United States Patent Application Publication US 2018/0305408 A1 - sequence listing, part 2

SEQ ID NO: 10197 - protein, 33 aa, Artificial Sequence
  Cyclic GFR-binding peptide
  MOD_RES (2)..(3): Xaa is C or S
AXXVPTELSPISMLYKDEYDKVVLKYHYEMVVE

SEQ ID NO: 10198 - protein, 39 aa, Artificial Sequence
  Cyclic GFR-binding peptide
  MOD_RES (6)..(7)..(38): Xaa is C or S
ASASPXXVPQDLSAISILYLVGRTPKVLKNYQMVVKSXK

SEQ ID NO: 10199 - protein, 36 aa, Artificial Sequence
  Cyclic GFR-binding peptide
  MOD_RES (2)..(34)..(36): Xaa is C or S
TXAPTKLSATSVLYYDDSSNVILRKHRNMVVRSXGX

SEQ ID NO: 10200 - protein, 32 aa, Artificial Sequence
  Cyclic GFR-binding peptide
  MOD_RES (1)..(2): Xaa is C or S
XXVPQALSPISILYKVGRKPKVLKYHYMIVRS

SEQ ID NO: 10201 - protein, 32 aa, Artificial Sequence
  Cyclic GFR-binding peptide
  MOD_RES (3)..(3): Xaa is C or S
PTXAPTKLSAISVLYLDDSSNVILKNYQNMVV

SEQ ID NO: 10202 - protein, 25 aa, Artificial Sequence
  Cyclic GFR-binding peptide
SPISVLYKDDSSNVILKYHYNMVVR

SEQ ID NO: 10203 - protein, 34 aa, Artificial Sequence
  Cyclic GFR-binding peptide
  MOD_RES (32)..(34): Xaa is C or S
APTQLSAISVLYLDDSSNVILKNYQNMVVRAXGX

SEQ ID NO: 10204 - protein, 25 aa, Artificial Sequence
  Cyclic GFR-binding peptide
PTELNAISMLYFDENEKVVLKKYRD

SEQ ID NO: 10205 - protein, 29 aa, Artificial Sequence
  Cyclic GFR-binding peptide
  MOD_RES (2)..(3): Xaa is C or S
PXXAPTQLSAISVLYLDDSSNVILKNYQN

SEQ ID NO: 10206 - protein, 20 aa, Artificial Sequence
  Cyclic GFR-binding peptide
NAISILYFIGKTPKILKKYR

SEQ ID NO: 10207 - protein, 34 aa, Artificial Sequence
  Cyclic GFR-binding peptide
  MOD_RES (6)..(7): Xaa is C or S
ASAAPXXVPQALSATSILYYVGRKPKVLRKHRMI

SEQ ID NO: 10208 - protein, 37 aa, Artificial Sequence
  Cyclic GFR-binding peptide
  MOD_RES (5)..(6): Xaa is C or S
VPKPXXAPTQLSPISVLYKDDSSNVILKYHYNMVVRA

SEQ ID NO: 10209 - protein, 33 aa, Artificial Sequence
  Cyclic GFR-binding peptide
  MOD_RES (31)..(33): Xaa is C or S
PTELSATSMLYYDEYDKVVLRKHREMVVEGXGX

SEQ ID NO: 10210 - protein, 35 aa, Artificial Sequence
  Cyclic GFR-binding peptide
  MOD_RES (32)..(34): Xaa is C or S
VPTELNAISMLYFDENEKVVLKKYRDMVVEGXGXR

SEQ ID NO: 10211 - protein, 20 aa, Artificial Sequence
  Cyclic GFR-binding peptide
SATSMLYYDENEKVVLRKHR

SEQ ID NO: 10212 - protein, 38 aa, Artificial Sequence
  Cyclic GFR-binding peptide
  MOD_RES (3)..(4)..(35)..(37): Xaa is C or S
SPXXVSQDLSATSILYYIGKTPKILRKHRMIVKSXKXS

SEQ ID NO: 10213 - protein, 36 aa, Artificial Sequence
  Cyclic GFR-binding peptide
  MOD_RES (5)..(6): Xaa is C or S
SAAPXXVPQALNAISILYFVGRKPKVLKKYRMIVRS

SEQ ID NO: 10214 - protein, 32 aa, Artificial Sequence
  Cyclic GFR-binding peptide
  MOD_RES (5)..(6): Xaa is C or S
VPKPXXAPTQLSATSVLYYDDSSNVILRKHRN

SEQ ID NO: 10215 - protein, 22 aa, Artificial Sequence
  Cyclic GFR-binding peptide
LNAISILYFIGKTPKILKKYRM

SEQ ID NO: 10216 - protein, 29 aa, Artificial Sequence
  Cyclic GFR-binding peptide
APTKLSPISVLYKDDSSNVILKYHYNMVV

SEQ ID NO: 10217 - protein, 32 aa, Artificial Sequence
  Cyclic GFR-binding peptide
  MOD_RES (29)..(31): Xaa is C or S
QLSATSVLYYDDSSNVILRKHRNMVVRAXGXH

SEQ ID NO: 10218 - protein, 30 aa, Artificial Sequence
  Cyclic GFR-binding peptide
  MOD_RES (4)..(5): Xaa is C or S
ASPXXVSQDLSPISILYKIGKTPKILKYHY

SEQ ID NO: 10219 - protein, 33 aa, Artificial Sequence
  Cyclic GFR-binding peptide
  MOD_RES (1)..(2): Xaa is C or S
XXAPTQLSPISVLYKDDSSNVILKYHYNMVVRA

SEQ ID NO: 10220 - protein, 38 aa, Artificial Sequence
  Cyclic GFR-binding peptide
  MOD_RES (4)..(5)..(37): Xaa is C or S
PKPXXAPTQLSATSVLYYDDSSNVILRKHRNMVVRAXG

SEQ ID NO: 10221 - protein, 31 aa, Artificial Sequence
  Cyclic GFR-binding peptide
  MOD_RES (1)..(1): Xaa is C or S
XAPTQLSPISVLYKDDSSNVILKYHYNMVVR

SEQ ID NO: 10222 - protein, 39 aa, Artificial Sequence
  Cyclic GFR-binding peptide
  MOD_RES (3)..(4)..(36)..(38): Xaa is C or S
KAXXAPTKLNAISVLYFDSSNNVILKKYRNMVVKAXGXH

SEQ ID NO: 10223 - protein, 38 aa, Artificial Sequence
  Cyclic GFR-binding peptide
  MOD_RES (5)..(6)..(38): Xaa is C or S
IPKAXXVPTELNAISMLYFDENEKVVLKKYRDMVVEGX

SEQ ID NO: 10224 - protein, 23 aa, Artificial Sequence
  Cyclic GFR-binding peptide
LNAISILYFVGRTPKVLKKYRMV

SEQ ID NO: 10225 - protein, 34 aa, Artificial Sequence
  Cyclic GFR-binding peptide
  MOD_RES (3)..(3): Xaa is C or S
VQXRPTQVQLSATSVLYYEIVRKKPIFLRKHRTL

SEQ ID NO: 10226 - protein, 32 aa, Artificial Sequence
  Cyclic GFR-binding peptide
  MOD_RES (31)..(31): Xaa is C or S
VPQDLNAISILYFVGRTPKVLKKYRMVVKSXK

SEQ ID NO: 10227 - protein, 25 aa, Artificial Sequence
  Cyclic GFR-binding peptide
LSATSILYYIGKTPKILRKHRMIVK

SEQ ID NO: 10228 - protein, 25 aa, Artificial Sequence
  Cyclic GFR-binding peptide
SATSMLYYDEYDKVVLRKHREMVVE

SEQ ID NO: 10229 - protein, 38 aa, Artificial Sequence
  Cyclic GFR-binding peptide
  MOD_RES (5)..(6)..(37): Xaa is C or S
SASPXXVSQDLSPISILYKIGKTPKILKYHYMIVKSXK

SEQ ID NO: 10230 - protein, 32 aa, Artificial Sequence
  Cyclic GFR-binding peptide
  MOD_RES (4)..(5): Xaa is C or S
AAPXXVPQALSATSILYYVGRKPKVLRKHRMI

SEQ ID NO: 10231 - protein, 25 aa, Artificial Sequence
  Cyclic GFR-binding peptide
TKLSAISVLYLDDMGVPTLKNYQEG

SEQ ID NO: 10232 - protein, 27 aa, Artificial Sequence
  Cyclic GFR-binding peptide
  MOD_RES (1)..(1): Xaa is C or S
XAPTKLSAISVLYLDSSNNVILKNYQN

SEQ ID NO: 10233 - protein, 33 aa, Artificial Sequence
  Cyclic GFR-binding peptide
  MOD_RES (4)..(4): Xaa is C or S
NVQXRPTQVQLSAISVLYLEIVRKKPIFLKNYQ

SEQ ID NO: 10234 - protein, 21 aa, Artificial Sequence
  Cyclic GFR-binding peptide
SAISVLYLDDMGVPTLKNYQE

SEQ ID NO: 10235 - protein, 39 aa, Artificial Sequence
  Cyclic GFR-binding peptide
  MOD_RES (36)..(38): Xaa is C or S
PTQVQLSPISVLYKEIVRKKPIFLKYHYTLEDHLAXKXE

SEQ ID NO: 10236 - protein, 37 aa, Artificial Sequence
  Cyclic GFR-binding peptide
  MOD_RES (4)..(4): Xaa is C or S
NVQXRPTQVQLSAISVLYLEIVRKKPIFLKNYQTLED

SEQ ID NO: 10237 - protein, 35 aa, Artificial Sequence
  Cyclic GFR-binding peptide
  MOD_RES (35)..(35): Xaa is C or S
TQVQLSATSVLYYEIVRKKPIFLRKHRTLEDHLAX

SEQ ID NO: 10238 - protein, 30 aa, Artificial Sequence
  Cyclic GFR-binding peptide
  MOD_RES (28)..(30): Xaa is C or S
NAISVLYFDDMGVPTLKKYREGMSVAEXGX

SEQ ID NO: 10239 - protein, 28 aa, Artificial Sequence
  Cyclic GFR-binding peptide
VPQDLSAISILYLVGRTPKVLKNYQMVV

SEQ ID NO: 10240 - protein, 33 aa, Artificial Sequence
  Cyclic GFR-binding peptide
  MOD_RES (1)..(33): Xaa is C or S
XAPTKLSPISVLYKDSSNNVILKYHYNMVVKAX

SEQ ID NO: 10241 - protein, 30 aa, Artificial Sequence
  Cyclic GFR-binding peptide
VPTELSATSMLYYDENEKVVLRKHRDMVVE

SEQ ID NO: 10242 - protein, 31 aa, Artificial Sequence
  Cyclic GFR-binding peptide
  MOD_RES (29)..(31): Xaa is C or S
QLSATSVLYYDDSSNVILRKHRNMVVRAXGX

SEQ ID NO: 10243 - protein, 27 aa, Artificial Sequence
  Cyclic GFR-binding peptide
TKLNAISVLYFDSSNNVILKKYRNMVV

SEQ ID NO: 10244 - protein, 22 aa, Artificial Sequence
  Cyclic GFR-binding peptide
KLSAISVLYLDSSNNVILKNYQ

SEQ ID NO: 10245 - protein, 38 aa, Artificial Sequence
  Cyclic GFR-binding peptide
  MOD_RES (36)..(38): Xaa is C or S
PTQVQLSPISVLYKEIVRKKPIFLKYHYTLEDHLAXKX

SEQ ID NO: 10246 - protein, 26 aa, Artificial Sequence
  Cyclic GFR-binding peptide
  MOD_RES (1)..(1): Xaa is C or S
XAPTKLSAISVLYLDSSNNVILKNYQ

SEQ ID NO: 10247 - protein, 32 aa, Artificial Sequence
  Cyclic GFR-binding peptide
  MOD_RES (29)..(31): Xaa is C or S
QALNAISILYFVGRKPKVLKKYRMIVRSXKXS

SEQ ID NO: 10248 - protein, 28 aa, Artificial Sequence
  Cyclic GFR-binding peptide
PQDLSPISILYKVGRTPKVLKYHYMVVK

SEQ ID NO: 10249 - protein, 33 aa, Artificial Sequence
  Cyclic GFR-binding peptide
  MOD_RES (1)..(33): Xaa is C or S
XVPTELNAISMLYFDEYDKVVLKKYREMVVEGX

SEQ ID NO: 10250 - protein, 26 aa, Artificial Sequence
  Cyclic GFR-binding peptide
APTKLSATSVLYYDDSSNVILRKHRN

SEQ ID NO: 10251 - protein, 25 aa, Artificial Sequence
  Cyclic GFR-binding peptide
QDLSAISILYLIGKTPKILKNYQMI

SEQ ID NO: 10252 - protein, 28 aa, Artificial Sequence
  Cyclic GFR-binding peptide
PTQLSAISVLYLDDSSNVILKNYQNMVV

SEQ ID NO: 10253 - protein, 32 aa, Artificial Sequence
  Cyclic GFR-binding peptide
  MOD_RES (29)..(31): Xaa is C or S
ELSATSMLYYDEYDKVVLRKHREMVVEGXGXR

SEQ ID NO: 10254 - protein, 35 aa, Artificial Sequence
  Cyclic GFR-binding peptide
  MOD_RES (6)..(7): Xaa is C or S
ASASPXXVPQDLSATSILYYVGRTPKVLRKHRMVV

SEQ ID NO: 10255 - protein, 27 aa, Artificial Sequence
  Cyclic GFR-binding peptide
  MOD_RES (27)..(27): Xaa is C or S
LSATSILYYVGRTPKVLRKHRMVVKSX

SEQ ID NO: 10256 - protein, 25 aa, Artificial Sequence
  Cyclic GFR-binding peptide
SPISVLYKDSSNNVILKYHYNMVVK

SEQ ID NO: 10257 - protein, 22 aa, Artificial Sequence
  Cyclic GFR-binding peptide
SAISILYLVGRTPKVLKNYQMV

SEQ ID NO: 10258 - protein, 40 aa, Artificial Sequence
  Cyclic GFR-binding peptide
  MOD_RES (6)..(7)..(38)..(40): Xaa is C or S
ASAAPXXVPQALSATSILYYVGRKPKVLRKHRMIVRSXKX

SEQ ID NO: 10259 - protein, 39 aa, Artificial Sequence
  Cyclic GFR-binding peptide
  MOD_RES (7)..(39): Xaa is C or S
HVTKPTXAPTKLSATSVLYYDDSSNVILRKHRNMVVRSX

SEQ ID NO: 10260 - protein, 24 aa, Artificial Sequence
  Cyclic GFR-binding peptide
LNAISVLYFEIVRKKPIFLKKYRT

SEQ ID NO: 10261 - protein, 31 aa, Artificial Sequence
  Cyclic GFR-binding peptide
  MOD_RES (5)..(6): Xaa is C or S
VPKAXXAPTKLNAISVLYFDSSNNVILKKYR

SEQ ID NO: 10262 - protein, 23 aa, Artificial Sequence
  Cyclic GFR-binding peptide
SATSMLYYDEYDKVVLRKHREMV

SEQ ID NO: 10263 - protein, 32 aa, Artificial Sequence
  Cyclic GFR-binding peptide
  MOD_RES (5)..(6): Xaa is C or S
VGKAXXVPTKLNAISVLYFDDMGVPTLKKYRE

SEQ ID NO: 10264 - protein, 30 aa, Artificial Sequence
  Cyclic GFR-binding peptide
  MOD_RES (30)..(30): Xaa is C or S
TQLSPISVLYKDDSSNVILKYHYNMVVRAX

SEQ ID NO: 10265 - protein, 30 aa, Artificial Sequence
  Cyclic GFR-binding peptide
  MOD_RES (3)..(4): Xaa is C or S
SPXXVPQDLSPISILYKVGRTPKVLKYHYM

SEQ ID NO: 10266 - protein, 39 aa, Artificial Sequence
  Cyclic GFR-binding peptide
  MOD_RES (36)..(38): Xaa is C or S
PTQVQLSAISVLYLEIVRKKPIFLKNYQTLEDHLAXKXE

SEQ ID NO: 10267 - protein, 30 aa, Artificial Sequence
  Cyclic GFR-binding peptide
  MOD_RES (3)..(4): Xaa is C or S
KPXXAPTQLSAISVLYLDDSSNVILKNYQN

SEQ ID NO: 10268 - protein, 31 aa, Artificial Sequence
  Cyclic GFR-binding peptide
  MOD_RES (1)..(1): Xaa is C or S
XVPQDLNAISILYFVGRTPKVLKKYRMVVKS

SEQ ID NO: 10269 - protein, 34 aa, Artificial Sequence
  Cyclic GFR-binding peptide
  MOD_RES (4)..(5): Xaa is C or S
PKAXXAPTKLSAISVLYLDSSNNVILKNYQNMVV

SEQ ID NO: 10270 - protein, 40 aa, Artificial Sequence
  Cyclic GFR-binding peptide
  MOD_RES (37)..(39): Xaa is C or S
RPTQVQLSATSVLYYEIVRKKPIFLRKHRTLEDHLAXKXE

SEQ ID NO: 10271 - protein, 25 aa, Artificial Sequence
  Cyclic GFR-binding peptide
APTKLSPISVLYKDSSNNVILKYHY

SEQ ID NO: 10272 - protein, 25 aa, Artificial Sequence
  Cyclic GFR-binding peptide
LSAISILYLVGRTPKVLKNYQMVVK

SEQ ID NO: 10273 - protein, 25 aa, Artificial Sequence
  Cyclic GFR-binding peptide
APTQLSPISVLYKDDSSNVILKYHY

SEQ ID NO: 10274 - protein, 38 aa, Artificial Sequence
  Cyclic GFR-binding peptide
  MOD_RES (3)..(4)..(36)..(38): Xaa is C or S
KAXXVPTELNAISMLYFDEYDKVVLKKYREMVVEGXGX

SEQ ID NO: 10275 - protein, 33 aa, Artificial Sequence
  Cyclic GFR-binding peptide
  MOD_RES (6)..(7): Xaa is C or S
ASASPXXVPQDLSPISILYKVGRTPKVLKYHYM

SEQ ID NO: 10276 - protein, 29 aa, Artificial Sequence
  Cyclic GFR-binding peptide
  MOD_RES (28)..(28): Xaa is C or S
LSATSVLYYDDSSNVILRKHRNMVVRAXG

SEQ ID NO: 10277 - protein, 26 aa, Artificial Sequence
  Cyclic GFR-binding peptide
SQDLNAISILYFIGKTPKILKKYRMI

SEQ ID NO: 10278 - protein, 29 aa, Artificial Sequence
  Cyclic GFR-binding peptide
  MOD_RES (1)..(1): Xaa is C or S
XVPQDLNAISILYFVGRTPKVLKKYRMVV

SEQ ID NO: 10279 - protein, 30 aa, Artificial Sequence
  Cyclic GFR-binding peptide
  MOD_RES (27)..(29): Xaa is C or S
LSATSILYYIGKTPKILRKHRMIVKSXKXS

SEQ ID NO: 10280 - protein, 39 aa, Artificial Sequence
  Cyclic GFR-binding peptide
  MOD_RES (4)..(36)..(38): Xaa is C or S
KPTXAPTKLSPISVLYKDDSSNVILKYHYNMVVRSXGXH

SEQ ID NO: 10281 - protein, 32 aa, Artificial Sequence
  Cyclic GFR-binding peptide
  MOD_RES (1)..(2): Xaa is C or S
XXAPTKLSPISVLYKDDSSNVILKYHYNMVVR

SEQ ID NO: 10282 - protein, 28 aa, Artificial Sequence
  Cyclic GFR-binding peptide
  MOD_RES (27)..(27): Xaa is C or S
SATSVLYYDDSSNVILRKHRNMVVRAXG

SEQ ID NO: 10283 - protein, 33 aa, Artificial Sequence
  Cyclic GFR-binding peptide
  MOD_RES (1)..(2): Xaa is C or S
XXAPTKLNAISVLYFDSSNNVILKKYRNMVVKA

SEQ ID NO: 10284 - protein, 32 aa, Artificial Sequence
  Cyclic GFR-binding peptide
  MOD_RES (1)..(2): Xaa is C or S
XXVPQDLNAISILYFVGRTPKVLKKYRMVVKS

SEQ ID NO: 10285 - protein, 30 aa, Artificial Sequence
  Cyclic GFR-binding peptide
  MOD_RES (28)..(30): Xaa is C or S
LSAISVLYLDDSSNVILKNYQNMVVRSXGX

SEQ ID NO: 10286 - protein, 39 aa, Artificial Sequence
  Cyclic GFR-binding peptide
  MOD_RES (4)..(5)..(37)..(39): Xaa is C or S
PKAXXVPTELSPISMLYKDEYDKVVLKYHYEMVVEGXGX

SEQ ID NO: 10287 - protein, 35 aa, Artificial Sequence
  Cyclic GFR-binding peptide
  MOD_RES (5)..(6): Xaa is C or S
VPKPXXAPTQLSATSVLYYDDSSNVILRKHRNMVV

SEQ ID NO: 10288 - protein, 27 aa, Artificial Sequence
  Cyclic GFR-binding peptide
VPQALSATSILYYVGRKPKVLRKHRMI

SEQ ID NO: 10289 - protein, 34 aa, Artificial Sequence
  Cyclic GFR-binding peptide
  MOD_RES (2)..(3): Xaa is C or S
AXXVPTKLSATSVLYYDDMGVPTLRKHREGMSVA

SEQ ID NO: 10290 - protein, 34 aa, Artificial Sequence
  Cyclic GFR-binding peptide
  MOD_RES (1)..(32)..(34): Xaa is C or S
XVSQDLSAISILYLIGKTPKILKNYQMIVKSXKX

SEQ ID NO: 10291 - protein, 33 aa, Artificial Sequence
  Cyclic GFR-binding peptide
  MOD_RES (2)..(3): Xaa is C or S
PXXVSQDLSPISILYKIGKTPKILKYHYMIVKS

SEQ ID NO: 10292 - protein, 25 aa, Artificial Sequence
  Cyclic GFR-binding peptide
DLSAISILYLVGRTPKVLKNYQMVV

SEQ ID NO: 10293 - protein, 37 aa, Artificial Sequence
  Cyclic GFR-binding peptide
  MOD_RES (6)..(7): Xaa is C or S
ASASPXXVPQDLSAISILYLVGRTPKVLKNYQMVVKS

SEQ ID NO: 10294 - protein, 31 aa, Artificial Sequence
  Cyclic GFR-binding peptide
  MOD_RES (28)..(30): Xaa is C or S
LSPISVLYKDSSNNVILKYHYNMVVKAXGXH

SEQ ID NO: 10295 - protein, 27 aa, Artificial Sequence
  Cyclic GFR-binding peptide
APTKLNAISVLYFDSSNNVILKKYRNM

SEQ ID NO: 10296 - protein, 32 aa, Artificial Sequence
  Cyclic GFR-binding peptide
  MOD_RES (29)..(31): Xaa is C or S
QDLSATSILYYVGRTPKVLRKHRMVVKSXKXS

SEQ ID NO: 10297 - protein, 32 aa, Artificial Sequence
  Cyclic GFR-binding peptide
  MOD_RES (29)..(31): Xaa is C or S
ELSATSMLYYDENEKVVLRKHRDMVVEGXGXR

SEQ ID NO: 10298 - protein, 35 aa, Artificial Sequence
  Cyclic GFR-binding peptide
  MOD_RES (3)..(4): Xaa is C or S
KAXXVPTELSPISMLYKDENEKVVLKYHYDMVVEG

SEQ ID NO: 10299 - protein, 26 aa, Artificial Sequence
  Cyclic GFR-binding peptide
VPQDLSPISILYKVGRTPKVLKYHYM

SEQ ID NO: 10300 - protein, 35 aa, Artificial Sequence
  Cyclic GFR-binding peptide
  MOD_RES (4)..(5): Xaa is C or S
PKPXXAPTQLSPISVLYKDDSSNVILKYHYNMVVR

SEQ ID NO: 10301 - protein, 37 aa, Artificial Sequence
  Cyclic GFR-binding peptide
  MOD_RES (2)..(3)..(35)..(37): Xaa is C or S
PXXAPTQLSATSVLYYDDSSNVILRKHRNMVVRAXGX

SEQ ID NO: 10302 - protein, 27 aa, Artificial Sequence
  Cyclic GFR-binding peptide
QVQLNAISVLYFEIVRKKPIFLKKYRT

SEQ ID NO: 10303 - protein, 24 aa, Artificial Sequence
  Cyclic GFR-binding peptide
LSPISILYKIGKTPKILKYHYMIV

SEQ ID NO: 10304 - protein, 26 aa, Artificial Sequence
  Cyclic GFR-binding peptide
  MOD_RES (1)..(1): Xaa is C or S
XAPTQLSAISVLYLDDSSNVILKNYQ

SEQ ID NO: 10305 - protein, 30 aa, Artificial Sequence
  Cyclic GFR-binding peptide
  MOD_RES (4)..(4): Xaa is C or S
KPTXAPTKLSATSVLYYDDSSNVILRKHRN

SEQ ID NO: 10306 - protein, 33 aa, Artificial Sequence
  Cyclic GFR-binding peptide
  MOD_RES (2)..(3): Xaa is C or S
PXXVSQDLSAISILYLIGKTPKILKNYQMIVKS

SEQ ID NO: 10307 - protein, 28 aa, Artificial Sequence
  Cyclic GFR-binding peptide
KLSPISVLYKDSSNNVILKYHYNMVVKA

SEQ ID NO: 10308 - protein, 35 aa, Artificial Sequence
  Cyclic GFR-binding peptide
  MOD_RES (2)..(3): Xaa is C or S
AXXVPTKLNAISVLYFDDMGVPTLKKYREGMSVAE

SEQ ID NO: 10309 - protein, 35 aa, Artificial Sequence
  Cyclic GFR-binding peptide
  MOD_RES (5)..(6): Xaa is C or S
SASPXXVSQDLSAISILYLIGKTPKILKNYQMIVK

SEQ ID NO: 10310 - protein, 33 aa, Artificial Sequence
  Cyclic GFR-binding peptide
  MOD_RES (1)..(33): Xaa is C or S
XAPTKLNAISVLYFDSSNNVILKKYRNMVVKAX

SEQ ID NO: 10311 - protein, 27 aa, Artificial Sequence
  Cyclic GFR-binding peptide
TKLSATSVLYYDDMGVPTLRKHREGMS

SEQ ID NO: 10312 - protein, 36 aa, Artificial Sequence
  Cyclic GFR-binding peptide
  MOD_RES (2)..(34)..(36): Xaa is C or S
TXAPTKLSAISVLYLDDSSNVILKNYQNMVVRSXGX

SEQ ID NO: 10313 - protein, 29 aa, Artificial Sequence
  Cyclic GFR-binding peptide
APTKLSAISVLYLDDSSNVILKNYQNMVV

SEQ ID NO: 10314 - protein, 26 aa, Artificial Sequence
  Cyclic GFR-binding peptide
TELNAISMLYFDEYDKVVLKKYREMV

SEQ ID NO: 10315 - protein, 25 aa, Artificial Sequence
  Cyclic GFR-binding peptide
SATSVLYYEIVRKKPIFLRKHRTLE

SEQ ID NO: 10316 - protein, 33 aa, Artificial Sequence
  Cyclic GFR-binding peptide
  MOD_RES (6)..(7): Xaa is C or S
ASASPXXVPQDLNAISILYFVGRTPKVLKKYRM

SEQ ID NO: 10317 - protein, 35 aa, Artificial Sequence
  Cyclic GFR-binding peptide
  MOD_RES (3)..(3): Xaa is C or S
VQXRPTQVQLSAISVLYLEIVRKKPIFLKNYQTLE

SEQ ID NO: 10318 - protein, 29 aa, Artificial Sequence
  Cyclic GFR-binding peptide
  MOD_RES (29)..(29): Xaa is C or S
QALSPISILYKVGRKPKVLKYHYMIVRSX

SEQ ID NO: 10319 - protein, 25 aa, Artificial Sequence
  Cyclic GFR-binding peptide
LNAISVLYFEIVRKKPIFLKKYRTL

SEQ ID NO: 10320 - protein, 21 aa, Artificial Sequence
  Cyclic GFR-binding peptide
SPISMLYKDEYDKVVLKYHYE

SEQ ID NO: 10321 - protein, 24 aa, Artificial Sequence
  Cyclic GFR-binding peptide
TELNAISMLYFDENEKVVLKKYRD

SEQ ID NO: 10322 - protein, 41 aa, Artificial Sequence
  Cyclic GFR-binding peptide
  MOD_RES (6)..(38)..(40): Xaa is C or S
VTKPTXAPTKLSAISVLYLDDSSNVILKNYQNMVVRSXGXH

SEQ ID NO: 10323 - protein, 39 aa, Artificial Sequence
  Cyclic GFR-binding peptide
  MOD_RES (5)..(6)..(38): Xaa is C or S
VPKPXXAPTKLSAISVLYLDDSSNVILKNYQNMVVRSXG

SEQ ID NO: 10324 - protein, 28 aa, Artificial Sequence
  Cyclic GFR-binding peptide
  MOD_RES (27)..(27): Xaa is C or S
LSATSILYYVGRTPKVLRKHRMVVKSXK

SEQ ID NO: 10325 - protein, 36 aa, Artificial Sequence
  Cyclic GFR-binding peptide
  MOD_RES (6)..(7): Xaa is C or S
ASAAPXXVPQALNAISILYFVGRKPKVLKKYRMIVR

SEQ ID NO: 10326 - protein, 33 aa, Artificial Sequence
  Cyclic GFR-binding peptide
  MOD_RES (3)..(4): Xaa is C or S
KPXXAPTKLSPISVLYKDDSSNVILKYHYNMVV

SEQ ID NO: 10327 - protein, 28 aa, Artificial Sequence
  Cyclic GFR-binding peptide
APTKLSAISVLYLDDSSNVILKNYQNMV

SEQ ID NO: 10328 - protein, 40 aa, Artificial Sequence
  Cyclic GFR-binding peptide
  MOD_RES (5)..(6)..(38)..(40): Xaa is C or S
VPKPXXAPTKLSATSVLYYDDSSNVILRKHRNMVVRSXGX

SEQ ID NO: 10329 - protein, 21 aa, Artificial Sequence
  Cyclic GFR-binding peptide
LSATSVLYYDDMGVPTLRKHR

SEQ ID NO: 10330 - protein, 40 aa, Artificial Sequence
  Cyclic GFR-binding peptide
  MOD_RES (5)..(6)..(37)..(39): Xaa is C or S
SASPXXVSQDLSAISILYLIGKTPKILKNYQMIVKSXKXS

SEQ ID NO: 10331 - protein, 35 aa, Artificial Sequence
  Cyclic GFR-binding peptide
  MOD_RES (4)..(5): Xaa is C or S
PKPXXAPTQLSAISVLYLDDSSNVILKNYQNMVVR

SEQ ID NO: 10332 - protein, 36 aa, Artificial Sequence
  Cyclic GFR-binding peptide
  MOD_RES (5)..(6): Xaa is C or S
SAAPXXVPQALSATSILYYVGRKPKVLRKHRMIVRS

SEQ ID NO: 10333 - protein, 32 aa, Artificial Sequence
  Cyclic GFR-binding peptide
  MOD_RES (3)..(4): Xaa is C or S
KAXXVPTELSATSMLYYDENEKVVLRKHRDMV

SEQ ID NO: 10334 - protein, 31 aa, Artificial Sequence
  Cyclic GFR-binding peptide
  MOD_RES (6)..(6): Xaa is C or S
VTKPTXAPTKLSAISVLYLDDSSNVILKNYQ

SEQ ID NO: 10335 - protein, 30 aa, Artificial Sequence
  Cyclic GFR-binding peptide
  MOD_RES (4)..(5): Xaa is C or S
PKAXXVPTELSATSMLYYDEYDKVVLRKHR

SEQ ID NO: 10336 - protein, 40 aa, Artificial Sequence
  Cyclic GFR-binding peptide
  MOD_RES (1)..(38)..(40): Xaa is C or S
XRPTQVQLSPISVLYKEIVRKKPIFLKYHYTLEDHLAXKX

SEQ ID NO: 10337 - protein, 37 aa, Artificial Sequence
  Cyclic GFR-binding peptide
  MOD_RES (2)..(3)..(34)..(36): Xaa is C or S
PXXVPQALSPISILYKVGRKPKVLKYHYMIVRSXKXS

SEQ ID NO: 10338 - protein, 30 aa, Artificial Sequence
  Cyclic GFR-binding peptide
  MOD_RES (2)..(3): Xaa is C or S
AXXVPTELSPISMLYKDEYDKVVLKYHYEM

SEQ ID NO: 10339 - protein, 28 aa, Artificial Sequence
  Cyclic GFR-binding peptide
  MOD_RES (26)..(28): Xaa is C or S
SATSILYYVGRKPKVLRKHRMIVRSXKX

SEQ ID NO: 10340 - protein, 30 aa, Artificial Sequence
  Cyclic GFR-binding peptide
  MOD_RES (30)..(30): Xaa is C or S
PQALSATSILYYVGRKPKVLRKHRMIVRSX

SEQ ID NO: 10341 - protein, 25 aa, Artificial Sequence
  Cyclic GFR-binding peptide
LSATSVLYYEIVRKKPIFLRKHRTL

SEQ ID NO: 10342 - protein, 28 aa, Artificial Sequence
  Cyclic GFR-binding peptide
SQDLSATSILYYIGKTPKILRKHRMIVK

SEQ ID NO: 10343 - protein, 30 aa, Artificial Sequence
  Cyclic GFR-binding peptide
PTELSPISMLYKDEYDKVVLKYHYEMVVEG

SEQ ID NO: 10344 - protein, 22 aa, Artificial Sequence
  Cyclic GFR-binding peptide
LNAISMLYFDENEKVVLKKYRD

SEQ ID NO: 10345 - protein, 35 aa, Artificial Sequence
  Cyclic GFR-binding peptide
  MOD_RES (3)..(4): Xaa is C or S
KAXXAPTKLSPISVLYKDSSNNVILKYHYNMVVKA

SEQ ID NO: 10346 - protein, 44 aa, Artificial Sequence
  Cyclic GFR-binding peptide
  MOD_RES (5)..(42)..(44): Xaa is C or S
RNVQXRPTQVQLSPISVLYKEIVRKKPIFLKYHYTLEDHLAXKX

SEQ ID NO: 10347 - protein, 30 aa, Artificial Sequence
  Cyclic GFR-binding peptide
VQLSAISVLYLEIVRKKPIFLKNYQTLEDH

SEQ ID NO: 10348 - protein, 32 aa, Artificial Sequence
  Cyclic GFR-binding peptide
  MOD_RES (3)..(4): Xaa is C or S
KAXXVPTKLSATSVLYYDDMGVPTLRKHREGM

SEQ ID NO: 10349 - protein, 30 aa, Artificial Sequence
  Cyclic GFR-binding peptide
  MOD_RES (1)..(2): Xaa is C or S
XXVPQDLSPISILYKVGRTPKVLKYHYMVV

SEQ ID NO: 10350 - protein, 32 aa, Artificial Sequence
  Cyclic GFR-binding peptide
  MOD_RES (4)..(5): Xaa is C or S
PKAXXAPTKLNAISVLYFDSSNNVILKKYRNM

SEQ ID NO: 10351 - protein, 39 aa, Artificial Sequence
  Cyclic GFR-binding peptide
  MOD_RES (4)..(5)..(36)..(38): Xaa is C or S
ASPXXVPQDLSPISILYKVGRTPKVLKYHYMVVKSXKXS

SEQ ID NO: 10352 - protein, 35 aa, Artificial Sequence
  Cyclic GFR-binding peptide
  MOD_RES (5)..(5): Xaa is C or S
RNVQXRPTQVQLSAISVLYLEIVRKKPIFLKNYQT

SEQ ID NO: 10353 - protein, 37 aa, Artificial Sequence
  Cyclic GFR-binding peptide
  MOD_RES (1)..(2)..(34)..(36): Xaa is C or S
XXAPTKLSAISVLYLDDSSNVILKNYQNMVVRSXGXH

SEQ ID NO: 10354 - protein, 29 aa, Artificial Sequence
  Cyclic GFR-binding peptide
PTELNAISMLYFDENEKVVLKKYRDMVVE

SEQ ID NO: 10355 - protein, 33 aa, Artificial Sequence
  Cyclic GFR-binding peptide
  MOD_RES (5)..(6): Xaa is C or S
VPKAXXAPTKLNAISVLYFDSSNNVILKKYRNM

SEQ ID NO: 10356 - protein, 23 aa, Artificial Sequence
  Cyclic GFR-binding peptide
LSATSVLYYEIVRKKPIFLRKHR

SEQ ID NO: 10357 - protein, 31 aa, Artificial Sequence
  Cyclic GFR-binding peptide
  MOD_RES (1)..(1): Xaa is C or S
XAPTKLNAISVLYFDSSNNVILKKYRNMVVK

SEQ ID NO: 10358 - protein, 28 aa, Artificial Sequence
  Cyclic GFR-binding peptide
  MOD_RES (28)..(28): Xaa is C or S
DLNAISILYFVGRTPKVLKKYRMVVKSX

SEQ ID NO: 10359 - protein, 38 aa, Artificial Sequence
  Cyclic GFR-binding peptide
  MOD_RES (1)..(2)..(35)..(37): Xaa is C or S
XXVPTKLSATSVLYYDDMGVPTLRKHREGMSVAEXGXR

SEQ ID NO: 10360 - protein, 41 aa, Artificial Sequence
  Cyclic GFR-binding peptide
  MOD_RES (6)..(7)..(39)..(41): Xaa is C or S
AVPKAXXAPTKLSAISVLYLDSSNNVILKNYQNMVVKAXGX

SEQ ID NO: 10361 - protein, 34 aa, Artificial Sequence
  Cyclic GFR-binding peptide
  MOD_RES (31)..(33): Xaa is C or S
VSQDLSATSILYYIGKTPKILRKHRMIVKSXKXS

SEQ ID NO: 10362 - protein, 29 aa, Artificial Sequence
  Cyclic GFR-binding peptide
  MOD_RES (26)..(28): Xaa is C or S
SPISILYKIGKTPKILKYHYMIVKSXKXS

SEQ ID NO: 10363 - protein, 34 aa, Artificial Sequence
  Cyclic GFR-binding peptide
  MOD_RES (2)..(3)..(34): Xaa is C or S
PXXVPQDLSATSILYYVGRTPKVLRKHRMVVKSX

SEQ ID NO: 10364 - protein, 31 aa, Artificial Sequence
  Cyclic GFR-binding peptide
  MOD_RES (29)..(31): Xaa is C or S
QDLSAISILYLIGKTPKILKNYQMIVKSXKX

SEQ ID NO: 10365 - protein, 33 aa, Artificial Sequence
  Cyclic GFR-binding peptide
  MOD_RES (30)..(32): Xaa is C or S
KLNAISVLYFDDMGVPTLKKYREGMSVAEXGXR

SEQ ID NO: 10366 - protein, 31 aa, Artificial Sequence
  Cyclic GFR-binding peptide
  MOD_RES (5)..(6): Xaa is C or S
VGKAXXVPTKLSAISVLYLDDMGVPTLKNYQ

SEQ ID NO: 10367 - protein, 39 aa, Artificial Sequence
  Cyclic GFR-binding peptide
  MOD_RES (4)..(5)..(37)..(39): Xaa is C or S
PKAXXVPTELSPISMLYKDENEKVVLKYHYDMVVEGXGX

SEQ ID NO: 10368 - protein, 30 aa, Artificial Sequence
  Cyclic GFR-binding peptide
  MOD_RES (2)..(3): Xaa is C or S
AXXVPTELSATSMLYYDEYDKVVLRKHREM

SEQ ID NO: 10369 - protein, 23 aa, Artificial Sequence
  Cyclic GFR-binding peptide
TKLSPISVLYKDSSNNVILKYHY

SEQ ID NO: 10370 - protein, 32 aa, Artificial Sequence
  Cyclic GFR-binding peptide
  MOD_RES (6)..(7): Xaa is C or S
YVPKPXXAPTKLSAISVLYLDDSSNVILKNYQ

SEQ ID NO: 10371 - protein, 24 aa, Artificial Sequence
  Cyclic GFR-binding peptide
KLNAISVLYFDSSNNVILKKYRNM

SEQ ID NO: 10372 - protein, 24 aa, Artificial Sequence
  Cyclic GFR-binding peptide
SQDLSATSILYYIGKTPKILRKHR

SEQ ID NO: 10373 - protein, 28 aa, Artificial Sequence
  Cyclic GFR-binding peptide
PTELNAISMLYFDEYDKVVLKKYREMVV

SEQ ID NO: 10374 - protein, 33 aa, Artificial Sequence
  Cyclic GFR-binding peptide
  MOD_RES (1)..(33): Xaa is C or S
XVPTELSATSMLYYDENEKVVLRKHRDMVVEGX

SEQ ID NO: 10375 - protein, 29 aa, Artificial Sequence
  Cyclic GFR-binding peptide
  MOD_RES (28)..(28): Xaa is C or S
LNAISMLYFDEYDKVVLKKYREMVVEGXG

SEQ ID NO: 10376 - protein, 30 aa, Artificial Sequence
  Cyclic GFR-binding peptide
  MOD_RES (30)..(30): Xaa is C or S
TKLSATSVLYYDDSSNVILRKHRNMVVRSX

SEQ ID NO: 10377 - protein, 33 aa, Artificial Sequence
  Cyclic GFR-binding peptide
  MOD_RES (6)..(7): Xaa is C or S
YVPKPXXAPTKLSATSVLYYDDSSNVILRKHRN

SEQ ID NO: 10378 - protein, 44 aa, Artificial Sequence
  Cyclic GFR-binding peptide
  MOD_RES (4)..(41)..(43): Xaa is C or S
NVQXRPTQVQLSPISVLYKEIVRKKPIFLKYHYTLEDHLAXKXE

SEQ ID NO: 10379 - protein, 32 aa, Artificial Sequence
  Cyclic GFR-binding peptide
RPTQVQLSAISVLYLEIVRKKPIFLKNYQTLE

SEQ ID NO: 10380 - protein, 33 aa, Artificial Sequence
  Cyclic GFR-binding peptide
  MOD_RES (31)..(33): Xaa is C or S
LSPISVLYKEIVRKKPIFLKYHYTLEDHLAXKX

SEQ ID NO: 10381 - protein, 32 aa, Artificial Sequence
  Cyclic GFR-binding peptide
  MOD_RES (1)..(2): Xaa is C or S
XXAPTKLSAISVLYLDDSSNVILKNYQNMVVR

SEQ ID NO: 10382 - protein, 29 aa, Artificial Sequence
  Cyclic GFR-binding peptide
  MOD_RES (28)..(28): Xaa is C or S
DLSATSILYYIGKTPKILRKHRMIVKSXK

SEQ ID NO: 10383 - protein, 23 aa, Artificial Sequence
  Cyclic GFR-binding peptide
SATSVLYYEIVRKKPIFLRKHRT

SEQ ID NO: 10384 - protein, 30 aa, Artificial Sequence
  Cyclic GFR-binding peptide
  MOD_RES (1)..(1): Xaa is C or S
XAPTKLSPISVLYKDDSSNVILKYHYNMVV

SEQ ID NO: 10385 - protein, 24 aa, Artificial Sequence
  Cyclic GFR-binding peptide
SQDLSAISILYLIGKTPKILKNYQ

SEQ ID NO: 10386 - protein, 39 aa, Artificial Sequence
  Cyclic GFR-binding peptide
  MOD_RES (1)..(38): Xaa is C or S
XRPTQVQLSPISVLYKEIVRKKPIFLKYHYTLEDHLAXK

SEQ ID NO: 10387 - protein, 34 aa, Artificial Sequence
  Cyclic GFR-binding peptide
  MOD_RES (1)..(33): Xaa is C or S
XVPTELSPISMLYKDEYDKVVLKYHYEMVVEGXG

SEQ ID NO: 10388 - protein, 33 aa, Artificial Sequence
  Cyclic GFR-binding peptide
  MOD_RES (1)..(2)..(33): Xaa is C or S
XXVPQDLSATSILYYVGRTPKVLRKHRMVVKSX

SEQ ID NO: 10389 - protein, 23 aa, Artificial Sequence
  Cyclic GFR-binding peptide
TKLSAISVLYLDSSNNVILKNYQ

SEQ ID NO: 10390 - protein, 26 aa, Artificial Sequence
  Cyclic GFR-binding peptide
LSAISVLYLEIVRKKPIFLKNYQTLE

SEQ ID NO: 10391 - protein, 34 aa, Artificial Sequence
  Cyclic GFR-binding peptide
  MOD_RES (1)..(33): Xaa is C or S
XAPTKLSAISVLYLDSSNNVILKNYQNMVVKAXG

SEQ ID NO: 10392 - protein, 32 aa, Artificial Sequence
  Cyclic GFR-binding peptide
  MOD_RES (30)..(32): Xaa is C or S
KLNAISVLYFDDMGVPTLKKYREGMSVAEXGX

SEQ ID NO: 10393 - protein, 30 aa, Artificial Sequence
  Cyclic GFR-binding peptide
PTQVQLSATSVLYYEIVRKKPIFLRKHRTL

SEQ ID NO: 10394 - protein, 31 aa, Artificial Sequence
  Cyclic GFR-binding peptide
  MOD_RES (31)..(31): Xaa is C or S
VSQDLNAISILYFIGKTPKILKKYRMIVKSX

SEQ ID NO: 10395 - protein, 25 aa, Artificial Sequence
  Cyclic GFR-binding peptide
VQLSATSVLYYEIVRKKPIFLRKHR

SEQ ID NO: 10396 - protein, 24 aa, Artificial Sequence
  Cyclic GFR-binding peptide
TKLSAISVLYLDDSSNVILKNYQN

SEQ ID NO: 10397 - protein, 41 aa, Artificial Sequence
  Cyclic GFR-binding peptide
  MOD_RES (4)..(5)..(38)..(40): Xaa is C or S
GKAXXVPTKLSAISVLYLDDMGVPTLKNYQEGMSVAEXGXR

SEQ ID NO: 10398 - protein, 29 aa, Artificial Sequence
  Cyclic GFR-binding peptide
  MOD_RES (2)..(3): Xaa is C or S
PXXVPQALNAISILYFVGRKPKVLKKYRM

SEQ ID NO: 10399 - protein, 28 aa, Artificial Sequence
  Cyclic GFR-binding peptide
PQALSAISILYLVGRKPKVLKNYQMIVR

SEQ ID NO: 10400 - protein, 28 aa, Artificial Sequence
  Cyclic GFR-binding peptide
  MOD_RES (1)..(2): Xaa is C or S
XXVSQDLSAISILYLIGKTPKILKNYQM

SEQ ID NO: 10401 - protein, 26 aa, Artificial Sequence
  Cyclic GFR-binding peptide
QLSAISVLYLDDSSNVILKNYQNMVV

SEQ ID NO: 10402 - protein, 27 aa, Artificial Sequence
  Cyclic GFR-binding peptide
SQDLNAISILYFIGKTPKILKKYRMIV

SEQ ID NO: 10403 - protein, 25 aa, Artificial Sequence
  Cyclic GFR-binding peptide
NAISILYFIGKTPKILKKYRMIVKS

SEQ ID NO: 10404 - protein, 28 aa, Artificial Sequence
  Cyclic GFR-binding peptide
PTQVQLSATSVLYYEIVRKKPIFLRKHR

SEQ ID NO: 10405 - protein, 31 aa, Artificial Sequence
  Cyclic GFR-binding peptide
  MOD_RES (1)..(1): Xaa is C or S
XVPQALSPISILYKVGRKPKVLKYHYMIVRS

SEQ ID NO: 10406 - protein, 27 aa, Artificial Sequence
  Cyclic GFR-binding peptide
QALSATSILYYVGRKPKVLRKHRMIVR

SEQ ID NO: 10407 - protein, 37 aa, Artificial Sequence
  Cyclic GFR-binding peptide
  MOD_RES (6)..(7): Xaa is C or S
ASASPXXVPQDLSATSILYYVGRTPKVLRKHRMVVKS

SEQ ID NO: 10408 - protein, 32 aa, Artificial Sequence
  Cyclic GFR-binding peptide
  MOD_RES (3)..(3): Xaa is C or S
VQXRPTQVQLSAISVLYLEIVRKKPIFLKNYQ

SEQ ID NO: 10409 - protein, 36 aa, Artificial Sequence
  Cyclic GFR-binding peptide
  MOD_RES (4)..(36): Xaa is C or S
KPTXAPTKLSATSVLYYDDSSNVILRKHRNMVVRSX

SEQ ID NO: 10410 - protein, 37 aa, Artificial Sequence
  Cyclic GFR-binding peptide
  MOD_RES (4)..(5)..(36): Xaa is C or S
AAPXXVPQALSAISILYLVGRKPKVLKNYQMIVRSXK

SEQ ID NO: 10411 - protein, 24 aa, Artificial Sequence
  Cyclic GFR-binding peptide
ALSPISILYKVGRKPKVLKYHYMI

SEQ ID NO: 10412 - protein, 33 aa, Artificial Sequence
  Cyclic GFR-binding peptide
RPTQVQLSPISVLYKEIVRKKPIFLKYHYTLED

SEQ ID NO: 10413 - protein, 32 aa, Artificial Sequence
  Cyclic GFR-binding peptide
  MOD_RES (1)..(2): Xaa is C or S
XXAPTKLSATSVLYYDDSSNVILRKHRNMVVR

SEQ ID NO: 10414 - protein, 31 aa, Artificial Sequence
  Cyclic GFR-binding peptide
  MOD_RES (5)..(6): Xaa is C or S
VGKAXXVPTKLSATSVLYYDDMGVPTLRKHR

SEQ ID NO: 10415 - protein, 38 aa, Artificial Sequence
  Cyclic GFR-binding peptide
  MOD_RES (5)..(6)..(38): Xaa is C or S
VPKPXXAPTKLSAISVLYLDDSSNVILKNYQNMVVRSX

SEQ ID NO: 10416 - protein, 34 aa, Artificial Sequence
  Cyclic GFR-binding peptide
  MOD_RES (6)..(7): Xaa is C or S
ASASPXXVSQDLSPISILYKIGKTPKILKYHYMI

SEQ ID NO: 10417 - protein, 28 aa, Artificial Sequence
  Cyclic GFR-binding peptide
QDLSAISILYLVGRTPKVLKNYQMVVKS

SEQ ID NO: 10418 - protein, 38 aa, Artificial Sequence
  Cyclic GFR-binding peptide
  MOD_RES (1)..(2)..(35)..(37): Xaa is C or S
XXVPTKLSAISVLYLDDMGVPTLKNYQEGMSVAEXGXR

SEQ ID NO: 10419 - protein, 32 aa, Artificial Sequence
  Cyclic GFR-binding peptide
  MOD_RES (30)..(32): Xaa is C or S
PQALSATSILYYVGRKPKVLRKHRMIVRSXKX

SEQ ID NO: 10420 - protein, 26 aa, Artificial Sequence
  Cyclic GFR-binding peptide
  MOD_RES (1)..(1): Xaa is C or S
XVPTKLSATSVLYYDDMGVPTLRKHR

SEQ ID NO: 10421 - protein, 28 aa, Artificial Sequence
  Cyclic GFR-binding peptide
  MOD_RES (27)..(27): Xaa is C or S
SPISMLYKDENEKVVLKYHYDMVVEGXG

SEQ ID NO: 10422 - protein, 34 aa, Artificial Sequence
  Cyclic GFR-binding peptide
  MOD_RES (1)..(33): Xaa is C or S
XAPTKLSPISVLYKDSSNNVILKYHYNMVVKAXG

SEQ ID NO: 10423 - protein, 29 aa, Artificial Sequence
  Cyclic GFR-binding peptide
  MOD_RES (1)..(1): Xaa is C or S
XVPTELSATSMLYYDEYDKVVLRKHREMV

SEQ ID NO: 10424 - protein, 28 aa, Artificial Sequence
  Cyclic GFR-binding peptide
LSATSVLYYEIVRKKPIFLRKHRTLEDH

SEQ ID NO: 10425 - protein, 36 aa, Artificial Sequence
  Cyclic GFR-binding peptide
  MOD_RES (1)..(2)..(33)..(35): Xaa is C or S
XXVSQDLSATSILYYIGKTPKILRKHRMIVKSXKXS

SEQ ID NO: 10426 - protein, 36 aa, Artificial Sequence
  Cyclic GFR-binding peptide
  MOD_RES (5)..(6): Xaa is C or S
IPKAXXVPTELSPISMLYKDENEKVVLKYHYDMVVE

SEQ ID NO: 10427 - protein, 38 aa, Artificial Sequence
  Cyclic GFR-binding peptide
  MOD_RES (4)..(5)..(37): Xaa is C or S
PKAXXVPTELSATSMLYYDENEKVVLRKHRDMVVEGXG

SEQ ID NO: 10428 - protein, 34 aa, Artificial Sequence
  Cyclic GFR-binding peptide
  MOD_RES (4)..(5): Xaa is C or S
PKAXXVPTELSPISMLYKDEYDKVVLKYHYEMVV

SEQ ID NO: 10429 - protein, 36 aa, Artificial Sequence
  Cyclic GFR-binding peptide
  MOD_RES (4)..(5): Xaa is C or S
PKPXXAPTQLSATSVLYYDDSSNVILRKHRNMVVRA

SEQ ID NO: 10430 - protein, 32 aa, Artificial Sequence
  Cyclic GFR-binding peptide
  MOD_RES (1)..(2): Xaa is C or S
XXAPTQLSAISVLYLDDSSNVILKNYQNMVVR

SEQ ID NO: 10431 - protein, 33 aa, Artificial Sequence
  Cyclic GFR-binding peptide
  MOD_RES (6)..(6): Xaa is C or S
VTKPTXAPTKLSPISVLYKDDSSNVILKYHYNM

SEQ ID NO: 10432 - protein, 33 aa, Artificial Sequence
  Cyclic GFR-binding peptide
  MOD_RES (4)..(4): Xaa is C or S
NVQXRPTQVQLNAISVLYFEIVRKKPIFLKKYR

SEQ ID NO: 10433 - protein, 32 aa, Artificial Sequence
  Cyclic GFR-binding peptide
  MOD_RES (31)..(31): Xaa is C or S
PTELSATSMLYYDENEKVVLRKHRDMVVEGXG

SEQ ID NO: 10434 - protein, 32 aa, Artificial Sequence
  Cyclic GFR-binding peptide
  MOD_RES (30)..(32): Xaa is C or S
PQDLNAISILYFVGRTPKVLKKYRMVVKSXKX

SEQ ID NO: 10435 - protein, 30 aa, Artificial Sequence
  Cyclic GFR-binding peptide
  MOD_RES (1)..(1): Xaa is C or S
XVSQDLSATSILYYIGKTPKILRKHRMIVK

SEQ ID NO: 10436 - protein, 34 aa, Artificial Sequence
  Cyclic GFR-binding peptide
  MOD_RES (32)..(34): Xaa is C or S
APTKLSPISVLYKDSSNNVILKYHYNMVVKAXGX

SEQ ID NO: 10437 - protein, 32 aa, Artificial Sequence
  Cyclic GFR-binding peptide
  MOD_RES (6)..(7): Xaa is C or S
ASAAPXXVPQALSPISILYKVGRKPKVLKYHY

SEQ ID NO: 10438 - protein, 31 aa, Artificial Sequence
  Cyclic GFR-binding peptide
  MOD_RES (30)..(30): Xaa is C or S
TELSPISMLYKDENEKVVLKYHYDMVVEGXG

SEQ ID NO: 10439 - protein, 31 aa, Artificial Sequence
  Cyclic GFR-binding peptide
  MOD_RES (31)..(31): Xaa is C or S
LSPISVLYKEIVRKKPIFLKYHYTLEDHLAX

SEQ ID NO: 10440 - protein, 36 aa, Artificial Sequence
  Cyclic GFR-binding peptide
  MOD_RES (3)..(3): Xaa is C or S
VQXRPTQVQLSAISVLYLEIVRKKPIFLKNYQTLED

SEQ ID NO: 10441 - protein, 30 aa, Artificial Sequence
  Cyclic GFR-binding peptide
  MOD_RES (1)..(2): Xaa is C or S
XXAPTKLSPISVLYKDDSSNVILKYHYNMV

SEQ ID NO: 10442 - protein, 34 aa, Artificial Sequence
  Cyclic GFR-binding peptide
  MOD_RES (3)..(4): Xaa is C or S
APXXVPQALSATSILYYVGRKPKVLRKHRMIVRS

SEQ ID NO: 10443 - protein, 38 aa, Artificial Sequence
  Cyclic GFR-binding peptide
  MOD_RES (35)..(37): Xaa is C or S
TQVQLSPISVLYKEIVRKKPIFLKYHYTLEDHLAXKXE

SEQ ID NO: 10444 - protein, 31 aa, Artificial Sequence
  Cyclic GFR-binding peptide
  MOD_RES (1)..(2): Xaa is C or S
XXVSQDLNAISILYFIGKTPKILKKYRMIVK

SEQ ID NO: 10445 - protein, 33 aa, Artificial Sequence
  Cyclic GFR-binding peptide
  MOD_RES (4)..(5): Xaa is C or S
ASPXXVPQDLNAISILYFVGRTPKVLKKYRMVV

SEQ ID NO: 10446 - protein, 31 aa, Artificial Sequence
  Cyclic GFR-binding peptide
  MOD_RES (5)..(5): Xaa is C or S
TKPTXAPTKLSPISVLYKDDSSNVILKYHYN

SEQ ID NO: 10447 - protein, 29 aa, Artificial Sequence
  Cyclic GFR-binding peptide
KLSATSVLYYDDMGVPTLRKHREGMSVAE

SEQ ID NO: 10448 - protein, 33 aa, Artificial Sequence
  Cyclic GFR-binding peptide
  MOD_RES (30)..(32): Xaa is C or S
PQDLSPISILYKVGRTPKVLKYHYMVVKSXKXS

SEQ ID NO: 10449 - protein, 35 aa, Artificial Sequence
  Cyclic GFR-binding peptide
RPTQVQLSATSVLYYEIVRKKPIFLRKHRTLEDHL

SEQ ID NO: 10450 - protein, 26 aa, Artificial Sequence
  Cyclic GFR-binding peptide
  MOD_RES (1)..(1): Xaa is C or S
XAPTQLSATSVLYYDDSSNVILRKHR

SEQ ID NO: 10451 - protein, 26 aa, Artificial Sequence
  Cyclic GFR-binding peptide
  MOD_RES (1)..(1): Xaa is C or S
XAPTKLSPISVLYKDSSNNVILKYHY

SEQ ID NO: 10452 - protein, 31 aa, Artificial Sequence
  Cyclic GFR-binding peptide
  MOD_RES (29)..(31): Xaa is C or S
ELNAISMLYFDENEKVVLKKYRDMVVEGXGX

SEQ ID NO: 10453 - protein, 33 aa, Artificial Sequence
  Cyclic GFR-binding peptide
  MOD_RES (5)..(6): Xaa is C or S
VGKAXXVPTKLSATSVLYYDDMGVPTLRKHREG

SEQ ID NO: 10454 - protein, 25 aa, Artificial Sequence
  Cyclic GFR-binding peptide
PTELSPISMLYKDENEKVVLKYHYD

SEQ ID NO: 10455 - protein, 37 aa, Artificial Sequence
  Cyclic GFR-binding peptide
  MOD_RES (4)..(5)..(37): Xaa is C or S
PKPXXAPTQLSPISVLYKDDSSNVILKYHYNMVVRAX

SEQ ID NO: 10456 - protein, 26 aa, Artificial Sequence
  Cyclic GFR-binding peptide
PTKLSATSVLYYDDSSNVILRKHRNM

SEQ ID NO: 10457 - protein, 32 aa, Artificial Sequence
  Cyclic GFR-binding peptide
  MOD_RES (30)..(32): Xaa is C or S
TELSPISMLYKDEYDKVVLKYHYEMVVEGXGX

SEQ ID NO: 10458 - protein, 37 aa, Artificial Sequence
  Cyclic GFR-binding peptide
  MOD_RES (37)..(37): Xaa is C or S
RPTQVQLSAISVLYLEIVRKKPIFLKNYQTLEDHLAX

SEQ ID NO: 10459 - protein, 30 aa, Artificial Sequence
  Cyclic GFR-binding peptide
  MOD_RES (29)..(29): Xaa is C or S
QALSATSILYYVGRKPKVLRKHRMIVRSXK

SEQ ID NO: 10460 - protein, 30 aa, Artificial Sequence
  Cyclic GFR-binding peptide
  MOD_RES (4)..(5): Xaa is C or S
ASPXXVSQDLSATSILYYIGKTPKILRKHR

SEQ ID NO: 10461 - protein, 34 aa, Artificial Sequence
  Cyclic GFR-binding peptide
  MOD_RES (2)..(3): Xaa is C or S
PXXAPTKLSPISVLYKDDSSNVILKYHYNMVVRS

SEQ ID NO: 10462 - protein, 22 aa, Artificial Sequence
  Cyclic GFR-binding peptide
QLSATSVLYYDDSSNVILRKHR

SEQ ID NO: 10463 - protein, 22 aa, Artificial Sequence
  Cyclic GFR-binding peptide
KLSPISVLYKDSSNNVILKYHY

SEQ ID NO: 10464 - protein, 35 aa, Artificial Sequence
  Cyclic GFR-binding peptide
  MOD_RES (32)..(34): Xaa is C or S
APTQLSPISVLYKDDSSNVILKYHYNMVVRAXGXH

SEQ ID NO: 10465 - protein, 34 aa, Artificial Sequence
  Cyclic GFR-binding peptide
  MOD_RES (3)..(3): Xaa is C or S
PTXAPTKLSATSVLYYDDSSNVILRKHRNMVVRS

SEQ ID NO: 10466 - protein, 31 aa, Artificial Sequence
  Cyclic GFR-binding peptide
  MOD_RES (2)..(3): Xaa is C or S
PXXAPTQLSAISVLYLDDSSNVILKNYQNMV

SEQ ID NO: 10467 - protein, 29 aa, Artificial Sequence
  Cyclic GFR-binding peptide
  MOD_RES (1)..(2): Xaa is C or S
XXAPTKLSAISVLYLDSSNNVILKNYQNM

SEQ ID NO: 10468 - protein, 32 aa, Artificial Sequence
  Cyclic GFR-binding peptide
  MOD_RES (1)..(2): Xaa is C or S
XXAPTKLSPISVLYKDSSNNVILKYHYNMVVK

SEQ ID NO: 10469 - protein, 31 aa, Artificial Sequence
  Cyclic GFR-binding peptide
  MOD_RES (31)..(31): Xaa is C or S
TKLSAISVLYLDDMGVPTLKNYQEGMSVAEX

SEQ ID NO: 10470 - protein, 25 aa, Artificial Sequence
  Cyclic GFR-binding peptide
LSATSILYYVGRTPKVLRKHRMVVK

SEQ ID NO: 10471 - protein, 31 aa, Artificial Sequence
  Cyclic GFR-binding peptide
  MOD_RES (5)..(6): Xaa is C or S
VPKAXXAPTKLSPISVLYKDSSNNVILKYHY

SEQ ID NO: 10472 - protein, 41 aa, Artificial Sequence
  Cyclic GFR-binding peptide
  MOD_RES (5)..(6)..(38)..(40): Xaa is C or S
IPKAXXVPTELSATSMLYYDENEKVVLRKHRDMVVEGXGXR

SEQ ID NO: 10473 - protein, 31 aa, Artificial Sequence
  Cyclic GFR-binding peptide
  MOD_RES (3)..(4): Xaa is C or S
KAXXAPTKLNAISVLYFDSSNNVILKKYRNM

SEQ ID NO: 10474 - protein, 35 aa, Artificial Sequence
  Cyclic GFR-binding peptide
  MOD_RES (4)..(4): Xaa is C or S
NVQXRPTQVQLSPISVLYKEIVRKKPIFLKYHYTL

SEQ ID NO: 10475 - protein, 39 aa, Artificial Sequence
  Cyclic GFR-binding peptide
  MOD_RES (3)..(4)..(37)..(39): Xaa is C or S
KAXXVPTKLNAISVLYFDDMGVPTLKKYREGMSVAEXGX

SEQ ID NO: 10476 - protein, 33 aa, Artificial Sequence
  Cyclic GFR-binding peptide
  MOD_RES (32)..(32): Xaa is C or S
PTKLSAISVLYLDDMGVPTLKNYQEGMSVAEXG

SEQ ID NO: 10477 - protein, 34 aa, Artificial Sequence
  Cyclic GFR-binding peptide
RPTQVQLSAISVLYLEIVRKKPIFLKNYQTLEDH

SEQ ID NO: 10478 - protein, 21 aa, Artificial Sequence
  Cyclic GFR-binding peptide
LSAISILYLVGRKPKVLKNYQ

SEQ ID NO: 10479 - protein, 32 aa, Artificial Sequence
  Cyclic GFR-binding peptide
  MOD_RES (1)..(2): Xaa is C or S
XXVPTKLSAISVLYLDDMGVPTLKNYQEGMSV

SEQ ID NO: 10480 - protein, 26 aa, Artificial Sequence
  Cyclic GFR-binding peptide
VPQALNAISILYFVGRKPKVLKKYRM

SEQ ID NO: 10481 - protein, 21 aa, Artificial Sequence
  Cyclic GFR-binding peptide
SPISILYKVGRTPKVLKYHYM

SEQ ID NO: 10482 - protein, 22 aa, Artificial Sequence
  Cyclic GFR-binding peptide
LSPISILYKIGKTPKILKYHYM

SEQ ID NO: 10483 - protein, 36 aa, Artificial Sequence
  Cyclic GFR-binding peptide
  MOD_RES (35)..(35): Xaa is C or S
TQVQLSATSVLYYEIVRKKPIFLRKHRTLEDHLAXK

SEQ ID NO: 10484 - protein, 31 aa, Artificial Sequence
  Cyclic GFR-binding peptide
QLSPISVLYKEIVRKKPIFLKYHYTLEDHLA

SEQ ID NO: 10485 - protein, 32 aa, Artificial Sequence
  Cyclic GFR-binding peptide
  MOD_RES (6)..(7): Xaa is C or S
TVPKPXXAPTQLSATSVLYYDDSSNVILRKHR

SEQ ID NO: 10486 - protein, 26 aa, Artificial Sequence
  Cyclic GFR-binding peptide
  MOD_RES (1)..(1): Xaa is C or S
XVPQDLSPISILYKVGRTPKVLKYHY

SEQ ID NO: 10487 - protein, 23 aa, Artificial Sequence
  Cyclic GFR-binding peptide
TQLSATSVLYYDDSSNVILRKHR

SEQ ID NO: 10488 - protein, 32 aa, Artificial Sequence
  Cyclic GFR-binding peptide
  MOD_RES (1)..(1): Xaa is C or S
XAPTKLSATSVLYYDDSSNVILRKHRNMVVRS

SEQ ID NO: 10489 - protein, 23 aa, Artificial Sequence
  Cyclic GFR-binding peptide
QDLSATSILYYIGKTPKILRKHR

SEQ ID NO: 10490 - protein, 32 aa, Artificial Sequence
  Cyclic GFR-binding peptide
  MOD_RES (1)..(2): Xaa is C or S
XXAPTQLSPISVLYKDDSSNVILKYHYNMVVR

SEQ ID NO: 10491 - protein, 30 aa, Artificial Sequence
  Cyclic GFR-binding peptide
  MOD_RES (28)..(30): Xaa is C or S
DLSAISILYLVGRTPKVLKNYQMVVKSXKX

SEQ ID NO: 10492 - protein, 32 aa, Artificial Sequence
  Cyclic GFR-binding peptide
  MOD_RES (5)..(6): Xaa is C or S
SASPXXVSQDLSATSILYYIGKTPKILRKHRM

SEQ ID NO: 10493 - protein, 24 aa, Artificial Sequence
  Cyclic GFR-binding peptide
SPISVLYKDDSSNVILKYHYNMVV

SEQ ID NO: 10494 - protein, 35 aa, Artificial Sequence
  Cyclic GFR-binding peptide
  MOD_RES (32)..(34): Xaa is C or S
PTKLNAISVLYFDDMGVPTLKKYREGMSVAEXGXR

SEQ ID NO: 10495 - protein, 32 aa, Artificial Sequence
  Cyclic GFR-binding peptide
  MOD_RES (1)..(32): Xaa is C or S
XVSQDLSPISILYKIGKTPKILKYHYMIVKSX

SEQ ID NO: 10496 - protein, 29 aa, Artificial Sequence
  Cyclic GFR-binding peptide
TELSATSMLYYDEYDKVVLRKHREMVVEG

SEQ ID NO: 10497 - protein, 20 aa, Artificial Sequence
  Cyclic GFR-binding peptide
SATSMLYYDEYDKVVLRKHR

SEQ ID NO: 10498 - protein, 30 aa, Artificial Sequence
  Cyclic GFR-binding peptide
  MOD_RES (27)..(29): Xaa is C or S
LSAISILYLIGKTPKILKNYQMIVKSXKXS

SEQ ID NO: 10499 - protein, 29 aa, Artificial Sequence
  Cyclic GFR-binding peptide
  MOD_RES (2)..(2): Xaa is C or S
TXAPTKLSPISVLYKDDSSNVILKYHYNM

SEQ ID NO: 10500 - protein, 26 aa, Artificial Sequence
  Cyclic GFR-binding peptide
PQALSATSILYYVGRKPKVLRKHRMI

SEQ ID NO: 10501 - protein, 25 aa, Artificial Sequence
  Cyclic GFR-binding peptide
DLNAISILYFIGKTPKILKKYRMIV

SEQ ID NO: 10502 - protein, 29 aa, Artificial Sequence
  Cyclic GFR-binding peptide
  MOD_RES (1)..(1): Xaa is C or S
XVSQDLNAISILYFIGKTPKILKKYRMIV

SEQ ID NO: 10503 - protein, 26 aa, Artificial Sequence
  Cyclic GFR-binding peptide
PQDLNAISILYFVGRTPKVLKKYRMV

SEQ ID NO: 10504 - protein, 35 aa, Artificial Sequence
  Cyclic GFR-binding peptide
  MOD_RES (4)..(5): Xaa is C or S
ASPXXVSQDLSPISILYKIGKTPKILKYHYMIVKS

SEQ ID NO: 10505 - protein, 30 aa, Artificial Sequence
  Cyclic GFR-binding peptide
PTKLSPISVLYKDDSSNVILKYHYNMVVRS

SEQ ID NO: 10506 - protein, 28 aa, Artificial Sequence
  Cyclic GFR-binding peptide
  MOD_RES (2)..(3): Xaa is C or S
AXXAPTKLNAISVLYFDSSNNVILKKYR

SEQ ID NO: 10507 - protein, 29 aa, Artificial Sequence
  Cyclic GFR-binding peptide
VQLSPISVLYKEIVRKKPIFLKYHYTLED

SEQ ID NO: 10508 - protein, 29 aa, Artificial Sequence
  Cyclic GFR-binding peptide
  MOD_RES (4)..(4): Xaa is C or S
KPTXAPTKLSAISVLYLDDSSNVILKNYQ

SEQ ID NO: 10509 - protein, 31 aa, Artificial Sequence
  Cyclic GFR-binding peptide
APTQLSAISVLYLDDSSNVILKNYQNMVVRA

SEQ ID NO: 10510 - protein, 23 aa, Artificial Sequence
  Cyclic GFR-binding peptide
KLSAISVLYLDSSNNVILKNYQN

SEQ ID NO: 10511 - protein, 30 aa, Artificial Sequence
  Cyclic GFR-binding peptide
  MOD_RES (2)..(2): Xaa is C or S
TXAPTKLSPISVLYKDDSSNVILKYHYNMV

SEQ ID NO: 10512 - protein, 33 aa, Artificial Sequence
  Cyclic GFR-binding peptide
  MOD_RES (1)..(33): Xaa is C or S
XAPTQLSATSVLYYDDSSNVILRKHRNMVVRAX

SEQ ID NO: 10513 - protein, 27 aa, Artificial Sequence
  Cyclic GFR-binding peptide
VPQALSPISILYKVGRKPKVLKYHYMI

SEQ ID NO: 10514 - protein, 28 aa, Artificial Sequence
  Cyclic GFR-binding peptide
  MOD_RES (2)..(3): Xaa is C or S
PXXVPQDLNAISILYFVGRTPKVLKKYR

SEQ ID NO: 10515 - protein, 34 aa, Artificial Sequence
  Cyclic GFR-binding peptide
  MOD_RES (31)..(33): Xaa is C or S
VPQDLNAISILYFVGRTPKVLKKYRMVVKSXKXS

SEQ ID NO: 10516 - protein, 27 aa, Artificial Sequence
  Cyclic GFR-binding peptide
LSPISVLYKDDSSNVILKYHYNMVVRA

SEQ ID NO: 10517 - protein, 32 aa, Artificial Sequence
  Cyclic GFR-binding peptide
  MOD_RES (3)..(4): Xaa is C or S
SPXXVPQDLSPISILYKVGRTPKVLKYHYMVV

SEQ ID NO: 10518 - protein, 34 aa, Artificial Sequence
  Cyclic GFR-binding peptide
  MOD_RES (5)..(5): Xaa is C or S
RNVQXRPTQVQLSATSVLYYEIVRKKPIFLRKHR

SEQ ID NO: 10519 - protein, 37 aa, Artificial Sequence
  Cyclic GFR-binding peptide
  MOD_RES (35)..(37): Xaa is C or S
TQVQLSPISVLYKEIVRKKPIFLKYHYTLEDHLAXKX

SEQ ID NO: 10520 - protein, 27 aa, Artificial Sequence
  Cyclic GFR-binding peptide
QDLSAISILYLVGRTPKVLKNYQMVVK

SEQ ID NO: 10521 - protein, 37 aa, Artificial Sequence
  Cyclic GFR-binding peptide
  MOD_RES (2)..(3)..(35)..(37): Xaa is C or S
PXXAPTKLSPISVLYKDDSSNVILKYHYNMVVRSXGX

SEQ ID NO: 10522 - protein, 30 aa, Artificial Sequence
  Cyclic GFR-binding peptide
  MOD_RES (28)..(30): Xaa is C or S
LNAISMLYFDEYDKVVLKKYREMVVEGXGX

SEQ ID NO: 10523 - protein, 37 aa, Artificial Sequence
  Cyclic GFR-binding peptide
  MOD_RES (4)..(5)..(37): Xaa is C or S
PKPXXAPTKLSATSVLYYDDSSNVILRKHRNMVVRSX

SEQ ID NO: 10524 - protein, 25 aa, Artificial Sequence
  Cyclic GFR-binding peptide
QDLSPISILYKVGRTPKVLKYHYMV

SEQ ID NO: 10525 - protein, 24 aa, Artificial Sequence
  Cyclic GFR-binding peptide
ALSATSILYYVGRKPKVLRKHRMI

SEQ ID NO: 10526 - protein, 32 aa, Artificial Sequence
  Cyclic GFR-binding peptide
  MOD_RES (1)..(2): Xaa is C or S
XXVPQDLSATSILYYVGRTPKVLRKHRMVVKS

SEQ ID NO: 10527 - protein, 27 aa, Artificial Sequence
  Cyclic GFR-binding peptide
LSPISVLYKDDSSNVILKYHYNMVVRS

SEQ ID NO: 10528 - protein, 40 aa, Artificial Sequence
  Cyclic GFR-binding peptide
  MOD_RES (5)..(6)..(38)..(40): Xaa is C or S
VPKPXXAPTQLSPISVLYKDDSSNVILKYHYNMVVRAXGX

SEQ ID NO: 10529 - protein, 27 aa, Artificial Sequence
  Cyclic GFR-binding peptide
PTKLNAISVLYFDDMGVPTLKKYREGM

SEQ ID NO: 10530 - protein, 33 aa, Artificial Sequence
  Cyclic GFR-binding peptide
  MOD_RES (4)..(5): Xaa is C or S
AAPXXVPQALSAISILYLVGRKPKVLKNYQMIV

SEQ ID NO: 10531 - protein, 23 aa, Artificial Sequence
  Cyclic GFR-binding peptide
DLSATSILYYIGKTPKILRKHRM

SEQ ID NO: 10532 - protein, 40 aa, Artificial Sequence
  Cyclic GFR-binding peptide
  MOD_RES (3)..(40): Xaa is C or S
VQXRPTQVQLSPISVLYKEIVRKKPIFLKYHYTLEDHLAX

SEQ ID NO: 10533 - protein, 26 aa, Artificial Sequence
  Cyclic GFR-binding peptide
LNAISILYFIGKTPKILKKYRMIVKS

SEQ ID NO: 10534 - protein, 26 aa, Artificial Sequence
  Cyclic GFR-binding peptide
PQALSPISILYKVGRKPKVLKYHYMI

SEQ ID NO: 10535 - protein, 32 aa, Artificial Sequence
  Cyclic GFR-binding peptide
  MOD_RES (29)..(31): Xaa is C or S
LSAISVLYLDDMGVPTLKNYQEGMSVAEXGXR

SEQ ID NO: 10536 - protein, 29 aa, Artificial Sequence
  Cyclic GFR-binding peptide
  MOD_RES (1)..(2): Xaa is C or S
XXVSQDLSATSILYYIGKTPKILRKHRMI

SEQ ID NO: 10537 - protein, 31 aa, Artificial Sequence
  Cyclic GFR-binding peptide
  MOD_RES (3)..(4): Xaa is C or S
KAXXVPTELSATSMLYYDENEKVVLRKHRDM

SEQ ID NO: 10538 - protein, 36 aa, Artificial Sequence
  Cyclic GFR-binding peptide
  MOD_RES (7)..(7): Xaa is C or S
HVTKPTXAPTKLSPISVLYKDDSSNVILKYHYNMVV

SEQ ID NO: 10539 - protein, 28 aa, Artificial Sequence
  Cyclic GFR-binding peptide
  MOD_RES (1)..(1): Xaa is C or S
XVSQDLSATSILYYIGKTPKILRKHRMI

SEQ ID NO: 10540 - protein, 31 aa, Artificial Sequence
  Cyclic GFR-binding peptide
  MOD_RES (2)..(3): Xaa is C or S
AXXVPTKLSATSVLYYDDMGVPTLRKHREGM

SEQ ID NO: 10541 - protein, 33 aa, Artificial Sequence
  Cyclic GFR-binding peptide
  MOD_RES (3)..(4): Xaa is C or S
APXXVPQALSPISILYKVGRKPKVLKYHYMIVR

SEQ ID NO: 10542 - protein, 34 aa, Artificial Sequence
  Cyclic GFR-binding peptide
  MOD_RES (2)..(2): Xaa is C or S
QXRPTQVQLNAISVLYFEIVRKKPIFLKKYRTLE

SEQ ID NO: 10543 - protein, 35 aa, Artificial Sequence
  Cyclic GFR-binding peptide
  MOD_RES (2)..(3)..(34): Xaa is C or S
PXXVPQDLSAISILYLVGRTPKVLKNYQMVVKSXK

SEQ ID NO: 10544 - protein, 31 aa, Artificial Sequence
  Cyclic GFR-binding peptide
  MOD_RES (30)..(30): Xaa is C or S
TKLSAISVLYLDSSNNVILKNYQNMVVKAXG

SEQ ID NO: 10545 - protein, 32 aa, Artificial Sequence
  Cyclic GFR-binding peptide
  MOD_RES (30)..(32): Xaa is C or S
TELSPISMLYKDENEKVVLKYHYDMVVEGXGX

SEQ ID NO: 10546 - protein, 23 aa, Artificial Sequence
  Cyclic GFR-binding peptide
ELSATSMLYYDENEKVVLRKHRD

SEQ ID NO: 10547 - protein, 34 aa, Artificial Sequence
  Cyclic GFR-binding peptide
  MOD_RES (2)..(3)..(34): Xaa is C or S
PXXVSQDLSPISILYKIGKTPKILKYHYMIVKSX

SEQ ID NO: 10548 - protein, 32 aa, Artificial Sequence
  Cyclic GFR-binding peptide
  MOD_RES (6)..(7): Xaa is C or S
KIPKAXXVPTELSPISMLYKDENEKVVLKYHY

SEQ ID NO: 10549 - protein, 26 aa, Artificial Sequence
  Cyclic GFR-binding peptide
TELNAISMLYFDENEKVVLKKYRDMV

SEQ ID NO: 10550 - protein, 31 aa, Artificial Sequence
  Cyclic GFR-binding peptide
  MOD_RES (1)..(1): Xaa is C or S
XVPTKLSAISVLYLDDMGVPTLKNYQEGMSV

SEQ ID NO: 10551 - protein, 27 aa, Artificial Sequence
  Cyclic GFR-binding peptide
PTKLNAISVLYFDSSNNVILKKYRNMV

SEQ ID NO: 10552 - protein, 32 aa, Artificial Sequence
  Cyclic GFR-binding peptide
  MOD_RES (1)..(2): Xaa is C or S
XXAPTKLSAISVLYLDSSNNVILKNYQNMVVK

SEQ ID NO: 10553 - protein, 22 aa, Artificial Sequence
  Cyclic GFR-binding peptide
SPISILYKVGRKPKVLKYHYMI

SEQ ID NO: 10554 - protein, 37 aa, Artificial Sequence
  Cyclic GFR-binding peptide
  MOD_RES (4)..(5): Xaa is C or S
GKAXXVPTKLSAISVLYLDDMGVPTLKNYQEGMSVAE

SEQ ID NO: 10555 - protein, 33 aa, Artificial Sequence
  Cyclic GFR-binding peptide
  MOD_RES (1)..(33): Xaa is C or S
XVPTELSPISMLYKDEYDKVVLKYHYEMVVEGX

SEQ ID NO: 10556 - protein, 32 aa, Artificial Sequence
  Cyclic GFR-binding peptide
  MOD_RES (5)..(6): Xaa is C or S
SAAPXXVPQALSPISILYKVGRKPKVLKYHYM

SEQ ID NO: 10557 - protein, 27 aa, Artificial Sequence
  Cyclic GFR-binding peptide
  MOD_RES (1)..(1): Xaa is C or S
XVSQDLSPISILYKIGKTPKILKYHYM

SEQ ID NO: 10558 - protein, 27 aa, Artificial Sequence
  Cyclic GFR-binding peptide
  MOD_RES (1)..(2): Xaa is C or S
XXAPTKLSATSVLYYDDSSNVILRKHR

SEQ ID NO: 10559 - protein, 34 aa, Artificial Sequence
  Cyclic GFR-binding peptide
  MOD_RES (4)..(5): Xaa is C or S
GKAXXVPTKLSAISVLYLDDMGVPTLKNYQEGMS

SEQ ID NO: 10560 - protein, 29 aa, Artificial Sequence
  Cyclic GFR-binding peptide
  MOD_RES (1)..(1): Xaa is C or S
XVPQALSPISILYKVGRKPKVLKYHYMIV

SEQ ID NO: 10561 - protein, 33 aa, Artificial Sequence
  Cyclic GFR-binding peptide
  MOD_RES (31)..(33): Xaa is C or S
PTELSATSMLYYDENEKVVLRKHRDMVVEGXGX

SEQ ID NO: 10562 - protein, 31 aa, Artificial Sequence
  Cyclic GFR-binding peptide
  MOD_RES (4)..(5): Xaa is C or S
GKAXXVPTKLSAISVLYLDDMGVPTLKNYQE

SEQ ID NO: 10563 - protein, 31 aa, Artificial Sequence
  Cyclic GFR-binding peptide
  MOD_RES (29)..(31): Xaa is C or S
QDLSPISILYKVGRTPKVLKYHYMVVKSXKX

SEQ ID NO: 10564 - protein, 32 aa, Artificial Sequence
  Cyclic GFR-binding peptide
  MOD_RES (3)..(4): Xaa is C or S
APXXVPQALSPISILYKVGRKPKVLKYHYMIV

SEQ ID NO: 10565 - protein, 28 aa, Artificial Sequence
  Cyclic GFR-binding peptide
  MOD_RES (2)..(3): Xaa is C or S
AXXAPTKLSPISVLYKDSSNNVILKYHY

SEQ ID NO: 10566 - protein, 32 aa, Artificial Sequence
  Cyclic GFR-binding peptide
  MOD_RES (30)..(32): Xaa is C or S
SAISVLYLEIVRKKPIFLKNYQTLEDHLAXKX

SEQ ID NO: 10567 - protein, 34 aa, Artificial Sequence
  Cyclic GFR-binding peptide
  MOD_RES (31)..(33): Xaa is C or S
LSPISVLYKEIVRKKPIFLKYHYTLEDHLAXKXE

SEQ ID NO: 10568 - protein, 40 aa, Artificial Sequence
  Cyclic GFR-binding peptide
  MOD_RES (4)..(5)..(37)..(39): Xaa is C or S
PKPXXAPTQLSATSVLYYDDSSNVILRKHRNMVVRAXGXH

SEQ ID NO: 10569 - protein, 35 aa, Artificial Sequence
  Cyclic GFR-binding peptide
  MOD_RES (6)..(7): Xaa is C or S
TVPKPXXAPTQLSPISVLYKDDSSNVILKYHYNMV

SEQ ID NO: 10570 - protein, 39 aa, Artificial Sequence
  Cyclic GFR-binding peptide
  MOD_RES (3)..(4)..(36)..(38): Xaa is C or S
KPXXAPTQLSPISVLYKDDSSNVILKYHYNMVVRAXGXH

SEQ ID NO: 10571 - protein, 24 aa, Artificial Sequence
  Cyclic GFR-binding peptide
SPISVLYKEIVRKKPIFLKYHYTL

SEQ ID NO: 10572 - protein, 34 aa, Artificial Sequence
  Cyclic GFR-binding peptide
  MOD_RES (2)..(2): Xaa is C or S
QXRPTQVQLSAISVLYLEIVRKKPIFLKNYQTLE

SEQ ID NO: 10573 - protein, 34 aa, Artificial Sequence
  Cyclic GFR-binding peptide
  MOD_RES (1)..(2)..(34): Xaa is C or S
XXAPTQLSATSVLYYDDSSNVILRKHRNMVVRAX

SEQ ID NO: 10574 - protein, 24 aa, Artificial Sequence
  Cyclic GFR-binding peptide
LSAISVLYLEIVRKKPIFLKNYQT

SEQ ID NO: 10575 - protein, 29 aa, Artificial Sequence
  Cyclic GFR-binding peptide
  MOD_RES (28)..(28): Xaa is C or S
DLSPISILYKIGKTPKILKYHYMIVKSXK

SEQ ID NO: 10576 - protein, 38 aa, Artificial Sequence
  Cyclic GFR-binding peptide
  MOD_RES (37)..(37): Xaa is C or S
RPTQVQLSPISVLYKEIVRKKPIFLKYHYTLEDHLAXK

SEQ ID NO: 10577 - protein, 23 aa, Artificial Sequence
  Cyclic GFR-binding peptide
QALSAISILYLVGRKPKVLKNYQ

SEQ ID NO: 10578 - protein, 29 aa, Artificial Sequence
  Cyclic GFR-binding peptide
  MOD_RES (2)..(3): Xaa is C or S
PXXVPQDLSPISILYKVGRTPKVLKYHYM

SEQ ID NO: 10579 - protein, 33 aa, Artificial Sequence
  Cyclic GFR-binding peptide
  MOD_RES (5)..(6): Xaa is C or S
SASPXXVPQDLNAISILYFVGRTPKVLKKYRMV

SEQ ID NO: 10580 - protein, 31 aa, Artificial Sequence
  Cyclic GFR-binding peptide
  MOD_RES (1)..(2): Xaa is C or S
XXVPTELSATSMLYYDEYDKVVLRKHREMVV

SEQ ID NO: 10581 - protein, 29 aa, Artificial Sequence
  Cyclic GFR-binding peptide
  MOD_RES (1)..(2): Xaa is C or S
XXVPQALSAISILYLVGRKPKVLKNYQMI

SEQ ID NO: 10582 - protein, 38 aa, Artificial Sequence
  Cyclic GFR-binding peptide
  MOD_RES (5)..(6)..(37): Xaa is C or S
SASPXXVSQDLNAISILYFIGKTPKILKKYRMIVKSXK

SEQ ID NO: 10583 - protein, 29 aa, Artificial Sequence
  Cyclic GFR-binding peptide
  MOD_RES (2)..(3): Xaa is C or S
AXXAPTKLSAISVLYLDSSNNVILKNYQN

SEQ ID NO: 10584 - protein, 32 aa, Artificial Sequence
  Cyclic GFR-binding peptide
  MOD_RES (1)..(1): Xaa is C or S
XRPTQVQLSAISVLYLEIVRKKPIFLKNYQTL

SEQ ID NO: 10585 - protein, 25 aa, Artificial Sequence
  Cyclic GFR-binding peptide
NAISILYFVGRKPKVLKKYRMIVRS

SEQ ID NO: 10586 - protein, 29 aa, Artificial Sequence
  Cyclic GFR-binding peptide
  MOD_RES (1)..(1): Xaa is C or S
XVPTKLSAISVLYLDDMGVPTLKNYQEGM

SEQ ID NO: 10587 - protein, 27 aa, Artificial Sequence
  Cyclic GFR-binding peptide
LSATSVLYYDDMGVPTLRKHREGMSVA

SEQ ID NO: 10588 - protein, 28 aa, Artificial Sequence
  Cyclic GFR-binding peptide
  MOD_RES (1)..(1): Xaa is C or S
XAPTKLSAISVLYLDSSNNVILKNYQNM

SEQ ID NO: 10589 - protein, 28 aa, Artificial Sequence
  Cyclic GFR-binding peptide
  MOD_RES (2)..(2): Xaa is C or S
TXAPTKLSAISVLYLDDSSNVILKNYQN

SEQ ID NO: 10590 - protein, 36 aa, Artificial Sequence
  Cyclic GFR-binding peptide
  MOD_RES (1)..(33)..(35): Xaa is C or S
XVPTELNAISMLYFDEYDKVVLKKYREMVVEGXGXR

SEQ ID NO: 10591 - protein, 31 aa, Artificial Sequence
  Cyclic GFR-binding peptide
  MOD_RES (29)..(31): Xaa is C or S
ELNAISMLYFDEYDKVVLKKYREMVVEGXGX

SEQ ID NO: 10592 - protein, 36 aa, Artificial Sequence
  Cyclic GFR-binding peptide
  MOD_RES (6)..(6): Xaa is C or S
VTKPTXAPTKLSATSVLYYDDSSNVILRKHRNMVVR

SEQ ID NO: 10593 - protein, 37 aa, Artificial Sequence
  Cyclic GFR-binding peptide
  MOD_RES (4)..(5)..(36): Xaa is C or S
AAPXXVPQALNAISILYFVGRKPKVLKKYRMIVRSXK

SEQ ID NO: 10594 - protein, 25 aa, Artificial Sequence
  Cyclic GFR-binding peptide
SAISVLYLDSSNNVILKNYQNMVVK

SEQ ID NO: 10595 - protein, 34 aa, Artificial Sequence
  Cyclic GFR-binding peptide
  MOD_RES (3)..(4): Xaa is C or S
APXXVPQALNAISILYFVGRKPKVLKKYRMIVRS

SEQ ID NO: 10596 - protein, 30 aa, Artificial Sequence
  Cyclic GFR-binding peptide
  MOD_RES (29)..(29): Xaa is C or S
QALNAISILYFVGRKPKVLKKYRMIVRSXK

SEQ ID NO: 10597 - protein, 30 aa, Artificial Sequence
  Cyclic GFR-binding peptide
  MOD_RES (30)..(30): Xaa is C or S
TELSATSMLYYDENEKVVLRKHRDMVVEGX

SEQ ID NO: 10598 - protein, 27 aa, Artificial Sequence
  Cyclic GFR-binding peptide
  MOD_RES (1)..(2): Xaa is C or S
XXVSQDLSATSILYYIGKTPKILRKHR

SEQ ID NO: 10599 - protein, 40 aa, Artificial Sequence
  Cyclic GFR-binding peptide
  MOD_RES (4)..(5)..(37)..(39): Xaa is C or S
PKPXXAPTQLSAISVLYLDDSSNVILKNYQNMVVRAXGXH

SEQ ID NO: 10600 - protein, 24 aa, Artificial Sequence
  Cyclic GFR-binding peptide
LSAISVLYLDSSNNVILKNYQNMV

SEQ ID NO: 10601 - protein, 29 aa, Artificial Sequence
  Cyclic GFR-binding peptide
  MOD_RES (3)..(4): Xaa is C or S
APXXVPQALSPISILYKVGRKPKVLKYHY

SEQ ID NO: 10602 - protein, 32 aa, Artificial Sequence
  Cyclic GFR-binding peptide
  MOD_RES (1)..(32): Xaa is C or S
XVPQDLSATSILYYVGRTPKVLRKHRMVVKSX

SEQ ID NO: 10603 - protein, 24 aa, Artificial Sequence
  Cyclic GFR-binding peptide
QALSPISILYKVGRKPKVLKYHYM

SEQ ID NO: 10604 - protein, 33 aa, Artificial Sequence
  Cyclic GFR-binding peptide
  MOD_RES (3)..(4): Xaa is C or S
SPXXVPQDLNAISILYFVGRTPKVLKKYRMVVK

SEQ ID NO: 10605 - protein, 26 aa, Artificial Sequence
  Cyclic GFR-binding peptide
PTQLSPISVLYKDDSSNVILKYHYNM

SEQ ID NO: 10606 - protein, 30 aa, Artificial Sequence
  Cyclic GFR-binding peptide
  MOD_RES (3)..(4): Xaa is C or S
KPXXAPTKLSPISVLYKDDSSNVILKYHYN

SEQ ID NO: 10607 - protein, 33 aa, Artificial Sequence
  Cyclic GFR-binding peptide
  MOD_RES (4)..(5): Xaa is C or S
ASPXXVSQDLSATSILYYIGKTPKILRKHRMIV

SEQ ID NO: 10608 - protein, 26 aa, Artificial Sequence
  Cyclic GFR-binding peptide
TKLSAISVLYLDDSSNVILKNYQNMV

SEQ ID NO: 10609 - protein, 31 aa, Artificial Sequence
  Cyclic GFR-binding peptide
QVQLSAISVLYLEIVRKKPIFLKNYQTLEDH

SEQ ID NO: 10610 - protein, 23 aa, Artificial Sequence
  Cyclic GFR-binding peptide
SATSILYYVGRTPKVLRKHRMVV

SEQ ID NO: 10611 - protein, 23 aa, Artificial Sequence
  Cyclic GFR-binding peptide
SATSMLYYDENEKVVLRKHRDMV

SEQ ID NO: 10612 - protein, 31 aa, Artificial Sequence
  Cyclic GFR-binding peptide
  MOD_RES (31)..(31): Xaa is C or S
VPQDLSATSILYYVGRTPKVLRKHRMVVKSX

SEQ ID NO: 10613 - protein, 41 aa, Artificial Sequence
  Cyclic GFR-binding peptide
  MOD_RES (6)..(7)..(38)..(40): Xaa is C or S
ASASPXXVSQDLNAISILYFIGKTPKILKKYRMIVKSXKXS

SEQ ID NO: 10614 - protein, 28 aa, Artificial Sequence
  Cyclic GFR-binding peptide
QDLSPISILYKVGRTPKVLKYHYMVVKS

SEQ ID NO: 10615 - protein, 31 aa, Artificial Sequence
  Cyclic GFR-binding peptide
  MOD_RES (2)..(3): Xaa is C or S
PXXVPQALNAISILYFVGRKPKVLKKYRMIV

SEQ ID NO: 10616 - protein, 33 aa, Artificial Sequence
  Cyclic GFR-binding peptide
  MOD_RES (4)..(4): Xaa is C or S
KPTXAPTKLSAISVLYLDDSSNVILKNYQNMVV

SEQ ID NO: 10617 - protein, 30 aa, Artificial Sequence
  Cyclic GFR-binding peptide
  MOD_RES (28)..(30): Xaa is C or S
LNAISMLYFDENEKVVLKKYRDMVVEGXGX

SEQ ID NO: 10618 - protein, 39 aa, Artificial Sequence
  Cyclic GFR-binding peptide
  MOD_RES (4)..(5)..(36)..(38): Xaa is C or S
AAPXXVPQALNAISILYFVGRKPKVLKKYRMIVRSXKXS

SEQ ID NO: 10619 - protein, 28 aa, Artificial Sequence
  Cyclic GFR-binding peptide
  MOD_RES (1)..(1): Xaa is C or S
XVPQALSAISILYLVGRKPKVLKNYQMI

SEQ ID NO: 10620 - protein, 21 aa, Artificial Sequence
  Cyclic GFR-binding peptide
SATSILYYVGRKPKVLRKHRM

SEQ ID NO: 10621 - protein, 34 aa, Artificial Sequence
  Cyclic GFR-binding peptide
  MOD_RES (32)..(34): Xaa is C or S
QLSPISVLYKEIVRKKPIFLKYHYTLEDHLAXKX

SEQ ID NO: 10622 - protein, 36 aa, Artificial Sequence
  Cyclic GFR-binding peptide
  MOD_RES (1)..(2)..(34)..(36): Xaa is C or S
XXAPTKLSAISVLYLDSSNNVILKNYQNMVVKAXGX

SEQ ID NO: 10623 - protein, 22 aa, Artificial Sequence
  Cyclic GFR-binding peptide
DLSATSILYYIGKTPKILRKHR

SEQ ID NO: 10624 - protein, 33 aa, Artificial Sequence
  Cyclic GFR-binding peptide
  MOD_RES (6)..(7): Xaa is C or S
AVPKAXXAPTKLSPISVLYKDSSNNVILKYHYN

SEQ ID NO: 10625 - protein, 37 aa, Artificial Sequence
  Cyclic GFR-binding peptide
  MOD_RES (34)..(36): Xaa is C or S
QVQLSPISVLYKEIVRKKPIFLKYHYTLEDHLAXKXE

SEQ ID NO: 10626 - protein, 27 aa, Artificial Sequence
  Cyclic GFR-binding peptide
KLSATSVLYYDDMGVPTLRKHREGMSV

SEQ ID NO: 10627 - protein, 33 aa, Artificial Sequence
  Cyclic GFR-binding peptide
  MOD_RES (32)..(32): Xaa is C or S
APTQLSAISVLYLDDSSNVILKNYQNMVVRAXG

SEQ ID NO: 10628 - protein, 33 aa, Artificial Sequence
  Cyclic GFR-binding peptide
  MOD_RES (3)..(4): Xaa is C or S
KAXXVPTELSATSMLYYDEYDKVVLRKHREMVV

SEQ ID NO: 10629 - protein, 40 aa, Artificial Sequence
  Cyclic GFR-binding peptide
  MOD_RES (5)..(6)..(38)..(40): Xaa is C or S
IPKAXXVPTELNAISMLYFDENEKVVLKKYRDMVVEGXGX

SEQ ID NO: 10630 - protein, 39 aa, Artificial Sequence
  Cyclic GFR-binding peptide
  MOD_RES (5)..(6)..(39): Xaa is C or S
VGKAXXVPTKLSATSVLYYDDMGVPTLRKHREGMSVAEX

SEQ ID NO: 10631 - protein, 32 aa, Artificial Sequence
  Cyclic GFR-binding peptide
  MOD_RES (4)..(5): Xaa is C or S
ASPXXVSQDLSPISILYKIGKTPKILKYHYMI

SEQ ID NO: 10632 - protein, 32 aa, Artificial Sequence
  Cyclic GFR-binding peptide
  MOD_RES (29)..(31): Xaa is C or S
LSATSVLYYDDMGVPTLRKHREGMSVAEXGXR

SEQ ID NO: 10633 - protein, 27 aa, Artificial Sequence
  Cyclic GFR-binding peptide
ELSATSMLYYDENEKVVLRKHRDMVVE

SEQ ID NO: 10634 - protein, 34 aa, Artificial Sequence
  Cyclic GFR-binding peptide
  MOD_RES (3)..(4): Xaa is C or S
KAXXVPTELSPISMLYKDENEKVVLKYHYDMVVE

SEQ ID NO: 10635 - protein, 39 aa, Artificial Sequence
  Cyclic GFR-binding peptide
  MOD_RES (5)..(6)..(38): Xaa is C or S
IPKAXXVPTELSATSMLYYDEYDKVVLRKHREMVVEGXG

SEQ ID NO: 10636 - protein, 31 aa, Artificial Sequence
  Cyclic GFR-binding peptide
  MOD_RES (30)..(30): Xaa is C or S
TKLSATSVLYYDDSSNVILRKHRNMVVRSXG

SEQ ID NO: 10637 - protein, 26 aa, Artificial Sequence
  Cyclic GFR-binding peptide
  MOD_RES (1)..(1): Xaa is C or S
XVPQALSPISILYKVGRKPKVLKYHY

SEQ ID NO: 10638 - protein, 30 aa, Artificial Sequence
  Cyclic GFR-binding peptide
PTKLSAISVLYLDDSSNVILKNYQNMVVRS

SEQ ID NO: 10639 - protein, 21 aa, Artificial Sequence
  Cyclic GFR-binding peptide
LSATSILYYVGRTPKVLRKHR

SEQ ID NO: 10640 - protein, 31 aa, Artificial Sequence
  Cyclic GFR-binding peptide
  MOD_RES (29)..(31): Xaa is C or S
QALNAISILYFVGRKPKVLKKYRMIVRSXKX

SEQ ID NO: 10641 - protein, 25 aa, Artificial Sequence
  Cyclic GFR-binding peptide
SATSVLYYDDSSNVILRKHRNMVVR

SEQ ID NO: 10642 - protein, 24 aa, Artificial Sequence
  Cyclic GFR-binding peptide
TKLSAISVLYLDDMGVPTLKNYQE

SEQ ID NO: 10643 - protein, 22 aa, Artificial Sequence
  Cyclic GFR-binding peptide
LSAISILYLVGRTPKVLKNYQM

SEQ ID NO: 10644 - protein, 32 aa, Artificial Sequence
  Cyclic GFR-binding peptide
  MOD_RES (3)..(4): Xaa is C or S
KAXXVPTELSATSMLYYDEYDKVVLRKHREMV

SEQ ID NO: 10645 - protein, 36 aa, Artificial Sequence
  Cyclic GFR-binding peptide
  MOD_RES (5)..(6): Xaa is C or S
IPKAXXVPTELSPISMLYKDEYDKVVLKYHYEMVVE

SEQ ID NO: 10646 - protein, 30 aa, Artificial Sequence
  Cyclic GFR-binding peptide
  MOD_RES (30)..(30): Xaa is C or S
TQLSATSVLYYDDSSNVILRKHRNMVVRAX

SEQ ID NO: 10647 - protein, 24 aa, Artificial Sequence
  Cyclic GFR-binding peptide
DLSATSILYYIGKTPKILRKHRMI

SEQ ID NO: 10648 - protein, 28 aa, Artificial Sequence
  Cyclic GFR-binding peptide
  MOD_RES (2)..(3): Xaa is C or S
AXXVPTKLSATSVLYYDDMGVPTLRKHR

SEQ ID NO: 10649 - protein, 34 aa, Artificial Sequence
  Cyclic GFR-binding peptide
  MOD_RES (4)..(5): Xaa is C or S
ASPXXVPQDLSATSILYYVGRTPKVLRKHRMVVK

SEQ ID NO: 10650 - protein, 26 aa, Artificial Sequence
  Cyclic GFR-binding peptide
PTQLSATSVLYYDDSSNVILRKHRNM

SEQ ID NO: 10651 - protein, 33 aa, Artificial Sequence
  Cyclic GFR-binding peptide
  MOD_RES (31)..(33): Xaa is C or S
VPQDLNAISILYFVGRTPKVLKKYRMVVKSXKX

SEQ ID NO: 10652 - protein, 29 aa, Artificial Sequence
  Cyclic GFR-binding peptide
  MOD_RES (1)..(1): Xaa is C or S
XVPTKLNAISVLYFDDMGVPTLKKYREGM

SEQ ID NO: 10653 - protein, 29 aa, Artificial Sequence
  Cyclic GFR-binding peptide
  MOD_RES (28)..(28): Xaa is C or S
LSPISMLYKDENEKVVLKYHYDMVVEGXG

SEQ ID NO: 10654 - protein, 34 aa, Artificial Sequence
  Cyclic GFR-binding peptide
  MOD_RES (6)..(7): Xaa is C or S
KIPKAXXVPTELSATSMLYYDENEKVVLRKHRDM

SEQ ID NO: 10655 - protein, 32 aa, Artificial Sequence
  Cyclic GFR-binding peptide
  MOD_RES (4)..(4): Xaa is C or S
KPTXAPTKLSATSVLYYDDSSNVILRKHRNMV

SEQ ID NO: 10656 - protein, 30 aa, Artificial Sequence
  Cyclic GFR-binding peptide
  MOD_RES (29)..(29): Xaa is C or S
QALSPISILYKVGRKPKVLKYHYMIVRSXK

SEQ ID NO: 10657 - protein, 28 aa, Artificial Sequence
  Cyclic GFR-binding peptide
  MOD_RES (1)..(1): Xaa is C or S
XVPQDLSATSILYYVGRTPKVLRKHRMV

SEQ ID NO: 10658 - protein, 41 aa, Artificial Sequence
  Cyclic GFR-binding peptide
  MOD_RES (5)..(6)..(38)..(40): Xaa is C or S
VPKPXXAPTQLSPISVLYKDDSSNVILKYHYNMVVRAXGXH

SEQ ID NO: 10659 - protein, 36 aa, Artificial Sequence
  Cyclic GFR-binding peptide
  MOD_RES (6)..(7): Xaa is C or S
AVPKAXXAPTKLSAISVLYLDSSNNVILKNYQNMVV

SEQ ID NO: 10660 - protein, 35 aa, Artificial Sequence
  Cyclic GFR-binding peptide
  MOD_RES (6)..(7): Xaa is C or S
ASASPXXVSQDLSPISILYKIGKTPKILKYHYMIV

SEQ ID NO: 10661 - protein, 27 aa, Artificial Sequence
  Cyclic GFR-binding peptide
VPTELSATSMLYYDENEKVVLRKHRDM

SEQ ID NO: 10662 - protein, 27 aa, Artificial Sequence
  Cyclic GFR-binding peptide
  MOD_RES (1)..(1): Xaa is C or S
XVPQDLNAISILYFVGRTPKVLKKYRM

SEQ ID NO: 10663 - protein, 39 aa, Artificial Sequence
  Cyclic GFR-binding peptide
  MOD_RES (5)..(37)..(39): Xaa is C or S
TKPTXAPTKLSAISVLYLDDSSNVILKNYQNMVVRSXGX

SEQ ID NO: 10664 - protein, 33 aa, Artificial Sequence
  Cyclic GFR-binding peptide
  MOD_RES (4)..(5): Xaa is C or S
ASPXXVPQDLSAISILYLVGRTPKVLKNYQMVV

SEQ ID NO: 10665 - protein, 34 aa, Artificial Sequence
  Cyclic GFR-binding peptide
  MOD_RES (6)..(7): Xaa is C or S
KIPKAXXVPTELSPISMLYKDENEKVVLKYHYDM

SEQ ID NO: 10666 - protein, 25 aa, Artificial Sequence
  Cyclic GFR-binding peptide
PQALSPISILYKVGRKPKVLKYHYM

SEQ ID NO: 10667 - protein, 29 aa, Artificial Sequence
  Cyclic GFR-binding peptide
  MOD_RES (3)..(4): Xaa is C or S
KPXXAPTQLSPISVLYKDDSSNVILKYHY

SEQ ID NO: 10668 - protein, 33 aa, Artificial Sequence
  Cyclic GFR-binding peptide
  MOD_RES (32)..(32): Xaa is C or S
APTKLSAISVLYLDDSSNVILKNYQNMVVRSXG

SEQ ID NO: 10669 - protein, 30 aa, Artificial Sequence
  Cyclic GFR-binding peptide
  MOD_RES (2)..(3): Xaa is C or S
PXXVPQALSATSILYYVGRKPKVLRKHRMI

SEQ ID NO: 10670 - protein, 36 aa, Artificial Sequence
  Cyclic GFR-binding peptide
  MOD_RES (1)..(2)..(34)..(36): Xaa is C or S
XXAPTQLSATSVLYYDDSSNVILRKHRNMVVRAXGX

SEQ ID NO: 10671 - protein, 22 aa, Artificial Sequence
  Cyclic GFR-binding peptide
SATSMLYYDEYDKVVLRKHREM

SEQ ID NO: 10672 - protein, 26 aa, Artificial Sequence
  Cyclic GFR-binding peptide
LSATSILYYVGRTPKVLRKHRMVVKS

SEQ ID NO: 10673 - protein, 33 aa, Artificial Sequence
  Cyclic GFR-binding peptide
  MOD_RES (3)..(4): Xaa is C or S
KAXXVPTKLSAISVLYLDDMGVPTLKNYQEGMS

SEQ ID NO: 10674 - protein, 32 aa, Artificial Sequence
  Cyclic GFR-binding peptide
  MOD_RES (2)..(3): Xaa is C or S
PXXVSQDLSPISILYKIGKTPKILKYHYMIVK

SEQ ID NO: 10675 - protein, 38 aa, Artificial Sequence
  Cyclic GFR-binding peptide
  MOD_RES (5)..(6)..(38): Xaa is C or S
IPKAXXVPTELSATSMLYYDENEKVVLRKHRDMVVEGX

SEQ ID NO: 10676 - protein, 40 aa, Artificial Sequence
  Cyclic GFR-binding peptide
  MOD_RES (4)..(4): Xaa is C or S
NVQXRPTQVQLSPISVLYKEIVRKKPIFLKYHYTLEDHLA

SEQ ID NO: 10677 - protein, 30 aa, Artificial Sequence
  Cyclic GFR-binding peptide
TKLNAISVLYFDDMGVPTLKKYREGMSVAE

SEQ ID NO: 10678 - protein, 37 aa, Artificial Sequence
  Cyclic GFR-binding peptide
  MOD_RES (3)..(35)..(37): Xaa is C or S
PTXAPTKLSATSVLYYDDSSNVILRKHRNMVVRSXGX

SEQ ID NO: 10679 - protein, 33 aa, Artificial Sequence
  Cyclic GFR-binding peptide
  MOD_RES (1)..(32): Xaa is C or S
XVSQDLSAISILYLIGKTPKILKNYQMIVKSXK

SEQ ID NO: 10680 - protein, 31 aa, Artificial Sequence
  Cyclic GFR-binding peptide
  MOD_RES (1)..(1): Xaa is C or S
XRPTQVQLSAISVLYLEIVRKKPIFLKNYQT

SEQ ID NO: 10681 - protein, 32 aa, Artificial Sequence
  Cyclic GFR-binding peptide
  MOD_RES (4)..(5): Xaa is C or S
ASPXXVSQDLSATSILYYIGKTPKILRKHRMI

SEQ ID NO: 10682 - protein, 31 aa, Artificial Sequence
  Cyclic GFR-binding peptide
  MOD_RES (1)..(2): Xaa is C or S
XXAPTKLSPISVLYKDSSNNVILKYHYNMVV

SEQ ID NO: 10683 - protein, 24 aa, Artificial Sequence
  Cyclic GFR-binding peptide
PQALSPISILYKVGRKPKVLKYHY

SEQ ID NO: 10684 - protein, 27 aa, Artificial Sequence
  Cyclic GFR-binding peptide
VQLSPISVLYKEIVRKKPIFLKYHYTL

SEQ ID NO: 10685 - protein, 35 aa, Artificial Sequence
  Cyclic GFR-binding peptide
  MOD_RES (1)..(33)..(35): Xaa is C or S
XVPTELNAISMLYFDEYDKVVLKKYREMVVEGXGX

SEQ ID NO: 10686 - protein, 33 aa, Artificial Sequence
  Cyclic GFR-binding peptide
  MOD_RES (5)..(6): Xaa is C or S
SASPXXVSQDLNAISILYFIGKTPKILKKYRMI

SEQ ID NO: 10687 - protein, 30 aa, Artificial Sequence
  Cyclic GFR-binding peptide
  MOD_RES (1)..(2): Xaa is C or S
XXVPQDLSAISILYLVGRTPKVLKNYQMVV

SEQ ID NO: 10688 - protein, 30 aa, Artificial Sequence
  Cyclic GFR-binding peptide
  MOD_RES (30)..(30): Xaa is C or S
TKLSAISVLYLDSSNNVILKNYQNMVVKAX

SEQ ID NO: 10689 - protein, 31 aa, Artificial Sequence
  Cyclic GFR-binding peptide
QVQLSPISVLYKEIVRKKPIFLKYHYTLEDH

SEQ ID NO: 10690 - protein, 26 aa, Artificial Sequence
  Cyclic GFR-binding peptide
  MOD_RES (1)..(1): Xaa is C or S
XAPTQLSPISVLYKDDSSNVILKYHY

SEQ ID NO: 10691 - protein, 26 aa, Artificial Sequence
  Cyclic GFR-binding peptide
ELSPISMLYKDEYDKVVLKYHYEMVV

SEQ ID NO: 10692 - protein, 27 aa, Artificial Sequence
  Cyclic GFR-binding peptide
  MOD_RES (1)..(1): Xaa is C or S
XAPTQLSPISVLYKDDSSNVILKYHYN

SEQ ID NO: 10693 - protein, 37 aa, Artificial Sequence
  Cyclic GFR-binding peptide
  MOD_RES (3)..(4)..(36): Xaa is C or S
KAXXVPTELNAISMLYFDENEKVVLKKYRDMVVEGXG

SEQ ID NO: 10694 - protein, 27 aa, Artificial Sequence
  Cyclic GFR-binding peptide
PTELNAISMLYFDENEKVVLKKYRDMV

SEQ ID NO: 10695 - protein, 34 aa, Artificial Sequence
  Cyclic GFR-binding peptide
  MOD_RES (33)..(33): Xaa is C or S
VQLNAISVLYFEIVRKKPIFLKKYRTLEDHLAXK

SEQ ID NO: 10696 - protein, 26 aa, Artificial Sequence
  Cyclic GFR-binding peptide
PTQLSAISVLYLDDSSNVILKNYQNM

SEQ ID NO: 10697 - protein, 29 aa, Artificial Sequence
  Cyclic GFR-binding peptide
  MOD_RES (3)..(4): Xaa is C or S
KPXXAPTKLSPISVLYKDDSSNVILKYHY

SEQ ID NO: 10698 - protein, 32 aa, Artificial Sequence
  Cyclic GFR-binding peptide
  MOD_RES (3)..(3): Xaa is C or S
VQXRPTQVQLNAISVLYFEIVRKKPIFLKKYR

SEQ ID NO: 10699 - protein, 27 aa, Artificial Sequence
  Cyclic GFR-binding peptide
  MOD_RES (27)..(27): Xaa is C or S
LNAISILYFIGKTPKILKKYRMIVKSX

SEQ ID NO: 10700 - protein, 35 aa, Artificial Sequence
  Cyclic GFR-binding peptide
  MOD_RES (3)..(4)..(35): Xaa is C or S
APXXVPQALNAISILYFVGRKPKVLKKYRMIVRSX

SEQ ID NO: 10701 - protein, 29 aa, Artificial Sequence
  Cyclic GFR-binding peptide
  MOD_RES (3)..(4): Xaa is C or S
KAXXVPTELSPISMLYKDENEKVVLKYHY

SEQ ID NO: 10702 - protein, 35 aa, Artificial Sequence
  Cyclic GFR-binding peptide
  MOD_RES (2)..(3)..(34): Xaa is C or S
PXXVPQDLNAISILYFVGRTPKVLKKYRMVVKSXK

SEQ ID NO: 10703 - protein, 35 aa, Artificial Sequence
  Cyclic GFR-binding peptide
  MOD_RES (4)..(5): Xaa is C or S
GKAXXVPTKLSAISVLYLDDMGVPTLKNYQEGMSV

SEQ ID NO: 10704 - protein, 32 aa, Artificial Sequence
  Cyclic GFR-binding peptide
  MOD_RES (3)..(3): Xaa is C or S
PTXAPTKLSATSVLYYDDSSNVILRKHRNMVV

SEQ ID NO: 10705 - protein, 36 aa, Artificial Sequence
  Cyclic GFR-binding peptide
  MOD_RES (3)..(4)..(36): Xaa is C or S
KAXXAPTKLSAISVLYLDSSNNVILKNYQNMVVKAX

SEQ ID NO: 10706 - protein, 22 aa, Artificial Sequence
  Cyclic GFR-binding peptide
SPISILYKVGRTPKVLKYHYMV

SEQ ID NO: 10707 - protein, 28 aa, Artificial Sequence
  Cyclic GFR-binding peptide
  MOD_RES (27)..(27): Xaa is C or S
SPISMLYKDEYDKVVLKYHYEMVVEGXG

SEQ ID NO: 10708 - protein, 34 aa, Artificial Sequence
  Cyclic GFR-binding peptide
RPTQVQLSPISVLYKEIVRKKPIFLKYHYTLEDH

SEQ ID NO: 10709 - protein, 33 aa, Artificial Sequence
  Cyclic GFR-binding peptide
  MOD_RES (6)..(7): Xaa is C or S
KVGKAXXVPTKLSATSVLYYDDMGVPTLRKHRE

SEQ ID NO: 10710 - protein, 26 aa, Artificial Sequence
  Cyclic GFR-binding peptide
  MOD_RES (26)..(26): Xaa is C or S
SPISILYKIGKTPKILKYHYMIVKSX

SEQ ID NO: 10711 - protein, 41 aa, Artificial Sequence
  Cyclic GFR-binding peptide
  MOD_RES (6)..(7)..(38)..(40): Xaa is C or S
ASASPXXVPQDLSATSILYYVGRTPKVLRKHRMVVKSXKXS

SEQ ID NO: 10712 - protein, 31 aa, Artificial Sequence
  Cyclic GFR-binding peptide
VPTELNAISMLYFDEYDKVVLKKYREMVVEG

SEQ ID NO: 10713 - protein, 27 aa, Artificial Sequence
  Cyclic GFR-binding peptide
NAISVLYFDDMGVPTLKKYREGMSVAE

SEQ ID NO: 10714 - protein, 32 aa, Artificial Sequence
  Cyclic GFR-binding peptide
  MOD_RES (2)..(3): Xaa is C or S
PXXVPQDLNAISILYFVGRTPKVLKKYRMVVK

SEQ ID NO: 10715 - protein, 28 aa, Artificial Sequence
  Cyclic GFR-binding peptide
QVQLSAISVLYLEIVRKKPIFLKNYQTL

SEQ ID NO: 10716 - protein, 25 aa, Artificial Sequence
  Cyclic GFR-binding peptide
QDLSPISILYKIGKTPKILKYHYMI

SEQ ID NO: 10717 - protein, 28 aa, Artificial Sequence
  Cyclic GFR-binding peptide
  MOD_RES (2)..(3): Xaa is C or S
PXXVPQDLSPISILYKVGRTPKVLKYHY

SEQ ID NO: 10718 - protein, 23 aa, Artificial Sequence
  Cyclic GFR-binding peptide
QDLSAISILYLIGKTPKILKNYQ

SEQ ID NO: 10719 - protein, 25 aa, Artificial Sequence
  Cyclic GFR-binding peptide
TELNAISMLYFDEYDKVVLKKYREM

SEQ ID NO: 10720 - protein, 23 aa, Artificial Sequence
  Cyclic GFR-binding peptide
NAISMLYFDENEKVVLKKYRDMV

SEQ ID NO: 10721 - protein, 38 aa, Artificial Sequence
  Cyclic GFR-binding peptide
  MOD_RES (3)..(4)..(35)..(37): Xaa is C or S
APXXVPQALSPISILYKVGRKPKVLKYHYMIVRSXKXS

SEQ ID NO: 10722 - protein, 37 aa, Artificial Sequence
  Cyclic GFR-binding peptide
  MOD_RES (5)..(6): Xaa is C or S
VPKPXXAPTKLSATSVLYYDDSSNVILRKHRNMVVRS

SEQ ID NO: 10723 - protein, 32 aa, Artificial Sequence
  Cyclic GFR-binding peptide
  MOD_RES (1)..(1): Xaa is C or S
XVPTKLNAISVLYFDDMGVPTLKKYREGMSVA

SEQ ID NO: 10724 - protein, 37 aa, Artificial Sequence
  Cyclic GFR-binding peptide
  MOD_RES (5)..(5): Xaa is C or S
RNVQXRPTQVQLSAISVLYLEIVRKKPIFLKNYQTLE

SEQ ID NO: 10725 - protein, 39 aa, Artificial Sequence
  Cyclic GFR-binding peptide
  MOD_RES (5)..(6)..(38): Xaa is C or S
IPKAXXVPTELNAISMLYFDENEKVVLKKYRDMVVEGXG

SEQ ID NO: 10726 - protein, 32 aa, Artificial Sequence
  Cyclic GFR-binding peptide
  MOD_RES (5)..(6): Xaa is C or S
VPKPXXAPTKLSPISVLYKDDSSNVILKYHYN

SEQ ID NO: 10727 - protein, 29 aa, Artificial Sequence
  Cyclic GFR-binding peptide
SPISVLYKEIVRKKPIFLKYHYTLEDHLA

SEQ ID NO: 10728 - protein, 37 aa, Artificial Sequence
  Cyclic GFR-binding peptide
  MOD_RES (4)..(5)..(37): Xaa is C or S
PKPXXAPTKLSPISVLYKDDSSNVILKYHYNMVVRSX

SEQ ID NO: 10729 - protein, 36 aa, Artificial Sequence
  Cyclic GFR-binding peptide
  MOD_RES (1)..(2)..(34)..(36): Xaa is C or S
XXVPTELSPISMLYKDENEKVVLKYHYDMVVEGXGX

SEQ ID NO: 10730 - protein, 33 aa, Artificial Sequence
  Cyclic GFR-binding peptide
  MOD_RES (5)..(6): Xaa is C or S
VPKPXXAPTKLSATSVLYYDDSSNVILRKHRNM

SEQ ID NO: 10731 - protein, 29 aa, Artificial Sequence
  Cyclic GFR-binding peptide
  MOD_RES (1)..(1): Xaa is C or S
XVPTELSATSMLYYDENEKVVLRKHRDMV

SEQ ID NO: 10732 - protein, 32 aa, Artificial Sequence
  Cyclic GFR-binding peptide
  MOD_RES (4)..(5): Xaa is C or S
ASPXXVPQDLSPISILYKVGRTPKVLKYHYMV

SEQ ID NO: 10733 - protein, 27 aa, Artificial Sequence
  Cyclic GFR-binding peptide
  MOD_RES (27)..(27): Xaa is C or S
NAISMLYFDENEKVVLKKYRDMVVEGX

SEQ ID NO: 10734 - protein, 33 aa, Artificial Sequence
  Cyclic GFR-binding peptide
  MOD_RES (1)..(1): Xaa is C or S
XVPTKLSATSVLYYDDMGVPTLRKHREGMSVAE

SEQ ID NO: 10735 - protein, 35 aa, Artificial Sequence
  Cyclic GFR-binding peptide
  MOD_RES (4)..(5): Xaa is C or S
ASPXXVPQDLNAISILYFVGRTPKVLKKYRMVVKS

SEQ ID NO: 10736 - protein, 27 aa, Artificial Sequence
  Cyclic GFR-binding peptide
QDLSAISILYLIGKTPKILKNYQMIVK

SEQ ID NO: 10737 - protein, 36 aa, Artificial Sequence
  Cyclic GFR-binding peptide
  MOD_RES (1)..(33)..(35): Xaa is C or S
XAPTQLSATSVLYYDDSSNVILRKHRNMVVRAXGXH

SEQ ID NO: 10738 - protein, 38 aa, Artificial Sequence
  Cyclic GFR-binding peptide
  MOD_RES (4)..(4): Xaa is C or S
NVQXRPTQVQLSAISVLYLEIVRKKPIFLKNYQTLEDH

SEQ ID NO: 10739 - protein, 31 aa, Artificial Sequence
  Cyclic GFR-binding peptide
  MOD_RES (28)..(30): Xaa is C or S
LNAISMLYFDENEKVVLKKYRDMVVEGXGXR

SEQ ID NO: 10740 - protein, 25 aa, Artificial Sequence
  Cyclic GFR-binding peptide
PTKLSAISVLYLDDMGVPTLKNYQE

SEQ ID NO: 10741 - protein, 28 aa, Artificial Sequence
  Cyclic GFR-binding peptide
  MOD_RES (1)..(2): Xaa is C or S
XXAPTQLSPISVLYKDDSSNVILKYHYN

SEQ ID NO: 10742 - protein, 38 aa, Artificial Sequence
  Cyclic GFR-binding peptide
  MOD_RES (5)..(6)..(37): Xaa is C or S
SASPXXVSQDLSAISILYLIGKTPKILKNYQMIVKSXK

SEQ ID NO: 10743 - protein, 35 aa, Artificial Sequence
  Cyclic GFR-binding peptide
  MOD_RES (6)..(7): Xaa is C or S
SIPKAXXVPTELNAISMLYFDEYDKVVLKKYREMV

SEQ ID NO: 10744 - protein, 25 aa, Artificial Sequence
  Cyclic GFR-binding peptide
SATSILYYIGKTPKILRKHRMIVKS

SEQ ID NO: 10745 - protein, 32 aa, Artificial Sequence
  Cyclic GFR-binding peptide
  MOD_RES (3)..(4): Xaa is C or S
SPXXVSQDLSAISILYLIGKTPKILKNYQMIV

SEQ ID NO: 10746 - protein, 33 aa, Artificial Sequence
  Cyclic GFR-binding peptide
  MOD_RES (5)..(6): Xaa is C or S
VPKAXXAPTKLSPISVLYKDSSNNVILKYHYNM

SEQ ID NO: 10747 - protein, 31 aa, Artificial Sequence
  Cyclic GFR-binding peptide
  MOD_RES (1)..(1): Xaa is C or S
XVPTELSPISMLYKDENEKVVLKYHYDMVVE

SEQ ID NO: 10748 - protein, 30 aa, Artificial Sequence
  Cyclic GFR-binding peptide
  MOD_RES (1)..(1): Xaa is C or S
XRPTQVQLNAISVLYFEIVRKKPIFLKKYR

SEQ ID NO: 10749 - protein, 34 aa, Artificial Sequence
  Cyclic GFR-binding peptide
  MOD_RES (1)..(2)..(34): Xaa is C or S
XXVPTELSPISMLYKDEYDKVVLKYHYEMVVEGX

SEQ ID NO: 10750 - protein, 26 aa, Artificial Sequence
  Cyclic GFR-binding peptide
  MOD_RES (1)..(1): Xaa is C or S
XAPTKLNAISVLYFDSSNNVILKKYR

SEQ ID NO: 10751 - protein, 43 aa, Artificial Sequence
  Cyclic GFR-binding peptide
  MOD_RES (6)..(7)..(40)..(42): Xaa is C or S
KVGKAXXVPTKLSATSVLYYDDMGVPTLRKHREGMSVAEXGXR

SEQ ID NO: 10752 - protein, 33 aa, Artificial Sequence
  Cyclic GFR-binding peptide
RPTQVQLNAISVLYFEIVRKKPIFLKKYRTLED

SEQ ID NO: 10753 - protein, 35 aa, Artificial Sequence
  Cyclic GFR-binding peptide
  MOD_RES (5)..(6): Xaa is C or S
VGKAXXVPTKLSAISVLYLDDMGVPTLKNYQEGMS

SEQ ID NO: 10754 - protein, 41 aa, Artificial Sequence
  Cyclic GFR-binding peptide
  MOD_RES (6)..(7)..(39)..(41): Xaa is C or S
AVPKAXXAPTKLNAISVLYFDSSNNVILKKYRNMVVKAXGX

SEQ ID NO: 10755 - protein, 28 aa, Artificial Sequence
  Cyclic GFR-binding peptide
  MOD_RES (1)..(2): Xaa is C or S
XXVPTELSPISMLYKDEYDKVVLKYHYE

SEQ ID NO: 10756 - protein, 30 aa, Artificial Sequence
  Cyclic GFR-binding peptide
  MOD_RES (1)..(2): Xaa is C or S
XXAPTQLSATSVLYYDDSSNVILRKHRNMV

SEQ ID NO: 10757 - protein, 39 aa, Artificial Sequence
  Cyclic GFR-binding peptide
  MOD_RES (4)..(5)..(36)..(38): Xaa is C or S
ASPXXVSQDLNAISILYFIGKTPKILKKYRMIVKSXKXS

SEQ ID NO: 10758 - protein, 22 aa, Artificial Sequence
  Cyclic GFR-binding peptide
KLNAISVLYFDSSNNVILKKYR

SEQ ID NO: 10759 - protein, 28 aa, Artificial Sequence
  Cyclic GFR-binding peptide
  MOD_RES (28)..(28): Xaa is C or S
LSATSMLYYDENEKVVLRKHRDMVVEGX

SEQ ID NO: 10760 - protein, 33 aa, Artificial Sequence
  Cyclic GFR-binding peptide
  MOD_RES (32)..(32): Xaa is C or S
APTKLSPISVLYKDDSSNVILKYHYNMVVRSXG

SEQ ID NO: 10761 - protein, 26 aa, Artificial Sequence
  Cyclic GFR-binding peptide
QVQLSAISVLYLEIVRKKPIFLKNYQ

SEQ ID NO: 10762 - protein, 30 aa, Artificial Sequence
  Cyclic GFR-binding peptide
PTQVQLSAISVLYLEIVRKKPIFLKNYQTL

SEQ ID NO: 10763 - protein, 31 aa, Artificial Sequence
  Cyclic GFR-binding peptide
  MOD_RES (29)..(31): Xaa is C or S
QLSPISVLYKDDSSNVILKYHYNMVVRAXGX

SEQ ID NO: 10764 - protein, 32 aa, Artificial Sequence
  Cyclic GFR-binding peptide
  MOD_RES (5)..(6): Xaa is C or S
IPKAXXVPTELSATSMLYYDEYDKVVLRKHRE

SEQ ID NO: 10765 - protein, 37 aa, Artificial Sequence
  Cyclic GFR-binding peptide
  MOD_RES (5)..(6): Xaa is C or S
VPKAXXAPTKLSAISVLYLDSSNNVILKNYQNMVVKA

SEQ ID NO: 10766 - protein, 21 aa, Artificial Sequence
  Cyclic GFR-binding peptide
LNAISMLYFDEYDKVVLKKYR

SEQ ID NO: 10767 - protein, 27 aa, Artificial Sequence
  Cyclic GFR-binding peptide
  MOD_RES (1)..(2): Xaa is C or S
XXVSQDLSPISILYKIGKTPKILKYHY

SEQ ID NO: 10768 - protein, 36 aa, Artificial Sequence
  Cyclic GFR-binding peptide
  MOD_RES (5)..(6): Xaa is C or S
IPKAXXVPTELSATSMLYYDENEKVVLRKHRDMVVE

SEQ ID NO: 10769 - protein, 42 aa, Artificial Sequence
  Cyclic GFR-binding peptide
  MOD_RES (6)..(7)..(39)..(41): Xaa is C or S
TVPKPXXAPTQLSATSVLYYDDSSNVILRKHRNMVVRAXGXH

SEQ ID NO: 10770 - protein, 31 aa, Artificial Sequence
  Cyclic GFR-binding peptide
  MOD_RES (1)..(1): Xaa is C or S
XVPTKLNAISVLYFDDMGVPTLKKYREGMSV

SEQ ID NO: 10771 - protein, 35 aa, Artificial Sequence
  Cyclic GFR-binding peptide
  MOD_RES (5)..(6): Xaa is C or S
VPKPXXAPTQLSAISVLYLDDSSNVILKNYQNMVV

SEQ ID NO: 10772 - protein, 35 aa, Artificial Sequence
  Cyclic GFR-binding peptide
  MOD_RES (4)..(5): Xaa is C or S
PKPXXAPTQLSATSVLYYDDSSNVILRKHRNMVVR

SEQ ID NO: 10773 - protein, 37 aa, Artificial Sequence
  Cyclic GFR-binding peptide
  MOD_RES (2)..(3)..(35)..(37): Xaa is C or S
AXXVPTELSPISMLYKDEYDKVVLKYHYEMVVEGXGX

SEQ ID NO: 10774 - protein, 25 aa, Artificial Sequence
  Cyclic GFR-binding peptide
PTELSATSMLYYDEYDKVVLRKHRE

SEQ ID NO: 10775 - protein, 27 aa, Artificial Sequence
  Cyclic GFR-binding peptide
SAISILYLVGRTPKVLKNYQVGRTPKV

SEQ ID NO: 10776 - protein, 33 aa, Artificial Sequence
  Cyclic GFR-binding peptide
  MOD_RES (6)..(7): Xaa is C or S
KIPKAXXVPTELSATSMLYYDENEKVVLRKHRD

SEQ ID NO: 10777 - protein, 29 aa, Artificial Sequence
  Cyclic GFR-binding peptide
  MOD_RES (29)..(29): Xaa is C or S
ELSATSMLYYDEYDKVVLRKHREMVVEGX

SEQ ID NO: 10778 - protein, 34 aa, Artificial Sequence
  Cyclic GFR-binding peptide
  MOD_RES (3)..(4): Xaa is C or S
APXXVPQALSPISILYKVGRKPKVLKYHYMIVRS

SEQ ID NO: 10779 - protein, 33 aa, Artificial Sequence
  Cyclic GFR-binding peptide
  MOD_RES (1)..(2): Xaa is C or S
XXVPTKLSAISVLYLDDMGVPTLKNYQEGMSVA

SEQ ID NO: 10780 - protein, 30 aa, Artificial Sequence
  Cyclic GFR-binding peptide
  MOD_RES (4)..(5): Xaa is C or S
ASPXXVSQDLSAISILYLIGKTPKILKNYQ

SEQ ID NO: 10781 - protein, 37 aa, Artificial Sequence
  Cyclic GFR-binding peptide
  MOD_RES (6)..(7): Xaa is C or S
KVGKAXXVPTKLSAISVLYLDDMGVPTLKNYQEGMSV

SEQ ID NO: 10782 - protein, 34 aa, Artificial Sequence
  Cyclic GFR-binding peptide
PTQVQLSATSVLYYEIVRKKPIFLRKHRTLEDHL

SEQ ID NO: 10783 - protein, 30 aa, Artificial Sequence
  Cyclic GFR-binding peptide
PTQLSATSVLYYDDSSNVILRKHRNMVVRA

SEQ ID NO: 10784 - protein, 31 aa, Artificial Sequence
  Cyclic GFR-binding peptide
  MOD_RES (4)..(5): Xaa is C or S
AAPXXVPQALSPISILYKVGRKPKVLKYHYM

SEQ ID NO: 10785 - protein, 24 aa, Artificial Sequence
  Cyclic GFR-binding peptide
LNAISILYFVGRTPKVLKKYRMVV

SEQ ID NO: 10786 - protein, 32 aa, Artificial Sequence
  Cyclic GFR-binding peptide
  MOD_RES (2)..(2): Xaa is C or S
QXRPTQVQLNAISVLYFEIVRKKPIFLKKYRT

SEQ ID NO: 10787 - protein, 21 aa, Artificial Sequence
  Cyclic GFR-binding peptide
LSATSILYYVGRKPKVLRKHR

SEQ ID NO: 10788 - protein, 28 aa, Artificial Sequence
  Cyclic GFR-binding peptide
  MOD_RES (28)..(28): Xaa is C or S
LSAISVLYLDDSSNVILKNYQNMVVRAX

SEQ ID NO: 10789 - protein, 33 aa, Artificial Sequence
  Cyclic GFR-binding peptide
  MOD_RES (30)..(32): Xaa is C or S
SPISVLYKEIVRKKPIFLKYHYTLEDHLAXKXE

SEQ ID NO: 10790 - protein, 32 aa, Artificial Sequence
  Cyclic GFR-binding peptide
  MOD_RES (1)..(1): Xaa is C or S
XVPTKLSAISVLYLDDMGVPTLKNYQEGMSVA

SEQ ID NO: 10791 - protein, 29 aa, Artificial Sequence
  Cyclic GFR-binding peptide
PTELSATSMLYYDENEKVVLRKHRDMVVE

SEQ ID NO: 10792 - protein, 32 aa, Artificial Sequence
  Cyclic GFR-binding peptide
  MOD_RES (30)..(32): Xaa is C or S
TKLSATSVLYYDDSSNVILRKHRNMVVRSXGX

SEQ ID NO: 10793 - protein, 23 aa, Artificial Sequence
  Cyclic GFR-binding peptide
LSPISVLYKDDSSNVILKYHYNM

SEQ ID NO: 10794 - protein, 25 aa, Artificial Sequence
  Cyclic GFR-binding peptide
VPTELNAISMLYFDEYDKVVLKKYR

SEQ ID NO: 10795 - protein, 29 aa, Artificial Sequence
  Cyclic GFR-binding peptide
PQALSPISILYKVGRKPKVLKYHYMIVRS

SEQ ID NO: 10796 - protein, 34 aa, Artificial Sequence
  Cyclic GFR-binding peptide
  MOD_RES (1)..(2)..(34): Xaa is C or S
XXVPTELNAISMLYFDEYDKVVLKKYREMVVEGX

SEQ ID NO: 10797 - protein, 36 aa, Artificial Sequence
  Cyclic GFR-binding peptide
  MOD_RES (4)..(5)..(36): Xaa is C or S
ASPXXVPQDLSPISILYKVGRTPKVLKYHYMVVKSX

SEQ ID NO: 10798 - protein, 28 aa, Artificial Sequence
  Cyclic GFR-binding peptide
  MOD_RES (1)..(2): Xaa is C or S
XXVPTELSATSMLYYDENEKVVLRKHRD

SEQ ID NO: 10799 - protein, 25 aa, Artificial Sequence
  Cyclic GFR-binding peptide
PQDLSAISILYLVGRTPKVLKNYQM

SEQ ID NO: 10800 - protein, 25 aa, Artificial Sequence
  Cyclic GFR-binding peptide
LSPISMLYKDEYDKVVLKYHYEMVV

SEQ ID NO: 10801 - protein, 31 aa, Artificial Sequence
  Cyclic GFR-binding peptide
RPTQVQLSATSVLYYEIVRKKPIFLRKHRTL

SEQ ID NO: 10802 - protein, 37 aa, Artificial Sequence
  Cyclic GFR-binding peptide
  MOD_RES (4)..(5)..(36): Xaa is C or S
ASPXXVPQDLNAISILYFVGRTPKVLKKYRMVVKSXK

SEQ ID NO: 10803 - protein, 35 aa, Artificial Sequence
  Cyclic GFR-binding peptide
  MOD_RES (3)..(3): Xaa is C or S
VQXRPTQVQLNAISVLYFEIVRKKPIFLKKYRTLE

SEQ ID NO: 10804 - protein, 35 aa, Artificial Sequence
  Cyclic GFR-binding peptide
  MOD_RES (33)..(35): Xaa is C or S
VQLSATSVLYYEIVRKKPIFLRKHRTLEDHLAXKX

SEQ ID NO: 10805 - protein, 36 aa, Artificial Sequence
  Cyclic GFR-binding peptide
  MOD_RES (1)..(2)..(35): Xaa is C or S
XXVPTKLNAISVLYFDDMGVPTLKKYREGMSVAEXG

SEQ ID NO: 10806 - protein, 30 aa, Artificial Sequence
  Cyclic GFR-binding peptide
LSPISVLYKEIVRKKPIFLKYHYTLEDHLA

SEQ ID NO: 10807 - protein, 27 aa, Artificial Sequence
  Cyclic GFR-binding peptide
ELNAISMLYFDENEKVVLKKYRDMVVE

SEQ ID NO: 10808 - protein, 41 aa, Artificial Sequence
  Cyclic GFR-binding peptide
  MOD_RES (4)..(5)..(38)..(40): Xaa is C or S
GKAXXVPTKLSATSVLYYDDMGVPTLRKHREGMSVAEXGXR

SEQ ID NO: 10809 - protein, 31 aa, Artificial Sequence
  Cyclic GFR-binding peptide
  MOD_RES (30)..(30): Xaa is C or S
PQDLSATSILYYVGRTPKVLRKHRMVVKSXK

SEQ ID NO: 10810 - protein, 25 aa, Artificial Sequence
  Cyclic GFR-binding peptide
PTKLSAISVLYLDDSSNVILKNYQN

SEQ ID NO: 10811 - protein, 24 aa, Artificial Sequence
  Cyclic GFR-binding peptide
KLSAISVLYLDDMGVPTLKNYQEG

SEQ ID NO: 10812 - protein, 42 aa, Artificial Sequence
  Cyclic GFR-binding peptide
  MOD_RES (2)..(39)..(41): Xaa is C or S
QXRPTQVQLSAISVLYLEIVRKKPIFLKNYQTLEDHLAXKXE

SEQ ID NO: 10813 - protein, 27 aa, Artificial Sequence
  Cyclic GFR-binding peptide
  MOD_RES (26)..(26): Xaa is C or S
SAISILYLVGRKPKVLKNYQMIVRSXK

SEQ ID NO: 10814 - protein, 35 aa, Artificial Sequence
  Cyclic GFR-binding peptide
  MOD_RES (2)..(3)..(34): Xaa is C or S
PXXVPQDLSPISILYKVGRTPKVLKYHYMVVKSXK

SEQ ID NO: 10815 - protein, 31 aa, Artificial Sequence
  Cyclic GFR-binding peptide
  MOD_RES (2)..(2): Xaa is C or S
TXAPTKLSPISVLYKDDSSNVILKYHYNMVV

SEQ ID NO: 10816 - protein, 32 aa, Artificial Sequence
  Cyclic GFR-binding peptide
  MOD_RES (1)..(32): Xaa is C or S
XVSQDLNAISILYFIGKTPKILKKYRMIVKSX

SEQ ID NO: 10817 - protein, 24 aa, Artificial Sequence
  Cyclic GFR-binding peptide
NAISILYFIGKTPKILKKYRMIVK

SEQ ID NO: 10818 - protein, 36 aa, Artificial Sequence
  Cyclic GFR-binding peptide
  MOD_RES (2)..(3)..(35): Xaa is C or S
AXXVPTELSATSMLYYDENEKVVLRKHRDMVVEGXG

SEQ ID NO: 10819 - protein, 21 aa, Artificial Sequence
  Cyclic GFR-binding peptide
NAISILYFVGRTPKVLKKYRM

SEQ ID NO: 10820 - protein, 40 aa, Artificial Sequence
  Cyclic GFR-binding peptide
  MOD_RES (6)..(38)..(40): Xaa is C or S
VTKPTXAPTKLSAISVLYLDDSSNVILKNYQNMVVRSXGX

SEQ ID NO: 10821 - protein, 31 aa, Artificial Sequence
  Cyclic GFR-binding peptide
  MOD_RES (1)..(2): Xaa is C or S
XXVPQDLNAISILYFVGRTPKVLKKYRMVVK

SEQ ID NO: 10822 - protein, 23 aa, Artificial Sequence
  Cyclic GFR-binding peptide
LSATSILYYVGRTPKVLRKHRMV

SEQ ID NO: 10823 - protein, 25 aa, Artificial Sequence
  Cyclic GFR-binding peptide
SQDLSATSILYYIGKTPKILRKHRM

SEQ ID NO: 10824 - protein, 22 aa, Artificial Sequence
  Cyclic GFR-binding peptide
QLSPISVLYKDDSSNVILKYHY

SEQ ID NO: 10825 - protein, 31 aa, Artificial Sequence
  Cyclic GFR-binding peptide
  MOD_RES (28)..(30): Xaa is C or S
LSATSVLYYDDSSNVILRKHRNMVVRSXGXH

SEQ ID NO: 10826 - protein, 27 aa, Artificial Sequence
  Cyclic GFR-binding peptide
  MOD_RES (1)..(2): Xaa is C or S
XXAPTKLSAISVLYLDSSNNVILKNYQ

SEQ ID NO: 10827 - protein, 29 aa, Artificial Sequence
  Cyclic GFR-binding peptide
KLSAISVLYLDDMGVPTLKNYQEGMSVAE

SEQ ID NO: 10828 - protein, 37 aa, Artificial Sequence
  Cyclic GFR-binding peptide
  MOD_RES (4)..(5): Xaa is C or S
GKAXXVPTKLSATSVLYYDDMGVPTLRKHREGMSVAE

SEQ ID NO: 10829 - protein, 40 aa, Artificial Sequence
  Cyclic GFR-binding peptide
  MOD_RES (37)..(39): Xaa is C or S
RPTQVQLSAISVLYLEIVRKKPIFLKNYQTLEDHLAXKXE

SEQ ID NO: 10830 - protein, 39 aa, Artificial Sequence
  Cyclic GFR-binding peptide
  MOD_RES (3)..(4)..(36)..(38): Xaa is C or S
KAXXVPTELSATSMLYYDENEKVVLRKHRDMVVEGXGXR

SEQ ID NO: 10831 - protein, 39 aa, Artificial Sequence
  Cyclic GFR-binding peptide
  MOD_RES (6)..(7)..(39): Xaa is C or S
YVPKPXXAPTKLSATSVLYYDDSSNVILRKHRNMVVRSX

SEQ ID NO: 10832 - protein, 25 aa, Artificial Sequence
  Cyclic GFR-binding peptide
LSAISILYLIGKTPKILKNYQMIVK

SEQ ID NO: 10833 - protein, 38 aa, Artificial Sequence
  Cyclic GFR-binding peptide
  MOD_RES (35)..(37): Xaa is C or S
TQVQLSATSVLYYEIVRKKPIFLRKHRTLEDHLAXKXE

SEQ ID NO: 10834 - protein, 23 aa, Artificial Sequence
  Cyclic GFR-binding peptide
SPISILYKVGRKPKVLKYHYMIV

SEQ ID NO: 10835 - protein, 29 aa, Artificial Sequence
  Cyclic GFR-binding peptide
  MOD_RES (29)..(29): Xaa is C or S
KLSAISVLYLDDSSNVILKNYQNMVVRSX

SEQ ID NO: 10836 - protein, 23 aa, Artificial Sequence
  Cyclic GFR-binding peptide
TQLSPISVLYKDDSSNVILKYHY

SEQ ID NO: 10837 - protein, 30 aa, Artificial Sequence
  Cyclic GFR-binding peptide
  MOD_RES (30)..(30): Xaa is C or S
TELSPISMLYKDENEKVVLKYHYDMVVEGX

SEQ ID NO: 10838 - protein, 25 aa, Artificial Sequence
  Cyclic GFR-binding peptide
KLNAISVLYFDSSNNVILKKYRNMV

SEQ ID NO: 10839 - protein, 32 aa, Artificial Sequence
  Cyclic GFR-binding peptide
  MOD_RES (1)..(32): Xaa is C or S
XVPQDLSAISILYLVGRTPKVLKNYQMVVKSX

SEQ ID NO: 10840 - protein, 31 aa, Artificial Sequence
  Cyclic GFR-binding peptide
  MOD_RES (31)..(31): Xaa is C or S
PTKLSATSVLYYDDSSNVILRKHRNMVVRSX

SEQ ID NO: 10841 - protein, 37 aa, Artificial Sequence
  Cyclic GFR-binding peptide
  MOD_RES (5)..(6): Xaa is C or S
IPKAXXVPTELSATSMLYYDENEKVVLRKHRDMVVEG

SEQ ID NO: 10842 - protein, 33 aa, Artificial Sequence
  Cyclic GFR-binding peptide
  MOD_RES (3)..(4): Xaa is C or S
KAXXAPTKLNAISVLYFDSSNNVILKKYRNMVV

SEQ ID NO: 10843 - protein, 26 aa, Artificial Sequence
  Cyclic GFR-binding peptide
TKLSPISVLYKDDSSNVILKYHYNMV

SEQ ID NO: 10844 - protein, 33 aa, Artificial Sequence
  Cyclic GFR-binding peptide
  MOD_RES (30)..(32): Xaa is C or S
PQALSAISILYLVGRKPKVLKNYQMIVRSXKXS

SEQ ID NO: 10845 - protein, 24 aa, Artificial Sequence
  Cyclic GFR-binding peptide
LSPISVLYKDSSNNVILKYHYNMV

SEQ ID NO: 10846 - protein, 26 aa, Artificial Sequence
  Cyclic GFR-binding peptide
  MOD_RES (1)..(1): Xaa is C or S
XVSQDLSATSILYYIGKTPKILRKHR

SEQ ID NO: 10847 - protein, 39 aa, Artificial Sequence
  Cyclic GFR-binding peptide
  MOD_RES (3)..(4)..(37)..(39): Xaa is C or S
KAXXVPTKLSAISVLYLDDMGVPTLKNYQEGMSVAEXGX

SEQ ID NO: 10848 - protein, 34 aa, Artificial Sequence
  Cyclic GFR-binding peptide
  MOD_RES (5)..(6): Xaa is C or S
VPKPXXAPTKLSAISVLYLDDSSNVILKNYQNMV

SEQ ID NO: 10849 - protein, 31 aa, Artificial Sequence
  Cyclic GFR-binding peptide
  MOD_RES (28)..(30): Xaa is C or S
SAISVLYLDDMGVPTLKNYQEGMSVAEXGXR

SEQ ID NO: 10850 - protein, 34 aa, Artificial Sequence
  Cyclic GFR-binding peptide
RPTQVQLSATSVLYYEIVRKKPIFLRKHRTLEDH

SEQ ID NO: 10851 - protein, 35 aa, Artificial Sequence
  Cyclic GFR-binding peptide
  MOD_RES (5)..(6): Xaa is C or S
SASPXXVSQDLSATSILYYIGKTPKILRKHRMIVK

SEQ ID NO: 10852 - protein, 34 aa, Artificial Sequence
  Cyclic GFR-binding peptide
  MOD_RES (32)..(34): Xaa is C or S
VPTELSATSMLYYDEYDKVVLRKHREMVVEGXGX

SEQ ID NO: 10853 - protein, 34 aa, Artificial Sequence
  Cyclic GFR-binding peptide
  MOD_RES (6)..(7): Xaa is C or S
ASAAPXXVPQALNAISILYFVGRKPKVLKKYRMI

SEQ ID NO: 10854 - protein, 31 aa, Artificial Sequence
  Cyclic GFR-binding peptide
  MOD_RES (31)..(31): Xaa is C or S
VSQDLSAISILYLIGKTPKILKNYQMIVKSX

SEQ ID NO: 10855 - protein, 30 aa, Artificial Sequence
  Cyclic GFR-binding peptide
  MOD_RES (4)..(5): Xaa is C or S
ASPXXVPQDLSPISILYKVGRTPKVLKYHY

SEQ ID NO: 10856 - protein, 30 aa, Artificial Sequence
  Cyclic GFR-binding peptide
  MOD_RES (1)..(2): Xaa is C or S
XXVPTKLSAISVLYLDDMGVPTLKNYQEGM

SEQ ID NO: 10857 - protein, 36 aa, Artificial Sequence
  Cyclic GFR-binding peptide
  MOD_RES (2)..(3)..(35): Xaa is C or S
AXXAPTKLSAISVLYLDSSNNVILKNYQNMVVKAXG

SEQ ID NO: 10858 - protein, 39 aa, Artificial Sequence
  Cyclic GFR-binding peptide
  MOD_RES (6)..(7)..(39): Xaa is C or S
KIPKAXXVPTELSATSMLYYDENEKVVLRKHRDMVVEGX

SEQ ID NO: 10859 - protein, 30 aa, Artificial Sequence
  Cyclic GFR-binding peptide
  MOD_RES (3)..(4): Xaa is C or S
KAXXVPTELSATSMLYYDENEKVVLRKHRD

SEQ ID NO: 10860 - protein, 34 aa, Artificial Sequence
  Cyclic GFR-binding peptide
  MOD_RES (31)..(33): Xaa is C or S
VSQDLSAISILYLIGKTPKILKNYQMIVKSXKXS

SEQ ID NO: 10861 - protein, 34 aa, Artificial Sequence
  Cyclic GFR-binding peptide
  MOD_RES (5)..(6): Xaa is C or S
SASPXXVPQDLSPISILYKVGRTPKVLKYHYMVV

SEQ ID NO: 10862 - protein, 30 aa, Artificial Sequence
  Cyclic GFR-binding peptide
VPQALNAISILYFVGRKPKVLKKYRMIVRS

SEQ ID NO: 10863 - protein, 25 aa, Artificial Sequence
  Cyclic GFR-binding peptide
LSAISVLYLDDSSNVILKNYQNMVV

SEQ ID NO: 10864 - protein, 23 aa, Artificial Sequence
  Cyclic GFR-binding peptide
TKLNAISVLYFDDMGVPTLKKYR

SEQ ID NO: 10865 - protein, 38 aa, Artificial Sequence
  Cyclic GFR-binding peptide
  MOD_RES (5)..(6)..(37): Xaa is C or S
SASPXXVPQDLSAISILYLVGRTPKVLKNYQMVVKSXK

SEQ ID NO: 10866 - protein, 38 aa, Artificial Sequence
  Cyclic GFR-binding peptide
  MOD_RES (6)..(7): Xaa is C or S
TVPKPXXAPTQLSPISVLYKDDSSNVILKYHYNMVVRA

SEQ ID NO: 10867 - protein, 33 aa, Artificial Sequence
  Cyclic GFR-binding peptide
  MOD_RES (30)..(32): Xaa is C or S
TELNAISMLYFDENEKVVLKKYRDMVVEGXGXR

SEQ ID NO: 10868 - protein, 38 aa, Artificial Sequence
  Cyclic GFR-binding peptide
  MOD_RES (4)..(5)..(36)..(38): Xaa is C or S
ASPXXVSQDLSAISILYLIGKTPKILKNYQMIVKSXKX

SEQ ID NO: 10869 - protein, 31 aa, Artificial Sequence
  Cyclic GFR-binding peptide
APTKLSPISVLYKDDSSNVILKYHYNMVVRS

SEQ ID NO: 10870 - protein, 35 aa, Artificial Sequence
  Cyclic GFR-binding peptide
  MOD_RES (3)..(4)..(35): Xaa is C or S
APXXVPQALSAISILYLVGRKPKVLKNYQMIVRSX

SEQ ID NO: 10871 - protein, 28 aa, Artificial Sequence
  Cyclic GFR-binding peptide
  MOD_RES (26)..(28): Xaa is C or S
SPISILYKVGRTPKVLKYHYMVVKSXKX

SEQ ID NO: 10872 - protein, 21 aa, Artificial Sequence
  Cyclic GFR-binding peptide
LSATSMLYYDENEKVVLRKHR

SEQ ID NO: 10873 - protein, 31 aa, Artificial Sequence
  Cyclic GFR-binding peptide
  MOD_RES (5)..(6): Xaa is C or S
VGKAXXVPTKLNAISVLYFDDMGVPTLKKYR

SEQ ID NO: 10874 - protein, 40 aa, Artificial Sequence
  Cyclic GFR-binding peptide
  MOD_RES (4)..(5)..(37)..(39): Xaa is C or S
PKAXXVPTELSPISMLYKDENEKVVLKYHYDMVVEGXGXR

SEQ ID NO: 10875 - protein, 23 aa, Artificial Sequence
  Cyclic GFR-binding peptide
LSATSMLYYDENEKVVLRKHRDM

SEQ ID NO: 10876 - protein, 21 aa, Artificial Sequence
  Cyclic GFR-binding peptide
SAISVLYLDSSNNVILKNYQN

SEQ ID NO: 10877 - protein, 36 aa, Artificial Sequence
  Cyclic GFR-binding peptide
  MOD_RES (35)..(35): Xaa is C or S
TQVQLSAISVLYLEIVRKKPIFLKNYQTLEDHLAXK

SEQ ID NO: 10878 - protein, 38 aa, Artificial Sequence
  Cyclic GFR-binding peptide
  MOD_RES (2)..(3)..(35)..(37): Xaa is C or S
PXXAPTQLSPISVLYKDDSSNVILKYHYNMVVRAXGXH

SEQ ID NO: 10879 - protein, 34 aa, Artificial Sequence
  Cyclic GFR-binding peptide
  MOD_RES (1)..(1): Xaa is C or S
XRPTQVQLSAISVLYLEIVRKKPIFLKNYQTLED

SEQ ID NO: 10880 - protein, 34 aa, Artificial Sequence
  Cyclic GFR-binding peptide
  MOD_RES (1)..(33): Xaa is C or S
XAPTKLSATSVLYYDDSSNVILRKHRNMVVRSXG

SEQ ID NO: 10881 - protein, 27 aa, Artificial Sequence
  Cyclic GFR-binding peptide
SAISVLYLDDMGVPTLKNYQEGMSVAE

SEQ ID NO: 10882 - protein, 32 aa, Artificial Sequence
  Cyclic GFR-binding peptide
  MOD_RES (30)..(32): Xaa is C or S
TQLSATSVLYYDDSSNVILRKHRNMVVRAXGX

SEQ ID NO: 10883 - protein, 25 aa, Artificial Sequence
  Cyclic GFR-binding peptide
VPTELSPISMLYKDENEKVVLKYHY

SEQ ID NO: 10884 - protein, 28 aa, Artificial Sequence
  Cyclic GFR-binding peptide
  MOD_RES (1)..(1): Xaa is C or S
XVPQALSATSILYYVGRKPKVLRKHRMI

SEQ ID NO: 10885 - protein, 39 aa, Artificial Sequence
  Cyclic GFR-binding peptide
  MOD_RES (7)..(39): Xaa is C or S
HVTKPTXAPTKLSPISVLYKDDSSNVILKYHYNMVVRSX

SEQ ID NO: 10886 - protein, 39 aa, Artificial Sequence
  Cyclic GFR-binding peptide
  MOD_RES (3)..(4)..(36)..(38): Xaa is C or S
KAXXVPTELSPISMLYKDEYDKVVLKYHYEMVVEGXGXR

SEQ ID NO: 10887 - protein, 45 aa, Artificial Sequence
  Cyclic GFR-binding peptide
  MOD_RES (5)..(42)..(44): Xaa is C or S
RNVQXRPTQVQLSPISVLYKEIVRKKPIFLKYHYTLEDHLAXKXE

SEQ ID NO: 10888 - protein, 34 aa, Artificial Sequence
  Cyclic GFR-binding peptide
  MOD_RES (3)..(4): Xaa is C or S
APXXVPQALSAISILYLVGRKPKVLKNYQMIVRS

SEQ ID NO: 10889 - protein, 24 aa, Artificial Sequence
  Cyclic GFR-binding peptide
KLNAISVLYFDDMGVPTLKKYREG

SEQ ID NO: 10890 - protein, 25 aa, Artificial Sequence
  Cyclic GFR-binding peptide
SAISVLYLEIVRKKPIFLKNYQTLE

SEQ ID NO: 10891 - protein, 27 aa, Artificial Sequence
  Cyclic GFR-binding peptide
PQDLSAISILYLVGRTPKVLKNYQMVV

SEQ ID NO: 10892 - protein, 36 aa, Artificial Sequence
  Cyclic GFR-binding peptide
  MOD_RES (3)..(4)..(35): Xaa is C or S
APXXVPQALNAISILYFVGRKPKVLKKYRMIVRSXK

SEQ ID NO: 10893 - protein, 37 aa, Artificial Sequence
  Cyclic GFR-binding peptide
  MOD_RES (1)..(2)..(34)..(36): Xaa is C or S
XXAPTKLSATSVLYYDDSSNVILRKHRNMVVRSXGXH

SEQ ID NO: 10894 - protein, 27 aa, Artificial Sequence
  Cyclic GFR-binding peptide
  MOD_RES (1)..(1): Xaa is C or S
XVPTELSPISMLYKDEYDKVVLKYHYE

SEQ ID NO: 10895 - protein, 29 aa, Artificial Sequence
  Cyclic GFR-binding peptide
PQALSAISILYLVGRKPKVLKNYQMIVRS

SEQ ID NO: 10896 - protein, 30 aa, Artificial Sequence
  Cyclic GFR-binding peptide
  MOD_RES (30)..(30): Xaa is C or S
TELNAISMLYFDENEKVVLKKYRDMVVEGX

SEQ ID NO: 10897 - protein, 29 aa, Artificial Sequence
  Cyclic GFR-binding peptide
NAISVLYFEIVRKKPIFLKKYRTLEDHLA

SEQ ID NO: 10898 - protein, 36 aa, Artificial Sequence
  Cyclic GFR-binding peptide
  MOD_RES (1)..(2)..(34)..(36): Xaa is C or S
XXAPTKLSPISVLYKDDSSNVILKYHYNMVVRSXGX

SEQ ID NO: 10899 - protein, 22 aa, Artificial Sequence
  Cyclic GFR-binding peptide
DLSPISILYKIGKTPKILKYHY

SEQ ID NO: 10900 - protein, 35 aa, Artificial Sequence
  Cyclic GFR-binding peptide
  MOD_RES (2)..(3)..(34): Xaa is C or S
PXXVSQDLNAISILYFIGKTPKILKKYRMIVKSXK

SEQ ID NO: 10901 - protein, 29 aa, Artificial Sequence
  Cyclic GFR-binding peptide
VSQDLSATSILYYIGKTPKILRKHRMIVK

SEQ ID NO: 10902 - protein, 39 aa, Artificial Sequence
  Cyclic GFR-binding peptide
  MOD_RES (5)..(6)..(38): Xaa is C or S
VPKAXXAPTKLNAISVLYFDSSNNVILKKYRNMVVKAXG

SEQ ID NO: 10903 - protein, 33 aa, Artificial Sequence
  Cyclic GFR-binding peptide
  MOD_RES (33)..(33): Xaa is C or S
VQLSATSVLYYEIVRKKPIFLRKHRTLEDHLAX

SEQ ID NO: 10904 - protein, 28 aa, Artificial Sequence
  Cyclic GFR-binding peptide
LSPISVLYKEIVRKKPIFLKYHYTLEDH

SEQ ID NO: 10905 - protein, 35 aa, Artificial Sequence
  Cyclic GFR-binding peptide
  MOD_RES (6)..(7): Xaa is C or S
TVPKPXXAPTQLSAISVLYLDDSSNVILKNYQNMV

SEQ ID NO: 10906 - protein, 37 aa, Artificial Sequence
  Cyclic GFR-binding peptide
  MOD_RES (5)..(6): Xaa is C or S
VPKAXXAPTKLNAISVLYFDSSNNVILKKYRNMVVKA

SEQ ID NO: 10907 - protein, 39 aa, Artificial Sequence
  Cyclic GFR-binding peptide
  MOD_RES (6)..(7)..(38): Xaa is C or S
ASASPXXVSQDLSPISILYKIGKTPKILKYHYMIVKSXK

SEQ ID NO: 10908 - protein, 27 aa, Artificial Sequence
  Cyclic GFR-binding peptide
VPQALNAISILYFVGRKPKVLKKYRMI

SEQ ID NO: 10909 - protein, 32 aa, Artificial Sequence
  Cyclic GFR-binding peptide
TQVQLSAISVLYLEIVRKKPIFLKNYQTLEDH

SEQ ID NO: 10910 - protein, 28 aa, Artificial Sequence
  Cyclic GFR-binding peptide
  MOD_RES (26)..(28): Xaa is C or S
NAISILYFIGKTPKILKKYRMIVKSXKX

SEQ ID NO: 10911 - protein, 35 aa, Artificial Sequence
  Cyclic GFR-binding peptide
  MOD_RES (1)..(2)..(34): Xaa is C or S
XXAPTQLSPISVLYKDDSSNVILKYHYNMVVRAXG

SEQ ID NO: 10912 - protein, 31 aa, Artificial Sequence
  Cyclic GFR-binding peptide
  MOD_RES (31)..(31): Xaa is C or S
PTQLSPISVLYKDDSSNVILKYHYNMVVRAX

SEQ ID NO: 10913 - protein, 37 aa, Artificial Sequence
  Cyclic GFR-binding peptide
  MOD_RES (6)..(7): Xaa is C or S
AVPKAXXAPTKLNAISVLYFDSSNNVILKKYRNMVVK

SEQ ID NO: 10914 - protein, 36 aa, Artificial Sequence
  Cyclic GFR-binding peptide
  MOD_RES (5)..(5): Xaa is C or S
TKPTXAPTKLSAISVLYLDDSSNVILKNYQNMVVRS

SEQ ID NO: 10915 - protein, 37 aa, Artificial Sequence
  Cyclic GFR-binding peptide
  MOD_RES (2)..(3)..(34)..(36): Xaa is C or S
PXXVSQDLSATSILYYIGKTPKILRKHRMIVKSXKXS

SEQ ID NO: 10916 - protein, 34 aa, Artificial Sequence
  Cyclic GFR-binding peptide
  MOD_RES (2)..(3): Xaa is C or S
PXXAPTQLSAISVLYLDDSSNVILKNYQNMVVRA

SEQ ID NO: 10917 - protein, 32 aa, Artificial Sequence
  Cyclic GFR-binding peptide
  MOD_RES (29)..(31): Xaa is C or S
QDLSAISILYLVGRTPKVLKNYQMVVKSXKXS

SEQ ID NO: 10918 - protein, 25 aa, Artificial Sequence
  Cyclic GFR-binding peptide
TKLSATSVLYYDDMGVPTLRKHREG

SEQ ID NO: 10919 - protein, 34 aa, Artificial Sequence
  Cyclic GFR-binding peptide
  MOD_RES (5)..(6): Xaa is C or S
VGKAXXVPTKLSAISVLYLDDMGVPTLKNYQEGM

SEQ ID NO: 10920 - protein, 34 aa, Artificial Sequence
  Cyclic GFR-binding peptide
  MOD_RES (6)..(7): Xaa is C or S
ASAAPXXVPQALSAISILYLVGRKPKVLKNYQMI

SEQ ID NO: 10921 - protein, 25 aa, Artificial Sequence
  Cyclic GFR-binding peptide
QLSAISVLYLDDSSNVILKNYQNMV

SEQ ID NO: 10922 - protein, 40 aa, Artificial Sequence
  Cyclic GFR-binding peptide
  MOD_RES (6)..(7)..(39): Xaa is C or S
AVPKAXXAPTKLSPISVLYKDSSNNVILKYHYNMVVKAXG

SEQ ID NO: 10923 - protein, 32 aa, Artificial Sequence
  Cyclic GFR-binding peptide
  MOD_RES (1)..(2): Xaa is C or S
XXAPTKLNAISVLYFDSSNNVILKKYRNMVVK

SEQ ID NO: 10924 - protein, 26 aa, Artificial Sequence
  Cyclic GFR-binding peptide
QDLSATSILYYIGKTPKILRKHRMIV

SEQ ID NO: 10925 - protein, 30 aa, Artificial Sequence
  Cyclic GFR-binding peptide
  MOD_RES (1)..(2): Xaa is C or S
XXAPTKLNAISVLYFDSSNNVILKKYRNMV

SEQ ID NO: 10926 - protein, 28 aa, Artificial Sequence
  Cyclic GFR-binding peptide
VPTELSATSMLYYDEYDKVVLRKHREMV

SEQ ID NO: 10927 - protein, 27 aa, Artificial Sequence
  Cyclic GFR-binding peptide
  MOD_RES (1)..(1): Xaa is C or S
XVPTELSATSMLYYDENEKVVLRKHRD

SEQ ID NO: 10928 - protein, 28 aa, Artificial Sequence
  Cyclic GFR-binding peptide
VSQDLSATSILYYIGKTPKILRKHRMIV

SEQ ID NO: 10929 - protein, 29 aa, Artificial Sequence
  Cyclic GFR-binding peptide
  MOD_RES (27)..(29): Xaa is C or S
SATSVLYYDDSSNVILRKHRNMVVRSXGX

SEQ ID NO: 10930 - protein, 37 aa, Artificial Sequence
  Cyclic GFR-binding peptide
  MOD_RES (2)..(2): Xaa is C or S
QXRPTQVQLSPISVLYKEIVRKKPIFLKYHYTLEDHL

SEQ ID NO: 10931 - protein, 41 aa, Artificial Sequence
  Cyclic GFR-binding peptide
  MOD_RES (6)..(7)..(38)..(40): Xaa is C or S
ASAAPXXVPQALNAISILYFVGRKPKVLKKYRMIVRSXKXS

SEQ ID NO: 10932 - protein, 33 aa, Artificial Sequence
  Cyclic GFR-binding peptide
  MOD_RES (5)..(6): Xaa is C or S
VGKAXXVPTKLNAISVLYFDDMGVPTLKKYREG

SEQ ID NO: 10933 - protein, 35 aa, Artificial Sequence
  Cyclic GFR-binding peptide
  MOD_RES (4)..(5): Xaa is C or S
ASPXXVSQDLSAISILYLIGKTPKILKNYQMIVKS

SEQ ID NO: 10934 - protein, 35 aa, Artificial Sequence
  Cyclic GFR-binding peptide
  MOD_RES (1)..(2)..(34): Xaa is C or S
XXVPTELNAISMLYFDEYDKVVLKKYREMVVEGXG

SEQ ID NO: 10935 - protein, 36 aa, Artificial Sequence
  Cyclic GFR-binding peptide
  MOD_RES (1)..(33)..(35): Xaa is C or S
XAPTKLNAISVLYFDSSNNVILKKYRNMVVKAXGXH

SEQ ID NO: 10936 - protein, 30 aa, Artificial Sequence
  Cyclic GFR-binding peptide
  MOD_RES (2)..(3): Xaa is C or S
AXXVPTELNAISMLYFDEYDKVVLKKYREM

SEQ ID NO: 10937 - protein, 28 aa, Artificial Sequence
  Cyclic GFR-binding peptide
  MOD_RES (2)..(3): Xaa is C or S
AXXAPTKLSAISVLYLDSSNNVILKNYQ

SEQ ID NO: 10938 - protein, 30 aa, Artificial Sequence
  Cyclic GFR-binding peptide
QVQLSAISVLYLEIVRKKPIFLKNYQTLED

SEQ ID NO: 10939 - protein, 29 aa, Artificial Sequence
  Cyclic GFR-binding peptide
  MOD_RES (1)..(1): Xaa is C or S
XAPTQLSATSVLYYDDSSNVILRKHRNMV

SEQ ID NO: 10940 - protein, 30 aa, Artificial Sequence
  Cyclic GFR-binding peptide
  MOD_RES (4)..(5): Xaa is C or S
PKPXXAPTKLSPISVLYKDDSSNVILKYHY

SEQ ID NO: 10941 - protein, 26 aa, Artificial Sequence
  Cyclic GFR-binding peptide
PTKLSPISVLYKDDSSNVILKYHYNM

SEQ ID NO: 10942 - protein, 32 aa, Artificial Sequence
  Cyclic GFR-binding peptide
  MOD_RES (30)..(32): Xaa is C or S
SATSVLYYEIVRKKPIFLRKHRTLEDHLAXKX

SEQ ID NO: 10943 - protein, 23 aa, Artificial Sequence
  Cyclic GFR-binding peptide
DLNAISILYFVGRTPKVLKKYRM

SEQ ID NO: 10944 - protein, 26 aa, Artificial Sequence
  Cyclic GFR-binding peptide
NAISMLYFDENEKVVLKKYRDMVVEG

SEQ ID NO: 10945 - protein, 29 aa, Artificial Sequence
  Cyclic GFR-binding peptide
  MOD_RES (1)..(1): Xaa is C or S
XVPTELNAISMLYFDEYDKVVLKKYREMV

SEQ ID NO: 10946 - protein, 29 aa, Artificial Sequence
  Cyclic GFR-binding peptide
  MOD_RES (29)..(29): Xaa is C or S
QALNAISILYFVGRKPKVLKKYRMIVRSX

SEQ ID NO: 10947 - protein, 23 aa, Artificial Sequence
  Cyclic GFR-binding peptide
LNAISILYFVGRKPKVLKKYRMI

SEQ ID NO: 10948 - protein, 38 aa, Artificial Sequence
  Cyclic GFR-binding peptide
  MOD_RES (3)..(4)..(36)..(38): Xaa is C or S
KAXXAPTKLSAISVLYLDSSNNVILKNYQNMVVKAXGX

SEQ ID NO: 10949 - protein, 34 aa, Artificial Sequence
  Cyclic GFR-binding peptide
  MOD_RES (31)..(33): Xaa is C or S
PTELSATSMLYYDENEKVVLRKHRDMVVEGXGXR

SEQ ID NO: 10950 - protein, 30 aa, Artificial Sequence
  Cyclic GFR-binding peptide
RPTQVQLSAISVLYLEIVRKKPIFLKNYQT

SEQ ID NO: 10951 - protein, 31 aa, Artificial Sequence
  Cyclic GFR-binding peptide
  MOD_RES (6)..(6): Xaa is C or S
VTKPTXAPTKLSATSVLYYDDSSNVILRKHR

SEQ ID NO: 10952 - protein, 35 aa, Artificial Sequence
  Cyclic GFR-binding peptide
  MOD_RES (5)..(6): Xaa is C or S
SAAPXXVPQALSPISILYKVGRKPKVLKYHYMIVR

SEQ ID NO: 10953 - protein, 30 aa, Artificial Sequence
  Cyclic GFR-binding peptide
  MOD_RES (1)..(1): Xaa is C or S
XVPQALSPISILYKVGRKPKVLKYHYMIVR

SEQ ID NO: 10954 - protein, 37 aa, Artificial Sequence
  Cyclic GFR-binding peptide
  MOD_RES (4)..(5)..(36): Xaa is C or S
ASPXXVSQDLSATSILYYIGKTPKILRKHRMIVKSXK

SEQ ID NO: 10955 - protein, 33 aa, Artificial Sequence
  Cyclic GFR-binding peptide
  MOD_RES (1)..(2)..(33): Xaa is C or S
XXVSQDLSATSILYYIGKTPKILRKHRMIVKSX

SEQ ID NO: 10956 - protein, 35 aa, Artificial Sequence
  Cyclic GFR-binding peptide
  MOD_RES (5)..(6): Xaa is C or S
IPKAXXVPTELSATSMLYYDENEKVVLRKHRDMVV

SEQ ID NO: 10957 - protein, 31 aa, Artificial Sequence
  Cyclic GFR-binding peptide
VPTELSPISMLYKDENEKVVLKYHYDMVVEG

SEQ ID NO: 10958 - protein, 31 aa, Artificial Sequence
  Cyclic GFR-binding peptide
QLNAISVLYFEIVRKKPIFLKKYRTLEDHLA

SEQ ID NO: 10959 - protein, 26 aa, Artificial Sequence
  Cyclic GFR-binding peptide
LSPISMLYKDEYDKVVLKYHYEMVVE

SEQ ID NO: 10960 - protein, 32 aa, Artificial Sequence
  Cyclic GFR-binding peptide
  MOD_RES (31)..(31): Xaa is C or S
VPQDLSAISILYLVGRTPKVLKNYQMVVKSXK

SEQ ID NO: 10961 - protein, 36 aa, Artificial Sequence
  Cyclic GFR-binding peptide
  MOD_RES (3)..(4)..(35): Xaa is C or S
APXXVPQALSPISILYKVGRKPKVLKYHYMIVRSXK

SEQ ID NO: 10962 - protein, 42 aa, Artificial Sequence
  Cyclic GFR-binding peptide
  MOD_RES (2)..(39)..(41): Xaa is C or S
QXRPTQVQLNAISVLYFEIVRKKPIFLKKYRTLEDHLAXKXE

SEQ ID NO: 10963 - protein, 39 aa, Artificial Sequence
  Cyclic GFR-binding peptide
  MOD_RES (4)..(5)..(36)..(38): Xaa is C or S
ASPXXVPQDLSATSILYYVGRTPKVLRKHRMVVKSXKXS

SEQ ID NO: 10964 - protein, 30 aa, Artificial Sequence
  Cyclic GFR-binding peptide
  MOD_RES (30)..(30): Xaa is C or S
KLSAISVLYLDDMGVPTLKNYQEGMSVAEX

SEQ ID NO: 10965 - protein, 28 aa, Artificial Sequence
  Cyclic GFR-binding peptide
  MOD_RES (26)..(28): Xaa is C or S
SATSILYYIGKTPKILRKHRMIVKSXKX

SEQ ID NO: 10966 - protein, 28 aa, Artificial Sequence
  Cyclic GFR-binding peptide
  MOD_RES (26)..(28): Xaa is C or S
SPISILYKIGKTPKILKYHYMIVKSXKX

SEQ ID NO: 10967 - protein, 30 aa, Artificial Sequence
  Cyclic GFR-binding peptide
VPTELSPISMLYKDENEKVVLKYHYDMVVE

SEQ ID NO: 10968 - protein, 29 aa, Artificial Sequence
  Cyclic GFR-binding peptide
  MOD_RES (3)..(4): Xaa is C or S
KAXXVPTELNAISMLYFDEYDKVVLKKYR

SEQ ID NO: 10969 - protein, 38 aa, Artificial Sequence
  Cyclic GFR-binding peptide
  MOD_RES (6)..(7): Xaa is C or S
SIPKAXXVPTELNAISMLYFDEYDKVVLKKYREMVVEG

SEQ ID NO: 10970 - protein, 22 aa, Artificial Sequence
  Cyclic GFR-binding peptide
SPISVLYKEIVRKKPIFLKYHY

SEQ ID NO: 10971 - protein, 40 aa, Artificial Sequence
  Cyclic GFR-binding peptide
  MOD_RES (5)..(6)..(37)..(39): Xaa is C or S
SASPXXVSQDLNAISILYFIGKTPKILKKYRMIVKSXKXS

SEQ ID NO: 10972 - protein, 37 aa, Artificial Sequence
  Cyclic GFR-binding peptide
  MOD_RES (4)..(36): Xaa is C or S
KPTXAPTKLSAISVLYLDDSSNVILKNYQNMVVRSXG

SEQ ID NO: 10973 - protein, 41 aa, Artificial Sequence
  Cyclic GFR-binding peptide
  MOD_RES (3)..(40): Xaa is C or S
VQXRPTQVQLSPISVLYKEIVRKKPIFLKYHYTLEDHLAXK

SEQ ID NO: 10974 - protein, 28 aa, Artificial Sequence
  Cyclic GFR-binding peptide
  MOD_RES (27)..(27): Xaa is C or S
LNAISILYFVGRKPKVLKKYRMIVRSXK

SEQ ID NO: 10975 - protein, 26 aa, Artificial Sequence
  Cyclic GFR-binding peptide
PTELSATSMLYYDENEKVVLRKHRDM

SEQ ID NO: 10976 - protein, 27 aa, Artificial Sequence
  Cyclic GFR-binding peptide
  MOD_RES (27)..(27): Xaa is C or S
SPISMLYKDENEKVVLKYHYDMVVEGX

SEQ ID NO: 10977 - protein, 26 aa, Artificial Sequence
  Cyclic GFR-binding peptide
QLSPISVLYKEIVRKKPIFLKYHYTL

SEQ ID NO: 10978 - protein, 30 aa, Artificial Sequence
  Cyclic GFR-binding peptide
  MOD_RES (27)..(29): Xaa is C or S
SPISVLYKDDSSNVILKYHYNMVVRAXGXH

SEQ ID NO: 10979 - protein, 39 aa, Artificial Sequence
  Cyclic GFR-binding peptide
  MOD_RES (2)..(39): Xaa is C or S
QXRPTQVQLSAISVLYLEIVRKKPIFLKNYQTLEDHLAX

SEQ ID NO: 10980 - protein, 24 aa, Artificial Sequence
  Cyclic GFR-binding peptide
PTELNAISMLYFDENEKVVLKKYR

SEQ ID NO: 10981 - protein, 33 aa, Artificial Sequence
  Cyclic GFR-binding peptide
  MOD_RES (3)..(3): Xaa is C or S
PTXAPTKLSATSVLYYDDSSNVILRKHRNMVVR

SEQ ID NO: 10982 - protein, 29 aa, Artificial Sequence
  Cyclic GFR-binding peptide
VPQALNAISILYFVGRKPKVLKKYRMIVR

SEQ ID NO: 10983 - protein, 28 aa, Artificial Sequence
  Cyclic GFR-binding peptide
  MOD_RES (26)..(28): Xaa is C or S
SATSILYYVGRTPKVLRKHRMVVKSXKX

SEQ ID NO: 10984 - protein, 34 aa, Artificial Sequence
  Cyclic GFR-binding peptide
  MOD_RES (1)..(33): Xaa is C or S
XVPTELSPISMLYKDENEKVVLKYHYDMVVEGXG

SEQ ID NO: 10985 - protein, 32 aa, Artificial Sequence
  Cyclic GFR-binding peptide
  MOD_RES (6)..(7): Xaa is C or S
YVPKPXXAPTKLSATSVLYYDDSSNVILRKHR

SEQ ID NO: 10986 - protein, 39 aa, Artificial Sequence
  Cyclic GFR-binding peptide
  MOD_RES (6)..(7)..(38): Xaa is C or S
ASASPXXVSQDLNAISILYFIGKTPKILKKYRMIVKSXK

SEQ ID NO: 10987 - protein, 37 aa, Artificial Sequence
  Cyclic GFR-binding peptide
  MOD_RES (1)..(2)..(35)..(37): Xaa is C or S
XXVPTKLNAISVLYFDDMGVPTLKKYREGMSVAEXGX

SEQ ID NO: 10988 - protein, 26 aa, Artificial Sequence
  Cyclic GFR-binding peptide
  MOD_RES (1)..(1): Xaa is C or S
XVPTELNAISMLYFDENEKVVLKKYR

SEQ ID NO: 10989 - protein, 32 aa, Artificial Sequence
  Cyclic GFR-binding peptide
  MOD_RES (29)..(31): Xaa is C or S
KLSPISVLYKDSSNNVILKYHYNMVVKAXGXH

SEQ ID NO: 10990 - protein, 27 aa, Artificial Sequence
  Cyclic GFR-binding peptide
PTELNAISMLYFDEYDKVVLKKYREMV

SEQ ID NO: 10991 - protein, 35 aa, Artificial Sequence
  Cyclic GFR-binding peptide
  MOD_RES (6)..(7): Xaa is C or S
ASAAPXXVPQALSATSILYYVGRKPKVLRKHRMIV

SEQ ID NO: 10992 - protein, 34 aa, Artificial Sequence
  Cyclic GFR-binding peptide
  MOD_RES (6)..(7): Xaa is C or S
KIPKAXXVPTELNAISMLYFDENEKVVLKKYRDM

SEQ ID NO: 10993 - protein, 32 aa, Artificial Sequence
  Cyclic GFR-binding peptide
  MOD_RES (5)..(6): Xaa is C or S
IPKAXXVPTELSPISMLYKDENEKVVLKYHYD

SEQ ID NO: 10994 - protein, 40 aa, Artificial Sequence
  Cyclic GFR-binding peptide
  MOD_RES (6)..(7)..(40): Xaa is C or S
KVGKAXXVPTKLNAISVLYFDDMGVPTLKKYREGMSVAEX

SEQ ID NO: 10995 - protein, 29 aa, Artificial Sequence
  Cyclic GFR-binding peptide
  MOD_RES (1)..(2): Xaa is C or S
XXVPQALSATSILYYVGRKPKVLRKHRMI

SEQ ID NO: 10996 - protein, 40 aa, Artificial Sequence
  Cyclic GFR-binding peptide
  MOD_RES (3)..(40): Xaa is C or S
VQXRPTQVQLNAISVLYFEIVRKKPIFLKKYRTLEDHLAX

SEQ ID NO: 10997 - protein, 32 aa, Artificial Sequence
  Cyclic GFR-binding peptide
  MOD_RES (1)..(1): Xaa is C or S
XAPTKLNAISVLYFDSSNNVILKKYRNMVVKA

SEQ ID NO: 10998 - protein, 25 aa, Artificial Sequence
  Cyclic GFR-binding peptide
KLSAISVLYLDDMGVPTLKNYQEGM

SEQ ID NO: 10999 - protein, 30 aa, Artificial Sequence
  Cyclic GFR-binding peptide
  MOD_RES (3)..(4): Xaa is C or S
KAXXVPTELSPISMLYKDEYDKVVLKYHYE

SEQ ID NO: 11000 - protein, 38 aa, Artificial Sequence
  Cyclic GFR-binding peptide
  MOD_RES (2)..(2): Xaa is C or S
QXRPTQVQLSPISVLYKEIVRKKPIFLKYHYTLEDHLA

SEQ ID NO: 11001 - protein, 28 aa, Artificial Sequence
  Cyclic GFR-binding peptide
PTQVQLSPISVLYKEIVRKKPIFLKYHY

SEQ ID NO: 11002 - protein, 35 aa, Artificial Sequence
  Cyclic GFR-binding peptide
  MOD_RES (7)..(7): Xaa is C or S
HVTKPTXAPTKLSPISVLYKDDSSNVILKYHYNMV

SEQ ID NO: 11003 - protein, 34 aa, Artificial Sequence
  Cyclic GFR-binding peptide
  MOD_RES (1)..(32)..(34): Xaa is C or S
XVPQALNAISILYFVGRKPKVLKKYRMIVRSXKX

SEQ ID NO: 11004 - protein, 40 aa, Artificial Sequence
  Cyclic GFR-binding peptide
  MOD_RES (5)..(5): Xaa is C or S
RNVQXRPTQVQLNAISVLYFEIVRKKPIFLKKYRTLEDHL

SEQ ID NO: 11005 - protein, 32 aa, Artificial Sequence
  Cyclic GFR-binding peptide
  MOD_RES (2)..(2): Xaa is C or S
TXAPTKLSATSVLYYDDSSNVILRKHRNMVVR

SEQ ID NO: 11006 - protein, 21 aa, Artificial Sequence
  Cyclic GFR-binding peptide
SATSVLYYDDMGVPTLRKHRE

SEQ ID NO: 11007 - protein, 27 aa, Artificial Sequence
  Cyclic GFR-binding peptide
  MOD_RES (1)..(1): Xaa is C or S
XVPQDLSPISILYKVGRTPKVLKYHYM

SEQ ID NO: 11008 - protein, 36 aa, Artificial Sequence
  Cyclic GFR-binding peptide
  MOD_RES (1)..(33)..(35): Xaa is C or S
XAPTKLSPISVLYKDSSNNVILKYHYNMVVKAXGXH

SEQ ID NO: 11009 - protein, 29 aa, Artificial Sequence
  Cyclic GFR-binding peptide
  MOD_RES (1)..(1): Xaa is C or S
XVSQDLSATSILYYIGKTPKILRKHRMIV

SEQ ID NO: 11010 - protein, 34 aa, Artificial Sequence
  Cyclic GFR-binding peptide
  MOD_RES (2)..(2): Xaa is C or S
QXRPTQVQLSATSVLYYEIVRKKPIFLRKHRTLE

SEQ ID NO: 11011 - protein, 37 aa, Artificial Sequence
  Cyclic GFR-binding peptide
  MOD_RES (3)..(4)..(36): Xaa is C or S
KAXXVPTELSATSMLYYDEYDKVVLRKHREMVVEGXG

SEQ ID NO: 11012 - protein, 36 aa, Artificial Sequence
  Cyclic GFR-binding peptide
  MOD_RES (4)..(5)..(36): Xaa is C or S
ASPXXVPQDLSATSILYYVGRTPKVLRKHRMVVKSX

SEQ ID NO: 11013 - protein, 29 aa, Artificial Sequence
  Cyclic GFR-binding peptide
  MOD_RES (28)..(28): Xaa is C or S
ALNAISILYFVGRKPKVLKKYRMIVRSXK

SEQ ID NO: 11014 - protein, 25 aa, Artificial Sequence
  Cyclic GFR-binding peptide
KLSPISVLYKDDSSNVILKYHYNMV

SEQ ID NO: 11015 - protein, 26 aa, Artificial Sequence
  Cyclic GFR-binding peptide
VPQDLNAISILYFVGRTPKVLKKYRM

SEQ ID NO: 11016 - protein, 32 aa, Artificial Sequence
  Cyclic GFR-binding peptide
  MOD_RES (2)..(3): Xaa is C or S
PXXVPQALSATSILYYVGRKPKVLRKHRMIVR

SEQ ID NO: 11017 - protein, 33 aa, Artificial Sequence
  Cyclic GFR-binding peptide
  MOD_RES (5)..(6): Xaa is C or S
SASPXXVSQDLSATSILYYIGKTPKILRKHRMI

SEQ ID NO: 11018 - protein, 22 aa, Artificial Sequence
  Cyclic GFR-binding peptide
KLNAISVLYFDDMGVPTLKKYR

SEQ ID NO: 11019 - protein, 35 aa, Artificial Sequence
  Cyclic GFR-binding peptide
  MOD_RES (34)..(34): Xaa is C or S
QVQLNAISVLYFEIVRKKPIFLKKYRTLEDHLAXK

SEQ ID NO: 11020 - protein, 31 aa, Artificial Sequence
  Cyclic GFR-binding peptide
  MOD_RES (5)..(6): Xaa is C or S
SASPXXVSQDLNAISILYFIGKTPKILKKYR

SEQ ID NO: 11021 - protein, 31 aa, Artificial Sequence
  Cyclic GFR-binding peptide
  MOD_RES (28)..(30): Xaa is C or S
DLSATSILYYIGKTPKILRKHRMIVKSXKXS

SEQ ID NO: 11022 - protein, 23 aa, Artificial Sequence
  Cyclic GFR-binding peptide
TKLSATSVLYYDDSSNVILRKHR

SEQ ID NO: 11023 - protein, 21 aa, Artificial Sequence
  Cyclic GFR-binding peptide
LNAISILYFVGRTPKVLKKYR

SEQ ID NO: 11024 - protein, 42 aa, Artificial Sequence
  Cyclic GFR-binding peptide
  MOD_RES (5)..(6)..(39)..(41): Xaa is C or S
VGKAXXVPTKLSATSVLYYDDMGVPTLRKHREGMSVAEXGXR

SEQ ID NO: 11025 - protein, 28 aa, Artificial Sequence
  Cyclic GFR-binding peptide
  MOD_RES (27)..(27): Xaa is C or S
NAISVLYFDSSNNVILKKYRNMVVKAXG

SEQ ID NO: 11026 - protein, 40 aa, Artificial Sequence
  Cyclic GFR-binding peptide
  MOD_RES (2)..(39): Xaa is C or S
QXRPTQVQLSAISVLYLEIVRKKPIFLKNYQTLEDHLAXK

SEQ ID NO: 11027 - protein, 32 aa, Artificial Sequence
  Cyclic GFR-binding peptide
  MOD_RES (30)..(32): Xaa is C or S
SQDLSATSILYYIGKTPKILRKHRMIVKSXKX

SEQ ID NO: 11028 - protein, 38 aa, Artificial Sequence
  Cyclic GFR-binding peptide
  MOD_RES (3)..(3): Xaa is C or S
VQXRPTQVQLNAISVLYFEIVRKKPIFLKKYRTLEDHL

SEQ ID NO: 11029 - protein, 38 aa, Artificial Sequence
  Cyclic GFR-binding peptide
  MOD_RES (4)..(5)..(37): Xaa is C or S
PKAXXVPTELNAISMLYFDENEKVVLKKYRDMVVEGXG

SEQ ID NO: 11030 - protein, 28 aa, Artificial Sequence
  Cyclic GFR-binding peptide
  MOD_RES (2)..(3): Xaa is C or S
PXXVSQDLNAISILYFIGKTPKILKKYR

SEQ ID NO: 11031 - protein, 34 aa, Artificial Sequence
  Cyclic GFR-binding peptide
  MOD_RES (3)..(4): Xaa is C or S
KAXXAPTKLNAISVLYFDSSNNVILKKYRNMVVK

SEQ ID NO: 11032 - protein, 30 aa, Artificial Sequence
  Cyclic GFR-binding peptide
  MOD_RES (4)..(4): Xaa is C or S
KPTXAPTKLSAISVLYLDDSSNVILKNYQN

SEQ ID NO: 11033 - protein, 29 aa, Artificial Sequence
  Cyclic GFR-binding peptide
  MOD_RES (28)..(28): Xaa is C or S
ALSPISILYKVGRKPKVLKYHYMIVRSXK

SEQ ID NO: 11034 - protein, 26 aa, Artificial Sequence
  Cyclic GFR-binding peptide
LNAISMLYFDEYDKVVLKKYREMVVE

SEQ ID NO: 11035 - protein, 34 aa, Artificial Sequence
  Cyclic GFR-binding peptide
  MOD_RES (1)..(1): Xaa is C or S
XRPTQVQLNAISVLYFEIVRKKPIFLKKYRTLED

SEQ ID NO: 11036 - protein, 23 aa, Artificial Sequence
  Cyclic GFR-binding peptide
QDLSPISILYKVGRTPKVLKYHY

SEQ ID NO: 11037 - protein, 38 aa, Artificial Sequence
  Cyclic GFR-binding peptide
  MOD_RES (6)..(7): Xaa is C or S
AVPKAXXAPTKLSPISVLYKDSSNNVILKYHYNMVVKA

SEQ ID NO: 11038 - protein, 39 aa, Artificial Sequence
  Cyclic GFR-binding peptide
  MOD_RES (5)..(6)..(39): Xaa is C or S
VGKAXXVPTKLNAISVLYFDDMGVPTLKKYREGMSVAEX

SEQ ID NO: 11039 - protein, 32 aa, Artificial Sequence
  Cyclic GFR-binding peptide
  MOD_RES (31)..(31): Xaa is C or S
VSQDLSPISILYKIGKTPKILKYHYMIVKSXK

SEQ ID NO: 11040 - protein, 31 aa, Artificial Sequence
  Cyclic GFR-binding peptide
  MOD_RES (29)..(31): Xaa is C or S
QALSATSILYYVGRKPKVLRKHRMIVRSXKX

SEQ ID NO: 11041 - protein, 35 aa, Artificial Sequence
  Cyclic GFR-binding peptide
  MOD_RES (1)..(2)..(34): Xaa is C or S
XXAPTKLSAISVLYLDDSSNVILKNYQNMVVRSXG

SEQ ID NO: 11042 - protein, 20 aa, Artificial Sequence
  Cyclic GFR-binding peptide
SAISILYLVGRTPKVLKNYQ

SEQ ID NO: 11043 - protein, 31 aa, Artificial Sequence
  Cyclic GFR-binding peptide
  MOD_RES (1)..(1): Xaa is C or S
XVPTKLSATSVLYYDDMGVPTLRKHREGMSV

SEQ ID NO: 11044 - protein, 31 aa, Artificial Sequence
  Cyclic GFR-binding peptide
  MOD_RES (29)..(31): Xaa is C or S
KLSAISVLYLDSSNNVILKNYQNMVVKAXGX

SEQ ID NO: 11045 - protein, 34 aa, Artificial Sequence
  Cyclic GFR-binding peptide
  MOD_RES (32)..(34): Xaa is C or S
VPTELSATSMLYYDENEKVVLRKHRDMVVEGXGX

SEQ ID NO: 11046 - protein, 29 aa, Artificial Sequence
  Cyclic GFR-binding peptide
  MOD_RES (3)..(4): Xaa is C or S
KPXXAPTKLSATSVLYYDDSSNVILRKHR

SEQ ID NO: 11047 - protein, 30 aa, Artificial Sequence
  Cyclic GFR-binding peptide
VPQALSPISILYKVGRKPKVLKYHYMIVRS

SEQ ID NO: 11048 - protein, 29 aa, Artificial Sequence
  Cyclic GFR-binding peptide
  MOD_RES (27)..(29): Xaa is C or S
NAISMLYFDEYDKVVLKKYREMVVEGXGX

SEQ ID NO: 11049 - protein, 28 aa, Artificial Sequence
  Cyclic GFR-binding peptide
  MOD_RES (1)..(2): Xaa is C or S
XXVPQDLSPISILYKVGRTPKVLKYHYM

SEQ ID NO: 11050 - protein, 37 aa, Artificial Sequence
  Cyclic GFR-binding peptide
  MOD_RES (2)..(3)..(35)..(37): Xaa is C or S
AXXVPTELSPISMLYKDENEKVVLKYHYDMVVEGXGX

SEQ ID NO: 11051 - protein, 28 aa, Artificial Sequence
  Cyclic GFR-binding peptide
  MOD_RES (2)..(3): Xaa is C or S
PXXVPQDLSATSILYYVGRTPKVLRKHR

SEQ ID NO: 11052 - protein, 36 aa, Artificial Sequence
  Cyclic GFR-binding peptide
  MOD_RES (6)..(6): Xaa is C or S
VTKPTXAPTKLSAISVLYLDDSSNVILKNYQNMVVR

SEQ ID NO: 11053 - protein, 32 aa, Artificial Sequence
  Cyclic GFR-binding peptide
  MOD_RES (30)..(32): Xaa is C or S
SQDLSPISILYKIGKTPKILKYHYMIVKSXKX

SEQ ID NO: 11054 - protein, 28 aa, Artificial Sequence
  Cyclic GFR-binding peptide
  MOD_RES (28)..(28): Xaa is C or S
NAISVLYFDDMGVPTLKKYREGMSVAEX

SEQ ID NO: 11055 - protein, 32 aa, Artificial Sequence
  Cyclic GFR-binding peptide
QVQLSATSVLYYEIVRKKPIFLRKHRTLEDHL

SEQ ID NO: 11056 - protein, 35 aa, Artificial Sequence
  Cyclic GFR-binding peptide
  MOD_RES (5)..(6): Xaa is C or S
VPKAXXAPTKLSAISVLYLDSSNNVILKNYQNMVV

SEQ ID NO: 11057 - protein, 31 aa, Artificial Sequence
  Cyclic GFR-binding peptide
  MOD_RES (2)..(3): Xaa is C or S
AXXAPTKLSPISVLYKDSSNNVILKYHYNMV

SEQ ID NO: 11058 - protein, 25 aa, Artificial Sequence
  Cyclic GFR-binding peptide
SPISILYKVGRKPKVLKYHYMIVRS

SEQ ID NO: 11059 - protein, 27 aa, Artificial Sequence
  Cyclic GFR-binding peptide
  MOD_RES (1)..(1): Xaa is C or S
XVPTKLNAISVLYFDDMGVPTLKKYRE

SEQ ID NO: 11060 - protein, 33 aa, Artificial Sequence
  Cyclic GFR-binding peptide
  MOD_RES (3)..(4): Xaa is C or S
SPXXVPQDLSPISILYKVGRTPKVLKYHYMVVK

SEQ ID NO: 11061 - protein, 25 aa, Artificial Sequence
  Cyclic GFR-binding peptide
VQLSPISVLYKEIVRKKPIFLKYHY

SEQ ID NO: 11062 - protein, 40 aa, Artificial Sequence
  Cyclic GFR-binding peptide
  MOD_RES (5)..(5): Xaa is C or S
RNVQXRPTQVQLSAISVLYLEIVRKKPIFLKNYQTLEDHL

SEQ ID NO: 11063 - protein, 28 aa, Artificial Sequence
  Cyclic GFR-binding peptide
  MOD_RES (1)..(2): Xaa is C or S
XXVPTKLNAISVLYFDDMGVPTLKKYRE

SEQ ID NO: 11064 - protein, 31 aa, Artificial Sequence
  Cyclic GFR-binding peptide
VQLSPISVLYKEIVRKKPIFLKYHYTLEDHL

SEQ ID NO: 11065 - protein, 29 aa, Artificial Sequence
  Cyclic GFR-binding peptide
  MOD_RES (2)..(3): Xaa is C or S
PXXVSQDLSAISILYLIGKTPKILKNYQM

SEQ ID NO: 11066 - protein, 37 aa, Artificial Sequence
  Cyclic GFR-binding peptide
  MOD_RES (4)..(5)..(37): Xaa is C or S
PKAXXVPTELSPISMLYKDENEKVVLKYHYDMVVEGX

SEQ ID NO: 11067 - protein, 33 aa, Artificial Sequence
  Cyclic GFR-binding peptide
  MOD_RES (1)..(2): Xaa is C or S
XXVPTELSPISMLYKDEYDKVVLKYHYEMVVEG

SEQ ID NO: 11068 - protein, 39 aa, Artificial Sequence
  Cyclic GFR-binding peptide
  MOD_RES (4)..(5)..(37)..(39): Xaa is C or S
PKPXXAPTKLSPISVLYKDDSSNVILKYHYNMVVRSXGX

SEQ ID NO: 11069 - protein, 32 aa, Artificial Sequence
  Cyclic GFR-binding peptide
  MOD_RES (30)..(32): Xaa is C or S
TKLNAISVLYFDSSNNVILKKYRNMVVKAXGX

SEQ ID NO: 11070 - protein, 34 aa, Artificial Sequence
  Cyclic GFR-binding peptide
  MOD_RES (31)..(33): Xaa is C or S
PTKLNAISVLYFDSSNNVILKKYRNMVVKAXGXH

SEQ ID NO: 11071 - protein, 22 aa, Artificial Sequence
  Cyclic GFR-binding peptide
NAISILYFIGKTPKILKKYRMI

SEQ ID NO: 11072 - protein, 36 aa, Artificial Sequence
  Cyclic GFR-binding peptide
  MOD_RES (33)..(35): Xaa is C or S
VQLNAISVLYFEIVRKKPIFLKKYRTLEDHLAXKXE

SEQ ID NO: 11073 - protein, 30 aa, Artificial Sequence
  Cyclic GFR-binding peptide
  MOD_RES (2)..(3): Xaa is C or S
AXXVPTKLSAISVLYLDDMGVPTLKNYQEG

SEQ ID NO: 11074 - protein, 36 aa, Artificial Sequence
  Cyclic GFR-binding peptide
  MOD_RES (3)..(4)..(36): Xaa is C or S
KAXXVPTELSPISMLYKDENEKVVLKYHYDMVVEGX

SEQ ID NO: 11075 - protein, 35 aa, Artificial Sequence
  Cyclic GFR-binding peptide
  MOD_RES (32)..(34): Xaa is C or S
VPTELSATSMLYYDEYDKVVLRKHREMVVEGXGXR

SEQ ID NO: 11076 - protein, 31 aa, Artificial Sequence
  Cyclic GFR-binding peptide
  MOD_RES (28)..(30): Xaa is C or S
LSPISMLYKDENEKVVLKYHYDMVVEGXGXR

SEQ ID NO: 11077 - protein, 23 aa, Artificial Sequence
  Cyclic GFR-binding peptide
LSAISVLYLDDSSNVILKNYQNM

SEQ ID NO: 11078 - protein, 33 aa, Artificial Sequence
  Cyclic GFR-binding peptide
  MOD_RES (30)..(32): Xaa is C or S
SQDLSAISILYLIGKTPKILKNYQMIVKSXKXS

SEQ ID NO: 11079 - protein, 23 aa, Artificial Sequence
  Cyclic GFR-binding peptide
QLSPISVLYKDDSSNVILKYHYN

SEQ ID NO: 11080 - protein, 32 aa, Artificial Sequence
  Cyclic GFR-binding peptide
VQLSAISVLYLEIVRKKPIFLKNYQTLEDHLA

SEQ ID NO: 11081 - protein, 35 aa, Artificial Sequence
  Cyclic GFR-binding peptide
  MOD_RES (4)..(5): Xaa is C or S
ASPXXVSQDLSATSILYYIGKTPKILRKHRMIVKS

SEQ ID NO: 11082 - protein, 30 aa, Artificial Sequence
  Cyclic GFR-binding peptide
  MOD_RES (1)..(1): Xaa is C or S
XVSQDLSAISILYLIGKTPKILKNYQMIVK

SEQ ID NO: 11083 - protein, 23 aa, Artificial Sequence
  Cyclic GFR-binding peptide
ELNAISMLYFDEYDKVVLKKYRE

SEQ ID NO: 11084 - protein, 43 aa, Artificial Sequence
  Cyclic GFR-binding peptide
  MOD_RES (6)..(7)..(40)..(42): Xaa is C or S
KVGKAXXVPTKLSAISVLYLDDMGVPTLKNYQEGMSVAEXGXR

SEQ ID NO: 11085 - protein, 30 aa, Artificial Sequence
  Cyclic GFR-binding peptide
  MOD_RES (28)..(30): Xaa is C or S
SAISVLYLDDMGVPTLKNYQEGMSVAEXGX

SEQ ID NO: 11086 - protein, 36 aa, Artificial Sequence
  Cyclic GFR-binding peptide
  MOD_RES (4)..(5): Xaa is C or S
PKAXXVPTELSATSMLYYDEYDKVVLRKHREMVVEG

SEQ ID NO: 11087 - protein, 31 aa, Artificial Sequence
  Cyclic GFR-binding peptide
  MOD_RES (29)..(31): Xaa is C or S
QDLNAISILYFVGRTPKVLKKYRMVVKSXKX

SEQ ID NO: 11088 - protein, 24 aa, Artificial Sequence
  Cyclic GFR-binding peptide
TQLSATSVLYYDDSSNVILRKHRN

SEQ ID NO: 11089 - protein, 36 aa, Artificial Sequence
  Cyclic GFR-binding peptide
  MOD_RES (2)..(3)..(35): Xaa is C or S
PXXAPTKLSATSVLYYDDSSNVILRKHRNMVVRSXG

SEQ ID NO: 11090 - protein, 25 aa, Artificial Sequence
  Cyclic GFR-binding peptide
APTKLSPISVLYKDDSSNVILKYHY

SEQ ID NO: 11091 - protein, 24 aa, Artificial Sequence
  Cyclic GFR-binding peptide
QDLSPISILYKIGKTPKILKYHYM

SEQ ID NO: 11092 - protein, 33 aa, Artificial Sequence
  Cyclic GFR-binding peptide
  MOD_RES (3)..(4): Xaa is C or S
APXXVPQALNAISILYFVGRKPKVLKKYRMIVR

SEQ ID NO: 11093 - protein, 24 aa, Artificial Sequence
  Cyclic GFR-binding peptide
SATSVLYYEIVRKKPIFLRKHRTL

SEQ ID NO: 11094 - protein, 39 aa, Artificial Sequence
  Cyclic GFR-binding peptide
  MOD_RES (36)..(38): Xaa is C or S
PTQVQLSATSVLYYEIVRKKPIFLRKHRTLEDHLAXKXE

SEQ ID NO: 11095 - protein, 30 aa, Artificial Sequence
  Cyclic GFR-binding peptide
QVQLSPISVLYKEIVRKKPIFLKYHYTLED

SEQ ID NO: 11096 - protein, 36 aa, Artificial Sequence
  Cyclic GFR-binding peptide
  MOD_RES (1)..(2)..(33)..(35): Xaa is C or S
XXVPQALSPISILYKVGRKPKVLKYHYMIVRSXKXS

SEQ ID NO: 11097 - protein, 33 aa, Artificial Sequence
  Cyclic GFR-binding peptide
  MOD_RES (4)..(5): Xaa is C or S
PKPXXAPTKLSAISVLYLDDSSNVILKNYQNMV

SEQ ID NO: 11098 - protein, 33 aa, Artificial Sequence
  Cyclic GFR-binding peptide
  MOD_RES (2)..(3): Xaa is C or S
AXXVPTELSATSMLYYDEYDKVVLRKHREMVVE

SEQ ID NO: 11099 - protein, 37 aa, Artificial Sequence
  Cyclic GFR-binding peptide
  MOD_RES (6)..(7): Xaa is C or S
KVGKAXXVPTKLSATSVLYYDDMGVPTLRKHREGMSV

SEQ ID NO: 11100 - protein, 32 aa, Artificial Sequence
  Cyclic GFR-binding peptide
  MOD_RES (4)..(5): Xaa is C or S
ASPXXVPQDLSAISILYLVGRTPKVLKNYQMV

SEQ ID NO: 11101 - protein, 25 aa, Artificial Sequence
  Cyclic GFR-binding peptide
PTQLSATSVLYYDDSSNVILRKHRN

SEQ ID NO: 11102 - protein, 32 aa, Artificial Sequence
  Cyclic GFR-binding peptide
VQLSATSVLYYEIVRKKPIFLRKHRTLEDHLA

SEQ ID NO: 11103 - protein, 42 aa, Artificial Sequence
  Cyclic GFR-binding peptide
  MOD_RES (5)..(42): Xaa is C or S
RNVQXRPTQVQLSAISVLYLEIVRKKPIFLKNYQTLEDHLAX

SEQ ID NO: 11104 - protein, 34 aa, Artificial Sequence
  Cyclic GFR-binding peptide
  MOD_RES (3)..(3): Xaa is C or S
VQXRPTQVQLSAISVLYLEIVRKKPIFLKNYQTL

SEQ ID NO: 11105 - protein, 29 aa, Artificial Sequence
  Cyclic GFR-binding peptide
  MOD_RES (26)..(28): Xaa is C or S
SATSILYYVGRTPKVLRKHRMVVKSXKXS

SEQ ID NO: 11106 - protein, 30 aa, Artificial Sequence
  Cyclic GFR-binding peptide
  MOD_RES (29)..(29): Xaa is C or S
KLSAISVLYLDSSNNVILKNYQNMVVKAXG

SEQ ID NO: 11107 - protein, 24 aa, Artificial Sequence
  Cyclic GFR-binding peptide
ALNAISILYFVGRKPKVLKKYRMI

SEQ ID NO: 11108 - protein, 26 aa, Artificial Sequence
  Cyclic GFR-binding peptide
SATSVLYYDDMGVPTLRKHREGMSVA

SEQ ID NO: 11109 - protein, 29 aa, Artificial Sequence
  Cyclic GFR-binding peptide
PTELSPISMLYKDENEKVVLKYHYDMVVE

SEQ ID NO: 11110 - protein, 33 aa, Artificial Sequence
  Cyclic GFR-binding peptide
  MOD_RES (5)..(6): Xaa is C or S
VPKPXXAPTQLSATSVLYYDDSSNVILRKHRNM

SEQ ID NO: 11111 - protein, 28 aa, Artificial Sequence
  Cyclic GFR-binding peptide
VPTELNAISMLYFDEYDKVVLKKYREMV

SEQ ID NO: 11112 - protein, 28 aa, Artificial Sequence
  Cyclic GFR-binding peptide
  MOD_RES (28)..(28): Xaa is C or S
ALSATSILYYVGRKPKVLRKHRMIVRSX

SEQ ID NO: 11113 - protein, 22 aa, Artificial Sequence
  Cyclic GFR-binding peptide
SAISVLYLEIVRKKPIFLKNYQ

SEQ ID NO: 11114 - protein, 36 aa, Artificial Sequence
  Cyclic GFR-binding peptide
  MOD_RES (4)..(5): Xaa is C or S
PKAXXAPTKLSPISVLYKDSSNNVILKYHYNMVVKA

SEQ ID NO: 11115 - protein, 25 aa, Artificial Sequence
  Cyclic GFR-binding peptide
LSPISMLYKDENEKVVLKYHYDMVV

SEQ ID NO: 11116 - protein, 36 aa, Artificial Sequence
  Cyclic GFR-binding peptide
  MOD_RES (4)..(5): Xaa is C or S
GKAXXVPTKLNAISVLYFDDMGVPTLKKYREGMSVA

SEQ ID NO: 11117 - protein, 33 aa, Artificial Sequence
  Cyclic GFR-binding peptide
  MOD_RES (32)..(32): Xaa is C or S
APTQLSPISVLYKDDSSNVILKYHYNMVVRAXG

SEQ ID NO: 11118 - protein, 32 aa, Artificial Sequence
  Cyclic GFR-binding peptide
  MOD_RES (1)..(32): Xaa is C or S
XVSQDLSAISILYLIGKTPKILKNYQMIVKSX

SEQ ID NO: 11119 - protein, 30 aa, Artificial Sequence
  Cyclic GFR-binding peptide
  MOD_RES (4)..(5): Xaa is C or S
ASPXXVPQDLSATSILYYVGRTPKVLRKHR

SEQ ID NO: 11120 - protein, 40 aa, Artificial Sequence
  Cyclic GFR-binding peptide
  MOD_RES (6)..(7)..(39): Xaa is C or S
SIPKAXXVPTELSATSMLYYDEYDKVVLRKHREMVVEGXG

SEQ ID NO: 11121 - protein, 40 aa, Artificial Sequence
  Cyclic GFR-binding peptide
  MOD_RES (7)..(39): Xaa is C or S
HVTKPTXAPTKLSATSVLYYDDSSNVILRKHRNMVVRSXG

SEQ ID NO: 11122 - protein, 20 aa, Artificial Sequence
  Cyclic GFR-binding peptide
NAISILYFVGRTPKVLKKYR

SEQ ID NO: 11123 - protein, 26 aa, Artificial Sequence
  Cyclic GFR-binding peptide
LSATSVLYYEIVRKKPIFLRKHRTLE

SEQ ID NO: 11124 - protein, 23 aa, Artificial Sequence
  Cyclic GFR-binding peptide
NAISVLYFEIVRKKPIFLKKYRT

SEQ ID NO: 11125 - protein, 36 aa, Artificial Sequence
  Cyclic GFR-binding peptide
  MOD_RES (4)..(5): Xaa is C or S
PKPXXAPTKLSAISVLYLDDSSNVILKNYQNMVVRS

SEQ ID NO: 11126 - protein, 30 aa, Artificial Sequence
  Cyclic GFR-binding peptide
  MOD_RES (29)..(29): Xaa is C or S
KLSATSVLYYDDSSNVILRKHRNMVVRSXG

SEQ ID NO: 11127 - protein, 33 aa, Artificial Sequence
  Cyclic GFR-binding peptide
  MOD_RES (6)..(7): Xaa is C or S
ASAAPXXVPQALSATSILYYVGRKPKVLRKHRM

SEQ ID NO: 11128 - protein, 27 aa, Artificial Sequence
  Cyclic GFR-binding peptide
  MOD_RES (1)..(1): Xaa is C or S
XVPQALNAISILYFVGRKPKVLKKYRM

SEQ ID NO: 11129 - protein, 31 aa, Artificial Sequence
  Cyclic GFR-binding peptide
  MOD_RES (2)..(3): Xaa is C or S
PXXVSQDLSPISILYKIGKTPKILKYHYMIV

SEQ ID NO: 11130 - protein, 26 aa, Artificial Sequence
  Cyclic GFR-binding peptide
ALNAISILYFVGRKPKVLKKYRMIVR

SEQ ID NO: 11131 - protein, 41 aa, Artificial Sequence
  Cyclic GFR-binding peptide
  MOD_RES (5)..(6)..(38)..(40): Xaa is C or S
VPKAXXAPTKLSPISVLYKDSSNNVILKYHYNMVVKAXGXH

SEQ ID NO: 11132 - protein, 41 aa, Artificial Sequence
  Cyclic GFR-binding peptide
  MOD_RES (5)..(6)..(38)..(40): Xaa is C or S
VPKPXXAPTKLSAISVLYLDDSSNVILKNYQNMVVRSXGXH

SEQ ID NO: 11133 - protein, 33 aa, Artificial Sequence
  Cyclic GFR-binding peptide
  MOD_RES (30)..(32): Xaa is C or S
TELSPISMLYKDENEKVVLKYHYDMVVEGXGXR

SEQ ID NO: 11134 - protein, 24 aa, Artificial Sequence
  Cyclic GFR-binding peptide
LSATSILYYVGRTPKVLRKHRMVV

SEQ ID NO: 11135 - protein, 32 aa, Artificial Sequence
  Cyclic GFR-binding peptide
  MOD_RES (31)..(31): Xaa is C or S
VSQDLNAISILYFIGKTPKILKKYRMIVKSXK

SEQ ID NO: 11136 - protein, 28 aa, Artificial Sequence
  Cyclic GFR-binding peptide
  MOD_RES (2)..(3): Xaa is C or S
PXXAPTQLSAISVLYLDDSSNVILKNYQ

SEQ ID NO: 11137 - protein, 27 aa, Artificial Sequence
  Cyclic GFR-binding peptide
PTQLSATSVLYYDDSSNVILRKHRNMV

SEQ ID NO: 11138 - protein, 38 aa, Artificial Sequence
  Cyclic GFR-binding peptide
  MOD_RES (3)..(3): Xaa is C or S
VQXRPTQVQLSAISVLYLEIVRKKPIFLKNYQTLEDHL

SEQ ID NO: 11139 - protein, 28 aa, Artificial Sequence
  Cyclic GFR-binding peptide
  MOD_RES (2)..(3): Xaa is C or S
PXXVSQDLSAISILYLIGKTPKILKNYQ

SEQ ID NO: 11140 - protein, 26 aa, Artificial Sequence
  Cyclic GFR-binding peptide
SQDLSATSILYYIGKTPKILRKHRMI

SEQ ID NO: 11141 - protein, 31 aa, Artificial Sequence
  Cyclic GFR-binding peptide
VPTKLSATSVLYYDDMGVPTLRKHREGMSVA

SEQ ID NO: 11142 - protein, 37 aa, Artificial Sequence
  Cyclic GFR-binding peptide
  MOD_RES (1)..(2)..(34)..(36): Xaa is C or S
XXAPTQLSAISVLYLDDSSNVILKNYQNMVVRAXGXH

SEQ ID NO: 11143 - protein, 27 aa, Artificial Sequence
  Cyclic GFR-binding peptide
LSPISMLYKDEYDKVVLKYHYEMVVEG

SEQ ID NO: 11144 - protein, 35 aa, Artificial Sequence
  Cyclic GFR-binding peptide
  MOD_RES (6)..(7): Xaa is C or S
YVPKPXXAPTKLSPISVLYKDDSSNVILKYHYNMV

SEQ ID NO: 11145 - protein, 39 aa, Artificial Sequence
  Cyclic GFR-binding peptide
  MOD_RES (5)..(5): Xaa is C or S
RNVQXRPTQVQLNAISVLYFEIVRKKPIFLKKYRTLEDH

SEQ ID NO: 11146 - protein, 26 aa, Artificial Sequence
  Cyclic GFR-binding peptide
APTKLSAISVLYLDSSNNVILKNYQN

SEQ ID NO: 11147 - protein, 35 aa, Artificial Sequence
  Cyclic GFR-binding peptide
  MOD_RES (4)..(5): Xaa is C or S
PKAXXAPTKLSPISVLYKDSSNNVILKYHYNMVVK

SEQ ID NO: 11148 - protein, 36 aa, Artificial Sequence
  Cyclic GFR-binding peptide
  MOD_RES (3)..(4)..(36): Xaa is C or S
KAXXVPTELNAISMLYFDENEKVVLKKYRDMVVEGX

SEQ ID NO: 11149 - protein, 31 aa, Artificial Sequence
  Cyclic GFR-binding peptide
  MOD_RES (5)..(6): Xaa is C or S
VPKAXXAPTKLSAISVLYLDSSNNVILKNYQ

SEQ ID NO: 11150 - protein, 42 aa, Artificial Sequence
  Cyclic GFR-binding peptide
  MOD_RES (4)..(41): Xaa is C or S
NVQXRPTQVQLSPISVLYKEIVRKKPIFLKYHYTLEDHLAXK

SEQ ID NO: 11151 - protein, 34 aa, Artificial Sequence
  Cyclic GFR-binding peptide
  MOD_RES (4)..(5): Xaa is C or S
ASPXXVSQDLNAISILYFIGKTPKILKKYRMIVK

SEQ ID NO: 11152 - protein, 26 aa, Artificial Sequence
  Cyclic GFR-binding peptide
TKLNAISVLYFDSSNNVILKKYRNMV

SEQ ID NO: 11153 - protein, 27 aa, Artificial Sequence
  Cyclic GFR-binding peptide
  MOD_RES (1)..(2): Xaa is C or S
XXAPTQLSPISVLYKDDSSNVILKYHY

SEQ ID NO: 11154 - protein, 39 aa, Artificial Sequence
  Cyclic GFR-binding peptide
  MOD_RES (4)..(5)..(37)..(39): Xaa is C or S
PKAXXAPTKLSAISVLYLDSSNNVILKNYQNMVVKAXGX

SEQ ID NO: 11155 - protein, 35 aa, Artificial Sequence
  Cyclic GFR-binding peptide
  MOD_RES (33)..(35): Xaa is C or S
VQLSAISVLYLEIVRKKPIFLKNYQTLEDHLAXKX

SEQ ID NO: 11156 - protein, 32 aa, Artificial Sequence
  Cyclic GFR-binding peptide
  MOD_RES (30)..(32): Xaa is C or S
PQDLSATSILYYVGRTPKVLRKHRMVVKSXKX

SEQ ID NO: 11157 - protein, 35 aa, Artificial Sequence
  Cyclic GFR-binding peptide
  MOD_RES (2)..(3)..(34): Xaa is C or S
PXXVSQDLSPISILYKIGKTPKILKYHYMIVKSXK

SEQ ID NO: 11158 - protein, 31 aa, Artificial Sequence
  Cyclic GFR-binding peptide
  MOD_RES (29)..(31): Xaa is C or S
KLSPISVLYKDDSSNVILKYHYNMVVRSXGX

SEQ ID NO: 11159 - protein, 35 aa, Artificial Sequence
  Cyclic GFR-binding peptide
  MOD_RES (4)..(5): Xaa is C or S
PKAXXAPTKLSAISVLYLDSSNNVILKNYQNMVVK

SEQ ID NO: 11160 - protein, 38 aa, Artificial Sequence
  Cyclic GFR-binding peptide
  MOD_RES (3)..(4)..(36)..(38): Xaa is C or S
KPXXAPTQLSPISVLYKDDSSNVILKYHYNMVVRAXGX

SEQ ID NO: 11161 - protein, 40 aa, Artificial Sequence
  Cyclic GFR-binding peptide
  MOD_RES (6)..(7)..(39): Xaa is C or S
TVPKPXXAPTQLSATSVLYYDDSSNVILRKHRNMVVRAXG

SEQ ID NO: 11162 - protein, 30 aa, Artificial Sequence
  Cyclic GFR-binding peptide
  MOD_RES (27)..(29): Xaa is C or S
LSATSILYYVGRKPKVLRKHRMIVRSXKXS

SEQ ID NO: 11163 - protein, 33 aa, Artificial Sequence
  Cyclic GFR-binding peptide
  MOD_RES (1)..(2)..(33): Xaa is C or S
XXVSQDLSPISILYKIGKTPKILKYHYMIVKSX

SEQ ID NO: 11164 - protein, 23 aa, Artificial Sequence
  Cyclic GFR-binding peptide
LSATSILYYIGKTPKILRKHRMI

SEQ ID NO: 11165 - protein, 37 aa, Artificial Sequence
  Cyclic GFR-binding peptide
  MOD_RES (6)..(7): Xaa is C or S
KVGKAXXVPTKLNAISVLYFDDMGVPTLKKYREGMSV

SEQ ID NO: 11166 - protein, 31 aa, Artificial Sequence
  Cyclic GFR-binding peptide
  MOD_RES (1)..(1): Xaa is C or S
XAPTQLSATSVLYYDDSSNVILRKHRNMVVR

SEQ ID NO: 11167 - protein, 30 aa, Artificial Sequence
  Cyclic GFR-binding peptide
  MOD_RES (4)..(5): Xaa is C or S
PKAXXVPTELSPISMLYKDEYDKVVLKYHY

SEQ ID NO: 11168 - protein, 31 aa, Artificial Sequence
  Cyclic GFR-binding peptide
  MOD_RES (5)..(6): Xaa is C or S
SASPXXVSQDLSAISILYLIGKTPKILKNYQ

SEQ ID NO: 11169 - protein, 21 aa, Artificial Sequence
  Cyclic GFR-binding peptide
LSAISILYLVGRTPKVLKNYQ

SEQ ID NO: 11170 - protein, 23 aa, Artificial Sequence
  Cyclic GFR-binding peptide
QALSATSILYYVGRKPKVLRKHR

SEQ ID NO: 11171 - protein, 29 aa, Artificial Sequence
  Cyclic GFR-binding peptide
QLSAISVLYLEIVRKKPIFLKNYQTLEDH

SEQ ID NO: 11172 - protein, 36 aa, Artificial Sequence
  Cyclic GFR-binding peptide
  MOD_RES (1)..(2)..(34)..(36): Xaa is C or S
XXVPTELSPISMLYKDEYDKVVLKYHYEMVVEGXGX

SEQ ID NO: 11173 - protein, 28 aa, Artificial Sequence
  Cyclic GFR-binding peptide
PTELSPISMLYKDEYDKVVLKYHYEMVV

SEQ ID NO: 11174 - protein, 36 aa, Artificial Sequence
  Cyclic GFR-binding peptide
  MOD_RES (5)..(6): Xaa is C or S
IPKAXXVPTELNAISMLYFDENEKVVLKKYRDMVVE

SEQ ID NO: 11175 - protein, 29 aa, Artificial Sequence
  Cyclic GFR-binding peptide
RPTQVQLNAISVLYFEIVRKKPIFLKKYR

SEQ ID NO: 11176 - protein, 32 aa, Artificial Sequence
  Cyclic GFR-binding peptide
  MOD_RES (31)..(31): Xaa is C or S
PTELSPISMLYKDEYDKVVLKYHYEMVVEGXG

SEQ ID NO: 11177 - protein, 34 aa, Artificial Sequence
  Cyclic GFR-binding peptide
  MOD_RES (1)..(2)..(33): Xaa is C or S
XXVPQDLSAISILYLVGRTPKVLKNYQMVVKSXK

SEQ ID NO: 11178 - protein, 24 aa, Artificial Sequence
  Cyclic GFR-binding peptide
TKLNAISVLYFDSSNNVILKKYRN

SEQ ID NO: 11179 - protein, 40 aa, Artificial Sequence
  Cyclic GFR-binding peptide
  MOD_RES (5)..(37)..(39): Xaa is C or S
TKPTXAPTKLSAISVLYLDDSSNVILKNYQNMVVRSXGXH

SEQ ID NO: 11180 - protein, 42 aa, Artificial Sequence
  Cyclic GFR-binding peptide
  MOD_RES (3)..(40)..(42): Xaa is C or S
VQXRPTQVQLSATSVLYYEIVRKKPIFLRKHRTLEDHLAXKX

SEQ ID NO: 11181 - protein, 30 aa, Artificial Sequence
  Cyclic GFR-binding peptide
  MOD_RES (27)..(29): Xaa is C or S
SPISVLYKDDSSNVILKYHYNMVVRSXGXH

SEQ ID NO: 11182 - protein, 25 aa, Artificial Sequence
  Cyclic GFR-binding peptide
DLSPISILYKVGRTPKVLKYHYMVV

SEQ ID NO: 11183 - protein, 26 aa, Artificial Sequence
  Cyclic GFR-binding peptide
PQDLSATSILYYVGRTPKVLRKHRMV

SEQ ID NO: 11184 - protein, 26 aa, Artificial Sequence
  Cyclic GFR-binding peptide
QVQLSATSVLYYEIVRKKPIFLRKHR

SEQ ID NO: 11185 - protein, 26 aa, Artificial Sequence
  Cyclic GFR-binding peptide
PQALSAISILYLVGRKPKVLKNYQMI

SEQ ID NO: 11186 - protein, 31 aa, Artificial Sequence
  Cyclic GFR-binding peptide
  MOD_RES (31)..(31): Xaa is C or S
PTKLSAISVLYLDSSNNVILKNYQNMVVKAX

SEQ ID NO: 11187 - protein, 37 aa, Artificial Sequence
  Cyclic GFR-binding peptide
  MOD_RES (6)..(7): Xaa is C or S
AVPKAXXAPTKLSAISVLYLDSSNNVILKNYQNMVVK

SEQ ID NO: 11188 - protein, 27 aa, Artificial Sequence
  Cyclic GFR-binding peptide
  MOD_RES (27)..(27): Xaa is C or S
LSATSILYYVGRKPKVLRKHRMIVRSX

SEQ ID NO: 11189 - protein, 24 aa, Artificial Sequence
  Cyclic GFR-binding peptide
NAISILYFVGRTPKVLKKYRMVVK

SEQ ID NO: 11190 - protein, 22 aa, Artificial Sequence
  Cyclic GFR-binding peptide
KLSAISVLYLDDSSNVILKNYQ

SEQ ID NO: 11191 - protein, 28 aa, Artificial Sequence
  Cyclic GFR-binding peptide
  MOD_RES (3)..(3): Xaa is C or S
PTXAPTKLSAISVLYLDDSSNVILKNYQ

SEQ ID NO: 11192 - protein, 28 aa, Artificial Sequence
  Cyclic GFR-binding peptide
QLSATSVLYYDDSSNVILRKHRNMVVRA

SEQ ID NO: 11193 - protein, 42 aa, Artificial Sequence
  Cyclic GFR-binding peptide
  MOD_RES (6)..(7)..(40)..(42): Xaa is C or S
KVGKAXXVPTKLNAISVLYFDDMGVPTLKKYREGMSVAEXGX

SEQ ID NO: 11194 - protein, 32 aa, Artificial Sequence
  Cyclic GFR-binding peptide
  MOD_RES (6)..(7): Xaa is C or S
YVPKPXXAPTKLSPISVLYKDDSSNVILKYHY

SEQ ID NO: 11195 - protein, 22 aa, Artificial Sequence
  Cyclic GFR-binding peptide
KLSAISVLYLDDMGVPTLKNYQ

SEQ ID NO: 11196 - protein, 35 aa, Artificial Sequence
  Cyclic GFR-binding peptide
  MOD_RES (4)..(4): Xaa is C or S
NVQXRPTQVQLSATSVLYYEIVRKKPIFLRKHRTL

SEQ ID NO: 11197 - protein, 40 aa, Artificial Sequence
  Cyclic GFR-binding peptide
  MOD_RES (2)..(39): Xaa is C or S
QXRPTQVQLSATSVLYYEIVRKKPIFLRKHRTLEDHLAXK

SEQ ID NO: 11198 - protein, 33 aa, Artificial Sequence
  Cyclic GFR-binding peptide
  MOD_RES (31)..(33): Xaa is C or S
LNAISVLYFEIVRKKPIFLKKYRTLEDHLAXKX

SEQ ID NO: 11199 - protein, 26 aa, Artificial Sequence
  Cyclic GFR-binding peptide
  MOD_RES (1)..(1): Xaa is C or S
XAPTKLSAISVLYLDDSSNVILKNYQ

SEQ ID NO: 11200 - protein, 31 aa, Artificial Sequence
  Cyclic GFR-binding peptide
  MOD_RES (30)..(30): Xaa is C or S
PQALSPISILYKVGRKPKVLKYHYMIVRSXK

SEQ ID NO: 11201 - protein, 30 aa, Artificial Sequence
  Cyclic GFR-binding peptide
  MOD_RES (27)..(29): Xaa is C or S
SAISVLYLDSSNNVILKNYQNMVVKAXGXH

SEQ ID NO: 11202 - protein, 35 aa, Artificial Sequence
  Cyclic GFR-binding peptide
  MOD_RES (5)..(6): Xaa is C or S
VPKPXXAPTKLSAISVLYLDDSSNVILKNYQNMVV

SEQ ID NO: 11203 - protein, 30 aa, Artificial Sequence
  Cyclic GFR-binding peptide
VPTELNAISMLYFDENEKVVLKKYRDMVVE

SEQ ID NO: 11204 - protein, 27 aa, Artificial Sequence
  Cyclic GFR-binding peptide
  MOD_RES (1)..(2): Xaa is C or S
XXAPTKLSAISVLYLDDSSNVILKNYQ

SEQ ID NO: 11205 - protein, 42 aa, Artificial Sequence
  Cyclic GFR-binding peptide
  MOD_RES (5)..(6)..(39)..(41): Xaa is C or S
VGKAXXVPTKLSAISVLYLDDMGVPTLKNYQEGMSVAEXGXR

SEQ ID NO: 11206 - protein, 36 aa, Artificial Sequence
  Cyclic GFR-binding peptide
  MOD_RES (34)..(36): Xaa is C or S
QVQLNAISVLYFEIVRKKPIFLKKYRTLEDHLAXKX

SEQ ID NO: 11207 - protein, 25 aa, Artificial Sequence
  Cyclic GFR-binding peptide
LSPISVLYKEIVRKKPIFLKYHYTL

SEQ ID NO: 11208 - protein, 26 aa, Artificial Sequence
  Cyclic GFR-binding peptide
PQALNAISILYFVGRKPKVLKKYRMI

SEQ ID NO: 11209 - protein, 34 aa, Artificial Sequence
  Cyclic GFR-binding peptide
  MOD_RES (3)..(4): Xaa is C or S
KAXXVPTKLNAISVLYFDDMGVPTLKKYREGMSV

SEQ ID NO: 11210 - protein, 34 aa, Artificial Sequence
  Cyclic GFR-binding peptide
  MOD_RES (4)..(5): Xaa is C or S
AAPXXVPQALSATSILYYVGRKPKVLRKHRMIVR

SEQ ID NO: 11211 - protein, 27 aa, Artificial Sequence
  Cyclic GFR-binding peptide
PTELSATSMLYYDENEKVVLRKHRDMV

SEQ ID NO: 11212 - protein, 25 aa, Artificial Sequence
  Cyclic GFR-binding peptide
LNAISVLYFDDMGVPTLKKYREGMS

SEQ ID NO: 11213 - protein, 21 aa, Artificial Sequence
  Cyclic GFR-binding peptide
SATSVLYYDDSSNVILRKHRN

SEQ ID NO: 11214 - protein, 29 aa, Artificial Sequence
  Cyclic GFR-binding peptide
  MOD_RES (1)..(1): Xaa is C or S
XVPTELNAISMLYFDENEKVVLKKYRDMV

SEQ ID NO: 11215 - protein, 37 aa, Artificial Sequence
  Cyclic GFR-binding peptide
  MOD_RES (4)..(36): Xaa is C or S
KPTXAPTKLSPISVLYKDDSSNVILKYHYNMVVRSXG

SEQ ID NO: 11216 - protein, 33 aa, Artificial Sequence
  Cyclic GFR-binding peptide
  MOD_RES (31)..(33): Xaa is C or S
VPQALNAISILYFVGRKPKVLKKYRMIVRSXKX

SEQ ID NO: 11217 - protein, 34 aa, Artificial Sequence
  Cyclic GFR-binding peptide
  MOD_RES (6)..(7): Xaa is C or S
YVPKPXXAPTKLSATSVLYYDDSSNVILRKHRNM

SEQ ID NO: 11218 - protein, 34 aa, Artificial Sequence
  Cyclic GFR-binding peptide
  MOD_RES (5)..(6): Xaa is C or S
IPKAXXVPTELSPISMLYKDENEKVVLKYHYDMV

SEQ ID NO: 11219 - protein, 33 aa, Artificial Sequence
  Cyclic GFR-binding peptide
  MOD_RES (6)..(7): Xaa is C or S
AVPKAXXAPTKLNAISVLYFDSSNNVILKKYRN

SEQ ID NO: 11220 - protein, 23 aa, Artificial Sequence
  Cyclic GFR-binding peptide
LSAISILYLVGRKPKVLKNYQMI

SEQ ID NO: 11221 - protein, 30 aa, Artificial Sequence
  Cyclic GFR-binding peptide
QVQLNAISVLYFEIVRKKPIFLKKYRTLED

SEQ ID NO: 11222 - protein, 37 aa, Artificial Sequence
  Cyclic GFR-binding peptide
  MOD_RES (2)..(3)..(36): Xaa is C or S
AXXVPTKLSATSVLYYDDMGVPTLRKHREGMSVAEXG

SEQ ID NO: 11223 - protein, 33 aa, Artificial Sequence
  Cyclic GFR-binding peptide
  MOD_RES (4)..(4): Xaa is C or S
KPTXAPTKLSATSVLYYDDSSNVILRKHRNMVV

SEQ ID NO: 11224 - protein, 35 aa, Artificial Sequence
  Cyclic GFR-binding peptide
  MOD_RES (4)..(5): Xaa is C or S
ASPXXVPQDLSAISILYLVGRTPKVLKNYQMVVKS

SEQ ID NO: 11225 - protein, 28 aa, Artificial Sequence
  Cyclic GFR-binding peptide
  MOD_RES (2)..(3): Xaa is C or S
PXXVPQALSATSILYYVGRKPKVLRKHR

SEQ ID NO: 11226 - protein, 20 aa, Artificial Sequence
  Cyclic GFR-binding peptide
SPISMLYKDENEKVVLKYHY

SEQ ID NO: 11227 - protein, 31 aa, Artificial Sequence
  Cyclic GFR-binding peptide
  MOD_RES (5)..(6): Xaa is C or S
SASPXXVPQDLSPISILYKVGRTPKVLKYHY

SEQ ID NO: 11228 - protein, 35 aa, Artificial Sequence
  Cyclic GFR-binding peptide
  MOD_RES (6)..(7): Xaa is C or S
SIPKAXXVPTELSATSMLYYDEYDKVVLRKHREMV

SEQ ID NO: 11229 - protein, 33 aa, Artificial Sequence
  Cyclic GFR-binding peptide
  MOD_RES (5)..(6): Xaa is C or S
SASPXXVPQDLSATSILYYVGRTPKVLRKHRMV

SEQ ID NO: 11230 - protein, 24 aa, Artificial Sequence
  Cyclic GFR-binding peptide
SQDLSPISILYKIGKTPKILKYHY

SEQ ID NO: 11231 - protein, 34 aa, Artificial Sequence
  Cyclic GFR-binding peptide
  MOD_RES (2)..(3): Xaa is C or S
AXXVPTELNAISMLYFDEYDKVVLKKYREMVVEG

SEQ ID NO: 11232 - protein, 31 aa, Artificial Sequence
  Cyclic GFR-binding peptide
  MOD_RES (2)..(3): Xaa is C or S
PXXAPTQLSPISVLYKDDSSNVILKYHYNMV

SEQ ID NO: 11233 - protein, 21 aa, Artificial Sequence
  Cyclic GFR-binding peptide
LSPISMLYKDENEKVVLKYHY

SEQ ID NO: 11234 - protein, 29 aa, Artificial Sequence
  Cyclic GFR-binding peptide
  MOD_RES (29)..(29): Xaa is C or S
LSATSVLYYDDMGVPTLRKHREGMSVAEX

SEQ ID NO: 11235 - protein, 22 aa, Artificial Sequence
  Cyclic GFR-binding peptide
SAISILYLIGKTPKILKNYQMI

SEQ ID NO: 11236 - protein, 37 aa, Artificial Sequence
  Cyclic GFR-binding peptide
  MOD_RES (4)..(5)..(37): Xaa is C or S
PKAXXVPTELNAISMLYFDENEKVVLKKYRDMVVEGX

SEQ ID NO: 11237 - protein, 32 aa, Artificial Sequence
  Cyclic GFR-binding peptide
  MOD_RES (1)..(2): Xaa is C or S
XXVPTKLSATSVLYYDDMGVPTLRKHREGMSV

SEQ ID NO: 11238 - protein, 38 aa, Artificial Sequence
  Cyclic GFR-binding peptide
  MOD_RES (3)..(4)..(36)..(38): Xaa is C or S
KPXXAPTKLSPISVLYKDDSSNVILKYHYNMVVRSXGX

SEQ ID NO: 11239 - protein, 32 aa, Artificial Sequence
  Cyclic GFR-binding peptide
  MOD_RES (5)..(6): Xaa is C or S
VPKPXXAPTQLSAISVLYLDDSSNVILKNYQN

SEQ ID NO: 11240 - protein, 35 aa, Artificial Sequence
  Cyclic GFR-binding peptide
  MOD_RES (32)..(34): Xaa is C or S
QLSPISVLYKEIVRKKPIFLKYHYTLEDHLAXKXE

SEQ ID NO: 11241 - protein, 26 aa, Artificial Sequence
  Cyclic GFR-binding peptide
  MOD_RES (1)..(1): Xaa is C or S
XVSQDLSPISILYKIGKTPKILKYHY

SEQ ID NO: 11242 - protein, 38 aa, Artificial Sequence
  Cyclic GFR-binding peptide
  MOD_RES (5)..(37): Xaa is C or S
TKPTXAPTKLSPISVLYKDDSSNVILKYHYNMVVRSXG

SEQ ID NO: 11243 - protein, 32 aa, Artificial Sequence
  Cyclic GFR-binding peptide
  MOD_RES (7)..(7): Xaa is C or S
HVTKPTXAPTKLSPISVLYKDDSSNVILKYHY

SEQ ID NO: 11244 - protein, 32 aa, Artificial Sequence
  Cyclic GFR-binding peptide
  MOD_RES (5)..(6): Xaa is C or S
SAAPXXVPQALNAISILYFVGRKPKVLKKYRM

SEQ ID NO: 11245 - protein, 32 aa, Artificial Sequence
  Cyclic GFR-binding peptide
  MOD_RES (30)..(32): Xaa is C or S
PQDLSPISILYKVGRTPKVLKYHYMVVKSXKX

SEQ ID NO: 11246 - protein, 26 aa, Artificial Sequence
  Cyclic GFR-binding peptide
QDLNAISILYFIGKTPKILKKYRMIV

SEQ ID NO: 11247 - protein, 30 aa, Artificial Sequence
  Cyclic GFR-binding peptide
  MOD_RES (29)..(29): Xaa is C or S
ELSPISMLYKDENEKVVLKYHYDMVVEGXG

SEQ ID NO: 11248 - protein, 39 aa, Artificial Sequence
  Cyclic GFR-binding peptide
  MOD_RES (37)..(39): Xaa is C or S
RPTQVQLSAISVLYLEIVRKKPIFLKNYQTLEDHLAXKX

SEQ ID NO: 11249 - protein, 31 aa, Artificial Sequence
  Cyclic GFR-binding peptide
  MOD_RES (30)..(30): Xaa is C or S
PQALNAISILYFVGRKPKVLKKYRMIVRSXK

SEQ ID NO: 11250 - protein, 26 aa, Artificial Sequence
  Cyclic GFR-binding peptide
VPTELSPISMLYKDEYDKVVLKYHYE

SEQ ID NO: 11251 - protein, 31 aa, Artificial Sequence
  Cyclic GFR-binding peptide
  MOD_RES (4)..(5): Xaa is C or S
PKPXXAPTKLSAISVLYLDDSSNVILKNYQN

SEQ ID NO: 11252 - protein, 30 aa, Artificial Sequence
  Cyclic GFR-binding peptide
VPQALSAISILYLVGRKPKVLKNYQMIVRS

SEQ ID NO: 11253 - protein, 29 aa, Artificial Sequence
  Cyclic GFR-binding peptide
  MOD_RES (29)..(29): Xaa is C or S
QALSAISILYLVGRKPKVLKNYQMIVRSX

SEQ ID NO: 11254 - protein, 40 aa, Artificial Sequence
  Cyclic GFR-binding peptide
  MOD_RES (6)..(7)..(39): Xaa is C or S
KIPKAXXVPTELNAISMLYFDENEKVVLKKYRDMVVEGXG

SEQ ID NO: 11255 - protein, 27 aa, Artificial Sequence
  Cyclic GFR-binding peptide
ELSPISMLYKDENEKVVLKYHYDMVVE

SEQ ID NO: 11256 - protein, 26 aa, Artificial Sequence
  Cyclic GFR-binding peptide
LSPISILYKIGKTPKILKYHYMIVKS

SEQ ID NO: 11257 - protein, 29 aa, Artificial Sequence
  Cyclic GFR-binding peptide
  MOD_RES (27)..(29): Xaa is C or S
NAISMLYFDENEKVVLKKYRDMVVEGXGX

SEQ ID NO: 11258 - protein, 33 aa, Artificial Sequence
  Cyclic GFR-binding peptide
QVQLSPISVLYKEIVRKKPIFLKYHYTLEDHLA

SEQ ID NO: 11259 - protein, 37 aa, Artificial Sequence
  Cyclic GFR-binding peptide
  MOD_RES (3)..(4)..(35)..(37): Xaa is C or S
SPXXVSQDLSAISILYLIGKTPKILKNYQMIVKSXKX

SEQ ID NO: 11260 - protein, 38 aa, Artificial Sequence
  Cyclic GFR-binding peptide
  MOD_RES (4)..(4): Xaa is C or S
NVQXRPTQVQLSATSVLYYEIVRKKPIFLRKHRTLEDH

SEQ ID NO: 11261 - protein, 43 aa, Artificial Sequence
  Cyclic GFR-binding peptide
  MOD_RES (3)..(40)..(42): Xaa is C or S
VQXRPTQVQLNAISVLYFEIVRKKPIFLKKYRTLEDHLAXKXE

SEQ ID NO: 11262 - protein, 37 aa, Artificial Sequence
  Cyclic GFR-binding peptide
  MOD_RES (4)..(5)..(37): Xaa is C or S
PKAXXAPTKLSAISVLYLDSSNNVILKNYQNMVVKAX

SEQ ID NO: 11263 - protein, 42 aa, Artificial Sequence
  Cyclic GFR-binding peptide
  MOD_RES (6)..(7)..(39)..(41): Xaa is C or S
YVPKPXXAPTKLSATSVLYYDDSSNVILRKHRNMVVRSXGXH

SEQ ID NO: 11264 - protein, 23 aa, Artificial Sequence
  Cyclic GFR-binding peptide
SPISILYKIGKTPKILKYHYMIV

SEQ ID NO: 11265 - protein, 31 aa, Artificial Sequence
  Cyclic GFR-binding peptide
  MOD_RES (1)..(2): Xaa is C or S
XXVSQDLSPISILYKIGKTPKILKYHYMIVK

SEQ ID NO: 11266 - protein, 28 aa, Artificial Sequence
  Cyclic GFR-binding peptide
VPTELSATSMLYYDENEKVVLRKHRDMV

SEQ ID NO: 11267 - protein, 32 aa, Artificial Sequence
  Cyclic GFR-binding peptide
  MOD_RES (1)..(2): Xaa is C or S
XXAPTQLSATSVLYYDDSSNVILRKHRNMVVR

SEQ ID NO: 11268 - protein, 20 aa, Artificial Sequence
  Cyclic GFR-binding peptide
NAISMLYFDEYDKVVLKKYR

SEQ ID NO: 11269 - protein, 38 aa, Artificial Sequence
  Cyclic GFR-binding peptide
  MOD_RES (2)..(3)..(35)..(37): Xaa is C or S
AXXVPTELSATSMLYYDENEKVVLRKHRDMVVEGXGXR

SEQ ID NO: 11270 - protein, 30 aa, Artificial Sequence
  Cyclic GFR-binding peptide
PTELNAISMLYFDENEKVVLKKYRDMVVEG

SEQ ID NO: 11271 - protein, 29 aa, Artificial Sequence
  Cyclic GFR-binding peptide
  MOD_RES (27)..(29): Xaa is C or S
SAISVLYLDDSSNVILKNYQNMVVRAXGX

SEQ ID NO: 11272 - protein, 30 aa, Artificial Sequence
  Cyclic GFR-binding peptide
  MOD_RES (28)..(30): Xaa is C or S
ALSAISILYLVGRKPKVLKNYQMIVRSXKX

SEQ ID NO: 11273 - protein, 37 aa, Artificial Sequence
  Cyclic GFR-binding peptide
  MOD_RES (4)..(5)..(36): Xaa is C or S
ASPXXVPQDLSPISILYKVGRTPKVLKYHYMVVKSXK

SEQ ID NO: 11274 - protein, 28 aa, Artificial Sequence
  Cyclic GFR-binding peptide
TQVQLSAISVLYLEIVRKKPIFLKNYQT

SEQ ID NO: 11275 - protein, 35 aa, Artificial Sequence
  Cyclic GFR-binding peptide
  MOD_RES (5)..(6): Xaa is C or S
IPKAXXVPTELSATSMLYYDEYDKVVLRKHREMVV

SEQ ID NO: 11276 - protein, 24 aa, Artificial Sequence
  Cyclic GFR-binding peptide
QDLSAISILYLVGRTPKVLKNYQM

SEQ ID NO: 11277 - protein, 38 aa, Artificial Sequence
  Cyclic GFR-binding peptide
  MOD_RES (6)..(38): Xaa is C or S
VTKPTXAPTKLSATSVLYYDDSSNVILRKHRNMVVRSX

SEQ ID NO: 11278 - protein, 31 aa, Artificial Sequence
  Cyclic GFR-binding peptide
  MOD_RES (31)..(31): Xaa is C or S
LNAISVLYFEIVRKKPIFLKKYRTLEDHLAX

SEQ ID NO: 11279 - protein, 40 aa, Artificial Sequence
  Cyclic GFR-binding peptide
  MOD_RES (6)..(7)..(39): Xaa is C or S
AVPKAXXAPTKLSAISVLYLDSSNNVILKNYQNMVVKAXG

SEQ ID NO: 11280 - protein, 36 aa, Artificial Sequence
  Cyclic GFR-binding peptide
  MOD_RES (1)..(34)..(36): Xaa is C or S
XVPTKLSAISVLYLDDMGVPTLKNYQEGMSVAEXGX

SEQ ID NO: 11281 - protein, 36 aa, Artificial Sequence
  Cyclic GFR-binding peptide
  MOD_RES (6)..(7): Xaa is C or S
ASASPXXVPQDLSPISILYKVGRTPKVLKYHYMVVK

SEQ ID NO: 11282 - protein, 32 aa, Artificial Sequence
  Cyclic GFR-binding peptide
  MOD_RES (4)..(5): Xaa is C or S
ASPXXVSQDLNAISILYFIGKTPKILKKYRMI

SEQ ID NO: 11283 - protein, 35 aa, Artificial Sequence
  Cyclic GFR-binding peptide
  MOD_RES (1)..(2)..(34): Xaa is C or S
XXAPTQLSAISVLYLDDSSNVILKNYQNMVVRAXG

SEQ ID NO: 11284 - protein, 34 aa, Artificial Sequence
  Cyclic GFR-binding peptide
  MOD_RES (3)..(4): Xaa is C or S
KAXXVPTKLSATSVLYYDDMGVPTLRKHREGMSV

SEQ ID NO: 11285 - protein, 39 aa, Artificial Sequence
  Cyclic GFR-binding peptide
  MOD_RES (3)..(4)..(36)..(38): Xaa is C or S
KPXXAPTKLSAISVLYLDDSSNVILKNYQNMVVRSXGXH

SEQ ID NO: 11286 - protein, 23 aa, Artificial Sequence
  Cyclic GFR-binding peptide
QDLNAISILYFIGKTPKILKKYR

SEQ ID NO: 11287 - protein, 31 aa, Artificial Sequence
  Cyclic GFR-binding peptide
  MOD_RES (28)..(30): Xaa is C or S
ALNAISILYFVGRKPKVLKKYRMIVRSXKXS

SEQ ID NO: 11288 - protein, 22 aa, Artificial Sequence
  Cyclic GFR-binding peptide
SATSVLYYEIVRKKPIFLRKHR

SEQ ID NO: 11289 - protein, 24 aa, Artificial Sequence
  Cyclic GFR-binding peptide
ELSPISMLYKDEYDKVVLKYHYEM

SEQ ID NO: 11290 - protein, 26 aa, Artificial Sequence
  Cyclic GFR-binding peptide
PTKLSAISVLYLDDSSNVILKNYQNM

SEQ ID NO: 11291 - protein, 26 aa, Artificial Sequence
  Cyclic GFR-binding peptide
TKLSAISVLYLDDMGVPTLKNYQEGM

SEQ ID NO: 11292 - protein, 34 aa, Artificial Sequence
  Cyclic GFR-binding peptide
  MOD_RES (4)..(5): Xaa is C or S
GKAXXVPTKLSATSVLYYDDMGVPTLRKHREGMS

SEQ ID NO: 11293 - protein, 32 aa, Artificial Sequence
  Cyclic GFR-binding peptide
  MOD_RES (1)..(1): Xaa is C or S
XAPTKLSAISVLYLDSSNNVILKNYQNMVVKA

SEQ ID NO: 11294 - protein, 26 aa, Artificial Sequence
  Cyclic GFR-binding peptide
VPTELSATSMLYYDENEKVVLRKHRD

SEQ ID NO: 11295 - protein, 36 aa, Artificial Sequence
  Cyclic GFR-binding peptide
  MOD_RES (6)..(6): Xaa is C or S
VTKPTXAPTKLSPISVLYKDDSSNVILKYHYNMVVR

SEQ ID NO: 11296 - protein, 28 aa, Artificial Sequence
  Cyclic GFR-binding peptide
  MOD_RES (1)..(2): Xaa is C or S
XXVPQALNAISILYFVGRKPKVLKKYRM

SEQ ID NO: 11297 - protein, 30 aa, Artificial Sequence
  Cyclic GFR-binding peptide
  MOD_RES (3)..(4): Xaa is C or S
KAXXAPTKLSAISVLYLDSSNNVILKNYQN

SEQ ID NO: 11298 - protein, 40 aa, Artificial Sequence
  Cyclic GFR-binding peptide
  MOD_RES (4)..(5)..(37)..(39): Xaa is C or S
PKPXXAPTKLSATSVLYYDDSSNVILRKHRNMVVRSXGXH

SEQ ID NO: 11299 - protein, 31 aa, Artificial Sequence
  Cyclic GFR-binding peptide
  MOD_RES (29)..(31): Xaa is C or S
QALSPISILYKVGRKPKVLKYHYMIVRSXKX

SEQ ID NO: 11300 - protein, 33 aa, Artificial Sequence
  Cyclic GFR-binding peptide
  MOD_RES (3)..(4): Xaa is C or S
KAXXVPTKLSATSVLYYDDMGVPTLRKHREGMS

SEQ ID NO: 11301 - protein, 22 aa, Artificial Sequence
  Cyclic GFR-binding peptide
NAISMLYFDENEKVVLKKYRDM

SEQ ID NO: 11302 - protein, 37 aa, Artificial Sequence
  Cyclic GFR-binding peptide
  MOD_RES (3)..(4)..(35)..(37): Xaa is C or S
SPXXVPQDLSAISILYLVGRTPKVLKNYQMVVKSXKX

SEQ ID NO: 11303 - protein, 32 aa, Artificial Sequence
  Cyclic GFR-binding peptide
  MOD_RES (6)..(7): Xaa is C or S
TVPKPXXAPTQLSPISVLYKDDSSNVILKYHY

SEQ ID NO: 11304 - protein, 41 aa, Artificial Sequence
  Cyclic GFR-binding peptide
  MOD_RES (2)..(39)..(41): Xaa is C or S
QXRPTQVQLNAISVLYFEIVRKKPIFLKKYRTLEDHLAXKX

SEQ ID NO: 11305 - protein, 36 aa, Artificial Sequence
  Cyclic GFR-binding peptide
  MOD_RES (2)..(3)..(35): Xaa is C or S
AXXAPTKLSPISVLYKDSSNNVILKYHYNMVVKAXG

SEQ ID NO: 11306 - protein, 27 aa, Artificial Sequence
  Cyclic GFR-binding peptide
  MOD_RES (27)..(27): Xaa is C or S
LSPISILYKVGRKPKVLKYHYMIVRSX

SEQ ID NO: 11307 - protein, 29 aa, Artificial Sequence
  Cyclic GFR-binding peptide
  MOD_RES (2)..(3): Xaa is C or S
AXXVPTELNAISMLYFDEYDKVVLKKYRE

SEQ ID NO: 11308 - protein, 27 aa, Artificial Sequence
  Cyclic GFR-binding peptide
  MOD_RES (26)..(26): Xaa is C or S
SATSILYYVGRTPKVLRKHRMVVKSXK

SEQ ID NO: 11309 - protein, 34 aa, Artificial Sequence
  Cyclic GFR-binding peptide
  MOD_RES (5)..(6): Xaa is C or S
SAAPXXVPQALSPISILYKVGRKPKVLKYHYMIV

SEQ ID NO: 11310 - protein, 32 aa, Artificial Sequence
  Cyclic GFR-binding peptide
  MOD_RES (5)..(6): Xaa is C or S
SASPXXVPQDLSATSILYYVGRTPKVLRKHRM

SEQ ID NO: 11311 - protein, 30 aa, Artificial Sequence
  Cyclic GFR-binding peptide
  MOD_RES (4)..(5): Xaa is C or S
ASPXXVSQDLNAISILYFIGKTPKILKKYR

SEQ ID NO: 11312 - protein, 35 aa, Artificial Sequence
  Cyclic GFR-binding peptide
  MOD_RES (1)..(32)..(34): Xaa is C or S
XVSQDLNAISILYFIGKTPKILKKYRMIVKSXKXS

SEQ ID NO: 11313 - protein, 39 aa, Artificial Sequence
  Cyclic GFR-binding peptide
  MOD_RES (3)..(4)..(36)..(38): Xaa is C or S
KAXXAPTKLSPISVLYKDSSNNVILKYHYNMVVKAXGXH

SEQ ID NO: 11314 - protein, 28 aa, Artificial Sequence
  Cyclic GFR-binding peptide
ELNAISMLYFDENEKVVLKKYRDMVVEG

SEQ ID NO: 11315 - protein, 31 aa, Artificial Sequence
  Cyclic GFR-binding peptide
QVQLSATSVLYYEIVRKKPIFLRKHRTLEDH

SEQ ID NO: 11316 - protein, 33 aa, Artificial Sequence
  Cyclic GFR-binding peptide
  MOD_RES (2)..(3): Xaa is C or S
AXXVPTELNAISMLYFDEYDKVVLKKYREMVVE

SEQ ID NO: 11317 - protein, 25 aa, Artificial Sequence
  Cyclic GFR-binding peptide
VPTELSATSMLYYDENEKVVLRKHR

SEQ ID NO: 11318 - protein, 34 aa, Artificial Sequence
  Cyclic GFR-binding peptide
  MOD_RES (4)..(5): Xaa is C or S
ASPXXVPQDLSAISILYLVGRTPKVLKNYQMVVK

SEQ ID NO: 11319 - protein, 31 aa, Artificial Sequence
  Cyclic GFR-binding peptide
  MOD_RES (1)..(2): Xaa is C or S
XXVPTKLSATSVLYYDDMGVPTLRKHREGMS

SEQ ID NO: 11320 - protein, 33 aa, Artificial Sequence
  Cyclic GFR-binding peptide
  MOD_RES (1)..(32): Xaa is C or S
XVPQDLSAISILYLVGRTPKVLKNYQMVVKSXK

SEQ ID NO: 11321 - protein, 31 aa, Artificial Sequence
  Cyclic GFR-binding peptide
  MOD_RES (4)..(5): Xaa is C or S
ASPXXVSQDLNAISILYFIGKTPKILKKYRM

SEQ ID NO: 11322 - protein, 28 aa, Artificial Sequence
  Cyclic GFR-binding peptide
  MOD_RES (1)..(1): Xaa is C or S
XSRVVMNQYNKLIVNSSDDLYLVSIASL

SEQ ID NO: 11323 - protein, 38 aa, Artificial Sequence; identical to SEQ ID NO: 749
  Cyclic GFR-binding peptide
  MOD_RES (32)..(33): Xaa is C or S

SEQ ID NO: 11324 - protein, 30 aa, Artificial Sequence
  Cyclic GFR-binding peptide
  MOD_RES (29)..(30): Xaa is C or S
VMDNSLQEVVNNASDYYLITLPELRTPVXX

SEQ ID NO: 11325 - protein, 36 aa, Artificial Sequence
  Cyclic GFR-binding peptide
  MOD_RES (2)..(4)..(36): Xaa is C or S
HXGXSRVVMNNSLQEIVNSSDDYYVVPLPELKTPAX

SEQ ID NO: 11326 - protein, 35 aa, Artificial Sequence; identical to SEQ ID NO: 752
  Cyclic GFR-binding peptide
  MOD_RES (2)..(4): Xaa is C or S

SEQ ID NO: 11327 - protein, 24 aa, Artificial Sequence
  Cyclic GFR-binding peptide
MRYKKLIKPTKGIFYLISIANLDQ

SEQ ID NO: 11328 - protein, 29 aa, Artificial Sequence
  Cyclic GFR-binding peptide
  MOD_RES (1)..(1): Xaa is C or S
XSKVVMRYKKLVKPTRGVFYLISIANLDQ

SEQ ID NO: 11329 - protein, 30 aa, Artificial Sequence; identical to SEQ ID NO: 757
  Cyclic GFR-binding peptide
  MOD_RES (1)..(1): Xaa is C or S

SEQ ID NO: 11330 - protein, 25 aa, Artificial Sequence
  Cyclic GFR-binding peptide
QYNKLIKPTKGILYLISIASLDQSV

SEQ ID NO: 11331 - protein, 33 aa, Artificial Sequence; identical to SEQ ID NO: 760
  Cyclic GFR-binding peptide
  MOD_RES (2)..(2): Xaa is C or S

SEQ ID NO: 11332 - protein, 28 aa, Artificial Sequence
  Cyclic GFR-binding peptide
RVIMRYKKLVKPKRGVFYLISIANLAQP

SEQ ID NO: 11333 - protein, 26 aa, Artificial Sequence
  Cyclic GFR-binding peptide
SKVIMQYNKLIKPTKGILYLISIASL

SEQ ID NO: 11334 - protein, 25 aa, Artificial Sequence
  Cyclic GFR-binding peptide
VVMDRYKKLVVKENEDFYLMSIANL

SEQ ID NO: 11335 - protein, 32 aa, Artificial Sequence
  Cyclic GFR-binding peptide
  MOD_RES (26)..(27): Xaa is C or S
NSLQEIVNSSDDYYVVPLPELKTPAXXPKPVY

SEQ ID NO: 11336 - protein, 33 aa, Artificial Sequence; identical to SEQ ID NO: 764
  Cyclic GFR-binding peptide
  MOD_RES (2)..(4): Xaa is C or S

SEQ ID NO: 11337 - protein, 35 aa, Artificial Sequence
  Cyclic GFR-binding peptide
  MOD_RES (1)..(33)..(34): Xaa is C or S
XGEVVMENSLQEVVKDYEDYYVMPLPELETPVXXA

SEQ ID NO: 11338 - protein, 34 aa, Artificial Sequence
  Cyclic GFR-binding peptide
  MOD_RES (2)..(34): Xaa is C or S
GXARVVMNNSLQEIVNSSDDYYLVTLPELQTPAX

SEQ ID NO: 11339 - protein, 25 aa, Artificial Sequence
  Cyclic GFR-binding peptide
RYKKLVVNNASDFYLISIANLRTPV

SEQ ID NO: 11340 - protein, 25 aa, Artificial Sequence
  Cyclic GFR-binding peptide
EYQKYIVNSSDDIFLVSIPSLKTPA

SEQ ID NO: 11341 - protein, 28 aa, Artificial Sequence
  Cyclic GFR-binding peptide
  MOD_RES (27)..(28): Xaa is C or S
DNSLQEVVNNASDYYVIPLPELRTPVXX

SEQ ID NO: 11342 - protein, 24 aa, Artificial Sequence
  Cyclic GFR-binding peptide
KVIMNSLQEIKPTKGIYYLITLPE

SEQ ID NO: 11343 - protein, 32 aa, Artificial Sequence
  Cyclic GFR-binding peptide
  MOD_RES (26)..(27): Xaa is C or S
NSLQEVKPTRGVYYVIPLPELDQPVXXPSASA

SEQ ID NO: 11344 - protein, 40 aa, Artificial Sequence
  Cyclic GFR-binding peptide
  MOD_RES (2)..(34)..(35): Xaa is C or S
GXGEVVMDNSLQEVVKENEDYYVMPLPELETPVXXAKPIK

SEQ ID NO: 11345 - protein, 27 aa, Artificial Sequence
  Cyclic GFR-binding peptide
  MOD_RES (26)..(26): Xaa is C or S
NSLQEIVNSSDDYYLVTLPELKTPAXT

SEQ ID NO: 11346 - protein, 28 aa, Artificial Sequence
  Cyclic GFR-binding peptide
  MOD_RES (28)..(28): Xaa is C or S
MNRYKKLIVNSSDDFYLVSIANLQTPAX

SEQ ID NO: 11347 - protein, 38 aa, Artificial Sequence; identical to SEQ ID NO: 770
  Cyclic GFR-binding peptide
  MOD_RES (1)..(3)..(34)..(35): Xaa is C or S

SEQ ID NO: 11348 - protein, 26 aa, Artificial Sequence
  Cyclic GFR-binding peptide
VMNNSLQEIVNSSDDYYLVTLPELQT

SEQ ID NO: 11349 - protein, 35 aa, Artificial Sequence
  Cyclic GFR-binding peptide
  MOD_RES (1)..(33)..(34): Xaa is C or S
XSRVVMNEYQKYIVNSSDDIFLVSIPSLKTPAXXP

SEQ ID NO: 11350 - protein, 34 aa, Artificial Sequence
  Cyclic GFR-binding peptide
  MOD_RES (28)..(29): Xaa is C or S
VMNSLQEVKPTRGVYYVIPLPELDQPVXXPSASA

SEQ ID NO: 11351 - protein, 31 aa, Artificial Sequence
  Cyclic GFR-binding peptide
  MOD_RES (29)..(30): Xaa is C or S
VVMEYQKYVKPTRGVIFLISIPSLDQPVXXP

SEQ ID NO: 11352 - protein, 22 aa, Artificial Sequence
  Cyclic GFR-binding peptide
MRYKKLVKPKRGVFYLISIANL

SEQ ID NO: 11353 - protein, 35 aa, Artificial Sequence; identical to SEQ ID NO: 775
  Cyclic GFR-binding peptide
  MOD_RES (31)..(32): Xaa is C or S

SEQ ID NO: 11354 - protein, 29 aa, Artificial Sequence
  Cyclic GFR-binding peptide
RVVMNEYQKYIVNSSDDIFLVSIPSLQTP

SEQ ID NO: 11355 - protein, 42 aa, Artificial Sequence; identical to SEQ ID NO: 777
  Cyclic GFR-binding peptide
  MOD_RES (2)..(4)..(36)..(37): Xaa is C or S

SEQ ID NO: 11356 - protein, 30 aa, Artificial Sequence; identical to SEQ ID NO: 778
  Cyclic GFR-binding peptide

SEQ ID NO: 11357 - protein, 32 aa, Artificial Sequence
  Cyclic GFR-binding peptide
  MOD_RES (26)..(27): Xaa is C or S
QYNKLVVNNASDLYLISIASLRTPVXXTPPTS

SEQ ID NO: 11358 - protein, 36 aa, Artificial Sequence
  Cyclic GFR-binding peptide
  MOD_RES (30)..(31): Xaa is C or S
RVIMEYQKYVKPKRGVIFLISIPSLAQPVXXPAASA

SEQ ID NO: 11359 - protein, 23 aa, Artificial Sequence
  Cyclic GFR-binding peptide
MNRYKKLIVNSSDDFYLVSIANL

SEQ ID NO: 11360 - protein, 33 aa, Artificial Sequence
  Cyclic GFR-binding peptide
  MOD_RES (27)..(28): Xaa is C or S
MNSLQEIKPTKGIYYVIPLPELDQSVXXPSASA

SEQ ID NO: 11361 - protein, 35 aa, Artificial Sequence
  Cyclic GFR-binding peptide
  MOD_RES (1)..(33)..(34): Xaa is C or S
XSEVVMDNSLQEVVNNASDYYVIPLPELRTPVXXT

SEQ ID NO: 11362 - protein, 35 aa, Artificial Sequence
  Cyclic GFR-binding peptide
  MOD_RES (2)..(34)..(35): Xaa is C or S
GXGEVVMENSLQEVVKDYEDYYVMPLPELETPVXX

SEQ ID NO: 11363 - protein, 39 aa, Artificial Sequence; identical to SEQ ID NO: 784
  Cyclic GFR-binding peptide
  MOD_RES (1)..(3)..(35)..(36): Xaa is C or S

SEQ ID NO: 11364 - protein, 38 aa, Artificial Sequence; identical to SEQ ID NO: 785
  Cyclic GFR-binding peptide
  MOD_RES (1)..(33): Xaa is C or S

SEQ ID NO: 11365 - protein, 27 aa, Artificial Sequence
  Cyclic GFR-binding peptide
  MOD_RES (27)..(27): Xaa is C or S
DRYKKLVVNNASDFYLISIANLRTPVX

SEQ ID NO: 11366 - protein, 35 aa, Artificial Sequence; identical to SEQ ID NO: 786
  Cyclic GFR-binding peptide
  MOD_RES (1)..(32)..(33): Xaa is C or S

SEQ ID NO: 11367 - protein, 24 aa, Artificial Sequence
  Cyclic GFR-binding peptide
MDQYNKLVVKENEDLYLMSIASLE

SEQ ID NO: 11368 - protein, 30 aa, Artificial Sequence
  Cyclic GFR-binding peptide
  MOD_RES (27)..(28): Xaa is C or S
MNSLQEIKPTKGIYYVIPLPELDQSVXXPS

SEQ ID NO: 11369 - protein, 27 aa, Artificial Sequence
  Cyclic GFR-binding peptide
EVVMDEYQKYVVKENEDIFLMSIPSLE

SEQ ID NO: 11370 - protein, 37 aa, Artificial Sequence
  Cyclic GFR-binding peptide
  MOD_RES (32)..(33): Xaa is C or S
GEVVMENSLQEVVKDYEDYYLMTLPELETPVXXAKPI

SEQ ID NO: 11371 - protein, 36 aa, Artificial Sequence
  Cyclic GFR-binding peptide
  MOD_RES (1)..(32)..(33): Xaa is C or S
XSKVIMNSLQEIKPTKGIYYLITLPELDQSVXXPSA

SEQ ID NO: 11372 - protein, 22 aa, Artificial Sequence
  Cyclic GFR-binding peptide
NNSLQEIVNSSDDYYVVPLPEL

SEQ ID NO: 11373 - protein, 31 aa, Artificial Sequence; identical to SEQ ID NO: 794
  Cyclic GFR-binding peptide
  MOD_RES (26)..(27): Xaa is C or S

SEQ ID NO: 11374 - protein, 37 aa, Artificial Sequence; identical to SEQ ID NO: 796
  Cyclic GFR-binding peptide
  MOD_RES (31)..(32): Xaa is C or S

SEQ ID NO: 11375 - protein, 27 aa, Artificial Sequence
  Cyclic GFR-binding peptide
VVMDEYQKYVVKENEDIFLMSIPSLET

SEQ ID NO: 11376 - protein, 35 aa, Artificial Sequence
  Cyclic GFR-binding peptide
  MOD_RES (31)..(32): Xaa is C or S
EVVMDNSLQEVVNNASDYYLITLPELRTPVXXTPP

SEQ ID NO: 11377 - protein, 33 aa, Artificial Sequence
  Cyclic GFR-binding peptide
  MOD_RES (2)..(4): Xaa is C or S
HXGXSRVVMNNSLQEIVNSSDDYYVVPLPELKT

SEQ ID NO: 11378 - protein, 25 aa, Artificial Sequence
  Cyclic GFR-binding peptide
DNSLQEVVKENEDYYVMPLPELETP

SEQ ID NO: 11379 - protein, 29 aa, Artificial Sequence
  Cyclic GFR-binding peptide
SRVIMRYKKLVKPKRGVFYLISIANLAQP

SEQ ID NO: 11380 - protein, 38 aa, Artificial Sequence; identical to SEQ ID NO: 804
  Cyclic GFR-binding peptide
  MOD_RES (32)..(32): Xaa is C or S

SEQ ID NO: 11381 - protein, 34 aa, Artificial Sequence
  Cyclic GFR-binding peptide
  MOD_RES (2)..(4): Xaa is C or S
RXGXSEVVMDQYNKLVVNNASDLYLISIASLRTP

SEQ ID NO: 11382 - protein, 30 aa, Artificial Sequence; identical to SEQ ID NO: 808
  Cyclic GFR-binding peptide
  MOD_RES (2)..(2): Xaa is C or S

SEQ ID NO: 11383 - protein, 33 aa, Artificial Sequence
  Cyclic GFR-binding peptide
  MOD_RES (2)..(2): Xaa is C or S
GXSRVVMNEYQKYIVNSSDDIFLVSIPSLKTPA

SEQ ID NO: 11384 - protein, 37 aa, Artificial Sequence
  Cyclic GFR-binding peptide
  MOD_RES (1)..(33)..(34): Xaa is C or S
XSEVVMDNSLQEVVNNASDYYVIPLPELRTPVXXTPP

SEQ ID NO: 11385 - protein, 24 aa, Artificial Sequence
  Cyclic GFR-binding peptide
NSLQEIVNSSDDYYLVTLPELKTP

SEQ ID NO: 11386 - protein, 30 aa, Artificial Sequence
  Cyclic GFR-binding peptide
  MOD_RES (1)..(1): Xaa is C or S
XSKVIMNSLQEIKPTKGIYYVIPLPELDQS

SEQ ID NO: 11387 - protein, 26 aa, Artificial Sequence
  Cyclic GFR-binding peptide
SEVVMDNSLQEVVNNASDYYLITLPE

SEQ ID NO: 11388 - protein, 33 aa, Artificial Sequence; identical to SEQ ID NO: 813
  Cyclic GFR-binding peptide
  MOD_RES (30)..(31): Xaa is C or S

SEQ ID NO: 11389 - protein, 22 aa, Artificial Sequence
  Cyclic GFR-binding peptide
MQYNKLIKPTKGILYLISIASL

SEQ ID NO: 11390 - protein, 25 aa, Artificial Sequence
  Cyclic GFR-binding peptide
IMEYQKYVKPKRGVIFLISIPSLAQ

SEQ ID NO: 11391 - protein, 32 aa, Artificial Sequence; identical to SEQ ID NO: 817
  Cyclic GFR-binding peptide
  MOD_RES (31)..(32): Xaa is C or S

SEQ ID NO: 11392 - protein, 41 aa, Artificial Sequence
  Cyclic GFR-binding peptide
  MOD_RES (1)..(3)..(35)..(36): Xaa is C or S
XGXSEVVMDQYNKLVVNNASDLYLISIASLRTPVXXTPPTS

SEQ ID NO: 11393 - protein, 20 aa, Artificial Sequence
  Cyclic GFR-binding peptide
EYQKYVKPKRGVIFLISIPS

SEQ ID NO: 11394 - protein, 29 aa, Artificial Sequence
  Cyclic GFR-binding peptide
  MOD_RES (1)..(3): Xaa is C or S
XGXGEVVMEEYQKYVVKDYEDIFLMSIPS

SEQ ID NO: 11395 - protein, 35 aa, Artificial Sequence
  Cyclic GFR-binding peptide
  MOD_RES (30)..(31): Xaa is C or S
VVMDQYNKLVVNNASDLYLISIASLRTPVXXTPPT

SEQ ID NO: 11396 - protein, 35 aa, Artificial Sequence; identical to SEQ ID NO: 819
  Cyclic GFR-binding peptide
  MOD_RES (2)..(4)..(35): Xaa is C or S

SEQ ID NO: 11397 - protein, 26 aa, Artificial Sequence
  Cyclic GFR-binding peptide
  MOD_RES (26)..(26): Xaa is C or S
RYKKLVVKDYEDFYLMSIANLETPVX

SEQ ID NO: 11398 - protein, 30 aa, Artificial Sequence
  Cyclic GFR-binding peptide
  MOD_RES (27)..(28): Xaa is C or S
DEYQKYVVKENEDIFLMSIPSLETPVXXAK

SEQ ID NO: 11399 - protein, 40 aa, Artificial Sequence; identical to SEQ ID NO: 824
  Cyclic GFR-binding peptide
  MOD_RES (1)..(3)..(35): Xaa is C or S

SEQ ID NO: 11400 - protein, 32 aa, Artificial Sequence; identical to SEQ ID NO: 825
  Cyclic GFR-binding peptide
  MOD_RES (28)..(29): Xaa is C or S

SEQ ID NO: 11401 - protein, 33 aa, Artificial Sequence; identical to SEQ ID NO: 826
  Cyclic GFR-binding peptide
  MOD_RES (1)..(3): Xaa is C or S

SEQ ID NO: 11402 - protein, 40 aa, Artificial Sequence
  Cyclic GFR-binding peptide
  MOD_RES (1)..(3)..(34)..(35): Xaa is C or S
XKXSKVVMEYQKYVKPTRGVIFLISIPSLDQPVXXPSASA

SEQ ID NO: 11403 - protein, 28 aa, Artificial Sequence
  Cyclic GFR-binding peptide
  MOD_RES (2)..(2): Xaa is C or S
GXSRVVMNQYNKLIVNSSDDLYLVSIAS

SEQ ID NO: 11404 - protein, 35 aa, Artificial Sequence
  Cyclic GFR-binding peptide
  MOD_RES (2)..(4): Xaa is C or S
HXGXSRVVMNNSLQEIVNSSDDYYVVPLPELKTPA

SEQ ID NO: 11405 - protein, 40 aa, Artificial Sequence
  Cyclic GFR-binding peptide
  MOD_RES (1)..(3)..(34)..(35): Xaa is C or S
XKXSKVIMNSLQEIKPTKGIYYLITLPELDQSVXXPSASA

SEQ ID NO: 11406 - protein, 25 aa, Artificial Sequence
  Cyclic GFR-binding peptide
VMNNSLQEIVNSSDDYYLVTLPELK

SEQ ID NO: 11407 - protein, 34 aa, Artificial Sequence
  Cyclic GFR-binding peptide
  MOD_RES (28)..(29): Xaa is C or S
MENSLQEVVKDYEDYYLMTLPELETPVXXAKPIS

SEQ ID NO: 11408 - protein, 25 aa, Artificial Sequence
  Cyclic GFR-binding peptide
VVMNEYQKYIVNSSDDIFLVSIPSL

SEQ ID NO: 11409 - protein, 25 aa, Artificial Sequence
  Cyclic GFR-binding peptide
IMRYKKLIKPTKGIFYLISIANLDQ

SEQ ID NO: 11410 - protein, 31 aa, Artificial Sequence
  Cyclic GFR-binding peptide
SRVVMNNSLQEIVNSSDDYYVVPLPELKTPA

SEQ ID NO: 11411 - protein, 24 aa, Artificial Sequence
  Cyclic GFR-binding peptide
EYQKYVVKDYEDIFLMSIPSLETP

SEQ ID NO: 11412 - protein, 37 aa, Artificial Sequence; identical to SEQ ID NO: 836
  Cyclic GFR-binding peptide
  MOD_RES (1)..(33)..(34): Xaa is C or S

SEQ ID NO: 11413 - protein, 32 aa, Artificial Sequence
  Cyclic GFR-binding peptide
  MOD_RES (1)..(1): Xaa is C or S
XARVVMNNSLQEIVNSSDDYYLVTLPELQTPA

SEQ ID NO: 11414 - protein, 24 aa, Artificial Sequence
  Cyclic GFR-binding peptide
MDNSLQEVVKENEDYYVMPLPELE

SEQ ID NO: 11415 - protein, 30 aa, Artificial Sequence
  Cyclic GFR-binding peptide
  MOD_RES (30)..(30): Xaa is C or S
VVMEEYQKYVVKDYEDIFLMSIPSLETPVX

SEQ ID NO: 11416 - protein, 27 aa, Artificial Sequence
  Cyclic GFR-binding peptide
  MOD_RES (26)..(27): Xaa is C or S
EYQKYIVNSSDDIFLVSIPSLQTPAXX

SEQ ID NO: 11417 - protein, 27 aa, Artificial Sequence
  Cyclic GFR-binding peptide
  MOD_RES (1)..(1): Xaa is C or S
XSRVIMEYQKYVKPKRGVIFLISIPSL

SEQ ID NO: 11418 - protein, 33 aa, Artificial Sequence; identical to SEQ ID NO: 839
  Cyclic GFR-binding peptide
  MOD_RES (2)..(4): Xaa is C or S

SEQ ID NO: 11419 - protein, 35 aa, Artificial Sequence
  Cyclic GFR-binding peptide
  MOD_RES (31)..(32): Xaa is C or S
EVVMDNSLQEVVKENEDYYLMTLPELETPVXXAKP

SEQ ID NO: 11420 - protein, 27 aa, Artificial Sequence
  Cyclic GFR-binding peptide
VMNNSLQEIVNSSDDYYVVPLPELQTP

SEQ ID NO: 11421 - protein, 28 aa, Artificial Sequence
  Cyclic GFR-binding peptide
  MOD_RES (26)..(26): Xaa is C or S
NSLQEIVNSSDDYYLVTLPELKTPAXTP

SEQ ID NO: 11422 - protein, 26 aa, Artificial Sequence
  Cyclic GFR-binding peptide
SRVIMQYNKLVKPKRGVLYLISIASL

SEQ ID NO: 11423 - protein, 35 aa, Artificial Sequence; identical to SEQ ID NO: 841
  Cyclic GFR-binding peptide
  MOD_RES (29)..(30): Xaa is C or S

SEQ ID NO: 11424 - protein, 34 aa, Artificial Sequence; identical to SEQ ID NO: 843
  Cyclic GFR-binding peptide
  MOD_RES (31)..(32): Xaa is C or S

SEQ ID NO: 11425 - protein, 25 aa, Artificial Sequence
  Cyclic GFR-binding peptide
NSLQEVVKENEDYYVMPLPELETPV

SEQ ID NO: 11426 - protein, 36 aa, Artificial Sequence
  Cyclic GFR-binding peptide
  MOD_RES (1)..(33)..(34): Xaa is C or S
XSEVVMDNSLQEVVNNASDYYLITLPELRTPVXXTP

SEQ ID NO: 11427 - protein, 35 aa, Artificial Sequence
  Cyclic GFR-binding peptide
  MOD_RES (2)..(33)..(34): Xaa is C or S
KXSKVIMNSLQEIKPTKGIYYLITLPELDQSVXXP

SEQ ID NO: 11428 - protein, 32 aa, Artificial Sequence; identical to SEQ ID NO: 845
  Cyclic GFR-binding peptide
  MOD_RES (2)..(4): Xaa is C or S

SEQ ID NO: 11429 - protein, 30 aa, Artificial Sequence
  Cyclic GFR-binding peptide
  MOD_RES (29)..(30): Xaa is C or S
VMDQYNKLVVNNASDLYLISIASLRTPVXX

SEQ ID NO: 11430 - protein, 27 aa, Artificial Sequence
  Cyclic GFR-binding peptide
SKVIMNSLQEIKPTKGIYYVIPLPELD

SEQ ID NO: 11431 - protein, 39 aa, Artificial Sequence; identical to SEQ ID NO: 846
  Cyclic GFR-binding peptide
  MOD_RES (2)..(4)..(36)..(37): Xaa is C or S

SEQ ID NO: 11432 - protein, 21 aa, Artificial Sequence
  Cyclic GFR-binding peptide
NSLQEVKPTRGVYYVIPLPEL

SEQ ID NO: 11433 - protein, 38 aa, Artificial Sequence; identical to SEQ ID NO: 848
  Cyclic GFR-binding peptide
  MOD_RES (1)..(3)..(35)..(36): Xaa is C or S

SEQ ID NO: 11434 - protein, 30 aa, Artificial Sequence
  Cyclic GFR-binding peptide
  MOD_RES (27)..(28): Xaa is C or S
DNSLQEVVNNASDYYVIPLPELRTPVXXTP

SEQ ID NO: 11435 - protein, 27 aa, Artificial Sequence
  Cyclic GFR-binding peptide
EVVMDNSLQEVVNNASDYYVIPLPELR

SEQ ID NO: 11436 - protein, 31 aa, Artificial Sequence
  Cyclic GFR-binding peptide
  MOD_RES (1)..(3): Xaa is C or S
XGXARVVMNNSLQEIVNSSDDYYVVPLPELQ

SEQ ID NO: 11437 - protein, 30 aa, Artificial Sequence; identical to SEQ ID NO: 851
  Cyclic GFR-binding peptide
  MOD_RES (29)..(30): Xaa is C or S

SEQ ID NO: 11438 - protein, 27 aa, Artificial Sequence
  Cyclic GFR-binding peptide
GEVVMERYKKLVVKDYEDFYLMSIANL

SEQ ID NO: 11439 - protein, 27 aa, Artificial Sequence
  Cyclic GFR-binding peptide
VVMNEYQKYIVNSSDDIFLVSIPSLKT

SEQ ID NO: 11440 - protein, 28 aa, Artificial Sequence
  Cyclic GFR-binding peptide
VVMEQYNKLVVKDYEDLYLMSIASLETP

SEQ ID NO: 11441 - protein, 31 aa, Artificial Sequence; identical to SEQ ID NO: 855
  Cyclic GFR-binding peptide
  MOD_RES (29)..(30): Xaa is C or S

SEQ ID NO: 11442 - protein, 27 aa, Artificial Sequence
  Cyclic GFR-binding peptide
  MOD_RES (2)..(2): Xaa is C or S
KXSKVIMRYKKLIKPTKGIFYLISIAN

SEQ ID NO: 11443 - protein, 41 aa, Artificial Sequence
  Cyclic GFR-binding peptide
  MOD_RES (2)..(4)..(36)..(37): Xaa is C or S
RXGXGEVVMDEYQKYVVKENEDIFLMSIPSLETPVXXAKPI

SEQ ID NO: 11444 - protein, 21 aa, Artificial Sequence
  Cyclic GFR-binding peptide
MQYNKLVKPKRGVLYLISIAS

SEQ ID NO: 11445 - protein, 32 aa, Artificial Sequence
  Cyclic GFR-binding peptide
  MOD_RES (30)..(30): Xaa is C or S
VVMNNSLQEIVNSSDDYYVVPLPELKTPAXTP

SEQ ID NO: 11446 - protein, 32 aa, Artificial Sequence; identical to SEQ ID NO: 859
  Cyclic GFR-binding peptide
  MOD_RES (2)..(2): Xaa is C or S

SEQ ID NO: 11447 - protein, 29 aa, Artificial Sequence
  Cyclic GFR-binding peptide
SKVVMEYQKYVKPTRGVIFLISIPSLDQP

SEQ ID NO: 11448 - protein, 34 aa, Artificial Sequence
  Cyclic GFR-binding peptide
  MOD_RES (30)..(31): Xaa is C or S
VVMNEYQKYIVNSSDDIFLVSIPSLKTPAXXPKP

SEQ ID NO: 11449 - protein, 34 aa, Artificial Sequence; identical to SEQ ID NO: 861
  Cyclic GFR-binding peptide
  MOD_RES (1)..(33)..(34): Xaa is C or S

SEQ ID NO: 11450 - protein, 32 aa, Artificial Sequence
  Cyclic GFR-binding peptide
  MOD_RES (1)..(3): Xaa is C or S
XGXSEVVMDQYNKLVVNNASDLYLISIASLRT

SEQ ID NO: 11451 - protein, 32 aa, Artificial Sequence
  Cyclic GFR-binding peptide
  MOD_RES (31)..(32): Xaa is C or S
RVVMNEYQKYIVNSSDDIFLVSIPSLKTPAXX

SEQ ID NO: 11452 - protein, 30 aa, Artificial Sequence; identical to SEQ ID NO: 864
  Cyclic GFR-binding peptide
  MOD_RES (29)..(30): Xaa is C or S

SEQ ID NO: 11453 - protein, 30 aa, Artificial Sequence
  Cyclic GFR-binding peptide
  MOD_RES (2)..(2): Xaa is C or S
GXSEVVMDNSLQEVVNNASDYYLITLPELR

SEQ ID NO: 11454 - protein, 40 aa, Artificial Sequence
  Cyclic GFR-binding peptide
  MOD_RES (2)..(4)..(35)..(36): Xaa is C or S
SXKXSRVIMEYQKYVKPKRGVIFLISIPSLAQPVXXPAAS

SEQ ID NO: 11455 - protein, 34 aa, Artificial Sequence; identical to SEQ ID NO: 866
  Cyclic GFR-binding peptide
  MOD_RES (32)..(33): Xaa is C or S

SEQ ID NO: 11456 - protein, 34 aa, Artificial Sequence; identical to SEQ ID NO: 872
  Cyclic GFR-binding peptide
  MOD_RES (28)..(29): Xaa is C or S

SEQ ID NO: 11457 - protein, 30 aa, Artificial Sequence
  Cyclic GFR-binding peptide
  MOD_RES (1)..(3): Xaa is C or S
XGXSEVVMDRYKKLVVNNASDFYLISIANL

SEQ ID NO: 11458 - protein, 30 aa, Artificial Sequence
  Cyclic GFR-binding peptide
  MOD_RES (26)..(27): Xaa is C or S
NSLQEVVNNASDYYLITLPELRTPVXXTPP

SEQ ID NO: 11459 - protein, 34 aa, Artificial Sequence; identical to SEQ ID NO: 873
  Cyclic GFR-binding peptide
  MOD_RES (30)..(30): Xaa is C or S

SEQ ID NO: 11460 - protein, 29 aa, Artificial Sequence
  Cyclic GFR-binding peptide
  MOD_RES (2)..(2): Xaa is C or S
GXSRVVMNQYNKLIVNSSDDLYLVSIASL

SEQ ID NO: 11461 - protein, 31 aa, Artificial Sequence; identical to SEQ ID NO: 877
  Cyclic GFR-binding peptide
  MOD_RES (27)..(28): Xaa is C or S

SEQ ID NO: 11462 - protein, 32 aa, Artificial Sequence
  Cyclic GFR-binding peptide
  MOD_RES (32)..(32): Xaa is C or S
GEVVMENSLQEVVKDYEDYYLMTLPELETPVX

SEQ ID NO: 11463 - protein, 39 aa, Artificial Sequence
  Cyclic GFR-binding peptide
  MOD_RES (1)..(3)..(35)..(36): Xaa is C or S
XGXSRVVMNNSLQEIVNSSDDYYLVTLPELKTPAXXPKP

SEQ ID NO: 11464 - protein, 37 aa, Artificial Sequence; identical to SEQ ID NO: 880
  Cyclic GFR-binding peptide
  MOD_RES (1)..(33)..(34): Xaa is C or S

SEQ ID NO: 11465 - protein, 26 aa, Artificial Sequence
  Cyclic GFR-binding peptide
  MOD_RES (26)..(26): Xaa is C or S
NSLQEIVNSSDDYYVVPLPELQTPAX

SEQ ID NO: 11466 - protein, 32 aa, Artificial Sequence
  Cyclic GFR-binding peptide
  MOD_RES (26)..(27): Xaa is C or S
NSLQEVVKDYEDYYVMPLPELETPVXXAKPIS

SEQ ID NO: 11467 - protein, 32 aa, Artificial Sequence
  Cyclic GFR-binding peptide
  MOD_RES (28)..(29): Xaa is C or S
VMNSLQEVKPTRGVYYVIPLPELDQPVXXPSA

SEQ ID NO: 11468 - protein, 25 aa, Artificial Sequence
  Cyclic GFR-binding peptide
MNNSLQEIVNSSDDYYLVTLPELKT

SEQ ID NO: 11469 - protein, 33 aa, Artificial Sequence
  Cyclic GFR-binding peptide
  MOD_RES (1)..(3): Xaa is C or S
XGXSEVVMDNSLQEVVNNASDYYLITLPELRTP

SEQ ID NO: 11470 - protein, 28 aa, Artificial Sequence
  Cyclic GFR-binding peptide
  MOD_RES (26)..(27): Xaa is C or S
RYKKLIVNSSDDFYLVSIANLKTPAXXP

SEQ ID NO: 11471 - protein, 31 aa, Artificial Sequence
  Cyclic GFR-binding peptide
  MOD_RES (29)..(30): Xaa is C or S
VVMNSLQEVKPTRGVYYVIPLPELDQPVXXP

SEQ ID NO: 11472 - protein, 29 aa, Artificial Sequence
  Cyclic GFR-binding peptide
  MOD_RES (26)..(27): Xaa is C or S
QYNKLVVKENEDLYLMSIASLETPVXXAK

SEQ ID NO: 11473 - protein, 28 aa, Artificial Sequence
  Cyclic GFR-binding peptide
SRVIMRYKKLVKPKRGVFYLISIANLAQ

SEQ ID NO: 11474 - protein, 31 aa, Artificial Sequence
  Cyclic GFR-binding peptide
  MOD_RES (31)..(31): Xaa is C or S
RVVMNEYQKYIVNSSDDIFLVSIPSLQTPAX

SEQ ID NO: 11475 - protein, 30 aa, Artificial Sequence; identical to SEQ ID NO: 896
  Cyclic GFR-binding peptide
  MOD_RES (27)..(28): Xaa is C or S

SEQ ID NO: 11476 - protein, 32 aa, Artificial Sequence
  Cyclic GFR-binding peptide
  MOD_RES (31)..(32): Xaa is C or S
SRVIMEYQKYVKPKRGVIFLISIPSLAQPVXX

SEQ ID NO: 11477 - protein, 35 aa, Artificial Sequence; identical to SEQ ID NO: 897
  Cyclic GFR-binding peptide
  MOD_RES (1)..(32)..(33): Xaa is C or S

SEQ ID NO: 11478 - protein, 27 aa, Artificial Sequence
  Cyclic GFR-binding peptide
VVMNRYKKLIVNSSDDFYLVSIANLQT

SEQ ID NO: 11479 - protein, 29 aa, Artificial Sequence
  Cyclic GFR-binding peptide
VVMDNSLQEVVNNASDYYVIPLPELRTPV

SEQ ID NO: 11480 - protein, 30 aa, Artificial Sequence
  Cyclic GFR-binding peptide
  MOD_RES (30)..(30): Xaa is C or S
KVVMNSLQEVKPTRGVYYVIPLPELDQPVX

SEQ ID NO: 11481 - protein, 31 aa, Artificial Sequence
  Cyclic GFR-binding peptide
  MOD_RES (28)..(29): Xaa is C or S
MDNSLQEVVNNASDYYLITLPELRTPVXXTP

SEQ ID NO: 11482 - protein, 23 aa, Artificial Sequence
  Cyclic GFR-binding peptide
NNSLQEIVNSSDDYYLVTLPELQ

SEQ ID NO: 11483 - protein, 32 aa, Artificial Sequence; identical to SEQ ID NO: 904
  Cyclic GFR-binding peptide
  MOD_RES (2)..(2): Xaa is C or S

SEQ ID NO: 11484 - protein, 34 aa, Artificial Sequence
  Cyclic GFR-binding peptide
  MOD_RES (31)..(31): Xaa is C or S
RVVMNNSLQEIVNSSDDYYLVTLPELKTPAXTPK

SEQ ID NO: 11485 - protein, 25 aa, Artificial Sequence
  Cyclic GFR-binding peptide
VMNQYNKLIVNSSDDLYLVSIASLK

SEQ ID NO: 11486 - protein, 38 aa, Artificial Sequence
  Cyclic GFR-binding peptide
  MOD_RES (1)..(33)..(34): Xaa is C or S
XSEVVMDQYNKLVVNNASDLYLISIASLRTPVXXTPPT

SEQ ID NO: 11487 - protein, 25 aa, Artificial Sequence
  Cyclic GFR-binding peptide
NEYQKYIVNSSDDIFLVSIPSLKTP

SEQ ID NO: 11488 - protein, 28 aa, Artificial Sequence
  Cyclic GFR-binding peptide
  MOD_RES (2)..(2): Xaa is C or S
GXSRVVMNNSLQEIVNSSDDYYVVPLPE

SEQ ID NO: 11489 - protein, 30 aa, Artificial Sequence
  Cyclic GFR-binding peptide
  MOD_RES (29)..(30): Xaa is C or S
VIMEYQKYIKPTKGIIFLISIPSLDQSVXX

SEQ ID NO: 11490 - protein, 39 aa, Artificial Sequence
  Cyclic GFR-binding peptide
  MOD_RES (2)..(34): Xaa is C or S
GXSRVVMNEYQKYIVNSSDDIFLVSIPSLKTPAXTPKTV

SEQ ID NO: 11491 - protein, 33 aa, Artificial Sequence
  Cyclic GFR-binding peptide
  MOD_RES (27)..(28): Xaa is C or S
MNSLQEVKPTRGVYYVIPLPELDQPVXXPSASA

SEQ ID NO: 11492 - protein, 23 aa, Artificial Sequence
  Cyclic GFR-binding peptide
MDRYKKLVVKENEDFYLMSIANL

SEQ ID NO: 11493 - protein, 34 aa, Artificial Sequence
  Cyclic GFR-binding peptide
  MOD_RES (30)..(31): Xaa is C or S
VVMDNSLQEVVNNASDYYLITLPELRTPVXXTPP

SEQ ID NO: 11494 - protein, 32 aa, Artificial Sequence
  Cyclic GFR-binding peptide
  MOD_RES (26)..(26): Xaa is C or S
EYQKYIVNSSDDIFLVSIPSLKTPAXTPKTVH

SEQ ID NO: 11495 - protein, 30 aa, Artificial Sequence
  Cyclic GFR-binding peptide
  MOD_RES (27)..(28): Xaa is C or S
MNSLQEVKPKRGVYYLITLPELAQPVXXPA

SEQ ID NO: 11496 - protein, 29 aa, Artificial Sequence
  Cyclic GFR-binding peptide
KVVMRYKKLVKPTRGVFYLISIANLDQPV

SEQ ID NO: 11497 - protein, 29 aa, Artificial Sequence
  Cyclic GFR-binding peptide
  MOD_RES (2)..(2): Xaa is C or S
KXSRVIMQYNKLVKPKRGVLYLISIASLA

SEQ ID NO: 11498 - protein, 28 aa, Artificial Sequence
  Cyclic GFR-binding peptide
GEVVMENSLQEVVKDYEDYYVMPLPELE

SEQ ID NO: 11499 - protein, 30 aa, Artificial Sequence
  Cyclic GFR-binding peptide
  MOD_RES (1)..(1): Xaa is C or S
XSEVVMDRYKKLVVNNASDFYLISIANLRT

SEQ ID NO: 11500 - protein, 32 aa, Artificial Sequence; identical to SEQ ID NO: 924
  Cyclic GFR-binding peptide
  MOD_RES (31)..(31): Xaa is C or S

SEQ ID NO: 11501 - protein, 41 aa, Artificial Sequence; identical to SEQ ID NO: 925
  Cyclic GFR-binding peptide
  MOD_RES (1)..(3)..(35)..(36): Xaa is C or S

SEQ ID NO: 11502 - protein, 35 aa, Artificial Sequence
  Cyclic GFR-binding peptide
  MOD_RES (1)..(3)..(34)..(35): Xaa is C or S
XKXSKVIMNSLQEIKPTKGIYYVIPLPELDQSVXX

SEQ ID NO: 11503 - protein, 38 aa, Artificial Sequence
  Cyclic GFR-binding peptide
  MOD_RES (2)..(4)..(36)..(37): Xaa is C or S
RXGXGEVVMENSLQEVVKDYEDYYVMPLPELETPVXXA

SEQ ID NO: 11504 - protein, 30 aa, Artificial Sequence
  Cyclic GFR-binding peptide
  MOD_RES (29)..(30): Xaa is C or S
VMENSLQEVVKDYEDYYVMPLPELETPVXX

SEQ ID NO: 11505 - protein, 30 aa, Artificial Sequence; identical to SEQ ID NO: 928
  Cyclic GFR-binding peptide
  MOD_RES (1)..(3): Xaa is C or S

SEQ ID NO: 11506 - protein, 29 aa, Artificial Sequence
  Cyclic GFR-binding peptide
SRVVMNRYKKLIVNSSDDFYLVSIANLKT

SEQ ID NO: 11507 - protein, 34 aa, Artificial Sequence
  Cyclic GFR-binding peptide
  MOD_RES (32)..(33): Xaa is C or S
ARVVMNNSLQEIVNSSDDYYVVPLPELQTPAXXP

SEQ ID NO: 11508 - protein, 40 aa, Artificial Sequence
  Cyclic GFR-binding peptide
  MOD_RES (2)..(34)..(35): Xaa is C or S
GXSEVVMDRYKKLVVNNASDFYLISIANLRTPVXXTPPTS

SEQ ID NO: 11509 - protein, 32 aa, Artificial Sequence
  Cyclic GFR-binding peptide
  MOD_RES (28)..(29): Xaa is C or S
IMNSLQEIKPTKGIYYVIPLPELDQSVXXPSA

SEQ ID NO: 11510 - protein, 33 aa, Artificial Sequence
  Cyclic GFR-binding peptide
  MOD_RES (30)..(31): Xaa is C or S
KVIMNSLQEIKPTKGIYYVIPLPELDQSVXXPS

SEQ ID NO: 11511 - protein, 29 aa, Artificial Sequence
  Cyclic GFR-binding peptide
  MOD_RES (2)..(2): Xaa is C or S
GXGEVVMDNSLQEVVKENEDYYLMTLPEL

SEQ ID NO: 11512 - protein, 29 aa, Artificial Sequence
  Cyclic GFR-binding peptide
  MOD_RES (1)..(3): Xaa is C or S
XGXSRVVMNQYNKLIVNSSDDLYLVSIAS

SEQ ID NO: 11513 - protein, 36 aa, Artificial Sequence; identical to SEQ ID NO: 938
  Cyclic GFR-binding peptide
  MOD_RES (1)..(32)..(33): Xaa is C or S

SEQ ID NO: 11514 - protein, 26 aa, Artificial Sequence
  Cyclic GFR-binding peptide
MDRYKKLVVKENEDFYLMSIANLETP

SEQ ID NO: 11515 - protein, 34 aa, Artificial Sequence
  Cyclic GFR-binding peptide
  MOD_RES (1)..(3): Xaa is C or S
XGXARVVMNEYQKYIVNSSDDIFLVSIPSLQTPA

SEQ ID NO: 11516 - protein, 30 aa, Artificial Sequence
  Cyclic GFR-binding peptide
  MOD_RES (1)..(1): Xaa is C or S
XSEVVMDNSLQEVVNNASDYYVIPLPELRT

SEQ ID NO: 11517 - protein, 22 aa, Artificial Sequence
  Cyclic GFR-binding peptide
MEEYQKYVVKDYEDIFLMSIPS

SEQ ID NO: 11518 - protein, 35 aa, Artificial Sequence; identical to SEQ ID NO: 944
  Cyclic GFR-binding peptide
  MOD_RES (29)..(30): Xaa is C or S

SEQ ID NO: 11519 - protein, 29 aa, Artificial Sequence
  Cyclic GFR-binding peptide
ARVVMNQYNKLIVNSSDDLYLVSIASLQT

SEQ ID NO: 11520 - protein, 30 aa, Artificial Sequence
  Cyclic GFR-binding peptide
EVVMDNSLQEVVKENEDYYLMTLPELETPV

SEQ ID NO: 11521 - protein, 37 aa, Artificial Sequence
  Cyclic GFR-binding peptide
  MOD_RES (1)..(3)..(34)..(35): Xaa is C or S
XKXSRVIMEYQKYVKPKRGVIFLISIPSLAQPVXXPA

SEQ ID NO: 11522 - protein, 26 aa, Artificial Sequence
  Cyclic GFR-binding peptide
VVMDNSLQEVVNNASDYYVIPLPELR

SEQ ID NO: 11523 - protein, 32 aa, Artificial Sequence; identical to SEQ ID NO: 951
  Cyclic GFR-binding peptide
  MOD_RES (1)..(3): Xaa is C or S

SEQ ID NO: 11524 - protein, 24 aa, Artificial Sequence
  Cyclic GFR-binding peptide
DNSLQEVVKENEDYYVMPLPELET

SEQ ID NO: 11525 - protein, 25 aa, Artificial Sequence
  Cyclic GFR-binding peptide
VIMQYNKLIKPTKGILYLISIASLD

SEQ ID NO: 11526 - protein, 38 aa, Artificial Sequence
  Cyclic GFR-binding peptide
  MOD_RES (2)..(4)..(36)..(37): Xaa is C or S
HXGXARVVMNNSLQEIVNSSDDYYVVPLPELQTPAXXP

SEQ ID NO: 11527 - protein, 32 aa, Artificial Sequence
  Cyclic GFR-binding peptide
  MOD_RES (1)..(3): Xaa is C or S
XGXSRVVMNNSLQEIVNSSDDYYLVTLPELKT

SEQ ID NO: 11528 - protein, 27 aa, Artificial Sequence
  Cyclic GFR-binding peptide
  MOD_RES (26)..(27): Xaa is C or S
RYKKLVKPTRGVFYLISIANLDQPVXX

SEQ ID NO: 11529 - protein, 24 aa, Artificial Sequence
  Cyclic GFR-binding peptide
VVMDNSLQEVVKENEDYYLMTLPE

SEQ ID NO: 11530 - protein, 31 aa, Artificial Sequence
  Cyclic GFR-binding peptide
  MOD_RES (31)..(31): Xaa is C or S
RVVMNNSLQEIVNSSDDYYVVPLPELKTPAX

SEQ ID NO: 11531 - protein, 23 aa, Artificial Sequence
  Cyclic GFR-binding peptide
NRYKKLIVNSSDDFYLVSIANLK

SEQ ID NO: 11532 - protein, 25 aa, Artificial Sequence
  Cyclic GFR-binding peptide
SRVIMQYNKLVKPKRGVLYLISIAS

SEQ ID NO: 11533 - protein, 20 aa, Artificial Sequence
  Cyclic GFR-binding peptide
RYKKLVVNNASDFYLISIAN

SEQ ID NO: 11534 - protein, 22 aa, Artificial Sequence
  Cyclic GFR-binding peptide
DNSLQEVVKENEDYYVMPLPEL

SEQ ID NO: 11535 - protein, 41 aa, Artificial Sequence
  Cyclic GFR-binding peptide
  MOD_RES (2)..(4)..(35)..(36): Xaa is C or S
SXKXSRVIMEYQKYVKPKRGVIFLISIPSLAQPVXXPAASA

SEQ ID NO: 11536 - protein, 31 aa, Artificial Sequence; identical to SEQ ID NO: 966
  Cyclic GFR-binding peptide
  MOD_RES (2)..(4): Xaa is C or S

SEQ ID NO: 11537 - protein, 33 aa, Artificial Sequence; identical to SEQ ID NO: 967
  Cyclic GFR-binding peptide
  MOD_RES (31)..(32): Xaa is C or S

SEQ ID NO: 11538 - protein, 34 aa, Artificial Sequence; identical to SEQ ID NO: 969
  Cyclic GFR-binding peptide
  MOD_RES (1)..(3)..(34): Xaa is C or S

SEQ ID NO: 11539 - protein, 37 aa, Artificial Sequence
  Cyclic GFR-binding peptide
  MOD_RES (31)..(32): Xaa is C or S
SKVVMEYQKYVKPTRGVIFLISIPSLDQPVXXPSASA

SEQ ID NO: 11540 - protein, 33 aa, Artificial Sequence
  Cyclic GFR-binding peptide
  MOD_RES (28)..(29): Xaa is C or S
MNNSLQEIVNSSDDYYVVPLPELKTPAXXPKPV

SEQ ID NO: 11541 - protein, 36 aa, Artificial Sequence
  Cyclic GFR-binding peptide
  MOD_RES (32)..(33): Xaa is C or S
ARVVMNNSLQEIVNSSDDYYLVTLPELQTPAXXPKP

SEQ ID NO: 11542 - protein, 29 aa, Artificial Sequence
  Cyclic GFR-binding peptide
KVIMQYNKLIKPTKGILYLISIASLDQSV

SEQ ID NO: 11543 - protein, 31 aa, Artificial Sequence
  Cyclic GFR-binding peptide
  MOD_RES (28)..(29): Xaa is C or S
VMEYQKYVKPTRGVIFLISIPSLDQPVXXPS

SEQ ID NO: 11544 - protein, 31 aa, Artificial Sequence
  Cyclic GFR-binding peptide
  MOD_RES (1)..(1): Xaa is C or S
XSKVVMNSLQEVKPTRGVYYVIPLPELDQPV

SEQ ID NO: 11545 - protein, 30 aa, Artificial Sequence; identical to SEQ ID NO: 975
  Cyclic GFR-binding peptide
  MOD_RES (2)..(2): Xaa is C or S

SEQ ID NO: 11546 - protein, 28 aa, Artificial Sequence
  Cyclic GFR-binding peptide
RVVMNEYQKYIVNSSDDIFLVSIPSLQT

SEQ ID NO: 11547 - protein, 28 aa, Artificial Sequence
  Cyclic GFR-binding peptide
  MOD_RES (26)..(27): Xaa is C or S
EYQKYIKPTKGIIFLISIPSLDQSVXXP

SEQ ID NO: 11548 - protein, 25 aa, Artificial Sequence
  Cyclic GFR-binding peptide
SKVIMQYNKLIKPTKGILYLISIAS

SEQ ID NO: 11549 - protein, 34 aa, Artificial Sequence
  Cyclic GFR-binding peptide
  MOD_RES (1)..(3): Xaa is C or S
XGXGEVVMDNSLQEVVKENEDYYLMTLPELETPV

SEQ ID NO: 11550 - protein, 28 aa, Artificial Sequence
  Cyclic GFR-binding peptide
EVVMDQYNKLVVNNASDLYLISIASLRT

SEQ ID NO: 11551 - protein, 33 aa, Artificial Sequence
  Cyclic GFR-binding peptide
  MOD_RES (29)..(30): Xaa is C or S
VMNNSLQEIVNSSDDYYLVTLPELQTPAXXPKP

SEQ ID NO: 11552 - protein, 35 aa, Artificial Sequence
  Cyclic GFR-binding peptide
  MOD_RES (29)..(30): Xaa is C or S
VMNNSLQEIVNSSDDYYLVTLPELKTPAXXPKPVY

SEQ ID NO: 11553 - protein, 26 aa, Artificial Sequence
  Cyclic GFR-binding peptide
MNEYQKYIVNSSDDIFLVSIPSLKTP

SEQ ID NO: 11554 - protein, 29 aa, Artificial Sequence
  Cyclic GFR-binding peptide
RVIMNSLQEVKPKRGVYYLITLPELAQPV

SEQ ID NO: 11555 - protein, 28 aa, Artificial Sequence
  Cyclic GFR-binding peptide
GEVVMDNSLQEVVKENEDYYVMPLPELE

SEQ ID NO: 11556 - protein, 31 aa, Artificial Sequence; identical to SEQ ID NO: 986
  Cyclic GFR-binding peptide
  MOD_RES (31)..(31): Xaa is C or S

SEQ ID NO: 11557 - protein, 30 aa, Artificial Sequence
  Cyclic GFR-binding peptide
  MOD_RES (29)..(30): Xaa is C or S
VMEEYQKYVVKDYEDIFLMSIPSLETPVXX

SEQ ID NO: 11558 - protein, 34 aa, Artificial Sequence
  Cyclic GFR-binding peptide
  MOD_RES (32)..(33): Xaa is C or S
SEVVMDRYKKLVVNNASDFYLISIANLRTPVXXT

SEQ ID NO: 11559 - protein, 26 aa, Artificial Sequence
  Cyclic GFR-binding peptide
MQYNKLIKPTKGILYLISIASLDQSV

SEQ ID NO: 11560 - protein, 31 aa, Artificial Sequence; identical to SEQ ID NO: 988
  Cyclic GFR-binding peptide
  MOD_RES (27)..(28): Xaa is C or S

SEQ ID NO: 11561 - protein, 27 aa, Artificial Sequence
  Cyclic GFR-binding peptide
RVVMNRYKKLIVNSSDDFYLVSIANLK

SEQ ID NO: 11562 - protein, 41 aa, Artificial Sequence
  Cyclic GFR-binding peptide
  MOD_RES (2)..(4)..(36)..(37): Xaa is C or S
RXGXSEVVMDNSLQEVVNNASDYYLITLPELRTPVXXTPPT

SEQ ID NO: 11563 - protein, 31 aa, Artificial Sequence
  Cyclic GFR-binding peptide
  MOD_RES (30)..(31): Xaa is C or S
VVMNEYQKYIVNSSDDIFLVSIPSLQTPAXX

SEQ ID NO: 11564 - protein, 30 aa, Artificial Sequence
  Cyclic GFR-binding peptide
  MOD_RES (27)..(28): Xaa is C or S
MNSLQEVKPTRGVYYVIPLPELDQPVXXPS

SEQ ID NO: 11565 - protein, 40 aa, Artificial Sequence; identical to SEQ ID NO: 993
  Cyclic GFR-binding peptide
  MOD_RES (2)..(4)..(36)..(37): Xaa is C or S

SEQ ID NO: 11566 - protein, 23 aa, Artificial Sequence
  Cyclic GFR-binding peptide
VMDNSLQEVVNNASDYYVIPLPE

SEQ ID NO: 11567 - protein, 24 aa, Artificial Sequence
  Cyclic GFR-binding peptide
IMQYNKLIKPTKGILYLISIASLD

SEQ ID NO: 11568 - protein, 29 aa, Artificial Sequence
  Cyclic GFR-binding peptide
VVMDRYKKLVVNNASDFYLISIANLRTPV

SEQ ID NO: 11569 - protein, 28 aa, Artificial Sequence
  Cyclic GFR-binding peptide
  MOD_RES (28)..(28): Xaa is C or S
IMRYKKLVKPKRGVFYLISIANLAQPVX

SEQ ID NO: 11570 - protein, 33 aa, Artificial Sequence; identical to SEQ ID NO: 998
  Cyclic GFR-binding peptide
  MOD_RES (29)..(30): Xaa is C or S

SEQ ID NO: 11571 - protein, 34 aa, Artificial Sequence; identical to SEQ ID NO: 999
  Cyclic GFR-binding peptide
  MOD_RES (28)..(29): Xaa is C or S

SEQ ID NO: 11572 - protein, 28 aa, Artificial Sequence
  Cyclic GFR-binding peptide
SKVVMEYQKYVKPTRGVIFLISIPSLDQ

SEQ ID NO: 11573 - protein, 32 aa, Artificial Sequence; identical to SEQ ID NO: 1000
  Cyclic GFR-binding peptide
  MOD_RES (31)..(32): Xaa is C or S

SEQ ID NO: 11574 - protein, 33 aa, Artificial Sequence
  Cyclic GFR-binding peptide
  MOD_RES (1)..(33): Xaa is C or S
XGEVVMENSLQEVVKDYEDYYLMTLPELETPVX

SEQ ID NO: 11575 - protein, 30 aa, Artificial Sequence; identical to SEQ ID NO: 1001
  Cyclic GFR-binding peptide
  MOD_RES (26)..(27): Xaa is C or S

SEQ ID NO: 11576 - protein, 35 aa, Artificial Sequence
  Cyclic GFR-binding peptide
  MOD_RES (1)..(33)..(34): Xaa is C or S
XGEVVMEEYQKYVVKDYEDIFLMSIPSLETPVXXA

SEQ ID NO: 11577 - protein, 37 aa, Artificial Sequence
  Cyclic GFR-binding peptide
  MOD_RES (32)..(33): Xaa is C or S
GEVVMDNSLQEVVKENEDYYVMPLPELETPVXXAKPI

SEQ ID NO: 11578 - protein, 31 aa, Artificial Sequence
  Cyclic GFR-binding peptide
  MOD_RES (28)..(29): Xaa is C or S
IMEYQKYIKPTKGIIFLISIPSLDQSVXXPS

SEQ ID NO: 11579 - protein, 28 aa, Artificial Sequence
  Cyclic GFR-binding peptide
VMDEYQKYVVKENEDIFLMSIPSLETPV

SEQ ID NO: 11580 - protein, 38 aa, Artificial Sequence
  Cyclic GFR-binding peptide
  MOD_RES (1)..(33)..(34): Xaa is C or S
XGEVVMEEYQKYVVKDYEDIFLMSIPSLETPVXXAKPI

SEQ ID NO: 11581 - protein, 26 aa, Artificial Sequence
  Cyclic GFR-binding peptide
EVVMDNSLQEVVNNASDYYVIPLPEL

SEQ ID NO: 11582 - protein, 38 aa, Artificial Sequence; identical to SEQ ID NO: 1005
  Cyclic GFR-binding peptide
  MOD_RES (1)..(32)..(33): Xaa is C or S

SEQ ID NO: 11583 - protein, 31 aa, Artificial Sequence
  Cyclic GFR-binding peptide
  MOD_RES (1)..(3): Xaa is C or S
XGXARVVMNEYQKYIVNSSDDIFLVSIPSLQ

SEQ ID NO: 11584 - protein, 27 aa, Artificial Sequence
  Cyclic GFR-binding peptide
VMDQYNKLVVKENEDLYLMSIASLETP

SEQ ID NO: 11585 - protein, 37 aa, Artificial Sequence
  Cyclic GFR-binding peptide
  MOD_RES (1)..(3)..(34)..(35): Xaa is C or S
XKXSRVIMNSLQEVKPKRGVYYLITLPELAQPVXXPA

SEQ ID NO: 11586 - protein, 35 aa, Artificial Sequence
  Cyclic GFR-binding peptide
  MOD_RES (1)..(32)..(33): Xaa is C or S
XSKVIMNSLQEIKPTKGIYYVIPLPELDQSVXXPS

SEQ ID NO: 11587 - protein, 33 aa, Artificial Sequence
  Cyclic GFR-binding peptide
  MOD_RES (28)..(29): Xaa is C or S
MDNSLQEVVKENEDYYLMTLPELETPVXXAKPI

SEQ ID NO: 11588 - protein, 34 aa, Artificial Sequence
  Cyclic GFR-binding peptide
  MOD_RES (31)..(32): Xaa is C or S
EVVMDEYQKYVVKENEDIFLMSIPSLETPVXXAK

SEQ ID NO: 11589 - protein, 34 aa, Artificial Sequence; identical to SEQ ID NO: 1008
  Cyclic GFR-binding peptide
  MOD_RES (30)..(31): Xaa is C or S

SEQ ID NO: 11590 - protein, 32 aa, Artificial Sequence; identical to SEQ ID NO: 1012
  Cyclic GFR-binding peptide
  MOD_RES (1)..(32): Xaa is C or S

SEQ ID NO: 11591 - protein, 30 aa, Artificial Sequence
  Cyclic GFR-binding peptide
ARVVMNNSLQEIVNSSDDYYLVTLPELQTP

SEQ ID NO: 11592 - protein, 27 aa, Artificial Sequence
  Cyclic GFR-binding peptide
VMNQYNKLIVNSSDDLYLVSIASLKTP

SEQ ID NO: 11593 - protein, 21 aa, Artificial Sequence
  Cyclic GFR-binding peptide
EYQKYVVKDYEDIFLMSIPSL

SEQ ID NO: 11594 - protein, 32 aa, Artificial Sequence
  Cyclic GFR-binding peptide
  MOD_RES (29)..(30): Xaa is C or S
VIMEYQKYVKPKRGVIFLISIPSLAQPVXXPA

SEQ ID NO: 11595 - protein, 33 aa, Artificial Sequence
  Cyclic GFR-binding peptide
  MOD_RES (1)..(3): Xaa is C or S
XGXGEVVMENSLQEVVKDYEDYYVMPLPELETP

SEQ ID NO: 11596 - protein, 28 aa, Artificial Sequence
  Cyclic GFR-binding peptide
  MOD_RES (26)..(27): Xaa is C or S
RYKKLVVNNASDFYLISIANLRTPVXXT

SEQ ID NO: 11597 - protein, 21 aa, Artificial Sequence
  Cyclic GFR-binding peptide
EYQKYIKPTKGIIFLISIPSL

SEQ ID NO: 11598 - protein, 30 aa, Artificial Sequence; identical to SEQ ID NO: 1017
  Cyclic GFR-binding peptide
  MOD_RES (1)..(1): Xaa is C or S

SEQ ID NO: 11599 - protein, 31 aa, Artificial Sequence; identical to SEQ ID NO: 1018
  Cyclic GFR-binding peptide
  MOD_RES (1)..(1): Xaa is C or S

SEQ ID NO: 11600 - protein, 34 aa, Artificial Sequence
  Cyclic GFR-binding peptide
  MOD_RES (1)..(33)..(34): Xaa is C or S
XGEVVMDNSLQEVVKENEDYYLMTLPELETPVXX

SEQ ID NO: 11601 - protein, 40 aa, Artificial Sequence; identical to SEQ ID NO: 1022
  Cyclic GFR-binding peptide
  MOD_RES (2)..(34)..(35): Xaa is C or S

SEQ ID NO: 11602 - protein, 25 aa, Artificial Sequence
  Cyclic GFR-binding peptide
MNSLQEIKPTKGIYYLITLPELDQS

SEQ ID NO: 11603 - protein, 27 aa, Artificial Sequence
  Cyclic GFR-binding peptide
VMNEYQKYIVNSSDDIFLVSIPSLQTP

SEQ ID NO: 11604 - protein, 25 aa, Artificial Sequence
  Cyclic GFR-binding peptide
KVIMRYKKLIKPTKGIFYLISIANL

SEQ ID NO: 11605 - protein, 34 aa, Artificial Sequence
  Cyclic GFR-binding peptide
  MOD_RES (1)..(3): Xaa is C or S
XGXGEVVMEEYQKYVVKDYEDIFLMSIPSLETPV

SEQ ID NO: 11606 - protein, 41 aa, Artificial Sequence; identical to SEQ ID NO: 1026
  Cyclic GFR-binding peptide
  MOD_RES (2)..(4)..(36)..(37): Xaa is C or S

SEQ ID NO: 11607 - protein, 31 aa, Artificial Sequence
  Cyclic GFR-binding peptide
  MOD_RES (30)..(31): Xaa is C or S
VVMENSLQEVVKDYEDYYVMPLPELETPVXX

SEQ ID NO: 11608 - protein, 27 aa, Artificial Sequence
  Cyclic GFR-binding peptide
SEVVMDQYNKLVVNNASDLYLISIASL

SEQ ID NO: 11609 - protein, 28 aa, Artificial Sequence
  Cyclic GFR-binding peptide
  MOD_RES (26)..(27): Xaa is C or S
NSLQEVVKDYEDYYLMTLPELETPVXXA

SEQ ID NO: 11610 - protein, 27 aa, Artificial Sequence
  Cyclic GFR-binding peptide
SKVVMEYQKYVKPTRGVIFLISIPSLD

SEQ ID NO: 11611 - protein, 38 aa, Artificial Sequence; identical to SEQ ID NO: 1027
  Cyclic GFR-binding peptide
  MOD_RES (32)..(33): Xaa is C or S

SEQ ID NO: 11612 - protein, 34 aa, Artificial Sequence
  Cyclic GFR-binding peptide
  MOD_RES (32)..(32): Xaa is C or S
SRVVMNNSLQEIVNSSDDYYLVTLPELKTPAXTP

SEQ ID NO: 11613 - protein, 33 aa, Artificial Sequence; identical to SEQ ID NO: 1028
  Cyclic GFR-binding peptide
  MOD_RES (1)..(33): Xaa is C or S

SEQ ID NO: 11614 - protein, 39 aa, Artificial Sequence; identical to SEQ ID NO: 1029
  Cyclic GFR-binding peptide
  MOD_RES (2)..(4)..(35)..(36): Xaa is C or S

SEQ ID NO: 11615 - protein, 31 aa, Artificial Sequence; identical to SEQ ID NO: 1035
  Cyclic GFR-binding peptide
  MOD_RES (1)..(3): Xaa is C or S

SEQ ID NO: 11616 - protein, 34 aa, Artificial Sequence
  Cyclic GFR-binding peptide
  MOD_RES (2)..(33)..(34): Xaa is C or S
KXSRVIMEYQKYVKPKRGVIFLISIPSLAQPVXX

SEQ ID NO: 11617 - protein, 40 aa, Artificial Sequence; identical to SEQ ID NO: 1037
  Cyclic GFR-binding peptide
  MOD_RES (2)..(34): Xaa is C or S

SEQ ID NO: 11618 - protein, 30 aa, Artificial Sequence
  Cyclic GFR-binding peptide
  MOD_RES (2)..(4): Xaa is C or S
HXGXARVVMNNSLQEIVNSSDDYYVVPLPE

SEQ ID NO: 11619 - protein, 32 aa, Artificial Sequence
  Cyclic GFR-binding peptide
  MOD_RES (2)..(4): Xaa is C or S
RXGXGEVVMENSLQEVVKDYEDYYLMTLPELE

SEQ ID NO: 11620 - protein, 36 aa, Artificial Sequence
  Cyclic GFR-binding peptide
  MOD_RES (31)..(31): Xaa is C or S
RVVMNEYQKYIVNSSDDIFLVSIPSLKTPAXTPKTV

SEQ ID NO: 11621 - protein, 29 aa, Artificial Sequence
  Cyclic GFR-binding peptide
VVMEEYQKYVVKDYEDIFLMSIPSLETPV

SEQ ID NO: 11622 - protein, 34 aa, Artificial Sequence; identical to SEQ ID NO: 1042
  Cyclic GFR-binding peptide
  MOD_RES (1)..(3): Xaa is C or S

SEQ ID NO: 11623 - protein, 33 aa, Artificial Sequence
  Cyclic GFR-binding peptide
  MOD_RES (27)..(28): Xaa is C or S
MNSLQEVKPKRGVYYLITLPELAQPVXXPAASA

SEQ ID NO: 11624 - protein, 41 aa, Artificial Sequence
  Cyclic GFR-binding peptide
  MOD_RES (2)..(4)..(36)..(37): Xaa is C or S
RXGXSEVVMDRYKKLVVNNASDFYLISIANLRTPVXXTPPT

SEQ ID NO: 11625 - protein, 38 aa, Artificial Sequence; identical to SEQ ID NO: 1044
  Cyclic GFR-binding peptide
  MOD_RES (2)..(4)..(35)..(36): Xaa is C or S

SEQ ID NO: 11626 - protein, 30 aa, Artificial Sequence
  Cyclic GFR-binding peptide
  MOD_RES (1)..(3): Xaa is C or S
XGXSRVVMNNSLQEIVNSSDDYYLVTLPEL

SEQ ID NO: 11627 - protein, 34 aa, Artificial Sequence
  Cyclic GFR-binding peptide
  MOD_RES (1)..(33)..(34): Xaa is C or S
XGEVVMENSLQEVVKDYEDYYLMTLPELETPVXX

SEQ ID NO: 11628 - protein, 29 aa, Artificial Sequence
  Cyclic GFR-binding peptide
RVVMNNSLQEIVNSSDDYYLVTLPELKTP

SEQ ID NO: 11629 - protein, 28 aa, Artificial Sequence
  Cyclic GFR-binding peptide
VVMEEYQKYVVKDYEDIFLMSIPSLETP

SEQ ID NO: 11630 - protein, 33 aa, Artificial Sequence
  Cyclic GFR-binding peptide
  MOD_RES (31)..(32): Xaa is C or S
EVVMDQYNKLVVNNASDLYLISIASLRTPVXXT

SEQ ID NO: 11631 - protein, 30 aa, Artificial Sequence
  Cyclic GFR-binding peptide
EVVMDNSLQEVVKENEDYYVMPLPELETPV

SEQ ID NO: 11632 - protein, 32 aa, Artificial Sequence; identical to SEQ ID NO: 1052
  Cyclic GFR-binding peptide
  MOD_RES (29)..(29): Xaa is C or S

SEQ ID NO: 11633 - protein, 25 aa, Artificial Sequence
  Cyclic GFR-binding peptide
VMDRYKKLVVKENEDFYLMSIANLE

SEQ ID NO: 11634 - protein, 35 aa, Artificial Sequence; identical to SEQ ID NO: 1056
  Cyclic GFR-binding peptide
  MOD_RES (29)..(30): Xaa is C or S

SEQ ID NO: 11635 - protein, 36 aa, Artificial Sequence
  Cyclic GFR-binding peptide
  MOD_RES (30)..(31): Xaa is C or S
VVMDNSLQEVVKENEDYYVMPLPELETPVXXAKPIK

SEQ ID NO: 11636 - protein, 26 aa, Artificial Sequence
  Cyclic GFR-binding peptide
NNSLQEIVNSSDDYYVVPLPELKTPA

SEQ ID NO: 11637 - protein, 28 aa, Artificial Sequence
  Cyclic GFR-binding peptide
  MOD_RES (26)..(27): Xaa is C or S
NSLQEVVKENEDYYLMTLPELETPVXXA

SEQ ID NO: 11638 - protein, 26 aa, Artificial Sequence
  Cyclic GFR-binding peptide
EVVMENSLQEVVKDYEDYYVMPLPEL

SEQ ID NO: 11639 - protein, 33 aa, Artificial Sequence; identical to SEQ ID NO: 1067
  Cyclic GFR-binding peptide
  MOD_RES (32)..(32): Xaa is C or S

SEQ ID NO: 11640 - protein, 28 aa, Artificial Sequence
  Cyclic GFR-binding peptide
SEVVMDRYKKLVVNNASDFYLISIANLR

SEQ ID NO: 11641 - protein, 39 aa, Artificial Sequence
  Cyclic GFR-binding peptide
  MOD_RES (2)..(34)..(35): Xaa is C or S
GXGEVVMDNSLQEVVKENEDYYLMTLPELETPVXXAKPI

SEQ ID NO: 11642 - protein, 31 aa, Artificial Sequence; identical to SEQ ID NO: 1069
  Cyclic GFR-binding peptide
  MOD_RES (26)..(27): Xaa is C or S

SEQ ID NO: 11643 - protein, 35 aa, Artificial Sequence
  Cyclic GFR-binding peptide
  MOD_RES (31)..(32): Xaa is C or S
RVVMNNSLQEIVNSSDDYYVVPLPELKTPAXXPKP

SEQ ID NO: 11644 - protein, 31 aa, Artificial Sequence
  Cyclic GFR-binding peptide
  MOD_RES (2)..(4): Xaa is C or S
RXGXGEVVMEEYQKYVVKDYEDIFLMSIPSL

SEQ ID NO: 11645 - protein, 35 aa, Artificial Sequence
  Cyclic GFR-binding peptide
  MOD_RES (1)..(33)..(34): Xaa is C or S
XSRVVMNNSLQEIVNSSDDYYVVPLPELKTPAXXP

SEQ ID NO: 11646 - protein, 36 aa, Artificial Sequence
  Cyclic GFR-binding peptide
  MOD_RES (2)..(34)..(35): Xaa is C or S
GXGEVVMENSLQEVVKDYEDYYVMPLPELETPVXXA

SEQ ID NO: 11647 - protein, 36 aa, Artificial Sequence
  Cyclic GFR-binding peptide
  MOD_RES (2)..(34)..(35): Xaa is C or S
GXSRVVMNNSLQEIVNSSDDYYVVPLPELKTPAXXP

SEQ ID NO: 11648 - protein, 23 aa, Artificial Sequence
  Cyclic GFR-binding peptide
MQYNKLIKPTKGILYLISIASLD

SEQ ID NO: 11649 - protein, 24 aa, Artificial Sequence
  Cyclic GFR-binding peptide
NSLQEVKPTRGVYYVIPLPELDQP

SEQ ID NO: 11650 - protein, 33 aa, Artificial Sequence
  Cyclic GFR-binding peptide
  MOD_RES (27)..(28): Xaa is C or S
NEYQKYIVNSSDDIFLVSIPSLQTPAXXPKPVT

SEQ ID NO: 11651 - protein, 30 aa, Artificial Sequence
  Cyclic GFR-binding peptide
  MOD_RES (28)..(29): Xaa is C or S
MDNSLQEVVKENEDYYLMTLPELETPVXXA

SEQ ID NO: 11652 - protein, 34 aa, Artificial Sequence
  Cyclic GFR-binding peptide
  MOD_RES (1)..(3): Xaa is C or S
XGXSEVVMDRYKKLVVNNASDFYLISIANLRTPV

SEQ ID NO: 11653 - protein, 27 aa, Artificial Sequence
  Cyclic GFR-binding peptide
  MOD_RES (26)..(27): Xaa is C or S
NSLQEIKPTKGIYYVIPLPELDQSVXX

SEQ ID NO: 11654 - protein, 39 aa, Artificial Sequence; identical to SEQ ID NO: 1077
  Cyclic GFR-binding peptide
  MOD_RES (1)..(3)..(34)..(35): Xaa is C or S

SEQ ID NO: 11655 - protein, 32 aa, Artificial Sequence; identical to SEQ ID NO: 1079
  Cyclic GFR-binding peptide
  MOD_RES (26)..(27): Xaa is C or S

SEQ ID NO: 11656 - protein, 28 aa, Artificial Sequence
  Cyclic GFR-binding peptide
VVMNNSLQEIVNSSDDYYLVTLPELKTP

SEQ ID NO: 11657 - protein, 39 aa, Artificial Sequence
  Cyclic GFR-binding peptide
  MOD_RES (1)..(3)..(35)..(36): Xaa is C or S
XGXGEVVMDNSLQEVVKENEDYYLMTLPELETPVXXAKP

SEQ ID NO: 11658 - protein, 28 aa, Artificial Sequence
  Cyclic GFR-binding peptide
  MOD_RES (27)..(28): Xaa is C or S
MRYKKLIKPTKGIFYLISIANLDQSVXX

SEQ ID NO: 11659 - protein, 23 aa, Artificial Sequence
  Cyclic GFR-binding peptide
VMNEYQKYIVNSSDDIFLVSIPS

SEQ ID NO: 11660 - protein, 35 aa, Artificial Sequence
  Cyclic GFR-binding peptide
  MOD_RES (1)..(32)..(33): Xaa is C or S
XSKVIMNSLQEIKPTKGIYYLITLPELDQSVXXPS

SEQ ID NO: 11661 - protein, 29 aa, Artificial Sequence
  Cyclic GFR-binding peptide
  MOD_RES (28)..(29): Xaa is C or S
MEEYQKYVVKDYEDIFLMSIPSLETPVXX

SEQ ID NO: 11662 - protein, 35 aa, Artificial Sequence
  Cyclic GFR-binding peptide
  MOD_RES (1)..(33)..(34): Xaa is C or S
XSEVVMDRYKKLVVNNASDFYLISIANLRTPVXXT

SEQ ID NO: 11663 - protein, 25 aa, Artificial Sequence
  Cyclic GFR-binding peptide
VVMDNSLQEVVKENEDYYVMPLPEL

SEQ ID NO: 11664 - protein, 25 aa, Artificial Sequence
  Cyclic GFR-binding peptide
VMEEYQKYVVKDYEDIFLMSIPSLE

SEQ ID NO: 11665 - protein, 35 aa, Artificial Sequence
  Cyclic GFR-binding peptide
  MOD_RES (1)..(33)..(34): Xaa is C or S
XARVVMNEYQKYIVNSSDDIFLVSIPSLQTPAXXP

SEQ ID NO: 11666 - protein, 22 aa, Artificial Sequence
  Cyclic GFR-binding peptide
NSLQEIVNSSDDYYLVTLPELQ

SEQ ID NO: 11667 - protein, 34 aa, Artificial Sequence
  Cyclic GFR-binding peptide
  MOD_RES (2)..(34): Xaa is C or S
GXGEVVMEEYQKYVVKDYEDIFLMSIPSLETPVX

SEQ ID NO: 11668 - protein, 28 aa, Artificial Sequence
  Cyclic GFR-binding peptide
EVVMERYKKLVVKDYEDFYLMSIANLET

SEQ ID NO: 11669 - protein, 32 aa, Artificial Sequence
  Cyclic GFR-binding peptide
  MOD_RES (1)..(1): Xaa is C or S
XGEVVMDNSLQEVVKENEDYYLMTLPELETPV

SEQ ID NO: 11670 - protein, 34 aa, Artificial Sequence; identical to SEQ ID NO: 1092
  Cyclic GFR-binding peptide
  MOD_RES (29)..(30): Xaa is C or S

SEQ ID NO: 11671 - protein, 32 aa, Artificial Sequence
  Cyclic GFR-binding peptide
  MOD_RES (2)..(2): Xaa is C or S
KXSRVIMEYQKYVKPKRGVIFLISIPSLAQPV

SEQ ID NO: 11672 - protein, 31 aa, Artificial Sequence
  Cyclic GFR-binding peptide
  MOD_RES (26)..(26): Xaa is C or S
NSLQEIVNSSDDYYLVTLPELKTPAXTPKTV

SEQ ID NO: 11673 - protein, 36 aa, Artificial Sequence
  Cyclic GFR-binding peptide
  MOD_RES (2)..(4)..(36): Xaa is C or S
HXGXARVVMNEYQKYIVNSSDDIFLVSIPSLQTPAX

SEQ ID NO: 11674 - protein, 32 aa, Artificial Sequence
  Cyclic GFR-binding peptide
  MOD_RES (31)..(32): Xaa is C or S
EVVMDRYKKLVVNNASDFYLISIANLRTPVXX

SEQ ID NO: 11675 - protein, 37 aa, Artificial Sequence; identical to SEQ ID NO: 1101
  Cyclic GFR-binding peptide
  MOD_RES (2)..(33)..(34): Xaa is C or S

SEQ ID NO: 11676 - protein, 33 aa, Artificial Sequence
  Cyclic GFR-binding peptide
  MOD_RES (29)..(29): Xaa is C or S
VMNEYQKYIVNSSDDIFLVSIPSLKTPAXTPKT

SEQ ID NO: 11677 - protein, 40 aa, Artificial Sequence; identical to SEQ ID NO: 1103
  Cyclic GFR-binding peptide
  MOD_RES (1)..(3)..(35)..(36): Xaa is C or S

SEQ ID NO: 11678 - protein, 28 aa, Artificial Sequence
  Cyclic GFR-binding peptide
VVMDNSLQEVVNNASDYYVIPLPELRTP

SEQ ID NO: 11679 - protein, 26 aa, Artificial Sequence
  Cyclic GFR-binding peptide
  MOD_RES (1)..(1): Xaa is C or S
XSKVVMRYKKLVKPTRGVFYLISIAN

SEQ ID NO: 11680 - protein, 41 aa, Artificial Sequence; identical to SEQ ID NO: 1105
  Cyclic GFR-binding peptide
  MOD_RES (2)..(4)..(36)..(37): Xaa is C or S

SEQ ID NO: 11681 - protein, 34 aa, Artificial Sequence
  Cyclic GFR-binding peptide
  MOD_RES (2)..(4): Xaa is C or S
HXGXARVVMNNSLQEIVNSSDDYYVVPLPELQTP

SEQ ID NO: 11682 - protein, 24 aa, Artificial Sequence
  Cyclic GFR-binding peptide
VIMRYKKLIKPTKGIFYLISIANL

SEQ ID NO: 11683 - protein, 39 aa, Artificial Sequence
  Cyclic GFR-binding peptide
  MOD_RES (2)..(33)..(34): Xaa is C or S
KXSKVIMNSLQEIKPTKGIYYLITLPELDQSVXXPSASA

SEQ ID NO: 11684 - protein, 34 aa, Artificial Sequence
  Cyclic GFR-binding peptide
  MOD_RES (28)..(29): Xaa is C or S
MDRYKKLVVNNASDFYLISIANLRTPVXXTPPTS

SEQ ID NO: 11685 - protein, 34 aa, Artificial Sequence; identical to SEQ ID NO: 1111
  Cyclic GFR-binding peptide
  MOD_RES (1)..(33): Xaa is C or S

SEQ ID NO: 11686 - protein, 31 aa, Artificial Sequence
  Cyclic GFR-binding peptide
  MOD_RES (31)..(31): Xaa is C or S
EVVMENSLQEVVKDYEDYYVMPLPELETPVX

SEQ ID NO: 11687 - protein, 35 aa, Artificial Sequence
  Cyclic GFR-binding peptide
  MOD_RES (1)..(33)..(34): Xaa is C or S
XGEVVMDEYQKYVVKENEDIFLMSIPSLETPVXXA

SEQ ID NO: 11688 - protein, 39 aa, Artificial Sequence
  Cyclic GFR-binding peptide
  MOD_RES (1)..(3)..(35): Xaa is C or S
XGXSRVVMNEYQKYIVNSSDDIFLVSIPSLKTPAXTPKT

SEQ ID NO: 11689 - protein, 28 aa, Artificial Sequence
  Cyclic GFR-binding peptide
  MOD_RES (2)..(2): Xaa is C or S
KXSKVVMQYNKLVKPTRGVLYLISIASL

SEQ ID NO: 11690 - protein, 41 aa, Artificial Sequence
  Cyclic GFR-binding peptide
  MOD_RES (2)..(4)..(36): Xaa is C or S
HXGXSRVVMNNSLQEIVNSSDDYYLVTLPELKTPAXTPKTV

SEQ ID NO: 11691 - protein, 36 aa, Artificial Sequence
  Cyclic GFR-binding peptide
  MOD_RES (2)..(34)..(35): Xaa is C or S
GXSRVVMNEYQKYIVNSSDDIFLVSIPSLKTPAXXP

SEQ ID NO: 11692 - protein, 30 aa, Artificial Sequence; identical to SEQ ID NO: 1114
  Cyclic GFR-binding peptide
  MOD_RES (30)..(30): Xaa is C or S

SEQ ID NO: 11693 - protein, 28 aa, Artificial Sequence
  Cyclic GFR-binding peptide
  MOD_RES (27)..(28): Xaa is C or S
EQYNKLVVKDYEDLYLMSIASLETPVXX

SEQ ID NO: 11694 - protein, 36 aa, Artificial Sequence
  Cyclic GFR-binding peptide
  MOD_RES (31)..(32): Xaa is C or S
EVVMEEYQKYVVKDYEDIFLMSIPSLETPVXXAKPI

SEQ ID NO: 11695 - protein, 29 aa, Artificial Sequence
  Cyclic GFR-binding peptide
  MOD_RES (2)..(2): Xaa is C or S
KXSKVVMEYQKYVKPTRGVIFLISIPSLD

SEQ ID NO: 11696 - protein, 26 aa, Artificial Sequence
  Cyclic GFR-binding peptide
IMNSLQEIKPTKGIYYVIPLPELDQS

SEQ ID NO: 11697 - protein, 32 aa, Artificial Sequence
  Cyclic GFR-binding peptide
  MOD_RES (2)..(4): Xaa is C or S
RXGXSEVVMDNSLQEVVNNASDYYVIPLPELR

SEQ ID NO: 11698 - protein, 36 aa, Artificial Sequence; identical to SEQ ID NO: 1117
  Cyclic GFR-binding peptide
  MOD_RES (32)..(33): Xaa is C or S

SEQ ID NO: 11699 - protein, 34 aa, Artificial Sequence; identical to SEQ ID NO: 1122
  Cyclic GFR-binding peptide
  MOD_RES (2)..(4): Xaa is C or S

SEQ ID NO: 11700 - protein, 29 aa, Artificial Sequence
  Cyclic GFR-binding peptide
RVVMNNSLQEIVNSSDDYYVVPLPELKTP

SEQ ID NO: 11701 - protein, 30 aa, Artificial Sequence
  Cyclic GFR-binding peptide
  MOD_RES (27)..(27): Xaa is C or S
NNSLQEIVNSSDDYYVVPLPELKTPAXTPK

SEQ ID NO: 11702 - protein, 33 aa, Artificial Sequence
  Cyclic GFR-binding peptide
  MOD_RES (27)..(28): Xaa is C or S
NEYQKYIVNSSDDIFLVSIPSLKTPAXXPKPVY

SEQ ID NO: 11703 - protein, 27 aa, Artificial Sequence
  Cyclic GFR-binding peptide
  MOD_RES (2)..(2): Xaa is C or S
KXSKVIMNSLQEIKPTKGIYYVIPLPE

SEQ ID NO: 11704 - protein, 40 aa, Artificial Sequence; identical to SEQ ID NO: 1128
  Cyclic GFR-binding peptide
  MOD_RES (1)..(3)..(35)..(36): Xaa is C or S

SEQ ID NO: 11705 - protein, 29 aa, Artificial Sequence
  Cyclic GFR-binding peptide
  MOD_RES (27)..(28): Xaa is C or S
NEYQKYIVNSSDDIFLVSIPSLKTPAXXP

SEQ ID NO: 11706 - protein, 25 aa, Artificial Sequence
  Cyclic GFR-binding peptide
VMNSLQEVKPTRGVYYVIPLPELDQ

SEQ ID NO: 11707 - protein, 25 aa, Artificial Sequence
  Cyclic GFR-binding peptide
RVVMNRYKKLIVNSSDDFYLVSIAN

SEQ ID NO: 11708 - protein, 26 aa, Artificial Sequence
  Cyclic GFR-binding peptide
MQYNKLVKPTRGVLYLISIASLDQPV

SEQ ID NO: 11709 - protein, 28 aa, Artificial Sequence
  Cyclic GFR-binding peptide
  MOD_RES (1)..(1): Xaa is C or S
XARVVMNNSLQEIVNSSDDYYLVTLPEL

SEQ ID NO: 11710 - protein, 27 aa, Artificial Sequence
  Cyclic GFR-binding peptide
  MOD_RES (27)..(27): Xaa is C or S
MQYNKLIKPTKGILYLISIASLDQSVX

SEQ ID NO: 11711 - protein, 24 aa, Artificial Sequence
  Cyclic GFR-binding peptide
VMEEYQKYVVKDYEDIFLMSIPSL

SEQ ID NO: 11712 - protein, 23 aa, Artificial Sequence
  Cyclic GFR-binding peptide
EYQKYIVNSSDDIFLVSIPSLKT

SEQ ID NO: 11713 - protein, 33 aa, Artificial Sequence
  Cyclic GFR-binding peptide
  MOD_RES (2)..(4): Xaa is C or S
HXGXARVVMNEYQKYIVNSSDDIFLVSIPSLQT

SEQ ID NO: 11714 - protein, 29 aa, Artificial Sequence
  Cyclic GFR-binding peptide
  MOD_RES (28)..(29): Xaa is C or S
IMRYKKLVKPKRGVFYLISIANLAQPVXX

SEQ ID NO: 11715 - protein, 35 aa, Artificial Sequence; identical to SEQ ID NO: 1142
  Cyclic GFR-binding peptide
  MOD_RES (1)..(33)..(34): Xaa is C or S

SEQ ID NO: 11716 - protein, 28 aa, Artificial Sequence
  Cyclic GFR-binding peptide
  MOD_RES (27)..(28): Xaa is C or S
DNSLQEVVKENEDYYLMTLPELETPVXX

SEQ ID NO: 11717 - protein, 27 aa, Artificial Sequence
  Cyclic GFR-binding peptide
KVIMRYKKLIKPTKGIFYLISIANLDQ

SEQ ID NO: 11718 - protein, 35 aa, Artificial Sequence; identical to SEQ ID NO: 1144
  Cyclic GFR-binding peptide
  MOD_RES (31)..(31): Xaa is C or S

SEQ ID NO: 11719 - protein, 39 aa, Artificial Sequence; identical to SEQ ID NO: 1145
  Cyclic GFR-binding peptide
  MOD_RES (1)..(3)..(34)..(35): Xaa is C or S

SEQ ID NO: 11720 - protein, 40 aa, Artificial Sequence
  Cyclic GFR-binding peptide
  MOD_RES (1)..(3)..(35): Xaa is C or S
XGXSRVVMNNSLQEIVNSSDDYYLVTLPELKTPAXTPKTV

SEQ ID NO: 11721 - protein, 31 aa, Artificial Sequence
  Cyclic GFR-binding peptide
  MOD_RES (1)..(1): Xaa is C or S
XSRVIMEYQKYVKPKRGVIFLISIPSLAQPV

SEQ ID NO: 11722 - protein, 36 aa, Artificial Sequence; identical to SEQ ID NO: 1148
  Cyclic GFR-binding peptide
  MOD_RES (30)..(31): Xaa is C or S

SEQ ID NO: 11723 - protein, 42 aa, Artificial Sequence
  Cyclic GFR-binding peptide
  MOD_RES (2)..(4)..(36)..(37): Xaa is C or S
RXGXGEVVMDNSLQEVVKENEDYYVMPLPELETPVXXAKPIK

SEQ ID NO: 11724 - protein, 25 aa, Artificial Sequence
  Cyclic GFR-binding peptide
VMNNSLQEIVNSSDDYYVVPLPELQ

SEQ ID NO: 11725 - protein, 30 aa, Artificial Sequence
  Cyclic GFR-binding peptide
  MOD_RES (30)..(30): Xaa is C or S
RVIMNSLQEVKPKRGVYYLITLPELAQPVX

SEQ ID NO: 11726 - protein, 30 aa, Artificial Sequence; identical to SEQ ID NO: 1151
  Cyclic GFR-binding peptide
  MOD_RES (2)..(2): Xaa is C or S

SEQ ID NO: 11727 - protein, 36 aa, Artificial Sequence
  Cyclic GFR-binding peptide
  MOD_RES (2)..(4)..(35)..(36): Xaa is C or S
SXKXSKVIMNSLQEIKPTKGIYYVIPLPELDQSVXX

SEQ ID NO: 11728 - protein, 23 aa, Artificial Sequence
  Cyclic GFR-binding peptide
DQYNKLVVKENEDLYLMSIASLE

SEQ ID NO: 11729 - protein, 33 aa, Artificial Sequence
  Cyclic GFR-binding peptide
  MOD_RES (1)..(3): Xaa is C or S
XGXARVVMNNSLQEIVNSSDDYYLVTLPELQTP

SEQ ID NO: 11730 - protein, 33 aa, Artificial Sequence
  Cyclic GFR-binding peptide
  MOD_RES (1)..(3): Xaa is C or S
XKXSRVIMNSLQEVKPKRGVYYLITLPELAQPV

SEQ ID NO: 11731 - protein, 31 aa, Artificial Sequence
  Cyclic GFR-binding peptide
  MOD_RES (30)..(31): Xaa is C or S
KVIMEYQKYIKPTKGIIFLISIPSLDQSVXX

SEQ ID NO: 11732 - protein, 36 aa, Artificial Sequence
  Cyclic GFR-binding peptide
  MOD_RES (31)..(32): Xaa is C or S
EVVMDEYQKYVVKENEDIFLMSIPSLETPVXXAKPI

SEQ ID NO: 11733 - protein, 25 aa, Artificial Sequence
  Cyclic GFR-binding peptide
EYQKYVKPKRGVIFLISIPSLAQPV

SEQ ID NO: 11734 - protein, 31 aa, Artificial Sequence; identical to SEQ ID NO: 1154
  Cyclic GFR-binding peptide
  MOD_RES (27)..(28): Xaa is C or S

SEQ ID NO: 11735 - protein, 36 aa, Artificial Sequence; identical to SEQ ID NO: 1155
  Cyclic GFR-binding peptide
  MOD_RES (1)..(32)..(33): Xaa is C or S

SEQ ID NO: 11736 - protein, 35 aa, Artificial Sequence
  Cyclic GFR-binding peptide
  MOD_RES (32)..(33): Xaa is C or S
SEVVMDNSLQEVVNNASDYYLITLPELRTPVXXTP

SEQ ID NO: 11737 - protein, 33 aa, Artificial Sequence; identical to SEQ ID NO: 1159
  Cyclic GFR-binding peptide
  MOD_RES (31)..(32): Xaa is C or S

SEQ ID NO: 11738 - protein, 33 aa, Artificial Sequence; identical to SEQ ID NO: 1160
  Cyclic GFR-binding peptide
  MOD_RES (27)..(28): Xaa is C or S

SEQ ID NO: 11739 - protein, 33 aa, Artificial Sequence
  Cyclic GFR-binding peptide
  MOD_RES (31)..(32): Xaa is C or S
EVVMDNSLQEVVNNASDYYLITLPELRTPVXXT

SEQ ID NO: 11740 - protein, 42 aa, Artificial Sequence; identical to SEQ ID NO: 1163
  Cyclic GFR-binding peptide
  MOD_RES (2)..(4)..(36): Xaa is C or S

SEQ ID NO: 11741 - protein, 29 aa, Artificial Sequence
  Cyclic GFR-binding peptide
  MOD_RES (28)..(29): Xaa is C or S
MDNSLQEVVNNASDYYVIPLPELRTPVXX

SEQ ID NO: 11742 - protein, 34 aa, Artificial Sequence
  Cyclic GFR-binding peptide
  MOD_RES (31)..(32): Xaa is C or S
RVVMNEYQKYIVNSSDDIFLVSIPSLKTPAXXPK

SEQ ID NO: 11743 - protein, 27 aa, Artificial Sequence
  Cyclic GFR-binding peptide
  MOD_RES (1)..(1): Xaa is C or S
XARVVMNEYQKYIVNSSDDIFLVSIPS

SEQ ID NO: 11744 - protein, 38 aa, Artificial Sequence
  Cyclic GFR-binding peptide
  MOD_RES (1)..(32)..(33): Xaa is C or S
XSKVVMEYQKYVKPTRGVIFLISIPSLDQPVXXPSASA

SEQ ID NO: 11745 - protein, 32 aa, Artificial Sequence; identical to SEQ ID NO: 1165
  Cyclic GFR-binding peptide
  MOD_RES (1)..(3): Xaa is C or S

SEQ ID NO: 11746 - protein, 33 aa, Artificial Sequence
  Cyclic GFR-binding peptide
  MOD_RES (27)..(28): Xaa is C or S
NNSLQEIVNSSDDYYVVPLPELKTPAXXPKPVY

SEQ ID NO: 11747 - protein, 34 aa, Artificial Sequence
  Cyclic GFR-binding peptide
  MOD_RES (28)..(29): Xaa is C or S
IMNSLQEIKPTKGIYYVIPLPELDQSVXXPSASA

SEQ ID NO: 11748 - protein, 32 aa, Artificial Sequence; identical to SEQ ID NO: 1166
  Cyclic GFR-binding peptide
  MOD_RES (30)..(31): Xaa is C or S

SEQ ID NO: 11749 - protein, 32 aa, Artificial Sequence; identical to SEQ ID NO: 1167
  Cyclic GFR-binding peptide
  MOD_RES (30)..(31): Xaa is C or S

SEQ ID NO: 11750 - protein, 27 aa, Artificial Sequence
  Cyclic GFR-binding peptide
IMQYNKLVKPKRGVLYLISIASLAQPV

SEQ ID NO: 11751 - protein, 30 aa, Artificial Sequence; identical to SEQ ID NO: 1169
  Cyclic GFR-binding peptide
  MOD_RES (27)..(28): Xaa is C or S

SEQ ID NO: 11752 - protein, 34 aa, Artificial Sequence; identical to SEQ ID NO: 1171
  Cyclic GFR-binding peptide
  MOD_RES (29)..(30): Xaa is C or S

SEQ ID NO: 11753 - protein, 22 aa, Artificial Sequence
  Cyclic GFR-binding peptide
NSLQEIKPTKGIYYVIPLPELD

SEQ ID NO: 11754 - protein, 37 aa, Artificial Sequence
  Cyclic GFR-binding peptide
  MOD_RES (31)..(32): Xaa is C or S
RVVMNNSLQEIVNSSDDYYLVTLPELKTPAXXPKPVY

SEQ ID NO: 11755 - protein, 29 aa, Artificial Sequence
  Cyclic GFR-binding peptide
VVMNQYNKLIVNSSDDLYLVSIASLQTPA

SEQ ID NO: 11756 - protein, 32 aa, Artificial Sequence; identical to SEQ ID NO: 1176
  Cyclic GFR-binding peptide
  MOD_RES (27)..(28): Xaa is C or S

SEQ ID NO: 11757 - protein, 27 aa, Artificial Sequence
  Cyclic GFR-binding peptide
GEVVMDRYKKLVVKENEDFYLMSIANL

SEQ ID NO: 11758 - protein, 33 aa, Artificial Sequence
  Cyclic GFR-binding peptide
  MOD_RES (2)..(4): Xaa is C or S
SXKXSRVIMNSLQEVKPKRGVYYLITLPELAQP

SEQ ID NO: 11759 - protein, 34 aa, Artificial Sequence; identical to SEQ ID NO: 1179
  Cyclic GFR-binding peptide
  MOD_RES (1)..(33)..(34): Xaa is C or S

SEQ ID NO: 11760 - protein, 27 aa, Artificial Sequence
  Cyclic GFR-binding peptide
  MOD_RES (27)..(27): Xaa is C or S
DRYKKLVVKENEDFYLMSIANLETPVX

SEQ ID NO: 11761 - protein, 35 aa, Artificial Sequence
  Cyclic GFR-binding peptide
  MOD_RES (29)..(30): Xaa is C or S
VMNEYQKYIVNSSDDIFLVSIPSLQTPAXXPKPVT

SEQ ID NO: 11762 - protein, 26 aa, Artificial Sequence
  Cyclic GFR-binding peptide
EVVMENSLQEVVKDYEDYYLMTLPEL

SEQ ID NO: 11763 - protein, 30 aa, Artificial Sequence
  Cyclic GFR-binding peptide
ARVVMNNSLQEIVNSSDDYYVVPLPELQTP

SEQ ID NO: 11764 - protein, 28 aa, Artificial Sequence
  Cyclic GFR-binding peptide
VIMNSLQEIKPTKGIYYLITLPELDQSV

SEQ ID NO: 11765 - protein, 35 aa, Artificial Sequence
  Cyclic GFR-binding peptide
  MOD_RES (30)..(31): Xaa is C or S
KVIMNSLQEIKPTKGIYYVIPLPELDQSVXXPSAS

SEQ ID NO: 11766 - protein, 31 aa, Artificial Sequence
  Cyclic GFR-binding peptide
  MOD_RES (26)..(27): Xaa is C or S
NSLQEIVNSSDDYYLVTLPELKTPAXXPKPV

SEQ ID NO: 11767 - protein, 26 aa, Artificial Sequence
  Cyclic GFR-binding peptide
DRYKKLVVNNASDFYLISIANLRTPV

SEQ ID NO: 11768 - protein, 37 aa, Artificial Sequence
  Cyclic GFR-binding peptide
  MOD_RES (2)..(4)..(36)..(37): Xaa is C or S
HXGXSRVVMNNSLQEIVNSSDDYYLVTLPELKTPAXX

SEQ ID NO: 11769 - protein, 33 aa, Artificial Sequence
  Cyclic GFR-binding peptide
  MOD_RES (2)..(4): Xaa is C or S
RXGXGEVVMDEYQKYVVKENEDIFLMSIPSLET

SEQ ID NO: 11770 - protein, 38 aa, Artificial Sequence
  Cyclic GFR-binding peptide
  MOD_RES (1)..(33)..(34): Xaa is C or S
XGEVVMENSLQEVVKDYEDYYVMPLPELETPVXXAKPI

SEQ ID NO: 11771 - protein, 37 aa, Artificial Sequence; identical to SEQ ID NO: 1197
  Cyclic GFR-binding peptide
  MOD_RES (1)..(3)..(35)..(36): Xaa is C or S

SEQ ID NO: 11772 - protein, 33 aa, Artificial Sequence
  Cyclic GFR-binding peptide
  MOD_RES (31)..(32): Xaa is C or S
EVVMENSLQEVVKDYEDYYVMPLPELETPVXXA

SEQ ID NO: 11773 - protein, 32 aa, Artificial Sequence
  Cyclic GFR-binding peptide
  MOD_RES (2)..(2): Xaa is C or S
GXARVVMNEYQKYIVNSSDDIFLVSIPSLQTP

SEQ ID NO: 11774 - protein, 28 aa, Artificial Sequence
  Cyclic GFR-binding peptide
  MOD_RES (26)..(27): Xaa is C or S
NSLQEIKPTKGIYYLITLPELDQSVXXP

SEQ ID NO: 11775 - protein, 28 aa, Artificial Sequence
  Cyclic GFR-binding peptide
VMDNSLQEVVKENEDYYVMPLPELETPV

SEQ ID NO: 11776 - protein, 28 aa, Artificial Sequence
  Cyclic GFR-binding peptide
  MOD_RES (2)..(2): Xaa is C or S
GXGEVVMDRYKKLVVKENEDFYLMSIAN

SEQ ID NO: 11777 - protein, 38 aa, Artificial Sequence
  Cyclic GFR-binding peptide
  MOD_RES (1)..(3)..(34)..(35): Xaa is C or S
XKXSRVIMNSLQEVKPKRGVYYLITLPELAQPVXXPAA

SEQ ID NO: 11778 - protein, 30 aa, Artificial Sequence; identical to SEQ ID NO: 1206
  Cyclic GFR-binding peptide
  MOD_RES (28)..(29): Xaa is C or S

SEQ ID NO: 11779 - protein, 26 aa, Artificial Sequence
  Cyclic GFR-binding peptide
VIMEYQKYIKPTKGIIFLISIPSLDQ

SEQ ID NO: 11780 - protein, 34 aa, Artificial Sequence
  Cyclic GFR-binding peptide
  MOD_RES (1)..(3): Xaa is C or S
XGXGEVVMENSLQEVVKDYEDYYVMPLPELETPV

SEQ ID NO: 11781 - protein, 33 aa, Artificial Sequence
  Cyclic GFR-binding peptide
  MOD_RES (28)..(29): Xaa is C or S
MENSLQEVVKDYEDYYVMPLPELETPVXXAKPI

SEQ ID NO: 11782 - protein, 33 aa, Artificial Sequence
  Cyclic GFR-binding peptide
  MOD_RES (30)..(31): Xaa is C or S
VVMNEYQKYIVNSSDDIFLVSIPSLQTPAXXPK

SEQ ID NO: 11783 - protein, 34 aa, Artificial Sequence
  Cyclic GFR-binding peptide
  MOD_RES (30)..(31): Xaa is C or S
RVIMEYQKYVKPKRGVIFLISIPSLAQPVXXPAA

SEQ ID NO: 11784 - protein, 32 aa, Artificial Sequence; identical to SEQ ID NO: 1211
  Cyclic GFR-binding peptide
  MOD_RES (2)..(2): Xaa is C or S

SEQ ID NO: 11785 - protein, 40 aa, Artificial Sequence; identical to SEQ ID NO: 1212
  Cyclic GFR-binding peptide
  MOD_RES (2)..(4)..(35)..(36): Xaa is C or S

SEQ ID NO: 11786 - protein, 35 aa, Artificial Sequence
  Cyclic GFR-binding peptide
  MOD_RES (2)..(4)..(35): Xaa is C or S
SXKXSKVVMEYQKYVKPTRGVIFLISIPSLDQPVX

SEQ ID NO: 11787 - protein, 30 aa, Artificial Sequence; identical to SEQ ID NO: 1215
  Cyclic GFR-binding peptide
  MOD_RES (26)..(26): Xaa is C or S

SEQ ID NO: 11788 - protein, 31 aa, Artificial Sequence; identical to SEQ ID NO: 1216
  Cyclic GFR-binding peptide
  MOD_RES (1)..(3): Xaa is C or S

SEQ ID NO: 11789 - protein, 36 aa, Artificial Sequence
  Cyclic GFR-binding peptide
  MOD_RES (1)..(32)..(33): Xaa is C or S
XSKVIMNSLQEIKPTKGIYYVIPLPELDQSVXXPSA

SEQ ID NO: 11790 - protein, 30 aa, Artificial Sequence
  Cyclic GFR-binding peptide
  MOD_RES (30)..(30): Xaa is C or S
VVMDNSLQEVVKENEDYYLMTLPELETPVX

SEQ ID NO: 11791 - protein, 34 aa, Artificial Sequence; identical to SEQ ID NO: 1217
  Cyclic GFR-binding peptide
  MOD_RES (31)..(32): Xaa is C or S

SEQ ID NO: 11792 - protein, 35 aa, Artificial Sequence
  Cyclic GFR-binding peptide
  MOD_RES (29)..(30): Xaa is C or S
VMENSLQEVVKDYEDYYVMPLPELETPVXXAKPIS

SEQ ID NO: 11793 - protein, 40 aa, Artificial Sequence
  Cyclic GFR-binding peptide
  MOD_RES (1)..(3)..(35)..(36): Xaa is C or S
XGXSRVVMNNSLQEIVNSSDDYYVVPLPELKTPAXXPKPV

SEQ ID NO: 11794 - protein, 41 aa, Artificial Sequence; identical to SEQ ID NO: 1219
  Cyclic GFR-binding peptide
  MOD_RES (1)..(3)..(35)..(36): Xaa is C or S

SEQ ID NO: 11795 - protein, 30 aa, Artificial Sequence; identical to SEQ ID NO: 1220
  Cyclic GFR-binding peptide
  MOD_RES (30)..(30): Xaa is C or S

SEQ ID NO: 11796 - protein, 28 aa, Artificial Sequence
  Cyclic GFR-binding peptide
  MOD_RES (27)..(28): Xaa is C or S
NQYNKLIVNSSDDLYLVSIASLKTPAXX

SEQ ID NO: 11797 - protein, 33 aa, Artificial Sequence; identical to SEQ ID NO: 1223
  Cyclic GFR-binding peptide
  MOD_RES (1)..(33): Xaa is C or S

SEQ ID NO: 11798 - protein, 40 aa, Artificial Sequence
  Cyclic GFR-binding peptide
  MOD_RES (2)..(4)..(36)..(37): Xaa is C or S
RXGXGEVVMDNSLQEVVKENEDYYLMTLPELETPVXXAKP

SEQ ID NO: 11799 - protein, 30 aa, Artificial Sequence
  Cyclic GFR-binding peptide
  MOD_RES (28)..(29): Xaa is C or S
MENSLQEVVKDYEDYYVMPLPELETPVXXA

SEQ ID NO: 11800 - protein, 31 aa, Artificial Sequence
  Cyclic GFR-binding peptide
  MOD_RES (1)..(3): Xaa is C or S
XKXSKVIMNSLQEIKPTKGIYYVIPLPELDQ

SEQ ID NO: 11801 - protein, 31 aa, Artificial Sequence; identical to SEQ ID NO: 1225
  Cyclic GFR-binding peptide
  MOD_RES (26)..(27): Xaa is C or S

SEQ ID NO: 11802 - protein, 33 aa, Artificial Sequence; identical to SEQ ID NO: 1226
  Cyclic GFR-binding peptide
  MOD_RES (30)..(31): Xaa is C or S

SEQ ID NO: 11803 - protein, 23 aa, Artificial Sequence
  Cyclic GFR-binding peptide
QYNKLVKPTRGVLYLISIASLDQ

SEQ ID NO: 11804 - protein, 37 aa, Artificial Sequence; identical to SEQ ID NO: 1229
  Cyclic GFR-binding peptide
  MOD_RES (32)..(32): Xaa is C or S

SEQ ID NO: 11805 - protein, 31 aa, Artificial Sequence; identical to SEQ ID NO: 1231
  Cyclic GFR-binding peptide
  MOD_RES (31)..(31): Xaa is C or S

SEQ ID NO: 11806 - protein, 32 aa, Artificial Sequence
  Cyclic GFR-binding peptide
  MOD_RES (26)..(26): Xaa is C or S
NSLQEIVNSSDDYYLVTLPELKTPAXTPKTVH

SEQ ID NO: 11807 - protein, 24 aa, Artificial Sequence
  Cyclic GFR-binding peptide
IMNSLQEIKPTKGIYYVIPLPELD

SEQ ID NO: 11808 - protein, 41 aa, Artificial Sequence; identical to SEQ ID NO: 1233
  Cyclic GFR-binding peptide
  MOD_RES (2)..(4)..(36)..(37): Xaa is C or S

SEQ ID NO: 11809 - protein, 28 aa, Artificial Sequence
  Cyclic GFR-binding peptide
  MOD_RES (26)..(27): Xaa is C or S
NSLQEIVNSSDDYYVVPLPELKTPAXXP

SEQ ID NO: 11810 - protein, 25 aa, Artificial Sequence
  Cyclic GFR-binding peptide
EVVMDRYKKLVVNNASDFYLISIAN

SEQ ID NO: 11811 - protein, 26 aa, Artificial Sequence
  Cyclic GFR-binding peptide
KVIMQYNKLIKPTKGILYLISIASLD

SEQ ID NO: 11812 - protein, 37 aa, Artificial Sequence; identical to SEQ ID NO: 1237
  Cyclic GFR-binding peptide
  MOD_RES (1)..(33)..(34): Xaa is C or S

SEQ ID NO: 11813 - protein, 35 aa, Artificial Sequence
  Cyclic GFR-binding peptide
  MOD_RES (1)..(3)..(35): Xaa is C or S
XGXGEVVMENSLQEVVKDYEDYYVMPLPELETPVX

SEQ ID NO: 11814 - protein, 30 aa, Artificial Sequence
  Cyclic GFR-binding peptide
  MOD_RES (27)..(27): Xaa is C or S
NEYQKYIVNSSDDIFLVSIPSLKTPAXTPK

SEQ ID NO: 11815 - protein, 29 aa, Artificial Sequence
  Cyclic GFR-binding peptide
  MOD_RES (26)..(27): Xaa is C or S
NSLQEIVNSSDDYYVVPLPELQTPAXXPK

SEQ ID NO: 11816 - protein, 32 aa, Artificial Sequence; identical to SEQ ID NO: 1241
  Cyclic GFR-binding peptide
  MOD_RES (2)..(2): Xaa is C or S

SEQ ID NO: 11817 - protein, 27 aa, Artificial Sequence
  Cyclic GFR-binding peptide
KVIMNSLQEIKPTKGIYYLITLPELDQ

SEQ ID NO: 11818 - protein, 33 aa, Artificial Sequence; identical to SEQ ID NO: 1242
  Cyclic GFR-binding peptide
  MOD_RES (28)..(29): Xaa is C or S

SEQ ID NO: 11819 - protein, 35 aa, Artificial Sequence
  Cyclic GFR-binding peptide
  MOD_RES (30)..(30): Xaa is C or S
VVMNEYQKYIVNSSDDIFLVSIPSLKTPAXTPKTV

SEQ ID NO: 11820 - protein, 37 aa, Artificial Sequence; identical to SEQ ID NO: 1243
  Cyclic GFR-binding peptide
  MOD_RES (31)..(32): Xaa is C or S

SEQ ID NO: 11821 - protein, 36 aa, Artificial Sequence
  Cyclic GFR-binding peptide
  MOD_RES (1)..(3)..(35): Xaa is C or S
XGXSRVVMNNSLQEIVNSSDDYYLVTLPELKTPAXT

SEQ ID NO: 11822 - protein, 32 aa, Artificial Sequence; identical to SEQ ID NO: 1246
  Cyclic GFR-binding peptide
  MOD_RES (1)..(1): Xaa is C or S

SEQ ID NO: 11823 - protein, 37 aa, Artificial Sequence; identical to SEQ ID NO: 1247
  Cyclic GFR-binding peptide
  MOD_RES (1)..(33): Xaa is C or S

SEQ ID NO: 11824 - protein, 33 aa, Artificial Sequence
  Cyclic GFR-binding peptide
  MOD_RES (1)..(3): Xaa is C or S
XGXGEVVMEEYQKYVVKDYEDIFLMSIPSLETP

SEQ ID NO: 11825 - protein, 32 aa, Artificial Sequence
  Cyclic GFR-binding peptide
  MOD_RES (2)..(2): Xaa is C or S
GXARVVMNNSLQEIVNSSDDYYVVPLPELQTP

SEQ ID NO: 11826 - protein, 32 aa, Artificial Sequence
  Cyclic GFR-binding peptide
  MOD_RES (29)..(30): Xaa is C or S
VMNEYQKYIVNSSDDIFLVSIPSLQTPAXXPK

SEQ ID NO: 11827 - protein, 39 aa, Artificial Sequence; identical to SEQ ID NO: 1251
  Cyclic GFR-binding peptide
  MOD_RES (2)..(4)..(35)..(36): Xaa is C or S

SEQ ID NO: 11828 - protein, 36 aa, Artificial Sequence
  Cyclic GFR-binding peptide
  MOD_RES (2)..(34)..(35): Xaa is C or S
GXSEVVMDRYKKLVVNNASDFYLISIANLRTPVXXT

SEQ ID NO: 11829 - protein, 30 aa, Artificial Sequence
  Cyclic GFR-binding peptide
  MOD_RES (2)..(4): Xaa is C or S
SXKXSKVVMEYQKYVKPTRGVIFLISIPSL

SEQ ID NO: 11830 - protein, 31 aa, Artificial Sequence; identical to SEQ ID NO: 1255
  Cyclic GFR-binding peptide
  MOD_RES (2)..(4): Xaa is C or S

SEQ ID NO: 11831 - protein, 30 aa, Artificial Sequence
  Cyclic GFR-binding peptide
  MOD_RES (28)..(29): Xaa is C or S
MDRYKKLVVNNASDFYLISIANLRTPVXXT

SEQ ID NO: 11832 - protein, 23 aa, Artificial Sequence
  Cyclic GFR-binding peptide
NSLQEVVNNASDYYVIPLPELRT

SEQ ID NO: 11833 - protein, 32 aa, Artificial Sequence
  Cyclic GFR-binding peptide
  MOD_RES (2)..(4): Xaa is C or S
RXGXGEVVMENSLQEVVKDYEDYYVMPLPELE

SEQ ID NO: 11834 - protein, 24 aa, Artificial Sequence
  Cyclic GFR-binding peptide
EYQKYIVNSSDDIFLVSIPSLKTP

SEQ ID NO: 11835 - protein, 35 aa, Artificial Sequence; identical to SEQ ID NO: 1258
  Cyclic GFR-binding peptide
  MOD_RES (2)..(4)..(35): Xaa is C or S

SEQ ID NO: 11836 - protein, 35 aa, Artificial Sequence; identical to SEQ ID NO: 1259
  Cyclic GFR-binding peptide
  MOD_RES (1)..(3)..(34)..(35): Xaa is C or S

SEQ ID NO: 11837 - protein, 28 aa, Artificial Sequence
  Cyclic GFR-binding peptide
  MOD_RES (27)..(28): Xaa is C or S
MRYKKLVKPTRGVFYLISIANLDQPVXX

SEQ ID NO: 11838 - protein, 20 aa, Artificial Sequence
  Cyclic GFR-binding peptide
NSLQEVVNNASDYYVIPLPE

SEQ ID NO: 11839 - protein, 37 aa, Artificial Sequence; identical to SEQ ID NO: 1261
  Cyclic GFR-binding peptide
  MOD_RES (2)..(33)..(34): Xaa is C or S

SEQ ID NO: 11840 - protein, 34 aa, Artificial Sequence
  Cyclic GFR-binding peptide
  MOD_RES (28)..(29): Xaa is C or S
IMEYQKYVKPKRGVIFLISIPSLAQPVXXPAASA

SEQ ID NO: 11841 - protein, 28 aa, Artificial Sequence
  Cyclic GFR-binding peptide
VIMQYNKLIKPTKGILYLISIASLDQSV

SEQ ID NO: 11842 - protein, 29 aa, Artificial Sequence
  Cyclic GFR-binding peptide
  MOD_RES (1)..(1): Xaa is C or S
XSKVIMNSLQEIKPTKGIYYLITLPELDQ

SEQ ID NO: 11843 - protein, 37 aa, Artificial Sequence
  Cyclic GFR-binding peptide
  MOD_RES (31)..(32): Xaa is C or S
EVVMEEYQKYVVKDYEDIFLMSIPSLETPVXXAKPIS

SEQ ID NO: 11844 - protein, 35 aa, Artificial Sequence
  Cyclic GFR-binding peptide
  MOD_RES (2)..(4)..(35): Xaa is C or S
SXKXSRVIMNSLQEVKPKRGVYYLITLPELAQPVX

SEQ ID NO: 11845 - protein, 21 aa, Artificial Sequence
  Cyclic GFR-binding peptide
DNSLQEVVKENEDYYLMTLPE

SEQ ID NO: 11846 - protein, 35 aa, Artificial Sequence
  Cyclic GFR-binding peptide
  MOD_RES (31)..(32): Xaa is C or S
RVVMNEYQKYIVNSSDDIFLVSIPSLQTPAXXPKP

SEQ ID NO: 11847 - protein, 28 aa, Artificial Sequence
  Cyclic GFR-binding peptide
VVMNSLQEVKPTRGVYYVIPLPELDQPV

SEQ ID NO: 11848 - protein, 34 aa, Artificial Sequence; identical to SEQ ID NO: 1270
  Cyclic GFR-binding peptide
  MOD_RES (31)..(31): Xaa is C or S

SEQ ID NO: 11849 - protein, 24 aa, Artificial Sequence
  Cyclic GFR-binding peptide
MQYNKLVKPKRGVLYLISIASLAQ

SEQ ID NO: 11850 - protein, 29 aa, Artificial Sequence
  Cyclic GFR-binding peptide
  MOD_RES (27)..(28): Xaa is C or S
NNSLQEIVNSSDDYYVVPLPELKTPAXXP

SEQ ID NO: 11851 - protein, 34 aa, Artificial Sequence
  Cyclic GFR-binding peptide
  MOD_RES (30)..(31): Xaa is C or S
VVMENSLQEVVKDYEDYYVMPLPELETPVXXAKP

SEQ ID NO: 11852 - protein, 39 aa, Artificial Sequence; identical to SEQ ID NO: 1273
  Cyclic GFR-binding peptide
  MOD_RES (1)..(33)..(34): Xaa is C or S

SEQ ID NO: 11853 - protein, 32 aa, Artificial Sequence; identical to SEQ ID NO: 1277
  Cyclic GFR-binding peptide
  MOD_RES (2)..(2): Xaa is C or S

SEQ ID NO: 11854 - protein, 32 aa, Artificial Sequence; identical to SEQ ID NO: 1279
  Cyclic GFR-binding peptide
  MOD_RES (1)..(3): Xaa is C or S

SEQ ID NO: 11855 - protein, 30 aa, Artificial Sequence; identical to SEQ ID NO: 1280
  Cyclic GFR-binding peptide
  MOD_RES (30)..(30): Xaa is C or S

SEQ ID NO: 11856 - protein, 38 aa, Artificial Sequence
  Cyclic GFR-binding peptide
  MOD_RES (1)..(3)..(34)..(35): Xaa is C or S
XKXSKVIMNSLQEIKPTKGIYYVIPLPELDQSVXXPSA

SEQ ID NO: 11857 - protein, 33 aa, Artificial Sequence
  Cyclic GFR-binding peptide
  MOD_RES (31)..(32): Xaa is C or S
RVVMNNSLQEIVNSSDDYYLVTLPELQTPAXXP

SEQ ID NO: 11858 - protein, 30 aa, Artificial Sequence; identical to SEQ ID NO: 1284
  Cyclic GFR-binding peptide
  MOD_RES (1)..(1): Xaa is C or S

SEQ ID NO: 11859 - protein, 28 aa, Artificial Sequence
  Cyclic GFR-binding peptide
  MOD_RES (1)..(1): Xaa is C or S
XSRVIMQYNKLVKPKRGVLYLISIASLA

SEQ ID NO: 11860 - protein, 31 aa, Artificial Sequence
  Cyclic GFR-binding peptide
  MOD_RES (29)..(30): Xaa is C or S
VMNNSLQEIVNSSDDYYVVPLPELKTPAXXP

SEQ ID NO: 11861 - protein, 29 aa, Artificial Sequence
  Cyclic GFR-binding peptide
  MOD_RES (1)..(1): Xaa is C or S
XSKVVMQYNKLVKPTRGVLYLISIASLDQ

SEQ ID NO: 11862 - protein, 29 aa, Artificial Sequence
  Cyclic GFR-binding peptide
  MOD_RES (27)..(27): Xaa is C or S
NQYNKLIVNSSDDLYLVSIASLKTPAXTP

SEQ ID NO: 11863 - protein, 30 aa, Artificial Sequence
  Cyclic GFR-binding peptide
  MOD_RES (1)..(3): Xaa is C or S
XGXARVVMNNSLQEIVNSSDDYYLVTLPEL

SEQ ID NO: 11864 - protein, 34 aa, Artificial Sequence
  Cyclic GFR-binding peptide
  MOD_RES (1)..(3)..(34): Xaa is C or S
XKXSRVIMNSLQEVKPKRGVYYLITLPELAQPVX

SEQ ID NO: 11865 - protein, 39 aa, Artificial Sequence
  Cyclic GFR-binding peptide
  MOD_RES (2)..(4)..(36)..(37): Xaa is C or S
RXGXSEVVMDNSLQEVVNNASDYYVIPLPELRTPVXXTP

SEQ ID NO: 11866 - protein, 24 aa, Artificial Sequence
  Cyclic GFR-binding peptide
MNNSLQEIVNSSDDYYVVPLPELQ

SEQ ID NO: 11867 - protein, 35 aa, Artificial Sequence; identical to SEQ ID NO: 1292
  Cyclic GFR-binding peptide
  MOD_RES (1)..(3)..(35): Xaa is C or S

SEQ ID NO: 11868 - protein, 32 aa, Artificial Sequence
  Cyclic GFR-binding peptide
  MOD_RES (28)..(29): Xaa is C or S
MNNSLQEIVNSSDDYYLVTLPELQTPAXXPKP

SEQ ID NO: 11869 - protein, 28 aa, Artificial Sequence
  Cyclic GFR-binding peptide
  MOD_RES (2)..(2): Xaa is C or S
KXSRVIMNSLQEVKPKRGVYYLITLPEL

SEQ ID NO: 11870 - protein, 32 aa, Artificial Sequence
  Cyclic GFR-binding peptide
  MOD_RES (26)..(27): Xaa is C or S
NSLQEIKPTKGIYYVIPLPELDQSVXXPSASA

SEQ ID NO: 11871 - protein, 26 aa, Artificial Sequence
  Cyclic GFR-binding peptide
SEVVMDNSLQEVVNNASDYYVIPLPE

SEQ ID NO: 11872 - protein, 36 aa, Artificial Sequence; identical to SEQ ID NO: 1294
  Cyclic GFR-binding peptide
  MOD_RES (32)..(33): Xaa is C or S

SEQ ID NO: 11873 - protein, 38 aa, Artificial Sequence
  Cyclic GFR-binding peptide
  MOD_RES (32)..(33): Xaa is C or S
ARVVMNEYQKYIVNSSDDIFLVSIPSLQTPAXXPKPVT

SEQ ID NO: 11874 - protein, 29 aa, Artificial Sequence
  Cyclic GFR-binding peptide
  MOD_RES (2)..(2): Xaa is C or S
GXGEVVMDRYKKLVVKENEDFYLMSIANL

SEQ ID NO: 11875 - protein, 31 aa, Artificial Sequence
  Cyclic GFR-binding peptide
SEVVMDNSLQEVVNNASDYYVIPLPELRTPV

SEQ ID NO: 11876 - protein, 27 aa, Artificial Sequence
  Cyclic GFR-binding peptide
MNNSLQEIVNSSDDYYVVPLPELQTPA

SEQ ID NO: 11877 - protein, 41 aa, Artificial Sequence
  Cyclic GFR-binding peptide
  MOD_RES (2)..(4)..(36)..(37): Xaa is C or S
RXGXGEVVMDNSLQEVVKENEDYYLMTLPELETPVXXAKPI

SEQ ID NO: 11878 - protein, 26 aa, Artificial Sequence
  Cyclic GFR-binding peptide
  MOD_RES (1)..(1): Xaa is C or S
XSRVIMQYNKLVKPKRGVLYLISIAS

SEQ ID NO: 11879 - protein, 35 aa, Artificial Sequence
  Cyclic GFR-binding peptide
  MOD_RES (32)..(33): Xaa is C or S
SEVVMDNSLQEVVNNASDYYVIPLPELRTPVXXTP

SEQ ID NO: 11880 - protein, 31 aa, Artificial Sequence
  Cyclic GFR-binding peptide
  MOD_RES (2)..(2): Xaa is C or S
GXGEVVMDNSLQEVVKENEDYYLMTLPELET

SEQ ID NO: 11881 - protein, 35 aa, Artificial Sequence; identical to SEQ ID NO: 1304
  Cyclic GFR-binding peptide
  MOD_RES (32)..(32): Xaa is C or S

SEQ ID NO: 11882 - protein, 31 aa, Artificial Sequence
  Cyclic GFR-binding peptide
  MOD_RES (31)..(31): Xaa is C or S
SRVIMNSLQEVKPKRGVYYLITLPELAQPVX

SEQ ID NO: 11883 - protein, 36 aa, Artificial Sequence; identical to SEQ ID NO: 1307
  Cyclic GFR-binding peptide
  MOD_RES (30)..(31): Xaa is C or S

SEQ ID NO: 11884 - protein, 40 aa, Artificial Sequence; identical to SEQ ID NO: 1310
  Cyclic GFR-binding peptide
  MOD_RES (2)..(34): Xaa is C or S

SEQ ID NO: 11885 - protein, 21 aa, Artificial Sequence
  Cyclic GFR-binding peptide
DRYKKLVVKENEDFYLMSIAN

SEQ ID NO: 11886 - protein, 29 aa, Artificial Sequence
  Cyclic GFR-binding peptide
  MOD_RES (26)..(27): Xaa is C or S
EYQKYVKPTRGVIFLISIPSLDQPVXXPS

SEQ ID NO: 11887 - protein, 30 aa, Artificial Sequence
  Cyclic GFR-binding peptide
  MOD_RES (26)..(27): Xaa is C or S
NSLQEIVNSSDDYYLVTLPELKTPAXXPKP

SEQ ID NO: 11888 - protein, 25 aa, Artificial Sequence
  Cyclic GFR-binding peptide
MDNSLQEVVNNASDYYLITLPELRT

SEQ ID NO: 11889 - protein, 37 aa, Artificial Sequence; identical to SEQ ID NO: 1313
  Cyclic GFR-binding peptide
  MOD_RES (2)..(4)..(36)..(37): Xaa is C or S

SEQ ID NO: 11890 - protein, 30 aa, Artificial Sequence; identical to SEQ ID NO: 1314
  Cyclic GFR-binding peptide
  MOD_RES (1)..(3): Xaa is C or S

SEQ ID NO: 11891 - protein, 28 aa, Artificial Sequence
  Cyclic GFR-binding peptide
SRVVMNNSLQEIVNSSDDYYVVPLPELK

SEQ ID NO: 11892 - protein, 34 aa, Artificial Sequence
  Cyclic GFR-binding peptide
  MOD_RES (1)..(3)..(34): Xaa is C or S
XKXSKVIMNSLQEIKPTKGIYYVIPLPELDQSVX

SEQ ID NO: 11893 - protein, 22 aa, Artificial Sequence
  Cyclic GFR-binding peptide
NSLQEVVNNASDYYLITLPELR

SEQ ID NO: 11894 - protein, 31 aa, Artificial Sequence
  Cyclic GFR-binding peptide
  MOD_RES (2)..(2): Xaa is C or S
GXSEVVMDRYKKLVVNNASDFYLISIANLRT

SEQ ID NO: 11895 - protein, 30 aa, Artificial Sequence; identical to SEQ ID NO: 1320
  Cyclic GFR-binding peptide
  MOD_RES (27)..(28): Xaa is C or S

SEQ ID NO: 11896 - protein, 29 aa, Artificial Sequence
  Cyclic GFR-binding peptide
  MOD_RES (27)..(28): Xaa is C or S
MQYNKLVKPTRGVLYLISIASLDQPVXXP

SEQ ID NO: 11897 - protein, 24 aa, Artificial Sequence
  Cyclic GFR-binding peptide
MERYKKLVVKDYEDFYLMSIANLE

SEQ ID NO: 11898 - protein, 34 aa, Artificial Sequence; identical to SEQ ID NO: 1327
  Cyclic GFR-binding peptide
  MOD_RES (2)..(4): Xaa is C or S

SEQ ID NO: 11899 - protein, 28 aa, Artificial Sequence
  Cyclic GFR-binding peptide
  MOD_RES (1)..(1): Xaa is C or S
XGEVVMEQYNKLVVKDYEDLYLMSIASL

SEQ ID NO: 11900 - protein, 31 aa, Artificial Sequence
  Cyclic GFR-binding peptide
  MOD_RES (30)..(31): Xaa is C or S
VVMDNSLQEVVNNASDYYLITLPELRTPVXX

SEQ ID NO: 11901 - protein, 25 aa, Artificial Sequence
  Cyclic GFR-binding peptide
RVIMNSLQEVKPKRGVYYLITLPEL

SEQ ID NO: 11902 - protein, 41 aa, Artificial Sequence
  Cyclic GFR-binding peptide
  MOD_RES (2)..(4)..(36)..(37): Xaa is C or S
HXGXSRVVMNEYQKYIVNSSDDIFLVSIPSLKTPAXXPKPV

SEQ ID NO: 11903 - protein, 26 aa, Artificial Sequence
  Cyclic GFR-binding peptide
VVMDRYKKLVVNNASDFYLISIANLR

SEQ ID NO: 11904 - protein, 28 aa, Artificial Sequence
  Cyclic GFR-binding peptide
  MOD_RES (26)..(27): Xaa is C or S
QYNKLVKPKRGVLYLISIASLAQPVXXP

SEQ ID NO: 11905 - protein, 35 aa, Artificial Sequence
  Cyclic GFR-binding peptide
  MOD_RES (1)..(32)..(33): Xaa is C or S
XSRVIMEYQKYVKPKRGVIFLISIPSLAQPVXXPA

SEQ ID NO: 11906 - protein, 28 aa, Artificial Sequence
  Cyclic GFR-binding peptide
  MOD_RES (1)..(1): Xaa is C or S
XSRVIMNSLQEVKPKRGVYYLITLPELA

SEQ ID NO: 11907 - protein, 28 aa, Artificial Sequence
  Cyclic GFR-binding peptide
  MOD_RES (1)..(1): Xaa is C or S
XGEVVMDRYKKLVVKENEDFYLMSIANL

SEQ ID NO: 11908 - protein, 29 aa, Artificial Sequence
  Cyclic GFR-binding peptide
  MOD_RES (1)..(1): Xaa is C or S
XSKVVMNSLQEVKPTRGVYYVIPLPELDQ

SEQ ID NO: 11909 - protein, 30 aa, Artificial Sequence; identical to SEQ ID NO: 1334
  Cyclic GFR-binding peptide

SEQ ID NO: 11910 - protein, 35 aa, Artificial Sequence; identical to SEQ ID NO: 1336
  Cyclic GFR-binding peptide
  MOD_RES (2)..(34)..(35): Xaa is C or S

SEQ ID NO: 11911 - protein, 22 aa, Artificial Sequence
  Cyclic GFR-binding peptide
IMNSLQEIKPTKGIYYVIPLPE

SEQ ID NO: 11912 - protein, 33 aa, Artificial Sequence
  Cyclic GFR-binding peptide
  MOD_RES (32)..(33): Xaa is C or S
SEVVMDQYNKLVVNNASDLYLISIASLRTPVXX

SEQ ID NO: 11913 - protein, 30 aa, Artificial Sequence; identical to SEQ ID NO: 1342
  Cyclic GFR-binding peptide
  MOD_RES (26)..(26): Xaa is C or S

SEQ ID NO: 11914 - protein, 28 aa, Artificial Sequence
  Cyclic GFR-binding peptide
RVVMNNSLQEIVNSSDDYYLVTLPELKT

SEQ ID NO: 11915 - protein, 41 aa, Artificial Sequence
  Cyclic GFR-binding peptide
  MOD_RES (2)..(4)..(35)..(36): Xaa is C or S
SXKXSKVIMNSLQEIKPTKGIYYLITLPELDQSVXXPSASA

SEQ ID NO: 11916 - protein, 25 aa, Artificial Sequence
  Cyclic GFR-binding peptide
RYKKLVVKENEDFYLMSIANLETPV

SEQ ID NO: 11917 - protein, 39 aa, Artificial Sequence; identical to SEQ ID NO: 1346
  Cyclic GFR-binding peptide
  MOD_RES (1)..(3)..(35)..(36): Xaa is C or S

SEQ ID NO: 11918 - protein, 30 aa, Artificial Sequence
  Cyclic GFR-binding peptide
  MOD_RES (1)..(1): Xaa is C or S
XSRVIMNSLQEVKPKRGVYYLITLPELAQP

SEQ ID NO: 11919 - protein, 30 aa, Artificial Sequence; identical to SEQ ID NO: 1349
  Cyclic GFR-binding peptide
  MOD_RES (29)..(30): Xaa is C or S

SEQ ID NO: 11920 - protein, 27 aa, Artificial Sequence
  Cyclic GFR-binding peptide
VVMNQYNKLIVNSSDDLYLVSIASLKT

SEQ ID NO: 11921 - protein, 34 aa, Artificial Sequence
  Cyclic GFR-binding peptide
  MOD_RES (31)..(31): Xaa is C or S
RVVMNNSLQEIVNSSDDYYVVPLPELKTPAXTPK

SEQ ID NO: 11922 - protein, 31 aa, Artificial Sequence
  Cyclic GFR-binding peptide
  MOD_RES (29)..(30): Xaa is C or S
VMDRYKKLVVNNASDFYLISIANLRTPVXXT

SEQ ID NO: 11923 - protein, 31 aa, Artificial Sequence
  Cyclic GFR-binding peptide
  MOD_RES (26)..(27): Xaa is C or S
NSLQEVKPKRGVYYLITLPELAQPVXXPAAS

SEQ ID NO: 11924 - protein, 32 aa, Artificial Sequence; identical to SEQ ID NO: 1356
  Cyclic GFR-binding peptide
  MOD_RES (27)..(28): Xaa is C or S

SEQ ID NO: 11925 - protein, 34 aa, Artificial Sequence
  Cyclic GFR-binding peptide
  MOD_RES (29)..(30): Xaa is C or S
VMNNSLQEIVNSSDDYYLVTLPELQTPAXXPKPV

SEQ ID NO: 11926 - protein, 37 aa, Artificial Sequence
  Cyclic GFR-binding peptide
  MOD_RES (31)..(31): Xaa is C or S
RVVMNNSLQEIVNSSDDYYVVPLPELKTPAXTPKTVH

SEQ ID NO: 11927 - protein, 30 aa, Artificial Sequence
  Cyclic GFR-binding peptide
GEVVMDEYQKYVVKENEDIFLMSIPSLETP

SEQ ID NO: 11928 - protein, 32 aa, Artificial Sequence
  Cyclic GFR-binding peptide
  MOD_RES (32)..(32): Xaa is C or S
SEVVMDRYKKLVVNNASDFYLISIANLRTPVX

SEQ ID NO: 11929 - protein, 25 aa, Artificial Sequence
  Cyclic GFR-binding peptide
EVVMDRYKKLVVKENEDFYLMSIAN

SEQ ID NO: 11930 - protein, 26 aa, Artificial Sequence
  Cyclic GFR-binding peptide
KVIMEYQKYIKPTKGIIFLISIPSLD

SEQ ID NO: 11931 - protein, 27 aa, Artificial Sequence
  Cyclic GFR-binding peptide
IMNSLQEIKPTKGIYYVIPLPELDQSV

SEQ ID NO: 11932 - protein, 29 aa, Artificial Sequence
  Cyclic GFR-binding peptide
  MOD_RES (2)..(4): Xaa is C or S
SXKXSRVIMEYQKYVKPKRGVIFLISIPS

SEQ ID NO: 11933 - protein, 30 aa, Artificial Sequence
  Cyclic GFR-binding peptide
  MOD_RES (2)..(4): Xaa is C or S
SXKXSKVIMNSLQEIKPTKGIYYVIPLPEL

SEQ ID NO: 11934 - protein, 28 aa, Artificial Sequence
  Cyclic GFR-binding peptide
VIMRYKKLIKPTKGIFYLISIANLDQSV

SEQ ID NO: 11935 - protein, 29 aa, Artificial Sequence
  Cyclic GFR-binding peptide
EVVMDQYNKLVVNNASDLYLISIASLRTP

SEQ ID NO: 11936 - protein, 34 aa, Artificial Sequence
  Cyclic GFR-binding peptide
  MOD_RES (2)..(4): Xaa is C or S
RXGXSEVVMDEYQKYVVNNASDIFLISIPSLRTP

SEQ ID NO: 11937 - protein, 33 aa, Artificial Sequence; identical to SEQ ID NO: 1365
  Cyclic GFR-binding peptide
  MOD_RES (32)..(33): Xaa is C or S

SEQ ID NO: 11938 - protein, 35 aa, Artificial Sequence; identical to SEQ ID NO: 1366
  Cyclic GFR-binding peptide
  MOD_RES (30)..(30): Xaa is C or S

SEQ ID NO: 11939 - protein, 28 aa, Artificial Sequence
  Cyclic GFR-binding peptide
SRVVMNNSLQEIVNSSDDYYLVTLPELK

SEQ ID NO: 11940 - protein, 25 aa, Artificial Sequence
  Cyclic GFR-binding peptide
VIMEYQKYVKPKRGVIFLISIPSLA

SEQ ID NO: 11941 - protein, 27 aa, Artificial Sequence
  Cyclic GFR-binding peptide
VVMNNSLQEIVNSSDDYYVVPLPELQT

SEQ ID NO: 11942 - protein, 29 aa, Artificial Sequence
  Cyclic GFR-binding peptide
  MOD_RES (2)..(2): Xaa is C or S
KXSKVIMQYNKLIKPTKGILYLISIASLD

SEQ ID NO: 11943 - protein, 34 aa, Artificial Sequence
  Cyclic GFR-binding peptide
  MOD_RES (1)..(33): Xaa is C or S
XSRVVMNNSLQEIVNSSDDYYLVTLPELKTPAXT

SEQ ID NO: 11944 - protein, 34 aa, Artificial Sequence; identical to SEQ ID NO: 1371
  Cyclic GFR-binding peptide
  MOD_RES (30)..(31): Xaa is C or S

SEQ ID NO: 11945 - protein, 33 aa, Artificial Sequence
  Cyclic GFR-binding peptide
  MOD_RES (30)..(31): Xaa is C or S
VVMDQYNKLVVNNASDLYLISIASLRTPVXXTP

SEQ ID NO: 11946 - protein, 36 aa, Artificial Sequence
  Cyclic GFR-binding peptide
  MOD_RES (1)..(33)..(34): Xaa is C or S
XGEVVMDNSLQEVVKENEDYYLMTLPELETPVXXAK

SEQ ID NO: 11947 - protein, 28 aa, Artificial Sequence
  Cyclic GFR-binding peptide
SKVIMNSLQEIKPTKGIYYLITLPELDQ

SEQ ID NO: 11948 - protein, 33 aa, Artificial Sequence
  Cyclic GFR-binding peptide
  MOD_RES (31)..(32): Xaa is C or S
SKVIMEYQKYIKPTKGIIFLISIPSLDQSVXXP

SEQ ID NO: 11949 - protein, 37 aa, Artificial Sequence
  Cyclic GFR-binding peptide
  MOD_RES (1)..(32)..(33): Xaa is C or S
XSKVIMEYQKYIKPTKGIIFLISIPSLDQSVXXPSAS

SEQ ID NO: 11950 - protein, 36 aa, Artificial Sequence; identical to SEQ ID NO: 1375
  Cyclic GFR-binding peptide
  MOD_RES (2)..(34)..(35): Xaa is C or S

SEQ ID NO: 11951 - protein, 26 aa, Artificial Sequence
  Cyclic GFR-binding peptide
VMNQYNKLIVNSSDDLYLVSIASLQT

SEQ ID NO: 11952 - protein, 36 aa, Artificial Sequence; identical to SEQ ID NO: 1378
  Cyclic GFR-binding peptide
  MOD_RES (2)..(34)..(35): Xaa is C or S

SEQ ID NO: 11953 - protein, 28 aa, Artificial Sequence
  Cyclic GFR-binding peptide
SKVIMNSLQEIKPTKGIYYVIPLPELDQ

SEQ ID NO: 11954 - protein, 32 aa, Artificial Sequence; identical to SEQ ID NO: 1379
  Cyclic GFR-binding peptide
  MOD_RES (31)..(32): Xaa is C or S

SEQ ID NO: 11955 - protein, 32 aa, Artificial Sequence; identical to SEQ ID NO: 1380
  Cyclic GFR-binding peptide
  MOD_RES (27)..(28): Xaa is C or S

SEQ ID NO: 11956 - protein, 30 aa, Artificial Sequence; identical to SEQ ID NO: 1382
  Cyclic GFR-binding peptide

SEQ ID NO: 11957 - protein, 40 aa, Artificial Sequence; identical to SEQ ID NO: 1383
  Cyclic GFR-binding peptide
  MOD_RES (2)..(4)..(36)..(37): Xaa is C or S

SEQ ID NO: 11958 - protein, 28 aa, Artificial Sequence
  Cyclic GFR-binding peptide
  MOD_RES (26)..(27): Xaa is C or S
NSLQEVVNNASDYYVIPLPELRTPVXXT

SEQ ID NO: 11959 - protein, 33 aa, Artificial Sequence; identical to SEQ ID NO: 1384
  Cyclic GFR-binding peptide
  MOD_RES (32)..(33): Xaa is C or S

SEQ ID NO: 11960 - protein, 30 aa, Artificial Sequence
  Cyclic GFR-binding peptide
GEVVMEEYQKYVVKDYEDIFLMSIPSLETP

SEQ ID NO: 11961 - protein, 28 aa, Artificial Sequence
  Cyclic GFR-binding peptide
  MOD_RES (28)..(28): Xaa is C or S
MEEYQKYVVKDYEDIFLMSIPSLETPVX

SEQ ID NO: 11962 - protein, 33 aa, Artificial Sequence; identical to SEQ ID NO: 1385
  Cyclic GFR-binding peptide
  MOD_RES (30)..(31): Xaa is C or S

SEQ ID NO: 11963 - protein, 31 aa, Artificial Sequence
  Cyclic GFR-binding peptide
  MOD_RES (27)..(28): Xaa is C or S
NEYQKYIVNSSDDIFLVSIPSLKTPAXXPKP

SEQ ID NO: 11964 - protein, 25 aa, Artificial Sequence
  Cyclic GFR-binding peptide
VIMNSLQEIKPTKGIYYLITLPELD

SEQ ID NO: 11965 - protein, 33 aa, Artificial Sequence; identical to SEQ ID NO: 1386
  Cyclic GFR-binding peptide
  MOD_RES (1)..(33): Xaa is C or S

SEQ ID NO: 11966 - protein, 23 aa, Artificial Sequence
  Cyclic GFR-binding peptide
NSLQEIVNSSDDYYVVPLPELQT

SEQ ID NO: 11967 - protein, 31 aa, Artificial Sequence; identical to SEQ ID NO: 1394
  Cyclic GFR-binding peptide
  MOD_RES (1)..(1): Xaa is C or S

SEQ ID NO: 11968 - protein, 33 aa, Artificial Sequence
  Cyclic GFR-binding peptide
  MOD_RES (27)..(28): Xaa is C or S
MEYQKYIKPTKGIIFLISIPSLDQSVXXPSASA

SEQ ID NO: 11969 - protein, 40 aa, Artificial Sequence
  Cyclic GFR-binding peptide
  MOD_RES (2)..(34): Xaa is C or S
GXSRVVMNNSLQEIVNSSDDYYVVPLPELKTPAXTPKTVH

SEQ ID NO: 11970 - protein, 28 aa, Artificial Sequence
  Cyclic GFR-binding peptide
  MOD_RES (26)..(27): Xaa is C or S
RYKKLVKPKRGVFYLISIANLAQPVXXP

SEQ ID NO: 11971 - protein, 21 aa, Artificial Sequence
  Cyclic GFR-binding peptide
NRYKKLIVNSSDDFYLVSIAN

SEQ ID NO: 11972 - protein, 28 aa, Artificial Sequence
  Cyclic GFR-binding peptide
  MOD_RES (2)..(2): Xaa is C or S
GXGEVVMDNSLQEVVKENEDYYLMTLPE

SEQ ID NO: 11973 - protein, 31 aa, Artificial Sequence
  Cyclic GFR-binding peptide
SRVVMNNSLQEIVNSSDDYYLVTLPELKTPA

SEQ ID NO: 11974 - protein, 25 aa, Artificial Sequence
  Cyclic GFR-binding peptide
VVMDQYNKLVVNNASDLYLISIASL

SEQ ID NO: 11975 - protein, 26 aa, Artificial Sequence
  Cyclic GFR-binding peptide
MNSLQEVKPKRGVYYLITLPELAQPV

SEQ ID NO: 11976 - protein, 25 aa, Artificial Sequence
  Cyclic GFR-binding peptide
VVMDNSLQEVVKENEDYYLMTLPEL

SEQ ID NO: 11977 - protein, 32 aa, Artificial Sequence
  Cyclic GFR-binding peptide
  MOD_RES (28)..(29): Xaa is C or S
IMEYQKYVKPKRGVIFLISIPSLAQPVXXPAA

SEQ ID NO: 11978 - protein, 30 aa, Artificial Sequence
  Cyclic GFR-binding peptide
  MOD_RES (1)..(3): Xaa is C or S
XKXSKVIMNSLQEIKPTKGIYYLITLPELD

SEQ ID NO: 11979 - protein, 36 aa, Artificial Sequence
  Cyclic GFR-binding peptide
  MOD_RES (1)..(3)..(35)..(36): Xaa is C or S
XGXARVVMNNSLQEIVNSSDDYYLVTLPELQTPAXX

SEQ ID NO: 11980 - protein, 28 aa, Artificial Sequence
  Cyclic GFR-binding peptide
  MOD_RES (26)..(26): Xaa is C or S
EYQKYIVNSSDDIFLVSIPSLKTPAXTP

SEQ ID NO: 11981 - protein, 37 aa, Artificial Sequence; identical to SEQ ID NO: 1408
  Cyclic GFR-binding peptide
  MOD_RES (1)..(33)..(34): Xaa is C or S

SEQ ID NO: 11982 - protein, 33 aa, Artificial Sequence; identical to SEQ ID NO: 1410
  Cyclic GFR-binding peptide
  MOD_RES (1)..(33): Xaa is C or S

SEQ ID NO: 11983 - protein, 30 aa, Artificial Sequence
  Cyclic GFR-binding peptide
EVVMENSLQEVVKDYEDYYLMTLPELETPV

SEQ ID NO: 11984 - protein, 27 aa, Artificial Sequence
  Cyclic GFR-binding peptide
EVVMDNSLQEVVNNASDYYLITLPELR

SEQ ID NO: 11985 - protein, 21 aa, Artificial Sequence
  Cyclic GFR-binding peptide
NSLQEVVNNASDYYVIPLPEL

SEQ ID NO: 11986 - protein, 27 aa, Artificial Sequence
  Cyclic GFR-binding peptide
SRVIMRYKKLVKPKRGVFYLISIANLA

SEQ ID NO: 11987 - protein, 27 aa, Artificial Sequence
  Cyclic GFR-binding peptide
VMNSLQEVKPTRGVYYVIPLPELDQPV

SEQ ID NO: 11988 - protein, 37 aa, Artificial Sequence
  Cyclic GFR-binding peptide
  MOD_RES (31)..(32): Xaa is C or S
RVVMNNSLQEIVNSSDDYYVVPLPELKTPAXXPKPVY

SEQ ID NO: 11989 - protein, 24 aa, Artificial Sequence
  Cyclic GFR-binding peptide
RYKKLVKPTRGVFYLISIANLDQP

SEQ ID NO: 11990 - protein, 33 aa, Artificial Sequence; identical to SEQ ID NO: 1417
  Cyclic GFR-binding peptide
  MOD_RES (31)..(32): Xaa is C or S

SEQ ID NO: 11991 - protein, 29 aa, Artificial Sequence
  Cyclic GFR-binding peptide
  MOD_RES (29)..(29): Xaa is C or S
VMNRYKKLIVNSSDDFYLVSIANLQTPAX

SEQ ID NO: 11992 - protein, 36 aa, Artificial Sequence
  Cyclic GFR-binding peptide
  MOD_RES (2)..(4)..(36): Xaa is C or S
HXGXSRVVMNNSLQEIVNSSDDYYLVTLPELKTPAX

SEQ ID NO: 11993 - protein, 33 aa, Artificial Sequence
  Cyclic GFR-binding peptide
  MOD_RES (28)..(29): Xaa is C or S
IMNSLQEIKPTKGIYYLITLPELDQSVXXPSAS

SEQ ID NO: 11994 - protein, 28 aa, Artificial Sequence
  Cyclic GFR-binding peptide
  MOD_RES (1)..(1): Xaa is C or S
XGEVVMDNSLQEVVKENEDYYVMPLPEL

SEQ ID NO: 11995 - protein, 40 aa, Artificial Sequence
  Cyclic GFR-binding peptide
  MOD_RES (2)..(34)..(35): Xaa is C or S
GXSEVVMDNSLQEVVNNASDYYLITLPELRTPVXXTPPTS

SEQ ID NO: 11996 - protein, 28 aa, Artificial Sequence
  Cyclic GFR-binding peptide
KVVMNSLQEVKPTRGVYYVIPLPELDQP

SEQ ID NO: 11997 - protein, 33 aa, Artificial Sequence
  Cyclic GFR-binding peptide
  MOD_RES (30)..(31): Xaa is C or S
VVMDNSLQEVVKENEDYYVMPLPELETPVXXAK

SEQ ID NO: 11998 - protein, 32 aa, Artificial Sequence
  Cyclic GFR-binding peptide
  MOD_RES (30)..(31): Xaa is C or S
RVIMEYQKYVKPKRGVIFLISIPSLAQPVXXP

SEQ ID NO: 11999 - protein, 28 aa, Artificial Sequence
  Cyclic GFR-binding peptide
RVVMNNSLQEIVNSSDDYYVVPLPELKT

SEQ ID NO: 12000 - protein, 35 aa, Artificial Sequence
  Cyclic GFR-binding peptide
  MOD_RES (1)..(3)..(34)..(35): Xaa is C or S
XKXSRVIMEYQKYVKPKRGVIFLISIPSLAQPVXX

SEQ ID NO: 12001 - protein, 36 aa, Artificial Sequence
  Cyclic GFR-binding peptide
  MOD_RES (32)..(32): Xaa is C or S
SRVVMNNSLQEIVNSSDDYYVVPLPELKTPAXTPKT

SEQ ID NO: 12002 - protein, 35 aa, Artificial Sequence
  Cyclic GFR-binding peptide
  MOD_RES (1)..(3)..(34)..(35): Xaa is C or S
XKXSKVIMEYQKYIKPTKGIIFLISIPSLDQSVXX

SEQ ID NO: 12003 - protein, 33 aa, Artificial Sequence; identical to SEQ ID NO: 1430
  Cyclic GFR-binding peptide
  MOD_RES (1)..(33): Xaa is C or S

SEQ ID NO: 12004 - protein, 31 aa, Artificial Sequence
  Cyclic GFR-binding peptide
  MOD_RES (27)..(28): Xaa is C or S
NNSLQEIVNSSDDYYVVPLPELKTPAXXPKP

SEQ ID NO: 12005 - protein, 28 aa, Artificial Sequence
  Cyclic GFR-binding peptide
EVVMDNSLQEVVNNASDYYLITLPELRT

SEQ ID NO: 12006 - protein, 25 aa, Artificial Sequence
  Cyclic GFR-binding peptide
MDNSLQEVVKENEDYYVMPLPELET

SEQ ID NO: 12007 - protein, 30 aa, Artificial Sequence; identical to SEQ ID NO: 1435
  Cyclic GFR-binding peptide
  MOD_RES (2)..(4): Xaa is C or S

SEQ ID NO: 12008 - protein, 23 aa, Artificial Sequence
  Cyclic GFR-binding peptide
NSLQEVVKENEDYYVMPLPELET

SEQ ID NO: 12009 - protein, 25 aa, Artificial Sequence
  Cyclic GFR-binding peptide
MQYNKLVKPKRGVLYLISIASLAQP

SEQ ID NO: 12010 - protein, 28 aa, Artificial Sequence
  Cyclic GFR-binding peptide
  MOD_RES (1)..(1): Xaa is C or S
XSKVIMNSLQEIKPTKGIYYVIPLPELD

SEQ ID NO: 12011 - protein, 32 aa, Artificial Sequence; identical to SEQ ID NO: 1442
  Cyclic GFR-binding peptide
  MOD_RES (32)..(32): Xaa is C or S

SEQ ID NO: 12012 - protein, 28 aa, Artificial Sequence
  Cyclic GFR-binding peptide
KVVMEYQKYVKPTRGVIFLISIPSLDQP

SEQ ID NO: 12013 - protein, 23 aa, Artificial Sequence
  Cyclic GFR-binding peptide
NNSLQEIVNSSDDYYVVPLPELQ

SEQ ID NO: 12014 - protein, 35 aa, Artificial Sequence; identical to SEQ ID NO: 1444
  Cyclic GFR-binding peptide
  MOD_RES (2)..(4): Xaa is C or S

SEQ ID NO: 12015 - protein, 23 aa, Artificial Sequence
  Cyclic GFR-binding peptide
IMQYNKLIKPTKGILYLISIASL

SEQ ID NO: 12016 - protein, 32 aa, Artificial Sequence; identical to SEQ ID NO: 1453
  Cyclic GFR-binding peptide
  MOD_RES (2)..(4): Xaa is C or S

SEQ ID NO: 12017 - protein, 31 aa, Artificial Sequence
  Cyclic GFR-binding peptide
  MOD_RES (29)..(29): Xaa is C or S
VMNNSLQEIVNSSDDYYVVPLPELKTPAXTP

SEQ ID NO: 12018 - protein, 28 aa, Artificial Sequence
  Cyclic GFR-binding peptide
  MOD_RES (1)..(1): Xaa is C or S
XGEVVMDQYNKLVVKENEDLYLMSIASL

SEQ ID NO: 12019 - protein, 37 aa, Artificial Sequence; identical to SEQ ID NO: 1456
  Cyclic GFR-binding peptide
  MOD_RES (1)..(3)..(34)..(35): Xaa is C or S

SEQ ID NO: 12020 - protein, 36 aa, Artificial Sequence; identical to SEQ ID NO: 1457
  Cyclic GFR-binding peptide
  MOD_RES (32)..(33): Xaa is C or S

SEQ ID NO: 12021 - protein, 31 aa, Artificial Sequence
  Cyclic GFR-binding peptide
  MOD_RES (30)..(31): Xaa is C or S
VVMDRYKKLVVNNASDFYLISIANLRTPVXX

SEQ ID NO: 12022 - protein, 31 aa, Artificial Sequence
  Cyclic GFR-binding peptide
  MOD_RES (2)..(2): Xaa is C or S
KXSRVIMEYQKYVKPKRGVIFLISIPSLAQP

SEQ ID NO: 12023 - protein, 32 aa, Artificial Sequence; identical to SEQ ID NO: 1458
  Cyclic GFR-binding peptide
  MOD_RES (31)..(32): Xaa is C or S

SEQ ID NO: 12024 - protein, 29 aa, Artificial Sequence
  Cyclic GFR-binding peptide
  MOD_RES (2)..(4): Xaa is C or S
SXKXSKVIMNSLQEIKPTKGIYYLITLPE

SEQ ID NO: 12025 - protein, 30 aa, Artificial Sequence; identical to SEQ ID NO: 1460
  Cyclic GFR-binding peptide
  MOD_RES (2)..(4): Xaa is C or S

SEQ ID NO: 12026 - protein, 34 aa, Artificial Sequence
  Cyclic GFR-binding peptide
  MOD_RES (29)..(30): Xaa is C or S
VIMNSLQEVKPKRGVYYLITLPELAQPVXXPAAS

SEQ ID NO: 12027 - protein, 35 aa, Artificial Sequence
  Cyclic GFR-binding peptide
  MOD_RES (1)..(3)..(34)..(35): Xaa is C or S
XKXSKVVMNSLQEVKPTRGVYYVIPLPELDQPVXX

SEQ ID NO: 12028 - protein, 27 aa, Artificial Sequence
  Cyclic GFR-binding peptide
  MOD_RES (26)..(27): Xaa is C or S
NSLQEIVNSSDDYYLVTLPELQTPAXX

SEQ ID NO: 12029 - protein, 32 aa, Artificial Sequence
  Cyclic GFR-binding peptide
  MOD_RES (2)..(2): Xaa is C or S
GXSRVVMNNSLQEIVNSSDDYYVVPLPELKTP

SEQ ID NO: 12030 - protein, 26 aa, Artificial Sequence
  Cyclic GFR-binding peptide
VMQYNKLVKPTRGVLYLISIASLDQP

SEQ ID NO: 12031 - protein, 37 aa, Artificial Sequence
  Cyclic GFR-binding peptide
  MOD_RES (1)..(3)..(35)..(36): Xaa is C or S
XGXSEVVMDNSLQEVVNNASDYYVIPLPELRTPVXXT

SEQ ID NO: 12032 - protein, 27 aa, Artificial Sequence
  Cyclic GFR-binding peptide
KVIMNSLQEIKPTKGIYYVIPLPELDQ

SEQ ID NO: 12033 - protein, 33 aa, Artificial Sequence
  Cyclic GFR-binding peptide
  MOD_RES (1)..(3): Xaa is C or S
XGXSRVVMNNSLQEIVNSSDDYYVVPLPELKTP

SEQ ID NO: 12034 - protein, 34 aa, Artificial Sequence; identical to SEQ ID NO: 1467
  Cyclic GFR-binding peptide
  MOD_RES (2)..(34): Xaa is C or S

SEQ ID NO: 12035 - protein, 28 aa, Artificial Sequence
  Cyclic GFR-binding peptide
  MOD_RES (28)..(28): Xaa is C or S
MDNSLQEVVNNASDYYVIPLPELRTPVX

SEQ ID NO: 12036 - protein, 34 aa, Artificial Sequence
  Cyclic GFR-binding peptide
  MOD_RES (2)..(4): Xaa is C or S
HXGXARVVMNNSLQEIVNSSDDYYLVTLPELQTP

SEQ ID NO: 12037 - protein, 31 aa, Artificial Sequence
  Cyclic GFR-binding peptide
  MOD_RES (2)..(4): Xaa is C or S
RXGXSEVVMDNSLQEVVNNASDYYVIPLPEL

SEQ ID NO: 12038 - protein, 31 aa, Artificial Sequence
  Cyclic GFR-binding peptide
GEVVMDNSLQEVVKENEDYYLMTLPELETPV

SEQ ID NO: 12039 - protein, 27 aa, Artificial Sequence
  Cyclic GFR-binding peptide
VIMNSLQEVKPKRGVYYLITLPELAQP

SEQ ID NO: 12040 - protein, 39 aa, Artificial Sequence
  Cyclic GFR-binding peptide
  MOD_RES (1)..(3)..(35): Xaa is C or S
XGXSRVVMNNSLQEIVNSSDDYYVVPLPELKTPAXTPKT

SEQ ID NO: 12041 - protein, 32 aa, Artificial Sequence; identical to SEQ ID NO: 1474
  Cyclic GFR-binding peptide
  MOD_RES (26)..(27): Xaa is C or S

SEQ ID NO: 12042 - protein, 35 aa, Artificial Sequence; identical to SEQ ID NO: 1475
  Cyclic GFR-binding peptide
  MOD_RES (29)..(30): Xaa is C or S

SEQ ID NO: 12043 - protein, 28 aa, Artificial Sequence
  Cyclic GFR-binding peptide
VVMDRYKKLVVNNASDFYLISIANLRTP

SEQ ID NO: 12044 - protein, 31 aa, Artificial Sequence
  Cyclic GFR-binding peptide
  MOD_RES (28)..(29): Xaa is C or S
MNNSLQEIVNSSDDYYVVPLPELQTPAXXPK

SEQ ID NO: 12045 - protein, 25 aa, Artificial Sequence
  Cyclic GFR-binding peptide
VVMEQYNKLVVKDYEDLYLMSIASL

SEQ ID NO: 12046 - protein, 37 aa, Artificial Sequence
  Cyclic GFR-binding peptide
  MOD_RES (1)..(33): Xaa is C or S
XSRVVMNNSLQEIVNSSDDYYLVTLPELKTPAXTPKT

SEQ ID NO: 12047 - protein, 33 aa, Artificial Sequence
  Cyclic GFR-binding peptide
  MOD_RES (31)..(32): Xaa is C or S
SKVVMEYQKYVKPTRGVIFLISIPSLDQPVXXP

SEQ ID NO: 12048 - protein, 35 aa, Artificial Sequence; identical to SEQ ID NO: 1483
  Cyclic GFR-binding peptide
  MOD_RES (32)..(33): Xaa is C or S

SEQ ID NO: 12049 - protein, 38 aa, Artificial Sequence
  Cyclic GFR-binding peptide
  MOD_RES (32)..(33): Xaa is C or S
SEVVMDQYNKLVVNNASDLYLISIASLRTPVXXTPPTS

SEQ ID NO: 12050 - protein, 29 aa, Artificial Sequence
  Cyclic GFR-binding peptide
GEVVMDQYNKLVVKENEDLYLMSIASLET

SEQ ID NO: 12051 - protein, 27 aa, Artificial Sequence
  Cyclic GFR-binding peptide
VMQYNKLVKPTRGVLYLISIASLDQPV

SEQ ID NO: 12052 - protein, 32 aa, Artificial Sequence
  Cyclic GFR-binding peptide
  MOD_RES (1)..(32): Xaa is C or S
XSRVIMNSLQEVKPKRGVYYLITLPELAQPVX

SEQ ID NO: 12053 - protein, 34 aa, Artificial Sequence
  Cyclic GFR-binding peptide
  MOD_RES (1)..(3)..(34): Xaa is C or S
XKXSKVIMEYQKYIKPTKGIIFLISIPSLDQSVX

SEQ ID NO: 12054 - protein, 29 aa, Artificial Sequence
  Cyclic GFR-binding peptide
  MOD_RES (1)..(3): Xaa is C or S
XKXSKVVMNSLQEVKPTRGVYYVIPLPEL

SEQ ID NO: 12055 - protein, 33 aa, Artificial Sequence
  Cyclic GFR-binding peptide
  MOD_RES (27)..(28): Xaa is C or S
MEYQKYVKPTRGVIFLISIPSLDQPVXXPSASA

SEQ ID NO: 12056 - protein, 32 aa, Artificial Sequence
  Cyclic GFR-binding peptide
  MOD_RES (31)..(31): Xaa is C or S
RVVMNNSLQEIVNSSDDYYLVTLPELKTPAXT

SEQ ID NO: 12057 - protein, 24 aa, Artificial Sequence
  Cyclic GFR-binding peptide
NQYNKLIVNSSDDLYLVSIASLQT

SEQ ID NO: 12058 - protein, 24 aa, Artificial Sequence
  Cyclic GFR-binding peptide
MNSLQEIKPTKGIYYLITLPELDQ

SEQ ID NO: 12059 - protein, 34 aa, Artificial Sequence
  Cyclic GFR-binding peptide
  MOD_RES (1)..(3)..(34): Xaa is C or S
XKXSRVIMEYQKYVKPKRGVIFLISIPSLAQPVX

SEQ ID NO: 12060 - protein, 32 aa, Artificial Sequence
  Cyclic GFR-binding peptide
  MOD_RES (28)..(29): Xaa is C or S
MDRYKKLVVNNASDFYLISIANLRTPVXXTPP

SEQ ID NO: 12061 - protein, 33 aa, Artificial Sequence; identical to SEQ ID NO: 1496
  Cyclic GFR-binding peptide
  MOD_RES (32)..(33): Xaa is C or S

SEQ ID NO: 12062 - protein, 27 aa, Artificial Sequence
  Cyclic GFR-binding peptide
ARVVMNNSLQEIVNSSDDYYVVPLPEL

SEQ ID NO: 12063 - protein, 26 aa, Artificial Sequence
  Cyclic GFR-binding peptide
  MOD_RES (1)..(1): Xaa is C or S
XSRVIMRYKKLVKPKRGVFYLISIAN

SEQ ID NO: 12064 - protein, 34 aa, Artificial Sequence
  Cyclic GFR-binding peptide
  MOD_RES (2)..(4): Xaa is C or S
RXGXGEVVMDNSLQEVVKENEDYYLMTLPELETP

SEQ ID NO: 12065 - protein, 31 aa, Artificial Sequence
  Cyclic GFR-binding peptide
  MOD_RES (27)..(27): Xaa is C or S
NNSLQEIVNSSDDYYVVPLPELKTPAXTPKT

SEQ ID NO: 12066 - protein, 29 aa, Artificial Sequence
  Cyclic GFR-binding peptide
  MOD_RES (2)..(4): Xaa is C or S
SXKXSRVIMNSLQEVKPKRGVYYVIPLPE

SEQ ID NO: 12067 - protein, 32 aa, Artificial Sequence
  Cyclic GFR-binding peptide
  MOD_RES (2)..(2): Xaa is C or S
GXGEVVMENSLQEVVKDYEDYYVMPLPELETP

SEQ ID NO: 12068 - protein, 27 aa, Artificial Sequence
  Cyclic GFR-binding peptide
  MOD_RES (27)..(27): Xaa is C or S
DNSLQEVVNNASDYYLITLPELRTPVX

SEQ ID NO: 12069 - protein, 38 aa, Artificial Sequence
  Cyclic GFR-binding peptide
  MOD_RES (32)..(33): Xaa is C or S
ARVVMNNSLQEIVNSSDDYYLVTLPELQTPAXXPKPVT

SEQ ID NO: 12070 - protein, 27 aa, Artificial Sequence
  Cyclic GFR-binding peptide
SRVVMNNSLQEIVNSSDDYYVVPLPEL

SEQ ID NO: 12071 - protein, 37 aa, Artificial Sequence
  Cyclic GFR-binding peptide
  MOD_RES (1)..(33)..(34): Xaa is C or S
XGEVVMDNSLQEVVKENEDYYVMPLPELETPVXXAKP

SEQ ID NO: 12072 - protein, 37 aa, Artificial Sequence
  Cyclic GFR-binding peptide
  MOD_RES (1)..(3)..(35)..(36): Xaa is C or S
XGXARVVMNNSLQEIVNSSDDYYLVTLPELQTPAXXP

SEQ ID NO: 12073 - protein, 36 aa, Artificial Sequence
  Cyclic GFR-binding peptide
  MOD_RES (2)..(34)..(35): Xaa is C or S
GXSEVVMDQYNKLVVNNASDLYLISIASLRTPVXXT

SEQ ID NO: 12074 - protein, 32 aa, Artificial Sequence
  Cyclic GFR-binding peptide
  MOD_RES (30)..(31): Xaa is C or S
VVMNNSLQEIVNSSDDYYVVPLPELKTPAXXP

SEQ ID NO: 12075 - protein, 35 aa, Artificial Sequence
  Cyclic GFR-binding peptide
  MOD_RES (1)..(3)..(35): Xaa is C or S
XGXARVVMNNSLQEIVNSSDDYYVVPLPELQTPAX

SEQ ID NO: 12076 - protein, 32 aa, Artificial Sequence
  Cyclic GFR-binding peptide
  MOD_RES (28)..(29): Xaa is C or S
MDNSLQEVVNNASDYYVIPLPELRTPVXXTPP

SEQ ID NO: 12077 - protein, 29 aa, Artificial Sequence
  Cyclic GFR-binding peptide
  MOD_RES (2)..(2): Xaa is C or S
GXSRVVMNEYQKYIVNSSDDIFLVSIPSL

SEQ ID NO: 12078 - protein, 28 aa, Artificial Sequence
  Cyclic GFR-binding peptide
KVVMRYKKLVKPTRGVFYLISIANLDQP

SEQ ID NO: 12079 - protein, 30 aa, Artificial Sequence; identical to SEQ ID NO: 1519
  Cyclic GFR-binding peptide
  MOD_RES (26)..(27): Xaa is C or S

SEQ ID NO: 12080 - protein, 30 aa, Artificial Sequence
  Cyclic GFR-binding peptide
SEVVMDNSLQEVVNNASDYYVIPLPELRTP

SEQ ID NO: 12081 - protein, 37 aa, Artificial Sequence
  Cyclic GFR-binding peptide
  MOD_RES (1)..(3)..(35)..(36): Xaa is C or S
XGXSRVVMNNSLQEIVNSSDDYYLVTLPELKTPAXXP

SEQ ID NO: 12082 - protein, 27 aa, Artificial Sequence
  Cyclic GFR-binding peptide
SKVIMNSLQEIKPTKGIYYLITLPELD

SEQ ID NO: 12083 - protein, 34 aa, Artificial Sequence
  Cyclic GFR-binding peptide
  MOD_RES (32)..(32): Xaa is C or S
SRVVMNNSLQEIVNSSDDYYVVPLPELKTPAXTP

SEQ ID NO: 12084 - protein, 20 aa, Artificial Sequence
  Cyclic GFR-binding peptide
EYQKYIVNSSDDIFLVSIPS

SEQ ID NO: 12085 - protein, 33 aa, Artificial Sequence
  Cyclic GFR-binding peptide
  MOD_RES (31)..(32): Xaa is C or S
EVVMENSLQEVVKDYEDYYLMTLPELETPVXXA

SEQ ID NO: 12086 - protein, 22 aa, Artificial Sequence
  Cyclic GFR-binding peptide
MDRYKKLVVNNASDFYLISIAN

SEQ ID NO: 12087 - protein, 31 aa, Artificial Sequence
  Cyclic GFR-binding peptide
  MOD_RES (28)..(29): Xaa is C or S
MEEYQKYVVKDYEDIFLMSIPSLETPVXXAK

SEQ ID NO: 12088 - protein, 33 aa, Artificial Sequence; identical to SEQ ID NO: 1526
  Cyclic GFR-binding peptide
  MOD_RES (1)..(3): Xaa is C or S

SEQ ID NO: 12089 - protein, 27 aa, Artificial Sequence
  Cyclic GFR-binding peptide
  MOD_RES (26)..(26): Xaa is C or S
EYQKYIVNSSDDIFLVSIPSLKTPAXT

SEQ ID NO: 12090 - protein, 33 aa, Artificial Sequence
  Cyclic GFR-binding peptide
  MOD_RES (2)..(2): Xaa is C or S
GXGEVVMDNSLQEVVKENEDYYVMPLPELETPV

SEQ ID NO: 12091 - protein, 38 aa, Artificial Sequence
  Cyclic GFR-binding peptide
  MOD_RES (2)..(4)..(35)..(36): Xaa is C or S
SXKXSKVIMNSLQEIKPTKGIYYLITLPELDQSVXXPS

SEQ ID NO: 12092 - protein, 32 aa, Artificial Sequence; identical to SEQ ID NO: 1527
  Cyclic GFR-binding peptide
  MOD_RES (27)..(28): Xaa is C or S

SEQ ID NO: 12093 - protein, 31 aa, Artificial Sequence; identical to SEQ ID NO: 1528
  Cyclic GFR-binding peptide
  MOD_RES (2)..(2): Xaa is C or S

SEQ ID NO: 12094 - protein, 28 aa, Artificial Sequence
  Cyclic GFR-binding peptide
  MOD_RES (1)..(1): Xaa is C or S
XGEVVMERYKKLVVKDYEDFYLMSIANL

SEQ ID NO: 12095 - protein, 35 aa, Artificial Sequence
  Cyclic GFR-binding peptide
  MOD_RES (31)..(32): Xaa is C or S
EVVMDNSLQEVVKENEDYYVMPLPELETPVXXAKP

SEQ ID NO: 12096 - protein, 34 aa, Artificial Sequence; identical to SEQ ID NO: 1530
  Cyclic GFR-binding peptide
  MOD_RES (28)..(29): Xaa is C or S

SEQ ID NO: 12097 - protein, 32 aa, Artificial Sequence; identical to SEQ ID NO: 1535
  Cyclic GFR-binding peptide
  MOD_RES (28)..(29): Xaa is C or S

SEQ ID NO: 12098 - protein, 27 aa, Artificial Sequence
  Cyclic GFR-binding peptide
  MOD_RES (26)..(27): Xaa is C or S
NSLQEIVNSSDDYYLVTLPELKTPAXX

SEQ ID NO: 12099 - protein, 32 aa, Artificial Sequence; identical to SEQ ID NO: 1538
  Cyclic GFR-binding peptide
  MOD_RES (2)..(4): Xaa is C or S

SEQ ID NO: 12100 - protein, 38 aa, Artificial Sequence; identical to SEQ ID NO: 1542
  Cyclic GFR-binding peptide
  MOD_RES (2)..(4)..(36)..(37): Xaa is C or S

SEQ ID NO: 12101 - protein, 31 aa, Artificial Sequence
  Cyclic GFR-binding peptide
  MOD_RES (2)..(2): Xaa is C or S
GXSEVVMDNSLQEVVNNASDYYVIPLPELRT

SEQ ID NO: 12102 - protein, 29 aa, Artificial Sequence
  Cyclic GFR-binding peptide
  MOD_RES (1)..(1): Xaa is C or S
XGEVVMDNSLQEVVKENEDYYLMTLPELE

SEQ ID NO: 12103 - protein, 26 aa, Artificial Sequence
  Cyclic GFR-binding peptide
EVVMDRYKKLVVNNASDFYLISIANL

SEQ ID NO: 12104 - protein, 35 aa, Artificial Sequence
  Cyclic GFR-binding peptide
  MOD_RES (29)..(30): Xaa is C or S
VIMNSLQEIKPTKGIYYLITLPELDQSVXXPSASA

SEQ ID NO: 12105 - protein, 31 aa, Artificial Sequence
  Cyclic GFR-binding peptide
  MOD_RES (2)..(2): Xaa is C or S
KXSKVIMEYQKYIKPTKGIIFLISIPSLDQS

SEQ ID NO: 12106 - protein, 24 aa, Artificial Sequence
  Cyclic GFR-binding peptide
EYQKYIVNSSDDIFLVSIPSLQTP

SEQ ID NO: 12107 - protein, 38 aa, Artificial Sequence
  Cyclic GFR-binding peptide
  MOD_RES (1)..(33)..(34): Xaa is C or S
XSRVVMNNSLQEIVNSSDDYYLVTLPELKTPAXXPKPV

SEQ ID NO: 12108 - protein, 26 aa, Artificial Sequence
  Cyclic GFR-binding peptide
EEYQKYVVKDYEDIFLMSIPSLETPV

SEQ ID NO: 12109 - protein, 21 aa, Artificial Sequence
  Cyclic GFR-binding peptide
QYNKLIVNSSDDLYLVSIASL

SEQ ID NO: 12110 - protein, 31 aa, Artificial Sequence
  Cyclic GFR-binding peptide
  MOD_RES (2)..(2): Xaa is C or S
KXSKVVMEYQKYVKPTRGVIFLISIPSLDQP

SEQ ID NO: 12111 - protein, 38 aa, Artificial Sequence; identical to SEQ ID NO: 1551
  Cyclic GFR-binding peptide
  MOD_RES (1)..(3)..(35)..(36): Xaa is C or S

SEQ ID NO: 12112 - protein, 28 aa, Artificial Sequence
  Cyclic GFR-binding peptide
RVVMNQYNKLIVNSSDDLYLVSIASLKT

SEQ ID NO: 12113 - protein, 37 aa, Artificial Sequence; identical to SEQ ID NO: 1553
  Cyclic GFR-binding peptide
  MOD_RES (1)..(33)..(34): Xaa is C or S

SEQ ID NO: 12114 - protein, 35 aa, Artificial Sequence
  Cyclic GFR-binding peptide
  MOD_RES (31)..(32): Xaa is C or S
EVVMDNSLQEVVNNASDYYVIPLPELRTPVXXTPP

SEQ ID NO: 12115 - protein, 30 aa, Artificial Sequence
  Cyclic GFR-binding peptide
  MOD_RES (29)..(30): Xaa is C or S
VMNNSLQEIVNSSDDYYLVTLPELQTPAXX

SEQ ID NO: 12116 - protein, 30 aa, Artificial Sequence
  Cyclic GFR-binding peptide
  MOD_RES (2)..(4): Xaa is C or S
SXKXSKVIMEYQKYIKPTKGIIFLISIPSL

SEQ ID NO: 12117 - protein, 29 aa, Artificial Sequence
  Cyclic GFR-binding peptide
KVIMEYQKYIKPTKGIIFLISIPSLDQSV

SEQ ID NO: 12118 - protein, 28 aa, Artificial Sequence
  Cyclic GFR-binding peptide
  MOD_RES (1)..(1): Xaa is C or S
XSEVVMDNSLQEVVNNASDYYVIPLPEL

SEQ ID NO: 12119 - protein, 35 aa, Artificial Sequence; identical to SEQ ID NO: 1557
  Cyclic GFR-binding peptide
  MOD_RES (2)..(4)..(35): Xaa is C or S

SEQ ID NO: 12120 - protein, 29 aa, Artificial Sequence
  Cyclic GFR-binding peptide
  MOD_RES (2)..(2): Xaa is C or S
GXSRVVMNRYKKLIVNSSDDFYLVSIANL

SEQ ID NO: 12121 - protein, 20 aa, Artificial Sequence
  Cyclic GFR-binding peptide
NSLQEVKPKRGVYYLITLPE

SEQ ID NO: 12122 - protein, 31 aa, Artificial Sequence
  Cyclic GFR-binding peptide
  MOD_RES (1)..(3): Xaa is C or S
XKXSKVVMEYQKYVKPTRGVIFLISIPSLDQ

SEQ ID NO: 12123 - protein, 34 aa, Artificial Sequence
  Cyclic GFR-binding peptide
  MOD_RES (1)..(3)..(34): Xaa is C or S
XKXSKVVMNSLQEVKPTRGVYYVIPLPELDQPVX

SEQ ID NO: 12124 - protein, 28 aa, Artificial Sequence
  Cyclic GFR-binding peptide
VVMEYQKYVKPTRGVIFLISIPSLDQPV

SEQ ID NO: 12125 - protein, 31 aa, Artificial Sequence
  Cyclic GFR-binding peptide
  MOD_RES (28)..(29): Xaa is C or S
IMNSLQEIKPTKGIYYLITLPELDQSVXXPS

SEQ ID NO: 12126 - protein, 38 aa, Artificial Sequence
  Cyclic GFR-binding peptide
  MOD_RES (2)..(4)..(36)..(37): Xaa is C or S
HXGXARVVMNNSLQEIVNSSDDYYLVTLPELQTPAXXP

SEQ ID NO: 12127 - protein, 32 aa, Artificial Sequence
  Cyclic GFR-binding peptide
  MOD_RES (28)..(29): Xaa is C or S
MDNSLQEVVKENEDYYVMPLPELETPVXXAKP

SEQ ID NO: 12128 - protein, 25 aa, Artificial Sequence
  Cyclic GFR-binding peptide
NNSLQEIVNSSDDYYVVPLPELKTP

SEQ ID NO: 12129 - protein, 33 aa, Artificial Sequence; identical to SEQ ID NO: 1565
  Cyclic GFR-binding peptide
  MOD_RES (32)..(33): Xaa is C or S

SEQ ID NO: 12130 - protein, 23 aa, Artificial Sequence
  Cyclic GFR-binding peptide
EYQKYVVKDYEDIFLMSIPSLET

SEQ ID NO: 12131 - protein, 33 aa, Artificial Sequence; identical to SEQ ID NO: 1568
  Cyclic GFR-binding peptide
  MOD_RES (1)..(33): Xaa is C or S

SEQ ID NO: 12132 - protein, 41 aa, Artificial Sequence
  Cyclic GFR-binding peptide
  MOD_RES (2)..(4)..(36)..(37): Xaa is C or S
RXGXSEVVMDNSLQEVVNNASDYYVIPLPELRTPVXXTPPT

SEQ ID NO: 12133 - protein, 29 aa, Artificial Sequence
  Cyclic GFR-binding peptide
  MOD_RES (28)..(29): Xaa is C or S
VMRYKKLVKPTRGVFYLISIANLDQPVXX

SEQ ID NO: 12134 - protein, 29 aa, Artificial Sequence
  Cyclic GFR-binding peptide
VVMDNSLQEVVNNASDYYLITLPELRTPV

SEQ ID NO: 12135 - protein, 29 aa, Artificial Sequence
  Cyclic GFR-binding peptide
  MOD_RES (29)..(29): Xaa is C or S
VMNNSLQEIVNSSDDYYLVTLPELQTPAX

SEQ ID NO: 12136 - protein, 29 aa, Artificial Sequence
  Cyclic GFR-binding peptide
  MOD_RES (26)..(27): Xaa is C or S
RYKKLIVNSSDDFYLVSIANLQTPAXXPK

SEQ ID NO: 12137 - protein, 28 aa, Artificial Sequence
  Cyclic GFR-binding peptide
  MOD_RES (26)..(27): Xaa is C or S
QYNKLVVNNASDLYLISIASLRTPVXXT

SEQ ID NO: 12138 - protein, 29 aa, Artificial Sequence
  Cyclic GFR-binding peptide
  MOD_RES (2)..(2): Xaa is C or S
KXSKVIMRYKKLIKPTKGIFYLISIANLD

SEQ ID NO: 12139 - protein, 30 aa, Artificial Sequence
  Cyclic GFR-binding peptide
  MOD_RES (27)..(28): Xaa is C or S
MEYQKYVKPTRGVIFLISIPSLDQPVXXPS

SEQ ID NO: 12140 - protein, 36 aa, Artificial Sequence
  Cyclic GFR-binding peptide
  MOD_RES (1)..(33)..(34): Xaa is C or S
XSEVVMDQYNKLVVNNASDLYLISIASLRTPVXXTP

SEQ ID NO: 12141 - protein, 37 aa, Artificial Sequence
  Cyclic GFR-binding peptide
  MOD_RES (2)..(4)..(35)..(36): Xaa is C or S
SXKXSKVIMNSLQEIKPTKGIYYVIPLPELDQSVXXP

SEQ ID NO: 12142 - protein, 37 aa, Artificial Sequence
  Cyclic GFR-binding peptide
  MOD_RES (32)..(33): Xaa is C or S
GEVVMEEYQKYVVKDYEDIFLMSIPSLETPVXXAKPI

SEQ ID NO: 12143 - protein, 26 aa, Artificial Sequence
  Cyclic GFR-binding peptide
  MOD_RES (26)..(26): Xaa is C or S
EYQKYIVNSSDDIFLVSIPSLKTPAX

SEQ ID NO: 12144 - protein, 36 aa, Artificial Sequence; identical to SEQ ID NO: 1578
  Cyclic GFR-binding peptide
  MOD_RES (1)..(3)..(35)..(36): Xaa is C or S

SEQ ID NO: 12145 - protein, 32 aa, Artificial Sequence; identical to SEQ ID NO: 1579
  Cyclic GFR-binding peptide
  MOD_RES (1)..(3): Xaa is C or S

SEQ ID NO: 12146 - protein, 31 aa, Artificial Sequence
  Cyclic GFR-binding peptide
  MOD_RES (1)..(3): Xaa is C or S
XKXSKVIMEYQKYIKPTKGIIFLISIPSLDQ

SEQ ID NO: 12147 - protein, 33 aa, Artificial Sequence
  Cyclic GFR-binding peptide
  MOD_RES (28)..(29): Xaa is C or S
MNNSLQEIVNSSDDYYLVTLPELQTPAXXPKPV

SEQ ID NO: 12148 - protein, 36 aa, Artificial Sequence; identical to SEQ ID NO: 1581
  Cyclic GFR-binding peptide
  MOD_RES (1)..(3)..(35): Xaa is C or S

SEQ ID NO: 12149 - protein, 27 aa, Artificial Sequence
  Cyclic GFR-binding peptide
EVVMEEYQKYVVKDYEDIFLMSIPSLE

SEQ ID NO: 12150 - protein, 33 aa, Artificial Sequence
  Cyclic GFR-binding peptide
  MOD_RES (29)..(30): Xaa is C or S
VIMNSLQEIKPTKGIYYVIPLPELDQSVXXPSA

SEQ ID NO: 12151 - protein, 39 aa, Artificial Sequence
  Cyclic GFR-binding peptide
  MOD_RES (1)..(3)..(35)..(36): Xaa is C or S
XGXGEVVMEEYQKYVVKDYEDIFLMSIPSLETPVXXAKP

SEQ ID NO: 12152 - protein, 32 aa, Artificial Sequence
  Cyclic GFR-binding peptide
  MOD_RES (31)..(32): Xaa is C or S
EVVMDNSLQEVVKENEDYYLMTLPELETPVXX

SEQ ID NO: 12153 - protein, 31 aa, Artificial Sequence; identical to SEQ ID NO: 1584
  Cyclic GFR-binding peptide
  MOD_RES (28)..(29): Xaa is C or S

SEQ ID NO: 12154 - protein, 23 aa, Artificial Sequence
  Cyclic GFR-binding peptide
VIMNSLQEVKPKRGVYYLITLPE

SEQ ID NO: 12155 - protein, 29 aa, Artificial Sequence
  Cyclic GFR-binding peptide
  MOD_RES (29)..(29): Xaa is C or S
VVMEYQKYVKPTRGVIFLISIPSLDQPVX

SEQ ID NO: 12156 - protein, 31 aa, Artificial Sequence; identical to SEQ ID NO: 1590
  Cyclic GFR-binding peptide
  MOD_RES (26)..(27): Xaa is C or S

SEQ ID NO: 12157 - protein, 32 aa, Artificial Sequence; identical to SEQ ID NO: 1591
  Cyclic GFR-binding peptide
  MOD_RES (2)..(2): Xaa is C or S

SEQ ID NO: 12158 - protein, 26 aa, Artificial Sequence
  Cyclic GFR-binding peptide
  MOD_RES (1)..(1): Xaa is C or S
XSKVVMNSLQEVKPTRGVYYVIPLPE

SEQ ID NO: 12159 - protein, 23 aa, Artificial Sequence
  Cyclic GFR-binding peptide
NNSLQEIVNSSDDYYLVTLPELK

SEQ ID NO: 12160 - protein, 25 aa, Artificial Sequence
  Cyclic GFR-binding peptide
QYNKLVVNNASDLYLISIASLRTPV

SEQ ID NO: 12161 - protein, 37 aa, Artificial Sequence; identical to SEQ ID NO: 1595
  Cyclic GFR-binding peptide
  MOD_RES (2)..(4)..(35)..(36): Xaa is C or S

SEQ ID NO: 12162 - protein, 32 aa, Artificial Sequence; identical to SEQ ID NO: 1598
  Cyclic GFR-binding peptide
  MOD_RES (27)..(27): Xaa is C or S

SEQ ID NO: 12163 - protein, 38 aa, Artificial Sequence
  Cyclic GFR-binding peptide
  MOD_RES (32)..(33): Xaa is C or S
SEVVMDRYKKLVVNNASDFYLISIANLRTPVXXTPPTS

SEQ ID NO: 12164 - protein, 41 aa, Artificial Sequence; identical to SEQ ID NO: 1600
  Cyclic GFR-binding peptide
  MOD_RES (2)..(4)..(36): Xaa is C or S

SEQ ID NO: 12165 - protein, 26 aa, Artificial Sequence
  Cyclic GFR-binding peptide
VVMNNSLQEIVNSSDDYYLVTLPELK

SEQ ID NO: 12166 - protein, 25 aa, Artificial Sequence
  Cyclic GFR-binding peptide
SKVIMNSLQEIKPTKGIYYVIPLPE

SEQ ID NO: 12167 - protein, 36 aa, Artificial Sequence
  Cyclic GFR-binding peptide
  MOD_RES (2)..(34)..(35): Xaa is C or S
GXSEVVMDNSLQEVVNNASDYYLITLPELRTPVXXT

SEQ ID NO: 12168 - protein, 29 aa, Artificial Sequence
  Cyclic GFR-binding peptide
SEVVMDNSLQEVVNNASDYYLITLPELRT

SEQ ID NO: 12169 - protein, 34 aa, Artificial Sequence
  Cyclic GFR-binding peptide
  MOD_RES (2)..(34): Xaa is C or S
GXSEVVMDNSLQEVVNNASDYYLITLPELRTPVX

SEQ ID NO: 12170 - protein, 32 aa, Artificial Sequence; identical to SEQ ID NO: 1605
  Cyclic GFR-binding peptide
  MOD_RES (2)..(4): Xaa is C or S

SEQ ID NO: 12171 - protein, 27 aa, Artificial Sequence
  Cyclic GFR-binding peptide
  MOD_RES (26)..(27): Xaa is C or S
EYQKYVVKENEDIFLMSIPSLETPVXX

SEQ ID NO: 12172 - protein, 32 aa, Artificial Sequence
  Cyclic GFR-binding peptide
  MOD_RES (1)..(32): Xaa is C or S
XSKVIMNSLQEIKPTKGIYYLITLPELDQSVX

SEQ ID NO: 12173 - protein, 24 aa, Artificial Sequence
  Cyclic GFR-binding peptide
RYKKLIKPTKGIFYLISIANLDQS

SEQ ID NO: 12174 - protein, 33 aa, Artificial Sequence
  Cyclic GFR-binding peptide
  MOD_RES (1)..(32)..(33): Xaa is C or S
XSRVIMEYQKYVKPKRGVIFLISIPSLAQPVXX

SEQ ID NO: 12175 - protein, 24 aa, Artificial Sequence
  Cyclic GFR-binding peptide
NSLQEVVKDYEDYYLMTLPELETP

SEQ ID NO: 12176 - protein, 26 aa, Artificial Sequence
  Cyclic GFR-binding peptide
RVVMNRYKKLIVNSSDDFYLVSIANL

SEQ ID NO: 12177 - protein, 32 aa, Artificial Sequence; identical to SEQ ID NO: 1610
  Cyclic GFR-binding peptide
  MOD_RES (32)..(32): Xaa is C or S

SEQ ID NO: 12178 - protein, 32 aa, Artificial Sequence; identical to SEQ ID NO: 1611
  Cyclic GFR-binding peptide
  MOD_RES (32)..(32): Xaa is C or S

SEQ ID NO: 12179 - protein, 30 aa, Artificial Sequence
  Cyclic GFR-binding peptide
ARVVMNEYQKYIVNSSDDIFLVSIPSLQTP

SEQ ID NO: 12180 - protein, 29 aa, Artificial Sequence
  Cyclic GFR-binding peptide
  MOD_RES (29)..(29): Xaa is C or S
VMEQYNKLVVKDYEDLYLMSIASLETPVX

SEQ ID NO: 12181 - protein, 33 aa, Artificial Sequence
  Cyclic GFR-binding peptide
  MOD_RES (27)..(28): Xaa is C or S
MNSLQEIKPTKGIYYLITLPELDQSVXXPSASA

SEQ ID NO: 12182 - protein, 38 aa, Artificial Sequence
  Cyclic GFR-binding peptide
  MOD_RES (1)..(3)..(34)..(35): Xaa is C or S
XKXSRVIMEYQKYVKPKRGVIFLISIPSLAQPVXXPAA

SEQ ID NO: 12183 - protein, 26 aa, Artificial Sequence
  Cyclic GFR-binding peptide
  MOD_RES (26)..(26): Xaa is C or S
QYNKLIKPTKGILYLISIASLDQSVX

SEQ ID NO: 12184 - protein, 37 aa, Artificial Sequence
  Cyclic GFR-binding peptide
  MOD_RES (1)..(33)..(34): Xaa is C or S
XGEVVMDEYQKYVVKENEDIFLMSIPSLETPVXXAKP

SEQ ID NO: 12185 - protein, 35 aa, Artificial Sequence; identical to SEQ ID NO: 1622
  Cyclic GFR-binding peptide
  MOD_RES (31)..(32): Xaa is C or S

SEQ ID NO: 12186 - protein, 24 aa, Artificial Sequence
  Cyclic GFR-binding peptide
VVMNNSLQEIVNSSDDYYVVPLPE

SEQ ID NO: 12187 - protein, 36 aa, Artificial Sequence
  Cyclic GFR-binding peptide
  MOD_RES (31)..(32): Xaa is C or S
EVVMDRYKKLVVNNASDFYLISIANLRTPVXXTPPT

SEQ ID NO: 12188 - protein, 38 aa, Artificial Sequence
  Cyclic GFR-binding peptide
  MOD_RES (1)..(3)..(35): Xaa is C or S
XGXSRVVMNNSLQEIVNSSDDYYVVPLPELKTPAXTPK

SEQ ID NO: 12189 - protein, 39 aa, Artificial Sequence
  Cyclic GFR-binding peptide
  MOD_RES (2)..(4)..(36)..(37): Xaa is C or S
RXGXSEVVMDNSLQEVVNNASDYYLITLPELRTPVXXTP

SEQ ID NO: 12190 - protein, 42 aa, Artificial Sequence
  Cyclic GFR-binding peptide
  MOD_RES (2)..(4)..(36)..(37): Xaa is C or S
HXGXSRVVMNEYQKYIVNSSDDIFLVSIPSLKTPAXXPKPVY

SEQ ID NO: 12191 - protein, 26 aa, Artificial Sequence
  Cyclic GFR-binding peptide
MNNSLQEIVNSSDDYYLVTLPELKTP

SEQ ID NO: 12192 - protein, 26 aa, Artificial Sequence
  Cyclic GFR-binding peptide
  MOD_RES (26)..(26): Xaa is C or S
EYQKYVKPKRGVIFLISIPSLAQPVX

SEQ ID NO: 12193 - protein, 38 aa, Artificial Sequence
  Cyclic GFR-binding peptide
  MOD_RES (1)..(3)..(35)..(36): Xaa is C or S
XGXGEVVMENSLQEVVKDYEDYYLMTLPELETPVXXAK

SEQ ID NO: 12194 - protein, 29 aa, Artificial Sequence
  Cyclic GFR-binding peptide
  MOD_RES (2)..(4): Xaa is C or S
SXKXSKVVMEYQKYVKPTRGVIFLISIPS

SEQ ID NO: 12195 - protein, 28 aa, Artificial Sequence
  Cyclic GFR-binding peptide
VMNEYQKYIVNSSDDIFLVSIPSLKTPA

SEQ ID NO: 12196 - protein, 30 aa, Artificial Sequence; identical to SEQ ID NO: 1625
  Cyclic GFR-binding peptide
  MOD_RES (29)..(30): Xaa is C or S

SEQ ID NO: 12197 - protein, 27 aa, Artificial Sequence
  Cyclic GFR-binding peptide
  MOD_RES (1)..(1): Xaa is C or S
XSRVVMNEYQKYIVNSSDDIFLVSIPS

SEQ ID NO: 12198 - protein, 31 aa, Artificial Sequence; identical to SEQ ID NO: 1628
  Cyclic GFR-binding peptide
  MOD_RES (26)..(27): Xaa is C or S

SEQ ID NO: 12199 - protein, 28 aa, Artificial Sequence
  Cyclic GFR-binding peptide
  MOD_RES (27)..(28): Xaa is C or S
DNSLQEVVNNASDYYLITLPELRTPVXX

SEQ ID NO: 12200 - protein, 37 aa, Artificial Sequence; identical to SEQ ID NO: 1630
  Cyclic GFR-binding peptide
  MOD_RES (32)..(33): Xaa is C or S

SEQ ID NO: 12201 - protein, 42 aa, Artificial Sequence
  Cyclic GFR-binding peptide
  MOD_RES (2)..(4)..(36): Xaa is C or S
HXGXSRVVMNEYQKYIVNSSDDIFLVSIPSLKTPAXTPKTVH

SEQ ID NO: 12202 - protein, 24 aa, Artificial Sequence
  Cyclic GFR-binding peptide
KVVMQYNKLVKPTRGVLYLISIAS

SEQ ID NO: 12203 - protein, 23 aa, Artificial Sequence
  Cyclic GFR-binding peptide
RYKKLVVNNASDFYLISIANLRT

SEQ ID NO: 12204 - protein, 40 aa, Artificial Sequence
  Cyclic GFR-binding peptide
  MOD_RES (2)..(34)..(35): Xaa is C or S
GXGEVVMEEYQKYVVKDYEDIFLMSIPSLETPVXXAKPIS

SEQ ID NO: 12205 - protein, 32 aa, Artificial Sequence; identical to SEQ ID NO: 1636
  Cyclic GFR-binding peptide
  MOD_RES (30)..(31): Xaa is C or S

SEQ ID NO: 12206 - protein, 25 aa, Artificial Sequence
  Cyclic GFR-binding peptide
NSLQEVKPKRGVYYLITLPELAQPV

SEQ ID NO: 12207 - protein, 30 aa, Artificial Sequence; identical to SEQ ID NO: 1637
  Cyclic GFR-binding peptide
  MOD_RES (2)..(2): Xaa is C or S

SEQ ID NO: 12208 - protein, 30 aa, Artificial Sequence
  Cyclic GFR-binding peptide
  MOD_RES (1)..(1): Xaa is C or S
XARVVMNNSLQEIVNSSDDYYVVPLPELQT

SEQ ID NO: 12209 - protein, 31 aa, Artificial Sequence
  Cyclic GFR-binding peptide
  MOD_RES (2)..(4): Xaa is C or S
HXGXARVVMNEYQKYIVNSSDDIFLVSIPSL

SEQ ID NO: 12210 - protein, 40 aa, Artificial Sequence; identical to SEQ ID NO: 1642
  Cyclic GFR-binding peptide
  MOD_RES (1)..(3)..(34)..(35): Xaa is C or S

SEQ ID NO: 12211 - protein, 30 aa, Artificial Sequence
  Cyclic GFR-binding peptide
  MOD_RES (26)..(27): Xaa is C or S
EYQKYIVNSSDDIFLVSIPSLQTPAXXPKP

SEQ ID NO: 12212 - protein, 33 aa, Artificial Sequence
  Cyclic GFR-binding peptide
  MOD_RES (2)..(2): Xaa is C or S
GXSRVVMNNSLQEIVNSSDDYYVVPLPELKTPA

SEQ ID NO: 12213 - protein, 39 aa, Artificial Sequence
  Cyclic GFR-binding peptide
  MOD_RES (1)..(3)..(34)..(35): Xaa is C or S
XKXSKVIMNSLQEIKPTKGIYYLITLPELDQSVXXPSAS

SEQ ID NO: 12214 - protein, 32 aa, Artificial Sequence; identical to SEQ ID NO: 1645
  Cyclic GFR-binding peptide
  MOD_RES (28)..(29): Xaa is C or S

SEQ ID NO: 12215 - protein, 39 aa, Artificial Sequence
  Cyclic GFR-binding peptide
  MOD_RES (1)..(3)..(34)..(35): Xaa is C or S
XKXSKVVMEYQKYVKPTRGVIFLISIPSLDQPVXXPSAS

SEQ ID NO: 12216 - protein, 38 aa, Artificial Sequence
  Cyclic GFR-binding peptide
  MOD_RES (1)..(3)..(35)..(36): Xaa is C or S
XGXGEVVMDNSLQEVVKENEDYYVMPLPELETPVXXAK

SEQ ID NO: 12217 - protein, 26 aa, Artificial Sequence
  Cyclic GFR-binding peptide
MENSLQEVVKDYEDYYLMTLPELETP

SEQ ID NO: 12218 - protein, 35 aa, Artificial Sequence
  Cyclic GFR-binding peptide
  MOD_RES (31)..(32): Xaa is C or S
EVVMENSLQEVVKDYEDYYLMTLPELETPVXXAKP

SEQ ID NO: 12219 - protein, 26 aa, Artificial Sequence
  Cyclic GFR-binding peptide
VMDRYKKLVVNNASDFYLISIANLRT

SEQ ID NO: 12220 - protein, 30 aa, Artificial Sequence; identical to SEQ ID NO: 1651
  Cyclic GFR-binding peptide
  MOD_RES (2)..(4): Xaa is C or S

SEQ ID NO: 12221 - protein, 28 aa, Artificial Sequence
  Cyclic GFR-binding peptide
RVIMNSLQEVKPKRGVYYLITLPELAQP

SEQ ID NO: 12222 - protein, 34 aa, Artificial Sequence
  Cyclic GFR-binding peptide
  MOD_RES (2)..(34): Xaa is C or S
GXSRVVMNNSLQEIVNSSDDYYLVTLPELKTPAX

SEQ ID NO: 12223 - protein, 32 aa, Artificial Sequence; identical to SEQ ID NO: 1654
  Cyclic GFR-binding peptide
  MOD_RES (28)..(29): Xaa is C or S

SEQ ID NO: 12224 - protein, 27 aa, Artificial Sequence
  Cyclic GFR-binding peptide
VVMNNSLQEIVNSSDDYYVVPLPELKT

SEQ ID NO: 12225 - protein, 35 aa, Artificial Sequence; identical to SEQ ID NO: 1657
  Cyclic GFR-binding peptide
  MOD_RES (32)..(33): Xaa is C or S

SEQ ID NO: 12226 - protein, 36 aa, Artificial Sequence
  Cyclic GFR-binding peptide
  MOD_RES (30)..(31): Xaa is C or S
KVVMEYQKYVKPTRGVIFLISIPSLDQPVXXPSASA

SEQ ID NO: 12227 - protein, 38 aa, Artificial Sequence
  Cyclic GFR-binding peptide
  MOD_RES (1)..(33)..(34): Xaa is C or S
XSEVVMDNSLQEVVNNASDYYLITLPELRTPVXXTPPT

SEQ ID NO: 12228 - protein, 23 aa, Artificial Sequence
  Cyclic GFR-binding peptide
MDNSLQEVVNNASDYYVIPLPEL

SEQ ID NO: 12229 - protein, 26 aa, Artificial Sequence
  Cyclic GFR-binding peptide
SKVVMEYQKYVKPTRGVIFLISIPSL

SEQ ID NO: 12230 - protein, 37 aa, Artificial Sequence; identical to SEQ ID NO: 1660
  Cyclic GFR-binding peptide
  MOD_RES (2)..(4)..(36)..(37): Xaa is C or S

SEQ ID NO: 12231 - protein, 32 aa, Artificial Sequence
  Cyclic GFR-binding peptide
  MOD_RES (26)..(27): Xaa is C or S
EYQKYVVKENEDIFLMSIPSLETPVXXAKPIK

SEQ ID NO: 12232 - protein, 30 aa, Artificial Sequence
  Cyclic GFR-binding peptide
  MOD_RES (2)..(2): Xaa is C or S
KXSKVVMEYQKYVKPTRGVIFLISIPSLDQ

SEQ ID NO: 12233 - protein, 30 aa, Artificial Sequence; identical to SEQ ID NO: 1662
  Cyclic GFR-binding peptide
  MOD_RES (28)..(28): Xaa is C or S

SEQ ID NO: 12234 - protein, 21 aa, Artificial Sequence
  Cyclic GFR-binding peptide
EQYNKLVVKDYEDLYLMSIAS

SEQ ID NO: 12235 - protein, 35 aa, Artificial Sequence; identical to SEQ ID NO: 1669
  Cyclic GFR-binding peptide
  MOD_RES (1)..(33)..(34): Xaa is C or S

SEQ ID NO: 12236 - protein, 38 aa, Artificial Sequence
  Cyclic GFR-binding peptide
  MOD_RES (1)..(3)..(35)..(36): Xaa is C or S
XGXGEVVMDEYQKYVVKENEDIFLMSIPSLETPVXXAK

SEQ ID NO: 12237 - protein, 31 aa, Artificial Sequence; identical to SEQ ID NO: 1672
  Cyclic GFR-binding peptide
  MOD_RES (31)..(31): Xaa is C or S

SEQ ID NO: 12238 - protein, 23 aa, Artificial Sequence
  Cyclic GFR-binding peptide
NSLQEIVNSSDDYYLVTLPELKT

SEQ ID NO: 12239 - protein, 34 aa, Artificial Sequence; identical to SEQ ID NO: 1675
  Cyclic GFR-binding peptide
  MOD_RES (29)..(30): Xaa is C or S

SEQ ID NO: 12240 - protein, 25 aa, Artificial Sequence
  Cyclic GFR-binding peptide
EVVMERYKKLVVKDYEDFYLMSIAN

SEQ ID NO: 12241 - protein, 23 aa, Artificial Sequence
  Cyclic GFR-binding peptide
RYKKLIVNSSDDFYLVSIANLQT

SEQ ID NO: 12242 - protein, 29 aa, Artificial Sequence
  Cyclic GFR-binding peptide
  MOD_RES (29)..(29): Xaa is C or S
VMNEYQKYIVNSSDDIFLVSIPSLKTPAX

SEQ ID NO: 12243 - protein, 31 aa, Artificial Sequence; identical to SEQ ID NO: 1680
  Cyclic GFR-binding peptide
  MOD_RES (31)..(31): Xaa is C or S

SEQ ID NO: 12244 - protein, 34 aa, Artificial Sequence
  Cyclic GFR-binding peptide
  MOD_RES (2)..(4): Xaa is C or S
RXGXSEVVMDNSLQEVVNNASDYYLITLPELRTP

SEQ ID NO: 12245 - protein, 27 aa, Artificial Sequence
  Cyclic GFR-binding peptide
VIMNSLQEIKPTKGIYYVIPLPELDQS

SEQ ID NO: 12246 - protein, 29 aa, Artificial Sequence
  Cyclic GFR-binding peptide
  MOD_RES (28)..(29): Xaa is C or S
MNEYQKYIVNSSDDIFLVSIPSLKTPAXX

SEQ ID NO: 12247 - protein, 23 aa, Artificial Sequence
  Cyclic GFR-binding peptide
MENSLQEVVKDYEDYYLMTLPEL

SEQ ID NO: 12248 - protein, 22 aa, Artificial Sequence
  Cyclic GFR-binding peptide
NSLQEVVKENEDYYLMTLPELE

SEQ ID NO: 12249 - protein, 33 aa, Artificial Sequence
  Cyclic GFR-binding peptide
  MOD_RES (1)..(33): Xaa is C or S
XSRVVMNNSLQEIVNSSDDYYVVPLPELKTPAX

SEQ ID NO: 12250 - protein, 41 aa, Artificial Sequence; identical to SEQ ID NO: 1691
  Cyclic GFR-binding peptide
  MOD_RES (2)..(4)..(36)..(37): Xaa is C or S

SEQ ID NO: 12251 - protein, 26 aa, Artificial Sequence
  Cyclic GFR-binding peptide
VVMNSLQEVKPTRGVYYVIPLPELDQ

SEQ ID NO: 12252 - protein, 39 aa, Artificial Sequence
  Cyclic GFR-binding peptide
  MOD_RES (1)..(33)..(34): Xaa is C or S
XGEVVMENSLQEVVKDYEDYYLMTLPELETPVXXAKPIS

SEQ ID NO: 12253 - protein, 36 aa, Artificial Sequence
  Cyclic GFR-binding peptide
  MOD_RES (32)..(33): Xaa is C or S
ARVVMNNSLQEIVNSSDDYYVVPLPELQTPAXXPKP

SEQ ID NO: 12254 - protein, 25 aa, Artificial Sequence
  Cyclic GFR-binding peptide
IMNSLQEVKPKRGVYYLITLPELAQ

SEQ ID NO: 12255 - protein, 20 aa, Artificial Sequence
  Cyclic GFR-binding peptide
QYNKLVVNNASDLYLISIAS

SEQ ID NO: 12256 - protein, 30 aa, Artificial Sequence
  Cyclic GFR-binding peptide
  MOD_RES (27)..(28): Xaa is C or S
NNSLQEIVNSSDDYYLVTLPELQTPAXXPK

SEQ ID NO: 12257 - protein, 23 aa, Artificial Sequence
  Cyclic GFR-binding peptide
VVMRYKKLVKPTRGVFYLISIAN

SEQ ID NO: 12258 - protein, 40 aa, Artificial Sequence
  Cyclic GFR-binding peptide
  MOD_RES (2)..(4)..(36)..(37): Xaa is C or S
RXGXGEVVMDNSLQEVVKENEDYYVMPLPELETPVXXAKP

SEQ ID NO: 12259 - protein, 20 aa, Artificial Sequence
  Cyclic GFR-binding peptide
NSLQEVVKENEDYYVMPLPE

SEQ ID NO: 12260 - protein, 26 aa, Artificial Sequence
  Cyclic GFR-binding peptide
IMEYQKYVKPKRGVIFLISIPSLAQP

SEQ ID NO: 12261 - protein, 35 aa, Artificial Sequence
  Cyclic GFR-binding peptide
  MOD_RES (2)..(4)..(35): Xaa is C or S
SXKXSKVVMNSLQEVKPTRGVYYVIPLPELDQPVX

SEQ ID NO: 12262 - protein, 35 aa, Artificial Sequence
  Cyclic GFR-binding peptide
  MOD_RES (30)..(30): Xaa is C or S
VVMNNSLQEIVNSSDDYYVVPLPELKTPAXTPKTV

SEQ ID NO: 12263 - protein, 28 aa, Artificial Sequence
  Cyclic GFR-binding peptide
  MOD_RES (28)..(28): Xaa is C or S
MNNSLQEIVNSSDDYYLVTLPELKTPAX

SEQ ID NO: 12264 - protein, 29 aa, Artificial Sequence
  Cyclic GFR-binding peptide
  MOD_RES (26)..(27): Xaa is C or S
RYKKLVVKENEDFYLMSIANLETPVXXAK

SEQ ID NO: 12265 - protein, 27 aa, Artificial Sequence
  Cyclic GFR-binding peptide
  MOD_RES (1)..(1): Xaa is C or S
XGEVVMEEYQKYVVKDYEDIFLMSIPS

SEQ ID NO: 12266 - protein, 36 aa, Artificial Sequence
  Cyclic GFR-binding peptide
  MOD_RES (32)..(33): Xaa is C or S
SEVVMDRYKKLVVNNASDFYLISIANLRTPVXXTPP

SEQ ID NO: 12267 - protein, 27 aa, Artificial Sequence
  Cyclic GFR-binding peptide
VMDNSLQEVVNNASDYYLITLPELRTP

SEQ ID NO: 12268 - protein, 29 aa, Artificial Sequence
  Cyclic GFR-binding peptide
  MOD_RES (29)..(29): Xaa is C or S
VIMNSLQEIKPTKGIYYLITLPELDQSVX

SEQ ID NO: 12269 - protein, 26 aa, Artificial Sequence
  Cyclic GFR-binding peptide
VIMRYKKLVKPKRGVFYLISIANLAQ

SEQ ID NO: 12270 - protein, 34 aa, Artificial Sequence
  Cyclic GFR-binding peptide
  MOD_RES (2)..(4): Xaa is C or S
SXKXSRVIMNSLQEVKPKRGVYYLITLPELAQPV

SEQ ID NO: 12271 - protein, 40 aa, Artificial Sequence; identical to SEQ ID NO: 1707
  Cyclic GFR-binding peptide
  MOD_RES (1)..(3)..(34)..(35): Xaa is C or S

SEQ ID NO: 12272 - protein, 28 aa, Artificial Sequence
  Cyclic GFR-binding peptide
KVIMQYNKLIKPTKGILYLISIASLDQS

SEQ ID NO: 12273 - protein, 23 aa, Artificial Sequence
  Cyclic GFR-binding peptide
NRYKKLIVNSSDDFYLVSIANLQ

SEQ ID NO: 12274 - protein, 30 aa, Artificial Sequence
  Cyclic GFR-binding peptide
  MOD_RES (1)..(1): Xaa is C or S
XGEVVMENSLQEVVKDYEDYYVMPLPELET

SEQ ID NO: 12275 - protein, 30 aa, Artificial Sequence; identical to SEQ ID NO: 1711
  Cyclic GFR-binding peptide

SEQ ID NO: 12276 - protein, 23 aa, Artificial Sequence
  Cyclic GFR-binding peptide
RYKKLVKPTRGVFYLISIANLDQ

SEQ ID NO: 12277 - protein, 28 aa, Artificial Sequence
  Cyclic GFR-binding peptide
VMENSLQEVVKDYEDYYLMTLPELETPV

SEQ ID NO: 12278 - protein, 28 aa, Artificial Sequence
  Cyclic GFR-binding peptide
ARVVMNRYKKLIVNSSDDFYLVSIANLQ

SEQ ID NO: 12279 - protein, 34 aa, Artificial Sequence; identical to SEQ ID NO: 1715
  Cyclic GFR-binding peptide
  MOD_RES (30)..(31): Xaa is C or S

SEQ ID NO: 12280 - protein, 28 aa, Artificial Sequence
  Cyclic GFR-binding peptide
  MOD_RES (1)..(1): Xaa is C or S
XSRVIMRYKKLVKPKRGVFYLISIANLA

SEQ ID NO: 12281 - protein, 30 aa, Artificial Sequence
  Cyclic GFR-binding peptide
  MOD_RES (2)..(2): Xaa is C or S
KXSRVIMNSLQEVKPKRGVYYLITLPELAQ

SEQ ID NO: 12282 - protein, 35 aa, Artificial Sequence
  Cyclic GFR-binding peptide
  MOD_RES (1)..(33)..(34): Xaa is C or S
XGEVVMDNSLQEVVKENEDYYVMPLPELETPVXXA

SEQ ID NO: 12283 - protein, 33 aa, Artificial Sequence
  Cyclic GFR-binding peptide
  MOD_RES (2)..(2): Xaa is C or S
GXSEVVMDNSLQEVVNNASDYYVIPLPELRTPV

SEQ ID NO: 12284 - protein, 40 aa, Artificial Sequence
  Cyclic GFR-binding peptide
  MOD_RES (2)..(4)..(36)..(37): Xaa is C or S
HXGXSRVVMNEYQKYIVNSSDDIFLVSIPSLKTPAXXPKP

SEQ ID NO: 12285 - protein, 27 aa, Artificial Sequence
  Cyclic GFR-binding peptide
SKVIMRYKKLIKPTKGIFYLISIANLD

SEQ ID NO: 12286 - protein, 32 aa, Artificial Sequence
  Cyclic GFR-binding peptide
  MOD_RES (2)..(2): Xaa is C or S
KXSKVVMEYQKYVKPTRGVIFLISIPSLDQPV

SEQ ID NO: 12287 - protein, 32 aa, Artificial Sequence
  Cyclic GFR-binding peptide
  MOD_RES (28)..(29): Xaa is C or S
MNEYQKYIVNSSDDIFLVSIPSLQTPAXXPKP

SEQ ID NO: 12288 - protein, 20 aa, Artificial Sequence
  Cyclic GFR-binding peptide
EYQKYIKPTKGIIFLISIPS

SEQ ID NO: 12289 - protein, 30 aa, Artificial Sequence; identical to SEQ ID NO: 1724
  Cyclic GFR-binding peptide
  MOD_RES (1)..(3): Xaa is C or S

SEQ ID NO: 12290 - protein, 25 aa, Artificial Sequence
  Cyclic GFR-binding peptide
NSLQEIVNSSDDYYLVTLPELKTPA

SEQ ID NO: 12291 - protein, 34 aa, Artificial Sequence
  Cyclic GFR-binding peptide
  MOD_RES (31)..(32): Xaa is C or S
SKVIMNSLQEIKPTKGIYYLITLPELDQSVXXPS

SEQ ID NO: 12292 - protein, 34 aa, Artificial Sequence
  Cyclic GFR-binding peptide
  MOD_RES (30)..(31): Xaa is C or S
VVMDRYKKLVVNNASDFYLISIANLRTPVXXTPP

SEQ ID NO: 12293 - protein, 27 aa, Artificial Sequence
  Cyclic GFR-binding peptide
VVMRYKKLVKPTRGVFYLISIANLDQP

SEQ ID NO: 12294 - protein, 33 aa, Artificial Sequence; identical to SEQ ID NO: 1732
  Cyclic GFR-binding peptide
  MOD_RES (1)..(32)..(33): Xaa is C or S

SEQ ID NO: 12295 - protein, 35 aa, Artificial Sequence
  Cyclic GFR-binding peptide
  MOD_RES (29)..(30): Xaa is C or S
VVMNSLQEVKPTRGVYYVIPLPELDQPVXXPSASA

SEQ ID NO: 12296 - protein, 26 aa, Artificial Sequence
  Cyclic GFR-binding peptide
  MOD_RES (26)..(26): Xaa is C or S
QYNKLVVKDYEDLYLMSIASLETPVX

SEQ ID NO: 12297 - protein, 27 aa, Artificial Sequence
  Cyclic GFR-binding peptide
GEVVMDQYNKLVVKENEDLYLMSIASL

SEQ ID NO: 12298 - protein, 25 aa, Artificial Sequence
  Cyclic GFR-binding peptide
VMENSLQEVVKDYEDYYVMPLPELE

SEQ ID NO: 12299 - protein, 34 aa, Artificial Sequence
  Cyclic GFR-binding peptide
  MOD_RES (30)..(31): Xaa is C or S
VVMEEYQKYVVKDYEDIFLMSIPSLETPVXXAKP

SEQ ID NO: 12300 - protein, 40 aa, Artificial Sequence
  Cyclic GFR-binding peptide
  MOD_RES (2)..(4)..(35)..(36): Xaa is C or S
SXKXSKVIMNSLQEIKPTKGIYYLITLPELDQSVXXPSAS

SEQ ID NO: 12301 - protein, 21 aa, Artificial Sequence
  Cyclic GFR-binding peptide
RYKKLVVNNASDFYLISIANL

SEQ ID NO: 12302 - protein, 28 aa, Artificial Sequence
  Cyclic GFR-binding peptide
  MOD_RES (27)..(28): Xaa is C or S
DNSLQEVVKENEDYYVMPLPELETPVXX

SEQ ID NO: 12303 - protein, 26 aa, Artificial Sequence
  Cyclic GFR-binding peptide
EVVMDRYKKLVVKENEDFYLMSIANL

SEQ ID NO: 12304 - protein, 27 aa, Artificial Sequence
  Cyclic GFR-binding peptide
RVIMQYNKLVKPKRGVLYLISIASLAQ

SEQ ID NO: 12305 - protein, 25 aa, Artificial Sequence
  Cyclic GFR-binding peptide
MDQYNKLVVKENEDLYLMSIASLET

SEQ ID NO: 12306 - protein, 30 aa, Artificial Sequence
  Cyclic GFR-binding peptide
  MOD_RES (28)..(29): Xaa is C or S
IMNSLQEIKPTKGIYYLITLPELDQSVXXP

SEQ ID NO: 12307 - protein, 27 aa, Artificial Sequence
  Cyclic GFR-binding peptide
  MOD_RES (1)..(1): Xaa is C or S
XARVVMNNSLQEIVNSSDDYYVVPLPE

SEQ ID NO: 12308 - protein, 28 aa, Artificial Sequence
  Cyclic GFR-binding peptide
  MOD_RES (1)..(1): Xaa is C or S
XSRVVMNNSLQEIVNSSDDYYLVTLPEL

SEQ ID NO: 12309 - protein, 30 aa, Artificial Sequence
  Cyclic GFR-binding peptide
  MOD_RES (30)..(30): Xaa is C or S
VVMDNSLQEVVNNASDYYLITLPELRTPVX

SEQ ID NO: 12310 - protein, 33 aa, Artificial Sequence
  Cyclic GFR-binding peptide
  MOD_RES (2)..(33): Xaa is C or S
KXSRVIMEYQKYVKPKRGVIFLISIPSLAQPVX

SEQ ID NO: 12311 - protein, 32 aa, Artificial Sequence; identical to SEQ ID NO: 1750
  Cyclic GFR-binding peptide
  MOD_RES (29)..(30): Xaa is C or S

SEQ ID NO: 12312 - protein, 34 aa, Artificial Sequence
  Cyclic GFR-binding peptide
  MOD_RES (29)..(30): Xaa is C or S
VMENSLQEVVKDYEDYYLMTLPELETPVXXAKPI

SEQ ID NO: 12313 - protein, 34 aa, Artificial Sequence
  Cyclic GFR-binding peptide
  MOD_RES (30)..(31): Xaa is C or S
VVMNNSLQEIVNSSDDYYLVTLPELQTPAXXPKP

SEQ ID NO: 12314 - protein, 36 aa, Artificial Sequence; identical to SEQ ID NO: 1754
  Cyclic GFR-binding peptide
  MOD_RES (2)..(34)..(35): Xaa is C or S

SEQ ID NO: 12315 - protein, 31 aa, Artificial Sequence
  Cyclic GFR-binding peptide
  MOD_RES (26)..(27): Xaa is C or S
QYNKLVVNNASDLYLISIASLRTPVXXTPPT

SEQ ID NO: 12316 - protein, 36 aa, Artificial Sequence
  Cyclic GFR-binding peptide
  MOD_RES (32)..(33): Xaa is C or S
SRVVMNEYQKYIVNSSDDIFLVSIPSLKTPAXXPKP

SEQ ID NO: 12317 - protein, 36 aa, Artificial Sequence
  Cyclic GFR-binding peptide
  MOD_RES (2)..(34)..(35): Xaa is C or S
GXARVVMNEYQKYIVNSSDDIFLVSIPSLQTPAXXP

SEQ ID NO: 12318 - protein, 27 aa, Artificial Sequence
  Cyclic GFR-binding peptide
  MOD_RES (2)..(2): Xaa is C or S
KXSKVIMQYNKLIKPTKGILYLISIAS

SEQ ID NO: 12319 - protein, 33 aa, Artificial Sequence; identical to SEQ ID NO: 1761
  Cyclic GFR-binding peptide
  MOD_RES (2)..(2): Xaa is C or S

SEQ ID NO: 12320 - protein, 42 aa, Artificial Sequence
  Cyclic GFR-binding peptide
  MOD_RES (2)..(4)..(36)..(37): Xaa is C or S
HXGXSRVVMNNSLQEIVNSSDDYYVVPLPELKTPAXXPKPVY

SEQ ID NO: 12321 - protein, 34 aa, Artificial Sequence
  Cyclic GFR-binding peptide
  MOD_RES (32)..(32): Xaa is C or S
SRVVMNEYQKYIVNSSDDIFLVSIPSLKTPAXTP

SEQ ID NO: 12322 - protein, 27 aa, Artificial Sequence
  Cyclic GFR-binding peptide
  MOD_RES (26)..(27): Xaa is C or S
RYKKLIKPTKGIFYLISIANLDQSVXX

SEQ ID NO: 12323 - protein, 31 aa, Artificial Sequence
  Cyclic GFR-binding peptide
  MOD_RES (1)..(3): Xaa is C or S
XGXSEVVMDNSLQEVVNNASDYYVIPLPELR

SEQ ID NO: 12324 - protein, 39 aa, Artificial Sequence
  Cyclic GFR-binding peptide
  MOD_RES (2)..(34): Xaa is C or S
GXSRVVMNNSLQEIVNSSDDYYVVPLPELKTPAXTPKTV

SEQ ID NO: 12325 - protein, 27 aa, Artificial Sequence
  Cyclic GFR-binding peptide
MNEYQKYIVNSSDDIFLVSIPSLQTPA

SEQ ID NO: 12326 - protein, 28 aa, Artificial Sequence
  Cyclic GFR-binding peptide
  MOD_RES (27)..(28): Xaa is C or S
DEYQKYVVKENEDIFLMSIPSLETPVXX

SEQ ID NO: 12327 - protein, 39 aa, Artificial Sequence
  Cyclic GFR-binding peptide
  MOD_RES (2)..(4)..(35)..(36): Xaa is C or S
SXKXSKVIMNSLQEIKPTKGIYYLITLPELDQSVXXPSA

SEQ ID NO: 12328 - protein, 35 aa, Artificial Sequence
  Cyclic GFR-binding peptide
  MOD_RES (2)..(4): Xaa is C or S
RXGXGEVVMENSLQEVVKDYEDYYVMPLPELETPV

SEQ ID NO: 12329 - protein, 36 aa, Artificial Sequence
  Cyclic GFR-binding peptide
  MOD_RES (2)..(4)..(36): Xaa is C or S
HXGXARVVMNNSLQEIVNSSDDYYLVTLPELQTPAX

SEQ ID NO: 12330 - protein, 24 aa, Artificial Sequence
  Cyclic GFR-binding peptide
EYQKYVVKENEDIFLMSIPSLETP

SEQ ID NO: 12331 - protein, 26 aa, Artificial Sequence
  Cyclic GFR-binding peptide
RVVMNNSLQEIVNSSDDYYVVPLPEL

SEQ ID NO: 12332 - protein, 34 aa, Artificial Sequence
  Cyclic GFR-binding peptide
  MOD_RES (29)..(30): Xaa is C or S
VIMEYQKYIKPTKGIIFLISIPSLDQSVXXPSAS

SEQ ID NO: 12333 - protein, 34 aa, Artificial Sequence
  Cyclic GFR-binding peptide
  MOD_RES (30)..(31): Xaa is C or S
KVIMNSLQEIKPTKGIYYLITLPELDQSVXXPSA

SEQ ID NO: 12334 - protein, 37 aa, Artificial Sequence
  Cyclic GFR-binding peptide
  MOD_RES (31)..(32): Xaa is C or S
RVVMNNSLQEIVNSSDDYYVVPLPELQTPAXXPKPVT

SEQ ID NO: 12335 - protein, 31 aa, Artificial Sequence
  Cyclic GFR-binding peptide
  MOD_RES (1)..(1): Xaa is C or S
XSRVVMNNSLQEIVNSSDDYYLVTLPELKTP

SEQ ID NO: 12336 - protein, 31 aa, Artificial Sequence
  Cyclic GFR-binding peptide
  MOD_RES (2)..(4): Xaa is C or S
SXKXSKVVMEYQKYVKPTRGVIFLISIPSLD

SEQ ID NO: 12337 - protein, 24 aa, Artificial Sequence
  Cyclic GFR-binding peptide
VMNRYKKLIVNSSDDFYLVSIANL

SEQ ID NO: 12338 - protein, 36 aa, Artificial Sequence
  Cyclic GFR-binding peptide
  MOD_RES (32)..(33): Xaa is C or S
ARVVMNEYQKYIVNSSDDIFLVSIPSLQTPAXXPKP

SEQ ID NO: 12339 - protein, 30 aa, Artificial Sequence
  Cyclic GFR-binding peptide
  MOD_RES (2)..(2): Xaa is C or S
KXSKVVMNSLQEVKPTRGVYYVIPLPELDQ

SEQ ID NO: 12340 - protein, 36 aa, Artificial Sequence
  Cyclic GFR-binding peptide
  MOD_RES (31)..(32): Xaa is C or S
RVVMNEYQKYIVNSSDDIFLVSIPSLKTPAXXPKPV

SEQ ID NO: 12341 - protein, 35 aa, Artificial Sequence; identical to SEQ ID NO: 1779
  Cyclic GFR-binding peptide
  MOD_RES (1)..(3)..(35): Xaa is C or S

SEQ ID NO: 12342 - protein, 28 aa, Artificial Sequence
  Cyclic GFR-binding peptide
  MOD_RES (27)..(28): Xaa is C or S
DRYKKLVVKENEDFYLMSIANLETPVXX

SEQ ID NO: 12343 - protein, 35 aa, Artificial Sequence; identical to SEQ ID NO: 1784
  Cyclic GFR-binding peptide
  MOD_RES (32)..(33): Xaa is C or S

SEQ ID NO: 12344 - protein, 24 aa, Artificial Sequence
  Cyclic GFR-binding peptide
VMDRYKKLVVKENEDFYLMSIANL

SEQ ID NO: 12345 - protein, 33 aa, Artificial Sequence
  Cyclic GFR-binding peptide
  MOD_RES (2)..(2): Xaa is C or S
GXGEVVMENSLQEVVKDYEDYYLMTLPELETPV

SEQ ID NO: 12346 - protein, 35 aa, Artificial Sequence
  Cyclic GFR-binding peptide
  MOD_RES (30)..(31): Xaa is C or S
VVMDEYQKYVVKENEDIFLMSIPSLETPVXXAKPI

SEQ ID NO: 12347 - protein, 32 aa, Artificial Sequence
  Cyclic GFR-binding peptide
  MOD_RES (29)..(30): Xaa is C or S
VMDNSLQEVVNNASDYYVIPLPELRTPVXXTP

SEQ ID NO: 12348 - protein, 23 aa, Artificial Sequence
  Cyclic GFR-binding peptide
RYKKLVVKENEDFYLMSIANLET

SEQ ID NO: 12349 - protein, 29 aa, Artificial Sequence
  Cyclic GFR-binding peptide
  MOD_RES (26)..(27): Xaa is C or S
NSLQEIVNSSDDYYLVTLPELKTPAXXPK

SEQ ID NO: 12350 - protein, 34 aa, Artificial Sequence
  Cyclic GFR-binding peptide
  MOD_RES (1)..(33)..(34): Xaa is C or S
XSRVVMNNSLQEIVNSSDDYYLVTLPELKTPAXX

SEQ ID NO: 12351 - protein, 27 aa, Artificial Sequence
  Cyclic GFR-binding peptide
  MOD_RES (27)..(27): Xaa is C or S
EEYQKYVVKDYEDIFLMSIPSLETPVX

SEQ ID NO: 12352 - protein, 35 aa, Artificial Sequence; identical to SEQ ID NO: 1795
  Cyclic GFR-binding peptide
  MOD_RES (2)..(33)..(34): Xaa is C or S

SEQ ID NO: 12353 - protein, 26 aa, Artificial Sequence
  Cyclic GFR-binding peptide
RVIMNSLQEVKPKRGVYYLITLPELA

SEQ ID NO: 12354 - protein, 24 aa, Artificial Sequence
  Cyclic GFR-binding peptide
VVMQYNKLVKPTRGVLYLISIASL

SEQ ID NO: 12355 - protein, 37 aa, Artificial Sequence
  Cyclic GFR-binding peptide
  MOD_RES (2)..(34): Xaa is C or S
GXSRVVMNNSLQEIVNSSDDYYVVPLPELKTPAXTPK

SEQ ID NO: 12356 - protein, 35 aa, Artificial Sequence
  Cyclic GFR-binding peptide
  MOD_RES (30)..(31): Xaa is C or S
VVMNEYQKYIVNSSDDIFLVSIPSLQTPAXXPKPV

SEQ ID NO: 12357 - protein, 24 aa, Artificial Sequence
  Cyclic GFR-binding peptide
VVMDRYKKLVVKENEDFYLMSIAN

SEQ ID NO: 12358 - protein, 30 aa, Artificial Sequence; identical to SEQ ID NO: 1804
  Cyclic GFR-binding peptide
  MOD_RES (29)..(30): Xaa is C or S

SEQ ID NO: 12359 - protein, 37 aa, Artificial Sequence
  Cyclic GFR-binding peptide
  MOD_RES (32)..(33): Xaa is C or S
GEVVMDNSLQEVVKENEDYYLMTLPELETPVXXAKPI

SEQ ID NO: 12360 - protein, 26 aa, Artificial Sequence
  Cyclic GFR-binding peptide
MDNSLQEVVNNASDYYVIPLPELRTP

SEQ ID NO: 12361 - protein, 38 aa, Artificial Sequence; identical to SEQ ID NO: 1811
  Cyclic GFR-binding peptide
  MOD_RES (1)..(3)..(35): Xaa is C or S

SEQ ID NO: 12362 - protein, 35 aa, Artificial Sequence; identical to SEQ ID NO: 1812
  Cyclic GFR-binding peptide
  MOD_RES (32)..(33): Xaa is C or S

SEQ ID NO: 12363 - protein, 31 aa, Artificial Sequence
  Cyclic GFR-binding peptide
  MOD_RES (30)..(31): Xaa is C or S
KVVMNSLQEVKPTRGVYYVIPLPELDQPVXX

SEQ ID NO: 12364 - protein, 32 aa, Artificial Sequence; identical to SEQ ID NO: 1815
  Cyclic GFR-binding peptide
  MOD_RES (2)..(2): Xaa is C or S

SEQ ID NO: 12365 - protein, 29 aa, Artificial Sequence
  Cyclic GFR-binding peptide
  MOD_RES (1)..(3): Xaa is C or S
XGXGEVVMENSLQEVVKDYEDYYVMPLPE

SEQ ID NO: 12366 - protein, 32 aa, Artificial Sequence; identical to SEQ ID NO: 1817
  Cyclic GFR-binding peptide
  MOD_RES (26)..(27): Xaa is C or S

SEQ ID NO: 12367 - protein, 35 aa, Artificial Sequence
  Cyclic GFR-binding peptide
  MOD_RES (1)..(3)..(35): Xaa is C or S
XGXARVVMNEYQKYIVNSSDDIFLVSIPSLQTPAX

SEQ ID NO: 12368 - protein, 34 aa, Artificial Sequence; identical to SEQ ID NO: 1822
  Cyclic GFR-binding peptide
  MOD_RES (29)..(30): Xaa is C or S

SEQ ID NO: 12369 - protein, 29 aa, Artificial Sequence
  Cyclic GFR-binding peptide
SEVVMDQYNKLVVNNASDLYLISIASLRT

SEQ ID NO: 12370 - protein, 35 aa, Artificial Sequence
  Cyclic GFR-binding peptide
  MOD_RES (2)..(4): Xaa is C or S
HXGXARVVMNEYQKYIVNSSDDIFLVSIPSLQTPA

SEQ ID NO: 12371 - protein, 28 aa, Artificial Sequence
  Cyclic GFR-binding peptide
  MOD_RES (27)..(28): Xaa is C or S
ERYKKLVVKDYEDFYLMSIANLETPVXX

SEQ ID NO: 12372 - protein, 27 aa, Artificial Sequence
  Cyclic GFR-binding peptide
MDNSLQEVVNNASDYYVIPLPELRTPV

SEQ ID NO: 12373 - protein, 37 aa, Artificial Sequence; identical to SEQ ID NO: 1826
  Cyclic GFR-binding peptide
  MOD_RES (2)..(33)..(34): Xaa is C or S

SEQ ID NO: 12374 - protein, 41 aa, Artificial Sequence; identical to SEQ ID NO: 1827
  Cyclic GFR-binding peptide
  MOD_RES (2)..(4)..(35)..(36): Xaa is C or S

SEQ ID NO: 12375 - protein, 27 aa, Artificial Sequence
  Cyclic GFR-binding peptide
  MOD_RES (1)..(1): Xaa is C or S
XSRVVMNNSLQEIVNSSDDYYVVPLPE

SEQ ID NO: 12376 - protein, 25 aa, Artificial Sequence
  Cyclic GFR-binding peptide
VMNEYQKYIVNSSDDIFLVSIPSLQ

SEQ ID NO: 12377 - protein, 27 aa, Artificial Sequence
  Cyclic GFR-binding peptide
IMQYNKLIKPTKGILYLISIASLDQSV

SEQ ID NO: 12378 - protein, 39 aa, Artificial Sequence
  Cyclic GFR-binding peptide
  MOD_RES (1)..(3)..(34)..(35): Xaa is C or S
XKXSKVVMNSLQEVKPTRGVYYVIPLPELDQPVXXPSAS

SEQ ID NO: 12379 - protein, 33 aa, Artificial Sequence
  Cyclic GFR-binding peptide
  MOD_RES (1)..(3): Xaa is C or S
XGXSRVVMNEYQKYIVNSSDDIFLVSIPSLKTP

SEQ ID NO: 12380 - protein, 30 aa, Artificial Sequence
  Cyclic GFR-binding peptide
  MOD_RES (28)..(29): Xaa is C or S
VMEYQKYVKPTRGVIFLISIPSLDQPVXXP

SEQ ID NO: 12381 - protein, 33 aa, Artificial Sequence
  Cyclic GFR-binding peptide
  MOD_RES (31)..(32): Xaa is C or S
EVVMDNSLQEVVKENEDYYVMPLPELETPVXXA

SEQ ID NO: 12382 - protein, 31 aa, Artificial Sequence
  Cyclic GFR-binding peptide
  MOD_RES (29)..(30): Xaa is C or S
VMDEYQKYVVKENEDIFLMSIPSLETPVXXA

SEQ ID NO: 12383 - protein, 32 aa, Artificial Sequence
  Cyclic GFR-binding peptide
  MOD_RES (2)..(4): Xaa is C or S
HXGXSRVVMNEYQKYIVNSSDDIFLVSIPSLK

SEQ ID NO: 12384 - protein, 35 aa, Artificial Sequence; identical to SEQ ID NO: 1842
  Cyclic GFR-binding peptide
  MOD_RES (32)..(33): Xaa is C or S

SEQ ID NO: 12385 - protein, 31 aa, Artificial Sequence
  Cyclic GFR-binding peptide
  MOD_RES (27)..(28): Xaa is C or S
NEYQKYIVNSSDDIFLVSIPSLQTPAXXPKP

SEQ ID NO: 12386 - protein, 32 aa, Artificial Sequence; identical to SEQ ID NO: 1846
  Cyclic GFR-binding peptide
  MOD_RES (26)..(27): Xaa is C or S

SEQ ID NO: 12387 - protein, 26 aa, Artificial Sequence
  Cyclic GFR-binding peptide
NEYQKYIVNSSDDIFLVSIPSLKTPA

SEQ ID NO: 12388 - protein, 36 aa, Artificial Sequence; identical to SEQ ID NO: 1849
  Cyclic GFR-binding peptide
  MOD_RES (2)..(34)..(35): Xaa is C or S

SEQ ID NO: 12389 - protein, 32 aa, Artificial Sequence
  Cyclic GFR-binding peptide
  MOD_RES (31)..(32): Xaa is C or S
SKVVMNSLQEVKPTRGVYYVIPLPELDQPVXX

SEQ ID NO: 12390 - protein, 30 aa, Artificial Sequence
  Cyclic GFR-binding peptide
SKVIMNSLQEIKPTKGIYYLITLPELDQSV

SEQ ID NO: 12391 - protein, 29 aa, Artificial Sequence
  Cyclic GFR-binding peptide
  MOD_RES (26)..(27): Xaa is C or S
EYQKYVKPKRGVIFLISIPSLAQPVXXPA

SEQ ID NO: 12392 - protein, 30 aa, Artificial Sequence
  Cyclic GFR-binding peptide
  MOD_RES (1)..(3): Xaa is C or S
XKXSKVIMEYQKYIKPTKGIIFLISIPSLD

SEQ ID NO: 12393 - protein, 31 aa, Artificial Sequence
  Cyclic GFR-binding peptide
  MOD_RES (30)..(31): Xaa is C or S
VVMEEYQKYVVKDYEDIFLMSIPSLETPVXX

SEQ ID NO: 12394 - protein, 31 aa, Artificial Sequence; identical to SEQ ID NO: 1852
  Cyclic GFR-binding peptide
  MOD_RES (31)..(31): Xaa is C or S

SEQ ID NO: 12395 - protein, 34 aa, Artificial Sequence
  Cyclic GFR-binding peptide
  MOD_RES (31)..(32): Xaa is C or S
EVVMEEYQKYVVKDYEDIFLMSIPSLETPVXXAK

SEQ ID NO: 12396 - protein, 26 aa, Artificial Sequence
  Cyclic GFR-binding peptide
  MOD_RES (26)..(26): Xaa is C or S
RYKKLIVNSSDDFYLVSIANLQTPAX

SEQ ID NO: 12397 - protein, 32 aa, Artificial Sequence
  Cyclic GFR-binding peptide
  MOD_RES (27)..(27): Xaa is C or S
NNSLQEIVNSSDDYYVVPLPELKTPAXTPKTV

SEQ ID NO: 12398 - protein, 25 aa, Artificial Sequence
  Cyclic GFR-binding peptide
SRVIMNSLQEVKPKRGVYYLITLPE

SEQ ID NO: 12399 - protein, 26 aa, Artificial Sequence
  Cyclic GFR-binding peptide
VVMERYKKLVVKDYEDFYLMSIANLE

SEQ ID NO: 12400 - protein, 36 aa, Artificial Sequence
  Cyclic GFR-binding peptide
  MOD_RES (31)..(32): Xaa is C or S
SKVVMEYQKYVKPTRGVIFLISIPSLDQPVXXPSAS

SEQ ID NO: 12401 - protein, 24 aa, Artificial Sequence
  Cyclic GFR-binding peptide
VIMEYQKYVKPKRGVIFLISIPSL

SEQ ID NO: 12402 - protein, 27 aa, Artificial Sequence
  Cyclic GFR-binding peptide
  MOD_RES (27)..(27): Xaa is C or S
NQYNKLIVNSSDDLYLVSIASLQTPAX

SEQ ID NO: 12403 - protein, 35 aa, Artificial Sequence; identical to SEQ ID NO: 1861
  Cyclic GFR-binding peptide
  MOD_RES (30)..(31): Xaa is C or S

SEQ ID NO: 12404 - protein, 32 aa, Artificial Sequence
  Cyclic GFR-binding peptide
  MOD_RES (1)..(32): Xaa is C or S
XSKVIMNSLQEIKPTKGIYYVIPLPELDQSVX

SEQ ID NO: 12405 - protein, 32 aa, Artificial Sequence
  Cyclic GFR-binding peptide
  MOD_RES (2)..(4): Xaa is C or S
RXGXSEVVMDRYKKLVVNNASDFYLISIANLR

SEQ ID NO: 12406 - protein, 28 aa, Artificial Sequence
  Cyclic GFR-binding peptide
  MOD_RES (26)..(27): Xaa is C or S
EYQKYVVKENEDIFLMSIPSLETPVXXA

SEQ ID NO: 12407 - protein, 29 aa, Artificial Sequence
  Cyclic GFR-binding peptide
  MOD_RES (28)..(29): Xaa is C or S
IMRYKKLIKPTKGIFYLISIANLDQSVXX

SEQ ID NO: 12408 - protein, 35 aa, Artificial Sequence; identical to SEQ ID NO: 1863
  Cyclic GFR-binding peptide
  MOD_RES (1)..(33)..(34): Xaa is C or S

SEQ ID NO: 12409 - protein, 32 aa, Artificial Sequence; identical to SEQ ID NO: 1864
  Cyclic GFR-binding peptide
  MOD_RES (27)..(28): Xaa is C or S

SEQ ID NO: 12410 - protein, 22 aa, Artificial Sequence
  Cyclic GFR-binding peptide
MEQYNKLVVKDYEDLYLMSIAS

SEQ ID NO: 12411 - protein, 37 aa, Artificial Sequence
  Cyclic GFR-binding peptide
  MOD_RES (31)..(32): Xaa is C or S
SRVIMEYQKYVKPKRGVIFLISIPSLAQPVXXPAASA

SEQ ID NO: 12412 - protein, 31 aa, Artificial Sequence
  Cyclic GFR-binding peptide
  MOD_RES (26)..(27): Xaa is C or S
EYQKYIVNSSDDIFLVSIPSLQTPAXXPKPV

SEQ ID NO: 12413 - protein, 26 aa, Artificial Sequence
  Cyclic GFR-binding peptide
IMQYNKLIKPTKGILYLISIASLDQS

SEQ ID NO: 12414 - protein, 33 aa, Artificial Sequence
  Cyclic GFR-binding peptide
  MOD_RES (32)..(32): Xaa is C or S
SRVVMNEYQKYIVNSSDDIFLVSIPSLKTPAXT

SEQ ID NO: 12415 - protein, 32 aa, Artificial Sequence
  Cyclic GFR-binding peptide
  MOD_RES (1)..(1): Xaa is C or S
XSRVVMNNSLQEIVNSSDDYYLVTLPELKTPA

SEQ ID NO: 12416 - protein, 25 aa, Artificial Sequence
  Cyclic GFR-binding peptide
VMQYNKLVKPTRGVLYLISIASLDQ

SEQ ID NO: 12417 - protein, 34 aa, Artificial Sequence; identical to SEQ ID NO: 1874
  Cyclic GFR-binding peptide
  MOD_RES (1)..(32)..(33): Xaa is C or S

SEQ ID NO: 12418 - protein, 35 aa, Artificial Sequence
  Cyclic GFR-binding peptide
  MOD_RES (2)..(34): Xaa is C or S
GXSRVVMNNSLQEIVNSSDDYYVVPLPELKTPAXT

SEQ ID NO: 12419 - protein, 32 aa, Artificial Sequence
  Cyclic GFR-binding peptide
  MOD_RES (28)..(29): Xaa is C or S
MDEYQKYVVKENEDIFLMSIPSLETPVXXAKP

SEQ ID NO: 12420 - protein, 38 aa, Artificial Sequence; identical to SEQ ID NO: 1878
  Cyclic GFR-binding peptide
  MOD_RES (1)..(32)..(33): Xaa is C or S

SEQ ID NO: 12421 - protein, 28 aa, Artificial Sequence
  Cyclic GFR-binding peptide
VMNNSLQEIVNSSDDYYVVPLPELQTPA

SEQ ID NO: 12422 - protein, 35 aa, Artificial Sequence
  Cyclic GFR-binding peptide
  MOD_RES (2)..(4): Xaa is C or S
HXGXARVVMNNSLQEIVNSSDDYYLVTLPELQTPA

SEQ ID NO: 12423 - protein, 30 aa, Artificial Sequence
  Cyclic GFR-binding peptide
SRVVMNEYQKYIVNSSDDIFLVSIPSLKTP

SEQ ID NO: 12424 - protein, 26 aa, Artificial Sequence
  Cyclic GFR-binding peptide
DQYNKLVVNNASDLYLISIASLRTPV

SEQ ID NO: 12425 - protein, 29 aa, Artificial Sequence
  Cyclic GFR-binding peptide
  MOD_RES (1)..(1): Xaa is C or S
XSRVIMEYQKYVKPKRGVIFLISIPSLAQ

SEQ ID NO: 12426 - protein, 39 aa, Artificial Sequence; identical to SEQ ID NO: 1881
  Cyclic GFR-binding peptide
  MOD_RES (2)..(4)..(36): Xaa is C or S

SEQ ID NO: 12427 - protein, 37 aa, Artificial Sequence
  Cyclic GFR-binding peptide
  MOD_RES (1)..(32)..(33): Xaa is C or S
XSKVVMNSLQEVKPTRGVYYVIPLPELDQPVXXPSAS

SEQ ID NO: 12428 - protein, 35 aa, Artificial Sequence
  Cyclic GFR-binding peptide
  MOD_RES (1)..(3)..(34)..(35): Xaa is C or S
XKXSRVIMNSLQEVKPKRGVYYLITLPELAQPVXX

SEQ ID NO: 12429 - protein, 37 aa, Artificial Sequence; identical to SEQ ID NO: 1884
  Cyclic GFR-binding peptide
  MOD_RES (31)..(31): Xaa is C or S

SEQ ID NO: 12430 - protein, 30 aa, Artificial Sequence
  Cyclic GFR-binding peptide
SKVVMNSLQEVKPTRGVYYLITLPELDQPV

SEQ ID NO: 12431 - protein, 29 aa, Artificial Sequence
  Cyclic GFR-binding peptide
EVVMERYKKLVVKDYEDFYLMSIANLETP

SEQ ID NO: 12432 - protein, 24 aa, Artificial Sequence
  Cyclic GFR-binding peptide
IMNSLQEVKPKRGVYYLITLPELA

SEQ ID NO: 12433 - protein, 30 aa, Artificial Sequence
  Cyclic GFR-binding peptide
  MOD_RES (26)..(27): Xaa is C or S
NSLQEVVKDYEDYYVMPLPELETPVXXAKP

SEQ ID NO: 12434 - protein, 36 aa, Artificial Sequence
  Cyclic GFR-binding peptide
  MOD_RES (2)..(4)..(36): Xaa is C or S
RXGXGEVVMENSLQEVVKDYEDYYVMPLPELETPVX

SEQ ID NO: 12435 - protein, 37 aa, Artificial Sequence; identical to SEQ ID NO: 1889
  Cyclic GFR-binding peptide
  MOD_RES (1)..(3)..(35)..(36): Xaa is C or S

SEQ ID NO: 12436 - protein, 28 aa, Artificial Sequence
  Cyclic GFR-binding peptide
  MOD_RES (27)..(28): Xaa is C or S
MNSLQEIKPTKGIYYLITLPELDQSVXX

SEQ ID NO: 12437 - protein, 37 aa, Artificial Sequence; identical to SEQ ID NO: 1891
  Cyclic GFR-binding peptide
  MOD_RES (31)..(32): Xaa is C or S

SEQ ID NO: 12438 - protein, 31 aa, Artificial Sequence
  Cyclic GFR-binding peptide
  MOD_RES (2)..(4): Xaa is C or S
SXKXSKVIMNSLQEIKPTKGIYYVIPLPELD

SEQ ID NO: 12439 - protein, 35 aa, Artificial Sequence
  Cyclic GFR-binding peptide
  MOD_RES (2)..(34)..(35): Xaa is C or S
GXGEVVMDEYQKYVVKENEDIFLMSIPSLETPVXX

SEQ ID NO: 12440 - protein, 29 aa, Artificial Sequence
  Cyclic GFR-binding peptide
  MOD_RES (2)..(2): Xaa is C or S
KXSKVVMRYKKLVKPTRGVFYLISIANLD

SEQ ID NO: 12441 - protein, 31 aa, Artificial Sequence
  Cyclic GFR-binding peptide
  MOD_RES (1)..(3): Xaa is C or S
XKXSKVVMNSLQEVKPTRGVYYVIPLPELDQ

SEQ ID NO: 12442 - protein, 39 aa, Artificial Sequence
  Cyclic GFR-binding peptide
  MOD_RES (1)..(3)..(34)..(35): Xaa is C or S
XKXSKVIMEYQKYIKPTKGIIFLISIPSLDQSVXXPSAS

SEQ ID NO: 12443 - protein, 40 aa, Artificial Sequence; identical to SEQ ID NO: 1895
  Cyclic GFR-binding peptide
  MOD_RES (1)..(3)..(34)..(35): Xaa is C or S

SEQ ID NO: 12444 - protein, 34 aa, Artificial Sequence
  Cyclic GFR-binding peptide
  MOD_RES (28)..(29): Xaa is C or S
IMNSLQEVKPKRGVYYLITLPELAQPVXXPAASA

SEQ ID NO: 12445 - protein, 29 aa, Artificial Sequence
  Cyclic GFR-binding peptide
  MOD_RES (28)..(29): Xaa is C or S
MNNSLQEIVNSSDDYYLVTLPELKTPAXX

SEQ ID NO: 12446 - protein, 27 aa, Artificial Sequence
  Cyclic GFR-binding peptide
  MOD_RES (27)..(27): Xaa is C or S
MRYKKLIKPTKGIFYLISIANLDQSVX

SEQ ID NO: 12447 - protein, 26 aa, Artificial Sequence
  Cyclic GFR-binding peptide
DQYNKLVVKENEDLYLMSIASLETPV

SEQ ID NO: 12448 - protein, 29 aa, Artificial Sequence
  Cyclic GFR-binding peptide
  MOD_RES (27)..(28): Xaa is C or S
NNSLQEIVNSSDDYYVVPLPELQTPAXXP

SEQ ID NO: 12449 - protein, 24 aa, Artificial Sequence
  Cyclic GFR-binding peptide
NEYQKYIVNSSDDIFLVSIPSLKT

SEQ ID NO: 12450 - protein, 30 aa, Artificial Sequence
  Cyclic GFR-binding peptide
SRVIMNSLQEVKPKRGVYYLITLPELAQPV

SEQ ID NO: 12451 - protein, 39 aa, Artificial Sequence; identical to SEQ ID NO: 1899
  Cyclic GFR-binding peptide
  MOD_RES (1)..(3)..(35)..(36): Xaa is C or S

SEQ ID NO: 12452 - protein, 31 aa, Artificial Sequence; identical to SEQ ID NO: 1901
  Cyclic GFR-binding peptide
  MOD_RES (27)..(28): Xaa is C or S

SEQ ID NO: 12453 - protein, 31 aa, Artificial Sequence
  Cyclic GFR-binding peptide
  MOD_RES (27)..(27): Xaa is C or S
NNSLQEIVNSSDDYYLVTLPELKTPAXTPKT

SEQ ID NO: 12454 - protein, 26 aa, Artificial Sequence
  Cyclic GFR-binding peptide
EVVMDNSLQEVVKENEDYYVMPLPEL

SEQ ID NO: 12455 - protein, 29 aa, Artificial Sequence
  Cyclic GFR-binding peptide
  MOD_RES (28)..(28): Xaa is C or S
MNRYKKLIVNSSDDFYLVSIANLKTPAXT

SEQ ID NO: 12456 - protein, 26 aa, Artificial Sequence
  Cyclic GFR-binding peptide
MEEYQKYVVKDYEDIFLMSIPSLETP

SEQ ID NO: 12457 - protein, 33 aa, Artificial Sequence
  Cyclic GFR-binding peptide
  MOD_RES (2)..(4): Xaa is C or S
RXGXGEVVMDNSLQEVVKENEDYYLMTLPELET

SEQ ID NO: 12458 - protein, 32 aa, Artificial Sequence; identical to SEQ ID NO: 1907
  Cyclic GFR-binding peptide
  MOD_RES (26)..(27): Xaa is C or S

SEQ ID NO: 12459 - protein, 33 aa, Artificial Sequence; identical to SEQ ID NO: 1911
  Cyclic GFR-binding peptide
  MOD_RES (28)..(28): Xaa is C or S

SEQ ID NO: 12460 - protein, 23 aa, Artificial Sequence
  Cyclic GFR-binding peptide
MEEYQKYVVKDYEDIFLMSIPSL

SEQ ID NO: 12461 - protein, 33 aa, Artificial Sequence
  Cyclic GFR-binding peptide
  MOD_RES (1)..(3): Xaa is C or S
XGXSEVVMDRYKKLVVNNASDFYLISIANLRTP

SEQ ID NO: 12462 - protein, 26 aa, Artificial Sequence
  Cyclic GFR-binding peptide
VVMEEYQKYVVKDYEDIFLMSIPSLE

SEQ ID NO: 12463 - protein, 29 aa, Artificial Sequence
  Cyclic GFR-binding peptide
  MOD_RES (1)..(3): Xaa is C or S
XGXGEVVMEQYNKLVVKDYEDLYLMSIAS

SEQ ID NO: 12464 - protein, 23 aa, Artificial Sequence
  Cyclic GFR-binding peptide
MEYQKYVKPKRGVIFLISIPSLA

SEQ ID NO: 12465 - protein, 28 aa, Artificial Sequence
  Cyclic GFR-binding peptide
  MOD_RES (1)..(1): Xaa is C or S
XSKVIMNSLQEIKPTKGIYYLITLPELD

SEQ ID NO: 12466 - protein, 30 aa, Artificial Sequence; identical to SEQ ID NO: 1916
  Cyclic GFR-binding peptide
  MOD_RES (29)..(30): Xaa is C or S

SEQ ID NO: 12467 - protein, 21 aa, Artificial Sequence
  Cyclic GFR-binding peptide
NSLQEVKPKRGVYYLITLPEL

SEQ ID NO: 12468 - protein, 32 aa, Artificial Sequence
  Cyclic GFR-binding peptide
  MOD_RES (32)..(32): Xaa is C or S
GEVVMDNSLQEVVKENEDYYLMTLPELETPVX

SEQ ID NO: 12469 - protein, 41 aa, Artificial Sequence
  Cyclic GFR-binding peptide
  MOD_RES (2)..(4)..(36)..(37): Xaa is C or S
RXGXGEVVMDNSLQEVVKENEDYYVMPLPELETPVXXAKPI

SEQ ID NO: 12470 - protein, 27 aa, Artificial Sequence
  Cyclic GFR-binding peptide
VMRYKKLVKPTRGVFYLISIANLDQPV

SEQ ID NO: 12471 - protein, 28 aa, Artificial Sequence
  Cyclic GFR-binding peptide
  MOD_RES (28)..(28): Xaa is C or S
MNEYQKYIVNSSDDIFLVSIPSLKTPAX

SEQ ID NO: 12472 - protein, 29 aa, Artificial Sequence
  Cyclic GFR-binding peptide
  MOD_RES (1)..(1): Xaa is C or S
XSEVVMDNSLQEVVNNASDYYVIPLPELR

SEQ ID NO: 12473 - protein, 32 aa, Artificial Sequence; identical to SEQ ID NO: 1920
  Cyclic GFR-binding peptide
  MOD_RES (26)..(27): Xaa is C or S

SEQ ID NO: 12474 - protein, 36 aa, Artificial Sequence; identical to SEQ ID NO: 1924
  Cyclic GFR-binding peptide
  MOD_RES (30)..(31): Xaa is C or S

SEQ ID NO: 12475 - protein, 30 aa, Artificial Sequence
  Cyclic GFR-binding peptide
  MOD_RES (28)..(29): Xaa is C or S
MEEYQKYVVKDYEDIFLMSIPSLETPVXXA

SEQ ID NO: 12476 - protein, 33 aa, Artificial Sequence
  Cyclic GFR-binding peptide
  MOD_RES (1)..(33): Xaa is C or S
XARVVMNEYQKYIVNSSDDIFLVSIPSLQTPAX

SEQ ID NO: 12477 - protein, 27 aa, Artificial Sequence
  Cyclic GFR-binding peptide
  MOD_RES (27)..(27): Xaa is C or S
DQYNKLVVKENEDLYLMSIASLETPVX

SEQ ID NO: 12478 - protein, 28 aa, Artificial Sequence
  Cyclic GFR-binding peptide
SRVVMNEYQKYIVNSSDDIFLVSIPSLK

SEQ ID NO: 12479 - protein, 31 aa, Artificial Sequence; identical to SEQ ID NO: 1933
  Cyclic GFR-binding peptide
  MOD_RES (2)..(4): Xaa is C or S

SEQ ID NO: 12480 - protein, 37 aa, Artificial Sequence; identical to SEQ ID NO: 1934
  Cyclic GFR-binding peptide
  MOD_RES (1)..(3)..(35)..(36): Xaa is C or S

SEQ ID NO: 12481 - protein, 30 aa, Artificial Sequence; identical to SEQ ID NO: 1935
  Cyclic GFR-binding peptide
  MOD_RES (27)..(28): Xaa is C or S

SEQ ID NO: 12482 - protein, 32 aa, Artificial Sequence
  Cyclic GFR-binding peptide
  MOD_RES (28)..(29): Xaa is C or S
MNNSLQEIVNSSDDYYVVPLPELKTPAXXPKP

SEQ ID NO: 12483 - protein, 39 aa, Artificial Sequence
  Cyclic GFR-binding peptide
  MOD_RES (2)..(4)..(36)..(37): Xaa is C or S
RXGXGEVVMDEYQKYVVKENEDIFLMSIPSLETPVXXAK

SEQ ID NO: 12484 - protein, 24 aa, Artificial Sequence
  Cyclic GFR-binding peptide
RVIMNSLQEVKPKRGVYYLITLPE

SEQ ID NO: 12485 - protein, 27 aa, Artificial Sequence
  Cyclic GFR-binding peptide
  MOD_RES (2)..(2): Xaa is C or S
KXSKVVMRYKKLVKPTRGVFYLISIAN

SEQ ID NO: 12486 - protein, 27 aa, Artificial Sequence
  Cyclic GFR-binding peptide
  MOD_RES (26)..(27): Xaa is C or S
EYQKYVKPKRGVIFLISIPSLAQPVXX

SEQ ID NO: 12487 - protein, 35 aa, Artificial Sequence
  Cyclic GFR-binding peptide
  MOD_RES (31)..(31): Xaa is C or S
RVVMNNSLQEIVNSSDDYYVVPLPELKTPAXTPKT

SEQ ID NO: 12488 - protein, 42 aa, Artificial Sequence
  Cyclic GFR-binding peptide
  MOD_RES (2)..(4)..(36)..(37): Xaa is C or S
RXGXSEVVMDNSLQEVVNNASDYYVIPLPELRTPVXXTPPTS

SEQ ID NO: 12489 - protein, 27 aa, Artificial Sequence
  Cyclic GFR-binding peptide
MENSLQEVVKDYEDYYLMTLPELETPV

SEQ ID NO: 12490 - protein, 34 aa, Artificial Sequence; identical to SEQ ID NO: 1944
  Cyclic GFR-binding peptide
  MOD_RES (31)..(32): Xaa is C or S

SEQ ID NO: 12491 - protein, 31 aa, Artificial Sequence
  Cyclic GFR-binding peptide
  MOD_RES (27)..(27): Xaa is C or S
NEYQKYIVNSSDDIFLVSIPSLKTPAXTPKT

SEQ ID NO: 12492 - protein, 42 aa, Artificial Sequence
  Cyclic GFR-binding peptide
  MOD_RES (2)..(4)..(36)..(37): Xaa is C or S
HXGXSRVVMNNSLQEIVNSSDDYYLVTLPELKTPAXXPKPVY

SEQ ID NO: 12493 - protein, 28 aa, Artificial Sequence
  Cyclic GFR-binding peptide
VVMDRYKKLVVKENEDFYLMSIANLETP

SEQ ID NO: 12494 - protein, 26 aa, Artificial Sequence
  Cyclic GFR-binding peptide
  MOD_RES (1)..(1): Xaa is C or S
XSKVIMQYNKLIKPTKGILYLISIAS

SEQ ID NO: 12495 - protein, 31 aa, Artificial Sequence; identical to SEQ ID NO: 1951
  Cyclic GFR-binding peptide
  MOD_RES (31)..(31): Xaa is C or S

SEQ ID NO: 12496 - protein, 29 aa, Artificial Sequence
  Cyclic GFR-binding peptide
GEVVMDRYKKLVVKENEDFYLMSIANLET

SEQ ID NO: 12497 - protein, 29 aa, Artificial Sequence
  Cyclic GFR-binding peptide
  MOD_RES (2)..(4): Xaa is C or S
SXKXSKVVMNSLQEVKPTRGVYYVIPLPE

SEQ ID NO: 12498 - protein, 36 aa, Artificial Sequence
  Cyclic GFR-binding peptide
  MOD_RES (30)..(31): Xaa is C or S
VVMNNSLQEIVNSSDDYYLVTLPELKTPAXXPKPVY

SEQ ID NO: 12499 - protein, 23 aa, Artificial Sequence
  Cyclic GFR-binding peptide
NSLQEVKPTRGVYYVIPLPELDQ

SEQ ID NO: 12500 - protein, 31 aa, Artificial Sequence; identical to SEQ ID NO: 1954
  Cyclic GFR-binding peptide
  MOD_RES (27)..(27): Xaa is C or S

SEQ ID NO: 12501 - protein, 34 aa, Artificial Sequence
  Cyclic GFR-binding peptide
  MOD_RES (30)..(31): Xaa is C or S
KVVMEYQKYVKPTRGVIFLISIPSLDQPVXXPSA

SEQ ID NO: 12502 - protein, 25 aa, Artificial Sequence
  Cyclic GFR-binding peptide
EVVMEQYNKLVVKDYEDLYLMSIAS

SEQ ID NO: 12503 - protein, 30 aa, Artificial Sequence
  Cyclic GFR-binding peptide
  MOD_RES (29)..(30): Xaa is C or S
VMDRYKKLVVNNASDFYLISIANLRTPVXX

SEQ ID NO: 12504 - protein, 31 aa, Artificial Sequence
  Cyclic GFR-binding peptide
  MOD_RES (2)..(2): Xaa is C or S
GXARVVMNNSLQEIVNSSDDYYLVTLPELQT

SEQ ID NO: 12505 - protein, 25 aa, Artificial Sequence
  Cyclic GFR-binding peptide
MDRYKKLVVKENEDFYLMSIANLET

SEQ ID NO: 12506 - protein, 28 aa, Artificial Sequence
  Cyclic GFR-binding peptide
EVVMENSLQEVVKDYEDYYVMPLPELET

SEQ ID NO: 12507 - protein, 41 aa, Artificial Sequence
  Cyclic GFR-binding peptide
  MOD_RES (2)..(4)..(35)..(36): Xaa is C or S
SXKXSRVIMNSLQEVKPKRGVYYVIPLPELAQPVXXPAASA

SEQ ID NO: 12508 - protein, 32 aa, Artificial Sequence; identical to SEQ ID NO: 1958
  Cyclic GFR-binding peptide
  MOD_RES (29)..(30): Xaa is C or S

SEQ ID NO: 12509 - protein, 24 aa, Artificial Sequence
  Cyclic GFR-binding peptide
VVMNQYNKLIVNSSDDLYLVSIAS

SEQ ID NO: 12510 - protein, 38 aa, Artificial Sequence
  Cyclic GFR-binding peptide
  MOD_RES (2)..(34)..(35): Xaa is C or S
GXGEVVMEEYQKYVVKDYEDIFLMSIPSLETPVXXAKP

SEQ ID NO: 12511 - protein, 33 aa, Artificial Sequence; identical to SEQ ID NO: 1966
  Cyclic GFR-binding peptide
  MOD_RES (29)..(30): Xaa is C or S

SEQ ID NO: 12512 - protein, 30 aa, Artificial Sequence
  Cyclic GFR-binding peptide
  MOD_RES (2)..(4): Xaa is C or S
HXGXARVVMNNSLQEIVNSSDDYYLVTLPE

SEQ ID NO: 12513 - protein, 29 aa, Artificial Sequence
  Cyclic GFR-binding peptide
KVVMNSLQEVKPTRGVYYVIPLPELDQPV

SEQ ID NO: 12514 - protein, 38 aa, Artificial Sequence; identical to SEQ ID NO: 1972
  Cyclic GFR-binding peptide
  MOD_RES (32)..(33): Xaa is C or S

SEQ ID NO: 12515 - protein, 28 aa, Artificial Sequence
  Cyclic GFR-binding peptide
  MOD_RES (27)..(28): Xaa is C or S
NQYNKLIVNSSDDLYLVSIASLQTPAXX

SEQ ID NO: 12516 - protein, 27 aa, Artificial Sequence
  Cyclic GFR-binding peptide
  MOD_RES (26)..(27): Xaa is C or S
QYNKLIKPTKGILYLISIASLDQSVXX

SEQ ID NO: 12517 - protein, 28 aa, Artificial Sequence
  Cyclic GFR-binding peptide
  MOD_RES (2)..(2): Xaa is C or S
GXSEVVMDNSLQEVVNNASDYYVIPLPE

SEQ ID NO: 12518 - protein, 35 aa, Artificial Sequence
  Cyclic GFR-binding peptide
  MOD_RES (1)..(3)..(35): Xaa is C or S
XGXSRVVMNNSLQEIVNSSDDYYVVPLPELKTPAX

SEQ ID NO: 12519 - protein, 35 aa, Artificial Sequence
  Cyclic GFR-binding peptide
  MOD_RES (1)..(33)..(34): Xaa is C or S
XARVVMNNSLQEIVNSSDDYYVVPLPELQTPAXXP

SEQ ID NO: 12520 - protein, 28 aa, Artificial Sequence
  Cyclic GFR-binding peptide
VMEQYNKLVVKDYEDLYLMSIASLETPV

SEQ ID NO: 12521 - protein, 38 aa, Artificial Sequence
  Cyclic GFR-binding peptide
  MOD_RES (1)..(3)..(35): Xaa is C or S
XGXSRVVMNEYQKYIVNSSDDIFLVSIPSLKTPAXTPK

SEQ ID NO: 12522 - protein, 40 aa, Artificial Sequence
  Cyclic GFR-binding peptide
  MOD_RES (2)..(34)..(35): Xaa is C or S
GXSRVVMNNSLQEIVNSSDDYYLVTLPELKTPAXXPKPVY

SEQ ID NO: 12523 - protein, 34 aa, Artificial Sequence
  Cyclic GFR-binding peptide
  MOD_RES (29)..(30): Xaa is C or S
VMNNSLQEIVNSSDDYYVVPLPELKTPAXXPKPV

SEQ ID NO: 12524 - protein, 27 aa, Artificial Sequence
  Cyclic GFR-binding peptide
VMDQYNKLVVNNASDLYLISIASLRTP

SEQ ID NO: 12525 - protein, 37 aa, Artificial Sequence
  Cyclic GFR-binding peptide
  MOD_RES (1)..(33)..(34): Xaa is C or S
XGEVVMENSLQEVVKDYEDYYVMPLPELETPVXXAKP

SEQ ID NO: 12526 - protein, 29 aa, Artificial Sequence
  Cyclic GFR-binding peptide
  MOD_RES (1)..(3): Xaa is C or S
XGXARVVMNRYKKLIVNSSDDFYLVSIAN

SEQ ID NO: 12527 - protein, 31 aa, Artificial Sequence
  Cyclic GFR-binding peptide
  MOD_RES (29)..(30): Xaa is C or S
VIMNSLQEIKPTKGIYYLITLPELDQSVXXP

SEQ ID NO: 12528 - protein, 27 aa, Artificial Sequence
  Cyclic GFR-binding peptide
VMDNSLQEVVKENEDYYLMTLPELETP

SEQ ID NO: 12529 - protein, 29 aa, Artificial Sequence
  Cyclic GFR-binding peptide
  MOD_RES (26)..(27): Xaa is C or S
NSLQEIKPTKGIYYLITLPELDQSVXXPS

SEQ ID NO: 12530 - protein, 30 aa, Artificial Sequence; identical to SEQ ID NO: 1982
  Cyclic GFR-binding peptide
  MOD_RES (2)..(4): Xaa is C or S

SEQ ID NO: 12531 - protein, 40 aa, Artificial Sequence
  Cyclic GFR-binding peptide
  MOD_RES (1)..(3)..(34)..(35): Xaa is C or S
XKXSKVVMNSLQEVKPTRGVYYVIPLPELDQPVXXPSASA

SEQ ID NO: 12532 - protein, 33 aa, Artificial Sequence
  Cyclic GFR-binding peptide
  MOD_RES (28)..(29): Xaa is C or S
MDEYQKYVVKENEDIFLMSIPSLETPVXXAKPI

SEQ ID NO: 12533 - protein, 29 aa, Artificial Sequence
  Cyclic GFR-binding peptide
GEVVMERYKKLVVKDYEDFYLMSIANLET

SEQ ID NO: 12534 - protein, 35 aa, Artificial Sequence
  Cyclic GFR-binding peptide
  MOD_RES (1)..(3)..(35): Xaa is C or S
XGXSRVVMNEYQKYIVNSSDDIFLVSIPSLKTPAX

SEQ ID NO: 12535 - protein, 32 aa, Artificial Sequence
  Cyclic GFR-binding peptide
  MOD_RES (31)..(32): Xaa is C or S
EVVMEEYQKYVVKDYEDIFLMSIPSLETPVXX

SEQ ID NO: 12536 - protein, 28 aa, Artificial Sequence
  Cyclic GFR-binding peptide
  MOD_RES (28)..(28): Xaa is C or S
IMRYKKLIKPTKGIFYLISIANLDQSVX

SEQ ID NO: 12537 - protein, 31 aa, Artificial Sequence
  Cyclic GFR-binding peptide
  MOD_RES (26)..(27): Xaa is C or S
NSLQEVKPTRGVYYVIPLPELDQPVXXPSAS

SEQ ID NO: 12538 - protein, 36 aa, Artificial Sequence; identical to SEQ ID NO: 1990
  Cyclic GFR-binding peptide
  MOD_RES (2)..(4)..(35)..(36): Xaa is C or S

SEQ ID NO: 12539 - protein, 24 aa, Artificial Sequence
  Cyclic GFR-binding peptide
NSLQEIKPTKGIYYVIPLPELDQS

SEQ ID NO: 12540 - protein, 29 aa, Artificial Sequence
  Cyclic GFR-binding peptide
  MOD_RES (2)..(2): Xaa is C or S
GXGEVVMENSLQEVVKDYEDYYLMTLPEL

SEQ ID NO: 12541 - protein, 34 aa, Artificial Sequence; identical to SEQ ID NO: 1995
  Cyclic GFR-binding peptide
  MOD_RES (1)..(32)..(33): Xaa is C or S

SEQ ID NO: 12542 - protein, 29 aa, Artificial Sequence
  Cyclic GFR-binding peptide
  MOD_RES (1)..(3): Xaa is C or S
XKXSKVVMEYQKYVKPTRGVIFLISIPSL

SEQ ID NO: 12543 - protein, 26 aa, Artificial Sequence
  Cyclic GFR-binding peptide
  MOD_RES (1)..(1): Xaa is C or S
XSKVVMEYQKYVKPTRGVIFLISIPS

SEQ ID NO: 12544 - protein, 27 aa, Artificial Sequence
  Cyclic GFR-binding peptide
IMRYKKLIKPTKGIFYLISIANLDQSV

SEQ ID NO: 12545 - protein, 38 aa, Artificial Sequence
  Cyclic GFR-binding peptide
  MOD_RES (2)..(33)..(34): Xaa is C or S
KXSRVIMNSLQEVKPKRGVYYLITLPELAQPVXXPAAS

SEQ ID NO: 12546 - protein, 25 aa, Artificial Sequence
  Cyclic GFR-binding peptide
EVVMENSLQEVVKDYEDYYVMPLPE

SEQ ID NO: 12547 - protein, 31 aa, Artificial Sequence
  Cyclic GFR-binding peptide
  MOD_RES (28)..(29): Xaa is C or S
MENSLQEVVKDYEDYYLMTLPELETPVXXAK

SEQ ID NO: 12548 - protein, 33 aa, Artificial Sequence
  Cyclic GFR-binding peptide
  MOD_RES (29)..(30): Xaa is C or S
VMDRYKKLVVNNASDFYLISIANLRTPVXXTPP

SEQ ID NO: 12549 - protein, 29 aa, Artificial Sequence
  Cyclic GFR-binding peptide
  MOD_RES (1)..(3): Xaa is C or S
XGXGEVVMDNSLQEVVKENEDYYLMTLPE

SEQ ID NO: 12550 - protein, 25 aa, Artificial Sequence
  Cyclic GFR-binding peptide
EVVMDNSLQEVVNNASDYYLITLPE

SEQ ID NO: 12551 - protein, 35 aa, Artificial Sequence
  Cyclic GFR-binding peptide
  MOD_RES (1)..(3)..(35): Xaa is C or S
XGXSEVVMDQYNKLVVNNASDLYLISIASLRTPVX

SEQ ID NO: 12552 - protein, 26 aa, Artificial Sequence
  Cyclic GFR-binding peptide
SKVIMNSLQEIKPTKGIYYLITLPEL

SEQ ID NO: 12553 - protein, 21 aa, Artificial Sequence
  Cyclic GFR-binding peptide
MNSLQEIKPTKGIYYVIPLPE

SEQ ID NO: 12554 - protein, 20 aa, Artificial Sequence
  Cyclic GFR-binding peptide
RYKKLVVKENEDFYLMSIAN

SEQ ID NO: 12555 - protein, 33 aa, Artificial Sequence; identical to SEQ ID NO: 2009
  Cyclic GFR-binding peptide
  MOD_RES (28)..(29): Xaa is C or S

SEQ ID NO: 12556 - protein, 27 aa, Artificial Sequence
  Cyclic GFR-binding peptide
  MOD_RES (27)..(27): Xaa is C or S
MQYNKLVKPTRGVLYLISIASLDQPVX

SEQ ID NO: 12557 - protein, 26 aa, Artificial Sequence
  Cyclic GFR-binding peptide
  MOD_RES (26)..(26): Xaa is C or S
NSLQEVVKDYEDYYVMPLPELETPVX

SEQ ID NO: 12558 - protein, 22 aa, Artificial Sequence
  Cyclic GFR-binding peptide
RYKKLIKPTKGIFYLISIANLD

SEQ ID NO: 12559 - protein, 26 aa, Artificial Sequence
  Cyclic GFR-binding peptide
VMDEYQKYVVKENEDIFLMSIPSLET

SEQ ID NO: 12560 - protein, 36 aa, Artificial Sequence; identical to SEQ ID NO: 2013
  Cyclic GFR-binding peptide
  MOD_RES (1)..(3)..(35)..(36): Xaa is C or S

SEQ ID NO: 12561 - protein, 24 aa, Artificial Sequence
  Cyclic GFR-binding peptide
VVMEEYQKYVVKDYEDIFLMSIPS

SEQ ID NO: 12562 - protein, 31 aa, Artificial Sequence
  Cyclic GFR-binding peptide
  MOD_RES (1)..(1): Xaa is C or S
XSKVIMEYQKYIKPTKGIIFLISIPSLDQSV

SEQ ID NO: 12563 - protein, 33 aa, Artificial Sequence; identical to SEQ ID NO: 2016
  Cyclic GFR-binding peptide
  MOD_RES (2)..(4): Xaa is C or S

SEQ ID NO: 12564 - protein, 24 aa, Artificial Sequence
  Cyclic GFR-binding peptide
KVIMNSLQEIKPTKGIYYVIPLPE

SEQ ID NO: 12565 - protein, 32 aa, Artificial Sequence; identical to SEQ ID NO: 2018
  Cyclic GFR-binding peptide
  MOD_RES (27)..(28): Xaa is C or S

SEQ ID NO: 12566 - protein, 33 aa, Artificial Sequence
  Cyclic GFR-binding peptide
  MOD_RES (30)..(31): Xaa is C or S
VVMEEYQKYVVKDYEDIFLMSIPSLETPVXXAK

SEQ ID NO: 12567 - protein, 23 aa, Artificial Sequence
  Cyclic GFR-binding peptide
NSLQEVKPKRGVYYLITLPELAQ

SEQ ID NO: 12568 - protein, 30 aa, Artificial Sequence; identical to SEQ ID NO: 2022
  Cyclic GFR-binding peptide
  MOD_RES (1)..(3): Xaa is C or S

SEQ ID NO: 12569 - protein, 31 aa, Artificial Sequence; identical to SEQ ID NO: 2023
  Cyclic GFR-binding peptide
  MOD_RES (28)..(29): Xaa is C or S

SEQ ID NO: 12570 - protein, 22 aa, Artificial Sequence
  Cyclic GFR-binding peptide
EYQKYVKPKRGVIFLISIPSLA

SEQ ID NO: 12571 - protein, 37 aa, Artificial Sequence
  Cyclic GFR-binding peptide
  MOD_RES (32)..(33): Xaa is C or S
SRVVMNNSLQEIVNSSDDYYLVTLPELKTPAXXPKPV

SEQ ID NO: 12572 - protein, 27 aa, Artificial Sequence
  Cyclic GFR-binding peptide
  MOD_RES (27)..(27): Xaa is C or S
NEYQKYIVNSSDDIFLVSIPSLKTPAX

SEQ ID NO: 12573 - protein, 33 aa, Artificial Sequence
  Cyclic GFR-binding peptide
  MOD_RES (30)..(31): Xaa is C or S
RVIMNSLQEVKPKRGVYYLITLPELAQPVXXPA

SEQ ID NO: 12574 - protein, 24 aa, Artificial Sequence
  Cyclic GFR-binding peptide
MDRYKKLVVNNASDFYLISIANLR

SEQ ID NO: 12575 - protein, 23 aa, Artificial Sequence
  Cyclic GFR-binding peptide
VIMQYNKLVKPKRGVLYLISIAS

SEQ ID NO: 12576 - protein, 36 aa, Artificial Sequence
  Cyclic GFR-binding peptide
  MOD_RES (2)..(34)..(35): Xaa is C or S
GXGEVVMDEYQKYVVKENEDIFLMSIPSLETPVXXA

SEQ ID NO: 12577 - protein, 36 aa, Artificial Sequence; identical to SEQ ID NO: 2028
  Cyclic GFR-binding peptide
  MOD_RES (30)..(30): Xaa is C or S

SEQ ID NO: 12578 - protein, 37 aa, Artificial Sequence
  Cyclic GFR-binding peptide
  MOD_RES (2)..(33)..(34): Xaa is C or S
KXSKVVMNSLQEVKPTRGVYYVIPLPELDQPVXXPSA

SEQ ID NO: 12579 - protein, 27 aa, Artificial Sequence
  Cyclic GFR-binding peptide
MDRYKKLVVKENEDFYLMSIANLETPV

SEQ ID NO: 12580 - protein, 29 aa, Artificial Sequence
  Cyclic GFR-binding peptide
GEVVMEQYNKLVVKDYEDLYLMSIASLET

SEQ ID NO: 12581 - protein, 40 aa, Artificial Sequence; identical to SEQ ID NO: 2034
  Cyclic GFR-binding peptide
  MOD_RES (2)..(4)..(36)..(37): Xaa is C or S

SEQ ID NO: 12582 - protein, 31 aa, Artificial Sequence
  Cyclic GFR-binding peptide
  MOD_RES (30)..(31): Xaa is C or S
RVIMNSLQEVKPKRGVYYLITLPELAQPVXX

SEQ ID NO: 12583 - protein, 24 aa, Artificial Sequence
  Cyclic GFR-binding peptide
VMDNSLQEVVNNASDYYVIPLPEL

SEQ ID NO: 12584 - protein, 24 aa, Artificial Sequence
  Cyclic GFR-binding peptide
VMENSLQEVVKDYEDYYVMPLPEL

SEQ ID NO: 12585 - protein, 24 aa, Artificial Sequence
  Cyclic GFR-binding peptide
NNSLQEIVNSSDDYYVVPLPELKT

SEQ ID NO: 12586 - protein, 34 aa, Artificial Sequence
  Cyclic GFR-binding peptide
  MOD_RES (30)..(31): Xaa is C or S
VVMNNSLQEIVNSSDDYYVVPLPELQTPAXXPKP

SEQ ID NO: 12587 - protein, 34 aa, Artificial Sequence
  Cyclic GFR-binding peptide
  MOD_RES (31)..(32): Xaa is C or S
SRVIMNSLQEVKPKRGVYYLITLPELAQPVXXPA

SEQ ID NO: 12588 - protein, 31 aa, Artificial Sequence; identical to SEQ ID NO: 2039
  Cyclic GFR-binding peptide
  MOD_RES (30)..(31): Xaa is C or S

SEQ ID NO: 12589 - protein, 37 aa, Artificial Sequence
  Cyclic GFR-binding peptide
  MOD_RES (1)..(33)..(34): Xaa is C or S
XSEVVMDQYNKLVVNNASDLYLISIASLRTPVXXTPP

SEQ ID NO: 12590 - protein, 31 aa, Artificial Sequence
  Cyclic GFR-binding peptide
  MOD_RES (26)..(27): Xaa is C or S
NSLQEVVKDYEDYYVMPLPELETPVXXAKPI

SEQ ID NO: 12591 - protein, 27 aa, Artificial Sequence
  Cyclic GFR-binding peptide
  MOD_RES (27)..(27): Xaa is C or S
NNSLQEIVNSSDDYYVVPLPELKTPAX

SEQ ID NO: 12592 - protein, 31 aa, Artificial Sequence
  Cyclic GFR-binding peptide
  MOD_RES (2)..(4): Xaa is C or S
SXKXSKVIMEYQKYIKPTKGIIFLISIPSLD

SEQ ID NO: 12593 - protein, 36 aa, Artificial Sequence
  Cyclic GFR-binding peptide
  MOD_RES (1)..(33)..(34): Xaa is C or S
XSRVVMNNSLQEIVNSSDDYYLVTLPELKTPAXXPK

SEQ ID NO: 12594 - protein, 37 aa, Artificial Sequence; identical to SEQ ID NO: 2046
  Cyclic GFR-binding peptide
  MOD_RES (2)..(4)..(36)..(37): Xaa is C or S

SEQ ID NO: 12595 - protein, 39 aa, Artificial Sequence
  Cyclic GFR-binding peptide
  MOD_RES (1)..(33)..(34): Xaa is C or S
XARVVMNNSLQEIVNSSDDYYLVTLPELQTPAXXPKPVT

SEQ ID NO: 12596 - protein, 29 aa, Artificial Sequence
  Cyclic GFR-binding peptide
  MOD_RES (2)..(2): Xaa is C or S
GXSRVVMNNSLQEIVNSSDDYYLVTLPEL

SEQ ID NO: 12597 - protein, 25 aa, Artificial Sequence
  Cyclic GFR-binding peptide
EVVMDNSLQEVVKENEDYYLMTLPE

SEQ ID NO: 12598 - protein, 25 aa, Artificial Sequence
  Cyclic GFR-binding peptide
RVVMNNSLQEIVNSSDDYYLVTLPE

SEQ ID NO: 12599 - protein, 22 aa, Artificial Sequence
  Cyclic GFR-binding peptide
VMEYQKYVKPTRGVIFLISIPS

SEQ ID NO: 12600 - protein, 31 aa, Artificial Sequence; identical to SEQ ID NO: 2052
  Cyclic GFR-binding peptide
  MOD_RES (28)..(29): Xaa is C or S

SEQ ID NO: 12601 - protein, 31 aa, Artificial Sequence
  Cyclic GFR-binding peptide
  MOD_RES (2)..(4): Xaa is C or S
RXGXSEVVMDNSLQEVVNNASDYYLITLPEL

SEQ ID NO: 12602 - protein, 22 aa, Artificial Sequence
  Cyclic GFR-binding peptide
MRYKKLVKPTRGVFYLISIANL

SEQ ID NO: 12603 - protein, 35 aa, Artificial Sequence
  Cyclic GFR-binding peptide
  MOD_RES (29)..(30): Xaa is C or S
VMNNSLQEIVNSSDDYYVVPLPELQTPAXXPKPVT

SEQ ID NO: 12604 - protein, 32 aa, Artificial Sequence
  Cyclic GFR-binding peptide
  MOD_RES (27)..(27): Xaa is C or S
NNSLQEIVNSSDDYYLVTLPELKTPAXTPKTV

SEQ ID NO: 12605 - protein, 25 aa, Artificial Sequence
  Cyclic GFR-binding peptide
EYQKYIVNSSDDIFLVSIPSLQTPA

SEQ ID NO: 12606 - protein, 26 aa, Artificial Sequence
  Cyclic GFR-binding peptide
RVVMNQYNKLIVNSSDDLYLVSIASL

SEQ ID NO: 12607 - protein, 32 aa, Artificial Sequence; identical to SEQ ID NO: 2059
  Cyclic GFR-binding peptide
  MOD_RES (29)..(30): Xaa is C or S

SEQ ID NO: 12608 - protein, 39 aa, Artificial Sequence
  Cyclic GFR-binding peptide
  MOD_RES (2)..(34)..(35): Xaa is C or S
GXGEVVMENSLQEVVKDYEDYYLMTLPELETPVXXAKPI

SEQ ID NO: 12609 - protein, 42 aa, Artificial Sequence; identical to SEQ ID NO: 2061
  Cyclic GFR-binding peptide
  MOD_RES (2)..(4)..(36)..(37): Xaa is C or S

SEQ ID NO: 12610 - protein, 33 aa, Artificial Sequence; identical to SEQ ID NO: 2064
  Cyclic GFR-binding peptide
  MOD_RES (27)..(28): Xaa is C or S

SEQ ID NO: 12611 - protein, 32 aa, Artificial Sequence
  Cyclic GFR-binding peptide
  MOD_RES (30)..(31): Xaa is C or S
VVMNNSLQEIVNSSDDYYLVTLPELKTPAXXP

SEQ ID NO: 12612 - protein, 25 aa, Artificial Sequence
  Cyclic GFR-binding peptide
NQYNKLIVNSSDDLYLVSIASLQTP

SEQ ID NO: 12613 - protein, 30 aa, Artificial Sequence
  Cyclic GFR-binding peptide
  MOD_RES (30)..(30): Xaa is C or S
VVMDNSLQEVVNNASDYYVIPLPELRTPVX

SEQ ID NO: 12614 - protein, 31 aa, Artificial Sequence
  Cyclic GFR-binding peptide
  MOD_RES (29)..(30): Xaa is C or S
VMNEYQKYIVNSSDDIFLVSIPSLKTPAXXP

SEQ ID NO: 12615 - protein, 33 aa, Artificial Sequence; identical to SEQ ID NO: 2067
  Cyclic GFR-binding peptide
  MOD_RES (1)..(32)..(33): Xaa is C or S

SEQ ID NO: 12616 - protein, 28 aa, Artificial Sequence
  Cyclic GFR-binding peptide
  MOD_RES (26)..(27): Xaa is C or S
QYNKLIVNSSDDLYLVSIASLKTPAXXP

SEQ ID NO: 12617 - protein, 29 aa, Artificial Sequence
  Cyclic GFR-binding peptide
  MOD_RES (27)..(28): Xaa is C or S
NEYQKYIVNSSDDIFLVSIPSLQTPAXXP

SEQ ID NO: 12618 - protein, 37 aa, Artificial Sequence
  Cyclic GFR-binding peptide
  MOD_RES (2)..(4)..(36)..(37): Xaa is C or S
HXGXSRVVMNNSLQEIVNSSDDYYVVPLPELKTPAXX

SEQ ID NO: 12619 - protein, 27 aa, Artificial Sequence
  Cyclic GFR-binding peptide
RVVMNQYNKLIVNSSDDLYLVSIASLQ

SEQ ID NO: 12620 - protein, 33 aa, Artificial Sequence; identical to SEQ ID NO: 2075
  Cyclic GFR-binding peptide
  MOD_RES (29)..(30): Xaa is C or S

SEQ ID NO: 12621 - protein, 40 aa, Artificial Sequence
  Cyclic GFR-binding peptide
  MOD_RES (1)..(3)..(35)..(36): Xaa is C or S
XGXSEVVMDNSLQEVVNNASDYYVIPLPELRTPVXXTPPT

SEQ ID NO: 12622 - protein, 32 aa, Artificial Sequence
  Cyclic GFR-binding peptide
  MOD_RES (2)..(4): Xaa is C or S
RXGXGEVVMEEYQKYVVKDYEDIFLMSIPSLE

SEQ ID NO: 12623 - protein, 30 aa, Artificial Sequence
  Cyclic GFR-binding peptide
  MOD_RES (2)..(4): Xaa is C or S
SXKXSRVIMNSLQEVKPKRGVYYLITLPEL

SEQ ID NO: 12624 - protein, 22 aa, Artificial Sequence
  Cyclic GFR-binding peptide
IMRYKKLVKPKRGVFYLISIAN

SEQ ID NO: 12625 - protein, 34 aa, Artificial Sequence
  Cyclic GFR-binding peptide
  MOD_RES (28)..(29): Xaa is C or S
MEEYQKYVVKDYEDIFLMSIPSLETPVXXAKPIS

SEQ ID NO: 12626 - protein, 30 aa, Artificial Sequence; identical to SEQ ID NO: 2080
  Cyclic GFR-binding peptide
  MOD_RES (1)..(1): Xaa is C or S

SEQ ID NO: 12627 - protein, 34 aa, Artificial Sequence
  Cyclic GFR-binding peptide
  MOD_RES (2)..(4): Xaa is C or S
RXGXGEVVMDNSLQEVVKENEDYYVMPLPELETP

SEQ ID NO: 12628 - protein, 32 aa, Artificial Sequence; identical to SEQ ID NO: 2081
  Cyclic GFR-binding peptide
  MOD_RES (30)..(30): Xaa is C or S

SEQ ID NO: 12629 - protein, 41 aa, Artificial Sequence
  Cyclic GFR-binding peptide
  MOD_RES (2)..(4)..(35)..(36): Xaa is C or S
SXKXSKVVMNSLQEVKPTRGVYYLITLPELDQPVXXPSASA

SEQ ID NO: 12630 - protein, 27 aa, Artificial Sequence
  Cyclic GFR-binding peptide
  MOD_RES (2)..(2): Xaa is C or S
KXSRVIMRYKKLVKPKRGVFYLISIAN

SEQ ID NO: 12631 - protein, 33 aa, Artificial Sequence; identical to SEQ ID NO: 2084
  Cyclic GFR-binding peptide
  MOD_RES (31)..(32): Xaa is C or S

SEQ ID NO: 12632 - protein, 34 aa, Artificial Sequence
  Cyclic GFR-binding peptide
  MOD_RES (29)..(29): Xaa is C or S
VMNNSLQEIVNSSDDYYVVPLPELKTPAXTPKTV

SEQ ID NO: 12633 - protein, 31 aa, Artificial Sequence
  Cyclic GFR-binding peptide
  MOD_RES (2)..(4): Xaa is C or S
SXKXSRVIMNSLQEVKPKRGVYYLITLPELA

SEQ ID NO: 12634 - protein, 33 aa, Artificial Sequence; identical to SEQ ID NO: 2086
  Cyclic GFR-binding peptide
  MOD_RES (31)..(32): Xaa is C or S

SEQ ID NO: 12635 - protein, 27 aa, Artificial Sequence
  Cyclic GFR-binding peptide
VIMQYNKLVKPKRGVLYLISIASLAQP

SEQ ID NO: 12636 - protein, 35 aa, Artificial Sequence
  Cyclic GFR-binding peptide
  MOD_RES (1)..(3)..(35): Xaa is C or S
XGXSEVVMDNSLQEVVNNASDYYLITLPELRTPVX

SEQ ID NO: 12637 - protein, 35 aa, Artificial Sequence; identical to SEQ ID NO: 2090
  Cyclic GFR-binding peptide
  MOD_RES (31)..(32): Xaa is C or S

SEQ ID NO: 12638 - protein, 36 aa, Artificial Sequence
  Cyclic GFR-binding peptide
  MOD_RES (31)..(32): Xaa is C or S
SRVIMEYQKYVKPKRGVIFLISIPSLAQPVXXPAAS

SEQ ID NO: 12639 - protein, 33 aa, Artificial Sequence
  Cyclic GFR-binding peptide
  MOD_RES (29)..(30): Xaa is C or S
VMENSLQEVVKDYEDYYVMPLPELETPVXXAKP

SEQ ID NO: 12640 - protein, 32 aa, Artificial Sequence; identical to SEQ ID NO: 2091
  Cyclic GFR-binding peptide
  MOD_RES (2)..(2): Xaa is C or S

SEQ ID NO: 12641 - protein, 25 aa, Artificial Sequence
  Cyclic GFR-binding peptide
NSLQEVVNNASDYYVIPLPELRTPV

SEQ ID NO: 12642 - protein, 41 aa, Artificial Sequence
  Cyclic GFR-binding peptide
  MOD_RES (2)..(4)..(36)..(37): Xaa is C or S
HXGXARVVMNEYQKYIVNSSDDIFLVSIPSLQTPAXXPKPV

SEQ ID NO: 12643 - protein, 30 aa, Artificial Sequence; identical to SEQ ID NO: 2092
  Cyclic GFR-binding peptide
  MOD_RES (28)..(29): Xaa is C or S

SEQ ID NO: 12644 - protein, 22 aa, Artificial Sequence
  Cyclic GFR-binding peptide
MDNSLQEVVKENEDYYLMTLPE

SEQ ID NO: 12645 - protein, 40 aa, Artificial Sequence
  Cyclic GFR-binding peptide
  MOD_RES (1)..(3)..(34)..(35): Xaa is C or S
XKXSKVIMEYQKYIKPTKGIIFLISIPSLDQSVXXPSASA

SEQ ID NO: 12646 - protein, 33 aa, Artificial Sequence; identical to SEQ ID NO: 2094
  Cyclic GFR-binding peptide
  MOD_RES (29)..(30): Xaa is C or S

SEQ ID NO: 12647 - protein, 40 aa, Artificial Sequence
  Cyclic GFR-binding peptide
  MOD_RES (1)..(3)..(34)..(35): Xaa is C or S
XKXSKVIMNSLQEIKPTKGIYYVIPLPELDQSVXXPSASA

SEQ ID NO: 12648 - protein, 25 aa, Artificial Sequence
  Cyclic GFR-binding peptide
VMDRYKKLVVNNASDFYLISIANLR

SEQ ID NO: 12649 - protein, 33 aa, Artificial Sequence; identical to SEQ ID NO: 2095
  Cyclic GFR-binding peptide
  MOD_RES (2)..(4): Xaa is C or S

SEQ ID NO: 12650 - protein, 30 aa, Artificial Sequence
  Cyclic GFR-binding peptide
  MOD_RES (30)..(30): Xaa is C or S
KVIMEYQKYIKPTKGIIFLISIPSLDQSVX

SEQ ID NO: 12651 - protein, 38 aa, Artificial Sequence; identical to SEQ ID NO: 2096
  Cyclic GFR-binding peptide
  MOD_RES (1)..(3)..(35)..(36): Xaa is C or S

SEQ ID NO: 12652 - protein, 35 aa, Artificial Sequence
  Cyclic GFR-binding peptide
  MOD_RES (32)..(33): Xaa is C or S
GEVVMENSLQEVVKDYEDYYLMTLPELETPVXXAK

SEQ ID NO: 12653 - protein, 34 aa, Artificial Sequence; identical to SEQ ID NO: 2097
  Cyclic GFR-binding peptide
  MOD_RES (30)..(31): Xaa is C or S

SEQ ID NO: 12654 - protein, 36 aa, Artificial Sequence; identical to SEQ ID NO: 2098
  Cyclic GFR-binding peptide
  MOD_RES (2)..(4)..(36): Xaa is C or S

SEQ ID NO: 12655 - protein, 35 aa, Artificial Sequence
  Cyclic GFR-binding peptide
  MOD_RES (2)..(4)..(35): Xaa is C or S
SXKXSKVIMEYQKYIKPTKGIIFLISIPSLDQSVX

SEQ ID NO: 12656 - protein, 22 aa, Artificial Sequence
  Cyclic GFR-binding peptide
MNSLQEVKPKRGVYYLITLPEL

SEQ ID NO: 12657 - protein, 33 aa, Artificial Sequence
  Cyclic GFR-binding peptide
  MOD_RES (1)..(3): Xaa is C or S
XKXSRVIMEYQKYVKPKRGVIFLISIPSLAQPV

SEQ ID NO: 12658 - protein, 35 aa, Artificial Sequence
  Cyclic GFR-binding peptide
  MOD_RES (31)..(32): Xaa is C or S
EVVMDQYNKLVVNNASDLYLISIASLRTPVXXTPP

SEQ ID NO: 12659 - protein, 32 aa, Artificial Sequence
  Cyclic GFR-binding peptide
  MOD_RES (30)..(30): Xaa is C or S
VVMNEYQKYIVNSSDDIFLVSIPSLKTPAXTP

SEQ ID NO: 12660 - protein, 32 aa, Artificial Sequence
  Cyclic GFR-binding peptide
  MOD_RES (2)..(2): Xaa is C or S
GXGEVVMDEYQKYVVKENEDIFLMSIPSLETP

SEQ ID NO: 12661 - protein, 42 aa, Artificial Sequence; identical to SEQ ID NO: 2108
  Cyclic GFR-binding peptide
  MOD_RES (2)..(4)..(36)..(37): Xaa is C or S

SEQ ID NO: 12662 - protein, 21 aa, Artificial Sequence
  Cyclic GFR-binding peptide
MEYQKYIKPTKGIIFLISIPS

SEQ ID NO: 12663 - protein, 28 aa, Artificial Sequence
  Cyclic GFR-binding peptide
  MOD_RES (28)..(28): Xaa is C or S
VMRYKKLVKPTRGVFYLISIANLDQPVX

SEQ ID NO: 12664 - protein, 23 aa, Artificial Sequence
  Cyclic GFR-binding peptide
VMEEYQKYVVKDYEDIFLMSIPS

SEQ ID NO: 12665 - protein, 32 aa, Artificial Sequence; identical to SEQ ID NO: 2113
  Cyclic GFR-binding peptide
  MOD_RES (30)..(31): Xaa is C or S

SEQ ID NO: 12666 - protein, 42 aa, Artificial Sequence; identical to SEQ ID NO: 2114
  Cyclic GFR-binding peptide
  MOD_RES (2)..(4)..(36)..(37): Xaa is C or S

SEQ ID NO: 12667 - protein, 35 aa, Artificial Sequence
  Cyclic GFR-binding peptide
  MOD_RES (2)..(4): Xaa is C or S
HXGXARVVMNNSLQEIVNSSDDYYVVPLPELQTPA

SEQ ID NO: 12668 - protein, 24 aa, Artificial Sequence
  Cyclic GFR-binding peptide
EYQKYVKPKRGVIFLISIPSLAQP

SEQ ID NO: 12669 - protein, 32 aa, Artificial Sequence
  Cyclic GFR-binding peptide
  MOD_RES (28)..(29): Xaa is C or S
VMEYQKYVKPTRGVIFLISIPSLDQPVXXPSA

SEQ ID NO: 12670 - protein, 29 aa, Artificial Sequence
  Cyclic GFR-binding peptide
  MOD_RES (1)..(3): Xaa is C or S
XGXSRVVMNEYQKYIVNSSDDIFLVSIPS

SEQ ID NO: 12671 - protein, 32 aa, Artificial Sequence; identical to SEQ ID NO: 2124
  Cyclic GFR-binding peptide
  MOD_RES (1)..(1): Xaa is C or S

SEQ ID NO: 12672 - protein, 24 aa, Artificial Sequence
  Cyclic GFR-binding peptide
EYQKYIKPTKGIIFLISIPSLDQS

SEQ ID NO: 12673 - protein, 28 aa, Artificial Sequence
  Cyclic GFR-binding peptide
VMNNSLQEIVNSSDDYYLVTLPELKTPA

SEQ ID NO: 12674 - protein, 33 aa, Artificial Sequence
  Cyclic GFR-binding peptide
  MOD_RES (28)..(29): Xaa is C or S
MNEYQKYIVNSSDDIFLVSIPSLKTPAXXPKPV

SEQ ID NO: 12675 - protein, 29 aa, Artificial Sequence
  Cyclic GFR-binding peptide
  MOD_RES (2)..(2): Xaa is C or S
KXSKVIMEYQKYIKPTKGIIFLISIPSLD

SEQ ID NO: 12676 - protein, 33 aa, Artificial Sequence; identical to SEQ ID NO: 2126
  Cyclic GFR-binding peptide
  MOD_RES (2)..(33): Xaa is C or S

SEQ ID NO: 12677 - protein, 31 aa, Artificial Sequence; identical to SEQ ID NO: 2127
  Cyclic GFR-binding peptide
  MOD_RES (2)..(2): Xaa is C or S

SEQ ID NO: 12678 - protein, 36 aa, Artificial Sequence
  Cyclic GFR-binding peptide
  MOD_RES (1)..(32)..(33): Xaa is C or S
XSKVIMEYQKYIKPTKGIIFLISIPSLDQSVXXPSA

SEQ ID NO: 12679 - protein, 23 aa, Artificial Sequence
  Cyclic GFR-binding peptide
NSLQEVVKDYEDYYLMTLPELET

SEQ ID NO: 12680 - protein, 29 aa, Artificial Sequence
  Cyclic GFR-binding peptide
  MOD_RES (29)..(29): Xaa is C or S
VMDNSLQEVVNNASDYYLITLPELRTPVX

SEQ ID NO: 12681 - protein, 33 aa, Artificial Sequence
  Cyclic GFR-binding peptide
  MOD_RES (2)..(4): Xaa is C or S
HXGXARVVMNNSLQEIVNSSDDYYVVPLPELQT

SEQ ID NO: 12682 - protein, 29 aa, Artificial Sequence
  Cyclic GFR-binding peptide
  MOD_RES (26)..(27): Xaa is C or S
QYNKLIVNSSDDLYLVSIASLQTPAXXPK

SEQ ID NO: 12683 - protein, 34 aa, Artificial Sequence; identical to SEQ ID NO: 2137
  Cyclic GFR-binding peptide
  MOD_RES (30)..(31): Xaa is C or S

SEQ ID NO: 12684 - protein, 36 aa, Artificial Sequence; identical to SEQ ID NO: 2138
  Cyclic GFR-binding peptide
  MOD_RES (2)..(4)..(36): Xaa is C or S

SEQ ID NO: 12685 - protein, 27 aa, Artificial Sequence
  Cyclic GFR-binding peptide
SEVVMDRYKKLVVNNASDFYLISIANL

SEQ ID NO: 12686 - protein, 26 aa, Artificial Sequence
  Cyclic GFR-binding peptide
  MOD_RES (26)..(26): Xaa is C or S
RYKKLVKPKRGVFYLISIANLAQPVX

SEQ ID NO: 12687 - protein, 27 aa, Artificial Sequence
  Cyclic GFR-binding peptide
  MOD_RES (27)..(27): Xaa is C or S
DQYNKLVVNNASDLYLISIASLRTPVX

SEQ ID NO: 12688 - protein, 30 aa, Artificial Sequence
  Cyclic GFR-binding peptide
  MOD_RES (27)..(28): Xaa is C or S
ENSLQEVVKDYEDYYVMPLPELETPVXXAK

SEQ ID NO: 12689 - protein, 26 aa, Artificial Sequence
  Cyclic GFR-binding peptide
KVIMRYKKLIKPTKGIFYLISIANLD

SEQ ID NO: 12690 - protein, 38 aa, Artificial Sequence
  Cyclic GFR-binding peptide
  MOD_RES (2)..(34)..(35): Xaa is C or S
GXSRVVMNEYQKYIVNSSDDIFLVSIPSLKTPAXXPKP

SEQ ID NO: 12691 - protein, 34 aa, Artificial Sequence
  Cyclic GFR-binding peptide
  MOD_RES (30)..(31): Xaa is C or S
VVMENSLQEVVKDYEDYYLMTLPELETPVXXAKP

SEQ ID NO: 12692 - protein, 23 aa, Artificial Sequence
  Cyclic GFR-binding peptide
VVMQYNKLVKPTRGVLYLISIAS

SEQ ID NO: 12693 - protein, 39 aa, Artificial Sequence
  Cyclic GFR-binding peptide
  MOD_RES (1)..(33): Xaa is C or S
XSRVVMNEYQKYIVNSSDDIFLVSIPSLKTPAXTPKTVH

SEQ ID NO: 12694 - protein, 26 aa, Artificial Sequence
  Cyclic GFR-binding peptide
  MOD_RES (26)..(26): Xaa is C or S
NSLQEIVNSSDDYYVVPLPELKTPAX

SEQ ID NO: 12695 - protein, 31 aa, Artificial Sequence; identical to SEQ ID NO: 2151
  Cyclic GFR-binding peptide
  MOD_RES (29)..(30): Xaa is C or S

SEQ ID NO: 12696 - protein, 36 aa, Artificial Sequence
  Cyclic GFR-binding peptide
  MOD_RES (2)..(4)..(36): Xaa is C or S
RXGXGEVVMENSLQEVVKDYEDYYLMTLPELETPVX

SEQ ID NO: 12697 - protein, 42 aa, Artificial Sequence
  Cyclic GFR-binding peptide
  MOD_RES (2)..(4)..(36)..(37): Xaa is C or S
RXGXGEVVMDEYQKYVVKENEDIFLMSIPSLETPVXXAKPIK

SEQ ID NO: 12698 - protein, 39 aa, Artificial Sequence
  Cyclic GFR-binding peptide
  MOD_RES (2)..(4)..(35)..(36): Xaa is C or S
SXKXSRVIMEYQKYVKPKRGVIFLISIPSLAQPVXXPAA

SEQ ID NO: 12699 - protein, 31 aa, Artificial Sequence
  Cyclic GFR-binding peptide
  MOD_RES (1)..(1): Xaa is C or S
XARVVMNNSLQEIVNSSDDYYLVTLPELQTP

SEQ ID NO: 12700 - protein, 30 aa, Artificial Sequence
  Cyclic GFR-binding peptide
  MOD_RES (1)..(1): Xaa is C or S
XGEVVMDEYQKYVVKENEDIFLMSIPSLET

SEQ ID NO: 12701 - protein, 22 aa, Artificial Sequence
  Cyclic GFR-binding peptide
NSLQEIVNSSDDYYVVPLPELK

SEQ ID NO: 12702 - protein, 26 aa, Artificial Sequence
  Cyclic GFR-binding peptide
VVMDRYKKLVVKENEDFYLMSIANLE

SEQ ID NO: 12703 - protein, 30 aa, Artificial Sequence
  Cyclic GFR-binding peptide
  MOD_RES (2)..(4): Xaa is C or S
RXGXSEVVMDQYNKLVVNNASDLYLISIAS

SEQ ID NO: 12704 - protein, 29 aa, Artificial Sequence
  Cyclic GFR-binding peptide
  MOD_RES (28)..(29): Xaa is C or S
MNQYNKLIVNSSDDLYLVSIASLQTPAXX

SEQ ID NO: 12705 - protein, 30 aa, Artificial Sequence; identical to SEQ ID NO: 2158
  Cyclic GFR-binding peptide
  MOD_RES (1)..(1): Xaa is C or S

SEQ ID NO: 12706 - protein, 32 aa, Artificial Sequence
  Cyclic GFR-binding peptide
  MOD_RES (27)..(28): Xaa is C or S
DNSLQEVVKENEDYYVMPLPELETPVXXAKPI

SEQ ID NO: 12707 - protein, 31 aa, Artificial Sequence; identical to SEQ ID NO: 2160
  Cyclic GFR-binding peptide
  MOD_RES (30)..(31): Xaa is C or S

SEQ ID NO: 12708 - protein, 38 aa, Artificial Sequence
  Cyclic GFR-binding peptide
  MOD_RES (1)..(33)..(34): Xaa is C or S
XSEVVMDNSLQEVVNNASDYYVIPLPELRTPVXXTPPT

SEQ ID NO: 12709 - protein, 29 aa, Artificial Sequence
  Cyclic GFR-binding peptide
SKVIMRYKKLIKPTKGIFYLISIANLDQS

SEQ ID NO: 12710 - protein, 36 aa, Artificial Sequence; identical to SEQ ID NO: 2164
  Cyclic GFR-binding peptide
  MOD_RES (2)..(34)..(35): Xaa is C or S

SEQ ID NO: 12711 - protein, 28 aa, Artificial Sequence
  Cyclic GFR-binding peptide
  MOD_RES (28)..(28): Xaa is C or S
MNQYNKLIVNSSDDLYLVSIASLKTPAX

SEQ ID NO: 12712 - protein, 37 aa, Artificial Sequence; identical to SEQ ID NO: 2167
  Cyclic GFR-binding peptide
  MOD_RES (31)..(31): Xaa is C or S

SEQ ID NO: 12713 - protein, 33 aa, Artificial Sequence
  Cyclic GFR-binding peptide
  MOD_RES (32)..(33): Xaa is C or S
ARVVMNNSLQEIVNSSDDYYLVTLPELQTPAXX

SEQ ID NO: 12714 - protein, 28 aa, Artificial Sequence
  Cyclic GFR-binding peptide
  MOD_RES (1)..(1): Xaa is C or S
XSKVVMNSLQEVKPTRGVYYVIPLPELD

SEQ ID NO: 12715 - protein, 37 aa, Artificial Sequence
  Cyclic GFR-binding peptide
  MOD_RES (1)..(3)..(35)..(36): Xaa is C or S
XGXGEVVMENSLQEVVKDYEDYYVMPLPELETPVXXA

SEQ ID NO: 12716 - protein, 32 aa, Artificial Sequence
  Cyclic GFR-binding peptide
  MOD_RES (32)..(32): Xaa is C or S
SEVVMDQYNKLVVNNASDLYLISIASLRTPVX

SEQ ID NO: 12717 - protein, 31 aa, Artificial Sequence
  Cyclic GFR-binding peptide
  MOD_RES (27)..(28): Xaa is C or S
MNSLQEIKPTKGIYYVIPLPELDQSVXXPSA

SEQ ID NO: 12718 - protein, 31 aa, Artificial Sequence; identical to SEQ ID NO: 2175
  Cyclic GFR-binding peptide
  MOD_RES (27)..(28): Xaa is C or S

SEQ ID NO: 12719 - protein, 37 aa, Artificial Sequence
  Cyclic GFR-binding peptide
  MOD_RES (32)..(33): Xaa is C or S
ARVVMNNSLQEIVNSSDDYYLVTLPELQTPAXXPKPV

SEQ ID NO: 12720 - protein, 35 aa, Artificial Sequence
  Cyclic GFR-binding peptide
  MOD_RES (2)..(34)..(35): Xaa is C or S
GXGEVVMENSLQEVVKDYEDYYLMTLPELETPVXX

SEQ ID NO: 12721 - protein, 37 aa, Artificial Sequence
  Cyclic GFR-binding peptide
  MOD_RES (1)..(33)..(34): Xaa is C or S
XARVVMNNSLQEIVNSSDDYYVVPLPELQTPAXXPKP

SEQ ID NO: 12722 - protein, 39 aa, Artificial Sequence
  Cyclic GFR-binding peptide
  MOD_RES (1)..(33)..(34): Xaa is C or S
XSEVVMDNSLQEVVNNASDYYLITLPELRTPVXXTPPTS

SEQ ID NO: 12723 - protein, 36 aa, Artificial Sequence
  Cyclic GFR-binding peptide
  MOD_RES (1)..(3)..(34)..(35): Xaa is C or S
XKXSRVIMEYQKYVKPKRGVIFLISIPSLAQPVXXP

SEQ ID NO: 12724 - protein, 29 aa, Artificial Sequence
  Cyclic GFR-binding peptide
  MOD_RES (27)..(28): Xaa is C or S
ENSLQEVVKDYEDYYVMPLPELETPVXXA

SEQ ID NO: 12725 - protein, 32 aa, Artificial Sequence
  Cyclic GFR-binding peptide
  MOD_RES (26)..(27): Xaa is C or S
NSLQEVKPKRGVYYLITLPELAQPVXXPAASA

SEQ ID NO: 12726 - protein, 21 aa, Artificial Sequence
  Cyclic GFR-binding peptide
MQYNKLIKPTKGILYLISIAS

SEQ ID NO: 12727 - protein, 31 aa, Artificial Sequence
  Cyclic GFR-binding peptide
  MOD_RES (1)..(3): Xaa is C or S
XGXGEVVMDEYQKYVVKENEDIFLMSIPSLE

SEQ ID NO: 12728 - protein, 30 aa, Artificial Sequence
  Cyclic GFR-binding peptide
  MOD_RES (2)..(2): Xaa is C or S
GXARVVMNNSLQEIVNSSDDYYLVTLPELQ

SEQ ID NO: 12729 - protein, 31 aa, Artificial Sequence
  Cyclic GFR-binding peptide
  MOD_RES (29)..(30): Xaa is C or S
VMEEYQKYVVKDYEDIFLMSIPSLETPVXXA

SEQ ID NO: 12730 - protein, 31 aa, Artificial Sequence
  Cyclic GFR-binding peptide
  MOD_RES (1)..(3): Xaa is C or S
XGXSRVVMNNSLQEIVNSSDDYYVVPLPELK

SEQ ID NO: 12731 - protein, 30 aa, Artificial Sequence
  Cyclic GFR-binding peptide
EVVMEEYQKYVVKDYEDIFLMSIPSLETPV

SEQ ID NO: 12732 - protein, 32 aa, Artificial Sequence; identical to SEQ ID NO: 2194
  Cyclic GFR-binding peptide
  MOD_RES (2)..(4): Xaa is C or S

SEQ ID NO: 12733 - protein, 38 aa, Artificial Sequence
  Cyclic GFR-binding peptide
  MOD_RES (2)..(34)..(35): Xaa is C or S
GXGEVVMENSLQEVVKDYEDYYVMPLPELETPVXXAKP

SEQ ID NO: 12734 - protein, 34 aa, Artificial Sequence
  Cyclic GFR-binding peptide
  MOD_RES (28)..(29): Xaa is C or S
MDQYNKLVVNNASDLYLISIASLRTPVXXTPPTS

SEQ ID NO: 12735 - protein, 22 aa, Artificial Sequence
  Cyclic GFR-binding peptide
MQYNKLVKPKRGVLYLISIASL

SEQ ID NO: 12736 - protein, 33 aa, Artificial Sequence
  Cyclic GFR-binding peptide
  MOD_RES (30)..(31): Xaa is C or S
VVMDRYKKLVVNNASDFYLISIANLRTPVXXTP

SEQ ID NO: 12737 - protein, 29 aa, Artificial Sequence
  Cyclic GFR-binding peptide
  MOD_RES (1)..(3): Xaa is C or S
XKXSRVIMQYNKLVKPKRGVLYLISIASL

SEQ ID NO: 12738 - protein, 28 aa, Artificial Sequence
  Cyclic GFR-binding peptide
  MOD_RES (27)..(28): Xaa is C or S
MNSLQEVKPTRGVYYVIPLPELDQPVXX

SEQ ID NO: 12739 - protein, 29 aa, Artificial Sequence
  Cyclic GFR-binding peptide
  MOD_RES (1)..(1): Xaa is C or S
XSEVVMDRYKKLVVNNASDFYLISIANLR

SEQ ID NO: 12740 - protein, 35 aa, Artificial Sequence
  Cyclic GFR-binding peptide
  MOD_RES (29)..(29): Xaa is C or S
VMNNSLQEIVNSSDDYYLVTLPELKTPAXTPKTVH

SEQ ID NO: 12741 - protein, 20 aa, Artificial Sequence
  Cyclic GFR-binding peptide
EYQKYVVKENEDIFLMSIPS

SEQ ID NO: 12742 - protein, 32 aa, Artificial Sequence; identical to SEQ ID NO: 2200
  Cyclic GFR-binding peptide
  MOD_RES (29)..(30): Xaa is C or S

SEQ ID NO: 12743 - protein, 32 aa, Artificial Sequence
  Cyclic GFR-binding peptide
  MOD_RES (28)..(28): Xaa is C or S
MNEYQKYIVNSSDDIFLVSIPSLKTPAXTPKT

SEQ ID NO: 12744 - protein, 23 aa, Artificial Sequence
  Cyclic GFR-binding peptide
MRYKKLIKPTKGIFYLISIANLD

SEQ ID NO: 12745 - protein, 39 aa, Artificial Sequence; identical to SEQ ID NO: 2205
  Cyclic GFR-binding peptide
  MOD_RES (1)..(33)..(34): Xaa is C or S

SEQ ID NO: 12746 - protein, 37 aa, Artificial Sequence
  Cyclic GFR-binding peptide
  MOD_RES (2)..(34)..(35): Xaa is C or S
GXSEVVMDQYNKLVVNNASDLYLISIASLRTPVXXTP

SEQ ID NO: 12747 - protein, 31 aa, Artificial Sequence
  Cyclic GFR-binding peptide
  MOD_RES (1)..(3): Xaa is C or S
XGXGEVVMDNSLQEVVKENEDYYLMTLPELE

SEQ ID NO: 12748 - protein, 33 aa, Artificial Sequence
  Cyclic GFR-binding peptide
  MOD_RES (31)..(31): Xaa is C or S
RVVMNEYQKYIVNSSDDIFLVSIPSLKTPAXTP

SEQ ID NO: 12749 - protein, 25 aa, Artificial Sequence
  Cyclic GFR-binding peptide
RYKKLVKPTRGVFYLISIANLDQPV

SEQ ID NO: 12750 - protein, 30 aa, Artificial Sequence
  Cyclic GFR-binding peptide
  MOD_RES (28)..(29): Xaa is C or S
MDQYNKLVVNNASDLYLISIASLRTPVXXT

SEQ ID NO: 12751 - protein, 33 aa, Artificial Sequence
  Cyclic GFR-binding peptide
  MOD_RES (29)..(30): Xaa is C or S
VVMEYQKYVKPTRGVIFLISIPSLDQPVXXPSA

SEQ ID NO: 12752 - protein, 32 aa, Artificial Sequence; identical to SEQ ID NO: 2212
  Cyclic GFR-binding peptide
  MOD_RES (1)..(3): Xaa is C or S

SEQ ID NO: 12753 - protein, 25 aa, Artificial Sequence
  Cyclic GFR-binding peptide
VVMDEYQKYVVKENEDIFLMSIPSL

SEQ ID NO: 12754 - protein, 41 aa, Artificial Sequence
  Cyclic GFR-binding peptide
  MOD_RES (1)..(3)..(35)..(36): Xaa is C or S
XGXGEVVMEEYQKYVVKDYEDIFLMSIPSLETPVXXAKPIS

SEQ ID NO: 12755 - protein, 24 aa, Artificial Sequence
  Cyclic GFR-binding peptide
NSLQEIVNSSDDYYLVTLPELQTP

SEQ ID NO: 12756 - protein, 29 aa, Artificial Sequence
  Cyclic GFR-binding peptide
  MOD_RES (26)..(27): Xaa is C or S
QYNKLIKPTKGILYLISIASLDQSVXXPS

SEQ ID NO: 12757 - protein, 35 aa, Artificial Sequence
  Cyclic GFR-binding peptide
  MOD_RES (31)..(32): Xaa is C or S
SKVIMNSLQEIKPTKGIYYLITLPELDQSVXXPSA

SEQ ID NO: 12758 - protein, 23 aa, Artificial Sequence
  Cyclic GFR-binding peptide
VIMRYKKLIKPTKGIFYLISIAN

SEQ ID NO: 12759 - protein, 37 aa, Artificial Sequence; identical to SEQ ID NO: 2218
  Cyclic GFR-binding peptide
  MOD_RES (1)..(32)..(33): Xaa is C or S

SEQ ID NO: 12760 - protein, 37 aa, Artificial Sequence; identical to SEQ ID NO: 2221
  Cyclic GFR-binding peptide
  MOD_RES (1)..(32)..(33): Xaa is C or S

SEQ ID NO: 12761 - protein, 29 aa, Artificial Sequence
  Cyclic GFR-binding peptide
  MOD_RES (28)..(29): Xaa is C or S
MNNSLQEIVNSSDDYYVVPLPELQTPAXX

SEQ ID NO: 12762 - protein, 21 aa, Artificial Sequence
  Cyclic GFR-binding peptide
QYNKLVVNNASDLYLISIASL

SEQ ID NO: 12763 - protein, 33 aa, Artificial Sequence
  Cyclic GFR-binding peptide
  MOD_RES (27)..(28): Xaa is C or S
NNSLQEIVNSSDDYYLVTLPELQTPAXXPKPVT

SEQ ID NO: 12764 - protein, 27 aa, Artificial Sequence
  Cyclic GFR-binding peptide
MNNSLQEIVNSSDDYYLVTLPELKTPA

SEQ ID NO: 12765 - protein, 26 aa, Artificial Sequence
  Cyclic GFR-binding peptide
  MOD_RES (26)..(26): Xaa is C or S
NSLQEIKPTKGIYYLITLPELDQSVX

SEQ ID NO: 12766 - protein, 30 aa, Artificial Sequence; identical to SEQ ID NO: 2231
  Cyclic GFR-binding peptide
  MOD_RES (2)..(4): Xaa is C or S

SEQ ID NO: 12767 - protein, 36 aa, Artificial Sequence; identical to SEQ ID NO: 2233
  Cyclic GFR-binding peptide
  MOD_RES (30)..(31): Xaa is C or S

SEQ ID NO: 12768 - protein, 34 aa, Artificial Sequence; identical to SEQ ID NO: 2236
  Cyclic GFR-binding peptide
  MOD_RES (29)..(30): Xaa is C or S

SEQ ID NO: 12769 - protein, 22 aa, Artificial Sequence
  Cyclic GFR-binding peptide
MDEYQKYVVKENEDIFLMSIPS

SEQ ID NO: 12770 - protein, 33 aa, Artificial Sequence
  Cyclic GFR-binding peptide
  MOD_RES (27)..(27): Xaa is C or S
NNSLQEIVNSSDDYYLVTLPELKTPAXTPKTVH

SEQ ID NO: 12771 - protein, 24 aa, Artificial Sequence
  Cyclic GFR-binding peptide
RVIMRYKKLVKPKRGVFYLISIAN

SEQ ID NO: 12772 - protein, 40 aa, Artificial Sequence
  Cyclic GFR-binding peptide
  MOD_RES (2)..(34)..(35): Xaa is C or S
GXARVVMNEYQKYIVNSSDDIFLVSIPSLQTPAXXPKPVT

SEQ ID NO: 12773 - protein, 32 aa, Artificial Sequence
  Cyclic GFR-binding peptide
  MOD_RES (2)..(2): Xaa is C or S
KXSKVIMNSLQEIKPTKGIYYVIPLPELDQSV

SEQ ID NO: 12774 - protein, 30 aa, Artificial Sequence; identical to SEQ ID NO: 2246
  Cyclic GFR-binding peptide
  MOD_RES (27)..(28): Xaa is C or S

SEQ ID NO: 12775 - protein, 34 aa, Artificial Sequence
  Cyclic GFR-binding peptide
  MOD_RES (28)..(29): Xaa is C or S
MNNSLQEIVNSSDDYYLVTLPELQTPAXXPKPVT

SEQ ID NO: 12776 - protein, 38 aa, Artificial Sequence
  Cyclic GFR-binding peptide
  MOD_RES (32)..(33): Xaa is C or S
ARVVMNNSLQEIVNSSDDYYVVPLPELQTPAXXPKPVT

SEQ ID NO: 12777 - protein, 22 aa, Artificial Sequence
  Cyclic GFR-binding peptide
MNRYKKLIVNSSDDFYLVSIAN

SEQ ID NO: 12778 - protein, 25 aa, Artificial Sequence
  Cyclic GFR-binding peptide
MENSLQEVVKDYEDYYLMTLPELET

SEQ ID NO: 12779 - protein, 24 aa, Artificial Sequence
  Cyclic GFR-binding peptide
VIMQYNKLIKPTKGILYLISIASL

SEQ ID NO: 12780 - protein, 28 aa, Artificial Sequence
  Cyclic GFR-binding peptide
  MOD_RES (28)..(28): Xaa is C or S
MNNSLQEIVNSSDDYYVVPLPELKTPAX

SEQ ID NO: 12781 - protein, 32 aa, Artificial Sequence; identical to SEQ ID NO: 2253
  Cyclic GFR-binding peptide
  MOD_RES (26)..(27): Xaa is C or S

SEQ ID NO: 12782 - protein, 34 aa, Artificial Sequence
  Cyclic GFR-binding peptide
  MOD_RES (1)..(3)..(34): Xaa is C or S
XKXSKVVMEYQKYVKPTRGVIFLISIPSLDQPVX

SEQ ID NO: 12783 - protein, 35 aa, Artificial Sequence
  Cyclic GFR-binding peptide
  MOD_RES (32)..(32): Xaa is C or S
SRVVMNEYQKYIVNSSDDIFLVSIPSLKTPAXTPK

SEQ ID NO: 12784 - protein, 36 aa, Artificial Sequence; identical to SEQ ID NO: 2255
  Cyclic GFR-binding peptide
  MOD_RES (1)..(3)..(35)..(36): Xaa is C or S

SEQ ID NO: 12785 - protein, 29 aa, Artificial Sequence
  Cyclic GFR-binding peptide
  MOD_RES (2)..(4): Xaa is C or S
SXKXSKVVMRYKKLVKPTRGVFYLISIAN

SEQ ID NO: 12786 - protein, 35 aa, Artificial Sequence
  Cyclic GFR-binding peptide
  MOD_RES (31)..(32): Xaa is C or S
SKVVMEYQKYVKPTRGVIFLISIPSLDQPVXXPSA

SEQ ID NO: 12787 - protein, 37 aa, Artificial Sequence; identical to SEQ ID NO: 2258
  Cyclic GFR-binding peptide
  MOD_RES (2)..(4)..(36)..(37): Xaa is C or S

SEQ ID NO: 12788 - protein, 35 aa, Artificial Sequence; identical to SEQ ID NO: 2260
  Cyclic GFR-binding peptide
  MOD_RES (29)..(30): Xaa is C or S

SEQ ID NO: 12789 - protein, 24 aa, Artificial Sequence
  Cyclic GFR-binding peptide
DNSLQEVVNNASDYYLITLPELRT

SEQ ID NO: 12790 - protein, 21 aa, Artificial Sequence
  Cyclic GFR-binding peptide
MEYQKYVKPTRGVIFLISIPS

SEQ ID NO: 12791 - protein, 31 aa, Artificial Sequence; identical to SEQ ID NO: 2262
  Cyclic GFR-binding peptide
  MOD_RES (2)..(4): Xaa is C or S

SEQ ID NO: 12792 - protein, 31 aa, Artificial Sequence
  Cyclic GFR-binding peptide
GEVVMDNSLQEVVKENEDYYVMPLPELETPV

SEQ ID NO: 12793 - protein, 37 aa, Artificial Sequence; identical to SEQ ID NO: 2265
  Cyclic GFR-binding peptide
  MOD_RES (1)..(3)..(34)..(35): Xaa is C or S

SEQ ID NO: 12794 - protein, 33 aa, Artificial Sequence
  Cyclic GFR-binding peptide
  MOD_RES (30)..(31): Xaa is C or S
VVMDEYQKYVVKENEDIFLMSIPSLETPVXXAK

SEQ ID NO: 12795 - protein, 26 aa, Artificial Sequence
  Cyclic GFR-binding peptide
VVMNEYQKYIVNSSDDIFLVSIPSLQ

SEQ ID NO: 12796 - protein, 32 aa, Artificial Sequence; identical to SEQ ID NO: 2266
  Cyclic GFR-binding peptide
  MOD_RES (27)..(28): Xaa is C or S

SEQ ID NO: 12797 - protein, 40 aa, Artificial Sequence
  Cyclic GFR-binding peptide
  MOD_RES (2)..(34)..(35): Xaa is C or S
GXGEVVMDNSLQEVVKENEDYYLMTLPELETPVXXAKPIK

SEQ ID NO: 12798 - protein, 38 aa, Artificial Sequence; identical to SEQ ID NO: 2267
  Cyclic GFR-binding peptide
  MOD_RES (32)..(33): Xaa is C or S

SEQ ID NO: 12799 - protein, 28 aa, Artificial Sequence
  Cyclic GFR-binding peptide
  MOD_RES (2)..(2): Xaa is C or S
GXGEVVMDNSLQEVVKENEDYYVMPLPE

SEQ ID NO: 12800 - protein, 36 aa, Artificial Sequence; identical to SEQ ID NO: 2269
  Cyclic GFR-binding peptide
  MOD_RES (2)..(33)..(34): Xaa is C or S

SEQ ID NO: 12801 - protein, 34 aa, Artificial Sequence; identical to SEQ ID NO: 2270
  Cyclic GFR-binding peptide
  MOD_RES (29)..(30): Xaa is C or S

SEQ ID NO: 12802 - protein, 36 aa, Artificial Sequence
  Cyclic GFR-binding peptide
  MOD_RES (30)..(31): Xaa is C or S
KVIMNSLQEIKPTKGIYYLITLPELDQSVXXPSASA

SEQ ID NO: 12803 - protein, 29 aa, Artificial Sequence
  Cyclic GFR-binding peptide
  MOD_RES (26)..(27): Xaa is C or S
NSLQEVVNNASDYYVIPLPELRTPVXXTP

SEQ ID NO: 12804 - protein, 32 aa, Artificial Sequence
  Cyclic GFR-binding peptide
  MOD_RES (1)..(3): Xaa is C or S
XGXSEVVMDNSLQEVVNNASDYYLITLPELRT

SEQ ID NO: 12805 - protein, 32 aa, Artificial Sequence
  Cyclic GFR-binding peptide
  MOD_RES (27)..(28): Xaa is C or S
DQYNKLVVNNASDLYLISIASLRTPVXXTPPT

SEQ ID NO: 12806 - protein, 31 aa, Artificial Sequence
  Cyclic GFR-binding peptide
  MOD_RES (2)..(4): Xaa is C or S
RXGXSEVVMDRYKKLVVNNASDFYLISIANL

SEQ ID NO: 12807 - protein, 26 aa, Artificial Sequence
  Cyclic GFR-binding peptide
EVVMDQYNKLVVNNASDLYLISIASL

SEQ ID NO: 12808 - protein, 39 aa, Artificial Sequence
  Cyclic GFR-binding peptide
  MOD_RES (2)..(34)..(35): Xaa is C or S
GXGEVVMDNSLQEVVKENEDYYVMPLPELETPVXXAKPI

SEQ ID NO: 12809 - protein, 32 aa, Artificial Sequence
  Cyclic GFR-binding peptide
  MOD_RES (27)..(28): Xaa is C or S
DNSLQEVVNNASDYYVIPLPELRTPVXXTPPT

SEQ ID NO: 12810 - protein, 26 aa, Artificial Sequence
  Cyclic GFR-binding peptide
NQYNKLIVNSSDDLYLVSIASLQTPA

SEQ ID NO: 12811 - protein, 29 aa, Artificial Sequence
  Cyclic GFR-binding peptide
VVMDQYNKLVVNNASDLYLISIASLRTPV

SEQ ID NO: 12812 - protein, 36 aa, Artificial Sequence; identical to SEQ ID NO: 2276
  Cyclic GFR-binding peptide
  MOD_RES (1)..(3)..(34)..(35): Xaa is C or S

SEQ ID NO: 12813 - protein, 26 aa, Artificial Sequence
  Cyclic GFR-binding peptide
NNSLQEIVNSSDDYYVVPLPELQTPA

SEQ ID NO: 12814 - protein, 29 aa, Artificial Sequence
  Cyclic GFR-binding peptide
  MOD_RES (29)..(29): Xaa is C or S
VMEEYQKYVVKDYEDIFLMSIPSLETPVX

SEQ ID NO: 12815 - protein, 38 aa, Artificial Sequence
  Cyclic GFR-binding peptide
  MOD_RES (2)..(34)..(35): Xaa is C or S
GXARVVMNNSLQEIVNSSDDYYLVTLPELQTPAXXPKP

SEQ ID NO: 12816 - protein, 30 aa, Artificial Sequence; identical to SEQ ID NO: 2279
  Cyclic GFR-binding peptide
  MOD_RES (30)..(30): Xaa is C or S

SEQ ID NO: 12817 - protein, 32 aa, Artificial Sequence; identical to SEQ ID NO: 2281
  Cyclic GFR-binding peptide
  MOD_RES (29)..(30): Xaa is C or S

SEQ ID NO: 12818 - protein, 40 aa, Artificial Sequence
  Cyclic GFR-binding peptide
  MOD_RES (1)..(3)..(35)..(36): Xaa is C or S
XGXSEVVMDRYKKLVVNNASDFYLISIANLRTPVXXTPPT

SEQ ID NO: 12819 - protein, 30 aa, Artificial Sequence; identical to SEQ ID NO: 2284
  Cyclic GFR-binding peptide
  MOD_RES (27)..(28): Xaa is C or S

SEQ ID NO: 12820 - protein, 36 aa, Artificial Sequence; identical to SEQ ID NO: 2285
  Cyclic GFR-binding peptide
  MOD_RES (2)..(4)..(36): Xaa is C or S

SEQ ID NO: 12821 - protein, 28 aa, Artificial Sequence
  Cyclic GFR-binding peptide
VVMDNSLQEVVNNASDYYLITLPELRTP

SEQ ID NO: 12822 - protein, 28 aa, Artificial Sequence
  Cyclic GFR-binding peptide
  MOD_RES (26)..(27): Xaa is C or S
NSLQEVKPTRGVYYVIPLPELDQPVXXP

SEQ ID NO: 12823 - protein, 28 aa, Artificial Sequence
  Cyclic GFR-binding peptide
  MOD_RES (2)..(2): Xaa is C or S
KXSKVVMRYKKLVKPTRGVFYLISIANL

SEQ ID NO: 12824 - protein, 27 aa, Artificial Sequence
  Cyclic GFR-binding peptide
  MOD_RES (1)..(1): Xaa is C or S
XSRVVMNRYKKLIVNSSDDFYLVSIAN

SEQ ID NO: 12825 - protein, 26 aa, Artificial Sequence
  Cyclic GFR-binding peptide
GEVVMENSLQEVVKDYEDYYLMTLPE

SEQ ID NO: 12826 - protein, 23 aa, Artificial Sequence
  Cyclic GFR-binding peptide
QYNKLIVNSSDDLYLVSIASLQT

SEQ ID NO: 12827 - protein, 25 aa, Artificial Sequence
  Cyclic GFR-binding peptide
EVVMDQYNKLVVNNASDLYLISIAS

SEQ ID NO: 12828 - protein, 31 aa, Artificial Sequence; identical to SEQ ID NO: 2298
  Cyclic GFR-binding peptide
  MOD_RES (26)..(27): Xaa is C or S

SEQ ID NO: 12829 - protein, 26 aa, Artificial Sequence
  Cyclic GFR-binding peptide
  MOD_RES (26)..(26): Xaa is C or S
EYQKYVKPTRGVIFLISIPSLDQPVX

SEQ ID NO: 12830 - protein, 32 aa, Artificial Sequence
  Cyclic GFR-binding peptide
  MOD_RES (28)..(29): Xaa is C or S
IMNSLQEVKPKRGVYYLITLPELAQPVXXPAA

SEQ ID NO: 12831 - protein, 31 aa, Artificial Sequence; identical to SEQ ID NO: 2300
  Cyclic GFR-binding peptide
  MOD_RES (31)..(31): Xaa is C or S

SEQ ID NO: 12832 - protein, 34 aa, Artificial Sequence
  Cyclic GFR-binding peptide
  MOD_RES (2)..(4): Xaa is C or S
HXGXARVVMNEYQKYIVNSSDDIFLVSIPSLQTP

SEQ ID NO: 12833 - protein, 29 aa, Artificial Sequence
  Cyclic GFR-binding peptide
RVVMNQYNKLIVNSSDDLYLVSIASLQTP

SEQ ID NO: 12834 - protein, 24 aa, Artificial Sequence
  Cyclic GFR-binding peptide
VMNNSLQEIVNSSDDYYVVPLPEL

SEQ ID NO: 12835 - protein, 30 aa, Artificial Sequence; identical to SEQ ID NO: 2303
  Cyclic GFR-binding peptide
  MOD_RES (30)..(30): Xaa is C or S

SEQ ID NO: 12836 - protein, 25 aa, Artificial Sequence
  Cyclic GFR-binding peptide
SKVVMRYKKLVKPTRGVFYLISIAN

SEQ ID NO: 12837 - protein, 24 aa, Artificial Sequence
  Cyclic GFR-binding peptide
MNRYKKLIVNSSDDFYLVSIANLK

SEQ ID NO: 12838 - protein, 26 aa, Artificial Sequence
  Cyclic GFR-binding peptide
  MOD_RES (26)..(26): Xaa is C or S
NSLQEVKPKRGVYYLITLPELAQPVX

SEQ ID NO: 12839 - protein, 29 aa, Artificial Sequence
  Cyclic GFR-binding peptide
  MOD_RES (29)..(29): Xaa is C or S
VIMQYNKLVKPKRGVLYLISIASLAQPVX

SEQ ID NO: 12840 - protein, 35 aa, Artificial Sequence
  Cyclic GFR-binding peptide
  MOD_RES (2)..(4)..(35): Xaa is C or S
SXKXSKVIMNSLQEIKPTKGIYYVIPLPELDQSVX

SEQ ID NO: 12841 - protein, 28 aa, Artificial Sequence
  Cyclic GFR-binding peptide
SKVIMRYKKLIKPTKGIFYLISIANLDQ

SEQ ID NO: 12842 - protein, 24 aa, Artificial Sequence
  Cyclic GFR-binding peptide
MNSLQEIKPTKGIYYVIPLPELDQ

SEQ ID NO: 12843 - protein, 33 aa, Artificial Sequence
  Cyclic GFR-binding peptide
  MOD_RES (2)..(4): Xaa is C or S
SXKXSKVIMNSLQEIKPTKGIYYLITLPELDQS

SEQ ID NO: 12844 - protein, 30 aa, Artificial Sequence
  Cyclic GFR-binding peptide
  MOD_RES (30)..(30): Xaa is C or S
RVIMEYQKYVKPKRGVIFLISIPSLAQPVX

SEQ ID NO: 12845 - protein, 30 aa, Artificial Sequence; identical to SEQ ID NO: 2311
  Cyclic GFR-binding peptide
  MOD_RES (1)..(1): Xaa is C or S

SEQ ID NO: 12846 - protein, 38 aa, Artificial Sequence
  Cyclic GFR-binding peptide
  MOD_RES (2)..(4)..(36): Xaa is C or S
HXGXSRVVMNEYQKYIVNSSDDIFLVSIPSLKTPAXTP

SEQ ID NO: 12847 - protein, 33 aa, Artificial Sequence
  Cyclic GFR-binding peptide
  MOD_RES (28)..(29): Xaa is C or S
MDRYKKLVVNNASDFYLISIANLRTPVXXTPPT

SEQ ID NO: 12848 - protein, 39 aa, Artificial Sequence; identical to SEQ ID NO: 2313
  Cyclic GFR-binding peptide
  MOD_RES (2)..(34)..(35): Xaa is C or S

SEQ ID NO: 12849 - protein, 27 aa, Artificial Sequence
  Cyclic GFR-binding peptide
VVMNRYKKLIVNSSDDFYLVSIANLKT

SEQ ID NO: 12850 - protein, 35 aa, Artificial Sequence; identical to SEQ ID NO: 2315
  Cyclic GFR-binding peptide
  MOD_RES (2)..(34)..(35): Xaa is C or S

SEQ ID NO: 12851 - protein, 32 aa, Artificial Sequence
  Cyclic GFR-binding peptide
  MOD_RES (1)..(3): Xaa is C or S
XGXGEVVMENSLQEVVKDYEDYYVMPLPELET

SEQ ID NO: 12852 - protein, 25 aa, Artificial Sequence
  Cyclic GFR-binding peptide
KVIMEYQKYIKPTKGIIFLISIPSL

SEQ ID NO: 12853 - protein, 27 aa, Artificial Sequence
  Cyclic GFR-binding peptide
  MOD_RES (1)..(1): Xaa is C or S
XGEVVMERYKKLVVKDYEDFYLMSIAN

SEQ ID NO: 12854 - protein, 40 aa, Artificial Sequence
  Cyclic GFR-binding peptide
  MOD_RES (2)..(4)..(36)..(37): Xaa is C or S
RXGXSEVVMDNSLQEVVNNASDYYLITLPELRTPVXXTPP

SEQ ID NO: 12855 - protein, 36 aa, Artificial Sequence
  Cyclic GFR-binding peptide
  MOD_RES (1)..(33): Xaa is C or S
XSRVVMNEYQKYIVNSSDDIFLVSIPSLKTPAXTPK

SEQ ID NO: 12856 - protein, 30 aa, Artificial Sequence
  Cyclic GFR-binding peptide
  MOD_RES (2)..(4): Xaa is C or S
HXGXARVVMNEYQKYIVNSSDDIFLVSIPS

SEQ ID NO: 12857 - protein, 29 aa, Artificial Sequence
  Cyclic GFR-binding peptide
KVVMQYNKLVKPTRGVLYLISIASLDQPV

SEQ ID NO: 12858 - protein, 34 aa, Artificial Sequence; identical to SEQ ID NO: 2319
  Cyclic GFR-binding peptide
  MOD_RES (29)..(30): Xaa is C or S

SEQ ID NO: 12859 - protein, 32 aa, Artificial Sequence
  Cyclic GFR-binding peptide
  MOD_RES (27)..(28): Xaa is C or S
NEYQKYIVNSSDDIFLVSIPSLKTPAXXPKPV

SEQ ID NO: 12860 - protein, 28 aa, Artificial Sequence
  Cyclic GFR-binding peptide
  MOD_RES (26)..(27): Xaa is C or S
QYNKLVVKDYEDLYLMSIASLETPVXXA

SEQ ID NO: 12861 - protein, 26 aa, Artificial Sequence
  Cyclic GFR-binding peptide
SRVIMEYQKYVKPKRGVIFLISIPSL

SEQ ID NO: 12862 - protein, 24 aa, Artificial Sequence
  Cyclic GFR-binding peptide
VMDRYKKLVVNNASDFYLISIANL

SEQ ID NO: 12863 - protein, 27 aa, Artificial Sequence
  Cyclic GFR-binding peptide
  MOD_RES (1)..(1): Xaa is C or S
XGEVVMDEYQKYVVKENEDIFLMSIPS

SEQ ID NO: 12864 - protein, 37 aa, Artificial Sequence
  Cyclic GFR-binding peptide
  MOD_RES (1)..(33)..(34): Xaa is C or S
XGEVVMDNSLQEVVKENEDYYLMTLPELETPVXXAKP

SEQ ID NO: 12865 - protein, 30 aa, Artificial Sequence
  Cyclic GFR-binding peptide
  MOD_RES (1)..(3): Xaa is C or S
XGXGEVVMDNSLQEVVKENEDYYVMPLPEL

SEQ ID NO: 12866 - protein, 33 aa, Artificial Sequence
  Cyclic GFR-binding peptide
  MOD_RES (32)..(33): Xaa is C or S
GEVVMENSLQEVVKDYEDYYLMTLPELETPVXX

SEQ ID NO: 12867 - protein, 28 aa, Artificial Sequence
  Cyclic GFR-binding peptide
  MOD_RES (1)..(1): Xaa is C or S
XSRVIMEYQKYVKPKRGVIFLISIPSLA

SEQ ID NO: 12868 - protein, 25 aa, Artificial Sequence
  Cyclic GFR-binding peptide
DNSLQEVVNNASDYYLITLPELRTP

SEQ ID NO: 12869 - protein, 31 aa, Artificial Sequence
  Cyclic GFR-binding peptide
  MOD_RES (27)..(28): Xaa is C or S
DNSLQEVVKENEDYYVMPLPELETPVXXAKP

SEQ ID NO: 12870 - protein, 37 aa, Artificial Sequence
  Cyclic GFR-binding peptide
  MOD_RES (1)..(33): Xaa is C or S
XSRVVMNNSLQEIVNSSDDYYVVPLPELKTPAXTPKT

SEQ ID NO: 12871 - protein, 33 aa, Artificial Sequence
  Cyclic GFR-binding peptide
  MOD_RES (2)..(4): Xaa is C or S
SXKXSKVVMNSLQEVKPTRGVYYVIPLPELDQP

SEQ ID NO: 12872 - protein, 25 aa, Artificial Sequence
  Cyclic GFR-binding peptide
EVVMDQYNKLVVKENEDLYLMSIAS

SEQ ID NO: 12873 - protein, 36 aa, Artificial Sequence
  Cyclic GFR-binding peptide
  MOD_RES (31)..(32): Xaa is C or S
SKVIMEYQKYIKPTKGIIFLISIPSLDQSVXXPSAS

SEQ ID NO: 12874 - protein, 36 aa, Artificial Sequence; identical to SEQ ID NO: 2336
  Cyclic GFR-binding peptide
  MOD_RES (2)..(33)..(34): Xaa is C or S

SEQ ID NO: 12875 - protein, 40 aa, Artificial Sequence; identical to SEQ ID NO: 2337
  Cyclic GFR-binding peptide
  MOD_RES (2)..(34)..(35): Xaa is C or S

SEQ ID NO: 12876 - protein, 27 aa, Artificial Sequence
  Cyclic GFR-binding peptide
GEVVMEQYNKLVVKDYEDLYLMSIASL

SEQ ID NO: 12877 - protein, 32 aa, Artificial Sequence
  Cyclic GFR-binding peptide
  MOD_RES (27)..(27): Xaa is C or S
NEYQKYIVNSSDDIFLVSIPSLKTPAXTPKTV

SEQ ID NO: 12878 - protein, 30 aa, Artificial Sequence
  Cyclic GFR-binding peptide
  MOD_RES (2)..(2): Xaa is C or S
KXSKVIMEYQKYIKPTKGIIFLISIPSLDQ

SEQ ID NO: 12879 - protein, 35 aa, Artificial Sequence
  Cyclic GFR-binding peptide
  MOD_RES (31)..(32): Xaa is C or S
SKVVMNSLQEVKPTRGVYYVIPLPELDQPVXXPSA

SEQ ID NO: 12880 - protein, 32 aa, Artificial Sequence
  Cyclic GFR-binding peptide
  MOD_RES (26)..(27): Xaa is C or S
NSLQEIVNSSDDYYLVTLPELQTPAXXPKPVT

SEQ ID NO: 12881 - protein, 30 aa, Artificial Sequence
  Cyclic GFR-binding peptide
SEVVMDRYKKLVVNNASDFYLISIANLRTP

SEQ ID NO: 12882 - protein, 34 aa, Artificial Sequence
  Cyclic GFR-binding peptide
  MOD_RES (28)..(29): Xaa is C or S
MDNSLQEVVNNASDYYVIPLPELRTPVXXTPPTS

SEQ ID NO: 12883 - protein, 27 aa, Artificial Sequence
  Cyclic GFR-binding peptide
SRVVMNNSLQEIVNSSDDYYLVTLPEL

SEQ ID NO: 12884 - protein, 31 aa, Artificial Sequence; identical to SEQ ID NO: 2346
  Cyclic GFR-binding peptide
  MOD_RES (2)..(2): Xaa is C or S

SEQ ID NO: 12885 - protein, 26 aa, Artificial Sequence
  Cyclic GFR-binding peptide
VIMQYNKLVKPKRGVLYLISIASLAQ

SEQ ID NO: 12886 - protein, 27 aa, Artificial Sequence
  Cyclic GFR-binding peptide
IMNSLQEVKPKRGVYYLITLPELAQPV

SEQ ID NO: 12887 - protein, 31 aa, Artificial Sequence
  Cyclic GFR-binding peptide
  MOD_RES (29)..(30): Xaa is C or S
VIMEYQKYVKPKRGVIFLISIPSLAQPVXXP

SEQ ID NO: 12888 - protein, 33 aa, Artificial Sequence
  Cyclic GFR-binding peptide
  MOD_RES (28)..(29): Xaa is C or S
MNEYQKYIVNSSDDIFLVSIPSLQTPAXXPKPV

SEQ ID NO: 12889 - protein, 22 aa, Artificial Sequence
  Cyclic GFR-binding peptide
RYKKLVVKDYEDFYLMSIANLE

SEQ ID NO: 12890 - protein, 33 aa, Artificial Sequence
  Cyclic GFR-binding peptide
  MOD_RES (1)..(3): Xaa is C or S
XGXSEVVMDQYNKLVVNNASDLYLISIASLRTP

SEQ ID NO: 12891 - protein, 28 aa, Artificial Sequence
  Cyclic GFR-binding peptide
VVMNNSLQEIVNSSDDYYVVPLPELKTP

SEQ ID NO: 12892 - protein, 29 aa, Artificial Sequence
  Cyclic GFR-binding peptide
  MOD_RES (29)..(29): Xaa is C or S
VMDEYQKYVVKENEDIFLMSIPSLETPVX

SEQ ID NO: 12893 - protein, 27 aa, Artificial Sequence
  Cyclic GFR-binding peptide
  MOD_RES (26)..(27): Xaa is C or S
NSLQEVVKDYEDYYVMPLPELETPVXX

SEQ ID NO: 12894 - protein, 31 aa, Artificial Sequence
  Cyclic GFR-binding peptide
  MOD_RES (27)..(28): Xaa is C or S
MNSLQEVKPTRGVYYVIPLPELDQPVXXPSA

SEQ ID NO: 12895 - protein, 28 aa, Artificial Sequence
  Cyclic GFR-binding peptide
  MOD_RES (2)..(2): Xaa is C or S
GXARVVMNNSLQEIVNSSDDYYLVTLPE

SEQ ID NO: 12896 - protein, 32 aa, Artificial Sequence
  Cyclic GFR-binding peptide
  MOD_RES (26)..(27): Xaa is C or S
NSLQEVVKENEDYYLMTLPELETPVXXAKPIK

SEQ ID NO: 12897 - protein, 35 aa, Artificial Sequence; identical to SEQ ID NO: 2361
  Cyclic GFR-binding peptide
  MOD_RES (1)..(33)..(34): Xaa is C or S

SEQ ID NO: 12898 - protein, 31 aa, Artificial Sequence; identical to SEQ ID NO: 2362
  Cyclic GFR-binding peptide
  MOD_RES (27)..(28): Xaa is C or S

SEQ ID NO: 12899 - protein, 38 aa, Artificial Sequence; identical to SEQ ID NO: 2365
  Cyclic GFR-binding peptide
  MOD_RES (2)..(34)..(35): Xaa is C or S

SEQ ID NO: 12900 - protein, 33 aa, Artificial Sequence
  Cyclic GFR-binding peptide
  MOD_RES (2)..(4): Xaa is C or S
RXGXGEVVMDNSLQEVVKENEDYYVMPLPELET

SEQ ID NO: 12901 - protein, 37 aa, Artificial Sequence
  Cyclic GFR-binding peptide
  MOD_RES (2)..(4)..(36)..(37): Xaa is C or S
RXGXGEVVMENSLQEVVKDYEDYYLMTLPELETPVXX

SEQ ID NO: 12902 - protein, 31 aa, Artificial Sequence; identical to SEQ ID NO: 2366
  Cyclic GFR-binding peptide
  MOD_RES (1)..(3): Xaa is C or S

SEQ ID NO: 12903 - protein, 30 aa, Artificial Sequence
  Cyclic GFR-binding peptide
  MOD_RES (1)..(1): Xaa is C or S
XSRVIMEYQKYVKPKRGVIFLISIPSLAQP

SEQ ID NO: 12904 - protein, 32 aa, Artificial Sequence; identical to SEQ ID NO: 2368
  Cyclic GFR-binding peptide
  MOD_RES (1)..(1): Xaa is C or S

SEQ ID NO: 12905 - protein, 40 aa, Artificial Sequence; identical to SEQ ID NO: 2370
  Cyclic GFR-binding peptide
  MOD_RES (2)..(4)..(35)..(36): Xaa is C or S

SEQ ID NO: 12906 - protein, 41 aa, Artificial Sequence
  Cyclic GFR-binding peptide
  MOD_RES (1)..(3)..(35)..(36): Xaa is C or S
XGXARVVMNNSLQEIVNSSDDYYLVTLPELQTPAXXPKPVT

SEQ ID NO: 12907 - protein, 28 aa, Artificial Sequence
  Cyclic GFR-binding peptide
  MOD_RES (27)..(28): Xaa is C or S
NEYQKYIVNSSDDIFLVSIPSLKTPAXX

SEQ ID NO: 12908 - protein, 22 aa, Artificial Sequence
  Cyclic GFR-binding peptide
RYKKLVKPTRGVFYLISIANLD

SEQ ID NO: 12909 - protein, 38 aa, Artificial Sequence
  Cyclic GFR-binding peptide
  MOD_RES (2)..(4)..(35)..(36): Xaa is C or S
SXKXSKVVMEYQKYVKPTRGVIFLISIPSLDQPVXXPS

SEQ ID NO: 12910 - protein, 30 aa, Artificial Sequence; identical to SEQ ID NO: 2374
  Cyclic GFR-binding peptide

SEQ ID NO: 12911 - protein, 34 aa, Artificial Sequence; identical to SEQ ID NO: 2376
  Cyclic GFR-binding peptide
  MOD_RES (1)..(33): Xaa is C or S

SEQ ID NO: 12912 - protein, 32 aa, Artificial Sequence
  Cyclic GFR-binding peptide
  MOD_RES (31)..(32): Xaa is C or S
EVVMDEYQKYVVKENEDIFLMSIPSLETPVXX

SEQ ID NO: 12913 - protein, 37 aa, Artificial Sequence
  Cyclic GFR-binding peptide
  MOD_RES (31)..(32): Xaa is C or S
EVVMDNSLQEVVNNASDYYVIPLPELRTPVXXTPPTS

SEQ ID NO: 12914 - protein, 34 aa, Artificial Sequence
  Cyclic GFR-binding peptide
  MOD_RES (1)..(33)..(34): Xaa is C or S
XSRVVMNNSLQEIVNSSDDYYVVPLPELKTPAXX

SEQ ID NO: 12915 - protein, 38 aa, Artificial Sequence
  Cyclic GFR-binding peptide
  MOD_RES (2)..(4)..(36)..(37): Xaa is C or S
HXGXSRVVMNNSLQEIVNSSDDYYVVPLPELKTPAXXP

SEQ ID NO: 12916 - protein, 33 aa, Artificial Sequence
  Cyclic GFR-binding peptide
  MOD_RES (31)..(31): Xaa is C or S
RVVMNNSLQEIVNSSDDYYVVPLPELKTPAXTP

SEQ ID NO: 12917 - protein, 38 aa, Artificial Sequence
  Cyclic GFR-binding peptide
  MOD_RES (2)..(4)..(36)..(37): Xaa is C or S
HXGXARVVMNEYQKYIVNSSDDIFLVSIPSLQTPAXXP

SEQ ID NO: 12918 - protein, 32 aa, Artificial Sequence; identical to SEQ ID NO: 2382
  Cyclic GFR-binding peptide
  MOD_RES (1)..(3): Xaa is C or S

SEQ ID NO: 12919 - protein, 29 aa, Artificial Sequence
  Cyclic GFR-binding peptide
RVVMNRYKKLIVNSSDDFYLVSIANLKTP

SEQ ID NO: 12920 - protein, 36 aa, Artificial Sequence
  Cyclic GFR-binding peptide
  MOD_RES (2)..(33)..(34): Xaa is C or S
KXSRVIMEYQKYVKPKRGVIFLISIPSLAQPVXXPA

SEQ ID NO: 12921 - protein, 30 aa, Artificial Sequence
  Cyclic GFR-binding peptide
SEVVMDNSLQEVVNNASDYYLITLPELRTP

SEQ ID NO: 12922 - protein, 38 aa, Artificial Sequence; identical to SEQ ID NO: 2391
  Cyclic GFR-binding peptide
  MOD_RES (1)..(32)..(33): Xaa is C or S

SEQ ID NO: 12923 - protein, 29 aa, Artificial Sequence
  Cyclic GFR-binding peptide
  MOD_RES (1)..(1): Xaa is C or S
XARVVMNNSLQEIVNSSDDYYLVTLPELQ

SEQ ID NO: 12924 - protein, 23 aa, Artificial Sequence
  Cyclic GFR-binding peptide
NEYQKYIVNSSDDIFLVSIPSLQ

SEQ ID NO: 12925 - protein, 28 aa, Artificial Sequence
  Cyclic GFR-binding peptide
SRVIMNSLQEVKPKRGVYYLITLPELAQ

SEQ ID NO: 12926 - protein, 34 aa, Artificial Sequence; identical to SEQ ID NO: 2393
  Cyclic GFR-binding peptide
  MOD_RES (30)..(31): Xaa is C or S

SEQ ID NO: 12927 - protein, 39 aa, Artificial Sequence; identical to SEQ ID NO: 2394
  Cyclic GFR-binding peptide
  MOD_RES (1)..(33)..(34): Xaa is C or S

SEQ ID NO: 12928 - protein, 31 aa, Artificial Sequence
  Cyclic GFR-binding peptide
  MOD_RES (30)..(31): Xaa is C or S
VVMNNSLQEIVNSSDDYYLVTLPELQTPAXX

SEQ ID NO: 12929 - protein, 31 aa, Artificial Sequence
  Cyclic GFR-binding peptide
  MOD_RES (27)..(28): Xaa is C or S
MNSLQEVKPKRGVYYLITLPELAQPVXXPAA

SEQ ID NO: 12930 - protein, 41 aa, Artificial Sequence
  Cyclic GFR-binding peptide
  MOD_RES (1)..(3)..(35)..(36): Xaa is C or S
XGXGEVVMENSLQEVVKDYEDYYLMTLPELETPVXXAKPIS

SEQ ID NO: 12931 - protein, 28 aa, Artificial Sequence
  Cyclic GFR-binding peptide
  MOD_RES (26)..(27): Xaa is C or S
NSLQEIVNSSDDYYVVPLPELQTPAXXP

SEQ ID NO: 12932 - protein, 28 aa, Artificial Sequence
  Cyclic GFR-binding peptide
KVVMQYNKLVKPTRGVLYLISIASLDQP

SEQ ID NO: 12933 - protein, 26 aa, Artificial Sequence
  Cyclic GFR-binding peptide
SKVIMEYQKYIKPTKGIIFLISIPSL

SEQ ID NO: 12934 - protein, 27 aa, Artificial Sequence
  Cyclic GFR-binding peptide
  MOD_RES (1)..(1): Xaa is C or S
XSKVVMEYQKYVKPTRGVIFLISIPSL

SEQ ID NO: 12935 - protein, 34 aa, Artificial Sequence; identical to SEQ ID NO: 2399
  Cyclic GFR-binding peptide
  MOD_RES (31)..(32): Xaa is C or S

SEQ ID NO: 12936 - protein, 31 aa, Artificial Sequence
  Cyclic GFR-binding peptide
  MOD_RES (29)..(30): Xaa is C or S
VMENSLQEVVKDYEDYYVMPLPELETPVXXA

SEQ ID NO: 12937 - protein, 39 aa, Artificial Sequence
  Cyclic GFR-binding peptide
  MOD_RES (2)..(4)..(35)..(36): Xaa is C or S
SXKXSKVIMNSLQEIKPTKGIYYVIPLPELDQSVXXPSA

SEQ ID NO: 12938 - protein, 34 aa, Artificial Sequence
  Cyclic GFR-binding peptide
  MOD_RES (31)..(32): Xaa is C or S
RVVMNNSLQEIVNSSDDYYLVTLPELQTPAXXPK

SEQ ID NO: 12939 - protein, 39 aa, Artificial Sequence; identical to SEQ ID NO: 2403
  Cyclic GFR-binding peptide
  MOD_RES (2)..(34)..(35): Xaa is C or S

SEQ ID NO: 12940 - protein, 30 aa, Artificial Sequence
  Cyclic GFR-binding peptide
  MOD_RES (30)..(30): Xaa is C or S
VVMDQYNKLVVNNASDLYLISIASLRTPVX

SEQ ID NO: 12941 - protein, 29 aa, Artificial Sequence
  Cyclic GFR-binding peptide
  MOD_RES (1)..(3): Xaa is C or S
XGXSRVVMNNSLQEIVNSSDDYYLVTLPE

SEQ ID NO: 12942 - protein, 34 aa, Artificial Sequence
  Cyclic GFR-binding peptide
  MOD_RES (31)..(32): Xaa is C or S
RVVMNNSLQEIVNSSDDYYVVPLPELQTPAXXPK

SEQ ID NO: 12943 - protein, 33 aa, Artificial Sequence
  Cyclic GFR-binding peptide
  MOD_RES (30)..(31): Xaa is C or S
VVMNNSLQEIVNSSDDYYVVPLPELQTPAXXPK

SEQ ID NO: 12944 - protein, 26 aa, Artificial Sequence
  Cyclic GFR-binding peptide
VMNNSLQEIVNSSDDYYVVPLPELKT

SEQ ID NO: 12945 - protein, 33 aa, Artificial Sequence; identical to SEQ ID NO: 2410
  Cyclic GFR-binding peptide
  MOD_RES (2)..(2): Xaa is C or S

SEQ ID NO: 12946 - protein, 38 aa, Artificial Sequence
  Cyclic GFR-binding peptide
  MOD_RES (2)..(4)..(36)..(37): Xaa is C or S
RXGXGEVVMEEYQKYVVKDYEDIFLMSIPSLETPVXXA

SEQ ID NO: 12947 - protein, 29 aa, Artificial Sequence
  Cyclic GFR-binding peptide
  MOD_RES (28)..(29): Xaa is C or S
MDRYKKLVVNNASDFYLISIANLRTPVXX

SEQ ID NO: 12948 - protein, 21 aa, Artificial Sequence
  Cyclic GFR-binding peptide
EYQKYIVNSSDDIFLVSIPSL

SEQ ID NO: 12949 - protein, 31 aa, Artificial Sequence; identical to SEQ ID NO: 2414
  Cyclic GFR-binding peptide
  MOD_RES (27)..(28): Xaa is C or S

SEQ ID NO: 12950 - protein, 34 aa, Artificial Sequence; identical to SEQ ID NO: 2416
  Cyclic GFR-binding peptide
  MOD_RES (2)..(4): Xaa is C or S

SEQ ID NO: 12951 - protein, 35 aa, Artificial Sequence; identical to SEQ ID NO: 2419
  Cyclic GFR-binding peptide
  MOD_RES (31)..(32): Xaa is C or S

SEQ ID NO: 12952 - protein, 33 aa, Artificial Sequence; identical to SEQ ID NO: 2420
  Cyclic GFR-binding peptide
  MOD_RES (29)..(30): Xaa is C or S

SEQ ID NO: 12953 - protein, 25 aa, Artificial Sequence
  Cyclic GFR-binding peptide
VVMEEYQKYVVKDYEDIFLMSIPSL

SEQ ID NO: 12954 - protein, 27 aa, Artificial Sequence
  Cyclic GFR-binding peptide
EVVMERYKKLVVKDYEDFYLMSIANLE

SEQ ID NO: 12955 - protein, 36 aa, Artificial Sequence
  Cyclic GFR-binding peptide
  MOD_RES (1)..(33)..(34): Xaa is C or S
XARVVMNNSLQEIVNSSDDYYLVTLPELQTPAXXPK

SEQ ID NO: 12956 - protein, 31 aa, Artificial Sequence
  Cyclic GFR-binding peptide
  MOD_RES (2)..(2): Xaa is C or S
GXGEVVMENSLQEVVKDYEDYYLMTLPELET

SEQ ID NO: 12957 - protein, 32 aa, Artificial Sequence; identical to SEQ ID NO: 2423
  Cyclic GFR-binding peptide
  MOD_RES (26)..(27): Xaa is C or S

SEQ ID NO: 12958 - protein, 34 aa, Artificial Sequence; identical to SEQ ID NO: 2424
  Cyclic GFR-binding peptide
  MOD_RES (31)..(31): Xaa is C or S

SEQ ID NO: 12959 - protein, 29 aa, Artificial Sequence
  Cyclic GFR-binding peptide
  MOD_RES (2)..(2): Xaa is C or S
KXSRVIMEYQKYVKPKRGVIFLISIPSLA

SEQ ID NO: 12960 - protein, 25 aa, Artificial Sequence
  Cyclic GFR-binding peptide
IMNSLQEIKPTKGIYYVIPLPELDQ

SEQ ID NO: 12961 - protein, 25 aa, Artificial Sequence
  Cyclic GFR-binding peptide
VVMDNSLQEVVNNASDYYVIPLPEL

SEQ ID NO: 12962 - protein, 28 aa, Artificial Sequence
  Cyclic GFR-binding peptide
  MOD_RES (27)..(28): Xaa is C or S
DRYKKLVVNNASDFYLISIANLRTPVXX

SEQ ID NO: 12963 - protein, 37 aa, Artificial Sequence; identical to SEQ ID NO: 2427
  Cyclic GFR-binding peptide
  MOD_RES (1)..(33): Xaa is C or S

SEQ ID NO: 12964 - protein, 31 aa, Artificial Sequence
  Cyclic GFR-binding peptide
  MOD_RES (2)..(4): Xaa is C or S
RXGXGEVVMDNSLQEVVKENEDYYVMPLPEL

SEQ ID NO: 12965 - protein, 36 aa, Artificial Sequence
  Cyclic GFR-binding peptide
  MOD_RES (2)..(34)..(35): Xaa is C or S
GXARVVMNNSLQEIVNSSDDYYVVPLPELQTPAXXP

SEQ ID NO: 12966 - protein, 42 aa, Artificial Sequence
  Cyclic GFR-binding peptide
  MOD_RES (2)..(4)..(36)..(37): Xaa is C or S
RXGXSEVVMDNSLQEVVNNASDYYLITLPELRTPVXXTPPTS

SEQ ID NO: 12967 - protein, 32 aa, Artificial Sequence
  Cyclic GFR-binding peptide
  MOD_RES (1)..(1): Xaa is C or S
XSEVVMDRYKKLVVNNASDFYLISIANLRTPV

SEQ ID NO: 12968 - protein, 27 aa, Artificial Sequence
  Cyclic GFR-binding peptide
  MOD_RES (27)..(27): Xaa is C or S
ENSLQEVVKDYEDYYVMPLPELETPVX

SEQ ID NO: 12969 - protein, 24 aa, Artificial Sequence
  Cyclic GFR-binding peptide
VMNEYQKYIVNSSDDIFLVSIPSL

SEQ ID NO: 12970 - protein, 33 aa, Artificial Sequence
  Cyclic GFR-binding peptide
  MOD_RES (2)..(2): Xaa is C or S
GXARVVMNNSLQEIVNSSDDYYVVPLPELQTPA

SEQ ID NO: 12971 - protein, 24 aa, Artificial Sequence
  Cyclic GFR-binding peptide
MNRYKKLIVNSSDDFYLVSIANLQ

SEQ ID NO: 12972 - protein, 29 aa, Artificial Sequence
  Cyclic GFR-binding peptide
  MOD_RES (28)..(29): Xaa is C or S
MDRYKKLVVKENEDFYLMSIANLETPVXX

SEQ ID NO: 12973 - protein, 21 aa, Artificial Sequence
  Cyclic GFR-binding peptide
EEYQKYVVKDYEDIFLMSIPS

SEQ ID NO: 12974 - protein, 27 aa, Artificial Sequence
  Cyclic GFR-binding peptide
IMEYQKYIKPTKGIIFLISIPSLDQSV

SEQ ID NO: 12975 - protein, 32 aa, Artificial Sequence
  Cyclic GFR-binding peptide
  MOD_RES (32)..(32): Xaa is C or S
SEVVMDNSLQEVVNNASDYYVIPLPELRTPVX

SEQ ID NO: 12976 - protein, 39 aa, Artificial Sequence; identical to SEQ ID NO: 2432
  Cyclic GFR-binding peptide
  MOD_RES (1)..(3)..(35)..(36): Xaa is C or S

SEQ ID NO: 12977 - protein, 29 aa, Artificial Sequence
  Cyclic GFR-binding peptide
  MOD_RES (26)..(27): Xaa is C or S
NSLQEIVNSSDDYYVVPLPELKTPAXXPK

SEQ ID NO: 12978 - protein, 23 aa, Artificial Sequence
  Cyclic GFR-binding peptide
VMENSLQEVVKDYEDYYLMTLPE

SEQ ID NO: 12979 - protein, 40 aa, Artificial Sequence
  Cyclic GFR-binding peptide
  MOD_RES (2)..(34)..(35): Xaa is C or S
GXGEVVMENSLQEVVKDYEDYYVMPLPELETPVXXAKPIS

SEQ ID NO: 12980 - protein, 27 aa, Artificial Sequence
  Cyclic GFR-binding peptide
ARVVMNNSLQEIVNSSDDYYLVTLPEL

SEQ ID NO: 12981 - protein, 32 aa, Artificial Sequence
  Cyclic GFR-binding peptide
  MOD_RES (29)..(30): Xaa is C or S
VMDNSLQEVVKENEDYYVMPLPELETPVXXAK

SEQ ID NO: 12982 - protein, 37 aa, Artificial Sequence
  Cyclic GFR-binding peptide
  MOD_RES (32)..(32): Xaa is C or S
SRVVMNEYQKYIVNSSDDIFLVSIPSLKTPAXTPKTV

SEQ ID NO: 12983 - protein, 30 aa, Artificial Sequence
  Cyclic GFR-binding peptide
  MOD_RES (29)..(30): Xaa is C or S
VMNNSLQEIVNSSDDYYLVTLPELKTPAXX

SEQ ID NO: 12984 - protein, 23 aa, Artificial Sequence
  Cyclic GFR-binding peptide
VMEYQKYVKPTRGVIFLISIPSL

SEQ ID NO: 12985 - protein, 32 aa, Artificial Sequence
  Cyclic GFR-binding peptide
  MOD_RES (31)..(31): Xaa is C or S
RVVMNNSLQEIVNSSDDYYVVPLPELKTPAXT

SEQ ID NO: 12986 - protein, 31 aa, Artificial Sequence; identical to SEQ ID NO: 2438
  Cyclic GFR-binding peptide
  MOD_RES (1)..(3): Xaa is C or S

SEQ ID NO: 12987 - protein, 33 aa, Artificial Sequence
  Cyclic GFR-binding peptide
  MOD_RES (2)..(4): Xaa is C or S
RXGXGEVVMENSLQEVVKDYEDYYVMPLPELET

SEQ ID NO: 12988 - protein, 31 aa, Artificial Sequence; identical to SEQ ID NO: 2439
  Cyclic GFR-binding peptide
  MOD_RES (2)..(2): Xaa is C or S

SEQ ID NO: 12989 - protein, 25 aa, Artificial Sequence
  Cyclic GFR-binding peptide
KVVMEYQKYVKPTRGVIFLISIPSL

SEQ ID NO: 12990 - protein, 23 aa, Artificial Sequence
  Cyclic GFR-binding peptide
MERYKKLVVKDYEDFYLMSIANL

SEQ ID NO: 12991 - protein, 34 aa, Artificial Sequence
  Cyclic GFR-binding peptide
  MOD_RES (2)..(33)..(34): Xaa is C or S
KXSKVIMNSLQEIKPTKGIYYLITLPELDQSVXX

SEQ ID NO: 12992 - protein, 40 aa, Artificial Sequence; identical to SEQ ID NO: 2444
  Cyclic GFR-binding peptide
  MOD_RES (1)..(3)..(35)..(36): Xaa is C or S

SEQ ID NO: 12993 - protein, 28 aa, Artificial Sequence
  Cyclic GFR-binding peptide
RVIMEYQKYVKPKRGVIFLISIPSLAQP

SEQ ID NO: 12994 - protein, 35 aa, Artificial Sequence
  Cyclic GFR-binding peptide
  MOD_RES (31)..(32): Xaa is C or S
EVVMDRYKKLVVNNASDFYLISIANLRTPVXXTPP

SEQ ID NO: 12995 - protein, 29 aa, Artificial Sequence
  Cyclic GFR-binding peptide
VVMERYKKLVVKDYEDFYLMSIANLETPV

SEQ ID NO: 12996 - protein, 22 aa, Artificial Sequence
  Cyclic GFR-binding peptide
NSLQEVVKDYEDYYLMTLPELE

SEQ ID NO: 12997 - protein, 33 aa, Artificial Sequence
  Cyclic GFR-binding peptide
  MOD_RES (31)..(32): Xaa is C or S
EVVMDNSLQEVVKENEDYYLMTLPELETPVXXA

SEQ ID NO: 12998 - protein, 28 aa, Artificial Sequence
  Cyclic GFR-binding peptide
VMNEYQKYIVNSSDDIFLVSIPSLQTPA

SEQ ID NO: 12999 - protein, 32 aa, Artificial Sequence; identical to SEQ ID NO: 2449
  Cyclic GFR-binding peptide
  MOD_RES (30)..(31): Xaa is C or S

SEQ ID NO: 13000 - protein, 34 aa, Artificial Sequence; identical to SEQ ID NO: 2451
  Cyclic GFR-binding peptide
  MOD_RES (32)..(32): Xaa is C or S

SEQ ID NO: 13001 - protein, 34 aa, Artificial Sequence
  Cyclic GFR-binding peptide
  MOD_RES (30)..(31): Xaa is C or S
VVMNNSLQEIVNSSDDYYVVPLPELKTPAXXPKP

SEQ ID NO: 13002 - protein, 37 aa, Artificial Sequence; identical to SEQ ID NO: 2452
  Cyclic GFR-binding peptide
  MOD_RES (2)..(4)..(35)..(36): Xaa is C or S

SEQ ID NO: 13003 - protein, 30 aa, Artificial Sequence; identical to SEQ ID NO: 2453
  Cyclic GFR-binding peptide
  MOD_RES (28)..(29): Xaa is C or S

SEQ ID NO: 13004 - protein, 32 aa, Artificial Sequence
  Cyclic GFR-binding peptide
  MOD_RES (2)..(2): Xaa is C or S
KXSKVIMEYQKYIKPTKGIIFLISIPSLDQSV

SEQ ID NO: 13005 - protein, 34 aa, Artificial Sequence; identical to SEQ ID NO: 2456
  Cyclic GFR-binding peptide
  MOD_RES (2)..(34): Xaa is C or S

SEQ ID NO: 13006 - protein, 41 aa, Artificial Sequence
  Cyclic GFR-binding peptide
  MOD_RES (1)..(3)..(35)..(36): Xaa is C or S
XGXSEVVMDNSLQEVVNNASDYYVIPLPELRTPVXXTPPTS

SEQ ID NO: 13007 - protein, 37 aa, Artificial Sequence
  Cyclic GFR-binding peptide
  MOD_RES (2)..(34)..(35): Xaa is C or S
GXGEVVMDNSLQEVVKENEDYYLMTLPELETPVXXAK

SEQ ID NO: 13008 - protein, 29 aa, Artificial Sequence
  Cyclic GFR-binding peptide
EVVMENSLQEVVKDYEDYYVMPLPELETP

SEQ ID NO: 13009 - protein, 23 aa, Artificial Sequence
  Cyclic GFR-binding peptide
NNSLQEIVNSSDDYYVVPLPELK

SEQ ID NO: 13010 - protein, 32 aa, Artificial Sequence; identical to SEQ ID NO: 2459
  Cyclic GFR-binding peptide
  MOD_RES (1)..(1): Xaa is C or S

SEQ ID NO: 13011 - protein, 23 aa, Artificial Sequence
  Cyclic GFR-binding peptide
NQYNKLIVNSSDDLYLVSIASLK

SEQ ID NO: 13012 - protein, 42 aa, Artificial Sequence; identical to SEQ ID NO: 2461
  Cyclic GFR-binding peptide
  MOD_RES (2)..(4)..(36): Xaa is C or S

SEQ ID NO: 13013 - protein, 39 aa, Artificial Sequence
  Cyclic GFR-binding peptide
  MOD_RES (2)..(4)..(36)..(37): Xaa is C or S
RXGXGEVVMDNSLQEVVKENEDYYLMTLPELETPVXXAK

SEQ ID NO: 13014 - protein, 26 aa, Artificial Sequence
  Cyclic GFR-binding peptide
SRVIMRYKKLVKPKRGVFYLISIANL

SEQ ID NO: 13015 - protein, 26 aa, Artificial Sequence
  Cyclic GFR-binding peptide
MEYQKYVKPTRGVIFLISIPSLDQPV

SEQ ID NO: 13016 - protein, 34 aa, Artificial Sequence; identical to SEQ ID NO: 2465
  Cyclic GFR-binding peptide
  MOD_RES (1)..(32)..(33): Xaa is C or S

SEQ ID NO: 13017 - protein, 31 aa, Artificial Sequence
  Cyclic GFR-binding peptide
  MOD_RES (30)..(31): Xaa is C or S
VVMDNSLQEVVNNASDYYVIPLPELRTPVXX

SEQ ID NO: 13018 - protein, 28 aa, Artificial Sequence
  Cyclic GFR-binding peptide
  MOD_RES (1)..(1): Xaa is C or S
XGEVVMENSLQEVVKDYEDYYLMTLPEL

SEQ ID NO: 13019 - protein, 36 aa, Artificial Sequence; identical to SEQ ID NO: 2468
  Cyclic GFR-binding peptide
  MOD_RES (1)..(3)..(34)..(35): Xaa is C or S

SEQ ID NO: 13020 - protein, 20 aa, Artificial Sequence
  Cyclic GFR-binding peptide
NSLQEIKPTKGIYYVIPLPE

SEQ ID NO: 13021 - protein, 38 aa, Artificial Sequence; identical to SEQ ID NO: 2469
  Cyclic GFR-binding peptide
  MOD_RES (2)..(4)..(35)..(36): Xaa is C or S

SEQ ID NO: 13022 - protein, 41 aa, Artificial Sequence
  Cyclic GFR-binding peptide
  MOD_RES (1)..(3)..(35)..(36): Xaa is C or S
XGXARVVMNEYQKYIVNSSDDIFLVSIPSLQTPAXXPKPVT

SEQ ID NO: 13023 - protein, 32 aa, Artificial Sequence
  Cyclic GFR-binding peptide
  MOD_RES (28)..(29): Xaa is C or S
MNEYQKYIVNSSDDIFLVSIPSLKTPAXXPKP

SEQ ID NO: 13024 - protein, 32 aa, Artificial Sequence; identical to SEQ ID NO: 2472
  Cyclic GFR-binding peptide
  MOD_RES (2)..(4): Xaa is C or S

SEQ ID NO: 13025 - protein, 32 aa, Artificial Sequence; identical to SEQ ID NO: 2473
  Cyclic GFR-binding peptide
  MOD_RES (28)..(29): Xaa is C or S

SEQ ID NO: 13026 - protein, 35 aa, Artificial Sequence; identical to SEQ ID NO: 2475
  Cyclic GFR-binding peptide
  MOD_RES (29)..(30): Xaa is C or S

SEQ ID NO: 13027 - protein, 30 aa, Artificial Sequence; identical to SEQ ID NO: 2477
  Cyclic GFR-binding peptide
  MOD_RES (26)..(27): Xaa is C or S

SEQ ID NO: 13028 - protein, 31 aa, Artificial Sequence
  Cyclic GFR-binding peptide
  MOD_RES (29)..(30): Xaa is C or S
VMNNSLQEIVNSSDDYYVVPLPELQTPAXXP

SEQ ID NO: 13029 - protein, 23 aa, Artificial Sequence
  Cyclic GFR-binding peptide
VIMNSLQEIKPTKGIYYVIPLPE

SEQ ID NO: 13030 - protein, 36 aa, Artificial Sequence
  Cyclic GFR-binding peptide
  MOD_RES (2)..(4)..(36): Xaa is C or S
RXGXGEVVMDEYQKYVVKENEDIFLMSIPSLETPVX

SEQ ID NO: 13031 - protein, 30 aa, Artificial Sequence
  Cyclic GFR-binding peptide
SRVIMEYQKYVKPKRGVIFLISIPSLAQPV

SEQ ID NO: 13032 - protein, 29 aa, Artificial Sequence
  Cyclic GFR-binding peptide
  MOD_RES (26)..(27): Xaa is C or S
NSLQEVVKENEDYYLMTLPELETPVXXAK

SEQ ID NO: 13033 - protein, 25 aa, Artificial Sequence
  Cyclic GFR-binding peptide
VVMDQYNKLVVKENEDLYLMSIASL

SEQ ID NO: 13034 - protein, 32 aa, Artificial Sequence
  Cyclic GFR-binding peptide
  MOD_RES (1)..(3): Xaa is C or S
XGXGEVVMDNSLQEVVKENEDYYVMPLPELET

SEQ ID NO: 13035 - protein, 23 aa, Artificial Sequence
  Cyclic GFR-binding peptide
VMDEYQKYVVKENEDIFLMSIPS

SEQ ID NO: 13036 - protein, 36 aa, Artificial Sequence; identical to SEQ ID NO: 2481
  Cyclic GFR-binding peptide
  MOD_RES (32)..(33): Xaa is C or S

SEQ ID NO: 13037 - protein, 31 aa, Artificial Sequence
  Cyclic GFR-binding peptide
  MOD_RES (28)..(29): Xaa is C or S
VMNSLQEVKPTRGVYYVIPLPELDQPVXXPS

SEQ ID NO: 13038 - protein, 30 aa, Artificial Sequence
  Cyclic GFR-binding peptide
  MOD_RES (1)..(3): Xaa is C or S
XGXGEVVMENSLQEVVKDYEDYYVMPLPEL

SEQ ID NO: 13039 - protein, 35 aa, Artificial Sequence
  Cyclic GFR-binding peptide
  MOD_RES (1)..(3)..(35): Xaa is C or S
XGXGEVVMDEYQKYVVKENEDIFLMSIPSLETPVX

SEQ ID NO: 13040 - protein, 38 aa, Artificial Sequence
  Cyclic GFR-binding peptide
  MOD_RES (1)..(3)..(34)..(35): Xaa is C or S
XKXSKVIMEYQKYIKPTKGIIFLISIPSLDQSVXXPSA

SEQ ID NO: 13041 - protein, 34 aa, Artificial Sequence; identical to SEQ ID NO: 2483
  Cyclic GFR-binding peptide
  MOD_RES (2)..(4): Xaa is C or S

SEQ ID NO: 13042 - protein, 29 aa, Artificial Sequence
  Cyclic GFR-binding peptide
RVIMEYQKYVKPKRGVIFLISIPSLAQPV

SEQ ID NO: 13043 - protein, 30 aa, Artificial Sequence; identical to SEQ ID NO: 2485
  Cyclic GFR-binding peptide
  MOD_RES (30)..(30): Xaa is C or S

SEQ ID NO: 13044 - protein, 31 aa, Artificial Sequence
  Cyclic GFR-binding peptide
  MOD_RES (2)..(4): Xaa is C or S
RXGXGEVVMENSLQEVVKDYEDYYVMPLPEL

SEQ ID NO: 13045 - protein, 28 aa, Artificial Sequence
  Cyclic GFR-binding peptide
EVVMDRYKKLVVKENEDFYLMSIANLET

SEQ ID NO: 13046 - protein, 29 aa, Artificial Sequence
  Cyclic GFR-binding peptide
  MOD_RES (26)..(27): Xaa is C or S
EYQKYIVNSSDDIFLVSIPSLQTPAXXPK

SEQ ID NO: 13047 - protein, 27 aa, Artificial Sequence
  Cyclic GFR-binding peptide
  MOD_RES (27)..(27): Xaa is C or S
NNSLQEIVNSSDDYYVVPLPELQTPAX

SEQ ID NO: 13048 - protein, 33 aa, Artificial Sequence; identical to SEQ ID NO: 2492
  Cyclic GFR-binding peptide
  MOD_RES (1)..(3): Xaa is C or S

SEQ ID NO: 13049 - protein, 29 aa, Artificial Sequence
  Cyclic GFR-binding peptide
EVVMDEYQKYVVKENEDIFLMSIPSLETP

SEQ ID NO: 13050 - protein, 25 aa, Artificial Sequence
  Cyclic GFR-binding peptide
MNQYNKLIVNSSDDLYLVSIASLQT

SEQ ID NO: 13051 - protein, 30 aa, Artificial Sequence; identical to SEQ ID NO: 2497
  Cyclic GFR-binding peptide
  MOD_RES (2)..(4): Xaa is C or S

SEQ ID NO: 13052 - protein, 36 aa, Artificial Sequence
  Cyclic GFR-binding peptide
  MOD_RES (2)..(4)..(36): Xaa is C or S
RXGXGEVVMDNSLQEVVKENEDYYLMTLPELETPVX

SEQ ID NO: 13053 - protein, 35 aa, Artificial Sequence
  Cyclic GFR-binding peptide
  MOD_RES (2)..(34)..(35): Xaa is C or S
GXSEVVMDNSLQEVVNNASDYYLITLPELRTPVXX

SEQ ID NO: 13054 - protein, 34 aa, Artificial Sequence; identical to SEQ ID NO: 2500
  Cyclic GFR-binding peptide
  MOD_RES (2)..(33)..(34): Xaa is C or S

SEQ ID NO: 13055 - protein, 30 aa, Artificial Sequence; identical to SEQ ID NO: 2501
  Cyclic GFR-binding peptide
  MOD_RES (28)..(29): Xaa is C or S

SEQ ID NO: 13056 - protein, 34 aa, Artificial Sequence
  Cyclic GFR-binding peptide
  MOD_RES (1)..(3): Xaa is C or S
XGXSRVVMNNSLQEIVNSSDDYYLVTLPELKTPA

SEQ ID NO: 13057 - protein, 31 aa, Artificial Sequence; identical to SEQ ID NO: 2502
  Cyclic GFR-binding peptide
  MOD_RES (29)..(29): Xaa is C or S

SEQ ID NO: 13058 - protein, 24 aa, Artificial Sequence
  Cyclic GFR-binding peptide
DNSLQEVVKENEDYYLMTLPELET

SEQ ID NO: 13059 - protein, 32 aa, Artificial Sequence
  Cyclic GFR-binding peptide
  MOD_RES (30)..(31): Xaa is C or S
VVMNNSLQEIVNSSDDYYLVTLPELQTPAXXP

SEQ ID NO: 13060 - protein, 27 aa, Artificial Sequence
  Cyclic GFR-binding peptide
  MOD_RES (2)..(2): Xaa is C or S
KXSRVIMNSLQEVKPKRGVYYLITLPE

SEQ ID NO: 13061 - protein, 22 aa, Artificial Sequence
  Cyclic GFR-binding peptide
QYNKLVVKENEDLYLMSIASLE

SEQ ID NO: 13062 - protein, 32 aa, Artificial Sequence
  Cyclic GFR-binding peptide
  MOD_RES (1)..(1): Xaa is C or S
XSRVVMNNSLQEIVNSSDDYYVVPLPELKTPA

SEQ ID NO: 13063 - protein, 37 aa, Artificial Sequence
  Cyclic GFR-binding peptide
  MOD_RES (1)..(3)..(35)..(36): Xaa is C or S
XGXSEVVMDNSLQEVVNNASDYYLITLPELRTPVXXT

SEQ ID NO: 13064 - protein, 26 aa, Artificial Sequence
  Cyclic GFR-binding peptide
  MOD_RES (1)..(1): Xaa is C or S
XSKVIMRYKKLIKPTKGIFYLISIAN

SEQ ID NO: 13065 - protein, 36 aa, Artificial Sequence
  Cyclic GFR-binding peptide
  MOD_RES (2)..(4)..(36): Xaa is C or S
HXGXSRVVMNEYQKYIVNSSDDIFLVSIPSLKTPAX

SEQ ID NO: 13066 - protein, 31 aa, Artificial Sequence; identical to SEQ ID NO: 2512
  Cyclic GFR-binding peptide
  MOD_RES (30)..(31): Xaa is C or S

SEQ ID NO: 13067 - protein, 25 aa, Artificial Sequence
  Cyclic GFR-binding peptide
RYKKLIVNSSDDFYLVSIANLQTPA

SEQ ID NO: 13068 - protein, 22 aa, Artificial Sequence
  Cyclic GFR-binding peptide
EYQKYIKPTKGIIFLISIPSLD

SEQ ID NO: 13069 - protein, 29 aa, Artificial Sequence
  Cyclic GFR-binding peptide
EVVMDNSLQEVVNNASDYYVIPLPELRTP

SEQ ID NO: 13070 - protein, 34 aa, Artificial Sequence
  Cyclic GFR-binding peptide
  MOD_RES (30)..(31): Xaa is C or S
VVMDNSLQEVVKENEDYYLMTLPELETPVXXAKP

SEQ ID NO: 13071 - protein, 38 aa, Artificial Sequence
  Cyclic GFR-binding peptide
  MOD_RES (32)..(33): Xaa is C or S
GEVVMDNSLQEVVKENEDYYVMPLPELETPVXXAKPIK

SEQ ID NO: 13072 - protein, 32 aa, Artificial Sequence
  Cyclic GFR-binding peptide
  MOD_RES (30)..(31): Xaa is C or S
VVMDQYNKLVVNNASDLYLISIASLRTPVXXT

SEQ ID NO: 13073 - protein, 23 aa, Artificial Sequence
  Cyclic GFR-binding peptide
EYQKYIKPTKGIIFLISIPSLDQ

SEQ ID NO: 13074 - protein, 37 aa, Artificial Sequence
  Cyclic GFR-binding peptide
  MOD_RES (2)..(4)..(36): Xaa is C or S
HXGXSRVVMNEYQKYIVNSSDDIFLVSIPSLKTPAXT

SEQ ID NO: 13075 - protein, 26 aa, Artificial Sequence
  Cyclic GFR-binding peptide
  MOD_RES (26)..(26): Xaa is C or S
QYNKLVKPTRGVLYLISIASLDQPVX

SEQ ID NO: 13076 - protein, 29 aa, Artificial Sequence
  Cyclic GFR-binding peptide
SRVVMNQYNKLIVNSSDDLYLVSIASLKT

SEQ ID NO: 13077 - protein, 34 aa, Artificial Sequence; identical to SEQ ID NO: 2520
  Cyclic GFR-binding peptide
  MOD_RES (32)..(33): Xaa is C or S

SEQ ID NO: 13078 - protein, 31 aa, Artificial Sequence
  Cyclic GFR-binding peptide
  MOD_RES (31)..(31): Xaa is C or S
EVVMDNSLQEVVKENEDYYVMPLPELETPVX

SEQ ID NO: 13079 - protein, 28 aa, Artificial Sequence
  Cyclic GFR-binding peptide
ARVVMNNSLQEIVNSSDDYYLVTLPELQ

SEQ ID NO: 13080 - protein, 29 aa, Artificial Sequence
  Cyclic GFR-binding peptide
VVMNNSLQEIVNSSDDYYVVPLPELQTPA

SEQ ID NO: 13081 - protein, 33 aa, Artificial Sequence
  Cyclic GFR-binding peptide
  MOD_RES (30)..(31): Xaa is C or S
KVIMNSLQEIKPTKGIYYLITLPELDQSVXXPS

SEQ ID NO: 13082 - protein, 27 aa, Artificial Sequence
  Cyclic GFR-binding peptide
RVVMNQYNKLIVNSSDDLYLVSIASLK

SEQ ID NO: 13083 - protein, 33 aa, Artificial Sequence; identical to SEQ ID NO: 2526
  Cyclic GFR-binding peptide
  MOD_RES (27)..(28): Xaa is C or S

SEQ ID NO: 13084 - protein, 34 aa, Artificial Sequence
  Cyclic GFR-binding peptide
  MOD_RES (1)..(3): Xaa is C or S
XGXSRVVMNEYQKYIVNSSDDIFLVSIPSLKTPA

SEQ ID NO: 13085 - protein, 39 aa, Artificial Sequence; identical to SEQ ID NO: 2529
  Cyclic GFR-binding peptide
  MOD_RES (2)..(33)..(34): Xaa is C or S

SEQ ID NO: 13086 - protein, 41 aa, Artificial Sequence
  Cyclic GFR-binding peptide
  MOD_RES (1)..(3)..(35)..(36): Xaa is C or S
XGXGEVVMDNSLQEVVKENEDYYVMPLPELETPVXXAKPIK

SEQ ID NO: 13087 - protein, 32 aa, Artificial Sequence
  Cyclic GFR-binding peptide
  MOD_RES (1)..(3): Xaa is C or S
XGXARVVMNNSLQEIVNSSDDYYLVTLPELQT

SEQ ID NO: 13088 - protein, 30 aa, Artificial Sequence
  Cyclic GFR-binding peptide
EVVMENSLQEVVKDYEDYYVMPLPELETPV

SEQ ID NO: 13089 - protein, 21 aa, Artificial Sequence
  Cyclic GFR-binding peptide
RYKKLIVNSSDDFYLVSIANL

SEQ ID NO: 13090 - protein, 24 aa, Artificial Sequence
  Cyclic GFR-binding peptide
QYNKLVKPKRGVLYLISIASLAQP

SEQ ID NO: 13091 - protein, 35 aa, Artificial Sequence; identical to SEQ ID NO: 2538
  Cyclic GFR-binding peptide
  MOD_RES (2)..(4): Xaa is C or S

SEQ ID NO: 13092 - protein, 30 aa, Artificial Sequence
  Cyclic GFR-binding peptide
  MOD_RES (2)..(4): Xaa is C or S
RXGXSEVVMDEYQKYVVNNASDIFLISIPS

SEQ ID NO: 13093 - protein, 36 aa, Artificial Sequence; identical to SEQ ID NO: 2539
  Cyclic GFR-binding peptide
  MOD_RES (31)..(32): Xaa is C or S

SEQ ID NO: 13094 - protein, 33 aa, Artificial Sequence
  Cyclic GFR-binding peptide
  MOD_RES (32)..(33): Xaa is C or S
SEVVMDRYKKLVVNNASDFYLISIANLRTPVXX

SEQ ID NO: 13095 - protein, 27 aa, Artificial Sequence
  Cyclic GFR-binding peptide
KVIMEYQKYIKPTKGIIFLISIPSLDQ

SEQ ID NO: 13096 - protein, 28 aa, Artificial Sequence
  Cyclic GFR-binding peptide
  MOD_RES (27)..(28): Xaa is C or S
MQYNKLVKPKRGVLYLISIASLAQPVXX

SEQ ID NO: 13097 - protein, 36 aa, Artificial Sequence
  Cyclic GFR-binding peptide
  MOD_RES (2)..(34): Xaa is C or S
GXSRVVMNNSLQEIVNSSDDYYLVTLPELKTPAXTP

SEQ ID NO: 13098 - protein, 23 aa, Artificial Sequence
  Cyclic GFR-binding peptide
IMNSLQEIKPTKGIYYLITLPEL

SEQ ID NO: 13099 - protein, 32 aa, Artificial Sequence; identical to SEQ ID NO: 2546
  Cyclic GFR-binding peptide
  MOD_RES (27)..(28): Xaa is C or S

SEQ ID NO: 13100 - protein, 29 aa, Artificial Sequence
  Cyclic GFR-binding peptide
  MOD_RES (27)..(28): Xaa is C or S
NNSLQEIVNSSDDYYLVTLPELKTPAXXP

SEQ ID NO: 13101 - protein, 32 aa, Artificial Sequence
  Cyclic GFR-binding peptide
  MOD_RES (1)..(3): Xaa is C or S
XGXARVVMNEYQKYIVNSSDDIFLVSIPSLQT

SEQ ID NO: 13102 - protein, 23 aa, Artificial Sequence
  Cyclic GFR-binding peptide
EYQKYIVNSSDDIFLVSIPSLQT

SEQ ID NO: 13103 - protein, 32 aa, Artificial Sequence
  Cyclic GFR-binding peptide
  MOD_RES (2)..(4): Xaa is C or S
HXGXSRVVMNNSLQEIVNSSDDYYLVTLPELK

SEQ ID NO: 13104 - protein, 36 aa, Artificial Sequence
  Cyclic GFR-binding peptide
  MOD_RES (30)..(31): Xaa is C or S
VVMDEYQKYVVKENEDIFLMSIPSLETPVXXAKPIK

SEQ ID NO: 13105 - protein, 32 aa, Artificial Sequence
  Cyclic GFR-binding peptide
  MOD_RES (1)..(3): Xaa is C or S
XKXSKVVMNSLQEVKPTRGVYYVIPLPELDQP

SEQ ID NO: 13106 - protein, 35 aa, Artificial Sequence
  Cyclic GFR-binding peptide
  MOD_RES (1)..(3)..(35): Xaa is C or S
XGXGEVVMDNSLQEVVKENEDYYLMTLPELETPVX

SEQ ID NO: 13107 - protein, 24 aa, Artificial Sequence
  Cyclic GFR-binding peptide
IMEYQKYIKPTKGIIFLISIPSLD

SEQ ID NO: 13108 - protein, 33 aa, Artificial Sequence
  Cyclic GFR-binding peptide
  MOD_RES (28)..(29): Xaa is C or S
MDNSLQEVVKENEDYYVMPLPELETPVXXAKPI

SEQ ID NO: 13109 - protein, 30 aa, Artificial Sequence; identical to SEQ ID NO: 2554
  Cyclic GFR-binding peptide

SEQ ID NO: 13110 - protein, 36 aa, Artificial Sequence
  Cyclic GFR-binding peptide
  MOD_RES (2)..(34)..(35): Xaa is C or S
GXSRVVMNNSLQEIVNSSDDYYLVTLPELKTPAXXP

SEQ ID NO: 13111 - protein, 26 aa, Artificial Sequence
  Cyclic GFR-binding peptide
  MOD_RES (1)..(1): Xaa is C or S
XSRVIMNSLQEVKPKRGVYYLITLPE

SEQ ID NO: 13112 - protein, 27 aa, Artificial Sequence
  Cyclic GFR-binding peptide
VVMDNSLQEVVKENEDYYVMPLPELET

SEQ ID NO: 13113 - protein, 30 aa, Artificial Sequence
  Cyclic GFR-binding peptide
  MOD_RES (2)..(4): Xaa is C or S
HXGXSRVVMNNSLQEIVNSSDDYYLVTLPE

SEQ ID NO: 13114 - protein, 35 aa, Artificial Sequence
  Cyclic GFR-binding peptide
  MOD_RES (1)..(3)..(34)..(35): Xaa is C or S
XKXSKVIMNSLQEIKPTKGIYYLITLPELDQSVXX

SEQ ID NO: 13115 - protein, 31 aa, Artificial Sequence
  Cyclic GFR-binding peptide
  MOD_RES (26)..(26): Xaa is C or S
EYQKYIVNSSDDIFLVSIPSLKTPAXTPKTV

SEQ ID NO: 13116 - protein, 40 aa, Artificial Sequence
  Cyclic GFR-binding peptide
  MOD_RES (2)..(34)..(35): Xaa is C or S
GXARVVMNNSLQEIVNSSDDYYVVPLPELQTPAXXPKPVT

SEQ ID NO: 13117 - protein, 38 aa, Artificial Sequence; identical to SEQ ID NO: 2558
  Cyclic GFR-binding peptide
  MOD_RES (2)..(4)..(35)..(36): Xaa is C or S

SEQ ID NO: 13118 - protein, 20 aa, Artificial Sequence
  Cyclic GFR-binding peptide
QYNKLIVNSSDDLYLVSIAS

SEQ ID NO: 13119 - protein, 32 aa, Artificial Sequence
  Cyclic GFR-binding peptide
  MOD_RES (2)..(2): Xaa is C or S
KXSKVVMNSLQEVKPTRGVYYVIPLPELDQPV

SEQ ID NO: 13120 - protein, 24 aa, Artificial Sequence
  Cyclic GFR-binding peptide
NSLQEVVNNASDYYLITLPELRTP

SEQ ID NO: 13121 - protein, 20 aa, Artificial Sequence
  Cyclic GFR-binding peptide
EYQKYVVKDYEDIFLMSIPS

SEQ ID NO: 13122 - protein, 30 aa, Artificial Sequence; identical to SEQ ID NO: 2563
  Cyclic GFR-binding peptide
  MOD_RES (2)..(4): Xaa is C or S

SEQ ID NO: 13123 - protein, 37 aa, Artificial Sequence
  Cyclic GFR-binding peptide
  MOD_RES (31)..(31): Xaa is C or S
RVVMNNSLQEIVNSSDDYYLVTLPELKTPAXTPKTVH

SEQ ID NO: 13124 - protein, 37 aa, Artificial Sequence
  Cyclic GFR-binding peptide
  MOD_RES (2)..(34)..(35): Xaa is C or S
GXGEVVMEEYQKYVVKDYEDIFLMSIPSLETPVXXAK

SEQ ID NO: 13125 - protein, 30 aa, Artificial Sequence
  Cyclic GFR-binding peptide
  MOD_RES (2)..(4): Xaa is C or S
HXGXSRVVMNEYQKYIVNSSDDIFLVSIPS

SEQ ID NO: 13126 - protein, 32 aa, Artificial Sequence
  Cyclic GFR-binding peptide
  MOD_RES (2)..(4): Xaa is C or S
SXKXSKVIMNSLQEIKPTKGIYYLITLPELDQ

SEQ ID NO: 13127 - protein, 27 aa, Artificial Sequence
  Cyclic GFR-binding peptide
VVMNNSLQEIVNSSDDYYLVTLPELKT

SEQ ID NO: 13128 - protein, 30 aa, Artificial Sequence
  Cyclic GFR-binding peptide
  MOD_RES (26)..(27): Xaa is C or S
EYQKYIKPTKGIIFLISIPSLDQSVXXPSA

SEQ ID NO: 13129 - protein, 37 aa, Artificial Sequence
  Cyclic GFR-binding peptide
  MOD_RES (2)..(34)..(35): Xaa is C or S
GXSRVVMNEYQKYIVNSSDDIFLVSIPSLKTPAXXPK

SEQ ID NO: 13130 - protein, 31 aa, Artificial Sequence
  Cyclic GFR-binding peptide
  MOD_RES (29)..(30): Xaa is C or S
VMDNSLQEVVNNASDYYLITLPELRTPVXXT

SEQ ID NO: 13131 - protein, 33 aa, Artificial Sequence; identical to SEQ ID NO: 2574
  Cyclic GFR-binding peptide
  MOD_RES (30)..(30): Xaa is C or S

SEQ ID NO: 13132 - protein, 30 aa, Artificial Sequence; identical to SEQ ID NO: 2575
  Cyclic GFR-binding peptide
  MOD_RES (28)..(29): Xaa is C or S

SEQ ID NO: 13133 - protein, 32 aa, Artificial Sequence
  Cyclic GFR-binding peptide
  MOD_RES (2)..(4): Xaa is C or S
SXKXSKVIMEYQKYIKPTKGIIFLISIPSLDQ

SEQ ID NO: 13134 - protein, 25 aa, Artificial Sequence
  Cyclic GFR-binding peptide
QYNKLIVNSSDDLYLVSIASLQTPA

SEQ ID NO: 13135 - protein, 23 aa, Artificial Sequence
  Cyclic GFR-binding peptide
EQYNKLVVKDYEDLYLMSIASLE

SEQ ID NO: 13136 - protein, 37 aa, Artificial Sequence
  Cyclic GFR-binding peptide
  MOD_RES (2)..(4)..(35)..(36): Xaa is C or S
SXKXSKVVMEYQKYVKPTRGVIFLISIPSLDQPVXXP

SEQ ID NO: 13137 - protein, 34 aa, Artificial Sequence; identical to SEQ ID NO: 2579
  Cyclic GFR-binding peptide
  MOD_RES (2)..(4): Xaa is C or S

SEQ ID NO: 13138 - protein, 38 aa, Artificial Sequence; identical to SEQ ID NO: 2581
  Cyclic GFR-binding peptide
  MOD_RES (2)..(4)..(36): Xaa is C or S

SEQ ID NO: 13139 - protein, 29 aa, Artificial Sequence
  Cyclic GFR-binding peptide
  MOD_RES (29)..(29): Xaa is C or S
VMENSLQEVVKDYEDYYLMTLPELETPVX

SEQ ID NO: 13140 - protein, 31 aa, Artificial Sequence
  Cyclic GFR-binding peptide
  MOD_RES (31)..(31): Xaa is C or S
SKVIMNSLQEIKPTKGIYYLITLPELDQSVX

SEQ ID NO: 13141 - protein, 32 aa, Artificial Sequence; identical to SEQ ID NO: 2585
  Cyclic GFR-binding peptide
  MOD_RES (31)..(32): Xaa is C or S

SEQ ID NO: 13142 - protein, 35 aa, Artificial Sequence
  Cyclic GFR-binding peptide
  MOD_RES (31)..(32): Xaa is C or S
RVVMNNSLQEIVNSSDDYYLVTLPELQTPAXXPKP

SEQ ID NO: 13143 - protein, 37 aa, Artificial Sequence
  Cyclic GFR-binding peptide
  MOD_RES (2)..(4)..(36): Xaa is C or S
HXGXSRVVMNNSLQEIVNSSDDYYLVTLPELKTPAXT

SEQ ID NO: 13144 - protein, 28 aa, Artificial Sequence
  Cyclic GFR-binding peptide
SRVIMQYNKLVKPKRGVLYLISIASLAQ

SEQ ID NO: 13145 - protein, 41 aa, Artificial Sequence; identical to SEQ ID NO: 2594
  Cyclic GFR-binding peptide
  MOD_RES (1)..(3)..(35)..(36): Xaa is C or S

SEQ ID NO: 13146 - protein, 25 aa, Artificial Sequence
  Cyclic GFR-binding peptide
VVMDRYKKLVVNNASDFYLISIANL

SEQ ID NO: 13147 - protein, 29 aa, Artificial Sequence
  Cyclic GFR-binding peptide
  MOD_RES (1)..(1): Xaa is C or S
XSKVIMQYNKLIKPTKGILYLISIASLDQ

SEQ ID NO: 13148 - protein, 39 aa, Artificial Sequence; identical to SEQ ID NO: 2597
  Cyclic GFR-binding peptide
  MOD_RES (1)..(3)..(34)..(35): Xaa is C or S

SEQ ID NO: 13149 - protein, 34 aa, Artificial Sequence
  Cyclic GFR-binding peptide
  MOD_RES (2)..(34): Xaa is C or S
GXGEVVMDNSLQEVVKENEDYYVMPLPELETPVX

SEQ ID NO: 13150 - protein, 30 aa, Artificial Sequence
  Cyclic GFR-binding peptide
  MOD_RES (29)..(30): Xaa is C or S
VMNEYQKYIVNSSDDIFLVSIPSLQTPAXX

SEQ ID NO: 13151 - protein, 33 aa, Artificial Sequence
  Cyclic GFR-binding peptide
  MOD_RES (28)..(29): Xaa is C or S
IMNSLQEVKPKRGVYYLITLPELAQPVXXPAAS

SEQ ID NO: 13152 - protein, 32 aa, Artificial Sequence
  Cyclic GFR-binding peptide
  MOD_RES (28)..(29): Xaa is C or S
IMEYQKYIKPTKGIIFLISIPSLDQSVXXPSA

SEQ ID NO: 13153 - protein, 21 aa, Artificial Sequence
  Cyclic GFR-binding peptide
NSLQEIKPTKGIYYVIPLPEL

SEQ ID NO: 13154 - protein, 30 aa, Artificial Sequence; identical to SEQ ID NO: 2599
  Cyclic GFR-binding peptide
  MOD_RES (2)..(2): Xaa is C or S

SEQ ID NO: 13155 - protein, 31 aa, Artificial Sequence; identical to SEQ ID NO: 2600
  Cyclic GFR-binding peptide

SEQ ID NO: 13156 - protein, 40 aa, Artificial Sequence
  Cyclic GFR-binding peptide
  MOD_RES (2)..(34): Xaa is C or S
GXSRVVMNNSLQEIVNSSDDYYLVTLPELKTPAXTPKTVH

SEQ ID NO: 13157 - protein, 30 aa, Artificial Sequence; identical to SEQ ID NO: 2602
  Cyclic GFR-binding peptide
  MOD_RES (27)..(27): Xaa is C or S

SEQ ID NO: 13158 - protein, 29 aa, Artificial Sequence
  Cyclic GFR-binding peptide
  MOD_RES (28)..(29): Xaa is C or S
MDEYQKYVVKENEDIFLMSIPSLETPVXX

SEQ ID NO: 13159 - protein, 39 aa, Artificial Sequence
  Cyclic GFR-binding peptide
  MOD_RES (1)..(33)..(34): Xaa is C or S
XGEVVMDEYQKYVVKENEDIFLMSIPSLETPVXXAKPIK

SEQ ID NO: 13160 - protein, 21 aa, Artificial Sequence
  Cyclic GFR-binding peptide
NSLQEVVKENEDYYLMTLPEL

SEQ ID NO: 13161 - protein, 37 aa, Artificial Sequence
  Cyclic GFR-binding peptide
  MOD_RES (2)..(34)..(35): Xaa is C or S
GXGEVVMENSLQEVVKDYEDYYVMPLPELETPVXXAK

SEQ ID NO: 13162 - protein, 34 aa, Artificial Sequence; identical to SEQ ID NO: 2606
  Cyclic GFR-binding peptide
  MOD_RES (31)..(32): Xaa is C or S

SEQ ID NO: 13163 - protein, 38 aa, Artificial Sequence
  Cyclic GFR-binding peptide
  MOD_RES (2)..(34)..(35): Xaa is C or S
GXSEVVMDQYNKLVVNNASDLYLISIASLRTPVXXTPP

SEQ ID NO: 13164 - protein, 35 aa, Artificial Sequence; identical to SEQ ID NO: 2608
  Cyclic GFR-binding peptide
  MOD_RES (30)..(31): Xaa is C or S

SEQ ID NO: 13165 - protein, 34 aa, Artificial Sequence; identical to SEQ ID NO: 2609
  Cyclic GFR-binding peptide
  MOD_RES (30)..(31): Xaa is C or S

SEQ ID NO: 13166 - protein, 22 aa, Artificial Sequence
  Cyclic GFR-binding peptide
EYQKYIVNSSDDIFLVSIPSLQ

SEQ ID NO: 13167 - protein, 27 aa, Artificial Sequence
  Cyclic GFR-binding peptide
ARVVMNEYQKYIVNSSDDIFLVSIPSL

SEQ ID NO: 13168 - protein, 36 aa, Artificial Sequence
  Cyclic GFR-binding peptide
  MOD_RES (31)..(32): Xaa is C or S
EVVMDNSLQEVVKENEDYYLMTLPELETPVXXAKPI

SEQ ID NO: 13169 - protein, 31 aa, Artificial Sequence
  Cyclic GFR-binding peptide
  MOD_RES (2)..(2): Xaa is C or S
KXSRVIMNSLQEVKPKRGVYYLITLPELAQP

SEQ ID NO: 13170 - protein, 29 aa, Artificial Sequence
  Cyclic GFR-binding peptide
  MOD_RES (1)..(3): Xaa is C or S
XKXSKVIMRYKKLIKPTKGIFYLISIANL

SEQ ID NO: 13171 - protein, 37 aa, Artificial Sequence
  Cyclic GFR-binding peptide
  MOD_RES (2)..(4)..(36)..(37): Xaa is C or S
HXGXARVVMNNSLQEIVNSSDDYYVVPLPELQTPAXX

SEQ ID NO: 13172 - protein, 30 aa, Artificial Sequence
  Cyclic GFR-binding peptide
  MOD_RES (30)..(30): Xaa is C or S
VVMNEYQKYIVNSSDDIFLVSIPSLQTPAX

SEQ ID NO: 13173 - protein, 24 aa, Artificial Sequence
  Cyclic GFR-binding peptide
MNNSLQEIVNSSDDYYLVTLPELK

SEQ ID NO: 13174 - protein, 29 aa, Artificial Sequence
  Cyclic GFR-binding peptide
  MOD_RES (27)..(28): Xaa is C or S
MEYQKYVKPKRGVIFLISIPSLAQPVXXP

SEQ ID NO: 13175 - protein, 28 aa, Artificial Sequence
  Cyclic GFR-binding peptide
  MOD_RES (27)..(28): Xaa is C or S
MEYQKYVKPTRGVIFLISIPSLDQPVXX

SEQ ID NO: 13176 - protein, 31 aa, Artificial Sequence; identical to SEQ ID NO: 2615
  Cyclic GFR-binding peptide
  MOD_RES (27)..(28): Xaa is C or S

SEQ ID NO: 13177 - protein, 31 aa, Artificial Sequence
  Cyclic GFR-binding peptide
  MOD_RES (30)..(31): Xaa is C or S
KVIMNSLQEIKPTKGIYYLITLPELDQSVXX

SEQ ID NO: 13178 - protein, 33 aa, Artificial Sequence; identical to SEQ ID NO: 2617
  Cyclic GFR-binding peptide
  MOD_RES (28)..(29): Xaa is C or S

SEQ ID NO: 13179 - protein, 27 aa, Artificial Sequence
  Cyclic GFR-binding peptide
SRVVMNEYQKYIVNSSDDIFLVSIPSL

SEQ ID NO: 13180 - protein, 29 aa, Artificial Sequence
  Cyclic GFR-binding peptide
  MOD_RES (27)..(28): Xaa is C or S
MRYKKLIKPTKGIFYLISIANLDQSVXXP

SEQ ID NO: 13181 - protein, 30 aa, Artificial Sequence
  Cyclic GFR-binding peptide
  MOD_RES (28)..(29): Xaa is C or S
MDNSLQEVVKENEDYYVMPLPELETPVXXA

SEQ ID NO: 13182 - protein, 30 aa, Artificial Sequence
  Cyclic GFR-binding peptide
RVVMNNSLQEIVNSSDDYYLVTLPELKTPA

SEQ ID NO: 13183 - protein, 39 aa, Artificial Sequence
  Cyclic GFR-binding peptide
  MOD_RES (2)..(4)..(36)..(37): Xaa is C or S
HXGXARVVMNNSLQEIVNSSDDYYVVPLPELQTPAXXPK

SEQ ID NO: 13184 - protein, 26 aa, Artificial Sequence
  Cyclic GFR-binding peptide
MEYQKYVKPKRGVIFLISIPSLAQPV

SEQ ID NO: 13185 - protein, 22 aa, Artificial Sequence
  Cyclic GFR-binding peptide
DNSLQEVVKENEDYYLMTLPEL

SEQ ID NO: 13186 - protein, 31 aa, Artificial Sequence; identical to SEQ ID NO: 2625
  Cyclic GFR-binding peptide
  MOD_RES (2)..(2): Xaa is C or S

SEQ ID NO: 13187 - protein, 32 aa, Artificial Sequence
  Cyclic GFR-binding peptide
  MOD_RES (29)..(30): Xaa is C or S
VMDEYQKYVVKENEDIFLMSIPSLETPVXXAK

SEQ ID NO: 13188 - protein, 29 aa, Artificial Sequence
  Cyclic GFR-binding peptide
  MOD_RES (2)..(2): Xaa is C or S
GXSEVVMDQYNKLVVNNASDLYLISIASL

SEQ ID NO: 13189 - protein, 33 aa, Artificial Sequence; identical to SEQ ID NO: 2628
  Cyclic GFR-binding peptide
  MOD_RES (1)..(33): Xaa is C or S

SEQ ID NO: 13190 - protein, 42 aa, Artificial Sequence
  Cyclic GFR-binding peptide
  MOD_RES (2)..(4)..(36)..(37): Xaa is C or S
RXGXGEVVMENSLQEVVKDYEDYYVMPLPELETPVXXAKPIS

SEQ ID NO: 13191 - protein, 32 aa, Artificial Sequence; identical to SEQ ID NO: 2631
  Cyclic GFR-binding peptide
  MOD_RES (27)..(27): Xaa is C or S

SEQ ID NO: 13192 - protein, 32 aa, Artificial Sequence
  Cyclic GFR-binding peptide
  MOD_RES (2)..(2): Xaa is C or S
GXSRVVMNEYQKYIVNSSDDIFLVSIPSLKTP

SEQ ID NO: 13193 - protein, 32 aa, Artificial Sequence; identical to SEQ ID NO: 2632
  Cyclic GFR-binding peptide
  MOD_RES (27)..(28): Xaa is C or S

SEQ ID NO: 13194 - protein, 34 aa, Artificial Sequence; identical to SEQ ID NO: 2634
  Cyclic GFR-binding peptide
  MOD_RES (1)..(33)..(34): Xaa is C or S

SEQ ID NO: 13195 - protein, 31 aa, Artificial Sequence; identical to SEQ ID NO: 2636
  Cyclic GFR-binding peptide
  MOD_RES (29)..(30): Xaa is C or S

SEQ ID NO: 13196 - protein, 24 aa, Artificial Sequence
  Cyclic GFR-binding peptide
RYKKLVKPKRGVFYLISIANLAQP

SEQ ID NO: 13197 - protein, 34 aa, Artificial Sequence
  Cyclic GFR-binding peptide
  MOD_RES (2)..(33)..(34): Xaa is C or S
KXSKVIMNSLQEIKPTKGIYYVIPLPELDQSVXX

SEQ ID NO: 13198 - protein, 37 aa, Artificial Sequence
  Cyclic GFR-binding peptide
  MOD_RES (2)..(34)..(35): Xaa is C or S
GXSRVVMNNSLQEIVNSSDDYYLVTLPELKTPAXXPK

SEQ ID NO: 13199 - protein, 38 aa, Artificial Sequence
  Cyclic GFR-binding peptide
  MOD_RES (2)..(33)..(34): Xaa is C or S
KXSKVIMNSLQEIKPTKGIYYVIPLPELDQSVXXPSAS

SEQ ID NO: 13200 - protein, 25 aa, Artificial Sequence
  Cyclic GFR-binding peptide
IMQYNKLVKPKRGVLYLISIASLAQ

SEQ ID NO: 13201 - protein, 34 aa, Artificial Sequence
  Cyclic GFR-binding peptide
  MOD_RES (32)..(33): Xaa is C or S
SRVVMNNSLQEIVNSSDDYYLVTLPELKTPAXXP

SEQ ID NO: 13202 - protein, 27 aa, Artificial Sequence
  Cyclic GFR-binding peptide
SKVVMQYNKLVKPTRGVLYLISIASLD

SEQ ID NO: 13203 - protein, 32 aa, Artificial Sequence
  Cyclic GFR-binding peptide
  MOD_RES (2)..(4): Xaa is C or S
RXGXGEVVMDNSLQEVVKENEDYYVMPLPELE

SEQ ID NO: 13204 - protein, 36 aa, Artificial Sequence; identical to SEQ ID NO: 2643
  Cyclic GFR-binding peptide
  MOD_RES (30)..(31): Xaa is C or S

SEQ ID NO: 13205 - protein, 27 aa, Artificial Sequence
  Cyclic GFR-binding peptide
  MOD_RES (27)..(27): Xaa is C or S
NQYNKLIVNSSDDLYLVSIASLKTPAX

SEQ ID NO: 13206 - protein, 37 aa, Artificial Sequence
  Cyclic GFR-binding peptide
  MOD_RES (1)..(33)..(34): Xaa is C or S
XARVVMNNSLQEIVNSSDDYYLVTLPELQTPAXXPKP

SEQ ID NO: 13207 - protein, 32 aa, Artificial Sequence
  Cyclic GFR-binding peptide
  MOD_RES (28)..(29): Xaa is C or S
MDQYNKLVVNNASDLYLISIASLRTPVXXTPP

SEQ ID NO: 13208 - protein, 36 aa, Artificial Sequence; identical to SEQ ID NO: 2647
  Cyclic GFR-binding peptide
  MOD_RES (2)..(4)..(35)..(36): Xaa is C or S

SEQ ID NO: 13209 - protein, 29 aa, Artificial Sequence
  Cyclic GFR-binding peptide
  MOD_RES (27)..(28): Xaa is C or S
DNSLQEVVNNASDYYVIPLPELRTPVXXT

SEQ ID NO: 13210 - protein, 23 aa, Artificial Sequence
  Cyclic GFR-binding peptide
NSLQEIVNSSDDYYVVPLPELKT

SEQ ID NO: 13211 - protein, 28 aa, Artificial Sequence
  Cyclic GFR-binding peptide
  MOD_RES (1)..(1): Xaa is C or S
XSRVVMNRYKKLIVNSSDDFYLVSIANL

SEQ ID NO: 13212 - protein, 42 aa, Artificial Sequence
  Cyclic GFR-binding peptide
  MOD_RES (2)..(4)..(36): Xaa is C or S
HXGXSRVVMNNSLQEIVNSSDDYYLVTLPELKTPAXTPKTVH

SEQ ID NO: 13213 - protein, 26 aa, Artificial Sequence
  Cyclic GFR-binding peptide
  MOD_RES (26)..(26): Xaa is C or S
RYKKLVKPTRGVFYLISIANLDQPVX

SEQ ID NO: 13214 - protein, 29 aa, Artificial Sequence
  Cyclic GFR-binding peptide
  MOD_RES (26)..(27): Xaa is C or S
RYKKLVKPKRGVFYLISIANLAQPVXXPA

SEQ ID NO: 13215 - protein, 32 aa, Artificial Sequence; identical to SEQ ID NO: 2652
  Cyclic GFR-binding peptide
  MOD_RES (1)..(1): Xaa is C or S

SEQ ID NO: 13216 - protein, 33 aa, Artificial Sequence
  Cyclic GFR-binding peptide
  MOD_RES (32)..(33): Xaa is C or S
ARVVMNNSLQEIVNSSDDYYVVPLPELQTPAXX

SEQ ID NO: 13217 - protein, 38 aa, Artificial Sequence; identical to SEQ ID NO: 2655
  Cyclic GFR-binding peptide
  MOD_RES (1)..(33)..(34): Xaa is C or S

SEQ ID NO: 13218 - protein, 37 aa, Artificial Sequence; identical to SEQ ID NO: 2656
  Cyclic GFR-binding peptide
  MOD_RES (31)..(32): Xaa is C or S

SEQ ID NO: 13219 - protein, 40 aa, Artificial Sequence
  Cyclic GFR-binding peptide
  MOD_RES (1)..(3)..(35)..(36): Xaa is C or S
XGXGEVVMDNSLQEVVKENEDYYVMPLPELETPVXXAKPI

SEQ ID NO: 13220 - protein, 32 aa, Artificial Sequence; identical to SEQ ID NO: 2658
  Cyclic GFR-binding peptide
  MOD_RES (28)..(29): Xaa is C or S

SEQ ID NO: 13221 - protein, 33 aa, Artificial Sequence
  Cyclic GFR-binding peptide
  MOD_RES (27)..(28): Xaa is C or S
DQYNKLVVNNASDLYLISIASLRTPVXXTPPTS

SEQ ID NO: 13222 - protein, 26 aa, Artificial Sequence
  Cyclic GFR-binding peptide
VVMDQYNKLVVNNASDLYLISIASLR

SEQ ID NO: 13223 - protein, 24 aa, Artificial Sequence
  Cyclic GFR-binding peptide
QYNKLVKPTRGVLYLISIASLDQP

SEQ ID NO: 13224 - protein, 31 aa, Artificial Sequence
  Cyclic GFR-binding peptide
  MOD_RES (31)..(31): Xaa is C or S
RVVMNNSLQEIVNSSDDYYLVTLPELQTPAX

SEQ ID NO: 13225 - protein, 30 aa, Artificial Sequence
  Cyclic GFR-binding peptide
  MOD_RES (27)..(28): Xaa is C or S
EEYQKYVVKDYEDIFLMSIPSLETPVXXAK

SEQ ID NO: 13226 - protein, 31 aa, Artificial Sequence; identical to SEQ ID NO: 2665
  Cyclic GFR-binding peptide

SEQ ID NO: 13227 - protein, 37 aa, Artificial Sequence; identical to SEQ ID NO: 2666
  Cyclic GFR-binding peptide
  MOD_RES (2)..(34)..(35): Xaa is C or S

SEQ ID NO: 13228 - protein, 32 aa, Artificial Sequence; identical to SEQ ID NO: 2667
  Cyclic GFR-binding peptide
  MOD_RES (26)..(27): Xaa is C or S

SEQ ID NO: 13229 - protein, 27 aa, Artificial Sequence
  Cyclic GFR-binding peptide
IMEYQKYVKPKRGVIFLISIPSLAQPV

SEQ ID NO: 13230 - protein, 27 aa, Artificial Sequence
  Cyclic GFR-binding peptide
RVVMNNSLQEIVNSSDDYYLVTLPELK

SEQ ID NO: 13231 - protein, 30 aa, Artificial Sequence
  Cyclic GFR-binding peptide
  MOD_RES (2)..(2): Xaa is C or S
GXSRVVMNEYQKYIVNSSDDIFLVSIPSLK

SEQ ID NO: 13232 - protein, 37 aa, Artificial Sequence
  Cyclic GFR-binding peptide
  MOD_RES (2)..(4)..(36)..(37): Xaa is C or S
RXGXGEVVMEEYQKYVVKDYEDIFLMSIPSLETPVXX

SEQ ID NO: 13233 - protein, 27 aa, Artificial Sequence
  Cyclic GFR-binding peptide
  MOD_RES (26)..(27): Xaa is C or S
QYNKLVKPKRGVLYLISIASLAQPVXX

SEQ ID NO: 13234 - protein, 30 aa, Artificial Sequence
  Cyclic GFR-binding peptide
SRVVMNNSLQEIVNSSDDYYVVPLPELKTP

SEQ ID NO: 13235 - protein, 29 aa, Artificial Sequence
  Cyclic GFR-binding peptide
  MOD_RES (29)..(29): Xaa is C or S
VIMQYNKLIKPTKGILYLISIASLDQSVX

SEQ ID NO: 13236 - protein, 31 aa, Artificial Sequence
  Cyclic GFR-binding peptide
  MOD_RES (1)..(3): Xaa is C or S
XGXGEVVMENSLQEVVKDYEDYYLMTLPELE

SEQ ID NO: 13237 - protein, 26 aa, Artificial Sequence
  Cyclic GFR-binding peptide
MDQYNKLVVNNASDLYLISIASLRTP

SEQ ID NO: 13238 - protein, 24 aa, Artificial Sequence
  Cyclic GFR-binding peptide
VVMDNSLQEVVNNASDYYVIPLPE

SEQ ID NO: 13239 - protein, 42 aa, Artificial Sequence
  Cyclic GFR-binding peptide
  MOD_RES (2)..(4)..(36)..(37): Xaa is C or S
RXGXSEVVMDEYQKYVVNNASDIFLISIPSLRTPVXXTPPTS

SEQ ID NO: 13240 - protein, 36 aa, Artificial Sequence; identical to SEQ ID NO: 2678
  Cyclic GFR-binding peptide
  MOD_RES (32)..(33): Xaa is C or S

SEQ ID NO: 13241 - protein, 40 aa, Artificial Sequence
  Cyclic GFR-binding peptide
  MOD_RES (2)..(4)..(35)..(36): Xaa is C or S
SXKXSKVVMNSLQEVKPTRGVYYVIPLPELDQPVXXPSAS

SEQ ID NO: 13242 - protein, 32 aa, Artificial Sequence; identical to SEQ ID NO: 2682
  Cyclic GFR-binding peptide
  MOD_RES (27)..(28): Xaa is C or S

SEQ ID NO: 13243 - protein, 28 aa, Artificial Sequence
  Cyclic GFR-binding peptide
  MOD_RES (28)..(28): Xaa is C or S
MNNSLQEIVNSSDDYYVVPLPELQTPAX

SEQ ID NO: 13244 - protein, 34 aa, Artificial Sequence
  Cyclic GFR-binding peptide
  MOD_RES (28)..(29): Xaa is C or S
MNNSLQEIVNSSDDYYLVTLPELKTPAXXPKPVY

SEQ ID NO: 13245 - protein, 33 aa, Artificial Sequence
  Cyclic GFR-binding peptide
  MOD_RES (1)..(3): Xaa is C or S
XGXARVVMNNSLQEIVNSSDDYYVVPLPELQTP

SEQ ID NO: 13246 - protein, 23 aa, Artificial Sequence
  Cyclic GFR-binding peptide
MQYNKLVKPKRGVLYLISIASLA

SEQ ID NO: 13247 - protein, 32 aa, Artificial Sequence; identical to SEQ ID NO: 2685
  Cyclic GFR-binding peptide
  MOD_RES (28)..(29): Xaa is C or S

SEQ ID NO: 13248 - protein, 36 aa, Artificial Sequence; identical to SEQ ID NO: 2687
  Cyclic GFR-binding peptide
  MOD_RES (1)..(3)..(35)..(36): Xaa is C or S

SEQ ID NO: 13249 - protein, 29 aa, Artificial Sequence
  Cyclic GFR-binding peptide
  MOD_RES (27)..(28): Xaa is C or S
EQYNKLVVKDYEDLYLMSIASLETPVXXA

SEQ ID NO: 13250 - protein, 26 aa, Artificial Sequence
  Cyclic GFR-binding peptide
DRYKKLVVKENEDFYLMSIANLETPV

SEQ ID NO: 13251 - protein, 31 aa, Artificial Sequence
  Cyclic GFR-binding peptide
  MOD_RES (2)..(4): Xaa is C or S
HXGXARVVMNNSLQEIVNSSDDYYLVTLPEL

SEQ ID NO: 13252 - protein, 30 aa, Artificial Sequence
  Cyclic GFR-binding peptide
  MOD_RES (26)..(27): Xaa is C or S
NSLQEIVNSSDDYYLVTLPELQTPAXXPKP

SEQ ID NO: 13253 - protein, 41 aa, Artificial Sequence; identical to SEQ ID NO: 2695
  Cyclic GFR-binding peptide
  MOD_RES (1)..(3)..(35)..(36): Xaa is C or S

SEQ ID NO: 13254 - protein, 28 aa, Artificial Sequence
  Cyclic GFR-binding peptide
  MOD_RES (1)..(1): Xaa is C or S
XSRVVMNNSLQEIVNSSDDYYVVPLPEL

SEQ ID NO: 13255 - protein, 31 aa, Artificial Sequence; identical to SEQ ID NO: 2696
  Cyclic GFR-binding peptide
  MOD_RES (30)..(30): Xaa is C or S

SEQ ID NO: 13256 - protein, 32 aa, Artificial Sequence
  Cyclic GFR-binding peptide
  MOD_RES (1)..(1): Xaa is C or S
XGEVVMENSLQEVVKDYEDYYLMTLPELETPV

SEQ ID NO: 13257 - protein, 37 aa, Artificial Sequence; identical to SEQ ID NO: 2701
  Cyclic GFR-binding peptide
  MOD_RES (2)..(4)..(36): Xaa is C or S

SEQ ID NO: 13258 - protein, 36 aa, Artificial Sequence
  Cyclic GFR-binding peptide
  MOD_RES (31)..(32): Xaa is C or S
EVVMDNSLQEVVNNASDYYLITLPELRTPVXXTPPT

SEQ ID NO: 13259 - protein, 21 aa, Artificial Sequence
  Cyclic GFR-binding peptide
EYQKYVKPTRGVIFLISIPSL

SEQ ID NO: 13260 - protein, 32 aa, Artificial Sequence
  Cyclic GFR-binding peptide
  MOD_RES (31)..(32): Xaa is C or S
EVVMDNSLQEVVKENEDYYVMPLPELETPVXX

SEQ ID NO: 13261 - protein, 38 aa, Artificial Sequence
  Cyclic GFR-binding peptide
  MOD_RES (1)..(3)..(34)..(35): Xaa is C or S
XKXSKVVMEYQKYVKPTRGVIFLISIPSLDQPVXXPSA

SEQ ID NO: 13262 - protein, 24 aa, Artificial Sequence
  Cyclic GFR-binding peptide
MDRYKKLVVKENEDFYLMSIANLE

SEQ ID NO: 13263 - protein, 35 aa, Artificial Sequence
  Cyclic GFR-binding peptide
  MOD_RES (29)..(29): Xaa is C or S
VMNNSLQEIVNSSDDYYVVPLPELKTPAXTPKTVH

SEQ ID NO: 13264 - protein, 34 aa, Artificial Sequence; identical to SEQ ID NO: 2709
  Cyclic GFR-binding peptide
  MOD_RES (1)..(32)..(33): Xaa is C or S

SEQ ID NO: 13265 - protein, 29 aa, Artificial Sequence
  Cyclic GFR-binding peptide
  MOD_RES (29)..(29): Xaa is C or S
VMNQYNKLIVNSSDDLYLVSIASLQTPAX

SEQ ID NO: 13266 - protein, 27 aa, Artificial Sequence
  Cyclic GFR-binding peptide
  MOD_RES (26)..(27): Xaa is C or S
NSLQEVVNNASDYYLITLPELRTPVXX

SEQ ID NO: 13267 - protein, 31 aa, Artificial Sequence
  Cyclic GFR-binding peptide
  MOD_RES (29)..(30): Xaa is C or S
VMDNSLQEVVKENEDYYVMPLPELETPVXXA

SEQ ID NO: 13268 - protein, 28 aa, Artificial Sequence
  Cyclic GFR-binding peptide
  MOD_RES (2)..(2): Xaa is C or S
GXGEVVMERYKKLVVKDYEDFYLMSIAN

SEQ ID NO: 13269 - protein, 33 aa, Artificial Sequence
  Cyclic GFR-binding peptide
  MOD_RES (1)..(3): Xaa is C or S
XKXSKVVMEYQKYVKPTRGVIFLISIPSLDQPV

SEQ ID NO: 13270 - protein, 26 aa, Artificial Sequence
  Cyclic GFR-binding peptide
VVMRYKKLVKPTRGVFYLISIANLDQ

SEQ ID NO: 13271 - protein, 34 aa, Artificial Sequence
  Cyclic GFR-binding peptide
  MOD_RES (32)..(33): Xaa is C or S
GEVVMDEYQKYVVKENEDIFLMSIPSLETPVXXA

SEQ ID NO: 13272 - protein, 32 aa, Artificial Sequence
  Cyclic GFR-binding peptide
  MOD_RES (1)..(32): Xaa is C or S
XSRVIMEYQKYVKPKRGVIFLISIPSLAQPVX

SEQ ID NO: 13273 - protein, 41 aa, Artificial Sequence; identical to SEQ ID NO: 2722
  Cyclic GFR-binding peptide
  MOD_RES (2)..(4)..(35)..(36): Xaa is C or S

SEQ ID NO: 13274 - protein, 25 aa, Artificial Sequence
  Cyclic GFR-binding peptide
RVIMRYKKLVKPKRGVFYLISIANL

SEQ ID NO: 13275 - protein, 37 aa, Artificial Sequence
  Cyclic GFR-binding peptide
  MOD_RES (2)..(34)..(35): Xaa is C or S
GXARVVMNNSLQEIVNSSDDYYLVTLPELQTPAXXPK

SEQ ID NO: 13276 - protein, 28 aa, Artificial Sequence
  Cyclic GFR-binding peptide
GEVVMEEYQKYVVKDYEDIFLMSIPSLE

SEQ ID NO: 13277 - protein, 40 aa, Artificial Sequence; identical to SEQ ID NO: 2726
  Cyclic GFR-binding peptide
  MOD_RES (1)..(3)..(34)..(35): Xaa is C or S

SEQ ID NO: 13278 - protein, 34 aa, Artificial Sequence; identical to SEQ ID NO: 2727
  Cyclic GFR-binding peptide
  MOD_RES (2)..(34): Xaa is C or S

SEQ ID NO: 13279 - protein, 32 aa, Artificial Sequence; identical to SEQ ID NO: 2729
  Cyclic GFR-binding peptide
  MOD_RES (27)..(28): Xaa is C or S

SEQ ID NO: 13280 - protein, 34 aa, Artificial Sequence; identical to SEQ ID NO: 2732
  Cyclic GFR-binding peptide
  MOD_RES (1)..(33)..(34): Xaa is C or S

SEQ ID NO: 13281 - protein, 32 aa, Artificial Sequence
  Cyclic GFR-binding peptide
  MOD_RES (1)..(3): Xaa is C or S
XKXSKVIMNSLQEIKPTKGIYYVIPLPELDQS

SEQ ID NO: 13282 - protein, 37 aa, Artificial Sequence; identical to SEQ ID NO: 2734
  Cyclic GFR-binding peptide
  MOD_RES (31)..(32): Xaa is C or S

SEQ ID NO: 13283 - protein, 29 aa, Artificial Sequence
  Cyclic GFR-binding peptide
  MOD_RES (28)..(29): Xaa is C or S
MEQYNKLVVKDYEDLYLMSIASLETPVXX

SEQ ID NO: 13284 - protein, 32 aa, Artificial Sequence
  Cyclic GFR-binding peptide
  MOD_RES (31)..(31): Xaa is C or S
RVVMNEYQKYIVNSSDDIFLVSIPSLKTPAXT

SEQ ID NO: 13285 - protein, 29 aa, Artificial Sequence
  Cyclic GFR-binding peptide
VVMDRYKKLVVKENEDFYLMSIANLETPV

SEQ ID NO: 13286 - protein, 36 aa, Artificial Sequence; identical to SEQ ID NO: 2739
  Cyclic GFR-binding peptide
  MOD_RES (2)..(4)..(35)..(36): Xaa is C or S

SEQ ID NO: 13287 - protein, 36 aa, Artificial Sequence; identical to SEQ ID NO: 2740
  Cyclic GFR-binding peptide
  MOD_RES (31)..(32): Xaa is C or S

SEQ ID NO: 13288 - protein, 33 aa, Artificial Sequence
  Cyclic GFR-binding peptide
  MOD_RES (29)..(30): Xaa is C or S
VMNEYQKYIVNSSDDIFLVSIPSLQTPAXXPKP

SEQ ID NO: 13289 - protein, 30 aa, Artificial Sequence
  Cyclic GFR-binding peptide
  MOD_RES (1)..(1): Xaa is C or S
XSRVVMNEYQKYIVNSSDDIFLVSIPSLKT

SEQ ID NO: 13290 - protein, 37 aa, Artificial Sequence
  Cyclic GFR-binding peptide
  MOD_RES (1)..(3)..(35): Xaa is C or S
XGXSRVVMNEYQKYIVNSSDDIFLVSIPSLKTPAXTP

SEQ ID NO: 13291 - protein, 32 aa, Artificial Sequence
  Cyclic GFR-binding peptide
  MOD_RES (2)..(2): Xaa is C or S
GXSRVVMNNSLQEIVNSSDDYYLVTLPELKTP

SEQ ID NO: 13292 - protein, 33 aa, Artificial Sequence; identical to SEQ ID NO: 2743
  Cyclic GFR-binding peptide
  MOD_RES (27)..(28): Xaa is C or S

SEQ ID NO: 13293 - protein, 26 aa, Artificial Sequence
  Cyclic GFR-binding peptide
ENSLQEVVKDYEDYYLMTLPELETPV

SEQ ID NO: 13294 - protein, 40 aa, Artificial Sequence; identical to SEQ ID NO: 2745
  Cyclic GFR-binding peptide
  MOD_RES (2)..(34)..(35): Xaa is C or S

SEQ ID NO: 13295 - protein, 33 aa, Artificial Sequence; identical to SEQ ID NO: 2746
  Cyclic GFR-binding peptide
  MOD_RES (32)..(33): Xaa is C or S

SEQ ID NO: 13296 - protein, 32 aa, Artificial Sequence; identical to SEQ ID NO: 2749
  Cyclic GFR-binding peptide
  MOD_RES (30)..(31): Xaa is C or S

SEQ ID NO: 13297 - protein, 30 aa, Artificial Sequence
  Cyclic GFR-binding peptide
  MOD_RES (2)..(2): Xaa is C or S
GXSEVVMDQYNKLVVNNASDLYLISIASLR

SEQ ID NO: 13298 - protein, 31 aa, Artificial Sequence
  Cyclic GFR-binding peptide
  MOD_RES (1)..(3): Xaa is C or S
XGXGEVVMEEYQKYVVKDYEDIFLMSIPSLE

SEQ ID NO: 13299 - protein, 28 aa, Artificial Sequence
  Cyclic GFR-binding peptide
  MOD_RES (1)..(1): Xaa is C or S
XGEVVMENSLQEVVKDYEDYYVMPLPEL

SEQ ID NO: 13300 - protein, 37 aa, Artificial Sequence
  Cyclic GFR-binding peptide
  MOD_RES (2)..(33)..(34): Xaa is C or S
KXSKVVMEYQKYVKPTRGVIFLISIPSLDQPVXXPSA

SEQ ID NO: 13301 - protein, 34 aa, Artificial Sequence
  Cyclic GFR-binding peptide
  MOD_RES (2)..(4): Xaa is C or S
RXGXGEVVMEEYQKYVVKDYEDIFLMSIPSLETP

SEQ ID NO: 13302 - protein, 25 aa, Artificial Sequence
  Cyclic GFR-binding peptide
VVMNSLQEVKPTRGVYYVIPLPELD

SEQ ID NO: 13303 - protein, 32 aa, Artificial Sequence
  Cyclic GFR-binding peptide
  MOD_RES (28)..(28): Xaa is C or S
MNNSLQEIVNSSDDYYLVTLPELKTPAXTPKT

SEQ ID NO: 13304 - protein, 26 aa, Artificial Sequence
  Cyclic GFR-binding peptide
ENSLQEVVKDYEDYYVMPLPELETPV

SEQ ID NO: 13305 - protein, 26 aa, Artificial Sequence
  Cyclic GFR-binding peptide
SEVVMDQYNKLVVNNASDLYLISIAS

SEQ ID NO: 13306 - protein, 27 aa, Artificial Sequence
  Cyclic GFR-binding peptide
MDNSLQEVVNNASDYYLITLPELRTPV

SEQ ID NO: 13307 - protein, 37 aa, Artificial Sequence; identical to SEQ ID NO: 2755
  Cyclic GFR-binding peptide
  MOD_RES (2)..(4)..(36)..(37): Xaa is C or S

SEQ ID NO: 13308 - protein, 32 aa, Artificial Sequence; identical to SEQ ID NO: 2758
  Cyclic GFR-binding peptide
  MOD_RES (28)..(28): Xaa is C or S

SEQ ID NO: 13309 - protein, 26 aa, Artificial Sequence
  Cyclic GFR-binding peptide
GEVVMENSLQEVVKDYEDYYVMPLPE

SEQ ID NO: 13310 - protein, 36 aa, Artificial Sequence; identical to SEQ ID NO: 2764
  Cyclic GFR-binding peptide
  MOD_RES (31)..(32): Xaa is C or S

SEQ ID NO: 13311 - protein, 31 aa, Artificial Sequence
  Cyclic GFR-binding peptide
  MOD_RES (30)..(30): Xaa is C or S
VVMNEYQKYIVNSSDDIFLVSIPSLKTPAXT

SEQ ID NO: 13312 - protein, 39 aa, Artificial Sequence
  Cyclic GFR-binding peptide
  MOD_RES (2)..(4)..(35)..(36): Xaa is C or S
SXKXSRVIMNSLQEVKPKRGVYYLITLPELAQPVXXPAA

SEQ ID NO: 13313 - protein, 22 aa, Artificial Sequence
  Cyclic GFR-binding peptide
NNSLQEIVNSSDDYYLVTLPEL

SEQ ID NO: 13314 - protein, 40 aa, Artificial Sequence
  Cyclic GFR-binding peptide
  MOD_RES (1)..(3)..(35)..(36): Xaa is C or S
XGXARVVMNNSLQEIVNSSDDYYVVPLPELQTPAXXPKPV

SEQ ID NO: 13315 - protein, 27 aa, Artificial Sequence
  Cyclic GFR-binding peptide
  MOD_RES (1)..(1): Xaa is C or S
XGEVVMDNSLQEVVKENEDYYLMTLPE

SEQ ID NO: 13316 - protein, 32 aa, Artificial Sequence
  Cyclic GFR-binding peptide
  MOD_RES (31)..(32): Xaa is C or S
RVVMNNSLQEIVNSSDDYYLVTLPELQTPAXX

SEQ ID NO: 13317 - protein, 34 aa, Artificial Sequence
  Cyclic GFR-binding peptide
  MOD_RES (29)..(30): Xaa is C or S
VMDQYNKLVVNNASDLYLISIASLRTPVXXTPPT

SEQ ID NO: 13318 - protein, 32 aa, Artificial Sequence
  Cyclic GFR-binding peptide
  MOD_RES (27)..(28): Xaa is C or S
DEYQKYVVKENEDIFLMSIPSLETPVXXAKPI

SEQ ID NO: 13319 - protein, 34 aa, Artificial Sequence
  Cyclic GFR-binding peptide
  MOD_RES (32)..(33): Xaa is C or S
SRVVMNNSLQEIVNSSDDYYVVPLPELKTPAXXP

SEQ ID NO: 13320 - protein, 25 aa, Artificial Sequence
  Cyclic GFR-binding peptide
VVMNNSLQEIVNSSDDYYVVPLPEL

SEQ ID NO: 13321 - protein, 40 aa, Artificial Sequence
  Cyclic GFR-binding peptide
  MOD_RES (2)..(34): Xaa is C or S
GXSRVVMNEYQKYIVNSSDDIFLVSIPSLKTPAXTPKTVH

SEQ ID NO: 13322 - protein, 23 aa, Artificial Sequence
  Cyclic GFR-binding peptide
VMDNSLQEVVKENEDYYLMTLPE

SEQ ID NO: 13323 - protein, 32 aa, Artificial Sequence
  Cyclic GFR-binding peptide
  MOD_RES (28)..(29): Xaa is C or S
MDNSLQEVVKENEDYYLMTLPELETPVXXAKP

SEQ ID NO: 13324 - protein, 38 aa, Artificial Sequence
  Cyclic GFR-binding peptide
  MOD_RES (1)..(32)..(33): Xaa is C or S
XSKVIMEYQKYIKPTKGIIFLISIPSLDQSVXXPSASA

SEQ ID NO: 13325 - protein, 27 aa, Artificial Sequence
  Cyclic GFR-binding peptide
KVVMEYQKYVKPTRGVIFLISIPSLDQ

SEQ ID NO: 13326 - protein, 41 aa, Artificial Sequence
  Cyclic GFR-binding peptide
  MOD_RES (1)..(3)..(35)..(36): Xaa is C or S
XGXSRVVMNNSLQEIVNSSDDYYVVPLPELKTPAXXPKPVY

SEQ ID NO: 13327 - protein, 35 aa, Artificial Sequence
  Cyclic GFR-binding peptide
  MOD_RES (1)..(3)..(35): Xaa is C or S
XGXGEVVMEEYQKYVVKDYEDIFLMSIPSLETPVX

SEQ ID NO: 13328 - protein, 27 aa, Artificial Sequence
  Cyclic GFR-binding peptide
  MOD_RES (27)..(27): Xaa is C or S
NEYQKYIVNSSDDIFLVSIPSLQTPAX

SEQ ID NO: 13329 - protein, 26 aa, Artificial Sequence
  Cyclic GFR-binding peptide
KVVMRYKKLVKPTRGVFYLISIANLD

SEQ ID NO: 13330 - protein, 31 aa, Artificial Sequence
  Cyclic GFR-binding peptide
  MOD_RES (28)..(29): Xaa is C or S
IMNSLQEIKPTKGIYYVIPLPELDQSVXXPS

SEQ ID NO: 13331 - protein, 27 aa, Artificial Sequence
  Cyclic GFR-binding peptide
VMEEYQKYVVKDYEDIFLMSIPSLETP

SEQ ID NO: 13332 - protein, 34 aa, Artificial Sequence
  Cyclic GFR-binding peptide
  MOD_RES (2)..(4): Xaa is C or S
SXKXSKVVMNSLQEVKPTRGVYYVIPLPELDQPV

SEQ ID NO: 13333 - protein, 33 aa, Artificial Sequence
  Cyclic GFR-binding peptide
  MOD_RES (28)..(28): Xaa is C or S
MNNSLQEIVNSSDDYYVVPLPELKTPAXTPKTV

SEQ ID NO: 13334 - protein, 33 aa, Artificial Sequence; identical to SEQ ID NO: 2787
  Cyclic GFR-binding peptide
  MOD_RES (30)..(31): Xaa is C or S

SEQ ID NO: 13335 - protein, 29 aa, Artificial Sequence
  Cyclic GFR-binding peptide
  MOD_RES (28)..(29): Xaa is C or S
MNNSLQEIVNSSDDYYVVPLPELKTPAXX

SEQ ID NO: 13336 - protein, 28 aa, Artificial Sequence
  Cyclic GFR-binding peptide
  MOD_RES (27)..(28): Xaa is C or S
NNSLQEIVNSSDDYYLVTLPELQTPAXX

SEQ ID NO: 13337 - protein, 27 aa, Artificial Sequence
  Cyclic GFR-binding peptide
SKVIMQYNKLIKPTKGILYLISIASLD

SEQ ID NO: 13338 - protein, 29 aa, Artificial Sequence
  Cyclic GFR-binding peptide
  MOD_RES (2)..(4): Xaa is C or S
SXKXSRVIMQYNKLVKPKRGVLYLISIAS

SEQ ID NO: 13339 - protein, 36 aa, Artificial Sequence
  Cyclic GFR-binding peptide
  MOD_RES (1)..(3)..(35)..(36): Xaa is C or S
XGXSRVVMNNSLQEIVNSSDDYYVVPLPELKTPAXX

SEQ ID NO: 13340 - protein, 36 aa, Artificial Sequence; identical to SEQ ID NO: 2792
  Cyclic GFR-binding peptide
  MOD_RES (1)..(3)..(35)..(36): Xaa is C or S

SEQ ID NO: 13341 - protein, 36 aa, Artificial Sequence
  Cyclic GFR-binding peptide
  MOD_RES (2)..(34): Xaa is C or S
GXSRVVMNEYQKYIVNSSDDIFLVSIPSLKTPAXTP

SEQ ID NO: 13342 - protein, 39 aa, Artificial Sequence
  Cyclic GFR-binding peptide
  MOD_RES (1)..(33)..(34): Xaa is C or S
XGEVVMENSLQEVVKDYEDYYVMPLPELETPVXXAKPIS

SEQ ID NO: 13343 - protein, 32 aa, Artificial Sequence
  Cyclic GFR-binding peptide
  MOD_RES (2)..(2): Xaa is C or S
GXARVVMNNSLQEIVNSSDDYYLVTLPELQTP

SEQ ID NO: 13344 - protein, 28 aa, Artificial Sequence
  Cyclic GFR-binding peptide
  MOD_RES (28)..(28): Xaa is C or S
MDEYQKYVVKENEDIFLMSIPSLETPVX

SEQ ID NO: 13345 - protein, 29 aa, Artificial Sequence
  Cyclic GFR-binding peptide
SRVVMNNSLQEIVNSSDDYYVVPLPELKT

SEQ ID NO: 13346 - protein, 37 aa, Artificial Sequence; identical to SEQ ID NO: 2798
  Cyclic GFR-binding peptide
  MOD_RES (1)..(3)..(35): Xaa is C or S

SEQ ID NO: 13347 - protein, 27 aa, Artificial Sequence
  Cyclic GFR-binding peptide
  MOD_RES (26)..(27): Xaa is C or S
EYQKYIVNSSDDIFLVSIPSLKTPAXX

SEQ ID NO: 13348 - protein, 29 aa, Artificial Sequence
  Cyclic GFR-binding peptide
VVMDNSLQEVVKENEDYYLMTLPELETPV

SEQ ID NO: 13349 - protein, 30 aa, Artificial Sequence; identical to SEQ ID NO: 2800
  Cyclic GFR-binding peptide
  MOD_RES (28)..(29): Xaa is C or S

SEQ ID NO: 13350 - protein, 28 aa, Artificial Sequence
  Cyclic GFR-binding peptide
  MOD_RES (1)..(3): Xaa is C or S
XKXSKVIMQYNKLIKPTKGILYLISIAS

SEQ ID NO: 13351 - protein, 39 aa, Artificial Sequence
  Cyclic GFR-binding peptide
  MOD_RES (1)..(3)..(35)..(36): Xaa is C or S
XGXGEVVMENSLQEVVKDYEDYYVMPLPELETPVXXAKP

SEQ ID NO: 13352 - protein, 29 aa, Artificial Sequence
  Cyclic GFR-binding peptide
  MOD_RES (2)..(2): Xaa is C or S
KXSRVIMNSLQEVKPKRGVYYLITLPELA

SEQ ID NO: 13353 - protein, 33 aa, Artificial Sequence
  Cyclic GFR-binding peptide
  MOD_RES (1)..(3): Xaa is C or S
XKXSKVIMEYQKYIKPTKGIIFLISIPSLDQSV

SEQ ID NO: 13354 - protein, 29 aa, Artificial Sequence
  Cyclic GFR-binding peptide
SKVVMQYNKLVKPTRGVLYLISIASLDQP

SEQ ID NO: 13355 - protein, 34 aa, Artificial Sequence; identical to SEQ ID NO: 2808
  Cyclic GFR-binding peptide
  MOD_RES (30)..(31): Xaa is C or S

SEQ ID NO: 13356 - protein, 35 aa, Artificial Sequence
  Cyclic GFR-binding peptide
  MOD_RES (1)..(3)..(35): Xaa is C or S
XGXGEVVMENSLQEVVKDYEDYYLMTLPELETPVX

SEQ ID NO: 13357 - protein, 37 aa, Artificial Sequence
  Cyclic GFR-binding peptide
  MOD_RES (1)..(3)..(35): Xaa is C or S
XGXSRVVMNNSLQEIVNSSDDYYLVTLPELKTPAXTP

SEQ ID NO: 13358 - protein, 26 aa, Artificial Sequence
  Cyclic GFR-binding peptide
VMNRYKKLIVNSSDDFYLVSIANLKT

SEQ ID NO: 13359 - protein, 26 aa, Artificial Sequence
  Cyclic GFR-binding peptide
VVMDNSLQEVVNNASDYYLITLPELR

SEQ ID NO: 13360 - protein, 30 aa, Artificial Sequence
  Cyclic GFR-binding peptide
  MOD_RES (2)..(4): Xaa is C or S
RXGXGEVVMENSLQEVVKDYEDYYLMTLPE

SEQ ID NO: 13361 - protein, 29 aa, Artificial Sequence
  Cyclic GFR-binding peptide
  MOD_RES (26)..(27): Xaa is C or S
NSLQEVVKDYEDYYVMPLPELETPVXXAK

SEQ ID NO: 13362 - protein, 28 aa, Artificial Sequence
  Cyclic GFR-binding peptide
  MOD_RES (1)..(3): Xaa is C or S
XKXSRVIMQYNKLVKPKRGVLYLISIAS

SEQ ID NO: 13363 - protein, 30 aa, Artificial Sequence
  Cyclic GFR-binding peptide
  MOD_RES (2)..(2): Xaa is C or S
GXSRVVMNNSLQEIVNSSDDYYVVPLPELK

SEQ ID NO: 13364 - protein, 24 aa, Artificial Sequence
  Cyclic GFR-binding peptide
IMEYQKYVKPKRGVIFLISIPSLA

SEQ ID NO: 13365 - protein, 29 aa, Artificial Sequence
  Cyclic GFR-binding peptide
EVVMEEYQKYVVKDYEDIFLMSIPSLETP

SEQ ID NO: 13366 - protein, 29 aa, Artificial Sequence
  Cyclic GFR-binding peptide
  MOD_RES (1)..(1): Xaa is C or S
XARVVMNNSLQEIVNSSDDYYVVPLPELQ

SEQ ID NO: 13367 - protein, 31 aa, Artificial Sequence
  Cyclic GFR-binding peptide
  MOD_RES (29)..(30): Xaa is C or S
VIMNSLQEVKPKRGVYYLITLPELAQPVXXP

SEQ ID NO: 13368 - protein, 35 aa, Artificial Sequence; identical to SEQ ID NO: 2823
  Cyclic GFR-binding peptide
  MOD_RES (30)..(31): Xaa is C or S

SEQ ID NO: 13369 - protein, 32 aa, Artificial Sequence
  Cyclic GFR-binding peptide
  MOD_RES (28)..(29): Xaa is C or S
MENSLQEVVKDYEDYYVMPLPELETPVXXAKP

SEQ ID NO: 13370 - protein, 35 aa, Artificial Sequence
  Cyclic GFR-binding peptide
  MOD_RES (29)..(30): Xaa is C or S
VVMEYQKYVKPTRGVIFLISIPSLDQPVXXPSASA

SEQ ID NO: 13371 - protein, 33 aa, Artificial Sequence
  Cyclic GFR-binding peptide
  MOD_RES (1)..(3): Xaa is C or S
XGXGEVVMDNSLQEVVKENEDYYLMTLPELETP

SEQ ID NO: 13372 - protein, 24 aa, Artificial Sequence
  Cyclic GFR-binding peptide
VMDNSLQEVVNNASDYYLITLPEL

SEQ ID NO: 13373 - protein, 23 aa, Artificial Sequence
  Cyclic GFR-binding peptide
MNSLQEVKPTRGVYYVIPLPELD

SEQ ID NO: 13374 - protein, 31 aa, Artificial Sequence
  Cyclic GFR-binding peptide
  MOD_RES (27)..(28): Xaa is C or S
DRYKKLVVNNASDFYLISIANLRTPVXXTPP

SEQ ID NO: 13375 - protein, 32 aa, Artificial Sequence; identical to SEQ ID NO: 2827
  Cyclic GFR-binding peptide
  MOD_RES (28)..(29): Xaa is C or S

SEQ ID NO: 13376 - protein, 39 aa, Artificial Sequence; identical to SEQ ID NO: 2828
  Cyclic GFR-binding peptide
  MOD_RES (1)..(3)..(34)..(35): Xaa is C or S

SEQ ID NO: 13377 - protein, 36 aa, Artificial Sequence
  Cyclic GFR-binding peptide
  MOD_RES (2)..(4)..(36): Xaa is C or S
RXGXGEVVMEEYQKYVVKDYEDIFLMSIPSLETPVX

SEQ ID NO: 13378 - protein, 32 aa, Artificial Sequence
  Cyclic GFR-binding peptide
  MOD_RES (29)..(30): Xaa is C or S
VIMNSLQEIKPTKGIYYLITLPELDQSVXXPS

SEQ ID NO: 13379 - protein, 22 aa, Artificial Sequence
  Cyclic GFR-binding peptide
RYKKLVKPKRGVFYLISIANLA

SEQ ID NO: 13380 - protein, 32 aa, Artificial Sequence
  Cyclic GFR-binding peptide
  MOD_RES (2)..(4): Xaa is C or S
SXKXSKVVMNSLQEVKPTRGVYYLITLPELDQ

SEQ ID NO: 13381 - protein, 28 aa, Artificial Sequence
  Cyclic GFR-binding peptide
  MOD_RES (26)..(27): Xaa is C or S
NSLQEIKPTKGIYYVIPLPELDQSVXXP

SEQ ID NO: 13382 - protein, 38 aa, Artificial Sequence
  Cyclic GFR-binding peptide
  MOD_RES (1)..(3)..(35)..(36): Xaa is C or S
XGXARVVMNNSLQEIVNSSDDYYVVPLPELQTPAXXPK

SEQ ID NO: 13383 - protein, 21 aa, Artificial Sequence
  Cyclic GFR-binding peptide
MQYNKLVKPTRGVLYLISIAS

SEQ ID NO: 13384 - protein, 37 aa, Artificial Sequence; identical to SEQ ID NO: 2837
  Cyclic GFR-binding peptide
  MOD_RES (31)..(32): Xaa is C or S

SEQ ID NO: 13385 - protein, 24 aa, Artificial Sequence
  Cyclic GFR-binding peptide
DQYNKLVVNNASDLYLISIASLRT

SEQ ID NO: 13386 - protein, 29 aa, Artificial Sequence
  Cyclic GFR-binding peptide
VVMNEYQKYIVNSSDDIFLVSIPSLQTPA

SEQ ID NO: 13387 - protein, 28 aa, Artificial Sequence
  Cyclic GFR-binding peptide
  MOD_RES (1)..(1): Xaa is C or S
XSKVIMQYNKLIKPTKGILYLISIASLD

SEQ ID NO: 13388 - protein, 31 aa, Artificial Sequence; identical to SEQ ID NO: 2844
  Cyclic GFR-binding peptide
  MOD_RES (30)..(31): Xaa is C or S

SEQ ID NO: 13389 - protein, 38 aa, Artificial Sequence; identical to SEQ ID NO: 2845
  Cyclic GFR-binding peptide
  MOD_RES (2)..(34)..(35): Xaa is C or S

SEQ ID NO: 13390 - protein, 26 aa, Artificial Sequence
  Cyclic GFR-binding peptide
GEVVMEQYNKLVVKDYEDLYLMSIAS

SEQ ID NO: 13391 - protein, 32 aa, Artificial Sequence; identical to SEQ ID NO: 2847
  Cyclic GFR-binding peptide
  MOD_RES (30)..(31): Xaa is C or S

SEQ ID NO: 13392 - protein, 32 aa, Artificial Sequence
  Cyclic GFR-binding peptide
  MOD_RES (31)..(32): Xaa is C or S
RVVMNNSLQEIVNSSDDYYLVTLPELKTPAXX

SEQ ID NO: 13393 - protein, 26 aa, Artificial Sequence
  Cyclic GFR-binding peptide
NNSLQEIVNSSDDYYLVTLPELQTPA

SEQ ID NO: 13394 - protein, 31 aa, Artificial Sequence; identical to SEQ ID NO: 2848
  Cyclic GFR-binding peptide
  MOD_RES (30)..(31): Xaa is C or S

SEQ ID NO: 13395 - protein, 32 aa, Artificial Sequence
  Cyclic GFR-binding peptide
  MOD_RES (1)..(3): Xaa is C or S
XKXSRVIMNSLQEVKPKRGVYYLITLPELAQP

SEQ ID NO: 13396 - protein, 31 aa, Artificial Sequence; identical to SEQ ID NO: 2849
  Cyclic GFR-binding peptide
  MOD_RES (2)..(2): Xaa is C or S

SEQ ID NO: 13397 - protein, 27 aa, Artificial Sequence
  Cyclic GFR-binding peptide
  MOD_RES (26)..(27): Xaa is C or S
QYNKLVVNNASDLYLISIASLRTPVXX

SEQ ID NO: 13398 - protein, 31 aa, Artificial Sequence; identical to SEQ ID NO: 2860
  Cyclic GFR-binding peptide
  MOD_RES (1)..(1): Xaa is C or S

SEQ ID NO: 13399 - protein, 26 aa, Artificial Sequence
  Cyclic GFR-binding peptide
NEYQKYIVNSSDDIFLVSIPSLQTPA

SEQ ID NO: 13400 - protein, 22 aa, Artificial Sequence
  Cyclic GFR-binding peptide
QYNKLVVKDYEDLYLMSIASLE

SEQ ID NO: 13401 - protein, 29 aa, Artificial Sequence
  Cyclic GFR-binding peptide
  MOD_RES (27)..(28): Xaa is C or S
DNSLQEVVNNASDYYLITLPELRTPVXXT

SEQ ID NO: 13402 - protein, 26 aa, Artificial Sequence
  Cyclic GFR-binding peptide
GEVVMEEYQKYVVKDYEDIFLMSIPS

SEQ ID NO: 13403 - protein, 36 aa, Artificial Sequence
  Cyclic GFR-binding peptide
  MOD_RES (2)..(34)..(35): Xaa is C or S
GXGEVVMDNSLQEVVKENEDYYVMPLPELETPVXXA

SEQ ID NO: 13404 - protein, 30 aa, Artificial Sequence
  Cyclic GFR-binding peptide
  MOD_RES (26)..(27): Xaa is C or S
EYQKYIVNSSDDIFLVSIPSLKTPAXXPKP

SEQ ID NO: 13405 - protein, 27 aa, Artificial Sequence
  Cyclic GFR-binding peptide
VVMENSLQEVVKDYEDYYVMPLPELET

SEQ ID NO: 13406 - protein, 31 aa, Artificial Sequence
  Cyclic GFR-binding peptide
  MOD_RES (30)..(31): Xaa is C or S
KVVMEYQKYVKPTRGVIFLISIPSLDQPVXX

SEQ ID NO: 13407 - protein, 38 aa, Artificial Sequence
  Cyclic GFR-binding peptide
  MOD_RES (1)..(32)..(33): Xaa is C or S
XSRVIMNSLQEVKPKRGVYYLITLPELAQPVXXPAASA

SEQ ID NO: 13408 - protein, 29 aa, Artificial Sequence
  Cyclic GFR-binding peptide
  MOD_RES (1)..(3): Xaa is C or S
XGXSEVVMDQYNKLVVNNASDLYLISIAS

SEQ ID NO: 13409 - protein, 35 aa, Artificial Sequence
  Cyclic GFR-binding peptide
  MOD_RES (2)..(4): Xaa is C or S
RXGXGEVVMDNSLQEVVKENEDYYVMPLPELETPV

SEQ ID NO: 13410 - protein, 40 aa, Artificial Sequence
  Cyclic GFR-binding peptide
  MOD_RES (1)..(3)..(35)..(36): Xaa is C or S
XGXGEVVMENSLQEVVKDYEDYYVMPLPELETPVXXAKPI

SEQ ID NO: 13411 - protein, 30 aa, Artificial Sequence
  Cyclic GFR-binding peptide
  MOD_RES (1)..(3): Xaa is C or S
XGXSEVVMDQYNKLVVNNASDLYLISIASL

SEQ ID NO: 13412 - protein, 31 aa, Artificial Sequence
  Cyclic GFR-binding peptide
  MOD_RES (29)..(30): Xaa is C or S
VIMNSLQEIKPTKGIYYVIPLPELDQSVXXP

SEQ ID NO: 13413 - protein, 31 aa, Artificial Sequence
  Cyclic GFR-binding peptide
  MOD_RES (28)..(29): Xaa is C or S
MENSLQEVVKDYEDYYVMPLPELETPVXXAK

SEQ ID NO: 13414 - protein, 41 aa, Artificial Sequence; identical to SEQ ID NO: 2877
  Cyclic GFR-binding peptide
  MOD_RES (2)..(4)..(36)..(37): Xaa is C or S

SEQ ID NO: 13415 - protein, 31 aa, Artificial Sequence
  Cyclic GFR-binding peptide
  MOD_RES (26)..(27): Xaa is C or S
NSLQEIKPTKGIYYVIPLPELDQSVXXPSAS

SEQ ID NO: 13416 - protein, 28 aa, Artificial Sequence
  Cyclic GFR-binding peptide
EVVMDRYKKLVVNNASDFYLISIANLRT

SEQ ID NO: 13417 - protein, 28 aa, Artificial Sequence
  Cyclic GFR-binding peptide
KVIMNSLQEIKPTKGIYYVIPLPELDQS

SEQ ID NO: 13418 - protein, 34 aa, Artificial Sequence; identical to SEQ ID NO: 2879
  Cyclic GFR-binding peptide
  MOD_RES (28)..(29): Xaa is C or S

SEQ ID NO: 13419 - protein, 33 aa, Artificial Sequence
  Cyclic GFR-binding peptide
  MOD_RES (27)..(28): Xaa is C or S
NNSLQEIVNSSDDYYVVPLPELQTPAXXPKPVT

SEQ ID NO: 13420 - protein, 23 aa, Artificial Sequence
  Cyclic GFR-binding peptide
VMNRYKKLIVNSSDDFYLVSIAN

SEQ ID NO: 13421 - protein, 30 aa, Artificial Sequence; identical to SEQ ID NO: 2882
  Cyclic GFR-binding peptide
  MOD_RES (27)..(28): Xaa is C or S

SEQ ID NO: 13422 - protein, 29 aa, Artificial Sequence
  Cyclic GFR-binding peptide
GEVVMDEYQKYVVKENEDIFLMSIPSLET

SEQ ID NO: 13423 - protein, 33 aa, Artificial Sequence
  Cyclic GFR-binding peptide
  MOD_RES (1)..(32)..(33): Xaa is C or S
XSKVIMEYQKYIKPTKGIIFLISIPSLDQSVXX

SEQ ID NO: 13424 - protein, 25 aa, Artificial Sequence
  Cyclic GFR-binding peptide
EYQKYVVKENEDIFLMSIPSLETPV

SEQ ID NO: 13425 - protein, 26 aa, Artificial Sequence
  Cyclic GFR-binding peptide
  MOD_RES (26)..(26): Xaa is C or S
NSLQEVVKENEDYYVMPLPELETPVX

SEQ ID NO: 13426 - protein, 30 aa, Artificial Sequence
  Cyclic GFR-binding peptide
  MOD_RES (1)..(1): Xaa is C or S
XARVVMNEYQKYIVNSSDDIFLVSIPSLQT

SEQ ID NO: 13427 - protein, 34 aa, Artificial Sequence
  Cyclic GFR-binding peptide
  MOD_RES (28)..(29): Xaa is C or S
MNEYQKYIVNSSDDIFLVSIPSLQTPAXXPKPVT

SEQ ID NO: 13428 - protein, 36 aa, Artificial Sequence; identical to SEQ ID NO: 2886
  Cyclic GFR-binding peptide
  MOD_RES (2)..(4)..(36): Xaa is C or S

SEQ ID NO: 13429 - protein, 27 aa, Artificial Sequence
  Cyclic GFR-binding peptide
VIMEYQKYIKPTKGIIFLISIPSLDQS

SEQ ID NO: 13430 - protein, 31 aa, Artificial Sequence; identical to SEQ ID NO: 2889
  Cyclic GFR-binding peptide
  MOD_RES (30)..(31): Xaa is C or S

SEQ ID NO: 13431 - protein, 27 aa, Artificial Sequence
  Cyclic GFR-binding peptide
  MOD_RES (26)..(27): Xaa is C or S
QYNKLVKPTRGVLYLISIASLDQPVXX

SEQ ID NO: 13432 - protein, 26 aa, Artificial Sequence
  Cyclic GFR-binding peptide
SRVVMNRYKKLIVNSSDDFYLVSIAN

SEQ ID NO: 13433 - protein, 30 aa, Artificial Sequence; identical to SEQ ID NO: 2892
  Cyclic GFR-binding peptide
  MOD_RES (29)..(29): Xaa is C or S

SEQ ID NO: 13434 - protein, 25 aa, Artificial Sequence
  Cyclic GFR-binding peptide
MRYKKLIKPTKGIFYLISIANLDQS

SEQ ID NO: 13435 - protein, 26 aa, Artificial Sequence
  Cyclic GFR-binding peptide
ARVVMNRYKKLIVNSSDDFYLVSIAN

SEQ ID NO: 13436 - protein, 28 aa, Artificial Sequence
  Cyclic GFR-binding peptide
  MOD_RES (28)..(28): Xaa is C or S
MENSLQEVVKDYEDYYVMPLPELETPVX

SEQ ID NO: 13437 - protein, 34 aa, Artificial Sequence; identical to SEQ ID NO: 2898
  Cyclic GFR-binding peptide
  MOD_RES (1)..(33)..(34): Xaa is C or S

SEQ ID NO: 13438 - protein, 26 aa, Artificial Sequence
  Cyclic GFR-binding peptide
VMENSLQEVVKDYEDYYLMTLPELET

SEQ ID NO: 13439 - protein, 32 aa, Artificial Sequence
  Cyclic GFR-binding peptide
  MOD_RES (29)..(30): Xaa is C or S
VVMNSLQEVKPTRGVYYVIPLPELDQPVXXPS

SEQ ID NO: 13440 - protein, 34 aa, Artificial Sequence; identical to SEQ ID NO: 2900
  Cyclic GFR-binding peptide
  MOD_RES (28)..(28): Xaa is C or S

SEQ ID NO: 13441 - protein, 33 aa, Artificial Sequence; identical to SEQ ID NO: 2902
  Cyclic GFR-binding peptide
  MOD_RES (29)..(29): Xaa is C or S

SEQ ID NO: 13442 - protein, 29 aa, Artificial Sequence
  Cyclic GFR-binding peptide
  MOD_RES (1)..(3): Xaa is C or S
XKXSKVIMNSLQEIKPTKGIYYVIPLPEL

SEQ ID NO: 13443 - protein, 36 aa, Artificial Sequence
  Cyclic GFR-binding peptide
  MOD_RES (31)..(32): Xaa is C or S
EVVMDNSLQEVVKENEDYYVMPLPELETPVXXAKPI

SEQ ID NO: 13444 - protein, 35 aa, Artificial Sequence
  Cyclic GFR-binding peptide
  MOD_RES (30)..(31): Xaa is C or S
VVMNNSLQEIVNSSDDYYVVPLPELQTPAXXPKPV

SEQ ID NO: 13445 - protein, 22 aa, Artificial Sequence
  Cyclic GFR-binding peptide
MDNSLQEVVNNASDYYVIPLPE

SEQ ID NO: 13446 - protein, 29 aa, Artificial Sequence
  Cyclic GFR-binding peptide
RVVMNQYNKLIVNSSDDLYLVSIASLKTP

SEQ ID NO: 13447 - protein, 34 aa, Artificial Sequence
  Cyclic GFR-binding peptide
  MOD_RES (1)..(3): Xaa is C or S
XGXSEVVMDQYNKLVVNNASDLYLISIASLRTPV

SEQ ID NO: 13448 - protein, 30 aa, Artificial Sequence
  Cyclic GFR-binding peptide
  MOD_RES (30)..(30): Xaa is C or S
VVMENSLQEVVKDYEDYYLMTLPELETPVX

SEQ ID NO: 13449 - protein, 34 aa, Artificial Sequence
  Cyclic GFR-binding peptide
  MOD_RES (28)..(28): Xaa is C or S
MNNSLQEIVNSSDDYYVVPLPELKTPAXTPKTVH

SEQ ID NO: 13450 - protein, 26 aa, Artificial Sequence
  Cyclic GFR-binding peptide
  MOD_RES (26)..(26): Xaa is C or S
NSLQEVVNNASDYYLITLPELRTPVX

SEQ ID NO: 13451 - protein, 24 aa, Artificial Sequence
  Cyclic GFR-binding peptide
MRYKKLVKPTRGVFYLISIANLDQ

SEQ ID NO: 13452 - protein, 23 aa, Artificial Sequence
  Cyclic GFR-binding peptide
MQYNKLVKPTRGVLYLISIASLD

SEQ ID NO: 13453 - protein, 32 aa, Artificial Sequence
  Cyclic GFR-binding peptide
  MOD_RES (31)..(32): Xaa is C or S
RVVMNNSLQEIVNSSDDYYVVPLPELQTPAXX

SEQ ID NO: 13454 - protein, 26 aa, Artificial Sequence
  Cyclic GFR-binding peptide
VVMDNSLQEVVKENEDYYLMTLPELE

SEQ ID NO: 13455 - protein, 29 aa, Artificial Sequence
  Cyclic GFR-binding peptide
  MOD_RES (27)..(28): Xaa is C or S
DRYKKLVVKENEDFYLMSIANLETPVXXA

SEQ ID NO: 13456 - protein, 30 aa, Artificial Sequence; identical to SEQ ID NO: 2918
  Cyclic GFR-binding peptide
  MOD_RES (1)..(3): Xaa is C or S

SEQ ID NO: 13457 - protein, 30 aa, Artificial Sequence
  Cyclic GFR-binding peptide
  MOD_RES (1)..(1): Xaa is C or S
XSEVVMDNSLQEVVNNASDYYLITLPELRT

SEQ ID NO: 13458 - protein, 39 aa, Artificial Sequence; identical to SEQ ID NO: 2920
  Cyclic GFR-binding peptide
  MOD_RES (1)..(33)..(34): Xaa is C or S

SEQ ID NO: 13459 - protein, 25 aa, Artificial Sequence
  Cyclic GFR-binding peptide
SKVVMQYNKLVKPTRGVLYLISIAS

SEQ ID NO: 13460 - protein, 27 aa, Artificial Sequence
  Cyclic GFR-binding peptide
IMNSLQEIKPTKGIYYLITLPELDQSV

SEQ ID NO: 13461 - protein, 32 aa, Artificial Sequence
  Cyclic GFR-binding peptide
  MOD_RES (27)..(28): Xaa is C or S
DNSLQEVVNNASDYYLITLPELRTPVXXTPPT

SEQ ID NO: 13462 - protein, 35 aa, Artificial Sequence; identical to SEQ ID NO: 2922
  Cyclic GFR-binding peptide
  MOD_RES (2)..(33)..(34): Xaa is C or S

SEQ ID NO: 13463 - protein, 29 aa, Artificial Sequence
  Cyclic GFR-binding peptide
  MOD_RES (1)..(1): Xaa is C or S
XGEVVMEEYQKYVVKDYEDIFLMSIPSLE

SEQ ID NO: 13464 - protein, 36 aa, Artificial Sequence; identical to SEQ ID NO: 2925
  Cyclic GFR-binding peptide
  MOD_RES (2)..(4)..(36): Xaa is C or S

SEQ ID NO: 13465 - protein, 33 aa, Artificial Sequence
  Cyclic GFR-binding peptide
  MOD_RES (30)..(30): Xaa is C or S
VVMNNSLQEIVNSSDDYYVVPLPELKTPAXTPK

SEQ ID NO: 13466 - protein, 35 aa, Artificial Sequence; identical to SEQ ID NO: 2927
  Cyclic GFR-binding peptide
  MOD_RES (31)..(32): Xaa is C or S

SEQ ID NO: 13467 - protein, 25 aa, Artificial Sequence
  Cyclic GFR-binding peptide
MNRYKKLIVNSSDDFYLVSIANLKT

SEQ ID NO: 13468 - protein, 32 aa, Artificial Sequence
  Cyclic GFR-binding peptide
  MOD_RES (29)..(30): Xaa is C or S
VMEEYQKYVVKDYEDIFLMSIPSLETPVXXAK

SEQ ID NO: 13469 - protein, 34 aa, Artificial Sequence; identical to SEQ ID NO: 2930
  Cyclic GFR-binding peptide
  MOD_RES (30)..(31): Xaa is C or S

SEQ ID NO: 13470 - protein, 28 aa, Artificial Sequence
  Cyclic GFR-binding peptide
  MOD_RES (1)..(1): Xaa is C or S
XGEVVMDEYQKYVVKENEDIFLMSIPSL

SEQ ID NO: 13471 - protein, 37 aa, Artificial Sequence
  Cyclic GFR-binding peptide
  MOD_RES (2)..(34)..(35): Xaa is C or S
GXGEVVMDEYQKYVVKENEDIFLMSIPSLETPVXXAK

SEQ ID NO: 13472 - protein, 30 aa, Artificial Sequence; identical to SEQ ID NO: 2934
  Cyclic GFR-binding peptide
  MOD_RES (1)..(3): Xaa is C or S

SEQ ID NO: 13473 - protein, 20 aa, Artificial Sequence
  Cyclic GFR-binding peptide
NSLQEVKPTRGVYYVIPLPE

SEQ ID NO: 13474 - protein, 32 aa, Artificial Sequence; identical to SEQ ID NO: 2936
  Cyclic GFR-binding peptide
  MOD_RES (28)..(29): Xaa is C or S

SEQ ID NO: 13475 - protein, 30 aa, Artificial Sequence
  Cyclic GFR-binding peptide
  MOD_RES (28)..(29): Xaa is C or S
IMEYQKYVKPKRGVIFLISIPSLAQPVXXP

SEQ ID NO: 13476 - protein, 35 aa, Artificial Sequence; identical to SEQ ID NO: 2937
  Cyclic GFR-binding peptide
  MOD_RES (29)..(30): Xaa is C or S

SEQ ID NO: 13477 - protein, 40 aa, Artificial Sequence
  Cyclic GFR-binding peptide
  MOD_RES (2)..(34)..(35): Xaa is C or S
GXSRVVMNNSLQEIVNSSDDYYVVPLPELKTPAXXPKPVY

SEQ ID NO: 13478 - protein, 29 aa, Artificial Sequence
  Cyclic GFR-binding peptide
SRVIMEYQKYVKPKRGVIFLISIPSLAQP

SEQ ID NO: 13479 - protein, 27 aa, Artificial Sequence
  Cyclic GFR-binding peptide
RVIMRYKKLVKPKRGVFYLISIANLAQ

SEQ ID NO: 13480 - protein, 22 aa, Artificial Sequence
  Cyclic GFR-binding peptide
NEYQKYIVNSSDDIFLVSIPSL

SEQ ID NO: 13481 - protein, 21 aa, Artificial Sequence
  Cyclic GFR-binding peptide
MNSLQEVKPTRGVYYVIPLPE

SEQ ID NO: 13482 - protein, 32 aa, Artificial Sequence; identical to SEQ ID NO: 2942
  Cyclic GFR-binding peptide
  MOD_RES (1)..(1): Xaa is C or S

SEQ ID NO: 13483 - protein, 28 aa, Artificial Sequence
  Cyclic GFR-binding peptide
  MOD_RES (28)..(28): Xaa is C or S
MDQYNKLVVNNASDLYLISIASLRTPVX

SEQ ID NO: 13484 - protein, 36 aa, Artificial Sequence
  Cyclic GFR-binding peptide
  MOD_RES (1)..(32)..(33): Xaa is C or S
XSRVIMEYQKYVKPKRGVIFLISIPSLAQPVXXPAA

SEQ ID NO: 13485 - protein, 24 aa, Artificial Sequence
  Cyclic GFR-binding peptide
NSLQEVKPKRGVYYLITLPELAQP

SEQ ID NO: 13486 - protein, 34 aa, Artificial Sequence
  Cyclic GFR-binding peptide
  MOD_RES (2)..(4): Xaa is C or S
HXGXSRVVMNNSLQEIVNSSDDYYLVTLPELKTP

SEQ ID NO: 13487 - protein, 33 aa, Artificial Sequence
  Cyclic GFR-binding peptide
  MOD_RES (27)..(28): Xaa is C or S
DNSLQEVVNNASDYYVIPLPELRTPVXXTPPTS

SEQ ID NO: 13488 - protein, 33 aa, Artificial Sequence
  Cyclic GFR-binding peptide
  MOD_RES (32)..(33): Xaa is C or S
ARVVMNEYQKYIVNSSDDIFLVSIPSLQTPAXX

SEQ ID NO: 13489 - protein, 33 aa, Artificial Sequence
  Cyclic GFR-binding peptide
  MOD_RES (32)..(33): Xaa is C or S
SEVVMDNSLQEVVNNASDYYLITLPELRTPVXX

SEQ ID NO: 13490 - protein, 32 aa, Artificial Sequence
  Cyclic GFR-binding peptide
  MOD_RES (31)..(32): Xaa is C or S
SKVIMNSLQEIKPTKGIYYLITLPELDQSVXX

SEQ ID NO: 13491 - protein, 31 aa, Artificial Sequence; identical to SEQ ID NO: 2948
  Cyclic GFR-binding peptide
  MOD_RES (28)..(29): Xaa is C or S

SEQ ID NO: 13492 - protein, 35 aa, Artificial Sequence; identical to SEQ ID NO: 2949
  Cyclic GFR-binding peptide
  MOD_RES (30)..(31): Xaa is C or S

SEQ ID NO: 13493 - protein, 31 aa, Artificial Sequence
  Cyclic GFR-binding peptide
  MOD_RES (2)..(2): Xaa is C or S
GXARVVMNNSLQEIVNSSDDYYVVPLPELQT

SEQ ID NO: 13494 - protein, 28 aa, Artificial Sequence
  Cyclic GFR-binding peptide
  MOD_RES (2)..(2): Xaa is C or S
GXSRVVMNRYKKLIVNSSDDFYLVSIAN

SEQ ID NO: 13495 - protein, 22 aa, Artificial Sequence
  Cyclic GFR-binding peptide
NSLQEVKPKRGVYYLITLPELA

SEQ ID NO: 13496 - protein, 29 aa, Artificial Sequence
  Cyclic GFR-binding peptide
EVVMDNSLQEVVKENEDYYVMPLPELETP

SEQ ID NO: 13497 - protein, 25 aa, Artificial Sequence
  Cyclic GFR-binding peptide
MRYKKLVKPTRGVFYLISIANLDQP

SEQ ID NO: 13498 - protein, 28 aa, Artificial Sequence
  Cyclic GFR-binding peptide
  MOD_RES (28)..(28): Xaa is C or S
VMEYQKYVKPTRGVIFLISIPSLDQPVX

SEQ ID NO: 13499 - protein, 31 aa, Artificial Sequence
  Cyclic GFR-binding peptide
  MOD_RES (27)..(28): Xaa is C or S
MNSLQEIKPTKGIYYLITLPELDQSVXXPSA

SEQ ID NO: 13500 - protein, 26 aa, Artificial Sequence
  Cyclic GFR-binding peptide
KVIMNSLQEIKPTKGIYYLITLPELD

SEQ ID NO: 13501 - protein, 31 aa, Artificial Sequence
  Cyclic GFR-binding peptide
  MOD_RES (27)..(28): Xaa is C or S
DEYQKYVVKENEDIFLMSIPSLETPVXXAKP

SEQ ID NO: 13502 - protein, 29 aa, Artificial Sequence
  Cyclic GFR-binding peptide
  MOD_RES (1)..(1): Xaa is C or S
XSKVIMRYKKLIKPTKGIFYLISIANLDQ

SEQ ID NO: 13503 - protein, 37 aa, Artificial Sequence
  Cyclic GFR-binding peptide
  MOD_RES (32)..(33): Xaa is C or S
ARVVMNEYQKYIVNSSDDIFLVSIPSLQTPAXXPKPV

SEQ ID NO: 13504 - protein, 34 aa, Artificial Sequence; identical to SEQ ID NO: 2957
  Cyclic GFR-binding peptide
  MOD_RES (2)..(4): Xaa is C or S

SEQ ID NO: 13505 - protein, 31 aa, Artificial Sequence; identical to SEQ ID NO: 2958
  Cyclic GFR-binding peptide
  MOD_RES (2)..(4): Xaa is C or S

SEQ ID NO: 13506 - protein, 28 aa, Artificial Sequence
  Cyclic GFR-binding peptide
  MOD_RES (28)..(28): Xaa is C or S
MEQYNKLVVKDYEDLYLMSIASLETPVX

SEQ ID NO: 13507 - protein, 39 aa, Artificial Sequence
  Cyclic GFR-binding peptide
  MOD_RES (1)..(3)..(35)..(36): Xaa is C or S
XGXARVVMNNSLQEIVNSSDDYYVVPLPELQTPAXXPKP

SEQ ID NO: 13508 - protein, 32 aa, Artificial Sequence
  Cyclic GFR-binding peptide
  MOD_RES (30)..(31): Xaa is C or S
KVVMEYQKYVKPTRGVIFLISIPSLDQPVXXP

SEQ ID NO: 13509 - protein, 40 aa, Artificial Sequence; identical to SEQ ID NO: 2961
  Cyclic GFR-binding peptide
  MOD_RES (1)..(3)..(35)..(36): Xaa is C or S

SEQ ID NO: 13510 - protein, 33 aa, Artificial Sequence
  Cyclic GFR-binding peptide
  MOD_RES (2)..(2): Xaa is C or S
GXSEVVMDNSLQEVVNNASDYYLITLPELRTPV

SEQ ID NO: 13511 - protein, 35 aa, Artificial Sequence
  Cyclic GFR-binding peptide
  MOD_RES (29)..(30): Xaa is C or S
VMNNSLQEIVNSSDDYYLVTLPELQTPAXXPKPVT

SEQ ID NO: 13512 - protein, 25 aa, Artificial Sequence
  Cyclic GFR-binding peptide
KVIMNSLQEIKPTKGIYYVIPLPEL

SEQ ID NO: 13513 - protein, 30 aa, Artificial Sequence; identical to SEQ ID NO: 2964
  Cyclic GFR-binding peptide
  MOD_RES (28)..(29): Xaa is C or S

SEQ ID NO: 13514 - protein, 39 aa, Artificial Sequence; identical to SEQ ID NO: 2965
  Cyclic GFR-binding peptide
  MOD_RES (2)..(34): Xaa is C or S

SEQ ID NO: 13515 - protein, 29 aa, Artificial Sequence
  Cyclic GFR-binding peptide
EVVMDNSLQEVVNNASDYYLITLPELRTP

SEQ ID NO: 13516 - protein, 22 aa, Artificial Sequence
  Cyclic GFR-binding peptide
MEYQKYIKPTKGIIFLISIPSL

SEQ ID NO: 13517 - protein, 31 aa, Artificial Sequence
  Cyclic GFR-binding peptide
  MOD_RES (1)..(1): Xaa is C or S
XGEVVMDNSLQEVVKENEDYYLMTLPELETP

SEQ ID NO: 13518 - protein, 34 aa, Artificial Sequence
  Cyclic GFR-binding peptide
  MOD_RES (2)..(4): Xaa is C or S
RXGXSEVVMDRYKKLVVNNASDFYLISIANLRTP

SEQ ID NO: 13519 - protein, 34 aa, Artificial Sequence
  Cyclic GFR-binding peptide
  MOD_RES (30)..(31): Xaa is C or S
VVMDQYNKLVVNNASDLYLISIASLRTPVXXTPP

SEQ ID NO: 13520 - protein, 40 aa, Artificial Sequence; identical to SEQ ID NO: 2976
  Cyclic GFR-binding peptide
  MOD_RES (2)..(34)..(35): Xaa is C or S

SEQ ID NO: 13521 - protein, 34 aa, Artificial Sequence
  Cyclic GFR-binding peptide
  MOD_RES (31)..(32): Xaa is C or S
SRVIMEYQKYVKPKRGVIFLISIPSLAQPVXXPA

SEQ ID NO: 13522 - protein, 25 aa, Artificial Sequence
  Cyclic GFR-binding peptide
VMDNSLQEVVKENEDYYLMTLPELE

SEQ ID NO: 13523 - protein, 42 aa, Artificial Sequence
  Cyclic GFR-binding peptide
  MOD_RES (2)..(4)..(36)..(37): Xaa is C or S
RXGXGEVVMDNSLQEVVKENEDYYLMTLPELETPVXXAKPIK

SEQ ID NO: 13524 - protein, 39 aa, Artificial Sequence
  Cyclic GFR-binding peptide
  MOD_RES (2)..(4)..(36)..(37): Xaa is C or S
RXGXGEVVMENSLQEVVKDYEDYYLMTLPELETPVXXAK

SEQ ID NO: 13525 - protein, 34 aa, Artificial Sequence; identical to SEQ ID NO: 2977
  Cyclic GFR-binding peptide
  MOD_RES (2)..(33)..(34): Xaa is C or S

SEQ ID NO: 13526 - protein, 34 aa, Artificial Sequence
  Cyclic GFR-binding peptide
  MOD_RES (29)..(30): Xaa is C or S
VMDNSLQEVVKENEDYYVMPLPELETPVXXAKPI

SEQ ID NO: 13527 - protein, 23 aa, Artificial Sequence
  Cyclic GFR-binding peptide
NSLQEVVNNASDYYLITLPELRT

SEQ ID NO: 13528 - protein, 32 aa, Artificial Sequence
  Cyclic GFR-binding peptide
  MOD_RES (27)..(28): Xaa is C or S
DNSLQEVVKENEDYYLMTLPELETPVXXAKPI

SEQ ID NO: 13529 - protein, 38 aa, Artificial Sequence
  Cyclic GFR-binding peptide
  MOD_RES (2)..(33)..(34): Xaa is C or S
KXSKVVMNSLQEVKPTRGVYYVIPLPELDQPVXXPSAS

SEQ ID NO: 13530 - protein, 38 aa, Artificial Sequence
  Cyclic GFR-binding peptide
  MOD_RES (1)..(3)..(35)..(36): Xaa is C or S
XGXSRVVMNNSLQEIVNSSDDYYVVPLPELKTPAXXPK

SEQ ID NO: 13531 - protein, 31 aa, Artificial Sequence
  Cyclic GFR-binding peptide
  MOD_RES (1)..(1): Xaa is C or S
XSRVVMNEYQKYIVNSSDDIFLVSIPSLKTP

SEQ ID NO: 13532 - protein, 28 aa, Artificial Sequence
  Cyclic GFR-binding peptide
SKVIMQYNKLIKPTKGILYLISIASLDQ

SEQ ID NO: 13533 - protein, 36 aa, Artificial Sequence; identical to SEQ ID NO: 2982
  Cyclic GFR-binding peptide
  MOD_RES (30)..(31): Xaa is C or S

SEQ ID NO: 13534 - protein, 23 aa, Artificial Sequence
  Cyclic GFR-binding peptide
VVMEYQKYVKPTRGVIFLISIPS

SEQ ID NO: 13535 - protein, 34 aa, Artificial Sequence; identical to SEQ ID NO: 2983
  Cyclic GFR-binding peptide
  MOD_RES (29)..(30): Xaa is C or S

SEQ ID NO: 13536 - protein, 35 aa, Artificial Sequence
  Cyclic GFR-binding peptide
  MOD_RES (32)..(33): Xaa is C or S
SRVVMNNSLQEIVNSSDDYYVVPLPELKTPAXXPK

SEQ ID NO: 13537 - protein, 25 aa, Artificial Sequence
  Cyclic GFR-binding peptide
DEYQKYVVKENEDIFLMSIPSLETP

SEQ ID NO: 13538 - protein, 35 aa, Artificial Sequence
  Cyclic GFR-binding peptide
  MOD_RES (2)..(34)..(35): Xaa is C or S
GXGEVVMEEYQKYVVKDYEDIFLMSIPSLETPVXX

SEQ ID NO: 13539 - protein, 31 aa, Artificial Sequence; identical to SEQ ID NO: 2988
  Cyclic GFR-binding peptide
  MOD_RES (29)..(30): Xaa is C or S

SEQ ID NO: 13540 - protein, 35 aa, Artificial Sequence
  Cyclic GFR-binding peptide
  MOD_RES (31)..(32): Xaa is C or S
SKVIMNSLQEIKPTKGIYYVIPLPELDQSVXXPSA

SEQ ID NO: 13541 - protein, 24 aa, Artificial Sequence
  Cyclic GFR-binding peptide
VVMDQYNKLVVKENEDLYLMSIAS

SEQ ID NO: 13542 - protein, 34 aa, Artificial Sequence
  Cyclic GFR-binding peptide
  MOD_RES (29)..(29): Xaa is C or S
VMNEYQKYIVNSSDDIFLVSIPSLKTPAXTPKTV

SEQ ID NO: 13543 - protein, 37 aa, Artificial Sequence
  Cyclic GFR-binding peptide
  MOD_RES (1)..(3)..(34)..(35): Xaa is C or S
XKXSKVVMEYQKYVKPTRGVIFLISIPSLDQPVXXPS

SEQ ID NO: 13544 - protein, 36 aa, Artificial Sequence
  Cyclic GFR-binding peptide
  MOD_RES (30)..(31): Xaa is C or S
VVMNNSLQEIVNSSDDYYLVTLPELQTPAXXPKPVT

SEQ ID NO: 13545 - protein, 33 aa, Artificial Sequence; identical to SEQ ID NO: 2994
  Cyclic GFR-binding peptide
  MOD_RES (27)..(27): Xaa is C or S

SEQ ID NO: 13546 - protein, 26 aa, Artificial Sequence
  Cyclic GFR-binding peptide
  MOD_RES (1)..(1): Xaa is C or S
XSKVIMEYQKYIKPTKGIIFLISIPS

SEQ ID NO: 13547 - protein, 25 aa, Artificial Sequence
  Cyclic GFR-binding peptide
MNQYNKLIVNSSDDLYLVSIASLKT

SEQ ID NO: 13548 - protein, 36 aa, Artificial Sequence; identical to SEQ ID NO: 2998
  Cyclic GFR-binding peptide
  MOD_RES (1)..(3)..(34)..(35): Xaa is C or S

SEQ ID NO: 13549 - protein, 35 aa, Artificial Sequence; identical to SEQ ID NO: 3001
  Cyclic GFR-binding peptide
  MOD_RES (29)..(29): Xaa is C or S

SEQ ID NO: 13550 - protein, 24 aa, Artificial Sequence
  Cyclic GFR-binding peptide
VMDNSLQEVVKENEDYYLMTLPEL

SEQ ID NO: 13551 - protein, 34 aa, Artificial Sequence
  Cyclic GFR-binding peptide
  MOD_RES (1)..(3): Xaa is C or S
XGXSEVVMDNSLQEVVNNASDYYVIPLPELRTPV

SEQ ID NO: 13552 - protein, 30 aa, Artificial Sequence
  Cyclic GFR-binding peptide
  MOD_RES (27)..(28): Xaa is C or S
ENSLQEVVKDYEDYYLMTLPELETPVXXAK

SEQ ID NO: 13553 - protein, 28 aa, Artificial Sequence
  Cyclic GFR-binding peptide
  MOD_RES (28)..(28): Xaa is C or S
MDRYKKLVVNNASDFYLISIANLRTPVX

SEQ ID NO: 13554 - protein, 35 aa, Artificial Sequence; identical to SEQ ID NO: 3007
  Cyclic GFR-binding peptide
  MOD_RES (1)..(33): Xaa is C or S

SEQ ID NO: 13555 - protein, 36 aa, Artificial Sequence; identical to SEQ ID NO: 3008
  Cyclic GFR-binding peptide
  MOD_RES (30)..(31): Xaa is C or S

SEQ ID NO: 13556 - protein, 29 aa, Artificial Sequence
  Cyclic GFR-binding peptide
VVMEQYNKLVVKDYEDLYLMSIASLETPV

SEQ ID NO: 13557 - protein, 25 aa, Artificial Sequence
  Cyclic GFR-binding peptide
QYNKLVKPTRGVLYLISIASLDQPV

SEQ ID NO: 13558 - protein, 29 aa, Artificial Sequence
  Cyclic GFR-binding peptide
  MOD_RES (28)..(29): Xaa is C or S
MDNSLQEVVKENEDYYLMTLPELETPVXX

SEQ ID NO: 13559 - protein, 27 aa, Artificial Sequence
  Cyclic GFR-binding peptide
  MOD_RES (2)..(2): Xaa is C or S
KXSKVVMEYQKYVKPTRGVIFLISIPS

SEQ ID NO: 13560 - protein, 39 aa, Artificial Sequence
  Cyclic GFR-binding peptide
  MOD_RES (1)..(3)..(35)..(36): Xaa is C or S
XGXSEVVMDQYNKLVVNNASDLYLISIASLRTPVXXTPP

SEQ ID NO: 13561 - protein, 21 aa, Artificial Sequence
  Cyclic GFR-binding peptide
EYQKYVVKENEDIFLMSIPSL

SEQ ID NO: 13562 - protein, 32 aa, Artificial Sequence; identical to SEQ ID NO: 3017
  Cyclic GFR-binding peptide
  MOD_RES (26)..(27): Xaa is C or S

SEQ ID NO: 13563 - protein, 36 aa, Artificial Sequence
  Cyclic GFR-binding peptide
  MOD_RES (1)..(3)..(34)..(35): Xaa is C or S
XKXSKVIMNSLQEIKPTKGIYYLITLPELDQSVXXP

SEQ ID NO: 13564 - protein, 38 aa, Artificial Sequence; identical to SEQ ID NO: 3018
  Cyclic GFR-binding peptide
  MOD_RES (1)..(3)..(35)..(36): Xaa is C or S

SEQ ID NO: 13565 - protein, 34 aa, Artificial Sequence
  Cyclic GFR-binding peptide
  MOD_RES (29)..(30): Xaa is C or S
VMDNSLQEVVNNASDYYVIPLPELRTPVXXTPPT

SEQ ID NO: 13566 - protein, 25 aa, Artificial Sequence
  Cyclic GFR-binding peptide
RYKKLVKPKRGVFYLISIANLAQPV

SEQ ID NO: 13567 - protein, 31 aa, Artificial Sequence
  Cyclic GFR-binding peptide
  MOD_RES (28)..(28): Xaa is C or S
MNNSLQEIVNSSDDYYVVPLPELKTPAXTPK

SEQ ID NO: 13568 - protein, 29 aa, Artificial Sequence
  Cyclic GFR-binding peptide
  MOD_RES (1)..(1): Xaa is C or S
XSKVIMEYQKYIKPTKGIIFLISIPSLDQ

SEQ ID NO: 13569 - protein, 26 aa, Artificial Sequence
  Cyclic GFR-binding peptide
GEVVMERYKKLVVKDYEDFYLMSIAN

SEQ ID NO: 13570 - protein, 23 aa, Artificial Sequence
  Cyclic GFR-binding peptide
NSLQEIVNSSDDYYLVTLPELQT

SEQ ID NO: 13571 - protein, 40 aa, Artificial Sequence
  Cyclic GFR-binding peptide
  MOD_RES (2)..(4)..(36): Xaa is C or S
HXGXSRVVMNNSLQEIVNSSDDYYVVPLPELKTPAXTPKT

SEQ ID NO: 13572 - protein, 29 aa, Artificial Sequence
  Cyclic GFR-binding peptide
  MOD_RES (1)..(3): Xaa is C or S
XGXSEVVMDNSLQEVVNNASDYYVIPLPE

SEQ ID NO: 13573 - protein, 36 aa, Artificial Sequence; identical to SEQ ID NO: 3032
  Cyclic GFR-binding peptide
  MOD_RES (2)..(4)..(36): Xaa is C or S

SEQ ID NO: 13574 - protein, 25 aa, Artificial Sequence
  Cyclic GFR-binding peptide
RYKKLIKPTKGIFYLISIANLDQSV

SEQ ID NO: 13575 - protein, 34 aa, Artificial Sequence; identical to SEQ ID NO: 3034
  Cyclic GFR-binding peptide
  MOD_RES (28)..(29): Xaa is C or S

SEQ ID NO: 13576 - protein, 31 aa, Artificial Sequence; identical to SEQ ID NO: 3035
  Cyclic GFR-binding peptide
  MOD_RES (26)..(27): Xaa is C or S

SEQ ID NO: 13577 - protein, 32 aa, Artificial Sequence
  Cyclic GFR-binding peptide
  MOD_RES (29)..(30): Xaa is C or S
VMNNSLQEIVNSSDDYYVVPLPELQTPAXXPK

SEQ ID NO: 13578 - protein, 33 aa, Artificial Sequence; identical to SEQ ID NO: 3037
  Cyclic GFR-binding peptide
  MOD_RES (32)..(33): Xaa is C or S

SEQ ID NO: 13579 - protein, 30 aa, Artificial Sequence; identical to SEQ ID NO: 3039
  Cyclic GFR-binding peptide
  MOD_RES (2)..(2): Xaa is C or S

SEQ ID NO: 13580 - protein, 29 aa, Artificial Sequence
  Cyclic GFR-binding peptide
  MOD_RES (2)..(2): Xaa is C or S
GXSEVVMDNSLQEVVNNASDYYVIPLPEL

SEQ ID NO: 13581 - protein, 26 aa, Artificial Sequence
  Cyclic GFR-binding peptide
  MOD_RES (26)..(26): Xaa is C or S
EYQKYIKPTKGIIFLISIPSLDQSVX

SEQ ID NO: 13582 - protein, 35 aa, Artificial Sequence
  Cyclic GFR-binding peptide
  MOD_RES (32)..(33): Xaa is C or S
SEVVMDQYNKLVVNNASDLYLISIASLRTPVXXTP

SEQ ID NO: 13583 - protein, 27 aa, Artificial Sequence
  Cyclic GFR-binding peptide
  MOD_RES (26)..(27): Xaa is C or S
EYQKYIKPTKGIIFLISIPSLDQSVXX

SEQ ID NO: 13584 - protein, 26 aa, Artificial Sequence
  Cyclic GFR-binding peptide
IMNSLQEIKPTKGIYYLITLPELDQS

SEQ ID NO: 13585 - protein, 31 aa, Artificial Sequence
  Cyclic GFR-binding peptide
  MOD_RES (2)..(2): Xaa is C or S
GXSEVVMDNSLQEVVNNASDYYLITLPELRT

SEQ ID NO: 13586 - protein, 26 aa, Artificial Sequence
  Cyclic GFR-binding peptide
MDNSLQEVVNNASDYYLITLPELRTP

SEQ ID NO: 13587 - protein, 28 aa, Artificial Sequence
  Cyclic GFR-binding peptide
  MOD_RES (28)..(28): Xaa is C or S
MERYKKLVVKDYEDFYLMSIANLETPVX

SEQ ID NO: 13588 - protein, 27 aa, Artificial Sequence
  Cyclic GFR-binding peptide
MNRYKKLIVNSSDDFYLVSIANLKTPA

SEQ ID NO: 13589 - protein, 39 aa, Artificial Sequence
  Cyclic GFR-binding peptide
  MOD_RES (1)..(3)..(35)..(36): Xaa is C or S
XGXSRVVMNNSLQEIVNSSDDYYVVPLPELKTPAXXPKP

SEQ ID NO: 13590 - protein, 39 aa, Artificial Sequence; identical to SEQ ID NO: 3051
  Cyclic GFR-binding peptide
  MOD_RES (1)..(3)..(35)..(36): Xaa is C or S

SEQ ID NO: 13591 - protein, 30 aa, Artificial Sequence
  Cyclic GFR-binding peptide
  MOD_RES (1)..(3): Xaa is C or S
XGXSEVVMDNSLQEVVNNASDYYVIPLPEL

SEQ ID NO: 13592 - protein, 39 aa, Artificial Sequence
  Cyclic GFR-binding peptide
  MOD_RES (2)..(34)..(35): Xaa is C or S
GXGEVVMDEYQKYVVKENEDIFLMSIPSLETPVXXAKPI

SEQ ID NO: 13593 - protein, 33 aa, Artificial Sequence
  Cyclic GFR-binding peptide
  MOD_RES (30)..(31): Xaa is C or S
VVMENSLQEVVKDYEDYYVMPLPELETPVXXAK

SEQ ID NO: 13594 - protein, 25 aa, Artificial Sequence
  Cyclic GFR-binding peptide
MNRYKKLIVNSSDDFYLVSIANLQT

SEQ ID NO: 13595 - protein, 35 aa, Artificial Sequence
  Cyclic GFR-binding peptide
  MOD_RES (30)..(31): Xaa is C or S
VVMNNSLQEIVNSSDDYYVVPLPELKTPAXXPKPV

SEQ ID NO: 13596 - protein, 33 aa, Artificial Sequence; identical to SEQ ID NO: 3054
  Cyclic GFR-binding peptide
  MOD_RES (2)..(2): Xaa is C or S

SEQ ID NO: 13597 - protein, 33 aa, Artificial Sequence
  Cyclic GFR-binding peptide
  MOD_RES (28)..(29): Xaa is C or S
VMEYQKYVKPTRGVIFLISIPSLDQPVXXPSAS

SEQ ID NO: 13598 - protein, 32 aa, Artificial Sequence; identical to SEQ ID NO: 3056
  Cyclic GFR-binding peptide
  MOD_RES (29)..(30): Xaa is C or S

SEQ ID NO: 13599 - protein, 38 aa, Artificial Sequence; identical to SEQ ID NO: 3057
  Cyclic GFR-binding peptide
  MOD_RES (1)..(3)..(34)..(35): Xaa is C or S

SEQ ID NO: 13600 - protein, 32 aa, Artificial Sequence
  Cyclic GFR-binding peptide
  MOD_RES (26)..(27): Xaa is C or S
EYQKYIVNSSDDIFLVSIPSLKTPAXXPKPVY

SEQ ID NO: 13601 - protein, 27 aa, Artificial Sequence
  Cyclic GFR-binding peptide
GEVVMENSLQEVVKDYEDYYVMPLPEL

SEQ ID NO: 13602 - protein, 37 aa, Artificial Sequence
  Cyclic GFR-binding peptide
  MOD_RES (1)..(32)..(33): Xaa is C or S
XSRVIMNSLQEVKPKRGVYYLITLPELAQPVXXPAAS

SEQ ID NO: 13603 - protein, 21 aa, Artificial Sequence
  Cyclic GFR-binding peptide
NSLQEVVKDYEDYYVMPLPEL

SEQ ID NO: 13604 - protein, 21 aa, Artificial Sequence
  Cyclic GFR-binding peptide
NSLQEVVNNASDYYLITLPEL

SEQ ID NO: 13605 - protein, 27 aa, Artificial Sequence
  Cyclic GFR-binding peptide
VVMNNSLQEIVNSSDDYYLVTLPELQT

SEQ ID NO: 13606 - protein, 41 aa, Artificial Sequence
  Cyclic GFR-binding peptide
  MOD_RES (1)..(3)..(35): Xaa is C or S
XGXSRVVMNNSLQEIVNSSDDYYVVPLPELKTPAXTPKTVH

SEQ ID NO: 13607 - protein, 40 aa, Artificial Sequence; identical to SEQ ID NO: 3063
  Cyclic GFR-binding peptide
  MOD_RES (1)..(3)..(35)..(36): Xaa is C or S

SEQ ID NO: 13608 - protein, 27 aa, Artificial Sequence
  Cyclic GFR-binding peptide
  MOD_RES (1)..(1): Xaa is C or S
XSKVIMNSLQEIKPTKGIYYVIPLPEL

SEQ ID NO: 13609 - protein, 35 aa, Artificial Sequence
  Cyclic GFR-binding peptide
  MOD_RES (31)..(32): Xaa is C or S
RVVMNNSLQEIVNSSDDYYVVPLPELQTPAXXPKP

SEQ ID NO: 13610 - protein, 34 aa, Artificial Sequence; identical to SEQ ID NO: 3067
  Cyclic GFR-binding peptide
  MOD_RES (1)..(3): Xaa is C or S

SEQ ID NO: 13611 - protein, 29 aa, Artificial Sequence
  Cyclic GFR-binding peptide
  MOD_RES (26)..(27): Xaa is C or S
NSLQEIVNSSDDYYLVTLPELQTPAXXPK

SEQ ID NO: 13612 - protein, 28 aa, Artificial Sequence
  Cyclic GFR-binding peptide
VMNQYNKLIVNSSDDLYLVSIASLQTPA

SEQ ID NO: 13613 - protein, 34 aa, Artificial Sequence; identical to SEQ ID NO: 3069
  Cyclic GFR-binding peptide
  MOD_RES (2)..(4): Xaa is C or S

SEQ ID NO: 13614 - protein, 42 aa, Artificial Sequence; identical to SEQ ID NO: 3070
  Cyclic GFR-binding peptide
  MOD_RES (2)..(4)..(36)..(37): Xaa is C or S

SEQ ID NO: 13615 - protein, 25 aa, Artificial Sequence
  Cyclic GFR-binding peptide
VMNRYKKLIVNSSDDFYLVSIANLK

SEQ ID NO: 13616 - protein, 36 aa, Artificial Sequence; identical to SEQ ID NO: 3076
  Cyclic GFR-binding peptide
  MOD_RES (2)..(34)..(35): Xaa is C or S

SEQ ID NO: 13617 - protein, 26 aa, Artificial Sequence
  Cyclic GFR-binding peptide
MNSLQEVKPTRGVYYVIPLPELDQPV

SEQ ID NO: 13618 - protein, 30 aa, Artificial Sequence
  Cyclic GFR-binding peptide
  MOD_RES (1)..(1): Xaa is C or S
XSKVIMNSLQEIKPTKGIYYLITLPELDQS

SEQ ID NO: 13619 - protein, 33 aa, Artificial Sequence
  Cyclic GFR-binding peptide
  MOD_RES (2)..(33): Xaa is C or S
KXSKVIMNSLQEIKPTKGIYYLITLPELDQSVX

SEQ ID NO: 13620 - protein, 37 aa, Artificial Sequence; identical to SEQ ID NO: 3078
  Cyclic GFR-binding peptide
  MOD_RES (2)..(4)..(35)..(36): Xaa is C or S

SEQ ID NO: 13621 - protein, 38 aa, Artificial Sequence
  Cyclic GFR-binding peptide
  MOD_RES (2)..(34)..(35): Xaa is C or S
GXSRVVMNNSLQEIVNSSDDYYLVTLPELKTPAXXPKP

SEQ ID NO: 13622 - protein, 30 aa, Artificial Sequence
  Cyclic GFR-binding peptide
RVVMNNSLQEIVNSSDDYYLVTLPELQTPA

SEQ ID NO: 13623 - protein, 31 aa, Artificial Sequence
  Cyclic GFR-binding peptide
  MOD_RES (28)..(29): Xaa is C or S
MNEYQKYIVNSSDDIFLVSIPSLQTPAXXPK

SEQ ID NO: 13624 - protein, 27 aa, Artificial Sequence
  Cyclic GFR-binding peptide
  MOD_RES (1)..(1): Xaa is C or S
XSKVIMNSLQEIKPTKGIYYLITLPEL

SEQ ID NO: 13625 - protein, 27 aa, Artificial Sequence
  Cyclic GFR-binding peptide
  MOD_RES (1)..(1): Xaa is C or S
XARVVMNRYKKLIVNSSDDFYLVSIAN

SEQ ID NO: 13626 - protein, 29 aa, Artificial Sequence
  Cyclic GFR-binding peptide
  MOD_RES (26)..(26): Xaa is C or S
NSLQEIVNSSDDYYVVPLPELKTPAXTPK

SEQ ID NO: 13627 - protein, 28 aa, Artificial Sequence
  Cyclic GFR-binding peptide
VVMENSLQEVVKDYEDYYLMTLPELETP

SEQ ID NO: 13628 - protein, 24 aa, Artificial Sequence
  Cyclic GFR-binding peptide
VMEYQKYVKPTRGVIFLISIPSLD

SEQ ID NO: 13629 - protein, 21 aa, Artificial Sequence
  Cyclic GFR-binding peptide
EYQKYVKPKRGVIFLISIPSL

SEQ ID NO: 13630 - protein, 32 aa, Artificial Sequence; identical to SEQ ID NO: 3090
  Cyclic GFR-binding peptide
  MOD_RES (2)..(4): Xaa is C or S

SEQ ID NO: 13631 - protein, 35 aa, Artificial Sequence
  Cyclic GFR-binding peptide
  MOD_RES (2)..(34)..(35): Xaa is C or S
GXSEVVMDNSLQEVVNNASDYYVIPLPELRTPVXX

SEQ ID NO: 13632 - protein, 34 aa, Artificial Sequence; identical to SEQ ID NO: 3091
  Cyclic GFR-binding peptide
  MOD_RES (32)..(33): Xaa is C or S

SEQ ID NO: 13633 - protein, 35 aa, Artificial Sequence; identical to SEQ ID NO: 3092
  Cyclic GFR-binding peptide
  MOD_RES (31)..(32): Xaa is C or S

SEQ ID NO: 13634 - protein, 26 aa, Artificial Sequence
  Cyclic GFR-binding peptide
  MOD_RES (26)..(26): Xaa is C or S
EYQKYIVNSSDDIFLVSIPSLQTPAX

SEQ ID NO: 13635 - protein, 37 aa, Artificial Sequence
  Cyclic GFR-binding peptide
  MOD_RES (32)..(33): Xaa is C or S
GEVVMENSLQEVVKDYEDYYVMPLPELETPVXXAKPI

SEQ ID NO: 13636 - protein, 24 aa, Artificial Sequence
  Cyclic GFR-binding peptide
VMNQYNKLIVNSSDDLYLVSIASL

SEQ ID NO: 13637 - protein, 30 aa, Artificial Sequence
  Cyclic GFR-binding peptide
  MOD_RES (30)..(30): Xaa is C or S
VVMDRYKKLVVNNASDFYLISIANLRTPVX

SEQ ID NO: 13638 - protein, 23 aa, Artificial Sequence
  Cyclic GFR-binding peptide
NSLQEIKPTKGIYYVIPLPELDQ

SEQ ID NO: 13639 - protein, 30 aa, Artificial Sequence
  Cyclic GFR-binding peptide
  MOD_RES (29)..(30): Xaa is C or S
VMDNSLQEVVKENEDYYLMTLPELETPVXX

SEQ ID NO: 13640 - protein, 37 aa, Artificial Sequence; identical to SEQ ID NO: 3098
  Cyclic GFR-binding peptide
  MOD_RES (32)..(32): Xaa is C or S

SEQ ID NO: 13641 - protein, 24 aa, Artificial Sequence
  Cyclic GFR-binding peptide
DEYQKYVVKENEDIFLMSIPSLET

SEQ ID NO: 13642 - protein, 27 aa, Artificial Sequence
  Cyclic GFR-binding peptide
  MOD_RES (27)..(27): Xaa is C or S
MNSLQEVKPKRGVYYLITLPELAQPVX

SEQ ID NO: 13643 - protein, 31 aa, Artificial Sequence
  Cyclic GFR-binding peptide
  MOD_RES (31)..(31): Xaa is C or S
EVVMDEYQKYVVKENEDIFLMSIPSLETPVX

SEQ ID NO: 13644 - protein, 29 aa, Artificial Sequence
  Cyclic GFR-binding peptide
VVMNEYQKYIVNSSDDIFLVSIPSLKTPA

SEQ ID NO: 13645 - protein, 34 aa, Artificial Sequence
  Cyclic GFR-binding peptide
  MOD_RES (2)..(4): Xaa is C or S
RXGXGEVVMENSLQEVVKDYEDYYLMTLPELETP

SEQ ID NO: 13646 - protein, 37 aa, Artificial Sequence; identical to SEQ ID NO: 3101
  Cyclic GFR-binding peptide
  MOD_RES (2)..(4)..(36): Xaa is C or S

SEQ ID NO: 13647 - protein, 26 aa, Artificial Sequence
  Cyclic GFR-binding peptide
EVVMDNSLQEVVNNASDYYLITLPEL

SEQ ID NO: 13648 - protein, 24 aa, Artificial Sequence
  Cyclic GFR-binding peptide
DNSLQEVVNNASDYYVIPLPELRT

SEQ ID NO: 13649 - protein, 27 aa, Artificial Sequence
  Cyclic GFR-binding peptide
  MOD_RES (2)..(2): Xaa is C or S
KXSKVVMQYNKLVKPTRGVLYLISIAS

SEQ ID NO: 13650 - protein, 29 aa, Artificial Sequence
  Cyclic GFR-binding peptide
  MOD_RES (1)..(3): Xaa is C or S
XGXSRVVMNRYKKLIVNSSDDFYLVSIAN

SEQ ID NO: 13651 - protein, 34 aa, Artificial Sequence
  Cyclic GFR-binding peptide
  MOD_RES (2)..(4): Xaa is C or S
SXKXSKVIMNSLQEIKPTKGIYYLITLPELDQSV

SEQ ID NO: 13652 - protein, 27 aa, Artificial Sequence
  Cyclic GFR-binding peptide
MDQYNKLVVNNASDLYLISIASLRTPV

SEQ ID NO: 13653 - protein, 34 aa, Artificial Sequence
  Cyclic GFR-binding peptide
  MOD_RES (1)..(32)..(33): Xaa is C or S
XSKVVMEYQKYVKPTRGVIFLISIPSLDQPVXXP

SEQ ID NO: 13654 - protein, 26 aa, Artificial Sequence
  Cyclic GFR-binding peptide
MDNSLQEVVKENEDYYLMTLPELETP

SEQ ID NO: 13655 - protein, 35 aa, Artificial Sequence; identical to SEQ ID NO: 3111
  Cyclic GFR-binding peptide
  MOD_RES (1)..(33)..(34): Xaa is C or S

SEQ ID NO: 13656 - protein, 27 aa, Artificial Sequence
  Cyclic GFR-binding peptide
VVMNQYNKLIVNSSDDLYLVSIASLQT

SEQ ID NO: 13657 - protein, 32 aa, Artificial Sequence
  Cyclic GFR-binding peptide
  MOD_RES (29)..(30): Xaa is C or S
VMDNSLQEVVNNASDYYLITLPELRTPVXXTP

SEQ ID NO: 13658 - protein, 31 aa, Artificial Sequence
  Cyclic GFR-binding peptide
  MOD_RES (27)..(28): Xaa is C or S
DNSLQEVVKENEDYYLMTLPELETPVXXAKP

SEQ ID NO: 13659 - protein, 32 aa, Artificial Sequence
  Cyclic GFR-binding peptide
  MOD_RES (32)..(32): Xaa is C or S
GEVVMEEYQKYVVKDYEDIFLMSIPSLETPVX

SEQ ID NO: 13660 - protein, 35 aa, Artificial Sequence; identical to SEQ ID NO: 3117
  Cyclic GFR-binding peptide
  MOD_RES (1)..(3)..(34)..(35): Xaa is C or S

SEQ ID NO: 13661 - protein, 29 aa, Artificial Sequence
  Cyclic GFR-binding peptide
SKVIMQYNKLIKPTKGILYLISIASLDQS

SEQ ID NO: 13662 - protein, 27 aa, Artificial Sequence
  Cyclic GFR-binding peptide
VMEYQKYVKPTRGVIFLISIPSLDQPV

SEQ ID NO: 13663 - protein, 27 aa, Artificial Sequence
  Cyclic GFR-binding peptide
MEQYNKLVVKDYEDLYLMSIASLETPV

SEQ ID NO: 13664 - protein, 35 aa, Artificial Sequence
  Cyclic GFR-binding peptide
  MOD_RES (32)..(33): Xaa is C or S
SEVVMDRYKKLVVNNASDFYLISIANLRTPVXXTP

SEQ ID NO: 13665 - protein, 33 aa, Artificial Sequence
  Cyclic GFR-binding peptide
  MOD_RES (1)..(3): Xaa is C or S
XGXSEVVMDNSLQEVVNNASDYYVIPLPELRTP

SEQ ID NO: 13666 - protein, 32 aa, Artificial Sequence
  Cyclic GFR-binding peptide
  MOD_RES (2)..(4): Xaa is C or S
SXKXSKVVMEYQKYVKPTRGVIFLISIPSLDQ

SEQ ID NO: 13667 - protein, 39 aa, Artificial Sequence
  Cyclic GFR-binding peptide
  MOD_RES (2)..(4)..(36): Xaa is C or S
HXGXSRVVMNEYQKYIVNSSDDIFLVSIPSLKTPAXTPK

SEQ ID NO: 13668 - protein, 29 aa, Artificial Sequence
  Cyclic GFR-binding peptide
RVVMNNSLQEIVNSSDDYYLVTLPELQTP

SEQ ID NO: 13669 - protein, 35 aa, Artificial Sequence
  Cyclic GFR-binding peptide
  MOD_RES (29)..(30): Xaa is C or S
VMEEYQKYVVKDYEDIFLMSIPSLETPVXXAKPIS

SEQ ID NO: 13670 - protein, 34 aa, Artificial Sequence
  Cyclic GFR-binding peptide
  MOD_RES (2)..(4): Xaa is C or S
SXKXSKVIMEYQKYIKPTKGIIFLISIPSLDQSV

SEQ ID NO: 13671 - protein, 25 aa, Artificial Sequence
  Cyclic GFR-binding peptide
DNSLQEVVNNASDYYVIPLPELRTP

SEQ ID NO: 13672 - protein, 38 aa, Artificial Sequence; identical to SEQ ID NO: 3126
  Cyclic GFR-binding peptide
  MOD_RES (1)..(33): Xaa is C or S

SEQ ID NO: 13673 - protein, 25 aa, Artificial Sequence
  Cyclic GFR-binding peptide
DQYNKLVVNNASDLYLISIASLRTP

SEQ ID NO: 13674 - protein, 32 aa, Artificial Sequence
  Cyclic GFR-binding peptide
  MOD_RES (28)..(29): Xaa is C or S
MNNSLQEIVNSSDDYYLVTLPELKTPAXXPKP

SEQ ID NO: 13675 - protein, 35 aa, Artificial Sequence; identical to SEQ ID NO: 3128
  Cyclic GFR-binding peptide
  MOD_RES (1)..(3)..(34)..(35): Xaa is C or S

SEQ ID NO: 13676 - protein, 29 aa, Artificial Sequence
  Cyclic GFR-binding peptide
  MOD_RES (1)..(1): Xaa is C or S
XSRVVMNNSLQEIVNSSDDYYVVPLPELK

SEQ ID NO: 13677 - protein, 25 aa, Artificial Sequence
  Cyclic GFR-binding peptide
VVMRYKKLVKPTRGVFYLISIANLD

SEQ ID NO: 13678 - protein, 33 aa, Artificial Sequence
  Cyclic GFR-binding peptide
  MOD_RES (30)..(31): Xaa is C or S
VVMDNSLQEVVNNASDYYVIPLPELRTPVXXTP

SEQ ID NO: 13679 - protein, 24 aa, Artificial Sequence
  Cyclic GFR-binding peptide
VIMQYNKLVKPKRGVLYLISIASL

SEQ ID NO: 13680 - protein, 41 aa, Artificial Sequence; identical to SEQ ID NO: 3142
  Cyclic GFR-binding peptide
  MOD_RES (1)..(3)..(35): Xaa is C or S

SEQ ID NO: 13681 - protein, 20 aa, Artificial Sequence
  Cyclic GFR-binding peptide
NSLQEVVKDYEDYYVMPLPE

SEQ ID NO: 13682 - protein, 34 aa, Artificial Sequence; identical to SEQ ID NO: 3143
  Cyclic GFR-binding peptide
  MOD_RES (1)..(3): Xaa is C or S

SEQ ID NO: 13683 - protein, 22 aa, Artificial Sequence
  Cyclic GFR-binding peptide
QYNKLVKPTRGVLYLISIASLD

SEQ ID NO: 13684 - protein, 38 aa, Artificial Sequence
  Cyclic GFR-binding peptide
  MOD_RES (1)..(33)..(34): Xaa is C or S
XGEVVMDEYQKYVVKENEDIFLMSIPSLETPVXXAKPI

SEQ ID NO: 13685 - protein, 34 aa, Artificial Sequence; identical to SEQ ID NO: 3145
  Cyclic GFR-binding peptide
  MOD_RES (28)..(28): Xaa is C or S

SEQ ID NO: 13686 - protein, 29 aa, Artificial Sequence
  Cyclic GFR-binding peptide
  MOD_RES (28)..(29): Xaa is C or S
IMEYQKYVKPKRGVIFLISIPSLAQPVXX

SEQ ID NO: 13687 - protein, 23 aa, Artificial Sequence
  Cyclic GFR-binding peptide
MDNSLQEVVKENEDYYLMTLPEL

SEQ ID NO: 13688 - protein, 40 aa, Artificial Sequence
  Cyclic GFR-binding peptide
  MOD_RES (2)..(4)..(36)..(37): Xaa is C or S
RXGXGEVVMENSLQEVVKDYEDYYVMPLPELETPVXXAKP

SEQ ID NO: 13689 - protein, 33 aa, Artificial Sequence
  Cyclic GFR-binding peptide
  MOD_RES (32)..(33): Xaa is C or S
GEVVMENSLQEVVKDYEDYYVMPLPELETPVXX

SEQ ID NO: 13690 - protein, 38 aa, Artificial Sequence
  Cyclic GFR-binding peptide
  MOD_RES (1)..(33): Xaa is C or S
XSRVVMNEYQKYIVNSSDDIFLVSIPSLKTPAXTPKTV

SEQ ID NO: 13691 - protein, 25 aa, Artificial Sequence
  Cyclic GFR-binding peptide
MNNSLQEIVNSSDDYYVVPLPELKT

SEQ ID NO: 13692 - protein, 38 aa, Artificial Sequence
  Cyclic GFR-binding peptide
  MOD_RES (1)..(3)..(35)..(36): Xaa is C or S
XGXSEVVMDQYNKLVVNNASDLYLISIASLRTPVXXTP

SEQ ID NO: 13693 - protein, 34 aa, Artificial Sequence
  Cyclic GFR-binding peptide
  MOD_RES (30)..(31): Xaa is C or S
KVVMNSLQEVKPTRGVYYVIPLPELDQPVXXPSA

SEQ ID NO: 13694 - protein, 39 aa, Artificial Sequence; identical to SEQ ID NO: 3150
  Cyclic GFR-binding peptide
  MOD_RES (2)..(4)..(36)..(37): Xaa is C or S

SEQ ID NO: 13695 - protein, 27 aa, Artificial Sequence
  Cyclic GFR-binding peptide
SRVVMNQYNKLIVNSSDDLYLVSIASL

SEQ ID NO: 13696 - protein, 34 aa, Artificial Sequence; identical to SEQ ID NO: 3156
  Cyclic GFR-binding peptide
  MOD_RES (2)..(4): Xaa is C or S

SEQ ID NO: 13697 - protein, 33 aa, Artificial Sequence
  Cyclic GFR-binding peptide
  MOD_RES (29)..(30): Xaa is C or S
VIMEYQKYIKPTKGIIFLISIPSLDQSVXXPSA

SEQ ID NO: 13698 - protein, 38 aa, Artificial Sequence; identical to SEQ ID NO: 3157
  Cyclic GFR-binding peptide
  MOD_RES (2)..(4)..(36): Xaa is C or S

SEQ ID NO: 13699 - protein, 30 aa, Artificial Sequence
  Cyclic GFR-binding peptide
  MOD_RES (26)..(27): Xaa is C or S
NSLQEIKPTKGIYYVIPLPELDQSVXXPSA

SEQ ID NO: 13700 - protein, 39 aa, Artificial Sequence
  Cyclic GFR-binding peptide
  MOD_RES (2)..(34): Xaa is C or S
GXSRVVMNNSLQEIVNSSDDYYLVTLPELKTPAXTPKTV

SEQ ID NO: 13701 - protein, 27 aa, Artificial Sequence
  Cyclic GFR-binding peptide
SEVVMDNSLQEVVNNASDYYLITLPEL

SEQ ID NO: 13702 - protein, 22 aa, Artificial Sequence
  Cyclic GFR-binding peptide
DEYQKYVVKENEDIFLMSIPSL

SEQ ID NO: 13703 - protein, 27 aa, Artificial Sequence
  Cyclic GFR-binding peptide
  MOD_RES (2)..(2): Xaa is C or S
KXSKVIMEYQKYIKPTKGIIFLISIPS

SEQ ID NO: 13704 - protein, 29 aa, Artificial Sequence
  Cyclic GFR-binding peptide
  MOD_RES (27)..(28): Xaa is C or S
MNSLQEVKPKRGVYYLITLPELAQPVXXP

SEQ ID NO: 13705 - protein, 33 aa, Artificial Sequence
  Cyclic GFR-binding peptide
  MOD_RES (31)..(31): Xaa is C or S
RVVMNNSLQEIVNSSDDYYLVTLPELKTPAXTP

SEQ ID NO: 13706 - protein, 37 aa, Artificial Sequence; identical to SEQ ID NO: 3164
  Cyclic GFR-binding peptide
  MOD_RES (2)..(4)..(36)..(37): Xaa is C or S

SEQ ID NO: 13707 - protein, 27 aa, Artificial Sequence
  Cyclic GFR-binding peptide
ARVVMNQYNKLIVNSSDDLYLVSIASL

SEQ ID NO: 13708 - protein, 28 aa, Artificial Sequence
  Cyclic GFR-binding peptide
RVVMNEYQKYIVNSSDDIFLVSIPSLKT

SEQ ID NO: 13709 - protein, 31 aa, Artificial Sequence; identical to SEQ ID NO: 3166
  Cyclic GFR-binding peptide
  MOD_RES (29)..(30): Xaa is C or S

SEQ ID NO: 13710 - protein, 36 aa, Artificial Sequence
  Cyclic GFR-binding peptide
  MOD_RES (1)..(33)..(34): Xaa is C or S
XSRVVMNEYQKYIVNSSDDIFLVSIPSLKTPAXXPK

SEQ ID NO: 13711 - protein, 33 aa, Artificial Sequence; identical to SEQ ID NO: 3168
  Cyclic GFR-binding peptide
  MOD_RES (28)..(29): Xaa is C or S

SEQ ID NO: 13712 - protein, 24 aa, Artificial Sequence
  Cyclic GFR-binding peptide
VIMNSLQEIKPTKGIYYVIPLPEL

SEQ ID NO: 13713 - protein, 34 aa, Artificial Sequence; identical to SEQ ID NO: 3170
  Cyclic GFR-binding peptide
  MOD_RES (1)..(33)..(34): Xaa is C or S

SEQ ID NO: 13714 - protein, 32 aa, Artificial Sequence
  Cyclic GFR-binding peptide
  MOD_RES (2)..(4): Xaa is C or S
SXKXSRVIMNSLQEVKPKRGVYYVIPLPELAQ

SEQ ID NO: 13715 - protein, 32 aa, Artificial Sequence
  Cyclic GFR-binding peptide
  MOD_RES (26)..(27): Xaa is C or S
EYQKYIVNSSDDIFLVSIPSLQTPAXXPKPVT

SEQ ID NO: 13716 - protein, 31 aa, Artificial Sequence; identical to SEQ ID NO: 3172
  Cyclic GFR-binding peptide
  MOD_RES (28)..(29): Xaa is C or S

SEQ ID NO: 13717 - protein, 25 aa, Artificial Sequence
  Cyclic GFR-binding peptide
DNSLQEVVKENEDYYLMTLPELETP

SEQ ID NO: 13718 - protein, 26 aa, Artificial Sequence
  Cyclic GFR-binding peptide
  MOD_RES (1)..(1): Xaa is C or S
XSKVVMQYNKLVKPTRGVLYLISIAS

SEQ ID NO: 13719 - protein, 31 aa, Artificial Sequence; identical to SEQ ID NO: 3174
  Cyclic GFR-binding peptide
  MOD_RES (28)..(28): Xaa is C or S

SEQ ID NO: 13720 - protein, 39 aa, Artificial Sequence
  Cyclic GFR-binding peptide
  MOD_RES (1)..(3)..(34)..(35): Xaa is C or S
XKXSRVIMNSLQEVKPKRGVYYLITLPELAQPVXXPAAS

SEQ ID NO: 13721 - protein, 38 aa, Artificial Sequence; identical to SEQ ID NO: 3176
  Cyclic GFR-binding peptide
  MOD_RES (2)..(34): Xaa is C or S

SEQ ID NO: 13722 - protein, 34 aa, Artificial Sequence
  Cyclic GFR-binding peptide
  MOD_RES (1)..(33)..(34): Xaa is C or S
XSEVVMDQYNKLVVNNASDLYLISIASLRTPVXX

SEQ ID NO: 13723 - protein, 29 aa, Artificial Sequence
  Cyclic GFR-binding peptide
  MOD_RES (2)..(4): Xaa is C or S
SXKXSKVIMRYKKLIKPTKGIFYLISIAN

SEQ ID NO: 13724 - protein, 31 aa, Artificial Sequence
  Cyclic GFR-binding peptide
  MOD_RES (28)..(29): Xaa is C or S
MNNSLQEIVNSSDDYYLVTLPELKTPAXXPK

SEQ ID NO: 13725 - protein, 21 aa, Artificial Sequence
  Cyclic GFR-binding peptide
NSLQEIVNSSDDYYLVTLPEL

SEQ ID NO: 13726 - protein, 31 aa, Artificial Sequence
  Cyclic GFR-binding peptide
  MOD_RES (26)..(27): Xaa is C or S
EYQKYVKPTRGVIFLISIPSLDQPVXXPSAS

SEQ ID NO: 13727 - protein, 34 aa, Artificial Sequence; identical to SEQ ID NO: 3180
  Cyclic GFR-binding peptide
  MOD_RES (31)..(32): Xaa is C or S

SEQ ID NO: 13728 - protein, 30 aa, Artificial Sequence
  Cyclic GFR-binding peptide
GEVVMENSLQEVVKDYEDYYLMTLPELETP

SEQ ID NO: 13729 - protein, 32 aa, Artificial Sequence; identical to SEQ ID NO: 3183
  Cyclic GFR-binding peptide
  MOD_RES (30)..(31): Xaa is C or S

SEQ ID NO: 13730 - protein, 36 aa, Artificial Sequence; identical to SEQ ID NO: 3184
  Cyclic GFR-binding peptide
  MOD_RES (1)..(3)..(34)..(35): Xaa is C or S

SEQ ID NO: 13731 - protein, 25 aa, Artificial Sequence
  Cyclic GFR-binding peptide
SKVIMNSLQEIKPTKGIYYLITLPE

SEQ ID NO: 13732 - protein, 27 aa, Artificial Sequence
  Cyclic GFR-binding peptide
MNRYKKLIVNSSDDFYLVSIANLQTPA

SEQ ID NO: 13733 - protein, 28 aa, Artificial Sequence
  Cyclic GFR-binding peptide
GEVVMENSLQEVVKDYEDYYLMTLPELE

SEQ ID NO: 13734 - protein, 35 aa, Artificial Sequence; identical to SEQ ID NO: 3190
  Cyclic GFR-binding peptide
  MOD_RES (31)..(32): Xaa is C or S

SEQ ID NO: 13735 - protein, 27 aa, Artificial Sequence
  Cyclic GFR-binding peptide
VMNNSLQEIVNSSDDYYLVTLPELKTP

SEQ ID NO: 13736 - protein, 28 aa, Artificial Sequence
  Cyclic GFR-binding peptide
  MOD_RES (27)..(28): Xaa is C or S
MNSLQEVKPKRGVYYLITLPELAQPVXX

SEQ ID NO: 13737 - protein, 32 aa, Artificial Sequence
  Cyclic GFR-binding peptide
  MOD_RES (30)..(31): Xaa is C or S
VVMENSLQEVVKDYEDYYLMTLPELETPVXXA

SEQ ID NO: 13738 - protein, 31 aa, Artificial Sequence
  Cyclic GFR-binding peptide
  MOD_RES (2)..(2): Xaa is C or S
GXSEVVMDQYNKLVVNNASDLYLISIASLRT

SEQ ID NO: 13739 - protein, 31 aa, Artificial Sequence; identical to SEQ ID NO: 3192
  Cyclic GFR-binding peptide
  MOD_RES (29)..(30): Xaa is C or S

SEQ ID NO: 13740 - protein, 23 aa, Artificial Sequence
  Cyclic GFR-binding peptide
DRYKKLVVKENEDFYLMSIANLE

SEQ ID NO: 13741 - protein, 31 aa, Artificial Sequence
  Cyclic GFR-binding peptide
  MOD_RES (1)..(1): Xaa is C or S
XSEVVMDNSLQEVVNNASDYYLITLPELRTP

SEQ ID NO: 13742 - protein, 39 aa, Artificial Sequence
  Cyclic GFR-binding peptide
  MOD_RES (1)..(3)..(35)..(36): Xaa is C or S
XGXSEVVMDNSLQEVVNNASDYYVIPLPELRTPVXXTPP

SEQ ID NO: 13743 - protein, 28 aa, Artificial Sequence
  Cyclic GFR-binding peptide
EVVMENSLQEVVKDYEDYYLMTLPELET

SEQ ID NO: 13744 - protein, 25 aa, Artificial Sequence
  Cyclic GFR-binding peptide
NSLQEVVKDYEDYYVMPLPELETPV

SEQ ID NO: 13745 - protein, 25 aa, Artificial Sequence
  Cyclic GFR-binding peptide
VIMQYNKLVKPKRGVLYLISIASLA

SEQ ID NO: 13746 - protein, 33 aa, Artificial Sequence; identical to SEQ ID NO: 3197
  Cyclic GFR-binding peptide
  MOD_RES (2)..(4): Xaa is C or S

SEQ ID NO: 13747 - protein, 28 aa, Artificial Sequence
  Cyclic GFR-binding peptide
  MOD_RES (1)..(3): Xaa is C or S
XKXSKVVMNSLQEVKPTRGVYYVIPLPE

SEQ ID NO: 13748 - protein, 29 aa, Artificial Sequence
  Cyclic GFR-binding peptide
  MOD_RES (1)..(3): Xaa is C or S
XKXSKVIMNSLQEIKPTKGIYYLITLPEL

SEQ ID NO: 13749 - protein, 23 aa, Artificial Sequence
  Cyclic GFR-binding peptide
ENSLQEVVKDYEDYYVMPLPELE

SEQ ID NO: 13750 - protein, 27 aa, Artificial Sequence
  Cyclic GFR-binding peptide
VMDEYQKYVVKENEDIFLMSIPSLETP

SEQ ID NO: 13751 - protein, 31 aa, Artificial Sequence; identical to SEQ ID NO: 3203
  Cyclic GFR-binding peptide
  MOD_RES (28)..(28): Xaa is C or S

SEQ ID NO: 13752 - protein, 30 aa, Artificial Sequence; identical to SEQ ID NO: 3204
  Cyclic GFR-binding peptide
  MOD_RES (1)..(1): Xaa is C or S

SEQ ID NO: 13753 - protein, 34 aa, Artificial Sequence
  Cyclic GFR-binding peptide
  MOD_RES (32)..(33): Xaa is C or S
SEVVMDNSLQEVVNNASDYYLITLPELRTPVXXT

SEQ ID NO: 13754 - protein, 32 aa, Artificial Sequence; identical to SEQ ID NO: 3207
  Cyclic GFR-binding peptide
  MOD_RES (29)..(30): Xaa is C or S

SEQ ID NO: 13755 - protein, 33 aa, Artificial Sequence; identical to SEQ ID NO: 3209
  Cyclic GFR-binding peptide
  MOD_RES (28)..(29): Xaa is C or S

SEQ ID NO: 13756 - protein, 23 aa, Artificial Sequence
  Cyclic GFR-binding peptide
VMNNSLQEIVNSSDDYYVVPLPE

SEQ ID NO: 13757 - protein, 28 aa, Artificial Sequence
  Cyclic GFR-binding peptide
  MOD_RES (1)..(3): Xaa is C or S
XKXSKVVMQYNKLVKPTRGVLYLISIAS

SEQ ID NO: 13758 - protein, 33 aa, Artificial Sequence
  Cyclic GFR-binding peptide
  MOD_RES (29)..(30): Xaa is C or S
VMNNSLQEIVNSSDDYYLVTLPELKTPAXXPKP

SEQ ID NO: 13759 - protein, 37 aa, Artificial Sequence; identical to SEQ ID NO: 3211
  Cyclic GFR-binding peptide
  MOD_RES (1)..(3)..(35)..(36): Xaa is C or S

SEQ ID NO: 13760 - protein, 34 aa, Artificial Sequence
  Cyclic GFR-binding peptide
  MOD_RES (31)..(32): Xaa is C or S
RVVMNNSLQEIVNSSDDYYLVTLPELKTPAXXPK

SEQ ID NO: 13761 - protein, 30 aa, Artificial Sequence
  Cyclic GFR-binding peptide
SEVVMDQYNKLVVNNASDLYLISIASLRTP

SEQ ID NO: 13762 - protein, 29 aa, Artificial Sequence
  Cyclic GFR-binding peptide
  MOD_RES (1)..(3): Xaa is C or S
XKXSRVIMNSLQEVKPKRGVYYLITLPEL

SEQ ID NO: 13763 - protein, 36 aa, Artificial Sequence; identical to SEQ ID NO: 3212
  Cyclic GFR-binding peptide
  MOD_RES (31)..(32): Xaa is C or S

SEQ ID NO: 13764 - protein, 25 aa, Artificial Sequence
  Cyclic GFR-binding peptide
SRVIMEYQKYVKPKRGVIFLISIPS

SEQ ID NO: 13765 - protein, 29 aa, Artificial Sequence
  Cyclic GFR-binding peptide
VVMENSLQEVVKDYEDYYLMTLPELETPV

SEQ ID NO: 13766 - protein, 31 aa, Artificial Sequence
  Cyclic GFR-binding peptide
  MOD_RES (31)..(31): Xaa is C or S
RVVMNNSLQEIVNSSDDYYLVTLPELKTPAX

SEQ ID NO: 13767 - protein, 33 aa, Artificial Sequence
  Cyclic GFR-binding peptide
  MOD_RES (32)..(33): Xaa is C or S
GEVVMEEYQKYVVKDYEDIFLMSIPSLETPVXX

SEQ ID NO: 13768 - protein, 39 aa, Artificial Sequence; identical to SEQ ID NO: 3217
  Cyclic GFR-binding peptide
  MOD_RES (1)..(3)..(35)..(36): Xaa is C or S

SEQ ID NO: 13769 - protein, 34 aa, Artificial Sequence
  Cyclic GFR-binding peptide
  MOD_RES (1)..(3): Xaa is C or S
XGXARVVMNNSLQEIVNSSDDYYLVTLPELQTPA

SEQ ID NO: 13770 - protein, 27 aa, Artificial Sequence
  Cyclic GFR-binding peptide
  MOD_RES (26)..(27): Xaa is C or S
NSLQEVVKENEDYYVMPLPELETPVXX

SEQ ID NO: 13771 - protein, 32 aa, Artificial Sequence; identical to SEQ ID NO: 3220
  Cyclic GFR-binding peptide
  MOD_RES (26)..(27): Xaa is C or S

SEQ ID NO: 13772 - protein, 38 aa, Artificial Sequence
  Cyclic GFR-binding peptide
  MOD_RES (1)..(3)..(35)..(36): Xaa is C or S
XGXSEVVMDNSLQEVVNNASDYYVIPLPELRTPVXXTP

SEQ ID NO: 13773 - protein, 24 aa, Artificial Sequence
  Cyclic GFR-binding peptide
MNQYNKLIVNSSDDLYLVSIASLQ

SEQ ID NO: 13774 - protein, 24 aa, Artificial Sequence
  Cyclic GFR-binding peptide
VVMEQYNKLVVKDYEDLYLMSIAS

SEQ ID NO: 13775 - protein, 34 aa, Artificial Sequence
  Cyclic GFR-binding peptide
  MOD_RES (32)..(33): Xaa is C or S
SRVVMNEYQKYIVNSSDDIFLVSIPSLKTPAXXP

SEQ ID NO: 13776 - protein, 40 aa, Artificial Sequence
  Cyclic GFR-binding peptide
  MOD_RES (2)..(4)..(36)..(37): Xaa is C or S
RXGXGEVVMDEYQKYVVKENEDIFLMSIPSLETPVXXAKP

SEQ ID NO: 13777 - protein, 32 aa, Artificial Sequence
  Cyclic GFR-binding peptide
  MOD_RES (27)..(28): Xaa is C or S
NNSLQEIVNSSDDYYVVPLPELKTPAXXPKPV

SEQ ID NO: 13778 - protein, 33 aa, Artificial Sequence
  Cyclic GFR-binding peptide
  MOD_RES (29)..(30): Xaa is C or S
VIMNSLQEVKPKRGVYYLITLPELAQPVXXPAA

SEQ ID NO: 13779 - protein, 28 aa, Artificial Sequence
  Cyclic GFR-binding peptide
  MOD_RES (26)..(27): Xaa is C or S
NSLQEVVKENEDYYVMPLPELETPVXXA

SEQ ID NO: 13780 - protein, 36 aa, Artificial Sequence; identical to SEQ ID NO: 3224
  Cyclic GFR-binding peptide
  MOD_RES (1)..(32)..(33): Xaa is C or S

SEQ ID NO: 13781 - protein, 29 aa, Artificial Sequence
  Cyclic GFR-binding peptide
  MOD_RES (2)..(2): Xaa is C or S
KXSKVVMQYNKLVKPTRGVLYLISIASLD

SEQ ID NO: 13782 - protein, 26 aa, Artificial Sequence
  Cyclic GFR-binding peptide
VMDNSLQEVVNNASDYYLITLPELRT

SEQ ID NO: 13783 - protein, 31 aa, Artificial Sequence
  Cyclic GFR-binding peptide
  MOD_RES (26)..(27): Xaa is C or S
NSLQEIVNSSDDYYVVPLPELQTPAXXPKPV

SEQ ID NO: 13784 - protein, 26 aa, Artificial Sequence
  Cyclic GFR-binding peptide
EVVMDNSLQEVVKENEDYYLMTLPEL

SEQ ID NO: 13785 - protein, 32 aa, Artificial Sequence; identical to SEQ ID NO: 3228
  Cyclic GFR-binding peptide
  MOD_RES (29)..(29): Xaa is C or S

SEQ ID NO: 13786 - protein, 30 aa, Artificial Sequence; identical to SEQ ID NO: 3229
  Cyclic GFR-binding peptide
  MOD_RES (30)..(30): Xaa is C or S

SEQ ID NO: 13787 - protein, 27 aa, Artificial Sequence
  Cyclic GFR-binding peptide
MNQYNKLIVNSSDDLYLVSIASLKTPA

SEQ ID NO: 13788 - protein, 37 aa, Artificial Sequence
  Cyclic GFR-binding peptide
  MOD_RES (1)..(3)..(34)..(35): Xaa is C or S
XKXSKVIMEYQKYIKPTKGIIFLISIPSLDQSVXXPS

SEQ ID NO: 13789 - protein, 38 aa, Artificial Sequence
  Cyclic GFR-binding peptide
  MOD_RES (2)..(34)..(35): Xaa is C or S
GXGEVVMDNSLQEVVKENEDYYLMTLPELETPVXXAKP

SEQ ID NO: 13790 - protein, 28 aa, Artificial Sequence
  Cyclic GFR-binding peptide
VVMDQYNKLVVNNASDLYLISIASLRTP

SEQ ID NO: 13791 - protein, 38 aa, Artificial Sequence; identical to SEQ ID NO: 3237
  Cyclic GFR-binding peptide
  MOD_RES (1)..(3)..(35)..(36): Xaa is C or S

SEQ ID NO: 13792 - protein, 26 aa, Artificial Sequence
  Cyclic GFR-binding peptide
MERYKKLVVKDYEDFYLMSIANLETP

SEQ ID NO: 13793 - protein, 28 aa, Artificial Sequence
  Cyclic GFR-binding peptide
  MOD_RES (2)..(2): Xaa is C or S
GXSEVVMDQYNKLVVNNASDLYLISIAS

SEQ ID NO: 13794 - protein, 28 aa, Artificial Sequence
  Cyclic GFR-binding peptide
VIMRYKKLVKPKRGVFYLISIANLAQPV

SEQ ID NO: 13795 - protein, 34 aa, Artificial Sequence
  Cyclic GFR-binding peptide
  MOD_RES (2)..(33)..(34): Xaa is C or S
KXSKVVMNSLQEVKPTRGVYYVIPLPELDQPVXX

SEQ ID NO: 13796 - protein, 37 aa, Artificial Sequence; identical to SEQ ID NO: 3242
  Cyclic GFR-binding peptide
  MOD_RES (1)..(32)..(33): Xaa is C or S

SEQ ID NO: 13797 - protein, 29 aa, Artificial Sequence
  Cyclic GFR-binding peptide
  MOD_RES (29)..(29): Xaa is C or S
VIMRYKKLVKPKRGVFYLISIANLAQPVX

SEQ ID NO: 13798 - protein, 36 aa, Artificial Sequence
  Cyclic GFR-binding peptide
  MOD_RES (30)..(30): Xaa is C or S
VVMNEYQKYIVNSSDDIFLVSIPSLKTPAXTPKTVH

SEQ ID NO: 13799 - protein, 29 aa, Artificial Sequence
  Cyclic GFR-binding peptide
SRVVMNEYQKYIVNSSDDIFLVSIPSLKT

SEQ ID NO: 13800 - protein, 39 aa, Artificial Sequence
  Cyclic GFR-binding peptide
  MOD_RES (2)..(4)..(36)..(37): Xaa is C or S
RXGXSEVVMDRYKKLVVNNASDFYLISIANLRTPVXXTP

SEQ ID NO: 13801 - protein, 26 aa, Artificial Sequence
  Cyclic GFR-binding peptide
VVMENSLQEVVKDYEDYYLMTLPELE

SEQ ID NO: 13802 - protein, 32 aa, Artificial Sequence; identical to SEQ ID NO: 3245
  Cyclic GFR-binding peptide
  MOD_RES (29)..(30): Xaa is C or S

SEQ ID NO: 13803 - protein, 37 aa, Artificial Sequence; identical to SEQ ID NO: 3247
  Cyclic GFR-binding peptide
  MOD_RES (1)..(3)..(35)..(36): Xaa is C or S

SEQ ID NO: 13804 - protein, 35 aa, Artificial Sequence
  Cyclic GFR-binding peptide
  MOD_RES (1)..(32)..(33): Xaa is C or S
XSKVVMNSLQEVKPTRGVYYVIPLPELDQPVXXPS

SEQ ID NO: 13805 - protein, 30 aa, Artificial Sequence
  Cyclic GFR-binding peptide
  MOD_RES (26)..(27): Xaa is C or S
EYQKYVVKDYEDIFLMSIPSLETPVXXAKP

SEQ ID NO: 13806 - protein, 30 aa, Artificial Sequence
  Cyclic GFR-binding peptide
  MOD_RES (29)..(30): Xaa is C or S
VMENSLQEVVKDYEDYYLMTLPELETPVXX

SEQ ID NO: 13807 - protein, 30 aa, Artificial Sequence
  Cyclic GFR-binding peptide
  MOD_RES (1)..(1): Xaa is C or S
XSKVVMNSLQEVKPTRGVYYVIPLPELDQP

SEQ ID NO: 13808 - protein, 24 aa, Artificial Sequence
  Cyclic GFR-binding peptide
ERYKKLVVKDYEDFYLMSIANLET

SEQ ID NO: 13809 - protein, 42 aa, Artificial Sequence; identical to SEQ ID NO: 3249
  Cyclic GFR-binding peptide
  MOD_RES (2)..(4)..(36)..(37): Xaa is C or S

SEQ ID NO: 13810 - protein, 24 aa, Artificial Sequence
  Cyclic GFR-binding peptide
RYKKLVVNNASDFYLISIANLRTP

SEQ ID NO: 13811 - protein, 34 aa, Artificial Sequence
  Cyclic GFR-binding peptide
  MOD_RES (2)..(34): Xaa is C or S
GXSRVVMNNSLQEIVNSSDDYYVVPLPELKTPAX

SEQ ID NO: 13812 - protein, 35 aa, Artificial Sequence
  Cyclic GFR-binding peptide
  MOD_RES (31)..(32): Xaa is C or S
RVVMNNSLQEIVNSSDDYYLVTLPELKTPAXXPKP

SEQ ID NO: 13813 - protein, 36 aa, Artificial Sequence
  Cyclic GFR-binding peptide
  MOD_RES (1)..(3)..(35)..(36): Xaa is C or S
XGXGEVVMENSLQEVVKDYEDYYVMPLPELETPVXX

SEQ ID NO: 13814 - protein, 32 aa, Artificial Sequence
  Cyclic GFR-binding peptide
  MOD_RES (26)..(27): Xaa is C or S
NSLQEVVKDYEDYYLMTLPELETPVXXAKPIS

SEQ ID NO: 13815 - protein, 29 aa, Artificial Sequence
  Cyclic GFR-binding peptide
  MOD_RES (26)..(27): Xaa is C or S
EYQKYIVNSSDDIFLVSIPSLKTPAXXPK

SEQ ID NO: 13816 - protein, 38 aa, Artificial Sequence
  Cyclic GFR-binding peptide
  MOD_RES (2)..(4)..(36)..(37): Xaa is C or S
RXGXSEVVMDRYKKLVVNNASDFYLISIANLRTPVXXT

SEQ ID NO: 13817 - protein, 33 aa, Artificial Sequence
  Cyclic GFR-binding peptide
  MOD_RES (1)..(32)..(33): Xaa is C or S
XSKVVMEYQKYVKPTRGVIFLISIPSLDQPVXX

SEQ ID NO: 13818 - protein, 27 aa, Artificial Sequence
  Cyclic GFR-binding peptide
RVVMNNSLQEIVNSSDDYYLVTLPELQ

SEQ ID NO: 13819 - protein, 31 aa, Artificial Sequence
  Cyclic GFR-binding peptide
  MOD_RES (1)..(1): Xaa is C or S
XSEVVMDNSLQEVVNNASDYYVIPLPELRTP

SEQ ID NO: 13820 - protein, 29 aa, Artificial Sequence
  Cyclic GFR-binding peptide
  MOD_RES (28)..(29): Xaa is C or S
MNRYKKLIVNSSDDFYLVSIANLKTPAXX

SEQ ID NO: 13821 - protein, 27 aa, Artificial Sequence
  Cyclic GFR-binding peptide
  MOD_RES (27)..(27): Xaa is C or S
MEYQKYVKPKRGVIFLISIPSLAQPVX

SEQ ID NO: 13822 - protein, 30 aa, Artificial Sequence
  Cyclic GFR-binding peptide
  MOD_RES (30)..(30): Xaa is C or S
KVIMNSLQEIKPTKGIYYVIPLPELDQSVX

SEQ ID NO: 13823 - protein, 26 aa, Artificial Sequence
  Cyclic GFR-binding peptide
ARVVMNNSLQEIVNSSDDYYLVTLPE

SEQ ID NO: 13824 - protein, 36 aa, Artificial Sequence
  Cyclic GFR-binding peptide
  MOD_RES (30)..(31): Xaa is C or S
VVMENSLQEVVKDYEDYYLMTLPELETPVXXAKPIS

SEQ ID NO: 13825 - protein, 32 aa, Artificial Sequence
  Cyclic GFR-binding peptide
  MOD_RES (30)..(31): Xaa is C or S
KVIMNSLQEIKPTKGIYYLITLPELDQSVXXP

SEQ ID NO: 13826 - protein, 28 aa, Artificial Sequence
  Cyclic GFR-binding peptide
  MOD_RES (2)..(2): Xaa is C or S
GXSEVVMDNSLQEVVNNASDYYLITLPE

SEQ ID NO: 13827 - protein, 28 aa, Artificial Sequence
  Cyclic GFR-binding peptide
  MOD_RES (28)..(28): Xaa is C or S
MNQYNKLIVNSSDDLYLVSIASLQTPAX

SEQ ID NO: 13828 - protein, 35 aa, Artificial Sequence
  Cyclic GFR-binding peptide
  MOD_RES (2)..(34): Xaa is C or S
GXSRVVMNEYQKYIVNSSDDIFLVSIPSLKTPAXT

SEQ ID NO: 13829 - protein, 27 aa, Artificial Sequence
  Cyclic GFR-binding peptide
  MOD_RES (26)..(26): Xaa is C or S
QYNKLIVNSSDDLYLVSIASLKTPAXT

SEQ ID NO: 13830 - protein, 28 aa, Artificial Sequence
  Cyclic GFR-binding peptide
GEVVMEQYNKLVVKDYEDLYLMSIASLE

SEQ ID NO: 13831 - protein, 25 aa, Artificial Sequence
  Cyclic GFR-binding peptide
MNNSLQEIVNSSDDYYVVPLPELQT

SEQ ID NO: 13832 - protein, 30 aa, Artificial Sequence
  Cyclic GFR-binding peptide
  MOD_RES (26)..(26): Xaa is C or S
NSLQEIVNSSDDYYLVTLPELKTPAXTPKT

SEQ ID NO: 13833 - protein, 33 aa, Artificial Sequence
  Cyclic GFR-binding peptide
  MOD_RES (30)..(31): Xaa is C or S
VVMNEYQKYIVNSSDDIFLVSIPSLKTPAXXPK

SEQ ID NO: 13834 - protein, 25 aa, Artificial Sequence
  Cyclic GFR-binding peptide
RVVMNNSLQEIVNSSDDYYVVPLPE

SEQ ID NO: 13835 - protein, 27 aa, Artificial Sequence
  Cyclic GFR-binding peptide
SRVIMNSLQEVKPKRGVYYLITLPELA

SEQ ID NO: 13836 - protein, 24 aa, Artificial Sequence
  Cyclic GFR-binding peptide
QYNKLIVNSSDDLYLVSIASLQTP

SEQ ID NO: 13837 - protein, 23 aa, Artificial Sequence
  Cyclic GFR-binding peptide
EEYQKYVVKDYEDIFLMSIPSLE

SEQ ID NO: 13838 - protein, 35 aa, Artificial Sequence
  Cyclic GFR-binding peptide
  MOD_RES (32)..(33): Xaa is C or S
GEVVMDNSLQEVVKENEDYYVMPLPELETPVXXAK

SEQ ID NO: 13839 - protein, 40 aa, Artificial Sequence
  Cyclic GFR-binding peptide
  MOD_RES (2)..(4)..(35)..(36): Xaa is C or S
SXKXSRVIMNSLQEVKPKRGVYYLITLPELAQPVXXPAAS

SEQ ID NO: 13840 - protein, 36 aa, Artificial Sequence; identical to SEQ ID NO: 3278
  Cyclic GFR-binding peptide
  MOD_RES (30)..(31): Xaa is C or S

SEQ ID NO: 13841 - protein, 27 aa, Artificial Sequence
  Cyclic GFR-binding peptide
  MOD_RES (1)..(1): Xaa is C or S
XSEVVMDNSLQEVVNNASDYYVIPLPE

SEQ ID NO: 13842 - protein, 38 aa, Artificial Sequence
  Cyclic GFR-binding peptide
  MOD_RES (2)..(33)..(34): Xaa is C or S
KXSKVIMNSLQEIKPTKGIYYLITLPELDQSVXXPSAS

SEQ ID NO: 13843 - protein, 30 aa, Artificial Sequence; identical to SEQ ID NO: 3281
  Cyclic GFR-binding peptide
  MOD_RES (28)..(29): Xaa is C or S

SEQ ID NO: 13844 - protein, 34 aa, Artificial Sequence; identical to SEQ ID NO: 3283
  Cyclic GFR-binding peptide
  MOD_RES (29)..(30): Xaa is C or S

SEQ ID NO: 13845 - protein, 28 aa, Artificial Sequence
  Cyclic GFR-binding peptide
  MOD_RES (28)..(28): Xaa is C or S
MDNSLQEVVKENEDYYLMTLPELETPVX

SEQ ID NO: 13846 - protein, 33 aa, Artificial Sequence
  Cyclic GFR-binding peptide
  MOD_RES (28)..(29): Xaa is C or S
IMEYQKYIKPTKGIIFLISIPSLDQSVXXPSAS

SEQ ID NO: 13847 - protein, 38 aa, Artificial Sequence; identical to SEQ ID NO: 3284
  Cyclic GFR-binding peptide
  MOD_RES (2)..(4)..(36)..(37): Xaa is C or S

SEQ ID NO: 13848 - protein, 23 aa, Artificial Sequence
  Cyclic GFR-binding peptide
IMEYQKYIKPTKGIIFLISIPSL

SEQ ID NO: 13849 - protein, 30 aa, Artificial Sequence
  Cyclic GFR-binding peptide
  MOD_RES (27)..(28): Xaa is C or S
NNSLQEIVNSSDDYYLVTLPELKTPAXXPK

SEQ ID NO: 13850 - protein, 35 aa, Artificial Sequence; identical to SEQ ID NO: 3285
  Cyclic GFR-binding peptide
  MOD_RES (2)..(34): Xaa is C or S

SEQ ID NO: 13851 - protein, 33 aa, Artificial Sequence
  Cyclic GFR-binding peptide
  MOD_RES (29)..(30): Xaa is C or S
VMDNSLQEVVKENEDYYLMTLPELETPVXXAKP

SEQ ID NO: 13852 - protein, 33 aa, Artificial Sequence
  Cyclic GFR-binding peptide
  MOD_RES (27)..(28): Xaa is C or S
DNSLQEVVNNASDYYLITLPELRTPVXXTPPTS

SEQ ID NO: 13853 - protein, 29 aa, Artificial Sequence
  Cyclic GFR-binding peptide
  MOD_RES (28)..(29): Xaa is C or S
IMNSLQEIKPTKGIYYLITLPELDQSVXX

SEQ ID NO: 13854 - protein, 38 aa, Artificial Sequence
  Cyclic GFR-binding peptide
  MOD_RES (2)..(34)..(35): Xaa is C or S
GXGEVVMDEYQKYVVKENEDIFLMSIPSLETPVXXAKP

SEQ ID NO: 13855 - protein, 33 aa, Artificial Sequence
  Cyclic GFR-binding peptide
  MOD_RES (1)..(33): Xaa is C or S
XSEVVMDQYNKLVVNNASDLYLISIASLRTPVX

SEQ ID NO: 13856 - protein, 29 aa, Artificial Sequence
  Cyclic GFR-binding peptide
GEVVMDNSLQEVVKENEDYYVMPLPELET

SEQ ID NO: 13857 - protein, 25 aa, Artificial Sequence
  Cyclic GFR-binding peptide
NSLQEIKPTKGIYYLITLPELDQSV

SEQ ID NO: 13858 - protein, 32 aa, Artificial Sequence; identical to SEQ ID NO: 3289
  Cyclic GFR-binding peptide
  MOD_RES (2)..(2): Xaa is C or S

SEQ ID NO: 13859 - protein, 26 aa, Artificial Sequence
  Cyclic GFR-binding peptide
  MOD_RES (26)..(26): Xaa is C or S
QYNKLVVNNASDLYLISIASLRTPVX

SEQ ID NO: 13860 - protein, 30 aa, Artificial Sequence
  Cyclic GFR-binding peptide
  MOD_RES (28)..(28): Xaa is C or S
MNNSLQEIVNSSDDYYVVPLPELKTPAXTP

SEQ ID NO: 13861 - protein, 32 aa, Artificial Sequence
  Cyclic GFR-binding peptide
  MOD_RES (27)..(28): Xaa is C or S
MNSLQEVKPKRGVYYLITLPELAQPVXXPAAS

SEQ ID NO: 13862 - protein, 33 aa, Artificial Sequence
  Cyclic GFR-binding peptide
  MOD_RES (30)..(31): Xaa is C or S
RVIMEYQKYVKPKRGVIFLISIPSLAQPVXXPA

SEQ ID NO: 13863 - protein, 31 aa, Artificial Sequence
  Cyclic GFR-binding peptide
  MOD_RES (28)..(29): Xaa is C or S
MNEYQKYIVNSSDDIFLVSIPSLKTPAXXPK

SEQ ID NO: 13864 - protein, 34 aa, Artificial Sequence; identical to SEQ ID NO: 3291
  Cyclic GFR-binding peptide
  MOD_RES (30)..(31): Xaa is C or S

SEQ ID NO: 13865 - protein, 25 aa, Artificial Sequence
  Cyclic GFR-binding peptide
EVVMENSLQEVVKDYEDYYLMTLPE

SEQ ID NO: 13866 - protein, 27 aa, Artificial Sequence
  Cyclic GFR-binding peptide
ARVVMNRYKKLIVNSSDDFYLVSIANL

SEQ ID NO: 13867 - protein, 27 aa, Artificial Sequence
  Cyclic GFR-binding peptide
GEVVMEEYQKYVVKDYEDIFLMSIPSL

SEQ ID NO: 13868 - protein, 41 aa, Artificial Sequence
  Cyclic GFR-binding peptide
  MOD_RES (2)..(4)..(36)..(37): Xaa is C or S
HXGXSRVVMNNSLQEIVNSSDDYYVVPLPELKTPAXXPKPV

SEQ ID NO: 13869 - protein, 25 aa, Artificial Sequence
  Cyclic GFR-binding peptide
VMDNSLQEVVNNASDYYLITLPELR

SEQ ID NO: 13870 - protein, 31 aa, Artificial Sequence; identical to SEQ ID NO: 3297
  Cyclic GFR-binding peptide
  MOD_RES (1)..(3): Xaa is C or S

SEQ ID NO: 13871 - protein, 35 aa, Artificial Sequence
  Cyclic GFR-binding peptide
  MOD_RES (30)..(31): Xaa is C or S
RVIMNSLQEVKPKRGVYYLITLPELAQPVXXPAAS

SEQ ID NO: 13872 - protein, 33 aa, Artificial Sequence; identical to SEQ ID NO: 3300
  Cyclic GFR-binding peptide
  MOD_RES (27)..(28): Xaa is C or S

SEQ ID NO: 13873 - protein, 39 aa, Artificial Sequence
  Cyclic GFR-binding peptide
  MOD_RES (2)..(34)..(35): Xaa is C or S
GXGEVVMENSLQEVVKDYEDYYVMPLPELETPVXXAKPI

SEQ ID NO: 13874 - protein, 30 aa, Artificial Sequence; identical to SEQ ID NO: 3302
  Cyclic GFR-binding peptide
  MOD_RES (26)..(27): Xaa is C or S

SEQ ID NO: 13875 - protein, 26 aa, Artificial Sequence
  Cyclic GFR-binding peptide
SRVVMNNSLQEIVNSSDDYYLVTLPE

SEQ ID NO: 13876 - protein, 29 aa, Artificial Sequence
  Cyclic GFR-binding peptide
  MOD_RES (29)..(29): Xaa is C or S
VMNEYQKYIVNSSDDIFLVSIPSLQTPAX

SEQ ID NO: 13877 - protein, 39 aa, Artificial Sequence; identical to SEQ ID NO: 3304
  Cyclic GFR-binding peptide
  MOD_RES (1)..(33)..(34): Xaa is C or S

SEQ ID NO: 13878 - protein, 34 aa, Artificial Sequence
  Cyclic GFR-binding peptide
  MOD_RES (29)..(30): Xaa is C or S
VMENSLQEVVKDYEDYYVMPLPELETPVXXAKPI

SEQ ID NO: 13879 - protein, 24 aa, Artificial Sequence
  Cyclic GFR-binding peptide
QYNKLVVNNASDLYLISIASLRTP

SEQ ID NO: 13880 - protein, 31 aa, Artificial Sequence; identical to SEQ ID NO: 3308
  Cyclic GFR-binding peptide
  MOD_RES (28)..(29): Xaa is C or S

SEQ ID NO: 13881 - protein, 22 aa, Artificial Sequence
  Cyclic GFR-binding peptide
ERYKKLVVKDYEDFYLMSIANL

SEQ ID NO: 13882 - protein, 33 aa, Artificial Sequence
  Cyclic GFR-binding peptide
  MOD_RES (2)..(4): Xaa is C or S
SXKXSKVIMEYQKYIKPTKGIIFLISIPSLDQS

SEQ ID NO: 13883 - protein, 32 aa, Artificial Sequence
  Cyclic GFR-binding peptide
  MOD_RES (1)..(1): Xaa is C or S
XSEVVMDQYNKLVVNNASDLYLISIASLRTPV

SEQ ID NO: 13884 - protein, 21 aa, Artificial Sequence
  Cyclic GFR-binding peptide
DNSLQEVVNNASDYYVIPLPE

SEQ ID NO: 13885 - protein, 28 aa, Artificial Sequence
  Cyclic GFR-binding peptide
SEVVMDQYNKLVVNNASDLYLISIASLR

SEQ ID NO: 13886 - protein, 31 aa, Artificial Sequence
  Cyclic GFR-binding peptide
  MOD_RES (26)..(27): Xaa is C or S
NSLQEVVKENEDYYLMTLPELETPVXXAKPI

SEQ ID NO: 13887 - protein, 30 aa, Artificial Sequence
  Cyclic GFR-binding peptide
  MOD_RES (27)..(28): Xaa is C or S
DNSLQEVVNNASDYYLITLPELRTPVXXTP

SEQ ID NO: 13888 - protein, 25 aa, Artificial Sequence
  Cyclic GFR-binding peptide
NSLQEIVNSSDDYYLVTLPELQTPA

SEQ ID NO: 13889 - protein, 25 aa, Artificial Sequence
  Cyclic GFR-binding peptide
VMENSLQEVVKDYEDYYLMTLPELE

SEQ ID NO: 13890 - protein, 40 aa, Artificial Sequence; identical to SEQ ID NO: 3316
  Cyclic GFR-binding peptide
  MOD_RES (2)..(4)..(36)..(37): Xaa is C or S

SEQ ID NO: 13891 - protein, 33 aa, Artificial Sequence
  Cyclic GFR-binding peptide
  MOD_RES (27)..(27): Xaa is C or S
NNSLQEIVNSSDDYYVVPLPELKTPAXTPKTVH

SEQ ID NO: 13892 - protein, 27 aa, Artificial Sequence
  Cyclic GFR-binding peptide
SRVVMNRYKKLIVNSSDDFYLVSIANL

SEQ ID NO: 13893 - protein, 27 aa, Artificial Sequence
  Cyclic GFR-binding peptide
  MOD_RES (1)..(1): Xaa is C or S
XSEVVMDNSLQEVVNNASDYYLITLPE

SEQ ID NO: 13894 - protein, 23 aa, Artificial Sequence
  Cyclic GFR-binding peptide
VIMRYKKLVKPKRGVFYLISIAN

SEQ ID NO: 13895 - protein, 34 aa, Artificial Sequence
  Cyclic GFR-binding peptide
  MOD_RES (32)..(33): Xaa is C or S
GEVVMDNSLQEVVKENEDYYLMTLPELETPVXXA

SEQ ID NO: 13896 - protein, 37 aa, Artificial Sequence
  Cyclic GFR-binding peptide
  MOD_RES (1)..(33)..(34): Xaa is C or S
XSRVVMNEYQKYIVNSSDDIFLVSIPSLKTPAXXPKP

SEQ ID NO: 13897 - protein, 29 aa, Artificial Sequence
  Cyclic GFR-binding peptide
  MOD_RES (27)..(28): Xaa is C or S
EEYQKYVVKDYEDIFLMSIPSLETPVXXA

SEQ ID NO: 13898 - protein, 30 aa, Artificial Sequence; identical to SEQ ID NO: 3320
  Cyclic GFR-binding peptide

SEQ ID NO: 13899 - protein, 23 aa, Artificial Sequence
  Cyclic GFR-binding peptide
MDEYQKYVVKENEDIFLMSIPSL

SEQ ID NO: 13900 - protein, 35 aa, Artificial Sequence
  Cyclic GFR-binding peptide
  MOD_RES (29)..(30): Xaa is C or S
VIMEYQKYVKPKRGVIFLISIPSLAQPVXXPAASA

SEQ ID NO: 13901 - protein, 38 aa, Artificial Sequence; identical to SEQ ID NO: 3327
  Cyclic GFR-binding peptide
  MOD_RES (2)..(34)..(35): Xaa is C or S

SEQ ID NO: 13902 - protein, 29 aa, Artificial Sequence
  Cyclic GFR-binding peptide
  MOD_RES (1)..(3): Xaa is C or S
XKXSKVVMRYKKLVKPTRGVFYLISIANL

SEQ ID NO: 13903 - protein, 28 aa, Artificial Sequence
  Cyclic GFR-binding peptide
  MOD_RES (1)..(1): Xaa is C or S
XSKVIMRYKKLIKPTKGIFYLISIANLD

SEQ ID NO: 13904 - protein, 40 aa, Artificial Sequence; identical to SEQ ID NO: 3331
  Cyclic GFR-binding peptide
  MOD_RES (1)..(3)..(34)..(35): Xaa is C or S

SEQ ID NO: 13905 - protein, 30 aa, Artificial Sequence
  Cyclic GFR-binding peptide
  MOD_RES (27)..(28): Xaa is C or S
NNSLQEIVNSSDDYYVVPLPELKTPAXXPK

SEQ ID NO: 13906 - protein, 38 aa, Artificial Sequence; identical to SEQ ID NO: 3333
  Cyclic GFR-binding peptide
  MOD_RES (1)..(32)..(33): Xaa is C or S

SEQ ID NO: 13907 - protein, 27 aa, Artificial Sequence
  Cyclic GFR-binding peptide
  MOD_RES (26)..(27): Xaa is C or S
RYKKLVVNNASDFYLISIANLRTPVXX

SEQ ID NO: 13908 - protein, 30 aa, Artificial Sequence
  Cyclic GFR-binding peptide
  MOD_RES (28)..(29): Xaa is C or S
MNNSLQEIVNSSDDYYVVPLPELKTPAXXP

SEQ ID NO: 13909 - protein, 39 aa, Artificial Sequence; identical to SEQ ID NO: 3336
  Cyclic GFR-binding peptide
  MOD_RES (1)..(3)..(34)..(35): Xaa is C or S

SEQ ID NO: 13910 - protein, 31 aa, Artificial Sequence
  Cyclic GFR-binding peptide
SRVVMNEYQKYIVNSSDDIFLVSIPSLKTPA

SEQ ID NO: 13911 - protein, 25 aa, Artificial Sequence
  Cyclic GFR-binding peptide
VMNNSLQEIVNSSDDYYLVTLPELQ

SEQ ID NO: 13912 - protein, 26 aa, Artificial Sequence
  Cyclic GFR-binding peptide
SRVVMNQYNKLIVNSSDDLYLVSIAS

SEQ ID NO: 13913 - protein, 34 aa, Artificial Sequence; identical to SEQ ID NO: 3345
  Cyclic GFR-binding peptide
  MOD_RES (31)..(32): Xaa is C or S

SEQ ID NO: 13914 - protein, 40 aa, Artificial Sequence
  Cyclic GFR-binding peptide
  MOD_RES (2)..(34)..(35): Xaa is C or S
GXGEVVMDEYQKYVVKENEDIFLMSIPSLETPVXXAKPIK

SEQ ID NO: 13915 - protein, 29 aa, Artificial Sequence
  Cyclic GFR-binding peptide
  MOD_RES (27)..(28): Xaa is C or S
ENSLQEVVKDYEDYYLMTLPELETPVXXA

SEQ ID NO: 13916 - protein, 35 aa, Artificial Sequence
  Cyclic GFR-binding peptide
  MOD_RES (2)..(4): Xaa is C or S
RXGXSEVVMDNSLQEVVNNASDYYVIPLPELRTPV

SEQ ID NO: 13917 - protein, 40 aa, Artificial Sequence
  Cyclic GFR-binding peptide
  MOD_RES (1)..(3)..(34)..(35): Xaa is C or S
XKXSRVIMNSLQEVKPKRGVYYLITLPELAQPVXXPAASA

SEQ ID NO: 13918 - protein, 32 aa, Artificial Sequence
  Cyclic GFR-binding peptide
  MOD_RES (27)..(28): Xaa is C or S
NNSLQEIVNSSDDYYLVTLPELKTPAXXPKPV

SEQ ID NO: 13919 - protein, 33 aa, Artificial Sequence
  Cyclic GFR-binding peptide
  MOD_RES (2)..(33): Xaa is C or S
KXSKVVMNSLQEVKPTRGVYYVIPLPELDQPVX

SEQ ID NO: 13920 - protein, 31 aa, Artificial Sequence
  Cyclic GFR-binding peptide
  MOD_RES (28)..(29): Xaa is C or S
MNNSLQEIVNSSDDYYLVTLPELQTPAXXPK

SEQ ID NO: 13921 - protein, 26 aa, Artificial Sequence
  Cyclic GFR-binding peptide
  MOD_RES (26)..(26): Xaa is C or S
RYKKLVVNNASDFYLISIANLRTPVX

SEQ ID NO: 13922 - protein, 31 aa, Artificial Sequence; identical to SEQ ID NO: 3350
  Cyclic GFR-binding peptide
  MOD_RES (2)..(4): Xaa is C or S

SEQ ID NO: 13923 - protein, 32 aa, Artificial Sequence
  Cyclic GFR-binding peptide
  MOD_RES (32)..(32): Xaa is C or S
ARVVMNEYQKYIVNSSDDIFLVSIPSLQTPAX

SEQ ID NO: 13924 - protein, 36 aa, Artificial Sequence; identical to SEQ ID NO: 3353
  Cyclic GFR-binding peptide
  MOD_RES (2)..(4)..(35)..(36): Xaa is C or S

SEQ ID NO: 13925 - protein, 36 aa, Artificial Sequence; identical to SEQ ID NO: 3355
  Cyclic GFR-binding peptide
  MOD_RES (1)..(33)..(34): Xaa is C or S

SEQ ID NO: 13926 - protein, 29 aa, Artificial Sequence
  Cyclic GFR-binding peptide
  MOD_RES (29)..(29): Xaa is C or S
VIMEYQKYIKPTKGIIFLISIPSLDQSVX

SEQ ID NO: 13927 - protein, 30 aa, Artificial Sequence
  Cyclic GFR-binding peptide
  MOD_RES (30)..(30): Xaa is C or S
VVMNEYQKYIVNSSDDIFLVSIPSLKTPAX

SEQ ID NO: 13928 - protein, 34 aa, Artificial Sequence
  Cyclic GFR-binding peptide
  MOD_RES (1)..(32)..(33): Xaa is C or S
XSRVIMNSLQEVKPKRGVYYLITLPELAQPVXXP

SEQ ID NO: 13929 - protein, 26 aa, Artificial Sequence
  Cyclic GFR-binding peptide
VMEYQKYVKPTRGVIFLISIPSLDQP

SEQ ID NO: 13930 - protein, 29 aa, Artificial Sequence
  Cyclic GFR-binding peptide
  MOD_RES (28)..(29): Xaa is C or S
MENSLQEVVKDYEDYYVMPLPELETPVXX

SEQ ID NO: 13931 - protein, 36 aa, Artificial Sequence; identical to SEQ ID NO: 3359
  Cyclic GFR-binding peptide
  MOD_RES (31)..(32): Xaa is C or S

SEQ ID NO: 13932 - protein, 30 aa, Artificial Sequence
  Cyclic GFR-binding peptide
  MOD_RES (1)..(3): Xaa is C or S
XKXSRVIMEYQKYVKPKRGVIFLISIPSLA

SEQ ID NO: 13933 - protein, 37 aa, Artificial Sequence
  Cyclic GFR-binding peptide
  MOD_RES (31)..(32): Xaa is C or S
RVVMNNSLQEIVNSSDDYYLVTLPELQTPAXXPKPVT

SEQ ID NO: 13934 - protein, 28 aa, Artificial Sequence
  Cyclic GFR-binding peptide
  MOD_RES (27)..(27): Xaa is C or S
NRYKKLIVNSSDDFYLVSIANLKTPAXT

SEQ ID NO: 13935 - protein, 26 aa, Artificial Sequence
  Cyclic GFR-binding peptide
MEQYNKLVVKDYEDLYLMSIASLETP

SEQ ID NO: 13936 - protein, 24 aa, Artificial Sequence
  Cyclic GFR-binding peptide
KVIMEYQKYIKPTKGIIFLISIPS

SEQ ID NO: 13937 - protein, 37 aa, Artificial Sequence
  Cyclic GFR-binding peptide
  MOD_RES (32)..(33): Xaa is C or S
ARVVMNNSLQEIVNSSDDYYVVPLPELQTPAXXPKPV

SEQ ID NO: 13938 - protein, 26 aa, Artificial Sequence
  Cyclic GFR-binding peptide
RVIMEYQKYVKPKRGVIFLISIPSLA

SEQ ID NO: 13939 - protein, 23 aa, Artificial Sequence
  Cyclic GFR-binding peptide
EYQKYVKPKRGVIFLISIPSLAQ

SEQ ID NO: 13940 - protein, 31 aa, Artificial Sequence
  Cyclic GFR-binding peptide
GEVVMDEYQKYVVKENEDIFLMSIPSLETPV

SEQ ID NO: 13941 - protein, 32 aa, Artificial Sequence
  Cyclic GFR-binding peptide
  MOD_RES (32)..(32): Xaa is C or S
GEVVMENSLQEVVKDYEDYYVMPLPELETPVX

SEQ ID NO: 13942 - protein, 35 aa, Artificial Sequence; identical to SEQ ID NO: 3364
  Cyclic GFR-binding peptide
  MOD_RES (31)..(32): Xaa is C or S

SEQ ID NO: 13943 - protein, 29 aa, Artificial Sequence
  Cyclic GFR-binding peptide
  MOD_RES (1)..(3): Xaa is C or S
XGXARVVMNNSLQEIVNSSDDYYLVTLPE

SEQ ID NO: 13944 - protein, 37 aa, Artificial Sequence; identical to SEQ ID NO: 3366
  Cyclic GFR-binding peptide
  MOD_RES (1)..(32)..(33): Xaa is C or S

SEQ ID NO: 13945 - protein, 30 aa, Artificial Sequence
  Cyclic GFR-binding peptide
  MOD_RES (29)..(29): Xaa is C or S
VMNNSLQEIVNSSDDYYVVPLPELKTPAXT

SEQ ID NO: 13946 - protein, 32 aa, Artificial Sequence; identical to SEQ ID NO: 3368
  Cyclic GFR-binding peptide
  MOD_RES (30)..(31): Xaa is C or S

SEQ ID NO: 13947 - protein, 29 aa, Artificial Sequence
  Cyclic GFR-binding peptide
  MOD_RES (26)..(27): Xaa is C or S
NSLQEVKPKRGVYYLITLPELAQPVXXPA

SEQ ID NO: 13948 - protein, 37 aa, Artificial Sequence; identical to SEQ ID NO: 3370
  Cyclic GFR-binding peptide
  MOD_RES (1)..(33)..(34): Xaa is C or S

SEQ ID NO: 13949 - protein, 30 aa, Artificial Sequence; identical to SEQ ID NO: 3378
  Cyclic GFR-binding peptide

SEQ ID NO: 13950 - protein, 38 aa, Artificial Sequence
  Cyclic GFR-binding peptide
  MOD_RES (2)..(34)..(35): Xaa is C or S
GXARVVMNEYQKYIVNSSDDIFLVSIPSLQTPAXXPKP

SEQ ID NO: 13951 - protein, 37 aa, Artificial Sequence
  Cyclic GFR-binding peptide
  MOD_RES (1)..(3)..(35)..(36): Xaa is C or S
XGXGEVVMDNSLQEVVKENEDYYVMPLPELETPVXXA

SEQ ID NO: 13952 - protein, 27 aa, Artificial Sequence
  Cyclic GFR-binding peptide
VIMRYKKLVKPKRGVFYLISIANLAQP

SEQ ID NO: 13953 - protein, 37 aa, Artificial Sequence
  Cyclic GFR-binding peptide
  MOD_RES (2)..(33)..(34): Xaa is C or S
KXSRVIMNSLQEVKPKRGVYYLITLPELAQPVXXPAA

SEQ ID NO: 13954 - protein, 32 aa, Artificial Sequence; identical to SEQ ID NO: 3383
  Cyclic GFR-binding peptide
  MOD_RES (29)..(30): Xaa is C or S

SEQ ID NO: 13955 - protein, 23 aa, Artificial Sequence
  Cyclic GFR-binding peptide
QYNKLVVKDYEDLYLMSIASLET

SEQ ID NO: 13956 - protein, 20 aa, Artificial Sequence
  Cyclic GFR-binding peptide
NSLQEIVNSSDDYYLVTLPE

SEQ ID NO: 13957 - protein, 23 aa, Artificial Sequence
  Cyclic GFR-binding peptide
ENSLQEVVKDYEDYYLMTLPELE

SEQ ID NO: 13958 - protein, 23 aa, Artificial Sequence
  Cyclic GFR-binding peptide
MEQYNKLVVKDYEDLYLMSIASL

SEQ ID NO: 13959 - protein, 33 aa, Artificial Sequence
  Cyclic GFR-binding peptide
  MOD_RES (27)..(27): Xaa is C or S
NEYQKYIVNSSDDIFLVSIPSLKTPAXTPKTVH

SEQ ID NO: 13960 - protein, 24 aa, Artificial Sequence
  Cyclic GFR-binding peptide
KVVMEYQKYVKPTRGVIFLISIPS

SEQ ID NO: 13961 - protein, 26 aa, Artificial Sequence
  Cyclic GFR-binding peptide
ARVVMNQYNKLIVNSSDDLYLVSIAS

SEQ ID NO: 13962 - protein, 21 aa, Artificial Sequence
  Cyclic GFR-binding peptide
DNSLQEVVNNASDYYLITLPE

SEQ ID NO: 13963 - protein, 38 aa, Artificial Sequence; identical to SEQ ID NO: 3399
  Cyclic GFR-binding peptide
  MOD_RES (2)..(4)..(36)..(37): Xaa is C or S

SEQ ID NO: 13964 - protein, 29 aa, Artificial Sequence
  Cyclic GFR-binding peptide
  MOD_RES (28)..(29): Xaa is C or S
MNRYKKLIVNSSDDFYLVSIANLQTPAXX

SEQ ID NO: 13965 - protein, 33 aa, Artificial Sequence; identical to SEQ ID NO: 3404
  Cyclic GFR-binding peptide
  MOD_RES (31)..(32): Xaa is C or S

SEQ ID NO: 13966 - protein, 34 aa, Artificial Sequence
  Cyclic GFR-binding peptide
  MOD_RES (28)..(29): Xaa is C or S
MNEYQKYIVNSSDDIFLVSIPSLKTPAXXPKPVY

SEQ ID NO: 13967 - protein, 28 aa, Artificial Sequence
  Cyclic GFR-binding peptide
VVMDQYNKLVVKENEDLYLMSIASLETP

SEQ ID NO: 13968 - protein, 39 aa, Artificial Sequence; identical to SEQ ID NO: 3406
  Cyclic GFR-binding peptide
  MOD_RES (2)..(4)..(36): Xaa is C or S

SEQ ID NO: 13969 - protein, 31 aa, Artificial Sequence; identical to SEQ ID NO: 3409
  Cyclic GFR-binding peptide
  MOD_RES (28)..(29): Xaa is C or S

SEQ ID NO: 13970 - protein, 34 aa, Artificial Sequence
  Cyclic GFR-binding peptide
  MOD_RES (32)..(33): Xaa is C or S
SEVVMDQYNKLVVNNASDLYLISIASLRTPVXXT

SEQ ID NO: 13971 - protein, 29 aa, Artificial Sequence
  Cyclic GFR-binding peptide
KVIMNSLQEIKPTKGIYYVIPLPELDQSV

SEQ ID NO: 13972 - protein, 29 aa, Artificial Sequence
  Cyclic GFR-binding peptide
  MOD_RES (28)..(29): Xaa is C or S
MDQYNKLVVNNASDLYLISIASLRTPVXX

SEQ ID NO: 13973 - protein, 27 aa, Artificial Sequence
  Cyclic GFR-binding peptide
MERYKKLVVKDYEDFYLMSIANLETPV

SEQ ID NO: 13974 - protein, 30 aa, Artificial Sequence
  Cyclic GFR-binding peptide
  MOD_RES (2)..(2): Xaa is C or S
KXSRVIMEYQKYVKPKRGVIFLISIPSLAQ

SEQ ID NO: 13975 - protein, 29 aa, Artificial Sequence
  Cyclic GFR-binding peptide
  MOD_RES (28)..(29): Xaa is C or S
MNQYNKLIVNSSDDLYLVSIASLKTPAXX

SEQ ID NO: 13976 - protein, 31 aa, Artificial Sequence
  Cyclic GFR-binding peptide
  MOD_RES (28)..(29): Xaa is C or S
MDNSLQEVVKENEDYYLMTLPELETPVXXAK

SEQ ID NO: 13977 - protein, 26 aa, Artificial Sequence
  Cyclic GFR-binding peptide
VVMEQYNKLVVKDYEDLYLMSIASLE

SEQ ID NO: 13978 - protein, 30 aa, Artificial Sequence; identical to SEQ ID NO: 3422
  Cyclic GFR-binding peptide

SEQ ID NO: 13979 - protein, 38 aa, Artificial Sequence
  Cyclic GFR-binding peptide
  MOD_RES (2)..(4)..(36)..(37): Xaa is C or S
RXGXGEVVMENSLQEVVKDYEDYYLMTLPELETPVXXA

SEQ ID NO: 13980 - protein, 37 aa, Artificial Sequence
  Cyclic GFR-binding peptide
  MOD_RES (2)..(33)..(34): Xaa is C or S
KXSKVIMEYQKYIKPTKGIIFLISIPSLDQSVXXPSA

SEQ ID NO: 13981 - protein, 39 aa, Artificial Sequence
  Cyclic GFR-binding peptide
  MOD_RES (2)..(4)..(36): Xaa is C or S
HXGXSRVVMNNSLQEIVNSSDDYYLVTLPELKTPAXTPK

SEQ ID NO: 13982 - protein, 28 aa, Artificial Sequence
  Cyclic GFR-binding peptide
  MOD_RES (28)..(28): Xaa is C or S
IMNSLQEIKPTKGIYYLITLPELDQSVX

SEQ ID NO: 13983 - protein, 26 aa, Artificial Sequence
  Cyclic GFR-binding peptide
MQYNKLVKPKRGVLYLISIASLAQPV

SEQ ID NO: 13984 - protein, 27 aa, Artificial Sequence
  Cyclic GFR-binding peptide
EVVMDNSLQEVVKENEDYYVMPLPELE

SEQ ID NO: 13985 - protein, 37 aa, Artificial Sequence; identical to SEQ ID NO: 3432
  Cyclic GFR-binding peptide
  MOD_RES (31)..(32): Xaa is C or S

SEQ ID NO: 13986 - protein, 31 aa, Artificial Sequence
  Cyclic GFR-binding peptide
  MOD_RES (27)..(28): Xaa is C or S
MEYQKYIKPTKGIIFLISIPSLDQSVXXPSA

SEQ ID NO: 13987 - protein, 30 aa, Artificial Sequence
  Cyclic GFR-binding peptide
  MOD_RES (26)..(27): Xaa is C or S
EYQKYVKPTRGVIFLISIPSLDQPVXXPSA

SEQ ID NO: 13988 - protein, 36 aa, Artificial Sequence
  Cyclic GFR-binding peptide
  MOD_RES (2)..(4)..(35)..(36): Xaa is C or S
SXKXSKVVMEYQKYVKPTRGVIFLISIPSLDQPVXX

SEQ ID NO: 13989 - protein, 41 aa, Artificial Sequence
  Cyclic GFR-binding peptide
  MOD_RES (2)..(4)..(36): Xaa is C or S
HXGXSRVVMNNSLQEIVNSSDDYYVVPLPELKTPAXTPKTV

SEQ ID NO: 13990 - protein, 38 aa, Artificial Sequence; identical to SEQ ID NO: 3440
  Cyclic GFR-binding peptide
  MOD_RES (2)..(4)..(35)..(36): Xaa is C or S

SEQ ID NO: 13991 - protein, 22 aa, Artificial Sequence
  Cyclic GFR-binding peptide
MNSLQEIKPTKGIYYLITLPEL

SEQ ID NO: 13992 - protein, 35 aa, Artificial Sequence; identical to SEQ ID NO: 3444
  Cyclic GFR-binding peptide
  MOD_RES (1)..(33)..(34): Xaa is C or S

SEQ ID NO: 13993 - protein, 28 aa, Artificial Sequence
  Cyclic GFR-binding peptide
  MOD_RES (26)..(27): Xaa is C or S
EYQKYVKPTRGVIFLISIPSLDQPVXXP

SEQ ID NO: 13994 - protein, 37 aa, Artificial Sequence; identical to SEQ ID NO: 3446
  Cyclic GFR-binding peptide
  MOD_RES (2)..(34): Xaa is C or S

SEQ ID NO: 13995 - protein, 29 aa, Artificial Sequence
  Cyclic GFR-binding peptide
  MOD_RES (27)..(28): Xaa is C or S
NQYNKLIVNSSDDLYLVSIASLKTPAXXP

SEQ ID NO: 13996 - protein, 36 aa, Artificial Sequence
  Cyclic GFR-binding peptide
  MOD_RES (32)..(33): Xaa is C or S
SEVVMDNSLQEVVNNASDYYVIPLPELRTPVXXTPP

SEQ ID NO: 13997 - protein, 38 aa, Artificial Sequence; identical to SEQ ID NO: 3450
  Cyclic GFR-binding peptide
  MOD_RES (1)..(32)..(33): Xaa is C or S

SEQ ID NO: 13998 - protein, 33 aa, Artificial Sequence
  Cyclic GFR-binding peptide
  MOD_RES (2)..(2): Xaa is C or S
GXSEVVMDQYNKLVVNNASDLYLISIASLRTPV

SEQ ID NO: 13999 - protein, 34 aa, Artificial Sequence
  Cyclic GFR-binding peptide
  MOD_RES (30)..(30): Xaa is C or S
VVMNEYQKYIVNSSDDIFLVSIPSLKTPAXTPKT

SEQ ID NO: 14000 - protein, 34 aa, Artificial Sequence; identical to SEQ ID NO: 3452
  Cyclic GFR-binding peptide
  MOD_RES (32)..(33): Xaa is C or S

SEQ ID NO: 14001 - protein, 29 aa, Artificial Sequence
  Cyclic GFR-binding peptide
  MOD_RES (1)..(3): Xaa is C or S
XGXARVVMNEYQKYIVNSSDDIFLVSIPS

SEQ ID NO: 14002 - protein, 23 aa, Artificial Sequence
  Cyclic GFR-binding peptide
DRYKKLVVNNASDFYLISIANLR

SEQ ID NO: 14003 - protein, 28 aa, Artificial Sequence
  Cyclic GFR-binding peptide
VVMDNSLQEVVKENEDYYLMTLPELETP

SEQ ID NO: 14004 - protein, 31 aa, Artificial Sequence
  Cyclic GFR-binding peptide
  MOD_RES (1)..(3): Xaa is C or S
XGXSEVVMDRYKKLVVNNASDFYLISIANLR

SEQ ID NO: 14005 - protein, 31 aa, Artificial Sequence; identical to SEQ ID NO: 3456
  Cyclic GFR-binding peptide
  MOD_RES (28)..(29): Xaa is C or S

SEQ ID NO: 14006 - protein, 33 aa, Artificial Sequence
  Cyclic GFR-binding peptide
  MOD_RES (29)..(29): Xaa is C or S
VMNNSLQEIVNSSDDYYVVPLPELKTPAXTPKT

SEQ ID NO: 14007 - protein, 32 aa, Artificial Sequence
  Cyclic GFR-binding peptide
  MOD_RES (27)..(28): Xaa is C or S
MEYQKYVKPKRGVIFLISIPSLAQPVXXPAAS

SEQ ID NO: 14008 - protein, 21 aa, Artificial Sequence
  Cyclic GFR-binding peptide
MRYKKLVKPKRGVFYLISIAN

SEQ ID NO: 14009 - protein, 27 aa, Artificial Sequence
  Cyclic GFR-binding peptide
MDNSLQEVVKENEDYYLMTLPELETPV

SEQ ID NO: 14010 - protein, 31 aa, Artificial Sequence; identical to SEQ ID NO: 3458
  Cyclic GFR-binding peptide
  MOD_RES (29)..(30): Xaa is C or S

SEQ ID NO: 14011 - protein, 32 aa, Artificial Sequence
  Cyclic GFR-binding peptide
  MOD_RES (2)..(2): Xaa is C or S
GXGEVVMDNSLQEVVKENEDYYVMPLPELETP

SEQ ID NO: 14012 - protein, 30 aa, Artificial Sequence; identical to SEQ ID NO: 3462
  Cyclic GFR-binding peptide
  MOD_RES (26)..(27): Xaa is C or S

SEQ ID NO: 14013 - protein, 36 aa, Artificial Sequence
  Cyclic GFR-binding peptide
  MOD_RES (1)..(3)..(35)..(36): Xaa is C or S
XGXGEVVMDNSLQEVVKENEDYYVMPLPELETPVXX

SEQ ID NO: 14014 - protein, 34 aa, Artificial Sequence
  Cyclic GFR-binding peptide
  MOD_RES (2)..(34): Xaa is C or S
GXARVVMNNSLQEIVNSSDDYYVVPLPELQTPAX

SEQ ID NO: 14015 - protein, 30 aa, Artificial Sequence; identical to SEQ ID NO: 3463
  Cyclic GFR-binding peptide
  MOD_RES (2)..(4): Xaa is C or S

SEQ ID NO: 14016 - protein, 37 aa, Artificial Sequence; identical to SEQ ID NO: 3464
  Cyclic GFR-binding peptide
  MOD_RES (1)..(3)..(35)..(36): Xaa is C or S

SEQ ID NO: 14017 - protein, 34 aa, Artificial Sequence; identical to SEQ ID NO: 3466
  Cyclic GFR-binding peptide
  MOD_RES (2)..(4): Xaa is C or S

SEQ ID NO: 14018 - protein, 24 aa, Artificial Sequence
  Cyclic GFR-binding peptide
NSLQEVVKENEDYYVMPLPELETP

SEQ ID NO: 14019 - protein, 41 aa, Artificial Sequence; identical to SEQ ID NO: 3470
  Cyclic GFR-binding peptide
  MOD_RES (2)..(4)..(35)..(36): Xaa is C or S

SEQ ID NO: 14020 - protein, 26 aa, Artificial Sequence
  Cyclic GFR-binding peptide
SKVIMNSLQEIKPTKGIYYVIPLPEL

SEQ ID NO: 14021 - protein, 28 aa, Artificial Sequence
  Cyclic GFR-binding peptide
  MOD_RES (27)..(28): Xaa is C or S
MEYQKYVKPKRGVIFLISIPSLAQPVXX

SEQ ID NO: 14022 - protein, 30 aa, Artificial Sequence
  Cyclic GFR-binding peptide
  MOD_RES (28)..(29): Xaa is C or S
MDNSLQEVVNNASDYYVIPLPELRTPVXXT

SEQ ID NO: 14023 - protein, 33 aa, Artificial Sequence
  Cyclic GFR-binding peptide
  MOD_RES (29)..(30): Xaa is C or S
VMDQYNKLVVNNASDLYLISIASLRTPVXXTPP

SEQ ID NO: 14024 - protein, 24 aa, Artificial Sequence
  Cyclic GFR-binding peptide
RYKKLIVNSSDDFYLVSIANLQTP

SEQ ID NO: 14025 - protein, 28 aa, Artificial Sequence
  Cyclic GFR-binding peptide
GEVVMERYKKLVVKDYEDFYLMSIANLE

SEQ ID NO: 14026 - protein, 31 aa, Artificial Sequence; identical to SEQ ID NO: 3479
  Cyclic GFR-binding peptide
  MOD_RES (27)..(28): Xaa is C or S

SEQ ID NO: 14027 - protein, 32 aa, Artificial Sequence
  Cyclic GFR-binding peptide
  MOD_RES (31)..(32): Xaa is C or S
EVVMDNSLQEVVNNASDYYVIPLPELRTPVXX

SEQ ID NO: 14028 - protein, 24 aa, Artificial Sequence
  Cyclic GFR-binding peptide
IMNSLQEIKPTKGIYYLITLPELD

SEQ ID NO: 14029 - protein, 35 aa, Artificial Sequence
  Cyclic GFR-binding peptide
  MOD_RES (1)..(3)..(35): Xaa is C or S
XGXSEVVMDRYKKLVVNNASDFYLISIANLRTPVX

SEQ ID NO: 14030 - protein, 30 aa, Artificial Sequence
  Cyclic GFR-binding peptide
  MOD_RES (28)..(29): Xaa is C or S
IMNSLQEVKPKRGVYYLITLPELAQPVXXP

SEQ ID NO: 14031 - protein, 22 aa, Artificial Sequence
  Cyclic GFR-binding peptide
MENSLQEVVKDYEDYYLMTLPE

SEQ ID NO: 14032 - protein, 32 aa, Artificial Sequence
  Cyclic GFR-binding peptide
  MOD_RES (26)..(27): Xaa is C or S
NSLQEVVNNASDYYVIPLPELRTPVXXTPPTS

SEQ ID NO: 14033 - protein, 27 aa, Artificial Sequence
  Cyclic GFR-binding peptide
  MOD_RES (26)..(27): Xaa is C or S
NSLQEVKPKRGVYYLITLPELAQPVXX

SEQ ID NO: 14034 - protein, 27 aa, Artificial Sequence
  Cyclic GFR-binding peptide
MNQYNKLIVNSSDDLYLVSIASLQTPA

SEQ ID NO: 14035 - protein, 31 aa, Artificial Sequence; identical to SEQ ID NO: 3484
  Cyclic GFR-binding peptide
  MOD_RES (2)..(4): Xaa is C or S

SEQ ID NO: 14036 - protein, 30 aa, Artificial Sequence
  Cyclic GFR-binding peptide
  MOD_RES (27)..(28): Xaa is C or S
NEYQKYIVNSSDDIFLVSIPSLKTPAXXPK

SEQ ID NO: 14037 - protein, 29 aa, Artificial Sequence
  Cyclic GFR-binding peptide
  MOD_RES (1)..(1): Xaa is C or S
XSRVVMNNSLQEIVNSSDDYYLVTLPELK

SEQ ID NO: 14038 - protein, 35 aa, Artificial Sequence
  Cyclic GFR-binding peptide
  MOD_RES (30)..(31): Xaa is C or S
VVMDNSLQEVVKENEDYYVMPLPELETPVXXAKPI

SEQ ID NO: 14039 - protein, 36 aa, Artificial Sequence; identical to SEQ ID NO: 3489
  Cyclic GFR-binding peptide
  MOD_RES (1)..(3)..(35)..(36): Xaa is C or S

SEQ ID NO: 14040 - protein, 25 aa, Artificial Sequence
  Cyclic GFR-binding peptide
ERYKKLVVKDYEDFYLMSIANLETP

SEQ ID NO: 14041 - protein, 28 aa, Artificial Sequence
  Cyclic GFR-binding peptide
  MOD_RES (1)..(1): Xaa is C or S
XARVVMNNSLQEIVNSSDDYYVVPLPEL

SEQ ID NO: 14042 - protein, 31 aa, Artificial Sequence
  Cyclic GFR-binding peptide
  MOD_RES (31)..(31): Xaa is C or S
EVVMDNSLQEVVNNASDYYVIPLPELRTPVX

SEQ ID NO: 14043 - protein, 32 aa, Artificial Sequence; identical to SEQ ID NO: 3494
  Cyclic GFR-binding peptide
  MOD_RES (1)..(32): Xaa is C or S

SEQ ID NO: 14044 - protein, 31 aa, Artificial Sequence; identical to SEQ ID NO: 3495
  Cyclic GFR-binding peptide
  MOD_RES (1)..(1): Xaa is C or S

SEQ ID NO: 14045 - protein, 23 aa, Artificial Sequence
  Cyclic GFR-binding peptide
RYKKLVVKDYEDFYLMSIANLET

SEQ ID NO: 14046 - protein, 28 aa, Artificial Sequence
  Cyclic GFR-binding peptide
  MOD_RES (2)..(2): Xaa is C or S
KXSKVIMQYNKLIKPTKGILYLISIASL

SEQ ID NO: 14047 - protein, 24 aa, Artificial Sequence
  Cyclic GFR-binding peptide
VVMNEYQKYIVNSSDDIFLVSIPS

SEQ ID NO: 14048 - protein, 30 aa, Artificial Sequence; identical to SEQ ID NO: 3501
  Cyclic GFR-binding peptide
  MOD_RES (27)..(28): Xaa is C or S

SEQ ID NO: 14049 - protein, 35 aa, Artificial Sequence
  Cyclic GFR-binding peptide
  MOD_RES (2)..(34): Xaa is C or S
GXSRVVMNNSLQEIVNSSDDYYLVTLPELKTPAXT

SEQ ID NO: 14050 - protein, 40 aa, Artificial Sequence; identical to SEQ ID NO: 3504
  Cyclic GFR-binding peptide
  MOD_RES (1)..(3)..(34)..(35): Xaa is C or S

SEQ ID NO: 14051 - protein, 26 aa, Artificial Sequence
  Cyclic GFR-binding peptide
IMEYQKYIKPTKGIIFLISIPSLDQS

SEQ ID NO: 14052 - protein, 30 aa, Artificial Sequence; identical to SEQ ID NO: 3507
  Cyclic GFR-binding peptide
  MOD_RES (2)..(2): Xaa is C or S

SEQ ID NO: 14053 - protein, 27 aa, Artificial Sequence
  Cyclic GFR-binding peptide
  MOD_RES (26)..(26): Xaa is C or S
RYKKLIVNSSDDFYLVSIANLKTPAXT

SEQ ID NO: 14054 - protein, 30 aa, Artificial Sequence; identical to SEQ ID NO: 3509
  Cyclic GFR-binding peptide
  MOD_RES (1)..(3): Xaa is C or S

SEQ ID NO: 14055 - protein, 30 aa, Artificial Sequence
  Cyclic GFR-binding peptide
  MOD_RES (2)..(4): Xaa is C or S
RXGXSEVVMDNSLQEVVNNASDYYVIPLPE

SEQ ID NO: 14056 - protein, 25 aa, Artificial Sequence
  Cyclic GFR-binding peptide
VMNRYKKLIVNSSDDFYLVSIANLQ

SEQ ID NO: 14057 - protein, 24 aa, Artificial Sequence
  Cyclic GFR-binding peptide
QYNKLVVKENEDLYLMSIASLETP

SEQ ID NO: 14058 - protein, 24 aa, Artificial Sequence
  Cyclic GFR-binding peptide
NNSLQEIVNSSDDYYLVTLPELQT

SEQ ID NO: 14059 - protein, 36 aa, Artificial Sequence; identical to SEQ ID NO: 3514
  Cyclic GFR-binding peptide
  MOD_RES (1)..(33)..(34): Xaa is C or S

SEQ ID NO: 14060 - protein, 39 aa, Artificial Sequence; identical to SEQ ID NO: 3515
  Cyclic GFR-binding peptide
  MOD_RES (1)..(33)..(34): Xaa is C or S

SEQ ID NO: 14061 - protein, 25 aa, Artificial Sequence
  Cyclic GFR-binding peptide
VMDEYQKYVVKENEDIFLMSIPSLE

SEQ ID NO: 14062 - protein, 37 aa, Artificial Sequence; identical to SEQ ID NO: 3517
  Cyclic GFR-binding peptide
  MOD_RES (2)..(4)..(35)..(36): Xaa is C or S

SEQ ID NO: 14063 - protein, 34 aa, Artificial Sequence
  Cyclic GFR-binding peptide
  MOD_RES (1)..(32)..(33): Xaa is C or S
XSKVIMEYQKYIKPTKGIIFLISIPSLDQSVXXP

SEQ ID NO: 14064 - protein, 28 aa, Artificial Sequence
  Cyclic GFR-binding peptide
  MOD_RES (28)..(28): Xaa is C or S
MNEYQKYIVNSSDDIFLVSIPSLQTPAX

SEQ ID NO: 14065 - protein, 31 aa, Artificial Sequence
  Cyclic GFR-binding peptide
  MOD_RES (27)..(28): Xaa is C or S
ENSLQEVVKDYEDYYLMTLPELETPVXXAKP

SEQ ID NO: 14066 - protein, 29 aa, Artificial Sequence
  Cyclic GFR-binding peptide
  MOD_RES (1)..(1): Xaa is C or S
XGEVVMDNSLQEVVKENEDYYVMPLPELE

SEQ ID NO: 14067 - protein, 39 aa, Artificial Sequence
  Cyclic GFR-binding peptide
  MOD_RES (2)..(33)..(34): Xaa is C or S
KXSKVIMEYQKYIKPTKGIIFLISIPSLDQSVXXPSASA

SEQ ID NO: 14068 - protein, 27 aa, Artificial Sequence
  Cyclic GFR-binding peptide
GEVVMDNSLQEVVKENEDYYLMTLPEL

SEQ ID NO: 14069 - protein, 36 aa, Artificial Sequence
  Cyclic GFR-binding peptide
  MOD_RES (31)..(31): Xaa is C or S
RVVMNNSLQEIVNSSDDYYVVPLPELKTPAXTPKTV

SEQ ID NO: 14070 - protein, 32 aa, Artificial Sequence
  Cyclic GFR-binding peptide
  MOD_RES (27)..(28): Xaa is C or S
NNSLQEIVNSSDDYYVVPLPELQTPAXXPKPV

SEQ ID NO: 14071 - protein, 26 aa, Artificial Sequence
  Cyclic GFR-binding peptide
  MOD_RES (26)..(26): Xaa is C or S
NSLQEVVKDYEDYYLMTLPELETPVX

SEQ ID NO: 14072 - protein, 29 aa, Artificial Sequence
  Cyclic GFR-binding peptide
  MOD_RES (2)..(4): Xaa is C or S
SXKXSRVIMRYKKLVKPKRGVFYLISIAN

SEQ ID NO: 14073 - protein, 28 aa, Artificial Sequence
  Cyclic GFR-binding peptide
  MOD_RES (2)..(2): Xaa is C or S
GXGEVVMEEYQKYVVKDYEDIFLMSIPS

SEQ ID NO: 14074 - protein, 29 aa, Artificial Sequence
  Cyclic GFR-binding peptide
  MOD_RES (2)..(2): Xaa is C or S
GXGEVVMEEYQKYVVKDYEDIFLMSIPSL

SEQ ID NO: 14075 - protein, 35 aa, Artificial Sequence
  Cyclic GFR-binding peptide
  MOD_RES (29)..(30): Xaa is C or S
VIMNSLQEIKPTKGIYYVIPLPELDQSVXXPSASA

SEQ ID NO: 14076 - protein, 27 aa, Artificial Sequence
  Cyclic GFR-binding peptide
VVMDRYKKLVVNNASDFYLISIANLRT

SEQ ID NO: 14077 - protein, 34 aa, Artificial Sequence
  Cyclic GFR-binding peptide
  MOD_RES (28)..(29): Xaa is C or S
MNNSLQEIVNSSDDYYVVPLPELKTPAXXPKPVY

SEQ ID NO: 14078 - protein, 35 aa, Artificial Sequence
  Cyclic GFR-binding peptide
  MOD_RES (1)..(3)..(35): Xaa is C or S
XGXSEVVMDNSLQEVVNNASDYYVIPLPELRTPVX

SEQ ID NO: 14079 - protein, 29 aa, Artificial Sequence
  Cyclic GFR-binding peptide
  MOD_RES (1)..(1): Xaa is C or S
XSRVVMNRYKKLIVNSSDDFYLVSIANLK

SEQ ID NO: 14080 - protein, 34 aa, Artificial Sequence
  Cyclic GFR-binding peptide
  MOD_RES (32)..(33): Xaa is C or S
GEVVMENSLQEVVKDYEDYYVMPLPELETPVXXA

SEQ ID NO: 14081 - protein, 30 aa, Artificial Sequence; identical to SEQ ID NO: 3537
  Cyclic GFR-binding peptide
  MOD_RES (1)..(1): Xaa is C or S

SEQ ID NO: 14082 - protein, 33 aa, Artificial Sequence
  Cyclic GFR-binding peptide
  MOD_RES (31)..(32): Xaa is C or S
EVVMEEYQKYVVKDYEDIFLMSIPSLETPVXXA

SEQ ID NO: 14083 - protein, 28 aa, Artificial Sequence
  Cyclic GFR-binding peptide
  MOD_RES (26)..(26): Xaa is C or S
RYKKLIVNSSDDFYLVSIANLKTPAXTP

SEQ ID NO: 14084 - protein, 34 aa, Artificial Sequence
  Cyclic GFR-binding peptide
  MOD_RES (1)..(32)..(33): Xaa is C or S
XSKVVMNSLQEVKPTRGVYYVIPLPELDQPVXXP

SEQ ID NO: 14085 - protein, 30 aa, Artificial Sequence
  Cyclic GFR-binding peptide
  MOD_RES (1)..(3): Xaa is C or S
XGXSRVVMNEYQKYIVNSSDDIFLVSIPSL

SEQ ID NO: 14086 - protein, 29 aa, Artificial Sequence
  Cyclic GFR-binding peptide
  MOD_RES (26)..(27): Xaa is C or S
EYQKYVVKDYEDIFLMSIPSLETPVXXAK

SEQ ID NO: 14087 - protein, 35 aa, Artificial Sequence
  Cyclic GFR-binding peptide
  MOD_RES (29)..(30): Xaa is C or S
VIMEYQKYIKPTKGIIFLISIPSLDQSVXXPSASA

SEQ ID NO: 14088 - protein, 35 aa, Artificial Sequence; identical to SEQ ID NO: 3544
  Cyclic GFR-binding peptide
  MOD_RES (2)..(4)..(35): Xaa is C or S

SEQ ID NO: 14089 - protein, 29 aa, Artificial Sequence
  Cyclic GFR-binding peptide
  MOD_RES (26)..(27): Xaa is C or S
RYKKLVKPTRGVFYLISIANLDQPVXXPS

SEQ ID NO: 14090 - protein, 34 aa, Artificial Sequence; identical to SEQ ID NO: 3547
  Cyclic GFR-binding peptide
  MOD_RES (29)..(30): Xaa is C or S

SEQ ID NO: 14091 - protein, 32 aa, Artificial Sequence
  Cyclic GFR-binding peptide
  MOD_RES (29)..(30): Xaa is C or S
VMDRYKKLVVNNASDFYLISIANLRTPVXXTP

SEQ ID NO: 14092 - protein, 32 aa, Artificial Sequence
  Cyclic GFR-binding peptide
  MOD_RES (1)..(1): Xaa is C or S
XGEVVMDEYQKYVVKENEDIFLMSIPSLETPV

SEQ ID NO: 14093 - protein, 27 aa, Artificial Sequence
  Cyclic GFR-binding peptide
RVIMNSLQEVKPKRGVYYLITLPELAQ

SEQ ID NO: 14094 - protein, 29 aa, Artificial Sequence
  Cyclic GFR-binding peptide
  MOD_RES (28)..(28): Xaa is C or S
MNQYNKLIVNSSDDLYLVSIASLKTPAXT

SEQ ID NO: 14095 - protein, 32 aa, Artificial Sequence
  Cyclic GFR-binding peptide
  MOD_RES (27)..(28): Xaa is C or S
DRYKKLVVNNASDFYLISIANLRTPVXXTPPT

SEQ ID NO: 14096 - protein, 39 aa, Artificial Sequence
  Cyclic GFR-binding peptide
  MOD_RES (2)..(4)..(36)..(37): Xaa is C or S
RXGXGEVVMEEYQKYVVKDYEDIFLMSIPSLETPVXXAK

SEQ ID NO: 14097 - protein, 27 aa, Artificial Sequence
  Cyclic GFR-binding peptide
  MOD_RES (1)..(1): Xaa is C or S
XSKVVMRYKKLVKPTRGVFYLISIANL

SEQ ID NO: 14098 - protein, 22 aa, Artificial Sequence
  Cyclic GFR-binding peptide
NQYNKLIVNSSDDLYLVSIASL

SEQ ID NO: 14099 - protein, 28 aa, Artificial Sequence
  Cyclic GFR-binding peptide
VMDRYKKLVVKENEDFYLMSIANLETPV

SEQ ID NO: 14100 - protein, 38 aa, Artificial Sequence
  Cyclic GFR-binding peptide
  MOD_RES (2)..(34)..(35): Xaa is C or S
GXARVVMNNSLQEIVNSSDDYYVVPLPELQTPAXXPKP

SEQ ID NO: 14101 - protein, 41 aa, Artificial Sequence; identical to SEQ ID NO: 3561
  Cyclic GFR-binding peptide
  MOD_RES (2)..(4)..(36)..(37): Xaa is C or S

SEQ ID NO: 14102 - protein, 36 aa, Artificial Sequence
  Cyclic GFR-binding peptide
  MOD_RES (1)..(3)..(34)..(35): Xaa is C or S
XKXSKVIMEYQKYIKPTKGIIFLISIPSLDQSVXXP

SEQ ID NO: 14103 - protein, 41 aa, Artificial Sequence; identical to SEQ ID NO: 3563
  Cyclic GFR-binding peptide
  MOD_RES (1)..(3)..(35): Xaa is C or S

SEQ ID NO: 14104 - protein, 26 aa, Artificial Sequence
  Cyclic GFR-binding peptide
NRYKKLIVNSSDDFYLVSIANLQTPA

SEQ ID NO: 14105 - protein, 24 aa, Artificial Sequence
  Cyclic GFR-binding peptide
VIMRYKKLVKPKRGVFYLISIANL

SEQ ID NO: 14106 - protein, 37 aa, Artificial Sequence
  Cyclic GFR-binding peptide
  MOD_RES (32)..(32): Xaa is C or S
SRVVMNNSLQEIVNSSDDYYVVPLPELKTPAXTPKTV

SEQ ID NO: 14107 - protein, 31 aa, Artificial Sequence
  Cyclic GFR-binding peptide
  MOD_RES (26)..(27): Xaa is C or S
EYQKYVVKDYEDIFLMSIPSLETPVXXAKPI

SEQ ID NO: 14108 - protein, 25 aa, Artificial Sequence
  Cyclic GFR-binding peptide
DQYNKLVVKENEDLYLMSIASLETP

SEQ ID NO: 14109 - protein, 36 aa, Artificial Sequence
  Cyclic GFR-binding peptide
  MOD_RES (1)..(3)..(35)..(36): Xaa is C or S
XGXGEVVMEEYQKYVVKDYEDIFLMSIPSLETPVXX

SEQ ID NO: 14110 - protein, 33 aa, Artificial Sequence
  Cyclic GFR-binding peptide
  MOD_RES (1)..(33): Xaa is C or S
XSEVVMDRYKKLVVNNASDFYLISIANLRTPVX

SEQ ID NO: 14111 - protein, 29 aa, Artificial Sequence
  Cyclic GFR-binding peptide
  MOD_RES (29)..(29): Xaa is C or S
VMNQYNKLIVNSSDDLYLVSIASLKTPAX

SEQ ID NO: 14112 - protein, 23 aa, Artificial Sequence
  Cyclic GFR-binding peptide
EYQKYVKPTRGVIFLISIPSLDQ

SEQ ID NO: 14113 - protein, 29 aa, Artificial Sequence
  Cyclic GFR-binding peptide
  MOD_RES (1)..(3): Xaa is C or S
XGXGEVVMENSLQEVVKDYEDYYLMTLPE

SEQ ID NO: 14114 - protein, 27 aa, Artificial Sequence
  Cyclic GFR-binding peptide
KVVMRYKKLVKPTRGVFYLISIANLDQ

SEQ ID NO: 14115 - protein, 32 aa, Artificial Sequence
  Cyclic GFR-binding peptide
  MOD_RES (30)..(31): Xaa is C or S
VVMDRYKKLVVNNASDFYLISIANLRTPVXXT

SEQ ID NO: 14116 - protein, 35 aa, Artificial Sequence
  Cyclic GFR-binding peptide
  MOD_RES (1)..(33)..(34): Xaa is C or S
XGEVVMDNSLQEVVKENEDYYLMTLPELETPVXXA

SEQ ID NO: 14117 - protein, 30 aa, Artificial Sequence; identical to SEQ ID NO: 3577
  Cyclic GFR-binding peptide
  MOD_RES (30)..(30): Xaa is C or S

SEQ ID NO: 14118 - protein, 33 aa, Artificial Sequence
  Cyclic GFR-binding peptide
  MOD_RES (30)..(31): Xaa is C or S
VVMNNSLQEIVNSSDDYYVVPLPELKTPAXXPK

SEQ ID NO: 14119 - protein, 37 aa, Artificial Sequence
  Cyclic GFR-binding peptide
  MOD_RES (31)..(32): Xaa is C or S
SKVIMNSLQEIKPTKGIYYLITLPELDQSVXXPSASA

SEQ ID NO: 14120 - protein, 22 aa, Artificial Sequence
  Cyclic GFR-binding peptide
MNSLQEIKPTKGIYYVIPLPEL

SEQ ID NO: 14121 - protein, 36 aa, Artificial Sequence; identical to SEQ ID NO: 3580
  Cyclic GFR-binding peptide
  MOD_RES (2)..(33)..(34): Xaa is C or S

SEQ ID NO: 14122 - protein, 40 aa, Artificial Sequence
  Cyclic GFR-binding peptide
  MOD_RES (2)..(4)..(36)..(37): Xaa is C or S
RXGXGEVVMENSLQEVVKDYEDYYLMTLPELETPVXXAKP

SEQ ID NO: 14123 - protein, 35 aa, Artificial Sequence; identical to SEQ ID NO: 3581
  Cyclic GFR-binding peptide
  MOD_RES (30)..(31): Xaa is C or S

SEQ ID NO: 14124 - protein, 27 aa, Artificial Sequence
  Cyclic GFR-binding peptide
  MOD_RES (27)..(27): Xaa is C or S
MNSLQEVKPTRGVYYVIPLPELDQPVX

SEQ ID NO: 14125 - protein, 34 aa, Artificial Sequence; identical to SEQ ID NO: 3584
  Cyclic GFR-binding peptide
  MOD_RES (29)..(29): Xaa is C or S

SEQ ID NO: 14126 - protein, 26 aa, Artificial Sequence
  Cyclic GFR-binding peptide
VVMNEYQKYIVNSSDDIFLVSIPSLK

SEQ ID NO: 14127 - protein, 36 aa, Artificial Sequence
  Cyclic GFR-binding peptide
  MOD_RES (1)..(3)..(35)..(36): Xaa is C or S
XGXSEVVMDRYKKLVVNNASDFYLISIANLRTPVXX

SEQ ID NO: 14128 - protein, 28 aa, Artificial Sequence
  Cyclic GFR-binding peptide
  MOD_RES (2)..(2): Xaa is C or S
GXARVVMNNSLQEIVNSSDDYYVVPLPE

SEQ ID NO: 14129 - protein, 30 aa, Artificial Sequence; identical to SEQ ID NO: 3585
  Cyclic GFR-binding peptide
  MOD_RES (27)..(28): Xaa is C or S

SEQ ID NO: 14130 - protein, 23 aa, Artificial Sequence
  Cyclic GFR-binding peptide
MDNSLQEVVNNASDYYLITLPEL

SEQ ID NO: 14131 - protein, 22 aa, Artificial Sequence
  Cyclic GFR-binding peptide
DRYKKLVVNNASDFYLISIANL

SEQ ID NO: 14132 - protein, 30 aa, Artificial Sequence
  Cyclic GFR-binding peptide
  MOD_RES (30)..(30): Xaa is C or S
KVIMNSLQEIKPTKGIYYLITLPELDQSVX

SEQ ID NO: 14133 - protein, 36 aa, Artificial Sequence
  Cyclic GFR-binding peptide
  MOD_RES (30)..(31): Xaa is C or S
VVMNEYQKYIVNSSDDIFLVSIPSLKTPAXXPKPVY

SEQ ID NO: 14134 - protein, 24 aa, Artificial Sequence
  Cyclic GFR-binding peptide
RVIMEYQKYVKPKRGVIFLISIPS

SEQ ID NO: 14135 - protein, 27 aa, Artificial Sequence
  Cyclic GFR-binding peptide
EVVMENSLQEVVKDYEDYYLMTLPELE

SEQ ID NO: 14136 - protein, 38 aa, Artificial Sequence
  Cyclic GFR-binding peptide
  MOD_RES (2)..(34)..(35): Xaa is C or S
GXGEVVMENSLQEVVKDYEDYYLMTLPELETPVXXAKP

SEQ ID NO: 14137 - protein, 39 aa, Artificial Sequence
  Cyclic GFR-binding peptide
  MOD_RES (2)..(33)..(34): Xaa is C or S
KXSKVVMNSLQEVKPTRGVYYVIPLPELDQPVXXPSASA

SEQ ID NO: 14138 - protein, 28 aa, Artificial Sequence
  Cyclic GFR-binding peptide
SKVVMNSLQEVKPTRGVYYVIPLPELDQ

SEQ ID NO: 14139 - protein, 34 aa, Artificial Sequence; identical to SEQ ID NO: 3591
  Cyclic GFR-binding peptide
  MOD_RES (1)..(32)..(33): Xaa is C or S

SEQ ID NO: 14140 - protein, 24 aa, Artificial Sequence
  Cyclic GFR-binding peptide
MDNSLQEVVNNASDYYVIPLPELR

SEQ ID NO: 14141 - protein, 25 aa, Artificial Sequence
  Cyclic GFR-binding peptide
MNSLQEVKPKRGVYYLITLPELAQP

SEQ ID NO: 14142 - protein, 28 aa, Artificial Sequence
  Cyclic GFR-binding peptide
  MOD_RES (26)..(27): Xaa is C or S
RYKKLVVKENEDFYLMSIANLETPVXXA

SEQ ID NO: 14143 - protein, 30 aa, Artificial Sequence
  Cyclic GFR-binding peptide
  MOD_RES (30)..(30): Xaa is C or S
VVMNNSLQEIVNSSDDYYLVTLPELQTPAX

SEQ ID NO: 14144 - protein, 36 aa, Artificial Sequence
  Cyclic GFR-binding peptide
  MOD_RES (2)..(33)..(34): Xaa is C or S
KXSKVVMNSLQEVKPTRGVYYVIPLPELDQPVXXPS

SEQ ID NO: 14145 - protein, 36 aa, Artificial Sequence
  Cyclic GFR-binding peptide
  MOD_RES (1)..(33)..(34): Xaa is C or S
XGEVVMDNSLQEVVKENEDYYVMPLPELETPVXXAK

SEQ ID NO: 14146 - protein, 25 aa, Artificial Sequence
  Cyclic GFR-binding peptide
IMEYQKYIKPTKGIIFLISIPSLDQ

SEQ ID NO: 14147 - protein, 39 aa, Artificial Sequence; identical to SEQ ID NO: 3599
  Cyclic GFR-binding peptide
  MOD_RES (1)..(33): Xaa is C or S

SEQ ID NO: 14148 - protein, 31 aa, Artificial Sequence
  Cyclic GFR-binding peptide
  MOD_RES (31)..(31): Xaa is C or S
EVVMDRYKKLVVNNASDFYLISIANLRTPVX

SEQ ID NO: 14149 - protein, 25 aa, Artificial Sequence
  Cyclic GFR-binding peptide
RVIMQYNKLVKPKRGVLYLISIASL

SEQ ID NO: 14150 - protein, 36 aa, Artificial Sequence
  Cyclic GFR-binding peptide
  MOD_RES (2)..(33)..(34): Xaa is C or S
KXSKVIMEYQKYIKPTKGIIFLISIPSLDQSVXXPS

SEQ ID NO: 14151 - protein, 30 aa, Artificial Sequence; identical to SEQ ID NO: 3602
  Cyclic GFR-binding peptide
  MOD_RES (1)..(3): Xaa is C or S

SEQ ID NO: 14152 - protein, 26 aa, Artificial Sequence
  Cyclic GFR-binding peptide
VVMDEYQKYVVKENEDIFLMSIPSLE

SEQ ID NO: 14153 - protein, 40 aa, Artificial Sequence
  Cyclic GFR-binding peptide
  MOD_RES (2)..(4)..(36)..(37): Xaa is C or S
HXGXARVVMNNSLQEIVNSSDDYYLVTLPELQTPAXXPKP

SEQ ID NO: 14154 - protein, 31 aa, Artificial Sequence
  Cyclic GFR-binding peptide
  MOD_RES (1)..(1): Xaa is C or S
XGEVVMDNSLQEVVKENEDYYVMPLPELETP

SEQ ID NO: 14155 - protein, 29 aa, Artificial Sequence
  Cyclic GFR-binding peptide
  MOD_RES (27)..(28): Xaa is C or S
DRYKKLVVNNASDFYLISIANLRTPVXXT

SEQ ID NO: 14156 - protein, 31 aa, Artificial Sequence; identical to SEQ ID NO: 3606
  Cyclic GFR-binding peptide
  MOD_RES (29)..(30): Xaa is C or S

SEQ ID NO: 14157 - protein, 33 aa, Artificial Sequence; identical to SEQ ID NO: 3607
  Cyclic GFR-binding peptide
  MOD_RES (27)..(28): Xaa is C or S

SEQ ID NO: 14158 - protein, 35 aa, Artificial Sequence
  Cyclic GFR-binding peptide
  MOD_RES (1)..(3)..(35): Xaa is C or S
XGXSRVVMNNSLQEIVNSSDDYYLVTLPELKTPAX

SEQ ID NO: 14159 - protein, 22 aa, Artificial Sequence
  Cyclic GFR-binding peptide
VMRYKKLVKPTRGVFYLISIAN

SEQ ID NO: 14160 - protein, 27 aa, Artificial Sequence
  Cyclic GFR-binding peptide
  MOD_RES (26)..(27): Xaa is C or S
QYNKLVVKDYEDLYLMSIASLETPVXX

SEQ ID NO: 14161 - protein, 30 aa, Artificial Sequence; identical to SEQ ID NO: 3613
  Cyclic GFR-binding peptide
  MOD_RES (26)..(27): Xaa is C or S

SEQ ID NO: 14162 - protein, 39 aa, Artificial Sequence; identical to SEQ ID NO: 3616
  Cyclic GFR-binding peptide
  MOD_RES (2)..(33)..(34): Xaa is C or S

SEQ ID NO: 14163 - protein, 35 aa, Artificial Sequence
  Cyclic GFR-binding peptide
  MOD_RES (2)..(34)..(35): Xaa is C or S
GXARVVMNEYQKYIVNSSDDIFLVSIPSLQTPAXX

SEQ ID NO: 14164 - protein, 37 aa, Artificial Sequence
  Cyclic GFR-binding peptide
  MOD_RES (2)..(34)..(35): Xaa is C or S
GXGEVVMDNSLQEVVKENEDYYVMPLPELETPVXXAK

SEQ ID NO: 14165 - protein, 24 aa, Artificial Sequence
  Cyclic GFR-binding peptide
MEEYQKYVVKDYEDIFLMSIPSLE

SEQ ID NO: 14166 - protein, 42 aa, Artificial Sequence
  Cyclic GFR-binding peptide
  MOD_RES (2)..(4)..(36)..(37): Xaa is C or S
HXGXARVVMNNSLQEIVNSSDDYYVVPLPELQTPAXXPKPVT

SEQ ID NO: 14167 - protein, 40 aa, Artificial Sequence
  Cyclic GFR-binding peptide
  MOD_RES (2)..(4)..(35)..(36): Xaa is C or S
SXKXSKVIMNSLQEIKPTKGIYYVIPLPELDQSVXXPSAS

SEQ ID NO: 14168 - protein, 31 aa, Artificial Sequence; identical to SEQ ID NO: 3621
  Cyclic GFR-binding peptide
  MOD_RES (2)..(4): Xaa is C or S

SEQ ID NO: 14169 - protein, 28 aa, Artificial Sequence
  Cyclic GFR-binding peptide
EVVMDQYNKLVVKENEDLYLMSIASLET

SEQ ID NO: 14170 - protein, 39 aa, Artificial Sequence
  Cyclic GFR-binding peptide
  MOD_RES (2)..(4)..(36)..(37): Xaa is C or S
HXGXARVVMNEYQKYIVNSSDDIFLVSIPSLQTPAXXPK

SEQ ID NO: 14171 - protein, 31 aa, Artificial Sequence; identical to SEQ ID NO: 3624
  Cyclic GFR-binding peptide
  MOD_RES (28)..(29): Xaa is C or S

SEQ ID NO: 14172 - protein, 32 aa, Artificial Sequence
  Cyclic GFR-binding peptide
  MOD_RES (28)..(28): Xaa is C or S
MNNSLQEIVNSSDDYYVVPLPELKTPAXTPKT

SEQ ID NO: 14173 - protein, 26 aa, Artificial Sequence
  Cyclic GFR-binding peptide
KVVMQYNKLVKPTRGVLYLISIASLD

SEQ ID NO: 14174 - protein, 31 aa, Artificial Sequence; identical to SEQ ID NO: 3630
  Cyclic GFR-binding peptide
  MOD_RES (2)..(2): Xaa is C or S

SEQ ID NO: 14175 - protein, 33 aa, Artificial Sequence; identical to SEQ ID NO: 3631
  Cyclic GFR-binding peptide
  MOD_RES (2)..(33): Xaa is C or S

SEQ ID NO: 14176 - protein, 30 aa, Artificial Sequence; identical to SEQ ID NO: 3633
  Cyclic GFR-binding peptide
  MOD_RES (2)..(4): Xaa is C or S

SEQ ID NO: 14177 - protein, 28 aa, Artificial Sequence
  Cyclic GFR-binding peptide
VIMEYQKYIKPTKGIIFLISIPSLDQSV

SEQ ID NO: 14178 - protein, 33 aa, Artificial Sequence
  Cyclic GFR-binding peptide
  MOD_RES (2)..(4): Xaa is C or S
RXGXSEVVMDNSLQEVVNNASDYYLITLPELRT

SEQ ID NO: 14179 - protein, 33 aa, Artificial Sequence; identical to SEQ ID NO: 3636
  Cyclic GFR-binding peptide
  MOD_RES (2)..(33): Xaa is C or S

SEQ ID NO: 14180 - protein, 31 aa, Artificial Sequence; identical to SEQ ID NO: 3637
  Cyclic GFR-binding peptide
  MOD_RES (2)..(2): Xaa is C or S

SEQ ID NO: 14181 - protein, 37 aa, Artificial Sequence; identical to SEQ ID NO: 3642
  Cyclic GFR-binding peptide
  MOD_RES (2)..(34)..(35): Xaa is C or S

SEQ ID NO: 14182 - protein, 28 aa, Artificial Sequence
  Cyclic GFR-binding peptide
  MOD_RES (26)..(27): Xaa is C or S
NSLQEVVKDYEDYYVMPLPELETPVXXA

SEQ ID NO: 14183 - protein, 32 aa, Artificial Sequence
  Cyclic GFR-binding peptide
  MOD_RES (30)..(31): Xaa is C or S
VVMDNSLQEVVKENEDYYLMTLPELETPVXXA

SEQ ID NO: 14184 - protein, 24 aa, Artificial Sequence
  Cyclic GFR-binding peptide
VMDEYQKYVVKENEDIFLMSIPSL

SEQ ID NO: 14185 - protein, 39 aa, Artificial Sequence
  Cyclic GFR-binding peptide
  MOD_RES (2)..(34)..(35): Xaa is C or S
GXSRVVMNNSLQEIVNSSDDYYLVTLPELKTPAXXPKPV

SEQ ID NO: 14186 - protein, 36 aa, Artificial Sequence; identical to SEQ ID NO: 3645
  Cyclic GFR-binding peptide
  MOD_RES (2)..(4)..(35)..(36): Xaa is C or S

SEQ ID NO: 14187 - protein, 40 aa, Artificial Sequence; identical to SEQ ID NO: 3646
  Cyclic GFR-binding peptide
  MOD_RES (2)..(4)..(36)..(37): Xaa is C or S

SEQ ID NO: 14188 - protein, 36 aa, Artificial Sequence
  Cyclic GFR-binding peptide
  MOD_RES (1)..(3)..(35)..(36): Xaa is C or S
XGXARVVMNNSLQEIVNSSDDYYVVPLPELQTPAXX

SEQ ID NO: 14189 - protein, 32 aa, Artificial Sequence; identical to SEQ ID NO: 3648
  Cyclic GFR-binding peptide
  MOD_RES (31)..(32): Xaa is C or S

SEQ ID NO: 14190 - protein, 32 aa, Artificial Sequence
  Cyclic GFR-binding peptide
  MOD_RES (27)..(28): Xaa is C or S
MEYQKYIKPTKGIIFLISIPSLDQSVXXPSAS

SEQ ID NO: 14191 - protein, 33 aa, Artificial Sequence
  Cyclic GFR-binding peptide
  MOD_RES (29)..(30): Xaa is C or S
VMENSLQEVVKDYEDYYLMTLPELETPVXXAKP

SEQ ID NO: 14192 - protein, 28 aa, Artificial Sequence
  Cyclic GFR-binding peptide
VMENSLQEVVKDYEDYYVMPLPELETPV

SEQ ID NO: 14193 - protein, 29 aa, Artificial Sequence
  Cyclic GFR-binding peptide
SKVIMNSLQEIKPTKGIYYLITLPELDQS

SEQ ID NO: 14194 - protein, 28 aa, Artificial Sequence
  Cyclic GFR-binding peptide
  MOD_RES (26)..(27): Xaa is C or S
EYQKYVKPKRGVIFLISIPSLAQPVXXP

SEQ ID NO: 14195 - protein, 26 aa, Artificial Sequence
  Cyclic GFR-binding peptide
RVVMNEYQKYIVNSSDDIFLVSIPSL

SEQ ID NO: 14196 - protein, 32 aa, Artificial Sequence; identical to SEQ ID NO: 3653
  Cyclic GFR-binding peptide
  MOD_RES (1)..(1): Xaa is C or S

SEQ ID NO: 14197 - protein, 35 aa, Artificial Sequence
  Cyclic GFR-binding peptide
  MOD_RES (29)..(30): Xaa is C or S
VMDEYQKYVVKENEDIFLMSIPSLETPVXXAKPIK

SEQ ID NO: 14198 - protein, 41 aa, Artificial Sequence; identical to SEQ ID NO: 3655
  Cyclic GFR-binding peptide
  MOD_RES (1)..(3)..(35)..(36): Xaa is C or S

SEQ ID NO: 14199 - protein, 23 aa, Artificial Sequence
  Cyclic GFR-binding peptide
RYKKLVKPKRGVFYLISIANLAQ

SEQ ID NO: 14200 - protein, 36 aa, Artificial Sequence
  Cyclic GFR-binding peptide
  MOD_RES (2)..(33)..(34): Xaa is C or S
KXSKVVMEYQKYVKPTRGVIFLISIPSLDQPVXXPS

SEQ ID NO: 14201 - protein, 29 aa, Artificial Sequence
  Cyclic GFR-binding peptide
  MOD_RES (27)..(28): Xaa is C or S
DEYQKYVVKENEDIFLMSIPSLETPVXXA

SEQ ID NO: 14202 - protein, 30 aa, Artificial Sequence
  Cyclic GFR-binding peptide
  MOD_RES (28)..(29): Xaa is C or S
IMNSLQEIKPTKGIYYVIPLPELDQSVXXP

SEQ ID NO: 14203 - protein, 34 aa, Artificial Sequence
  Cyclic GFR-binding peptide
  MOD_RES (29)..(29): Xaa is C or S
VMNNSLQEIVNSSDDYYLVTLPELKTPAXTPKTV

SEQ ID NO: 14204 - protein, 26 aa, Artificial Sequence
  Cyclic GFR-binding peptide
VVMNRYKKLIVNSSDDFYLVSIANLQ

SEQ ID NO: 14205 - protein, 27 aa, Artificial Sequence
  Cyclic GFR-binding peptide
VVMEYQKYVKPTRGVIFLISIPSLDQP

SEQ ID NO: 14206 - protein, 32 aa, Artificial Sequence
  Cyclic GFR-binding peptide
  MOD_RES (29)..(30): Xaa is C or S
VIMEYQKYIKPTKGIIFLISIPSLDQSVXXPS

SEQ ID NO: 14207 - protein, 28 aa, Artificial Sequence
  Cyclic GFR-binding peptide
GEVVMDQYNKLVVKENEDLYLMSIASLE

SEQ ID NO: 14208 - protein, 33 aa, Artificial Sequence
  Cyclic GFR-binding peptide
  MOD_RES (2)..(2): Xaa is C or S
GXARVVMNNSLQEIVNSSDDYYLVTLPELQTPA

SEQ ID NO: 14209 - protein, 24 aa, Artificial Sequence
  Cyclic GFR-binding peptide
VVMENSLQEVVKDYEDYYLMTLPE

SEQ ID NO: 14210 - protein, 28 aa, Artificial Sequence
  Cyclic GFR-binding peptide
  MOD_RES (1)..(1): Xaa is C or S
XSEVVMDNSLQEVVNNASDYYLITLPEL

SEQ ID NO: 14211 - protein, 26 aa, Artificial Sequence
  Cyclic GFR-binding peptide
VVMQYNKLVKPTRGVLYLISIASLDQ

SEQ ID NO: 14212 - protein, 26 aa, Artificial Sequence
  Cyclic GFR-binding peptide
MDEYQKYVVKENEDIFLMSIPSLETP

SEQ ID NO: 14213 - protein, 27 aa, Artificial Sequence
  Cyclic GFR-binding peptide
MDEYQKYVVKENEDIFLMSIPSLETPV

SEQ ID NO: 14214 - protein, 24 aa, Artificial Sequence
  Cyclic GFR-binding peptide
RYKKLIVNSSDDFYLVSIANLKTP

SEQ ID NO: 14215 - protein, 30 aa, Artificial Sequence
  Cyclic GFR-binding peptide
  MOD_RES (26)..(27): Xaa is C or S
NSLQEIVNSSDDYYVVPLPELKTPAXXPKP

SEQ ID NO: 14216 - protein, 25 aa, Artificial Sequence
  Cyclic GFR-binding peptide
QYNKLVKPKRGVLYLISIASLAQPV

SEQ ID NO: 14217 - protein, 22 aa, Artificial Sequence
  Cyclic GFR-binding peptide
QYNKLVKPKRGVLYLISIASLA

SEQ ID NO: 14218 - protein, 31 aa, Artificial Sequence
  Cyclic GFR-binding peptide
  MOD_RES (2)..(2): Xaa is C or S
GXSRVVMNNSLQEIVNSSDDYYVVPLPELKT

SEQ ID NO: 14219 - protein, 38 aa, Artificial Sequence; identical to SEQ ID NO: 3683
  Cyclic GFR-binding peptide
  MOD_RES (1)..(33)..(34): Xaa is C or S

SEQ ID NO: 14220 - protein, 33 aa, Artificial Sequence
  Cyclic GFR-binding peptide
  MOD_RES (29)..(30): Xaa is C or S
VMDEYQKYVVKENEDIFLMSIPSLETPVXXAKP

SEQ ID NO: 14221 - protein, 28 aa, Artificial Sequence
  Cyclic GFR-binding peptide
KVIMNSLQEIKPTKGIYYLITLPELDQS

SEQ ID NO: 14222 - protein, 37 aa, Artificial Sequence
  Cyclic GFR-binding peptide
  MOD_RES (2)..(34)..(35): Xaa is C or S
GXARVVMNEYQKYIVNSSDDIFLVSIPSLQTPAXXPK

SEQ ID NO: 14223 - protein, 31 aa, Artificial Sequence
  Cyclic GFR-binding peptide
  MOD_RES (2)..(2): Xaa is C or S
GXGEVVMENSLQEVVKDYEDYYVMPLPELET

SEQ ID NO: 14224 - protein, 28 aa, Artificial Sequence
  Cyclic GFR-binding peptide
  MOD_RES (1)..(3): Xaa is C or S
XKXSRVIMRYKKLVKPKRGVFYLISIAN

SEQ ID NO: 14225 - protein, 24 aa, Artificial Sequence
  Cyclic GFR-binding peptide
IMQYNKLVKPKRGVLYLISIASLA

SEQ ID NO: 14226 - protein, 27 aa, Artificial Sequence
  Cyclic GFR-binding peptide
VMENSLQEVVKDYEDYYLMTLPELETP

SEQ ID NO: 14227 - protein, 29 aa, Artificial Sequence
  Cyclic GFR-binding peptide
  MOD_RES (26)..(27): Xaa is C or S
QYNKLVVNNASDLYLISIASLRTPVXXTP

SEQ ID NO: 14228 - protein, 21 aa, Artificial Sequence
  Cyclic GFR-binding peptide
QYNKLVVKENEDLYLMSIASL

SEQ ID NO: 14229 - protein, 27 aa, Artificial Sequence
  Cyclic GFR-binding peptide
VIMNSLQEIKPTKGIYYLITLPELDQS

SEQ ID NO: 14230 - protein, 26 aa, Artificial Sequence
  Cyclic GFR-binding peptide
  MOD_RES (26)..(26): Xaa is C or S
EYQKYVVKENEDIFLMSIPSLETPVX

SEQ ID NO: 14231 - protein, 32 aa, Artificial Sequence; identical to SEQ ID NO: 3707
  Cyclic GFR-binding peptide
  MOD_RES (28)..(28): Xaa is C or S

SEQ ID NO: 14232 - protein, 32 aa, Artificial Sequence; identical to SEQ ID NO: 3708
  Cyclic GFR-binding peptide
  MOD_RES (2)..(4): Xaa is C or S

SEQ ID NO: 14233 - protein, 23 aa, Artificial Sequence
  Cyclic GFR-binding peptide
IMNSLQEVKPKRGVYYLITLPEL

SEQ ID NO: 14234 - protein, 25 aa, Artificial Sequence
  Cyclic GFR-binding peptide
RVVMNEYQKYIVNSSDDIFLVSIPS

SEQ ID NO: 14235 - protein, 32 aa, Artificial Sequence
  Cyclic GFR-binding peptide
  MOD_RES (31)..(32): Xaa is C or S
RVVMNNSLQEIVNSSDDYYVVPLPELKTPAXX

SEQ ID NO: 14236 - protein, 36 aa, Artificial Sequence
  Cyclic GFR-binding peptide
  MOD_RES (2)..(34)..(35): Xaa is C or S
GXARVVMNNSLQEIVNSSDDYYLVTLPELQTPAXXP

SEQ ID NO: 14237 - protein, 34 aa, Artificial Sequence; identical to SEQ ID NO: 3711
  Cyclic GFR-binding peptide
  MOD_RES (1)..(32)..(33): Xaa is C or S

SEQ ID NO: 14238 - protein, 34 aa, Artificial Sequence
  Cyclic GFR-binding peptide
  MOD_RES (1)..(3): Xaa is C or S
XGXGEVVMDNSLQEVVKENEDYYVMPLPELETPV

SEQ ID NO: 14239 - protein, 35 aa, Artificial Sequence; identical to SEQ ID NO: 3715
  Cyclic GFR-binding peptide
  MOD_RES (29)..(30): Xaa is C or S

SEQ ID NO: 14240 - protein, 37 aa, Artificial Sequence
  Cyclic GFR-binding peptide
  MOD_RES (31)..(32): Xaa is C or S
EVVMENSLQEVVKDYEDYYVMPLPELETPVXXAKPIS

SEQ ID NO: 14241 - protein, 28 aa, Artificial Sequence
  Cyclic GFR-binding peptide
SEVVMDNSLQEVVNNASDYYLITLPELR

SEQ ID NO: 14242 - protein, 36 aa, Artificial Sequence; identical to SEQ ID NO: 3718
  Cyclic GFR-binding peptide
  MOD_RES (31)..(32): Xaa is C or S

SEQ ID NO: 14243 - protein, 33 aa, Artificial Sequence
  Cyclic GFR-binding peptide
  MOD_RES (31)..(32): Xaa is C or S
SKVIMNSLQEIKPTKGIYYVIPLPELDQSVXXP

SEQ ID NO: 14244 - protein, 34 aa, Artificial Sequence
  Cyclic GFR-binding peptide
  MOD_RES (30)..(31): Xaa is C or S
KVIMEYQKYIKPTKGIIFLISIPSLDQSVXXPSA

SEQ ID NO: 14245 - protein, 28 aa, Artificial Sequence
  Cyclic GFR-binding peptide
VIMNSLQEIKPTKGIYYVIPLPELDQSV

SEQ ID NO: 14246 - protein, 26 aa, Artificial Sequence
  Cyclic GFR-binding peptide
EVVMDEYQKYVVKENEDIFLMSIPSL

SEQ ID NO: 14247 - protein, 38 aa, Artificial Sequence
  Cyclic GFR-binding peptide
  MOD_RES (2)..(4)..(35)..(36): Xaa is C or S
SXKXSKVIMNSLQEIKPTKGIYYVIPLPELDQSVXXPS

SEQ ID NO: 14248 - protein, 31 aa, Artificial Sequence
  Cyclic GFR-binding peptide
  MOD_RES (26)..(27): Xaa is C or S
NSLQEIVNSSDDYYVVPLPELKTPAXXPKPV

SEQ ID NO: 14249 - protein, 28 aa, Artificial Sequence
  Cyclic GFR-binding peptide
  MOD_RES (28)..(28): Xaa is C or S
IMEYQKYVKPKRGVIFLISIPSLAQPVX

SEQ ID NO: 14250 - protein, 35 aa, Artificial Sequence
  Cyclic GFR-binding peptide
  MOD_RES (30)..(31): Xaa is C or S
VVMNNSLQEIVNSSDDYYLVTLPELQTPAXXPKPV

SEQ ID NO: 14251 - protein, 35 aa, Artificial Sequence; identical to SEQ ID NO: 3727
  Cyclic GFR-binding peptide
  MOD_RES (30)..(31): Xaa is C or S

SEQ ID NO: 14252 - protein, 30 aa, Artificial Sequence; identical to SEQ ID NO: 3730
  Cyclic GFR-binding peptide
  MOD_RES (2)..(2): Xaa is C or S

SEQ ID NO: 14253 - protein, 34 aa, Artificial Sequence
  Cyclic GFR-binding peptide
  MOD_RES (31)..(32): Xaa is C or S
EVVMENSLQEVVKDYEDYYLMTLPELETPVXXAK

SEQ ID NO: 14254 - protein, 23 aa, Artificial Sequence
  Cyclic GFR-binding peptide
VMNNSLQEIVNSSDDYYLVTLPE

SEQ ID NO: 14255 - protein, 30 aa, Artificial Sequence; identical to SEQ ID NO: 3732
  Cyclic GFR-binding peptide
  MOD_RES (28)..(29): Xaa is C or S

SEQ ID NO: 14256 - protein, 26 aa, Artificial Sequence
  Cyclic GFR-binding peptide
MDRYKKLVVNNASDFYLISIANLRTP

SEQ ID NO: 14257 - protein, 22 aa, Artificial Sequence
  Cyclic GFR-binding peptide
DQYNKLVVKENEDLYLMSIASL

SEQ ID NO: 14258 - protein, 27 aa, Artificial Sequence
  Cyclic GFR-binding peptide
  MOD_RES (27)..(27): Xaa is C or S
MQYNKLVKPKRGVLYLISIASLAQPVX

SEQ ID NO: 14259 - protein, 36 aa, Artificial Sequence
  Cyclic GFR-binding peptide
  MOD_RES (30)..(31): Xaa is C or S
VVMNEYQKYIVNSSDDIFLVSIPSLQTPAXXPKPVT

SEQ ID NO: 14260 - protein, 36 aa, Artificial Sequence
  Cyclic GFR-binding peptide
  MOD_RES (31)..(32): Xaa is C or S
SKVVMNSLQEVKPTRGVYYVIPLPELDQPVXXPSAS

SEQ ID NO: 14261 - protein, 28 aa, Artificial Sequence
  Cyclic GFR-binding peptide
  MOD_RES (28)..(28): Xaa is C or S
MDNSLQEVVNNASDYYLITLPELRTPVX

SEQ ID NO: 14262 - protein, 37 aa, Artificial Sequence
  Cyclic GFR-binding peptide
  MOD_RES (2)..(34)..(35): Xaa is C or S
GXSEVVMDNSLQEVVNNASDYYLITLPELRTPVXXTP

SEQ ID NO: 14263 - protein, 33 aa, Artificial Sequence
  Cyclic GFR-binding peptide
  MOD_RES (28)..(29): Xaa is C or S
MDQYNKLVVNNASDLYLISIASLRTPVXXTPPT

SEQ ID NO: 14264 - protein, 34 aa, Artificial Sequence
  Cyclic GFR-binding peptide
  MOD_RES (1)..(3): Xaa is C or S
XGXGEVVMDEYQKYVVKENEDIFLMSIPSLETPV

SEQ ID NO: 14265 - protein, 28 aa, Artificial Sequence
  Cyclic GFR-binding peptide
  MOD_RES (28)..(28): Xaa is C or S
MNRYKKLIVNSSDDFYLVSIANLKTPAX

SEQ ID NO: 14266 - protein, 27 aa, Artificial Sequence
  Cyclic GFR-binding peptide
SKVIMEYQKYIKPTKGIIFLISIPSLD

SEQ ID NO: 14267 - protein, 35 aa, Artificial Sequence
  Cyclic GFR-binding peptide
  MOD_RES (31)..(31): Xaa is C or S
RVVMNEYQKYIVNSSDDIFLVSIPSLKTPAXTPKT

SEQ ID NO: 14268 - protein, 30 aa, Artificial Sequence
  Cyclic GFR-binding peptide
EVVMDNSLQEVVNNASDYYLITLPELRTPV

SEQ ID NO: 14269 - protein, 35 aa, Artificial Sequence
  Cyclic GFR-binding peptide
  MOD_RES (2)..(4): Xaa is C or S
RXGXSEVVMDRYKKLVVNNASDFYLISIANLRTPV

SEQ ID NO: 14270 - protein, 33 aa, Artificial Sequence
  Cyclic GFR-binding peptide
  MOD_RES (29)..(29): Xaa is C or S
VMNNSLQEIVNSSDDYYLVTLPELKTPAXTPKT

SEQ ID NO: 14271 - protein, 36 aa, Artificial Sequence; identical to SEQ ID NO: 3755
  Cyclic GFR-binding peptide
  MOD_RES (2)..(34): Xaa is C or S

SEQ ID NO: 14272 - protein, 40 aa, Artificial Sequence; identical to SEQ ID NO: 3760
  Cyclic GFR-binding peptide
  MOD_RES (2)..(34)..(35): Xaa is C or S

SEQ ID NO: 14273 - protein, 30 aa, Artificial Sequence
  Cyclic GFR-binding peptide
  MOD_RES (26)..(27): Xaa is C or S
NSLQEVVNNASDYYVIPLPELRTPVXXTPP

SEQ ID NO: 14274 - protein, 31 aa, Artificial Sequence
  Cyclic GFR-binding peptide
  MOD_RES (2)..(4): Xaa is C or S
RXGXGEVVMDEYQKYVVKENEDIFLMSIPSL

SEQ ID NO: 14275 - protein, 37 aa, Artificial Sequence; identical to SEQ ID NO: 3765
  Cyclic GFR-binding peptide
  MOD_RES (2)..(34)..(35): Xaa is C or S

SEQ ID NO: 14276 - protein, 33 aa, Artificial Sequence; identical to SEQ ID NO: 3768
  Cyclic GFR-binding peptide
  MOD_RES (29)..(30): Xaa is C or S

SEQ ID NO: 14277 - protein, 32 aa, Artificial Sequence
  Cyclic GFR-binding peptide
  MOD_RES (28)..(29): Xaa is C or S
MDNSLQEVVNNASDYYLITLPELRTPVXXTPP

SEQ ID NO: 14278 - protein, 39 aa, Artificial Sequence
  Cyclic GFR-binding peptide
  MOD_RES (2)..(33)..(34): Xaa is C or S
KXSKVIMNSLQEIKPTKGIYYVIPLPELDQSVXXPSASA

SEQ ID NO: 14279 - protein, 28 aa, Artificial Sequence
  Cyclic GFR-binding peptide
VIMNSLQEVKPKRGVYYLITLPELAQPV

SEQ ID NO: 14280 - protein, 33 aa, Artificial Sequence; identical to SEQ ID NO: 3772
  Cyclic GFR-binding peptide
  MOD_RES (1)..(3): Xaa is C or S

SEQ ID NO: 14281 - protein, 37 aa, Artificial Sequence
  Cyclic GFR-binding peptide
  MOD_RES (2)..(33)..(34): Xaa is C or S
KXSRVIMEYQKYVKPKRGVIFLISIPSLAQPVXXPAA

SEQ ID NO: 14282 - protein, 30 aa, Artificial Sequence; identical to SEQ ID NO: 3773
  Cyclic GFR-binding peptide
  MOD_RES (2)..(2): Xaa is C or S

SEQ ID NO: 14283 - protein, 25 aa, Artificial Sequence
  Cyclic GFR-binding peptide
MNNSLQEIVNSSDDYYLVTLPELQT

SEQ ID NO: 14284 - protein, 34 aa, Artificial Sequence; identical to SEQ ID NO: 3777
  Cyclic GFR-binding peptide
  MOD_RES (28)..(29): Xaa is C or S

SEQ ID NO: 14285 - protein, 28 aa, Artificial Sequence
  Cyclic GFR-binding peptide
VVMRYKKLVKPTRGVFYLISIANLDQPV

SEQ ID NO: 14286 - protein, 24 aa, Artificial Sequence
  Cyclic GFR-binding peptide
MNQYNKLIVNSSDDLYLVSIASLK

SEQ ID NO: 14287 - protein, 33 aa, Artificial Sequence; identical to SEQ ID NO: 3782
  Cyclic GFR-binding peptide
  MOD_RES (27)..(28): Xaa is C or S

SEQ ID NO: 14288 - protein, 29 aa, Artificial Sequence
  Cyclic GFR-binding peptide
  MOD_RES (26)..(27): Xaa is C or S
NSLQEIKPTKGIYYVIPLPELDQSVXXPS

SEQ ID NO: 14289 - protein, 21 aa, Artificial Sequence
  Cyclic GFR-binding peptide
QYNKLIKPTKGILYLISIASL

SEQ ID NO: 14290 - protein, 27 aa, Artificial Sequence
  Cyclic GFR-binding peptide
SKVVMRYKKLVKPTRGVFYLISIANLD

SEQ ID NO: 14291 - protein, 24 aa, Artificial Sequence
  Cyclic GFR-binding peptide
MDQYNKLVVNNASDLYLISIASLR

SEQ ID NO: 14292 - protein, 31 aa, Artificial Sequence; identical to SEQ ID NO: 3787
  Cyclic GFR-binding peptide
  MOD_RES (26)..(27): Xaa is C or S

SEQ ID NO: 14293 - protein, 35 aa, Artificial Sequence
  Cyclic GFR-binding peptide
  MOD_RES (32)..(33): Xaa is C or S
SRVVMNNSLQEIVNSSDDYYLVTLPELKTPAXXPK

SEQ ID NO: 14294 - protein, 36 aa, Artificial Sequence
  Cyclic GFR-binding peptide
  MOD_RES (30)..(30): Xaa is C or S
VVMNNSLQEIVNSSDDYYVVPLPELKTPAXTPKTVH

SEQ ID NO: 14295 - protein, 33 aa, Artificial Sequence
  Cyclic GFR-binding peptide
  MOD_RES (2)..(4): Xaa is C or S
RXGXGEVVMEEYQKYVVKDYEDIFLMSIPSLET

SEQ ID NO: 14296 - protein, 28 aa, Artificial Sequence
  Cyclic GFR-binding peptide
  MOD_RES (27)..(28): Xaa is C or S
DQYNKLVVNNASDLYLISIASLRTPVXX

SEQ ID NO: 14297 - protein, 36 aa, Artificial Sequence
  Cyclic GFR-binding peptide
  MOD_RES (31)..(32): Xaa is C or S
SRVIMNSLQEVKPKRGVYYLITLPELAQPVXXPAAS

SEQ ID NO: 14298 - protein, 35 aa, Artificial Sequence; identical to SEQ ID NO: 3792
  Cyclic GFR-binding peptide
  MOD_RES (2)..(34)..(35): Xaa is C or S

SEQ ID NO: 14299 - protein, 36 aa, Artificial Sequence
  Cyclic GFR-binding peptide
  MOD_RES (30)..(31): Xaa is C or S
VVMEEYQKYVVKDYEDIFLMSIPSLETPVXXAKPIS

SEQ ID NO: 14300 - protein, 34 aa, Artificial Sequence
  Cyclic GFR-binding peptide
  MOD_RES (2)..(4): Xaa is C or S
HXGXSRVVMNEYQKYIVNSSDDIFLVSIPSLKTP

SEQ ID NO: 14301 - protein, 33 aa, Artificial Sequence
  Cyclic GFR-binding peptide
  MOD_RES (28)..(28): Xaa is C or S
MNEYQKYIVNSSDDIFLVSIPSLKTPAXTPKTV

SEQ ID NO: 14302 - protein, 25 aa, Artificial Sequence
  Cyclic GFR-binding peptide
IMRYKKLVKPKRGVFYLISIANLAQ

SEQ ID NO: 14303 - protein, 38 aa, Artificial Sequence
  Cyclic GFR-binding peptide
  MOD_RES (32)..(33): Xaa is C or S
SEVVMDNSLQEVVNNASDYYLITLPELRTPVXXTPPTS

SEQ ID NO: 14304 - protein, 25 aa, Artificial Sequence
  Cyclic GFR-binding peptide
VVMENSLQEVVKDYEDYYLMTLPEL

SEQ ID NO: 14305 - protein, 32 aa, Artificial Sequence; identical to SEQ ID NO: 3796
  Cyclic GFR-binding peptide
  MOD_RES (1)..(3): Xaa is C or S

SEQ ID NO: 14306 - protein, 41 aa, Artificial Sequence
  Cyclic GFR-binding peptide
  MOD_RES (2)..(4)..(35)..(36): Xaa is C or S
SXKXSRVIMNSLQEVKPKRGVYYLITLPELAQPVXXPAASA

SEQ ID NO: 14307 - protein, 40 aa, Artificial Sequence; identical to SEQ ID NO: 3799
  Cyclic GFR-binding peptide
  MOD_RES (2)..(4)..(36)..(37): Xaa is C or S

SEQ ID NO: 14308 - protein, 34 aa, Artificial Sequence; identical to SEQ ID NO: 3801
  Cyclic GFR-binding peptide
  MOD_RES (2)..(34): Xaa is C or S

SEQ ID NO: 14309 - protein, 28 aa, Artificial Sequence
  Cyclic GFR-binding peptide
VMDNSLQEVVNNASDYYLITLPELRTPV

SEQ ID NO: 14310 - protein, 22 aa, Artificial Sequence
  Cyclic GFR-binding peptide
NSLQEIVNSSDDYYVVPLPELQ

SEQ ID NO: 14311 - protein, 32 aa, Artificial Sequence
  Cyclic GFR-binding peptide
  MOD_RES (1)..(1): Xaa is C or S
XGEVVMDNSLQEVVKENEDYYVMPLPELETPV

SEQ ID NO: 14312 - protein, 35 aa, Artificial Sequence; identical to SEQ ID NO: 3803
  Cyclic GFR-binding peptide
  MOD_RES (2)..(33)..(34): Xaa is C or S

SEQ ID NO: 14313 - protein, 35 aa, Artificial Sequence; identical to SEQ ID NO: 3805
  Cyclic GFR-binding peptide
  MOD_RES (1)..(3)..(34)..(35): Xaa is C or S

SEQ ID NO: 14314 - protein, 32 aa, Artificial Sequence
  Cyclic GFR-binding peptide
  MOD_RES (32)..(32): Xaa is C or S
ARVVMNNSLQEIVNSSDDYYVVPLPELQTPAX

SEQ ID NO: 14315 - protein, 29 aa, Artificial Sequence
  Cyclic GFR-binding peptide
RVVMNNSLQEIVNSSDDYYVVPLPELQTP

SEQ ID NO: 14316 - protein, 28 aa, Artificial Sequence
  Cyclic GFR-binding peptide
  MOD_RES (2)..(2): Xaa is C or S
GXARVVMNQYNKLIVNSSDDLYLVSIAS

SEQ ID NO: 14317 - protein, 39 aa, Artificial Sequence
  Cyclic GFR-binding peptide
  MOD_RES (2)..(4)..(36)..(37): Xaa is C or S
HXGXSRVVMNNSLQEIVNSSDDYYVVPLPELKTPAXXPK

SEQ ID NO: 14318 - protein, 38 aa, Artificial Sequence
  Cyclic GFR-binding peptide
  MOD_RES (1)..(32)..(33): Xaa is C or S
XSKVIMNSLQEIKPTKGIYYLITLPELDQSVXXPSASA

SEQ ID NO: 14319 - protein, 29 aa, Artificial Sequence
  Cyclic GFR-binding peptide
  MOD_RES (29)..(29): Xaa is C or S
VVMQYNKLVKPTRGVLYLISIASLDQPVX

SEQ ID NO: 14320 - protein, 31 aa, Artificial Sequence
  Cyclic GFR-binding peptide
  MOD_RES (29)..(29): Xaa is C or S
VMNNSLQEIVNSSDDYYLVTLPELKTPAXTP

SEQ ID NO: 14321 - protein, 33 aa, Artificial Sequence; identical to SEQ ID NO: 3813
  Cyclic GFR-binding peptide
  MOD_RES (31)..(32): Xaa is C or S

SEQ ID NO: 14322 - protein, 33 aa, Artificial Sequence; identical to SEQ ID NO: 3814
  Cyclic GFR-binding peptide
  MOD_RES (31)..(32): Xaa is C or S

SEQ ID NO: 14323 - protein, 24 aa, Artificial Sequence
  Cyclic GFR-binding peptide
VMDNSLQEVVKENEDYYVMPLPEL

SEQ ID NO: 14324 - protein, 25 aa, Artificial Sequence
  Cyclic GFR-binding peptide
NSLQEVVNNASDYYLITLPELRTPV

SEQ ID NO: 14325 - protein, 32 aa, Artificial Sequence
  Cyclic GFR-binding peptide
  MOD_RES (30)..(31): Xaa is C or S
VVMDNSLQEVVNNASDYYVIPLPELRTPVXXT

SEQ ID NO: 14326 - protein, 24 aa, Artificial Sequence
  Cyclic GFR-binding peptide
DQYNKLVVKENEDLYLMSIASLET

SEQ ID NO: 14327 - protein, 24 aa, Artificial Sequence
  Cyclic GFR-binding peptide
VMEQYNKLVVKDYEDLYLMSIASL

SEQ ID NO: 14328 - protein, 38 aa, Artificial Sequence
  Cyclic GFR-binding peptide
  MOD_RES (2)..(4)..(36)..(37): Xaa is C or S
HXGXSRVVMNEYQKYIVNSSDDIFLVSIPSLKTPAXXP

SEQ ID NO: 14329 - protein, 40 aa, Artificial Sequence
  Cyclic GFR-binding peptide
  MOD_RES (2)..(4)..(36)..(37): Xaa is C or S
RXGXSEVVMDQYNKLVVNNASDLYLISIASLRTPVXXTPP

SEQ ID NO: 14330 - protein, 33 aa, Artificial Sequence; identical to SEQ ID NO: 3821
  Cyclic GFR-binding peptide
  MOD_RES (28)..(29): Xaa is C or S

SEQ ID NO: 14331 - protein, 36 aa, Artificial Sequence
  Cyclic GFR-binding peptide
  MOD_RES (30)..(31): Xaa is C or S
VVMDNSLQEVVNNASDYYVIPLPELRTPVXXTPPTS

SEQ ID NO: 14332 - protein, 34 aa, Artificial Sequence
  Cyclic GFR-binding peptide
  MOD_RES (1)..(3): Xaa is C or S
XGXGEVVMENSLQEVVKDYEDYYLMTLPELETPV

SEQ ID NO: 14333 - protein, 34 aa, Artificial Sequence
  Cyclic GFR-binding peptide
  MOD_RES (1)..(32)..(33): Xaa is C or S
XSRVIMEYQKYVKPKRGVIFLISIPSLAQPVXXP

SEQ ID NO: 14334 - protein, 33 aa, Artificial Sequence; identical to SEQ ID NO: 3824
  Cyclic GFR-binding peptide
  MOD_RES (31)..(32): Xaa is C or S

SEQ ID NO: 14335 - protein, 36 aa, Artificial Sequence
  Cyclic GFR-binding peptide
  MOD_RES (1)..(3)..(34)..(35): Xaa is C or S
XKXSKVVMNSLQEVKPTRGVYYVIPLPELDQPVXXP

SEQ ID NO: 14336 - protein, 38 aa, Artificial Sequence; identical to SEQ ID NO: 3825
  Cyclic GFR-binding peptide
  MOD_RES (2)..(33)..(34): Xaa is C or S

SEQ ID NO: 14337 - protein, 42 aa, Artificial Sequence
  Cyclic GFR-binding peptide
  MOD_RES (2)..(4)..(36)..(37): Xaa is C or S
HXGXARVVMNNSLQEIVNSSDDYYLVTLPELQTPAXXPKPVT

SEQ ID NO: 14338 - protein, 27 aa, Artificial Sequence
  Cyclic GFR-binding peptide
  MOD_RES (27)..(27): Xaa is C or S
ENSLQEVVKDYEDYYLMTLPELETPVX

SEQ ID NO: 14339 - protein, 25 aa, Artificial Sequence
  Cyclic GFR-binding peptide
VVMERYKKLVVKDYEDFYLMSIANL

SEQ ID NO: 14340 - protein, 33 aa, Artificial Sequence
  Cyclic GFR-binding peptide
  MOD_RES (2)..(4): Xaa is C or S
RXGXSEVVMDNSLQEVVNNASDYYVIPLPELRT

SEQ ID NO: 14341 - protein, 25 aa, Artificial Sequence
  Cyclic GFR-binding peptide
KVVMRYKKLVKPTRGVFYLISIANL

SEQ ID NO: 14342 - protein, 23 aa, Artificial Sequence
  Cyclic GFR-binding peptide
QYNKLIVNSSDDLYLVSIASLKT

SEQ ID NO: 14343 - protein, 37 aa, Artificial Sequence
  Cyclic GFR-binding peptide
  MOD_RES (31)..(31): Xaa is C or S
RVVMNEYQKYIVNSSDDIFLVSIPSLKTPAXTPKTVH

SEQ ID NO: 14344 - protein, 20 aa, Artificial Sequence
  Cyclic GFR-binding peptide
NSLQEIVNSSDDYYVVPLPE

SEQ ID NO: 14345 - protein, 38 aa, Artificial Sequence
  Cyclic GFR-binding peptide
  MOD_RES (2)..(4)..(36)..(37): Xaa is C or S
RXGXGEVVMDNSLQEVVKENEDYYVMPLPELETPVXXA

SEQ ID NO: 14346 - protein, 29 aa, Artificial Sequence
  Cyclic GFR-binding peptide
  MOD_RES (29)..(29): Xaa is C or S
VMNNSLQEIVNSSDDYYVVPLPELQTPAX

SEQ ID NO: 14347 - protein, 23 aa, Artificial Sequence
  Cyclic GFR-binding peptide
MEYQKYVKPTRGVIFLISIPSLD

SEQ ID NO: 14348 - protein, 38 aa, Artificial Sequence
  Cyclic GFR-binding peptide
  MOD_RES (32)..(33): Xaa is C or S
GEVVMDEYQKYVVKENEDIFLMSIPSLETPVXXAKPIK

SEQ ID NO: 14349 - protein, 33 aa, Artificial Sequence; identical to SEQ ID NO: 3842
  Cyclic GFR-binding peptide
  MOD_RES (1)..(32)..(33): Xaa is C or S

SEQ ID NO: 14350 - protein, 27 aa, Artificial Sequence
  Cyclic GFR-binding peptide
  MOD_RES (26)..(26): Xaa is C or S
NSLQEIVNSSDDYYVVPLPELKTPAXT

SEQ ID NO: 14351 - protein, 31 aa, Artificial Sequence
  Cyclic GFR-binding peptide
ARVVMNEYQKYIVNSSDDIFLVSIPSLQTPA

SEQ ID NO: 14352 - protein, 32 aa, Artificial Sequence
  Cyclic GFR-binding peptide
  MOD_RES (26)..(27): Xaa is C or S
NSLQEIVNSSDDYYLVTLPELKTPAXXPKPVY

SEQ ID NO: 14353 - protein, 32 aa, Artificial Sequence
  Cyclic GFR-binding peptide
  MOD_RES (30)..(31): Xaa is C or S
VVMNEYQKYIVNSSDDIFLVSIPSLQTPAXXP

SEQ ID NO: 14354 - protein, 20 aa, Artificial Sequence
  Cyclic GFR-binding peptide
NSLQEVVNNASDYYLITLPE

SEQ ID NO: 14355 - protein, 36 aa, Artificial Sequence
  Cyclic GFR-binding peptide
  MOD_RES (1)..(33)..(34): Xaa is C or S
XGEVVMDEYQKYVVKENEDIFLMSIPSLETPVXXAK

SEQ ID NO: 14356 - protein, 25 aa, Artificial Sequence
  Cyclic GFR-binding peptide
VIMNSLQEVKPKRGVYYLITLPELA

SEQ ID NO: 14357 - protein, 32 aa, Artificial Sequence; identical to SEQ ID NO: 3849
  Cyclic GFR-binding peptide
  MOD_RES (2)..(4): Xaa is C or S

SEQ ID NO: 14358 - protein, 30 aa, Artificial Sequence
  Cyclic GFR-binding peptide
  MOD_RES (26)..(27): Xaa is C or S
NSLQEVVKENEDYYLMTLPELETPVXXAKP

SEQ ID NO: 14359 - protein, 32 aa, Artificial Sequence; identical to SEQ ID NO: 3853
  Cyclic GFR-binding peptide
  MOD_RES (2)..(2): Xaa is C or S

SEQ ID NO: 14360 - protein, 38 aa, Artificial Sequence; identical to SEQ ID NO: 3857
  Cyclic GFR-binding peptide
  MOD_RES (2)..(34)..(35): Xaa is C or S

SEQ ID NO: 14361 - protein, 36 aa, Artificial Sequence
  Cyclic GFR-binding peptide
  MOD_RES (1)..(3)..(35): Xaa is C or S
XGXSRVVMNNSLQEIVNSSDDYYVVPLPELKTPAXT

SEQ ID NO: 14362 - protein, 24 aa, Artificial Sequence
  Cyclic GFR-binding peptide
MNNSLQEIVNSSDDYYVVPLPELK

SEQ ID NO: 14363 - protein, 39 aa, Artificial Sequence; identical to SEQ ID NO: 3858
  Cyclic GFR-binding peptide
  MOD_RES (2)..(4)..(35)..(36): Xaa is C or S

SEQ ID NO: 14364 - protein, 33 aa, Artificial Sequence
  Cyclic GFR-binding peptide
  MOD_RES (29)..(30): Xaa is C or S
VMDNSLQEVVKENEDYYVMPLPELETPVXXAKP

SEQ ID NO: 14365 - protein, 29 aa, Artificial Sequence
  Cyclic GFR-binding peptide
  MOD_RES (2)..(2): Xaa is C or S
GXARVVMNNSLQEIVNSSDDYYVVPLPEL

SEQ ID NO: 14366 - protein, 23 aa, Artificial Sequence
  Cyclic GFR-binding peptide
MNSLQEIKPTKGIYYVIPLPELD

SEQ ID NO: 14367 - protein, 31 aa, Artificial Sequence; identical to SEQ ID NO: 3860
  Cyclic GFR-binding peptide
  MOD_RES (1)..(1): Xaa is C or S

SEQ ID NO: 14368 - protein, 33 aa, Artificial Sequence
  Cyclic GFR-binding peptide
  MOD_RES (28)..(29): Xaa is C or S
MDNSLQEVVNNASDYYVIPLPELRTPVXXTPPT

SEQ ID NO: 14369 - protein, 35 aa, Artificial Sequence; identical to SEQ ID NO: 3862
  Cyclic GFR-binding peptide
  MOD_RES (29)..(30): Xaa is C or S

SEQ ID NO: 14370 - protein, 32 aa, Artificial Sequence
  Cyclic GFR-binding peptide
  MOD_RES (2)..(2): Xaa is C or S
GXSEVVMDNSLQEVVNNASDYYLITLPELRTP

SEQ ID NO: 14371 - protein, 32 aa, Artificial Sequence
  Cyclic GFR-binding peptide
  MOD_RES (29)..(30): Xaa is C or S
VIMNSLQEIKPTKGIYYVIPLPELDQSVXXPS

SEQ ID NO: 14372 - protein, 32 aa, Artificial Sequence
  Cyclic GFR-binding peptide
  MOD_RES (2)..(4): Xaa is C or S
HXGXARVVMNEYQKYIVNSSDDIFLVSIPSLQ

SEQ ID NO: 14373 - protein, 27 aa, Artificial Sequence
  Cyclic GFR-binding peptide
  MOD_RES (26)..(27): Xaa is C or S
RYKKLVKPKRGVFYLISIANLAQPVXX

SEQ ID NO: 14374 - protein, 37 aa, Artificial Sequence
  Cyclic GFR-binding peptide
  MOD_RES (2)..(4)..(36)..(37): Xaa is C or S
RXGXSEVVMDQYNKLVVNNASDLYLISIASLRTPVXX

SEQ ID NO: 14375 - protein, 31 aa, Artificial Sequence
  Cyclic GFR-binding peptide
  MOD_RES (31)..(31): Xaa is C or S
SRVIMEYQKYVKPKRGVIFLISIPSLAQPVX

SEQ ID NO: 14376 - protein, 39 aa, Artificial Sequence; identical to SEQ ID NO: 3874
  Cyclic GFR-binding peptide
  MOD_RES (2)..(34)..(35): Xaa is C or S

SEQ ID NO: 14377 - protein, 29 aa, Artificial Sequence
  Cyclic GFR-binding peptide
  MOD_RES (28)..(29): Xaa is C or S
MERYKKLVVKDYEDFYLMSIANLETPVXX

SEQ ID NO: 14378 - protein, 37 aa, Artificial Sequence
  Cyclic GFR-binding peptide
  MOD_RES (2)..(4)..(35)..(36): Xaa is C or S
SXKXSRVIMNSLQEVKPKRGVYYLITLPELAQPVXXP

SEQ ID NO: 14379 - protein, 24 aa, Artificial Sequence
  Cyclic GFR-binding peptide
VVMNSLQEVKPTRGVYYVIPLPEL

SEQ ID NO: 14380 - protein, 27 aa, Artificial Sequence
  Cyclic GFR-binding peptide
MENSLQEVVKDYEDYYVMPLPELETPV

SEQ ID NO: 14381 - protein, 37 aa, Artificial Sequence
  Cyclic GFR-binding peptide
  MOD_RES (2)..(34)..(35): Xaa is C or S
GXARVVMNNSLQEIVNSSDDYYVVPLPELQTPAXXPK

SEQ ID NO: 14382 - protein, 32 aa, Artificial Sequence; identical to SEQ ID NO: 3876
  Cyclic GFR-binding peptide
  MOD_RES (1)..(3): Xaa is C or S

SEQ ID NO: 14383 - protein, 31 aa, Artificial Sequence
  Cyclic GFR-binding peptide
  MOD_RES (30)..(31): Xaa is C or S
VVMDQYNKLVVNNASDLYLISIASLRTPVXX

SEQ ID NO: 14384 - protein, 30 aa, Artificial Sequence
  Cyclic GFR-binding peptide
EVVMDQYNKLVVNNASDLYLISIASLRTPV

SEQ ID NO: 14385 - protein, 36 aa, Artificial Sequence
  Cyclic GFR-binding peptide
  MOD_RES (1)..(3)..(35)..(36): Xaa is C or S
XGXSEVVMDNSLQEVVNNASDYYLITLPELRTPVXX

SEQ ID NO: 14386 - protein, 27 aa, Artificial Sequence
  Cyclic GFR-binding peptide
  MOD_RES (1)..(1): Xaa is C or S
XGEVVMEQYNKLVVKDYEDLYLMSIAS

SEQ ID NO: 14387 - protein, 32 aa, Artificial Sequence
  Cyclic GFR-binding peptide
  MOD_RES (27)..(28): Xaa is C or S
MNSLQEVKPTRGVYYVIPLPELDQPVXXPSAS

SEQ ID NO: 14388 - protein, 37 aa, Artificial Sequence
  Cyclic GFR-binding peptide
  MOD_RES (2)..(34)..(35): Xaa is C or S
GXGEVVMENSLQEVVKDYEDYYLMTLPELETPVXXAK

SEQ ID NO: 14389 - protein, 34 aa, Artificial Sequence; identical to SEQ ID NO: 3880
  Cyclic GFR-binding peptide
  MOD_RES (1)..(3)..(34): Xaa is C or S

SEQ ID NO: 14390 - protein, 38 aa, Artificial Sequence
  Cyclic GFR-binding peptide
  MOD_RES (1)..(32)..(33): Xaa is C or S
XSKVIMNSLQEIKPTKGIYYVIPLPELDQSVXXPSASA

SEQ ID NO: 14391 - protein, 26 aa, Artificial Sequence
  Cyclic GFR-binding peptide
VMDNSLQEVVKENEDYYLMTLPELET

SEQ ID NO: 14392 - protein, 28 aa, Artificial Sequence
  Cyclic GFR-binding peptide
  MOD_RES (26)..(26): Xaa is C or S
NSLQEIVNSSDDYYVVPLPELKTPAXTP

SEQ ID NO: 14393 - protein, 30 aa, Artificial Sequence; identical to SEQ ID NO: 3887
  Cyclic GFR-binding peptide
  MOD_RES (2)..(4): Xaa is C or S

SEQ ID NO: 14394 - protein, 32 aa, Artificial Sequence
  Cyclic GFR-binding peptide
  MOD_RES (29)..(30): Xaa is C or S
VMNEYQKYIVNSSDDIFLVSIPSLKTPAXXPK

SEQ ID NO: 14395 - protein, 25 aa, Artificial Sequence
  Cyclic GFR-binding peptide
QYNKLIVNSSDDLYLVSIASLKTPA

SEQ ID NO: 14396 - protein, 29 aa, Artificial Sequence
  Cyclic GFR-binding peptide
  MOD_RES (2)..(4): Xaa is C or S
SXKXSRVIMNSLQEVKPKRGVYYLITLPE

SEQ ID NO: 14397 - protein, 34 aa, Artificial Sequence; identical to SEQ ID NO: 3890
  Cyclic GFR-binding peptide
  MOD_RES (31)..(32): Xaa is C or S

SEQ ID NO: 14398 - protein, 32 aa, Artificial Sequence
  Cyclic GFR-binding peptide
  MOD_RES (29)..(29): Xaa is C or S
VMNEYQKYIVNSSDDIFLVSIPSLKTPAXTPK

SEQ ID NO: 14399 - protein, 30 aa, Artificial Sequence; identical to SEQ ID NO: 3892
  Cyclic GFR-binding peptide
  MOD_RES (28)..(28): Xaa is C or S

SEQ ID NO: 14400 - protein, 30 aa, Artificial Sequence
  Cyclic GFR-binding peptide
  MOD_RES (28)..(29): Xaa is C or S
MNNSLQEIVNSSDDYYVVPLPELQTPAXXP

SEQ ID NO: 14401 - protein, 31 aa, Artificial Sequence
  Cyclic GFR-binding peptide
  MOD_RES (31)..(31): Xaa is C or S
RVVMNNSLQEIVNSSDDYYVVPLPELQTPAX

SEQ ID NO: 14402 - protein, 38 aa, Artificial Sequence
  Cyclic GFR-binding peptide
  MOD_RES (32)..(33): Xaa is C or S
SRVVMNNSLQEIVNSSDDYYVVPLPELKTPAXXPKPVY

SEQ ID NO: 14403 - protein, 31 aa, Artificial Sequence
  Cyclic GFR-binding peptide
  MOD_RES (1)..(3): Xaa is C or S
XKXSRVIMEYQKYVKPKRGVIFLISIPSLAQ

SEQ ID NO: 14404 - protein, 37 aa, Artificial Sequence; identical to SEQ ID NO: 3900
  Cyclic GFR-binding peptide
  MOD_RES (2)..(34)..(35): Xaa is C or S

SEQ ID NO: 14405 - protein, 27 aa, Artificial Sequence
  Cyclic GFR-binding peptide
  MOD_RES (26)..(27): Xaa is C or S
NSLQEIVNSSDDYYVVPLPELKTPAXX

SEQ ID NO: 14406 - protein, 36 aa, Artificial Sequence
  Cyclic GFR-binding peptide
  MOD_RES (1)..(33)..(34): Xaa is C or S
XSRVVMNNSLQEIVNSSDDYYVVPLPELKTPAXXPK

SEQ ID NO: 14407 - protein, 25 aa, Artificial Sequence
  Cyclic GFR-binding peptide
RVIMEYQKYVKPKRGVIFLISIPSL

SEQ ID NO: 14408 - protein, 33 aa, Artificial Sequence; identical to SEQ ID NO: 3901
  Cyclic GFR-binding peptide
  MOD_RES (29)..(30): Xaa is C or S

SEQ ID NO: 14409 - protein, 30 aa, Artificial Sequence
  Cyclic GFR-binding peptide
  MOD_RES (2)..(2): Xaa is C or S
GXGEVVMENSLQEVVKDYEDYYLMTLPELE

SEQ ID NO: 14410 - protein, 28 aa, Artificial Sequence
  Cyclic GFR-binding peptide
  MOD_RES (26)..(27): Xaa is C or S
NSLQEVVNNASDYYLITLPELRTPVXXT

SEQ ID NO: 14411 - protein, 35 aa, Artificial Sequence
  Cyclic GFR-binding peptide
  MOD_RES (30)..(31): Xaa is C or S
VVMENSLQEVVKDYEDYYVMPLPELETPVXXAKPI

SEQ ID NO: 14412 - protein, 26 aa, Artificial Sequence
  Cyclic GFR-binding peptide
  MOD_RES (26)..(26): Xaa is C or S
NSLQEIVNSSDDYYLVTLPELQTPAX

SEQ ID NO: 14413 - protein, 24 aa, Artificial Sequence
  Cyclic GFR-binding peptide
VVMEYQKYVKPTRGVIFLISIPSL

SEQ ID NO: 14414 - protein, 34 aa, Artificial Sequence
  Cyclic GFR-binding peptide
  MOD_RES (28)..(29): Xaa is C or S
MDNSLQEVVNNASDYYLITLPELRTPVXXTPPTS

SEQ ID NO: 14415 - protein, 31 aa, Artificial Sequence
  Cyclic GFR-binding peptide
  MOD_RES (2)..(2): Xaa is C or S
GXGEVVMDEYQKYVVKENEDIFLMSIPSLET

SEQ ID NO: 14416 - protein, 32 aa, Artificial Sequence; identical to SEQ ID NO: 3910
  Cyclic GFR-binding peptide
  MOD_RES (29)..(30): Xaa is C or S

SEQ ID NO: 14417 - protein, 35 aa, Artificial Sequence
  Cyclic GFR-binding peptide
  MOD_RES (2)..(33)..(34): Xaa is C or S
KXSKVIMEYQKYIKPTKGIIFLISIPSLDQSVXXP

SEQ ID NO: 14418 - protein, 38 aa, Artificial Sequence
  Cyclic GFR-binding peptide
  MOD_RES (1)..(3)..(35)..(36): Xaa is C or S
XGXSEVVMDRYKKLVVNNASDFYLISIANLRTPVXXTP

SEQ ID NO: 14419 - protein, 33 aa, Artificial Sequence
  Cyclic GFR-binding peptide
  MOD_RES (30)..(31): Xaa is C or S
VVMNNSLQEIVNSSDDYYLVTLPELQTPAXXPK

SEQ ID NO: 14420 - protein, 36 aa, Artificial Sequence
  Cyclic GFR-binding peptide
  MOD_RES (2)..(4)..(36): Xaa is C or S
RXGXSEVVMDRYKKLVVNNASDFYLISIANLRTPVX

SEQ ID NO: 14421 - protein, 27 aa, Artificial Sequence
  Cyclic GFR-binding peptide
VVMDNSLQEVVNNASDYYVIPLPELRT

SEQ ID NO: 14422 - protein, 31 aa, Artificial Sequence; identical to SEQ ID NO: 3915
  Cyclic GFR-binding peptide
  MOD_RES (1)..(1): Xaa is C or S

SEQ ID NO: 14423 - protein, 34 aa, Artificial Sequence; identical to SEQ ID NO: 3918
  Cyclic GFR-binding peptide
  MOD_RES (2)..(33)..(34): Xaa is C or S

SEQ ID NO: 14424 - protein, 35 aa, Artificial Sequence
  Cyclic GFR-binding peptide
  MOD_RES (1)..(33)..(34): Xaa is C or S
XSRVVMNNSLQEIVNSSDDYYLVTLPELKTPAXXP

SEQ ID NO: 14425 - protein, 35 aa, Artificial Sequence; identical to SEQ ID NO: 3919
  Cyclic GFR-binding peptide
  MOD_RES (29)..(30): Xaa is C or S

SEQ ID NO: 14426 - protein, 27 aa, Artificial Sequence
  Cyclic GFR-binding peptide
  MOD_RES (27)..(27): Xaa is C or S
DEYQKYVVKENEDIFLMSIPSLETPVX

SEQ ID NO: 14427 - protein, 41 aa, Artificial Sequence; identical to SEQ ID NO: 3922
  Cyclic GFR-binding peptide
  MOD_RES (1)..(3)..(35)..(36): Xaa is C or S

SEQ ID NO: 14428 - protein, 33 aa, Artificial Sequence
  Cyclic GFR-binding peptide
  MOD_RES (30)..(30): Xaa is C or S
VVMNEYQKYIVNSSDDIFLVSIPSLKTPAXTPK

SEQ ID NO: 14429 - protein, 33 aa, Artificial Sequence; identical to SEQ ID NO: 3924
  Cyclic GFR-binding peptide
  MOD_RES (32)..(33): Xaa is C or S

SEQ ID NO: 14430 - protein, 38 aa, Artificial Sequence; identical to SEQ ID NO: 3925
  Cyclic GFR-binding peptide
  MOD_RES (1)..(32)..(33): Xaa is C or S

SEQ ID NO: 14431 - protein, 33 aa, Artificial Sequence
  Cyclic GFR-binding peptide
  MOD_RES (32)..(33): Xaa is C or S
SRVVMNNSLQEIVNSSDDYYVVPLPELKTPAXX

SEQ ID NO: 14432 - protein, 30 aa, Artificial Sequence
  Cyclic GFR-binding peptide
  MOD_RES (30)..(30): Xaa is C or S
VVMDEYQKYVVKENEDIFLMSIPSLETPVX

SEQ ID NO: 14433 - protein, 23 aa, Artificial Sequence
  Cyclic GFR-binding peptide
VMDNSLQEVVNNASDYYLITLPE

SEQ ID NO: 14434 - protein, 30 aa, Artificial Sequence
  Cyclic GFR-binding peptide
  MOD_RES (1)..(3): Xaa is C or S
XKXSKVVMEYQKYVKPTRGVIFLISIPSLD

SEQ ID NO: 14435 - protein, 31 aa, Artificial Sequence; identical to SEQ ID NO: 3933
  Cyclic GFR-binding peptide
  MOD_RES (30)..(31): Xaa is C or S

SEQ ID NO: 14436 - protein, 38 aa, Artificial Sequence; identical to SEQ ID NO: 3934
  Cyclic GFR-binding peptide
  MOD_RES (1)..(3)..(34)..(35): Xaa is C or S

SEQ ID NO: 14437 - protein, 31 aa, Artificial Sequence
  Cyclic GFR-binding peptide
  MOD_RES (28)..(28): Xaa is C or S
MNEYQKYIVNSSDDIFLVSIPSLKTPAXTPK

SEQ ID NO: 14438 - protein, 31 aa, Artificial Sequence
  Cyclic GFR-binding peptide
  MOD_RES (29)..(30): Xaa is C or S
VMDNSLQEVVNNASDYYVIPLPELRTPVXXT

SEQ ID NO: 14439 - protein, 36 aa, Artificial Sequence
  Cyclic GFR-binding peptide
  MOD_RES (2)..(33)..(34): Xaa is C or S
KXSKVIMNSLQEIKPTKGIYYVIPLPELDQSVXXPS

SEQ ID NO: 14440 - protein, 36 aa, Artificial Sequence
  Cyclic GFR-binding peptide
  MOD_RES (32)..(33): Xaa is C or S
GEVVMDNSLQEVVKENEDYYLMTLPELETPVXXAKP

SEQ ID NO: 14441 - protein, 23 aa, Artificial Sequence
  Cyclic GFR-binding peptide
VMQYNKLVKPTRGVLYLISIASL

SEQ ID NO: 14442 - protein, 24 aa, Artificial Sequence
  Cyclic GFR-binding peptide
QYNKLVVKDYEDLYLMSIASLETP

SEQ ID NO: 14443 - protein, 37 aa, Artificial Sequence; identical to SEQ ID NO: 3944
  Cyclic GFR-binding peptide
  MOD_RES (2)..(34)..(35): Xaa is C or S

SEQ ID NO: 14444 - protein, 29 aa, Artificial Sequence
  Cyclic GFR-binding peptide
  MOD_RES (27)..(28): Xaa is C or S
MNSLQEIKPTKGIYYVIPLPELDQSVXXP

SEQ ID NO: 14445 - protein, 27 aa, Artificial Sequence
  Cyclic GFR-binding peptide
  MOD_RES (26)..(27): Xaa is C or S
NSLQEIKPTKGIYYLITLPELDQSVXX

SEQ ID NO: 14446 - protein, 27 aa, Artificial Sequence
  Cyclic GFR-binding peptide
GEVVMENSLQEVVKDYEDYYLMTLPEL

SEQ ID NO: 14447 - protein, 41 aa, Artificial Sequence
  Cyclic GFR-binding peptide
  MOD_RES (2)..(4)..(35)..(36): Xaa is C or S
SXKXSKVIMEYQKYIKPTKGIIFLISIPSLDQSVXXPSASA

SEQ ID NO: 14448 - protein, 26 aa, Artificial Sequence
  Cyclic GFR-binding peptide
VVMDQYNKLVVKENEDLYLMSIASLE

SEQ ID NO: 14449 - protein, 29 aa, Artificial Sequence
  Cyclic GFR-binding peptide
  MOD_RES (26)..(27): Xaa is C or S
NSLQEVKPTRGVYYVIPLPELDQPVXXPS

SEQ ID NO: 14450 - protein, 34 aa, Artificial Sequence
  Cyclic GFR-binding peptide
  MOD_RES (1)..(33)..(34): Xaa is C or S
XGEVVMENSLQEVVKDYEDYYVMPLPELETPVXX

SEQ ID NO: 14451 - protein, 30 aa, Artificial Sequence; identical to SEQ ID NO: 3949
  Cyclic GFR-binding peptide
  MOD_RES (2)..(2): Xaa is C or S

SEQ ID NO: 14452 - protein, 31 aa, Artificial Sequence; identical to SEQ ID NO: 3950
  Cyclic GFR-binding peptide
  MOD_RES (30)..(31): Xaa is C or S

SEQ ID NO: 14453 - protein, 29 aa, Artificial Sequence
  Cyclic GFR-binding peptide
  MOD_RES (1)..(1): Xaa is C or S
XARVVMNRYKKLIVNSSDDFYLVSIANLQ

SEQ ID NO: 14454 - protein, 41 aa, Artificial Sequence
  Cyclic GFR-binding peptide
  MOD_RES (2)..(4)..(36)..(37): Xaa is C or S
RXGXGEVVMEEYQKYVVKDYEDIFLMSIPSLETPVXXAKPI

SEQ ID NO: 14455 - protein, 23 aa, Artificial Sequence
  Cyclic GFR-binding peptide
MENSLQEVVKDYEDYYVMPLPEL

SEQ ID NO: 14456 - protein, 37 aa, Artificial Sequence; identical to SEQ ID NO: 3958
  Cyclic GFR-binding peptide
  MOD_RES (2)..(4)..(35)..(36): Xaa is C or S

SEQ ID NO: 14457 - protein, 33 aa, Artificial Sequence
  Cyclic GFR-binding peptide
  MOD_RES (1)..(3): Xaa is C or S
XGXGEVVMDNSLQEVVKENEDYYVMPLPELETP

SEQ ID NO: 14458 - protein, 29 aa, Artificial Sequence
  Cyclic GFR-binding peptide
  MOD_RES (28)..(29): Xaa is C or S
IMNSLQEVKPKRGVYYLITLPELAQPVXX

SEQ ID NO: 14459 - protein, 32 aa, Artificial Sequence; identical to SEQ ID NO: 3959
  Cyclic GFR-binding peptide
  MOD_RES (1)..(3): Xaa is C or S

SEQ ID NO: 14460 - protein, 25 aa, Artificial Sequence
  Cyclic GFR-binding peptide
NRYKKLIVNSSDDFYLVSIANLQTP

SEQ ID NO: 14461 - protein, 37 aa, Artificial Sequence
  Cyclic GFR-binding peptide
  MOD_RES (2)..(4)..(36)..(37): Xaa is C or S
RXGXSEVVMDRYKKLVVNNASDFYLISIANLRTPVXX

SEQ ID NO: 14462 - protein, 21 aa, Artificial Sequence
  Cyclic GFR-binding peptide
RYKKLVKPKRGVFYLISIANL

SEQ ID NO: 14463 - protein, 29 aa, Artificial Sequence
  Cyclic GFR-binding peptide
SEVVMDRYKKLVVNNASDFYLISIANLRT

SEQ ID NO: 14464 - protein, 36 aa, Artificial Sequence
  Cyclic GFR-binding peptide
  MOD_RES (32)..(33): Xaa is C or S
GEVVMDNSLQEVVKENEDYYVMPLPELETPVXXAKP

SEQ ID NO: 14465 - protein, 30 aa, Artificial Sequence
  Cyclic GFR-binding peptide
  MOD_RES (28)..(29): Xaa is C or S
VMNSLQEVKPTRGVYYVIPLPELDQPVXXP

SEQ ID NO: 14466 - protein, 29 aa, Artificial Sequence
  Cyclic GFR-binding peptide
SRVVMNNSLQEIVNSSDDYYLVTLPELKT

SEQ ID NO: 14467 - protein, 38 aa, Artificial Sequence
  Cyclic GFR-binding peptide
  MOD_RES (32)..(33): Xaa is C or S
GEVVMDNSLQEVVKENEDYYLMTLPELETPVXXAKPIK

SEQ ID NO: 14468 - protein, 35 aa, Artificial Sequence
  Cyclic GFR-binding peptide
  MOD_RES (30)..(31): Xaa is C or S
KVVMEYQKYVKPTRGVIFLISIPSLDQPVXXPSAS

SEQ ID NO: 14469 - protein, 32 aa, Artificial Sequence
  Cyclic GFR-binding peptide
  MOD_RES (32)..(32): Xaa is C or S
ARVVMNNSLQEIVNSSDDYYLVTLPELQTPAX

SEQ ID NO: 14470 - protein, 29 aa, Artificial Sequence
  Cyclic GFR-binding peptide
GEVVMEEYQKYVVKDYEDIFLMSIPSLET

SEQ ID NO: 14471 - protein, 31 aa, Artificial Sequence
  Cyclic GFR-binding peptide
  MOD_RES (2)..(2): Xaa is C or S
KXSKVIMNSLQEIKPTKGIYYLITLPELDQS

SEQ ID NO: 14472 - protein, 26 aa, Artificial Sequence
  Cyclic GFR-binding peptide
MENSLQEVVKDYEDYYVMPLPELETP

SEQ ID NO: 14473 - protein, 38 aa, Artificial Sequence
  Cyclic GFR-binding peptide
  MOD_RES (2)..(4)..(36): Xaa is C or S
HXGXSRVVMNNSLQEIVNSSDDYYVVPLPELKTPAXTP

SEQ ID NO: 14474 - protein, 27 aa, Artificial Sequence
  Cyclic GFR-binding peptide
VMDNSLQEVVKENEDYYVMPLPELETP

SEQ ID NO: 14475 - protein, 36 aa, Artificial Sequence
  Cyclic GFR-binding peptide
  MOD_RES (31)..(32): Xaa is C or S
EVVMDQYNKLVVNNASDLYLISIASLRTPVXXTPPT

SEQ ID NO: 14476 - protein, 36 aa, Artificial Sequence; identical to SEQ ID NO: 3972
  Cyclic GFR-binding peptide
  MOD_RES (1)..(33): Xaa is C or S

SEQ ID NO: 14477 - protein, 29 aa, Artificial Sequence
  Cyclic GFR-binding peptide
ARVVMNNSLQEIVNSSDDYYVVPLPELQT

SEQ ID NO: 14478 - protein, 31 aa, Artificial Sequence; identical to SEQ ID NO: 3973
  Cyclic GFR-binding peptide
  MOD_RES (1)..(1): Xaa is C or S

SEQ ID NO: 14479 - protein, 21 aa, Artificial Sequence
  Cyclic GFR-binding peptide
ENSLQEVVKDYEDYYLMTLPE

SEQ ID NO: 14480 - protein, 27 aa, Artificial Sequence
  Cyclic GFR-binding peptide
  MOD_RES (1)..(1): Xaa is C or S
XGEVVMDQYNKLVVKENEDLYLMSIAS

SEQ ID NO: 14481 - protein, 31 aa, Artificial Sequence; identical to SEQ ID NO: 3976
  Cyclic GFR-binding peptide
  MOD_RES (29)..(30): Xaa is C or S

SEQ ID NO: 14482 - protein, 28 aa, Artificial Sequence
  Cyclic GFR-binding peptide
  MOD_RES (2)..(2): Xaa is C or S
GXARVVMNEYQKYIVNSSDDIFLVSIPS

SEQ ID NO: 14483 - protein, 26 aa, Artificial Sequence
  Cyclic GFR-binding peptide
MNEYQKYIVNSSDDIFLVSIPSLQTP

SEQ ID NO: 14484 - protein, 29 aa, Artificial Sequence
  Cyclic GFR-binding peptide
  MOD_RES (1)..(1): Xaa is C or S
XSEVVMDNSLQEVVNNASDYYLITLPELR

SEQ ID NO: 14485 - protein, 40 aa, Artificial Sequence
  Cyclic GFR-binding peptide
  MOD_RES (1)..(3)..(34)..(35): Xaa is C or S
XKXSRVIMEYQKYVKPKRGVIFLISIPSLAQPVXXPAASA

SEQ ID NO: 14486 - protein, 34 aa, Artificial Sequence
  Cyclic GFR-binding peptide
  MOD_RES (29)..(30): Xaa is C or S
VVMNSLQEVKPTRGVYYVIPLPELDQPVXXPSAS

SEQ ID NO: 14487 - protein, 31 aa, Artificial Sequence
  Cyclic GFR-binding peptide
SEVVMDQYNKLVVNNASDLYLISIASLRTPV

SEQ ID NO: 14488 - protein, 26 aa, Artificial Sequence
  Cyclic GFR-binding peptide
SEVVMDRYKKLVVNNASDFYLISIAN

SEQ ID NO: 14489 - protein, 30 aa, Artificial Sequence
  Cyclic GFR-binding peptide
  MOD_RES (2)..(4): Xaa is C or S
SXKXSKVVMNSLQEVKPTRGVYYLITLPEL

SEQ ID NO: 14490 - protein, 34 aa, Artificial Sequence; identical to SEQ ID NO: 3982
  Cyclic GFR-binding peptide
  MOD_RES (2)..(4): Xaa is C or S

SEQ ID NO: 14491 - protein, 33 aa, Artificial Sequence
  Cyclic GFR-binding peptide
  MOD_RES (2)..(33): Xaa is C or S
KXSKVIMNSLQEIKPTKGIYYVIPLPELDQSVX

SEQ ID NO: 14492 - protein, 30 aa, Artificial Sequence
  Cyclic GFR-binding peptide
  MOD_RES (28)..(29): Xaa is C or S
MDNSLQEVVNNASDYYLITLPELRTPVXXT

SEQ ID NO: 14493 - protein, 36 aa, Artificial Sequence
  Cyclic GFR-binding peptide
  MOD_RES (1)..(3)..(35): Xaa is C or S
XGXSRVVMNEYQKYIVNSSDDIFLVSIPSLKTPAXT

SEQ ID NO: 14494 - protein, 36 aa, Artificial Sequence; identical to SEQ ID NO: 3987
  Cyclic GFR-binding peptide
  MOD_RES (32)..(33): Xaa is C or S

SEQ ID NO: 14495 - protein, 33 aa, Artificial Sequence
  Cyclic GFR-binding peptide
  MOD_RES (2)..(4): Xaa is C or S
SXKXSRVIMEYQKYVKPKRGVIFLISIPSLAQP

SEQ ID NO: 14496 - protein, 34 aa, Artificial Sequence; identical to SEQ ID NO: 3991
  Cyclic GFR-binding peptide
  MOD_RES (2)..(33)..(34): Xaa is C or S

SEQ ID NO: 14497 - protein, 30 aa, Artificial Sequence; identical to SEQ ID NO: 3992
  Cyclic GFR-binding peptide
  MOD_RES (29)..(30): Xaa is C or S

SEQ ID NO: 14498 - protein, 38 aa, Artificial Sequence
  Cyclic GFR-binding peptide
  MOD_RES (1)..(3)..(35)..(36): Xaa is C or S
XGXGEVVMENSLQEVVKDYEDYYVMPLPELETPVXXAK

SEQ ID NO: 14499 - protein, 26 aa, Artificial Sequence
  Cyclic GFR-binding peptide
  MOD_RES (1)..(1): Xaa is C or S
XSRVIMEYQKYVKPKRGVIFLISIPS

SEQ ID NO: 14500 - protein, 38 aa, Artificial Sequence; identical to SEQ ID NO: 3996
  Cyclic GFR-binding peptide
  MOD_RES (2)..(34): Xaa is C or S

SEQ ID NO: 14501 - protein, 32 aa, Artificial Sequence
  Cyclic GFR-binding peptide
  MOD_RES (31)..(32): Xaa is C or S
RVVMNEYQKYIVNSSDDIFLVSIPSLQTPAXX

SEQ ID NO: 14502 - protein, 29 aa, Artificial Sequence
  Cyclic GFR-binding peptide
  MOD_RES (28)..(29): Xaa is C or S
MNEYQKYIVNSSDDIFLVSIPSLQTPAXX

SEQ ID NO: 14503 - protein, 24 aa, Artificial Sequence
  Cyclic GFR-binding peptide
NSLQEIVNSSDDYYVVPLPELKTP

SEQ ID NO: 14504 - protein, 26 aa, Artificial Sequence
  Cyclic GFR-binding peptide
DNSLQEVVKENEDYYVMPLPELETPV

SEQ ID NO: 14505 - protein, 34 aa, Artificial Sequence; identical to SEQ ID NO: 3998
  Cyclic GFR-binding peptide
  MOD_RES (32)..(32): Xaa is C or S

SEQ ID NO: 14506 - protein, 28 aa, Artificial Sequence
  Cyclic GFR-binding peptide
  MOD_RES (1)..(1): Xaa is C or S
XSKVIMEYQKYIKPTKGIIFLISIPSLD

SEQ ID NO: 14507 - protein, 39 aa, Artificial Sequence; identical to SEQ ID NO: 3999
  Cyclic GFR-binding peptide
  MOD_RES (2)..(4)..(36)..(37): Xaa is C or S

SEQ ID NO: 14508 - protein, 36 aa, Artificial Sequence; identical to SEQ ID NO: 4000
  Cyclic GFR-binding peptide
  MOD_RES (2)..(4)..(36): Xaa is C or S

SEQ ID NO: 14509 - protein, 28 aa, Artificial Sequence
  Cyclic GFR-binding peptide
  MOD_RES (28)..(28): Xaa is C or S
IMEYQKYIKPTKGIIFLISIPSLDQSVX

SEQ ID NO: 14510 - protein, 31 aa, Artificial Sequence
  Cyclic GFR-binding peptide
  MOD_RES (26)..(27): Xaa is C or S
NSLQEIKPTKGIYYLITLPELDQSVXXPSAS

SEQ ID NO: 14511 - protein, 38 aa, Artificial Sequence
  Cyclic GFR-binding peptide
  MOD_RES (2)..(4)..(35)..(36): Xaa is C or S
SXKXSKVIMEYQKYIKPTKGIIFLISIPSLDQSVXXPS

SEQ ID NO: 14512 - protein, 38 aa, Artificial Sequence
  Cyclic GFR-binding peptide
  MOD_RES (32)..(33): Xaa is C or S
SEVVMDNSLQEVVNNASDYYVIPLPELRTPVXXTPPTS

SEQ ID NO: 14513 - protein, 35 aa, Artificial Sequence
  Cyclic GFR-binding peptide
  MOD_RES (2)..(33)..(34): Xaa is C or S
KXSKVVMNSLQEVKPTRGVYYVIPLPELDQPVXXP

SEQ ID NO: 14514 - protein, 22 aa, Artificial Sequence
  Cyclic GFR-binding peptide
MDNSLQEVVKENEDYYVMPLPE

SEQ ID NO: 14515 - protein, 30 aa, Artificial Sequence
  Cyclic GFR-binding peptide
  MOD_RES (2)..(2): Xaa is C or S
GXSRVVMNNSLQEIVNSSDDYYLVTLPELK

SEQ ID NO: 14516 - protein, 35 aa, Artificial Sequence; identical to SEQ ID NO: 4001
  Cyclic GFR-binding peptide
  MOD_RES (29)..(30): Xaa is C or S

SEQ ID NO: 14517 - protein, 27 aa, Artificial Sequence
  Cyclic GFR-binding peptide
  MOD_RES (27)..(27): Xaa is C or S
NNSLQEIVNSSDDYYLVTLPELQTPAX

SEQ ID NO: 14518 - protein, 34 aa, Artificial Sequence
  Cyclic GFR-binding peptide
  MOD_RES (28)..(28): Xaa is C or S
MNEYQKYIVNSSDDIFLVSIPSLKTPAXTPKTVH

SEQ ID NO: 14519 - protein, 36 aa, Artificial Sequence; identical to SEQ ID NO: 4005
  Cyclic GFR-binding peptide
  MOD_RES (2)..(34): Xaa is C or S

SEQ ID NO: 14520 - protein, 34 aa, Artificial Sequence; identical to SEQ ID NO: 4006
  Cyclic GFR-binding peptide
  MOD_RES (29)..(30): Xaa is C or S

SEQ ID NO: 14521 - protein, 37 aa, Artificial Sequence
  Cyclic GFR-binding peptide
  MOD_RES (32)..(32): Xaa is C or S
SRVVMNNSLQEIVNSSDDYYLVTLPELKTPAXTPKTV

SEQ ID NO: 14522 - protein, 36 aa, Artificial Sequence; identical to SEQ ID NO: 4008
  Cyclic GFR-binding peptide
  MOD_RES (1)..(33)..(34): Xaa is C or S

SEQ ID NO: 14523 - protein, 35 aa, Artificial Sequence
  Cyclic GFR-binding peptide
  MOD_RES (31)..(32): Xaa is C or S
SKVIMEYQKYIKPTKGIIFLISIPSLDQSVXXPSA

SEQ ID NO: 14524 - protein, 34 aa, Artificial Sequence
  Cyclic GFR-binding peptide
  MOD_RES (28)..(29): Xaa is C or S
MDEYQKYVVKENEDIFLMSIPSLETPVXXAKPIK

SEQ ID NO: 14525 - protein, 23 aa, Artificial Sequence
  Cyclic GFR-binding peptide
VMERYKKLVVKDYEDFYLMSIAN

SEQ ID NO: 14526 - protein, 41 aa, Artificial Sequence
  Cyclic GFR-binding peptide
  MOD_RES (2)..(4)..(36)..(37): Xaa is C or S
RXGXGEVVMENSLQEVVKDYEDYYLMTLPELETPVXXAKPI

SEQ ID NO: 14527 - protein, 28 aa, Artificial Sequence
  Cyclic GFR-binding peptide
  MOD_RES (1)..(3): Xaa is C or S
XKXSKVIMNSLQEIKPTKGIYYVIPLPE

SEQ ID NO: 14528 - protein, 20 aa, Artificial Sequence
  Cyclic GFR-binding peptide
QYNKLVKPKRGVLYLISIAS

SEQ ID NO: 14529 - protein, 22 aa, Artificial Sequence
  Cyclic GFR-binding peptide
IMEYQKYVKPKRGVIFLISIPS

SEQ ID NO: 14530 - protein, 28 aa, Artificial Sequence
  Cyclic GFR-binding peptide
KVIMRYKKLIKPTKGIFYLISIANLDQS

SEQ ID NO: 14531 - protein, 33 aa, Artificial Sequence
  Cyclic GFR-binding peptide
  MOD_RES (1)..(3): Xaa is C or S
XGXGEVVMENSLQEVVKDYEDYYLMTLPELETP

SEQ ID NO: 14532 - protein, 28 aa, Artificial Sequence
  Cyclic GFR-binding peptide
  MOD_RES (1)..(3): Xaa is C or S
XKXSKVIMEYQKYIKPTKGIIFLISIPS

SEQ ID NO: 14533 - protein, 28 aa, Artificial Sequence
  Cyclic GFR-binding peptide
  MOD_RES (2)..(2): Xaa is C or S
GXGEVVMENSLQEVVKDYEDYYVMPLPE

SEQ ID NO: 14534 - protein, 40 aa, Artificial Sequence
  Cyclic GFR-binding peptide
  MOD_RES (2)..(34)..(35): Xaa is C or S
GXGEVVMENSLQEVVKDYEDYYLMTLPELETPVXXAKPIS

SEQ ID NO: 14535 - protein, 39 aa, Artificial Sequence; identical to SEQ ID NO: 4022
  Cyclic GFR-binding peptide
  MOD_RES (1)..(3)..(35)..(36): Xaa is C or S

SEQ ID NO: 14536 - protein, 27 aa, Artificial Sequence
  Cyclic GFR-binding peptide
KVVMNSLQEVKPTRGVYYVIPLPELDQ

SEQ ID NO: 14537 - protein, 28 aa, Artificial Sequence
  Cyclic GFR-binding peptide
  MOD_RES (28)..(28): Xaa is C or S
VMNSLQEVKPTRGVYYVIPLPELDQPVX

SEQ ID NO: 14538 - protein, 40 aa, Artificial Sequence
  Cyclic GFR-binding peptide
  MOD_RES (2)..(34)..(35): Xaa is C or S
GXARVVMNNSLQEIVNSSDDYYLVTLPELQTPAXXPKPVT

SEQ ID NO: 14539 - protein, 31 aa, Artificial Sequence; identical to SEQ ID NO: 4024
  Cyclic GFR-binding peptide
  MOD_RES (2)..(2): Xaa is C or S

SEQ ID NO: 14540 - protein, 28 aa, Artificial Sequence
  Cyclic GFR-binding peptide
VVMNEYQKYIVNSSDDIFLVSIPSLKTP

SEQ ID NO: 14541 - protein, 33 aa, Artificial Sequence
  Cyclic GFR-binding peptide
  MOD_RES (32)..(33): Xaa is C or S
SRVVMNNSLQEIVNSSDDYYLVTLPELKTPAXX

SEQ ID NO: 14542 - protein, 31 aa, Artificial Sequence
  Cyclic GFR-binding peptide
  MOD_RES (28)..(29): Xaa is C or S
MNNSLQEIVNSSDDYYVVPLPELKTPAXXPK

SEQ ID NO: 14543 - protein, 28 aa, Artificial Sequence
  Cyclic GFR-binding peptide
  MOD_RES (27)..(28): Xaa is C or S
NEYQKYIVNSSDDIFLVSIPSLQTPAXX

SEQ ID NO: 14544 - protein, 33 aa, Artificial Sequence
  Cyclic GFR-binding peptide
  MOD_RES (30)..(31): Xaa is C or S
KVVMEYQKYVKPTRGVIFLISIPSLDQPVXXPS

SEQ ID NO: 14545 - protein, 22 aa, Artificial Sequence
  Cyclic GFR-binding peptide
NSLQEIKPTKGIYYLITLPELD

SEQ ID NO: 14546 - protein, 24 aa, Artificial Sequence
  Cyclic GFR-binding peptide
VMENSLQEVVKDYEDYYLMTLPEL

SEQ ID NO: 14547 - protein, 39 aa, Artificial Sequence
  Cyclic GFR-binding peptide
  MOD_RES (2)..(33)..(34): Xaa is C or S
KXSKVVMEYQKYVKPTRGVIFLISIPSLDQPVXXPSASA

SEQ ID NO: 14548 - protein, 21 aa, Artificial Sequence
  Cyclic GFR-binding peptide
DQYNKLVVNNASDLYLISIAS

SEQ ID NO: 14549 - protein, 31 aa, Artificial Sequence
  Cyclic GFR-binding peptide
  MOD_RES (26)..(27): Xaa is C or S
EYQKYIKPTKGIIFLISIPSLDQSVXXPSAS

SEQ ID NO: 14550 - protein, 28 aa, Artificial Sequence
  Cyclic GFR-binding peptide
VVMNNSLQEIVNSSDDYYVVPLPELQTP

SEQ ID NO: 14551 - protein, 31 aa, Artificial Sequence; identical to SEQ ID NO: 4040
  Cyclic GFR-binding peptide

SEQ ID NO: 14552 - protein, 35 aa, Artificial Sequence
  Cyclic GFR-binding peptide
  MOD_RES (32)..(33): Xaa is C or S
GEVVMDEYQKYVVKENEDIFLMSIPSLETPVXXAK

SEQ ID NO: 14553 - protein, 29 aa, Artificial Sequence
  Cyclic GFR-binding peptide
  MOD_RES (28)..(28): Xaa is C or S
MNNSLQEIVNSSDDYYVVPLPELKTPAXT

SEQ ID NO: 14554 - protein, 25 aa, Artificial Sequence
  Cyclic GFR-binding peptide
KVVMNSLQEVKPTRGVYYVIPLPEL

SEQ ID NO: 14555 - protein, 30 aa, Artificial Sequence
  Cyclic GFR-binding peptide
  MOD_RES (27)..(28): Xaa is C or S
DQYNKLVVNNASDLYLISIASLRTPVXXTP

SEQ ID NO: 14556 - protein, 27 aa, Artificial Sequence
  Cyclic GFR-binding peptide
MDRYKKLVVNNASDFYLISIANLRTPV

SEQ ID NO: 14557 - protein, 36 aa, Artificial Sequence
  Cyclic GFR-binding peptide
  MOD_RES (2)..(4)..(36): Xaa is C or S
RXGXSEVVMDNSLQEVVNNASDYYLITLPELRTPVX

SEQ ID NO: 14558 - protein, 29 aa, Artificial Sequence
  Cyclic GFR-binding peptide
VVMNNSLQEIVNSSDDYYLVTLPELQTPA

SEQ ID NO: 14559 - protein, 29 aa, Artificial Sequence
  Cyclic GFR-binding peptide
  MOD_RES (1)..(1): Xaa is C or S
XARVVMNQYNKLIVNSSDDLYLVSIASLQ

SEQ ID NO: 14560 - protein, 33 aa, Artificial Sequence; identical to SEQ ID NO: 4054
  Cyclic GFR-binding peptide
  MOD_RES (31)..(31): Xaa is C or S

SEQ ID NO: 14561 - protein, 33 aa, Artificial Sequence; identical to SEQ ID NO: 4055
  Cyclic GFR-binding peptide
  MOD_RES (1)..(32)..(33): Xaa is C or S

SEQ ID NO: 14562 - protein, 37 aa, Artificial Sequence
  Cyclic GFR-binding peptide
  MOD_RES (1)..(3)..(35)..(36): Xaa is C or S
XGXSEVVMDQYNKLVVNNASDLYLISIASLRTPVXXT

SEQ ID NO: 14563 - protein, 29 aa, Artificial Sequence
  Cyclic GFR-binding peptide
SKVVMNSLQEVKPTRGVYYVIPLPELDQP

SEQ ID NO: 14564 - protein, 36 aa, Artificial Sequence; identical to SEQ ID NO: 4059
  Cyclic GFR-binding peptide
  MOD_RES (1)..(33)..(34): Xaa is C or S

SEQ ID NO: 14565 - protein, 34 aa, Artificial Sequence
  Cyclic GFR-binding peptide
  MOD_RES (30)..(31): Xaa is C or S
VVMDEYQKYVVKENEDIFLMSIPSLETPVXXAKP

SEQ ID NO: 14566 - protein, 32 aa, Artificial Sequence
  Cyclic GFR-binding peptide
  MOD_RES (28)..(29): Xaa is C or S
MENSLQEVVKDYEDYYLMTLPELETPVXXAKP

SEQ ID NO: 14567 - protein, 38 aa, Artificial Sequence; identical to SEQ ID NO: 4069
  Cyclic GFR-binding peptide
  MOD_RES (2)..(4)..(36)..(37): Xaa is C or S

SEQ ID NO: 14568 - protein, 34 aa, Artificial Sequence; identical to SEQ ID NO: 4070
  Cyclic GFR-binding peptide
  MOD_RES (1)..(3)..(34): Xaa is C or S

SEQ ID NO: 14569 - protein, 35 aa, Artificial Sequence
  Cyclic GFR-binding peptide
  MOD_RES (32)..(32): Xaa is C or S
SRVVMNNSLQEIVNSSDDYYVVPLPELKTPAXTPK

SEQ ID NO: 14570 - protein, 36 aa, Artificial Sequence
  Cyclic GFR-binding peptide
  MOD_RES (2)..(4)..(36): Xaa is C or S
RXGXSEVVMDQYNKLVVNNASDLYLISIASLRTPVX

SEQ ID NO: 14571 - protein, 30 aa, Artificial Sequence
  Cyclic GFR-binding peptide
  MOD_RES (2)..(2): Xaa is C or S
GXARVVMNNSLQEIVNSSDDYYVVPLPELQ

SEQ ID NO: 14572 - protein, 31 aa, Artificial Sequence
  Cyclic GFR-binding peptide
  MOD_RES (28)..(29): Xaa is C or S
MDEYQKYVVKENEDIFLMSIPSLETPVXXAK

SEQ ID NO: 14573 - protein, 30 aa, Artificial Sequence
  Cyclic GFR-binding peptide
  MOD_RES (27)..(28): Xaa is C or S
NEYQKYIVNSSDDIFLVSIPSLQTPAXXPK

SEQ ID NO: 14574 - protein, 30 aa, Artificial Sequence; identical to SEQ ID NO: 4073
  Cyclic GFR-binding peptide
  MOD_RES (27)..(28): Xaa is C or S

SEQ ID NO: 14575 - protein, 39 aa, Artificial Sequence; identical to SEQ ID NO: 4074
  Cyclic GFR-binding peptide
  MOD_RES (2)..(34)..(35): Xaa is C or S

SEQ ID NO: 14576 - protein, 39 aa, Artificial Sequence; identical to SEQ ID NO: 4077
  Cyclic GFR-binding peptide
  MOD_RES (1)..(3)..(35): Xaa is C or S

SEQ ID NO: 14577 - protein, 29 aa, Artificial Sequence
  Cyclic GFR-binding peptide
  MOD_RES (28)..(29): Xaa is C or S
MDQYNKLVVKENEDLYLMSIASLETPVXX

SEQ ID NO: 14578 - protein, 34 aa, Artificial Sequence
  Cyclic GFR-binding peptide
  MOD_RES (30)..(31): Xaa is C or S
RVIMNSLQEVKPKRGVYYLITLPELAQPVXXPAA

SEQ ID NO: 14579 - protein, 34 aa, Artificial Sequence
  Cyclic GFR-binding peptide
  MOD_RES (29)..(30): Xaa is C or S
VMDRYKKLVVNNASDFYLISIANLRTPVXXTPPT

SEQ ID NO: 14580 - protein, 34 aa, Artificial Sequence
  Cyclic GFR-binding peptide
  MOD_RES (29)..(30): Xaa is C or S
VIMNSLQEIKPTKGIYYLITLPELDQSVXXPSAS

SEQ ID NO: 14581 - protein, 29 aa, Artificial Sequence
  Cyclic GFR-binding peptide
  MOD_RES (28)..(29): Xaa is C or S
VMEYQKYVKPTRGVIFLISIPSLDQPVXX

SEQ ID NO: 14582 - protein, 36 aa, Artificial Sequence; identical to SEQ ID NO: 4087
  Cyclic GFR-binding peptide
  MOD_RES (1)..(3)..(35)..(36): Xaa is C or S

SEQ ID NO: 14583 - protein, 23 aa, Artificial Sequence
  Cyclic GFR-binding peptide
VMDRYKKLVVNNASDFYLISIAN

SEQ ID NO: 14584 - protein, 26 aa, Artificial Sequence
  Cyclic GFR-binding peptide
ERYKKLVVKDYEDFYLMSIANLETPV

SEQ ID NO: 14585 - protein, 32 aa, Artificial Sequence
  Cyclic GFR-binding peptide
  MOD_RES (29)..(30): Xaa is C or S
VIMNSLQEVKPKRGVYYLITLPELAQPVXXPA

SEQ ID NO: 14586 - protein, 31 aa, Artificial Sequence
  Cyclic GFR-binding peptide
  MOD_RES (26)..(26): Xaa is C or S
NSLQEIVNSSDDYYVVPLPELKTPAXTPKTV

SEQ ID NO: 14587 - protein, 25 aa, Artificial Sequence
  Cyclic GFR-binding peptide
VMNNSLQEIVNSSDDYYVVPLPELK

SEQ ID NO: 14588 - protein, 30 aa, Artificial Sequence
  Cyclic GFR-binding peptide
  MOD_RES (1)..(3): Xaa is C or S
XKXSKVVMNSLQEVKPTRGVYYVIPLPELD

SEQ ID NO: 14589 - protein, 36 aa, Artificial Sequence
  Cyclic GFR-binding peptide
  MOD_RES (2)..(34): Xaa is C or S
GXSRVVMNNSLQEIVNSSDDYYVVPLPELKTPAXTP

SEQ ID NO: 14590 - protein, 35 aa, Artificial Sequence; identical to SEQ ID NO: 4093
  Cyclic GFR-binding peptide
  MOD_RES (29)..(30): Xaa is C or S

SEQ ID NO: 14591 - protein, 20 aa, Artificial Sequence
  Cyclic GFR-binding peptide
RYKKLVKPKRGVFYLISIAN

SEQ ID NO: 14592 - protein, 39 aa, Artificial Sequence
  Cyclic GFR-binding peptide
  MOD_RES (1)..(3)..(35): Xaa is C or S
XGXSRVVMNNSLQEIVNSSDDYYLVTLPELKTPAXTPKT

SEQ ID NO: 14593 - protein, 34 aa, Artificial Sequence
  Cyclic GFR-binding peptide
  MOD_RES (31)..(32): Xaa is C or S
EVVMDNSLQEVVKENEDYYLMTLPELETPVXXAK

SEQ ID NO: 14594 - protein, 31 aa, Artificial Sequence; identical to SEQ ID NO: 4100
  Cyclic GFR-binding peptide
  MOD_RES (27)..(27): Xaa is C or S

SEQ ID NO: 14595 - protein, 24 aa, Artificial Sequence
  Cyclic GFR-binding peptide
MENSLQEVVKDYEDYYLMTLPELE

SEQ ID NO: 14596 - protein, 30 aa, Artificial Sequence
  Cyclic GFR-binding peptide
  MOD_RES (26)..(27): Xaa is C or S
RYKKLVVNNASDFYLISIANLRTPVXXTPP

SEQ ID NO: 14597 - protein, 36 aa, Artificial Sequence
  Cyclic GFR-binding peptide
  MOD_RES (30)..(31): Xaa is C or S
VVMDRYKKLVVNNASDFYLISIANLRTPVXXTPPTS

SEQ ID NO: 14598 - protein, 37 aa, Artificial Sequence; identical to SEQ ID NO: 4101
  Cyclic GFR-binding peptide
  MOD_RES (1)..(3)..(35): Xaa is C or S

SEQ ID NO: 14599 - protein, 32 aa, Artificial Sequence
  Cyclic GFR-binding peptide
  MOD_RES (27)..(28): Xaa is C or S
NEYQKYIVNSSDDIFLVSIPSLQTPAXXPKPV

SEQ ID NO: 14600 - protein, 36 aa, Artificial Sequence; identical to SEQ ID NO: 4102
  Cyclic GFR-binding peptide
  MOD_RES (1)..(32)..(33): Xaa is C or S

SEQ ID NO: 14601 - protein, 33 aa, Artificial Sequence; identical to SEQ ID NO: 4104
  Cyclic GFR-binding peptide
  MOD_RES (1)..(3): Xaa is C or S

SEQ ID NO: 14602 - protein, 29 aa, Artificial Sequence
  Cyclic GFR-binding peptide
  MOD_RES (1)..(1): Xaa is C or S
XGEVVMERYKKLVVKDYEDFYLMSIANLE

SEQ ID NO: 14603 - protein, 29 aa, Artificial Sequence
  Cyclic GFR-binding peptide
  MOD_RES (26)..(27): Xaa is C or S
EYQKYVVKENEDIFLMSIPSLETPVXXAK

SEQ ID NO: 14604 - protein, 29 aa, Artificial Sequence
  Cyclic GFR-binding peptide
  MOD_RES (1)..(3): Xaa is C or S
XKXSKVIMEYQKYIKPTKGIIFLISIPSL

SEQ ID NO: 14605 - protein, 37 aa, Artificial Sequence; identical to SEQ ID NO: 4108
  Cyclic GFR-binding peptide
  MOD_RES (2)..(34)..(35): Xaa is C or S

SEQ ID NO: 14606 - protein, 33 aa, Artificial Sequence
  Cyclic GFR-binding peptide
  MOD_RES (1)..(32)..(33): Xaa is C or S
XSRVIMNSLQEVKPKRGVYYLITLPELAQPVXX

SEQ ID NO: 14607 - protein, 33 aa, Artificial Sequence
  Cyclic GFR-binding peptide
  MOD_RES (31)..(32): Xaa is C or S
SRVIMNSLQEVKPKRGVYYLITLPELAQPVXXP

SEQ ID NO: 14608 - protein, 31 aa, Artificial Sequence; identical to SEQ ID NO: 4110
  Cyclic GFR-binding peptide
  MOD_RES (1)..(3): Xaa is C or S

SEQ ID NO: 14609 - protein, 26 aa, Artificial Sequence
  Cyclic GFR-binding peptide
DEYQKYVVKENEDIFLMSIPSLETPV

SEQ ID NO: 14610 - protein, 38 aa, Artificial Sequence; identical to SEQ ID NO: 4114
  Cyclic GFR-binding peptide
  MOD_RES (2)..(4)..(36)..(37): Xaa is C or S

SEQ ID NO: 14611 - protein, 28 aa, Artificial Sequence
  Cyclic GFR-binding peptide
  MOD_RES (26)..(27): Xaa is C or S
NSLQEIVNSSDDYYLVTLPELKTPAXXP

SEQ ID NO: 14612 - protein, 28 aa, Artificial Sequence
  Cyclic GFR-binding peptide
VVMNQYNKLIVNSSDDLYLVSIASLKTP

SEQ ID NO: 14613 - protein, 23 aa, Artificial Sequence
  Cyclic GFR-binding peptide
IMRYKKLIKPTKGIFYLISIANL

SEQ ID NO: 14614 - protein, 29 aa, Artificial Sequence
  Cyclic GFR-binding peptide
VVMDEYQKYVVKENEDIFLMSIPSLETPV

SEQ ID NO: 14615 - protein, 30 aa, Artificial Sequence
  Cyclic GFR-binding peptide
  MOD_RES (29)..(30): Xaa is C or S
VMDNSLQEVVKENEDYYVMPLPELETPVXX

SEQ ID NO: 14616 - protein, 40 aa, Artificial Sequence
  Cyclic GFR-binding peptide
  MOD_RES (1)..(3)..(35): Xaa is C or S
XGXSRVVMNEYQKYIVNSSDDIFLVSIPSLKTPAXTPKTV

SEQ ID NO: 14617 - protein, 38 aa, Artificial Sequence
  Cyclic GFR-binding peptide
  MOD_RES (1)..(33)..(34): Xaa is C or S
XSRVVMNNSLQEIVNSSDDYYVVPLPELKTPAXXPKPV

SEQ ID NO: 14618 - protein, 29 aa, Artificial Sequence
  Cyclic GFR-binding peptide
  MOD_RES (26)..(27): Xaa is C or S
QYNKLIVNSSDDLYLVSIASLKTPAXXPK

SEQ ID NO: 14619 - protein, 35 aa, Artificial Sequence
  Cyclic GFR-binding peptide
  MOD_RES (29)..(30): Xaa is C or S
VMDNSLQEVVKENEDYYVMPLPELETPVXXAKPIK

SEQ ID NO: 14620 - protein, 28 aa, Artificial Sequence
  Cyclic GFR-binding peptide
VMEEYQKYVVKDYEDIFLMSIPSLETPV

SEQ ID NO: 14621 - protein, 31 aa, Artificial Sequence; identical to SEQ ID NO: 4121
  Cyclic GFR-binding peptide
  MOD_RES (1)..(1): Xaa is C or S

SEQ ID NO: 14622 - protein, 29 aa, Artificial Sequence
  Cyclic GFR-binding peptide
  MOD_RES (28)..(29): Xaa is C or S
IMEYQKYIKPTKGIIFLISIPSLDQSVXX

SEQ ID NO: 14623 - protein, 39 aa, Artificial Sequence; identical to SEQ ID NO: 4124
  Cyclic GFR-binding peptide
  MOD_RES (2)..(4)..(36)..(37): Xaa is C or S

SEQ ID NO: 14624 - protein, 36 aa, Artificial Sequence
  Cyclic GFR-binding peptide
  MOD_RES (32)..(33): Xaa is C or S
GEVVMENSLQEVVKDYEDYYLMTLPELETPVXXAKP

SEQ ID NO: 14625 - protein, 31 aa, Artificial Sequence
  Cyclic GFR-binding peptide
  MOD_RES (30)..(30): Xaa is C or S
VVMNNSLQEIVNSSDDYYLVTLPELKTPAXT

SEQ ID NO: 14626 - protein, 25 aa, Artificial Sequence
  Cyclic GFR-binding peptide
VVMDNSLQEVVNNASDYYLITLPEL

SEQ ID NO: 14627 - protein, 30 aa, Artificial Sequence
  Cyclic GFR-binding peptide
  MOD_RES (1)..(3): Xaa is C or S
XGXARVVMNEYQKYIVNSSDDIFLVSIPSL

SEQ ID NO: 14628 - protein, 27 aa, Artificial Sequence
  Cyclic GFR-binding peptide
  MOD_RES (1)..(1): Xaa is C or S
XGEVVMENSLQEVVKDYEDYYLMTLPE

SEQ ID NO: 14629 - protein, 38 aa, Artificial Sequence
  Cyclic GFR-binding peptide
  MOD_RES (2)..(34)..(35): Xaa is C or S
GXSEVVMDNSLQEVVNNASDYYLITLPELRTPVXXTPP

SEQ ID NO: 14630 - protein, 38 aa, Artificial Sequence; identical to SEQ ID NO: 4131
  Cyclic GFR-binding peptide
  MOD_RES (1)..(3)..(34)..(35): Xaa is C or S

SEQ ID NO: 14631 - protein, 22 aa, Artificial Sequence
  Cyclic GFR-binding peptide
MNNSLQEIVNSSDDYYVVPLPE

SEQ ID NO: 14632 - protein, 41 aa, Artificial Sequence
  Cyclic GFR-binding peptide
  MOD_RES (2)..(4)..(35)..(36): Xaa is C or S
SXKXSKVIMNSLQEIKPTKGIYYVIPLPELDQSVXXPSASA

SEQ ID NO: 14633 - protein, 34 aa, Artificial Sequence
  Cyclic GFR-binding peptide
  MOD_RES (28)..(29): Xaa is C or S
MNNSLQEIVNSSDDYYVVPLPELQTPAXXPKPVT

SEQ ID NO: 14634 - protein, 29 aa, Artificial Sequence
  Cyclic GFR-binding peptide
VVMDQYNKLVVKENEDLYLMSIASLETPV

SEQ ID NO: 14635 - protein, 33 aa, Artificial Sequence
  Cyclic GFR-binding peptide
  MOD_RES (2)..(33): Xaa is C or S
KXSRVIMNSLQEVKPKRGVYYLITLPELAQPVX

SEQ ID NO: 14636 - protein, 27 aa, Artificial Sequence
  Cyclic GFR-binding peptide
  MOD_RES (27)..(27): Xaa is C or S
NRYKKLIVNSSDDFYLVSIANLQTPAX

SEQ ID NO: 14637 - protein, 31 aa, Artificial Sequence
  Cyclic GFR-binding peptide
  MOD_RES (27)..(28): Xaa is C or S
DNSLQEVVNNASDYYVIPLPELRTPVXXTPP

SEQ ID NO: 14638 - protein, 26 aa, Artificial Sequence
  Cyclic GFR-binding peptide
VMDQYNKLVVKENEDLYLMSIASLET

SEQ ID NO: 14639 - protein, 30 aa, Artificial Sequence
  Cyclic GFR-binding peptide
  MOD_RES (2)..(4): Xaa is C or S
RXGXSEVVMDNSLQEVVNNASDYYLITLPE

SEQ ID NO: 14640 - protein, 30 aa, Artificial Sequence
  Cyclic GFR-binding peptide
EVVMDEYQKYVVKENEDIFLMSIPSLETPV

SEQ ID NO: 14641 - protein, 39 aa, Artificial Sequence
  Cyclic GFR-binding peptide
  MOD_RES (1)..(3)..(34)..(35): Xaa is C or S
XKXSRVIMEYQKYVKPKRGVIFLISIPSLAQPVXXPAAS

SEQ ID NO: 14642 - protein, 41 aa, Artificial Sequence
  Cyclic GFR-binding peptide
  MOD_RES (2)..(4)..(36)..(37): Xaa is C or S
HXGXARVVMNNSLQEIVNSSDDYYVVPLPELQTPAXXPKPV

SEQ ID NO: 14643 - protein, 34 aa, Artificial Sequence
  Cyclic GFR-binding peptide
  MOD_RES (29)..(30): Xaa is C or S
VMNNSLQEIVNSSDDYYLVTLPELKTPAXXPKPV

SEQ ID NO: 14644 - protein, 32 aa, Artificial Sequence; identical to SEQ ID NO: 4145
  Cyclic GFR-binding peptide
  MOD_RES (28)..(29): Xaa is C or S

SEQ ID NO: 14645 - protein, 33 aa, Artificial Sequence
  Cyclic GFR-binding peptide
  MOD_RES (1)..(3): Xaa is C or S
XGXGEVVMDEYQKYVVKENEDIFLMSIPSLETP

SEQ ID NO: 14646 - protein, 32 aa, Artificial Sequence; identical to SEQ ID NO: 4147
  Cyclic GFR-binding peptide
  MOD_RES (1)..(3): Xaa is C or S

SEQ ID NO: 14647 - protein, 33 aa, Artificial Sequence; identical to SEQ ID NO: 4149
  Cyclic GFR-binding peptide
  MOD_RES (30)..(31): Xaa is C or S

SEQ ID NO: 14648 - protein, 32 aa, Artificial Sequence
  Cyclic GFR-binding peptide
  MOD_RES (27)..(28): Xaa is C or S
MEYQKYVKPTRGVIFLISIPSLDQPVXXPSAS

SEQ ID NO: 14649 - protein, 36 aa, Artificial Sequence
  Cyclic GFR-binding peptide
  MOD_RES (1)..(3)..(35)..(36): Xaa is C or S
XGXARVVMNEYQKYIVNSSDDIFLVSIPSLQTPAXX

SEQ ID NO: 14650 - protein, 36 aa, Artificial Sequence
  Cyclic GFR-binding peptide
  MOD_RES (31)..(32): Xaa is C or S
EVVMENSLQEVVKDYEDYYVMPLPELETPVXXAKPI

SEQ ID NO: 14651 - protein, 33 aa, Artificial Sequence; identical to SEQ ID NO: 4150
  Cyclic GFR-binding peptide
  MOD_RES (28)..(29): Xaa is C or S

SEQ ID NO: 14652 - protein, 38 aa, Artificial Sequence; identical to SEQ ID NO: 4151
  Cyclic GFR-binding peptide
  MOD_RES (1)..(3)..(34)..(35): Xaa is C or S

SEQ ID NO: 14653 - protein, 28 aa, Artificial Sequence
  Cyclic GFR-binding peptide
  MOD_RES (27)..(28): Xaa is C or S
NNSLQEIVNSSDDYYVVPLPELQTPAXX

SEQ ID NO: 14654 - protein, 28 aa, Artificial Sequence
  Cyclic GFR-binding peptide
  MOD_RES (26)..(27): Xaa is C or S
EYQKYIVNSSDDIFLVSIPSLKTPAXXP

SEQ ID NO: 14655 - protein, 32 aa, Artificial Sequence
  Cyclic GFR-binding peptide
  MOD_RES (1)..(3): Xaa is C or S
XGXGEVVMDNSLQEVVKENEDYYLMTLPELET

SEQ ID NO: 14656 - protein, 27 aa, Artificial Sequence
  Cyclic GFR-binding peptide
SKVVMNSLQEVKPTRGVYYVIPLPELD

SEQ ID NO: 14657 - protein, 23 aa, Artificial Sequence
  Cyclic GFR-binding peptide
VMDQYNKLVVNNASDLYLISIAS

SEQ ID NO: 14658 - protein, 36 aa, Artificial Sequence
  Cyclic GFR-binding peptide
  MOD_RES (31)..(32): Xaa is C or S
EVVMENSLQEVVKDYEDYYLMTLPELETPVXXAKPI

SEQ ID NO: 14659 - protein, 27 aa, Artificial Sequence
  Cyclic GFR-binding peptide
VIMQYNKLIKPTKGILYLISIASLDQS

SEQ ID NO: 14660 - protein, 28 aa, Artificial Sequence
  Cyclic GFR-binding peptide
  MOD_RES (26)..(27): Xaa is C or S
QYNKLVKPTRGVLYLISIASLDQPVXXP

SEQ ID NO: 14661 - protein, 34 aa, Artificial Sequence
  Cyclic GFR-binding peptide
  MOD_RES (2)..(34): Xaa is C or S
GXSEVVMDNSLQEVVNNASDYYVIPLPELRTPVX

SEQ ID NO: 14662 - protein, 31 aa, Artificial Sequence
  Cyclic GFR-binding peptide
  MOD_RES (1)..(1): Xaa is C or S
XSRVVMNNSLQEIVNSSDDYYVVPLPELKTP

SEQ ID NO: 14663 - protein, 27 aa, Artificial Sequence
  Cyclic GFR-binding peptide
  MOD_RES (1)..(1): Xaa is C or S
XSKVVMQYNKLVKPTRGVLYLISIASL

SEQ ID NO: 14664 - protein, 20 aa, Artificial Sequence
  Cyclic GFR-binding peptide
RYKKLIVNSSDDFYLVSIAN

SEQ ID NO: 14665 - protein, 31 aa, Artificial Sequence; identical to SEQ ID NO: 4170
  Cyclic GFR-binding peptide

SEQ ID NO: 14666 - protein, 34 aa, Artificial Sequence
  Cyclic GFR-binding peptide
  MOD_RES (2)..(34): Xaa is C or S
GXGEVVMDNSLQEVVKENEDYYLMTLPELETPVX

SEQ ID NO: 14667 - protein, 36 aa, Artificial Sequence
  Cyclic GFR-binding peptide
  MOD_RES (1)..(32)..(33): Xaa is C or S
XSKVVMEYQKYVKPTRGVIFLISIPSLDQPVXXPSA

SEQ ID NO: 14668 - protein, 32 aa, Artificial Sequence
  Cyclic GFR-binding peptide
  MOD_RES (27)..(28): Xaa is C or S
ENSLQEVVKDYEDYYLMTLPELETPVXXAKPI

SEQ ID NO: 14669 - protein, 20 aa, Artificial Sequence
  Cyclic GFR-binding peptide
EYQKYVKPTRGVIFLISIPS

SEQ ID NO: 14670 - protein, 35 aa, Artificial Sequence
  Cyclic GFR-binding peptide
  MOD_RES (2)..(4)..(35): Xaa is C or S
SXKXSRVIMEYQKYVKPKRGVIFLISIPSLAQPVX

SEQ ID NO: 14671 - protein, 40 aa, Artificial Sequence; identical to SEQ ID NO: 4174
  Cyclic GFR-binding peptide
  MOD_RES (1)..(3)..(35)..(36): Xaa is C or S

SEQ ID NO: 14672 - protein, 28 aa, Artificial Sequence
  Cyclic GFR-binding peptide
SRVVMNQYNKLIVNSSDDLYLVSIASLK

SEQ ID NO: 14673 - protein, 31 aa, Artificial Sequence; identical to SEQ ID NO: 4180
  Cyclic GFR-binding peptide
  MOD_RES (29)..(29): Xaa is C or S

SEQ ID NO: 14674 - protein, 29 aa, Artificial Sequence
  Cyclic GFR-binding peptide
  MOD_RES (27)..(28): Xaa is C or S
MNSLQEIKPTKGIYYLITLPELDQSVXXP

SEQ ID NO: 14675 - protein, 27 aa, Artificial Sequence
  Cyclic GFR-binding peptide
  MOD_RES (27)..(27): Xaa is C or S
MEYQKYVKPTRGVIFLISIPSLDQPVX

SEQ ID NO: 14676 - protein, 29 aa, Artificial Sequence
  Cyclic GFR-binding peptide
  MOD_RES (29)..(29): Xaa is C or S
VMNNSLQEIVNSSDDYYLVTLPELKTPAX

SEQ ID NO: 14677 - protein, 24 aa, Artificial Sequence
  Cyclic GFR-binding peptide
NRYKKLIVNSSDDFYLVSIANLQT

SEQ ID NO: 14678 - protein, 32 aa, Artificial Sequence; identical to SEQ ID NO: 4185
  Cyclic GFR-binding peptide
  MOD_RES (1)..(3): Xaa is C or S

SEQ ID NO: 14679 - protein, 27 aa, Artificial Sequence
  Cyclic GFR-binding peptide
  MOD_RES (1)..(1): Xaa is C or S
XSRVVMNNSLQEIVNSSDDYYLVTLPE

SEQ ID NO: 14680 - protein, 29 aa, Artificial Sequence
  Cyclic GFR-binding peptide
  MOD_RES (1)..(1): Xaa is C or S
XGEVVMDRYKKLVVKENEDFYLMSIANLE

SEQ ID NO: 14681 - protein, 34 aa, Artificial Sequence
  Cyclic GFR-binding peptide
  MOD_RES (31)..(32): Xaa is C or S
EVVMDNSLQEVVKENEDYYVMPLPELETPVXXAK

SEQ ID NO: 14682 - protein, 31 aa, Artificial Sequence
  Cyclic GFR-binding peptide
  MOD_RES (30)..(31): Xaa is C or S
VVMNNSLQEIVNSSDDYYLVTLPELKTPAXX

SEQ ID NO: 14683 - protein, 39 aa, Artificial Sequence
  Cyclic GFR-binding peptide
  MOD_RES (2)..(34)..(35): Xaa is C or S
GXARVVMNNSLQEIVNSSDDYYVVPLPELQTPAXXPKPV

SEQ ID NO: 14684 - protein, 33 aa, Artificial Sequence
  Cyclic GFR-binding peptide
  MOD_RES (27)..(28): Xaa is C or S
DNSLQEVVKENEDYYLMTLPELETPVXXAKPIK

SEQ ID NO: 14685 - protein, 25 aa, Artificial Sequence
  Cyclic GFR-binding peptide
NNSLQEIVNSSDDYYLVTLPELQTP

SEQ ID NO: 14686 - protein, 29 aa, Artificial Sequence
  Cyclic GFR-binding peptide
  MOD_RES (26)..(27): Xaa is C or S
RYKKLIKPTKGIFYLISIANLDQSVXXPS

SEQ ID NO: 14687 - protein, 36 aa, Artificial Sequence; identical to SEQ ID NO: 4193
  Cyclic GFR-binding peptide
  MOD_RES (1)..(33): Xaa is C or S

SEQ ID NO: 14688 - protein, 35 aa, Artificial Sequence
  Cyclic GFR-binding peptide
  MOD_RES (2)..(34)..(35): Xaa is C or S
GXSEVVMDQYNKLVVNNASDLYLISIASLRTPVXX

SEQ ID NO: 14689 - protein, 31 aa, Artificial Sequence; identical to SEQ ID NO: 4194
  Cyclic GFR-binding peptide
  MOD_RES (1)..(3): Xaa is C or S

SEQ ID NO: 14690 - protein, 34 aa, Artificial Sequence
  Cyclic GFR-binding peptide
  MOD_RES (2)..(33)..(34): Xaa is C or S
KXSRVIMNSLQEVKPKRGVYYLITLPELAQPVXX

SEQ ID NO: 14691 - protein, 36 aa, Artificial Sequence; identical to SEQ ID NO: 4199
  Cyclic GFR-binding peptide
  MOD_RES (2)..(33)..(34): Xaa is C or S

SEQ ID NO: 14692 - protein, 31 aa, Artificial Sequence; identical to SEQ ID NO: 4201
  Cyclic GFR-binding peptide
  MOD_RES (30)..(30): Xaa is C or S

SEQ ID NO: 14693 - protein, 26 aa, Artificial Sequence
  Cyclic GFR-binding peptide
EVVMEEYQKYVVKDYEDIFLMSIPSL

SEQ ID NO: 14694 - protein, 28 aa, Artificial Sequence
  Cyclic GFR-binding peptide
  MOD_RES (2)..(2): Xaa is C or S
KXSKVIMEYQKYIKPTKGIIFLISIPSL

SEQ ID NO: 14695 - protein, 32 aa, Artificial Sequence; identical to SEQ ID NO: 4204
  Cyclic GFR-binding peptide
  MOD_RES (1)..(32): Xaa is C or S

SEQ ID NO: 14696 - protein, 31 aa, Artificial Sequence; identical to SEQ ID NO: 4205
  Cyclic GFR-binding peptide
  MOD_RES (27)..(28): Xaa is C or S

SEQ ID NO: 14697 - protein, 21 aa, Artificial Sequence
  Cyclic GFR-binding peptide
NEYQKYIVNSSDDIFLVSIPS

SEQ ID NO: 14698 - protein, 26 aa, Artificial Sequence
  Cyclic GFR-binding peptide
KVVMEYQKYVKPTRGVIFLISIPSLD

SEQ ID NO: 14699 - protein, 35 aa, Artificial Sequence
  Cyclic GFR-binding peptide
  MOD_RES (30)..(31): Xaa is C or S
VVMENSLQEVVKDYEDYYLMTLPELETPVXXAKPI

SEQ ID NO: 14700 - protein, 31 aa, Artificial Sequence
  Cyclic GFR-binding peptide
  MOD_RES (30)..(31): Xaa is C or S
VVMDNSLQEVVKENEDYYVMPLPELETPVXX

SEQ ID NO: 14701 - protein, 28 aa, Artificial Sequence
  Cyclic GFR-binding peptide
VMNNSLQEIVNSSDDYYLVTLPELQTPA

SEQ ID NO: 14702 - protein, 34 aa, Artificial Sequence
  Cyclic GFR-binding peptide
  MOD_RES (31)..(32): Xaa is C or S
EVVMDNSLQEVVNNASDYYVIPLPELRTPVXXTP

SEQ ID NO: 14703 - protein, 29 aa, Artificial Sequence
  Cyclic GFR-binding peptide
  MOD_RES (1)..(1): Xaa is C or S
XGEVVMENSLQEVVKDYEDYYVMPLPELE

SEQ ID NO: 14704 - protein, 33 aa, Artificial Sequence
  Cyclic GFR-binding peptide
  MOD_RES (32)..(33): Xaa is C or S
SEVVMDNSLQEVVNNASDYYVIPLPELRTPVXX

SEQ ID NO: 14705 - protein, 27 aa, Artificial Sequence
  Cyclic GFR-binding peptide
  MOD_RES (1)..(1): Xaa is C or S
XSKVVMNSLQEVKPTRGVYYVIPLPEL

SEQ ID NO: 14706 - protein, 22 aa, Artificial Sequence
  Cyclic GFR-binding peptide
EYQKYIVNSSDDIFLVSIPSLK

SEQ ID NO: 14707 - protein, 32 aa, Artificial Sequence
  Cyclic GFR-binding peptide
  MOD_RES (30)..(31): Xaa is C or S
VVMDNSLQEVVNNASDYYLITLPELRTPVXXT

SEQ ID NO: 14708 - protein, 32 aa, Artificial Sequence; identical to SEQ ID NO: 4212
  Cyclic GFR-binding peptide
  MOD_RES (31)..(32): Xaa is C or S

SEQ ID NO: 14709 - protein, 30 aa, Artificial Sequence
  Cyclic GFR-binding peptide
  MOD_RES (29)..(30): Xaa is C or S
VIMNSLQEIKPTKGIYYLITLPELDQSVXX

SEQ ID NO: 14710 - protein, 25 aa, Artificial Sequence
  Cyclic GFR-binding peptide
VMDNSLQEVVKENEDYYVMPLPELE

SEQ ID NO: 14711 - protein, 38 aa, Artificial Sequence; identical to SEQ ID NO: 4215
  Cyclic GFR-binding peptide
  MOD_RES (1)..(33)..(34): Xaa is C or S

SEQ ID NO: 14712 - protein, 27 aa, Artificial Sequence
  Cyclic GFR-binding peptide
VVMNSLQEVKPTRGVYYVIPLPELDQP

SEQ ID NO: 14713 - protein, 30 aa, Artificial Sequence
  Cyclic GFR-binding peptide
  MOD_RES (2)..(2): Xaa is C or S
GXARVVMNEYQKYIVNSSDDIFLVSIPSLQ

SEQ ID NO: 14714 - protein, 30 aa, Artificial Sequence
  Cyclic GFR-binding peptide
  MOD_RES (26)..(27): Xaa is C or S
EYQKYVVKENEDIFLMSIPSLETPVXXAKP

SEQ ID NO: 14715 - protein, 33 aa, Artificial Sequence
  Cyclic GFR-binding peptide
  MOD_RES (2)..(33): Xaa is C or S
KXSKVVMEYQKYVKPTRGVIFLISIPSLDQPVX

SEQ ID NO: 14716 - protein, 28 aa, Artificial Sequence
  Cyclic GFR-binding peptide
  MOD_RES (28)..(28): Xaa is C or S
MDQYNKLVVKENEDLYLMSIASLETPVX

SEQ ID NO: 14717 - protein, 31 aa, Artificial Sequence
  Cyclic GFR-binding peptide
  MOD_RES (2)..(2): Xaa is C or S
GXGEVVMEEYQKYVVKDYEDIFLMSIPSLET

SEQ ID NO: 14718 - protein, 32 aa, Artificial Sequence
  Cyclic GFR-binding peptide
  MOD_RES (28)..(29): Xaa is C or S
MNNSLQEIVNSSDDYYVVPLPELQTPAXXPKP

SEQ ID NO: 14719 - protein, 38 aa, Artificial Sequence
  Cyclic GFR-binding peptide
  MOD_RES (2)..(4)..(36): Xaa is C or S
HXGXSRVVMNNSLQEIVNSSDDYYLVTLPELKTPAXTP

SEQ ID NO: 14720 - protein, 35 aa, Artificial Sequence
  Cyclic GFR-binding peptide
  MOD_RES (32)..(32): Xaa is C or S
SRVVMNNSLQEIVNSSDDYYLVTLPELKTPAXTPK

SEQ ID NO: 14721 - protein, 24 aa, Artificial Sequence
  Cyclic GFR-binding peptide
MNNSLQEIVNSSDDYYLVTLPELQ

SEQ ID NO: 14722 - protein, 35 aa, Artificial Sequence
  Cyclic GFR-binding peptide
  MOD_RES (1)..(3)..(35): Xaa is C or S
XGXGEVVMDNSLQEVVKENEDYYVMPLPELETPVX

SEQ ID NO: 14723 - protein, 30 aa, Artificial Sequence; identical to SEQ ID NO: 4222
  Cyclic GFR-binding peptide
  MOD_RES (1)..(1): Xaa is C or S

SEQ ID NO: 14724 - protein, 34 aa, Artificial Sequence; identical to SEQ ID NO: 4225
  Cyclic GFR-binding peptide
  MOD_RES (2)..(33)..(34): Xaa is C or S

SEQ ID NO: 14725 - protein, 38 aa, Artificial Sequence
  Cyclic GFR-binding peptide
  MOD_RES (2)..(33)..(34): Xaa is C or S
KXSKVIMEYQKYIKPTKGIIFLISIPSLDQSVXXPSAS

SEQ ID NO: 14726 - protein, 38 aa, Artificial Sequence; identical to SEQ ID NO: 4227
  Cyclic GFR-binding peptide
  MOD_RES (1)..(33)..(34): Xaa is C or S

SEQ ID NO: 14727 - protein, 29 aa, Artificial Sequence
  Cyclic GFR-binding peptide
  MOD_RES (28)..(29): Xaa is C or S
VMNSLQEVKPTRGVYYVIPLPELDQPVXX

SEQ ID NO: 14728 - protein, 32 aa, Artificial Sequence; identical to SEQ ID NO: 4230
  Cyclic GFR-binding peptide
  MOD_RES (30)..(31): Xaa is C or S

SEQ ID NO: 14729 - protein, 23 aa, Artificial Sequence
  Cyclic GFR-binding peptide
MNNSLQEIVNSSDDYYLVTLPEL

SEQ ID NO: 14730 - protein, 36 aa, Artificial Sequence; identical to SEQ ID NO: 4231
  Cyclic GFR-binding peptide
  MOD_RES (1)..(33)..(34): Xaa is C or S

SEQ ID NO: 14731 - protein, 30 aa, Artificial Sequence
  Cyclic GFR-binding peptide
  MOD_RES (2)..(4): Xaa is C or S
RXGXGEVVMDNSLQEVVKENEDYYVMPLPE

SEQ ID NO: 14732 - protein, 31 aa, Artificial Sequence
  Cyclic GFR-binding peptide
  MOD_RES (30)..(31): Xaa is C or S
VVMNNSLQEIVNSSDDYYVVPLPELKTPAXX

SEQ ID NO: 14733 - protein, 31 aa, Artificial Sequence; identical to SEQ ID NO: 4232
  Cyclic GFR-binding peptide
  MOD_RES (31)..(31): Xaa is C or S

SEQ ID NO: 14734 - protein, 34 aa, Artificial Sequence; identical to SEQ ID NO: 4234
  Cyclic GFR-binding peptide
  MOD_RES (2)..(34): Xaa is C or S

SEQ ID NO: 14735 - protein, 28 aa, Artificial Sequence
  Cyclic GFR-binding peptide
RVVMNRYKKLIVNSSDDFYLVSIANLQT

SEQ ID NO: 14736 - protein, 35 aa, Artificial Sequence; identical to SEQ ID NO: 4237
  Cyclic GFR-binding peptide
  MOD_RES (1)..(3)..(34)..(35): Xaa is C or S

SEQ ID NO: 14737 - protein, 31 aa, Artificial Sequence
  Cyclic GFR-binding peptide
  MOD_RES (2)..(2): Xaa is C or S
GXSRVVMNEYQKYIVNSSDDIFLVSIPSLKT

SEQ ID NO: 14738 - protein, 38 aa, Artificial Sequence; identical to SEQ ID NO: 4238
  Cyclic GFR-binding peptide
  MOD_RES (2)..(4)..(35)..(36): Xaa is C or S

SEQ ID NO: 14739 - protein, 22 aa, Artificial Sequence
  Cyclic GFR-binding peptide
DNSLQEVVNNASDYYLITLPEL

SEQ ID NO: 14740 - protein, 37 aa, Artificial Sequence
  Cyclic GFR-binding peptide
  MOD_RES (1)..(3)..(35)..(36): Xaa is C or S
XGXSRVVMNEYQKYIVNSSDDIFLVSIPSLKTPAXXP

SEQ ID NO: 14741 - protein, 29 aa, Artificial Sequence
  Cyclic GFR-binding peptide
  MOD_RES (2)..(2): Xaa is C or S
GXGEVVMEQYNKLVVKDYEDLYLMSIASL

SEQ ID NO: 14742 - protein, 30 aa, Artificial Sequence
  Cyclic GFR-binding peptide
  MOD_RES (29)..(30): Xaa is C or S
VIMEYQKYVKPKRGVIFLISIPSLAQPVXX

SEQ ID NO: 14743 - protein, 32 aa, Artificial Sequence
  Cyclic GFR-binding peptide
  MOD_RES (1)..(3): Xaa is C or S
XKXSKVIMNSLQEIKPTKGIYYLITLPELDQS

SEQ ID NO: 14744 - protein, 28 aa, Artificial Sequence
  Cyclic GFR-binding peptide
SKVIMEYQKYIKPTKGIIFLISIPSLDQ

SEQ ID NO: 14745 - protein, 36 aa, Artificial Sequence; identical to SEQ ID NO: 4241
  Cyclic GFR-binding peptide
  MOD_RES (1)..(3)..(35)..(36): Xaa is C or S

SEQ ID NO: 14746 - protein, 30 aa, Artificial Sequence; identical to SEQ ID NO: 4242
  Cyclic GFR-binding peptide

SEQ ID NO: 14747 - protein, 30 aa, Artificial Sequence
  Cyclic GFR-binding peptide
  MOD_RES (2)..(4): Xaa is C or S
SXKXSKVIMNSLQEIKPTKGIYYLITLPEL

SEQ ID NO: 14748 - protein, 37 aa, Artificial Sequence; identical to SEQ ID NO: 4246
  Cyclic GFR-binding peptide
  MOD_RES (1)..(32)..(33): Xaa is C or S

SEQ ID NO: 14749 - protein, 33 aa, Artificial Sequence
  Cyclic GFR-binding peptide
  MOD_RES (27)..(28): Xaa is C or S
DNSLQEVVKENEDYYVMPLPELETPVXXAKPIK

SEQ ID NO: 14750 - protein, 29 aa, Artificial Sequence
  Cyclic GFR-binding peptide
  MOD_RES (2)..(4): Xaa is C or S
SXKXSKVVMQYNKLVKPTRGVLYLISIAS

SEQ ID NO: 14751 - protein, 37 aa, Artificial Sequence
  Cyclic GFR-binding peptide
  MOD_RES (1)..(32)..(33): Xaa is C or S
XSKVVMEYQKYVKPTRGVIFLISIPSLDQPVXXPSAS

SEQ ID NO: 14752 - protein, 27 aa, Artificial Sequence
  Cyclic GFR-binding peptide
  MOD_RES (1)..(1): Xaa is C or S
XSEVVMDRYKKLVVNNASDFYLISIAN

SEQ ID NO: 14753 - protein, 37 aa, Artificial Sequence
  Cyclic GFR-binding peptide
  MOD_RES (31)..(32): Xaa is C or S
EVVMENSLQEVVKDYEDYYLMTLPELETPVXXAKPIS

SEQ ID NO: 14754 - protein, 25 aa, Artificial Sequence
  Cyclic GFR-binding peptide
MRYKKLVKPKRGVFYLISIANLAQP

SEQ ID NO: 14755 - protein, 24 aa, Artificial Sequence
  Cyclic GFR-binding peptide
VMERYKKLVVKDYEDFYLMSIANL

SEQ ID NO: 14756 - protein, 38 aa, Artificial Sequence
  Cyclic GFR-binding peptide
  MOD_RES (1)..(3)..(35)..(36): Xaa is C or S
XGXGEVVMEEYQKYVVKDYEDIFLMSIPSLETPVXXAK

SEQ ID NO: 14757 - protein, 29 aa, Artificial Sequence
  Cyclic GFR-binding peptide
  MOD_RES (1)..(1): Xaa is C or S
XGEVVMEQYNKLVVKDYEDLYLMSIASLE

SEQ ID NO: 14758 - protein, 37 aa, Artificial Sequence; identical to SEQ ID NO: 4256
  Cyclic GFR-binding peptide
  MOD_RES (32)..(33): Xaa is C or S

SEQ ID NO: 14759 - protein, 22 aa, Artificial Sequence
  Cyclic GFR-binding peptide
MNSLQEVKPTRGVYYVIPLPEL

SEQ ID NO: 14760 - protein, 33 aa, Artificial Sequence
  Cyclic GFR-binding peptide
  MOD_RES (28)..(29): Xaa is C or S
MNNSLQEIVNSSDDYYLVTLPELKTPAXXPKPV

SEQ ID NO: 14761 - protein, 31 aa, Artificial Sequence
  Cyclic GFR-binding peptide
  MOD_RES (1)..(1): Xaa is C or S
XGEVVMENSLQEVVKDYEDYYVMPLPELETP

SEQ ID NO: 14762 - protein, 32 aa, Artificial Sequence
  Cyclic GFR-binding peptide
  MOD_RES (2)..(2): Xaa is C or S
KXSKVIMNSLQEIKPTKGIYYLITLPELDQSV

SEQ ID NO: 14763 - protein, 28 aa, Artificial Sequence
  Cyclic GFR-binding peptide
  MOD_RES (28)..(28): Xaa is C or S
MNNSLQEIVNSSDDYYLVTLPELQTPAX

SEQ ID NO: 14764 - protein, 28 aa, Artificial Sequence
  Cyclic GFR-binding peptide
  MOD_RES (1)..(3): Xaa is C or S
XKXSKVIMNSLQEIKPTKGIYYLITLPE

SEQ ID NO: 14765 - protein, 32 aa, Artificial Sequence
  Cyclic GFR-binding peptide
  MOD_RES (30)..(31): Xaa is C or S
RVIMNSLQEVKPKRGVYYLITLPELAQPVXXP

SEQ ID NO: 14766 - protein, 22 aa, Artificial Sequence
  Cyclic GFR-binding peptide
IMQYNKLVKPKRGVLYLISIAS

SEQ ID NO: 14767 - protein, 32 aa, Artificial Sequence; identical to SEQ ID NO: 4262
  Cyclic GFR-binding peptide
  MOD_RES (31)..(32): Xaa is C or S

SEQ ID NO: 14768 - protein, 33 aa, Artificial Sequence; identical to SEQ ID NO: 4263
  Cyclic GFR-binding peptide
  MOD_RES (27)..(28): Xaa is C or S

SEQ ID NO: 14769 - protein, 34 aa, Artificial Sequence; identical to SEQ ID NO: 4266
  Cyclic GFR-binding peptide
  MOD_RES (1)..(3): Xaa is C or S

SEQ ID NO: 14770 - protein, 36 aa, Artificial Sequence
  Cyclic GFR-binding peptide
  MOD_RES (32)..(33): Xaa is C or S
SRVVMNNSLQEIVNSSDDYYVVPLPELKTPAXXPKP

SEQ ID NO: 14771 - protein, 32 aa, Artificial Sequence
  Cyclic GFR-binding peptide
  MOD_RES (26)..(26): Xaa is C or S
NSLQEIVNSSDDYYVVPLPELKTPAXTPKTVH

SEQ ID NO: 14772 - protein, 31 aa, Artificial Sequence; identical to SEQ ID NO: 4267
  Cyclic GFR-binding peptide
  MOD_RES (2)..(4): Xaa is C or S

SEQ ID NO: 14773 - protein, 30 aa, Artificial Sequence
  Cyclic GFR-binding peptide
  MOD_RES (2)..(4): Xaa is C or S
RXGXGEVVMEEYQKYVVKDYEDIFLMSIPS

SEQ ID NO: 14774 - protein, 36 aa, Artificial Sequence
  Cyclic GFR-binding peptide
  MOD_RES (1)..(33)..(34): Xaa is C or S
XSEVVMDNSLQEVVNNASDYYVIPLPELRTPVXXTP

SEQ ID NO: 14775 - protein, 28 aa, Artificial Sequence
  Cyclic GFR-binding peptide
  MOD_RES (28)..(28): Xaa is C or S
IMQYNKLIKPTKGILYLISIASLDQSVX

SEQ ID NO: 14776 - protein, 39 aa, Artificial Sequence; identical to SEQ ID NO: 4273
  Cyclic GFR-binding peptide
  MOD_RES (2)..(34)..(35): Xaa is C or S

SEQ ID NO: 14777 - protein, 25 aa, Artificial Sequence
  Cyclic GFR-binding peptide
MDNSLQEVVNNASDYYVIPLPELRT

SEQ ID NO: 14778 - protein, 38 aa, Artificial Sequence
  Cyclic GFR-binding peptide
  MOD_RES (1)..(33)..(34): Xaa is C or S
XARVVMNEYQKYIVNSSDDIFLVSIPSLQTPAXXPKPV

SEQ ID NO: 14779 - protein, 31 aa, Artificial Sequence
  Cyclic GFR-binding peptide
  MOD_RES (2)..(4): Xaa is C or S
RXGXSEVVMDQYNKLVVNNASDLYLISIASL

SEQ ID NO: 14780 - protein, 24 aa, Artificial Sequence
  Cyclic GFR-binding peptide
VVMERYKKLVVKDYEDFYLMSIAN

SEQ ID NO: 14781 - protein, 22 aa, Artificial Sequence
  Cyclic GFR-binding peptide
EYQKYVKPTRGVIFLISIPSLD

SEQ ID NO: 14782 - protein, 29 aa, Artificial Sequence
  Cyclic GFR-binding peptide
  MOD_RES (1)..(3): Xaa is C or S
XKXSKVVMQYNKLVKPTRGVLYLISIASL

SEQ ID NO: 14783 - protein, 23 aa, Artificial Sequence
  Cyclic GFR-binding peptide
MEYQKYIKPTKGIIFLISIPSLD

SEQ ID NO: 14784 - protein, 32 aa, Artificial Sequence
  Cyclic GFR-binding peptide
  MOD_RES (1)..(1): Xaa is C or S
XARVVMNNSLQEIVNSSDDYYVVPLPELQTPA

SEQ ID NO: 14785 - protein, 33 aa, Artificial Sequence; identical to SEQ ID NO: 4281
  Cyclic GFR-binding peptide
  MOD_RES (32)..(33): Xaa is C or S

SEQ ID NO: 14786 - protein, 32 aa, Artificial Sequence
  Cyclic GFR-binding peptide
  MOD_RES (1)..(3): Xaa is C or S
XGXARVVMNNSLQEIVNSSDDYYVVPLPELQT

SEQ ID NO: 14787 - protein, 33 aa, Artificial Sequence
  Cyclic GFR-binding peptide
  MOD_RES (31)..(32): Xaa is C or S
EVVMDEYQKYVVKENEDIFLMSIPSLETPVXXA

SEQ ID NO: 14788 - protein, 24 aa, Artificial Sequence
  Cyclic GFR-binding peptide
MEYQKYIKPTKGIIFLISIPSLDQ

SEQ ID NO: 14789 - protein, 32 aa, Artificial Sequence
  Cyclic GFR-binding peptide
  MOD_RES (26)..(27): Xaa is C or S
EYQKYVKPKRGVIFLISIPSLAQPVXXPAASA

SEQ ID NO: 14790 - protein, 25 aa, Artificial Sequence
  Cyclic GFR-binding peptide
VVMENSLQEVVKDYEDYYVMPLPEL

SEQ ID NO: 14791 - protein, 29 aa, Artificial Sequence
  Cyclic GFR-binding peptide
  MOD_RES (29)..(29): Xaa is C or S
VIMEYQKYVKPKRGVIFLISIPSLAQPVX

SEQ ID NO: 14792 - protein, 25 aa, Artificial Sequence
  Cyclic GFR-binding peptide
MEEYQKYVVKDYEDIFLMSIPSLET

SEQ ID NO: 14793 - protein, 32 aa, Artificial Sequence; identical to SEQ ID NO: 4285
  Cyclic GFR-binding peptide
  MOD_RES (30)..(31): Xaa is C or S

SEQ ID NO: 14794 - protein, 39 aa, Artificial Sequence
  Cyclic GFR-binding peptide
  MOD_RES (2)..(4)..(36)..(37): Xaa is C or S
HXGXARVVMNNSLQEIVNSSDDYYLVTLPELQTPAXXPK

SEQ ID NO: 14795 - protein, 34 aa, Artificial Sequence
  Cyclic GFR-binding peptide
  MOD_RES (31)..(32): Xaa is C or S
EVVMDNSLQEVVNNASDYYLITLPELRTPVXXTP

SEQ ID NO: 14796 - protein, 36 aa, Artificial Sequence
  Cyclic GFR-binding peptide
  MOD_RES (1)..(33)..(34): Xaa is C or S
XARVVMNNSLQEIVNSSDDYYVVPLPELQTPAXXPK

SEQ ID NO: 14797 - protein, 35 aa, Artificial Sequence
  Cyclic GFR-binding peptide
  MOD_RES (2)..(4): Xaa is C or S
RXGXGEVVMEEYQKYVVKDYEDIFLMSIPSLETPV

SEQ ID NO: 14798 - protein, 32 aa, Artificial Sequence
  Cyclic GFR-binding peptide
  MOD_RES (31)..(32): Xaa is C or S
SKVVMEYQKYVKPTRGVIFLISIPSLDQPVXX

SEQ ID NO: 14799 - protein, 37 aa, Artificial Sequence; identical to SEQ ID NO: 4288
  Cyclic GFR-binding peptide
  MOD_RES (31)..(32): Xaa is C or S

SEQ ID NO: 14800 - protein, 35 aa, Artificial Sequence; identical to SEQ ID NO: 4289
  Cyclic GFR-binding peptide
  MOD_RES (1)..(3)..(35): Xaa is C or S

SEQ ID NO: 14801 - protein, 31 aa, Artificial Sequence
  Cyclic GFR-binding peptide
  MOD_RES (28)..(29): Xaa is C or S
MDNSLQEVVKENEDYYVMPLPELETPVXXAK

SEQ ID NO: 14802 - protein, 35 aa, Artificial Sequence
  Cyclic GFR-binding peptide
  MOD_RES (29)..(30): Xaa is C or S
VMNNSLQEIVNSSDDYYVVPLPELKTPAXXPKPVY

SEQ ID NO: 14803 - protein, 34 aa, Artificial Sequence
  Cyclic GFR-binding peptide
  MOD_RES (1)..(33)..(34): Xaa is C or S
XGEVVMDEYQKYVVKENEDIFLMSIPSLETPVXX

SEQ ID NO: 14804 - protein, 30 aa, Artificial Sequence
  Cyclic GFR-binding peptide
  MOD_RES (2)..(4): Xaa is C or S
RXGXSEVVMDRYKKLVVNNASDFYLISIAN

SEQ ID NO: 14805 - protein, 31 aa, Artificial Sequence
  Cyclic GFR-binding peptide
  MOD_RES (31)..(31): Xaa is C or S
SKVVMNSLQEVKPTRGVYYVIPLPELDQPVX

SEQ ID NO: 14806 - protein, 28 aa, Artificial Sequence
  Cyclic GFR-binding peptide
SEVVMDNSLQEVVNNASDYYVIPLPELR

SEQ ID NO: 14807 - protein, 33 aa, Artificial Sequence; identical to SEQ ID NO: 4292
  Cyclic GFR-binding peptide
  MOD_RES (31)..(32): Xaa is C or S

SEQ ID NO: 14808 - protein, 29 aa, Artificial Sequence
  Cyclic GFR-binding peptide
  MOD_RES (1)..(3): Xaa is C or S
XKXSKVIMQYNKLIKPTKGILYLISIASL

SEQ ID NO: 14809 - protein, 34 aa, Artificial Sequence
  Cyclic GFR-binding peptide
  MOD_RES (31)..(31): Xaa is C or S
RVVMNEYQKYIVNSSDDIFLVSIPSLKTPAXTPK

SEQ ID NO: 14810 - protein, 35 aa, Artificial Sequence
  Cyclic GFR-binding peptide
  MOD_RES (29)..(30): Xaa is C or S
VMDNSLQEVVNNASDYYLITLPELRTPVXXTPPTS

SEQ ID NO: 14811 - protein, 35 aa, Artificial Sequence
  Cyclic GFR-binding peptide
  MOD_RES (1)..(33)..(34): Xaa is C or S
XARVVMNNSLQEIVNSSDDYYLVTLPELQTPAXXP

SEQ ID NO: 14812 - protein, 37 aa, Artificial Sequence; identical to SEQ ID NO: 4294
  Cyclic GFR-binding peptide
  MOD_RES (1)..(3)..(35)..(36): Xaa is C or S

SEQ ID NO: 14813 - protein, 34 aa, Artificial Sequence; identical to SEQ ID NO: 4295
  Cyclic GFR-binding peptide
  MOD_RES (1)..(3): Xaa is C or S

SEQ ID NO: 14814 - protein, 31 aa, Artificial Sequence; identical to SEQ ID NO: 4296
  Cyclic GFR-binding peptide
  MOD_RES (2)..(2): Xaa is C or S

SEQ ID NO: 14815 - protein, 31 aa, Artificial Sequence; identical to SEQ ID NO: 4298
  Cyclic GFR-binding peptide
  MOD_RES (2)..(2): Xaa is C or S

SEQ ID NO: 14816 - protein, 39 aa, Artificial Sequence
  Cyclic GFR-binding peptide
  MOD_RES (1)..(3)..(35)..(36): Xaa is C or S
XGXGEVVMDNSLQEVVKENEDYYVMPLPELETPVXXAKP

SEQ ID NO: 14817 - protein, 32 aa, Artificial Sequence; identical to SEQ ID NO: 4302
  Cyclic GFR-binding peptide
  MOD_RES (32)..(32): Xaa is C or S

SEQ ID NO: 14818 - protein, 34 aa, Artificial Sequence; identical to SEQ ID NO: 4304
  Cyclic GFR-binding peptide
  MOD_RES (30)..(31): Xaa is C or S

SEQ ID NO: 14819 - protein, 32 aa, Artificial Sequence
  Cyclic GFR-binding peptide
  MOD_RES (30)..(31): Xaa is C or S
VVMNNSLQEIVNSSDDYYVVPLPELQTPAXXP

SEQ ID NO: 14820 - protein, 34 aa, Artificial Sequence; identical to SEQ ID NO: 4306
  Cyclic GFR-binding peptide
  MOD_RES (31)..(32): Xaa is C or S

SEQ ID NO: 14821 - protein, 32 aa, Artificial Sequence
  Cyclic GFR-binding peptide
  MOD_RES (27)..(28): Xaa is C or S
ENSLQEVVKDYEDYYVMPLPELETPVXXAKPI

SEQ ID NO: 14822 - protein, 28 aa, Artificial Sequence
  Cyclic GFR-binding peptide
  MOD_RES (1)..(1): Xaa is C or S
XSEVVMDQYNKLVVNNASDLYLISIASL

SEQ ID NO: 14823 - protein, 34 aa, Artificial Sequence
  Cyclic GFR-binding peptide
  MOD_RES (30)..(31): Xaa is C or S
VVMDNSLQEVVKENEDYYVMPLPELETPVXXAKP

SEQ ID NO: 14824 - protein, 30 aa, Artificial Sequence; identical to SEQ ID NO: 4308
  Cyclic GFR-binding peptide
  MOD_RES (1)..(1): Xaa is C or S

SEQ ID NO: 14825 - protein, 26 aa, Artificial Sequence
  Cyclic GFR-binding peptide
VVMNNSLQEIVNSSDDYYLVTLPELQ

SEQ ID NO: 14826 - protein, 29 aa, Artificial Sequence
  Cyclic GFR-binding peptide
  MOD_RES (29)..(29): Xaa is C or S
VMDNSLQEVVKENEDYYLMTLPELETPVX

SEQ ID NO: 14827 - protein, 33 aa, Artificial Sequence; identical to SEQ ID NO: 4318
  Cyclic GFR-binding peptide
  MOD_RES (27)..(28): Xaa is C or S

SEQ ID NO: 14828 - protein, 33 aa, Artificial Sequence; identical to SEQ ID NO: 4319
  Cyclic GFR-binding peptide
  MOD_RES (1)..(3): Xaa is C or S

SEQ ID NO: 14829 - protein, 37 aa, Artificial Sequence
  Cyclic GFR-binding peptide
  MOD_RES (2)..(4)..(36)..(37): Xaa is C or S
RXGXSEVVMDNSLQEVVNNASDYYLITLPELRTPVXX

SEQ ID NO: 14830 - protein, 30 aa, Artificial Sequence; identical to SEQ ID NO: 4323
  Cyclic GFR-binding peptide
  MOD_RES (26)..(27): Xaa is C or S

SEQ ID NO: 14831 - protein, 39 aa, Artificial Sequence; identical to SEQ ID NO: 4324
  Cyclic GFR-binding peptide
  MOD_RES (1)..(3)..(34)..(35): Xaa is C or S

SEQ ID NO: 14832 - protein, 21 aa, Artificial Sequence
  Cyclic GFR-binding peptide
RYKKLIKPTKGIFYLISIANL

SEQ ID NO: 14833 - protein, 31 aa, Artificial Sequence
  Cyclic GFR-binding peptide
  MOD_RES (26)..(27): Xaa is C or S
NSLQEVVNNASDYYVIPLPELRTPVXXTPPT

SEQ ID NO: 14834 - protein, 37 aa, Artificial Sequence
  Cyclic GFR-binding peptide
  MOD_RES (2)..(34)..(35): Xaa is C or S
GXSEVVMDRYKKLVVNNASDFYLISIANLRTPVXXTP

SEQ ID NO: 14835 - protein, 40 aa, Artificial Sequence; identical to SEQ ID NO: 4330
  Cyclic GFR-binding peptide
  MOD_RES (2)..(4)..(35)..(36): Xaa is C or S

SEQ ID NO: 14836 - protein, 36 aa, Artificial Sequence
  Cyclic GFR-binding peptide
  MOD_RES (1)..(32)..(33): Xaa is C or S
XSRVIMNSLQEVKPKRGVYYLITLPELAQPVXXPAA

SEQ ID NO: 14837 - protein, 33 aa, Artificial Sequence; identical to SEQ ID NO: 4333
  Cyclic GFR-binding peptide
  MOD_RES (2)..(4): Xaa is C or S

SEQ ID NO: 14838 - protein, 29 aa, Artificial Sequence
  Cyclic GFR-binding peptide
  MOD_RES (27)..(28): Xaa is C or S
NNSLQEIVNSSDDYYLVTLPELQTPAXXP

SEQ ID NO: 14839 - protein, 31 aa, Artificial Sequence; identical to SEQ ID NO: 4334
  Cyclic GFR-binding peptide
  MOD_RES (1)..(3): Xaa is C or S

SEQ ID NO: 14840 - protein, 23 aa, Artificial Sequence
  Cyclic GFR-binding peptide
NQYNKLIVNSSDDLYLVSIASLQ

SEQ ID NO: 14841 - protein, 25 aa, Artificial Sequence
  Cyclic GFR-binding peptide
VIMRYKKLVKPKRGVFYLISIANLA

SEQ ID NO: 14842 - protein, 31 aa, Artificial Sequence
  Cyclic GFR-binding peptide
  MOD_RES (1)..(3): Xaa is C or S
XKXSRVIMNSLQEVKPKRGVYYLITLPELAQ

SEQ ID NO: 14843 - protein, 28 aa, Artificial Sequence
  Cyclic GFR-binding peptide
  MOD_RES (28)..(28): Xaa is C or S
IMNSLQEIKPTKGIYYVIPLPELDQSVX

SEQ ID NO: 14844 - protein, 32 aa, Artificial Sequence; identical to SEQ ID NO: 4337
  Cyclic GFR-binding peptide
  MOD_RES (30)..(31): Xaa is C or S

SEQ ID NO: 14845 - protein, 39 aa, Artificial Sequence; identical to SEQ ID NO: 4340
  Cyclic GFR-binding peptide
  MOD_RES (1)..(3)..(35)..(36): Xaa is C or S

SEQ ID NO: 14846 - protein, 29 aa, Artificial Sequence
  Cyclic GFR-binding peptide
RVIMQYNKLVKPKRGVLYLISIASLAQPV

SEQ ID NO: 14847 - protein, 31 aa, Artificial Sequence
  Cyclic GFR-binding peptide
  MOD_RES (30)..(31): Xaa is C or S
VVMDEYQKYVVKENEDIFLMSIPSLETPVXX

SEQ ID NO: 14848 - protein, 30 aa, Artificial Sequence; identical to SEQ ID NO: 4345
  Cyclic GFR-binding peptide
  MOD_RES (1)..(3): Xaa is C or S

SEQ ID NO: 14849 - protein, 33 aa, Artificial Sequence; identical to SEQ ID NO: 4346
  Cyclic GFR-binding peptide
  MOD_RES (31)..(32): Xaa is C or S

SEQ ID NO: 14850 - protein, 28 aa, Artificial Sequence
  Cyclic GFR-binding peptide
SKVVMRYKKLVKPTRGVFYLISIANLDQ

SEQ ID NO: 14851 - protein, 31 aa, Artificial Sequence; identical to SEQ ID NO: 4350
  Cyclic GFR-binding peptide
  MOD_RES (1)..(1): Xaa is C or S

SEQ ID NO: 14852 - protein, 36 aa, Artificial Sequence
  Cyclic GFR-binding peptide
  MOD_RES (32)..(33): Xaa is C or S
GEVVMENSLQEVVKDYEDYYVMPLPELETPVXXAKP

SEQ ID NO: 14853 - protein, 34 aa, Artificial Sequence
  Cyclic GFR-binding peptide
  MOD_RES (30)..(30): Xaa is C or S
VVMNNSLQEIVNSSDDYYLVTLPELKTPAXTPKT

SEQ ID NO: 14854 - protein, 30 aa, Artificial Sequence
  Cyclic GFR-binding peptide
  MOD_RES (29)..(30): Xaa is C or S
VMNNSLQEIVNSSDDYYVVPLPELKTPAXX

SEQ ID NO: 14855 - protein, 34 aa, Artificial Sequence
  Cyclic GFR-binding peptide
  MOD_RES (31)..(32): Xaa is C or S
EVVMENSLQEVVKDYEDYYVMPLPELETPVXXAK

SEQ ID NO: 14856 - protein, 30 aa, Artificial Sequence; identical to SEQ ID NO: 4352
  Cyclic GFR-binding peptide
  MOD_RES (2)..(2): Xaa is C or S

SEQ ID NO: 14857 - protein, 31 aa, Artificial Sequence
  Cyclic GFR-binding peptide
  MOD_RES (2)..(4): Xaa is C or S
SXKXSRVIMNSLQEVKPKRGVYYVIPLPELA

SEQ ID NO: 14858 - protein, 32 aa, Artificial Sequence; identical to SEQ ID NO: 4355
  Cyclic GFR-binding peptide
  MOD_RES (2)..(4): Xaa is C or S

SEQ ID NO: 14859 - protein, 20 aa, Artificial Sequence
  Cyclic GFR-binding peptide
NSLQEVVKENEDYYLMTLPE

SEQ ID NO: 14860 - protein, 34 aa, Artificial Sequence
  Cyclic GFR-binding peptide
  MOD_RES (31)..(32): Xaa is C or S
EVVMDRYKKLVVNNASDFYLISIANLRTPVXXTP

SEQ ID NO: 14861 - protein, 29 aa, Artificial Sequence
  Cyclic GFR-binding peptide
RVVMNRYKKLIVNSSDDFYLVSIANLQTP

SEQ ID NO: 14862 - protein, 32 aa, Artificial Sequence
  Cyclic GFR-binding peptide
  MOD_RES (2)..(4): Xaa is C or S
HXGXARVVMNNSLQEIVNSSDDYYVVPLPELQ

SEQ ID NO: 14863 - protein, 38 aa, Artificial Sequence; identical to SEQ ID NO: 4365
  Cyclic GFR-binding peptide
  MOD_RES (2)..(33)..(34): Xaa is C or S

SEQ ID NO: 14864 - protein, 33 aa, Artificial Sequence
  Cyclic GFR-binding peptide
  MOD_RES (1)..(33): Xaa is C or S
XGEVVMENSLQEVVKDYEDYYVMPLPELETPVX

SEQ ID NO: 14865 - protein, 36 aa, Artificial Sequence
  Cyclic GFR-binding peptide
  MOD_RES (1)..(33)..(34): Xaa is C or S
XGEVVMENSLQEVVKDYEDYYVMPLPELETPVXXAK

SEQ ID NO: 14866 - protein, 34 aa, Artificial Sequence
  Cyclic GFR-binding peptide
  MOD_RES (31)..(32): Xaa is C or S
RVVMNNSLQEIVNSSDDYYVVPLPELKTPAXXPK

SEQ ID NO: 14867 - protein, 36 aa, Artificial Sequence; identical to SEQ ID NO: 4367
  Cyclic GFR-binding peptide
  MOD_RES (31)..(32): Xaa is C or S

SEQ ID NO: 14868 - protein, 36 aa, Artificial Sequence
  Cyclic GFR-binding peptide
  MOD_RES (31)..(32): Xaa is C or S
RVVMNNSLQEIVNSSDDYYVVPLPELKTPAXXPKPV

SEQ ID NO: 14869 - protein, 34 aa, Artificial Sequence; identical to SEQ ID NO: 4371
  Cyclic GFR-binding peptide
  MOD_RES (31)..(32): Xaa is C or S

SEQ ID NO: 14870 - protein, 28 aa, Artificial Sequence
  Cyclic GFR-binding peptide
  MOD_RES (27)..(28): Xaa is C or S
NNSLQEIVNSSDDYYVVPLPELKTPAXX

SEQ ID NO: 14871 - protein, 30 aa, Artificial Sequence
  Cyclic GFR-binding peptide
  MOD_RES (2)..(4): Xaa is C or S
SXKXSRVIMNSLQEVKPKRGVYYVIPLPEL

SEQ ID NO: 14872 - protein, 36 aa, Artificial Sequence
  Cyclic GFR-binding peptide
  MOD_RES (2)..(34)..(35): Xaa is C or S
GXGEVVMDNSLQEVVKENEDYYLMTLPELETPVXXA

SEQ ID NO: 14873 - protein, 39 aa, Artificial Sequence
  Cyclic GFR-binding peptide
  MOD_RES (1)..(33)..(34): Xaa is C or S
XSEVVMDNSLQEVVNNASDYYVIPLPELRTPVXXTPPTS

SEQ ID NO: 14874 - protein, 41 aa, Artificial Sequence
  Cyclic GFR-binding peptide
  MOD_RES (2)..(4)..(35)..(36): Xaa is C or S
SXKXSKVVMNSLQEVKPTRGVYYVIPLPELDQPVXXPSASA

SEQ ID NO: 14875 - protein, 29 aa, Artificial Sequence
  Cyclic GFR-binding peptide
KVIMRYKKLIKPTKGIFYLISIANLDQSV

SEQ ID NO: 14876 - protein, 32 aa, Artificial Sequence; identical to SEQ ID NO: 4376
  Cyclic GFR-binding peptide
  MOD_RES (28)..(29): Xaa is C or S

SEQ ID NO: 14877 - protein, 39 aa, Artificial Sequence
  Cyclic GFR-binding peptide
  MOD_RES (2)..(4)..(35)..(36): Xaa is C or S
SXKXSKVVMNSLQEVKPTRGVYYVIPLPELDQPVXXPSA

SEQ ID NO: 14878 - protein, 39 aa, Artificial Sequence
  Cyclic GFR-binding peptide
  MOD_RES (1)..(33)..(34): Xaa is C or S
XSRVVMNEYQKYIVNSSDDIFLVSIPSLKTPAXXPKPVY

SEQ ID NO: 14879 - protein, 24 aa, Artificial Sequence
  Cyclic GFR-binding peptide
VIMEYQKYIKPTKGIIFLISIPSL

SEQ ID NO: 14880 - protein, 23 aa, Artificial Sequence
  Cyclic GFR-binding peptide
IMEYQKYVKPKRGVIFLISIPSL

SEQ ID NO: 14881 - protein, 31 aa, Artificial Sequence
  Cyclic GFR-binding peptide
  MOD_RES (27)..(28): Xaa is C or S
MEYQKYVKPTRGVIFLISIPSLDQPVXXPSA

SEQ ID NO: 14882 - protein, 29 aa, Artificial Sequence
  Cyclic GFR-binding peptide
  MOD_RES (29)..(29): Xaa is C or S
VMDQYNKLVVKENEDLYLMSIASLETPVX

SEQ ID NO: 14883 - protein, 37 aa, Artificial Sequence
  Cyclic GFR-binding peptide
  MOD_RES (2)..(34)..(35): Xaa is C or S
GXSRVVMNNSLQEIVNSSDDYYVVPLPELKTPAXXPK

SEQ ID NO: 14884 - protein, 37 aa, Artificial Sequence
  Cyclic GFR-binding peptide
  MOD_RES (31)..(32): Xaa is C or S
SKVIMNSLQEIKPTKGIYYVIPLPELDQSVXXPSASA

SEQ ID NO: 14885 - protein, 37 aa, Artificial Sequence; identical to SEQ ID NO: 4384
  Cyclic GFR-binding peptide
  MOD_RES (31)..(32): Xaa is C or S

SEQ ID NO: 14886 - protein, 31 aa, Artificial Sequence
  Cyclic GFR-binding peptide
  MOD_RES (28)..(29): Xaa is C or S
MDRYKKLVVNNASDFYLISIANLRTPVXXTP

SEQ ID NO: 14887 - protein, 33 aa, Artificial Sequence; identical to SEQ ID NO: 4386
  Cyclic GFR-binding peptide
  MOD_RES (28)..(29): Xaa is C or S

SEQ ID NO: 14888 - protein, 32 aa, Artificial Sequence
  Cyclic GFR-binding peptide
  MOD_RES (32)..(32): Xaa is C or S
SEVVMDNSLQEVVNNASDYYLITLPELRTPVX

SEQ ID NO: 14889 - protein, 39 aa, Artificial Sequence
  Cyclic GFR-binding peptide
  MOD_RES (1)..(3)..(35)..(36): Xaa is C or S
XGXGEVVMENSLQEVVKDYEDYYLMTLPELETPVXXAKP

SEQ ID NO: 14890 - protein, 21 aa, Artificial Sequence
  Cyclic GFR-binding peptide
MNSLQEIKPTKGIYYLITLPE

SEQ ID NO: 14891 - protein, 22 aa, Artificial Sequence
  Cyclic GFR-binding peptide
MEYQKYVKPKRGVIFLISIPSL

SEQ ID NO: 14892 - protein, 29 aa, Artificial Sequence
  Cyclic GFR-binding peptide
  MOD_RES (26)..(27): Xaa is C or S
QYNKLVKPKRGVLYLISIASLAQPVXXPA

SEQ ID NO: 14893 - protein, 33 aa, Artificial Sequence; identical to SEQ ID NO: 4394
  Cyclic GFR-binding peptide
  MOD_RES (1)..(3): Xaa is C or S

SEQ ID NO: 14894 - protein, 33 aa, Artificial Sequence; identical to SEQ ID NO: 4395
  Cyclic GFR-binding peptide
  MOD_RES (1)..(3): Xaa is C or S

SEQ ID NO: 14895 - protein, 37 aa, Artificial Sequence
  Cyclic GFR-binding peptide
  MOD_RES (1)..(3)..(34)..(35): Xaa is C or S
XKXSKVIMNSLQEIKPTKGIYYLITLPELDQSVXXPS

SEQ ID NO: 14896 - protein, 31 aa, Artificial Sequence; identical to SEQ ID NO: 4397
  Cyclic GFR-binding peptide
  MOD_RES (1)..(1): Xaa is C or S

SEQ ID NO: 14897 - protein, 31 aa, Artificial Sequence; identical to SEQ ID NO: 4399
  Cyclic GFR-binding peptide
  MOD_RES (29)..(30): Xaa is C or S

SEQ ID NO: 14898 - protein, 37 aa, Artificial Sequence; identical to SEQ ID NO: 4400
  Cyclic GFR-binding peptide
  MOD_RES (32)..(33): Xaa is C or S

SEQ ID NO: 14899 - protein, 33 aa, Artificial Sequence; identical to SEQ ID NO: 4402
  Cyclic GFR-binding peptide
  MOD_RES (1)..(32)..(33): Xaa is C or S

SEQ ID NO: 14900 - protein, 28 aa, Artificial Sequence
  Cyclic GFR-binding peptide
VVMNRYKKLIVNSSDDFYLVSIANLQTP

SEQ ID NO: 14901 - protein, 36 aa, Artificial Sequence
  Cyclic GFR-binding peptide
  MOD_RES (30)..(31): Xaa is C or S
KVIMNSLQEIKPTKGIYYVIPLPELDQSVXXPSASA

SEQ ID NO: 14902 - protein, 36 aa, Artificial Sequence; identical to SEQ ID NO: 4405
  Cyclic GFR-binding peptide
  MOD_RES (2)..(34)..(35): Xaa is C or S

SEQ ID NO: 14903 - protein, 28 aa, Artificial Sequence
  Cyclic GFR-binding peptide
ARVVMNQYNKLIVNSSDDLYLVSIASLQ

SEQ ID NO: 14904 - protein, 26 aa, Artificial Sequence
  Cyclic GFR-binding peptide
VMNNSLQEIVNSSDDYYLVTLPELKT

SEQ ID NO: 14905 - protein, 32 aa, Artificial Sequence; identical to SEQ ID NO: 4407
  Cyclic GFR-binding peptide
  MOD_RES (26)..(26): Xaa is C or S

SEQ ID NO: 14906 - protein, 42 aa, Artificial Sequence
  Cyclic GFR-binding peptide
  MOD_RES (2)..(4)..(36)..(37): Xaa is C or S
RXGXSEVVMDQYNKLVVNNASDLYLISIASLRTPVXXTPPTS

SEQ ID NO: 14907 - protein, 33 aa, Artificial Sequence; identical to SEQ ID NO: 4408
  Cyclic GFR-binding peptide
  MOD_RES (2)..(33): Xaa is C or S

SEQ ID NO: 14908 - protein, 37 aa, Artificial Sequence; identical to SEQ ID NO: 4409
  Cyclic GFR-binding peptide
  MOD_RES (32)..(33): Xaa is C or S

SEQ ID NO: 14909 - protein, 32 aa, Artificial Sequence
  Cyclic GFR-binding peptide
  MOD_RES (1)..(1): Xaa is C or S
XGEVVMEEYQKYVVKDYEDIFLMSIPSLETPV

SEQ ID NO: 14910 - protein, 38 aa, Artificial Sequence
  Cyclic GFR-binding peptide
  MOD_RES (2)..(4)..(36)..(37): Xaa is C or S
RXGXSEVVMDQYNKLVVNNASDLYLISIASLRTPVXXT

SEQ ID NO: 14911 - protein, 28 aa, Artificial Sequence
  Cyclic GFR-binding peptide
SRVVMNRYKKLIVNSSDDFYLVSIANLK

SEQ ID NO: 14912 - protein, 39 aa, Artificial Sequence; identical to SEQ ID NO: 4414
  Cyclic GFR-binding peptide
  MOD_RES (1)..(33)..(34): Xaa is C or S

SEQ ID NO: 14913 - protein, 36 aa, Artificial Sequence; identical to SEQ ID NO: 4415
  Cyclic GFR-binding peptide
  MOD_RES (31)..(32): Xaa is C or S

SEQ ID NO: 14914 - protein, 33 aa, Artificial Sequence; identical to SEQ ID NO: 4416
  Cyclic GFR-binding peptide
  MOD_RES (28)..(29): Xaa is C or S

SEQ ID NO: 14915 - protein, 28 aa, Artificial Sequence
  Cyclic GFR-binding peptide
  MOD_RES (2)..(2): Xaa is C or S
KXSKVIMRYKKLIKPTKGIFYLISIANL

SEQ ID NO: 14916 - protein, 28 aa, Artificial Sequence
  Cyclic GFR-binding peptide
ARVVMNEYQKYIVNSSDDIFLVSIPSLQ

SEQ ID NO: 14917 - protein, 37 aa, Artificial Sequence; identical to SEQ ID NO: 4420
  Cyclic GFR-binding peptide
  MOD_RES (31)..(32): Xaa is C or S

SEQ ID NO: 14918 - protein, 30 aa, Artificial Sequence
  Cyclic GFR-binding peptide
  MOD_RES (26)..(27): Xaa is C or S
NSLQEVVKDYEDYYLMTLPELETPVXXAKP

SEQ ID NO: 14919 - protein, 35 aa, Artificial Sequence
  Cyclic GFR-binding peptide
  MOD_RES (2)..(34)..(35): Xaa is C or S
GXSRVVMNNSLQEIVNSSDDYYVVPLPELKTPAXX

SEQ ID NO: 14920 - protein, 26 aa, Artificial Sequence
  Cyclic GFR-binding peptide
SRVVMNEYQKYIVNSSDDIFLVSIPS

SEQ ID NO: 14921 - protein, 33 aa, Artificial Sequence
  Cyclic GFR-binding peptide
  MOD_RES (32)..(32): Xaa is C or S
SRVVMNNSLQEIVNSSDDYYVVPLPELKTPAXT

SEQ ID NO: 14922 - protein, 39 aa, Artificial Sequence; identical to SEQ ID NO: 4426
  Cyclic GFR-binding peptide
  MOD_RES (2)..(4)..(35)..(36): Xaa is C or S

SEQ ID NO: 14923 - protein, 39 aa, Artificial Sequence
  Cyclic GFR-binding peptide
  MOD_RES (2)..(33)..(34): Xaa is C or S
KXSRVIMNSLQEVKPKRGVYYLITLPELAQPVXXPAASA

SEQ ID NO: 14924 - protein, 31 aa, Artificial Sequence
  Cyclic GFR-binding peptide
  MOD_RES (26)..(27): Xaa is C or S
NSLQEVVKDYEDYYLMTLPELETPVXXAKPI

SEQ ID NO: 14925 - protein, 29 aa, Artificial Sequence
  Cyclic GFR-binding peptide
  MOD_RES (1)..(3): Xaa is C or S
XKXSRVIMRYKKLVKPKRGVFYLISIANL

SEQ ID NO: 14926 - protein, 25 aa, Artificial Sequence
  Cyclic GFR-binding peptide
NRYKKLIVNSSDDFYLVSIANLKTP

SEQ ID NO: 14927 - protein, 28 aa, Artificial Sequence
  Cyclic GFR-binding peptide
EVVMEEYQKYVVKDYEDIFLMSIPSLET

SEQ ID NO: 14928 - protein, 34 aa, Artificial Sequence
  Cyclic GFR-binding peptide
  MOD_RES (2)..(4): Xaa is C or S
SXKXSRVIMEYQKYVKPKRGVIFLISIPSLAQPV

SEQ ID NO: 14929 - protein, 28 aa, Artificial Sequence
  Cyclic GFR-binding peptide
  MOD_RES (1)..(3): Xaa is C or S
XKXSKVVMRYKKLVKPTRGVFYLISIAN

SEQ ID NO: 14930 - protein, 33 aa, Artificial Sequence; identical to SEQ ID NO: 4431
  Cyclic GFR-binding peptide
  MOD_RES (1)..(3): Xaa is C or S

SEQ ID NO: 14931 - protein, 27 aa, Artificial Sequence
  Cyclic GFR-binding peptide
  MOD_RES (1)..(1): Xaa is C or S
XSKVIMQYNKLIKPTKGILYLISIASL

SEQ ID NO: 14932 - protein, 22 aa, Artificial Sequence
  Cyclic GFR-binding peptide
RYKKLVVKENEDFYLMSIANLE

SEQ ID NO: 14933 - protein, 29 aa, Artificial Sequence
  Cyclic GFR-binding peptide
  MOD_RES (1)..(1): Xaa is C or S
XSEVVMDQYNKLVVNNASDLYLISIASLR

SEQ ID NO: 14934 - protein, 39 aa, Artificial Sequence
  Cyclic GFR-binding peptide
  MOD_RES (2)..(4)..(36)..(37): Xaa is C or S
RXGXSEVVMDQYNKLVVNNASDLYLISIASLRTPVXXTP

SEQ ID NO: 14935 - protein, 32 aa, Artificial Sequence; identical to SEQ ID NO: 4434
  Cyclic GFR-binding peptide
  MOD_RES (32)..(32): Xaa is C or S

SEQ ID NO: 14936 - protein, 37 aa, Artificial Sequence; identical to SEQ ID NO: 4435
  Cyclic GFR-binding peptide
  MOD_RES (1)..(3)..(35)..(36): Xaa is C or S

SEQ ID NO: 14937 - protein, 38 aa, Artificial Sequence; identical to SEQ ID NO: 4436
  Cyclic GFR-binding peptide
  MOD_RES (1)..(33)..(34): Xaa is C or S

SEQ ID NO: 14938 - protein, 24 aa, Artificial Sequence
  Cyclic GFR-binding peptide
EYQKYVKPTRGVIFLISIPSLDQP

SEQ ID NO: 14939 - protein, 30 aa, Artificial Sequence
  Cyclic GFR-binding peptide
  MOD_RES (30)..(30): Xaa is C or S
VVMNNSLQEIVNSSDDYYVVPLPELQTPAX

SEQ ID NO: 14940 - protein, 26 aa, Artificial Sequence
  Cyclic GFR-binding peptide
SKVVMQYNKLVKPTRGVLYLISIASL

SEQ ID NO: 14941 - protein, 26 aa, Artificial Sequence
  Cyclic GFR-binding peptide
MNSLQEIKPTKGIYYLITLPELDQSV

SEQ ID NO: 14942 - protein, 36 aa, Artificial Sequence
  Cyclic GFR-binding peptide
  MOD_RES (1)..(3)..(34)..(35): Xaa is C or S
XKXSRVIMNSLQEVKPKRGVYYLITLPELAQPVXXP

SEQ ID NO: 14943 - protein, 36 aa, Artificial Sequence
  Cyclic GFR-binding peptide
  MOD_RES (30)..(31): Xaa is C or S
RVIMNSLQEVKPKRGVYYLITLPELAQPVXXPAASA

SEQ ID NO: 14944 - protein, 30 aa, Artificial Sequence; identical to SEQ ID NO: 4444
  Cyclic GFR-binding peptide

SEQ ID NO: 14945 - protein, 24 aa, Artificial Sequence
  Cyclic GFR-binding peptide
VMRYKKLVKPTRGVFYLISIANLD

SEQ ID NO: 14946 - protein, 26 aa, Artificial Sequence
  Cyclic GFR-binding peptide
  MOD_RES (26)..(26): Xaa is C or S
QYNKLVKPKRGVLYLISIASLAQPVX

SEQ ID NO: 14947 - protein, 32 aa, Artificial Sequence; identical to SEQ ID NO: 4447
  Cyclic GFR-binding peptide
  MOD_RES (32)..(32): Xaa is C or S

SEQ ID NO: 14948 - protein, 28 aa, Artificial Sequence
  Cyclic GFR-binding peptide
  MOD_RES (27)..(28): Xaa is C or S
NRYKKLIVNSSDDFYLVSIANLKTPAXX

SEQ ID NO: 14949 - protein, 31 aa, Artificial Sequence
  Cyclic GFR-binding peptide
  MOD_RES (1)..(3): Xaa is C or S
XGXGEVVMENSLQEVVKDYEDYYVMPLPELE

SEQ ID NO: 14950 - protein, 36 aa, Artificial Sequence; identical to SEQ ID NO: 4449
  Cyclic GFR-binding peptide
  MOD_RES (1)..(3)..(34)..(35): Xaa is C or S

SEQ ID NO: 14951 - protein, 29 aa, Artificial Sequence
  Cyclic GFR-binding peptide
EVVMEQYNKLVVKDYEDLYLMSIASLETP

SEQ ID NO: 14952 - protein, 36 aa, Artificial Sequence; identical to SEQ ID NO: 4451
  Cyclic GFR-binding peptide
  MOD_RES (1)..(3)..(34)..(35): Xaa is C or S

SEQ ID NO: 14953 - protein, 28 aa, Artificial Sequence
  Cyclic GFR-binding peptide
  MOD_RES (26)..(27): Xaa is C or S
EYQKYIVNSSDDIFLVSIPSLQTPAXXP

SEQ ID NO: 14954 - protein, 27 aa, Artificial Sequence
  Cyclic GFR-binding peptide
VMNEYQKYIVNSSDDIFLVSIPSLKTP

SEQ ID NO: 14955 - protein, 40 aa, Artificial Sequence; identical to SEQ ID NO: 4453
  Cyclic GFR-binding peptide
  MOD_RES (2)..(34)..(35): Xaa is C or S

SEQ ID NO: 14956 - protein, 39 aa, Artificial Sequence; identical to SEQ ID NO: 4455
  Cyclic GFR-binding peptide
  MOD_RES (2)..(4)..(36)..(37): Xaa is C or S

SEQ ID NO: 14957 - protein, 36 aa, Artificial Sequence; identical to SEQ ID NO: 4457
  Cyclic GFR-binding peptide
  MOD_RES (30)..(31): Xaa is C or S

SEQ ID NO: 14958 - protein, 38 aa, Artificial Sequence
  Cyclic GFR-binding peptide
  MOD_RES (1)..(33)..(34): Xaa is C or S
XARVVMNNSLQEIVNSSDDYYVVPLPELQTPAXXPKPV

SEQ ID NO: 14959 - protein, 30 aa, Artificial Sequence; identical to SEQ ID NO: 4459
  Cyclic GFR-binding peptide
  MOD_RES (29)..(30): Xaa is C or S

SEQ ID NO: 14960 - protein, 27 aa, Artificial Sequence
  Cyclic GFR-binding peptide
VMNQYNKLIVNSSDDLYLVSIASLQTP

SEQ ID NO: 14961 - protein, 37 aa, Artificial Sequence
  Cyclic GFR-binding peptide
  MOD_RES (1)..(33)..(34): Xaa is C or S
XSEVVMDNSLQEVVNNASDYYLITLPELRTPVXXTPP

SEQ ID NO: 14962 - protein, 35 aa, Artificial Sequence
  Cyclic GFR-binding peptide
  MOD_RES (1)..(32)..(33): Xaa is C or S
XSRVIMNSLQEVKPKRGVYYLITLPELAQPVXXPA

SEQ ID NO: 14963 - protein, 35 aa, Artificial Sequence
  Cyclic GFR-binding peptide
  MOD_RES (31)..(32): Xaa is C or S
EVVMDEYQKYVVKENEDIFLMSIPSLETPVXXAKP

SEQ ID NO: 14964 - protein, 30 aa, Artificial Sequence; identical to SEQ ID NO: 4462
  Cyclic GFR-binding peptide

SEQ ID NO: 14965 - protein, 32 aa, Artificial Sequence
  Cyclic GFR-binding peptide
  MOD_RES (1)..(32): Xaa is C or S
XSKVVMNSLQEVKPTRGVYYVIPLPELDQPVX

SEQ ID NO: 14966 - protein, 34 aa, Artificial Sequence
  Cyclic GFR-binding peptide
  MOD_RES (30)..(31): Xaa is C or S
KVIMNSLQEIKPTKGIYYVIPLPELDQSVXXPSA

SEQ ID NO: 14967 - protein, 30 aa, Artificial Sequence
  Cyclic GFR-binding peptide
  MOD_RES (29)..(30): Xaa is C or S
VVMNSLQEVKPTRGVYYVIPLPELDQPVXX

SEQ ID NO: 14968 - protein, 31 aa, Artificial Sequence; identical to SEQ ID NO: 4464
  Cyclic GFR-binding peptide
  MOD_RES (30)..(31): Xaa is C or S

SEQ ID NO: 14969 - protein, 26 aa, Artificial Sequence
  Cyclic GFR-binding peptide
RVIMQYNKLVKPKRGVLYLISIASLA

SEQ ID NO: 14970 - protein, 36 aa, Artificial Sequence
  Cyclic GFR-binding peptide
  MOD_RES (1)..(3)..(34)..(35): Xaa is C or S
XKXSKVIMNSLQEIKPTKGIYYVIPLPELDQSVXXP

SEQ ID NO: 14971 - protein, 23 aa, Artificial Sequence
  Cyclic GFR-binding peptide
NEYQKYIVNSSDDIFLVSIPSLK

SEQ ID NO: 14972 - protein, 31 aa, Artificial Sequence
  Cyclic GFR-binding peptide
  MOD_RES (1)..(1): Xaa is C or S
XSKVIMNSLQEIKPTKGIYYVIPLPELDQSV

SEQ ID NO: 14973 - protein, 37 aa, Artificial Sequence
  Cyclic GFR-binding peptide
  MOD_RES (1)..(3)..(35)..(36): Xaa is C or S
XGXARVVMNEYQKYIVNSSDDIFLVSIPSLQTPAXXP

SEQ ID NO: 14974 - protein, 31 aa, Artificial Sequence
  Cyclic GFR-binding peptide
  MOD_RES (1)..(1): Xaa is C or S
XARVVMNNSLQEIVNSSDDYYVVPLPELQTP

SEQ ID NO: 14975 - protein, 30 aa, Artificial Sequence; identical to SEQ ID NO: 4470
  Cyclic GFR-binding peptide
  MOD_RES (27)..(28): Xaa is C or S

SEQ ID NO: 14976 - protein, 40 aa, Artificial Sequence
  Cyclic GFR-binding peptide
  MOD_RES (2)..(4)..(36)..(37): Xaa is C or S
HXGXARVVMNNSLQEIVNSSDDYYVVPLPELQTPAXXPKP

SEQ ID NO: 14977 - protein, 20 aa, Artificial Sequence
  Cyclic GFR-binding peptide
QYNKLIKPTKGILYLISIAS

SEQ ID NO: 14978 - protein, 26 aa, Artificial Sequence
  Cyclic GFR-binding peptide
ARVVMNEYQKYIVNSSDDIFLVSIPS

SEQ ID NO: 14979 - protein, 33 aa, Artificial Sequence
  Cyclic GFR-binding peptide
  MOD_RES (1)..(3): Xaa is C or S
XGXARVVMNEYQKYIVNSSDDIFLVSIPSLQTP

SEQ ID NO: 14980 - protein, 29 aa, Artificial Sequence
  Cyclic GFR-binding peptide
  MOD_RES (2)..(2): Xaa is C or S
GXARVVMNRYKKLIVNSSDDFYLVSIANL

SEQ ID NO: 14981 - protein, 41 aa, Artificial Sequence
  Cyclic GFR-binding peptide
  MOD_RES (2)..(4)..(36)..(37): Xaa is C or S
HXGXARVVMNNSLQEIVNSSDDYYLVTLPELQTPAXXPKPV

SEQ ID NO: 14982 - protein, 41 aa, Artificial Sequence; identical to SEQ ID NO: 4476
  Cyclic GFR-binding peptide
  MOD_RES (1)..(3)..(35)..(36): Xaa is C or S

SEQ ID NO: 14983 - protein, 32 aa, Artificial Sequence
  Cyclic GFR-binding peptide
  MOD_RES (30)..(31): Xaa is C or S
VVMEEYQKYVVKDYEDIFLMSIPSLETPVXXA

SEQ ID NO: 14984 - protein, 29 aa, Artificial Sequence
  Cyclic GFR-binding peptide
  MOD_RES (1)..(1): Xaa is C or S
XSRVVMNEYQKYIVNSSDDIFLVSIPSLK

SEQ ID NO: 14985 - protein, 37 aa, Artificial Sequence; identical to SEQ ID NO: 4481
  Cyclic GFR-binding peptide
  MOD_RES (1)..(32)..(33): Xaa is C or S

SEQ ID NO: 14986 - protein, 37 aa, Artificial Sequence; identical to SEQ ID NO: 4482
  Cyclic GFR-binding peptide
  MOD_RES (2)..(4)..(35)..(36): Xaa is C or S

SEQ ID NO: 14987 - protein, 31 aa, Artificial Sequence; identical to SEQ ID NO: 4483
  Cyclic GFR-binding peptide
  MOD_RES (31)..(31): Xaa is C or S

SEQ ID NO: 14988 - protein, 30 aa, Artificial Sequence
  Cyclic GFR-binding peptide
  MOD_RES (29)..(30): Xaa is C or S
VMDNSLQEVVNNASDYYVIPLPELRTPVXX

SEQ ID NO: 14989 - protein, 35 aa, Artificial Sequence
  Cyclic GFR-binding peptide
  MOD_RES (32)..(33): Xaa is C or S
SRVVMNEYQKYIVNSSDDIFLVSIPSLKTPAXXPK

SEQ ID NO: 14990 - protein, 30 aa, Artificial Sequence; identical to SEQ ID NO: 4485
  Cyclic GFR-binding peptide
  MOD_RES (1)..(1): Xaa is C or S

SEQ ID NO: 14991 - protein, 21 aa, Artificial Sequence
  Cyclic GFR-binding peptide
ENSLQEVVKDYEDYYVMPLPE

SEQ ID NO: 14992 - protein, 29 aa, Artificial Sequence
  Cyclic GFR-binding peptide
  MOD_RES (28)..(29): Xaa is C or S
IMQYNKLIKPTKGILYLISIASLDQSVXX

SEQ ID NO: 14993 - protein, 28 aa, Artificial Sequence
  Cyclic GFR-binding peptide
  MOD_RES (28)..(28): Xaa is C or S
IMNSLQEVKPKRGVYYLITLPELAQPVX

SEQ ID NO: 14994 - protein, 39 aa, Artificial Sequence; identical to SEQ ID NO: 4487
  Cyclic GFR-binding peptide
  MOD_RES (2)..(4)..(36)..(37): Xaa is C or S

SEQ ID NO: 14995 - protein, 25 aa, Artificial Sequence
  Cyclic GFR-binding peptide
RYKKLIVNSSDDFYLVSIANLKTPA

SEQ ID NO: 14996 - protein, 40 aa, Artificial Sequence
  Cyclic GFR-binding peptide
  MOD_RES (2)..(4)..(36)..(37): Xaa is C or S
HXGXSRVVMNNSLQEIVNSSDDYYVVPLPELKTPAXXPKP

SEQ ID NO: 14997 - protein, 35 aa, Artificial Sequence; identical to SEQ ID NO: 4490
  Cyclic GFR-binding peptide
  MOD_RES (30)..(31): Xaa is C or S

SEQ ID NO: 14998 - protein, 34 aa, Artificial Sequence; identical to SEQ ID NO: 4491
  Cyclic GFR-binding peptide
  MOD_RES (2)..(34): Xaa is C or S

SEQ ID NO: 14999 - protein, 32 aa, Artificial Sequence; identical to SEQ ID NO: 4492
  Cyclic GFR-binding peptide
  MOD_RES (26)..(27): Xaa is C or S

SEQ ID NO: 15000 - protein, 33 aa, Artificial Sequence
  Cyclic GFR-binding peptide
  MOD_RES (2)..(4): Xaa is C or S
RXGXSEVVMDEYQKYVVNNASDIFLISIPSLRT

SEQ ID NO: 15001 - protein, 32 aa, Artificial Sequence
  Cyclic GFR-binding peptide
  MOD_RES (26)..(27): Xaa is C or S
NSLQEIKPTKGIYYLITLPELDQSVXXPSASA

SEQ ID NO: 15002 - protein, 38 aa, Artificial Sequence
  Cyclic GFR-binding peptide
  MOD_RES (2)..(4)..(36)..(37): Xaa is C or S
RXGXGEVVMDEYQKYVVKENEDIFLMSIPSLETPVXXA

SEQ ID NO: 15003 - protein, 29 aa, Artificial Sequence
  Cyclic GFR-binding peptide
  MOD_RES (26)..(27): Xaa is C or S
NSLQEVVKDYEDYYLMTLPELETPVXXAK

SEQ ID NO: 15004 - protein, 24 aa, Artificial Sequence
  Cyclic GFR-binding peptide
RYKKLVVKDYEDFYLMSIANLETP

SEQ ID NO: 15005 - protein, 36 aa, Artificial Sequence
  Cyclic GFR-binding peptide
  MOD_RES (1)..(33)..(34): Xaa is C or S
XGEVVMEEYQKYVVKDYEDIFLMSIPSLETPVXXAK

SEQ ID NO: 15006 - protein, 37 aa, Artificial Sequence; identical to SEQ ID NO: 4499
  Cyclic GFR-binding peptide
  MOD_RES (1)..(3)..(34)..(35): Xaa is C or S

SEQ ID NO: 15007 - protein, 34 aa, Artificial Sequence
  Cyclic GFR-binding peptide
  MOD_RES (28)..(29): Xaa is C or S
MENSLQEVVKDYEDYYVMPLPELETPVXXAKPIS

SEQ ID NO: 15008 - protein, 27 aa, Artificial Sequence
  Cyclic GFR-binding peptide
  MOD_RES (1)..(1): Xaa is C or S
XSRVVMNQYNKLIVNSSDDLYLVSIAS

SEQ ID NO: 15009 - protein, 40 aa, Artificial Sequence
  Cyclic GFR-binding peptide
  MOD_RES (2)..(4)..(36)..(37): Xaa is C or S
RXGXGEVVMEEYQKYVVKDYEDIFLMSIPSLETPVXXAKP

SEQ ID NO: 15010 - protein, 33 aa, Artificial Sequence; identical to SEQ ID NO: 4503
  Cyclic GFR-binding peptide
  MOD_RES (28)..(29): Xaa is C or S

SEQ ID NO: 15011 - protein, 27 aa, Artificial Sequence
  Cyclic GFR-binding peptide
  MOD_RES (1)..(1): Xaa is C or S
XSRVIMQYNKLVKPKRGVLYLISIASL

SEQ ID NO: 15012 - protein, 31 aa, Artificial Sequence
  Cyclic GFR-binding peptide
  MOD_RES (2)..(4): Xaa is C or S
RXGXSEVVMDEYQKYVVNNASDIFLISIPSL

SEQ ID NO: 15013 - protein, 35 aa, Artificial Sequence
  Cyclic GFR-binding peptide
  MOD_RES (2)..(34)..(35): Xaa is C or S
GXARVVMNNSLQEIVNSSDDYYVVPLPELQTPAXX

SEQ ID NO: 15014 - protein, 29 aa, Artificial Sequence
  Cyclic GFR-binding peptide
  MOD_RES (2)..(2): Xaa is C or S
GXSEVVMDNSLQEVVNNASDYYLITLPEL

SEQ ID NO: 15015 - protein, 33 aa, Artificial Sequence; identical to SEQ ID NO: 4507
  Cyclic GFR-binding peptide
  MOD_RES (27)..(28): Xaa is C or S

SEQ ID NO: 15016 - protein, 25 aa, Artificial Sequence
  Cyclic GFR-binding peptide
EVVMEEYQKYVVKDYEDIFLMSIPS

SEQ ID NO: 15017 - protein, 30 aa, Artificial Sequence; identical to SEQ ID NO: 4508
  Cyclic GFR-binding peptide
  MOD_RES (30)..(30): Xaa is C or S

SEQ ID NO: 15018 - protein, 39 aa, Artificial Sequence
  Cyclic GFR-binding peptide
  MOD_RES (1)..(3)..(35)..(36): Xaa is C or S
XGXGEVVMDEYQKYVVKENEDIFLMSIPSLETPVXXAKP

SEQ ID NO: 15019 - protein, 28 aa, Artificial Sequence
  Cyclic GFR-binding peptide
  MOD_RES (28)..(28): Xaa is C or S
MDNSLQEVVKENEDYYVMPLPELETPVX

SEQ ID NO: 15020 - protein, 24 aa, Artificial Sequence
  Cyclic GFR-binding peptide
NSLQEIKPTKGIYYLITLPELDQS

SEQ ID NO: 15021 - protein, 32 aa, Artificial Sequence
  Cyclic GFR-binding peptide
  MOD_RES (1)..(3): Xaa is C or S
XGXSRVVMNNSLQEIVNSSDDYYVVPLPELKT

SEQ ID NO: 15022 - protein, 37 aa, Artificial Sequence
  Cyclic GFR-binding peptide
  MOD_RES (32)..(33): Xaa is C or S
SEVVMDNSLQEVVNNASDYYVIPLPELRTPVXXTPPT

SEQ ID NO: 15023 - protein, 24 aa, Artificial Sequence
  Cyclic GFR-binding peptide
KVIMQYNKLIKPTKGILYLISIAS

SEQ ID NO: 15024 - protein, 29 aa, Artificial Sequence
  Cyclic GFR-binding peptide
  MOD_RES (28)..(29): Xaa is C or S
VMQYNKLVKPTRGVLYLISIASLDQPVXX

SEQ ID NO: 15025 - protein, 29 aa, Artificial Sequence
  Cyclic GFR-binding peptide
  MOD_RES (28)..(29): Xaa is C or S
MDNSLQEVVNNASDYYLITLPELRTPVXX

SEQ ID NO: 15026 - protein, 28 aa, Artificial Sequence
  Cyclic GFR-binding peptide
VVMNEYQKYIVNSSDDIFLVSIPSLQTP

SEQ ID NO: 15027 - protein, 23 aa, Artificial Sequence
  Cyclic GFR-binding peptide
MNSLQEIKPTKGIYYLITLPELD

SEQ ID NO: 15028 - protein, 25 aa, Artificial Sequence
  Cyclic GFR-binding peptide
VIMEYQKYIKPTKGIIFLISIPSLD

SEQ ID NO: 15029 - protein, 27 aa, Artificial Sequence
  Cyclic GFR-binding peptide
MNNSLQEIVNSSDDYYVVPLPELKTPA

SEQ ID NO: 15030 - protein, 29 aa, Artificial Sequence
  Cyclic GFR-binding peptide
  MOD_RES (2)..(2): Xaa is C or S
GXARVVMNEYQKYIVNSSDDIFLVSIPSL

SEQ ID NO: 15031 - protein, 32 aa, Artificial Sequence
  Cyclic GFR-binding peptide
  MOD_RES (31)..(32): Xaa is C or S
EVVMENSLQEVVKDYEDYYVMPLPELETPVXX

SEQ ID NO: 15032 - protein, 33 aa, Artificial Sequence; identical to SEQ ID NO: 4519
  Cyclic GFR-binding peptide
  MOD_RES (2)..(4): Xaa is C or S

SEQ ID NO: 15033 - protein, 32 aa, Artificial Sequence
  Cyclic GFR-binding peptide
  MOD_RES (2)..(2): Xaa is C or S
KXSRVIMNSLQEVKPKRGVYYLITLPELAQPV

SEQ ID NO: 15034 - protein, 36 aa, Artificial Sequence
  Cyclic GFR-binding peptide
  MOD_RES (1)..(3)..(34)..(35): Xaa is C or S
XKXSKVVMEYQKYVKPTRGVIFLISIPSLDQPVXXP

SEQ ID NO: 15035 - protein, 29 aa, Artificial Sequence
  Cyclic GFR-binding peptide
  MOD_RES (2)..(4): Xaa is C or S
SXKXSKVIMEYQKYIKPTKGIIFLISIPS

SEQ ID NO: 15036 - protein, 32 aa, Artificial Sequence; identical to SEQ ID NO: 4522
  Cyclic GFR-binding peptide
  MOD_RES (1)..(3): Xaa is C or S

SEQ ID NO: 15037 - protein, 29 aa, Artificial Sequence
  Cyclic GFR-binding peptide
SKVVMRYKKLVKPTRGVFYLISIANLDQP

SEQ ID NO: 15038 - protein, 39 aa, Artificial Sequence
  Cyclic GFR-binding peptide
  MOD_RES (1)..(33)..(34): Xaa is C or S
XARVVMNNSLQEIVNSSDDYYVVPLPELQTPAXXPKPVT

SEQ ID NO: 15039 - protein, 27 aa, Artificial Sequence
  Cyclic GFR-binding peptide
  MOD_RES (26)..(27): Xaa is C or S
NSLQEIVNSSDDYYVVPLPELQTPAXX

SEQ ID NO: 15040 - protein, 40 aa, Artificial Sequence
  Cyclic GFR-binding peptide
  MOD_RES (2)..(4)..(35)..(36): Xaa is C or S
SXKXSKVIMEYQKYIKPTKGIIFLISIPSLDQSVXXPSAS

SEQ ID NO: 15041 - protein, 34 aa, Artificial Sequence; identical to SEQ ID NO: 4526
  Cyclic GFR-binding peptide
  MOD_RES (1)..(3)..(34): Xaa is C or S

SEQ ID NO: 15042 - protein, 39 aa, Artificial Sequence
  Cyclic GFR-binding peptide
  MOD_RES (2)..(4)..(35)..(36): Xaa is C or S
SXKXSKVVMEYQKYVKPTRGVIFLISIPSLDQPVXXPSA

SEQ ID NO: 15043 - protein, 39 aa, Artificial Sequence; identical to SEQ ID NO: 4528
  Cyclic GFR-binding peptide
  MOD_RES (2)..(33)..(34): Xaa is C or S

SEQ ID NO: 15044 - protein, 32 aa, Artificial Sequence; identical to SEQ ID NO: 4532
  Cyclic GFR-binding peptide
  MOD_RES (29)..(30): Xaa is C or S

SEQ ID NO: 15045 - protein, 30 aa, Artificial Sequence
  Cyclic GFR-binding peptide
EVVMDNSLQEVVNNASDYYVIPLPELRTPV

SEQ ID NO: 15046 - protein, 31 aa, Artificial Sequence; identical to SEQ ID NO: 4534
  Cyclic GFR-binding peptide
  MOD_RES (28)..(29): Xaa is C or S

SEQ ID NO: 15047 - protein, 28 aa, Artificial Sequence
  Cyclic GFR-binding peptide
VMDQYNKLVVKENEDLYLMSIASLETPV

SEQ ID NO: 15048 - protein, 35 aa, Artificial Sequence
  Cyclic GFR-binding peptide
  MOD_RES (29)..(30): Xaa is C or S
VIMNSLQEVKPKRGVYYLITLPELAQPVXXPAASA

SEQ ID NO: 15049 - protein, 29 aa, Artificial Sequence
  Cyclic GFR-binding peptide
  MOD_RES (28)..(29): Xaa is C or S
IMNSLQEIKPTKGIYYVIPLPELDQSVXX

SEQ ID NO: 15050 - protein, 31 aa, Artificial Sequence; identical to SEQ ID NO: 4547
  Cyclic GFR-binding peptide
  MOD_RES (1)..(3): Xaa is C or S

SEQ ID NO: 15051 - protein, 30 aa, Artificial Sequence; identical to SEQ ID NO: 4548
  Cyclic GFR-binding peptide
  MOD_RES (27)..(28): Xaa is C or S

SEQ ID NO: 15052 - protein, 27 aa, Artificial Sequence
  Cyclic GFR-binding peptide
RVVMNRYKKLIVNSSDDFYLVSIANLQ

SEQ ID NO: 15053 - protein, 30 aa, Artificial Sequence; identical to SEQ ID NO: 4552
  Cyclic GFR-binding peptide
  MOD_RES (30)..(30): Xaa is C or S

SEQ ID NO: 15054 - protein, 32 aa, Artificial Sequence; identical to SEQ ID NO: 4553
  Cyclic GFR-binding peptide
  MOD_RES (1)..(1): Xaa is C or S

SEQ ID NO: 15055 - protein, 37 aa, Artificial Sequence
  Cyclic GFR-binding peptide
  MOD_RES (31)..(32): Xaa is C or S
EVVMDNSLQEVVNNASDYYLITLPELRTPVXXTPPTS

SEQ ID NO: 15056 - protein, 30 aa, Artificial Sequence; identical to SEQ ID NO: 4556
  Cyclic GFR-binding peptide
  MOD_RES (28)..(29): Xaa is C or S

SEQ ID NO: 15057 - protein, 27 aa, Artificial Sequence
  Cyclic GFR-binding peptide
SRVIMQYNKLVKPKRGVLYLISIASLA

SEQ ID NO: 15058 - protein, 25 aa, Artificial Sequence
  Cyclic GFR-binding peptide
VMDNSLQEVVNNASDYYVIPLPELR

SEQ ID NO: 15059 - protein, 28 aa, Artificial Sequence
  Cyclic GFR-binding peptide
  MOD_RES (27)..(28): Xaa is C or S
DQYNKLVVKENEDLYLMSIASLETPVXX

SEQ ID NO: 15060 - protein, 38 aa, Artificial Sequence; identical to SEQ ID NO: 4560
  Cyclic GFR-binding peptide
  MOD_RES (1)..(3)..(35)..(36): Xaa is C or S

SEQ ID NO: 15061 - protein, 35 aa, Artificial Sequence
  Cyclic GFR-binding peptide
  MOD_RES (29)..(30): Xaa is C or S
VMDQYNKLVVNNASDLYLISIASLRTPVXXTPPTS

SEQ ID NO: 15062 - protein, 34 aa, Artificial Sequence; identical to SEQ ID NO: 4561
  Cyclic GFR-binding peptide
  MOD_RES (29)..(29): Xaa is C or S

SEQ ID NO: 15063 - protein, 27 aa, Artificial Sequence
  Cyclic GFR-binding peptide
  MOD_RES (1)..(1): Xaa is C or S
XGEVVMDNSLQEVVKENEDYYVMPLPE

SEQ ID NO: 15064 - protein, 32 aa, Artificial Sequence
  Cyclic GFR-binding peptide
  MOD_RES (29)..(30): Xaa is C or S
VMNNSLQEIVNSSDDYYVVPLPELKTPAXXPK

SEQ ID NO: 15065 - protein, 21 aa, Artificial Sequence
  Cyclic GFR-binding peptide
ERYKKLVVKDYEDFYLMSIAN

SEQ ID NO: 15066 - protein, 25 aa, Artificial Sequence
  Cyclic GFR-binding peptide
MQYNKLIKPTKGILYLISIASLDQS

SEQ ID NO: 15067 - protein, 37 aa, Artificial Sequence; identical to SEQ ID NO: 4567
  Cyclic GFR-binding peptide
  MOD_RES (32)..(33): Xaa is C or S

SEQ ID NO: 15068 - protein, 33 aa, Artificial Sequence; identical to SEQ ID NO: 4568
  Cyclic GFR-binding peptide
  MOD_RES (29)..(30): Xaa is C or S

SEQ ID NO: 15069 - protein, 36 aa, Artificial Sequence; identical to SEQ ID NO: 4570
  Cyclic GFR-binding peptide
  MOD_RES (1)..(33)..(34): Xaa is C or S

SEQ ID NO: 15070 - protein, 38 aa, Artificial Sequence
  Cyclic GFR-binding peptide
  MOD_RES (2)..(4)..(36)..(37): Xaa is C or S
RXGXSEVVMDNSLQEVVNNASDYYLITLPELRTPVXXT

SEQ ID NO: 15071 - protein, 23 aa, Artificial Sequence
  Cyclic GFR-binding peptide
VIMQYNKLIKPTKGILYLISIAS

SEQ ID NO: 15072 - protein, 35 aa, Artificial Sequence
  Cyclic GFR-binding peptide
  MOD_RES (1)..(33)..(34): Xaa is C or S
XSEVVMDNSLQEVVNNASDYYLITLPELRTPVXXT

SEQ ID NO: 15073 - protein, 34 aa, Artificial Sequence
  Cyclic GFR-binding peptide
  MOD_RES (2)..(34): Xaa is C or S
GXSEVVMDQYNKLVVNNASDLYLISIASLRTPVX

SEQ ID NO: 15074 - protein, 21 aa, Artificial Sequence
  Cyclic GFR-binding peptide
RYKKLVVKENEDFYLMSIANL

SEQ ID NO: 15075 - protein, 29 aa, Artificial Sequence
  Cyclic GFR-binding peptide
  MOD_RES (27)..(28): Xaa is C or S
MQYNKLVKPKRGVLYLISIASLAQPVXXP

SEQ ID NO: 15076 - protein, 34 aa, Artificial Sequence
  Cyclic GFR-binding peptide
  MOD_RES (32)..(33): Xaa is C or S
GEVVMDNSLQEVVKENEDYYVMPLPELETPVXXA

SEQ ID NO: 15077 - protein, 37 aa, Artificial Sequence
  Cyclic GFR-binding peptide
  MOD_RES (2)..(4)..(36)..(37): Xaa is C or S
RXGXSEVVMDNSLQEVVNNASDYYVIPLPELRTPVXX

SEQ ID NO: 15078 - protein, 28 aa, Artificial Sequence
  Cyclic GFR-binding peptide
  MOD_RES (26)..(27): Xaa is C or S
RYKKLVVKDYEDFYLMSIANLETPVXXA

SEQ ID NO: 15079 - protein, 35 aa, Artificial Sequence; identical to SEQ ID NO: 4582
  Cyclic GFR-binding peptide
  MOD_RES (30)..(31): Xaa is C or S

SEQ ID NO: 15080 - protein, 27 aa, Artificial Sequence
  Cyclic GFR-binding peptide
  MOD_RES (27)..(27): Xaa is C or S
ERYKKLVVKDYEDFYLMSIANLETPVX

SEQ ID NO: 15081 - protein, 29 aa, Artificial Sequence
  Cyclic GFR-binding peptide
  MOD_RES (26)..(27): Xaa is C or S
RYKKLVVNNASDFYLISIANLRTPVXXTP

SEQ ID NO: 15082 - protein, 20 aa, Artificial Sequence
  Cyclic GFR-binding peptide
QYNKLVVKENEDLYLMSIAS

SEQ ID NO: 15083 - protein, 35 aa, Artificial Sequence; identical to SEQ ID NO: 4591
  Cyclic GFR-binding peptide
  MOD_RES (1)..(33): Xaa is C or S

SEQ ID NO: 15084 - protein, 32 aa, Artificial Sequence
  Cyclic GFR-binding peptide
  MOD_RES (29)..(29): Xaa is C or S
VMNNSLQEIVNSSDDYYVVPLPELKTPAXTPK

SEQ ID NO: 15085 - protein, 26 aa, Artificial Sequence
  Cyclic GFR-binding peptide
VIMQYNKLIKPTKGILYLISIASLDQ

SEQ ID NO: 15086 - protein, 33 aa, Artificial Sequence; identical to SEQ ID NO: 4593
  Cyclic GFR-binding peptide
  MOD_RES (27)..(28): Xaa is C or S

SEQ ID NO: 15087 - protein, 30 aa, Artificial Sequence
  Cyclic GFR-binding peptide
RVVMNNSLQEIVNSSDDYYVVPLPELQTPA

SEQ ID NO: 15088 - protein, 31 aa, Artificial Sequence
  Cyclic GFR-binding peptide
  MOD_RES (1)..(1): Xaa is C or S
XSRVIMNSLQEVKPKRGVYYLITLPELAQPV

SEQ ID NO: 15089 - protein, 35 aa, Artificial Sequence; identical to SEQ ID NO: 4598
  Cyclic GFR-binding peptide
  MOD_RES (1)..(32)..(33): Xaa is C or S

SEQ ID NO: 15090 - protein, 35 aa, Artificial Sequence
  Cyclic GFR-binding peptide
  MOD_RES (2)..(34)..(35): Xaa is C or S
GXGEVVMDNSLQEVVKENEDYYLMTLPELETPVXX

SEQ ID NO: 15091 - protein, 27 aa, Artificial Sequence
  Cyclic GFR-binding peptide
MDQYNKLVVKENEDLYLMSIASLETPV

SEQ ID NO: 15092 - protein, 35 aa, Artificial Sequence
  Cyclic GFR-binding peptide
  MOD_RES (2)..(34)..(35): Xaa is C or S
GXSEVVMDRYKKLVVNNASDFYLISIANLRTPVXX

SEQ ID NO: 15093 - protein, 29 aa, Artificial Sequence
  Cyclic GFR-binding peptide
  MOD_RES (28)..(29): Xaa is C or S
MDNSLQEVVKENEDYYVMPLPELETPVXX

SEQ ID NO: 15094 - protein, 39 aa, Artificial Sequence
  Cyclic GFR-binding peptide
  MOD_RES (1)..(33): Xaa is C or S
XSRVVMNNSLQEIVNSSDDYYLVTLPELKTPAXTPKTVH

SEQ ID NO: 15095 - protein, 32 aa, Artificial Sequence
  Cyclic GFR-binding peptide
  MOD_RES (2)..(2): Xaa is C or S
GXSEVVMDRYKKLVVNNASDFYLISIANLRTP

SEQ ID NO: 15096 - protein, 32 aa, Artificial Sequence
  Cyclic GFR-binding peptide
  MOD_RES (28)..(29): Xaa is C or S
IMNSLQEIKPTKGIYYLITLPELDQSVXXPSA

SEQ ID NO: 15097 - protein, 22 aa, Artificial Sequence
  Cyclic GFR-binding peptide
IMEYQKYIKPTKGIIFLISIPS

SEQ ID NO: 15098 - protein, 30 aa, Artificial Sequence; identical to SEQ ID NO: 4601
  Cyclic GFR-binding peptide

SEQ ID NO: 15099 - protein, 33 aa, Artificial Sequence; identical to SEQ ID NO: 4602
  Cyclic GFR-binding peptide
  MOD_RES (1)..(32)..(33): Xaa is C or S

SEQ ID NO: 15100 - protein, 34 aa, Artificial Sequence
  Cyclic GFR-binding peptide
  MOD_RES (2)..(33)..(34): Xaa is C or S
KXSKVIMEYQKYIKPTKGIIFLISIPSLDQSVXX

SEQ ID NO: 15101 - protein, 26 aa, Artificial Sequence
  Cyclic GFR-binding peptide
NQYNKLIVNSSDDLYLVSIASLKTPA

SEQ ID NO: 15102 - protein, 32 aa, Artificial Sequence
  Cyclic GFR-binding peptide
  MOD_RES (2)..(2): Xaa is C or S
GXGEVVMDNSLQEVVKENEDYYLMTLPELETP

SEQ ID NO: 15103 - protein, 32 aa, Artificial Sequence
  Cyclic GFR-binding peptide
  MOD_RES (1)..(1): Xaa is C or S
XGEVVMENSLQEVVKDYEDYYVMPLPELETPV

SEQ ID NO: 15104 - protein, 28 aa, Artificial Sequence
  Cyclic GFR-binding peptide
  MOD_RES (28)..(28): Xaa is C or S
VMQYNKLVKPTRGVLYLISIASLDQPVX

SEQ ID NO: 15105 - protein, 31 aa, Artificial Sequence; identical to SEQ ID NO: 4608
  Cyclic GFR-binding peptide
  MOD_RES (26)..(27): Xaa is C or S

SEQ ID NO: 15106 - protein, 31 aa, Artificial Sequence
  Cyclic GFR-binding peptide
  MOD_RES (28)..(28): Xaa is C or S
MNNSLQEIVNSSDDYYLVTLPELKTPAXTPK

SEQ ID NO: 15107 - protein, 30 aa, Artificial Sequence; identical to SEQ ID NO: 4609
  Cyclic GFR-binding peptide
  MOD_RES (28)..(29): Xaa is C or S

SEQ ID NO: 15108 - protein, 27 aa, Artificial Sequence
  Cyclic GFR-binding peptide
  MOD_RES (27)..(27): Xaa is C or S
MEYQKYIKPTKGIIFLISIPSLDQSVX

SEQ ID NO: 15109 - protein, 34 aa, Artificial Sequence
  Cyclic GFR-binding peptide
  MOD_RES (1)..(33)..(34): Xaa is C or S
XARVVMNEYQKYIVNSSDDIFLVSIPSLQTPAXX

SEQ ID NO: 15110 - protein, 30 aa, Artificial Sequence; identical to SEQ ID NO: 4613
  Cyclic GFR-binding peptide
  MOD_RES (2)..(2): Xaa is C or S

SEQ ID NO: 15111 - protein, 22 aa, Artificial Sequence
  Cyclic GFR-binding peptide
NSLQEVVNNASDYYVIPLPELR

SEQ ID NO: 15112 - protein, 35 aa, Artificial Sequence; identical to SEQ ID NO: 4617
  Cyclic GFR-binding peptide
  MOD_RES (2)..(4): Xaa is C or S

SEQ ID NO: 15113 - protein, 31 aa, Artificial Sequence; identical to SEQ ID NO: 4620
  Cyclic GFR-binding peptide
  MOD_RES (29)..(30): Xaa is C or S

SEQ ID NO: 15114 - protein, 34 aa, Artificial Sequence
  Cyclic GFR-binding peptide
  MOD_RES (28)..(29): Xaa is C or S
MDNSLQEVVKENEDYYLMTLPELETPVXXAKPIK

SEQ ID NO: 15115 - protein, 26 aa, Artificial Sequence
  Cyclic GFR-binding peptide
NRYKKLIVNSSDDFYLVSIANLKTPA

SEQ ID NO: 15116 - protein, 38 aa, Artificial Sequence; identical to SEQ ID NO: 4623
  Cyclic GFR-binding peptide
  MOD_RES (32)..(33): Xaa is C or S

SEQ ID NO: 15117 - protein, 27 aa, Artificial Sequence
  Cyclic GFR-binding peptide
  MOD_RES (1)..(1): Xaa is C or S
XARVVMNQYNKLIVNSSDDLYLVSIAS

SEQ ID NO: 15118 - protein, 30 aa, Artificial Sequence; identical to SEQ ID NO: 4626
  Cyclic GFR-binding peptide
  MOD_RES (26)..(27): Xaa is C or S

SEQ ID NO: 15119 - protein, 37 aa, Artificial Sequence
  Cyclic GFR-binding peptide
  MOD_RES (1)..(3)..(35)..(36): Xaa is C or S
XGXSRVVMNNSLQEIVNSSDDYYVVPLPELKTPAXXP

SEQ ID NO: 15120 - protein, 32 aa, Artificial Sequence; identical to SEQ ID NO: 4628
  Cyclic GFR-binding peptide
  MOD_RES (26)..(26): Xaa is C or S

SEQ ID NO: 15121 - protein, 22 aa, Artificial Sequence
  Cyclic GFR-binding peptide
EYQKYVVKDYEDIFLMSIPSLE

SEQ ID NO: 15122 - protein, 36 aa, Artificial Sequence; identical to SEQ ID NO: 4629
  Cyclic GFR-binding peptide
  MOD_RES (30)..(31): Xaa is C or S

SEQ ID NO: 15123 - protein, 27 aa, Artificial Sequence
  Cyclic GFR-binding peptide
  MOD_RES (27)..(27): Xaa is C or S
MNSLQEIKPTKGIYYLITLPELDQSVX

SEQ ID NO: 15124 - protein, 24 aa, Artificial Sequence
  Cyclic GFR-binding peptide
NRYKKLIVNSSDDFYLVSIANLKT

SEQ ID NO: 15125 - protein, 34 aa, Artificial Sequence
  Cyclic GFR-binding peptide
  MOD_RES (1)..(33): Xaa is C or S
XSRVVMNEYQKYIVNSSDDIFLVSIPSLKTPAXT

SEQ ID NO: 15126 - protein, 26 aa, Artificial Sequence
  Cyclic GFR-binding peptide
VVMNQYNKLIVNSSDDLYLVSIASLK

SEQ ID NO: 15127 - protein, 32 aa, Artificial Sequence
  Cyclic GFR-binding peptide
  MOD_RES (29)..(30): Xaa is C or S
VMNNSLQEIVNSSDDYYLVTLPELQTPAXXPK

SEQ ID NO: 15128 - protein, 34 aa, Artificial Sequence
  Cyclic GFR-binding peptide
  MOD_RES (29)..(30): Xaa is C or S
VMNEYQKYIVNSSDDIFLVSIPSLQTPAXXPKPV

SEQ ID NO: 15129 - protein, 31 aa, Artificial Sequence
  Cyclic GFR-binding peptide
  MOD_RES (2)..(4): Xaa is C or S
HXGXSRVVMNNSLQEIVNSSDDYYLVTLPEL

SEQ ID NO: 15130 - protein, 38 aa, Artificial Sequence; identical to SEQ ID NO: 4634
  Cyclic GFR-binding peptide
  MOD_RES (2)..(4)..(35)..(36): Xaa is C or S

SEQ ID NO: 15131 - protein, 29 aa, Artificial Sequence
  Cyclic GFR-binding peptide
  MOD_RES (1)..(1): Xaa is C or S
XSRVIMNSLQEVKPKRGVYYLITLPELAQ

SEQ ID NO: 15132 - protein, 27 aa, Artificial Sequence
  Cyclic GFR-binding peptide
MNNSLQEIVNSSDDYYLVTLPELQTPA

SEQ ID NO: 15133 - protein, 34 aa, Artificial Sequence; identical to SEQ ID NO: 4637
  Cyclic GFR-binding peptide
  MOD_RES (2)..(4): Xaa is C or S

SEQ ID NO: 15134 - protein, 32 aa, Artificial Sequence
  Cyclic GFR-binding peptide
  MOD_RES (1)..(3): Xaa is C or S
XGXSRVVMNEYQKYIVNSSDDIFLVSIPSLKT

SEQ ID NO: 15135 - protein, 26 aa, Artificial Sequence
  Cyclic GFR-binding peptide
VVMNNSLQEIVNSSDDYYVVPLPELK

SEQ ID NO: 15136 - protein, 32 aa, Artificial Sequence
  Cyclic GFR-binding peptide
  MOD_RES (31)..(32): Xaa is C or S
EVVMDNSLQEVVNNASDYYLITLPELRTPVXX

SEQ ID NO: 15137 - protein, 31 aa, Artificial Sequence
  Cyclic GFR-binding peptide
  MOD_RES (26)..(27): Xaa is C or S
RYKKLVVNNASDFYLISIANLRTPVXXTPPT

SEQ ID NO: 15138 - protein, 30 aa, Artificial Sequence
  Cyclic GFR-binding peptide
  MOD_RES (26)..(27): Xaa is C or S
NSLQEVKPTRGVYYVIPLPELDQPVXXPSA

SEQ ID NO: 15139 - protein, 31 aa, Artificial Sequence; identical to SEQ ID NO: 4640
  Cyclic GFR-binding peptide
  MOD_RES (27)..(28): Xaa is C or S

SEQ ID NO: 15140 - protein, 38 aa, Artificial Sequence
  Cyclic GFR-binding peptide
  MOD_RES (1)..(3)..(35)..(36): Xaa is C or S
XGXGEVVMDNSLQEVVKENEDYYLMTLPELETPVXXAK

SEQ ID NO: 15141 - protein, 38 aa, Artificial Sequence; identical to SEQ ID NO: 4642
  Cyclic GFR-binding peptide
  MOD_RES (2)..(33)..(34): Xaa is C or S

SEQ ID NO: 15142 - protein, 34 aa, Artificial Sequence; identical to SEQ ID NO: 4644
  Cyclic GFR-binding peptide
  MOD_RES (31)..(32): Xaa is C or S

SEQ ID NO: 15143 - protein, 39 aa, Artificial Sequence
  Cyclic GFR-binding peptide
  MOD_RES (1)..(3)..(35)..(36): Xaa is C or S
XGXSEVVMDRYKKLVVNNASDFYLISIANLRTPVXXTPP

SEQ ID NO: 15144 - protein, 26 aa, Artificial Sequence
  Cyclic GFR-binding peptide
MDQYNKLVVKENEDLYLMSIASLETP

SEQ ID NO: 15145 - protein, 22 aa, Artificial Sequence
  Cyclic GFR-binding peptide
IMNSLQEIKPTKGIYYLITLPE

SEQ ID NO: 15146 - protein, 31 aa, Artificial Sequence; identical to SEQ ID NO: 4650
  Cyclic GFR-binding peptide
  MOD_RES (29)..(30): Xaa is C or S

SEQ ID NO: 15147 - protein, 26 aa, Artificial Sequence
  Cyclic GFR-binding peptide
MNSLQEIKPTKGIYYVIPLPELDQSV

SEQ ID NO: 15148 - protein, 32 aa, Artificial Sequence
  Cyclic GFR-binding peptide
  MOD_RES (32)..(32): Xaa is C or S
SRVVMNNSLQEIVNSSDDYYLVTLPELKTPAX

SEQ ID NO: 15149 - protein, 40 aa, Artificial Sequence
  Cyclic GFR-binding peptide
  MOD_RES (2)..(34)..(35): Xaa is C or S
GXSRVVMNEYQKYIVNSSDDIFLVSIPSLKTPAXXPKPVY

SEQ ID NO: 15150 - protein, 30 aa, Artificial Sequence; identical to SEQ ID NO: 4655
  Cyclic GFR-binding peptide
  MOD_RES (28)..(29): Xaa is C or S

SEQ ID NO: 15151 - protein, 26 aa, Artificial Sequence
  Cyclic GFR-binding peptide
VVMNNSLQEIVNSSDDYYVVPLPELQ

SEQ ID NO: 15152 - protein, 35 aa, Artificial Sequence; identical to SEQ ID NO: 4656
  Cyclic GFR-binding peptide
  MOD_RES (2)..(34)..(35): Xaa is C or S

SEQ ID NO: 15153 - protein, 31 aa, Artificial Sequence; identical to SEQ ID NO: 4659
  Cyclic GFR-binding peptide
  MOD_RES (28)..(29): Xaa is C or S

SEQ ID NO: 15154 - protein, 31 aa, Artificial Sequence; identical to SEQ ID NO: 4661
  Cyclic GFR-binding peptide
  MOD_RES (30)..(31): Xaa is C or S

SEQ ID NO: 15155 - protein, 31 aa, Artificial Sequence; identical to SEQ ID NO: 4663
  Cyclic GFR-binding peptide
  MOD_RES (28)..(29): Xaa is C or S

SEQ ID NO: 15156 - protein, 35 aa, Artificial Sequence
  Cyclic GFR-binding peptide
  MOD_RES (30)..(31): Xaa is C or S
RVIMEYQKYVKPKRGVIFLISIPSLAQPVXXPAAS

SEQ ID NO: 15157 - protein, 31 aa, Artificial Sequence
  Cyclic GFR-binding peptide
  MOD_RES (1)..(1): Xaa is C or S
XGEVVMDEYQKYVVKENEDIFLMSIPSLETP

SEQ ID NO: 15158 - protein, 37 aa, Artificial Sequence; identical to SEQ ID NO: 4671
  Cyclic GFR-binding peptide
  MOD_RES (1)..(3)..(34)..(35): Xaa is C or S

SEQ ID NO: 15159 - protein, 32 aa, Artificial Sequence
  Cyclic GFR-binding peptide
  MOD_RES (2)..(4): Xaa is C or S
HXGXARVVMNNSLQEIVNSSDDYYLVTLPELQ

SEQ ID NO: 15160 - protein, 31 aa, Artificial Sequence; identical to SEQ ID NO: 4672
  Cyclic GFR-binding peptide
  MOD_RES (2)..(2): Xaa is C or S

SEQ ID NO: 15161 - protein, 27 aa, Artificial Sequence
  Cyclic GFR-binding peptide
  MOD_RES (26)..(27): Xaa is C or S
RYKKLVVKDYEDFYLMSIANLETPVXX

SEQ ID NO: 15162 - protein, 33 aa, Artificial Sequence
  Cyclic GFR-binding peptide
  MOD_RES (31)..(32): Xaa is C or S
SKVVMNSLQEVKPTRGVYYVIPLPELDQPVXXP

SEQ ID NO: 15163 - protein, 31 aa, Artificial Sequence
  Cyclic GFR-binding peptide
  MOD_RES (27)..(28): Xaa is C or S
NNSLQEIVNSSDDYYLVTLPELQTPAXXPKP

SEQ ID NO: 15164 - protein, 35 aa, Artificial Sequence; identical to SEQ ID NO: 4676
  Cyclic GFR-binding peptide
  MOD_RES (1)..(33)..(34): Xaa is C or S

SEQ ID NO: 15165 - protein, 26 aa, Artificial Sequence
  Cyclic GFR-binding peptide
VIMEYQKYVKPKRGVIFLISIPSLAQ

SEQ ID NO: 15166 - protein, 24 aa, Artificial Sequence
  Cyclic GFR-binding peptide
RVIMQYNKLVKPKRGVLYLISIAS

SEQ ID NO: 15167 - protein, 29 aa, Artificial Sequence
  Cyclic GFR-binding peptide
  MOD_RES (2)..(4): Xaa is C or S
SXKXSKVIMQYNKLIKPTKGILYLISIAS

SEQ ID NO: 15168 - protein, 37 aa, Artificial Sequence
  Cyclic GFR-binding peptide
  MOD_RES (1)..(3)..(35)..(36): Xaa is C or S
XGXARVVMNNSLQEIVNSSDDYYVVPLPELQTPAXXP

SEQ ID NO: 15169 - protein, 28 aa, Artificial Sequence
  Cyclic GFR-binding peptide
  MOD_RES (27)..(28): Xaa is C or S
NNSLQEIVNSSDDYYLVTLPELKTPAXX

SEQ ID NO: 15170 - protein, 39 aa, Artificial Sequence
  Cyclic GFR-binding peptide
  MOD_RES (2)..(34)..(35): Xaa is C or S
GXSEVVMDNSLQEVVNNASDYYLITLPELRTPVXXTPPT

SEQ ID NO: 15171 - protein, 31 aa, Artificial Sequence
  Cyclic GFR-binding peptide
  MOD_RES (29)..(30): Xaa is C or S
VMNNSLQEIVNSSDDYYLVTLPELQTPAXXP

SEQ ID NO: 15172 - protein, 33 aa, Artificial Sequence; identical to SEQ ID NO: 4685
  Cyclic GFR-binding peptide
  MOD_RES (29)..(29): Xaa is C or S

SEQ ID NO: 15173 - protein, 29 aa, Artificial Sequence
  Cyclic GFR-binding peptide
  MOD_RES (2)..(4): Xaa is C or S
SXKXSKVIMNSLQEIKPTKGIYYVIPLPE

SEQ ID NO: 15174 - protein, 32 aa, Artificial Sequence
  Cyclic GFR-binding peptide
  MOD_RES (30)..(31): Xaa is C or S
KVIMEYQKYIKPTKGIIFLISIPSLDQSVXXP

SEQ ID NO: 15175 - protein, 24 aa, Artificial Sequence
  Cyclic GFR-binding peptide
MNSLQEVKPKRGVYYLITLPELAQ

SEQ ID NO: 15176 - protein, 36 aa, Artificial Sequence; identical to SEQ ID NO: 4688
  Cyclic GFR-binding peptide
  MOD_RES (30)..(31): Xaa is C or S

SEQ ID NO: 15177 - protein, 28 aa, Artificial Sequence
  Cyclic GFR-binding peptide
  MOD_RES (27)..(28): Xaa is C or S
ENSLQEVVKDYEDYYLMTLPELETPVXX

SEQ ID NO: 15178 - protein, 33 aa, Artificial Sequence
  Cyclic GFR-binding peptide
  MOD_RES (29)..(30): Xaa is C or S
VIMEYQKYVKPKRGVIFLISIPSLAQPVXXPAA

SEQ ID NO: 15179 - protein, 38 aa, Artificial Sequence
  Cyclic GFR-binding peptide
  MOD_RES (2)..(4)..(36)..(37): Xaa is C or S
RXGXGEVVMDNSLQEVVKENEDYYLMTLPELETPVXXA

SEQ ID NO: 15180 - protein, 29 aa, Artificial Sequence
  Cyclic GFR-binding peptide
  MOD_RES (27)..(27): Xaa is C or S
NNSLQEIVNSSDDYYLVTLPELKTPAXTP

SEQ ID NO: 15181 - protein, 33 aa, Artificial Sequence
  Cyclic GFR-binding peptide
  MOD_RES (30)..(31): Xaa is C or S
VVMNNSLQEIVNSSDDYYLVTLPELKTPAXXPK

SEQ ID NO: 15182 - protein, 26 aa, Artificial Sequence
  Cyclic GFR-binding peptide
VIMNSLQEIKPTKGIYYLITLPELDQ

SEQ ID NO: 15183 - protein, 32 aa, Artificial Sequence; identical to SEQ ID NO: 4696
  Cyclic GFR-binding peptide
  MOD_RES (2)..(4): Xaa is C or S

SEQ ID NO: 15184 - protein, 27 aa, Artificial Sequence
  Cyclic GFR-binding peptide
SRVIMEYQKYVKPKRGVIFLISIPSLA

SEQ ID NO: 15185 - protein, 32 aa, Artificial Sequence; identical to SEQ ID NO: 4700
  Cyclic GFR-binding peptide
  MOD_RES (32)..(32): Xaa is C or S

SEQ ID NO: 15186 - protein, 31 aa, Artificial Sequence
  Cyclic GFR-binding peptide
  MOD_RES (2)..(4): Xaa is C or S
RXGXGEVVMDNSLQEVVKENEDYYLMTLPEL

SEQ ID NO: 15187 - protein, 33 aa, Artificial Sequence
  Cyclic GFR-binding peptide
  MOD_RES (1)..(3): Xaa is C or S
XGXSRVVMNNSLQEIVNSSDDYYLVTLPELKTP

SEQ ID NO: 15188 - protein, 28 aa, Artificial Sequence
  Cyclic GFR-binding peptide
  MOD_RES (28)..(28): Xaa is C or S
MDRYKKLVVKENEDFYLMSIANLETPVX

SEQ ID NO: 15189 - protein, 38 aa, Artificial Sequence
  Cyclic GFR-binding peptide
  MOD_RES (2)..(34): Xaa is C or S
GXSRVVMNNSLQEIVNSSDDYYVVPLPELKTPAXTPKT

SEQ ID NO: 15190 - protein, 32 aa, Artificial Sequence
  Cyclic GFR-binding peptide
  MOD_RES (26)..(27): Xaa is C or S
NSLQEIVNSSDDYYVVPLPELQTPAXXPKPVT

SEQ ID NO: 15191 - protein, 29 aa, Artificial Sequence
  Cyclic GFR-binding peptide
  MOD_RES (2)..(4): Xaa is C or S
SXKXSKVVMNSLQEVKPTRGVYYLITLPE

SEQ ID NO: 15192 - protein, 23 aa, Artificial Sequence
  Cyclic GFR-binding peptide
MDQYNKLVVKENEDLYLMSIASL

SEQ ID NO: 15193 - protein, 23 aa, Artificial Sequence
  Cyclic GFR-binding peptide
QYNKLVVNNASDLYLISIASLRT

SEQ ID NO: 15194 - protein, 32 aa, Artificial Sequence; identical to SEQ ID NO: 4704
  Cyclic GFR-binding peptide
  MOD_RES (32)..(32): Xaa is C or S

SEQ ID NO: 15195 - protein, 28 aa, Artificial Sequence
  Cyclic GFR-binding peptide
  MOD_RES (27)..(28): Xaa is C or S
ENSLQEVVKDYEDYYVMPLPELETPVXX

SEQ ID NO: 15196 - protein, 29 aa, Artificial Sequence
  Cyclic GFR-binding peptide
EVVMDNSLQEVVKENEDYYLMTLPELETP

SEQ ID NO: 15197 - protein, 29 aa, Artificial Sequence
  Cyclic GFR-binding peptide
  MOD_RES (2)..(2): Xaa is C or S
GXSEVVMDRYKKLVVNNASDFYLISIANL

SEQ ID NO: 15198 - protein, 33 aa, Artificial Sequence
  Cyclic GFR-binding peptide
  MOD_RES (2)..(2): Xaa is C or S
GXGEVVMEEYQKYVVKDYEDIFLMSIPSLETPV

SEQ ID NO: 15199 - protein, 33 aa, Artificial Sequence
  Cyclic GFR-binding peptide
  MOD_RES (29)..(30): Xaa is C or S
VMDNSLQEVVNNASDYYVIPLPELRTPVXXTPP

SEQ ID NO: 15200 - protein, 30 aa, Artificial Sequence; identical to SEQ ID NO: 4706
  Cyclic GFR-binding peptide
  MOD_RES (1)..(1): Xaa is C or S

SEQ ID NO: 15201 - protein, 27 aa, Artificial Sequence
  Cyclic GFR-binding peptide
VVMERYKKLVVKDYEDFYLMSIANLET

SEQ ID NO: 15202 - protein, 32 aa, Artificial Sequence
  Cyclic GFR-binding peptide
  MOD_RES (1)..(1): Xaa is C or S
XARVVMNEYQKYIVNSSDDIFLVSIPSLQTPA

SEQ ID NO: 15203 - protein, 35 aa, Artificial Sequence
  Cyclic GFR-binding peptide
  MOD_RES (30)..(31): Xaa is C or S
VVMDNSLQEVVNNASDYYLITLPELRTPVXXTPPT

SEQ ID NO: 15204 - protein, 38 aa, Artificial Sequence
  Cyclic GFR-binding peptide
  MOD_RES (2)..(34)..(35): Xaa is C or S
GXGEVVMDNSLQEVVKENEDYYVMPLPELETPVXXAKP

SEQ ID NO: 15205 - protein, 35 aa, Artificial Sequence
  Cyclic GFR-binding peptide
  MOD_RES (1)..(33): Xaa is C or S
XSRVVMNNSLQEIVNSSDDYYVVPLPELKTPAXTP

SEQ ID NO: 15206 - protein, 30 aa, Artificial Sequence
  Cyclic GFR-binding peptide
GEVVMENSLQEVVKDYEDYYVMPLPELETP

SEQ ID NO: 15207 - protein, 23 aa, Artificial Sequence
  Cyclic GFR-binding peptide
QYNKLVVKENEDLYLMSIASLET

SEQ ID NO: 15208 - protein, 31 aa, Artificial Sequence
  Cyclic GFR-binding peptide
  MOD_RES (2)..(4): Xaa is C or S
SXKXSKVVMNSLQEVKPTRGVYYLITLPELD

SEQ ID NO: 15209 - protein, 33 aa, Artificial Sequence
  Cyclic GFR-binding peptide
  MOD_RES (31)..(32): Xaa is C or S
RVVMNEYQKYIVNSSDDIFLVSIPSLKTPAXXP

SEQ ID NO: 15210 - protein, 23 aa, Artificial Sequence
  Cyclic GFR-binding peptide
VMNQYNKLIVNSSDDLYLVSIAS

SEQ ID NO: 15211 - protein, 32 aa, Artificial Sequence
  Cyclic GFR-binding peptide
  MOD_RES (1)..(3): Xaa is C or S
XGXSEVVMDRYKKLVVNNASDFYLISIANLRT

SEQ ID NO: 15212 - protein, 37 aa, Artificial Sequence; identical to SEQ ID NO: 4721
  Cyclic GFR-binding peptide
  MOD_RES (32)..(33): Xaa is C or S

SEQ ID NO: 15213 - protein, 27 aa, Artificial Sequence
  Cyclic GFR-binding peptide
SEVVMDNSLQEVVNNASDYYVIPLPEL

SEQ ID NO: 15214 - protein, 30 aa, Artificial Sequence
  Cyclic GFR-binding peptide
  MOD_RES (27)..(28): Xaa is C or S
MEYQKYVKPKRGVIFLISIPSLAQPVXXPA

SEQ ID NO: 15215 - protein, 38 aa, Artificial Sequence
  Cyclic GFR-binding peptide
  MOD_RES (32)..(32): Xaa is C or S
SRVVMNNSLQEIVNSSDDYYVVPLPELKTPAXTPKTVH

SEQ ID NO: 15216 - protein, 31 aa, Artificial Sequence
  Cyclic GFR-binding peptide
  MOD_RES (27)..(28): Xaa is C or S
MEYQKYVKPKRGVIFLISIPSLAQPVXXPAA

SEQ ID NO: 15217 - protein, 31 aa, Artificial Sequence
  Cyclic GFR-binding peptide
  MOD_RES (1)..(1): Xaa is C or S
XARVVMNEYQKYIVNSSDDIFLVSIPSLQTP

SEQ ID NO: 15218 - protein, 40 aa, Artificial Sequence
  Cyclic GFR-binding peptide
  MOD_RES (1)..(3)..(35)..(36): Xaa is C or S
XGXSEVVMDNSLQEVVNNASDYYLITLPELRTPVXXTPPT

SEQ ID NO: 15219 - protein, 35 aa, Artificial Sequence
  Cyclic GFR-binding peptide
  MOD_RES (32)..(33): Xaa is C or S
ARVVMNNSLQEIVNSSDDYYLVTLPELQTPAXXPK

SEQ ID NO: 15220 - protein, 30 aa, Artificial Sequence; identical to SEQ ID NO: 4732
  Cyclic GFR-binding peptide
  MOD_RES (26)..(27): Xaa is C or S

SEQ ID NO: 15221 - protein, 35 aa, Artificial Sequence
  Cyclic GFR-binding peptide
  MOD_RES (31)..(32): Xaa is C or S
SRVIMNSLQEVKPKRGVYYLITLPELAQPVXXPAA

SEQ ID NO: 15222 - protein, 40 aa, Artificial Sequence; identical to SEQ ID NO: 4736
  Cyclic GFR-binding peptide
  MOD_RES (2)..(34)..(35): Xaa is C or S

SEQ ID NO: 15223 - protein, 27 aa, Artificial Sequence
  Cyclic GFR-binding peptide
VVMEEYQKYVVKDYEDIFLMSIPSLET

SEQ ID NO: 15224 - protein, 35 aa, Artificial Sequence
  Cyclic GFR-binding peptide
  MOD_RES (2)..(33)..(34): Xaa is C or S
KXSKVIMNSLQEIKPTKGIYYVIPLPELDQSVXXP

SEQ ID NO: 15225 - protein, 30 aa, Artificial Sequence; identical to SEQ ID NO: 4737
  Cyclic GFR-binding peptide
  MOD_RES (29)..(29): Xaa is C or S

SEQ ID NO: 15226 - protein, 31 aa, Artificial Sequence
  Cyclic GFR-binding peptide
  MOD_RES (2)..(4): Xaa is C or S
HXGXSRVVMNEYQKYIVNSSDDIFLVSIPSL

SEQ ID NO: 15227 - protein, 35 aa, Artificial Sequence; identical to SEQ ID NO: 4740
  Cyclic GFR-binding peptide
  MOD_RES (1)..(3)..(35): Xaa is C or S

SEQ ID NO: 15228 - protein, 31 aa, Artificial Sequence
  Cyclic GFR-binding peptide
  MOD_RES (27)..(28): Xaa is C or S
NNSLQEIVNSSDDYYVVPLPELQTPAXXPKP

SEQ ID NO: 15229 - protein, 33 aa, Artificial Sequence; identical to SEQ ID NO: 4741
  Cyclic GFR-binding peptide
  MOD_RES (2)..(4): Xaa is C or S

SEQ ID NO: 15230 - protein, 27 aa, Artificial Sequence
  Cyclic GFR-binding peptide
EVVMENSLQEVVKDYEDYYVMPLPELE

SEQ ID NO: 15231 - protein, 40 aa, Artificial Sequence
  Cyclic GFR-binding peptide
  MOD_RES (2)..(4)..(36)..(37): Xaa is C or S
RXGXSEVVMDRYKKLVVNNASDFYLISIANLRTPVXXTPP

SEQ ID NO: 15232 - protein, 26 aa, Artificial Sequence
  Cyclic GFR-binding peptide
MRYKKLIKPTKGIFYLISIANLDQSV

SEQ ID NO: 15233 - protein, 32 aa, Artificial Sequence; identical to SEQ ID NO: 4748
  Cyclic GFR-binding peptide
  MOD_RES (30)..(31): Xaa is C or S

SEQ ID NO: 15234 - protein, 36 aa, Artificial Sequence
  Cyclic GFR-binding peptide
  MOD_RES (32)..(33): Xaa is C or S
SEVVMDNSLQEVVNNASDYYLITLPELRTPVXXTPP

SEQ ID NO: 15235 - protein, 31 aa, Artificial Sequence
  Cyclic GFR-binding peptide
  MOD_RES (2)..(2): Xaa is C or S
GXARVVMNEYQKYIVNSSDDIFLVSIPSLQT

SEQ ID NO: 15236 - protein, 36 aa, Artificial Sequence; identical to SEQ ID NO: 4749
  Cyclic GFR-binding peptide
  MOD_RES (31)..(32): Xaa is C or S

SEQ ID NO: 15237 - protein, 26 aa, Artificial Sequence
  Cyclic GFR-binding peptide
  MOD_RES (26)..(26): Xaa is C or S
NSLQEIKPTKGIYYVIPLPELDQSVX

SEQ ID NO: 15238 - protein, 24 aa, Artificial Sequence
  Cyclic GFR-binding peptide
QYNKLIVNSSDDLYLVSIASLKTP

SEQ ID NO: 15239 - protein, 35 aa, Artificial Sequence
  Cyclic GFR-binding peptide
  MOD_RES (2)..(33)..(34): Xaa is C or S
KXSRVIMNSLQEVKPKRGVYYLITLPELAQPVXXP

SEQ ID NO: 15240 - protein, 31 aa, Artificial Sequence; identical to SEQ ID NO: 4755
  Cyclic GFR-binding peptide
  MOD_RES (26)..(27): Xaa is C or S

SEQ ID NO: 15241 - protein, 36 aa, Artificial Sequence
  Cyclic GFR-binding peptide
  MOD_RES (31)..(31): Xaa is C or S
RVVMNNSLQEIVNSSDDYYLVTLPELKTPAXTPKTV

SEQ ID NO: 15242 - protein, 36 aa, Artificial Sequence
  Cyclic GFR-binding peptide
  MOD_RES (32)..(33): Xaa is C or S
GEVVMDEYQKYVVKENEDIFLMSIPSLETPVXXAKP

SEQ ID NO: 15243 - protein, 31 aa, Artificial Sequence
  Cyclic GFR-binding peptide
  MOD_RES (31)..(31): Xaa is C or S
RVVMNEYQKYIVNSSDDIFLVSIPSLKTPAX

SEQ ID NO: 15244 - protein, 37 aa, Artificial Sequence
  Cyclic GFR-binding peptide
  MOD_RES (31)..(32): Xaa is C or S
SKVVMNSLQEVKPTRGVYYVIPLPELDQPVXXPSASA

SEQ ID NO: 15245 - protein, 32 aa, Artificial Sequence
  Cyclic GFR-binding peptide
  MOD_RES (26)..(27): Xaa is C or S
EYQKYVVKDYEDIFLMSIPSLETPVXXAKPIS

SEQ ID NO: 15246 - protein, 33 aa, Artificial Sequence
  Cyclic GFR-binding peptide
  MOD_RES (28)..(29): Xaa is C or S
IMEYQKYVKPKRGVIFLISIPSLAQPVXXPAAS

SEQ ID NO: 15247 - protein, 28 aa, Artificial Sequence
  Cyclic GFR-binding peptide
  MOD_RES (2)..(2): Xaa is C or S
KXSRVIMEYQKYVKPKRGVIFLISIPSL

SEQ ID NO: 15248 - protein, 27 aa, Artificial Sequence
  Cyclic GFR-binding peptide
  MOD_RES (27)..(27): Xaa is C or S
NRYKKLIVNSSDDFYLVSIANLKTPAX

SEQ ID NO: 15249 - protein, 34 aa, Artificial Sequence
  Cyclic GFR-binding peptide
  MOD_RES (1)..(33)..(34): Xaa is C or S
XSEVVMDRYKKLVVNNASDFYLISIANLRTPVXX

SEQ ID NO: 15250 - protein, 31 aa, Artificial Sequence
  Cyclic GFR-binding peptide
  MOD_RES (1)..(3): Xaa is C or S
XGXSEVVMDQYNKLVVNNASDLYLISIASLR

SEQ ID NO: 15251 - protein, 26 aa, Artificial Sequence
  Cyclic GFR-binding peptide
MEYQKYIKPTKGIIFLISIPSLDQSV

SEQ ID NO: 15252 - protein, 28 aa, Artificial Sequence
  Cyclic GFR-binding peptide
RVVMNNSLQEIVNSSDDYYVVPLPELQT

SEQ ID NO: 15253 - protein, 33 aa, Artificial Sequence
  Cyclic GFR-binding peptide
  MOD_RES (1)..(33): Xaa is C or S
XGEVVMDEYQKYVVKENEDIFLMSIPSLETPVX

SEQ ID NO: 15254 - protein, 35 aa, Artificial Sequence; identical to SEQ ID NO: 4768
  Cyclic GFR-binding peptide
  MOD_RES (1)..(3)..(34)..(35): Xaa is C or S

SEQ ID NO: 15255 - protein, 32 aa, Artificial Sequence
  Cyclic GFR-binding peptide
  MOD_RES (1)..(32): Xaa is C or S
XSKVVMEYQKYVKPTRGVIFLISIPSLDQPVX

SEQ ID NO: 15256 - protein, 29 aa, Artificial Sequence
  Cyclic GFR-binding peptide
  MOD_RES (27)..(27): Xaa is C or S
NRYKKLIVNSSDDFYLVSIANLKTPAXTP

SEQ ID NO: 15257 - protein, 25 aa, Artificial Sequence
  Cyclic GFR-binding peptide
VMRYKKLVKPTRGVFYLISIANLDQ

SEQ ID NO: 15258 - protein, 22 aa, Artificial Sequence
  Cyclic GFR-binding peptide
MDQYNKLVVNNASDLYLISIAS

SEQ ID NO: 15259 - protein, 35 aa, Artificial Sequence; identical to SEQ ID NO: 4778
  Cyclic GFR-binding peptide
  MOD_RES (30)..(31): Xaa is C or S

SEQ ID NO: 15260 - protein, 37 aa, Artificial Sequence
  Cyclic GFR-binding peptide
  MOD_RES (1)..(33)..(34): Xaa is C or S
XARVVMNEYQKYIVNSSDDIFLVSIPSLQTPAXXPKP

SEQ ID NO: 15261 - protein, 39 aa, Artificial Sequence
  Cyclic GFR-binding peptide
  MOD_RES (2)..(34)..(35): Xaa is C or S
GXGEVVMEEYQKYVVKDYEDIFLMSIPSLETPVXXAKPI

SEQ ID NO: 15262 - protein, 35 aa, Artificial Sequence; identical to SEQ ID NO: 4780
  Cyclic GFR-binding peptide
  MOD_RES (32)..(33): Xaa is C or S

SEQ ID NO: 15263 - protein, 31 aa, Artificial Sequence
  Cyclic GFR-binding peptide
  MOD_RES (1)..(1): Xaa is C or S
XGEVVMEEYQKYVVKDYEDIFLMSIPSLETP

SEQ ID NO: 15264 - protein, 27 aa, Artificial Sequence
  Cyclic GFR-binding peptide
VMNNSLQEIVNSSDDYYLVTLPELQTP

SEQ ID NO: 15265 - protein, 24 aa, Artificial Sequence
  Cyclic GFR-binding peptide
MNEYQKYIVNSSDDIFLVSIPSLK

SEQ ID NO: 15266 - protein, 36 aa, Artificial Sequence
  Cyclic GFR-binding peptide
  MOD_RES (31)..(32): Xaa is C or S
SKVIMNSLQEIKPTKGIYYVIPLPELDQSVXXPSAS

SEQ ID NO: 15267 - protein, 24 aa, Artificial Sequence
  Cyclic GFR-binding peptide
KVVMNSLQEVKPTRGVYYVIPLPE

SEQ ID NO: 15268 - protein, 26 aa, Artificial Sequence
  Cyclic GFR-binding peptide
EQYNKLVVKDYEDLYLMSIASLETPV

SEQ ID NO: 15269 - protein, 31 aa, Artificial Sequence
  Cyclic GFR-binding peptide
  MOD_RES (2)..(4): Xaa is C or S
SXKXSKVIMNSLQEIKPTKGIYYLITLPELD

SEQ ID NO: 15270 - protein, 37 aa, Artificial Sequence
  Cyclic GFR-binding peptide
  MOD_RES (31)..(32): Xaa is C or S
EVVMDEYQKYVVKENEDIFLMSIPSLETPVXXAKPIK

SEQ ID NO: 15271 - protein, 29 aa, Artificial Sequence
  Cyclic GFR-binding peptide
  MOD_RES (26)..(27): Xaa is C or S
QYNKLVKPTRGVLYLISIASLDQPVXXPS

SEQ ID NO: 15272 - protein, 24 aa, Artificial Sequence
  Cyclic GFR-binding peptide
MRYKKLVKPKRGVFYLISIANLAQ

SEQ ID NO: 15273 - protein, 34 aa, Artificial Sequence; identical to SEQ ID NO: 4791
  Cyclic GFR-binding peptide
  MOD_RES (28)..(29): Xaa is C or S

SEQ ID NO: 15274 - protein, 27 aa, Artificial Sequence
  Cyclic GFR-binding peptide
EVVMEQYNKLVVKDYEDLYLMSIASLE

SEQ ID NO: 15275 - protein, 35 aa, Artificial Sequence; identical to SEQ ID NO: 4793
  Cyclic GFR-binding peptide
  MOD_RES (32)..(33): Xaa is C or S

SEQ ID NO: 15276 - protein, 33 aa, Artificial Sequence; identical to SEQ ID NO: 4795
  Cyclic GFR-binding peptide
  MOD_RES (28)..(28): Xaa is C or S

SEQ ID NO: 15277 - protein, 38 aa, Artificial Sequence; identical to SEQ ID NO: 4797
  Cyclic GFR-binding peptide
  MOD_RES (2)..(4)..(36)..(37): Xaa is C or S

SEQ ID NO: 15278 - protein, 34 aa, Artificial Sequence
  Cyclic GFR-binding peptide
  MOD_RES (2)..(34): Xaa is C or S
GXSRVVMNEYQKYIVNSSDDIFLVSIPSLKTPAX

SEQ ID NO: 15279 - protein, 22 aa, Artificial Sequence
  Cyclic GFR-binding peptide
NSLQEVVKENEDYYVMPLPELE

SEQ ID NO: 15280 - protein, 32 aa, Artificial Sequence
  Cyclic GFR-binding peptide
  MOD_RES (27)..(28): Xaa is C or S
MNSLQEIKPTKGIYYVIPLPELDQSVXXPSAS

SEQ ID NO: 15281 - protein, 36 aa, Artificial Sequence
  Cyclic GFR-binding peptide
  MOD_RES (32)..(33): Xaa is C or S
SEVVMDQYNKLVVNNASDLYLISIASLRTPVXXTPP

SEQ ID NO: 15282 - protein, 36 aa, Artificial Sequence
  Cyclic GFR-binding peptide
  MOD_RES (32)..(33): Xaa is C or S
GEVVMEEYQKYVVKDYEDIFLMSIPSLETPVXXAKP

SEQ ID NO: 15283 - protein, 31 aa, Artificial Sequence
  Cyclic GFR-binding peptide
  MOD_RES (2)..(4): Xaa is C or S
SXKXSRVIMEYQKYVKPKRGVIFLISIPSLA

SEQ ID NO: 15284 - protein, 33 aa, Artificial Sequence; identical to SEQ ID NO: 4804
  Cyclic GFR-binding peptide
  MOD_RES (2)..(2): Xaa is C or S

SEQ ID NO: 15285 - protein, 36 aa, Artificial Sequence; identical to SEQ ID NO: 4805
  Cyclic GFR-binding peptide
  MOD_RES (1)..(32)..(33): Xaa is C or S

SEQ ID NO: 15286 - protein, 27 aa, Artificial Sequence
  Cyclic GFR-binding peptide
  MOD_RES (1)..(1): Xaa is C or S
XARVVMNNSLQEIVNSSDDYYLVTLPE

SEQ ID NO: 15287 - protein, 23 aa, Artificial Sequence
  Cyclic GFR-binding peptide
MRYKKLVKPKRGVFYLISIANLA

SEQ ID NO: 15288 - protein, 30 aa, Artificial Sequence
  Cyclic GFR-binding peptide
  MOD_RES (1)..(3): Xaa is C or S
XKXSKVIMNSLQEIKPTKGIYYVIPLPELD

SEQ ID NO: 15289 - protein, 35 aa, Artificial Sequence
  Cyclic GFR-binding peptide
  MOD_RES (29)..(30): Xaa is C or S
VMENSLQEVVKDYEDYYLMTLPELETPVXXAKPIS

SEQ ID NO: 15290 - protein, 22 aa, Artificial Sequence
  Cyclic GFR-binding peptide
MEYQKYVKPTRGVIFLISIPSL

SEQ ID NO: 15291 - protein, 30 aa, Artificial Sequence; identical to SEQ ID NO: 4813
  Cyclic GFR-binding peptide
  MOD_RES (2)..(4): Xaa is C or S

SEQ ID NO: 15292 - protein, 29 aa, Artificial Sequence
  Cyclic GFR-binding peptide
  MOD_RES (1)..(3): Xaa is C or S
XGXGEVVMDEYQKYVVKENEDIFLMSIPS

SEQ ID NO: 15293 - protein, 25 aa, Artificial Sequence
  Cyclic GFR-binding peptide
NSLQEIVNSSDDYYVVPLPELKTPA

SEQ ID NO: 15294 - protein, 27 aa, Artificial Sequence
  Cyclic GFR-binding peptide
  MOD_RES (27)..(27): Xaa is C or S
NNSLQEIVNSSDDYYLVTLPELKTPAX

SEQ ID NO: 15295 - protein, 29 aa, Artificial Sequence
  Cyclic GFR-binding peptide
  MOD_RES (27)..(27): Xaa is C or S
NEYQKYIVNSSDDIFLVSIPSLKTPAXTP

SEQ ID NO: 15296 - protein, 34 aa, Artificial Sequence; identical to SEQ ID NO: 4814
  Cyclic GFR-binding peptide
  MOD_RES (30)..(31): Xaa is C or S

SEQ ID NO: 15297 - protein, 29 aa, Artificial Sequence
  Cyclic GFR-binding peptide
  MOD_RES (27)..(28): Xaa is C or S
NRYKKLIVNSSDDFYLVSIANLQTPAXXP

SEQ ID NO: 15298 - protein, 27 aa, Artificial Sequence
  Cyclic GFR-binding peptide
  MOD_RES (27)..(27): Xaa is C or S
MNSLQEIKPTKGIYYVIPLPELDQSVX

SEQ ID NO: 15299 - protein, 33 aa, Artificial Sequence; identical to SEQ ID NO: 4819
  Cyclic GFR-binding peptide
  MOD_RES (30)..(31): Xaa is C or S

SEQ ID NO: 15300 - protein, 29 aa, Artificial Sequence
  Cyclic GFR-binding peptide
  MOD_RES (27)..(28): Xaa is C or S
MNSLQEVKPTRGVYYVIPLPELDQPVXXP

SEQ ID NO: 15301 - protein, 35 aa, Artificial Sequence; identical to SEQ ID NO: 4820
  Cyclic GFR-binding peptide
  MOD_RES (31)..(31): Xaa is C or S

SEQ ID NO: 15302 - protein, 30 aa, Artificial Sequence; identical to SEQ ID NO: 4821
  Cyclic GFR-binding peptide

SEQ ID NO: 15303 - protein, 31 aa, Artificial Sequence
  Cyclic GFR-binding peptide
  MOD_RES (31)..(31): Xaa is C or S
EVVMDNSLQEVVNNASDYYLITLPELRTPVX

SEQ ID NO: 15304 - protein, 28 aa, Artificial Sequence
  Cyclic GFR-binding peptide
RVVMNQYNKLIVNSSDDLYLVSIASLQT

SEQ ID NO: 15305 - protein, 34 aa, Artificial Sequence
  Cyclic GFR-binding peptide
  MOD_RES (31)..(32): Xaa is C or S
RVVMNEYQKYIVNSSDDIFLVSIPSLQTPAXXPK

SEQ ID NO: 15306 - protein, 39 aa, Artificial Sequence; identical to SEQ ID NO: 4824
  Cyclic GFR-binding peptide
  MOD_RES (2)..(34)..(35): Xaa is C or S

SEQ ID NO: 15307 - protein, 40 aa, Artificial Sequence
  Cyclic GFR-binding peptide
  MOD_RES (1)..(3)..(35)..(36): Xaa is C or S
XGXSEVVMDQYNKLVVNNASDLYLISIASLRTPVXXTPPT

SEQ ID NO: 15308 - protein, 29 aa, Artificial Sequence
  Cyclic GFR-binding peptide
VVMNNSLQEIVNSSDDYYVVPLPELKTPA

SEQ ID NO: 15309 - protein, 28 aa, Artificial Sequence
  Cyclic GFR-binding peptide
VMDNSLQEVVKENEDYYLMTLPELETPV

SEQ ID NO: 15310 - protein, 28 aa, Artificial Sequence
  Cyclic GFR-binding peptide
  MOD_RES (1)..(1): Xaa is C or S
XARVVMNRYKKLIVNSSDDFYLVSIANL

SEQ ID NO: 15311 - protein, 34 aa, Artificial Sequence
  Cyclic GFR-binding peptide
  MOD_RES (2)..(34): Xaa is C or S
GXARVVMNEYQKYIVNSSDDIFLVSIPSLQTPAX

SEQ ID NO: 15312 - protein, 36 aa, Artificial Sequence; identical to SEQ ID NO: 4832
  Cyclic GFR-binding peptide
  MOD_RES (31)..(32): Xaa is C or S

SEQ ID NO: 15313 - protein, 30 aa, Artificial Sequence; identical to SEQ ID NO: 4833
  Cyclic GFR-binding peptide
  MOD_RES (29)..(30): Xaa is C or S

SEQ ID NO: 15314 - protein, 33 aa, Artificial Sequence
  Cyclic GFR-binding peptide
  MOD_RES (1)..(33): Xaa is C or S
XSRVVMNNSLQEIVNSSDDYYLVTLPELKTPAX

SEQ ID NO: 15315 - protein, 35 aa, Artificial Sequence; identical to SEQ ID NO: 4835
  Cyclic GFR-binding peptide
  MOD_RES (32)..(33): Xaa is C or S

SEQ ID NO: 15316 - protein, 32 aa, Artificial Sequence; identical to SEQ ID NO: 4836
  Cyclic GFR-binding peptide
  MOD_RES (31)..(32): Xaa is C or S

SEQ ID NO: 15317 - protein, 27 aa, Artificial Sequence
  Cyclic GFR-binding peptide
  MOD_RES (2)..(2): Xaa is C or S
KXSKVIMNSLQEIKPTKGIYYLITLPE

SEQ ID NO: 15318 - protein, 29 aa, Artificial Sequence
  Cyclic GFR-binding peptide
  MOD_RES (1)..(3): Xaa is C or S
XGXGEVVMDNSLQEVVKENEDYYVMPLPE

SEQ ID NO: 15319 - protein, 39 aa, Artificial Sequence
  Cyclic GFR-binding peptide
  MOD_RES (2)..(34)..(35): Xaa is C or S
GXSEVVMDRYKKLVVNNASDFYLISIANLRTPVXXTPPT

SEQ ID NO: 15320 - protein, 28 aa, Artificial Sequence
  Cyclic GFR-binding peptide
  MOD_RES (27)..(28): Xaa is C or S
MQYNKLVKPTRGVLYLISIASLDQPVXX

SEQ ID NO: 15321 - protein, 26 aa, Artificial Sequence
  Cyclic GFR-binding peptide
IMNSLQEVKPKRGVYYLITLPELAQP

SEQ ID NO: 15322 - protein, 25 aa, Artificial Sequence
  Cyclic GFR-binding peptide
EYQKYVVKDYEDIFLMSIPSLETPV

SEQ ID NO: 15323 - protein, 30 aa, Artificial Sequence
  Cyclic GFR-binding peptide
  MOD_RES (29)..(30): Xaa is C or S
VMDEYQKYVVKENEDIFLMSIPSLETPVXX

SEQ ID NO: 15324 - protein, 25 aa, Artificial Sequence
  Cyclic GFR-binding peptide
NNSLQEIVNSSDDYYLVTLPELKTP

SEQ ID NO: 15325 - protein, 22 aa, Artificial Sequence
  Cyclic GFR-binding peptide
QYNKLIVNSSDDLYLVSIASLQ

SEQ ID NO: 15326 - protein, 38 aa, Artificial Sequence
  Cyclic GFR-binding peptide
  MOD_RES (2)..(34)..(35): Xaa is C or S
GXSRVVMNNSLQEIVNSSDDYYVVPLPELKTPAXXPKP

SEQ ID NO: 15327 - protein, 26 aa, Artificial Sequence
  Cyclic GFR-binding peptide
SKVVMNSLQEVKPTRGVYYVIPLPEL

SEQ ID NO: 15328 - protein, 22 aa, Artificial Sequence
  Cyclic GFR-binding peptide
MNQYNKLIVNSSDDLYLVSIAS

SEQ ID NO: 15329 - protein, 31 aa, Artificial Sequence
  Cyclic GFR-binding peptide
  MOD_RES (1)..(1): Xaa is C or S
XSKVVMEYQKYVKPTRGVIFLISIPSLDQPV

SEQ ID NO: 15330 - protein, 30 aa, Artificial Sequence
  Cyclic GFR-binding peptide
  MOD_RES (30)..(30): Xaa is C or S
VVMNNSLQEIVNSSDDYYVVPLPELKTPAX

SEQ ID NO: 15331 - protein, 23 aa, Artificial Sequence
  Cyclic GFR-binding peptide
VIMNSLQEIKPTKGIYYLITLPE

SEQ ID NO: 15332 - protein, 27 aa, Artificial Sequence
  Cyclic GFR-binding peptide
  MOD_RES (26)..(27): Xaa is C or S
QYNKLIVNSSDDLYLVSIASLQTPAXX

SEQ ID NO: 15333 - protein, 35 aa, Artificial Sequence
  Cyclic GFR-binding peptide
  MOD_RES (1)..(3)..(35): Xaa is C or S
XGXARVVMNNSLQEIVNSSDDYYLVTLPELQTPAX

SEQ ID NO: 15334 - protein, 30 aa, Artificial Sequence
  Cyclic GFR-binding peptide
  MOD_RES (2)..(2): Xaa is C or S
GXGEVVMDNSLQEVVKENEDYYVMPLPELE

SEQ ID NO: 15335 - protein, 38 aa, Artificial Sequence
  Cyclic GFR-binding peptide
  MOD_RES (1)..(33)..(34): Xaa is C or S
XGEVVMENSLQEVVKDYEDYYLMTLPELETPVXXAKPI

SEQ ID NO: 15336 - protein, 37 aa, Artificial Sequence
  Cyclic GFR-binding peptide
  MOD_RES (2)..(4)..(36)..(37): Xaa is C or S
RXGXGEVVMDNSLQEVVKENEDYYVMPLPELETPVXX

SEQ ID NO: 15337 - protein, 32 aa, Artificial Sequence
  Cyclic GFR-binding peptide
  MOD_RES (1)..(32): Xaa is C or S
XSKVIMEYQKYIKPTKGIIFLISIPSLDQSVX

SEQ ID NO: 15338 - protein, 30 aa, Artificial Sequence
  Cyclic GFR-binding peptide
  MOD_RES (2)..(4): Xaa is C or S
HXGXSRVVMNNSLQEIVNSSDDYYVVPLPE

SEQ ID NO: 15339 - protein, 29 aa, Artificial Sequence
  Cyclic GFR-binding peptide
  MOD_RES (27)..(28): Xaa is C or S
MEYQKYVKPTRGVIFLISIPSLDQPVXXP

SEQ ID NO: 15340 - protein, 30 aa, Artificial Sequence; identical to SEQ ID NO: 4855
  Cyclic GFR-binding peptide
  MOD_RES (26)..(27): Xaa is C or S

SEQ ID NO: 15341 - protein, 37 aa, Artificial Sequence; identical to SEQ ID NO: 4856
  Cyclic GFR-binding peptide
  MOD_RES (32)..(33): Xaa is C or S

SEQ ID NO: 15342 - protein, 27 aa, Artificial Sequence
  Cyclic GFR-binding peptide
VMEQYNKLVVKDYEDLYLMSIASLETP

SEQ ID NO: 15343 - protein, 27 aa, Artificial Sequence
  Cyclic GFR-binding peptide
EVVMDNSLQEVVKENEDYYLMTLPELE

SEQ ID NO: 15344 - protein, 37 aa, Artificial Sequence; identical to SEQ ID NO: 4858
  Cyclic GFR-binding peptide
  MOD_RES (32)..(33): Xaa is C or S

SEQ ID NO: 15345 - protein, 35 aa, Artificial Sequence
  Cyclic GFR-binding peptide
  MOD_RES (30)..(31): Xaa is C or S
VVMNEYQKYIVNSSDDIFLVSIPSLKTPAXXPKPV

SEQ ID NO: 15346 - protein, 30 aa, Artificial Sequence; identical to SEQ ID NO: 4859
  Cyclic GFR-binding peptide
  MOD_RES (30)..(30): Xaa is C or S

SEQ ID NO: 15347 - protein, 23 aa, Artificial Sequence
  Cyclic GFR-binding peptide
MNSLQEVKPKRGVYYLITLPELA

SEQ ID NO: 15348 - protein, 33 aa, Artificial Sequence; identical to SEQ ID NO: 4860
  Cyclic GFR-binding peptide
  MOD_RES (30)..(31): Xaa is C or S

SEQ ID NO: 15349 - protein, 29 aa, Artificial Sequence
  Cyclic GFR-binding peptide
  MOD_RES (28)..(29): Xaa is C or S
MNNSLQEIVNSSDDYYLVTLPELQTPAXX

SEQ ID NO: 15350 - protein, 31 aa, Artificial Sequence
  Cyclic GFR-binding peptide
  MOD_RES (1)..(3): Xaa is C or S
XGXSEVVMDNSLQEVVNNASDYYLITLPELR

SEQ ID NO: 15351 - protein, 39 aa, Artificial Sequence
  Cyclic GFR-binding peptide
  MOD_RES (1)..(33)..(34): Xaa is C or S
XSEVVMDQYNKLVVNNASDLYLISIASLRTPVXXTPPTS

SEQ ID NO: 15352 - protein, 38 aa, Artificial Sequence; identical to SEQ ID NO: 4865
  Cyclic GFR-binding peptide
  MOD_RES (2)..(34)..(35): Xaa is C or S

SEQ ID NO: 15353 - protein, 31 aa, Artificial Sequence
  Cyclic GFR-binding peptide
  MOD_RES (2)..(2): Xaa is C or S
GXSRVVMNNSLQEIVNSSDDYYLVTLPELKT

SEQ ID NO: 15354 - protein, 28 aa, Artificial Sequence
  Cyclic GFR-binding peptide
VVMDEYQKYVVKENEDIFLMSIPSLETP

SEQ ID NO: 15355 - protein, 27 aa, Artificial Sequence
  Cyclic GFR-binding peptide
  MOD_RES (26)..(27): Xaa is C or S
RYKKLIVNSSDDFYLVSIANLQTPAXX

SEQ ID NO: 15356 - protein, 24 aa, Artificial Sequence
  Cyclic GFR-binding peptide
IMRYKKLIKPTKGIFYLISIANLD

SEQ ID NO: 15357 - protein, 35 aa, Artificial Sequence
  Cyclic GFR-binding peptide
  MOD_RES (1)..(33)..(34): Xaa is C or S
XGEVVMENSLQEVVKDYEDYYLMTLPELETPVXXA

SEQ ID NO: 15358 - protein, 28 aa, Artificial Sequence
  Cyclic GFR-binding peptide
  MOD_RES (2)..(2): Xaa is C or S
KXSKVVMEYQKYVKPTRGVIFLISIPSL

SEQ ID NO: 15359 - protein, 34 aa, Artificial Sequence
  Cyclic GFR-binding peptide
  MOD_RES (1)..(33)..(34): Xaa is C or S
XGEVVMEEYQKYVVKDYEDIFLMSIPSLETPVXX

SEQ ID NO: 15360 - protein, 29 aa, Artificial Sequence
  Cyclic GFR-binding peptide
GEVVMDNSLQEVVKENEDYYLMTLPELET

SEQ ID NO: 15361 - protein, 30 aa, Artificial Sequence
  Cyclic GFR-binding peptide
  MOD_RES (1)..(1): Xaa is C or S
XGEVVMDNSLQEVVKENEDYYLMTLPELET

SEQ ID NO: 15362 - protein, 29 aa, Artificial Sequence
  Cyclic GFR-binding peptide
  MOD_RES (27)..(28): Xaa is C or S
DQYNKLVVNNASDLYLISIASLRTPVXXT

SEQ ID NO: 15363 - protein, 26 aa, Artificial Sequence
  Cyclic GFR-binding peptide
SRVVMNNSLQEIVNSSDDYYVVPLPE

SEQ ID NO: 15364 - protein, 37 aa, Artificial Sequence; identical to SEQ ID NO: 4872
  Cyclic GFR-binding peptide
  MOD_RES (31)..(32): Xaa is C or S

SEQ ID NO: 15365 - protein, 41 aa, Artificial Sequence
  Cyclic GFR-binding peptide
  MOD_RES (2)..(4)..(35)..(36): Xaa is C or S
SXKXSKVVMEYQKYVKPTRGVIFLISIPSLDQPVXXPSASA

SEQ ID NO: 15366 - protein, 29 aa, Artificial Sequence
  Cyclic GFR-binding peptide
  MOD_RES (27)..(28): Xaa is C or S
MRYKKLVKPTRGVFYLISIANLDQPVXXP

SEQ ID NO: 15367 - protein, 28 aa, Artificial Sequence
  Cyclic GFR-binding peptide
  MOD_RES (27)..(28): Xaa is C or S
EEYQKYVVKDYEDIFLMSIPSLETPVXX

SEQ ID NO: 15368 - protein, 31 aa, Artificial Sequence
  Cyclic GFR-binding peptide
  MOD_RES (31)..(31): Xaa is C or S
EVVMEEYQKYVVKDYEDIFLMSIPSLETPVX

SEQ ID NO: 15369 - protein, 28 aa, Artificial Sequence
  Cyclic GFR-binding peptide
  MOD_RES (26)..(27): Xaa is C or S
NSLQEVKPKRGVYYLITLPELAQPVXXP

SEQ ID NO: 15370 - protein, 38 aa, Artificial Sequence
  Cyclic GFR-binding peptide
  MOD_RES (1)..(33)..(34): Xaa is C or S
XGEVVMDNSLQEVVKENEDYYLMTLPELETPVXXAKPI

SEQ ID NO: 15371 - protein, 34 aa, Artificial Sequence; identical to SEQ ID NO: 4879
  Cyclic GFR-binding peptide
  MOD_RES (28)..(29): Xaa is C or S

SEQ ID NO: 15372 - protein, 31 aa, Artificial Sequence; identical to SEQ ID NO: 4880
  Cyclic GFR-binding peptide
  MOD_RES (2)..(4): Xaa is C or S

SEQ ID NO: 15373 - protein, 39 aa, Artificial Sequence; identical to SEQ ID NO: 4881
  Cyclic GFR-binding peptide
  MOD_RES (1)..(33)..(34): Xaa is C or S

SEQ ID NO: 15374 - protein, 34 aa, Artificial Sequence
  Cyclic GFR-binding peptide
  MOD_RES (30)..(31): Xaa is C or S
VVMNNSLQEIVNSSDDYYLVTLPELKTPAXXPKP

SEQ ID NO: 15375 - protein, 36 aa, Artificial Sequence; identical to SEQ ID NO: 4882
  Cyclic GFR-binding peptide
  MOD_RES (2)..(4)..(35)..(36): Xaa is C or S

SEQ ID NO: 15376 - protein, 29 aa, Artificial Sequence
  Cyclic GFR-binding peptide
  MOD_RES (27)..(27): Xaa is C or S
NNSLQEIVNSSDDYYVVPLPELKTPAXTP

SEQ ID NO: 15377 - protein, 34 aa, Artificial Sequence
  Cyclic GFR-binding peptide
  MOD_RES (29)..(30): Xaa is C or S
VMDNSLQEVVKENEDYYLMTLPELETPVXXAKPI

SEQ ID NO: 15378 - protein, 21 aa, Artificial Sequence
  Cyclic GFR-binding peptide
MRYKKLIKPTKGIFYLISIAN

SEQ ID NO: 15379 - protein, 30 aa, Artificial Sequence
  Cyclic GFR-binding peptide
  MOD_RES (2)..(4): Xaa is C or S
SXKXSRVIMEYQKYVKPKRGVIFLISIPSL

SEQ ID NO: 15380 - protein, 31 aa, Artificial Sequence; identical to SEQ ID NO: 4888
  Cyclic GFR-binding peptide
  MOD_RES (31)..(31): Xaa is C or S

SEQ ID NO: 15381 - protein, 33 aa, Artificial Sequence
  Cyclic GFR-binding peptide
  MOD_RES (31)..(32): Xaa is C or S
EVVMDRYKKLVVNNASDFYLISIANLRTPVXXT

SEQ ID NO: 15382 - protein, 35 aa, Artificial Sequence
  Cyclic GFR-binding peptide
  MOD_RES (2)..(33)..(34): Xaa is C or S
KXSKVVMEYQKYVKPTRGVIFLISIPSLDQPVXXP

SEQ ID NO: 15383 - protein, 21 aa, Artificial Sequence
  Cyclic GFR-binding peptide
DQYNKLVVKENEDLYLMSIAS

SEQ ID NO: 15384 - protein, 31 aa, Artificial Sequence; identical to SEQ ID NO: 4891
  Cyclic GFR-binding peptide
  MOD_RES (28)..(29): Xaa is C or S

SEQ ID NO: 15385 - protein, 22 aa, Artificial Sequence
  Cyclic GFR-binding peptide
RYKKLVVNNASDFYLISIANLR

SEQ ID NO: 15386 - protein, 29 aa, Artificial Sequence
  Cyclic GFR-binding peptide
  MOD_RES (2)..(2): Xaa is C or S
GXARVVMNQYNKLIVNSSDDLYLVSIASL

SEQ ID NO: 15387 - protein, 36 aa, Artificial Sequence; identical to SEQ ID NO: 4893
  Cyclic GFR-binding peptide
  MOD_RES (2)..(34)..(35): Xaa is C or S

SEQ ID NO: 15388 - protein, 24 aa, Artificial Sequence
  Cyclic GFR-binding peptide
NSLQEVVKDYEDYYVMPLPELETP

SEQ ID NO: 15389 - protein, 38 aa, Artificial Sequence
  Cyclic GFR-binding peptide
  MOD_RES (1)..(3)..(35): Xaa is C or S
XGXSRVVMNNSLQEIVNSSDDYYLVTLPELKTPAXTPK

SEQ ID NO: 15390 - protein, 28 aa, Artificial Sequence
  Cyclic GFR-binding peptide
  MOD_RES (1)..(1): Xaa is C or S
XSKVVMQYNKLVKPTRGVLYLISIASLD

SEQ ID NO: 15391 - protein, 31 aa, Artificial Sequence
  Cyclic GFR-binding peptide
  MOD_RES (28)..(29): Xaa is C or S
MDQYNKLVVNNASDLYLISIASLRTPVXXTP

SEQ ID NO: 15392 - protein, 38 aa, Artificial Sequence; identical to SEQ ID NO: 4896
  Cyclic GFR-binding peptide
  MOD_RES (2)..(4)..(36)..(37): Xaa is C or S

SEQ ID NO: 15393 - protein, 34 aa, Artificial Sequence; identical to SEQ ID NO: 4899
  Cyclic GFR-binding peptide
  MOD_RES (2)..(34): Xaa is C or S

SEQ ID NO: 15394 - protein, 22 aa, Artificial Sequence
  Cyclic GFR-binding peptide
QYNKLIKPTKGILYLISIASLD

SEQ ID NO: 15395 - protein, 23 aa, Artificial Sequence
  Cyclic GFR-binding peptide
MNEYQKYIVNSSDDIFLVSIPSL

SEQ ID NO: 15396 - protein, 27 aa, Artificial Sequence
  Cyclic GFR-binding peptide
  MOD_RES (1)..(1): Xaa is C or S
XSRVIMRYKKLVKPKRGVFYLISIANL

SEQ ID NO: 15397 - protein, 33 aa, Artificial Sequence
  Cyclic GFR-binding peptide
  MOD_RES (2)..(4): Xaa is C or S
RXGXSEVVMDQYNKLVVNNASDLYLISIASLRT

SEQ ID NO: 15398 - protein, 35 aa, Artificial Sequence
  Cyclic GFR-binding peptide
  MOD_RES (32)..(33): Xaa is C or S
GEVVMDNSLQEVVKENEDYYLMTLPELETPVXXAK

SEQ ID NO: 15399 - protein, 32 aa, Artificial Sequence
  Cyclic GFR-binding peptide
  MOD_RES (29)..(30): Xaa is C or S
VMENSLQEVVKDYEDYYVMPLPELETPVXXAK

SEQ ID NO: 15400 - protein, 27 aa, Artificial Sequence
  Cyclic GFR-binding peptide
MNEYQKYIVNSSDDIFLVSIPSLKTPA

SEQ ID NO: 15401 - protein, 29 aa, Artificial Sequence
  Cyclic GFR-binding peptide
GEVVMENSLQEVVKDYEDYYLMTLPELET

SEQ ID NO: 15402 - protein, 36 aa, Artificial Sequence
  Cyclic GFR-binding peptide
  MOD_RES (2)..(33)..(34): Xaa is C or S
KXSRVIMNSLQEVKPKRGVYYLITLPELAQPVXXPA

SEQ ID NO: 15403 - protein, 30 aa, Artificial Sequence
  Cyclic GFR-binding peptide
  MOD_RES (1)..(1): Xaa is C or S
XGEVVMENSLQEVVKDYEDYYLMTLPELET

SEQ ID NO: 15404 - protein, 32 aa, Artificial Sequence; identical to SEQ ID NO: 4915
  Cyclic GFR-binding peptide
  MOD_RES (29)..(30): Xaa is C or S

SEQ ID NO: 15405 - protein, 25 aa, Artificial Sequence
  Cyclic GFR-binding peptide
SKVIMEYQKYIKPTKGIIFLISIPS

SEQ ID NO: 15406 - protein, 31 aa, Artificial Sequence; identical to SEQ ID NO: 4918
  Cyclic GFR-binding peptide
  MOD_RES (28)..(29): Xaa is C or S

SEQ ID NO: 15407 - protein, 32 aa, Artificial Sequence; identical to SEQ ID NO: 4919
  Cyclic GFR-binding peptide
  MOD_RES (31)..(32): Xaa is C or S

SEQ ID NO: 15408 - protein, 24 aa, Artificial Sequence
  Cyclic GFR-binding peptide
MEYQKYVKPKRGVIFLISIPSLAQ

SEQ ID NO: 15409 - protein, 25 aa, Artificial Sequence
  Cyclic GFR-binding peptide
NSLQEVVKENEDYYLMTLPELETPV

SEQ ID NO: 15410 - protein, 32 aa, Artificial Sequence; identical to SEQ ID NO: 4920
  Cyclic GFR-binding peptide
  MOD_RES (1)..(3): Xaa is C or S

SEQ ID NO: 15411 - protein, 33 aa, Artificial Sequence
  Cyclic GFR-binding peptide
  MOD_RES (1)..(33): Xaa is C or S
XGEVVMEEYQKYVVKDYEDIFLMSIPSLETPVX

SEQ ID NO: 15412 - protein, 30 aa, Artificial Sequence; identical to SEQ ID NO: 4921
  Cyclic GFR-binding peptide

SEQ ID NO: 15413 - protein, 36 aa, Artificial Sequence
  Cyclic GFR-binding peptide
  MOD_RES (1)..(33)..(34): Xaa is C or S
XARVVMNEYQKYIVNSSDDIFLVSIPSLQTPAXXPK

SEQ ID NO: 15414 - protein, 31 aa, Artificial Sequence; identical to SEQ ID NO: 4923
  Cyclic GFR-binding peptide
  MOD_RES (26)..(27): Xaa is C or S

SEQ ID NO: 15415 - protein, 28 aa, Artificial Sequence
  Cyclic GFR-binding peptide
VMDQYNKLVVNNASDLYLISIASLRTPV

SEQ ID NO: 15416 - protein, 33 aa, Artificial Sequence
  Cyclic GFR-binding peptide
  MOD_RES (2)..(33): Xaa is C or S
KXSKVIMEYQKYIKPTKGIIFLISIPSLDQSVX

SEQ ID NO: 15417 - protein, 36 aa, Artificial Sequence
  Cyclic GFR-binding peptide
  MOD_RES (30)..(30): Xaa is C or S
VVMNNSLQEIVNSSDDYYLVTLPELKTPAXTPKTVH

SEQ ID NO: 15418 - protein, 34 aa, Artificial Sequence; identical to SEQ ID NO: 4925
  Cyclic GFR-binding peptide
  MOD_RES (28)..(29): Xaa is C or S

SEQ ID NO: 15419 - protein, 32 aa, Artificial Sequence
  Cyclic GFR-binding peptide
  MOD_RES (27)..(28): Xaa is C or S
MNSLQEIKPTKGIYYLITLPELDQSVXXPSAS

SEQ ID NO: 15420 - protein, 31 aa, Artificial Sequence
  Cyclic GFR-binding peptide
  MOD_RES (26)..(27): Xaa is C or S
EYQKYVVKENEDIFLMSIPSLETPVXXAKPI

SEQ ID NO: 15421 - protein, 32 aa, Artificial Sequence; identical to SEQ ID NO: 4928
  Cyclic GFR-binding peptide
  MOD_RES (29)..(30): Xaa is C or S

SEQ ID NO: 15422 - protein, 29 aa, Artificial Sequence
  Cyclic GFR-binding peptide
  MOD_RES (1)..(3): Xaa is C or S
XGXGEVVMDQYNKLVVKENEDLYLMSIAS

SEQ ID NO: 15423 - protein, 26 aa, Artificial Sequence
  Cyclic GFR-binding peptide
ARVVMNNSLQEIVNSSDDYYVVPLPE

SEQ ID NO: 15424 - protein, 34 aa, Artificial Sequence
  Cyclic GFR-binding peptide
  MOD_RES (32)..(33): Xaa is C or S
SEVVMDNSLQEVVNNASDYYVIPLPELRTPVXXT

SEQ ID NO: 15425 - protein, 27 aa, Artificial Sequence
  Cyclic GFR-binding peptide
  MOD_RES (26)..(27): Xaa is C or S
EYQKYVKPTRGVIFLISIPSLDQPVXX

SEQ ID NO: 15426 - protein, 24 aa, Artificial Sequence
  Cyclic GFR-binding peptide
NNSLQEIVNSSDDYYLVTLPELKT

SEQ ID NO: 15427 - protein, 28 aa, Artificial Sequence
  Cyclic GFR-binding peptide
VIMQYNKLVKPKRGVLYLISIASLAQPV

SEQ ID NO: 15428 - protein, 26 aa, Artificial Sequence
  Cyclic GFR-binding peptide
VMNEYQKYIVNSSDDIFLVSIPSLQT

SEQ ID NO: 15429 - protein, 22 aa, Artificial Sequence
  Cyclic GFR-binding peptide
MERYKKLVVKDYEDFYLMSIAN

SEQ ID NO: 15430 - protein, 35 aa, Artificial Sequence
  Cyclic GFR-binding peptide
  MOD_RES (31)..(32): Xaa is C or S
RVVMNEYQKYIVNSSDDIFLVSIPSLKTPAXXPKP

SEQ ID NO: 15431 - protein, 24 aa, Artificial Sequence
  Cyclic GFR-binding peptide
VMQYNKLVKPTRGVLYLISIASLD

SEQ ID NO: 15432 - protein, 22 aa, Artificial Sequence
  Cyclic GFR-binding peptide
RYKKLIVNSSDDFYLVSIANLQ

SEQ ID NO: 15433 - protein, 26 aa, Artificial Sequence
  Cyclic GFR-binding peptide
EVVMDQYNKLVVKENEDLYLMSIASL

SEQ ID NO: 15434 - protein, 36 aa, Artificial Sequence; identical to SEQ ID NO: 4946
  Cyclic GFR-binding peptide
  MOD_RES (2)..(33)..(34): Xaa is C or S

SEQ ID NO: 15435 - protein, 28 aa, Artificial Sequence
  Cyclic GFR-binding peptide
EVVMDNSLQEVVKENEDYYLMTLPELET

SEQ ID NO: 15436 - protein, 35 aa, Artificial Sequence
  Cyclic GFR-binding peptide
  MOD_RES (2)..(4)..(35): Xaa is C or S
SXKXSKVIMNSLQEIKPTKGIYYLITLPELDQSVX

SEQ ID NO: 15437 - protein, 25 aa, Artificial Sequence
  Cyclic GFR-binding peptide
VMERYKKLVVKDYEDFYLMSIANLE

SEQ ID NO: 15438 - protein, 25 aa, Artificial Sequence
  Cyclic GFR-binding peptide
EYQKYIKPTKGIIFLISIPSLDQSV

SEQ ID NO: 15439 - protein, 28 aa, Artificial Sequence
  Cyclic GFR-binding peptide
EVVMEQYNKLVVKDYEDLYLMSIASLET

SEQ ID NO: 15440 - protein, 26 aa, Artificial Sequence
  Cyclic GFR-binding peptide
MNNSLQEIVNSSDDYYLVTLPELQTP

SEQ ID NO: 15441 - protein, 23 aa, Artificial Sequence
  Cyclic GFR-binding peptide
VVMNSLQEVKPTRGVYYVIPLPE

SEQ ID NO: 15442 - protein, 35 aa, Artificial Sequence; identical to SEQ ID NO: 4959
  Cyclic GFR-binding peptide
  MOD_RES (1)..(32)..(33): Xaa is C or S

SEQ ID NO: 15443 - protein, 30 aa, Artificial Sequence
  Cyclic GFR-binding peptide
  MOD_RES (26)..(26): Xaa is C or S
EYQKYIVNSSDDIFLVSIPSLKTPAXTPKT

SEQ ID NO: 15444 - protein, 30 aa, Artificial Sequence
  Cyclic GFR-binding peptide
  MOD_RES (1)..(1): Xaa is C or S
XARVVMNNSLQEIVNSSDDYYLVTLPELQT

SEQ ID NO: 15445 - protein, 41 aa, Artificial Sequence
  Cyclic GFR-binding peptide
  MOD_RES (1)..(3)..(35)..(36): Xaa is C or S
XGXGEVVMDEYQKYVVKENEDIFLMSIPSLETPVXXAKPIK

SEQ ID NO: 15446 - protein, 39 aa, Artificial Sequence
  Cyclic GFR-binding peptide
  MOD_RES (2)..(4)..(36)..(37): Xaa is C or S
HXGXSRVVMNEYQKYIVNSSDDIFLVSIPSLKTPAXXPK

SEQ ID NO: 15447 - protein, 33 aa, Artificial Sequence; identical to SEQ ID NO: 4964
  Cyclic GFR-binding peptide
  MOD_RES (28)..(29): Xaa is C or S

SEQ ID NO: 15448 - protein, 24 aa, Artificial Sequence
  Cyclic GFR-binding peptide
MQYNKLIKPTKGILYLISIASLDQ

SEQ ID NO: 15449 - protein, 39 aa, Artificial Sequence
  Cyclic GFR-binding peptide
  MOD_RES (1)..(33)..(34): Xaa is C or S
XGEVVMDNSLQEVVKENEDYYLMTLPELETPVXXAKPIK

SEQ ID NO: 15450 - protein, 33 aa, Artificial Sequence; identical to SEQ ID NO: 4968
  Cyclic GFR-binding peptide
  MOD_RES (30)..(31): Xaa is C or S

SEQ ID NO: 15451 - protein, 26 aa, Artificial Sequence
  Cyclic GFR-binding peptide
  MOD_RES (26)..(26): Xaa is C or S
RYKKLIKPTKGIFYLISIANLDQSVX

SEQ ID NO: 15452 - protein, 30 aa, Artificial Sequence
  Cyclic GFR-binding peptide
  MOD_RES (26)..(27): Xaa is C or S
NSLQEIVNSSDDYYVVPLPELQTPAXXPKP

SEQ ID NO: 15453 - protein, 30 aa, Artificial Sequence
  Cyclic GFR-binding peptide
  MOD_RES (2)..(2): Xaa is C or S
KXSKVIMNSLQEIKPTKGIYYVIPLPELDQ

SEQ ID NO: 15454 - protein, 34 aa, Artificial Sequence
  Cyclic GFR-binding peptide
  MOD_RES (2)..(4): Xaa is C or S
SXKXSKVVMEYQKYVKPTRGVIFLISIPSLDQPV

SEQ ID NO: 15455 - protein, 30 aa, Artificial Sequence
  Cyclic GFR-binding peptide
  MOD_RES (30)..(30): Xaa is C or S
VVMDNSLQEVVKENEDYYVMPLPELETPVX

SEQ ID NO: 15456 - protein, 32 aa, Artificial Sequence; identical to SEQ ID NO: 4977
  Cyclic GFR-binding peptide
  MOD_RES (28)..(29): Xaa is C or S

SEQ ID NO: 15457 - protein, 30 aa, Artificial Sequence
  Cyclic GFR-binding peptide
  MOD_RES (2)..(2): Xaa is C or S
GXGEVVMDNSLQEVVKENEDYYLMTLPELE

SEQ ID NO: 15458 - protein, 40 aa, Artificial Sequence
  Cyclic GFR-binding peptide
  MOD_RES (2)..(4)..(36)..(37): Xaa is C or S
HXGXSRVVMNNSLQEIVNSSDDYYLVTLPELKTPAXXPKP

SEQ ID NO: 15459 - protein, 37 aa, Artificial Sequence
  Cyclic GFR-binding peptide
  MOD_RES (1)..(33)..(34): Xaa is C or S
XGEVVMEEYQKYVVKDYEDIFLMSIPSLETPVXXAKP

SEQ ID NO: 15460 - protein, 34 aa, Artificial Sequence
  Cyclic GFR-binding peptide
  MOD_RES (1)..(33)..(34): Xaa is C or S
XSRVVMNEYQKYIVNSSDDIFLVSIPSLKTPAXX

SEQ ID NO: 15461 - protein, 34 aa, Artificial Sequence; identical to SEQ ID NO: 4985
  Cyclic GFR-binding peptide
  MOD_RES (1)..(3): Xaa is C or S

SEQ ID NO: 15462 - protein, 32 aa, Artificial Sequence; identical to SEQ ID NO: 4986
  Cyclic GFR-binding peptide
  MOD_RES (31)..(32): Xaa is C or S

SEQ ID NO: 15463 - protein, 36 aa, Artificial Sequence
  Cyclic GFR-binding peptide
  MOD_RES (1)..(32)..(33): Xaa is C or S
XSKVVMNSLQEVKPTRGVYYVIPLPELDQPVXXPSA

SEQ ID NO: 15464 - protein, 30 aa, Artificial Sequence
  Cyclic GFR-binding peptide
  MOD_RES (28)..(29): Xaa is C or S
IMEYQKYIKPTKGIIFLISIPSLDQSVXXP

SEQ ID NO: 15465 - protein, 40 aa, Artificial Sequence; identical to SEQ ID NO: 4992
  Cyclic GFR-binding peptide
  MOD_RES (2)..(4)..(35)..(36): Xaa is C or S

SEQ ID NO: 15466 - protein, 27 aa, Artificial Sequence
  Cyclic GFR-binding peptide
  MOD_RES (26)..(27): Xaa is C or S
RYKKLVVKENEDFYLMSIANLETPVXX

SEQ ID NO: 15467 - protein, 32 aa, Artificial Sequence
  Cyclic GFR-binding peptide
  MOD_RES (31)..(32): Xaa is C or S
SKVIMEYQKYIKPTKGIIFLISIPSLDQSVXX

SEQ ID NO: 15468 - protein, 37 aa, Artificial Sequence; identical to SEQ ID NO: 4995
  Cyclic GFR-binding peptide
  MOD_RES (31)..(32): Xaa is C or S

SEQ ID NO: 15469 - protein, 29 aa, Artificial Sequence
  Cyclic GFR-binding peptide
  MOD_RES (26)..(26): Xaa is C or S
EYQKYIVNSSDDIFLVSIPSLKTPAXTPK

SEQ ID NO: 15470 - protein, 36 aa, Artificial Sequence; identical to SEQ ID NO: 4996
  Cyclic GFR-binding peptide
  MOD_RES (30)..(31): Xaa is C or S

SEQ ID NO: 15471 - protein, 41 aa, Artificial Sequence; identical to SEQ ID NO: 4997
  Cyclic GFR-binding peptide
  MOD_RES (2)..(4)..(35)..(36): Xaa is C or S

SEQ ID NO: 15472 - protein, 21 aa, Artificial Sequence
  Cyclic GFR-binding peptide
DNSLQEVVKENEDYYVMPLPE

SEQ ID NO: 15473 - protein, 24 aa, Artificial Sequence
  Cyclic GFR-binding peptide
NEYQKYIVNSSDDIFLVSIPSLQT

SEQ ID NO: 15474 - protein, 31 aa, Artificial Sequence
  Cyclic GFR-binding peptide
  MOD_RES (2)..(4): Xaa is C or S
SXKXSKVVMNSLQEVKPTRGVYYVIPLPELD

SEQ ID NO: 15475 - protein, 29 aa, Artificial Sequence
  Cyclic GFR-binding peptide
SRVIMNSLQEVKPKRGVYYLITLPELAQP

SEQ ID NO: 15476 - protein, 26 aa, Artificial Sequence
  Cyclic GFR-binding peptide
SKVVMRYKKLVKPTRGVFYLISIANL

SEQ ID NO: 15477 - protein, 28 aa, Artificial Sequence
  Cyclic GFR-binding peptide
  MOD_RES (1)..(1): Xaa is C or S
XGEVVMEEYQKYVVKDYEDIFLMSIPSL

SEQ ID NO: 15478 - protein, 31 aa, Artificial Sequence
  Cyclic GFR-binding peptide
ARVVMNNSLQEIVNSSDDYYVVPLPELQTPA

SEQ ID NO: 15479 - protein, 34 aa, Artificial Sequence
  Cyclic GFR-binding peptide
  MOD_RES (1)..(3): Xaa is C or S
XGXSRVVMNNSLQEIVNSSDDYYVVPLPELKTPA

SEQ ID NO: 15480 - protein, 35 aa, Artificial Sequence
  Cyclic GFR-binding peptide
  MOD_RES (30)..(31): Xaa is C or S
VVMEEYQKYVVKDYEDIFLMSIPSLETPVXXAKPI

SEQ ID NO: 15481 - protein, 37 aa, Artificial Sequence
  Cyclic GFR-binding peptide
  MOD_RES (1)..(3)..(35)..(36): Xaa is C or S
XGXSEVVMDRYKKLVVNNASDFYLISIANLRTPVXXT

SEQ ID NO: 15482 - protein, 36 aa, Artificial Sequence; identical to SEQ ID NO: 5005
  Cyclic GFR-binding peptide
  MOD_RES (1)..(32)..(33): Xaa is C or S

SEQ ID NO: 15483 - protein, 30 aa, Artificial Sequence
  Cyclic GFR-binding peptide
  MOD_RES (30)..(30): Xaa is C or S
VVMNNSLQEIVNSSDDYYLVTLPELKTPAX

SEQ ID NO: 15484 - protein, 28 aa, Artificial Sequence
  Cyclic GFR-binding peptide
  MOD_RES (1)..(3): Xaa is C or S
XKXSRVIMNSLQEVKPKRGVYYLITLPE

SEQ ID NO: 15485 - protein, 24 aa, Artificial Sequence
  Cyclic GFR-binding peptide
MENSLQEVVKDYEDYYVMPLPELE

SEQ ID NO: 15486 - protein, 35 aa, Artificial Sequence
  Cyclic GFR-binding peptide
  MOD_RES (29)..(30): Xaa is C or S
VMDNSLQEVVNNASDYYVIPLPELRTPVXXTPPTS

SEQ ID NO: 15487 - protein, 24 aa, Artificial Sequence
  Cyclic GFR-binding peptide
NSLQEVVNNASDYYVIPLPELRTP

SEQ ID NO: 15488 - protein, 34 aa, Artificial Sequence
  Cyclic GFR-binding peptide
  MOD_RES (2)..(4): Xaa is C or S
RXGXSEVVMDNSLQEVVNNASDYYVIPLPELRTP

SEQ ID NO: 15489 - protein, 33 aa, Artificial Sequence; identical to SEQ ID NO: 5011
  Cyclic GFR-binding peptide
  MOD_RES (2)..(4): Xaa is C or S

SEQ ID NO: 15490 - protein, 28 aa, Artificial Sequence
  Cyclic GFR-binding peptide
  MOD_RES (27)..(27): Xaa is C or S
NNSLQEIVNSSDDYYVVPLPELKTPAXT

SEQ ID NO: 15491 - protein, 31 aa, Artificial Sequence; identical to SEQ ID NO: 5012
  Cyclic GFR-binding peptide
  MOD_RES (31)..(31): Xaa is C or S

SEQ ID NO: 15492 - protein, 38 aa, Artificial Sequence
  Cyclic GFR-binding peptide
  MOD_RES (32)..(32): Xaa is C or S
SRVVMNEYQKYIVNSSDDIFLVSIPSLKTPAXTPKTVH

SEQ ID NO: 15493 - protein, 21 aa, Artificial Sequence
  Cyclic GFR-binding peptide
NSLQEVVKENEDYYVMPLPEL

SEQ ID NO: 15494 - protein, 30 aa, Artificial Sequence; identical to SEQ ID NO: 5013
  Cyclic GFR-binding peptide
  MOD_RES (29)..(30): Xaa is C or S

SEQ ID NO: 15495 - protein, 28 aa, Artificial Sequence
  Cyclic GFR-binding peptide
  MOD_RES (26)..(27): Xaa is C or S
NSLQEIVNSSDDYYLVTLPELQTPAXXP

SEQ ID NO: 15496 - protein, 25 aa, Artificial Sequence
  Cyclic GFR-binding peptide
RVVMNQYNKLIVNSSDDLYLVSIAS

SEQ ID NO: 15497 - protein, 35 aa, Artificial Sequence; identical to SEQ ID NO: 5021
  Cyclic GFR-binding peptide
  MOD_RES (2)..(4): Xaa is C or S

SEQ ID NO: 15498 - protein, 25 aa, Artificial Sequence
  Cyclic GFR-binding peptide
MEYQKYVKPKRGVIFLISIPSLAQP

SEQ ID NO: 15499 - protein, 27 aa, Artificial Sequence
  Cyclic GFR-binding peptide
  MOD_RES (1)..(1): Xaa is C or S
XSRVIMNSLQEVKPKRGVYYLITLPEL

SEQ ID NO: 15500 - protein, 23 aa, Artificial Sequence
  Cyclic GFR-binding peptide
VMEQYNKLVVKDYEDLYLMSIAS

SEQ ID NO: 15501 - protein, 40 aa, Artificial Sequence; identical to SEQ ID NO: 5025
  Cyclic GFR-binding peptide
  MOD_RES (2)..(4)..(36): Xaa is C or S

SEQ ID NO: 15502 - protein, 33 aa, Artificial Sequence
  Cyclic GFR-binding peptide
  MOD_RES (2)..(2): Xaa is C or S
GXSEVVMDRYKKLVVNNASDFYLISIANLRTPV

SEQ ID NO: 15503 - protein, 38 aa, Artificial Sequence
  Cyclic GFR-binding peptide
  MOD_RES (1)..(3)..(34)..(35): Xaa is C or S
XKXSKVIMNSLQEIKPTKGIYYLITLPELDQSVXXPSA

SEQ ID NO: 15504 - protein, 24 aa, Artificial Sequence
  Cyclic GFR-binding peptide
VVMNNSLQEIVNSSDDYYLVTLPE

SEQ ID NO: 15505 - protein, 38 aa, Artificial Sequence; identical to SEQ ID NO: 5032
  Cyclic GFR-binding peptide
  MOD_RES (1)..(3)..(35)..(36): Xaa is C or S

SEQ ID NO: 15506 - protein, 21 aa, Artificial Sequence
  Cyclic GFR-binding peptide
NQYNKLIVNSSDDLYLVSIAS

SEQ ID NO: 15507 - protein, 33 aa, Artificial Sequence
  Cyclic GFR-binding peptide
  MOD_RES (1)..(33): Xaa is C or S
XGEVVMDNSLQEVVKENEDYYVMPLPELETPVX

SEQ ID NO: 15508 - protein, 34 aa, Artificial Sequence; identical to SEQ ID NO: 5035
  Cyclic GFR-binding peptide
  MOD_RES (29)..(30): Xaa is C or S

SEQ ID NO: 15509 - protein, 40 aa, Artificial Sequence; identical to SEQ ID NO: 5037
  Cyclic GFR-binding peptide
  MOD_RES (1)..(3)..(35)..(36): Xaa is C or S

SEQ ID NO: 15510 - protein, 33 aa, Artificial Sequence
  Cyclic GFR-binding peptide
  MOD_RES (1)..(3): Xaa is C or S
XKXSKVVMNSLQEVKPTRGVYYVIPLPELDQPV

SEQ ID NO: 15511 - protein, 39 aa, Artificial Sequence; identical to SEQ ID NO: 5038
  Cyclic GFR-binding peptide
  MOD_RES (2)..(33)..(34): Xaa is C or S

SEQ ID NO: 15512 - protein, 35 aa, Artificial Sequence
  Cyclic GFR-binding peptide
  MOD_RES (30)..(31): Xaa is C or S
VVMDNSLQEVVNNASDYYVIPLPELRTPVXXTPPT

SEQ ID NO: 15513 - protein, 25 aa, Artificial Sequence
  Cyclic GFR-binding peptide
MEYQKYIKPTKGIIFLISIPSLDQS

SEQ ID NO: 15514 - protein, 28 aa, Artificial Sequence
  Cyclic GFR-binding peptide
VVMENSLQEVVKDYEDYYVMPLPELETP

SEQ ID NO: 15515 - protein, 33 aa, Artificial Sequence
  Cyclic GFR-binding peptide
  MOD_RES (31)..(32): Xaa is C or S
RVVMNNSLQEIVNSSDDYYVVPLPELKTPAXXP

SEQ ID NO: 15516 - protein, 35 aa, Artificial Sequence; identical to SEQ ID NO: 5039
  Cyclic GFR-binding peptide
  MOD_RES (29)..(29): Xaa is C or S

SEQ ID NO: 15517 - protein, 33 aa, Artificial Sequence
  Cyclic GFR-binding peptide
  MOD_RES (2)..(2): Xaa is C or S
GXGEVVMDEYQKYVVKENEDIFLMSIPSLETPV

SEQ ID NO: 15518 - protein, 30 aa, Artificial Sequence; identical to SEQ ID NO: 5042
  Cyclic GFR-binding peptide
  MOD_RES (26)..(27): Xaa is C or S

SEQ ID NO: 15519 - protein, 28 aa, Artificial Sequence
  Cyclic GFR-binding peptide
  MOD_RES (2)..(2): Xaa is C or S
GXSRVVMNNSLQEIVNSSDDYYLVTLPE

SEQ ID NO: 15520 - protein, 27 aa, Artificial Sequence
  Cyclic GFR-binding peptide
VVMDRYKKLVVKENEDFYLMSIANLET

SEQ ID NO: 15521 - protein, 35 aa, Artificial Sequence; identical to SEQ ID NO: 5044
  Cyclic GFR-binding peptide
  MOD_RES (2)..(4)..(35): Xaa is C or S

SEQ ID NO: 15522 - protein, 36 aa, Artificial Sequence
  Cyclic GFR-binding peptide
  MOD_RES (32)..(33): Xaa is C or S
SRVVMNNSLQEIVNSSDDYYLVTLPELKTPAXXPKP

SEQ ID NO: 15523 - protein, 27 aa, Artificial Sequence
  Cyclic GFR-binding peptide
RVVMNNSLQEIVNSSDDYYVVPLPELQ

SEQ ID NO: 15524 - protein, 35 aa, Artificial Sequence
  Cyclic GFR-binding peptide
  MOD_RES (1)..(33): Xaa is C or S
XSRVVMNNSLQEIVNSSDDYYLVTLPELKTPAXTP

SEQ ID NO: 15525 - protein, 28 aa, Artificial Sequence
  Cyclic GFR-binding peptide
  MOD_RES (2)..(2): Xaa is C or S
KXSRVIMQYNKLVKPKRGVLYLISIASL

SEQ ID NO: 15526 - protein, 42 aa, Artificial Sequence
  Cyclic GFR-binding peptide
  MOD_RES (2)..(4)..(36)..(37): Xaa is C or S
RXGXGEVVMENSLQEVVKDYEDYYLMTLPELETPVXXAKPIS

SEQ ID NO: 15527 - protein, 33 aa, Artificial Sequence; identical to SEQ ID NO: 5049
  Cyclic GFR-binding peptide
  MOD_RES (32)..(32): Xaa is C or S

SEQ ID NO: 15528 - protein, 38 aa, Artificial Sequence
  Cyclic GFR-binding peptide
  MOD_RES (32)..(33): Xaa is C or S
SRVVMNEYQKYIVNSSDDIFLVSIPSLKTPAXXPKPVY

SEQ ID NO: 15529 - protein, 29 aa, Artificial Sequence
  Cyclic GFR-binding peptide
  MOD_RES (29)..(29): Xaa is C or S
VMDQYNKLVVNNASDLYLISIASLRTPVX

SEQ ID NO: 15530 - protein, 26 aa, Artificial Sequence
  Cyclic GFR-binding peptide
KVVMNSLQEVKPTRGVYYVIPLPELD

SEQ ID NO: 15531 - protein, 27 aa, Artificial Sequence
  Cyclic GFR-binding peptide
  MOD_RES (27)..(27): Xaa is C or S
DNSLQEVVNNASDYYVIPLPELRTPVX

SEQ ID NO: 15532 - protein, 31 aa, Artificial Sequence; identical to SEQ ID NO: 5051
  Cyclic GFR-binding peptide
  MOD_RES (2)..(4): Xaa is C or S

SEQ ID NO: 15533 - protein, 26 aa, Artificial Sequence
  Cyclic GFR-binding peptide
VMENSLQEVVKDYEDYYVMPLPELET

SEQ ID NO: 15534 - protein, 38 aa, Artificial Sequence; identical to SEQ ID NO: 5052
  Cyclic GFR-binding peptide
  MOD_RES (32)..(33): Xaa is C or S

SEQ ID NO: 15535 - protein, 24 aa, Artificial Sequence
  Cyclic GFR-binding peptide
MEYQKYVKPTRGVIFLISIPSLDQ

SEQ ID NO: 15536 - protein, 29 aa, Artificial Sequence
  Cyclic GFR-binding peptide
ARVVMNRYKKLIVNSSDDFYLVSIANLQT

SEQ ID NO: 15537 - protein, 33 aa, Artificial Sequence; identical to SEQ ID NO: 5057
  Cyclic GFR-binding peptide
  MOD_RES (1)..(3): Xaa is C or S

SEQ ID NO: 15538 - protein, 36 aa, Artificial Sequence; identical to SEQ ID NO: 5058
  Cyclic GFR-binding peptide
  MOD_RES (30)..(31): Xaa is C or S

SEQ ID NO: 15539 - protein, 29 aa, Artificial Sequence
  Cyclic GFR-binding peptide
  MOD_RES (2)..(2): Xaa is C or S
GXGEVVMDNSLQEVVKENEDYYVMPLPEL

SEQ ID NO: 15540 - protein, 35 aa, Artificial Sequence; identical to SEQ ID NO: 5064
  Cyclic GFR-binding peptide
  MOD_RES (1)..(33)..(34): Xaa is C or S

SEQ ID NO: 15541 - protein, 31 aa, Artificial Sequence
  Cyclic GFR-binding peptide
  MOD_RES (27)..(28): Xaa is C or S
DNSLQEVVNNASDYYLITLPELRTPVXXTPP

SEQ ID NO: 15542 - protein, 30 aa, Artificial Sequence; identical to SEQ ID NO: 5067
  Cyclic GFR-binding peptide

SEQ ID NO: 15543 - protein, 39 aa, Artificial Sequence
  Cyclic GFR-binding peptide
  MOD_RES (2)..(4)..(36)..(37): Xaa is C or S
RXGXGEVVMDNSLQEVVKENEDYYVMPLPELETPVXXAK

SEQ ID NO: 15544 - protein, 34 aa, Artificial Sequence
  Cyclic GFR-binding peptide
  MOD_RES (1)..(33)..(34): Xaa is C or S
XSEVVMDNSLQEVVNNASDYYLITLPELRTPVXX

SEQ ID NO: 15545 - protein, 42 aa, Artificial Sequence; identical to SEQ ID NO: 5070
  Cyclic GFR-binding peptide
  MOD_RES (2)..(4)..(36)..(37): Xaa is C or S

SEQ ID NO: 15546 - protein, 20 aa, Artificial Sequence
  Cyclic GFR-binding peptide
NSLQEIKPTKGIYYLITLPE

SEQ ID NO: 15547 - protein, 26 aa, Artificial Sequence
  Cyclic GFR-binding peptide
VVMNRYKKLIVNSSDDFYLVSIANLK

SEQ ID NO: 15548 - protein, 27 aa, Artificial Sequence
  Cyclic GFR-binding peptide
VMDRYKKLVVNNASDFYLISIANLRTP

SEQ ID NO: 15549 - protein, 35 aa, Artificial Sequence; identical to SEQ ID NO: 5073
  Cyclic GFR-binding peptide
  MOD_RES (1)..(3)..(35): Xaa is C or S

SEQ ID NO: 15550 - protein, 39 aa, Artificial Sequence; identical to SEQ ID NO: 5076
  Cyclic GFR-binding peptide
  MOD_RES (2)..(33)..(34): Xaa is C or S

SEQ ID NO: 15551 - protein, 27 aa, Artificial Sequence
  Cyclic GFR-binding peptide
EVVMDQYNKLVVKENEDLYLMSIASLE

SEQ ID NO: 15552 - protein, 29 aa, Artificial Sequence
  Cyclic GFR-binding peptide
  MOD_RES (1)..(1): Xaa is C or S
XGEVVMDQYNKLVVKENEDLYLMSIASLE

SEQ ID NO: 15553 - protein, 38 aa, Artificial Sequence
  Cyclic GFR-binding peptide
  MOD_RES (1)..(32)..(33): Xaa is C or S
XSKVVMNSLQEVKPTRGVYYVIPLPELDQPVXXPSASA

SEQ ID NO: 15554 - protein, 32 aa, Artificial Sequence; identical to SEQ ID NO: 5081
  Cyclic GFR-binding peptide
  MOD_RES (30)..(30): Xaa is C or S

SEQ ID NO: 15555 - protein, 28 aa, Artificial Sequence
  Cyclic GFR-binding peptide
RVVMNRYKKLIVNSSDDFYLVSIANLKT

SEQ ID NO: 15556 - protein, 29 aa, Artificial Sequence
  Cyclic GFR-binding peptide
  MOD_RES (2)..(2): Xaa is C or S
GXARVVMNNSLQEIVNSSDDYYLVTLPEL

SEQ ID NO: 15557 - protein, 34 aa, Artificial Sequence; identical to SEQ ID NO: 5084
  Cyclic GFR-binding peptide
  MOD_RES (1)..(3): Xaa is C or S

SEQ ID NO: 15558 - protein, 25 aa, Artificial Sequence
  Cyclic GFR-binding peptide
DRYKKLVVKENEDFYLMSIANLETP

SEQ ID NO: 15559 - protein, 30 aa, Artificial Sequence
  Cyclic GFR-binding peptide
  MOD_RES (1)..(3): Xaa is C or S
XGXGEVVMEEYQKYVVKDYEDIFLMSIPSL

SEQ ID NO: 15560 - protein, 29 aa, Artificial Sequence
  Cyclic GFR-binding peptide
  MOD_RES (27)..(28): Xaa is C or S
NQYNKLIVNSSDDLYLVSIASLQTPAXXP

SEQ ID NO: 15561 - protein, 20 aa, Artificial Sequence
  Cyclic GFR-binding peptide
RYKKLIKPTKGIFYLISIAN

SEQ ID NO: 15562 - protein, 27 aa, Artificial Sequence
  Cyclic GFR-binding peptide
VVMNEYQKYIVNSSDDIFLVSIPSLQT

SEQ ID NO: 15563 - protein, 35 aa, Artificial Sequence; identical to SEQ ID NO: 5091
  Cyclic GFR-binding peptide
  MOD_RES (2)..(4): Xaa is C or S

SEQ ID NO: 15564 - protein, 34 aa, Artificial Sequence
  Cyclic GFR-binding peptide
  MOD_RES (1)..(32)..(33): Xaa is C or S
XSKVIMNSLQEIKPTKGIYYLITLPELDQSVXXP

SEQ ID NO: 15565 - protein, 33 aa, Artificial Sequence
  Cyclic GFR-binding peptide
  MOD_RES (30)..(30): Xaa is C or S
VVMNNSLQEIVNSSDDYYLVTLPELKTPAXTPK

SEQ ID NO: 15566 - protein, 29 aa, Artificial Sequence
  Cyclic GFR-binding peptide
SEVVMDNSLQEVVNNASDYYVIPLPELRT

SEQ ID NO: 15567 - protein, 33 aa, Artificial Sequence
  Cyclic GFR-binding peptide
  MOD_RES (27)..(28): Xaa is C or S
DEYQKYVVKENEDIFLMSIPSLETPVXXAKPIK

SEQ ID NO: 15568 - protein, 36 aa, Artificial Sequence; identical to SEQ ID NO: 5094
  Cyclic GFR-binding peptide
  MOD_RES (31)..(32): Xaa is C or S

SEQ ID NO: 15569 - protein, 26 aa, Artificial Sequence
  Cyclic GFR-binding peptide
VMNEYQKYIVNSSDDIFLVSIPSLKT

SEQ ID NO: 15570 - protein, 40 aa, Artificial Sequence
  Cyclic GFR-binding peptide
  MOD_RES (2)..(4)..(36): Xaa is C or S
HXGXSRVVMNNSLQEIVNSSDDYYLVTLPELKTPAXTPKT

SEQ ID NO: 15571 - protein, 30 aa, Artificial Sequence
  Cyclic GFR-binding peptide
RVVMNEYQKYIVNSSDDIFLVSIPSLQTPA

SEQ ID NO: 15572 - protein, 34 aa, Artificial Sequence
  Cyclic GFR-binding peptide
  MOD_RES (2)..(4): Xaa is C or S
SXKXSKVVMNSLQEVKPTRGVYYLITLPELDQPV

SEQ ID NO: 15573 - protein, 22 aa, Artificial Sequence
  Cyclic GFR-binding peptide
MRYKKLIKPTKGIFYLISIANL

SEQ ID NO: 15574 - protein, 37 aa, Artificial Sequence
  Cyclic GFR-binding peptide
  MOD_RES (31)..(32): Xaa is C or S
RVVMNEYQKYIVNSSDDIFLVSIPSLQTPAXXPKPVT

SEQ ID NO: 15575 - protein, 27 aa, Artificial Sequence
  Cyclic GFR-binding peptide
  MOD_RES (26)..(27): Xaa is C or S
NSLQEVVKENEDYYLMTLPELETPVXX

SEQ ID NO: 15576 - protein, 32 aa, Artificial Sequence; identical to SEQ ID NO: 5100
  Cyclic GFR-binding peptide
  MOD_RES (26)..(27): Xaa is C or S

SEQ ID NO: 15577 - protein, 31 aa, Artificial Sequence
  Cyclic GFR-binding peptide
  MOD_RES (2)..(4): Xaa is C or S
HXGXSRVVMNNSLQEIVNSSDDYYVVPLPEL

SEQ ID NO: 15578 - protein, 41 aa, Artificial Sequence
  Cyclic GFR-binding peptide
  MOD_RES (1)..(3)..(35)..(36): Xaa is C or S
XGXSRVVMNNSLQEIVNSSDDYYLVTLPELKTPAXXPKPVY

SEQ ID NO: 15579 - protein, 24 aa, Artificial Sequence
  Cyclic GFR-binding peptide
VIMNSLQEIKPTKGIYYLITLPEL

SEQ ID NO: 15580 - protein, 32 aa, Artificial Sequence
  Cyclic GFR-binding peptide
  MOD_RES (29)..(30): Xaa is C or S
VMENSLQEVVKDYEDYYLMTLPELETPVXXAK

SEQ ID NO: 15581 - protein, 34 aa, Artificial Sequence
  Cyclic GFR-binding peptide
  MOD_RES (2)..(34): Xaa is C or S
GXGEVVMDEYQKYVVKENEDIFLMSIPSLETPVX

SEQ ID NO: 15582 - protein, 26 aa, Artificial Sequence
  Cyclic GFR-binding peptide
  MOD_RES (1)..(1): Xaa is C or S
XSKVIMNSLQEIKPTKGIYYVIPLPE

SEQ ID NO: 15583 - protein, 38 aa, Artificial Sequence; identical to SEQ ID NO: 5105
  Cyclic GFR-binding peptide
  MOD_RES (1)..(33)..(34): Xaa is C or S

SEQ ID NO: 15584 - protein, 28 aa, Artificial Sequence
  Cyclic GFR-binding peptide
VMNRYKKLIVNSSDDFYLVSIANLQTPA

SEQ ID NO: 15585 - protein, 23 aa, Artificial Sequence
  Cyclic GFR-binding peptide
VMRYKKLVKPTRGVFYLISIANL

SEQ ID NO: 15586 - protein, 22 aa, Artificial Sequence
  Cyclic GFR-binding peptide
QYNKLVVNNASDLYLISIASLR

SEQ ID NO: 15587 - protein, 41 aa, Artificial Sequence
  Cyclic GFR-binding peptide
  MOD_RES (1)..(3)..(35)..(36): Xaa is C or S
XGXSRVVMNEYQKYIVNSSDDIFLVSIPSLKTPAXXPKPVY

SEQ ID NO: 15588 - protein, 32 aa, Artificial Sequence; identical to SEQ ID NO: 5109
  Cyclic GFR-binding peptide
  MOD_RES (2)..(2): Xaa is C or S

SEQ ID NO: 15589 - protein, 30 aa, Artificial Sequence
  Cyclic GFR-binding peptide
  MOD_RES (1)..(3): Xaa is C or S
XGXGEVVMENSLQEVVKDYEDYYLMTLPEL

SEQ ID NO: 15590 - protein, 31 aa, Artificial Sequence
  Cyclic GFR-binding peptide
  MOD_RES (1)..(1): Xaa is C or S
XSEVVMDRYKKLVVNNASDFYLISIANLRTP

SEQ ID NO: 15591 - protein, 24 aa, Artificial Sequence
  Cyclic GFR-binding peptide
MNEYQKYIVNSSDDIFLVSIPSLQ

SEQ ID NO: 15592 - protein, 33 aa, Artificial Sequence
  Cyclic GFR-binding peptide
  MOD_RES (31)..(32): Xaa is C or S
SRVIMEYQKYVKPKRGVIFLISIPSLAQPVXXP

SEQ ID NO: 15593 - protein, 23 aa, Artificial Sequence
  Cyclic GFR-binding peptide
DNSLQEVVNNASDYYLITLPELR

SEQ ID NO: 15594 - protein, 22 aa, Artificial Sequence
  Cyclic GFR-binding peptide
EYQKYVVKENEDIFLMSIPSLE

SEQ ID NO: 15595 - protein, 34 aa, Artificial Sequence
  Cyclic GFR-binding peptide
  MOD_RES (30)..(30): Xaa is C or S
VVMNNSLQEIVNSSDDYYVVPLPELKTPAXTPKT

SEQ ID NO: 15596 - protein, 30 aa, Artificial Sequence
  Cyclic GFR-binding peptide
EVVMDRYKKLVVNNASDFYLISIANLRTPV

SEQ ID NO: 15597 - protein, 32 aa, Artificial Sequence
  Cyclic GFR-binding peptide
  MOD_RES (26)..(27): Xaa is C or S
EYQKYIKPTKGIIFLISIPSLDQSVXXPSASA

SEQ ID NO: 15598 - protein, 39 aa, Artificial Sequence
  Cyclic GFR-binding peptide
  MOD_RES (1)..(3)..(34)..(35): Xaa is C or S
XKXSKVIMNSLQEIKPTKGIYYVIPLPELDQSVXXPSAS

SEQ ID NO: 15599 - protein, 22 aa, Artificial Sequence
  Cyclic GFR-binding peptide
NRYKKLIVNSSDDFYLVSIANL

SEQ ID NO: 15600 - protein, 30 aa, Artificial Sequence; identical to SEQ ID NO: 5122
  Cyclic GFR-binding peptide
  MOD_RES (1)..(1): Xaa is C or S

SEQ ID NO: 15601 - protein, 28 aa, Artificial Sequence
  Cyclic GFR-binding peptide
VVMQYNKLVKPTRGVLYLISIASLDQPV

SEQ ID NO: 15602 - protein, 32 aa, Artificial Sequence
  Cyclic GFR-binding peptide
  MOD_RES (2)..(4): Xaa is C or S
SXKXSRVIMNSLQEVKPKRGVYYLITLPELAQ

SEQ ID NO: 15603 - protein, 23 aa, Artificial Sequence
  Cyclic GFR-binding peptide
MNNSLQEIVNSSDDYYVVPLPEL

SEQ ID NO: 15604 - protein, 28 aa, Artificial Sequence
  Cyclic GFR-binding peptide
  MOD_RES (28)..(28): Xaa is C or S
MENSLQEVVKDYEDYYLMTLPELETPVX

SEQ ID NO: 15605 - protein, 32 aa, Artificial Sequence; identical to SEQ ID NO: 5132
  Cyclic GFR-binding peptide
  MOD_RES (2)..(4): Xaa is C or S

SEQ ID NO: 15606 - protein, 33 aa, Artificial Sequence; identical to SEQ ID NO: 5134
  Cyclic GFR-binding peptide
  MOD_RES (1)..(33): Xaa is C or S

SEQ ID NO: 15607 - protein, 25 aa, Artificial Sequence
  Cyclic GFR-binding peptide
IMQYNKLIKPTKGILYLISIASLDQ

SEQ ID NO: 15608 - protein, 28 aa, Artificial Sequence
  Cyclic GFR-binding peptide
VVMNQYNKLIVNSSDDLYLVSIASLQTP

SEQ ID NO: 15609 - protein, 41 aa, Artificial Sequence
  Cyclic GFR-binding peptide
  MOD_RES (1)..(3)..(35)..(36): Xaa is C or S
XGXSEVVMDNSLQEVVNNASDYYLITLPELRTPVXXTPPTS

SEQ ID NO: 15610 - protein, 27 aa, Artificial Sequence
  Cyclic GFR-binding peptide
VMNRYKKLIVNSSDDFYLVSIANLKTP

SEQ ID NO: 15611 - protein, 22 aa, Artificial Sequence
  Cyclic GFR-binding peptide
VMQYNKLVKPTRGVLYLISIAS

SEQ ID NO: 15612 - protein, 30 aa, Artificial Sequence
  Cyclic GFR-binding peptide
  MOD_RES (28)..(29): Xaa is C or S
MENSLQEVVKDYEDYYLMTLPELETPVXXA

SEQ ID NO: 15613 - protein, 32 aa, Artificial Sequence
  Cyclic GFR-binding peptide
  MOD_RES (27)..(28): Xaa is C or S
EEYQKYVVKDYEDIFLMSIPSLETPVXXAKPI

SEQ ID NO: 15614 - protein, 32 aa, Artificial Sequence
  Cyclic GFR-binding peptide
  MOD_RES (2)..(2): Xaa is C or S
GXGEVVMEEYQKYVVKDYEDIFLMSIPSLETP

SEQ ID NO: 15615 - protein, 24 aa, Artificial Sequence
  Cyclic GFR-binding peptide
VVMDRYKKLVVNNASDFYLISIAN

SEQ ID NO: 15616 - protein, 21 aa, Artificial Sequence
  Cyclic GFR-binding peptide
DRYKKLVVNNASDFYLISIAN

SEQ ID NO: 15617 - protein, 37 aa, Artificial Sequence
  Cyclic GFR-binding peptide
  MOD_RES (31)..(32): Xaa is C or S
EVVMDNSLQEVVKENEDYYVMPLPELETPVXXAKPIK

SEQ ID NO: 15618 - protein, 33 aa, Artificial Sequence
  Cyclic GFR-binding peptide
  MOD_RES (32)..(33): Xaa is C or S
GEVVMDNSLQEVVKENEDYYLMTLPELETPVXX

SEQ ID NO: 15619 - protein, 30 aa, Artificial Sequence; identical to SEQ ID NO: 5153
  Cyclic GFR-binding peptide
  MOD_RES (27)..(28): Xaa is C or S

SEQ ID NO: 15620 - protein, 31 aa, Artificial Sequence; identical to SEQ ID NO: 5154
  Cyclic GFR-binding peptide
  MOD_RES (31)..(31): Xaa is C or S

SEQ ID NO: 15621 - protein, 30 aa, Artificial Sequence
  Cyclic GFR-binding peptide
  MOD_RES (28)..(29): Xaa is C or S
MNNSLQEIVNSSDDYYLVTLPELQTPAXXP

SEQ ID NO: 15622 - protein, 34 aa, Artificial Sequence
  Cyclic GFR-binding peptide
  MOD_RES (29)..(30): Xaa is C or S
VIMEYQKYVKPKRGVIFLISIPSLAQPVXXPAAS

SEQ ID NO: 15623 - protein, 35 aa, Artificial Sequence
  Cyclic GFR-binding peptide
  MOD_RES (1)..(3)..(34)..(35): Xaa is C or S
XKXSKVVMEYQKYVKPTRGVIFLISIPSLDQPVXX

SEQ ID NO: 15624 - protein, 25 aa, Artificial Sequence
  Cyclic GFR-binding peptide
KVVMQYNKLVKPTRGVLYLISIASL

SEQ ID NO: 15625 - protein, 35 aa, Artificial Sequence; identical to SEQ ID NO: 5160
  Cyclic GFR-binding peptide
  MOD_RES (2)..(34)..(35): Xaa is C or S

SEQ ID NO: 15626 - protein, 38 aa, Artificial Sequence; identical to SEQ ID NO: 5161
  Cyclic GFR-binding peptide
  MOD_RES (1)..(3)..(35)..(36): Xaa is C or S

SEQ ID NO: 15627 - protein, 30 aa, Artificial Sequence
  Cyclic GFR-binding peptide
GEVVMDNSLQEVVKENEDYYVMPLPELETP

SEQ ID NO: 15628 - protein, 26 aa, Artificial Sequence
  Cyclic GFR-binding peptide
IMRYKKLIKPTKGIFYLISIANLDQS

SEQ ID NO: 15629 - protein, 29 aa, Artificial Sequence
  Cyclic GFR-binding peptide
  MOD_RES (29)..(29): Xaa is C or S
VVMRYKKLVKPTRGVFYLISIANLDQPVX

SEQ ID NO: 15630 - protein, 29 aa, Artificial Sequence
  Cyclic GFR-binding peptide
  MOD_RES (29)..(29): Xaa is C or S
VMDNSLQEVVKENEDYYVMPLPELETPVX

SEQ ID NO: 15631 - protein, 35 aa, Artificial Sequence
  Cyclic GFR-binding peptide
  MOD_RES (2)..(33)..(34): Xaa is C or S
KXSRVIMEYQKYVKPKRGVIFLISIPSLAQPVXXP

SEQ ID NO: 15632 - protein, 31 aa, Artificial Sequence
  Cyclic GFR-binding peptide
SEVVMDRYKKLVVNNASDFYLISIANLRTPV

SEQ ID NO: 15633 - protein, 36 aa, Artificial Sequence
  Cyclic GFR-binding peptide
  MOD_RES (2)..(4)..(35)..(36): Xaa is C or S
SXKXSKVVMNSLQEVKPTRGVYYVIPLPELDQPVXX

SEQ ID NO: 15634 - protein, 32 aa, Artificial Sequence; identical to SEQ ID NO: 5171
  Cyclic GFR-binding peptide
  MOD_RES (31)..(32): Xaa is C or S

SEQ ID NO: 15635 - protein, 30 aa, Artificial Sequence; identical to SEQ ID NO: 5172
  Cyclic GFR-binding peptide
  MOD_RES (1)..(3): Xaa is C or S

SEQ ID NO: 15636 - protein, 34 aa, Artificial Sequence; identical to SEQ ID NO: 5177
  Cyclic GFR-binding peptide
  MOD_RES (1)..(3)..(34): Xaa is C or S

SEQ ID NO: 15637 - protein, 33 aa, Artificial Sequence
  Cyclic GFR-binding peptide
  MOD_RES (1)..(33): Xaa is C or S
XARVVMNNSLQEIVNSSDDYYLVTLPELQTPAX

SEQ ID NO: 15638 - protein, 39 aa, Artificial Sequence
  Cyclic GFR-binding peptide
  MOD_RES (1)..(33): Xaa is C or S
XSRVVMNNSLQEIVNSSDDYYVVPLPELKTPAXTPKTVH

SEQ ID NO: 15639 - protein, 25 aa, Artificial Sequence
  Cyclic GFR-binding peptide
VVMQYNKLVKPTRGVLYLISIASLD

SEQ ID NO: 15640 - protein, 37 aa, Artificial Sequence; identical to SEQ ID NO: 5180
  Cyclic GFR-binding peptide
  MOD_RES (31)..(32): Xaa is C or S

SEQ ID NO: 15641 - protein, 41 aa, Artificial Sequence; identical to SEQ ID NO: 5182
  Cyclic GFR-binding peptide
  MOD_RES (1)..(3)..(35)..(36): Xaa is C or S

SEQ ID NO: 15642 - protein, 36 aa, Artificial Sequence
  Cyclic GFR-binding peptide
  MOD_RES (31)..(32): Xaa is C or S
RVVMNNSLQEIVNSSDDYYLVTLPELKTPAXXPKPV

SEQ ID NO: 15643 - protein, 34 aa, Artificial Sequence
  Cyclic GFR-binding peptide
  MOD_RES (30)..(31): Xaa is C or S
VVMNEYQKYIVNSSDDIFLVSIPSLQTPAXXPKP

SEQ ID NO: 15644 - protein, 36 aa, Artificial Sequence
  Cyclic GFR-binding peptide
  MOD_RES (30)..(31): Xaa is C or S
KVVMNSLQEVKPTRGVYYVIPLPELDQPVXXPSASA

SEQ ID NO: 15645 - protein, 37 aa, Artificial Sequence
  Cyclic GFR-binding peptide
  MOD_RES (32)..(33): Xaa is C or S
SEVVMDNSLQEVVNNASDYYLITLPELRTPVXXTPPT

SEQ ID NO: 15646 - protein, 29 aa, Artificial Sequence
  Cyclic GFR-binding peptide
  MOD_RES (1)..(1): Xaa is C or S
XSKVVMEYQKYVKPTRGVIFLISIPSLDQ

SEQ ID NO: 15647 - protein, 26 aa, Artificial Sequence
  Cyclic GFR-binding peptide
VMEEYQKYVVKDYEDIFLMSIPSLET

SEQ ID NO: 15648 - protein, 38 aa, Artificial Sequence
  Cyclic GFR-binding peptide
  MOD_RES (32)..(33): Xaa is C or S
GEVVMENSLQEVVKDYEDYYLMTLPELETPVXXAKPIS

SEQ ID NO: 15649 - protein, 32 aa, Artificial Sequence
  Cyclic GFR-binding peptide
  MOD_RES (30)..(31): Xaa is C or S
VVMENSLQEVVKDYEDYYVMPLPELETPVXXA

SEQ ID NO: 15650 - protein, 37 aa, Artificial Sequence
  Cyclic GFR-binding peptide
  MOD_RES (2)..(34)..(35): Xaa is C or S
GXSEVVMDNSLQEVVNNASDYYVIPLPELRTPVXXTP

SEQ ID NO: 15651 - protein, 37 aa, Artificial Sequence
  Cyclic GFR-binding peptide
  MOD_RES (1)..(33)..(34): Xaa is C or S
XSRVVMNNSLQEIVNSSDDYYLVTLPELKTPAXXPKP

SEQ ID NO: 15652 - protein, 34 aa, Artificial Sequence; identical to SEQ ID NO: 5186
  Cyclic GFR-binding peptide
  MOD_RES (1)..(3): Xaa is C or S

SEQ ID NO: 15653 - protein, 23 aa, Artificial Sequence
  Cyclic GFR-binding peptide
EYQKYVVKENEDIFLMSIPSLET

SEQ ID NO: 15654 - protein, 34 aa, Artificial Sequence
  Cyclic GFR-binding peptide
  MOD_RES (28)..(29): Xaa is C or S
VMEYQKYVKPTRGVIFLISIPSLDQPVXXPSASA

SEQ ID NO: 15655 - protein, 29 aa, Artificial Sequence
  Cyclic GFR-binding peptide
ARVVMNEYQKYIVNSSDDIFLVSIPSLQT

SEQ ID NO: 15656 - protein, 27 aa, Artificial Sequence
  Cyclic GFR-binding peptide
  MOD_RES (1)..(1): Xaa is C or S
XGEVVMENSLQEVVKDYEDYYVMPLPE

SEQ ID NO: 15657 - protein, 37 aa, Artificial Sequence
  Cyclic GFR-binding peptide
  MOD_RES (1)..(3)..(34)..(35): Xaa is C or S
XKXSKVIMNSLQEIKPTKGIYYVIPLPELDQSVXXPS

SEQ ID NO: 15658 - protein, 30 aa, Artificial Sequence
  Cyclic GFR-binding peptide
  MOD_RES (2)..(2): Xaa is C or S
GXGEVVMEEYQKYVVKDYEDIFLMSIPSLE

SEQ ID NO: 15659 - protein, 33 aa, Artificial Sequence
  Cyclic GFR-binding peptide
  MOD_RES (29)..(30): Xaa is C or S
VVMNSLQEVKPTRGVYYVIPLPELDQPVXXPSA

SEQ ID NO: 15660 - protein, 26 aa, Artificial Sequence
  Cyclic GFR-binding peptide
  MOD_RES (26)..(26): Xaa is C or S
QYNKLIVNSSDDLYLVSIASLQTPAX

SEQ ID NO: 15661 - protein, 28 aa, Artificial Sequence
  Cyclic GFR-binding peptide
VVMDNSLQEVVKENEDYYVMPLPELETP

SEQ ID NO: 15662 - protein, 33 aa, Artificial Sequence; identical to SEQ ID NO: 5195
  Cyclic GFR-binding peptide
  MOD_RES (31)..(32): Xaa is C or S

SEQ ID NO: 15663 - protein, 31 aa, Artificial Sequence
  Cyclic GFR-binding peptide
  MOD_RES (1)..(3): Xaa is C or S
XKXSKVIMNSLQEIKPTKGIYYLITLPELDQ

SEQ ID NO: 15664 - protein, 26 aa, Artificial Sequence
  Cyclic GFR-binding peptide
DNSLQEVVKENEDYYLMTLPELETPV

SEQ ID NO: 15665 - protein, 28 aa, Artificial Sequence
  Cyclic GFR-binding peptide
EVVMDEYQKYVVKENEDIFLMSIPSLET

SEQ ID NO: 15666 - protein, 35 aa, Artificial Sequence
  Cyclic GFR-binding peptide
  MOD_RES (29)..(30): Xaa is C or S
VMDRYKKLVVNNASDFYLISIANLRTPVXXTPPTS

SEQ ID NO: 15667 - protein, 35 aa, Artificial Sequence; identical to SEQ ID NO: 5198
  Cyclic GFR-binding peptide
  MOD_RES (30)..(31): Xaa is C or S

SEQ ID NO: 15668 - protein, 25 aa, Artificial Sequence
  Cyclic GFR-binding peptide
MEYQKYVKPTRGVIFLISIPSLDQP

SEQ ID NO: 15669 - protein, 31 aa, Artificial Sequence
  Cyclic GFR-binding peptide
  MOD_RES (1)..(1): Xaa is C or S
XSKVIMNSLQEIKPTKGIYYLITLPELDQSV

SEQ ID NO: 15670 - protein, 30 aa, Artificial Sequence
  Cyclic GFR-binding peptide
  MOD_RES (29)..(29): Xaa is C or S
VMNNSLQEIVNSSDDYYLVTLPELKTPAXT

SEQ ID NO: 15671 - protein, 39 aa, Artificial Sequence
  Cyclic GFR-binding peptide
  MOD_RES (2)..(4)..(36): Xaa is C or S
HXGXSRVVMNNSLQEIVNSSDDYYVVPLPELKTPAXTPK

SEQ ID NO: 15672 - protein, 36 aa, Artificial Sequence; identical to SEQ ID NO: 5201
  Cyclic GFR-binding peptide
  MOD_RES (1)..(3)..(35): Xaa is C or S

SEQ ID NO: 15673 - protein, 33 aa, Artificial Sequence; identical to SEQ ID NO: 5202
  Cyclic GFR-binding peptide
  MOD_RES (1)..(3): Xaa is C or S

SEQ ID NO: 15674 - protein, 30 aa, Artificial Sequence
  Cyclic GFR-binding peptide
  MOD_RES (27)..(28): Xaa is C or S
DNSLQEVVKENEDYYLMTLPELETPVXXAK

SEQ ID NO: 15675 - protein, 36 aa, Artificial Sequence
  Cyclic GFR-binding peptide
  MOD_RES (31)..(32): Xaa is C or S
RVVMNNSLQEIVNSSDDYYVVPLPELQTPAXXPKPV

SEQ ID NO: 15676 - protein, 22 aa, Artificial Sequence
  Cyclic GFR-binding peptide
MDNSLQEVVNNASDYYLITLPE

SEQ ID NO: 15677 - protein, 29 aa, Artificial Sequence
  Cyclic GFR-binding peptide
VVMNQYNKLIVNSSDDLYLVSIASLKTPA

SEQ ID NO: 15678 - protein, 26 aa, Artificial Sequence
  Cyclic GFR-binding peptide
VMERYKKLVVKDYEDFYLMSIANLET

SEQ ID NO: 15679 - protein, 29 aa, Artificial Sequence
  Cyclic GFR-binding peptide
  MOD_RES (29)..(29): Xaa is C or S
VIMNSLQEVKPKRGVYYLITLPELAQPVX

SEQ ID NO: 15680 - protein, 27 aa, Artificial Sequence
  Cyclic GFR-binding peptide
VVMENSLQEVVKDYEDYYLMTLPELET

SEQ ID NO: 15681 - protein, 25 aa, Artificial Sequence
  Cyclic GFR-binding peptide
VVMNRYKKLIVNSSDDFYLVSIANL

SEQ ID NO: 15682 - protein, 39 aa, Artificial Sequence
  Cyclic GFR-binding peptide
  MOD_RES (2)..(4)..(35)..(36): Xaa is C or S
SXKXSKVIMEYQKYIKPTKGIIFLISIPSLDQSVXXPSA

SEQ ID NO: 15683 - protein, 33 aa, Artificial Sequence
  Cyclic GFR-binding peptide
  MOD_RES (29)..(30): Xaa is C or S
VMNNSLQEIVNSSDDYYVVPLPELKTPAXXPKP

SEQ ID NO: 15684 - protein, 33 aa, Artificial Sequence; identical to SEQ ID NO: 5207
  Cyclic GFR-binding peptide
  MOD_RES (27)..(28): Xaa is C or S

SEQ ID NO: 15685 - protein, 29 aa, Artificial Sequence
  Cyclic GFR-binding peptide
VVMNNSLQEIVNSSDDYYLVTLPELKTPA

SEQ ID NO: 15686 - protein, 32 aa, Artificial Sequence
  Cyclic GFR-binding peptide
  MOD_RES (31)..(32): Xaa is C or S
EVVMENSLQEVVKDYEDYYLMTLPELETPVXX

SEQ ID NO: 15687 - protein, 23 aa, Artificial Sequence
  Cyclic GFR-binding peptide
NSLQEVVKDYEDYYVMPLPELET

SEQ ID NO: 15688 - protein, 39 aa, Artificial Sequence
  Cyclic GFR-binding peptide
  MOD_RES (2)..(4)..(36)..(37): Xaa is C or S
RXGXGEVVMENSLQEVVKDYEDYYVMPLPELETPVXXAK

SEQ ID NO: 15689 - protein, 24 aa, Artificial Sequence
  Cyclic GFR-binding peptide
DRYKKLVVKENEDFYLMSIANLET

SEQ ID NO: 15690 - protein, 41 aa, Artificial Sequence; identical to SEQ ID NO: 5213
  Cyclic GFR-binding peptide
  MOD_RES (2)..(4)..(36): Xaa is C or S

SEQ ID NO: 15691 - protein, 37 aa, Artificial Sequence; identical to SEQ ID NO: 5214
  Cyclic GFR-binding peptide
  MOD_RES (2)..(34)..(35): Xaa is C or S

SEQ ID NO: 15692 - protein, 35 aa, Artificial Sequence
  Cyclic GFR-binding peptide
  MOD_RES (2)..(4): Xaa is C or S
RXGXGEVVMENSLQEVVKDYEDYYLMTLPELETPV

SEQ ID NO: 15693 - protein, 34 aa, Artificial Sequence
  Cyclic GFR-binding peptide
  MOD_RES (28)..(28): Xaa is C or S
MNNSLQEIVNSSDDYYLVTLPELKTPAXTPKTVH

SEQ ID NO: 15694 - protein, 39 aa, Artificial Sequence; identical to SEQ ID NO: 5215
  Cyclic GFR-binding peptide
  MOD_RES (2)..(34)..(35): Xaa is C or S

SEQ ID NO: 15695 - protein, 36 aa, Artificial Sequence; identical to SEQ ID NO: 5217
  Cyclic GFR-binding peptide
  MOD_RES (30)..(31): Xaa is C or S

SEQ ID NO: 15696 - protein, 28 aa, Artificial Sequence
  Cyclic GFR-binding peptide
VMNQYNKLIVNSSDDLYLVSIASLKTPA

SEQ ID NO: 15697 - protein, 40 aa, Artificial Sequence; identical to SEQ ID NO: 5222
  Cyclic GFR-binding peptide
  MOD_RES (2)..(4)..(35)..(36): Xaa is C or S

SEQ ID NO: 15698 - protein, 35 aa, Artificial Sequence; identical to SEQ ID NO: 5223
  Cyclic GFR-binding peptide
  MOD_RES (31)..(32): Xaa is C or S

SEQ ID NO: 15699 - protein, 28 aa, Artificial Sequence
  Cyclic GFR-binding peptide
  MOD_RES (27)..(28): Xaa is C or S
MNSLQEIKPTKGIYYVIPLPELDQSVXX

SEQ ID NO: 15700 - protein, 42 aa, Artificial Sequence
  Cyclic GFR-binding peptide
  MOD_RES (2)..(4)..(36)..(37): Xaa is C or S
RXGXSEVVMDRYKKLVVNNASDFYLISIANLRTPVXXTPPTS

SEQ ID NO: 15701 - protein, 36 aa, Artificial Sequence
  Cyclic GFR-binding peptide
  MOD_RES (2)..(4)..(36): Xaa is C or S
HXGXARVVMNNSLQEIVNSSDDYYVVPLPELQTPAX

SEQ ID NO: 15702 - protein, 30 aa, Artificial Sequence
  Cyclic GFR-binding peptide
  MOD_RES (2)..(2): Xaa is C or S
GXGEVVMENSLQEVVKDYEDYYVMPLPELE

SEQ ID NO: 15703 - protein, 31 aa, Artificial Sequence; identical to SEQ ID NO: 5226
  Cyclic GFR-binding peptide
  MOD_RES (26)..(26): Xaa is C or S

SEQ ID NO: 15704 - protein, 36 aa, Artificial Sequence; identical to SEQ ID NO: 5228
  Cyclic GFR-binding peptide
  MOD_RES (31)..(32): Xaa is C or S

SEQ ID NO: 15705 - protein, 34 aa, Artificial Sequence
  Cyclic GFR-binding peptide
  MOD_RES (29)..(30): Xaa is C or S
VMNEYQKYIVNSSDDIFLVSIPSLKTPAXXPKPV

SEQ ID NO: 15706 - protein, 37 aa, Artificial Sequence
  Cyclic GFR-binding peptide
  MOD_RES (1)..(32)..(33): Xaa is C or S
XSKVIMNSLQEIKPTKGIYYVIPLPELDQSVXXPSAS

SEQ ID NO: 15707 - protein, 29 aa, Artificial Sequence
  Cyclic GFR-binding peptide
  MOD_RES (26)..(27): Xaa is C or S
NSLQEVVNNASDYYLITLPELRTPVXXTP

SEQ ID NO: 15708 - protein, 29 aa, Artificial Sequence
  Cyclic GFR-binding peptide
  MOD_RES (1)..(1): Xaa is C or S
XGEVVMENSLQEVVKDYEDYYLMTLPELE

SEQ ID NO: 15709 - protein, 31 aa, Artificial Sequence
  Cyclic GFR-binding peptide
  MOD_RES (31)..(31): Xaa is C or S
SKVIMNSLQEIKPTKGIYYVIPLPELDQSVX

SEQ ID NO: 15710 - protein, 23 aa, Artificial Sequence
  Cyclic GFR-binding peptide
VMDQYNKLVVKENEDLYLMSIAS

SEQ ID NO: 15711 - protein, 39 aa, Artificial Sequence
  Cyclic GFR-binding peptide
  MOD_RES (2)..(34)..(35): Xaa is C or S
GXSEVVMDQYNKLVVNNASDLYLISIASLRTPVXXTPPT

SEQ ID NO: 15712 - protein, 35 aa, Artificial Sequence
  Cyclic GFR-binding peptide
  MOD_RES (2)..(4): Xaa is C or S
RXGXGEVVMDNSLQEVVKENEDYYLMTLPELETPV

SEQ ID NO: 15713 - protein, 28 aa, Artificial Sequence
  Cyclic GFR-binding peptide
  MOD_RES (1)..(1): Xaa is C or S
XGEVVMDNSLQEVVKENEDYYLMTLPEL

SEQ ID NO: 15714 - protein, 32 aa, Artificial Sequence
  Cyclic GFR-binding peptide
  MOD_RES (31)..(32): Xaa is C or S
SKVIMNSLQEIKPTKGIYYVIPLPELDQSVXX

SEQ ID NO: 15715 - protein, 34 aa, Artificial Sequence
  Cyclic GFR-binding peptide
  MOD_RES (29)..(30): Xaa is C or S
VMDNSLQEVVNNASDYYLITLPELRTPVXXTPPT

SEQ ID NO: 15716 - protein, 31 aa, Artificial Sequence
  Cyclic GFR-binding peptide
  MOD_RES (30)..(31): Xaa is C or S
VVMDNSLQEVVKENEDYYLMTLPELETPVXX

SEQ ID NO: 15717 - protein, 29 aa, Artificial Sequence
  Cyclic GFR-binding peptide
VVMDNSLQEVVKENEDYYVMPLPELETPV

SEQ ID NO: 15718 - protein, 30 aa, Artificial Sequence; identical to SEQ ID NO: 5237
  Cyclic GFR-binding peptide
  MOD_RES (29)..(30): Xaa is C or S

SEQ ID NO: 15719 - protein, 22 aa, Artificial Sequence
  Cyclic GFR-binding peptide
DRYKKLVVKENEDFYLMSIANL

SEQ ID NO: 15720 - protein, 32 aa, Artificial Sequence
  Cyclic GFR-binding peptide
  MOD_RES (1)..(1): Xaa is C or S
XSEVVMDNSLQEVVNNASDYYVIPLPELRTPV

SEQ ID NO: 15721 - protein, 24 aa, Artificial Sequence
  Cyclic GFR-binding peptide
VVMDEYQKYVVKENEDIFLMSIPS

SEQ ID NO: 15722 - protein, 31 aa, Artificial Sequence; identical to SEQ ID NO: 5244
  Cyclic GFR-binding peptide
  MOD_RES (30)..(31): Xaa is C or S

SEQ ID NO: 15723 - protein, 39 aa, Artificial Sequence
  Cyclic GFR-binding peptide
  MOD_RES (1)..(3)..(35)..(36): Xaa is C or S
XGXARVVMNNSLQEIVNSSDDYYLVTLPELQTPAXXPKP

SEQ ID NO: 15724 - protein, 36 aa, Artificial Sequence; identical to SEQ ID NO: 5245
  Cyclic GFR-binding peptide
  MOD_RES (1)..(33)..(34): Xaa is C or S

SEQ ID NO: 15725 - protein, 36 aa, Artificial Sequence
  Cyclic GFR-binding peptide
  MOD_RES (32)..(32): Xaa is C or S
SRVVMNNSLQEIVNSSDDYYLVTLPELKTPAXTPKT

SEQ ID NO: 15726 - protein, 37 aa, Artificial Sequence; identical to SEQ ID NO: 5250
  Cyclic GFR-binding peptide
  MOD_RES (2)..(4)..(36)..(37): Xaa is C or S

SEQ ID NO: 15727 - protein, 29 aa, Artificial Sequence
  Cyclic GFR-binding peptide
EVVMDRYKKLVVKENEDFYLMSIANLETP

SEQ ID NO: 15728 - protein, 33 aa, Artificial Sequence
  Cyclic GFR-binding peptide
  MOD_RES (30)..(31): Xaa is C or S
KVVMNSLQEVKPTRGVYYVIPLPELDQPVXXPS

SEQ ID NO: 15729 - protein, 30 aa, Artificial Sequence
  Cyclic GFR-binding peptide
  MOD_RES (2)..(2): Xaa is C or S
GXSEVVMDNSLQEVVNNASDYYVIPLPELR

SEQ ID NO: 15730 - protein, 28 aa, Artificial Sequence
  Cyclic GFR-binding peptide
  MOD_RES (1)..(1): Xaa is C or S
XSKVVMRYKKLVKPTRGVFYLISIANLD

SEQ ID NO: 15731 - protein, 22 aa, Artificial Sequence
  Cyclic GFR-binding peptide
MNEYQKYIVNSSDDIFLVSIPS

SEQ ID NO: 15732 - protein, 32 aa, Artificial Sequence
  Cyclic GFR-binding peptide
  MOD_RES (2)..(4): Xaa is C or S
SXKXSKVIMNSLQEIKPTKGIYYVIPLPELDQ

SEQ ID NO: 15733 - protein, 31 aa, Artificial Sequence; identical to SEQ ID NO: 5261
  Cyclic GFR-binding peptide
  MOD_RES (1)..(3): Xaa is C or S

SEQ ID NO: 15734 - protein, 33 aa, Artificial Sequence
  Cyclic GFR-binding peptide
  MOD_RES (28)..(29): Xaa is C or S
MENSLQEVVKDYEDYYLMTLPELETPVXXAKPI

SEQ ID NO: 15735 - protein, 34 aa, Artificial Sequence
  Cyclic GFR-binding peptide
  MOD_RES (1)..(33): Xaa is C or S
XSRVVMNNSLQEIVNSSDDYYVVPLPELKTPAXT

SEQ ID NO: 15736 - protein, 35 aa, Artificial Sequence
  Cyclic GFR-binding peptide
  MOD_RES (31)..(32): Xaa is C or S
EVVMENSLQEVVKDYEDYYVMPLPELETPVXXAKP

SEQ ID NO: 15737 - protein, 32 aa, Artificial Sequence; identical to SEQ ID NO: 5267
  Cyclic GFR-binding peptide
  MOD_RES (26)..(27): Xaa is C or S

SEQ ID NO: 15738 - protein, 29 aa, Artificial Sequence
  Cyclic GFR-binding peptide
  MOD_RES (28)..(28): Xaa is C or S
MNEYQKYIVNSSDDIFLVSIPSLKTPAXT

SEQ ID NO: 15739 - protein, 33 aa, Artificial Sequence; identical to SEQ ID NO: 5268
  Cyclic GFR-binding peptide
  MOD_RES (30)..(31): Xaa is C or S

SEQ ID NO: 15740 - protein, 28 aa, Artificial Sequence
  Cyclic GFR-binding peptide
VVMERYKKLVVKDYEDFYLMSIANLETP

SEQ ID NO: 15741 - protein, 38 aa, Artificial Sequence; identical to SEQ ID NO: 5272
  Cyclic GFR-binding peptide
  MOD_RES (1)..(33)..(34): Xaa is C or S

SEQ ID NO: 15742 - protein, 24 aa, Artificial Sequence
  Cyclic GFR-binding peptide
NSLQEIVNSSDDYYVVPLPELQTP

SEQ ID NO: 15743 - protein, 29 aa, Artificial Sequence
  Cyclic GFR-binding peptide
  MOD_RES (2)..(2): Xaa is C or S
GXGEVVMERYKKLVVKDYEDFYLMSIANL

SEQ ID NO: 15744 - protein, 30 aa, Artificial Sequence; identical to SEQ ID NO: 5275
  Cyclic GFR-binding peptide
  MOD_RES (26)..(27): Xaa is C or S

SEQ ID NO: 15745 - protein, 30 aa, Artificial Sequence
  Cyclic GFR-binding peptide
  MOD_RES (1)..(1): Xaa is C or S
XGEVVMDNSLQEVVKENEDYYVMPLPELET

SEQ ID NO: 15746 - protein, 22 aa, Artificial Sequence
  Cyclic GFR-binding peptide
VMNSLQEVKPTRGVYYVIPLPE

SEQ ID NO: 15747 - protein, 24 aa, Artificial Sequence
  Cyclic GFR-binding peptide
MEQYNKLVVKDYEDLYLMSIASLE

SEQ ID NO: 15748 - protein, 22 aa, Artificial Sequence
  Cyclic GFR-binding peptide
DQYNKLVVNNASDLYLISIASL

SEQ ID NO: 15749 - protein, 22 aa, Artificial Sequence
  Cyclic GFR-binding peptide
DNSLQEVVNNASDYYVIPLPEL

SEQ ID NO: 15750 - protein, 37 aa, Artificial Sequence
  Cyclic GFR-binding peptide
  MOD_RES (2)..(33)..(34): Xaa is C or S
KXSKVIMNSLQEIKPTKGIYYLITLPELDQSVXXPSA

SEQ ID NO: 15751 - protein, 37 aa, Artificial Sequence
  Cyclic GFR-binding peptide
  MOD_RES (2)..(4)..(35)..(36): Xaa is C or S
SXKXSKVIMNSLQEIKPTKGIYYLITLPELDQSVXXP

SEQ ID NO: 15752 - protein, 32 aa, Artificial Sequence; identical to SEQ ID NO: 5282
  Cyclic GFR-binding peptide
  MOD_RES (31)..(32): Xaa is C or S

SEQ ID NO: 15753 - protein, 37 aa, Artificial Sequence
  Cyclic GFR-binding peptide
  MOD_RES (2)..(4)..(35)..(36): Xaa is C or S
SXKXSKVIMEYQKYIKPTKGIIFLISIPSLDQSVXXP

SEQ ID NO: 15754 - protein, 33 aa, Artificial Sequence; identical to SEQ ID NO: 5285
  Cyclic GFR-binding peptide
  MOD_RES (31)..(32): Xaa is C or S

SEQ ID NO: 15755 - protein, 35 aa, Artificial Sequence; identical to SEQ ID NO: 5286
  Cyclic GFR-binding peptide
  MOD_RES (30)..(31): Xaa is C or S

SEQ ID NO: 15756 - protein, 39 aa, Artificial Sequence
  Cyclic GFR-binding peptide
  MOD_RES (1)..(3)..(35)..(36): Xaa is C or S
XGXARVVMNEYQKYIVNSSDDIFLVSIPSLQTPAXXPKP

SEQ ID NO: 15757 - protein, 29 aa, Artificial Sequence
  Cyclic GFR-binding peptide
  MOD_RES (27)..(28): Xaa is C or S
DNSLQEVVKENEDYYLMTLPELETPVXXA

SEQ ID NO: 15758 - protein, 24 aa, Artificial Sequence
  Cyclic GFR-binding peptide
QYNKLIKPTKGILYLISIASLDQS

SEQ ID NO: 15759 - protein, 34 aa, Artificial Sequence; identical to SEQ ID NO: 5289
  Cyclic GFR-binding peptide
  MOD_RES (2)..(4): Xaa is C or S

SEQ ID NO: 15760 - protein, 32 aa, Artificial Sequence
  Cyclic GFR-binding peptide
  MOD_RES (30)..(31): Xaa is C or S
KVVMNSLQEVKPTRGVYYVIPLPELDQPVXXP

SEQ ID NO: 15761 - protein, 32 aa, Artificial Sequence
  Cyclic GFR-binding peptide
  MOD_RES (2)..(4): Xaa is C or S
RXGXSEVVMDQYNKLVVNNASDLYLISIASLR

SEQ ID NO: 15762 - protein, 34 aa, Artificial Sequence; identical to SEQ ID NO: 5298
  Cyclic GFR-binding peptide
  MOD_RES (31)..(32): Xaa is C or S

SEQ ID NO: 15763 - protein, 36 aa, Artificial Sequence; identical to SEQ ID NO: 5299
  Cyclic GFR-binding peptide
  MOD_RES (32)..(33): Xaa is C or S

SEQ ID NO: 15764 - protein, 31 aa, Artificial Sequence
  Cyclic GFR-binding peptide
  MOD_RES (31)..(31): Xaa is C or S
SKVVMEYQKYVKPTRGVIFLISIPSLDQPVX

SEQ ID NO: 15765 - protein, 31 aa, Artificial Sequence; identical to SEQ ID NO: 5300
  Cyclic GFR-binding peptide
  MOD_RES (1)..(1): Xaa is C or S

SEQ ID NO: 15766 - protein, 24 aa, Artificial Sequence
  Cyclic GFR-binding peptide
NQYNKLIVNSSDDLYLVSIASLKT

SEQ ID NO: 15767 - protein, 29 aa, Artificial Sequence
  Cyclic GFR-binding peptide
  MOD_RES (27)..(28): Xaa is C or S
MRYKKLVKPKRGVFYLISIANLAQPVXXP

SEQ ID NO: 15768 - protein, 36 aa, Artificial Sequence
  Cyclic GFR-binding peptide
  MOD_RES (31)..(32): Xaa is C or S
RVVMNNSLQEIVNSSDDYYLVTLPELQTPAXXPKPV

SEQ ID NO: 15769 - protein, 33 aa, Artificial Sequence
  Cyclic GFR-binding peptide
  MOD_RES (32)..(32): Xaa is C or S
SRVVMNNSLQEIVNSSDDYYLVTLPELKTPAXT

SEQ ID NO: 15770 - protein, 35 aa, Artificial Sequence
  Cyclic GFR-binding peptide
  MOD_RES (30)..(30): Xaa is C or S
VVMNNSLQEIVNSSDDYYLVTLPELKTPAXTPKTV

SEQ ID NO: 15771 - protein, 28 aa, Artificial Sequence
  Cyclic GFR-binding peptide
RVIMQYNKLVKPKRGVLYLISIASLAQP

SEQ ID NO: 15772 - protein, 25 aa, Artificial Sequence
  Cyclic GFR-binding peptide
QYNKLVVKENEDLYLMSIASLETPV

SEQ ID NO: 15773 - protein, 28 aa, Artificial Sequence
  Cyclic GFR-binding peptide
  MOD_RES (27)..(28): Xaa is C or S
MQYNKLIKPTKGILYLISIASLDQSVXX

SEQ ID NO: 15774 - protein, 28 aa, Artificial Sequence
  Cyclic GFR-binding peptide
KVIMEYQKYIKPTKGIIFLISIPSLDQS

SEQ ID NO: 15775 - protein, 27 aa, Artificial Sequence
  Cyclic GFR-binding peptide
  MOD_RES (26)..(27): Xaa is C or S
NSLQEVVKDYEDYYLMTLPELETPVXX

SEQ ID NO: 15776 - protein, 26 aa, Artificial Sequence
  Cyclic GFR-binding peptide
VVMNQYNKLIVNSSDDLYLVSIASLQ

SEQ ID NO: 15777 - protein, 27 aa, Artificial Sequence
  Cyclic GFR-binding peptide
VIMRYKKLIKPTKGIFYLISIANLDQS

SEQ ID NO: 15778 - protein, 25 aa, Artificial Sequence
  Cyclic GFR-binding peptide
SKVIMRYKKLIKPTKGIFYLISIAN

SEQ ID NO: 15779 - protein, 36 aa, Artificial Sequence
  Cyclic GFR-binding peptide
  MOD_RES (1)..(33): Xaa is C or S
XSRVVMNNSLQEIVNSSDDYYVVPLPELKTPAXTPK

SEQ ID NO: 15780 - protein, 37 aa, Artificial Sequence
  Cyclic GFR-binding peptide
  MOD_RES (1)..(32)..(33): Xaa is C or S
XSKVIMNSLQEIKPTKGIYYLITLPELDQSVXXPSAS

SEQ ID NO: 15781 - protein, 30 aa, Artificial Sequence
  Cyclic GFR-binding peptide
  MOD_RES (26)..(27): Xaa is C or S
NSLQEVKPKRGVYYLITLPELAQPVXXPAA

SEQ ID NO: 15782 - protein, 26 aa, Artificial Sequence
  Cyclic GFR-binding peptide
MNNSLQEIVNSSDDYYVVPLPELKTP

SEQ ID NO: 15783 - protein, 28 aa, Artificial Sequence
  Cyclic GFR-binding peptide
  MOD_RES (27)..(28): Xaa is C or S
MEYQKYIKPTKGIIFLISIPSLDQSVXX

SEQ ID NO: 15784 - protein, 35 aa, Artificial Sequence; identical to SEQ ID NO: 5316
  Cyclic GFR-binding peptide
  MOD_RES (30)..(31): Xaa is C or S

SEQ ID NO: 15785 - protein, 37 aa, Artificial Sequence; identical to SEQ ID NO: 5318
  Cyclic GFR-binding peptide
  MOD_RES (2)..(33)..(34): Xaa is C or S

SEQ ID NO: 15786 - protein, 38 aa, Artificial Sequence
  Cyclic GFR-binding peptide
  MOD_RES (2)..(34): Xaa is C or S
GXSRVVMNNSLQEIVNSSDDYYLVTLPELKTPAXTPKT

SEQ ID NO: 15787 - protein, 29 aa, Artificial Sequence
  Cyclic GFR-binding peptide
  MOD_RES (2)..(2): Xaa is C or S
KXSKVIMNSLQEIKPTKGIYYLITLPELD

SEQ ID NO: 15788 - protein, 38 aa, Artificial Sequence; identical to SEQ ID NO: 5323
  Cyclic GFR-binding peptide
  MOD_RES (1)..(33)..(34): Xaa is C or S

SEQ ID NO: 15789 - protein, 31 aa, Artificial Sequence
  Cyclic GFR-binding peptide
  MOD_RES (26)..(27): Xaa is C or S
NSLQEVVNNASDYYLITLPELRTPVXXTPPT

SEQ ID NO: 15790 - protein, 28 aa, Artificial Sequence
  Cyclic GFR-binding peptide
SKVVMQYNKLVKPTRGVLYLISIASLDQ

SEQ ID NO: 15791 - protein, 33 aa, Artificial Sequence
  Cyclic GFR-binding peptide
  MOD_RES (31)..(32): Xaa is C or S
RVVMNEYQKYIVNSSDDIFLVSIPSLQTPAXXP

SEQ ID NO: 15792 - protein, 25 aa, Artificial Sequence
  Cyclic GFR-binding peptide
NNSLQEIVNSSDDYYVVPLPELQTP

SEQ ID NO: 15793 - protein, 31 aa, Artificial Sequence; identical to SEQ ID NO: 5326
  Cyclic GFR-binding peptide
  MOD_RES (2)..(2): Xaa is C or S

SEQ ID NO: 15794 - protein, 32 aa, Artificial Sequence
  Cyclic GFR-binding peptide
  MOD_RES (26)..(27): Xaa is C or S
NSLQEVVKENEDYYVMPLPELETPVXXAKPIK

SEQ ID NO: 15795 - protein, 31 aa, Artificial Sequence
  Cyclic GFR-binding peptide
  MOD_RES (29)..(30): Xaa is C or S
VMDQYNKLVVNNASDLYLISIASLRTPVXXT

SEQ ID NO: 15796 - protein, 27 aa, Artificial Sequence
  Cyclic GFR-binding peptide
  MOD_RES (27)..(27): Xaa is C or S
EQYNKLVVKDYEDLYLMSIASLETPVX

SEQ ID NO: 15797 - protein, 26 aa, Artificial Sequence
  Cyclic GFR-binding peptide
GEVVMDQYNKLVVKENEDLYLMSIAS

SEQ ID NO: 15798 - protein, 28 aa, Artificial Sequence
  Cyclic GFR-binding peptide
  MOD_RES (2)..(2): Xaa is C or S
GXGEVVMDEYQKYVVKENEDIFLMSIPS

SEQ ID NO: 15799 - protein, 26 aa, Artificial Sequence
  Cyclic GFR-binding peptide
VVMDNSLQEVVKENEDYYVMPLPELE

SEQ ID NO: 15800 - protein, 40 aa, Artificial Sequence
  Cyclic GFR-binding peptide
  MOD_RES (1)..(3)..(35)..(36): Xaa is C or S
XGXGEVVMENSLQEVVKDYEDYYLMTLPELETPVXXAKPI

SEQ ID NO: 15801 - protein, 32 aa, Artificial Sequence
  Cyclic GFR-binding peptide
  MOD_RES (32)..(32): Xaa is C or S
GEVVMDEYQKYVVKENEDIFLMSIPSLETPVX

SEQ ID NO: 15802 - protein, 29 aa, Artificial Sequence
  Cyclic GFR-binding peptide
  MOD_RES (28)..(29): Xaa is C or S
MENSLQEVVKDYEDYYLMTLPELETPVXX

SEQ ID NO: 15803 - protein, 25 aa, Artificial Sequence
  Cyclic GFR-binding peptide
NSLQEVKPTRGVYYVIPLPELDQPV

SEQ ID NO: 15804 - protein, 26 aa, Artificial Sequence
  Cyclic GFR-binding peptide
VMDNSLQEVVNNASDYYVIPLPELRT

SEQ ID NO: 15805 - protein, 31 aa, Artificial Sequence
  Cyclic GFR-binding peptide
  MOD_RES (2)..(2): Xaa is C or S
KXSKVIMNSLQEIKPTKGIYYVIPLPELDQS

SEQ ID NO: 15806 - protein, 32 aa, Artificial Sequence; identical to SEQ ID NO: 5341
  Cyclic GFR-binding peptide
  MOD_RES (31)..(32): Xaa is C or S

SEQ ID NO: 15807 - protein, 32 aa, Artificial Sequence; identical to SEQ ID NO: 5345
  Cyclic GFR-binding peptide
  MOD_RES (1)..(3): Xaa is C or S

SEQ ID NO: 15808 - protein, 30 aa, Artificial Sequence
  Cyclic GFR-binding peptide
  MOD_RES (30)..(30): Xaa is C or S
VVMENSLQEVVKDYEDYYVMPLPELETPVX

SEQ ID NO: 15809 - protein, 35 aa, Artificial Sequence
  Cyclic GFR-binding peptide
  MOD_RES (1)..(32)..(33): Xaa is C or S
XSKVIMEYQKYIKPTKGIIFLISIPSLDQSVXXPS

SEQ ID NO: 15810 - protein, 38 aa, Artificial Sequence
  Cyclic GFR-binding peptide
  MOD_RES (1)..(3)..(34)..(35): Xaa is C or S
XKXSKVVMNSLQEVKPTRGVYYVIPLPELDQPVXXPSA

SEQ ID NO: 15811 - protein, 35 aa, Artificial Sequence
  Cyclic GFR-binding peptide
  MOD_RES (32)..(33): Xaa is C or S
ARVVMNEYQKYIVNSSDDIFLVSIPSLQTPAXXPK

SEQ ID NO: 15812 - protein, 31 aa, Artificial Sequence
  Cyclic GFR-binding peptide
  MOD_RES (30)..(31): Xaa is C or S
VVMNEYQKYIVNSSDDIFLVSIPSLKTPAXX

SEQ ID NO: 15813 - protein, 31 aa, Artificial Sequence; identical to SEQ ID NO: 5355
  Cyclic GFR-binding peptide
  MOD_RES (30)..(31): Xaa is C or S

SEQ ID NO: 15814 - protein, 33 aa, Artificial Sequence; identical to SEQ ID NO: 5356
  Cyclic GFR-binding peptide
  MOD_RES (29)..(30): Xaa is C or S

SEQ ID NO: 15815 - protein, 37 aa, Artificial Sequence
  Cyclic GFR-binding peptide
  MOD_RES (1)..(33)..(34): Xaa is C or S
XSRVVMNNSLQEIVNSSDDYYVVPLPELKTPAXXPKP

SEQ ID NO: 15816 - protein, 27 aa, Artificial Sequence
  Cyclic GFR-binding peptide
RVVMNEYQKYIVNSSDDIFLVSIPSLQ

SEQ ID NO: 15817 - protein, 30 aa, Artificial Sequence
  Cyclic GFR-binding peptide
  MOD_RES (26)..(27): Xaa is C or S
NSLQEIKPTKGIYYLITLPELDQSVXXPSA

SEQ ID NO: 15818 - protein, 31 aa, Artificial Sequence; identical to SEQ ID NO: 5363
  Cyclic GFR-binding peptide
  MOD_RES (1)..(3): Xaa is C or S

SEQ ID NO: 15819 - protein, 35 aa, Artificial Sequence
  Cyclic GFR-binding peptide
  MOD_RES (1)..(33): Xaa is C or S
XSRVVMNEYQKYIVNSSDDIFLVSIPSLKTPAXTP

SEQ ID NO: 15820 - protein, 27 aa, Artificial Sequence
  Cyclic GFR-binding peptide
  MOD_RES (27)..(27): Xaa is C or S
DNSLQEVVKENEDYYLMTLPELETPVX

SEQ ID NO: 15821 - protein, 30 aa, Artificial Sequence
  Cyclic GFR-binding peptide
  MOD_RES (1)..(1): Xaa is C or S
XSEVVMDQYNKLVVNNASDLYLISIASLRT

SEQ ID NO: 15822 - protein, 29 aa, Artificial Sequence
  Cyclic GFR-binding peptide
  MOD_RES (1)..(3): Xaa is C or S
XGXSRVVMNNSLQEIVNSSDDYYVVPLPE

SEQ ID NO: 15823 - protein, 40 aa, Artificial Sequence
  Cyclic GFR-binding peptide
  MOD_RES (1)..(3)..(35)..(36): Xaa is C or S
XGXGEVVMEEYQKYVVKDYEDIFLMSIPSLETPVXXAKPI

SEQ ID NO: 15824 - protein, 38 aa, Artificial Sequence
  Cyclic GFR-binding peptide
  MOD_RES (32)..(33): Xaa is C or S
GEVVMENSLQEVVKDYEDYYVMPLPELETPVXXAKPIS

SEQ ID NO: 15825 - protein, 32 aa, Artificial Sequence
  Cyclic GFR-binding peptide
  MOD_RES (1)..(3): Xaa is C or S
XKXSKVIMEYQKYIKPTKGIIFLISIPSLDQS

SEQ ID NO: 15826 - protein, 26 aa, Artificial Sequence
  Cyclic GFR-binding peptide
DNSLQEVVNNASDYYLITLPELRTPV

SEQ ID NO: 15827 - protein, 30 aa, Artificial Sequence
  Cyclic GFR-binding peptide
  MOD_RES (2)..(4): Xaa is C or S
RXGXGEVVMDNSLQEVVKENEDYYLMTLPE

SEQ ID NO: 15828 - protein, 26 aa, Artificial Sequence
  Cyclic GFR-binding peptide
NNSLQEIVNSSDDYYLVTLPELKTPA

SEQ ID NO: 15829 - protein, 31 aa, Artificial Sequence
  Cyclic GFR-binding peptide
  MOD_RES (26)..(27): Xaa is C or S
EYQKYIVNSSDDIFLVSIPSLKTPAXXPKPV

SEQ ID NO: 15830 - protein, 30 aa, Artificial Sequence
  Cyclic GFR-binding peptide
SRVVMNNSLQEIVNSSDDYYLVTLPELKTP

SEQ ID NO: 15831 - protein, 31 aa, Artificial Sequence
  Cyclic GFR-binding peptide
SEVVMDNSLQEVVNNASDYYLITLPELRTPV

SEQ ID NO: 15832 - protein, 37 aa, Artificial Sequence
  Cyclic GFR-binding peptide
  MOD_RES (1)..(33)..(34): Xaa is C or S
XGEVVMENSLQEVVKDYEDYYLMTLPELETPVXXAKP

SEQ ID NO: 15833 - protein, 31 aa, Artificial Sequence
  Cyclic GFR-binding peptide
  MOD_RES (1)..(3): Xaa is C or S
XGXGEVVMDNSLQEVVKENEDYYVMPLPELE

SEQ ID NO: 15834 - protein, 31 aa, Artificial Sequence; identical to SEQ ID NO: 5377
  Cyclic GFR-binding peptide
  MOD_RES (29)..(30): Xaa is C or S

SEQ ID NO: 15835 - protein, 32 aa, Artificial Sequence; identical to SEQ ID NO: 5378
  Cyclic GFR-binding peptide
  MOD_RES (2)..(2): Xaa is C or S

SEQ ID NO: 15836 - protein, 38 aa, Artificial Sequence
  Cyclic GFR-binding peptide
  MOD_RES (1)..(33)..(34): Xaa is C or S
XGEVVMDNSLQEVVKENEDYYVMPLPELETPVXXAKPI

SEQ ID NO: 15837 - protein, 42 aa, Artificial Sequence
  Cyclic GFR-binding peptide
  MOD_RES (2)..(4)..(36)..(37): Xaa is C or S
HXGXARVVMNEYQKYIVNSSDDIFLVSIPSLQTPAXXPKPVT

SEQ ID NO: 15838 - protein, 35 aa, Artificial Sequence
  Cyclic GFR-binding peptide
  MOD_RES (31)..(32): Xaa is C or S
SRVIMEYQKYVKPKRGVIFLISIPSLAQPVXXPAA

SEQ ID NO: 15839 - protein, 33 aa, Artificial Sequence
  Cyclic GFR-binding peptide
  MOD_RES (31)..(32): Xaa is C or S
EVVMDNSLQEVVNNASDYYVIPLPELRTPVXXT

SEQ ID NO: 15840 - protein, 35 aa, Artificial Sequence; identical to SEQ ID NO: 5382
  Cyclic GFR-binding peptide
  MOD_RES (32)..(32): Xaa is C or S

SEQ ID NO: 15841 - protein, 36 aa, Artificial Sequence
  Cyclic GFR-binding peptide
  MOD_RES (2)..(34)..(35): Xaa is C or S
GXSEVVMDNSLQEVVNNASDYYVIPLPELRTPVXXT

SEQ ID NO: 15842 - protein, 35 aa, Artificial Sequence; identical to SEQ ID NO: 5385
  Cyclic GFR-binding peptide
  MOD_RES (31)..(32): Xaa is C or S

SEQ ID NO: 15843 - protein, 36 aa, Artificial Sequence
  Cyclic GFR-binding peptide
  MOD_RES (30)..(31): Xaa is C or S
VVMNNSLQEIVNSSDDYYVVPLPELQTPAXXPKPVT

SEQ ID NO: 15844 - protein, 30 aa, Artificial Sequence
  Cyclic GFR-binding peptide
  MOD_RES (1)..(1): Xaa is C or S
XSKVIMEYQKYIKPTKGIIFLISIPSLDQS

SEQ ID NO: 15845 - protein, 23 aa, Artificial Sequence
  Cyclic GFR-binding peptide
NSLQEVVKENEDYYLMTLPELET

SEQ ID NO: 15846 - protein, 32 aa, Artificial Sequence
  Cyclic GFR-binding peptide
  MOD_RES (30)..(31): Xaa is C or S
VVMDNSLQEVVKENEDYYVMPLPELETPVXXA

SEQ ID NO: 15847 - protein, 36 aa, Artificial Sequence
  Cyclic GFR-binding peptide
  MOD_RES (2)..(34)..(35): Xaa is C or S
GXGEVVMENSLQEVVKDYEDYYLMTLPELETPVXXA

SEQ ID NO: 15848 - protein, 29 aa, Artificial Sequence
  Cyclic GFR-binding peptide
EVVMENSLQEVVKDYEDYYLMTLPELETP

SEQ ID NO: 15849 - protein, 21 aa, Artificial Sequence
  Cyclic GFR-binding peptide
QYNKLVKPKRGVLYLISIASL

SEQ ID NO: 15850 - protein, 26 aa, Artificial Sequence
  Cyclic GFR-binding peptide
MRYKKLVKPKRGVFYLISIANLAQPV

SEQ ID NO: 15851 - protein, 36 aa, Artificial Sequence
  Cyclic GFR-binding peptide
  MOD_RES (32)..(32): Xaa is C or S
SRVVMNEYQKYIVNSSDDIFLVSIPSLKTPAXTPKT

SEQ ID NO: 15852 - protein, 40 aa, Artificial Sequence
  Cyclic GFR-binding peptide
  MOD_RES (2)..(4)..(35)..(36): Xaa is C or S
SXKXSKVVMEYQKYVKPTRGVIFLISIPSLDQPVXXPSAS

SEQ ID NO: 15853 - protein, 22 aa, Artificial Sequence
  Cyclic GFR-binding peptide
NSLQEIVNSSDDYYLVTLPELK

SEQ ID NO: 15854 - protein, 30 aa, Artificial Sequence
  Cyclic GFR-binding peptide
  MOD_RES (26)..(27): Xaa is C or S
QYNKLVVNNASDLYLISIASLRTPVXXTPP

SEQ ID NO: 15855 - protein, 40 aa, Artificial Sequence
  Cyclic GFR-binding peptide
  MOD_RES (2)..(34)..(35): Xaa is C or S
GXSEVVMDNSLQEVVNNASDYYVIPLPELRTPVXXTPPTS

SEQ ID NO: 15856 - protein, 28 aa, Artificial Sequence
  Cyclic GFR-binding peptide
ARVVMNNSLQEIVNSSDDYYVVPLPELQ

SEQ ID NO: 15857 - protein, 29 aa, Artificial Sequence
  Cyclic GFR-binding peptide
  MOD_RES (27)..(28): Xaa is C or S
MEYQKYIKPTKGIIFLISIPSLDQSVXXP

SEQ ID NO: 15858 - protein, 22 aa, Artificial Sequence
  Cyclic GFR-binding peptide
EQYNKLVVKDYEDLYLMSIASL

SEQ ID NO: 15859 - protein, 34 aa, Artificial Sequence
  Cyclic GFR-binding peptide
  MOD_RES (32)..(33): Xaa is C or S
ARVVMNEYQKYIVNSSDDIFLVSIPSLQTPAXXP

SEQ ID NO: 15860 - protein, 38 aa, Artificial Sequence
  Cyclic GFR-binding peptide
  MOD_RES (2)..(34)..(35): Xaa is C or S
GXSEVVMDRYKKLVVNNASDFYLISIANLRTPVXXTPP

SEQ ID NO: 15861 - protein, 33 aa, Artificial Sequence
  Cyclic GFR-binding peptide
  MOD_RES (27)..(28): Xaa is C or S
NNSLQEIVNSSDDYYLVTLPELKTPAXXPKPVY

SEQ ID NO: 15862 - protein, 32 aa, Artificial Sequence
  Cyclic GFR-binding peptide
  MOD_RES (29)..(29): Xaa is C or S
VMNNSLQEIVNSSDDYYLVTLPELKTPAXTPK

SEQ ID NO: 15863 - protein, 33 aa, Artificial Sequence
  Cyclic GFR-binding peptide
  MOD_RES (27)..(28): Xaa is C or S
MEYQKYVKPKRGVIFLISIPSLAQPVXXPAASA

SEQ ID NO: 15864 - protein, 37 aa, Artificial Sequence
  Cyclic GFR-binding peptide
  MOD_RES (2)..(4)..(36)..(37): Xaa is C or S
RXGXGEVVMDEYQKYVVKENEDIFLMSIPSLETPVXX

SEQ ID NO: 15865 - protein, 30 aa, Artificial Sequence; identical to SEQ ID NO: 5406
  Cyclic GFR-binding peptide
  MOD_RES (1)..(3): Xaa is C or S

SEQ ID NO: 15866 - protein, 31 aa, Artificial Sequence
  Cyclic GFR-binding peptide
GEVVMENSLQEVVKDYEDYYVMPLPELETPV

SEQ ID NO: 15867 - protein, 36 aa, Artificial Sequence
  Cyclic GFR-binding peptide
  MOD_RES (30)..(31): Xaa is C or S
VVMNNSLQEIVNSSDDYYVVPLPELKTPAXXPKPVY

SEQ ID NO: 15868 - protein, 25 aa, Artificial Sequence
  Cyclic GFR-binding peptide
NEYQKYIVNSSDDIFLVSIPSLQTP

SEQ ID NO: 15869 - protein, 30 aa, Artificial Sequence
  Cyclic GFR-binding peptide
  MOD_RES (27)..(28): Xaa is C or S
NNSLQEIVNSSDDYYVVPLPELQTPAXXPK

SEQ ID NO: 15870 - protein, 29 aa, Artificial Sequence
  Cyclic GFR-binding peptide
  MOD_RES (1)..(1): Xaa is C or S
XSKVIMNSLQEIKPTKGIYYVIPLPELDQ

SEQ ID NO: 15871 - protein, 33 aa, Artificial Sequence; identical to SEQ ID NO: 5409
  Cyclic GFR-binding peptide
  MOD_RES (27)..(28): Xaa is C or S

SEQ ID NO: 15872 - protein, 35 aa, Artificial Sequence; identical to SEQ ID NO: 5411
  Cyclic GFR-binding peptide
  MOD_RES (30)..(30): Xaa is C or S

SEQ ID NO: 15873 - protein, 30 aa, Artificial Sequence
  Cyclic GFR-binding peptide
  MOD_RES (1)..(3): Xaa is C or S
XGXARVVMNNSLQEIVNSSDDYYVVPLPEL

SEQ ID NO: 15874 - protein, 33 aa, Artificial Sequence; identical to SEQ ID NO: 5414
  Cyclic GFR-binding peptide
  MOD_RES (1)..(3): Xaa is C or S

SEQ ID NO: 15875 - protein, 30 aa, Artificial Sequence; identical to SEQ ID NO: 5416
  Cyclic GFR-binding peptide
  MOD_RES (2)..(4): Xaa is C or S

SEQ ID NO: 15876 - protein, 25 aa, Artificial Sequence
  Cyclic GFR-binding peptide
VIMRYKKLIKPTKGIFYLISIANLD

SEQ ID NO: 15877 - protein, 27 aa, Artificial Sequence
  Cyclic GFR-binding peptide
MDNSLQEVVKENEDYYVMPLPELETPV

SEQ ID NO: 15878 - protein, 34 aa, Artificial Sequence
  Cyclic GFR-binding peptide
  MOD_RES (31)..(32): Xaa is C or S
EVVMDQYNKLVVNNASDLYLISIASLRTPVXXTP

SEQ ID NO: 15879 - protein, 37 aa, Artificial Sequence
  Cyclic GFR-binding peptide
  MOD_RES (32)..(33): Xaa is C or S
GEVVMDEYQKYVVKENEDIFLMSIPSLETPVXXAKPI

SEQ ID NO: 15880 - protein, 27 aa, Artificial Sequence
  Cyclic GFR-binding peptide
MEEYQKYVVKDYEDIFLMSIPSLETPV

SEQ ID NO: 15881 - protein, 29 aa, Artificial Sequence
  Cyclic GFR-binding peptide
  MOD_RES (29)..(29): Xaa is C or S
VIMRYKKLIKPTKGIFYLISIANLDQSVX

SEQ ID NO: 15882 - protein, 25 aa, Artificial Sequence
  Cyclic GFR-binding peptide
MNSLQEVKPTRGVYYVIPLPELDQP

SEQ ID NO: 15883 - protein, 26 aa, Artificial Sequence
  Cyclic GFR-binding peptide
VMRYKKLVKPTRGVFYLISIANLDQP

SEQ ID NO: 15884 - protein, 24 aa, Artificial Sequence
  Cyclic GFR-binding peptide
EQYNKLVVKDYEDLYLMSIASLET

SEQ ID NO: 15885 - protein, 31 aa, Artificial Sequence
  Cyclic GFR-binding peptide
  MOD_RES (31)..(31): Xaa is C or S
EVVMDNSLQEVVKENEDYYLMTLPELETPVX

SEQ ID NO: 15886 - protein, 26 aa, Artificial Sequence
  Cyclic GFR-binding peptide
KVIMNSLQEIKPTKGIYYVIPLPELD

SEQ ID NO: 15887 - protein, 36 aa, Artificial Sequence
  Cyclic GFR-binding peptide
  MOD_RES (1)..(3)..(35)..(36): Xaa is C or S
XGXSRVVMNNSLQEIVNSSDDYYLVTLPELKTPAXX

SEQ ID NO: 15888 - protein, 28 aa, Artificial Sequence
  Cyclic GFR-binding peptide
  MOD_RES (1)..(3): Xaa is C or S
XKXSRVIMEYQKYVKPKRGVIFLISIPS

SEQ ID NO: 15889 - protein, 29 aa, Artificial Sequence
  Cyclic GFR-binding peptide
  MOD_RES (26)..(26): Xaa is C or S
QYNKLIVNSSDDLYLVSIASLKTPAXTPK

SEQ ID NO: 15890 - protein, 26 aa, Artificial Sequence
  Cyclic GFR-binding peptide
MDNSLQEVVKENEDYYVMPLPELETP

SEQ ID NO: 15891 - protein, 31 aa, Artificial Sequence; identical to SEQ ID NO: 5428
  Cyclic GFR-binding peptide

SEQ ID NO: 15892 - protein, 29 aa, Artificial Sequence
  Cyclic GFR-binding peptide
  MOD_RES (29)..(29): Xaa is C or S
VMNRYKKLIVNSSDDFYLVSIANLKTPAX

SEQ ID NO: 15893 - protein, 33 aa, Artificial Sequence
  Cyclic GFR-binding peptide
  MOD_RES (29)..(30): Xaa is C or S
VMNEYQKYIVNSSDDIFLVSIPSLKTPAXXPKP

SEQ ID NO: 15894 - protein, 34 aa, Artificial Sequence
  Cyclic GFR-binding peptide
  MOD_RES (28)..(29): Xaa is C or S
IMEYQKYIKPTKGIIFLISIPSLDQSVXXPSASA

SEQ ID NO: 15895 - protein, 32 aa, Artificial Sequence
  Cyclic GFR-binding peptide
  MOD_RES (2)..(2): Xaa is C or S
GXSEVVMDQYNKLVVNNASDLYLISIASLRTP

SEQ ID NO: 15896 - protein, 27 aa, Artificial Sequence
  Cyclic GFR-binding peptide
  MOD_RES (26)..(27): Xaa is C or S
NSLQEVVNNASDYYVIPLPELRTPVXX

SEQ ID NO: 15897 - protein, 28 aa, Artificial Sequence
  Cyclic GFR-binding peptide
  MOD_RES (26)..(27): Xaa is C or S
RYKKLVKPTRGVFYLISIANLDQPVXXP

SEQ ID NO: 15898 - protein, 23 aa, Artificial Sequence
  Cyclic GFR-binding peptide
MDNSLQEVVKENEDYYVMPLPEL

SEQ ID NO: 15899 - protein, 34 aa, Artificial Sequence; identical to SEQ ID NO: 5435
  Cyclic GFR-binding peptide
  MOD_RES (2)..(4): Xaa is C or S

SEQ ID NO: 15900 - protein, 32 aa, Artificial Sequence
  Cyclic GFR-binding peptide
  MOD_RES (2)..(4): Xaa is C or S
SXKXSRVIMEYQKYVKPKRGVIFLISIPSLAQ

SEQ ID NO: 15901 - protein, 35 aa, Artificial Sequence
  Cyclic GFR-binding peptide
  MOD_RES (30)..(31): Xaa is C or S
KVIMNSLQEIKPTKGIYYLITLPELDQSVXXPSAS

SEQ ID NO: 15902 - protein, 29 aa, Artificial Sequence
  Cyclic GFR-binding peptide
  MOD_RES (29)..(29): Xaa is C or S
VVMNSLQEVKPTRGVYYVIPLPELDQPVX

SEQ ID NO: 15903 - protein, 34 aa, Artificial Sequence
  Cyclic GFR-binding peptide
  MOD_RES (1)..(32)..(33): Xaa is C or S
XSKVIMNSLQEIKPTKGIYYVIPLPELDQSVXXP

SEQ ID NO: 15904 - protein, 27 aa, Artificial Sequence
  Cyclic GFR-binding peptide
KVVMQYNKLVKPTRGVLYLISIASLDQ

SEQ ID NO: 15905 - protein, 33 aa, Artificial Sequence; identical to SEQ ID NO: 5442
  Cyclic GFR-binding peptide
  MOD_RES (30)..(31): Xaa is C or S

SEQ ID NO: 15906 - protein, 37 aa, Artificial Sequence
  Cyclic GFR-binding peptide
  MOD_RES (31)..(32): Xaa is C or S
SKVIMEYQKYIKPTKGIIFLISIPSLDQSVXXPSASA

SEQ ID NO: 15907 - protein, 32 aa, Artificial Sequence
  Cyclic GFR-binding peptide
  MOD_RES (1)..(3): Xaa is C or S
XGXGEVVMEEYQKYVVKDYEDIFLMSIPSLET

SEQ ID NO: 15908 - protein, 30 aa, Artificial Sequence; identical to SEQ ID NO: 5443
  Cyclic GFR-binding peptide
  MOD_RES (1)..(3): Xaa is C or S

SEQ ID NO: 15909 - protein, 22 aa, Artificial Sequence
  Cyclic GFR-binding peptide
MENSLQEVVKDYEDYYVMPLPE

SEQ ID NO: 15910 - protein, 37 aa, Artificial Sequence
  Cyclic GFR-binding peptide
  MOD_RES (2)..(4)..(36)..(37): Xaa is C or S
RXGXGEVVMDNSLQEVVKENEDYYLMTLPELETPVXX

SEQ ID NO: 15911 - protein, 29 aa, Artificial Sequence
  Cyclic GFR-binding peptide
  MOD_RES (2)..(2): Xaa is C or S
GXGEVVMDEYQKYVVKENEDIFLMSIPSL

SEQ ID NO: 15912 - protein, 36 aa, Artificial Sequence; identical to SEQ ID NO: 5450
  Cyclic GFR-binding peptide
  MOD_RES (31)..(32): Xaa is C or S

SEQ ID NO: 15913 - protein, 33 aa, Artificial Sequence; identical to SEQ ID NO: 5452
  Cyclic GFR-binding peptide
  MOD_RES (29)..(30): Xaa is C or S

SEQ ID NO: 15914 - protein, 33 aa, Artificial Sequence; identical to SEQ ID NO: 5453
  Cyclic GFR-binding peptide
  MOD_RES (28)..(29): Xaa is C or S

SEQ ID NO: 15915 - protein, 26 aa, Artificial Sequence
  Cyclic GFR-binding peptide
SKVIMRYKKLIKPTKGIFYLISIANL

SEQ ID NO: 15916 - protein, 27 aa, Artificial Sequence
  Cyclic GFR-binding peptide
  MOD_RES (27)..(27): Xaa is C or S
DNSLQEVVKENEDYYVMPLPELETPVX

SEQ ID NO: 15917 - protein, 36 aa, Artificial Sequence
  Cyclic GFR-binding peptide
  MOD_RES (1)..(3)..(35)..(36): Xaa is C or S
XGXSRVVMNEYQKYIVNSSDDIFLVSIPSLKTPAXX

SEQ ID NO: 15918 - protein, 26 aa, Artificial Sequence
  Cyclic GFR-binding peptide
GEVVMDNSLQEVVKENEDYYLMTLPE

SEQ ID NO: 15919 - protein, 38 aa, Artificial Sequence
  Cyclic GFR-binding peptide
  MOD_RES (2)..(33)..(34): Xaa is C or S
KXSRVIMEYQKYVKPKRGVIFLISIPSLAQPVXXPAAS

SEQ ID NO: 15920 - protein, 28 aa, Artificial Sequence
  Cyclic GFR-binding peptide
  MOD_RES (2)..(2): Xaa is C or S
GXGEVVMDQYNKLVVKENEDLYLMSIAS

SEQ ID NO: 15921 - protein, 38 aa, Artificial Sequence
  Cyclic GFR-binding peptide
  MOD_RES (1)..(33)..(34): Xaa is C or S
XARVVMNNSLQEIVNSSDDYYLVTLPELQTPAXXPKPV

SEQ ID NO: 15922 - protein, 34 aa, Artificial Sequence
  Cyclic GFR-binding peptide
  MOD_RES (2)..(34): Xaa is C or S
GXGEVVMENSLQEVVKDYEDYYVMPLPELETPVX

SEQ ID NO: 15923 - protein, 34 aa, Artificial Sequence; identical to SEQ ID NO: 5462
  Cyclic GFR-binding peptide
  MOD_RES (28)..(29): Xaa is C or S

SEQ ID NO: 15924 - protein, 37 aa, Artificial Sequence
  Cyclic GFR-binding peptide
  MOD_RES (1)..(32)..(33): Xaa is C or S
XSRVIMEYQKYVKPKRGVIFLISIPSLAQPVXXPAAS

SEQ ID NO: 15925 - protein, 29 aa, Artificial Sequence
  Cyclic GFR-binding peptide
VVMENSLQEVVKDYEDYYVMPLPELETPV

SEQ ID NO: 15926 - protein, 35 aa, Artificial Sequence; identical to SEQ ID NO: 5468
  Cyclic GFR-binding peptide
  MOD_RES (2)..(33)..(34): Xaa is C or S

SEQ ID NO: 15927 - protein, 36 aa, Artificial Sequence
  Cyclic GFR-binding peptide
  MOD_RES (2)..(4)..(35)..(36): Xaa is C or S
SXKXSKVIMNSLQEIKPTKGIYYLITLPELDQSVXX

SEQ ID NO: 15928 - protein, 34 aa, Artificial Sequence
  Cyclic GFR-binding peptide
  MOD_RES (31)..(32): Xaa is C or S
SKVIMEYQKYIKPTKGIIFLISIPSLDQSVXXPS

SEQ ID NO: 15929 - protein, 33 aa, Artificial Sequence
  Cyclic GFR-binding peptide
  MOD_RES (29)..(30): Xaa is C or S
VIMNSLQEIKPTKGIYYLITLPELDQSVXXPSA

SEQ ID NO: 15930 - protein, 26 aa, Artificial Sequence
  Cyclic GFR-binding peptide
VMDRYKKLVVKENEDFYLMSIANLET

SEQ ID NO: 15931 - protein, 28 aa, Artificial Sequence
  Cyclic GFR-binding peptide
  MOD_RES (27)..(28): Xaa is C or S
NRYKKLIVNSSDDFYLVSIANLQTPAXX

SEQ ID NO: 15932 - protein, 28 aa, Artificial Sequence
  Cyclic GFR-binding peptide
EVVMDNSLQEVVNNASDYYVIPLPELRT

SEQ ID NO: 15933 - protein, 31 aa, Artificial Sequence; identical to SEQ ID NO: 5478
  Cyclic GFR-binding peptide

SEQ ID NO: 15934 - protein, 29 aa, Artificial Sequence
  Cyclic GFR-binding peptide
  MOD_RES (29)..(29): Xaa is C or S
VIMNSLQEIKPTKGIYYVIPLPELDQSVX

SEQ ID NO: 15935 - protein, 39 aa, Artificial Sequence
  Cyclic GFR-binding peptide
  MOD_RES (2)..(34)..(35): Xaa is C or S
GXARVVMNNSLQEIVNSSDDYYLVTLPELQTPAXXPKPV

SEQ ID NO: 15936 - protein, 30 aa, Artificial Sequence; identical to SEQ ID NO: 5482
  Cyclic GFR-binding peptide
  MOD_RES (29)..(30): Xaa is C or S

SEQ ID NO: 15937 - protein, 31 aa, Artificial Sequence
  Cyclic GFR-binding peptide
  MOD_RES (1)..(1): Xaa is C or S
XGEVVMENSLQEVVKDYEDYYLMTLPELETP

SEQ ID NO: 15938 - protein, 21 aa, Artificial Sequence
  Cyclic GFR-binding peptide
DEYQKYVVKENEDIFLMSIPS

SEQ ID NO: 15939 - protein, 38 aa, Artificial Sequence
  Cyclic GFR-binding peptide
  MOD_RES (2)..(34)..(35): Xaa is C or S
GXSEVVMDNSLQEVVNNASDYYVIPLPELRTPVXXTPP

SEQ ID NO: 15940 - protein, 31 aa, Artificial Sequence
  Cyclic GFR-binding peptide
  MOD_RES (27)..(28): Xaa is C or S
NNSLQEIVNSSDDYYLVTLPELKTPAXXPKP

SEQ ID NO: 15941 - protein, 30 aa, Artificial Sequence
  Cyclic GFR-binding peptide
  MOD_RES (1)..(3): Xaa is C or S
XGXGEVVMDEYQKYVVKENEDIFLMSIPSL

SEQ ID NO: 15942 - protein, 26 aa, Artificial Sequence
  Cyclic GFR-binding peptide
VMNRYKKLIVNSSDDFYLVSIANLQT

SEQ ID NO: 15943 - protein, 30 aa, Artificial Sequence
  Cyclic GFR-binding peptide
  MOD_RES (2)..(4): Xaa is C or S
SXKXSKVVMNSLQEVKPTRGVYYVIPLPEL

SEQ ID NO: 15944 - protein, 34 aa, Artificial Sequence; identical to SEQ ID NO: 5493
  Cyclic GFR-binding peptide
  MOD_RES (1)..(33)..(34): Xaa is C or S

SEQ ID NO: 15945 - protein, 34 aa, Artificial Sequence
  Cyclic GFR-binding peptide
  MOD_RES (2)..(34): Xaa is C or S
GXSEVVMDRYKKLVVNNASDFYLISIANLRTPVX

SEQ ID NO: 15946 - protein, 35 aa, Artificial Sequence
  Cyclic GFR-binding peptide
  MOD_RES (32)..(33): Xaa is C or S
GEVVMEEYQKYVVKDYEDIFLMSIPSLETPVXXAK

SEQ ID NO: 15947 - protein, 32 aa, Artificial Sequence
  Cyclic GFR-binding peptide
  MOD_RES (27)..(28): Xaa is C or S
NNSLQEIVNSSDDYYLVTLPELQTPAXXPKPV

SEQ ID NO: 15948 - protein, 23 aa, Artificial Sequence
  Cyclic GFR-binding peptide
QYNKLVKPKRGVLYLISIASLAQ

SEQ ID NO: 15949 - protein, 32 aa, Artificial Sequence
  Cyclic GFR-binding peptide
  MOD_RES (30)..(31): Xaa is C or S
VVMDEYQKYVVKENEDIFLMSIPSLETPVXXA

SEQ ID NO: 15950 - protein, 33 aa, Artificial Sequence; identical to SEQ ID NO: 5509
  Cyclic GFR-binding peptide
  MOD_RES (28)..(29): Xaa is C or S

SEQ ID NO: 15951 - protein, 35 aa, Artificial Sequence
  Cyclic GFR-binding peptide
  MOD_RES (30)..(31): Xaa is C or S
KVVMNSLQEVKPTRGVYYVIPLPELDQPVXXPSAS

SEQ ID NO: 15952 - protein, 34 aa, Artificial Sequence
  Cyclic GFR-binding peptide
  MOD_RES (1)..(33)..(34): Xaa is C or S
XARVVMNNSLQEIVNSSDDYYVVPLPELQTPAXX

SEQ ID NO: 15953 - protein, 29 aa, Artificial Sequence
  Cyclic GFR-binding peptide
  MOD_RES (28)..(29): Xaa is C or S
IMQYNKLVKPKRGVLYLISIASLAQPVXX

SEQ ID NO: 15954 - protein, 31 aa, Artificial Sequence; identical to SEQ ID NO: 5512
  Cyclic GFR-binding peptide
  MOD_RES (1)..(1): Xaa is C or S

SEQ ID NO: 15955 - protein, 38 aa, Artificial Sequence; identical to SEQ ID NO: 5513
  Cyclic GFR-binding peptide
  MOD_RES (2)..(33)..(34): Xaa is C or S

SEQ ID NO: 15956 - protein, 25 aa, Artificial Sequence
  Cyclic GFR-binding peptide
SRVIMRYKKLVKPKRGVFYLISIAN

SEQ ID NO: 15957 - protein, 25 aa, Artificial Sequence
  Cyclic GFR-binding peptide
MDEYQKYVVKENEDIFLMSIPSLET

SEQ ID NO: 15958 - protein, 24 aa, Artificial Sequence
  Cyclic GFR-binding peptide
NNSLQEIVNSSDDYYVVPLPELQT

SEQ ID NO: 15959 - protein, 28 aa, Artificial Sequence
  Cyclic GFR-binding peptide
  MOD_RES (27)..(27): Xaa is C or S
NQYNKLIVNSSDDLYLVSIASLKTPAXT

SEQ ID NO: 15960 - protein, 36 aa, Artificial Sequence; identical to SEQ ID NO: 5521
  Cyclic GFR-binding peptide
  MOD_RES (2)..(4)..(36): Xaa is C or S

SEQ ID NO: 15961 - protein, 31 aa, Artificial Sequence; identical to SEQ ID NO: 5522
  Cyclic GFR-binding peptide
  MOD_RES (1)..(3): Xaa is C or S

SEQ ID NO: 15962 - protein, 31 aa, Artificial Sequence
  Cyclic GFR-binding peptide
  MOD_RES (26)..(27): Xaa is C or S
EYQKYVKPKRGVIFLISIPSLAQPVXXPAAS

SEQ ID NO: 15963 - protein, 37 aa, Artificial Sequence; identical to SEQ ID NO: 5524
  Cyclic GFR-binding peptide
  MOD_RES (2)..(33)..(34): Xaa is C or S

SEQ ID NO: 15964 - protein, 34 aa, Artificial Sequence; identical to SEQ ID NO: 5526
  Cyclic GFR-binding peptide
  MOD_RES (31)..(32): Xaa is C or S

SEQ ID NO: 15965 - protein, 41 aa, Artificial Sequence
  Cyclic GFR-binding peptide
  MOD_RES (1)..(3)..(35)..(36): Xaa is C or S
XGXGEVVMDNSLQEVVKENEDYYLMTLPELETPVXXAKPIK

SEQ ID NO: 15966 - protein, 37 aa, Artificial Sequence; identical to SEQ ID NO: 5527
  Cyclic GFR-binding peptide
  MOD_RES (31)..(32): Xaa is C or S

SEQ ID NO: 15967 - protein, 30 aa, Artificial Sequence
  Cyclic GFR-binding peptide
  MOD_RES (1)..(3): Xaa is C or S
XKXSRVIMNSLQEVKPKRGVYYLITLPELA

SEQ ID NO: 15968 - protein, 30 aa, Artificial Sequence; identical to SEQ ID NO: 5528
  Cyclic GFR-binding peptide
  MOD_RES (2)..(2): Xaa is C or S

SEQ ID NO: 15969 - protein, 40 aa, Artificial Sequence; identical to SEQ ID NO: 5531
  Cyclic GFR-binding peptide
  MOD_RES (2)..(4)..(36)..(37): Xaa is C or S

SEQ ID NO: 15970 - protein, 32 aa, Artificial Sequence
  Cyclic GFR-binding peptide
  MOD_RES (31)..(32): Xaa is C or S
SRVIMNSLQEVKPKRGVYYLITLPELAQPVXX

SEQ ID NO: 15971 - protein, 29 aa, Artificial Sequence
  Cyclic GFR-binding peptide
  MOD_RES (2)..(2): Xaa is C or S
KXSKVIMNSLQEIKPTKGIYYVIPLPELD

SEQ ID NO: 15972 - protein, 38 aa, Artificial Sequence
  Cyclic GFR-binding peptide
  MOD_RES (1)..(33): Xaa is C or S
XSRVVMNNSLQEIVNSSDDYYLVTLPELKTPAXTPKTV

SEQ ID NO: 15973 - protein, 33 aa, Artificial Sequence; identical to SEQ ID NO: 5536
  Cyclic GFR-binding peptide
  MOD_RES (30)..(31): Xaa is C or S

SEQ ID NO: 15974 - protein, 35 aa, Artificial Sequence
  Cyclic GFR-binding peptide
  MOD_RES (1)..(33)..(34): Xaa is C or S
XSEVVMDQYNKLVVNNASDLYLISIASLRTPVXXT

SEQ ID NO: 15975 - protein, 20 aa, Artificial Sequence
  Cyclic GFR-binding peptide
NSLQEVVKDYEDYYLMTLPE

SEQ ID NO: 15976 - protein, 36 aa, Artificial Sequence
  Cyclic GFR-binding peptide
  MOD_RES (31)..(32): Xaa is C or S
RVVMNEYQKYIVNSSDDIFLVSIPSLQTPAXXPKPV

SEQ ID NO: 15977 - protein, 31 aa, Artificial Sequence
  Cyclic GFR-binding peptide
  MOD_RES (2)..(2): Xaa is C or S
GXGEVVMDNSLQEVVKENEDYYVMPLPELET

SEQ ID NO: 15978 - protein, 26 aa, Artificial Sequence
  Cyclic GFR-binding peptide
VMNQYNKLIVNSSDDLYLVSIASLKT

SEQ ID NO: 15979 - protein, 29 aa, Artificial Sequence
  Cyclic GFR-binding peptide
  MOD_RES (26)..(26): Xaa is C or S
RYKKLIVNSSDDFYLVSIANLKTPAXTPK

SEQ ID NO: 15980 - protein, 23 aa, Artificial Sequence
  Cyclic GFR-binding peptide
NSLQEIKPTKGIYYLITLPELDQ

SEQ ID NO: 15981 - protein, 30 aa, Artificial Sequence
  Cyclic GFR-binding peptide
  MOD_RES (29)..(29): Xaa is C or S
VMNEYQKYIVNSSDDIFLVSIPSLKTPAXT

SEQ ID NO: 15982 - protein, 27 aa, Artificial Sequence
  Cyclic GFR-binding peptide
VMNNSLQEIVNSSDDYYVVPLPELKTP

SEQ ID NO: 15983 - protein, 28 aa, Artificial Sequence
  Cyclic GFR-binding peptide
  MOD_RES (2)..(2): Xaa is C or S
KXSKVVMNSLQEVKPTRGVYYVIPLPEL

SEQ ID NO: 15984 - protein, 38 aa, Artificial Sequence
  Cyclic GFR-binding peptide
  MOD_RES (2)..(4)..(36)..(37): Xaa is C or S
RXGXSEVVMDNSLQEVVNNASDYYVIPLPELRTPVXXT

SEQ ID NO: 15985 - protein, 21 aa, Artificial Sequence
  Cyclic GFR-binding peptide
NNSLQEIVNSSDDYYVVPLPE

SEQ ID NO: 15986 - protein, 41 aa, Artificial Sequence; identical to SEQ ID NO: 5546
  Cyclic GFR-binding peptide
  MOD_RES (2)..(4)..(35)..(36): Xaa is C or S

SEQ ID NO: 15987 - protein, 36 aa, Artificial Sequence
  Cyclic GFR-binding peptide
  MOD_RES (1)..(33)..(34): Xaa is C or S
XGEVVMENSLQEVVKDYEDYYLMTLPELETPVXXAK

SEQ ID NO: 15988 - protein, 30 aa, Artificial Sequence
  Cyclic GFR-binding peptide
RVVMNNSLQEIVNSSDDYYVVPLPELKTPA

SEQ ID NO: 15989 - protein, 31 aa, Artificial Sequence; identical to SEQ ID NO: 5548
  Cyclic GFR-binding peptide
  MOD_RES (29)..(30): Xaa is C or S

SEQ ID NO: 15990 - protein, 33 aa, Artificial Sequence; identical to SEQ ID NO: 5549
  Cyclic GFR-binding peptide
  MOD_RES (30)..(30): Xaa is C or S

SEQ ID NO: 15991 - protein, 32 aa, Artificial Sequence
  Cyclic GFR-binding peptide
  MOD_RES (29)..(30): Xaa is C or S
VVMEYQKYVKPTRGVIFLISIPSLDQPVXXPS

SEQ ID NO: 15992 - protein, 30 aa, Artificial Sequence; identical to SEQ ID NO: 5550
  Cyclic GFR-binding peptide
  MOD_RES (1)..(3): Xaa is C or S

SEQ ID NO: 15993 - protein, 26 aa, Artificial Sequence
  Cyclic GFR-binding peptide
  MOD_RES (26)..(26): Xaa is C or S
NSLQEIVNSSDDYYLVTLPELKTPAX

SEQ ID NO: 15994 - protein, 39 aa, Artificial Sequence; identical to SEQ ID NO: 5551
  Cyclic GFR-binding peptide
  MOD_RES (2)..(4)..(35)..(36): Xaa is C or S

SEQ ID NO: 15995 - protein, 34 aa, Artificial Sequence
  Cyclic GFR-binding peptide
  MOD_RES (2)..(4): Xaa is C or S
RXGXGEVVMDEYQKYVVKENEDIFLMSIPSLETP

SEQ ID NO: 15996 - protein, 28 aa, Artificial Sequence
  Cyclic GFR-binding peptide
  MOD_RES (28)..(28): Xaa is C or S
IMQYNKLVKPKRGVLYLISIASLAQPVX

SEQ ID NO: 15997 - protein, 29 aa, Artificial Sequence
  Cyclic GFR-binding peptide
VVMNRYKKLIVNSSDDFYLVSIANLQTPA

SEQ ID NO: 15998 - protein, 37 aa, Artificial Sequence
  Cyclic GFR-binding peptide
  MOD_RES (2)..(4)..(36)..(37): Xaa is C or S
HXGXSRVVMNEYQKYIVNSSDDIFLVSIPSLKTPAXX

SEQ ID NO: 15999 - protein, 36 aa, Artificial Sequence
  Cyclic GFR-binding peptide
  MOD_RES (30)..(31): Xaa is C or S
VVMDNSLQEVVKENEDYYLMTLPELETPVXXAKPIK

SEQ ID NO: 16000 - protein, 27 aa, Artificial Sequence
  Cyclic GFR-binding peptide
VIMEYQKYVKPKRGVIFLISIPSLAQP

SEQ ID NO: 16001 - protein, 33 aa, Artificial Sequence
  Cyclic GFR-binding peptide
  MOD_RES (1)..(33): Xaa is C or S
XARVVMNNSLQEIVNSSDDYYVVPLPELQTPAX

SEQ ID NO: 16002 - protein, 36 aa, Artificial Sequence
  Cyclic GFR-binding peptide
  MOD_RES (1)..(3)..(35)..(36): Xaa is C or S
XGXSEVVMDNSLQEVVNNASDYYVIPLPELRTPVXX

SEQ ID NO: 16003 - protein, 38 aa, Artificial Sequence
  Cyclic GFR-binding peptide
  MOD_RES (1)..(32)..(33): Xaa is C or S
XSRVIMEYQKYVKPKRGVIFLISIPSLAQPVXXPAASA

SEQ ID NO: 16004 - protein, 33 aa, Artificial Sequence
  Cyclic GFR-binding peptide
  MOD_RES (1)..(3): Xaa is C or S
XKXSKVIMNSLQEIKPTKGIYYVIPLPELDQSV

SEQ ID NO: 16005 - protein, 24 aa, Artificial Sequence
  Cyclic GFR-binding peptide
MDNSLQEVVKENEDYYLMTLPELE

SEQ ID NO: 16006 - protein, 33 aa, Artificial Sequence; identical to SEQ ID NO: 5561
  Cyclic GFR-binding peptide
  MOD_RES (2)..(2): Xaa is C or S

SEQ ID NO: 16007 - protein, 30 aa, Artificial Sequence
  Cyclic GFR-binding peptide
  MOD_RES (1)..(3): Xaa is C or S
XGXGEVVMDNSLQEVVKENEDYYLMTLPEL

SEQ ID NO: 16008 - protein, 31 aa, Artificial Sequence
  Cyclic GFR-binding peptide
GEVVMENSLQEVVKDYEDYYLMTLPELETPV

SEQ ID NO: 16009 - protein, 25 aa, Artificial Sequence
  Cyclic GFR-binding peptide
QYNKLVVKDYEDLYLMSIASLETPV

SEQ ID NO: 16010 - protein, 30 aa, Artificial Sequence
  Cyclic GFR-binding peptide
  MOD_RES (27)..(27): Xaa is C or S
NNSLQEIVNSSDDYYLVTLPELKTPAXTPK

SEQ ID NO: 16011 - protein, 25 aa, Artificial Sequence
  Cyclic GFR-binding peptide
MNEYQKYIVNSSDDIFLVSIPSLKT

SEQ ID NO: 16012 - protein, 37 aa, Artificial Sequence
  Cyclic GFR-binding peptide
  MOD_RES (2)..(4)..(35)..(36): Xaa is C or S
SXKXSKVVMNSLQEVKPTRGVYYVIPLPELDQPVXXP

SEQ ID NO: 16013 - protein, 25 aa, Artificial Sequence
  Cyclic GFR-binding peptide
EQYNKLVVKDYEDLYLMSIASLETP

SEQ ID NO: 16014 - protein, 29 aa, Artificial Sequence
  Cyclic GFR-binding peptide
  MOD_RES (26)..(27): Xaa is C or S
RYKKLIVNSSDDFYLVSIANLKTPAXXPK

SEQ ID NO: 16015 - protein, 35 aa, Artificial Sequence
  Cyclic GFR-binding peptide
  MOD_RES (31)..(32): Xaa is C or S
EVVMEEYQKYVVKDYEDIFLMSIPSLETPVXXAKP

SEQ ID NO: 16016 - protein, 40 aa, Artificial Sequence
  Cyclic GFR-binding peptide
  MOD_RES (2)..(4)..(36)..(37): Xaa is C or S
RXGXSEVVMDNSLQEVVNNASDYYVIPLPELRTPVXXTPP

SEQ ID NO: 16017 - protein, 40 aa, Artificial Sequence; identical to SEQ ID NO: 5566
  Cyclic GFR-binding peptide
  MOD_RES (1)..(3)..(35)..(36): Xaa is C or S

SEQ ID NO: 16018 - protein, 28 aa, Artificial Sequence
  Cyclic GFR-binding peptide
VVMNRYKKLIVNSSDDFYLVSIANLKTP

SEQ ID NO: 16019 - protein, 29 aa, Artificial Sequence
  Cyclic GFR-binding peptide
  MOD_RES (1)..(3): Xaa is C or S
XGXSEVVMDRYKKLVVNNASDFYLISIAN

SEQ ID NO: 16020 - protein, 26 aa, Artificial Sequence
  Cyclic GFR-binding peptide
GEVVMDNSLQEVVKENEDYYVMPLPE

SEQ ID NO: 16021 - protein, 30 aa, Artificial Sequence
  Cyclic GFR-binding peptide
  MOD_RES (28)..(28): Xaa is C or S
MNNSLQEIVNSSDDYYLVTLPELKTPAXTP

SEQ ID NO: 16022 - protein, 29 aa, Artificial Sequence
  Cyclic GFR-binding peptide
  MOD_RES (26)..(27): Xaa is C or S
NSLQEVVKENEDYYVMPLPELETPVXXAK

SEQ ID NO: 16023 - protein, 37 aa, Artificial Sequence
  Cyclic GFR-binding peptide
  MOD_RES (2)..(33)..(34): Xaa is C or S
KXSKVIMNSLQEIKPTKGIYYVIPLPELDQSVXXPSA

SEQ ID NO: 16024 - protein, 30 aa, Artificial Sequence; identical to SEQ ID NO: 5574
  Cyclic GFR-binding peptide
  MOD_RES (2)..(4): Xaa is C or S

SEQ ID NO: 16025 - protein, 31 aa, Artificial Sequence
  Cyclic GFR-binding peptide
  MOD_RES (31)..(31): Xaa is C or S
SKVIMEYQKYIKPTKGIIFLISIPSLDQSVX

SEQ ID NO: 16026 - protein, 29 aa, Artificial Sequence
  Cyclic GFR-binding peptide
  MOD_RES (27)..(28): Xaa is C or S
NRYKKLIVNSSDDFYLVSIANLKTPAXXP

SEQ ID NO: 16027 - protein, 35 aa, Artificial Sequence
  Cyclic GFR-binding peptide
  MOD_RES (2)..(4): Xaa is C or S
HXGXSRVVMNEYQKYIVNSSDDIFLVSIPSLKTPA

SEQ ID NO: 16028 - protein, 34 aa, Artificial Sequence
  Cyclic GFR-binding peptide
  MOD_RES (32)..(33): Xaa is C or S
GEVVMEEYQKYVVKDYEDIFLMSIPSLETPVXXA

SEQ ID NO: 16029 - protein, 40 aa, Artificial Sequence
  Cyclic GFR-binding peptide
  MOD_RES (1)..(3)..(35)..(36): Xaa is C or S
XGXGEVVMDEYQKYVVKENEDIFLMSIPSLETPVXXAKPI

SEQ ID NO: 16030 - protein, 30 aa, Artificial Sequence; identical to SEQ ID NO: 5578
  Cyclic GFR-binding peptide

SEQ ID NO: 16031 - protein, 31 aa, Artificial Sequence; identical to SEQ ID NO: 5580
  Cyclic GFR-binding peptide
  MOD_RES (1)..(3): Xaa is C or S

SEQ ID NO: 16032 - protein, 40 aa, Artificial Sequence
  Cyclic GFR-binding peptide
  MOD_RES (1)..(3)..(35)..(36): Xaa is C or S
XGXGEVVMDNSLQEVVKENEDYYLMTLPELETPVXXAKPI

SEQ ID NO: 16033 - protein, 22 aa, Artificial Sequence
  Cyclic GFR-binding peptide
MQYNKLVKPTRGVLYLISIASL

SEQ ID NO: 16034 - protein, 34 aa, Artificial Sequence
  Cyclic GFR-binding peptide
  MOD_RES (2)..(33)..(34): Xaa is C or S
KXSKVVMEYQKYVKPTRGVIFLISIPSLDQPVXX

SEQ ID NO: 16035 - protein, 29 aa, Artificial Sequence
  Cyclic GFR-binding peptide
  MOD_RES (1)..(3): Xaa is C or S
XGXSEVVMDNSLQEVVNNASDYYLITLPE

SEQ ID NO: 16036 - protein, 23 aa, Artificial Sequence
  Cyclic GFR-binding peptide
VIMEYQKYVKPKRGVIFLISIPS

SEQ ID NO: 16037 - protein, 33 aa, Artificial Sequence; identical to SEQ ID NO: 5591
  Cyclic GFR-binding peptide
  MOD_RES (1)..(3): Xaa is C or S

SEQ ID NO: 16038 - protein, 37 aa, Artificial Sequence
  Cyclic GFR-binding peptide
  MOD_RES (32)..(33): Xaa is C or S
SRVVMNEYQKYIVNSSDDIFLVSIPSLKTPAXXPKPV

SEQ ID NO: 16039 - protein, 34 aa, Artificial Sequence
  Cyclic GFR-binding peptide
  MOD_RES (1)..(33)..(34): Xaa is C or S
XGEVVMDNSLQEVVKENEDYYVMPLPELETPVXX

SEQ ID NO: 16040 - protein, 41 aa, Artificial Sequence
  Cyclic GFR-binding peptide
  MOD_RES (2)..(4)..(36): Xaa is C or S
HXGXSRVVMNEYQKYIVNSSDDIFLVSIPSLKTPAXTPKTV

SEQ ID NO: 16041 - protein, 39 aa, Artificial Sequence
  Cyclic GFR-binding peptide
  MOD_RES (2)..(34)..(35): Xaa is C or S
GXARVVMNEYQKYIVNSSDDIFLVSIPSLQTPAXXPKPV

SEQ ID NO: 16042 - protein, 40 aa, Artificial Sequence; identical to SEQ ID NO: 5598
  Cyclic GFR-binding peptide
  MOD_RES (2)..(4)..(36)..(37): Xaa is C or S

SEQ ID NO: 16043 - protein, 31 aa, Artificial Sequence
  Cyclic GFR-binding peptide
  MOD_RES (28)..(29): Xaa is C or S
MDNSLQEVVNNASDYYVIPLPELRTPVXXTP

SEQ ID NO: 16044 - protein, 39 aa, Artificial Sequence
  Cyclic GFR-binding peptide
  MOD_RES (2)..(34)..(35): Xaa is C or S
GXSRVVMNNSLQEIVNSSDDYYVVPLPELKTPAXXPKPV

SEQ ID NO: 16045 - protein, 38 aa, Artificial Sequence
  Cyclic GFR-binding peptide
  MOD_RES (2)..(4)..(36)..(37): Xaa is C or S
HXGXSRVVMNNSLQEIVNSSDDYYLVTLPELKTPAXXP

SEQ ID NO: 16046 - protein, 36 aa, Artificial Sequence
  Cyclic GFR-binding peptide
  MOD_RES (30)..(31): Xaa is C or S
VVMDQYNKLVVNNASDLYLISIASLRTPVXXTPPTS

SEQ ID NO: 16047 - protein, 27 aa, Artificial Sequence
  Cyclic GFR-binding peptide
  MOD_RES (27)..(27): Xaa is C or S
MRYKKLVKPTRGVFYLISIANLDQPVX

SEQ ID NO: 16048 - protein, 39 aa, Artificial Sequence; identical to SEQ ID NO: 5604
  Cyclic GFR-binding peptide
  MOD_RES (1)..(3)..(35): Xaa is C or S

SEQ ID NO: 16049 - protein, 33 aa, Artificial Sequence; identical to SEQ ID NO: 5605
  Cyclic GFR-binding peptide
  MOD_RES (29)..(30): Xaa is C or S

SEQ ID NO: 16050 - protein, 30 aa, Artificial Sequence
  Cyclic GFR-binding peptide
  MOD_RES (28)..(29): Xaa is C or S
MNNSLQEIVNSSDDYYLVTLPELKTPAXXP

SEQ ID NO: 16051 - protein, 36 aa, Artificial Sequence
  Cyclic GFR-binding peptide
  MOD_RES (31)..(32): Xaa is C or S
EVVMDNSLQEVVNNASDYYVIPLPELRTPVXXTPPT

SEQ ID NO: 16052 - protein, 33 aa, Artificial Sequence; identical to SEQ ID NO: 5609
  Cyclic GFR-binding peptide
  MOD_RES (2)..(2): Xaa is C or S

SEQ ID NO: 16053 - protein, 28 aa, Artificial Sequence
  Cyclic GFR-binding peptide
GEVVMDEYQKYVVKENEDIFLMSIPSLE

SEQ ID NO: 16054 - protein, 36 aa, Artificial Sequence
  Cyclic GFR-binding peptide
  MOD_RES (1)..(3)..(35)..(36): Xaa is C or S
XGXSEVVMDQYNKLVVNNASDLYLISIASLRTPVXX

SEQ ID NO: 16055 - protein, 30 aa, Artificial Sequence; identical to SEQ ID NO: 5614
  Cyclic GFR-binding peptide
  MOD_RES (2)..(2): Xaa is C or S

SEQ ID NO: 16056 - protein, 28 aa, Artificial Sequence
  Cyclic GFR-binding peptide
  MOD_RES (2)..(2): Xaa is C or S
GXARVVMNRYKKLIVNSSDDFYLVSIAN

SEQ ID NO: 16057 - protein, 31 aa, Artificial Sequence; identical to SEQ ID NO: 5619
  Cyclic GFR-binding peptide
  MOD_RES (31)..(31): Xaa is C or S

SEQ ID NO: 16058 - protein, 30 aa, Artificial Sequence
  Cyclic GFR-binding peptide
  MOD_RES (29)..(30): Xaa is C or S
VMNEYQKYIVNSSDDIFLVSIPSLKTPAXX

SEQ ID NO: 16059 - protein, 33 aa, Artificial Sequence
  Cyclic GFR-binding peptide
  MOD_RES (2)..(4): Xaa is C or S
HXGXARVVMNNSLQEIVNSSDDYYLVTLPELQT

SEQ ID NO: 16060 - protein, 33 aa, Artificial Sequence; identical to SEQ ID NO: 5623
  Cyclic GFR-binding peptide
  MOD_RES (2)..(33): Xaa is C or S

SEQ ID NO: 16061 - protein, 35 aa, Artificial Sequence
  Cyclic GFR-binding peptide
  MOD_RES (2)..(4): Xaa is C or S
RXGXGEVVMDEYQKYVVKENEDIFLMSIPSLETPV

SEQ ID NO: 16062 - protein, 33 aa, Artificial Sequence
  Cyclic GFR-binding peptide
  MOD_RES (30)..(31): Xaa is C or S
VVMDNSLQEVVNNASDYYLITLPELRTPVXXTP

SEQ ID NO: 16063 - protein, 35 aa, Artificial Sequence; identical to SEQ ID NO: 5629
  Cyclic GFR-binding peptide
  MOD_RES (1)..(3)..(35): Xaa is C or S

SEQ ID NO: 16064 - protein, 34 aa, Artificial Sequence
  Cyclic GFR-binding peptide
  MOD_RES (29)..(30): Xaa is C or S
VMEEYQKYVVKDYEDIFLMSIPSLETPVXXAKPI

SEQ ID NO: 16065 - protein, 33 aa, Artificial Sequence; identical to SEQ ID NO: 5630
  Cyclic GFR-binding peptide
  MOD_RES (28)..(29): Xaa is C or S

SEQ ID NO: 16066 - protein, 30 aa, Artificial Sequence; identical to SEQ ID NO: 5631
  Cyclic GFR-binding peptide
  MOD_RES (29)..(30): Xaa is C or S

SEQ ID NO: 16067 - protein, 25 aa, Artificial Sequence
  Cyclic GFR-binding peptide
SKVVMEYQKYVKPTRGVIFLISIPS

SEQ ID NO: 16068 - protein, 37 aa, Artificial Sequence; identical to SEQ ID NO: 5637
  Cyclic GFR-binding peptide
  MOD_RES (2)..(34)..(35): Xaa is C or S

SEQ ID NO: 16069 - protein, 32 aa, Artificial Sequence
  Cyclic GFR-binding peptide
  MOD_RES (1)..(1): Xaa is C or S
XSEVVMDNSLQEVVNNASDYYLITLPELRTPV

SEQ ID NO: 16070 - protein, 27 aa, Artificial Sequence
  Cyclic GFR-binding peptide
VMDRYKKLVVKENEDFYLMSIANLETP

SEQ ID NO: 16071 - protein, 28 aa, Artificial Sequence
  Cyclic GFR-binding peptide
  MOD_RES (2)..(2): Xaa is C or S
GXSRVVMNEYQKYIVNSSDDIFLVSIPS

SEQ ID NO: 16072 - protein, 26 aa, Artificial Sequence
  Cyclic GFR-binding peptide
MNQYNKLIVNSSDDLYLVSIASLQTP

SEQ ID NO: 16073 - protein, 28 aa, Artificial Sequence
  Cyclic GFR-binding peptide
  MOD_RES (1)..(1): Xaa is C or S
XARVVMNEYQKYIVNSSDDIFLVSIPSL

SEQ ID NO: 16074 - protein, 27 aa, Artificial Sequence
  Cyclic GFR-binding peptide
  MOD_RES (1)..(1): Xaa is C or S
XSKVIMRYKKLIKPTKGIFYLISIANL

SEQ ID NO: 16075 - protein, 24 aa, Artificial Sequence
  Cyclic GFR-binding peptide
DRYKKLVVNNASDFYLISIANLRT

SEQ ID NO: 16076 - protein, 35 aa, Artificial Sequence; identical to SEQ ID NO: 5644
  Cyclic GFR-binding peptide
  MOD_RES (1)..(32)..(33): Xaa is C or S

SEQ ID NO: 16077 - protein, 36 aa, Artificial Sequence
  Cyclic GFR-binding peptide
  MOD_RES (30)..(31): Xaa is C or S
VVMDNSLQEVVNNASDYYLITLPELRTPVXXTPPTS

SEQ ID NO: 16078 - protein, 24 aa, Artificial Sequence
  Cyclic GFR-binding peptide
VVMDNSLQEVVKENEDYYVMPLPE

SEQ ID NO: 16079 - protein, 21 aa, Artificial Sequence
  Cyclic GFR-binding peptide
NSLQEVVKDYEDYYLMTLPEL

SEQ ID NO: 16080 - protein, 35 aa, Artificial Sequence; identical to SEQ ID NO: 5646
  Cyclic GFR-binding peptide
  MOD_RES (2)..(33)..(34): Xaa is C or S

SEQ ID NO: 16081 - protein, 34 aa, Artificial Sequence
  Cyclic GFR-binding peptide
  MOD_RES (29)..(30): Xaa is C or S
VMDEYQKYVVKENEDIFLMSIPSLETPVXXAKPI

SEQ ID NO: 16082 - protein, 25 aa, Artificial Sequence
  Cyclic GFR-binding peptide
ENSLQEVVKDYEDYYVMPLPELETP

SEQ ID NO: 16083 - protein, 33 aa, Artificial Sequence
  Cyclic GFR-binding peptide
  MOD_RES (28)..(29): Xaa is C or S
VMNSLQEVKPTRGVYYVIPLPELDQPVXXPSAS

SEQ ID NO: 16084 - protein, 37 aa, Artificial Sequence
  Cyclic GFR-binding peptide
  MOD_RES (31)..(32): Xaa is C or S
EVVMDRYKKLVVNNASDFYLISIANLRTPVXXTPPTS

SEQ ID NO: 16085 - protein, 35 aa, Artificial Sequence
  Cyclic GFR-binding peptide
  MOD_RES (29)..(30): Xaa is C or S
VMDNSLQEVVKENEDYYLMTLPELETPVXXAKPIK

SEQ ID NO: 16086 - protein, 21 aa, Artificial Sequence
  Cyclic GFR-binding peptide
NNSLQEIVNSSDDYYLVTLPE

SEQ ID NO: 16087 - protein, 29 aa, Artificial Sequence
  Cyclic GFR-binding peptide
  MOD_RES (27)..(28): Xaa is C or S
DNSLQEVVKENEDYYVMPLPELETPVXXA

SEQ ID NO: 16088 - protein, 30 aa, Artificial Sequence; identical to SEQ ID NO: 5652
  Cyclic GFR-binding peptide

SEQ ID NO: 16089 - protein, 31 aa, Artificial Sequence
  Cyclic GFR-binding peptide
  MOD_RES (27)..(28): Xaa is C or S
DQYNKLVVNNASDLYLISIASLRTPVXXTPP

SEQ ID NO: 16090 - protein, 31 aa, Artificial Sequence; identical to SEQ ID NO: 5657
  Cyclic GFR-binding peptide

SEQ ID NO: 16091 - protein, 33 aa, Artificial Sequence
  Cyclic GFR-binding peptide
  MOD_RES (31)..(32): Xaa is C or S
SKVIMNSLQEIKPTKGIYYLITLPELDQSVXXP

SEQ ID NO: 16092 - protein, 41 aa, Artificial Sequence
  Cyclic GFR-binding peptide
  MOD_RES (1)..(3)..(35)..(36): Xaa is C or S
XGXARVVMNNSLQEIVNSSDDYYVVPLPELQTPAXXPKPVT

SEQ ID NO: 16093 - protein, 32 aa, Artificial Sequence; identical to SEQ ID NO: 5659
  Cyclic GFR-binding peptide
  MOD_RES (30)..(31): Xaa is C or S

SEQ ID NO: 16094 - protein, 31 aa, Artificial Sequence
  Cyclic GFR-binding peptide
  MOD_RES (29)..(30): Xaa is C or S
VIMEYQKYIKPTKGIIFLISIPSLDQSVXXP

SEQ ID NO: 16095 - protein, 40 aa, Artificial Sequence
  Cyclic GFR-binding peptide
  MOD_RES (1)..(3)..(35)..(36): Xaa is C or S
XGXSRVVMNEYQKYIVNSSDDIFLVSIPSLKTPAXXPKPV

SEQ ID NO: 16096 - protein, 23 aa, Artificial Sequence
  Cyclic GFR-binding peptide
DNSLQEVVNNASDYYVIPLPELR

SEQ ID NO: 16097 - protein, 39 aa, Artificial Sequence
  Cyclic GFR-binding peptide
  MOD_RES (2)..(4)..(36)..(37): Xaa is C or S
HXGXSRVVMNNSLQEIVNSSDDYYLVTLPELKTPAXXPK

SEQ ID NO: 16098 - protein, 30 aa, Artificial Sequence
  Cyclic GFR-binding peptide
  MOD_RES (28)..(29): Xaa is C or S
MNEYQKYIVNSSDDIFLVSIPSLKTPAXXP

SEQ ID NO: 16099 - protein, 23 aa, Artificial Sequence
  Cyclic GFR-binding peptide
QYNKLIKPTKGILYLISIASLDQ

SEQ ID NO: 16100 - protein, 25 aa, Artificial Sequence
  Cyclic GFR-binding peptide
MERYKKLVVKDYEDFYLMSIANLET

SEQ ID NO: 16101 - protein, 23 aa, Artificial Sequence
  Cyclic GFR-binding peptide
VMDRYKKLVVKENEDFYLMSIAN

SEQ ID NO: 16102 - protein, 31 aa, Artificial Sequence
  Cyclic GFR-binding peptide
  MOD_RES (30)..(31): Xaa is C or S
KVIMNSLQEIKPTKGIYYVIPLPELDQSVXX

SEQ ID NO: 16103 - protein, 28 aa, Artificial Sequence
  Cyclic GFR-binding peptide
  MOD_RES (2)..(2): Xaa is C or S
GXGEVVMEQYNKLVVKDYEDLYLMSIAS

SEQ ID NO: 16104 - protein, 35 aa, Artificial Sequence; identical to SEQ ID NO: 5668
  Cyclic GFR-binding peptide
  MOD_RES (2)..(4): Xaa is C or S

SEQ ID NO: 16105 - protein, 32 aa, Artificial Sequence
  Cyclic GFR-binding peptide
  MOD_RES (1)..(3): Xaa is C or S
XGXGEVVMDEYQKYVVKENEDIFLMSIPSLET

SEQ ID NO: 16106 - protein, 33 aa, Artificial Sequence
  Cyclic GFR-binding peptide
  MOD_RES (31)..(32): Xaa is C or S
RVVMNNSLQEIVNSSDDYYVVPLPELQTPAXXP

SEQ ID NO: 16107 - protein, 24 aa, Artificial Sequence
  Cyclic GFR-binding peptide
VMNSLQEVKPTRGVYYVIPLPELD

SEQ ID NO: 16108 - protein, 32 aa, Artificial Sequence
  Cyclic GFR-binding peptide
  MOD_RES (2)..(4): Xaa is C or S
HXGXSRVVMNNSLQEIVNSSDDYYVVPLPELK

SEQ ID NO: 16109 - protein, 27 aa, Artificial Sequence
  Cyclic GFR-binding peptide
RVVMNNSLQEIVNSSDDYYVVPLPELK

SEQ ID NO: 16110 - protein, 30 aa, Artificial Sequence
  Cyclic GFR-binding peptide
  MOD_RES (26)..(26): Xaa is C or S
NSLQEIVNSSDDYYVVPLPELKTPAXTPKT

SEQ ID NO: 16111 - protein, 27 aa, Artificial Sequence
  Cyclic GFR-binding peptide
  MOD_RES (26)..(27): Xaa is C or S
RYKKLIVNSSDDFYLVSIANLKTPAXX

SEQ ID NO: 16112 - protein, 34 aa, Artificial Sequence
  Cyclic GFR-binding peptide
  MOD_RES (30)..(31): Xaa is C or S
VVMDNSLQEVVNNASDYYVIPLPELRTPVXXTPP

SEQ ID NO: 16113 - protein, 24 aa, Artificial Sequence
  Cyclic GFR-binding peptide
MNSLQEVKPTRGVYYVIPLPELDQ

SEQ ID NO: 16114 - protein, 31 aa, Artificial Sequence
  Cyclic GFR-binding peptide
  MOD_RES (29)..(29): Xaa is C or S
VMNEYQKYIVNSSDDIFLVSIPSLKTPAXTP

SEQ ID NO: 16115 - protein, 39 aa, Artificial Sequence; identical to SEQ ID NO: 5673
  Cyclic GFR-binding peptide
  MOD_RES (2)..(34)..(35): Xaa is C or S

SEQ ID NO: 16116 - protein, 40 aa, Artificial Sequence
  Cyclic GFR-binding peptide
  MOD_RES (1)..(3)..(35)..(36): Xaa is C or S
XGXARVVMNNSLQEIVNSSDDYYLVTLPELQTPAXXPKPV

SEQ ID NO: 16117 - protein, 39 aa, Artificial Sequence
  Cyclic GFR-binding peptide
  MOD_RES (1)..(33)..(34): Xaa is C or S
XSRVVMNNSLQEIVNSSDDYYVVPLPELKTPAXXPKPVY

SEQ ID NO: 16118 - protein, 31 aa, Artificial Sequence
  Cyclic GFR-binding peptide
  MOD_RES (30)..(31): Xaa is C or S
VVMNNSLQEIVNSSDDYYVVPLPELQTPAXX

SEQ ID NO: 16119 - protein, 39 aa, Artificial Sequence
  Cyclic GFR-binding peptide
  MOD_RES (2)..(34)..(35): Xaa is C or S
GXSRVVMNEYQKYIVNSSDDIFLVSIPSLKTPAXXPKPV

SEQ ID NO: 16120 - protein, 28 aa, Artificial Sequence
  Cyclic GFR-binding peptide
GEVVMDNSLQEVVKENEDYYLMTLPELE

SEQ ID NO: 16121 - protein, 27 aa, Artificial Sequence
  Cyclic GFR-binding peptide
  MOD_RES (1)..(1): Xaa is C or S
XGEVVMDRYKKLVVKENEDFYLMSIAN

SEQ ID NO: 16122 - protein, 35 aa, Artificial Sequence; identical to SEQ ID NO: 5683
  Cyclic GFR-binding peptide
  MOD_RES (31)..(32): Xaa is C or S

SEQ ID NO: 16123 - protein, 27 aa, Artificial Sequence
  Cyclic GFR-binding peptide
KVIMQYNKLIKPTKGILYLISIASLDQ

SEQ ID NO: 16124 - protein, 21 aa, Artificial Sequence
  Cyclic GFR-binding peptide
NSLQEIKPTKGIYYLITLPEL

SEQ ID NO: 16125 - protein, 36 aa, Artificial Sequence
  Cyclic GFR-binding peptide
  MOD_RES (2)..(4)..(35)..(36): Xaa is C or S
SXKXSRVIMNSLQEVKPKRGVYYLITLPELAQPVXX

SEQ ID NO: 16126 - protein, 31 aa, Artificial Sequence; identical to SEQ ID NO: 5687
  Cyclic GFR-binding peptide
  MOD_RES (27)..(28): Xaa is C or S

SEQ ID NO: 16127 - protein, 36 aa, Artificial Sequence
  Cyclic GFR-binding peptide
  MOD_RES (2)..(4)..(36): Xaa is C or S
RXGXGEVVMDNSLQEVVKENEDYYVMPLPELETPVX

SEQ ID NO: 16128 - protein, 31 aa, Artificial Sequence; identical to SEQ ID NO: 5688
  Cyclic GFR-binding peptide
  MOD_RES (2)..(4): Xaa is C or S

SEQ ID NO: 16129 - protein, 38 aa, Artificial Sequence; identical to SEQ ID NO: 5691
  Cyclic GFR-binding peptide
  MOD_RES (2)..(33)..(34): Xaa is C or S

SEQ ID NO: 16130 - protein, 35 aa, Artificial Sequence; identical to SEQ ID NO: 5692
  Cyclic GFR-binding peptide
  MOD_RES (29)..(30): Xaa is C or S

SEQ ID NO: 16131 - protein, 25 aa, Artificial Sequence
  Cyclic GFR-binding peptide
VMDQYNKLVVKENEDLYLMSIASLE

SEQ ID NO: 16132 - protein, 36 aa, Artificial Sequence
  Cyclic GFR-binding peptide
  MOD_RES (2)..(4)..(35)..(36): Xaa is C or S
SXKXSKVIMEYQKYIKPTKGIIFLISIPSLDQSVXX

SEQ ID NO: 16133 - protein, 32 aa, Artificial Sequence; identical to SEQ ID NO: 5695
  Cyclic GFR-binding peptide
  MOD_RES (29)..(30): Xaa is C or S

SEQ ID NO: 16134 - protein, 30 aa, Artificial Sequence
  Cyclic GFR-binding peptide
  MOD_RES (2)..(2): Xaa is C or S
GXSEVVMDRYKKLVVNNASDFYLISIANLR

SEQ ID NO: 16135 - protein, 32 aa, Artificial Sequence
  Cyclic GFR-binding peptide
  MOD_RES (30)..(31): Xaa is C or S
KVIMNSLQEIKPTKGIYYVIPLPELDQSVXXP

SEQ ID NO: 16136 - protein, 38 aa, Artificial Sequence
  Cyclic GFR-binding peptide
  MOD_RES (1)..(3)..(35)..(36): Xaa is C or S
XGXSEVVMDNSLQEVVNNASDYYLITLPELRTPVXXTP

SEQ ID NO: 16137 - protein, 30 aa, Artificial Sequence
  Cyclic GFR-binding peptide
GEVVMDNSLQEVVKENEDYYLMTLPELETP

SEQ ID NO: 16138 - protein, 39 aa, Artificial Sequence
  Cyclic GFR-binding peptide
  MOD_RES (1)..(3)..(35)..(36): Xaa is C or S
XGXSEVVMDNSLQEVVNNASDYYLITLPELRTPVXXTPP

SEQ ID NO: 16139 - protein, 35 aa, Artificial Sequence
  Cyclic GFR-binding peptide
  MOD_RES (29)..(30): Xaa is C or S
VMNEYQKYIVNSSDDIFLVSIPSLKTPAXXPKPVY

SEQ ID NO: 16140 - protein, 23 aa, Artificial Sequence
  Cyclic GFR-binding peptide
MDRYKKLVVNNASDFYLISIANL

SEQ ID NO: 16141 - protein, 35 aa, Artificial Sequence
  Cyclic GFR-binding peptide
  MOD_RES (30)..(31): Xaa is C or S
KVIMEYQKYIKPTKGIIFLISIPSLDQSVXXPSAS

SEQ ID NO: 16142 - protein, 33 aa, Artificial Sequence
  Cyclic GFR-binding peptide
  MOD_RES (2)..(2): Xaa is C or S
GXGEVVMDNSLQEVVKENEDYYLMTLPELETPV

SEQ ID NO: 16143 - protein, 33 aa, Artificial Sequence
  Cyclic GFR-binding peptide
  MOD_RES (1)..(32)..(33): Xaa is C or S
XSKVIMNSLQEIKPTKGIYYLITLPELDQSVXX

SEQ ID NO: 16144 - protein, 31 aa, Artificial Sequence; identical to SEQ ID NO: 5707
  Cyclic GFR-binding peptide
  MOD_RES (26)..(27): Xaa is C or S

SEQ ID NO: 16145 - protein, 25 aa, Artificial Sequence
  Cyclic GFR-binding peptide
NSLQEIVNSSDDYYVVPLPELQTPA

SEQ ID NO: 16146 - protein, 39 aa, Artificial Sequence; identical to SEQ ID NO: 5708
  Cyclic GFR-binding peptide
  MOD_RES (2)..(4)..(35)..(36): Xaa is C or S

SEQ ID NO: 16147 - protein, 28 aa, Artificial Sequence
  Cyclic GFR-binding peptide
VIMEYQKYVKPKRGVIFLISIPSLAQPV

SEQ ID NO: 16148 - protein, 38 aa, Artificial Sequence; identical to SEQ ID NO: 5710
  Cyclic GFR-binding peptide
  MOD_RES (2)..(4)..(36)..(37): Xaa is C or S

SEQ ID NO: 16149 - protein, 32 aa, Artificial Sequence
  Cyclic GFR-binding peptide
  MOD_RES (2)..(2): Xaa is C or S
GXGEVVMENSLQEVVKDYEDYYLMTLPELETP

SEQ ID NO: 16150 - protein, 33 aa, Artificial Sequence
  Cyclic GFR-binding peptide
  MOD_RES (1)..(32)..(33): Xaa is C or S
XSKVVMNSLQEVKPTRGVYYVIPLPELDQPVXX

SEQ ID NO: 16151 - protein, 33 aa, Artificial Sequence
  Cyclic GFR-binding peptide
  MOD_RES (32)..(33): Xaa is C or S
GEVVMDEYQKYVVKENEDIFLMSIPSLETPVXX

SEQ ID NO: 16152 - protein, 27 aa, Artificial Sequence
  Cyclic GFR-binding peptide
  MOD_RES (2)..(2): Xaa is C or S
KXSKVVMNSLQEVKPTRGVYYVIPLPE

SEQ ID NO: 16153 - protein, 35 aa, Artificial Sequence
  Cyclic GFR-binding peptide
  MOD_RES (1)..(32)..(33): Xaa is C or S
XSKVVMEYQKYVKPTRGVIFLISIPSLDQPVXXPS

SEQ ID NO: 16154 - protein, 41 aa, Artificial Sequence
  Cyclic GFR-binding peptide
  MOD_RES (2)..(4)..(36)..(37): Xaa is C or S
RXGXGEVVMENSLQEVVKDYEDYYVMPLPELETPVXXAKPI

SEQ ID NO: 16155 - protein, 21 aa, Artificial Sequence
  Cyclic GFR-binding peptide
RYKKLVVKDYEDFYLMSIANL

SEQ ID NO: 16156 - protein, 32 aa, Artificial Sequence
  Cyclic GFR-binding peptide
  MOD_RES (1)..(3): Xaa is C or S
XGXGEVVMENSLQEVVKDYEDYYLMTLPELET

SEQ ID NO: 16157 - protein, 35 aa, Artificial Sequence; identical to SEQ ID NO: 5721
  Cyclic GFR-binding peptide
  MOD_RES (2)..(4): Xaa is C or S

SEQ ID NO: 16158 - protein, 34 aa, Artificial Sequence; identical to SEQ ID NO: 5724
  Cyclic GFR-binding peptide
  MOD_RES (29)..(30): Xaa is C or S

SEQ ID NO: 16159 - protein, 20 aa, Artificial Sequence
  Cyclic GFR-binding peptide
QYNKLVVKDYEDLYLMSIAS

SEQ ID NO: 16160 - protein, 32 aa, Artificial Sequence
  Cyclic GFR-binding peptide
  MOD_RES (1)..(3): Xaa is C or S
XKXSKVVMEYQKYVKPTRGVIFLISIPSLDQP

SEQ ID NO: 16161 - protein, 33 aa, Artificial Sequence
  Cyclic GFR-binding peptide
  MOD_RES (2)..(4): Xaa is C or S
RXGXGEVVMENSLQEVVKDYEDYYLMTLPELET

SEQ ID NO: 16162 - protein, 35 aa, Artificial Sequence; identical to SEQ ID NO: 5726
  Cyclic GFR-binding peptide
  MOD_RES (30)..(31): Xaa is C or S

SEQ ID NO: 16163 - protein, 25 aa, Artificial Sequence
  Cyclic GFR-binding peptide
MDRYKKLVVNNASDFYLISIANLRT

SEQ ID NO: 16164 - protein, 33 aa, Artificial Sequence; identical to SEQ ID NO: 5727
  Cyclic GFR-binding peptide
  MOD_RES (2)..(4): Xaa is C or S

SEQ ID NO: 16165 - protein, 31 aa, Artificial Sequence
  Cyclic GFR-binding peptide
  MOD_RES (2)..(2): Xaa is C or S
KXSKVVMNSLQEVKPTRGVYYVIPLPELDQP

SEQ ID NO: 16166 - protein, 32 aa, Artificial Sequence
  Cyclic GFR-binding peptide
  MOD_RES (31)..(32): Xaa is C or S
EVVMDQYNKLVVNNASDLYLISIASLRTPVXX

SEQ ID NO: 16167 - protein, 29 aa, Artificial Sequence
  Cyclic GFR-binding peptide
  MOD_RES (1)..(3): Xaa is C or S
XKXSRVIMEYQKYVKPKRGVIFLISIPSL

SEQ ID NO: 16168 - protein, 30 aa, Artificial Sequence; identical to SEQ ID NO: 5733
  Cyclic GFR-binding peptide
  MOD_RES (30)..(30): Xaa is C or S

SEQ ID NO: 16169 - protein, 29 aa, Artificial Sequence
  Cyclic GFR-binding peptide
  MOD_RES (26)..(26): Xaa is C or S
NSLQEIVNSSDDYYLVTLPELKTPAXTPK

SEQ ID NO: 16170 - protein, 40 aa, Artificial Sequence
  Cyclic GFR-binding peptide
  MOD_RES (1)..(3)..(35)..(36): Xaa is C or S
XGXARVVMNEYQKYIVNSSDDIFLVSIPSLQTPAXXPKPV

SEQ ID NO: 16171 - protein, 30 aa, Artificial Sequence; identical to SEQ ID NO: 5737
  Cyclic GFR-binding peptide
  MOD_RES (26)..(27): Xaa is C or S

SEQ ID NO: 16172 - protein, 22 aa, Artificial Sequence
  Cyclic GFR-binding peptide
MNNSLQEIVNSSDDYYLVTLPE

SEQ ID NO: 16173 - protein, 33 aa, Artificial Sequence
  Cyclic GFR-binding peptide
  MOD_RES (31)..(32): Xaa is C or S
RVVMNNSLQEIVNSSDDYYLVTLPELKTPAXXP

SEQ ID NO: 16174 - protein, 39 aa, Artificial Sequence
  Cyclic GFR-binding peptide
  MOD_RES (1)..(33)..(34): Xaa is C or S
XARVVMNEYQKYIVNSSDDIFLVSIPSLQTPAXXPKPVT

SEQ ID NO: 16175 - protein, 33 aa, Artificial Sequence; identical to SEQ ID NO: 5742
  Cyclic GFR-binding peptide
  MOD_RES (31)..(31): Xaa is C or S

SEQ ID NO: 16176 - protein, 26 aa, Artificial Sequence
  Cyclic GFR-binding peptide
EVVMEQYNKLVVKDYEDLYLMSIASL

SEQ ID NO: 16177 - protein, 33 aa, Artificial Sequence
  Cyclic GFR-binding peptide
  MOD_RES (29)..(30): Xaa is C or S
VMNNSLQEIVNSSDDYYVVPLPELQTPAXXPKP

SEQ ID NO: 16178 - protein, 24 aa, Artificial Sequence
  Cyclic GFR-binding peptide
VMDQYNKLVVNNASDLYLISIASL

SEQ ID NO: 16179 - protein, 26 aa, Artificial Sequence
  Cyclic GFR-binding peptide
  MOD_RES (26)..(26): Xaa is C or S
EYQKYVVKDYEDIFLMSIPSLETPVX

SEQ ID NO: 16180 - protein, 24 aa, Artificial Sequence
  Cyclic GFR-binding peptide
VVMRYKKLVKPTRGVFYLISIANL

SEQ ID NO: 16181 - protein, 33 aa, Artificial Sequence
  Cyclic GFR-binding peptide
  MOD_RES (1)..(33): Xaa is C or S
XSRVVMNEYQKYIVNSSDDIFLVSIPSLKTPAX

SEQ ID NO: 16182 - protein, 23 aa, Artificial Sequence
  Cyclic GFR-binding peptide
DQYNKLVVNNASDLYLISIASLR

SEQ ID NO: 16183 - protein, 37 aa, Artificial Sequence
  Cyclic GFR-binding peptide
  MOD_RES (1)..(3)..(35)..(36): Xaa is C or S
XGXGEVVMDNSLQEVVKENEDYYLMTLPELETPVXXA

SEQ ID NO: 16184 - protein, 30 aa, Artificial Sequence
  Cyclic GFR-binding peptide
  MOD_RES (28)..(29): Xaa is C or S
MDEYQKYVVKENEDIFLMSIPSLETPVXXA

SEQ ID NO: 16185 - protein, 29 aa, Artificial Sequence
  Cyclic GFR-binding peptide
  MOD_RES (29)..(29): Xaa is C or S
VMNNSLQEIVNSSDDYYVVPLPELKTPAX

SEQ ID NO: 16186 - protein, 28 aa, Artificial Sequence
  Cyclic GFR-binding peptide
  MOD_RES (1)..(1): Xaa is C or S
XARVVMNQYNKLIVNSSDDLYLVSIASL

SEQ ID NO: 16187 - protein, 30 aa, Artificial Sequence
  Cyclic GFR-binding peptide
  MOD_RES (2)..(2): Xaa is C or S
GXGEVVMDEYQKYVVKENEDIFLMSIPSLE

SEQ ID NO: 16188 - protein, 29 aa, Artificial Sequence
  Cyclic GFR-binding peptide
RVVMNEYQKYIVNSSDDIFLVSIPSLKTP

SEQ ID NO: 16189 - protein, 40 aa, Artificial Sequence
  Cyclic GFR-binding peptide
  MOD_RES (2)..(4)..(36)..(37): Xaa is C or S
HXGXARVVMNEYQKYIVNSSDDIFLVSIPSLQTPAXXPKP

SEQ ID NO: 16190 - protein, 25 aa, Artificial Sequence
  Cyclic GFR-binding peptide
RYKKLVVKDYEDFYLMSIANLETPV

SEQ ID NO: 16191 - protein, 35 aa, Artificial Sequence
  Cyclic GFR-binding peptide
  MOD_RES (32)..(33): Xaa is C or S
GEVVMENSLQEVVKDYEDYYVMPLPELETPVXXAK

SEQ ID NO: 16192 - protein, 32 aa, Artificial Sequence
  Cyclic GFR-binding peptide
  MOD_RES (28)..(29): Xaa is C or S
MEEYQKYVVKDYEDIFLMSIPSLETPVXXAKP

SEQ ID NO: 16193 - protein, 27 aa, Artificial Sequence
  Cyclic GFR-binding peptide
RVIMEYQKYVKPKRGVIFLISIPSLAQ

SEQ ID NO: 16194 - protein, 34 aa, Artificial Sequence; identical to SEQ ID NO: 5755
  Cyclic GFR-binding peptide
  MOD_RES (1)..(33)..(34): Xaa is C or S

SEQ ID NO: 16195 - protein, 33 aa, Artificial Sequence
  Cyclic GFR-binding peptide
  MOD_RES (2)..(2): Xaa is C or S
GXSRVVMNNSLQEIVNSSDDYYLVTLPELKTPA

SEQ ID NO: 16196 - protein, 25 aa, Artificial Sequence
  Cyclic GFR-binding peptide
MQYNKLVKPTRGVLYLISIASLDQP

SEQ ID NO: 16197 - protein, 42 aa, Artificial Sequence
  Cyclic GFR-binding peptide
  MOD_RES (2)..(4)..(36)..(37): Xaa is C or S
RXGXGEVVMEEYQKYVVKDYEDIFLMSIPSLETPVXXAKPIS

SEQ ID NO: 16198 - protein, 41 aa, Artificial Sequence
  Cyclic GFR-binding peptide
  MOD_RES (2)..(4)..(36)..(37): Xaa is C or S
RXGXSEVVMDQYNKLVVNNASDLYLISIASLRTPVXXTPPT

SEQ ID NO: 16199 - protein, 30 aa, Artificial Sequence; identical to SEQ ID NO: 5761
  Cyclic GFR-binding peptide
  MOD_RES (2)..(4): Xaa is C or S

SEQ ID NO: 16200 - protein, 37 aa, Artificial Sequence; identical to SEQ ID NO: 5762
  Cyclic GFR-binding peptide
  MOD_RES (2)..(33)..(34): Xaa is C or S

SEQ ID NO: 16201 - protein, 23 aa, Artificial Sequence
  Cyclic GFR-binding peptide
VMENSLQEVVKDYEDYYVMPLPE

SEQ ID NO: 16202 - protein, 27 aa, Artificial Sequence
  Cyclic GFR-binding peptide
EVVMDRYKKLVVKENEDFYLMSIANLE

SEQ ID NO: 16203 - protein, 40 aa, Artificial Sequence
  Cyclic GFR-binding peptide
  MOD_RES (2)..(34)..(35): Xaa is C or S
GXSEVVMDQYNKLVVNNASDLYLISIASLRTPVXXTPPTS

SEQ ID NO: 16204 - protein, 25 aa, Artificial Sequence
  Cyclic GFR-binding peptide
NQYNKLIVNSSDDLYLVSIASLKTP

SEQ ID NO: 16205 - protein, 30 aa, Artificial Sequence; identical to SEQ ID NO: 5771
  Cyclic GFR-binding peptide
  MOD_RES (30)..(30): Xaa is C or S

SEQ ID NO: 16206 - protein, 25 aa, Artificial Sequence
  Cyclic GFR-binding peptide
MNEYQKYIVNSSDDIFLVSIPSLQT

SEQ ID NO: 16207 - protein, 27 aa, Artificial Sequence
  Cyclic GFR-binding peptide
  MOD_RES (2)..(2): Xaa is C or S
KXSRVIMQYNKLVKPKRGVLYLISIAS

SEQ ID NO: 16208 - protein, 36 aa, Artificial Sequence
  Cyclic GFR-binding peptide
  MOD_RES (30)..(31): Xaa is C or S
VVMENSLQEVVKDYEDYYVMPLPELETPVXXAKPIS

SEQ ID NO: 16209 - protein, 25 aa, Artificial Sequence
  Cyclic GFR-binding peptide
VIMNSLQEIKPTKGIYYVIPLPELD

SEQ ID NO: 16210 - protein, 32 aa, Artificial Sequence; identical to SEQ ID NO: 5776
  Cyclic GFR-binding peptide
  MOD_RES (31)..(31): Xaa is C or S

SEQ ID NO: 16211 - protein, 25 aa, Artificial Sequence
  Cyclic GFR-binding peptide
EVVMDNSLQEVVKENEDYYVMPLPE

SEQ ID NO: 16212 - protein, 27 aa, Artificial Sequence
  Cyclic GFR-binding peptide
GEVVMDEYQKYVVKENEDIFLMSIPSL

SEQ ID NO: 16213 - protein, 32 aa, Artificial Sequence; identical to SEQ ID NO: 5778
  Cyclic GFR-binding peptide
  MOD_RES (1)..(32): Xaa is C or S

SEQ ID NO: 16214 - protein, 38 aa, Artificial Sequence; identical to SEQ ID NO: 5779
  Cyclic GFR-binding peptide
  MOD_RES (32)..(33): Xaa is C or S

SEQ ID NO: 16215 - protein, 33 aa, Artificial Sequence
  Cyclic GFR-binding peptide
  MOD_RES (28)..(29): Xaa is C or S
MDNSLQEVVNNASDYYLITLPELRTPVXXTPPT

SEQ ID NO: 16216 - protein, 31 aa, Artificial Sequence
  Cyclic GFR-binding peptide
  MOD_RES (28)..(29): Xaa is C or S
IMEYQKYVKPKRGVIFLISIPSLAQPVXXPA

SEQ ID NO: 16217 - protein, 24 aa, Artificial Sequence
  Cyclic GFR-binding peptide
KVIMRYKKLIKPTKGIFYLISIAN

SEQ ID NO: 16218 - protein, 21 aa, Artificial Sequence
  Cyclic GFR-binding peptide
MRYKKLVKPTRGVFYLISIAN

SEQ ID NO: 16219 - protein, 40 aa, Artificial Sequence; identical to SEQ ID NO: 5783
  Cyclic GFR-binding peptide
  MOD_RES (1)..(3)..(35): Xaa is C or S

SEQ ID NO: 16220 - protein, 31 aa, Artificial Sequence; identical to SEQ ID NO: 5784
  Cyclic GFR-binding peptide
  MOD_RES (30)..(31): Xaa is C or S

SEQ ID NO: 16221 - protein, 32 aa, Artificial Sequence
  Cyclic GFR-binding peptide
  MOD_RES (1)..(1): Xaa is C or S
XSRVVMNEYQKYIVNSSDDIFLVSIPSLKTPA

SEQ ID NO: 16222 - protein, 27 aa, Artificial Sequence
  Cyclic GFR-binding peptide
  MOD_RES (2)..(2): Xaa is C or S
KXSRVIMEYQKYVKPKRGVIFLISIPS

SEQ ID NO: 16223 - protein, 37 aa, Artificial Sequence
  Cyclic GFR-binding peptide
  MOD_RES (1)..(3)..(35): Xaa is C or S
XGXSRVVMNNSLQEIVNSSDDYYVVPLPELKTPAXTP

SEQ ID NO: 16224 - protein, 26 aa, Artificial Sequence
  Cyclic GFR-binding peptide
MNNSLQEIVNSSDDYYVVPLPELQTP

SEQ ID NO: 16225 - protein, 28 aa, Artificial Sequence
  Cyclic GFR-binding peptide
RVVMNNSLQEIVNSSDDYYLVTLPELQT

SEQ ID NO: 16226 - protein, 26 aa, Artificial Sequence
  Cyclic GFR-binding peptide
VMNNSLQEIVNSSDDYYVVPLPELQT

SEQ ID NO: 16227 - protein, 21 aa, Artificial Sequence
  Cyclic GFR-binding peptide
MNSLQEVKPKRGVYYLITLPE

SEQ ID NO: 16228 - protein, 25 aa, Artificial Sequence
  Cyclic GFR-binding peptide
KVIMQYNKLIKPTKGILYLISIASL

SEQ ID NO: 16229 - protein, 34 aa, Artificial Sequence
  Cyclic GFR-binding peptide
  MOD_RES (1)..(33)..(34): Xaa is C or S
XARVVMNNSLQEIVNSSDDYYLVTLPELQTPAXX

SEQ ID NO: 16230 - protein, 33 aa, Artificial Sequence
  Cyclic GFR-binding peptide
  MOD_RES (30)..(31): Xaa is C or S
KVIMEYQKYIKPTKGIIFLISIPSLDQSVXXPS

SEQ ID NO: 16231 - protein, 27 aa, Artificial Sequence
  Cyclic GFR-binding peptide
VMENSLQEVVKDYEDYYVMPLPELETP

SEQ ID NO: 16232 - protein, 29 aa, Artificial Sequence
  Cyclic GFR-binding peptide
  MOD_RES (29)..(29): Xaa is C or S
VMDRYKKLVVNNASDFYLISIANLRTPVX

SEQ ID NO: 16233 - protein, 29 aa, Artificial Sequence
  Cyclic GFR-binding peptide
  MOD_RES (1)..(1): Xaa is C or S
XSRVVMNQYNKLIVNSSDDLYLVSIASLK

SEQ ID NO: 16234 - protein, 33 aa, Artificial Sequence
  Cyclic GFR-binding peptide
  MOD_RES (29)..(30): Xaa is C or S
VMEEYQKYVVKDYEDIFLMSIPSLETPVXXAKP

SEQ ID NO: 16235 - protein, 41 aa, Artificial Sequence
  Cyclic GFR-binding peptide
  MOD_RES (1)..(3)..(35): Xaa is C or S
XGXSRVVMNEYQKYIVNSSDDIFLVSIPSLKTPAXTPKTVH

SEQ ID NO: 16236 - protein, 42 aa, Artificial Sequence; identical to SEQ ID NO: 5801
  Cyclic GFR-binding peptide
  MOD_RES (2)..(4)..(36)..(37): Xaa is C or S

SEQ ID NO: 16237 - protein, 28 aa, Artificial Sequence
  Cyclic GFR-binding peptide
  MOD_RES (26)..(27): Xaa is C or S
EYQKYVVKDYEDIFLMSIPSLETPVXXA

SEQ ID NO: 16238 - protein, 25 aa, Artificial Sequence
  Cyclic GFR-binding peptide
EYQKYVKPTRGVIFLISIPSLDQPV

SEQ ID NO: 16239 - protein, 32 aa, Artificial Sequence; identical to SEQ ID NO: 5803
  Cyclic GFR-binding peptide
  MOD_RES (1)..(32): Xaa is C or S

SEQ ID NO: 16240 - protein, 31 aa, Artificial Sequence
  Cyclic GFR-binding peptide
ARVVMNNSLQEIVNSSDDYYLVTLPELQTPA

SEQ ID NO: 16241 - protein, 33 aa, Artificial Sequence; identical to SEQ ID NO: 5808
  Cyclic GFR-binding peptide
  MOD_RES (2)..(4): Xaa is C or S

SEQ ID NO: 16242 - protein, 38 aa, Artificial Sequence
  Cyclic GFR-binding peptide
  MOD_RES (32)..(33): Xaa is C or S
SRVVMNNSLQEIVNSSDDYYLVTLPELKTPAXXPKPVY

SEQ ID NO: 16243 - protein, 31 aa, Artificial Sequence
  Cyclic GFR-binding peptide
  MOD_RES (2)..(4): Xaa is C or S
HXGXARVVMNNSLQEIVNSSDDYYVVPLPEL

SEQ ID NO: 16244 - protein, 34 aa, Artificial Sequence; identical to SEQ ID NO: 5812
  Cyclic GFR-binding peptide
  MOD_RES (29)..(30): Xaa is C or S

SEQ ID NO: 16245 - protein, 25 aa, Artificial Sequence
  Cyclic GFR-binding peptide
VMEYQKYVKPTRGVIFLISIPSLDQ

SEQ ID NO: 16246 - protein, 41 aa, Artificial Sequence
  Cyclic GFR-binding peptide
  MOD_RES (1)..(3)..(35)..(36): Xaa is C or S
XGXSEVVMDRYKKLVVNNASDFYLISIANLRTPVXXTPPTS

SEQ ID NO: 16247 - protein, 22 aa, Artificial Sequence
  Cyclic GFR-binding peptide
ENSLQEVVKDYEDYYVMPLPEL

SEQ ID NO: 16248 - protein, 27 aa, Artificial Sequence
  Cyclic GFR-binding peptide
  MOD_RES (26)..(27): Xaa is C or S
QYNKLVVKENEDLYLMSIASLETPVXX

SEQ ID NO: 16249 - protein, 31 aa, Artificial Sequence
  Cyclic GFR-binding peptide
  MOD_RES (29)..(30): Xaa is C or S
VMDNSLQEVVKENEDYYLMTLPELETPVXXA

SEQ ID NO: 16250 - protein, 26 aa, Artificial Sequence
  Cyclic GFR-binding peptide
  MOD_RES (26)..(26): Xaa is C or S
QYNKLVVKENEDLYLMSIASLETPVX

SEQ ID NO: 16251 - protein, 28 aa, Artificial Sequence
  Cyclic GFR-binding peptide
VMNRYKKLIVNSSDDFYLVSIANLKTPA

SEQ ID NO: 16252 - protein, 34 aa, Artificial Sequence; identical to SEQ ID NO: 5820
  Cyclic GFR-binding peptide
  MOD_RES (28)..(29): Xaa is C or S

SEQ ID NO: 16253 - protein, 33 aa, Artificial Sequence
  Cyclic GFR-binding peptide
  MOD_RES (28)..(28): Xaa is C or S
MNNSLQEIVNSSDDYYLVTLPELKTPAXTPKTV

SEQ ID NO: 16254 - protein, 31 aa, Artificial Sequence; identical to SEQ ID NO: 5821
  Cyclic GFR-binding peptide
  MOD_RES (1)..(1): Xaa is C or S

SEQ ID NO: 16255 - protein, 37 aa, Artificial Sequence
  Cyclic GFR-binding peptide
  MOD_RES (2)..(4)..(36)..(37): Xaa is C or S
HXGXARVVMNEYQKYIVNSSDDIFLVSIPSLQTPAXX

SEQ ID NO: 16256 - protein, 34 aa, Artificial Sequence; identical to SEQ ID NO: 5827
  Cyclic GFR-binding peptide
  MOD_RES (2)..(4): Xaa is C or S

SEQ ID NO: 16257 - protein, 35 aa, Artificial Sequence
  Cyclic GFR-binding peptide
  MOD_RES (30)..(31): Xaa is C or S
VVMDNSLQEVVKENEDYYLMTLPELETPVXXAKPI

SEQ ID NO: 16258 - protein, 30 aa, Artificial Sequence; identical to SEQ ID NO: 5829
  Cyclic GFR-binding peptide

SEQ ID NO: 16259 - protein, 34 aa, Artificial Sequence
  Cyclic GFR-binding peptide
  MOD_RES (28)..(29): Xaa is C or S
MDNSLQEVVKENEDYYVMPLPELETPVXXAKPIK

SEQ ID NO: 16260 - protein, 25 aa, Artificial Sequence
  Cyclic GFR-binding peptide
VVMNQYNKLIVNSSDDLYLVSIASL

SEQ ID NO: 16261 - protein, 26 aa, Artificial Sequence
  Cyclic GFR-binding peptide
  MOD_RES (26)..(26): Xaa is C or S
NSLQEVKPTRGVYYVIPLPELDQPVX

SEQ ID NO: 16262 - protein, 23 aa, Artificial Sequence
  Cyclic GFR-binding peptide
RYKKLIVNSSDDFYLVSIANLKT

SEQ ID NO: 16263 - protein, 26 aa, Artificial Sequence
  Cyclic GFR-binding peptide
DNSLQEVVNNASDYYVIPLPELRTPV

SEQ ID NO: 16264 - protein, 36 aa, Artificial Sequence
  Cyclic GFR-binding peptide
  MOD_RES (2)..(34)..(35): Xaa is C or S
GXGEVVMEEYQKYVVKDYEDIFLMSIPSLETPVXXA

SEQ ID NO: 16265 - protein, 38 aa, Artificial Sequence; identical to SEQ ID NO: 5833
  Cyclic GFR-binding peptide
  MOD_RES (2)..(33)..(34): Xaa is C or S

SEQ ID NO: 16266 - protein, 35 aa, Artificial Sequence
  Cyclic GFR-binding peptide
  MOD_RES (2)..(4): Xaa is C or S
RXGXSEVVMDQYNKLVVNNASDLYLISIASLRTPV

SEQ ID NO: 16267 - protein, 33 aa, Artificial Sequence; identical to SEQ ID NO: 5835
  Cyclic GFR-binding peptide
  MOD_RES (2)..(4): Xaa is C or S

SEQ ID NO: 16268 - protein, 38 aa, Artificial Sequence; identical to SEQ ID NO: 5836
  Cyclic GFR-binding peptide
  MOD_RES (1)..(3)..(34)..(35): Xaa is C or S

SEQ ID NO: 16269 - protein, 31 aa, Artificial Sequence
  Cyclic GFR-binding peptide
  MOD_RES (26)..(27): Xaa is C or S
NSLQEIVNSSDDYYLVTLPELQTPAXXPKPV

SEQ ID NO: 16270 - protein, 35 aa, Artificial Sequence; identical to SEQ ID NO: 5838
  Cyclic GFR-binding peptide
  MOD_RES (1)..(32)..(33): Xaa is C or S

SEQ ID NO: 16271 - protein, 31 aa, Artificial Sequence
  Cyclic GFR-binding peptide
  MOD_RES (31)..(31): Xaa is C or S
EVVMENSLQEVVKDYEDYYLMTLPELETPVX

SEQ ID NO: 16272 - protein, 29 aa, Artificial Sequence
  Cyclic GFR-binding peptide
VVMNRYKKLIVNSSDDFYLVSIANLKTPA

SEQ ID NO: 16273 - protein, 28 aa, Artificial Sequence
  Cyclic GFR-binding peptide
VMDNSLQEVVNNASDYYVIPLPELRTPV

SEQ ID NO: 16274 - protein, 30 aa, Artificial Sequence
  Cyclic GFR-binding peptide
  MOD_RES (1)..(1): Xaa is C or S
XSKVVMEYQKYVKPTRGVIFLISIPSLDQP

SEQ ID NO: 16275 - protein, 33 aa, Artificial Sequence
  Cyclic GFR-binding peptide
  MOD_RES (2)..(2): Xaa is C or S
GXARVVMNEYQKYIVNSSDDIFLVSIPSLQTPA

SEQ ID NO: 16276 - protein, 38 aa, Artificial Sequence
  Cyclic GFR-binding peptide
  MOD_RES (2)..(4)..(35)..(36): Xaa is C or S
SXKXSKVVMNSLQEVKPTRGVYYVIPLPELDQPVXXPS

SEQ ID NO: 16277 - protein, 34 aa, Artificial Sequence; identical to SEQ ID NO: 5845
  Cyclic GFR-binding peptide
  MOD_RES (32)..(33): Xaa is C or S

SEQ ID NO: 16278 - protein, 38 aa, Artificial Sequence
  Cyclic GFR-binding peptide
  MOD_RES (2)..(33)..(34): Xaa is C or S
KXSKVVMEYQKYVKPTRGVIFLISIPSLDQPVXXPSAS

SEQ ID NO: 16279 - protein, 36 aa, Artificial Sequence
  Cyclic GFR-binding peptide
  MOD_RES (2)..(4)..(36): Xaa is C or S
RXGXSEVVMDNSLQEVVNNASDYYVIPLPELRTPVX

SEQ ID NO: 16280 - protein, 41 aa, Artificial Sequence
  Cyclic GFR-binding peptide
  MOD_RES (2)..(4)..(36)..(37): Xaa is C or S
HXGXSRVVMNNSLQEIVNSSDDYYLVTLPELKTPAXXPKPV

SEQ ID NO: 16281 - protein, 33 aa, Artificial Sequence; identical to SEQ ID NO: 5852
  Cyclic GFR-binding peptide
  MOD_RES (2)..(2): Xaa is C or S

SEQ ID NO: 16282 - protein, 36 aa, Artificial Sequence; identical to SEQ ID NO: 5855
  Cyclic GFR-binding peptide
  MOD_RES (31)..(31): Xaa is C or S

SEQ ID NO: 16283 - protein, 24 aa, Artificial Sequence
  Cyclic GFR-binding peptide
NSLQEVVKENEDYYLMTLPELETP

SEQ ID NO: 16284 - protein, 25 aa, Artificial Sequence
  Cyclic GFR-binding peptide
DRYKKLVVNNASDFYLISIANLRTP

SEQ ID NO: 16285 - protein, 34 aa, Artificial Sequence
  Cyclic GFR-binding peptide
  MOD_RES (31)..(32): Xaa is C or S
SKVIMNSLQEIKPTKGIYYVIPLPELDQSVXXPS

SEQ ID NO: 16286 - protein, 33 aa, Artificial Sequence
  Cyclic GFR-binding peptide
  MOD_RES (1)..(33): Xaa is C or S
XSEVVMDNSLQEVVNNASDYYLITLPELRTPVX

SEQ ID NO: 16287 - protein, 27 aa, Artificial Sequence
  Cyclic GFR-binding peptide
GEVVMDNSLQEVVKENEDYYVMPLPEL

SEQ ID NO: 16288 - protein, 34 aa, Artificial Sequence; identical to SEQ ID NO: 5860
  Cyclic GFR-binding peptide
  MOD_RES (31)..(32): Xaa is C or S

SEQ ID NO: 16289 - protein, 32 aa, Artificial Sequence
  Cyclic GFR-binding peptide
  MOD_RES (26)..(27): Xaa is C or S
EYQKYVKPTRGVIFLISIPSLDQPVXXPSASA

SEQ ID NO: 16290 - protein, 27 aa, Artificial Sequence
  Cyclic GFR-binding peptide
VVMQYNKLVKPTRGVLYLISIASLDQP

SEQ ID NO: 16291 - protein, 36 aa, Artificial Sequence; identical to SEQ ID NO: 5864
  Cyclic GFR-binding peptide
  MOD_RES (2)..(33)..(34): Xaa is C or S

SEQ ID NO: 16292 - protein, 39 aa, Artificial Sequence
  Cyclic GFR-binding peptide
  MOD_RES (1)..(33)..(34): Xaa is C or S
XSEVVMDRYKKLVVNNASDFYLISIANLRTPVXXTPPTS

SEQ ID NO: 16293 - protein, 29 aa, Artificial Sequence
  Cyclic GFR-binding peptide
SRVIMQYNKLVKPKRGVLYLISIASLAQP

SEQ ID NO: 16294 - protein, 30 aa, Artificial Sequence; identical to SEQ ID NO: 5868
  Cyclic GFR-binding peptide
  MOD_RES (1)..(1): Xaa is C or S

SEQ ID NO: 16295 - protein, 29 aa, Artificial Sequence
  Cyclic GFR-binding peptide
EVVMDRYKKLVVNNASDFYLISIANLRTP

SEQ ID NO: 16296 - protein, 27 aa, Artificial Sequence
  Cyclic GFR-binding peptide
EVVMDQYNKLVVNNASDLYLISIASLR

SEQ ID NO: 16297 - protein, 21 aa, Artificial Sequence
  Cyclic GFR-binding peptide
NSLQEIVNSSDDYYVVPLPEL

SEQ ID NO: 16298 - protein, 40 aa, Artificial Sequence
  Cyclic GFR-binding peptide
  MOD_RES (1)..(3)..(35): Xaa is C or S
XGXSRVVMNNSLQEIVNSSDDYYVVPLPELKTPAXTPKTV

SEQ ID NO: 16299 - protein, 26 aa, Artificial Sequence
  Cyclic GFR-binding peptide
VVMEYQKYVKPTRGVIFLISIPSLDQ

SEQ ID NO: 16300 - protein, 35 aa, Artificial Sequence; identical to SEQ ID NO: 5872
  Cyclic GFR-binding peptide
  MOD_RES (2)..(33)..(34): Xaa is C or S

SEQ ID NO: 16301 - protein, 34 aa, Artificial Sequence
  Cyclic GFR-binding peptide
  MOD_RES (2)..(34): Xaa is C or S
GXGEVVMENSLQEVVKDYEDYYLMTLPELETPVX

SEQ ID NO: 16302 - protein, 29 aa, Artificial Sequence
  Cyclic GFR-binding peptide
  MOD_RES (2)..(2): Xaa is C or S
GXGEVVMENSLQEVVKDYEDYYVMPLPEL

SEQ ID NO: 16303 - protein, 29 aa, Artificial Sequence
  Cyclic GFR-binding peptide
SKVIMNSLQEIKPTKGIYYVIPLPELDQS

SEQ ID NO: 16304 - protein, 26 aa, Artificial Sequence
  Cyclic GFR-binding peptide
RVVMNNSLQEIVNSSDDYYLVTLPEL

SEQ ID NO: 16305 - protein, 35 aa, Artificial Sequence; identical to SEQ ID NO: 5877
  Cyclic GFR-binding peptide
  MOD_RES (29)..(30): Xaa is C or S

SEQ ID NO: 16306 - protein, 40 aa, Artificial Sequence
  Cyclic GFR-binding peptide
  MOD_RES (2)..(4)..(36): Xaa is C or S
HXGXSRVVMNEYQKYIVNSSDDIFLVSIPSLKTPAXTPKT

SEQ ID NO: 16307 - protein, 30 aa, Artificial Sequence
  Cyclic GFR-binding peptide
RVVMNEYQKYIVNSSDDIFLVSIPSLKTPA

SEQ ID NO: 16308 - protein, 31 aa, Artificial Sequence
  Cyclic GFR-binding peptide
  MOD_RES (30)..(30): Xaa is C or S
VVMNNSLQEIVNSSDDYYVVPLPELKTPAXT

SEQ ID NO: 16309 - protein, 23 aa, Artificial Sequence
  Cyclic GFR-binding peptide
IMNSLQEIKPTKGIYYVIPLPEL

SEQ ID NO: 16310 - protein, 27 aa, Artificial Sequence
  Cyclic GFR-binding peptide
IMRYKKLVKPKRGVFYLISIANLAQPV

SEQ ID NO: 16311 - protein, 26 aa, Artificial Sequence
  Cyclic GFR-binding peptide
VMDNSLQEVVKENEDYYVMPLPELET

SEQ ID NO: 16312 - protein, 24 aa, Artificial Sequence
  Cyclic GFR-binding peptide
VVMDQYNKLVVNNASDLYLISIAS

SEQ ID NO: 16313 - protein, 28 aa, Artificial Sequence
  Cyclic GFR-binding peptide
  MOD_RES (1)..(3): Xaa is C or S
XKXSKVIMRYKKLIKPTKGIFYLISIAN

SEQ ID NO: 16314 - protein, 35 aa, Artificial Sequence
  Cyclic GFR-binding peptide
  MOD_RES (2)..(4): Xaa is C or S
RXGXSEVVMDNSLQEVVNNASDYYLITLPELRTPV

SEQ ID NO: 16315 - protein, 28 aa, Artificial Sequence
  Cyclic GFR-binding peptide
  MOD_RES (26)..(27): Xaa is C or S
QYNKLVVKENEDLYLMSIASLETPVXXA

SEQ ID NO: 16316 - protein, 36 aa, Artificial Sequence; identical to SEQ ID NO: 5887
  Cyclic GFR-binding peptide
  MOD_RES (32)..(32): Xaa is C or S

SEQ ID NO: 16317 - protein, 25 aa, Artificial Sequence
  Cyclic GFR-binding peptide
VVMNNSLQEIVNSSDDYYLVTLPEL

SEQ ID NO: 16318 - protein, 34 aa, Artificial Sequence
  Cyclic GFR-binding peptide
  MOD_RES (1)..(3): Xaa is C or S
XGXSEVVMDNSLQEVVNNASDYYLITLPELRTPV

SEQ ID NO: 16319 - protein, 30 aa, Artificial Sequence
  Cyclic GFR-binding peptide
  MOD_RES (1)..(1): Xaa is C or S
XGEVVMEEYQKYVVKDYEDIFLMSIPSLET

SEQ ID NO: 16320 - protein, 27 aa, Artificial Sequence
  Cyclic GFR-binding peptide
VVMDNSLQEVVNNASDYYLITLPELRT

SEQ ID NO: 16321 - protein, 34 aa, Artificial Sequence; identical to SEQ ID NO: 5889
  Cyclic GFR-binding peptide
  MOD_RES (32)..(33): Xaa is C or S

SEQ ID NO: 16322 - protein, 31 aa, Artificial Sequence; identical to SEQ ID NO: 5890
  Cyclic GFR-binding peptide

SEQ ID NO: 16323 - protein, 32 aa, Artificial Sequence; identical to SEQ ID NO: 5891
  Cyclic GFR-binding peptide
  MOD_RES (2)..(4): Xaa is C or S

SEQ ID NO: 16324 - protein, 31 aa, Artificial Sequence; identical to SEQ ID NO: 5892
  Cyclic GFR-binding peptide
  MOD_RES (26)..(26): Xaa is C or S

SEQ ID NO: 16325 - protein, 30 aa, Artificial Sequence
  Cyclic GFR-binding peptide
SKVIMEYQKYIKPTKGIIFLISIPSLDQSV

SEQ ID NO: 16326 - protein, 34 aa, Artificial Sequence; identical to SEQ ID NO: 5895
  Cyclic GFR-binding peptide
  MOD_RES (28)..(29): Xaa is C or S

SEQ ID NO: 16327 - protein, 27 aa, Artificial Sequence
  Cyclic GFR-binding peptide
  MOD_RES (26)..(27): Xaa is C or S
EYQKYVVKDYEDIFLMSIPSLETPVXX

SEQ ID NO: 16328 - protein, 25 aa, Artificial Sequence
  Cyclic GFR-binding peptide
VMNQYNKLIVNSSDDLYLVSIASLQ

SEQ ID NO: 16329 - protein, 32 aa, Artificial Sequence
  Cyclic GFR-binding peptide
  MOD_RES (26)..(27): Xaa is C or S
NSLQEVVNNASDYYLITLPELRTPVXXTPPTS

SEQ ID NO: 16330 - protein, 33 aa, Artificial Sequence
  Cyclic GFR-binding peptide
  MOD_RES (2)..(4): Xaa is C or S
SXKXSKVIMNSLQEIKPTKGIYYVIPLPELDQS

SEQ ID NO: 16331 - protein, 38 aa, Artificial Sequence
  Cyclic GFR-binding peptide
  MOD_RES (2)..(34): Xaa is C or S
GXSRVVMNEYQKYIVNSSDDIFLVSIPSLKTPAXTPKT

SEQ ID NO: 16332 - protein, 24 aa, Artificial Sequence
  Cyclic GFR-binding peptide
VVMDNSLQEVVNNASDYYLITLPE

SEQ ID NO: 16333 - protein, 37 aa, Artificial Sequence; identical to SEQ ID NO: 5898
  Cyclic GFR-binding peptide
  MOD_RES (1)..(33)..(34): Xaa is C or S

SEQ ID NO: 16334 - protein, 39 aa, Artificial Sequence; identical to SEQ ID NO: 5899
  Cyclic GFR-binding peptide
  MOD_RES (1)..(33): Xaa is C or S

SEQ ID NO: 16335 - protein, 28 aa, Artificial Sequence
  Cyclic GFR-binding peptide
  MOD_RES (2)..(2): Xaa is C or S
KXSKVIMNSLQEIKPTKGIYYLITLPEL

SEQ ID NO: 16336 - protein, 23 aa, Artificial Sequence
  Cyclic GFR-binding peptide
MDQYNKLVVNNASDLYLISIASL

SEQ ID NO: 16337 - protein, 34 aa, Artificial Sequence
  Cyclic GFR-binding peptide
  MOD_RES (31)..(32): Xaa is C or S
SKVVMEYQKYVKPTRGVIFLISIPSLDQPVXXPS

SEQ ID NO: 16338 - protein, 29 aa, Artificial Sequence
  Cyclic GFR-binding peptide
  MOD_RES (27)..(28): Xaa is C or S
DQYNKLVVKENEDLYLMSIASLETPVXXA

SEQ ID NO: 16339 - protein, 26 aa, Artificial Sequence
  Cyclic GFR-binding peptide
VVMENSLQEVVKDYEDYYVMPLPELE

SEQ ID NO: 16340 - protein, 30 aa, Artificial Sequence
  Cyclic GFR-binding peptide
  MOD_RES (26)..(27): Xaa is C or S
EYQKYVKPKRGVIFLISIPSLAQPVXXPAA

SEQ ID NO: 16341 - protein, 34 aa, Artificial Sequence; identical to SEQ ID NO: 5909
  Cyclic GFR-binding peptide
  MOD_RES (28)..(29): Xaa is C or S

SEQ ID NO: 16342 - protein, 33 aa, Artificial Sequence
  Cyclic GFR-binding peptide
  MOD_RES (2)..(4): Xaa is C or S
SXKXSKVVMNSLQEVKPTRGVYYLITLPELDQP

SEQ ID NO: 16343 - protein, 41 aa, Artificial Sequence; identical to SEQ ID NO: 5910
  Cyclic GFR-binding peptide
  MOD_RES (2)..(4)..(35)..(36): Xaa is C or S

SEQ ID NO: 16344 - protein, 27 aa, Artificial Sequence
  Cyclic GFR-binding peptide
RVVMNEYQKYIVNSSDDIFLVSIPSLK

SEQ ID NO: 16345 - protein, 35 aa, Artificial Sequence; identical to SEQ ID NO: 5912
  Cyclic GFR-binding peptide
  MOD_RES (31)..(32): Xaa is C or S

SEQ ID NO: 16346 - protein, 41 aa, Artificial Sequence
  Cyclic GFR-binding peptide
  MOD_RES (1)..(3)..(35): Xaa is C or S
XGXSRVVMNNSLQEIVNSSDDYYLVTLPELKTPAXTPKTVH

SEQ ID NO: 16347 - protein, 32 aa, Artificial Sequence
  Cyclic GFR-binding peptide
  MOD_RES (2)..(4): Xaa is C or S
RXGXSEVVMDNSLQEVVNNASDYYLITLPELR

SEQ ID NO: 16348 - protein, 31 aa, Artificial Sequence
  Cyclic GFR-binding peptide
  MOD_RES (29)..(30): Xaa is C or S
VMNNSLQEIVNSSDDYYLVTLPELKTPAXXP

SEQ ID NO: 16349 - protein, 35 aa, Artificial Sequence; identical to SEQ ID NO: 5913
  Cyclic GFR-binding peptide
  MOD_RES (2)..(34)..(35): Xaa is C or S

SEQ ID NO: 16350 - protein, 30 aa, Artificial Sequence; identical to SEQ ID NO: 5915
  Cyclic GFR-binding peptide
  MOD_RES (28)..(29): Xaa is C or S

SEQ ID NO: 16351 - protein, 30 aa, Artificial Sequence
  Cyclic GFR-binding peptide
  MOD_RES (1)..(1): Xaa is C or S
XSRVVMNNSLQEIVNSSDDYYLVTLPELKT

SEQ ID NO: 16352 - protein, 23 aa, Artificial Sequence
  Cyclic GFR-binding peptide
MRYKKLVKPTRGVFYLISIANLD

SEQ ID NO: 16353 - protein, 30 aa, Artificial Sequence
  Cyclic GFR-binding peptide
SKVVMNSLQEVKPTRGVYYVIPLPELDQPV

SEQ ID NO: 16354 - protein, 26 aa, Artificial Sequence
  Cyclic GFR-binding peptide
GEVVMDRYKKLVVKENEDFYLMSIAN

SEQ ID NO: 16355 - protein, 29 aa, Artificial Sequence
  Cyclic GFR-binding peptide
  MOD_RES (29)..(29): Xaa is C or S
VMERYKKLVVKDYEDFYLMSIANLETPVX

SEQ ID NO: 16356 - protein, 29 aa, Artificial Sequence
  Cyclic GFR-binding peptide
  MOD_RES (1)..(1): Xaa is C or S
XSRVIMRYKKLVKPKRGVFYLISIANLAQ

SEQ ID NO: 16357 - protein, 25 aa, Artificial Sequence
  Cyclic GFR-binding peptide
MENSLQEVVKDYEDYYVMPLPELET

SEQ ID NO: 16358 - protein, 23 aa, Artificial Sequence
  Cyclic GFR-binding peptide
IMRYKKLVKPKRGVFYLISIANL

SEQ ID NO: 16359 - protein, 33 aa, Artificial Sequence
  Cyclic GFR-binding peptide
  MOD_RES (2)..(4): Xaa is C or S
SXKXSKVVMEYQKYVKPTRGVIFLISIPSLDQP

SEQ ID NO: 16360 - protein, 32 aa, Artificial Sequence
  Cyclic GFR-binding peptide
  MOD_RES (32)..(32): Xaa is C or S
SRVVMNEYQKYIVNSSDDIFLVSIPSLKTPAX

SEQ ID NO: 16361 - protein, 40 aa, Artificial Sequence
  Cyclic GFR-binding peptide
  MOD_RES (1)..(3)..(35)..(36): Xaa is C or S
XGXSRVVMNNSLQEIVNSSDDYYLVTLPELKTPAXXPKPV

SEQ ID NO: 16362 - protein, 36 aa, Artificial Sequence
  Cyclic GFR-binding peptide
  MOD_RES (30)..(31): Xaa is C or S
KVIMEYQKYIKPTKGIIFLISIPSLDQSVXXPSASA

SEQ ID NO: 16363 - protein, 30 aa, Artificial Sequence
  Cyclic GFR-binding peptide
  MOD_RES (27)..(28): Xaa is C or S
DNSLQEVVKENEDYYVMPLPELETPVXXAK

SEQ ID NO: 16364 - protein, 35 aa, Artificial Sequence
  Cyclic GFR-binding peptide
  MOD_RES (2)..(4): Xaa is C or S
HXGXSRVVMNNSLQEIVNSSDDYYLVTLPELKTPA

SEQ ID NO: 16365 - protein, 33 aa, Artificial Sequence
  Cyclic GFR-binding peptide
  MOD_RES (30)..(31): Xaa is C or S
VVMDNSLQEVVKENEDYYLMTLPELETPVXXAK

SEQ ID NO: 16366 - protein, 25 aa, Artificial Sequence
  Cyclic GFR-binding peptide
SKVVMNSLQEVKPTRGVYYVIPLPE

SEQ ID NO: 16367 - protein, 33 aa, Artificial Sequence
  Cyclic GFR-binding peptide
  MOD_RES (1)..(33): Xaa is C or S
XGEVVMDNSLQEVVKENEDYYLMTLPELETPVX

SEQ ID NO: 16368 - protein, 27 aa, Artificial Sequence
  Cyclic GFR-binding peptide
VVMEQYNKLVVKDYEDLYLMSIASLET

SEQ ID NO: 16369 - protein, 32 aa, Artificial Sequence; identical to SEQ ID NO: 5940
  Cyclic GFR-binding peptide
  MOD_RES (2)..(2): Xaa is C or S

SEQ ID NO: 16370 - protein, 34 aa, Artificial Sequence
  Cyclic GFR-binding peptide
  MOD_RES (32)..(33): Xaa is C or S
ARVVMNNSLQEIVNSSDDYYLVTLPELQTPAXXP

SEQ ID NO: 16371 - protein, 30 aa, Artificial Sequence
  Cyclic GFR-binding peptide
  MOD_RES (2)..(4): Xaa is C or S
RXGXGEVVMDEYQKYVVKENEDIFLMSIPS

SEQ ID NO: 16372 - protein, 39 aa, Artificial Sequence; identical to SEQ ID NO: 5941
  Cyclic GFR-binding peptide
  MOD_RES (2)..(4)..(36)..(37): Xaa is C or S

SEQ ID NO: 16373 - protein, 33 aa, Artificial Sequence; identical to SEQ ID NO: 5943
  Cyclic GFR-binding peptide
  MOD_RES (27)..(28): Xaa is C or S

SEQ ID NO: 16374 - protein, 35 aa, Artificial Sequence
  Cyclic GFR-binding peptide
  MOD_RES (32)..(33): Xaa is C or S
ARVVMNNSLQEIVNSSDDYYVVPLPELQTPAXXPK

SEQ ID NO: 16375 - protein, 25 aa, Artificial Sequence
  Cyclic GFR-binding peptide
MEQYNKLVVKDYEDLYLMSIASLET

SEQ ID NO: 16376 - protein, 34 aa, Artificial Sequence
  Cyclic GFR-binding peptide
  MOD_RES (2)..(4): Xaa is C or S
HXGXSRVVMNNSLQEIVNSSDDYYVVPLPELKTP

SEQ ID NO: 16377 - protein, 29 aa, Artificial Sequence
  Cyclic GFR-binding peptide
  MOD_RES (26)..(27): Xaa is C or S
RYKKLVVKDYEDFYLMSIANLETPVXXAK

SEQ ID NO: 16378 - protein, 38 aa, Artificial Sequence; identical to SEQ ID NO: 5952
  Cyclic GFR-binding peptide
  MOD_RES (32)..(33): Xaa is C or S

SEQ ID NO: 16379 - protein, 37 aa, Artificial Sequence
  Cyclic GFR-binding peptide
  MOD_RES (2)..(4)..(35)..(36): Xaa is C or S
SXKXSRVIMEYQKYVKPKRGVIFLISIPSLAQPVXXP

SEQ ID NO: 16380 - protein, 26 aa, Artificial Sequence
  Cyclic GFR-binding peptide
VMDQYNKLVVNNASDLYLISIASLRT

SEQ ID NO: 16381 - protein, 32 aa, Artificial Sequence; identical to SEQ ID NO: 5953
  Cyclic GFR-binding peptide
  MOD_RES (2)..(4): Xaa is C or S

SEQ ID NO: 16382 - protein, 26 aa, Artificial Sequence
  Cyclic GFR-binding peptide
  MOD_RES (26)..(26): Xaa is C or S
NSLQEVVKENEDYYLMTLPELETPVX

SEQ ID NO: 16383 - protein, 31 aa, Artificial Sequence; identical to SEQ ID NO: 5954
  Cyclic GFR-binding peptide
  MOD_RES (1)..(1): Xaa is C or S

SEQ ID NO: 16384 - protein, 26 aa, Artificial Sequence
  Cyclic GFR-binding peptide
  MOD_RES (26)..(26): Xaa is C or S
NSLQEVVNNASDYYVIPLPELRTPVX

SEQ ID NO: 16385 - protein, 33 aa, Artificial Sequence
  Cyclic GFR-binding peptide
  MOD_RES (2)..(4): Xaa is C or S
SXKXSRVIMNSLQEVKPKRGVYYVIPLPELAQP

SEQ ID NO: 16386 - protein, 33 aa, Artificial Sequence
  Cyclic GFR-binding peptide
  MOD_RES (32)..(33): Xaa is C or S
GEVVMDNSLQEVVKENEDYYVMPLPELETPVXX

SEQ ID NO: 16387 - protein, 28 aa, Artificial Sequence
  Cyclic GFR-binding peptide
  MOD_RES (2)..(2): Xaa is C or S
GXGEVVMENSLQEVVKDYEDYYLMTLPE

SEQ ID NO: 16388 - protein, 40 aa, Artificial Sequence; identical to SEQ ID NO: 5956
  Cyclic GFR-binding peptide
  MOD_RES (2)..(4)..(35)..(36): Xaa is C or S

SEQ ID NO: 16389 - protein, 26 aa, Artificial Sequence
  Cyclic GFR-binding peptide
VMNSLQEVKPTRGVYYVIPLPELDQP

SEQ ID NO: 16390 - protein, 37 aa, Artificial Sequence; identical to SEQ ID NO: 5957
  Cyclic GFR-binding peptide
  MOD_RES (2)..(34): Xaa is C or S

SEQ ID NO: 16391 - protein, 32 aa, Artificial Sequence
  Cyclic GFR-binding peptide
  MOD_RES (26)..(27): Xaa is C or S
RYKKLVVNNASDFYLISIANLRTPVXXTPPTS

SEQ ID NO: 16392 - protein, 28 aa, Artificial Sequence
  Cyclic GFR-binding peptide
  MOD_RES (2)..(2): Xaa is C or S
KXSRVIMRYKKLVKPKRGVFYLISIANL

SEQ ID NO: 16393 - protein, 29 aa, Artificial Sequence
  Cyclic GFR-binding peptide
ARVVMNNSLQEIVNSSDDYYLVTLPELQT

SEQ ID NO: 16394 - protein, 38 aa, Artificial Sequence
  Cyclic GFR-binding peptide
  MOD_RES (32)..(33): Xaa is C or S
GEVVMEEYQKYVVKDYEDIFLMSIPSLETPVXXAKPIS

SEQ ID NO: 16395 - protein, 37 aa, Artificial Sequence
  Cyclic GFR-binding peptide
  MOD_RES (31)..(32): Xaa is C or S
RVVMNEYQKYIVNSSDDIFLVSIPSLKTPAXXPKPVY

SEQ ID NO: 16396 - protein, 24 aa, Artificial Sequence
  Cyclic GFR-binding peptide
RYKKLVVKENEDFYLMSIANLETP

SEQ ID NO: 16397 - protein, 29 aa, Artificial Sequence
  Cyclic GFR-binding peptide
RVIMRYKKLVKPKRGVFYLISIANLAQPV

SEQ ID NO: 16398 - protein, 26 aa, Artificial Sequence
  Cyclic GFR-binding peptide
VMEQYNKLVVKDYEDLYLMSIASLET

SEQ ID NO: 16399 - protein, 39 aa, Artificial Sequence; identical to SEQ ID NO: 5972
  Cyclic GFR-binding peptide
  MOD_RES (2)..(33)..(34): Xaa is C or S

SEQ ID NO: 16400 - protein, 25 aa, Artificial Sequence
  Cyclic GFR-binding peptide
MDQYNKLVVNNASDLYLISIASLRT

SEQ ID NO: 16401 - protein, 25 aa, Artificial Sequence
  Cyclic GFR-binding peptide
MNSLQEIKPTKGIYYVIPLPELDQS

SEQ ID NO: 16402 - protein, 26 aa, Artificial Sequence
  Cyclic GFR-binding peptide
  MOD_RES (26)..(26): Xaa is C or S
RYKKLVVKENEDFYLMSIANLETPVX

SEQ ID NO: 16403 - protein, 25 aa, Artificial Sequence
  Cyclic GFR-binding peptide
KVIMNSLQEIKPTKGIYYLITLPEL

SEQ ID NO: 16404 - protein, 27 aa, Artificial Sequence
  Cyclic GFR-binding peptide
VMERYKKLVVKDYEDFYLMSIANLETP

SEQ ID NO: 16405 - protein, 33 aa, Artificial Sequence; identical to SEQ ID NO: 5977
  Cyclic GFR-binding peptide
  MOD_RES (30)..(31): Xaa is C or S

SEQ ID NO: 16406 - protein, 37 aa, Artificial Sequence
  Cyclic GFR-binding peptide
  MOD_RES (1)..(33): Xaa is C or S
XSRVVMNEYQKYIVNSSDDIFLVSIPSLKTPAXTPKT

SEQ ID NO: 16407 - protein, 29 aa, Artificial Sequence
  Cyclic GFR-binding peptide
  MOD_RES (2)..(2): Xaa is C or S
GXGEVVMDQYNKLVVKENEDLYLMSIASL

SEQ ID NO: 16408 - protein, 31 aa, Artificial Sequence
  Cyclic GFR-binding peptide
  MOD_RES (1)..(3): Xaa is C or S
XGXSRVVMNEYQKYIVNSSDDIFLVSIPSLK

SEQ ID NO: 16409 - protein, 35 aa, Artificial Sequence
  Cyclic GFR-binding peptide
  MOD_RES (31)..(31): Xaa is C or S
RVVMNNSLQEIVNSSDDYYLVTLPELKTPAXTPKT

SEQ ID NO: 16410 - protein, 36 aa, Artificial Sequence
  Cyclic GFR-binding peptide
  MOD_RES (1)..(33)..(34): Xaa is C or S
XSEVVMDRYKKLVVNNASDFYLISIANLRTPVXXTP

SEQ ID NO: 16411 - protein, 41 aa, Artificial Sequence; identical to SEQ ID NO: 5979
  Cyclic GFR-binding peptide
  MOD_RES (2)..(4)..(36)..(37): Xaa is C or S

SEQ ID NO: 16412 - protein, 34 aa, Artificial Sequence; identical to SEQ ID NO: 5981
  Cyclic GFR-binding peptide
  MOD_RES (28)..(29): Xaa is C or S

SEQ ID NO: 16413 - protein, 33 aa, Artificial Sequence
  Cyclic GFR-binding peptide
  MOD_RES (28)..(29): Xaa is C or S
MNNSLQEIVNSSDDYYVVPLPELQTPAXXPKPV

SEQ ID NO: 16414 - protein, 34 aa, Artificial Sequence
  Cyclic GFR-binding peptide
  MOD_RES (29)..(30): Xaa is C or S
VMNNSLQEIVNSSDDYYVVPLPELQTPAXXPKPV

SEQ ID NO: 16415 - protein, 24 aa, Artificial Sequence
  Cyclic GFR-binding peptide
EEYQKYVVKDYEDIFLMSIPSLET

SEQ ID NO: 16416 - protein, 39 aa, Artificial Sequence
  Cyclic GFR-binding peptide
  MOD_RES (2)..(34)..(35): Xaa is C or S
GXSEVVMDNSLQEVVNNASDYYVIPLPELRTPVXXTPPT

SEQ ID NO: 16417 - protein, 33 aa, Artificial Sequence
  Cyclic GFR-binding peptide
  MOD_RES (30)..(31): Xaa is C or S
VVMENSLQEVVKDYEDYYLMTLPELETPVXXAK

SEQ ID NO: 16418 - protein, 33 aa, Artificial Sequence
  Cyclic GFR-binding peptide
  MOD_RES (27)..(28): Xaa is C or S
ENSLQEVVKDYEDYYLMTLPELETPVXXAKPIS

SEQ ID NO: 16419 - protein, 35 aa, Artificial Sequence
  Cyclic GFR-binding peptide
  MOD_RES (2)..(34)..(35): Xaa is C or S
GXSRVVMNEYQKYIVNSSDDIFLVSIPSLKTPAXX

SEQ ID NO: 16420 - protein, 36 aa, Artificial Sequence
  Cyclic GFR-binding peptide
  MOD_RES (31)..(32): Xaa is C or S
SKVIMNSLQEIKPTKGIYYLITLPELDQSVXXPSAS

SEQ ID NO: 16421 - protein, 34 aa, Artificial Sequence; identical to SEQ ID NO: 5992
  Cyclic GFR-binding peptide
  MOD_RES (1)..(3)..(34): Xaa is C or S

SEQ ID NO: 16422 - protein, 37 aa, Artificial Sequence
  Cyclic GFR-binding peptide
  MOD_RES (32)..(33): Xaa is C or S
SEVVMDQYNKLVVNNASDLYLISIASLRTPVXXTPPT

SEQ ID NO: 16423 - protein, 37 aa, Artificial Sequence
  Cyclic GFR-binding peptide
  MOD_RES (31)..(32): Xaa is C or S
EVVMDNSLQEVVKENEDYYLMTLPELETPVXXAKPIK

SEQ ID NO: 16424 - protein, 33 aa, Artificial Sequence
  Cyclic GFR-binding peptide
  MOD_RES (29)..(30): Xaa is C or S
VMDNSLQEVVNNASDYYLITLPELRTPVXXTPP

SEQ ID NO: 16425 - protein, 29 aa, Artificial Sequence
  Cyclic GFR-binding peptide
  MOD_RES (28)..(28): Xaa is C or S
MNNSLQEIVNSSDDYYLVTLPELKTPAXT

SEQ ID NO: 16426 - protein, 33 aa, Artificial Sequence
  Cyclic GFR-binding peptide
  MOD_RES (1)..(33): Xaa is C or S
XSEVVMDNSLQEVVNNASDYYVIPLPELRTPVX

SEQ ID NO: 16427 - protein, 33 aa, Artificial Sequence
  Cyclic GFR-binding peptide
  MOD_RES (1)..(32)..(33): Xaa is C or S
XSKVIMNSLQEIKPTKGIYYVIPLPELDQSVXX

SEQ ID NO: 16428 - protein, 41 aa, Artificial Sequence
  Cyclic GFR-binding peptide
  MOD_RES (1)..(3)..(35)..(36): Xaa is C or S
XGXGEVVMENSLQEVVKDYEDYYVMPLPELETPVXXAKPIS

SEQ ID NO: 16429 - protein, 35 aa, Artificial Sequence; identical to SEQ ID NO: 5999
  Cyclic GFR-binding peptide
  MOD_RES (2)..(34): Xaa is C or S

SEQ ID NO: 16430 - protein, 34 aa, Artificial Sequence
  Cyclic GFR-binding peptide
  MOD_RES (29)..(30): Xaa is C or S
VVMEYQKYVKPTRGVIFLISIPSLDQPVXXPSAS

SEQ ID NO: 16431 - protein, 29 aa, Artificial Sequence
  Cyclic GFR-binding peptide
  MOD_RES (2)..(2): Xaa is C or S
KXSRVIMRYKKLVKPKRGVFYLISIANLA

SEQ ID NO: 16432 - protein, 26 aa, Artificial Sequence
  Cyclic GFR-binding peptide
GEVVMDEYQKYVVKENEDIFLMSIPS

SEQ ID NO: 16433 - protein, 26 aa, Artificial Sequence
  Cyclic GFR-binding peptide
MRYKKLVKPTRGVFYLISIANLDQPV

SEQ ID NO: 16434 - protein, 31 aa, Artificial Sequence
  Cyclic GFR-binding peptide
  MOD_RES (1)..(3): Xaa is C or S
XGXARVVMNNSLQEIVNSSDDYYLVTLPELQ

SEQ ID NO: 16435 - protein, 36 aa, Artificial Sequence
  Cyclic GFR-binding peptide
  MOD_RES (1)..(3)..(35)..(36): Xaa is C or S
XGXGEVVMDNSLQEVVKENEDYYLMTLPELETPVXX

SEQ ID NO: 16436 - protein, 22 aa, Artificial Sequence
  Cyclic GFR-binding peptide
MDQYNKLVVKENEDLYLMSIAS

SEQ ID NO: 16437 - protein, 22 aa, Artificial Sequence
  Cyclic GFR-binding peptide
RYKKLIVNSSDDFYLVSIANLK

SEQ ID NO: 16438 - protein, 26 aa, Artificial Sequence
  Cyclic GFR-binding peptide
SRVIMNSLQEVKPKRGVYYLITLPEL

SEQ ID NO: 16439 - protein, 24 aa, Artificial Sequence
  Cyclic GFR-binding peptide
ENSLQEVVKDYEDYYLMTLPELET

SEQ ID NO: 16440 - protein, 31 aa, Artificial Sequence
  Cyclic GFR-binding peptide
  MOD_RES (31)..(31): Xaa is C or S
EVVMDQYNKLVVNNASDLYLISIASLRTPVX

SEQ ID NO: 16441 - protein, 26 aa, Artificial Sequence
  Cyclic GFR-binding peptide
VIMNSLQEIKPTKGIYYVIPLPELDQ

SEQ ID NO: 16442 - protein, 33 aa, Artificial Sequence
  Cyclic GFR-binding peptide
  MOD_RES (27)..(28): Xaa is C or S
EEYQKYVVKDYEDIFLMSIPSLETPVXXAKPIS

SEQ ID NO: 16443 - protein, 31 aa, Artificial Sequence; identical to SEQ ID NO: 6012
  Cyclic GFR-binding peptide
  MOD_RES (26)..(27): Xaa is C or S

SEQ ID NO: 16444 - protein, 31 aa, Artificial Sequence; identical to SEQ ID NO: 6014
  Cyclic GFR-binding peptide
  MOD_RES (2)..(4): Xaa is C or S

SEQ ID NO: 16445 - protein, 30 aa, Artificial Sequence
  Cyclic GFR-binding peptide
SKVVMEYQKYVKPTRGVIFLISIPSLDQPV

SEQ ID NO: 16446 - protein, 22 aa, Artificial Sequence
  Cyclic GFR-binding peptide
ENSLQEVVKDYEDYYLMTLPEL

SEQ ID NO: 16447 - protein, 21 aa, Artificial Sequence
  Cyclic GFR-binding peptide
RYKKLVKPTRGVFYLISIANL

SEQ ID NO: 16448 - protein, 26 aa, Artificial Sequence
  Cyclic GFR-binding peptide
  MOD_RES (26)..(26): Xaa is C or S
RYKKLIVNSSDDFYLVSIANLKTPAX

SEQ ID NO: 16449 - protein, 38 aa, Artificial Sequence
  Cyclic GFR-binding peptide
  MOD_RES (1)..(33)..(34): Xaa is C or S
XSEVVMDRYKKLVVNNASDFYLISIANLRTPVXXTPPT

SEQ ID NO: 16450 - protein, 38 aa, Artificial Sequence
  Cyclic GFR-binding peptide
  MOD_RES (1)..(3)..(35)..(36): Xaa is C or S
XGXARVVMNEYQKYIVNSSDDIFLVSIPSLQTPAXXPK

SEQ ID NO: 16451 - protein, 38 aa, Artificial Sequence
  Cyclic GFR-binding peptide
  MOD_RES (1)..(33): Xaa is C or S
XSRVVMNNSLQEIVNSSDDYYVVPLPELKTPAXTPKTV

SEQ ID NO: 16452 - protein, 33 aa, Artificial Sequence
  Cyclic GFR-binding peptide
  MOD_RES (2)..(4): Xaa is C or S
RXGXSEVVMDRYKKLVVNNASDFYLISIANLRT

SEQ ID NO: 16453 - protein, 34 aa, Artificial Sequence
  Cyclic GFR-binding peptide
  MOD_RES (29)..(30): Xaa is C or S
VIMNSLQEIKPTKGIYYVIPLPELDQSVXXPSAS

SEQ ID NO: 16454 - protein, 36 aa, Artificial Sequence; identical to SEQ ID NO: 6024
  Cyclic GFR-binding peptide
  MOD_RES (32)..(32): Xaa is C or S

SEQ ID NO: 16455 - protein, 32 aa, Artificial Sequence
  Cyclic GFR-binding peptide
  MOD_RES (1)..(3): Xaa is C or S
XGXSEVVMDNSLQEVVNNASDYYVIPLPELRT

SEQ ID NO: 16456 - protein, 38 aa, Artificial Sequence; identical to SEQ ID NO: 6025
  Cyclic GFR-binding peptide
  MOD_RES (1)..(3)..(35): Xaa is C or S

SEQ ID NO: 16457 - protein, 37 aa, Artificial Sequence
  Cyclic GFR-binding peptide
  MOD_RES (32)..(33): Xaa is C or S
SRVVMNNSLQEIVNSSDDYYVVPLPELKTPAXXPKPV

SEQ ID NO: 16458 - protein, 38 aa, Artificial Sequence; identical to SEQ ID NO: 6026
  Cyclic GFR-binding peptide
  MOD_RES (2)..(34)..(35): Xaa is C or S

SEQ ID NO: 16459 - protein, 28 aa, Artificial Sequence
  Cyclic GFR-binding peptide
  MOD_RES (26)..(27): Xaa is C or S
RYKKLIKPTKGIFYLISIANLDQSVXXP

SEQ ID NO: 16460 - protein, 29 aa, Artificial Sequence
  Cyclic GFR-binding peptide
  MOD_RES (26)..(27): Xaa is C or S
QYNKLVVKDYEDLYLMSIASLETPVXXAK

SEQ ID NO: 16461 - protein, 33 aa, Artificial Sequence; identical to SEQ ID NO: 6030
  Cyclic GFR-binding peptide
  MOD_RES (29)..(30): Xaa is C or S

SEQ ID NO: 16462 - protein, 30 aa, Artificial Sequence; identical to SEQ ID NO: 6031
  Cyclic GFR-binding peptide
  MOD_RES (27)..(27): Xaa is C or S

SEQ ID NO: 16463 - protein, 26 aa, Artificial Sequence
  Cyclic GFR-binding peptide
EVVMERYKKLVVKDYEDFYLMSIANL

SEQ ID NO: 16464 - protein, 34 aa, Artificial Sequence; identical to SEQ ID NO: 6035
  Cyclic GFR-binding peptide
  MOD_RES (2)..(34): Xaa is C or S

SEQ ID NO: 16465 - protein, 35 aa, Artificial Sequence; identical to SEQ ID NO: 6041
  Cyclic GFR-binding peptide
  MOD_RES (2)..(34)..(35): Xaa is C or S

SEQ ID NO: 16466 - protein, 20 aa, Artificial Sequence
  Cyclic GFR-binding peptide
QYNKLVKPTRGVLYLISIAS

SEQ ID NO: 16467 - protein, 29 aa, Artificial Sequence
  Cyclic GFR-binding peptide
  MOD_RES (1)..(3): Xaa is C or S
XGXGEVVMERYKKLVVKDYEDFYLMSIAN

SEQ ID NO: 16468 - protein, 27 aa, Artificial Sequence
  Cyclic GFR-binding peptide
VVMDQYNKLVVNNASDLYLISIASLRT

SEQ ID NO: 16469 - protein, 28 aa, Artificial Sequence
  Cyclic GFR-binding peptide
VVMNNSLQEIVNSSDDYYLVTLPELQTP

SEQ ID NO: 16470 - protein, 38 aa, Artificial Sequence
  Cyclic GFR-binding peptide
  MOD_RES (2)..(4)..(35)..(36): Xaa is C or S
SXKXSRVIMNSLQEVKPKRGVYYLITLPELAQPVXXPA

SEQ ID NO: 16471 - protein, 36 aa, Artificial Sequence; identical to SEQ ID NO: 6052
  Cyclic GFR-binding peptide
  MOD_RES (31)..(31): Xaa is C or S

SEQ ID NO: 16472 - protein, 32 aa, Artificial Sequence
  Cyclic GFR-binding peptide
  MOD_RES (1)..(3): Xaa is C or S
XKXSRVIMEYQKYVKPKRGVIFLISIPSLAQP

SEQ ID NO: 16473 - protein, 23 aa, Artificial Sequence
  Cyclic GFR-binding peptide
VIMEYQKYIKPTKGIIFLISIPS

SEQ ID NO: 16474 - protein, 29 aa, Artificial Sequence
  Cyclic GFR-binding peptide
  MOD_RES (27)..(28): Xaa is C or S
MQYNKLIKPTKGILYLISIASLDQSVXXP

SEQ ID NO: 16475 - protein, 35 aa, Artificial Sequence; identical to SEQ ID NO: 6067
  Cyclic GFR-binding peptide
  MOD_RES (31)..(32): Xaa is C or S

SEQ ID NO: 16476 - protein, 33 aa, Artificial Sequence
  Cyclic GFR-binding peptide
  MOD_RES (1)..(3): Xaa is C or S
XKXSKVIMNSLQEIKPTKGIYYLITLPELDQSV

SEQ ID NO: 16477 - protein, 30 aa, Artificial Sequence
  Cyclic GFR-binding peptide
  MOD_RES (2)..(4): Xaa is C or S
RXGXGEVVMENSLQEVVKDYEDYYVMPLPE

SEQ ID NO: 16478 - protein, 23 aa, Artificial Sequence
  Cyclic GFR-binding peptide
DNSLQEVVKENEDYYVMPLPELE

SEQ ID NO: 16479 - protein, 22 aa, Artificial Sequence
  Cyclic GFR-binding peptide
IMRYKKLIKPTKGIFYLISIAN

SEQ ID NO: 16480 - protein, 37 aa, Artificial Sequence
  Cyclic GFR-binding peptide
  MOD_RES (1)..(3)..(35)..(36): Xaa is C or S
XGXGEVVMEEYQKYVVKDYEDIFLMSIPSLETPVXXA

SEQ ID NO: 16481 - protein, 37 aa, Artificial Sequence
  Cyclic GFR-binding peptide
  MOD_RES (1)..(3)..(35)..(36): Xaa is C or S
XGXGEVVMENSLQEVVKDYEDYYLMTLPELETPVXXA

SEQ ID NO: 16482 - protein, 33 aa, Artificial Sequence
  Cyclic GFR-binding peptide
  MOD_RES (2)..(2): Xaa is C or S
GXGEVVMENSLQEVVKDYEDYYVMPLPELETPV

SEQ ID NO: 16483 - protein, 25 aa, Artificial Sequence
  Cyclic GFR-binding peptide
VMEQYNKLVVKDYEDLYLMSIASLE

SEQ ID NO: 16484 - protein, 23 aa, Artificial Sequence
  Cyclic GFR-binding peptide
MNQYNKLIVNSSDDLYLVSIASL

SEQ ID NO: 16485 - protein, 33 aa, Artificial Sequence; identical to SEQ ID NO: 6080
  Cyclic GFR-binding peptide
  MOD_RES (2)..(4): Xaa is C or S

SEQ ID NO: 16486 - protein, 30 aa, Artificial Sequence; identical to SEQ ID NO: 6084
  Cyclic GFR-binding peptide
  MOD_RES (30)..(30): Xaa is C or S

SEQ ID NO: 16487 - protein, 28 aa, Artificial Sequence
  Cyclic GFR-binding peptide
  MOD_RES (1)..(1): Xaa is C or S
XSKVVMEYQKYVKPTRGVIFLISIPSLD

SEQ ID NO: 16488 - protein, 39 aa, Artificial Sequence; identical to SEQ ID NO: 6085
  Cyclic GFR-binding peptide
  MOD_RES (2)..(34): Xaa is C or S

SEQ ID NO: 16489 - protein, 23 aa, Artificial Sequence
  Cyclic GFR-binding peptide
ERYKKLVVKDYEDFYLMSIANLE

SEQ ID NO: 16490 - protein, 32 aa, Artificial Sequence
  Cyclic GFR-binding peptide
  MOD_RES (2)..(4): Xaa is C or S
RXGXGEVVMDNSLQEVVKENEDYYLMTLPELE

SEQ ID NO: 16491 - protein, 37 aa, Artificial Sequence
  Cyclic GFR-binding peptide
  MOD_RES (2)..(34): Xaa is C or S
GXSRVVMNNSLQEIVNSSDDYYLVTLPELKTPAXTPK

SEQ ID NO: 16492 - protein, 31 aa, Artificial Sequence; identical to SEQ ID NO: 6090
  Cyclic GFR-binding peptide
  MOD_RES (1)..(3): Xaa is C or S

SEQ ID NO: 16493 - protein, 35 aa, Artificial Sequence; identical to SEQ ID NO: 6091
  Cyclic GFR-binding peptide
  MOD_RES (1)..(3)..(35): Xaa is C or S

SEQ ID NO: 16494 - protein, 32 aa, Artificial Sequence
  Cyclic GFR-binding peptide
  MOD_RES (2)..(4): Xaa is C or S
SXKXSKVVMNSLQEVKPTRGVYYVIPLPELDQ

SEQ ID NO: 16495 - protein, 38 aa, Artificial Sequence
  Cyclic GFR-binding peptide
  MOD_RES (1)..(33)..(34): Xaa is C or S
XSRVVMNEYQKYIVNSSDDIFLVSIPSLKTPAXXPKPV

SEQ ID NO: 16496 - protein, 32 aa, Artificial Sequence
  Cyclic GFR-binding peptide
  MOD_RES (30)..(30): Xaa is C or S
VVMNNSLQEIVNSSDDYYLVTLPELKTPAXTP

SEQ ID NO: 16497 - protein, 33 aa, Artificial Sequence; identical to SEQ ID NO: 6096
  Cyclic GFR-binding peptide
  MOD_RES (30)..(31): Xaa is C or S

SEQ ID NO: 16498 - protein, 32 aa, Artificial Sequence
  Cyclic GFR-binding peptide
  MOD_RES (2)..(2): Xaa is C or S
GXSEVVMDNSLQEVVNNASDYYVIPLPELRTP

SEQ ID NO: 16499 - protein, 33 aa, Artificial Sequence
  Cyclic GFR-binding peptide
  MOD_RES (28)..(29): Xaa is C or S
MEEYQKYVVKDYEDIFLMSIPSLETPVXXAKPI

SEQ ID NO: 16500 - protein, 42 aa, Artificial Sequence
  Cyclic GFR-binding peptide
  MOD_RES (2)..(4)..(36): Xaa is C or S
HXGXSRVVMNNSLQEIVNSSDDYYVVPLPELKTPAXTPKTVH

SEQ ID NO: 16501 - protein, 33 aa, Artificial Sequence; identical to SEQ ID NO: 6101
  Cyclic GFR-binding peptide
  MOD_RES (29)..(30): Xaa is C or S

SEQ ID NO: 16502 - protein, 32 aa, Artificial Sequence
  Cyclic GFR-binding peptide
  MOD_RES (29)..(30): Xaa is C or S
VMNNSLQEIVNSSDDYYLVTLPELKTPAXXPK

SEQ ID NO: 16503 - protein, 28 aa, Artificial Sequence
  Cyclic GFR-binding peptide
  MOD_RES (2)..(2): Xaa is C or S
GXSEVVMDRYKKLVVNNASDFYLISIAN

SEQ ID NO: 16504 - protein, 31 aa, Artificial Sequence
  Cyclic GFR-binding peptide
  MOD_RES (1)..(3): Xaa is C or S
XGXSRVVMNNSLQEIVNSSDDYYLVTLPELK

SEQ ID NO: 16505 - protein, 32 aa, Artificial Sequence; identical to SEQ ID NO: 6104
  Cyclic GFR-binding peptide
  MOD_RES (28)..(29): Xaa is C or S

SEQ ID NO: 16506 - protein, 39 aa, Artificial Sequence
  Cyclic GFR-binding peptide
  MOD_RES (1)..(3)..(35)..(36): Xaa is C or S
XGXSRVVMNEYQKYIVNSSDDIFLVSIPSLKTPAXXPKP

SEQ ID NO: 16507 - protein, 37 aa, Artificial Sequence
  Cyclic GFR-binding peptide
  MOD_RES (31)..(32): Xaa is C or S
EVVMDQYNKLVVNNASDLYLISIASLRTPVXXTPPTS

SEQ ID NO: 16508 - protein, 25 aa, Artificial Sequence
  Cyclic GFR-binding peptide
VVMEYQKYVKPTRGVIFLISIPSLD

SEQ ID NO: 16509 - protein, 38 aa, Artificial Sequence
  Cyclic GFR-binding peptide
  MOD_RES (1)..(3)..(35)..(36): Xaa is C or S
XGXARVVMNNSLQEIVNSSDDYYLVTLPELQTPAXXPK

SEQ ID NO: 16510 - protein, 26 aa, Artificial Sequence
  Cyclic GFR-binding peptide
MNRYKKLIVNSSDDFYLVSIANLKTP

SEQ ID NO: 16511 - protein, 24 aa, Artificial Sequence
  Cyclic GFR-binding peptide
IMRYKKLVKPKRGVFYLISIANLA

SEQ ID NO: 16512 - protein, 29 aa, Artificial Sequence
  Cyclic GFR-binding peptide
  MOD_RES (1)..(3): Xaa is C or S
XGXARVVMNNSLQEIVNSSDDYYVVPLPE

SEQ ID NO: 16513 - protein, 28 aa, Artificial Sequence
  Cyclic GFR-binding peptide
VMERYKKLVVKDYEDFYLMSIANLETPV

SEQ ID NO: 16514 - protein, 37 aa, Artificial Sequence
  Cyclic GFR-binding peptide
  MOD_RES (1)..(3)..(35)..(36): Xaa is C or S
XGXGEVVMDEYQKYVVKENEDIFLMSIPSLETPVXXA

SEQ ID NO: 16515 - protein, 24 aa, Artificial Sequence
  Cyclic GFR-binding peptide
VVMENSLQEVVKDYEDYYVMPLPE

SEQ ID NO: 16516 - protein, 29 aa, Artificial Sequence
  Cyclic GFR-binding peptide
KVIMNSLQEIKPTKGIYYLITLPELDQSV

SEQ ID NO: 16517 - protein, 33 aa, Artificial Sequence
  Cyclic GFR-binding peptide
  MOD_RES (2)..(4): Xaa is C or S
HXGXSRVVMNNSLQEIVNSSDDYYLVTLPELKT

SEQ ID NO: 16518 - protein, 25 aa, Artificial Sequence
  Cyclic GFR-binding peptide
NSLQEIKPTKGIYYVIPLPELDQSV

SEQ ID NO: 16519 - protein, 35 aa, Artificial Sequence
  Cyclic GFR-binding peptide
  MOD_RES (30)..(31): Xaa is C or S
VVMDRYKKLVVNNASDFYLISIANLRTPVXXTPPT

SEQ ID NO: 16520 - protein, 36 aa, Artificial Sequence
  Cyclic GFR-binding peptide
  MOD_RES (2)..(33)..(34): Xaa is C or S
KXSKVIMNSLQEIKPTKGIYYLITLPELDQSVXXPS

SEQ ID NO: 16521 - protein, 32 aa, Artificial Sequence; identical to SEQ ID NO: 6123
  Cyclic GFR-binding peptide
  MOD_RES (1)..(32): Xaa is C or S

SEQ ID NO: 16522 - protein, 36 aa, Artificial Sequence
  Cyclic GFR-binding peptide
  MOD_RES (1)..(3)..(35)..(36): Xaa is C or S
XGXGEVVMDEYQKYVVKENEDIFLMSIPSLETPVXX

SEQ ID NO: 16523 - protein, 22 aa, Artificial Sequence
  Cyclic GFR-binding peptide
EEYQKYVVKDYEDIFLMSIPSL

SEQ ID NO: 16524 - protein, 30 aa, Artificial Sequence
  Cyclic GFR-binding peptide
  MOD_RES (1)..(3): Xaa is C or S
XGXSEVVMDNSLQEVVNNASDYYLITLPEL

SEQ ID NO: 16525 - protein, 20 aa, Artificial Sequence
  Cyclic GFR-binding peptide
RYKKLVKPTRGVFYLISIAN

SEQ ID NO: 16526 - protein, 29 aa, Artificial Sequence
  Cyclic GFR-binding peptide
  MOD_RES (26)..(27): Xaa is C or S
EYQKYIKPTKGIIFLISIPSLDQSVXXPS

SEQ ID NO: 16527 - protein, 36 aa, Artificial Sequence
  Cyclic GFR-binding peptide
  MOD_RES (1)..(33): Xaa is C or S
XSRVVMNNSLQEIVNSSDDYYLVTLPELKTPAXTPK

SEQ ID NO: 16528 - protein, 36 aa, Artificial Sequence; identical to SEQ ID NO: 6130
  Cyclic GFR-binding peptide
  MOD_RES (32)..(33): Xaa is C or S

SEQ ID NO: 16529 - protein, 24 aa, Artificial Sequence
  Cyclic GFR-binding peptide
ENSLQEVVKDYEDYYVMPLPELET

SEQ ID NO: 16530 - protein, 34 aa, Artificial Sequence; identical to SEQ ID NO: 6131
  Cyclic GFR-binding peptide
  MOD_RES (32)..(33): Xaa is C or S

SEQ ID NO: 16531 - protein, 23 aa, Artificial Sequence
  Cyclic GFR-binding peptide
VMDNSLQEVVKENEDYYVMPLPE

SEQ ID NO: 16532 - protein, 24 aa, Artificial Sequence
  Cyclic GFR-binding peptide
MDEYQKYVVKENEDIFLMSIPSLE

SEQ ID NO: 16533 - protein, 37 aa, Artificial Sequence
  Cyclic GFR-binding peptide
  MOD_RES (31)..(32): Xaa is C or S
SRVIMNSLQEVKPKRGVYYLITLPELAQPVXXPAASA

SEQ ID NO: 16534 - protein, 27 aa, Artificial Sequence
  Cyclic GFR-binding peptide
VMNRYKKLIVNSSDDFYLVSIANLQTP

SEQ ID NO: 16535 - protein, 27 aa, Artificial Sequence
  Cyclic GFR-binding peptide
  MOD_RES (27)..(27): Xaa is C or S
MRYKKLVKPKRGVFYLISIANLAQPVX

SEQ ID NO: 16536 - protein, 26 aa, Artificial Sequence
  Cyclic GFR-binding peptide
RVIMRYKKLVKPKRGVFYLISIANLA

SEQ ID NO: 16537 - protein, 31 aa, Artificial Sequence
  Cyclic GFR-binding peptide
  MOD_RES (29)..(30): Xaa is C or S
VMNEYQKYIVNSSDDIFLVSIPSLQTPAXXP

SEQ ID NO: 16538 - protein, 30 aa, Artificial Sequence
  Cyclic GFR-binding peptide
  MOD_RES (1)..(3): Xaa is C or S
XGXSRVVMNNSLQEIVNSSDDYYVVPLPEL

SEQ ID NO: 16539 - protein, 27 aa, Artificial Sequence
  Cyclic GFR-binding peptide
VMDNSLQEVVNNASDYYVIPLPELRTP

SEQ ID NO: 16540 - protein, 41 aa, Artificial Sequence; identical to SEQ ID NO: 6139
  Cyclic GFR-binding peptide
  MOD_RES (2)..(4)..(36)..(37): Xaa is C or S

SEQ ID NO: 16541 - protein, 32 aa, Artificial Sequence; identical to SEQ ID NO: 6142
  Cyclic GFR-binding peptide
  MOD_RES (2)..(2): Xaa is C or S

SEQ ID NO: 16542 - protein, 28 aa, Artificial Sequence
  Cyclic GFR-binding peptide
  MOD_RES (26)..(27): Xaa is C or S
QYNKLIVNSSDDLYLVSIASLQTPAXXP

SEQ ID NO: 16543 - protein, 37 aa, Artificial Sequence
  Cyclic GFR-binding peptide
  MOD_RES (1)..(33)..(34): Xaa is C or S
XSEVVMDRYKKLVVNNASDFYLISIANLRTPVXXTPP

SEQ ID NO: 16544 - protein, 21 aa, Artificial Sequence
  Cyclic GFR-binding peptide
QYNKLVVKDYEDLYLMSIASL

SEQ ID NO: 16545 - protein, 28 aa, Artificial Sequence
  Cyclic GFR-binding peptide
  MOD_RES (26)..(27): Xaa is C or S
QYNKLIKPTKGILYLISIASLDQSVXXP

SEQ ID NO: 16546 - protein, 37 aa, Artificial Sequence
  Cyclic GFR-binding peptide
  MOD_RES (1)..(3)..(34)..(35): Xaa is C or S
XKXSKVVMNSLQEVKPTRGVYYVIPLPELDQPVXXPS

SEQ ID NO: 16547 - protein, 34 aa, Artificial Sequence
  Cyclic GFR-binding peptide
  MOD_RES (2)..(4): Xaa is C or S
SXKXSKVIMNSLQEIKPTKGIYYVIPLPELDQSV

SEQ ID NO: 16548 - protein, 25 aa, Artificial Sequence
  Cyclic GFR-binding peptide
EVVMDEYQKYVVKENEDIFLMSIPS

SEQ ID NO: 16549 - protein, 29 aa, Artificial Sequence
  Cyclic GFR-binding peptide
KVVMEYQKYVKPTRGVIFLISIPSLDQPV

SEQ ID NO: 16550 - protein, 37 aa, Artificial Sequence; identical to SEQ ID NO: 6150
  Cyclic GFR-binding peptide
  MOD_RES (2)..(4)..(36)..(37): Xaa is C or S

SEQ ID NO: 16551 - protein, 33 aa, Artificial Sequence
  Cyclic GFR-binding peptide
  MOD_RES (2)..(4): Xaa is C or S
HXGXSRVVMNEYQKYIVNSSDDIFLVSIPSLKT

SEQ ID NO: 16552 - protein, 23 aa, Artificial Sequence
  Cyclic GFR-binding peptide
DNSLQEVVKENEDYYLMTLPELE

SEQ ID NO: 16553 - protein, 33 aa, Artificial Sequence
  Cyclic GFR-binding peptide
  MOD_RES (28)..(29): Xaa is C or S
IMNSLQEIKPTKGIYYVIPLPELDQSVXXPSAS

SEQ ID NO: 16554 - protein, 30 aa, Artificial Sequence
  Cyclic GFR-binding peptide
  MOD_RES (29)..(30): Xaa is C or S
VIMNSLQEIKPTKGIYYVIPLPELDQSVXX

SEQ ID NO: 16555 - protein, 36 aa, Artificial Sequence; identical to SEQ ID NO: 6156
  Cyclic GFR-binding peptide
  MOD_RES (1)..(33)..(34): Xaa is C or S

SEQ ID NO: 16556 - protein, 30 aa, Artificial Sequence
  Cyclic GFR-binding peptide
  MOD_RES (28)..(28): Xaa is C or S
MNEYQKYIVNSSDDIFLVSIPSLKTPAXTP

SEQ ID NO: 16557 - protein, 32 aa, Artificial Sequence
  Cyclic GFR-binding peptide
  MOD_RES (29)..(30): Xaa is C or S
VMDNSLQEVVKENEDYYLMTLPELETPVXXAK

SEQ ID NO: 16558 - protein, 34 aa, Artificial Sequence; identical to SEQ ID NO: 6159
  Cyclic GFR-binding peptide
  MOD_RES (30)..(31): Xaa is C or S

SEQ ID NO: 16559 - protein, 30 aa, Artificial Sequence; identical to SEQ ID NO: 6160
  Cyclic GFR-binding peptide
  MOD_RES (29)..(30): Xaa is C or S

SEQ ID NO: 16560 - protein, 35 aa, Artificial Sequence
  Cyclic GFR-binding peptide
  MOD_RES (2)..(34)..(35): Xaa is C or S
GXGEVVMDNSLQEVVKENEDYYVMPLPELETPVXX

SEQ ID NO: 16561 - protein, 32 aa, Artificial Sequence; identical to SEQ ID NO: 6161
  Cyclic GFR-binding peptide
  MOD_RES (27)..(28): Xaa is C or S

SEQ ID NO: 16562 - protein, 28 aa, Artificial Sequence
  Cyclic GFR-binding peptide
  MOD_RES (27)..(27): Xaa is C or S
NNSLQEIVNSSDDYYLVTLPELKTPAXT

SEQ ID NO: 16563 - protein, 29 aa, Artificial Sequence
  Cyclic GFR-binding peptide
  MOD_RES (1)..(1): Xaa is C or S
XGEVVMDEYQKYVVKENEDIFLMSIPSLE

SEQ ID NO: 16564 - protein, 28 aa, Artificial Sequence
  Cyclic GFR-binding peptide
  MOD_RES (27)..(27): Xaa is C or S
NEYQKYIVNSSDDIFLVSIPSLKTPAXT

SEQ ID NO: 16565 - protein, 27 aa, Artificial Sequence
  Cyclic GFR-binding peptide
  MOD_RES (1)..(1): Xaa is C or S
XSEVVMDQYNKLVVNNASDLYLISIAS

SEQ ID NO: 16566 - protein, 30 aa, Artificial Sequence
  Cyclic GFR-binding peptide
  MOD_RES (29)..(30): Xaa is C or S
VVMEYQKYVKPTRGVIFLISIPSLDQPVXX

SEQ ID NO: 16567 - protein, 23 aa, Artificial Sequence
  Cyclic GFR-binding peptide
VMNSLQEVKPTRGVYYVIPLPEL

SEQ ID NO: 16568 - protein, 34 aa, Artificial Sequence
  Cyclic GFR-binding peptide
  MOD_RES (32)..(33): Xaa is C or S
GEVVMENSLQEVVKDYEDYYLMTLPELETPVXXA

SEQ ID NO: 16569 - protein, 24 aa, Artificial Sequence
  Cyclic GFR-binding peptide
VMNNSLQEIVNSSDDYYLVTLPEL

SEQ ID NO: 16570 - protein, 31 aa, Artificial Sequence
  Cyclic GFR-binding peptide
GEVVMEEYQKYVVKDYEDIFLMSIPSLETPV

SEQ ID NO: 16571 - protein, 34 aa, Artificial Sequence
  Cyclic GFR-binding peptide
  MOD_RES (2)..(4): Xaa is C or S
RXGXGEVVMENSLQEVVKDYEDYYVMPLPELETP

SEQ ID NO: 16572 - protein, 29 aa, Artificial Sequence
  Cyclic GFR-binding peptide
GEVVMENSLQEVVKDYEDYYVMPLPELET

SEQ ID NO: 16573 - protein, 22 aa, Artificial Sequence
  Cyclic GFR-binding peptide
NSLQEVKPTRGVYYVIPLPELD

SEQ ID NO: 16574 - protein, 33 aa, Artificial Sequence
  Cyclic GFR-binding peptide
  MOD_RES (27)..(28): Xaa is C or S
DRYKKLVVNNASDFYLISIANLRTPVXXTPPTS

SEQ ID NO: 16575 - protein, 29 aa, Artificial Sequence
  Cyclic GFR-binding peptide
  MOD_RES (29)..(29): Xaa is C or S
VMENSLQEVVKDYEDYYVMPLPELETPVX

SEQ ID NO: 16576 - protein, 31 aa, Artificial Sequence; identical to SEQ ID NO: 6178
  Cyclic GFR-binding peptide
  MOD_RES (26)..(27): Xaa is C or S

SEQ ID NO: 16577 - protein, 31 aa, Artificial Sequence
  Cyclic GFR-binding peptide
  MOD_RES (26)..(27): Xaa is C or S
NSLQEVVKENEDYYVMPLPELETPVXXAKPI

SEQ ID NO: 16578 - protein, 21 aa, Artificial Sequence
  Cyclic GFR-binding peptide
QYNKLVKPTRGVLYLISIASL

SEQ ID NO: 16579 - protein, 29 aa, Artificial Sequence
  Cyclic GFR-binding peptide
  MOD_RES (2)..(2): Xaa is C or S
KXSKVVMNSLQEVKPTRGVYYVIPLPELD

SEQ ID NO: 16580 - protein, 24 aa, Artificial Sequence
  Cyclic GFR-binding peptide
VVMNRYKKLIVNSSDDFYLVSIAN

SEQ ID NO: 16581 - protein, 28 aa, Artificial Sequence
  Cyclic GFR-binding peptide
  MOD_RES (1)..(3): Xaa is C or S
XKXSKVVMEYQKYVKPTRGVIFLISIPS

SEQ ID NO: 16582 - protein, 38 aa, Artificial Sequence
  Cyclic GFR-binding peptide
  MOD_RES (32)..(32): Xaa is C or S
SRVVMNNSLQEIVNSSDDYYLVTLPELKTPAXTPKTVH

SEQ ID NO: 16583 - protein, 27 aa, Artificial Sequence
  Cyclic GFR-binding peptide
  MOD_RES (26)..(27): Xaa is C or S
NSLQEVKPTRGVYYVIPLPELDQPVXX

SEQ ID NO: 16584 - protein, 35 aa, Artificial Sequence
  Cyclic GFR-binding peptide
  MOD_RES (2)..(34)..(35): Xaa is C or S
GXARVVMNNSLQEIVNSSDDYYLVTLPELQTPAXX

SEQ ID NO: 16585 - protein, 30 aa, Artificial Sequence
  Cyclic GFR-binding peptide
  MOD_RES (29)..(30): Xaa is C or S
VIMNSLQEVKPKRGVYYLITLPELAQPVXX

SEQ ID NO: 16586 - protein, 25 aa, Artificial Sequence
  Cyclic GFR-binding peptide
ENSLQEVVKDYEDYYLMTLPELETP

SEQ ID NO: 16587 - protein, 27 aa, Artificial Sequence
  Cyclic GFR-binding peptide
  MOD_RES (1)..(1): Xaa is C or S
XSKVIMEYQKYIKPTKGIIFLISIPSL

SEQ ID NO: 16588 - protein, 32 aa, Artificial Sequence
  Cyclic GFR-binding peptide
  MOD_RES (32)..(32): Xaa is C or S
SRVVMNNSLQEIVNSSDDYYVVPLPELKTPAX

SEQ ID NO: 16589 - protein, 33 aa, Artificial Sequence
  Cyclic GFR-binding peptide
  MOD_RES (27)..(28): Xaa is C or S
ENSLQEVVKDYEDYYVMPLPELETPVXXAKPIS

SEQ ID NO: 16590 - protein, 36 aa, Artificial Sequence; identical to SEQ ID NO: 6185
  Cyclic GFR-binding peptide
  MOD_RES (31)..(32): Xaa is C or S

SEQ ID NO: 16591 - protein, 38 aa, Artificial Sequence; identical to SEQ ID NO: 6186
  Cyclic GFR-binding peptide
  MOD_RES (2)..(34)..(35): Xaa is C or S

SEQ ID NO: 16592 - protein, 34 aa, Artificial Sequence; identical to SEQ ID NO: 6189
  Cyclic GFR-binding peptide
  MOD_RES (2)..(33)..(34): Xaa is C or S

SEQ ID NO: 16593 - protein, 30 aa, Artificial Sequence
  Cyclic GFR-binding peptide
  MOD_RES (27)..(28): Xaa is C or S
MNSLQEIKPTKGIYYLITLPELDQSVXXPS

SEQ ID NO: 16594 - protein, 39 aa, Artificial Sequence
  Cyclic GFR-binding peptide
  MOD_RES (1)..(33)..(34): Xaa is C or S
XSRVVMNNSLQEIVNSSDDYYLVTLPELKTPAXXPKPVY

SEQ ID NO: 16595 - protein, 40 aa, Artificial Sequence; identical to SEQ ID NO: 6191
  Cyclic GFR-binding peptide
  MOD_RES (2)..(4)..(36): Xaa is C or S

SEQ ID NO: 16596 - protein, 26 aa, Artificial Sequence
  Cyclic GFR-binding peptide
  MOD_RES (1)..(1): Xaa is C or S
XSKVIMNSLQEIKPTKGIYYLITLPE

SEQ ID NO: 16597 - protein, 30 aa, Artificial Sequence
  Cyclic GFR-binding peptide
  MOD_RES (27)..(28): Xaa is C or S
MEYQKYIKPTKGIIFLISIPSLDQSVXXPS

SEQ ID NO: 16598 - protein, 30 aa, Artificial Sequence
  Cyclic GFR-binding peptide
  MOD_RES (27)..(28): Xaa is C or S
DRYKKLVVNNASDFYLISIANLRTPVXXTP

SEQ ID NO: 16599 - protein, 26 aa, Artificial Sequence
  Cyclic GFR-binding peptide
IMQYNKLVKPKRGVLYLISIASLAQP

SEQ ID NO: 16600 - protein, 34 aa, Artificial Sequence
  Cyclic GFR-binding peptide
  MOD_RES (1)..(3)..(34): Xaa is C or S
XKXSKVIMNSLQEIKPTKGIYYLITLPELDQSVX

SEQ ID NO: 16601 - protein, 27 aa, Artificial Sequence
  Cyclic GFR-binding peptide
VVMDNSLQEVVKENEDYYLMTLPELET

SEQ ID NO: 16602 - protein, 29 aa, Artificial Sequence
  Cyclic GFR-binding peptide
  MOD_RES (2)..(2): Xaa is C or S
GXSRVVMNNSLQEIVNSSDDYYVVPLPEL

SEQ ID NO: 16603 - protein, 34 aa, Artificial Sequence
  Cyclic GFR-binding peptide
  MOD_RES (1)..(33)..(34): Xaa is C or S
XSEVVMDNSLQEVVNNASDYYVIPLPELRTPVXX

SEQ ID NO: 16604 - protein, 24 aa, Artificial Sequence
  Cyclic GFR-binding peptide
KVVMRYKKLVKPTRGVFYLISIAN

SEQ ID NO: 16605 - protein, 30 aa, Artificial Sequence
  Cyclic GFR-binding peptide
  MOD_RES (26)..(27): Xaa is C or S
NSLQEVVKENEDYYVMPLPELETPVXXAKP

SEQ ID NO: 16606 - protein, 22 aa, Artificial Sequence
  Cyclic GFR-binding peptide
QYNKLIVNSSDDLYLVSIASLK

SEQ ID NO: 16607 - protein, 28 aa, Artificial Sequence
  Cyclic GFR-binding peptide
  MOD_RES (26)..(26): Xaa is C or S
QYNKLIVNSSDDLYLVSIASLKTPAXTP

SEQ ID NO: 16608 - protein, 25 aa, Artificial Sequence
  Cyclic GFR-binding peptide
IMNSLQEIKPTKGIYYLITLPELDQ

SEQ ID NO: 16609 - protein, 26 aa, Artificial Sequence
  Cyclic GFR-binding peptide
VIMNSLQEVKPKRGVYYLITLPELAQ

SEQ ID NO: 16610 - protein, 34 aa, Artificial Sequence; identical to SEQ ID NO: 6204
  Cyclic GFR-binding peptide
  MOD_RES (30)..(30): Xaa is C or S

SEQ ID NO: 16611 - protein, 38 aa, Artificial Sequence
  Cyclic GFR-binding peptide
  MOD_RES (2)..(4)..(35)..(36): Xaa is C or S
SXKXSRVIMEYQKYVKPKRGVIFLISIPSLAQPVXXPA

SEQ ID NO: 16612 - protein, 33 aa, Artificial Sequence; identical to SEQ ID NO: 6206
  Cyclic GFR-binding peptide
  MOD_RES (27)..(27): Xaa is C or S

SEQ ID NO: 16613 - protein, 31 aa, Artificial Sequence
  Cyclic GFR-binding peptide
  MOD_RES (27)..(28): Xaa is C or S
ENSLQEVVKDYEDYYVMPLPELETPVXXAKP

SEQ ID NO: 16614 - protein, 39 aa, Artificial Sequence
  Cyclic GFR-binding peptide
  MOD_RES (1)..(33)..(34): Xaa is C or S
XGEVVMEEYQKYVVKDYEDIFLMSIPSLETPVXXAKPIS

SEQ ID NO: 16615 - protein, 36 aa, Artificial Sequence
  Cyclic GFR-binding peptide
  MOD_RES (1)..(3)..(35)..(36): Xaa is C or S
XGXGEVVMENSLQEVVKDYEDYYLMTLPELETPVXX

SEQ ID NO: 16616 - protein, 28 aa, Artificial Sequence
  Cyclic GFR-binding peptide
  MOD_RES (2)..(2): Xaa is C or S
KXSKVIMNSLQEIKPTKGIYYVIPLPEL

SEQ ID NO: 16617 - protein, 33 aa, Artificial Sequence; identical to SEQ ID NO: 6211
  Cyclic GFR-binding peptide
  MOD_RES (29)..(30): Xaa is C or S

SEQ ID NO: 16618 - protein, 28 aa, Artificial Sequence
  Cyclic GFR-binding peptide
VMDRYKKLVVNNASDFYLISIANLRTPV

SEQ ID NO: 16619 - protein, 27 aa, Artificial Sequence
  Cyclic GFR-binding peptide
EVVMDRYKKLVVNNASDFYLISIANLR

SEQ ID NO: 16620 - protein, 26 aa, Artificial Sequence
  Cyclic GFR-binding peptide
  MOD_RES (26)..(26): Xaa is C or S
QYNKLIVNSSDDLYLVSIASLKTPAX

SEQ ID NO: 16621 - protein, 35 aa, Artificial Sequence; identical to SEQ ID NO: 6217
  Cyclic GFR-binding peptide
  MOD_RES (30)..(31): Xaa is C or S

SEQ ID NO: 16622 - protein, 33 aa, Artificial Sequence; identical to SEQ ID NO: 6218
  Cyclic GFR-binding peptide
  MOD_RES (30)..(31): Xaa is C or S

SEQ ID NO: 16623 - protein, 30 aa, Artificial Sequence; identical to SEQ ID NO: 6219
  Cyclic GFR-binding peptide

SEQ ID NO: 16624 - protein, 29 aa, Artificial Sequence
  Cyclic GFR-binding peptide
  MOD_RES (1)..(1): Xaa is C or S
XARVVMNEYQKYIVNSSDDIFLVSIPSLQ

SEQ ID NO: 16625 - protein, 27 aa, Artificial Sequence
  Cyclic GFR-binding peptide
  MOD_RES (26)..(27): Xaa is C or S
QYNKLIVNSSDDLYLVSIASLKTPAXX

SEQ ID NO: 16626 - protein, 37 aa, Artificial Sequence
  Cyclic GFR-binding peptide
  MOD_RES (32)..(33): Xaa is C or S
SEVVMDRYKKLVVNNASDFYLISIANLRTPVXXTPPT

SEQ ID NO: 16627 - protein, 31 aa, Artificial Sequence; identical to SEQ ID NO: 6221
  Cyclic GFR-binding peptide
  MOD_RES (31)..(31): Xaa is C or S

SEQ ID NO: 16628 - protein, 34 aa, Artificial Sequence
  Cyclic GFR-binding peptide
  MOD_RES (1)..(3): Xaa is C or S
XGXARVVMNNSLQEIVNSSDDYYVVPLPELQTPA

SEQ ID NO: 16629 - protein, 25 aa, Artificial Sequence
  Cyclic GFR-binding peptide
NSLQEVVKDYEDYYLMTLPELETPV

SEQ ID NO: 16630 - protein, 24 aa, Artificial Sequence
  Cyclic GFR-binding peptide
VIMNSLQEVKPKRGVYYLITLPEL

SEQ ID NO: 16631 - protein, 25 aa, Artificial Sequence
  Cyclic GFR-binding peptide
VMDQYNKLVVNNASDLYLISIASLR

SEQ ID NO: 16632 - protein, 26 aa, Artificial Sequence
  Cyclic GFR-binding peptide
IMRYKKLVKPKRGVFYLISIANLAQP

SEQ ID NO: 16633 - protein, 25 aa, Artificial Sequence
  Cyclic GFR-binding peptide
VMNEYQKYIVNSSDDIFLVSIPSLK

SEQ ID NO: 16634 - protein, 37 aa, Artificial Sequence
  Cyclic GFR-binding peptide
  MOD_RES (2)..(4)..(36): Xaa is C or S
HXGXSRVVMNNSLQEIVNSSDDYYVVPLPELKTPAXT

SEQ ID NO: 16635 - protein, 25 aa, Artificial Sequence
  Cyclic GFR-binding peptide
MDNSLQEVVKENEDYYLMTLPELET

SEQ ID NO: 16636 - protein, 29 aa, Artificial Sequence
  Cyclic GFR-binding peptide
  MOD_RES (29)..(29): Xaa is C or S
VMDRYKKLVVKENEDFYLMSIANLETPVX

SEQ ID NO: 16637 - protein, 37 aa, Artificial Sequence
  Cyclic GFR-binding peptide
  MOD_RES (2)..(34): Xaa is C or S
GXSRVVMNEYQKYIVNSSDDIFLVSIPSLKTPAXTPK

SEQ ID NO: 16638 - protein, 33 aa, Artificial Sequence; identical to SEQ ID NO: 6234
  Cyclic GFR-binding peptide
  MOD_RES (1)..(3): Xaa is C or S

SEQ ID NO: 16639 - protein, 39 aa, Artificial Sequence
  Cyclic GFR-binding peptide
  MOD_RES (2)..(33)..(34): Xaa is C or S
KXSRVIMEYQKYVKPKRGVIFLISIPSLAQPVXXPAASA

SEQ ID NO: 16640 - protein, 29 aa, Artificial Sequence
  Cyclic GFR-binding peptide
SKVIMEYQKYIKPTKGIIFLISIPSLDQS

SEQ ID NO: 16641 - protein, 35 aa, Artificial Sequence; identical to SEQ ID NO: 6237
  Cyclic GFR-binding peptide
  MOD_RES (1)..(3)..(35): Xaa is C or S

SEQ ID NO: 16642 - protein, 30 aa, Artificial Sequence; identical to SEQ ID NO: 6239
  Cyclic GFR-binding peptide
  MOD_RES (28)..(29): Xaa is C or S

SEQ ID NO: 16643 - protein, 28 aa, Artificial Sequence
  Cyclic GFR-binding peptide
EVVMDNSLQEVVKENEDYYVMPLPELET

SEQ ID NO: 16644 - protein, 23 aa, Artificial Sequence
  Cyclic GFR-binding peptide
IMQYNKLVKPKRGVLYLISIASL

SEQ ID NO: 16645 - protein, 24 aa, Artificial Sequence
  Cyclic GFR-binding peptide
MDNSLQEVVNNASDYYLITLPELR

SEQ ID NO: 16646 - protein, 27 aa, Artificial Sequence
  Cyclic GFR-binding peptide
VVMDQYNKLVVKENEDLYLMSIASLET

SEQ ID NO: 16647 - protein, 35 aa, Artificial Sequence
  Cyclic GFR-binding peptide
  MOD_RES (29)..(29): Xaa is C or S
VMNEYQKYIVNSSDDIFLVSIPSLKTPAXTPKTVH

SEQ ID NO: 16648 - protein, 22 aa, Artificial Sequence
  Cyclic GFR-binding peptide
NSLQEVVKDYEDYYVMPLPELE

SEQ ID NO: 16649 - protein, 35 aa, Artificial Sequence; identical to SEQ ID NO: 6245
  Cyclic GFR-binding peptide
  MOD_RES (31)..(32): Xaa is C or S

SEQ ID NO: 16650 - protein, 31 aa, Artificial Sequence
  Cyclic GFR-binding peptide
  MOD_RES (29)..(30): Xaa is C or S
VMENSLQEVVKDYEDYYLMTLPELETPVXXA

SEQ ID NO: 16651 - protein, 30 aa, Artificial Sequence
  Cyclic GFR-binding peptide
  MOD_RES (1)..(1): Xaa is C or S
XSRVVMNNSLQEIVNSSDDYYVVPLPELKT

SEQ ID NO: 16652 - protein, 37 aa, Artificial Sequence
  Cyclic GFR-binding peptide
  MOD_RES (2)..(4)..(36)..(37): Xaa is C or S
HXGXARVVMNNSLQEIVNSSDDYYLVTLPELQTPAXX

SEQ ID NO: 16653 - protein, 26 aa, Artificial Sequence
  Cyclic GFR-binding peptide
MNRYKKLIVNSSDDFYLVSIANLQTP

SEQ ID NO: 16654 - protein, 28 aa, Artificial Sequence
  Cyclic GFR-binding peptide
  MOD_RES (1)..(1): Xaa is C or S
XSEVVMDRYKKLVVNNASDFYLISIANL

SEQ ID NO: 16655 - protein, 36 aa, Artificial Sequence; identical to SEQ ID NO: 6252
  Cyclic GFR-binding peptide
  MOD_RES (30)..(30): Xaa is C or S

SEQ ID NO: 16656 - protein, 34 aa, Artificial Sequence; identical to SEQ ID NO: 6254
  Cyclic GFR-binding peptide
  MOD_RES (32)..(33): Xaa is C or S

SEQ ID NO: 16657 - protein, 35 aa, Artificial Sequence
  Cyclic GFR-binding peptide
  MOD_RES (30)..(31): Xaa is C or S
VVMNNSLQEIVNSSDDYYLVTLPELKTPAXXPKPV

SEQ ID NO: 16658 - protein, 35 aa, Artificial Sequence
  Cyclic GFR-binding peptide
  MOD_RES (2)..(34)..(35): Xaa is C or S
GXSRVVMNNSLQEIVNSSDDYYLVTLPELKTPAXX

SEQ ID NO: 16659 - protein, 38 aa, Artificial Sequence
  Cyclic GFR-binding peptide
  MOD_RES (1)..(3)..(35)..(36): Xaa is C or S
XGXSRVVMNEYQKYIVNSSDDIFLVSIPSLKTPAXXPK

SEQ ID NO: 16660 - protein, 31 aa, Artificial Sequence
  Cyclic GFR-binding peptide
  MOD_RES (2)..(4): Xaa is C or S
RXGXGEVVMENSLQEVVKDYEDYYLMTLPEL

SEQ ID NO: 16661 - protein, 22 aa, Artificial Sequence
  Cyclic GFR-binding peptide
IMQYNKLIKPTKGILYLISIAS

SEQ ID NO: 16662 - protein, 37 aa, Artificial Sequence; identical to SEQ ID NO: 6259
  Cyclic GFR-binding peptide
  MOD_RES (1)..(33)..(34): Xaa is C or S

SEQ ID NO: 16663 - protein, 30 aa, Artificial Sequence; identical to SEQ ID NO: 6261
  Cyclic GFR-binding peptide
  MOD_RES (27)..(28): Xaa is C or S

SEQ ID NO: 16664 - protein, 22 aa, Artificial Sequence
  Cyclic GFR-binding peptide
IMNSLQEVKPKRGVYYLITLPE

SEQ ID NO: 16665 - protein, 31 aa, Artificial Sequence; identical to SEQ ID NO: 6264
  Cyclic GFR-binding peptide
  MOD_RES (30)..(31): Xaa is C or S

SEQ ID NO: 16666 - protein, 32 aa, Artificial Sequence; identical to SEQ ID NO: 6265
  Cyclic GFR-binding peptide
  MOD_RES (27)..(28): Xaa is C or S

SEQ ID NO: 16667 - protein, 38 aa, Artificial Sequence; identical to SEQ ID NO: 6268
  Cyclic GFR-binding peptide
  MOD_RES (32)..(32): Xaa is C or S

SEQ ID NO: 16668 - protein, 32 aa, Artificial Sequence; identical to SEQ ID NO: 6271
  Cyclic GFR-binding peptide
  MOD_RES (27)..(28): Xaa is C or S

SEQ ID NO: 16669 - protein, 31 aa, Artificial Sequence
  Cyclic GFR-binding peptide
  MOD_RES (30)..(31): Xaa is C or S
RVIMEYQKYVKPKRGVIFLISIPSLAQPVXX

SEQ ID NO: 16670 - protein, 26 aa, Artificial Sequence
  Cyclic GFR-binding peptide
VIMRYKKLIKPTKGIFYLISIANLDQ

SEQ ID NO: 16671 - protein, 31 aa, Artificial Sequence; identical to SEQ ID NO: 6276
  Cyclic GFR-binding peptide
  MOD_RES (2)..(2): Xaa is C or S

SEQ ID NO: 16672 - protein, 24 aa, Artificial Sequence
  Cyclic GFR-binding peptide
VMDQYNKLVVKENEDLYLMSIASL

SEQ ID NO: 16673 - protein, 31 aa, Artificial Sequence
  Cyclic GFR-binding peptide
  MOD_RES (28)..(29): Xaa is C or S
IMNSLQEVKPKRGVYYLITLPELAQPVXXPA

SEQ ID NO: 16674 - protein, 31 aa, Artificial Sequence; identical to SEQ ID NO: 6279
  Cyclic GFR-binding peptide
  MOD_RES (27)..(28): Xaa is C or S

SEQ ID NO: 16675 - protein, 30 aa, Artificial Sequence; identical to SEQ ID NO: 6280
  Cyclic GFR-binding peptide

SEQ ID NO: 16676 - protein, 29 aa, Artificial Sequence
  Cyclic GFR-binding peptide
  MOD_RES (1)..(1): Xaa is C or S
XSRVIMQYNKLVKPKRGVLYLISIASLAQ

SEQ ID NO: 16677 - protein, 40 aa, Artificial Sequence; identical to SEQ ID NO: 6282
  Cyclic GFR-binding peptide
  MOD_RES (2)..(34)..(35): Xaa is C or S

SEQ ID NO: 16678 - protein, 32 aa, Artificial Sequence
  Cyclic GFR-binding peptide
  MOD_RES (2)..(4): Xaa is C or S
RXGXGEVVMDEYQKYVVKENEDIFLMSIPSLE

SEQ ID NO: 16679 - protein, 29 aa, Artificial Sequence
  Cyclic GFR-binding peptide
  MOD_RES (1)..(3): Xaa is C or S
XGXGEVVMDRYKKLVVKENEDFYLMSIAN

SEQ ID NO: 16680 - protein, 34 aa, Artificial Sequence
  Cyclic GFR-binding peptide
  MOD_RES (28)..(29): Xaa is C or S
IMNSLQEIKPTKGIYYLITLPELDQSVXXPSASA

SEQ ID NO: 16681 - protein, 37 aa, Artificial Sequence; identical to SEQ ID NO: 6287
  Cyclic GFR-binding peptide
  MOD_RES (1)..(3)..(34)..(35): Xaa is C or S

SEQ ID NO: 16682 - protein, 30 aa, Artificial Sequence
  Cyclic GFR-binding peptide
  MOD_RES (30)..(30): Xaa is C or S
KVVMEYQKYVKPTRGVIFLISIPSLDQPVX

SEQ ID NO: 16683 - protein, 20 aa, Artificial Sequence
  Cyclic GFR-binding peptide
RYKKLVVKDYEDFYLMSIAN

SEQ ID NO: 16684 - protein, 32 aa, Artificial Sequence
  Cyclic GFR-binding peptide
  MOD_RES (30)..(31): Xaa is C or S
VVMNEYQKYIVNSSDDIFLVSIPSLKTPAXXP

SEQ ID NO: 16685 - protein, 28 aa, Artificial Sequence
  Cyclic GFR-binding peptide
VMNNSLQEIVNSSDDYYVVPLPELKTPA

SEQ ID NO: 16686 - protein, 30 aa, Artificial Sequence; identical to SEQ ID NO: 6298
  Cyclic GFR-binding peptide

SEQ ID NO: 16687 - protein, 29 aa, Artificial Sequence
  Cyclic GFR-binding peptide
  MOD_RES (1)..(3): Xaa is C or S
XGXARVVMNQYNKLIVNSSDDLYLVSIAS

SEQ ID NO: 16688 - protein, 30 aa, Artificial Sequence; identical to SEQ ID NO: 6300
  Cyclic GFR-binding peptide
  MOD_RES (1)..(3): Xaa is C or S

SEQ ID NO: 16689 - protein, 39 aa, Artificial Sequence
  Cyclic GFR-binding peptide
  MOD_RES (1)..(33)..(34): Xaa is C or S
XGEVVMDNSLQEVVKENEDYYVMPLPELETPVXXAKPIK

SEQ ID NO: 16690 - protein, 25 aa, Artificial Sequence
  Cyclic GFR-binding peptide
EEYQKYVVKDYEDIFLMSIPSLETP

SEQ ID NO: 16691 - protein, 28 aa, Artificial Sequence
  Cyclic GFR-binding peptide
  MOD_RES (1)..(1): Xaa is C or S
XSRVVMNEYQKYIVNSSDDIFLVSIPSL

SEQ ID NO: 16692 - protein, 36 aa, Artificial Sequence
  Cyclic GFR-binding peptide
  MOD_RES (2)..(4)..(35)..(36): Xaa is C or S
SXKXSRVIMEYQKYVKPKRGVIFLISIPSLAQPVXX

SEQ ID NO: 16693 - protein, 29 aa, Artificial Sequence
  Cyclic GFR-binding peptide
  MOD_RES (29)..(29): Xaa is C or S
VMDNSLQEVVNNASDYYVIPLPELRTPVX

SEQ ID NO: 16694 - protein, 28 aa, Artificial Sequence
  Cyclic GFR-binding peptide
  MOD_RES (26)..(27): Xaa is C or S
RYKKLIVNSSDDFYLVSIANLQTPAXXP

SEQ ID NO: 16695 - protein, 24 aa, Artificial Sequence
  Cyclic GFR-binding peptide
MQYNKLVKPTRGVLYLISIASLDQ

SEQ ID NO: 16696 - protein, 32 aa, Artificial Sequence
  Cyclic GFR-binding peptide
  MOD_RES (29)..(30): Xaa is C or S
VMDQYNKLVVNNASDLYLISIASLRTPVXXTP

SEQ ID NO: 16697 - protein, 23 aa, Artificial Sequence
  Cyclic GFR-binding peptide
DEYQKYVVKENEDIFLMSIPSLE

SEQ ID NO: 16698 - protein, 32 aa, Artificial Sequence; identical to SEQ ID NO: 6311
  Cyclic GFR-binding peptide
  MOD_RES (28)..(29): Xaa is C or S

SEQ ID NO: 16699 - protein, 35 aa, Artificial Sequence; identical to SEQ ID NO: 6312
  Cyclic GFR-binding peptide
  MOD_RES (2)..(34)..(35): Xaa is C or S

SEQ ID NO: 16700 - protein, 31 aa, Artificial Sequence
  Cyclic GFR-binding peptide
  MOD_RES (1)..(1): Xaa is C or S
XSEVVMDQYNKLVVNNASDLYLISIASLRTP

SEQ ID NO: 16701 - protein, 39 aa, Artificial Sequence; identical to SEQ ID NO: 6314
  Cyclic GFR-binding peptide
  MOD_RES (2)..(4)..(36)..(37): Xaa is C or S

SEQ ID NO: 16702 - protein, 23 aa, Artificial Sequence
  Cyclic GFR-binding peptide
RYKKLIKPTKGIFYLISIANLDQ

SEQ ID NO: 16703 - protein, 31 aa, Artificial Sequence; identical to SEQ ID NO: 6316
  Cyclic GFR-binding peptide
  MOD_RES (2)..(4): Xaa is C or S

SEQ ID NO: 16704 - protein, 30 aa, Artificial Sequence
  Cyclic GFR-binding peptide
  MOD_RES (2)..(2): Xaa is C or S
KXSKVIMNSLQEIKPTKGIYYLITLPELDQ

SEQ ID NO: 16705 - protein, 28 aa, Artificial Sequence
  Cyclic GFR-binding peptide
SRVIMEYQKYVKPKRGVIFLISIPSLAQ

SEQ ID NO: 16706 - protein, 26 aa, Artificial Sequence
  Cyclic GFR-binding peptide
MNQYNKLIVNSSDDLYLVSIASLKTP

SEQ ID NO: 16707 - protein, 32 aa, Artificial Sequence
  Cyclic GFR-binding peptide
  MOD_RES (32)..(32): Xaa is C or S
GEVVMDNSLQEVVKENEDYYVMPLPELETPVX

SEQ ID NO: 16708 - protein, 33 aa, Artificial Sequence; identical to SEQ ID NO: 6322
  Cyclic GFR-binding peptide
  MOD_RES (2)..(4): Xaa is C or S

SEQ ID NO: 16709 - protein, 25 aa, Artificial Sequence
  Cyclic GFR-binding peptide
EVVMDNSLQEVVNNASDYYVIPLPE

SEQ ID NO: 16710 - protein, 21 aa, Artificial Sequence
  Cyclic GFR-binding peptide
MEYQKYVKPKRGVIFLISIPS

SEQ ID NO: 16711 - protein, 30 aa, Artificial Sequence
  Cyclic GFR-binding peptide
  MOD_RES (29)..(30): Xaa is C or S
VMNNSLQEIVNSSDDYYVVPLPELQTPAXX

SEQ ID NO: 16712 - protein, 33 aa, Artificial Sequence
  Cyclic GFR-binding peptide
  MOD_RES (32)..(33): Xaa is C or S
SRVVMNEYQKYIVNSSDDIFLVSIPSLKTPAXX

SEQ ID NO: 16713 - protein, 34 aa, Artificial Sequence
  Cyclic GFR-binding peptide
  MOD_RES (31)..(32): Xaa is C or S
SKVVMNSLQEVKPTRGVYYVIPLPELDQPVXXPS

SEQ ID NO: 16714 - protein, 28 aa, Artificial Sequence
  Cyclic GFR-binding peptide
  MOD_RES (27)..(28): Xaa is C or S
MRYKKLVKPKRGVFYLISIANLAQPVXX

SEQ ID NO: 16715 - protein, 22 aa, Artificial Sequence
  Cyclic GFR-binding peptide
MDRYKKLVVKENEDFYLMSIAN

SEQ ID NO: 16716 - protein, 37 aa, Artificial Sequence
  Cyclic GFR-binding peptide
  MOD_RES (2)..(4)..(36)..(37): Xaa is C or S
RXGXGEVVMENSLQEVVKDYEDYYVMPLPELETPVXX

SEQ ID NO: 16717 - protein, 37 aa, Artificial Sequence; identical to SEQ ID NO: 6332
  Cyclic GFR-binding peptide
  MOD_RES (1)..(3)..(34)..(35): Xaa is C or S

SEQ ID NO: 16718 - protein, 38 aa, Artificial Sequence; identical to SEQ ID NO: 6333
  Cyclic GFR-binding peptide
  MOD_RES (2)..(34)..(35): Xaa is C or S

SEQ ID NO: 16719 - protein, 31 aa, Artificial Sequence
  Cyclic GFR-binding peptide
  MOD_RES (27)..(28): Xaa is C or S
EEYQKYVVKDYEDIFLMSIPSLETPVXXAKP

SEQ ID NO: 16720 - protein, 30 aa, Artificial Sequence
  Cyclic GFR-binding peptide
  MOD_RES (28)..(29): Xaa is C or S
MNEYQKYIVNSSDDIFLVSIPSLQTPAXXP

SEQ ID NO: 16721 - protein, 29 aa, Artificial Sequence
  Cyclic GFR-binding peptide
  MOD_RES (27)..(28): Xaa is C or S
ERYKKLVVKDYEDFYLMSIANLETPVXXA

SEQ ID NO: 16722 - protein, 31 aa, Artificial Sequence
  Cyclic GFR-binding peptide
  MOD_RES (30)..(31): Xaa is C or S
VVMENSLQEVVKDYEDYYLMTLPELETPVXX

SEQ ID NO: 16723 - protein, 30 aa, Artificial Sequence; identical to SEQ ID NO: 6342
  Cyclic GFR-binding peptide
  MOD_RES (26)..(27): Xaa is C or S

SEQ ID NO: 16724 - protein, 35 aa, Artificial Sequence; identical to SEQ ID NO: 6343
  Cyclic GFR-binding peptide
  MOD_RES (2)..(4)..(35): Xaa is C or S

SEQ ID NO: 16725 - protein, 30 aa, Artificial Sequence
  Cyclic GFR-binding peptide
SKVIMNSLQEIKPTKGIYYVIPLPELDQSV

SEQ ID NO: 16726 - protein, 28 aa, Artificial Sequence
  Cyclic GFR-binding peptide
GEVVMDRYKKLVVKENEDFYLMSIANLE

SEQ ID NO: 16727 - protein, 32 aa, Artificial Sequence
  Cyclic GFR-binding peptide
  MOD_RES (2)..(4): Xaa is C or S
RXGXSEVVMDEYQKYVVNNASDIFLISIPSLR

SEQ ID NO: 16728 - protein, 29 aa, Artificial Sequence
  Cyclic GFR-binding peptide
EVVMDQYNKLVVKENEDLYLMSIASLETP

SEQ ID NO: 16729 - protein, 38 aa, Artificial Sequence
  Cyclic GFR-binding peptide
  MOD_RES (1)..(3)..(35)..(36): Xaa is C or S
XGXSRVVMNNSLQEIVNSSDDYYLVTLPELKTPAXXPK

SEQ ID NO: 16730 - protein, 33 aa, Artificial Sequence; identical to SEQ ID NO: 6348
  Cyclic GFR-binding peptide
  MOD_RES (31)..(32): Xaa is C or S

SEQ ID NO: 16731 - protein, 34 aa, Artificial Sequence; identical to SEQ ID NO: 6350
  Cyclic GFR-binding peptide
  MOD_RES (30)..(31): Xaa is C or S

SEQ ID NO: 16732 - protein, 33 aa, Artificial Sequence; identical to SEQ ID NO: 6352
  Cyclic GFR-binding peptide
  MOD_RES (2)..(33): Xaa is C or S

SEQ ID NO: 16733 - protein, 31 aa, Artificial Sequence; identical to SEQ ID NO: 6353
  Cyclic GFR-binding peptide
  MOD_RES (27)..(28): Xaa is C or S

SEQ ID NO: 16734 - protein, 28 aa, Artificial Sequence
  Cyclic GFR-binding peptide
  MOD_RES (28)..(28): Xaa is C or S
LSAISVLYLDDSSNVILKNYQNMVVRSX

SEQ ID NO: 16735 - protein, 38 aa, Artificial Sequence; identical to SEQ ID NO: 6355
  Cyclic GFR-binding peptide
  MOD_RES (6)..(7): Xaa is C or S

SEQ ID NO: 16736 - protein, 30 aa, Artificial Sequence
  Cyclic GFR-binding peptide
  MOD_RES (1)..(2): Xaa is C or S
XXVPTRLEPLTILYYDSANNVVEQLSNDMV

SEQ ID NO: 16737 - protein, 36 aa, Artificial Sequence
  Cyclic GFR-binding peptide
  MOD_RES (1)..(33)..(35): Xaa is C or S
XAPTKLEPLPVVYYDDSSNVIEQLSNNMVVRSXGXH

SEQ ID NO: 16738 - protein, 35 aa, Artificial Sequence; identical to SEQ ID NO: 6358
  Cyclic GFR-binding peptide
  MOD_RES (32)..(34): Xaa is C or S

SEQ ID NO: 16739 - protein, 24 aa, Artificial Sequence
  Cyclic GFR-binding peptide
QDLNAISILYFIGKTPKILKKYRM

SEQ ID NO: 16740 - protein, 29 aa, Artificial Sequence
  Cyclic GFR-binding peptide
  MOD_RES (29)..(29): Xaa is C or S
QDLNAISILYFVGRTPKVLKKYRMVVKSX

SEQ ID NO: 16741 - protein, 30 aa, Artificial Sequence; identical to SEQ ID NO: 6363
  Cyclic GFR-binding peptide
  MOD_RES (30)..(30): Xaa is C or S

SEQ ID NO: 16742 - protein, 25 aa, Artificial Sequence
  Cyclic GFR-binding peptide
VSQDLSAISILYLIGKTPKILKNYQ

SEQ ID NO: 16743 - protein, 33 aa, Artificial Sequence; identical to SEQ ID NO: 6366
  Cyclic GFR-binding peptide
  MOD_RES (32)..(32): Xaa is C or S

SEQ ID NO: 16744 - protein, 28 aa, Artificial Sequence
  Cyclic GFR-binding peptide
PQALNAISILYFVGRKPKVLKKYRMIVR

SEQ ID NO: 16745 - protein, 26 aa, Artificial Sequence
  Cyclic GFR-binding peptide
LSAISILYLIGKTPKILKNYQMIVKS

SEQ ID NO: 16746 - protein, 25 aa, Artificial Sequence
  Cyclic GFR-binding peptide
LNAISMLYFDENEKVVLKKYRDMVV

SEQ ID NO: 16747 - protein, 32 aa, Artificial Sequence
  Cyclic GFR-binding peptide
  MOD_RES (6)..(7): Xaa is C or S
YVPKPXXAPTKLEPLPVVYYDDSSNVIEQLSN

SEQ ID NO: 16748 - protein, 33 aa, Artificial Sequence; identical to SEQ ID NO: 6370
  Cyclic GFR-binding peptide
  MOD_RES (30)..(32): Xaa is C or S

SEQ ID NO: 16749 - protein, 35 aa, Artificial Sequence
  Cyclic GFR-binding peptide
  MOD_RES (2)..(3)..(35): Xaa is C or S
AXXVPTELEPLPMVYYDEYDKVVEQLSNEMVVEGX

SEQ ID NO: 16750 - protein, 34 aa, Artificial Sequence
  Cyclic GFR-binding peptide
  MOD_RES (1)..(33): Xaa is C or S
XAPTQLEPLTVLYYDDSSNVIEQLSNNMVVRAXG

SEQ ID NO: 16751 - protein, 25 aa, Artificial Sequence
  Cyclic GFR-binding peptide
VPTRLNAISILYFDSANNVVLKKYR

SEQ ID NO: 16752 - protein, 25 aa, Artificial Sequence
  Cyclic GFR-binding peptide
APTKLSPISVLFIDDSSNVIYKQYE

SEQ ID NO: 16753 - protein, 28 aa, Artificial Sequence
  Cyclic GFR-binding peptide
  MOD_RES (1)..(2): Xaa is C or S
XXVPTRLEPLPIVYYDSANNVVEQLSND

SEQ ID NO: 16754 - protein, 32 aa, Artificial Sequence
  Cyclic GFR-binding peptide
  MOD_RES (6)..(7): Xaa is C or S
ASASPXXVPQDLEPLPIVYYVGRTPKVEQLSN

SEQ ID NO: 16755 - protein, 40 aa, Artificial Sequence
  Cyclic GFR-binding peptide
  MOD_RES (6)..(7)..(39): Xaa is C or S
KIPKAXXVPTELEPLPMVYYDENEKVVEQLSNDMVVEGXG

SEQ ID NO: 16756 - protein, 27 aa, Artificial Sequence
  Cyclic GFR-binding peptide
  MOD_RES (2)..(2): Xaa is C or S
TXAPTKLEPLTVLYYDDSSNVIEQLSN

SEQ ID NO: 16757 - protein, 38 aa, Artificial Sequence; identical to SEQ ID NO: 6375
  Cyclic GFR-binding peptide
  MOD_RES (4)..(5)..(36)..(38): Xaa is C or S

SEQ ID NO: 16758 - protein, 26 aa, Artificial Sequence
  Cyclic GFR-binding peptide
TQLEPLTVLYYDDSSNVIEQLSNNMV

SEQ ID NO: 16759 - protein, 35 aa, Artificial Sequence
  Cyclic GFR-binding peptide
  MOD_RES (2)..(3)..(35): Xaa is C or S
PXXAPTKLSPISVLFIDDSSNVIYKQYENMVVRSX

SEQ ID NO: 16760 - protein, 34 aa, Artificial Sequence
  Cyclic GFR-binding peptide
  MOD_RES (6)..(7): Xaa is C or S
ASASPXXVPQDLEPLPIVYYVGRTPKVEQLSNMV

SEQ ID NO: 16761 - protein, 31 aa, Artificial Sequence
  Cyclic GFR-binding peptide
  MOD_RES (2)..(3): Xaa is C or S
PXXVPQDLSPISILFIVGRTPKVYKQYEMVV

SEQ ID NO: 16762 - protein, 22 aa, Artificial Sequence
  Cyclic GFR-binding peptide
LNAISILYFVGRKPKVLKKYRM

SEQ ID NO: 16763 - protein, 35 aa, Artificial Sequence; identical to SEQ ID NO: 6380
  Cyclic GFR-binding peptide
  MOD_RES (4)..(5): Xaa is C or S

SEQ ID NO: 16764 - protein, 29 aa, Artificial Sequence
  Cyclic GFR-binding peptide
PTQLSPISVLFIDDSSNVIYKQYENMVVR

SEQ ID NO: 16765 - protein, 32 aa, Artificial Sequence
  Cyclic GFR-binding peptide
  MOD_RES (6)..(7): Xaa is C or S
STPPTXXVPTRLSAISILYLDSANNVVLKNYQ

SEQ ID NO: 16766 - protein, 36 aa, Artificial Sequence
  Cyclic GFR-binding peptide
  MOD_RES (6)..(7): Xaa is C or S
ASAAPXXVPQALSPISILFIVGRKPKVYKQYEMIVR

SEQ ID NO: 16767 - protein, 33 aa, Artificial Sequence
  Cyclic GFR-binding peptide
  MOD_RES (6)..(7): Xaa is C or S
ASASPXXVSQDLEPLPIVYYIGKTPKIEQLSNM

SEQ ID NO: 16768 - protein, 35 aa, Artificial Sequence
  Cyclic GFR-binding peptide
  MOD_RES (2)..(3)..(35): Xaa is C or S
TXXVPTRLEPLPIVYYDSANNVVEQLSNDMVVESX

SEQ ID NO: 16769 - protein, 35 aa, Artificial Sequence
  Cyclic GFR-binding peptide
  MOD_RES (1)..(2)..(34): Xaa is C or S
XXVPTELEPLPMVYYDEYDKVVEQLSNEMVVEGXG

SEQ ID NO: 16770 - protein, 39 aa, Artificial Sequence; identical to SEQ ID NO: 6386
  Cyclic GFR-binding peptide
  MOD_RES (4)..(5)..(37)..(39): Xaa is C or S

SEQ ID NO: 16771 - protein, 27 aa, Artificial Sequence
  Cyclic GFR-binding peptide
  MOD_RES (1)..(1): Xaa is C or S
XVPTRLNAISILYFDSANNVVLKKYRD

SEQ ID NO: 16772 - protein, 35 aa, Artificial Sequence; identical to SEQ ID NO: 6387
  Cyclic GFR-binding peptide
  MOD_RES (3)..(4)..(35): Xaa is C or S

SEQ ID NO: 16773 - protein, 30 aa, Artificial Sequence
  Cyclic GFR-binding peptide
  MOD_RES (3)..(4): Xaa is C or S
SPXXVSQDLEPLPIVYYIGKTPKIEQLSNM

SEQ ID NO: 16774 - protein, 27 aa, Artificial Sequence
  Cyclic GFR-binding peptide
ELSPISMLFIDENEKVVYKQYEDMVVE

SEQ ID NO: 16775 - protein, 37 aa, Artificial Sequence
  Cyclic GFR-binding peptide
  MOD_RES (5)..(6): Xaa is C or S
IPKAXXVPTELEPLTMLYYDEYDKVVEQLSNEMVVEG

SEQ ID NO: 16776 - protein, 22 aa, Artificial Sequence
  Cyclic GFR-binding peptide
LEPLPVVYYDDSSNVIEQLSNN

SEQ ID NO: 16777 - protein, 37 aa, Artificial Sequence; identical to SEQ ID NO: 6395
  Cyclic GFR-binding peptide
  MOD_RES (6)..(7): Xaa is C or S

SEQ ID NO: 16778 - protein, 27 aa, Artificial Sequence
  Cyclic GFR-binding peptide
TELSPISMLFIDENEKVVYKQYEDMVV

SEQ ID NO: 16779 - protein, 35 aa, Artificial Sequence
  Cyclic GFR-binding peptide
  MOD_RES (4)..(5): Xaa is C or S
PPTXXVPTRLEPLTILYYDSANNVVEQLSNDMVVE

SEQ ID NO: 16780 - protein, 33 aa, Artificial Sequence
  Cyclic GFR-binding peptide
  MOD_RES (30)..(32): Xaa is C or S
TKLEPLPVVYYDDSSNVIEQLSNNMVVRSXGXH

SEQ ID NO: 16781 - protein, 25 aa, Artificial Sequence
  Cyclic GFR-binding peptide
PTELEPLPMVYYDENEKVVEQLSND

SEQ ID NO: 16782 - protein, 29 aa, Artificial Sequence
  Cyclic GFR-binding peptide
PQALNAISILYFVGRKPKVLKKYRMIVRS

SEQ ID NO: 16783 - protein, 38 aa, Artificial Sequence; identical to SEQ ID NO: 6403
  Cyclic GFR-binding peptide
  MOD_RES (7)..(7): Xaa is C or S

SEQ ID NO: 16784 - protein, 34 aa, Artificial Sequence
  Cyclic GFR-binding peptide
  MOD_RES (31)..(33): Xaa is C or S
PTRLSAISILYLDSANNVVLKNYQDMVVESXGXR

SEQ ID NO: 16785 - protein, 30 aa, Artificial Sequence; identical to SEQ ID NO: 6407
  Cyclic GFR-binding peptide
  MOD_RES (29)..(29): Xaa is C or S

SEQ ID NO: 16786 - protein, 33 aa, Artificial Sequence
  Cyclic GFR-binding peptide
  MOD_RES (32)..(32): Xaa is C or S
APTKLSPISVLFIDDSSNVIYKQYENMVVRSXG

SEQ ID NO: 16787 - protein, 37 aa, Artificial Sequence
  Cyclic GFR-binding peptide
  MOD_RES (4)..(5)..(37): Xaa is C or S
PPTXXVPTRLEPLPIVYYDSANNVVEQLSNDMVVESX

SEQ ID NO: 16788 - protein, 24 aa, Artificial Sequence
  Cyclic GFR-binding peptide
PTKLEPLTVLYYDDSSNVIEQLSN

SEQ ID NO: 16789 - protein, 30 aa, Artificial Sequence
  Cyclic GFR-binding peptide
  MOD_RES (30)..(30): Xaa is C or S
SQDLEPLPIVYYIGKTPKIEQLSNMIVKSX

SEQ ID NO: 16790 - protein, 26 aa, Artificial Sequence
  Cyclic GFR-binding peptide
EPLTILYYDSANNVVEQLSNDMVVES

SEQ ID NO: 16791 - protein, 33 aa, Artificial Sequence; identical to SEQ ID NO: 6412
  Cyclic GFR-binding peptide
  MOD_RES (3)..(4): Xaa is C or S

SEQ ID NO: 16792 - protein, 22 aa, Artificial Sequence
  Cyclic GFR-binding peptide
LSAISILYLIGKTPKILKNYQM

SEQ ID NO: 16793 - protein, 25 aa, Artificial Sequence
  Cyclic GFR-binding peptide
QALSPISILFIVGRKPKVYKQYEMI

SEQ ID NO: 16794 - protein, 41 aa, Artificial Sequence
  Cyclic GFR-binding peptide
  MOD_RES (6)..(7)..(39)..(41): Xaa is C or S
STPPTXXVPTRLSAISILYLDSANNVVLKNYQDMVVESXGX

SEQ ID NO: 16795 - protein, 20 aa, Artificial Sequence
  Cyclic GFR-binding peptide
SPISILFIVGRKPKVYKQYE

SEQ ID NO: 16796 - protein, 29 aa, Artificial Sequence
  Cyclic GFR-binding peptide
  MOD_RES (27)..(29): Xaa is C or S
SPISMLFIDEYDKVVYKQYEEMVVEGXGX

SEQ ID NO: 16797 - protein, 35 aa, Artificial Sequence
  Cyclic GFR-binding peptide
  MOD_RES (5)..(6): Xaa is C or S
TPPTXXVPTRLSAISILYLDSANNVVLKNYQDMVV

SEQ ID NO: 16798 - protein, 35 aa, Artificial Sequence; identical to SEQ ID NO: 6417
  Cyclic GFR-binding peptide
  MOD_RES (1)..(32)..(34): Xaa is C or S

SEQ ID NO: 16799 - protein, 26 aa, Artificial Sequence
  Cyclic GFR-binding peptide
  MOD_RES (1)..(1): Xaa is C or S
XVPTELNAISMLYFDEYDKVVLKKYR

SEQ ID NO: 16800 - protein, 30 aa, Artificial Sequence
  Cyclic GFR-binding peptide
  MOD_RES (3)..(4): Xaa is C or S
KAXXVPTELSPISMLFIDENEKVVYKQYED

SEQ ID NO: 16801 - protein, 32 aa, Artificial Sequence; identical to SEQ ID NO: 6422
  Cyclic GFR-binding peptide
  MOD_RES (4)..(5): Xaa is C or S

SEQ ID NO: 16802 - protein, 40 aa, Artificial Sequence
  Cyclic GFR-binding peptide
  MOD_RES (6)..(7)..(38)..(40): Xaa is C or S
ASASPXXVPQDLSPISILFIVGRTPKVYKQYEMVVKSXKX

SEQ ID NO: 16803 - protein, 28 aa, Artificial Sequence
  Cyclic GFR-binding peptide
  MOD_RES (27)..(27): Xaa is C or S
SAISVLYLDDSSNVILKNYQNMVVRSXG

SEQ ID NO: 16804 - protein, 35 aa, Artificial Sequence
  Cyclic GFR-binding peptide
  MOD_RES (32)..(34): Xaa is C or S
APTKLEPLPVVYYDDSSNVIEQLSNNMVVRSXGXH

SEQ ID NO: 16805 - protein, 25 aa, Artificial Sequence
  Cyclic GFR-binding peptide
KLEPLTVLYYDDSSNVIEQLSNNMV

SEQ ID NO: 16806 - protein, 34 aa, Artificial Sequence
  Cyclic GFR-binding peptide
  MOD_RES (6)..(7): Xaa is C or S
SIPKAXXVPTELEPLTMLYYDEYDKVVEQLSNEM

SEQ ID NO: 16807 - protein, 25 aa, Artificial Sequence
  Cyclic GFR-binding peptide
LSPISVLFIDDSSNVIYKQYENMVV

SEQ ID NO: 16808 - protein, 25 aa, Artificial Sequence
  Cyclic GFR-binding peptide
QDLNAISILYFIGKTPKILKKYRMI

SEQ ID NO: 16809 - protein, 31 aa, Artificial Sequence
  Cyclic GFR-binding peptide
APTKLEPLPVVYYDDSSNVIEQLSNNMVVRS

SEQ ID NO: 16810 - protein, 24 aa, Artificial Sequence
  Cyclic GFR-binding peptide
PTELSPISMLFIDEYDKVVYKQYE

SEQ ID NO: 16811 - protein, 37 aa, Artificial Sequence; identical to SEQ ID NO: 6432
  Cyclic GFR-binding peptide
  MOD_RES (4)..(5)..(37): Xaa is C or S

SEQ ID NO: 16812 - protein, 32 aa, Artificial Sequence
  Cyclic GFR-binding peptide
  MOD_RES (32)..(32): Xaa is C or S
APTQLEPLTVLYYDDSSNVIEQLSNNMVVRAX

SEQ ID NO: 16813 - protein, 24 aa, Artificial Sequence
  Cyclic GFR-binding peptide
ELEPLPMVYYDENEKVVEQLSNDM

SEQ ID NO: 16814 - protein, 30 aa, Artificial Sequence
  Cyclic GFR-binding peptide
  MOD_RES (1)..(1): Xaa is C or S
XVPTELSPISMLFIDEYDKVVYKQYEEMVV

SEQ ID NO: 16815 - protein, 27 aa, Artificial Sequence
  Cyclic GFR-binding peptide
  MOD_RES (1)..(2): Xaa is C or S
XXAPTQLSPISVLFIDDSSNVIYKQYE

SEQ ID NO: 16816 - protein, 27 aa, Artificial Sequence
  Cyclic GFR-binding peptide
  MOD_RES (27)..(27): Xaa is C or S
LSPISILFIVGRKPKVYKQYEMIVRSX

SEQ ID NO: 16817 - protein, 33 aa, Artificial Sequence; identical to SEQ ID NO: 6435
  Cyclic GFR-binding peptide
  MOD_RES (30)..(32): Xaa is C or S

SEQ ID NO: 16818 - protein, 35 aa, Artificial Sequence
  Cyclic GFR-binding peptide
  MOD_RES (4)..(5): Xaa is C or S
PKAXXVPTELEPLTMLYYDENEKVVEQLSNDMVVE

SEQ ID NO: 16819 - protein, 27 aa, Artificial Sequence
  Cyclic GFR-binding peptide
PTQLEPLPVVYYDDSSNVIEQLSNNMV

SEQ ID NO: 16820 - protein, 28 aa, Artificial Sequence
  Cyclic GFR-binding peptide
  MOD_RES (3)..(3): Xaa is C or S
PTXAPTKLEPLTVLYYDDSSNVIEQLSN

SEQ ID NO: 16821 - protein, 26 aa, Artificial Sequence
  Cyclic GFR-binding peptide
LSAISILYLVGRKPKVLKNYQMIVRS

SEQ ID NO: 16822 - protein, 35 aa, Artificial Sequence; identical to SEQ ID NO: 6437
  Cyclic GFR-binding peptide
  MOD_RES (6)..(7): Xaa is C or S

SEQ ID NO: 16823 - protein, 34 aa, Artificial Sequence; identical to SEQ ID NO: 6439
  Cyclic GFR-binding peptide
  MOD_RES (3)..(4): Xaa is C or S

SEQ ID NO: 16824 - protein, 25 aa, Artificial Sequence
  Cyclic GFR-binding peptide
VPTELEPLPMVYYDENEKVVEQLSN

SEQ ID NO: 16825 - protein, 36 aa, Artificial Sequence
  Cyclic GFR-binding peptide
  MOD_RES (3)..(4)..(36): Xaa is C or S
PTXXVPTRLEPLTILYYDSANNVVEQLSNDMVVESX

SEQ ID NO: 16826 - protein, 32 aa, Artificial Sequence; identical to SEQ ID NO: 6441
  Cyclic GFR-binding peptide
  MOD_RES (29)..(31): Xaa is C or S

SEQ ID NO: 16827 - protein, 30 aa, Artificial Sequence
  Cyclic GFR-binding peptide
  MOD_RES (1)..(2): Xaa is C or S
XXVPTRLSAISILYLDSANNVVLKNYQDMV

SEQ ID NO: 16828 - protein, 27 aa, Artificial Sequence
  Cyclic GFR-binding peptide
DLEPLPIVYYIGKTPKIEQLSNMIVKS

SEQ ID NO: 16829 - protein, 21 aa, Artificial Sequence
  Cyclic GFR-binding peptide
LEPLPIVYYVGRTPKVEQLSN

SEQ ID NO: 16830 - protein, 30 aa, Artificial Sequence
  Cyclic GFR-binding peptide
  MOD_RES (3)..(4): Xaa is C or S
PTXXVPTRLEPLPIVYYDSANNVVEQLSND

SEQ ID NO: 16831 - protein, 27 aa, Artificial Sequence
  Cyclic GFR-binding peptide
RLEPLPIVYYDSANNVVEQLSNDMVVE

SEQ ID NO: 16832 - protein, 31 aa, Artificial Sequence
  Cyclic GFR-binding peptide
  MOD_RES (29)..(31): Xaa is C or S
QLEPLPVVYYDDSSNVIEQLSNNMVVRAXGX

SEQ ID NO: 16833 - protein, 30 aa, Artificial Sequence; identical to SEQ ID NO: 6445
  Cyclic GFR-binding peptide
  MOD_RES (1)..(2): Xaa is C or S

SEQ ID NO: 16834 - protein, 27 aa, Artificial Sequence
  Cyclic GFR-binding peptide
LNAISMLYFDEYDKVVLKKYREMVVEG

SEQ ID NO: 16835 - protein, 27 aa, Artificial Sequence
  Cyclic GFR-binding peptide
TKLSPISVLFIDDSSNVIYKQYENMVV

SEQ ID NO: 16836 - protein, 31 aa, Artificial Sequence; identical to SEQ ID NO: 6448
  Cyclic GFR-binding peptide
  MOD_RES (2)..(3): Xaa is C or S

SEQ ID NO: 16837 - protein, 27 aa, Artificial Sequence
  Cyclic GFR-binding peptide
  MOD_RES (26)..(26): Xaa is C or S
NAISILYFIGKTPKILKKYRMIVKSXK

SEQ ID NO: 16838 - protein, 41 aa, Artificial Sequence
  Cyclic GFR-binding peptide
  MOD_RES (5)..(6)..(38)..(40): Xaa is C or S
IPKAXXVPTELSPISMLFIDENEKVVYKQYEDMVVEGXGXR

SEQ ID NO: 16839 - protein, 21 aa, Artificial Sequence
  Cyclic GFR-binding peptide
SAISILYLVGRKPKVLKNYQM

SEQ ID NO: 16840 - protein, 32 aa, Artificial Sequence
  Cyclic GFR-binding peptide
  MOD_RES (3)..(3): Xaa is C or S
PTXAPTKLEPLPVVYYDDSSNVIEQLSNNMVV

SEQ ID NO: 16841 - protein, 29 aa, Artificial Sequence
  Cyclic GFR-binding peptide
PQDLSPISILFIVGRTPKVYKQYEMVVKS

SEQ ID NO: 16842 - protein, 34 aa, Artificial Sequence
  Cyclic GFR-binding peptide
  MOD_RES (4)..(5): Xaa is C or S
PKPXXAPTKLSPISVLFIDDSSNVIYKQYENMVV

SEQ ID NO: 16843 - protein, 34 aa, Artificial Sequence; identical to SEQ ID NO: 6453
  Cyclic GFR-binding peptide
  MOD_RES (1)..(2)..(34): Xaa is C or S

SEQ ID NO: 16844 - protein, 32 aa, Artificial Sequence
  Cyclic GFR-binding peptide
  MOD_RES (30)..(32): Xaa is C or S
TRLSAISILYLDSANNVVLKNYQDMVVESXGX

SEQ ID NO: 16845 - protein, 32 aa, Artificial Sequence
  Cyclic GFR-binding peptide
  MOD_RES (1)..(2): Xaa is C or S
XXAPTKLSPISVLFIDDSSNVIYKQYENMVVR

SEQ ID NO: 16846 - protein, 30 aa, Artificial Sequence; identical to SEQ ID NO: 6456
  Cyclic GFR-binding peptide
  MOD_RES (1)..(2): Xaa is C or S

SEQ ID NO: 16847 - protein, 30 aa, Artificial Sequence
  Cyclic GFR-binding peptide
  MOD_RES (29)..(29): Xaa is C or S
RLEPLTILYYDSANNVVEQLSNDMVVESXG

SEQ ID NO: 16848 - protein, 40 aa, Artificial Sequence
  Cyclic GFR-binding peptide
  MOD_RES (5)..(6)..(37)..(39): Xaa is C or S
SAAPXXVPQALSPISILFIVGRKPKVYKQYEMIVRSXKXS

SEQ ID NO: 16849 - protein, 34 aa, Artificial Sequence; identical to SEQ ID NO: 6463
  Cyclic GFR-binding peptide
  MOD_RES (6)..(7): Xaa is C or S

SEQ ID NO: 16850 - protein, 30 aa, Artificial Sequence
  Cyclic GFR-binding peptide
  MOD_RES (28)..(30): Xaa is C or S
LNAISILYFDSANNVVLKKYRDMVVESXGX

SEQ ID NO: 16851 - protein, 30 aa, Artificial Sequence
  Cyclic GFR-binding peptide
  MOD_RES (4)..(5): Xaa is C or S
PPTXXVPTRLEPLTILYYDSANNVVEQLSN

SEQ ID NO: 16852 - protein, 34 aa, Artificial Sequence; identical to SEQ ID NO: 6464
  Cyclic GFR-binding peptide
  MOD_RES (5)..(5): Xaa is C or S

SEQ ID NO: 16853 - protein, 29 aa, Artificial Sequence
  Cyclic GFR-binding peptide
  MOD_RES (28)..(28): Xaa is C or S
LSAISVLYLDDSSNVILKNYQNMVVRSXG

SEQ ID NO: 16854 - protein, 31 aa, Artificial Sequence; identical to SEQ ID NO: 6468
  Cyclic GFR-binding peptide
  MOD_RES (4)..(5): Xaa is C or S

SEQ ID NO: 16855 - protein, 32 aa, Artificial Sequence
  Cyclic GFR-binding peptide
  MOD_RES (1)..(1): Xaa is C or S
XVPTELEPLTMLYYDEYDKVVEQLSNEMVVEG

SEQ ID NO: 16856 - protein, 39 aa, Artificial Sequence
  Cyclic GFR-binding peptide
  MOD_RES (4)..(5)..(37)..(39): Xaa is C or S
PKPXXAPTKLEPLTVLYYDDSSNVIEQLSNNMVVRSXGX

SEQ ID NO: 16857 - protein, 26 aa, Artificial Sequence
  Cyclic GFR-binding peptide
  MOD_RES (1)..(1): Xaa is C or S
XAPTQLEPLPVVYYDDSSNVIEQLSN

SEQ ID NO: 16858 - protein, 32 aa, Artificial Sequence
  Cyclic GFR-binding peptide
  MOD_RES (6)..(7): Xaa is C or S
SIPKAXXVPTELEPLPMVYYDEYDKVVEQLSN

SEQ ID NO: 16859 - protein, 32 aa, Artificial Sequence
  Cyclic GFR-binding peptide
  MOD_RES (4)..(5): Xaa is C or S
ASPXXVPQDLEPLPIVYYVGRTPKVEQLSNMV

SEQ ID NO: 16860 - protein, 25 aa, Artificial Sequence
  Cyclic GFR-binding peptide
TKLEPLTVLYYDDSSNVIEQLSNNM

SEQ ID NO: 16861 - protein, 33 aa, Artificial Sequence
  Cyclic GFR-binding peptide
  MOD_RES (31)..(33): Xaa is C or S
PTRLEPLTILYYDSANNVVEQLSNDMVVESXGX

SEQ ID NO: 16862 - protein, 31 aa, Artificial Sequence
  Cyclic GFR-binding peptide
  MOD_RES (2)..(3): Xaa is C or S
PXXVPQDLEPLPIVYYVGRTPKVEQLSNMVV

SEQ ID NO: 16863 - protein, 28 aa, Artificial Sequence
  Cyclic GFR-binding peptide
QALNAISILYFVGRKPKVLKKYRMIVRS

SEQ ID NO: 16864 - protein, 31 aa, Artificial Sequence
  Cyclic GFR-binding peptide
  MOD_RES (1)..(1): Xaa is C or S
XAPTQLSPISVLFIDDSSNVIYKQYENMVVR

SEQ ID NO: 16865 - protein, 32 aa, Artificial Sequence
  Cyclic GFR-binding peptide
  MOD_RES (1)..(2): Xaa is C or S
XXVPQALSPISILFIVGRKPKVYKQYEMIVRS

SEQ ID NO: 16866 - protein, 35 aa, Artificial Sequence; identical to SEQ ID NO: 6484
  Cyclic GFR-binding peptide
  MOD_RES (3)..(4)..(35): Xaa is C or S

SEQ ID NO: 16867 - protein, 29 aa, Artificial Sequence
  Cyclic GFR-binding peptide
VPTRLEPLPIVYYDSANNVVEQLSNDMVV

SEQ ID NO: 16868 - protein, 30 aa, Artificial Sequence
  Cyclic GFR-binding peptide
  MOD_RES (1)..(1): Xaa is C or S
XVPQDLEPLPIVYYVGRTPKVEQLSNMVVK

SEQ ID NO: 16869 - protein, 31 aa, Artificial Sequence
  Cyclic GFR-binding peptide
  MOD_RES (3)..(4): Xaa is C or S
PTXXVPTRLEPLTILYYDSANNVVEQLSNDM

SEQ ID NO: 16870 - protein, 23 aa, Artificial Sequence
  Cyclic GFR-binding peptide
QLEPLTVLYYDDSSNVIEQLSNN

SEQ ID NO: 16871 - protein, 32 aa, Artificial Sequence; identical to SEQ ID NO: 6490
  Cyclic GFR-binding peptide
  MOD_RES (31)..(31): Xaa is C or S

SEQ ID NO: 16872 - protein, 34 aa, Artificial Sequence
  Cyclic GFR-binding peptide
  MOD_RES (4)..(4): Xaa is C or S
KPTXAPTKLEPLTVLYYDDSSNVIEQLSNNMVVR

SEQ ID NO: 16873 - protein, 25 aa, Artificial Sequence
  Cyclic GFR-binding peptide
KLSAISVLYLDDSSNVILKNYQNMV

SEQ ID NO: 16874 - protein, 38 aa, Artificial Sequence
  Cyclic GFR-binding peptide
  MOD_RES (5)..(6)..(38): Xaa is C or S
TPPTXXVPTRLSAISILYLDSANNVVLKNYQDMVVESX

SEQ ID NO: 16875 - protein, 25 aa, Artificial Sequence
  Cyclic GFR-binding peptide
PTKLSPISVLFIDDSSNVIYKQYEN

SEQ ID NO: 16876 - protein, 28 aa, Artificial Sequence
  Cyclic GFR-binding peptide
  MOD_RES (27)..(27): Xaa is C or S
EPLPVVYYDDSSNVIEQLSNNMVVRSXG

SEQ ID NO: 16877 - protein, 30 aa, Artificial Sequence
  Cyclic GFR-binding peptide
  MOD_RES (1)..(2): Xaa is C or S
XXVSQDLSPISILFIIGKTPKIYKQYEMIV

SEQ ID NO: 16878 - protein, 39 aa, Artificial Sequence
  Cyclic GFR-binding peptide
  MOD_RES (6)..(38): Xaa is C or S
VTKPTXAPTKLSPISVLFIDDSSNVIYKQYENMVVRSXG

SEQ ID NO: 16879 - protein, 33 aa, Artificial Sequence
  Cyclic GFR-binding peptide
  MOD_RES (6)..(7): Xaa is C or S
ASASPXXVPQDLEPLPIVYYVGRTPKVEQLSNM

SEQ ID NO: 16880 - protein, 23 aa, Artificial Sequence
  Cyclic GFR-binding peptide
LNAISMLYFDENEKVVLKKYRDM

SEQ ID NO: 16881 - protein, 34 aa, Artificial Sequence
  Cyclic GFR-binding peptide
  MOD_RES (4)..(5): Xaa is C or S
PPTXXVPTRLEPLTILYYDSANNVVEQLSNDMVV

SEQ ID NO: 16882 - protein, 32 aa, Artificial Sequence
  Cyclic GFR-binding peptide
  MOD_RES (7)..(7): Xaa is C or S
HVTKPTXAPTKLSPISVLFIDDSSNVIYKQYE

SEQ ID NO: 16883 - protein, 30 aa, Artificial Sequence
  Cyclic GFR-binding peptide
  MOD_RES (3)..(4): Xaa is C or S
APXXVPQALEPLTILYYVGRKPKVEQLSNM

SEQ ID NO: 16884 - protein, 29 aa, Artificial Sequence
  Cyclic GFR-binding peptide
VPQDLNAISILYFVGRTPKVLKKYRMVVK

SEQ ID NO: 16885 - protein, 29 aa, Artificial Sequence
  Cyclic GFR-binding peptide
  MOD_RES (28)..(28): Xaa is C or S
ALSAISILYLVGRKPKVLKNYQMIVRSXK

SEQ ID NO: 16886 - protein, 28 aa, Artificial Sequence
  Cyclic GFR-binding peptide
ELEPLPMVYYDEYDKVVEQLSNEMVVEG

SEQ ID NO: 16887 - protein, 30 aa, Artificial Sequence
  Cyclic GFR-binding peptide
  MOD_RES (30)..(30): Xaa is C or S
TRLNAISILYFDSANNVVLKKYRDMVVESX

SEQ ID NO: 16888 - protein, 32 aa, Artificial Sequence; identical to SEQ ID NO: 6510
  Cyclic GFR-binding peptide
  MOD_RES (2)..(2): Xaa is C or S

SEQ ID NO: 16889 - protein, 35 aa, Artificial Sequence
  Cyclic GFR-binding peptide
  MOD_RES (1)..(2)..(33)..(35): Xaa is C or S
XXVSQDLEPLPIVYYIGKTPKIEQLSNMIVKSXKX

SEQ ID NO: 16890 - protein, 38 aa, Artificial Sequence
  Cyclic GFR-binding peptide
  MOD_RES (2)..(3)..(35)..(37): Xaa is C or S
AXXVPTELEPLPMVYYDEYDKVVEQLSNEMVVEGXGXR

SEQ ID NO: 16891 - protein, 30 aa, Artificial Sequence
  Cyclic GFR-binding peptide
  MOD_RES (1)..(2): Xaa is C or S
XXVPTELEPLPMVYYDEYDKVVEQLSNEMV

SEQ ID NO: 16892 - protein, 34 aa, Artificial Sequence
  Cyclic GFR-binding peptide
  MOD_RES (2)..(3): Xaa is C or S
PXXAPTQLEPLPVVYYDDSSNVIEQLSNNMVVRA

SEQ ID NO: 16893 - protein, 40 aa, Artificial Sequence
  Cyclic GFR-binding peptide
  MOD_RES (6)..(7)..(39): Xaa is C or S
STPPTXXVPTRLNAISILYFDSANNVVLKKYRDMVVESXG

SEQ ID NO: 16894 - protein, 32 aa, Artificial Sequence
  Cyclic GFR-binding peptide
  MOD_RES (4)..(5): Xaa is C or S
ASPXXVSQDLEPLPIVYYIGKTPKIEQLSNMI

SEQ ID NO: 16895 - protein, 33 aa, Artificial Sequence
  Cyclic GFR-binding peptide
  MOD_RES (3)..(4): Xaa is C or S
SPXXVSQDLEPLPIVYYIGKTPKIEQLSNMIVK

SEQ ID NO: 16896 - protein, 29 aa, Artificial Sequence
  Cyclic GFR-binding peptide
  MOD_RES (28)..(28): Xaa is C or S
LEPLTMLYYDENEKVVEQLSNDMVVEGXG

SEQ ID NO: 16897 - protein, 29 aa, Artificial Sequence
  Cyclic GFR-binding peptide
  MOD_RES (27)..(29): Xaa is C or S
SAISVLYLDDSSNVILKNYQNMVVRSXGX

SEQ ID NO: 16898 - protein, 36 aa, Artificial Sequence; identical to SEQ ID NO: 6521
  Cyclic GFR-binding peptide
  MOD_RES (4)..(5)..(36): Xaa is C or S

SEQ ID NO: 16899 - protein, 26 aa, Artificial Sequence
  Cyclic GFR-binding peptide
PTELNAISMLYFDENEKVVLKKYRDM

SEQ ID NO: 16900 - protein, 34 aa, Artificial Sequence
  Cyclic GFR-binding peptide
  MOD_RES (32)..(34): Xaa is C or S
APTQLSPISVLFIDDSSNVIYKQYENMVVRAXGX

SEQ ID NO: 16901 - protein, 30 aa, Artificial Sequence
  Cyclic GFR-binding peptide
  MOD_RES (30)..(30): Xaa is C or S
TRLEPLPIVYYDSANNVVEQLSNDMVVESX

SEQ ID NO: 16902 - protein, 22 aa, Artificial Sequence
  Cyclic GFR-binding peptide
SPISMLFIDEYDKVVYKQYEEM

SEQ ID NO: 16903 - protein, 35 aa, Artificial Sequence; identical to SEQ ID NO: 6527
  Cyclic GFR-binding peptide
  MOD_RES (6)..(7): Xaa is C or S

SEQ ID NO: 16904 - protein, 29 aa, Artificial Sequence
  Cyclic GFR-binding peptide
TQLSAISVLYLDDSSNVILKNYQNMVVRA

SEQ ID NO: 16905 - protein, 30 aa, Artificial Sequence
  Cyclic GFR-binding peptide
VPTELEPLTMLYYDENEKVVEQLSNDMVVE

SEQ ID NO: 16906 - protein, 37 aa, Artificial Sequence
  Cyclic GFR-binding peptide
  MOD_RES (3)..(4)..(35)..(37): Xaa is C or S
APXXVPQALSPISILFIVGRKPKVYKQYEMIVRSXKX

SEQ ID NO: 16907 - protein, 26 aa, Artificial Sequence
  Cyclic GFR-binding peptide
RLEPLPIVYYDSANNVVEQLSNDMVV

SEQ ID NO: 16908 - protein, 24 aa, Artificial Sequence
  Cyclic GFR-binding peptide
TELEPLPMVYYDENEKVVEQLSND

SEQ ID NO: 16909 - protein, 25 aa, Artificial Sequence
  Cyclic GFR-binding peptide
DLSAISILYLIGKTPKILKNYQMIV

SEQ ID NO: 16910 - protein, 38 aa, Artificial Sequence
  Cyclic GFR-binding peptide
  MOD_RES (2)..(3)..(35)..(37): Xaa is C or S
PXXAPTQLEPLPVVYYDDSSNVIEQLSNNMVVRAXGXH

SEQ ID NO: 16911 - protein, 32 aa, Artificial Sequence
  Cyclic GFR-binding peptide
  MOD_RES (30)..(32): Xaa is C or S
TKLEPLTVLYYDDSSNVIEQLSNNMVVRSXGX

SEQ ID NO: 16912 - protein, 27 aa, Artificial Sequence
  Cyclic GFR-binding peptide
  MOD_RES (1)..(2): Xaa is C or S
XXVPQDLNAISILYFVGRTPKVLKKYR

SEQ ID NO: 16913 - protein, 24 aa, Artificial Sequence
  Cyclic GFR-binding peptide
EPLTMLYYDENEKVVEQLSNDMVV

SEQ ID NO: 16914 - protein, 31 aa, Artificial Sequence
  Cyclic GFR-binding peptide
  MOD_RES (1)..(1): Xaa is C or S
XAPTKLEPLPVVYYDDSSNVIEQLSNNMVVR

SEQ ID NO: 16915 - protein, 25 aa, Artificial Sequence
  Cyclic GFR-binding peptide
SAISILYLVGRKPKVLKNYQMIVRS

SEQ ID NO: 16916 - protein, 20 aa, Artificial Sequence
  Cyclic GFR-binding peptide
NAISILYFDSANNVVLKKYR

SEQ ID NO: 16917 - protein, 22 aa, Artificial Sequence
  Cyclic GFR-binding peptide
LEPLPMVYYDENEKVVEQLSND

SEQ ID NO: 16918 - protein, 41 aa, Artificial Sequence
  Cyclic GFR-binding peptide
  MOD_RES (6)..(7)..(38)..(40): Xaa is C or S
ASAAPXXVPQALSPISILFIVGRKPKVYKQYEMIVRSXKXS

SEQ ID NO: 16919 - protein, 31 aa, Artificial Sequence; identical to SEQ ID NO: 6547
  Cyclic GFR-binding peptide
  MOD_RES (28)..(30): Xaa is C or S

SEQ ID NO: 16920 - protein, 33 aa, Artificial Sequence; identical to SEQ ID NO: 6548
  Cyclic GFR-binding peptide
  MOD_RES (2)..(3): Xaa is C or S

SEQ ID NO: 16921 - protein, 34 aa, Artificial Sequence; identical to SEQ ID NO: 6550
  Cyclic GFR-binding peptide
  MOD_RES (1)..(32)..(34): Xaa is C or S

SEQ ID NO: 16922 - protein, 37 aa, Artificial Sequence
  Cyclic GFR-binding peptide
  MOD_RES (6)..(7): Xaa is C or S
ASASPXXVPQDLSPISILFIVGRTPKVYKQYEMVVKS

SEQ ID NO: 16923 - protein, 33 aa, Artificial Sequence
  Cyclic GFR-binding peptide
  MOD_RES (5)..(6): Xaa is C or S
VPKPXXAPTKLEPLPVVYYDDSSNVIEQLSNNM

SEQ ID NO: 16924 - protein, 36 aa, Artificial Sequence
  Cyclic GFR-binding peptide
  MOD_RES (4)..(5): Xaa is C or S
PKPXXAPTQLEPLTVLYYDDSSNVIEQLSNNMVVRA

SEQ ID NO: 16925 - protein, 29 aa, Artificial Sequence
  Cyclic GFR-binding peptide
VSQDLSAISILYLIGKTPKILKNYQMIVK

SEQ ID NO: 16926 - protein, 31 aa, Artificial Sequence
  Cyclic GFR-binding peptide
  MOD_RES (3)..(4): Xaa is C or S
SPXXVPQDLSPISILFIVGRTPKVYKQYEMV

SEQ ID NO: 16927 - protein, 31 aa, Artificial Sequence
  Cyclic GFR-binding peptide
  MOD_RES (31)..(31): Xaa is C or S
VPQDLEPLPIVYYVGRTPKVEQLSNMVVKSX

SEQ ID NO: 16928 - protein, 30 aa, Artificial Sequence; identical to SEQ ID NO: 6556
  Cyclic GFR-binding peptide
  MOD_RES (29)..(29): Xaa is C or S

SEQ ID NO: 16929 - protein, 28 aa, Artificial Sequence
  Cyclic GFR-binding peptide
TQLSPISVLFIDDSSNVIYKQYENMVVR

SEQ ID NO: 16930 - protein, 28 aa, Artificial Sequence
  Cyclic GFR-binding peptide
  MOD_RES (2)..(3): Xaa is C or S
PXXVSQDLSPISILFIIGKTPKIYKQYE

SEQ ID NO: 16931 - protein, 25 aa, Artificial Sequence
  Cyclic GFR-binding peptide
SAISILYLIGKTPKILKNYQMIVKS

SEQ ID NO: 16932 - protein, 34 aa, Artificial Sequence
  Cyclic GFR-binding peptide
  MOD_RES (32)..(34): Xaa is C or S
VPTELEPLTMLYYDENEKVVEQLSNDMVVEGXGX

SEQ ID NO: 16933 - protein, 28 aa, Artificial Sequence
  Cyclic GFR-binding peptide
TRLSAISILYLDSANNVVLKNYQDMVVE

SEQ ID NO: 16934 - protein, 33 aa, Artificial Sequence
  Cyclic GFR-binding peptide
  MOD_RES (4)..(5): Xaa is C or S
PKPXXAPTQLEPLTVLYYDDSSNVIEQLSNNMV

SEQ ID NO: 16935 - protein, 35 aa, Artificial Sequence
  Cyclic GFR-binding peptide
  MOD_RES (6)..(7): Xaa is C or S
YVPKPXXAPTKLEPLTVLYYDDSSNVIEQLSNNMV

SEQ ID NO: 16936 - protein, 26 aa, Artificial Sequence
  Cyclic GFR-binding peptide
PTKLSPISVLFIDDSSNVIYKQYENM

SEQ ID NO: 16937 - protein, 29 aa, Artificial Sequence
  Cyclic GFR-binding peptide
VPQALEPLTILYYVGRKPKVEQLSNMIVR

SEQ ID NO: 16938 - protein, 28 aa, Artificial Sequence
  Cyclic GFR-binding peptide
ELEPLPMVYYDENEKVVEQLSNDMVVEG

SEQ ID NO: 16939 - protein, 31 aa, Artificial Sequence; identical to SEQ ID NO: 6567
  Cyclic GFR-binding peptide
  MOD_RES (1)..(1): Xaa is C or S

SEQ ID NO: 16940 - protein, 30 aa, Artificial Sequence
  Cyclic GFR-binding peptide
  MOD_RES (1)..(2): Xaa is C or S
XXVPTELSPISMLFIDEYDKVVYKQYEEMV

SEQ ID NO: 16941 - protein, 34 aa, Artificial Sequence
  Cyclic GFR-binding peptide
  MOD_RES (2)..(3): Xaa is C or S
TXXVPTRLNAISILYFDSANNVVLKKYRDMVVES

SEQ ID NO: 16942 - protein, 26 aa, Artificial Sequence
  Cyclic GFR-binding peptide
VSQDLSAISILYLIGKTPKILKNYQM

SEQ ID NO: 16943 - protein, 31 aa, Artificial Sequence; identical to SEQ ID NO: 6569
  Cyclic GFR-binding peptide
  MOD_RES (4)..(5): Xaa is C or S

SEQ ID NO: 16944 - protein, 41 aa, Artificial Sequence
  Cyclic GFR-binding peptide
  MOD_RES (5)..(6)..(38)..(40): Xaa is C or S
TPPTXXVPTRLEPLTILYYDSANNVVEQLSNDMVVESXGXR

SEQ ID NO: 16945 - protein, 31 aa, Artificial Sequence
  Cyclic GFR-binding peptide
  MOD_RES (1)..(2): Xaa is C or S
XXAPTQLSPISVLFIDDSSNVIYKQYENMVV

SEQ ID NO: 16946 - protein, 30 aa, Artificial Sequence
  Cyclic GFR-binding peptide
  MOD_RES (3)..(4): Xaa is C or S
SPXXVPQDLEPLPIVYYVGRTPKVEQLSNM

SEQ ID NO: 16947 - protein, 40 aa, Artificial Sequence; identical to SEQ ID NO: 6573
  Cyclic GFR-binding peptide
  MOD_RES (4)..(5)..(37)..(39): Xaa is C or S

SEQ ID NO: 16948 - protein, 23 aa, Artificial Sequence
  Cyclic GFR-binding peptide
EPLPIVYYDSANNVVEQLSNDMV

SEQ ID NO: 16949 - protein, 24 aa, Artificial Sequence
  Cyclic GFR-binding peptide
DLSAISILYLIGKTPKILKNYQMI

SEQ ID NO: 16950 - protein, 29 aa, Artificial Sequence
  Cyclic GFR-binding peptide
VPTRLNAISILYFDSANNVVLKKYRDMVV

SEQ ID NO: 16951 - protein, 28 aa, Artificial Sequence
  Cyclic GFR-binding peptide
  MOD_RES (1)..(1): Xaa is C or S
XVPQALNAISILYFVGRKPKVLKKYRMI

SEQ ID NO: 16952 - protein, 33 aa, Artificial Sequence; identical to SEQ ID NO: 6578
  Cyclic GFR-binding peptide
  MOD_RES (4)..(5): Xaa is C or S

SEQ ID NO: 16953 - protein, 34 aa, Artificial Sequence; identical to SEQ ID NO: 6579
  Cyclic GFR-binding peptide
  MOD_RES (6)..(7): Xaa is C or S

SEQ ID NO: 16954 - protein, 28 aa, Artificial Sequence
  Cyclic GFR-binding peptide
QDLSPISILFIVGRTPKVYKQYEMVVKS

SEQ ID NO: 16955 - protein, 32 aa, Artificial Sequence; identical to SEQ ID NO: 6580
  Cyclic GFR-binding peptide
  MOD_RES (1)..(2): Xaa is C or S

SEQ ID NO: 16956 - protein, 33 aa, Artificial Sequence
  Cyclic GFR-binding peptide
  MOD_RES (1)..(33): Xaa is C or S
XVPTELEPLTMLYYDEYDKVVEQLSNEMVVEGX

SEQ ID NO: 16957 - protein, 30 aa, Artificial Sequence; identical to SEQ ID NO: 6581
  Cyclic GFR-binding peptide
  MOD_RES (4)..(5): Xaa is C or S

SEQ ID NO: 16958 - protein, 35 aa, Artificial Sequence
  Cyclic GFR-binding peptide
  MOD_RES (2)..(3)..(35): Xaa is C or S
AXXVPTELSPISMLFIDEYDKVVYKQYEEMVVEGX

SEQ ID NO: 16959 - protein, 37 aa, Artificial Sequence
  Cyclic GFR-binding peptide
  MOD_RES (5)..(6): Xaa is C or S
IPKAXXVPTELEPLPMVYYDENEKVVEQLSNDMVVEG

SEQ ID NO: 16960 - protein, 31 aa, Artificial Sequence
  Cyclic GFR-binding peptide
  MOD_RES (3)..(4): Xaa is C or S
SPXXVSQDLSPISILFIIGKTPKIYKQYEMI

SEQ ID NO: 16961 - protein, 28 aa, Artificial Sequence
  Cyclic GFR-binding peptide
VPTELSPISMLFIDENEKVVYKQYEDMV

SEQ ID NO: 16962 - protein, 38 aa, Artificial Sequence
  Cyclic GFR-binding peptide
  MOD_RES (5)..(6)..(38): Xaa is C or S
IPKAXXVPTELSPISMLFIDEYDKVVYKQYEEMVVEGX

SEQ ID NO: 16963 - protein, 26 aa, Artificial Sequence
  Cyclic GFR-binding peptide
LEPLPIVYYDSANNVVEQLSNDMVVE

SEQ ID NO: 16964 - protein, 38 aa, Artificial Sequence; identical to SEQ ID NO: 6585
  Cyclic GFR-binding peptide
  MOD_RES (6)..(7)..(38): Xaa is C or S

SEQ ID NO: 16965 - protein, 31 aa, Artificial Sequence
  Cyclic GFR-binding peptide
  MOD_RES (29)..(31): Xaa is C or S
QLSPISVLFIDDSSNVIYKQYENMVVRAXGX

SEQ ID NO: 16966 - protein, 37 aa, Artificial Sequence
  Cyclic GFR-binding peptide
  MOD_RES (3)..(4)..(35)..(37): Xaa is C or S
APXXVPQALEPLTILYYVGRKPKVEQLSNMIVRSXKX

SEQ ID NO: 16967 - protein, 35 aa, Artificial Sequence
  Cyclic GFR-binding peptide
  MOD_RES (3)..(4)..(35): Xaa is C or S
SPXXVSQDLEPLPIVYYIGKTPKIEQLSNMIVKSX

SEQ ID NO: 16968 - protein, 33 aa, Artificial Sequence
  Cyclic GFR-binding peptide
  MOD_RES (5)..(6): Xaa is C or S
IPKAXXVPTELEPLTMLYYDENEKVVEQLSNDM

SEQ ID NO: 16969 - protein, 34 aa, Artificial Sequence
  Cyclic GFR-binding peptide
  MOD_RES (3)..(4): Xaa is C or S
KAXXVPTELSPISMLFIDENEKVVYKQYEDMVVE

SEQ ID NO: 16970 - protein, 32 aa, Artificial Sequence; identical to SEQ ID NO: 6590
  Cyclic GFR-binding peptide
  MOD_RES (1)..(32): Xaa is C or S

SEQ ID NO: 16971 - protein, 30 aa, Artificial Sequence
  Cyclic GFR-binding peptide
PTQLEPLTVLYYDDSSNVIEQLSNNMVVRA

SEQ ID NO: 16972 - protein, 27 aa, Artificial Sequence
  Cyclic GFR-binding peptide
PTKLSAISVLYLDDSSNVILKNYQNMV

SEQ ID NO: 16973 - protein, 21 aa, Artificial Sequence
  Cyclic GFR-binding peptide
LSPISMLFIDEYDKVVYKQYE

SEQ ID NO: 16974 - protein, 32 aa, Artificial Sequence
  Cyclic GFR-binding peptide
  MOD_RES (3)..(4): Xaa is C or S
APXXVPQALSPISILFIVGRKPKVYKQYEMIV

SEQ ID NO: 16975 - protein, 33 aa, Artificial Sequence
  Cyclic GFR-binding peptide
  MOD_RES (31)..(33): Xaa is C or S
PTELEPLPMVYYDEYDKVVEQLSNEMVVEGXGX

SEQ ID NO: 16976 - protein, 28 aa, Artificial Sequence
  Cyclic GFR-binding peptide
  MOD_RES (2)..(3): Xaa is C or S
TXXVPTRLNAISILYFDSANNVVLKKYR

SEQ ID NO: 16977 - protein, 21 aa, Artificial Sequence
  Cyclic GFR-binding peptide
LSPISILFIIGKTPKIYKQYE

SEQ ID NO: 16978 - protein, 30 aa, Artificial Sequence; identical to SEQ ID NO: 6595
  Cyclic GFR-binding peptide
  MOD_RES (30)..(30): Xaa is C or S

SEQ ID NO: 16979 - protein, 31 aa, Artificial Sequence; identical to SEQ ID NO: 6596
  Cyclic GFR-binding peptide
  MOD_RES (31)..(31): Xaa is C or S

SEQ ID NO: 16980 - protein, 34 aa, Artificial Sequence
  Cyclic GFR-binding peptide
  MOD_RES (1)..(2)..(34): Xaa is C or S
XXVPTELEPLTMLYYDENEKVVEQLSNDMVVEGX

SEQ ID NO: 16981 - protein, 27 aa, Artificial Sequence
  Cyclic GFR-binding peptide
PTQLSPISVLFIDDSSNVIYKQYENMV

SEQ ID NO: 16982 - protein, 25 aa, Artificial Sequence
  Cyclic GFR-binding peptide
LNAISILYFIGKTPKILKKYRMIVK

SEQ ID NO: 16983 - protein, 34 aa, Artificial Sequence
  Cyclic GFR-binding peptide
  MOD_RES (32)..(34): Xaa is C or S
VPTELSPISMLFIDEYDKVVYKQYEEMVVEGXGX

SEQ ID NO: 16984 - protein, 31 aa, Artificial Sequence
  Cyclic GFR-binding peptide
  MOD_RES (1)..(2): Xaa is C or S
XXVPTELEPLPMVYYDEYDKVVEQLSNEMVV

SEQ ID NO: 16985 - protein, 27 aa, Artificial Sequence
  Cyclic GFR-binding peptide
LSAISILYLDSANNVVLKNYQDMVVES

SEQ ID NO: 16986 - protein, 28 aa, Artificial Sequence
  Cyclic GFR-binding peptide
  MOD_RES (2)..(3): Xaa is C or S
AXXVPTELEPLTMLYYDEYDKVVEQLSN

SEQ ID NO: 16987 - protein, 27 aa, Artificial Sequence
  Cyclic GFR-binding peptide
DLSPISILFIVGRTPKVYKQYEMVVKS

SEQ ID NO: 16988 - protein, 38 aa, Artificial Sequence; identical to SEQ ID NO: 6603
  Cyclic GFR-binding peptide
  MOD_RES (6)..(7): Xaa is C or S

SEQ ID NO: 16989 - protein, 34 aa, Artificial Sequence
  Cyclic GFR-binding peptide
  MOD_RES (3)..(3): Xaa is C or S
PTXAPTKLEPLTVLYYDDSSNVIEQLSNNMVVRS

SEQ ID NO: 16990 - protein, 39 aa, Artificial Sequence; identical to SEQ ID NO: 6604
  Cyclic GFR-binding peptide
  MOD_RES (4)..(5)..(36)..(38): Xaa is C or S

SEQ ID NO: 16991 - protein, 31 aa, Artificial Sequence; identical to SEQ ID NO: 6610
  Cyclic GFR-binding peptide
  MOD_RES (29)..(31): Xaa is C or S

SEQ ID NO: 16992 - protein, 34 aa, Artificial Sequence
  Cyclic GFR-binding peptide
  MOD_RES (1)..(2)..(33): Xaa is C or S
XXVPQALSPISILFIVGRKPKVYKQYEMIVRSXK

SEQ ID NO: 16993 - protein, 40 aa, Artificial Sequence; identical to SEQ ID NO: 6612
  Cyclic GFR-binding peptide
  MOD_RES (7)..(39): Xaa is C or S

SEQ ID NO: 16994 - protein, 30 aa, Artificial Sequence
  Cyclic GFR-binding peptide
  MOD_RES (27)..(29): Xaa is C or S
EPLPVVYYDDSSNVIEQLSNNMVVRAXGXH

SEQ ID NO: 16995 - protein, 32 aa, Artificial Sequence
  Cyclic GFR-binding peptide
  MOD_RES (29)..(31): Xaa is C or S
ELEPLTMLYYDEYDKVVEQLSNEMVVEGXGXR

SEQ ID NO: 16996 - protein, 36 aa, Artificial Sequence
  Cyclic GFR-binding peptide
  MOD_RES (6)..(6): Xaa is C or S
VTKPTXAPTKLSPISVLFIDDSSNVIYKQYENMVVR

SEQ ID NO: 16997 - protein, 29 aa, Artificial Sequence
  Cyclic GFR-binding peptide
VPTELSPISMLFIDEYDKVVYKQYEEMVV

SEQ ID NO: 16998 - protein, 34 aa, Artificial Sequence; identical to SEQ ID NO: 6617
  Cyclic GFR-binding peptide
  MOD_RES (32)..(34): Xaa is C or S

SEQ ID NO: 16999 - protein, 33 aa, Artificial Sequence
  Cyclic GFR-binding peptide
  MOD_RES (6)..(7): Xaa is C or S
ASAAPXXVPQALEPLTILYYVGRKPKVEQLSNM

SEQ ID NO: 17000 - protein, 41 aa, Artificial Sequence
  Cyclic GFR-binding peptide
  MOD_RES (5)..(6)..(38)..(40): Xaa is C or S
TPPTXXVPTRLNAISILYFDSANNVVLKKYRDMVVESXGXR

SEQ ID NO: 17001 - protein, 38 aa, Artificial Sequence; identical to SEQ ID NO: 6619
  Cyclic GFR-binding peptide
  MOD_RES (3)..(4)..(35)..(37): Xaa is C or S

SEQ ID NO: 17002 - protein, 30 aa, Artificial Sequence
  Cyclic GFR-binding peptide
  MOD_RES (28)..(30): Xaa is C or S
LEPLTVLYYDDSSNVIEQLSNNMVVRSXGX

SEQ ID NO: 17003 - protein, 34 aa, Artificial Sequence
  Cyclic GFR-binding peptide
  MOD_RES (1)..(2)..(34): Xaa is C or S
XXVPTELEPLTMLYYDEYDKVVEQLSNEMVVEGX

SEQ ID NO: 17004 - protein, 29 aa, Artificial Sequence
  Cyclic GFR-binding peptide
PTKLEPLTVLYYDDSSNVIEQLSNNMVVR

SEQ ID NO: 17005 - protein, 28 aa, Artificial Sequence
  Cyclic GFR-binding peptide
PTELSPISMLFIDEYDKVVYKQYEEMVV

SEQ ID NO: 17006 - protein, 33 aa, Artificial Sequence
  Cyclic GFR-binding peptide
  MOD_RES (2)..(3): Xaa is C or S
TXXVPTRLSAISILYLDSANNVVLKNYQDMVVE

SEQ ID NO: 17007 - protein, 30 aa, Artificial Sequence
  Cyclic GFR-binding peptide
VPTELEPLPMVYYDENEKVVEQLSNDMVVE

SEQ ID NO: 17008 - protein, 25 aa, Artificial Sequence
  Cyclic GFR-binding peptide
ELNAISMLYFDENEKVVLKKYRDMV

SEQ ID NO: 17009 - protein, 35 aa, Artificial Sequence; identical to SEQ ID NO: 6630
  Cyclic GFR-binding peptide
  MOD_RES (6)..(7): Xaa is C or S

SEQ ID NO: 17010 - protein, 36 aa, Artificial Sequence
  Cyclic GFR-binding peptide
  MOD_RES (6)..(7): Xaa is C or S
KIPKAXXVPTELEPLPMVYYDENEKVVEQLSNDMVV

SEQ ID NO: 17011 - protein, 26 aa, Artificial Sequence
  Cyclic GFR-binding peptide
APTKLEPLPVVYYDDSSNVIEQLSNN

SEQ ID NO: 17012 - protein, 28 aa, Artificial Sequence
  Cyclic GFR-binding peptide
  MOD_RES (2)..(3): Xaa is C or S
AXXVPTELEPLTMLYYDENEKVVEQLSN

SEQ ID NO: 17013 - protein, 26 aa, Artificial Sequence
  Cyclic GFR-binding peptide
LEPLPMVYYDEYDKVVEQLSNEMVVE

SEQ ID NO: 17014 - protein, 33 aa, Artificial Sequence; identical to SEQ ID NO: 6641
  Cyclic GFR-binding peptide
  MOD_RES (2)..(2): Xaa is C or S

SEQ ID NO: 17015 - protein, 28 aa, Artificial Sequence
  Cyclic GFR-binding peptide
RLNAISILYFDSANNVVLKKYRDMVVES

SEQ ID NO: 17016 - protein, 39 aa, Artificial Sequence
  Cyclic GFR-binding peptide
  MOD_RES (5)..(6)..(38): Xaa is C or S
IPKAXXVPTELEPLTMLYYDENEKVVEQLSNDMVVEGXG

SEQ ID NO: 17017 - protein, 31 aa, Artificial Sequence; identical to SEQ ID NO: 6643
  Cyclic GFR-binding peptide
  MOD_RES (5)..(6): Xaa is C or S

SEQ ID NO: 17018 - protein, 35 aa, Artificial Sequence
  Cyclic GFR-binding peptide
  MOD_RES (4)..(5): Xaa is C or S
PKPXXAPTKLEPLPVVYYDDSSNVIEQLSNNMVVR

SEQ ID NO: 17019 - protein, 31 aa, Artificial Sequence
  Cyclic GFR-binding peptide
  MOD_RES (28)..(30): Xaa is C or S
LSPISMLFIDEYDKVVYKQYEEMVVEGXGXR

SEQ ID NO: 17020 - protein, 35 aa, Artificial Sequence
  Cyclic GFR-binding peptide
  MOD_RES (2)..(3)..(35): Xaa is C or S
PXXAPTKLEPLPVVYYDDSSNVIEQLSNNMVVRSX

SEQ ID NO: 17021 - protein, 36 aa, Artificial Sequence
  Cyclic GFR-binding peptide
  MOD_RES (2)..(3)..(35): Xaa is C or S
AXXVPTELEPLPMVYYDEYDKVVEQLSNEMVVEGXG

SEQ ID NO: 17022 - protein, 36 aa, Artificial Sequence
  Cyclic GFR-binding peptide
  MOD_RES (2)..(3)..(35): Xaa is C or S
PXXAPTKLEPLPVVYYDDSSNVIEQLSNNMVVRSXG

SEQ ID NO: 17023 - protein, 23 aa, Artificial Sequence
  Cyclic GFR-binding peptide
DLSAISILYLIGKTPKILKNYQM

SEQ ID NO: 17024 - protein, 24 aa, Artificial Sequence
  Cyclic GFR-binding peptide
PQDLEPLPIVYYVGRTPKVEQLSN

SEQ ID NO: 17025 - protein, 33 aa, Artificial Sequence
  Cyclic GFR-binding peptide
  MOD_RES (6)..(7): Xaa is C or S
TVPKPXXAPTQLSPISVLFIDDSSNVIYKQYEN

SEQ ID NO: 17026 - protein, 30 aa, Artificial Sequence
  Cyclic GFR-binding peptide
  MOD_RES (2)..(3): Xaa is C or S
AXXVPTELEPLTMLYYDENEKVVEQLSNDM

SEQ ID NO: 17027 - protein, 34 aa, Artificial Sequence
  Cyclic GFR-binding peptide
  MOD_RES (32)..(34): Xaa is C or S
VPTRLNAISILYFDSANNVVLKKYRDMVVESXGX

SEQ ID NO: 17028 - protein, 27 aa, Artificial Sequence
  Cyclic GFR-binding peptide
  MOD_RES (1)..(2): Xaa is C or S
XXVSQDLEPLPIVYYIGKTPKIEQLSN

SEQ ID NO: 17029 - protein, 39 aa, Artificial Sequence; identical to SEQ ID NO: 6651
  Cyclic GFR-binding peptide
  MOD_RES (5)..(6)..(37)..(39): Xaa is C or S

SEQ ID NO: 17030 - protein, 32 aa, Artificial Sequence; identical to SEQ ID NO: 6653
  Cyclic GFR-binding peptide
  MOD_RES (6)..(7): Xaa is C or S

SEQ ID NO: 17031 - protein, 28 aa, Artificial Sequence
  Cyclic GFR-binding peptide
PTKLEPLTVLYYDDSSNVIEQLSNNMVV

SEQ ID NO: 17032 - protein, 39 aa, Artificial Sequence
  Cyclic GFR-binding peptide
  MOD_RES (4)..(5)..(37)..(39): Xaa is C or S
PKAXXVPTELEPLTMLYYDENEKVVEQLSNDMVVEGXGX

SEQ ID NO: 17033 - protein, 28 aa, Artificial Sequence
  Cyclic GFR-binding peptide
  MOD_RES (1)..(2): Xaa is C or S
XXVSQDLNAISILYFIGKTPKILKKYRM

SEQ ID NO: 17034 - protein, 23 aa, Artificial Sequence
  Cyclic GFR-binding peptide
SPISVLFIDDSSNVIYKQYENMV

SEQ ID NO: 17035 - protein, 29 aa, Artificial Sequence
  Cyclic GFR-binding peptide
  MOD_RES (1)..(2): Xaa is C or S
XXVPTELSPISMLFIDEYDKVVYKQYEEM

SEQ ID NO: 17036 - protein, 35 aa, Artificial Sequence
  Cyclic GFR-binding peptide
  MOD_RES (2)..(3)..(35): Xaa is C or S
TXXVPTRLNAISILYFDSANNVVLKKYRDMVVESX

SEQ ID NO: 17037 - protein, 25 aa, Artificial Sequence
  Cyclic GFR-binding peptide
LEPLPMVYYDENEKVVEQLSNDMVV

SEQ ID NO: 17038 - protein, 25 aa, Artificial Sequence
  Cyclic GFR-binding peptide
ELSPISMLFIDEYDKVVYKQYEEMV

SEQ ID NO: 17039 - protein, 35 aa, Artificial Sequence
  Cyclic GFR-binding peptide
  MOD_RES (2)..(3)..(35): Xaa is C or S
PXXAPTQLSPISVLFIDDSSNVIYKQYENMVVRAX

SEQ ID NO: 17040 - protein, 22 aa, Artificial Sequence
  Cyclic GFR-binding peptide
QLEPLTVLYYDDSSNVIEQLSN

SEQ ID NO: 17041 - protein, 34 aa, Artificial Sequence
  Cyclic GFR-binding peptide
  MOD_RES (1)..(33): Xaa is C or S
XVPTELSPISMLFIDEYDKVVYKQYEEMVVEGXG

SEQ ID NO: 17042 - protein, 28 aa, Artificial Sequence
  Cyclic GFR-binding peptide
TELNAISMLYFDEYDKVVLKKYREMVVE

SEQ ID NO: 17043 - protein, 32 aa, Artificial Sequence
  Cyclic GFR-binding peptide
  MOD_RES (32)..(32): Xaa is C or S
VPTELEPLTMLYYDENEKVVEQLSNDMVVEGX

SEQ ID NO: 17044 - protein, 34 aa, Artificial Sequence; identical to SEQ ID NO: 6666
  Cyclic GFR-binding peptide
  MOD_RES (5)..(6): Xaa is C or S

SEQ ID NO: 17045 - protein, 32 aa, Artificial Sequence
  Cyclic GFR-binding peptide
  MOD_RES (31)..(31): Xaa is C or S
VPQALSPISILFIVGRKPKVYKQYEMIVRSXK

SEQ ID NO: 17046 - protein, 31 aa, Artificial Sequence
  Cyclic GFR-binding peptide
  MOD_RES (6)..(6): Xaa is C or S
VTKPTXAPTKLEPLTVLYYDDSSNVIEQLSN

SEQ ID NO: 17047 - protein, 36 aa, Artificial Sequence
  Cyclic GFR-binding peptide
  MOD_RES (1)..(33)..(35): Xaa is C or S
XAPTQLSPISVLFIDDSSNVIYKQYENMVVRAXGXH

SEQ ID NO: 17048 - protein, 32 aa, Artificial Sequence
  Cyclic GFR-binding peptide
  MOD_RES (1)..(2): Xaa is C or S
XXVPTRLNAISILYFDSANNVVLKKYRDMVVE

SEQ ID NO: 17049 - protein, 37 aa, Artificial Sequence; identical to SEQ ID NO: 6675
  Cyclic GFR-binding peptide
  MOD_RES (4)..(5)..(36): Xaa is C or S

SEQ ID NO: 17050 - protein, 33 aa, Artificial Sequence
  Cyclic GFR-binding peptide
  MOD_RES (5)..(5): Xaa is C or S
TKPTXAPTKLSPISVLFIDDSSNVIYKQYENMV

SEQ ID NO: 17051 - protein, 28 aa, Artificial Sequence
  Cyclic GFR-binding peptide
PTRLEPLPIVYYDSANNVVEQLSNDMVV

SEQ ID NO: 17052 - protein, 26 aa, Artificial Sequence
  Cyclic GFR-binding peptide
  MOD_RES (26)..(26): Xaa is C or S
NAISILYFVGRTPKVLKKYRMVVKSX

SEQ ID NO: 17053 - protein, 41 aa, Artificial Sequence; identical to SEQ ID NO: 6678
  Cyclic GFR-binding peptide
  MOD_RES (5)..(6)..(38)..(40): Xaa is C or S

SEQ ID NO: 17054 - protein, 34 aa, Artificial Sequence
  Cyclic GFR-binding peptide
  MOD_RES (31)..(33): Xaa is C or S
PTQLEPLPVVYYDDSSNVIEQLSNNMVVRAXGXH

SEQ ID NO: 17055 - protein, 24 aa, Artificial Sequence
  Cyclic GFR-binding peptide
LNAISILYFIGKTPKILKKYRMIV

SEQ ID NO: 17056 - protein, 34 aa, Artificial Sequence
  Cyclic GFR-binding peptide
  MOD_RES (6)..(7): Xaa is C or S
STPPTXXVPTRLNAISILYFDSANNVVLKKYRDM

SEQ ID NO: 17057 - protein, 34 aa, Artificial Sequence; identical to SEQ ID NO: 6684
  Cyclic GFR-binding peptide
  MOD_RES (2)..(34): Xaa is C or S

SEQ ID NO: 17058 - protein, 31 aa, Artificial Sequence
  Cyclic GFR-binding peptide
  MOD_RES (1)..(1): Xaa is C or S
XVPTELEPLPMVYYDEYDKVVEQLSNEMVVE

SEQ ID NO: 17059 - protein, 35 aa, Artificial Sequence
  Cyclic GFR-binding peptide
  MOD_RES (2)..(3)..(35): Xaa is C or S
AXXVPTELSPISMLFIDENEKVVYKQYEDMVVEGX

SEQ ID NO: 17060 - protein, 39 aa, Artificial Sequence
  Cyclic GFR-binding peptide
  MOD_RES (5)..(37)..(39): Xaa is C or S
TKPTXAPTKLSPISVLFIDDSSNVIYKQYENMVVRSXGX

SEQ ID NO: 17061 - protein, 28 aa, Artificial Sequence
  Cyclic GFR-binding peptide
  MOD_RES (27)..(27): Xaa is C or S
LSAISILYLVGRTPKVLKNYQMVVKSXK

SEQ ID NO: 17062 - protein, 41 aa, Artificial Sequence
  Cyclic GFR-binding peptide
  MOD_RES (6)..(38)..(40): Xaa is C or S
VTKPTXAPTKLEPLTVLYYDDSSNVIEQLSNNMVVRSXGXH

SEQ ID NO: 17063 - protein, 36 aa, Artificial Sequence
  Cyclic GFR-binding peptide
  MOD_RES (2)..(3)..(35): Xaa is C or S
PXXAPTKLSPISVLFIDDSSNVIYKQYENMVVRSXG

SEQ ID NO: 17064 - protein, 36 aa, Artificial Sequence
  Cyclic GFR-binding peptide
  MOD_RES (5)..(6): Xaa is C or S
IPKAXXVPTELSPISMLFIDEYDKVVYKQYEEMVVE

SEQ ID NO: 17065 - protein, 29 aa, Artificial Sequence
  Cyclic GFR-binding peptide
  MOD_RES (28)..(28): Xaa is C or S
DLSPISILFIVGRTPKVYKQYEMVVKSXK

SEQ ID NO: 17066 - protein, 26 aa, Artificial Sequence
  Cyclic GFR-binding peptide
SQDLEPLPIVYYIGKTPKIEQLSNMI

SEQ ID NO: 17067 - protein, 32 aa, Artificial Sequence
  Cyclic GFR-binding peptide
  MOD_RES (29)..(31): Xaa is C or S
RLEPLPIVYYDSANNVVEQLSNDMVVESXGXR

SEQ ID NO: 17068 - protein, 36 aa, Artificial Sequence; identical to SEQ ID NO: 6688
  Cyclic GFR-binding peptide
  MOD_RES (4)..(5): Xaa is C or S

SEQ ID NO: 17069 - protein, 34 aa, Artificial Sequence; identical to SEQ ID NO: 6693
  Cyclic GFR-binding peptide
  MOD_RES (31)..(33): Xaa is C or S

SEQ ID NO: 17070 - protein, 29 aa, Artificial Sequence
  Cyclic GFR-binding peptide
PTKLEPLPVVYYDDSSNVIEQLSNNMVVR

SEQ ID NO: 17071 - protein, 30 aa, Artificial Sequence
  Cyclic GFR-binding peptide
  MOD_RES (4)..(4): Xaa is C or S
KPTXAPTKLEPLPVVYYDDSSNVIEQLSNN

SEQ ID NO: 17072 - protein, 33 aa, Artificial Sequence
  Cyclic GFR-binding peptide
  MOD_RES (6)..(7): Xaa is C or S
YVPKPXXAPTKLSPISVLFIDDSSNVIYKQYEN

SEQ ID NO: 17073 - protein, 27 aa, Artificial Sequence
  Cyclic GFR-binding peptide
  MOD_RES (26)..(26): Xaa is C or S
EPLPIVYYIGKTPKIEQLSNMIVKSXK

SEQ ID NO: 17074 - protein, 29 aa, Artificial Sequence
  Cyclic GFR-binding peptide
  MOD_RES (2)..(3): Xaa is C or S
PXXAPTKLSPISVLFIDDSSNVIYKQYEN

SEQ ID NO: 17075 - protein, 25 aa, Artificial Sequence
  Cyclic GFR-binding peptide
QDLEPLPIVYYVGRTPKVEQLSNMV

SEQ ID NO: 17076 - protein, 26 aa, Artificial Sequence
  Cyclic GFR-binding peptide
VPQDLSAISILYLVGRTPKVLKNYQM

SEQ ID NO: 17077 - protein, 28 aa, Artificial Sequence
  Cyclic GFR-binding peptide
  MOD_RES (28)..(28): Xaa is C or S
LEPLTVLYYDDSSNVIEQLSNNMVVRAX

SEQ ID NO: 17078 - protein, 27 aa, Artificial Sequence
  Cyclic GFR-binding peptide
  MOD_RES (1)..(1): Xaa is C or S
XVSQDLSAISILYLIGKTPKILKNYQM

SEQ ID NO: 17079 - protein, 24 aa, Artificial Sequence
  Cyclic GFR-binding peptide
LSPISMLFIDEYDKVVYKQYEEMV

SEQ ID NO: 17080 - protein, 23 aa, Artificial Sequence
  Cyclic GFR-binding peptide
TKLSPISVLFIDDSSNVIYKQYE

SEQ ID NO: 17081 - protein, 33 aa, Artificial Sequence
  Cyclic GFR-binding peptide
  MOD_RES (30)..(32): Xaa is C or S
TQLSPISVLFIDDSSNVIYKQYENMVVRAXGXH

SEQ ID NO: 17082 - protein, 29 aa, Artificial Sequence
  Cyclic GFR-binding peptide
  MOD_RES (1)..(2): Xaa is C or S
XXVPQALNAISILYFVGRKPKVLKKYRMI

SEQ ID NO: 17083 - protein, 35 aa, Artificial Sequence; identical to SEQ ID NO: 6711
  Cyclic GFR-binding peptide
  MOD_RES (2)..(3)..(35): Xaa is C or S

SEQ ID NO: 17084 - protein, 28 aa, Artificial Sequence
  Cyclic GFR-binding peptide
  MOD_RES (1)..(2): Xaa is C or S
XXVPTELEPLTMLYYDENEKVVEQLSND

SEQ ID NO: 17085 - protein, 27 aa, Artificial Sequence
  Cyclic GFR-binding peptide
QDLNAISILYFIGKTPKILKKYRMIVK

SEQ ID NO: 17086 - protein, 39 aa, Artificial Sequence; identical to SEQ ID NO: 6713
  Cyclic GFR-binding peptide
  MOD_RES (5)..(6)..(37)..(39): Xaa is C or S

SEQ ID NO: 17087 - protein, 40 aa, Artificial Sequence
  Cyclic GFR-binding peptide
  MOD_RES (6)..(38)..(40): Xaa is C or S
VTKPTXAPTKLEPLTVLYYDDSSNVIEQLSNNMVVRSXGX

SEQ ID NO: 17088 - protein, 31 aa, Artificial Sequence
  Cyclic GFR-binding peptide
  MOD_RES (31)..(31): Xaa is C or S
VPQALSPISILFIVGRKPKVYKQYEMIVRSX

SEQ ID NO: 17089 - protein, 36 aa, Artificial Sequence; identical to SEQ ID NO: 6716
  Cyclic GFR-binding peptide
  MOD_RES (6)..(7): Xaa is C or S

SEQ ID NO: 17090 - protein, 42 aa, Artificial Sequence
  Cyclic GFR-binding peptide
  MOD_RES (6)..(7)..(39)..(41): Xaa is C or S
KIPKAXXVPTELEPLPMVYYDENEKVVEQLSNDMVVEGXGXR

SEQ ID NO: 17091 - protein, 25 aa, Artificial Sequence
  Cyclic GFR-binding peptide
QLEPLPVVYYDDSSNVIEQLSNNMV

SEQ ID NO: 17092 - protein, 30 aa, Artificial Sequence
  Cyclic GFR-binding peptide
  MOD_RES (1)..(1): Xaa is C or S
XVPQALEPLTILYYVGRKPKVEQLSNMIVR

SEQ ID NO: 17093 - protein, 30 aa, Artificial Sequence; identical to SEQ ID NO: 6719
  Cyclic GFR-binding peptide
  MOD_RES (29)..(29): Xaa is C or S

SEQ ID NO: 17094 - protein, 36 aa, Artificial Sequence
  Cyclic GFR-binding peptide
  MOD_RES (1)..(2)..(33)..(35): Xaa is C or S
XXVSQDLEPLPIVYYIGKTPKIEQLSNMIVKSXKXS

SEQ ID NO: 17095 - protein, 33 aa, Artificial Sequence
  Cyclic GFR-binding peptide
  MOD_RES (31)..(33): Xaa is C or S
PTQLEPLTVLYYDDSSNVIEQLSNNMVVRAXGX

SEQ ID NO: 17096 - protein, 33 aa, Artificial Sequence
  Cyclic GFR-binding peptide
  MOD_RES (31)..(33): Xaa is C or S
VPQALEPLTILYYVGRKPKVEQLSNMIVRSXKX

SEQ ID NO: 17097 - protein, 31 aa, Artificial Sequence
  Cyclic GFR-binding peptide
  MOD_RES (1)..(2): Xaa is C or S
XXVSQDLSPISILFIIGKTPKIYKQYEMIVK

SEQ ID NO: 17098 - protein, 36 aa, Artificial Sequence
  Cyclic GFR-binding peptide
  MOD_RES (5)..(6): Xaa is C or S
IPKAXXVPTELSPISMLFIDENEKVVYKQYEDMVVE

SEQ ID NO: 17099 - protein, 25 aa, Artificial Sequence
  Cyclic GFR-binding peptide
VPQALSPISILFIVGRKPKVYKQYE

SEQ ID NO: 17100 - protein, 31 aa, Artificial Sequence; identical to SEQ ID NO: 6721
  Cyclic GFR-binding peptide
  MOD_RES (4)..(5): Xaa is C or S

SEQ ID NO: 17101 - protein, 36 aa, Artificial Sequence; identical to SEQ ID NO: 6722
  Cyclic GFR-binding peptide
  MOD_RES (4)..(5)..(36): Xaa is C or S

SEQ ID NO: 17102 - protein, 35 aa, Artificial Sequence
  Cyclic GFR-binding peptide
  MOD_RES (3)..(4): Xaa is C or S
PTXXVPTRLEPLTILYYDSANNVVEQLSNDMVVES

SEQ ID NO: 17103 - protein, 33 aa, Artificial Sequence; identical to SEQ ID NO: 6726
  Cyclic GFR-binding peptide
  MOD_RES (2)..(3): Xaa is C or S

SEQ ID NO: 17104 - protein, 33 aa, Artificial Sequence; identical to SEQ ID NO: 6727
  Cyclic GFR-binding peptide
  MOD_RES (6)..(7): Xaa is C or S

SEQ ID NO: 17105 - protein, 33 aa, Artificial Sequence
  Cyclic GFR-binding peptide
  MOD_RES (2)..(3): Xaa is C or S
TXXVPTRLEPLTILYYDSANNVVEQLSNDMVVE

SEQ ID NO: 17106 - protein, 42 aa, Artificial Sequence; identical to SEQ ID NO: 6730
  Cyclic GFR-binding peptide
  MOD_RES (7)..(39)..(41): Xaa is C or S

SEQ ID NO: 17107 - protein, 29 aa, Artificial Sequence
  Cyclic GFR-binding peptide
  MOD_RES (1)..(2): Xaa is C or S
XXVPTRLEPLPIVYYDSANNVVEQLSNDM

SEQ ID NO: 17108 - protein, 34 aa, Artificial Sequence
  Cyclic GFR-binding peptide
  MOD_RES (3)..(4): Xaa is C or S
KPXXAPTKLSPISVLFIDDSSNVIYKQYENMVVR

SEQ ID NO: 17109 - protein, 27 aa, Artificial Sequence
  Cyclic GFR-binding peptide
  MOD_RES (27)..(27): Xaa is C or S
SPISVLFIDDSSNVIYKQYENMVVRAX

SEQ ID NO: 17110 - protein, 38 aa, Artificial Sequence
  Cyclic GFR-binding peptide
  MOD_RES (6)..(7)..(38): Xaa is C or S
ASASPXXVPQDLSPISILFIVGRTPKVYKQYEMVVKSX

SEQ ID NO: 17111 - protein, 32 aa, Artificial Sequence; identical to SEQ ID NO: 6732
  Cyclic GFR-binding peptide
  MOD_RES (30)..(32): Xaa is C or S

SEQ ID NO: 17112 - protein, 33 aa, Artificial Sequence
  Cyclic GFR-binding peptide
  MOD_RES (6)..(7): Xaa is C or S
YVPKPXXAPTKLEPLPVVYYDDSSNVIEQLSNN

SEQ ID NO: 17113 - protein, 34 aa, Artificial Sequence
  Cyclic GFR-binding peptide
  MOD_RES (6)..(7): Xaa is C or S
ASASPXXVSQDLEPLPIVYYIGKTPKIEQLSNMI

SEQ ID NO: 17114 - protein, 32 aa, Artificial Sequence; identical to SEQ ID NO: 6733
  Cyclic GFR-binding peptide
  MOD_RES (2)..(3): Xaa is C or S

SEQ ID NO: 17115 - protein, 27 aa, Artificial Sequence
  Cyclic GFR-binding peptide
VPQALSAISILYLVGRKPKVLKNYQMI

SEQ ID NO: 17116 - protein, 30 aa, Artificial Sequence; identical to SEQ ID NO: 6735
  Cyclic GFR-binding peptide
  MOD_RES (3)..(4): Xaa is C or S

SEQ ID NO: 17117 - protein, 34 aa, Artificial Sequence; identical to SEQ ID NO: 6737
  Cyclic GFR-binding peptide
  MOD_RES (5)..(6): Xaa is C or S

SEQ ID NO: 17118 - protein, 22 aa, Artificial Sequence
  Cyclic GFR-binding peptide
DLEPLPIVYYIGKTPKIEQLSN

SEQ ID NO: 17119 - protein, 37 aa, Artificial Sequence
  Cyclic GFR-binding peptide
  MOD_RES (6)..(7): Xaa is C or S
YVPKPXXAPTKLEPLTVLYYDDSSNVIEQLSNNMVVR

SEQ ID NO: 17120 - protein, 29 aa, Artificial Sequence
  Cyclic GFR-binding peptide
APTQLSAISVLYLDDSSNVILKNYQNMVV

SEQ ID NO: 17121 - protein, 32 aa, Artificial Sequence; identical to SEQ ID NO: 6742
  Cyclic GFR-binding peptide
  MOD_RES (5)..(6): Xaa is C or S

SEQ ID NO: 17122 - protein, 27 aa, Artificial Sequence
  Cyclic GFR-binding peptide
LNAISMLYFDENEKVVLKKYRDMVVEG

SEQ ID NO: 17123 - protein, 33 aa, Artificial Sequence
  Cyclic GFR-binding peptide
  MOD_RES (30)..(32): Xaa is C or S
PQALEPLTILYYVGRKPKVEQLSNMIVRSXKXS

SEQ ID NO: 17124 - protein, 34 aa, Artificial Sequence; identical to SEQ ID NO: 6745
  Cyclic GFR-binding peptide
  MOD_RES (1)..(2)..(34): Xaa is C or S

SEQ ID NO: 17125 - protein, 27 aa, Artificial Sequence
  Cyclic GFR-binding peptide
  MOD_RES (1)..(1): Xaa is C or S
XVPTELNAISMLYFDENEKVVLKKYRD

SEQ ID NO: 17126 - protein, 35 aa, Artificial Sequence
  Cyclic GFR-binding peptide
  MOD_RES (6)..(7): Xaa is C or S
TVPKPXXAPTQLSPISVLFIDDSSNVIYKQYENMV

SEQ ID NO: 17127 - protein, 26 aa, Artificial Sequence
  Cyclic GFR-binding peptide
LEPLTMLYYDEYDKVVEQLSNEMVVE

SEQ ID NO: 17128 - protein, 30 aa, Artificial Sequence
  Cyclic GFR-binding peptide
PTQLEPLPVVYYDDSSNVIEQLSNNMVVRA

SEQ ID NO: 17129 - protein, 35 aa, Artificial Sequence
  Cyclic GFR-binding peptide
  MOD_RES (5)..(6): Xaa is C or S
SASPXXVSQDLEPLPIVYYIGKTPKIEQLSNMIVK

SEQ ID NO: 17130 - protein, 31 aa, Artificial Sequence
  Cyclic GFR-binding peptide
  MOD_RES (5)..(6): Xaa is C or S
VPKPXXAPTKLEPLTVLYYDDSSNVIEQLSN

SEQ ID NO: 17131 - protein, 26 aa, Artificial Sequence
  Cyclic GFR-binding peptide
VPTRLNAISILYFDSANNVVLKKYRD

SEQ ID NO: 17132 - protein, 37 aa, Artificial Sequence
  Cyclic GFR-binding peptide
  MOD_RES (1)..(2)..(34)..(36): Xaa is C or S
XXAPTKLEPLTVLYYDDSSNVIEQLSNNMVVRSXGXH

SEQ ID NO: 17133 - protein, 33 aa, Artificial Sequence
  Cyclic GFR-binding peptide
  MOD_RES (30)..(32): Xaa is C or S
TELSPISMLFIDENEKVVYKQYEDMVVEGXGXR

SEQ ID NO: 17134 - protein, 38 aa, Artificial Sequence
  Cyclic GFR-binding peptide
  MOD_RES (5)..(6)..(38): Xaa is C or S
IPKAXXVPTELEPLPMVYYDEYDKVVEQLSNEMVVEGX

SEQ ID NO: 17135 - protein, 33 aa, Artificial Sequence
  Cyclic GFR-binding peptide
  MOD_RES (2)..(3): Xaa is C or S
AXXVPTELEPLPMVYYDEYDKVVEQLSNEMVVE

SEQ ID NO: 17136 - protein, 32 aa, Artificial Sequence
  Cyclic GFR-binding peptide
  MOD_RES (31)..(31): Xaa is C or S
PTQLSPISVLFIDDSSNVIYKQYENMVVRAXG

SEQ ID NO: 17137 - protein, 28 aa, Artificial Sequence
  Cyclic GFR-binding peptide
VPTELEPLPMVYYDENEKVVEQLSNDMV

SEQ ID NO: 17138 - protein, 28 aa, Artificial Sequence
  Cyclic GFR-binding peptide
  MOD_RES (27)..(27): Xaa is C or S
NAISMLYFDENEKVVLKKYRDMVVEGXG

SEQ ID NO: 17139 - protein, 38 aa, Artificial Sequence
  Cyclic GFR-binding peptide
  MOD_RES (4)..(5)..(36)..(38): Xaa is C or S
AAPXXVPQALEPLTILYYVGRKPKVEQLSNMIVRSXKX

SEQ ID NO: 17140 - protein, 30 aa, Artificial Sequence; identical to SEQ ID NO: 6771
  Cyclic GFR-binding peptide
  MOD_RES (2)..(3): Xaa is C or S

SEQ ID NO: 17141 - protein, 26 aa, Artificial Sequence
  Cyclic GFR-binding peptide
QDLSPISILFIIGKTPKIYKQYEMIV

SEQ ID NO: 17142 - protein, 34 aa, Artificial Sequence
  Cyclic GFR-binding peptide
  MOD_RES (32)..(34): Xaa is C or S
VPTELEPLPMVYYDEYDKVVEQLSNEMVVEGXGX

SEQ ID NO: 17143 - protein, 33 aa, Artificial Sequence
  Cyclic GFR-binding peptide
  MOD_RES (5)..(6): Xaa is C or S
IPKAXXVPTELEPLPMVYYDEYDKVVEQLSNEM

SEQ ID NO: 17144 - protein, 33 aa, Artificial Sequence
  Cyclic GFR-binding peptide
  MOD_RES (3)..(4): Xaa is C or S
KPXXAPTQLSPISVLFIDDSSNVIYKQYENMVV

SEQ ID NO: 17145 - protein, 34 aa, Artificial Sequence
  Cyclic GFR-binding peptide
  MOD_RES (4)..(5): Xaa is C or S
AAPXXVPQALSPISILFIVGRKPKVYKQYEMIVR

SEQ ID NO: 17146 - protein, 32 aa, Artificial Sequence; identical to SEQ ID NO: 6776
  Cyclic GFR-binding peptide
  MOD_RES (31)..(31): Xaa is C or S

SEQ ID NO: 17147 - protein, 40 aa, Artificial Sequence; identical to SEQ ID NO: 6777
  Cyclic GFR-binding peptide
  MOD_RES (5)..(6)..(37)..(39): Xaa is C or S

SEQ ID NO: 17148 - protein, 35 aa, Artificial Sequence
  Cyclic GFR-binding peptide
  MOD_RES (1)..(32)..(34): Xaa is C or S
XVPQDLSPISILFIVGRTPKVYKQYEMVVKSXKXS

SEQ ID NO: 17149 - protein, 36 aa, Artificial Sequence
  Cyclic GFR-binding peptide
  MOD_RES (4)..(5)..(36): Xaa is C or S
ASPXXVSQDLEPLPIVYYIGKTPKIEQLSNMIVKSX

SEQ ID NO: 17150 - protein, 30 aa, Artificial Sequence
  Cyclic GFR-binding peptide
  MOD_RES (1)..(1): Xaa is C or S
XVPTELEPLTMLYYDENEKVVEQLSNDMVV

SEQ ID NO: 17151 - protein, 35 aa, Artificial Sequence
  Cyclic GFR-binding peptide
  MOD_RES (6)..(7): Xaa is C or S
SIPKAXXVPTELEPLPMVYYDEYDKVVEQLSNEMV

SEQ ID NO: 17152 - protein, 40 aa, Artificial Sequence
  Cyclic GFR-binding peptide
  MOD_RES (5)..(6)..(38)..(40): Xaa is C or S
VPKPXXAPTKLEPLPVVYYDDSSNVIEQLSNNMVVRSXGX

SEQ ID NO: 17153 - protein, 41 aa, Artificial Sequence; identical to SEQ ID NO: 6781
  Cyclic GFR-binding peptide
  MOD_RES (6)..(7)..(39)..(41): Xaa is C or S

SEQ ID NO: 17154 - protein, 30 aa, Artificial Sequence; identical to SEQ ID NO: 6782
  Cyclic GFR-binding peptide
  MOD_RES (1)..(1): Xaa is C or S

SEQ ID NO: 17155 - protein, 28 aa, Artificial Sequence
  Cyclic GFR-binding peptide
  MOD_RES (1)..(2): Xaa is C or S
XXAPTKLSAISVLYLDDSSNVILKNYQN

SEQ ID NO: 17156 - protein, 33 aa, Artificial Sequence; identical to SEQ ID NO: 6785
  Cyclic GFR-binding peptide
  MOD_RES (1)..(33): Xaa is C or S

SEQ ID NO: 17157 - protein, 40 aa, Artificial Sequence
  Cyclic GFR-binding peptide
  MOD_RES (4)..(5)..(37)..(39): Xaa is C or S
PKAXXVPTELEPLTMLYYDENEKVVEQLSNDMVVEGXGXR

SEQ ID NO: 17158 - protein, 30 aa, Artificial Sequence
  Cyclic GFR-binding peptide
  MOD_RES (2)..(3): Xaa is C or S
AXXVPTELEPLPMVYYDEYDKVVEQLSNEM

SEQ ID NO: 17159 - protein, 31 aa, Artificial Sequence
  Cyclic GFR-binding peptide
  MOD_RES (29)..(31): Xaa is C or S
QDLEPLPIVYYIGKTPKIEQLSNMIVKSXKX

SEQ ID NO: 17160 - protein, 33 aa, Artificial Sequence; identical to SEQ ID NO: 6787
  Cyclic GFR-binding peptide
  MOD_RES (3)..(4): Xaa is C or S

SEQ ID NO: 17161 - protein, 23 aa, Artificial Sequence
  Cyclic GFR-binding peptide
QDLSAISILYLVGRTPKVLKNYQ

SEQ ID NO: 17162 - protein, 37 aa, Artificial Sequence; identical to SEQ ID NO: 6790
  Cyclic GFR-binding peptide
  MOD_RES (6)..(6): Xaa is C or S

SEQ ID NO: 17163 - protein, 31 aa, Artificial Sequence; identical to SEQ ID NO: 6792
  Cyclic GFR-binding peptide
  MOD_RES (1)..(1): Xaa is C or S

SEQ ID NO: 17164 - protein, 32 aa, Artificial Sequence
  Cyclic GFR-binding peptide
  MOD_RES (7)..(7): Xaa is C or S
HVTKPTXAPTKLEPLTVLYYDDSSNVIEQLSN

SEQ ID NO: 17165 - protein, 24 aa, Artificial Sequence
  Cyclic GFR-binding peptide
DLEPLPIVYYIGKTPKIEQLSNMI

SEQ ID NO: 17166 - protein, 28 aa, Artificial Sequence
  Cyclic GFR-binding peptide
  MOD_RES (2)..(3): Xaa is C or S
PXXAPTKLEPLPVVYYDDSSNVIEQLSN

SEQ ID NO: 17167 - protein, 25 aa, Artificial Sequence
  Cyclic GFR-binding peptide
NAISILYFDSANNVVLKKYRDMVVE

SEQ ID NO: 17168 - protein, 26 aa, Artificial Sequence
  Cyclic GFR-binding peptide
DLSAISILYLIGKTPKILKNYQMIVK

SEQ ID NO: 17169 - protein, 37 aa, Artificial Sequence; identical to SEQ ID NO: 6797
  Cyclic GFR-binding peptide
  MOD_RES (4)..(5)..(37): Xaa is C or S

SEQ ID NO: 17170 - protein, 35 aa, Artificial Sequence
  Cyclic GFR-binding peptide
  MOD_RES (1)..(33)..(35): Xaa is C or S
XVPTELEPLPMVYYDEYDKVVEQLSNEMVVEGXGX

SEQ ID NO: 17171 - protein, 30 aa, Artificial Sequence
  Cyclic GFR-binding peptide
  MOD_RES (4)..(4): Xaa is C or S
KPTXAPTKLSPISVLFIDDSSNVIYKQYEN

SEQ ID NO: 17172 - protein, 29 aa, Artificial Sequence
  Cyclic GFR-binding peptide
  MOD_RES (3)..(4): Xaa is C or S
KPXXAPTQLEPLPVVYYDDSSNVIEQLSN

SEQ ID NO: 17173 - protein, 32 aa, Artificial Sequence; identical to SEQ ID NO: 6801
  Cyclic GFR-binding peptide
  MOD_RES (31)..(31): Xaa is C or S

SEQ ID NO: 17174 - protein, 33 aa, Artificial Sequence; identical to SEQ ID NO: 6802
  Cyclic GFR-binding peptide
  MOD_RES (5)..(6): Xaa is C or S

SEQ ID NO: 17175 - protein, 35 aa, Artificial Sequence
  Cyclic GFR-binding peptide
  MOD_RES (6)..(6): Xaa is C or S
VTKPTXAPTKLSPISVLFIDDSSNVIYKQYENMVV

SEQ ID NO: 17176 - protein, 37 aa, Artificial Sequence; identical to SEQ ID NO: 6803
  Cyclic GFR-binding peptide
  MOD_RES (6)..(7): Xaa is C or S

SEQ ID NO: 17177 - protein, 36 aa, Artificial Sequence
  Cyclic GFR-binding peptide
  MOD_RES (2)..(34)..(36): Xaa is C or S
TXAPTKLEPLTVLYYDDSSNVIEQLSNNMVVRSXGX

SEQ ID NO: 17178 - protein, 32 aa, Artificial Sequence; identical to SEQ ID NO: 6806
  Cyclic GFR-binding peptide
  MOD_RES (32)..(32): Xaa is C or S

SEQ ID NO: 17179 - protein, 37 aa, Artificial Sequence; identical to SEQ ID NO: 6807
  Cyclic GFR-binding peptide
  MOD_RES (5)..(37): Xaa is C or S

SEQ ID NO: 17180 - protein, 33 aa, Artificial Sequence
  Cyclic GFR-binding peptide
  MOD_RES (31)..(33): Xaa is C or S
PTELSPISMLFIDEYDKVVYKQYEEMVVEGXGX

SEQ ID NO: 17181 - protein, 32 aa, Artificial Sequence
  Cyclic GFR-binding peptide
  MOD_RES (31)..(31): Xaa is C or S
PTQLEPLPVVYYDDSSNVIEQLSNNMVVRAXG

SEQ ID NO: 17182 - protein, 32 aa, Artificial Sequence
  Cyclic GFR-binding peptide
  MOD_RES (3)..(4): Xaa is C or S
KPXXAPTQLSPISVLFIDDSSNVIYKQYENMV

SEQ ID NO: 17183 - protein, 39 aa, Artificial Sequence; identical to SEQ ID NO: 6811
  Cyclic GFR-binding peptide
  MOD_RES (4)..(5)..(36)..(38): Xaa is C or S

SEQ ID NO: 17184 - protein, 36 aa, Artificial Sequence
  Cyclic GFR-binding peptide
  MOD_RES (2)..(3)..(35): Xaa is C or S
TXXVPTRLNAISILYFDSANNVVLKKYRDMVVESXG

SEQ ID NO: 17185 - protein, 30 aa, Artificial Sequence
  Cyclic GFR-binding peptide
  MOD_RES (27)..(29): Xaa is C or S
LSPISILFIVGRTPKVYKQYEMVVKSXKXS

SEQ ID NO: 17186 - protein, 31 aa, Artificial Sequence; identical to SEQ ID NO: 6815
  Cyclic GFR-binding peptide
  MOD_RES (28)..(30): Xaa is C or S

SEQ ID NO: 17187 - protein, 30 aa, Artificial Sequence
  Cyclic GFR-binding peptide
  MOD_RES (2)..(3): Xaa is C or S
TXXVPTRLNAISILYFDSANNVVLKKYRDM

SEQ ID NO: 17188 - protein, 23 aa, Artificial Sequence
  Cyclic GFR-binding peptide
TRLEPLPIVYYDSANNVVEQLSN

SEQ ID NO: 17189 - protein, 32 aa, Artificial Sequence
  Cyclic GFR-binding peptide
  MOD_RES (29)..(31): Xaa is C or S
ELEPLPMVYYDEYDKVVEQLSNEMVVEGXGXR

SEQ ID NO: 17190 - protein, 24 aa, Artificial Sequence
  Cyclic GFR-binding peptide
PTKLSPISVLFIDDSSNVIYKQYE

SEQ ID NO: 17191 - protein, 35 aa, Artificial Sequence; identical to SEQ ID NO: 6818
  Cyclic GFR-binding peptide
  MOD_RES (1)..(32)..(34): Xaa is C or S

SEQ ID NO: 17192 - protein, 35 aa, Artificial Sequence; identical to SEQ ID NO: 6819
  Cyclic GFR-binding peptide
  MOD_RES (1)..(2)..(33)..(35): Xaa is C or S

SEQ ID NO: 17193 - protein, 28 aa, Artificial Sequence
  Cyclic GFR-binding peptide
  MOD_RES (1)..(2): Xaa is C or S
XXVPQDLNAISILYFVGRTPKVLKKYRM

SEQ ID NO: 17194 - protein, 20 aa, Artificial Sequence
  Cyclic GFR-binding peptide
EPLPIVYYDSANNVVEQLSN

SEQ ID NO: 17195 - protein, 37 aa, Artificial Sequence; identical to SEQ ID NO: 6821
  Cyclic GFR-binding peptide
  MOD_RES (4)..(5)..(36): Xaa is C or S

SEQ ID NO: 17196 - protein, 34 aa, Artificial Sequence
  Cyclic GFR-binding peptide
  MOD_RES (6)..(7): Xaa is C or S
ASAAPXXVPQALSPISILFIVGRKPKVYKQYEMI

SEQ ID NO: 17197 - protein, 28 aa, Artificial Sequence
  Cyclic GFR-binding peptide
VSQDLSAISILYLIGKTPKILKNYQMIV

SEQ ID NO: 17198 - protein, 37 aa, Artificial Sequence
  Cyclic GFR-binding peptide
  MOD_RES (6)..(7): Xaa is C or S
SIPKAXXVPTELSPISMLFIDEYDKVVYKQYEEMVVE

SEQ ID NO: 17199 - protein, 35 aa, Artificial Sequence
  Cyclic GFR-binding peptide
  MOD_RES (1)..(32)..(34): Xaa is C or S
XVPQALEPLTILYYVGRKPKVEQLSNMIVRSXKXS

SEQ ID NO: 17200 - protein, 21 aa, Artificial Sequence
  Cyclic GFR-binding peptide
EPLTMLYYDENEKVVEQLSND

SEQ ID NO: 17201 - protein, 35 aa, Artificial Sequence
  Cyclic GFR-binding peptide
  MOD_RES (4)..(5): Xaa is C or S
PKPXXAPTQLSPISVLFIDDSSNVIYKQYENMVVR

SEQ ID NO: 17202 - protein, 28 aa, Artificial Sequence
  Cyclic GFR-binding peptide
VPQDLEPLPIVYYVGRTPKVEQLSNMVV

SEQ ID NO: 17203 - protein, 34 aa, Artificial Sequence; identical to SEQ ID NO: 6830
  Cyclic GFR-binding peptide
  MOD_RES (4)..(4): Xaa is C or S

SEQ ID NO: 17204 - protein, 24 aa, Artificial Sequence
  Cyclic GFR-binding peptide
QALSAISILYLVGRKPKVLKNYQM

SEQ ID NO: 17205 - protein, 29 aa, Artificial Sequence
  Cyclic GFR-binding peptide
  MOD_RES (2)..(3): Xaa is C or S
PXXAPTKLEPLPVVYYDDSSNVIEQLSNN

SEQ ID NO: 17206 - protein, 34 aa, Artificial Sequence
  Cyclic GFR-binding peptide
  MOD_RES (4)..(5): Xaa is C or S
PKAXXVPTELEPLPMVYYDEYDKVVEQLSNEMVV

SEQ ID NO: 17207 - protein, 30 aa, Artificial Sequence; identical to SEQ ID NO: 6837
  Cyclic GFR-binding peptide
  MOD_RES (1)..(1): Xaa is C or S

SEQ ID NO: 17208 - protein, 38 aa, Artificial Sequence
  Cyclic GFR-binding peptide
  MOD_RES (4)..(5)..(36)..(38): Xaa is C or S
ASPXXVSQDLEPLPIVYYIGKTPKIEQLSNMIVKSXKX

SEQ ID NO: 17209 - protein, 33 aa, Artificial Sequence
  Cyclic GFR-binding peptide
  MOD_RES (2)..(3): Xaa is C or S
PXXAPTQLEPLTVLYYDDSSNVIEQLSNNMVVR

SEQ ID NO: 17210 - protein, 30 aa, Artificial Sequence; identical to SEQ ID NO: 6841
  Cyclic GFR-binding peptide
  MOD_RES (30)..(30): Xaa is C or S

SEQ ID NO: 17211 - protein, 28 aa, Artificial Sequence
  Cyclic GFR-binding peptide
  MOD_RES (28)..(28): Xaa is C or S
ALSAISILYLVGRKPKVLKNYQMIVRSX

SEQ ID NO: 17212 - protein, 31 aa, Artificial Sequence
  Cyclic GFR-binding peptide
  MOD_RES (2)..(3): Xaa is C or S
PXXAPTKLEPLPVVYYDDSSNVIEQLSNNMV

SEQ ID NO: 17213 - protein, 29 aa, Artificial Sequence
  Cyclic GFR-binding peptide
  MOD_RES (29)..(29): Xaa is C or S
QDLSAISILYLVGRTPKVLKNYQMVVKSX

SEQ ID NO: 17214 - protein, 29 aa, Artificial Sequence
  Cyclic GFR-binding peptide
  MOD_RES (3)..(3): Xaa is C or S
PTXAPTKLSAISVLYLDDSSNVILKNYQN

SEQ ID NO: 17215 - protein, 30 aa, Artificial Sequence
  Cyclic GFR-binding peptide
  MOD_RES (28)..(30): Xaa is C or S
LEPLTVLYYDDSSNVIEQLSNNMVVRAXGX

SEQ ID NO: 17216 - protein, 34 aa, Artificial Sequence
  Cyclic GFR-binding peptide
  MOD_RES (1)..(32)..(34): Xaa is C or S
XVPQALEPLTILYYVGRKPKVEQLSNMIVRSXKX

SEQ ID NO: 17217 - protein, 39 aa, Artificial Sequence
  Cyclic GFR-binding peptide
  MOD_RES (3)..(4)..(36)..(38): Xaa is C or S
PTXXVPTRLEPLPIVYYDSANNVVEQLSNDMVVESXGXR

SEQ ID NO: 17218 - protein, 24 aa, Artificial Sequence
  Cyclic GFR-binding peptide
QLEPLPVVYYDDSSNVIEQLSNNM

SEQ ID NO: 17219 - protein, 32 aa, Artificial Sequence
  Cyclic GFR-binding peptide
  MOD_RES (4)..(5): Xaa is C or S
PKPXXAPTQLEPLTVLYYDDSSNVIEQLSNNM

SEQ ID NO: 17220 - protein, 28 aa, Artificial Sequence
  Cyclic GFR-binding peptide
  MOD_RES (27)..(27): Xaa is C or S
LEPLTILYYVGRKPKVEQLSNMIVRSXK

SEQ ID NO: 17221 - protein, 32 aa, Artificial Sequence
  Cyclic GFR-binding peptide
  MOD_RES (6)..(7): Xaa is C or S
ASASPXXVSQDLEPLPIVYYIGKTPKIEQLSN

SEQ ID NO: 17222 - protein, 26 aa, Artificial Sequence
  Cyclic GFR-binding peptide
EPLPIVYYDSANNVVEQLSNDMVVES

SEQ ID NO: 17223 - protein, 38 aa, Artificial Sequence
  Cyclic GFR-binding peptide
  MOD_RES (6)..(7): Xaa is C or S
TVPKPXXAPTQLSPISVLFIDDSSNVIYKQYENMVVRA

SEQ ID NO: 17224 - protein, 29 aa, Artificial Sequence
  Cyclic GFR-binding peptide
  MOD_RES (28)..(28): Xaa is C or S
LNAISMLYFDENEKVVLKKYRDMVVEGXG

SEQ ID NO: 17225 - protein, 31 aa, Artificial Sequence
  Cyclic GFR-binding peptide
VPTRLEPLPIVYYDSANNVVEQLSNDMVVES

SEQ ID NO: 17226 - protein, 27 aa, Artificial Sequence
  Cyclic GFR-binding peptide
APTQLEPLPVVYYDDSSNVIEQLSNNM

SEQ ID NO: 17227 - protein, 41 aa, Artificial Sequence
  Cyclic GFR-binding peptide
  MOD_RES (5)..(6)..(38)..(40): Xaa is C or S
IPKAXXVPTELEPLTMLYYDENEKVVEQLSNDMVVEGXGXR

SEQ ID NO: 17228 - protein, 26 aa, Artificial Sequence
  Cyclic GFR-binding peptide
  MOD_RES (26)..(26): Xaa is C or S
SAISILYLVGRKPKVLKNYQMIVRSX

SEQ ID NO: 17229 - protein, 35 aa, Artificial Sequence
  Cyclic GFR-binding peptide
  MOD_RES (3)..(4): Xaa is C or S
PTXXVPTRLEPLPIVYYDSANNVVEQLSNDMVVES

SEQ ID NO: 17230 - protein, 31 aa, Artificial Sequence
  Cyclic GFR-binding peptide
  MOD_RES (30)..(30): Xaa is C or S
TELEPLTMLYYDENEKVVEQLSNDMVVEGXG

SEQ ID NO: 17231 - protein, 35 aa, Artificial Sequence; identical to SEQ ID NO: 6859
  Cyclic GFR-binding peptide
  MOD_RES (4)..(4): Xaa is C or S

SEQ ID NO: 17232 - protein, 31 aa, Artificial Sequence
  Cyclic GFR-binding peptide
  MOD_RES (1)..(1): Xaa is C or S
XVPQALEPLTILYYVGRKPKVEQLSNMIVRS

SEQ ID NO: 17233 - protein, 36 aa, Artificial Sequence; identical to SEQ ID NO: 6862
  Cyclic GFR-binding peptide
  MOD_RES (6)..(7): Xaa is C or S

SEQ ID NO: 17234 - protein, 21 aa, Artificial Sequence
  Cyclic GFR-binding peptide
NAISMLYFDENEKVVLKKYRD

SEQ ID NO: 17235 - protein, 29 aa, Artificial Sequence
  Cyclic GFR-binding peptide
  MOD_RES (3)..(4): Xaa is C or S
SPXXVPQDLSPISILFIVGRTPKVYKQYE

SEQ ID NO: 17236 - protein, 30 aa, Artificial Sequence
  Cyclic GFR-binding peptide
  MOD_RES (4)..(5): Xaa is C or S
PKPXXAPTKLEPLTVLYYDDSSNVIEQLSN

SEQ ID NO: 17237 - protein, 25 aa, Artificial Sequence
  Cyclic GFR-binding peptide
TRLEPLTILYYDSANNVVEQLSNDM

SEQ ID NO: 17238 - protein, 28 aa, Artificial Sequence
  Cyclic GFR-binding peptide
KLEPLPVVYYDDSSNVIEQLSNNMVVRS

SEQ ID NO: 17239 - protein, 34 aa, Artificial Sequence
  Cyclic GFR-binding peptide
  MOD_RES (1)..(32)..(34): Xaa is C or S
XVSQDLEPLPIVYYIGKTPKIEQLSNMIVKSXKX

SEQ ID NO: 17240 - protein, 22 aa, Artificial Sequence
  Cyclic GFR-binding peptide
RLEPLTILYYDSANNVVEQLSN

SEQ ID NO: 17241 - protein, 31 aa, Artificial Sequence
  Cyclic GFR-binding peptide
  MOD_RES (30)..(30): Xaa is C or S
TRLNAISILYFDSANNVVLKKYRDMVVESXG

SEQ ID NO: 17242 - protein, 30 aa, Artificial Sequence; identical to SEQ ID NO: 6872
  Cyclic GFR-binding peptide
  MOD_RES (3)..(4): Xaa is C or S

SEQ ID NO: 17243 - protein, 29 aa, Artificial Sequence
  Cyclic GFR-binding peptide
  MOD_RES (2)..(3): Xaa is C or S
PXXVPQDLSAISILYLVGRTPKVLKNYQM

SEQ ID NO: 17244 - protein, 24 aa, Artificial Sequence
  Cyclic GFR-binding peptide
ELNAISMLYFDEYDKVVLKKYREM

SEQ ID NO: 17245 - protein, 34 aa, Artificial Sequence; identical to SEQ ID NO: 6879
  Cyclic GFR-binding peptide
  MOD_RES (31)..(33): Xaa is C or S

SEQ ID NO: 17246 - protein, 31 aa, Artificial Sequence
  Cyclic GFR-binding peptide
  MOD_RES (1)..(2): Xaa is C or S
XXVPTRLEPLTILYYDSANNVVEQLSNDMVV

SEQ ID NO: 17247 - protein, 25 aa, Artificial Sequence
  Cyclic GFR-binding peptide
LEPLTILYYVGRKPKVEQLSNMIVR

SEQ ID NO: 17248 - protein, 41 aa, Artificial Sequence
  Cyclic GFR-binding peptide
  MOD_RES (5)..(6)..(38)..(40): Xaa is C or S
VPKPXXAPTKLSPISVLFIDDSSNVIYKQYENMVVRSXGXH

SEQ ID NO: 17249 - protein, 26 aa, Artificial Sequence
  Cyclic GFR-binding peptide
RLNAISILYFDSANNVVLKKYRDMVV

SEQ ID NO: 17250 - protein, 28 aa, Artificial Sequence
  Cyclic GFR-binding peptide
  MOD_RES (2)..(3): Xaa is C or S
PXXVPQALSAISILYLVGRKPKVLKNYQ

SEQ ID NO: 17251 - protein, 35 aa, Artificial Sequence
  Cyclic GFR-binding peptide
  MOD_RES (3)..(4)..(35): Xaa is C or S
APXXVPQALSPISILFIVGRKPKVYKQYEMIVRSX

SEQ ID NO: 17252 - protein, 28 aa, Artificial Sequence
  Cyclic GFR-binding peptide
  MOD_RES (28)..(28): Xaa is C or S
ALEPLTILYYVGRKPKVEQLSNMIVRSX

SEQ ID NO: 17253 - protein, 28 aa, Artificial Sequence
  Cyclic GFR-binding peptide
  MOD_RES (28)..(28): Xaa is C or S
LNAISMLYFDENEKVVLKKYRDMVVEGX

SEQ ID NO: 17254 - protein, 29 aa, Artificial Sequence
  Cyclic GFR-binding peptide
  MOD_RES (29)..(29): Xaa is C or S
QDLEPLPIVYYVGRTPKVEQLSNMVVKSX

SEQ ID NO: 17255 - protein, 30 aa, Artificial Sequence; identical to SEQ ID NO: 6885
  Cyclic GFR-binding peptide

SEQ ID NO: 17256 - protein, 22 aa, Artificial Sequence
  Cyclic GFR-binding peptide
EPLPIVYYIGKTPKIEQLSNMI

SEQ ID NO: 17257 - protein, 33 aa, Artificial Sequence
  Cyclic GFR-binding peptide
  MOD_RES (1)..(2): Xaa is C or S
XXVPTRLSAISILYLDSANNVVLKNYQDMVVES

SEQ ID NO: 17258 - protein, 30 aa, Artificial Sequence; identical to SEQ ID NO: 6892
  Cyclic GFR-binding peptide
  MOD_RES (5)..(5): Xaa is C or S

SEQ ID NO: 17259 - protein, 28 aa, Artificial Sequence
  Cyclic GFR-binding peptide
TKLEPLTVLYYDDSSNVIEQLSNNMVVR

SEQ ID NO: 17260 - protein, 25 aa, Artificial Sequence
  Cyclic GFR-binding peptide
VPTELNAISMLYFDENEKVVLKKYR

SEQ ID NO: 17261 - protein, 30 aa, Artificial Sequence
  Cyclic GFR-binding peptide
  MOD_RES (30)..(30): Xaa is C or S
PQALEPLTILYYVGRKPKVEQLSNMIVRSX

SEQ ID NO: 17262 - protein, 30 aa, Artificial Sequence; identical to SEQ ID NO: 6898
  Cyclic GFR-binding peptide
  MOD_RES (1)..(2): Xaa is C or S

SEQ ID NO: 17263 - protein, 27 aa, Artificial Sequence
  Cyclic GFR-binding peptide
TKLSAISVLYLDDSSNVILKNYQNMVV

SEQ ID NO: 17264 - protein, 34 aa, Artificial Sequence
  Cyclic GFR-binding peptide
  MOD_RES (4)..(4): Xaa is C or S
KPTXAPTKLEPLPVVYYDDSSNVIEQLSNNMVVR

SEQ ID NO: 17265 - protein, 31 aa, Artificial Sequence
  Cyclic GFR-binding peptide
  MOD_RES (2)..(3): Xaa is C or S
TXXVPTRLNAISILYFDSANNVVLKKYRDMV

SEQ ID NO: 17266 - protein, 31 aa, Artificial Sequence
  Cyclic GFR-binding peptide
  MOD_RES (5)..(6): Xaa is C or S
SAAPXXVPQALEPLTILYYVGRKPKVEQLSN

SEQ ID NO: 17267 - protein, 32 aa, Artificial Sequence; identical to SEQ ID NO: 6904
  Cyclic GFR-binding peptide
  MOD_RES (5)..(6): Xaa is C or S

SEQ ID NO: 17268 - protein, 34 aa, Artificial Sequence
  Cyclic GFR-binding peptide
  MOD_RES (5)..(6): Xaa is C or S
VPKPXXAPTQLEPLTVLYYDDSSNVIEQLSNNMV

SEQ ID NO: 17269 - protein, 37 aa, Artificial Sequence
  Cyclic GFR-binding peptide
  MOD_RES (7)..(7): Xaa is C or S
HVTKPTXAPTKLEPLPVVYYDDSSNVIEQLSNNMVVR

SEQ ID NO: 17270 - protein, 30 aa, Artificial Sequence
  Cyclic GFR-binding peptide
PTELSPISMLFIDENEKVVYKQYEDMVVEG

SEQ ID NO: 17271 - protein, 32 aa, Artificial Sequence
  Cyclic GFR-binding peptide
  MOD_RES (1)..(1): Xaa is C or S
XVPTRLNAISILYFDSANNVVLKKYRDMVVES

SEQ ID NO: 17272 - protein, 25 aa, Artificial Sequence
  Cyclic GFR-binding peptide
NAISMLYFDENEKVVLKKYRDMVVE

SEQ ID NO: 17273 - protein, 26 aa, Artificial Sequence
  Cyclic GFR-binding peptide
DLSPISILFIIGKTPKIYKQYEMIVK

SEQ ID NO: 17274 - protein, 27 aa, Artificial Sequence
  Cyclic GFR-binding peptide
VSQDLEPLPIVYYIGKTPKIEQLSNMI

SEQ ID NO: 17275 - protein, 29 aa, Artificial Sequence
  Cyclic GFR-binding peptide
  MOD_RES (26)..(28): Xaa is C or S
SPISILFIVGRKPKVYKQYEMIVRSXKXS

SEQ ID NO: 17276 - protein, 30 aa, Artificial Sequence
  Cyclic GFR-binding peptide
  MOD_RES (27)..(29): Xaa is C or S
LEPLPIVYYIGKTPKIEQLSNMIVKSXKXS

SEQ ID NO: 17277 - protein, 28 aa, Artificial Sequence
  Cyclic GFR-binding peptide
VSQDLNAISILYFIGKTPKILKKYRMIV

SEQ ID NO: 17278 - protein, 29 aa, Artificial Sequence
  Cyclic GFR-binding peptide
PTRLSAISILYLDSANNVVLKNYQDMVVE

SEQ ID NO: 17279 - protein, 35 aa, Artificial Sequence; identical to SEQ ID NO: 6912
  Cyclic GFR-binding peptide
  MOD_RES (6)..(6): Xaa is C or S

SEQ ID NO: 17280 - protein, 28 aa, Artificial Sequence
  Cyclic GFR-binding peptide
KLEPLTVLYYDDSSNVIEQLSNNMVVRS

SEQ ID NO: 17281 - protein, 25 aa, Artificial Sequence
  Cyclic GFR-binding peptide
ALSPISILFIVGRKPKVYKQYEMIV

SEQ ID NO: 17282 - protein, 27 aa, Artificial Sequence
  Cyclic GFR-binding peptide
TQLEPLPVVYYDDSSNVIEQLSNNMVV

SEQ ID NO: 17283 - protein, 29 aa, Artificial Sequence
  Cyclic GFR-binding peptide
  MOD_RES (28)..(28): Xaa is C or S
DLSAISILYLIGKTPKILKNYQMIVKSXK

SEQ ID NO: 17284 - protein, 34 aa, Artificial Sequence
  Cyclic GFR-binding peptide
  MOD_RES (2)..(34): Xaa is C or S
TXAPTKLEPLTVLYYDDSSNVIEQLSNNMVVRSX

SEQ ID NO: 17285 - protein, 34 aa, Artificial Sequence; identical to SEQ ID NO: 6917
  Cyclic GFR-binding peptide
  MOD_RES (4)..(5): Xaa is C or S

SEQ ID NO: 17286 - protein, 33 aa, Artificial Sequence
  Cyclic GFR-binding peptide
  MOD_RES (3)..(4): Xaa is C or S
PTXXVPTRLSAISILYLDSANNVVLKNYQDMVV

SEQ ID NO: 17287 - protein, 36 aa, Artificial Sequence
  Cyclic GFR-binding peptide
  MOD_RES (3)..(4)..(36): Xaa is C or S
KAXXVPTELEPLTMLYYDENEKVVEQLSNDMVVEGX

SEQ ID NO: 17288 - protein, 33 aa, Artificial Sequence
  Cyclic GFR-binding peptide
  MOD_RES (2)..(3): Xaa is C or S
PXXVSQDLSPISILFIIGKTPKIYKQYEMIVKS

SEQ ID NO: 17289 - protein, 37 aa, Artificial Sequence
  Cyclic GFR-binding peptide
  MOD_RES (5)..(6)..(37): Xaa is C or S
SASPXXVSQDLSPISILFIIGKTPKIYKQYEMIVKSX

SEQ ID NO: 17290 - protein, 26 aa, Artificial Sequence
  Cyclic GFR-binding peptide
TQLSAISVLYLDDSSNVILKNYQNMV

SEQ ID NO: 17291 - protein, 36 aa, Artificial Sequence; identical to SEQ ID NO: 6923
  Cyclic GFR-binding peptide
  MOD_RES (2)..(3)..(35): Xaa is C or S

SEQ ID NO: 17292 - protein, 28 aa, Artificial Sequence
  Cyclic GFR-binding peptide
QDLEPLPIVYYIGKTPKIEQLSNMIVKS

SEQ ID NO: 17293 - protein, 32 aa, Artificial Sequence; identical to SEQ ID NO: 6924
  Cyclic GFR-binding peptide
  MOD_RES (5)..(6): Xaa is C or S

SEQ ID NO: 17294 - protein, 30 aa, Artificial Sequence; identical to SEQ ID NO: 6926
  Cyclic GFR-binding peptide

SEQ ID NO: 17295 - protein, 28 aa, Artificial Sequence
  Cyclic GFR-binding peptide
  MOD_RES (2)..(3): Xaa is C or S
TXXVPTRLEPLPIVYYDSANNVVEQLSN

SEQ ID NO: 17296 - protein, 33 aa, Artificial Sequence; identical to SEQ ID NO: 6927
  Cyclic GFR-binding peptide
  MOD_RES (1)..(2): Xaa is C or S

SEQ ID NO: 17297 - protein, 30 aa, Artificial Sequence
  Cyclic GFR-binding peptide
PTELSPISMLFIDEYDKVVYKQYEEMVVEG

SEQ ID NO: 17298 - protein, 28 aa, Artificial Sequence
  Cyclic GFR-binding peptide
  MOD_RES (1)..(1): Xaa is C or S
XVPTELSPISMLFIDEYDKVVYKQYEEM

SEQ ID NO: 17299 - protein, 33 aa, Artificial Sequence; identical to SEQ ID NO: 6928
  Cyclic GFR-binding peptide
  MOD_RES (3)..(4): Xaa is C or S

SEQ ID NO: 17300 - protein, 31 aa, Artificial Sequence
  Cyclic GFR-binding peptide
  MOD_RES (4)..(5): Xaa is C or S
PKPXXAPTKLSPISVLFIDDSSNVIYKQYEN

SEQ ID NO: 17301 - protein, 23 aa, Artificial Sequence
  Cyclic GFR-binding peptide
TQLEPLPVVYYDDSSNVIEQLSN

SEQ ID NO: 17302 - protein, 31 aa, Artificial Sequence; identical to SEQ ID NO: 6936
  Cyclic GFR-binding peptide
  MOD_RES (31)..(31): Xaa is C or S

SEQ ID NO: 17303 - protein, 33 aa, Artificial Sequence
  Cyclic GFR-binding peptide
  MOD_RES (6)..(7): Xaa is C or S
ASASPXXVSQDLSPISILFIIGKTPKIYKQYEM

SEQ ID NO: 17304 - protein, 40 aa, Artificial Sequence
  Cyclic GFR-binding peptide
  MOD_RES (7)..(39): Xaa is C or S
HVTKPTXAPTKLEPLPVVYYDDSSNVIEQLSNNMVVRSXG

SEQ ID NO: 17305 - protein, 28 aa, Artificial Sequence
  Cyclic GFR-binding peptide
  MOD_RES (2)..(3): Xaa is C or S
PXXVPQALNAISILYFVGRKPKVLKKYR

SEQ ID NO: 17306 - protein, 28 aa, Artificial Sequence
  Cyclic GFR-binding peptide
  MOD_RES (27)..(27): Xaa is C or S
EPLTMLYYDENEKVVEQLSNDMVVEGXG

SEQ ID NO: 17307 - protein, 31 aa, Artificial Sequence
  Cyclic GFR-binding peptide
APTKLEPLTVLYYDDSSNVIEQLSNNMVVRS

SEQ ID NO: 17308 - protein, 25 aa, Artificial Sequence
  Cyclic GFR-binding peptide
LSAISILYLDSANNVVLKNYQDMVV

SEQ ID NO: 17309 - protein, 26 aa, Artificial Sequence
  Cyclic GFR-binding peptide
VPQALEPLTILYYVGRKPKVEQLSNM

SEQ ID NO: 17310 - protein, 25 aa, Artificial Sequence
  Cyclic GFR-binding peptide
LEPLTMLYYDENEKVVEQLSNDMVV

SEQ ID NO: 17311 - protein, 32 aa, Artificial Sequence
  Cyclic GFR-binding peptide
  MOD_RES (4)..(5): Xaa is C or S
AAPXXVPQALSPISILFIVGRKPKVYKQYEMI

SEQ ID NO: 17312 - protein, 36 aa, Artificial Sequence
  Cyclic GFR-binding peptide
  MOD_RES (1)..(2)..(34)..(36): Xaa is C or S
XXAPTQLEPLTVLYYDDSSNVIEQLSNNMVVRAXGX

SEQ ID NO: 17313 - protein, 28 aa, Artificial Sequence
  Cyclic GFR-binding peptide
  MOD_RES (3)..(3): Xaa is C or S
PTXAPTKLSPISVLFIDDSSNVIYKQYE

SEQ ID NO: 17314 - protein, 30 aa, Artificial Sequence
  Cyclic GFR-binding peptide
VPTELEPLTMLYYDEYDKVVEQLSNEMVVE

SEQ ID NO: 17315 - protein, 27 aa, Artificial Sequence
  Cyclic GFR-binding peptide
RLEPLTILYYDSANNVVEQLSNDMVVE

SEQ ID NO: 17316 - protein, 21 aa, Artificial Sequence
  Cyclic GFR-binding peptide
LEPLPIVYYDSANNVVEQLSN

SEQ ID NO: 17317 - protein, 27 aa, Artificial Sequence
  Cyclic GFR-binding peptide
ALNAISILYFVGRKPKVLKKYRMIVRS

SEQ ID NO: 17318 - protein, 27 aa, Artificial Sequence
  Cyclic GFR-binding peptide
VPQDLEPLPIVYYVGRTPKVEQLSNMV

SEQ ID NO: 17319 - protein, 37 aa, Artificial Sequence
  Cyclic GFR-binding peptide
  MOD_RES (6)..(7): Xaa is C or S
YVPKPXXAPTKLEPLPVVYYDDSSNVIEQLSNNMVVR

SEQ ID NO: 17320 - protein, 24 aa, Artificial Sequence
  Cyclic GFR-binding peptide
PQDLNAISILYFVGRTPKVLKKYR

SEQ ID NO: 17321 - protein, 36 aa, Artificial Sequence
  Cyclic GFR-binding peptide
  MOD_RES (1)..(33)..(35): Xaa is C or S
XAPTKLEPLTVLYYDDSSNVIEQLSNNMVVRSXGXH

SEQ ID NO: 17322 - protein, 28 aa, Artificial Sequence
  Cyclic GFR-binding peptide
  MOD_RES (28)..(28): Xaa is C or S
LEPLPMVYYDENEKVVEQLSNDMVVEGX

SEQ ID NO: 17323 - protein, 40 aa, Artificial Sequence
  Cyclic GFR-binding peptide
  MOD_RES (6)..(7)..(39): Xaa is C or S
STPPTXXVPTRLEPLTILYYDSANNVVEQLSNDMVVESXG

SEQ ID NO: 17324 - protein, 28 aa, Artificial Sequence
  Cyclic GFR-binding peptide
PQDLEPLPIVYYVGRTPKVEQLSNMVVK

SEQ ID NO: 17325 - protein, 33 aa, Artificial Sequence
  Cyclic GFR-binding peptide
  MOD_RES (3)..(4): Xaa is C or S
KAXXVPTELEPLPMVYYDENEKVVEQLSNDMVV

SEQ ID NO: 17326 - protein, 32 aa, Artificial Sequence
  Cyclic GFR-binding peptide
  MOD_RES (2)..(3): Xaa is C or S
PXXVPQALSPISILFIVGRKPKVYKQYEMIVR

SEQ ID NO: 17327 - protein, 28 aa, Artificial Sequence
  Cyclic GFR-binding peptide
TKLEPLPVVYYDDSSNVIEQLSNNMVVR

SEQ ID NO: 17328 - protein, 35 aa, Artificial Sequence
  Cyclic GFR-binding peptide
  MOD_RES (1)..(2)..(33)..(35): Xaa is C or S
XXVPQALSPISILFIVGRKPKVYKQYEMIVRSXKX

SEQ ID NO: 17329 - protein, 36 aa, Artificial Sequence
  Cyclic GFR-binding peptide
  MOD_RES (5)..(5): Xaa is C or S
TKPTXAPTKLEPLPVVYYDDSSNVIEQLSNNMVVRS

SEQ ID NO: 17330 - protein, 35 aa, Artificial Sequence
  Cyclic GFR-binding peptide
  MOD_RES (1)..(2)..(33)..(35): Xaa is C or S
XXVSQDLSPISILFIIGKTPKIYKQYEMIVKSXKX

SEQ ID NO: 17331 - protein, 31 aa, Artificial Sequence
  Cyclic GFR-binding peptide
  MOD_RES (4)..(5): Xaa is C or S
PKPXXAPTKLEPLPVVYYDDSSNVIEQLSNN

SEQ ID NO: 17332 - protein, 28 aa, Artificial Sequence
  Cyclic GFR-binding peptide
TRLEPLTILYYDSANNVVEQLSNDMVVE

SEQ ID NO: 17333 - protein, 25 aa, Artificial Sequence
  Cyclic GFR-binding peptide
TELEPLPMVYYDENEKVVEQLSNDM

SEQ ID NO: 17334 - protein, 23 aa, Artificial Sequence
  Cyclic GFR-binding peptide
TELEPLPMVYYDENEKVVEQLSN

SEQ ID NO: 17335 - protein, 25 aa, Artificial Sequence
  Cyclic GFR-binding peptide
PQALSAISILYLVGRKPKVLKNYQM

SEQ ID NO: 17336 - protein, 28 aa, Artificial Sequence
  Cyclic GFR-binding peptide
  MOD_RES (28)..(28): Xaa is C or S
DLEPLPIVYYIGKTPKIEQLSNMIVKSX

SEQ ID NO: 17337 - protein, 28 aa, Artificial Sequence
  Cyclic GFR-binding peptide
PQDLSPISILFIVGRTPKVYKQYEMVVK

SEQ ID NO: 17338 - protein, 23 aa, Artificial Sequence
  Cyclic GFR-binding peptide
QLEPLPVVYYDDSSNVIEQLSNN

SEQ ID NO: 17339 - protein, 23 aa, Artificial Sequence
  Cyclic GFR-binding peptide
LSAISILYLIGKTPKILKNYQMI

SEQ ID NO: 17340 - protein, 32 aa, Artificial Sequence; identical to SEQ ID NO: 6986
  Cyclic GFR-binding peptide
  MOD_RES (29)..(31): Xaa is C or S

SEQ ID NO: 17341 - protein, 31 aa, Artificial Sequence
  Cyclic GFR-binding peptide
  MOD_RES (3)..(3): Xaa is C or S
PTXAPTKLEPLPVVYYDDSSNVIEQLSNNMV

SEQ ID NO: 17342 - protein, 37 aa, Artificial Sequence; identical to SEQ ID NO: 6988
  Cyclic GFR-binding peptide
  MOD_RES (3)..(4)..(35)..(37): Xaa is C or S

SEQ ID NO: 17343 - protein, 36 aa, Artificial Sequence; identical to SEQ ID NO: 6989
  Cyclic GFR-binding peptide
  MOD_RES (4)..(5): Xaa is C or S

SEQ ID NO: 17344 - protein, 31 aa, Artificial Sequence
  Cyclic GFR-binding peptide
  MOD_RES (1)..(2): Xaa is C or S
XXVPTRLNAISILYFDSANNVVLKKYRDMVV

SEQ ID NO: 17345 - protein, 31 aa, Artificial Sequence
  Cyclic GFR-binding peptide
  MOD_RES (30)..(30): Xaa is C or S
PQALSPISILFIVGRKPKVYKQYEMIVRSXK

SEQ ID NO: 17346 - protein, 32 aa, Artificial Sequence; identical to SEQ ID NO: 6990
  Cyclic GFR-binding peptide
  MOD_RES (1)..(2): Xaa is C or S

SEQ ID NO: 17347 - protein, 30 aa, Artificial Sequence; identical to SEQ ID NO: 6992
  Cyclic GFR-binding peptide
  MOD_RES (27)..(29): Xaa is C or S

SEQ ID NO: 17348 - protein, 34 aa, Artificial Sequence
  Cyclic GFR-binding peptide
  MOD_RES (5)..(6): Xaa is C or S
SAAPXXVPQALEPLTILYYVGRKPKVEQLSNMIV

SEQ ID NO: 17349 - protein, 35 aa, Artificial Sequence
  Cyclic GFR-binding peptide
  MOD_RES (1)..(2)..(33)..(35): Xaa is C or S
XXVPQDLEPLPIVYYVGRTPKVEQLSNMVVKSXKX

SEQ ID NO: 17350 - protein, 27 aa, Artificial Sequence
  Cyclic GFR-binding peptide
  MOD_RES (1)..(2): Xaa is C or S
XXAPTQLEPLTVLYYDDSSNVIEQLSN

SEQ ID NO: 17351 - protein, 32 aa, Artificial Sequence
  Cyclic GFR-binding peptide
  MOD_RES (31)..(31): Xaa is C or S
PTKLEPLPVVYYDDSSNVIEQLSNNMVVRSXG

SEQ ID NO: 17352 - protein, 26 aa, Artificial Sequence
  Cyclic GFR-binding peptide
PQDLSAISILYLVGRTPKVLKNYQMV

SEQ ID NO: 17353 - protein, 37 aa, Artificial Sequence
  Cyclic GFR-binding peptide
  MOD_RES (2)..(3)..(35)..(37): Xaa is C or S
TXXVPTRLEPLPIVYYDSANNVVEQLSNDMVVESXGX

SEQ ID NO: 17354 - protein, 27 aa, Artificial Sequence
  Cyclic GFR-binding peptide
QDLEPLPIVYYIGKTPKIEQLSNMIVK

SEQ ID NO: 17355 - protein, 33 aa, Artificial Sequence
  Cyclic GFR-binding peptide
  MOD_RES (31)..(33): Xaa is C or S
PTKLEPLPVVYYDDSSNVIEQLSNNMVVRSXGX

SEQ ID NO: 17356 - protein, 28 aa, Artificial Sequence
  Cyclic GFR-binding peptide
  MOD_RES (1)..(1): Xaa is C or S
XVPTRLEPLPIVYYDSANNVVEQLSNDM

SEQ ID NO: 17357 - protein, 34 aa, Artificial Sequence
  Cyclic GFR-binding peptide
  MOD_RES (31)..(33): Xaa is C or S
PTQLEPLTVLYYDDSSNVIEQLSNNMVVRAXGXH

SEQ ID NO: 17358 - protein, 31 aa, Artificial Sequence
  Cyclic GFR-binding peptide
  MOD_RES (28)..(30): Xaa is C or S
LEPLPIVYYDSANNVVEQLSNDMVVESXGXR

SEQ ID NO: 17359 - protein, 31 aa, Artificial Sequence
  Cyclic GFR-binding peptide
VPTELEPLTMLYYDENEKVVEQLSNDMVVEG

SEQ ID NO: 17360 - protein, 27 aa, Artificial Sequence
  Cyclic GFR-binding peptide
PQALEPLTILYYVGRKPKVEQLSNMIV

SEQ ID NO: 17361 - protein, 39 aa, Artificial Sequence
  Cyclic GFR-binding peptide
  MOD_RES (5)..(37)..(39): Xaa is C or S
TKPTXAPTKLEPLPVVYYDDSSNVIEQLSNNMVVRSXGX

SEQ ID NO: 17362 - protein, 32 aa, Artificial Sequence; identical to SEQ ID NO: 7005
  Cyclic GFR-binding peptide
  MOD_RES (6)..(7): Xaa is C or S

SEQ ID NO: 17363 - protein, 35 aa, Artificial Sequence; identical to SEQ ID NO: 7006
  Cyclic GFR-binding peptide
  MOD_RES (6)..(7): Xaa is C or S

SEQ ID NO: 17364 - protein, 28 aa, Artificial Sequence
  Cyclic GFR-binding peptide
PTRLNAISILYFDSANNVVLKKYRDMVV

SEQ ID NO: 17365 - protein, 31 aa, Artificial Sequence
  Cyclic GFR-binding peptide
  MOD_RES (3)..(4): Xaa is C or S
KPXXAPTQLEPLPVVYYDDSSNVIEQLSNNM

SEQ ID NO: 17366 - protein, 37 aa, Artificial Sequence
  Cyclic GFR-binding peptide
  MOD_RES (5)..(37): Xaa is C or S
TKPTXAPTKLEPLTVLYYDDSSNVIEQLSNNMVVRSX

SEQ ID NO: 17367 - protein, 33 aa, Artificial Sequence
  Cyclic GFR-binding peptide
  MOD_RES (2)..(3): Xaa is C or S
PXXVPQDLSPISILFIVGRTPKVYKQYEMVVKS

SEQ ID NO: 17368 - protein, 35 aa, Artificial Sequence; identical to SEQ ID NO: 7013
  Cyclic GFR-binding peptide
  MOD_RES (3)..(4): Xaa is C or S

SEQ ID NO: 17369 - protein, 38 aa, Artificial Sequence
  Cyclic GFR-binding peptide
  MOD_RES (6)..(7): Xaa is C or S
STPPTXXVPTRLSAISILYLDSANNVVLKNYQDMVVES

SEQ ID NO: 17370 - protein, 27 aa, Artificial Sequence
  Cyclic GFR-binding peptide
VPQDLSAISILYLVGRTPKVLKNYQMV

SEQ ID NO: 17371 - protein, 32 aa, Artificial Sequence
  Cyclic GFR-binding peptide
  MOD_RES (1)..(32): Xaa is C or S
XVPQALEPLTILYYVGRKPKVEQLSNMIVRSX

SEQ ID NO: 17372 - protein, 34 aa, Artificial Sequence
  Cyclic GFR-binding peptide
  MOD_RES (1)..(32)..(34): Xaa is C or S
XVSQDLSPISILFIIGKTPKIYKQYEMIVKSXKX

SEQ ID NO: 17373 - protein, 29 aa, Artificial Sequence
  Cyclic GFR-binding peptide
  MOD_RES (27)..(29): Xaa is C or S
LEPLPIVYYVGRTPKVEQLSNMVVKSXKX

SEQ ID NO: 17374 - protein, 33 aa, Artificial Sequence
  Cyclic GFR-binding peptide
  MOD_RES (6)..(7): Xaa is C or S
ASASPXXVPQDLSPISILFIVGRTPKVYKQYEM

SEQ ID NO: 17375 - protein, 32 aa, Artificial Sequence
  Cyclic GFR-binding peptide
  MOD_RES (2)..(2): Xaa is C or S
TXAPTKLEPLTVLYYDDSSNVIEQLSNNMVVR

SEQ ID NO: 17376 - protein, 24 aa, Artificial Sequence
  Cyclic GFR-binding peptide
TQLSAISVLYLDDSSNVILKNYQN

SEQ ID NO: 17377 - protein, 34 aa, Artificial Sequence
  Cyclic GFR-binding peptide
  MOD_RES (1)..(32)..(34): Xaa is C or S
XVPQALSPISILFIVGRKPKVYKQYEMIVRSXKX

SEQ ID NO: 17378 - protein, 32 aa, Artificial Sequence
  Cyclic GFR-binding peptide
  MOD_RES (4)..(5): Xaa is C or S
PPTXXVPTRLNAISILYFDSANNVVLKKYRDM

SEQ ID NO: 17379 - protein, 33 aa, Artificial Sequence; identical to SEQ ID NO: 7025
  Cyclic GFR-binding peptide
  MOD_RES (1)..(2): Xaa is C or S

SEQ ID NO: 17380 - protein, 27 aa, Artificial Sequence
  Cyclic GFR-binding peptide
LEPLPVVYYDDSSNVIEQLSNNMVVRA

SEQ ID NO: 17381 - protein, 26 aa, Artificial Sequence
  Cyclic GFR-binding peptide
  MOD_RES (26)..(26): Xaa is C or S
NAISILYFVGRKPKVLKKYRMIVRSX

SEQ ID NO: 17382 - protein, 34 aa, Artificial Sequence
  Cyclic GFR-binding peptide
  MOD_RES (31)..(33): Xaa is C or S
PTELEPLTMLYYDENEKVVEQLSNDMVVEGXGXR

SEQ ID NO: 17383 - protein, 31 aa, Artificial Sequence
  Cyclic GFR-binding peptide
  MOD_RES (5)..(5): Xaa is C or S
TKPTXAPTKLEPLPVVYYDDSSNVIEQLSNN

SEQ ID NO: 17384 - protein, 32 aa, Artificial Sequence
  Cyclic GFR-binding peptide
  MOD_RES (31)..(31): Xaa is C or S
PTELEPLPMVYYDEYDKVVEQLSNEMVVEGXG

SEQ ID NO: 17385 - protein, 27 aa, Artificial Sequence
  Cyclic GFR-binding peptide
  MOD_RES (1)..(1): Xaa is C or S
XVPTRLEPLTILYYDSANNVVEQLSND

SEQ ID NO: 17386 - protein, 38 aa, Artificial Sequence
  Cyclic GFR-binding peptide
  MOD_RES (6)..(7): Xaa is C or S
TVPKPXXAPTQLEPLTVLYYDDSSNVIEQLSNNMVVRA

SEQ ID NO: 17387 - protein, 27 aa, Artificial Sequence
  Cyclic GFR-binding peptide
LEPLPVVYYDDSSNVIEQLSNNMVVRS

SEQ ID NO: 17388 - protein, 37 aa, Artificial Sequence
  Cyclic GFR-binding peptide
  MOD_RES (4)..(5)..(37): Xaa is C or S
PKAXXVPTELEPLPMVYYDENEKVVEQLSNDMVVEGX

SEQ ID NO: 17389 - protein, 37 aa, Artificial Sequence
  Cyclic GFR-binding peptide
  MOD_RES (2)..(3)..(35)..(37): Xaa is C or S
PXXAPTQLEPLTVLYYDDSSNVIEQLSNNMVVRAXGX

SEQ ID NO: 17390 - protein, 36 aa, Artificial Sequence
  Cyclic GFR-binding peptide
  MOD_RES (2)..(3)..(35): Xaa is C or S
TXXVPTRLSAISILYLDSANNVVLKNYQDMVVESXG

SEQ ID NO: 17391 - protein, 32 aa, Artificial Sequence
  Cyclic GFR-binding peptide
  MOD_RES (2)..(3): Xaa is C or S
PXXAPTKLEPLPVVYYDDSSNVIEQLSNNMVV

SEQ ID NO: 17392 - protein, 35 aa, Artificial Sequence
  Cyclic GFR-binding peptide
  MOD_RES (1)..(33)..(35): Xaa is C or S
XAPTQLEPLPVVYYDDSSNVIEQLSNNMVVRAXGX

SEQ ID NO: 17393 - protein, 32 aa, Artificial Sequence
  Cyclic GFR-binding peptide
  MOD_RES (4)..(5): Xaa is C or S
PPTXXVPTRLEPLPIVYYDSANNVVEQLSNDM

SEQ ID NO: 17394 - protein, 29 aa, Artificial Sequence
  Cyclic GFR-binding peptide
  MOD_RES (28)..(28): Xaa is C or S
LSPISVLFIDDSSNVIYKQYENMVVRSXG

SEQ ID NO: 17395 - protein, 28 aa, Artificial Sequence
  Cyclic GFR-binding peptide
PQDLNAISILYFVGRTPKVLKKYRMVVK

SEQ ID NO: 17396 - protein, 30 aa, Artificial Sequence; identical to SEQ ID NO: 7048
  Cyclic GFR-binding peptide
  MOD_RES (4)..(5): Xaa is C or S

SEQ ID NO: 17397 - protein, 30 aa, Artificial Sequence
  Cyclic GFR-binding peptide
PTRLEPLPIVYYDSANNVVEQLSNDMVVES

SEQ ID NO: 17398 - protein, 37 aa, Artificial Sequence
  Cyclic GFR-binding peptide
  MOD_RES (2)..(3)..(35)..(37): Xaa is C or S
PXXAPTKLEPLTVLYYDDSSNVIEQLSNNMVVRSXGX

SEQ ID NO: 17399 - protein, 34 aa, Artificial Sequence
  Cyclic GFR-binding peptide
  MOD_RES (3)..(3): Xaa is C or S
PTXAPTKLEPLPVVYYDDSSNVIEQLSNNMVVRS

SEQ ID NO: 17400 - protein, 20 aa, Artificial Sequence
  Cyclic GFR-binding peptide
SPISVLFIDDSSNVIYKQYE

SEQ ID NO: 17401 - protein, 33 aa, Artificial Sequence
  Cyclic GFR-binding peptide
  MOD_RES (2)..(3): Xaa is C or S
AXXVPTELEPLTMLYYDEYDKVVEQLSNEMVVE

SEQ ID NO: 17402 - protein, 22 aa, Artificial Sequence
  Cyclic GFR-binding peptide
NAISILYFDSANNVVLKKYRDM

SEQ ID NO: 17403 - protein, 31 aa, Artificial Sequence
  Cyclic GFR-binding peptide
  MOD_RES (3)..(4): Xaa is C or S
KAXXVPTELSPISMLFIDEYDKVVYKQYEEM

SEQ ID NO: 17404 - protein, 33 aa, Artificial Sequence; identical to SEQ ID NO: 7055
  Cyclic GFR-binding peptide
  MOD_RES (31)..(33): Xaa is C or S

SEQ ID NO: 17405 - protein, 27 aa, Artificial Sequence
  Cyclic GFR-binding peptide
  MOD_RES (2)..(2): Xaa is C or S
TXAPTKLSPISVLFIDDSSNVIYKQYE

SEQ ID NO: 17406 - protein, 33 aa, Artificial Sequence
  Cyclic GFR-binding peptide
  MOD_RES (32)..(32): Xaa is C or S
VPTELEPLPMVYYDENEKVVEQLSNDMVVEGXG

SEQ ID NO: 17407 - protein, 32 aa, Artificial Sequence; identical to SEQ ID NO: 7056
  Cyclic GFR-binding peptide
  MOD_RES (5)..(6): Xaa is C or S

SEQ ID NO: 17408 - protein, 31 aa, Artificial Sequence; identical to SEQ ID NO: 7057
  Cyclic GFR-binding peptide
  MOD_RES (30)..(30): Xaa is C or S

SEQ ID NO: 17409 - protein, 28 aa, Artificial Sequence
  Cyclic GFR-binding peptide
  MOD_RES (28)..(28): Xaa is C or S
LNAISMLYFDEYDKVVLKKYREMVVEGX

SEQ ID NO: 17410 - protein, 35 aa, Artificial Sequence
  Cyclic GFR-binding peptide
  MOD_RES (4)..(5): Xaa is C or S
PKAXXVPTELEPLPMVYYDENEKVVEQLSNDMVVE

SEQ ID NO: 17411 - protein, 32 aa, Artificial Sequence; identical to SEQ ID NO: 7063
  Cyclic GFR-binding peptide
  MOD_RES (4)..(5): Xaa is C or S

SEQ ID NO: 17412 - protein, 27 aa, Artificial Sequence
  Cyclic GFR-binding peptide
  MOD_RES (1)..(2): Xaa is C or S
XXAPTKLEPLTVLYYDDSSNVIEQLSN

SEQ ID NO: 17413 - protein, 32 aa, Artificial Sequence; identical to SEQ ID NO: 7066
  Cyclic GFR-binding peptide
  MOD_RES (29)..(31): Xaa is C or S

SEQ ID NO: 17414 - protein, 38 aa, Artificial Sequence; identical to SEQ ID NO: 7070
  Cyclic GFR-binding peptide
  MOD_RES (2)..(3)..(35)..(37): Xaa is C or S

SEQ ID NO: 17415 - protein, 31 aa, Artificial Sequence
  Cyclic GFR-binding peptide
  MOD_RES (30)..(30): Xaa is C or S
TRLEPLPIVYYDSANNVVEQLSNDMVVESXG

SEQ ID NO: 17416 - protein, 29 aa, Artificial Sequence
  Cyclic GFR-binding peptide
  MOD_RES (29)..(29): Xaa is C or S
ELEPLTMLYYDENEKVVEQLSNDMVVEGX

SEQ ID NO: 17417 - protein, 26 aa, Artificial Sequence
  Cyclic GFR-binding peptide
LNAISILYFDSANNVVLKKYRDMVVE

SEQ ID NO: 17418 - protein, 31 aa, Artificial Sequence
  Cyclic GFR-binding peptide
  MOD_RES (30)..(30): Xaa is C or S
SQDLSPISILFIIGKTPKIYKQYEMIVKSXK

SEQ ID NO: 17419 - protein, 24 aa, Artificial Sequence
  Cyclic GFR-binding peptide
PTQLSPISVLFIDDSSNVIYKQYE

SEQ ID NO: 17420 - protein, 38 aa, Artificial Sequence
  Cyclic GFR-binding peptide
  MOD_RES (5)..(6)..(38): Xaa is C or S
VPKPXXAPTKLEPLTVLYYDDSSNVIEQLSNNMVVRSX

SEQ ID NO: 17421 - protein, 26 aa, Artificial Sequence
  Cyclic GFR-binding peptide
VPTELSPISMLFIDEYDKVVYKQYEE

SEQ ID NO: 17422 - protein, 21 aa, Artificial Sequence
  Cyclic GFR-binding peptide
LSAISVLYLDDSSNVILKNYQ

SEQ ID NO: 17423 - protein, 31 aa, Artificial Sequence
  Cyclic GFR-binding peptide
  MOD_RES (30)..(30): Xaa is C or S
PQDLSPISILFIVGRTPKVYKQYEMVVKSXK

SEQ ID NO: 17424 - protein, 28 aa, Artificial Sequence
  Cyclic GFR-binding peptide
TKLSAISVLYLDDSSNVILKNYQNMVVR

SEQ ID NO: 17425 - protein, 35 aa, Artificial Sequence
  Cyclic GFR-binding peptide
  MOD_RES (4)..(5): Xaa is C or S
PPTXXVPTRLEPLPIVYYDSANNVVEQLSNDMVVE

SEQ ID NO: 17426 - protein, 30 aa, Artificial Sequence
  Cyclic GFR-binding peptide
  MOD_RES (1)..(2): Xaa is C or S
XXAPTQLEPLTVLYYDDSSNVIEQLSNNMV

SEQ ID NO: 17427 - protein, 30 aa, Artificial Sequence
  Cyclic GFR-binding peptide
  MOD_RES (27)..(29): Xaa is C or S
LSPISILFIIGKTPKIYKQYEMIVKSXKXS

SEQ ID NO: 17428 - protein, 29 aa, Artificial Sequence
  Cyclic GFR-binding peptide
VSQDLSPISILFIIGKTPKIYKQYEMIVK

SEQ ID NO: 17429 - protein, 28 aa, Artificial Sequence
  Cyclic GFR-binding peptide
  MOD_RES (28)..(28): Xaa is C or S
LEPLPIVYYDSANNVVEQLSNDMVVESX

SEQ ID NO: 17430 - protein, 35 aa, Artificial Sequence; identical to SEQ ID NO: 7083
  Cyclic GFR-binding peptide
  MOD_RES (1)..(32)..(34): Xaa is C or S

SEQ ID NO: 17431 - protein, 20 aa, Artificial Sequence
  Cyclic GFR-binding peptide
EPLTILYYVGRKPKVEQLSN

SEQ ID NO: 17432 - protein, 31 aa, Artificial Sequence
  Cyclic GFR-binding peptide
  MOD_RES (29)..(31): Xaa is C or S
QDLSPISILFIVGRTPKVYKQYEMVVKSXKX

SEQ ID NO: 17433 - protein, 34 aa, Artificial Sequence
  Cyclic GFR-binding peptide
  MOD_RES (1)..(32)..(34): Xaa is C or S
XVPQDLEPLPIVYYVGRTPKVEQLSNMVVKSXKX

SEQ ID NO: 17434 - protein, 28 aa, Artificial Sequence
  Cyclic GFR-binding peptide
VPQDLSPISILFIVGRTPKVYKQYEMVV

SEQ ID NO: 17435 - protein, 38 aa, Artificial Sequence
  Cyclic GFR-binding peptide
  MOD_RES (2)..(3)..(35)..(37): Xaa is C or S
PXXAPTQLEPLTVLYYDDSSNVIEQLSNNMVVRAXGXH

SEQ ID NO: 17436 - protein, 32 aa, Artificial Sequence
  Cyclic GFR-binding peptide
  MOD_RES (4)..(5): Xaa is C or S
PKAXXVPTELEPLPMVYYDENEKVVEQLSNDM

SEQ ID NO: 17437 - protein, 25 aa, Artificial Sequence
  Cyclic GFR-binding peptide
PTKLEPLPVVYYDDSSNVIEQLSNN

SEQ ID NO: 17438 - protein, 33 aa, Artificial Sequence; identical to SEQ ID NO: 7090
  Cyclic GFR-binding peptide
  MOD_RES (1)..(2): Xaa is C or S

SEQ ID NO: 17439 - protein, 23 aa, Artificial Sequence
  Cyclic GFR-binding peptide
TELSPISMLFIDEYDKVVYKQYE

SEQ ID NO: 17440 - protein, 33 aa, Artificial Sequence; identical to SEQ ID NO: 7093
  Cyclic GFR-binding peptide
  MOD_RES (1)..(33): Xaa is C or S

SEQ ID NO: 17441 - protein, 41 aa, Artificial Sequence
  Cyclic GFR-binding peptide
  MOD_RES (5)..(6)..(38)..(40): Xaa is C or S
TPPTXXVPTRLEPLPIVYYDSANNVVEQLSNDMVVESXGXR

SEQ ID NO: 17442 - protein, 29 aa, Artificial Sequence
  Cyclic GFR-binding peptide
  MOD_RES (1)..(2): Xaa is C or S
XXVPQDLNAISILYFVGRTPKVLKKYRMV

SEQ ID NO: 17443 - protein, 29 aa, Artificial Sequence
  Cyclic GFR-binding peptide
VPTRLEPLTILYYDSANNVVEQLSNDMVV

SEQ ID NO: 17444 - protein, 29 aa, Artificial Sequence
  Cyclic GFR-binding peptide
  MOD_RES (1)..(1): Xaa is C or S
XAPTQLEPLTVLYYDDSSNVIEQLSNNMV

SEQ ID NO: 17445 - protein, 28 aa, Artificial Sequence
  Cyclic GFR-binding peptide
  MOD_RES (2)..(3): Xaa is C or S
TXXVPTRLSAISILYLDSANNVVLKNYQ

SEQ ID NO: 17446 - protein, 29 aa, Artificial Sequence
  Cyclic GFR-binding peptide
  MOD_RES (28)..(28): Xaa is C or S
DLNAISILYFIGKTPKILKKYRMIVKSXK

SEQ ID NO: 17447 - protein, 30 aa, Artificial Sequence
  Cyclic GFR-binding peptide
  MOD_RES (3)..(4): Xaa is C or S
SPXXVPQDLSPISILFIVGRTPKVYKQYEM

SEQ ID NO: 17448 - protein, 36 aa, Artificial Sequence
  Cyclic GFR-binding peptide
  MOD_RES (3)..(4)..(36): Xaa is C or S
PTXXVPTRLSAISILYLDSANNVVLKNYQDMVVESX

SEQ ID NO: 17449 - protein, 37 aa, Artificial Sequence
  Cyclic GFR-binding peptide
  MOD_RES (2)..(3)..(34)..(36): Xaa is C or S
PXXVSQDLEPLPIVYYIGKTPKIEQLSNMIVKSXKXS

SEQ ID NO: 17450 - protein, 37 aa, Artificial Sequence
  Cyclic GFR-binding peptide
  MOD_RES (5)..(6): Xaa is C or S
IPKAXXVPTELSPISMLFIDEYDKVVYKQYEEMVVEG

SEQ ID NO: 17451 - protein, 26 aa, Artificial Sequence
  Cyclic GFR-binding peptide
  MOD_RES (1)..(1): Xaa is C or S
XAPTKLSPISVLFIDDSSNVIYKQYE

SEQ ID NO: 17452 - protein, 32 aa, Artificial Sequence; identical to SEQ ID NO: 7102
  Cyclic GFR-binding peptide
  MOD_RES (30)..(32): Xaa is C or S

SEQ ID NO: 17453 - protein, 31 aa, Artificial Sequence
  Cyclic GFR-binding peptide
  MOD_RES (29)..(31): Xaa is C or S
QDLSPISILFIIGKTPKIYKQYEMIVKSXKX

SEQ ID NO: 17454 - protein, 33 aa, Artificial Sequence
  Cyclic GFR-binding peptide
  MOD_RES (5)..(6): Xaa is C or S
VPKPXXAPTQLEPLTVLYYDDSSNVIEQLSNNM

SEQ ID NO: 17455 - protein, 27 aa, Artificial Sequence
  Cyclic GFR-binding peptide
ELSPISMLFIDEYDKVVYKQYEEMVVE

SEQ ID NO: 17456 - protein, 33 aa, Artificial Sequence
  Cyclic GFR-binding peptide
  MOD_RES (4)..(5): Xaa is C or S
ASPXXVSQDLEPLPIVYYIGKTPKIEQLSNMIV

SEQ ID NO: 17457 - protein, 39 aa, Artificial Sequence
  Cyclic GFR-binding peptide
  MOD_RES (4)..(5)..(37)..(39): Xaa is C or S
PKAXXVPTELSPISMLFIDEYDKVVYKQYEEMVVEGXGX

SEQ ID NO: 17458 - protein, 32 aa, Artificial Sequence
  Cyclic GFR-binding peptide
  MOD_RES (1)..(2): Xaa is C or S
XXVPTELEPLTMLYYDENEKVVEQLSNDMVVE

SEQ ID NO: 17459 - protein, 31 aa, Artificial Sequence; identical to SEQ ID NO: 7106
  Cyclic GFR-binding peptide
  MOD_RES (3)..(4): Xaa is C or S

SEQ ID NO: 17460 - protein, 23 aa, Artificial Sequence
  Cyclic GFR-binding peptide
EPLTILYYVGRKPKVEQLSNMIV

SEQ ID NO: 17461 - protein, 29 aa, Artificial Sequence
  Cyclic GFR-binding peptide
  MOD_RES (1)..(1): Xaa is C or S
XVPQDLSPISILFIVGRTPKVYKQYEMVV

SEQ ID NO: 17462 - protein, 31 aa, Artificial Sequence; identical to SEQ ID NO: 7112
  Cyclic GFR-binding peptide
  MOD_RES (5)..(6): Xaa is C or S

SEQ ID NO: 17463 - protein, 26 aa, Artificial Sequence
  Cyclic GFR-binding peptide
  MOD_RES (26)..(26): Xaa is C or S
EPLPIVYYVGRTPKVEQLSNMVVKSX

SEQ ID NO: 17464 - protein, 23 aa, Artificial Sequence
  Cyclic GFR-binding peptide
KLEPLTVLYYDDSSNVIEQLSNN

SEQ ID NO: 17465 - protein, 25 aa, Artificial Sequence
  Cyclic GFR-binding peptide
VPTRLSAISILYLDSANNVVLKNYQ

SEQ ID NO: 17466 - protein, 37 aa, Artificial Sequence; identical to SEQ ID NO: 7116
  Cyclic GFR-binding peptide
  MOD_RES (2)..(3)..(34)..(36): Xaa is C or S

SEQ ID NO: 17467 - protein, 38 aa, Artificial Sequence
  Cyclic GFR-binding peptide
  MOD_RES (6)..(7): Xaa is C or S
STPPTXXVPTRLNAISILYFDSANNVVLKKYRDMVVES

SEQ ID NO: 17468 - protein, 26 aa, Artificial Sequence
  Cyclic GFR-binding peptide
KLEPLTVLYYDDSSNVIEQLSNNMVV

SEQ ID NO: 17469 - protein, 25 aa, Artificial Sequence
  Cyclic GFR-binding peptide
EPLPIVYYIGKTPKIEQLSNMIVKS

SEQ ID NO: 17470 - protein, 36 aa, Artificial Sequence
  Cyclic GFR-binding peptide
  MOD_RES (2)..(3)..(35): Xaa is C or S
TXXVPTRLEPLTILYYDSANNVVEQLSNDMVVESXG

SEQ ID NO: 17471 - protein, 29 aa, Artificial Sequence
  Cyclic GFR-binding peptide
TRLEPLTILYYDSANNVVEQLSNDMVVES

SEQ ID NO: 17472 - protein, 34 aa, Artificial Sequence
  Cyclic GFR-binding peptide
  MOD_RES (1)..(33): Xaa is C or S
XVPTRLEPLTILYYDSANNVVEQLSNDMVVESXG

SEQ ID NO: 17473 - protein, 27 aa, Artificial Sequence
  Cyclic GFR-binding peptide
  MOD_RES (1)..(2): Xaa is C or S
XXVPTELSPISMLFIDENEKVVYKQYE

SEQ ID NO: 17474 - protein, 24 aa, Artificial Sequence
  Cyclic GFR-binding peptide
SQDLNAISILYFIGKTPKILKKYR

SEQ ID NO: 17475 - protein, 33 aa, Artificial Sequence
  Cyclic GFR-binding peptide
  MOD_RES (1)..(2)..(33): Xaa is C or S
XXVPQALSPISILFIVGRKPKVYKQYEMIVRSX

SEQ ID NO: 17476 - protein, 24 aa, Artificial Sequence
  Cyclic GFR-binding peptide
PTELEPLTMLYYDEYDKVVEQLSN

SEQ ID NO: 17477 - protein, 32 aa, Artificial Sequence; identical to SEQ ID NO: 7127
  Cyclic GFR-binding peptide
  MOD_RES (1)..(1): Xaa is C or S

SEQ ID NO: 17478 - protein, 30 aa, Artificial Sequence
  Cyclic GFR-binding peptide
PTQLSPISVLFIDDSSNVIYKQYENMVVRA

SEQ ID NO: 17479 - protein, 38 aa, Artificial Sequence
  Cyclic GFR-binding peptide
  MOD_RES (4)..(5)..(36)..(38): Xaa is C or S
AAPXXVPQALSPISILFIVGRKPKVYKQYEMIVRSXKX

SEQ ID NO: 17480 - protein, 26 aa, Artificial Sequence
  Cyclic GFR-binding peptide
  MOD_RES (1)..(1): Xaa is C or S
XVSQDLSAISILYLIGKTPKILKNYQ

SEQ ID NO: 17481 - protein, 37 aa, Artificial Sequence
  Cyclic GFR-binding peptide
  MOD_RES (4)..(5)..(37): Xaa is C or S
PKAXXVPTELSPISMLFIDENEKVVYKQYEDMVVEGX

SEQ ID NO: 17482 - protein, 35 aa, Artificial Sequence; identical to SEQ ID NO: 7137
  Cyclic GFR-binding peptide
  MOD_RES (4)..(5): Xaa is C or S

SEQ ID NO: 17483 - protein, 24 aa, Artificial Sequence
  Cyclic GFR-binding peptide
EPLPVVYYDDSSNVIEQLSNNMVV

SEQ ID NO: 17484 - protein, 36 aa, Artificial Sequence
  Cyclic GFR-binding peptide
  MOD_RES (5)..(6): Xaa is C or S
TPPTXXVPTRLNAISILYFDSANNVVLKKYRDMVVE

SEQ ID NO: 17485 - protein, 38 aa, Artificial Sequence
  Cyclic GFR-binding peptide
  MOD_RES (4)..(36)..(38): Xaa is C or S
KPTXAPTKLEPLPVVYYDDSSNVIEQLSNNMVVRSXGX

SEQ ID NO: 17486 - protein, 39 aa, Artificial Sequence
  Cyclic GFR-binding peptide
  MOD_RES (3)..(4)..(36)..(38): Xaa is C or S
PTXXVPTRLEPLTILYYDSANNVVEQLSNDMVVESXGXR

SEQ ID NO: 17487 - protein, 42 aa, Artificial Sequence
  Cyclic GFR-binding peptide
  MOD_RES (6)..(7)..(39)..(41): Xaa is C or S
YVPKPXXAPTKLSPISVLFIDDSSNVIYKQYENMVVRSXGXH

SEQ ID NO: 17488 - protein, 26 aa, Artificial Sequence
  Cyclic GFR-binding peptide
PTKLEPLTVLYYDDSSNVIEQLSNNM

SEQ ID NO: 17489 - protein, 26 aa, Artificial Sequence
  Cyclic GFR-binding peptide
  MOD_RES (1)..(1): Xaa is C or S
XVPQALSPISILFIVGRKPKVYKQYE

SEQ ID NO: 17490 - protein, 38 aa, Artificial Sequence
  Cyclic GFR-binding peptide
  MOD_RES (3)..(4)..(36)..(38): Xaa is C or S
KAXXVPTELEPLTMLYYDEYDKVVEQLSNEMVVEGXGX

SEQ ID NO: 17491 - protein, 29 aa, Artificial Sequence
  Cyclic GFR-binding peptide
  MOD_RES (26)..(28): Xaa is C or S
SPISILFIVGRTPKVYKQYEMVVKSXKXS

SEQ ID NO: 17492 - protein, 28 aa, Artificial Sequence
  Cyclic GFR-binding peptide
APTKLSPISVLFIDDSSNVIYKQYENMV

SEQ ID NO: 17493 - protein, 30 aa, Artificial Sequence; identical to SEQ ID NO: 7140
  Cyclic GFR-binding peptide
  MOD_RES (1)..(2): Xaa is C or S

SEQ ID NO: 17494 - protein, 27 aa, Artificial Sequence
  Cyclic GFR-binding peptide
  MOD_RES (27)..(27): Xaa is C or S
SPISVLFIDDSSNVIYKQYENMVVRSX

SEQ ID NO: 17495 - protein, 31 aa, Artificial Sequence; identical to SEQ ID NO: 7143
  Cyclic GFR-binding peptide
  MOD_RES (5)..(6): Xaa is C or S

SEQ ID NO: 17496 - protein, 28 aa, Artificial Sequence
  Cyclic GFR-binding peptide
  MOD_RES (1)..(2): Xaa is C or S
XXVPTRLEPLTILYYDSANNVVEQLSND

SEQ ID NO: 17497 - protein, 42 aa, Artificial Sequence
  Cyclic GFR-binding peptide
  MOD_RES (7)..(39)..(41): Xaa is C or S
HVTKPTXAPTKLSPISVLFIDDSSNVIYKQYENMVVRSXGXH

SEQ ID NO: 17498 - protein, 24 aa, Artificial Sequence
  Cyclic GFR-binding peptide
SAISILYLVGRTPKVLKNYQMVVK

SEQ ID NO: 17499 - protein, 23 aa, Artificial Sequence
  Cyclic GFR-binding peptide
TRLNAISILYFDSANNVVLKKYR

SEQ ID NO: 17500 - protein, 40 aa, Artificial Sequence
  Cyclic GFR-binding peptide
  MOD_RES (6)..(7)..(39): Xaa is C or S
SIPKAXXVPTELSPISMLFIDEYDKVVYKQYEEMVVEGXG

SEQ ID NO: 17501 - protein, 32 aa, Artificial Sequence; identical to SEQ ID NO: 7150
  Cyclic GFR-binding peptide
  MOD_RES (2)..(3): Xaa is C or S

SEQ ID NO: 17502 - protein, 25 aa, Artificial Sequence
  Cyclic GFR-binding peptide
VPQALEPLTILYYVGRKPKVEQLSN

SEQ ID NO: 17503 - protein, 30 aa, Artificial Sequence; identical to SEQ ID NO: 7151
  Cyclic GFR-binding peptide
  MOD_RES (29)..(29): Xaa is C or S

SEQ ID NO: 17504 - protein, 30 aa, Artificial Sequence
  Cyclic GFR-binding peptide
  MOD_RES (30)..(30): Xaa is C or S
TQLEPLPVVYYDDSSNVIEQLSNNMVVRAX

SEQ ID NO: 17505 - protein, 31 aa, Artificial Sequence
  Cyclic GFR-binding peptide
  MOD_RES (28)..(30): Xaa is C or S
LSPISVLFIDDSSNVIYKQYENMVVRAXGXH

SEQ ID NO: 17506 - protein, 40 aa, Artificial Sequence; identical to SEQ ID NO: 7156
  Cyclic GFR-binding peptide
  MOD_RES (6)..(7)..(38)..(40): Xaa is C or S

SEQ ID NO: 17507 - protein, 30 aa, Artificial Sequence
  Cyclic GFR-binding peptide
  MOD_RES (4)..(5): Xaa is C or S
PKPXXAPTQLSPISVLFIDDSSNVIYKQYE

SEQ ID NO: 17508 - protein, 33 aa, Artificial Sequence
  Cyclic GFR-binding peptide
  MOD_RES (32)..(32): Xaa is C or S
APTKLEPLPVVYYDDSSNVIEQLSNNMVVRSXG

SEQ ID NO: 17509 - protein, 39 aa, Artificial Sequence
  Cyclic GFR-binding peptide
  MOD_RES (5)..(6)..(37)..(39): Xaa is C or S
SASPXXVPQDLSPISILFIVGRTPKVYKQYEMVVKSXKX

SEQ ID NO: 17510 - protein, 38 aa, Artificial Sequence
  Cyclic GFR-binding peptide
  MOD_RES (3)..(4)..(36)..(38): Xaa is C or S
KAXXVPTELEPLPMVYYDENEKVVEQLSNDMVVEGXGX

SEQ ID NO: 17511 - protein, 26 aa, Artificial Sequence
  Cyclic GFR-binding peptide
PTELEPLTMLYYDEYDKVVEQLSNEM

SEQ ID NO: 17512 - protein, 35 aa, Artificial Sequence
  Cyclic GFR-binding peptide
  MOD_RES (4)..(5): Xaa is C or S
PKAXXVPTELEPLTMLYYDEYDKVVEQLSNEMVVE

SEQ ID NO: 17513 - protein, 26 aa, Artificial Sequence
  Cyclic GFR-binding peptide
TRLNAISILYFDSANNVVLKKYRDMV

SEQ ID NO: 17514 - protein, 30 aa, Artificial Sequence; identical to SEQ ID NO: 7164
  Cyclic GFR-binding peptide
  MOD_RES (27)..(29): Xaa is C or S

SEQ ID NO: 17515 - protein, 28 aa, Artificial Sequence
  Cyclic GFR-binding peptide
PQALEPLTILYYVGRKPKVEQLSNMIVR

SEQ ID NO: 17516 - protein, 34 aa, Artificial Sequence
  Cyclic GFR-binding peptide
  MOD_RES (1)..(33): Xaa is C or S
XAPTKLEPLTVLYYDDSSNVIEQLSNNMVVRSXG

SEQ ID NO: 17517 - protein, 32 aa, Artificial Sequence; identical to SEQ ID NO: 7167
  Cyclic GFR-binding peptide
  MOD_RES (4)..(5): Xaa is C or S

SEQ ID NO: 17518 - protein, 27 aa, Artificial Sequence
  Cyclic GFR-binding peptide
TKLEPLPVVYYDDSSNVIEQLSNNMVV

SEQ ID NO: 17519 - protein, 35 aa, Artificial Sequence; identical to SEQ ID NO: 7170
  Cyclic GFR-binding peptide
  MOD_RES (3)..(4): Xaa is C or S

SEQ ID NO: 17520 - protein, 36 aa, Artificial Sequence
  Cyclic GFR-binding peptide
  MOD_RES (6)..(7): Xaa is C or S
ASASPXXVPQDLSPISILFIVGRTPKVYKQYEMVVK

SEQ ID NO: 17521 - protein, 38 aa, Artificial Sequence
  Cyclic GFR-binding peptide
  MOD_RES (5)..(6)..(38): Xaa is C or S
TPPTXXVPTRLEPLTILYYDSANNVVEQLSNDMVVESX

SEQ ID NO: 17522 - protein, 23 aa, Artificial Sequence
  Cyclic GFR-binding peptide
LEPLPIVYYDSANNVVEQLSNDM

SEQ ID NO: 17523 - protein, 26 aa, Artificial Sequence
  Cyclic GFR-binding peptide
LSPISILFIVGRTPKVYKQYEMVVKS

SEQ ID NO: 17524 - protein, 32 aa, Artificial Sequence
  Cyclic GFR-binding peptide
  MOD_RES (6)..(7): Xaa is C or S
KIPKAXXVPTELSPISMLFIDENEKVVYKQYE

SEQ ID NO: 17525 - protein, 30 aa, Artificial Sequence
  Cyclic GFR-binding peptide
  MOD_RES (29)..(29): Xaa is C or S
QDLSPISILFIVGRTPKVYKQYEMVVKSXK

SEQ ID NO: 17526 - protein, 30 aa, Artificial Sequence; identical to SEQ ID NO: 7174
  Cyclic GFR-binding peptide
  MOD_RES (3)..(3): Xaa is C or S

SEQ ID NO: 17527 - protein, 38 aa, Artificial Sequence
  Cyclic GFR-binding peptide
  MOD_RES (3)..(4)..(36)..(38): Xaa is C or S
KAXXVPTELSPISMLFIDENEKVVYKQYEDMVVEGXGX

SEQ ID NO: 17528 - protein, 31 aa, Artificial Sequence; identical to SEQ ID NO: 7182
  Cyclic GFR-binding peptide
  MOD_RES (1)..(1): Xaa is C or S

SEQ ID NO: 17529 - protein, 23 aa, Artificial Sequence
  Cyclic GFR-binding peptide
TKLEPLTVLYYDDSSNVIEQLSN

SEQ ID NO: 17530 - protein, 34 aa, Artificial Sequence; identical to SEQ ID NO: 7185
  Cyclic GFR-binding peptide
  MOD_RES (5)..(6): Xaa is C or S

SEQ ID NO: 17531 - protein, 25 aa, Artificial Sequence
  Cyclic GFR-binding peptide
NAISMLYFDEYDKVVLKKYREMVVE

SEQ ID NO: 17532 - protein, 29 aa, Artificial Sequence
  Cyclic GFR-binding peptide
  MOD_RES (1)..(1): Xaa is C or S
XAPTKLSPISVLFIDDSSNVIYKQYENMV

SEQ ID NO: 17533 - protein, 31 aa, Artificial Sequence; identical to SEQ ID NO: 7189
  Cyclic GFR-binding peptide
  MOD_RES (1)..(1): Xaa is C or S

SEQ ID NO: 17534 - protein, 34 aa, Artificial Sequence
  Cyclic GFR-binding peptide
  MOD_RES (31)..(33): Xaa is C or S
PTRLEPLTILYYDSANNVVEQLSNDMVVESXGXR

SEQ ID NO: 17535 - protein, 27 aa, Artificial Sequence
  Cyclic GFR-binding peptide
SQDLEPLPIVYYIGKTPKIEQLSNMIV

SEQ ID NO: 17536 - protein, 29 aa, Artificial Sequence
  Cyclic GFR-binding peptide
  MOD_RES (1)..(2): Xaa is C or S
XXAPTKLSPISVLFIDDSSNVIYKQYENM

SEQ ID NO: 17537 - protein, 23 aa, Artificial Sequence
  Cyclic GFR-binding peptide
LEPLTMLYYDEYDKVVEQLSNEM

SEQ ID NO: 17538 - protein, 22 aa, Artificial Sequence
  Cyclic GFR-binding peptide
ELEPLTMLYYDENEKVVEQLSN

SEQ ID NO: 17539 - protein, 33 aa, Artificial Sequence
  Cyclic GFR-binding peptide
  MOD_RES (1)..(33): Xaa is C or S
XAPTKLEPLPVVYYDDSSNVIEQLSNNMVVRSX

SEQ ID NO: 17540 - protein, 41 aa, Artificial Sequence; identical to SEQ ID NO: 7200
  Cyclic GFR-binding peptide
  MOD_RES (5)..(6)..(38)..(40): Xaa is C or S

SEQ ID NO: 17541 - protein, 26 aa, Artificial Sequence
  Cyclic GFR-binding peptide
QDLEPLPIVYYVGRTPKVEQLSNMVV

SEQ ID NO: 17542 - protein, 39 aa, Artificial Sequence
  Cyclic GFR-binding peptide
  MOD_RES (6)..(7)..(39): Xaa is C or S
SIPKAXXVPTELEPLTMLYYDEYDKVVEQLSNEMVVEGX

SEQ ID NO: 17543 - protein, 36 aa, Artificial Sequence
  Cyclic GFR-binding peptide
  MOD_RES (4)..(5): Xaa is C or S
PKPXXAPTQLEPLPVVYYDDSSNVIEQLSNNMVVRA

SEQ ID NO: 17544 - protein, 25 aa, Artificial Sequence
  Cyclic GFR-binding peptide
QALEPLTILYYVGRKPKVEQLSNMI

SEQ ID NO: 17545 - protein, 20 aa, Artificial Sequence
  Cyclic GFR-binding peptide
SAISILYLDSANNVVLKNYQ

SEQ ID NO: 17546 - protein, 30 aa, Artificial Sequence
  Cyclic GFR-binding peptide
  MOD_RES (3)..(4): Xaa is C or S
KPXXAPTQLEPLTVLYYDDSSNVIEQLSNN

SEQ ID NO: 17547 - protein, 23 aa, Artificial Sequence
  Cyclic GFR-binding peptide
NAISILYFVGRTPKVLKKYRMVV

SEQ ID NO: 17548 - protein, 40 aa, Artificial Sequence
  Cyclic GFR-binding peptide
  MOD_RES (4)..(5)..(37)..(39): Xaa is C or S
PKAXXVPTELEPLPMVYYDENEKVVEQLSNDMVVEGXGXR

SEQ ID NO: 17549 - protein, 20 aa, Artificial Sequence
  Cyclic GFR-binding peptide
EPLPMVYYDENEKVVEQLSN

SEQ ID NO: 17550 - protein, 26 aa, Artificial Sequence
  Cyclic GFR-binding peptide
PQALSPISILFIVGRKPKVYKQYEMI

SEQ ID NO: 17551 - protein, 35 aa, Artificial Sequence
  Cyclic GFR-binding peptide
  MOD_RES (1)..(32)..(34): Xaa is C or S
XVPQDLEPLPIVYYVGRTPKVEQLSNMVVKSXKXS

SEQ ID NO: 17552 - protein, 35 aa, Artificial Sequence
  Cyclic GFR-binding peptide
  MOD_RES (6)..(6): Xaa is C or S
VTKPTXAPTKLEPLPVVYYDDSSNVIEQLSNNMVV

SEQ ID NO: 17553 - protein, 28 aa, Artificial Sequence
  Cyclic GFR-binding peptide
  MOD_RES (1)..(1): Xaa is C or S
XAPTKLEPLTVLYYDDSSNVIEQLSNNM

SEQ ID NO: 17554 - protein, 29 aa, Artificial Sequence
  Cyclic GFR-binding peptide
  MOD_RES (3)..(4): Xaa is C or S
KAXXVPTELNAISMLYFDENEKVVLKKYR

SEQ ID NO: 17555 - protein, 27 aa, Artificial Sequence
  Cyclic GFR-binding peptide
  MOD_RES (27)..(27): Xaa is C or S
SPISMLFIDEYDKVVYKQYEEMVVEGX

SEQ ID NO: 17556 - protein, 36 aa, Artificial Sequence
  Cyclic GFR-binding peptide
  MOD_RES (4)..(5): Xaa is C or S
PPTXXVPTRLNAISILYFDSANNVVLKKYRDMVVES

SEQ ID NO: 17557 - protein, 27 aa, Artificial Sequence
  Cyclic GFR-binding peptide
PTRLEPLTILYYDSANNVVEQLSNDMV

SEQ ID NO: 17558 - protein, 26 aa, Artificial Sequence
  Cyclic GFR-binding peptide
QALNAISILYFVGRKPKVLKKYRMIV

SEQ ID NO: 17559 - protein, 34 aa, Artificial Sequence
  Cyclic GFR-binding peptide
  MOD_RES (31)..(33): Xaa is C or S
VPQALEPLTILYYVGRKPKVEQLSNMIVRSXKXS

SEQ ID NO: 17560 - protein, 40 aa, Artificial Sequence; identical to SEQ ID NO: 7216
  Cyclic GFR-binding peptide
  MOD_RES (6)..(7)..(38)..(40): Xaa is C or S

SEQ ID NO: 17561 - protein, 28 aa, Artificial Sequence
  Cyclic GFR-binding peptide
SQDLSAISILYLIGKTPKILKNYQMIVK

SEQ ID NO: 17562 - protein, 30 aa, Artificial Sequence
  Cyclic GFR-binding peptide
  MOD_RES (30)..(30): Xaa is C or S
TELEPLPMVYYDEYDKVVEQLSNEMVVEGX

SEQ ID NO: 17563 - protein, 23 aa, Artificial Sequence
  Cyclic GFR-binding peptide
QDLNAISILYFVGRTPKVLKKYR

SEQ ID NO: 17564 - protein, 28 aa, Artificial Sequence
  Cyclic GFR-binding peptide
VPTELEPLTMLYYDEYDKVVEQLSNEMV

SEQ ID NO: 17565 - protein, 34 aa, Artificial Sequence; identical to SEQ ID NO: 7221
  Cyclic GFR-binding peptide
  MOD_RES (4)..(5): Xaa is C or S

SEQ ID NO: 17566 - protein, 28 aa, Artificial Sequence
  Cyclic GFR-binding peptide
  MOD_RES (28)..(28): Xaa is C or S
ALNAISILYFVGRKPKVLKKYRMIVRSX

SEQ ID NO: 17567 - protein, 30 aa, Artificial Sequence
  Cyclic GFR-binding peptide
  MOD_RES (29)..(29): Xaa is C or S
QALEPLTILYYVGRKPKVEQLSNMIVRSXK

SEQ ID NO: 17568 - protein, 35 aa, Artificial Sequence
  Cyclic GFR-binding peptide
  MOD_RES (2)..(3)..(35): Xaa is C or S
AXXVPTELEPLPMVYYDENEKVVEQLSNDMVVEGX

SEQ ID NO: 17569 - protein, 33 aa, Artificial Sequence
  Cyclic GFR-binding peptide
  MOD_RES (32)..(32): Xaa is C or S
VPTRLEPLPIVYYDSANNVVEQLSNDMVVESXG

SEQ ID NO: 17570 - protein, 40 aa, Artificial Sequence
  Cyclic GFR-binding peptide
  MOD_RES (4)..(5)..(37)..(39): Xaa is C or S
PKPXXAPTKLSPISVLFIDDSSNVIYKQYENMVVRSXGXH

SEQ ID NO: 17571 - protein, 27 aa, Artificial Sequence
  Cyclic GFR-binding peptide
DLNAISILYFIGKTPKILKKYRMIVKS

SEQ ID NO: 17572 - protein, 32 aa, Artificial Sequence
  Cyclic GFR-binding peptide
  MOD_RES (31)..(31): Xaa is C or S
VPQDLSPISILFIVGRTPKVYKQYEMVVKSXK

SEQ ID NO: 17573 - protein, 32 aa, Artificial Sequence
  Cyclic GFR-binding peptide
  MOD_RES (4)..(5): Xaa is C or S
PKPXXAPTQLSPISVLFIDDSSNVIYKQYENM

SEQ ID NO: 17574 - protein, 20 aa, Artificial Sequence
  Cyclic GFR-binding peptide
SPISILFIIGKTPKIYKQYE

SEQ ID NO: 17575 - protein, 25 aa, Artificial Sequence
  Cyclic GFR-binding peptide
APTKLEPLTVLYYDDSSNVIEQLSN

SEQ ID NO: 17576 - protein, 34 aa, Artificial Sequence
  Cyclic GFR-binding peptide
  MOD_RES (4)..(5): Xaa is C or S
PPTXXVPTRLNAISILYFDSANNVVLKKYRDMVV

SEQ ID NO: 17577 - protein, 27 aa, Artificial Sequence
  Cyclic GFR-binding peptide
PQDLNAISILYFVGRTPKVLKKYRMVV

SEQ ID NO: 17578 - protein, 33 aa, Artificial Sequence; identical to SEQ ID NO: 7237
  Cyclic GFR-binding peptide
  MOD_RES (1)..(2)..(33): Xaa is C or S

SEQ ID NO: 17579 - protein, 35 aa, Artificial Sequence
  Cyclic GFR-binding peptide
  MOD_RES (6)..(7): Xaa is C or S
ASASPXXVPQDLEPLPIVYYVGRTPKVEQLSNMVV

SEQ ID NO: 17580 - protein, 25 aa, Artificial Sequence
  Cyclic GFR-binding peptide
ELEPLPMVYYDEYDKVVEQLSNEMV

SEQ ID NO: 17581 - protein, 34 aa, Artificial Sequence
  Cyclic GFR-binding peptide
  MOD_RES (4)..(5): Xaa is C or S
PKAXXVPTELSPISMLFIDEYDKVVYKQYEEMVV

SEQ ID NO: 17582 - protein, 21 aa, Artificial Sequence
  Cyclic GFR-binding peptide
LNAISILYFDSANNVVLKKYR

SEQ ID NO: 17583 - protein, 28 aa, Artificial Sequence
  Cyclic GFR-binding peptide
  MOD_RES (1)..(2): Xaa is C or S
XXVPTELEPLPMVYYDENEKVVEQLSND

SEQ ID NO: 17584 - protein, 26 aa, Artificial Sequence
  Cyclic GFR-binding peptide
LNAISMLYFDENEKVVLKKYRDMVVE

SEQ ID NO: 17585 - protein, 27 aa, Artificial Sequence
  Cyclic GFR-binding peptide
QALSAISILYLVGRKPKVLKNYQMIVR

SEQ ID NO: 17586 - protein, 27 aa, Artificial Sequence
  Cyclic GFR-binding peptide
  MOD_RES (27)..(27): Xaa is C or S
EPLPVVYYDDSSNVIEQLSNNMVVRAX

SEQ ID NO: 17587 - protein, 28 aa, Artificial Sequence
  Cyclic GFR-binding peptide
  MOD_RES (28)..(28): Xaa is C or S
LEPLTVLYYDDSSNVIEQLSNNMVVRSX

SEQ ID NO: 17588 - protein, 30 aa, Artificial Sequence
  Cyclic GFR-binding peptide
  MOD_RES (1)..(1): Xaa is C or S
XVPTRLEPLTILYYDSANNVVEQLSNDMVV

SEQ ID NO: 17589 - protein, 33 aa, Artificial Sequence
  Cyclic GFR-binding peptide
  MOD_RES (1)..(32): Xaa is C or S
XVPQALSPISILFIVGRKPKVYKQYEMIVRSXK

SEQ ID NO: 17590 - protein, 32 aa, Artificial Sequence; identical to SEQ ID NO: 7252
  Cyclic GFR-binding peptide
  MOD_RES (3)..(4): Xaa is C or S

SEQ ID NO: 17591 - protein, 34 aa, Artificial Sequence
  Cyclic GFR-binding peptide
  MOD_RES (5)..(6): Xaa is C or S
IPKAXXVPTELEPLTMLYYDEYDKVVEQLSNEMV

SEQ ID NO: 17592 - protein, 34 aa, Artificial Sequence
  Cyclic GFR-binding peptide
  MOD_RES (4)..(5): Xaa is C or S
PKPXXAPTQLEPLTVLYYDDSSNVIEQLSNNMVV

SEQ ID NO: 17593 - protein, 31 aa, Artificial Sequence
  Cyclic GFR-binding peptide
  MOD_RES (5)..(6): Xaa is C or S
TPPTXXVPTRLSAISILYLDSANNVVLKNYQ

SEQ ID NO: 17594 - protein, 36 aa, Artificial Sequence
  Cyclic GFR-binding peptide
  MOD_RES (4)..(5): Xaa is C or S
PKPXXAPTKLSPISVLFIDDSSNVIYKQYENMVVRS

SEQ ID NO: 17595 - protein, 36 aa, Artificial Sequence
  Cyclic GFR-binding peptide
  MOD_RES (2)..(3)..(35): Xaa is C or S
PXXAPTQLSPISVLFIDDSSNVIYKQYENMVVRAXG

SEQ ID NO: 17596 - protein, 27 aa, Artificial Sequence
  Cyclic GFR-binding peptide
  MOD_RES (26)..(26): Xaa is C or S
SAISILYLIGKTPKILKNYQMIVKSXK

SEQ ID NO: 17597 - protein, 33 aa, Artificial Sequence; identical to SEQ ID NO: 7262
  Cyclic GFR-binding peptide
  MOD_RES (32)..(32): Xaa is C or S

SEQ ID NO: 17598 - protein, 42 aa, Artificial Sequence
  Cyclic GFR-binding peptide
  MOD_RES (6)..(7)..(39)..(41): Xaa is C or S
YVPKPXXAPTKLEPLPVVYYDDSSNVIEQLSNNMVVRSXGXH

SEQ ID NO: 17599 - protein, 34 aa, Artificial Sequence
  Cyclic GFR-binding peptide
  MOD_RES (3)..(3): Xaa is C or S
PTXAPTKLSPISVLFIDDSSNVIYKQYENMVVRS

SEQ ID NO: 17600 - protein, 27 aa, Artificial Sequence
  Cyclic GFR-binding peptide
  MOD_RES (1)..(2): Xaa is C or S
XXVSQDLNAISILYFIGKTPKILKKYR

SEQ ID NO: 17601 - protein, 31 aa, Artificial Sequence
  Cyclic GFR-binding peptide
  MOD_RES (29)..(31): Xaa is C or S
RLEPLPIVYYDSANNVVEQLSNDMVVESXGX

SEQ ID NO: 17602 - protein, 39 aa, Artificial Sequence
  Cyclic GFR-binding peptide
  MOD_RES (6)..(38): Xaa is C or S
VTKPTXAPTKLEPLPVVYYDDSSNVIEQLSNNMVVRSXG

SEQ ID NO: 17603 - protein, 27 aa, Artificial Sequence
  Cyclic GFR-binding peptide
APTQLSPISVLFIDDSSNVIYKQYENM

SEQ ID NO: 17604 - protein, 28 aa, Artificial Sequence
  Cyclic GFR-binding peptide
  MOD_RES (1)..(2): Xaa is C or S
XXVPTELSPISMLFIDENEKVVYKQYED

SEQ ID NO: 17605 - protein, 35 aa, Artificial Sequence
  Cyclic GFR-binding peptide
  MOD_RES (32)..(34): Xaa is C or S
VPTELEPLPMVYYDEYDKVVEQLSNEMVVEGXGXR

SEQ ID NO: 17606 - protein, 36 aa, Artificial Sequence
  Cyclic GFR-binding peptide
  MOD_RES (1)..(33)..(35): Xaa is C or S
XAPTQLEPLTVLYYDDSSNVIEQLSNNMVVRAXGXH

SEQ ID NO: 17607 - protein, 24 aa, Artificial Sequence
  Cyclic GFR-binding peptide
PTELSPISMLFIDENEKVVYKQYE

SEQ ID NO: 17608 - protein, 26 aa, Artificial Sequence
  Cyclic GFR-binding peptide
LEPLPVVYYDDSSNVIEQLSNNMVVR

SEQ ID NO: 17609 - protein, 34 aa, Artificial Sequence
  Cyclic GFR-binding peptide
  MOD_RES (5)..(6): Xaa is C or S
SASPXXVSQDLSPISILFIIGKTPKIYKQYEMIV

SEQ ID NO: 17610 - protein, 37 aa, Artificial Sequence
  Cyclic GFR-binding peptide
  MOD_RES (6)..(7): Xaa is C or S
TVPKPXXAPTQLEPLPVVYYDDSSNVIEQLSNNMVVR

SEQ ID NO: 17611 - protein, 31 aa, Artificial Sequence
  Cyclic GFR-binding peptide
  MOD_RES (31)..(31): Xaa is C or S
PTKLEPLTVLYYDDSSNVIEQLSNNMVVRSX

SEQ ID NO: 17612 - protein, 31 aa, Artificial Sequence
  Cyclic GFR-binding peptide
  MOD_RES (28)..(30): Xaa is C or S
DLSPISILFIVGRTPKVYKQYEMVVKSXKXS

SEQ ID NO: 17613 - protein, 36 aa, Artificial Sequence
  Cyclic GFR-binding peptide
  MOD_RES (4)..(5): Xaa is C or S
PKPXXAPTQLSPISVLFIDDSSNVIYKQYENMVVRA

SEQ ID NO: 17614 - protein, 30 aa, Artificial Sequence
  Cyclic GFR-binding peptide
  MOD_RES (29)..(29): Xaa is C or S
QDLEPLPIVYYVGRTPKVEQLSNMVVKSXK

SEQ ID NO: 17615 - protein, 36 aa, Artificial Sequence
  Cyclic GFR-binding peptide
  MOD_RES (5)..(6): Xaa is C or S
VPKPXXAPTKLSPISVLFIDDSSNVIYKQYENMVVR

SEQ ID NO: 17616 - protein, 35 aa, Artificial Sequence; identical to SEQ ID NO: 7279
  Cyclic GFR-binding peptide
  MOD_RES (1)..(33)..(35): Xaa is C or S

SEQ ID NO: 17617 - protein, 28 aa, Artificial Sequence
  Cyclic GFR-binding peptide
  MOD_RES (1)..(2): Xaa is C or S
XXVPTELNAISMLYFDENEKVVLKKYRD

SEQ ID NO: 17618 - protein, 35 aa, Artificial Sequence; identical to SEQ ID NO: 7284
  Cyclic GFR-binding peptide
  MOD_RES (3)..(4): Xaa is C or S

SEQ ID NO: 17619 - protein, 24 aa, Artificial Sequence
  Cyclic GFR-binding peptide
LNAISMLYFDENEKVVLKKYRDMV

SEQ ID NO: 17620 - protein, 33 aa, Artificial Sequence
  Cyclic GFR-binding peptide
  MOD_RES (32)..(32): Xaa is C or S
VPTELEPLTMLYYDEYDKVVEQLSNEMVVEGXG

SEQ ID NO: 17621 - protein, 35 aa, Artificial Sequence
  Cyclic GFR-binding peptide
  MOD_RES (5)..(6): Xaa is C or S
IPKAXXVPTELSPISMLFIDENEKVVYKQYEDMVV

SEQ ID NO: 17622 - protein, 32 aa, Artificial Sequence
  Cyclic GFR-binding peptide
  MOD_RES (3)..(4): Xaa is C or S
PTXXVPTRLEPLPIVYYDSANNVVEQLSNDMV

SEQ ID NO: 17623 - protein, 23 aa, Artificial Sequence
  Cyclic GFR-binding peptide
TELNAISMLYFDENEKVVLKKYR

SEQ ID NO: 17624 - protein, 29 aa, Artificial Sequence
  Cyclic GFR-binding peptide
  MOD_RES (3)..(4): Xaa is C or S
KPXXAPTKLEPLTVLYYDDSSNVIEQLSN

SEQ ID NO: 17625 - protein, 34 aa, Artificial Sequence
  Cyclic GFR-binding peptide
  MOD_RES (1)..(2)..(34): Xaa is C or S
XXAPTKLEPLTVLYYDDSSNVIEQLSNNMVVRSX

SEQ ID NO: 17626 - protein, 27 aa, Artificial Sequence
  Cyclic GFR-binding peptide
  MOD_RES (1)..(1): Xaa is C or S
XVPTELSPISMLFIDEYDKVVYKQYEE

SEQ ID NO: 17627 - protein, 35 aa, Artificial Sequence; identical to SEQ ID NO: 7295
  Cyclic GFR-binding peptide
  MOD_RES (2)..(3)..(34): Xaa is C or S

SEQ ID NO: 17628 - protein, 26 aa, Artificial Sequence
  Cyclic GFR-binding peptide
ALEPLTILYYVGRKPKVEQLSNMIVR

SEQ ID NO: 17629 - protein, 24 aa, Artificial Sequence
  Cyclic GFR-binding peptide
LSAISILYLVGRTPKVLKNYQMVV

SEQ ID NO: 17630 - protein, 37 aa, Artificial Sequence
  Cyclic GFR-binding peptide
  MOD_RES (4)..(36): Xaa is C or S
KPTXAPTKLEPLPVVYYDDSSNVIEQLSNNMVVRSXG

SEQ ID NO: 17631 - protein, 35 aa, Artificial Sequence
  Cyclic GFR-binding peptide
  MOD_RES (5)..(6): Xaa is C or S
VPKPXXAPTQLSPISVLFIDDSSNVIYKQYENMVV

SEQ ID NO: 17632 - protein, 24 aa, Artificial Sequence
  Cyclic GFR-binding peptide
NAISMLYFDENEKVVLKKYRDMVV

SEQ ID NO: 17633 - protein, 30 aa, Artificial Sequence; identical to SEQ ID NO: 7304
  Cyclic GFR-binding peptide
  MOD_RES (1)..(2): Xaa is C or S

SEQ ID NO: 17634 - protein, 37 aa, Artificial Sequence
  Cyclic GFR-binding peptide
  MOD_RES (5)..(6): Xaa is C or S
IPKAXXVPTELEPLTMLYYDENEKVVEQLSNDMVVEG

SEQ ID NO: 17635 - protein, 26 aa, Artificial Sequence
  Cyclic GFR-binding peptide
PTRLEPLPIVYYDSANNVVEQLSNDM

SEQ ID NO: 17636 - protein, 38 aa, Artificial Sequence; identical to SEQ ID NO: 7311
  Cyclic GFR-binding peptide
  MOD_RES (4)..(36)..(38): Xaa is C or S

SEQ ID NO: 17637 - protein, 35 aa, Artificial Sequence; identical to SEQ ID NO: 7312
  Cyclic GFR-binding peptide
  MOD_RES (3)..(4): Xaa is C or S

SEQ ID NO: 17638 - protein, 31 aa, Artificial Sequence
  Cyclic GFR-binding peptide
  MOD_RES (1)..(2): Xaa is C or S
XXVPQDLEPLPIVYYVGRTPKVEQLSNMVVK

SEQ ID NO: 17639 - protein, 32 aa, Artificial Sequence; identical to SEQ ID NO: 7315
  Cyclic GFR-binding peptide
  MOD_RES (31)..(31): Xaa is C or S

SEQ ID NO: 17640 - protein, 29 aa, Artificial Sequence
  Cyclic GFR-binding peptide
  MOD_RES (27)..(29): Xaa is C or S
EPLPMVYYDEYDKVVEQLSNEMVVEGXGX

SEQ ID NO: 17641 - protein, 35 aa, Artificial Sequence
  Cyclic GFR-binding peptide
  MOD_RES (1)..(33)..(35): Xaa is C or S
XAPTQLSPISVLFIDDSSNVIYKQYENMVVRAXGX

SEQ ID NO: 17642 - protein, 29 aa, Artificial Sequence
  Cyclic GFR-binding peptide
TRLSAISILYLDSANNVVLKNYQDMVVES

SEQ ID NO: 17643 - protein, 35 aa, Artificial Sequence
  Cyclic GFR-binding peptide
  MOD_RES (32)..(34): Xaa is C or S
APTQLSPISVLFIDDSSNVIYKQYENMVVRAXGXH

SEQ ID NO: 17644 - protein, 28 aa, Artificial Sequence
  Cyclic GFR-binding peptide
  MOD_RES (1)..(2): Xaa is C or S
XXVPTELNAISMLYFDEYDKVVLKKYRE

SEQ ID NO: 17645 - protein, 27 aa, Artificial Sequence
  Cyclic GFR-binding peptide
VPTRLEPLPIVYYDSANNVVEQLSNDM

SEQ ID NO: 17646 - protein, 37 aa, Artificial Sequence; identical to SEQ ID NO: 7324
  Cyclic GFR-binding peptide
  MOD_RES (4)..(5)..(36): Xaa is C or S

SEQ ID NO: 17647 - protein, 41 aa, Artificial Sequence; identical to SEQ ID NO: 7325
  Cyclic GFR-binding peptide
  MOD_RES (6)..(7)..(38)..(40): Xaa is C or S

SEQ ID NO: 17648 - protein, 27 aa, Artificial Sequence
  Cyclic GFR-binding peptide
  MOD_RES (27)..(27): Xaa is C or S
EPLPVVYYDDSSNVIEQLSNNMVVRSX

SEQ ID NO: 17649 - protein, 25 aa, Artificial Sequence
  Cyclic GFR-binding peptide
QLSPISVLFIDDSSNVIYKQYENMV

SEQ ID NO: 17650 - protein, 27 aa, Artificial Sequence
  Cyclic GFR-binding peptide
VSQDLSAISILYLIGKTPKILKNYQMI

SEQ ID NO: 17651 - protein, 39 aa, Artificial Sequence
  Cyclic GFR-binding peptide
  MOD_RES (5)..(6)..(37)..(39): Xaa is C or S
SASPXXVPQDLEPLPIVYYVGRTPKVEQLSNMVVKSXKX

SEQ ID NO: 17652 - protein, 33 aa, Artificial Sequence
  Cyclic GFR-binding peptide
  MOD_RES (31)..(33): Xaa is C or S
PTKLSPISVLFIDDSSNVIYKQYENMVVRSXGX

SEQ ID NO: 17653 - protein, 30 aa, Artificial Sequence
  Cyclic GFR-binding peptide
  MOD_RES (2)..(3): Xaa is C or S
PXXVPQDLSPISILFIVGRTPKVYKQYEMV

SEQ ID NO: 17654 - protein, 33 aa, Artificial Sequence
  Cyclic GFR-binding peptide
  MOD_RES (2)..(3): Xaa is C or S
AXXVPTELEPLPMVYYDENEKVVEQLSNDMVVE

SEQ ID NO: 17655 - protein, 31 aa, Artificial Sequence
  Cyclic GFR-binding peptide
  MOD_RES (2)..(3): Xaa is C or S
AXXVPTELSPISMLFIDENEKVVYKQYEDMV

SEQ ID NO: 17656 - protein, 32 aa, Artificial Sequence
  Cyclic GFR-binding peptide
  MOD_RES (29)..(31): Xaa is C or S
KLSPISVLFIDDSSNVIYKQYENMVVRSXGXH

SEQ ID NO: 17657 - protein, 31 aa, Artificial Sequence
  Cyclic GFR-binding peptide
  MOD_RES (4)..(5): Xaa is C or S
PKPXXAPTQLSPISVLFIDDSSNVIYKQYEN

SEQ ID NO: 17658 - protein, 32 aa, Artificial Sequence; identical to SEQ ID NO: 7343
  Cyclic GFR-binding peptide
  MOD_RES (6)..(7): Xaa is C or S

SEQ ID NO: 17659 - protein, 26 aa, Artificial Sequence
  Cyclic GFR-binding peptide
APTKLSPISVLFIDDSSNVIYKQYEN

SEQ ID NO: 17660 - protein, 32 aa, Artificial Sequence
  Cyclic GFR-binding peptide
  MOD_RES (1)..(2): Xaa is C or S
XXVPQDLEPLPIVYYVGRTPKVEQLSNMVVKS

SEQ ID NO: 17661 - protein, 29 aa, Artificial Sequence
  Cyclic GFR-binding peptide
  MOD_RES (3)..(4): Xaa is C or S
APXXVPQALSPISILFIVGRKPKVYKQYE

SEQ ID NO: 17662 - protein, 30 aa, Artificial Sequence
  Cyclic GFR-binding peptide
  MOD_RES (28)..(30): Xaa is C or S
DLSPISILFIIGKTPKIYKQYEMIVKSXKX

SEQ ID NO: 17663 - protein, 31 aa, Artificial Sequence
  Cyclic GFR-binding peptide
  MOD_RES (1)..(2): Xaa is C or S
XXVPTELSPISMLFIDEYDKVVYKQYEEMVV

SEQ ID NO: 17664 - protein, 31 aa, Artificial Sequence; identical to SEQ ID NO: 7348
  Cyclic GFR-binding peptide
  MOD_RES (1)..(1): Xaa is C or S

SEQ ID NO: 17665 - protein, 34 aa, Artificial Sequence
  Cyclic GFR-binding peptide
  MOD_RES (3)..(4): Xaa is C or S
KAXXVPTELSPISMLFIDEYDKVVYKQYEEMVVE

SEQ ID NO: 17666 - protein, 32 aa, Artificial Sequence
  Cyclic GFR-binding peptide
  MOD_RES (6)..(6): Xaa is C or S
VTKPTXAPTKLEPLPVVYYDDSSNVIEQLSNN

SEQ ID NO: 17667 - protein, 25 aa, Artificial Sequence
  Cyclic GFR-binding peptide
EPLTILYYVGRKPKVEQLSNMIVRS

SEQ ID NO: 17668 - protein, 26 aa, Artificial Sequence
  Cyclic GFR-binding peptide
ELNAISMLYFDEYDKVVLKKYREMVV

SEQ ID NO: 17669 - protein, 36 aa, Artificial Sequence
  Cyclic GFR-binding peptide
  MOD_RES (5)..(6): Xaa is C or S
SASPXXVPQDLSPISILFIVGRTPKVYKQYEMVVKS

SEQ ID NO: 17670 - protein, 24 aa, Artificial Sequence
  Cyclic GFR-binding peptide
LSPISILFIVGRKPKVYKQYEMIV

SEQ ID NO: 17671 - protein, 27 aa, Artificial Sequence
  Cyclic GFR-binding peptide
  MOD_RES (1)..(1): Xaa is C or S
XAPTQLSAISVLYLDDSSNVILKNYQN

SEQ ID NO: 17672 - protein, 35 aa, Artificial Sequence; identical to SEQ ID NO: 7356
  Cyclic GFR-binding peptide
  MOD_RES (5)..(6): Xaa is C or S

SEQ ID NO: 17673 - protein, 32 aa, Artificial Sequence
  Cyclic GFR-binding peptide
  MOD_RES (1)..(32): Xaa is C or S
XVSQDLEPLPIVYYIGKTPKIEQLSNMIVKSX

SEQ ID NO: 17674 - protein, 32 aa, Artificial Sequence
  Cyclic GFR-binding peptide
  MOD_RES (29)..(31): Xaa is C or S
RLNAISILYFDSANNVVLKKYRDMVVESXGXR

SEQ ID NO: 17675 - protein, 28 aa, Artificial Sequence
  Cyclic GFR-binding peptide
  MOD_RES (2)..(3): Xaa is C or S
AXXVPTELSPISMLFIDENEKVVYKQYE

SEQ ID NO: 17676 - protein, 29 aa, Artificial Sequence
  Cyclic GFR-binding peptide
  MOD_RES (1)..(2): Xaa is C or S
XXVSQDLNAISILYFIGKTPKILKKYRMI

SEQ ID NO: 17677 - protein, 35 aa, Artificial Sequence; identical to SEQ ID NO: 7358
  Cyclic GFR-binding peptide
  MOD_RES (2)..(3)..(35): Xaa is C or S

SEQ ID NO: 17678 - protein, 32 aa, Artificial Sequence; identical to SEQ ID NO: 7359
  Cyclic GFR-binding peptide
  MOD_RES (5)..(6): Xaa is C or S

SEQ ID NO: 17679 - protein, 37 aa, Artificial Sequence
  Cyclic GFR-binding peptide
  MOD_RES (6)..(7): Xaa is C or S
ASAAPXXVPQALSPISILFIVGRKPKVYKQYEMIVRS

SEQ ID NO: 17680 - protein, 31 aa, Artificial Sequence
  Cyclic GFR-binding peptide
  MOD_RES (5)..(6): Xaa is C or S
VPKPXXAPTQLSPISVLFIDDSSNVIYKQYE

SEQ ID NO: 17681 - protein, 26 aa, Artificial Sequence
  Cyclic GFR-binding peptide
SQDLSAISILYLIGKTPKILKNYQMI

SEQ ID NO: 17682 - protein, 33 aa, Artificial Sequence
  Cyclic GFR-binding peptide
  MOD_RES (2)..(2): Xaa is C or S
TXAPTKLSPISVLFIDDSSNVIYKQYENMVVRS

SEQ ID NO: 17683 - protein, 32 aa, Artificial Sequence
  Cyclic GFR-binding peptide
  MOD_RES (32)..(32): Xaa is C or S
APTKLEPLTVLYYDDSSNVIEQLSNNMVVRSX

SEQ ID NO: 17684 - protein, 25 aa, Artificial Sequence
  Cyclic GFR-binding peptide
QDLSAISILYLVGRTPKVLKNYQMV

SEQ ID NO: 17685 - protein, 34 aa, Artificial Sequence; identical to SEQ ID NO: 7368
  Cyclic GFR-binding peptide
  MOD_RES (2)..(3)..(34): Xaa is C or S

SEQ ID NO: 17686 - protein, 35 aa, Artificial Sequence
  Cyclic GFR-binding peptide
  MOD_RES (2)..(34): Xaa is C or S
TXAPTKLEPLPVVYYDDSSNVIEQLSNNMVVRSXG

SEQ ID NO: 17687 - protein, 32 aa, Artificial Sequence
  Cyclic GFR-binding peptide
  MOD_RES (4)..(5): Xaa is C or S
PKAXXVPTELSPISMLFIDENEKVVYKQYEDM

SEQ ID NO: 17688 - protein, 38 aa, Artificial Sequence; identical to SEQ ID NO: 7372
  Cyclic GFR-binding peptide
  MOD_RES (6)..(7)..(38): Xaa is C or S

SEQ ID NO: 17689 - protein, 28 aa, Artificial Sequence
  Cyclic GFR-binding peptide
APTQLEPLPVVYYDDSSNVIEQLSNNMV

SEQ ID NO: 17690 - protein, 35 aa, Artificial Sequence
  Cyclic GFR-binding peptide
  MOD_RES (32)..(34): Xaa is C or S
APTQLEPLTVLYYDDSSNVIEQLSNNMVVRAXGXH

SEQ ID NO: 17691 - protein, 30 aa, Artificial Sequence
  Cyclic GFR-binding peptide
PTKLSPISVLFIDDSSNVIYKQYENMVVRS

SEQ ID NO: 17692 - protein, 26 aa, Artificial Sequence
  Cyclic GFR-binding peptide
VPTRLSAISILYLDSANNVVLKNYQD

SEQ ID NO: 17693 - protein, 29 aa, Artificial Sequence
  Cyclic GFR-binding peptide
  MOD_RES (29)..(29): Xaa is C or S
QALSPISILFIVGRKPKVYKQYEMIVRSX

SEQ ID NO: 17694 - protein, 37 aa, Artificial Sequence
  Cyclic GFR-binding peptide
  MOD_RES (5)..(6)..(37): Xaa is C or S
SASPXXVPQDLEPLPIVYYVGRTPKVEQLSNMVVKSX

SEQ ID NO: 17695 - protein, 35 aa, Artificial Sequence
  Cyclic GFR-binding peptide
  MOD_RES (1)..(2)..(33)..(35): Xaa is C or S
XXVPQALEPLTILYYVGRKPKVEQLSNMIVRSXKX

SEQ ID NO: 17696 - protein, 29 aa, Artificial Sequence
  Cyclic GFR-binding peptide
PTELNAISMLYFDEYDKVVLKKYREMVVE

SEQ ID NO: 17697 - protein, 24 aa, Artificial Sequence
  Cyclic GFR-binding peptide
ALEPLTILYYVGRKPKVEQLSNMI

SEQ ID NO: 17698 - protein, 30 aa, Artificial Sequence
  Cyclic GFR-binding peptide
  MOD_RES (4)..(5): Xaa is C or S
PKAXXVPTELEPLPMVYYDEYDKVVEQLSN

SEQ ID NO: 17699 - protein, 36 aa, Artificial Sequence
  Cyclic GFR-binding peptide
  MOD_RES (1)..(33)..(35): Xaa is C or S
XVPTELEPLPMVYYDEYDKVVEQLSNEMVVEGXGXR

SEQ ID NO: 17700 - protein, 37 aa, Artificial Sequence; identical to SEQ ID NO: 7381
  Cyclic GFR-binding peptide
  MOD_RES (2)..(3)..(35)..(37): Xaa is C or S

SEQ ID NO: 17701 - protein, 31 aa, Artificial Sequence
  Cyclic GFR-binding peptide
  MOD_RES (28)..(30): Xaa is C or S
DLEPLPIVYYIGKTPKIEQLSNMIVKSXKXS

SEQ ID NO: 17702 - protein, 35 aa, Artificial Sequence
  Cyclic GFR-binding peptide
  MOD_RES (1)..(2)..(34): Xaa is C or S
XXVPTELSPISMLFIDENEKVVYKQYEDMVVEGXG

SEQ ID NO: 17703 - protein, 29 aa, Artificial Sequence
  Cyclic GFR-binding peptide
  MOD_RES (28)..(28): Xaa is C or S
DLNAISILYFVGRTPKVLKKYRMVVKSXK

SEQ ID NO: 17704 - protein, 31 aa, Artificial Sequence
  Cyclic GFR-binding peptide
  MOD_RES (29)..(31): Xaa is C or S
QDLEPLPIVYYVGRTPKVEQLSNMVVKSXKX

SEQ ID NO: 17705 - protein, 39 aa, Artificial Sequence
  Cyclic GFR-binding peptide
  MOD_RES (5)..(6)..(37)..(39): Xaa is C or S
SASPXXVSQDLSPISILFIIGKTPKIYKQYEMIVKSXKX

SEQ ID NO: 17706 - protein, 40 aa, Artificial Sequence; identical to SEQ ID NO: 7386
  Cyclic GFR-binding peptide
  MOD_RES (6)..(7)..(38)..(40): Xaa is C or S

SEQ ID NO: 17707 - protein, 34 aa, Artificial Sequence
  Cyclic GFR-binding peptide
  MOD_RES (6)..(7): Xaa is C or S
ASAAPXXVPQALEPLTILYYVGRKPKVEQLSNMI

SEQ ID NO: 17708 - protein, 29 aa, Artificial Sequence
  Cyclic GFR-binding peptide
  MOD_RES (1)..(2): Xaa is C or S
XXAPTKLEPLTVLYYDDSSNVIEQLSNNM

SEQ ID NO: 17709 - protein, 27 aa, Artificial Sequence
  Cyclic GFR-binding peptide
  MOD_RES (1)..(1): Xaa is C or S
XVSQDLNAISILYFIGKTPKILKKYRM

SEQ ID NO: 17710 - protein, 29 aa, Artificial Sequence
  Cyclic GFR-binding peptide
  MOD_RES (2)..(3): Xaa is C or S
PXXAPTQLEPLPVVYYDDSSNVIEQLSNN

SEQ ID NO: 17711 - protein, 24 aa, Artificial Sequence
  Cyclic GFR-binding peptide
TKLSPISVLFIDDSSNVIYKQYEN

SEQ ID NO: 17712 - protein, 30 aa, Artificial Sequence
  Cyclic GFR-binding peptide
VPQALEPLTILYYVGRKPKVEQLSNMIVRS

SEQ ID NO: 17713 - protein, 31 aa, Artificial Sequence; identical to SEQ ID NO: 7390
  Cyclic GFR-binding peptide
  MOD_RES (4)..(5): Xaa is C or S

SEQ ID NO: 17714 - protein, 31 aa, Artificial Sequence
  Cyclic GFR-binding peptide
  MOD_RES (5)..(5): Xaa is C or S
TKPTXAPTKLEPLTVLYYDDSSNVIEQLSNN

SEQ ID NO: 17715 - protein, 26 aa, Artificial Sequence
  Cyclic GFR-binding peptide
LEPLPMVYYDENEKVVEQLSNDMVVE

SEQ ID NO: 17716 - protein, 26 aa, Artificial Sequence
  Cyclic GFR-binding peptide
PTELSPISMLFIDEYDKVVYKQYEEM

SEQ ID NO: 17717 - protein, 33 aa, Artificial Sequence
  Cyclic GFR-binding peptide
  MOD_RES (30)..(32): Xaa is C or S
TELEPLTMLYYDENEKVVEQLSNDMVVEGXGXR

SEQ ID NO: 17718 - protein, 32 aa, Artificial Sequence; identical to SEQ ID NO: 7395
  Cyclic GFR-binding peptide
  MOD_RES (6)..(7): Xaa is C or S

SEQ ID NO: 17719 - protein, 23 aa, Artificial Sequence
  Cyclic GFR-binding peptide
LSPISMLFIDEYDKVVYKQYEEM

SEQ ID NO: 17720 - protein, 33 aa, Artificial Sequence
  Cyclic GFR-binding peptide
  MOD_RES (31)..(33): Xaa is C or S
PTRLNAISILYFDSANNVVLKKYRDMVVESXGX

SEQ ID NO: 17721 - protein, 26 aa, Artificial Sequence
  Cyclic GFR-binding peptide
ELSPISMLFIDEYDKVVYKQYEEMVV

SEQ ID NO: 17722 - protein, 23 aa, Artificial Sequence
  Cyclic GFR-binding peptide
ALSPISILFIVGRKPKVYKQYEM

SEQ ID NO: 17723 - protein, 21 aa, Artificial Sequence
  Cyclic GFR-binding peptide
LEPLTILYYVGRKPKVEQLSN

SEQ ID NO: 17724 - protein, 32 aa, Artificial Sequence
  Cyclic GFR-binding peptide
  MOD_RES (1)..(1): Xaa is C or S
XVPTELEPLTMLYYDENEKVVEQLSNDMVVEG

SEQ ID NO: 17725 - protein, 41 aa, Artificial Sequence
  Cyclic GFR-binding peptide
  MOD_RES (5)..(6)..(38)..(40): Xaa is C or S
IPKAXXVPTELEPLPMVYYDENEKVVEQLSNDMVVEGXGXR

SEQ ID NO: 17726 - protein, 27 aa, Artificial Sequence
  Cyclic GFR-binding peptide
VPQDLNAISILYFVGRTPKVLKKYRMV

SEQ ID NO: 17727 - protein, 28 aa, Artificial Sequence
  Cyclic GFR-binding peptide
  MOD_RES (1)..(1): Xaa is C or S
XAPTKLSPISVLFIDDSSNVIYKQYENM

SEQ ID NO: 17728 - protein, 29 aa, Artificial Sequence
  Cyclic GFR-binding peptide
  MOD_RES (29)..(29): Xaa is C or S
RLEPLPIVYYDSANNVVEQLSNDMVVESX

SEQ ID NO: 17729 - protein, 32 aa, Artificial Sequence; identical to SEQ ID NO: 7405
  Cyclic GFR-binding peptide
  MOD_RES (6)..(7): Xaa is C or S

SEQ ID NO: 17730 - protein, 36 aa, Artificial Sequence; identical to SEQ ID NO: 7409
  Cyclic GFR-binding peptide
  MOD_RES (6)..(7): Xaa is C or S

SEQ ID NO: 17731 - protein, 30 aa, Artificial Sequence
  Cyclic GFR-binding peptide
  MOD_RES (2)..(3): Xaa is C or S
AXXVPTELSPISMLFIDEYDKVVYKQYEEM

SEQ ID NO: 17732 - protein, 33 aa, Artificial Sequence
  Cyclic GFR-binding peptide
  MOD_RES (1)..(33): Xaa is C or S
XAPTQLSPISVLFIDDSSNVIYKQYENMVVRAX

SEQ ID NO: 17733 - protein, 28 aa, Artificial Sequence
  Cyclic GFR-binding peptide
KLSPISVLFIDDSSNVIYKQYENMVVRS

SEQ ID NO: 17734 - protein, 31 aa, Artificial Sequence; identical to SEQ ID NO: 7417
  Cyclic GFR-binding peptide
  MOD_RES (28)..(30): Xaa is C or S

SEQ ID NO: 17735 - protein, 37 aa, Artificial Sequence; identical to SEQ ID NO: 7418
  Cyclic GFR-binding peptide
  MOD_RES (2)..(3)..(35)..(37): Xaa is C or S

SEQ ID NO: 17736 - protein, 30 aa, Artificial Sequence; identical to SEQ ID NO: 7419
  Cyclic GFR-binding peptide
  MOD_RES (3)..(4): Xaa is C or S

SEQ ID NO: 17737 - protein, 32 aa, Artificial Sequence
  Cyclic GFR-binding peptide
  MOD_RES (4)..(5): Xaa is C or S
PKPXXAPTKLEPLPVVYYDDSSNVIEQLSNNM

SEQ ID NO: 17738 - protein, 39 aa, Artificial Sequence
  Cyclic GFR-binding peptide
  MOD_RES (3)..(4)..(36)..(38): Xaa is C or S
KAXXVPTELSPISMLFIDENEKVVYKQYEDMVVEGXGXR

SEQ ID NO: 17739 - protein, 24 aa, Artificial Sequence
  Cyclic GFR-binding peptide
EPLTILYYVGRKPKVEQLSNMIVR

SEQ ID NO: 17740 - protein, 27 aa, Artificial Sequence
  Cyclic GFR-binding peptide
  MOD_RES (26)..(26): Xaa is C or S
NAISILYFVGRTPKVLKKYRMVVKSXK

SEQ ID NO: 17741 - protein, 27 aa, Artificial Sequence
  Cyclic GFR-binding peptide
  MOD_RES (1)..(2): Xaa is C or S
XXVPQALSPISILFIVGRKPKVYKQYE

SEQ ID NO: 17742 - protein, 35 aa, Artificial Sequence
  Cyclic GFR-binding peptide
  MOD_RES (5)..(5): Xaa is C or S
TKPTXAPTKLEPLPVVYYDDSSNVIEQLSNNMVVR

SEQ ID NO: 17743 - protein, 42 aa, Artificial Sequence
  Cyclic GFR-binding peptide
  MOD_RES (6)..(7)..(39)..(41): Xaa is C or S
STPPTXXVPTRLEPLPIVYYDSANNVVEQLSNDMVVESXGXR

SEQ ID NO: 17744 - protein, 27 aa, Artificial Sequence
  Cyclic GFR-binding peptide
VPTELEPLTMLYYDEYDKVVEQLSNEM

SEQ ID NO: 17745 - protein, 34 aa, Artificial Sequence; identical to SEQ ID NO: 7428
  Cyclic GFR-binding peptide
  MOD_RES (3)..(4): Xaa is C or S

SEQ ID NO: 17746 - protein, 31 aa, Artificial Sequence
  Cyclic GFR-binding peptide
  MOD_RES (5)..(5): Xaa is C or S
TKPTXAPTKLSPISVLFIDDSSNVIYKQYEN

SEQ ID NO: 17747 - protein, 42 aa, Artificial Sequence
  Cyclic GFR-binding peptide
  MOD_RES (6)..(7)..(39)..(41): Xaa is C or S
YVPKPXXAPTKLEPLTVLYYDDSSNVIEQLSNNMVVRSXGXH

SEQ ID NO: 17748 - protein, 28 aa, Artificial Sequence
  Cyclic GFR-binding peptide
PTELNAISMLYFDENEKVVLKKYRDMVV

SEQ ID NO: 17749 - protein, 26 aa, Artificial Sequence
  Cyclic GFR-binding peptide
  MOD_RES (26)..(26): Xaa is C or S
SAISILYLIGKTPKILKNYQMIVKSX

SEQ ID NO: 17750 - protein, 31 aa, Artificial Sequence; identical to SEQ ID NO: 7435
  Cyclic GFR-binding peptide
  MOD_RES (1)..(1): Xaa is C or S

SEQ ID NO: 17751 - protein, 29 aa, Artificial Sequence
  Cyclic GFR-binding peptide
TELNAISMLYFDENEKVVLKKYRDMVVEG

SEQ ID NO: 17752 - protein, 29 aa, Artificial Sequence
  Cyclic GFR-binding peptide
  MOD_RES (26)..(28): Xaa is C or S
EPLPIVYYVGRTPKVEQLSNMVVKSXKXS

SEQ ID NO: 17753 - protein, 36 aa, Artificial Sequence
  Cyclic GFR-binding peptide
  MOD_RES (6)..(7): Xaa is C or S
YVPKPXXAPTKLEPLTVLYYDDSSNVIEQLSNNMVV

SEQ ID NO: 17754 - protein, 23 aa, Artificial Sequence
  Cyclic GFR-binding peptide
QDLEPLPIVYYVGRTPKVEQLSN

SEQ ID NO: 17755 - protein, 34 aa, Artificial Sequence
  Cyclic GFR-binding peptide
  MOD_RES (4)..(5): Xaa is C or S
ASPXXVPQDLSPISILFIVGRTPKVYKQYEMVVK

SEQ ID NO: 17756 - protein, 30 aa, Artificial Sequence
  Cyclic GFR-binding peptide
  MOD_RES (1)..(2): Xaa is C or S
XXVPTRLNAISILYFDSANNVVLKKYRDMV

SEQ ID NO: 17757 - protein, 31 aa, Artificial Sequence
  Cyclic GFR-binding peptide
  MOD_RES (30)..(30): Xaa is C or S
TQLEPLTVLYYDDSSNVIEQLSNNMVVRAXG

SEQ ID NO: 17758 - protein, 25 aa, Artificial Sequence
  Cyclic GFR-binding peptide
TELNAISMLYFDENEKVVLKKYRDM

SEQ ID NO: 17759 - protein, 28 aa, Artificial Sequence
  Cyclic GFR-binding peptide
TELEPLPMVYYDEYDKVVEQLSNEMVVE

SEQ ID NO: 17760 - protein, 32 aa, Artificial Sequence; identical to SEQ ID NO: 7440
  Cyclic GFR-binding peptide
  MOD_RES (3)..(4): Xaa is C or S

SEQ ID NO: 17761 - protein, 24 aa, Artificial Sequence
  Cyclic GFR-binding peptide
SAISVLYLDDSSNVILKNYQNMVV

SEQ ID NO: 17762 - protein, 38 aa, Artificial Sequence
  Cyclic GFR-binding peptide
  MOD_RES (4)..(5)..(37): Xaa is C or S
PKAXXVPTELSPISMLFIDEYDKVVYKQYEEMVVEGXG

SEQ ID NO: 17763 - protein, 30 aa, Artificial Sequence
  Cyclic GFR-binding peptide
  MOD_RES (27)..(29): Xaa is C or S
EPLTVLYYDDSSNVIEQLSNNMVVRAXGXH

SEQ ID NO: 17764 - protein, 29 aa, Artificial Sequence
  Cyclic GFR-binding peptide
VPQDLEPLPIVYYVGRTPKVEQLSNMVVK

SEQ ID NO: 17765 - protein, 38 aa, Artificial Sequence; identical to SEQ ID NO: 7453
  Cyclic GFR-binding peptide
  MOD_RES (6)..(7): Xaa is C or S

SEQ ID NO: 17766 - protein, 28 aa, Artificial Sequence
  Cyclic GFR-binding peptide
  MOD_RES (1)..(2): Xaa is C or S
XXAPTQLSAISVLYLDDSSNVILKNYQN

SEQ ID NO: 17767 - protein, 27 aa, Artificial Sequence
  Cyclic GFR-binding peptide
  MOD_RES (1)..(2): Xaa is C or S
XXVSQDLSAISILYLIGKTPKILKNYQ

SEQ ID NO: 17768 - protein, 28 aa, Artificial Sequence
  Cyclic GFR-binding peptide
  MOD_RES (27)..(27): Xaa is C or S
EPLPIVYYDSANNVVEQLSNDMVVESXG

SEQ ID NO: 17769 - protein, 35 aa, Artificial Sequence
  Cyclic GFR-binding peptide
  MOD_RES (1)..(33)..(35): Xaa is C or S
XAPTKLEPLPVVYYDDSSNVIEQLSNNMVVRSXGX

SEQ ID NO: 17770 - protein, 35 aa, Artificial Sequence
  Cyclic GFR-binding peptide
  MOD_RES (2)..(3)..(35): Xaa is C or S
PXXAPTQLEPLPVVYYDDSSNVIEQLSNNMVVRAX

SEQ ID NO: 17771 - protein, 38 aa, Artificial Sequence
  Cyclic GFR-binding peptide
  MOD_RES (4)..(36)..(38): Xaa is C or S
KPTXAPTKLSPISVLFIDDSSNVIYKQYENMVVRSXGX

SEQ ID NO: 17772 - protein, 40 aa, Artificial Sequence
  Cyclic GFR-binding peptide
  MOD_RES (6)..(7)..(39): Xaa is C or S
YVPKPXXAPTKLEPLTVLYYDDSSNVIEQLSNNMVVRSXG

SEQ ID NO: 17773 - protein, 34 aa, Artificial Sequence
  Cyclic GFR-binding peptide
  MOD_RES (5)..(6): Xaa is C or S
VPKPXXAPTKLEPLPVVYYDDSSNVIEQLSNNMV

SEQ ID NO: 17774 - protein, 27 aa, Artificial Sequence
  Cyclic GFR-binding peptide
PTRLSAISILYLDSANNVVLKNYQDMV

SEQ ID NO: 17775 - protein, 37 aa, Artificial Sequence
  Cyclic GFR-binding peptide
  MOD_RES (4)..(5)..(37): Xaa is C or S
PKAXXVPTELEPLPMVYYDEYDKVVEQLSNEMVVEGX

SEQ ID NO: 17776 - protein, 27 aa, Artificial Sequence
  Cyclic GFR-binding peptide
PTELEPLTMLYYDENEKVVEQLSNDMV

SEQ ID NO: 17777 - protein, 30 aa, Artificial Sequence; identical to SEQ ID NO: 7461
  Cyclic GFR-binding peptide
  MOD_RES (27)..(29): Xaa is C or S

SEQ ID NO: 17778 - protein, 40 aa, Artificial Sequence
  Cyclic GFR-binding peptide
  MOD_RES (6)..(7)..(38)..(40): Xaa is C or S
ASASPXXVPQDLEPLPIVYYVGRTPKVEQLSNMVVKSXKX

SEQ ID NO: 17779 - protein, 33 aa, Artificial Sequence
  Cyclic GFR-binding peptide
  MOD_RES (5)..(6): Xaa is C or S
IPKAXXVPTELSPISMLFIDENEKVVYKQYEDM

SEQ ID NO: 17780 - protein, 29 aa, Artificial Sequence
  Cyclic GFR-binding peptide
TELNAISMLYFDEYDKVVLKKYREMVVEG

SEQ ID NO: 17781 - protein, 35 aa, Artificial Sequence
  Cyclic GFR-binding peptide
  MOD_RES (1)..(33)..(35): Xaa is C or S
XAPTKLSPISVLFIDDSSNVIYKQYENMVVRSXGX

SEQ ID NO: 17782 - protein, 32 aa, Artificial Sequence
  Cyclic GFR-binding peptide
  MOD_RES (1)..(2): Xaa is C or S
XXVPTELSPISMLFIDEYDKVVYKQYEEMVVE

SEQ ID NO: 17783 - protein, 28 aa, Artificial Sequence
  Cyclic GFR-binding peptide
  MOD_RES (1)..(1): Xaa is C or S
XVSQDLNAISILYFIGKTPKILKKYRMI

SEQ ID NO: 17784 - protein, 31 aa, Artificial Sequence
  Cyclic GFR-binding peptide
  MOD_RES (5)..(6): Xaa is C or S
SASPXXVPQDLEPLPIVYYVGRTPKVEQLSN

SEQ ID NO: 17785 - protein, 36 aa, Artificial Sequence; identical to SEQ ID NO: 7469
  Cyclic GFR-binding peptide
  MOD_RES (1)..(2)..(33)..(35): Xaa is C or S

SEQ ID NO: 17786 - protein, 24 aa, Artificial Sequence
  Cyclic GFR-binding peptide
SQDLEPLPIVYYIGKTPKIEQLSN

SEQ ID NO: 17787 - protein, 29 aa, Artificial Sequence
  Cyclic GFR-binding peptide
  MOD_RES (28)..(28): Xaa is C or S
LEPLTMLYYDEYDKVVEQLSNEMVVEGXG

SEQ ID NO: 17788 - protein, 34 aa, Artificial Sequence; identical to SEQ ID NO: 7474
  Cyclic GFR-binding peptide
  MOD_RES (2)..(3)..(34): Xaa is C or S

SEQ ID NO: 17789 - protein, 29 aa, Artificial Sequence
  Cyclic GFR-binding peptide
  MOD_RES (27)..(29): Xaa is C or S
LSPISILFIVGRTPKVYKQYEMVVKSXKX

SEQ ID NO: 17790 - protein, 26 aa, Artificial Sequence
  Cyclic GFR-binding peptide
  MOD_RES (26)..(26): Xaa is C or S
SPISILFIVGRTPKVYKQYEMVVKSX

SEQ ID NO: 17791 - protein, 27 aa, Artificial Sequence
  Cyclic GFR-binding peptide
VSQDLNAISILYFIGKTPKILKKYRMI

SEQ ID NO: 17792 - protein, 38 aa, Artificial Sequence
  Cyclic GFR-binding peptide
  MOD_RES (5)..(6)..(37): Xaa is C or S
SAAPXXVPQALEPLTILYYVGRKPKVEQLSNMIVRSXK

SEQ ID NO: 17793 - protein, 25 aa, Artificial Sequence
  Cyclic GFR-binding peptide
EPLPMVYYDEYDKVVEQLSNEMVVE

SEQ ID NO: 17794 - protein, 31 aa, Artificial Sequence
  Cyclic GFR-binding peptide
  MOD_RES (3)..(4): Xaa is C or S
KAXXVPTELEPLTMLYYDEYDKVVEQLSNEM

SEQ ID NO: 17795 - protein, 33 aa, Artificial Sequence
  Cyclic GFR-binding peptide
  MOD_RES (4)..(5): Xaa is C or S
PPTXXVPTRLNAISILYFDSANNVVLKKYRDMV

SEQ ID NO: 17796 - protein, 29 aa, Artificial Sequence
  Cyclic GFR-binding peptide
  MOD_RES (27)..(29): Xaa is C or S
EPLTMLYYDENEKVVEQLSNDMVVEGXGX

SEQ ID NO: 17797 - protein, 25 aa, Artificial Sequence
  Cyclic GFR-binding peptide
EPLTILYYDSANNVVEQLSNDMVVE

SEQ ID NO: 17798 - protein, 35 aa, Artificial Sequence
  Cyclic GFR-binding peptide
  MOD_RES (1)..(33)..(35): Xaa is C or S
XVPTRLSAISILYLDSANNVVLKNYQDMVVESXGX

SEQ ID NO: 17799 - protein, 21 aa, Artificial Sequence
  Cyclic GFR-binding peptide
EPLPIVYYIGKTPKIEQLSNM

SEQ ID NO: 17800 - protein, 20 aa, Artificial Sequence
  Cyclic GFR-binding peptide
NAISMLYFDENEKVVLKKYR

SEQ ID NO: 17801 - protein, 27 aa, Artificial Sequence
  Cyclic GFR-binding peptide
  MOD_RES (1)..(1): Xaa is C or S
XVPQDLSAISILYLVGRTPKVLKNYQM

SEQ ID NO: 17802 - protein, 26 aa, Artificial Sequence
  Cyclic GFR-binding peptide
  MOD_RES (1)..(1): Xaa is C or S
XVPTELEPLPMVYYDEYDKVVEQLSN

SEQ ID NO: 17803 - protein, 22 aa, Artificial Sequence
  Cyclic GFR-binding peptide
DLNAISILYFIGKTPKILKKYR

SEQ ID NO: 17804 - protein, 26 aa, Artificial Sequence
  Cyclic GFR-binding peptide
TELSPISMLFIDENEKVVYKQYEDMV

SEQ ID NO: 17805 - protein, 36 aa, Artificial Sequence; identical to SEQ ID NO: 7491
  Cyclic GFR-binding peptide
  MOD_RES (1)..(2)..(34)..(36): Xaa is C or S

SEQ ID NO: 17806 - protein, 24 aa, Artificial Sequence
  Cyclic GFR-binding peptide
SPISMLFIDEYDKVVYKQYEEMVV

SEQ ID NO: 17807 - protein, 31 aa, Artificial Sequence
  Cyclic GFR-binding peptide
  MOD_RES (31)..(31): Xaa is C or S
VSQDLSPISILFIIGKTPKIYKQYEMIVKSX

SEQ ID NO: 17808 - protein, 24 aa, Artificial Sequence
  Cyclic GFR-binding peptide
EPLPIVYYIGKTPKIEQLSNMIVK

SEQ ID NO: 17809 - protein, 33 aa, Artificial Sequence
  Cyclic GFR-binding peptide
  MOD_RES (3)..(4): Xaa is C or S
KAXXVPTELSPISMLFIDEYDKVVYKQYEEMVV

SEQ ID NO: 17810 - protein, 23 aa, Artificial Sequence
  Cyclic GFR-binding peptide
QALEPLTILYYVGRKPKVEQLSN

SEQ ID NO: 17811 - protein, 30 aa, Artificial Sequence; identical to SEQ ID NO: 7498
  Cyclic GFR-binding peptide
  MOD_RES (28)..(30): Xaa is C or S

SEQ ID NO: 17812 - protein, 31 aa, Artificial Sequence; identical to SEQ ID NO: 7499
  Cyclic GFR-binding peptide
  MOD_RES (3)..(4): Xaa is C or S

SEQ ID NO: 17813 - protein, 22 aa, Artificial Sequence
  Cyclic GFR-binding peptide
ALSPISILFIVGRKPKVYKQYE

SEQ ID NO: 17814 - protein, 37 aa, Artificial Sequence
  Cyclic GFR-binding peptide
  MOD_RES (5)..(6): Xaa is C or S
VPKPXXAPTKLEPLTVLYYDDSSNVIEQLSNNMVVRS

SEQ ID NO: 17815 - protein, 27 aa, Artificial Sequence
  Cyclic GFR-binding peptide
  MOD_RES (1)..(1): Xaa is C or S
XAPTKLSPISVLFIDDSSNVIYKQYEN

SEQ ID NO: 17816 - protein, 33 aa, Artificial Sequence
  Cyclic GFR-binding peptide
  MOD_RES (3)..(4): Xaa is C or S
APXXVPQALEPLTILYYVGRKPKVEQLSNMIVR

SEQ ID NO: 17817 - protein, 24 aa, Artificial Sequence
  Cyclic GFR-binding peptide
RLNAISILYFDSANNVVLKKYRDM

SEQ ID NO: 17818 - protein, 23 aa, Artificial Sequence
  Cyclic GFR-binding peptide
SAISILYLVGRKPKVLKNYQMIV

SEQ ID NO: 17819 - protein, 36 aa, Artificial Sequence
  Cyclic GFR-binding peptide
  MOD_RES (2)..(3)..(35): Xaa is C or S
AXXVPTELSPISMLFIDENEKVVYKQYEDMVVEGXG

SEQ ID NO: 17820 - protein, 36 aa, Artificial Sequence; identical to SEQ ID NO: 7504
  Cyclic GFR-binding peptide
  MOD_RES (7)..(7): Xaa is C or S

SEQ ID NO: 17821 - protein, 37 aa, Artificial Sequence
  Cyclic GFR-binding peptide
  MOD_RES (4)..(5)..(36): Xaa is C or S
ASPXXVPQDLEPLPIVYYVGRTPKVEQLSNMVVKSXK

SEQ ID NO: 17822 - protein, 27 aa, Artificial Sequence
  Cyclic GFR-binding peptide
VPTELNAISMLYFDENEKVVLKKYRDM

SEQ ID NO: 17823 - protein, 40 aa, Artificial Sequence; identical to SEQ ID NO: 7509
  Cyclic GFR-binding peptide
  MOD_RES (4)..(5)..(37)..(39): Xaa is C or S

SEQ ID NO: 17824 - protein, 31 aa, Artificial Sequence
  Cyclic GFR-binding peptide
  MOD_RES (1)..(2): Xaa is C or S
XXVPQALEPLTILYYVGRKPKVEQLSNMIVR

SEQ ID NO: 17825 - protein, 24 aa, Artificial Sequence
  Cyclic GFR-binding peptide
LEPLPIVYYDSANNVVEQLSNDMV

SEQ ID NO: 17826 - protein, 24 aa, Artificial Sequence
  Cyclic GFR-binding peptide
LEPLPMVYYDEYDKVVEQLSNEMV

SEQ ID NO: 17827 - protein, 24 aa, Artificial Sequence
  Cyclic GFR-binding peptide
TKLEPLPVVYYDDSSNVIEQLSNN

SEQ ID NO: 17828 - protein, 34 aa, Artificial Sequence
  Cyclic GFR-binding peptide
  MOD_RES (4)..(5): Xaa is C or S
PKPXXAPTQLEPLPVVYYDDSSNVIEQLSNNMVV

SEQ ID NO: 17829 - protein, 34 aa, Artificial Sequence
  Cyclic GFR-binding peptide
  MOD_RES (3)..(4): Xaa is C or S
APXXVPQALEPLTILYYVGRKPKVEQLSNMIVRS

SEQ ID NO: 17830 - protein, 31 aa, Artificial Sequence; identical to SEQ ID NO: 7514
  Cyclic GFR-binding peptide
  MOD_RES (1)..(2): Xaa is C or S

SEQ ID NO: 17831 - protein, 37 aa, Artificial Sequence
  Cyclic GFR-binding peptide
  MOD_RES (4)..(5)..(37): Xaa is C or S
PPTXXVPTRLSAISILYLDSANNVVLKNYQDMVVESX

SEQ ID NO: 17832 - protein, 31 aa, Artificial Sequence
  Cyclic GFR-binding peptide
  MOD_RES (5)..(6): Xaa is C or S
IPKAXXVPTELEPLPMVYYDEYDKVVEQLSN

SEQ ID NO: 17833 - protein, 27 aa, Artificial Sequence
  Cyclic GFR-binding peptide
  MOD_RES (1)..(1): Xaa is C or S
XAPTKLEPLPVVYYDDSSNVIEQLSNN

SEQ ID NO: 17834 - protein, 31 aa, Artificial Sequence
  Cyclic GFR-binding peptide
  MOD_RES (28)..(30): Xaa is C or S
DLSPISILFIIGKTPKIYKQYEMIVKSXKXS

SEQ ID NO: 17835 - protein, 36 aa, Artificial Sequence
  Cyclic GFR-binding peptide
  MOD_RES (3)..(4)..(36): Xaa is C or S
KPXXAPTKLEPLTVLYYDDSSNVIEQLSNNMVVRSX

SEQ ID NO: 17836 - protein, 39 aa, Artificial Sequence
  Cyclic GFR-binding peptide
  MOD_RES (6)..(7)..(39): Xaa is C or S
TVPKPXXAPTQLEPLTVLYYDDSSNVIEQLSNNMVVRAX

SEQ ID NO: 17837 - protein, 29 aa, Artificial Sequence
  Cyclic GFR-binding peptide
  MOD_RES (28)..(28): Xaa is C or S
LEPLTVLYYDDSSNVIEQLSNNMVVRSXG

SEQ ID NO: 17838 - protein, 25 aa, Artificial Sequence
  Cyclic GFR-binding peptide
EPLTMLYYDENEKVVEQLSNDMVVE

SEQ ID NO: 17839 - protein, 25 aa, Artificial Sequence
  Cyclic GFR-binding peptide
EPLTVLYYDDSSNVIEQLSNNMVVR

SEQ ID NO: 17840 - protein, 22 aa, Artificial Sequence
  Cyclic GFR-binding peptide
SPISILFIVGRTPKVYKQYEMV

SEQ ID NO: 17841 - protein, 31 aa, Artificial Sequence
  Cyclic GFR-binding peptide
  MOD_RES (28)..(30): Xaa is C or S
LEPLTILYYDSANNVVEQLSNDMVVESXGXR

SEQ ID NO: 17842 - protein, 22 aa, Artificial Sequence
  Cyclic GFR-binding peptide
LNAISILYFVGRTPKVLKKYRM

SEQ ID NO: 17843 - protein, 35 aa, Artificial Sequence
  Cyclic GFR-binding peptide
  MOD_RES (6)..(7): Xaa is C or S
TVPKPXXAPTQLEPLPVVYYDDSSNVIEQLSNNMV

SEQ ID NO: 17844 - protein, 32 aa, Artificial Sequence
  Cyclic GFR-binding peptide
  MOD_RES (6)..(6): Xaa is C or S
VTKPTXAPTKLEPLTVLYYDDSSNVIEQLSNN

SEQ ID NO: 17845 - protein, 25 aa, Artificial Sequence
  Cyclic GFR-binding peptide
APTQLSPISVLFIDDSSNVIYKQYE

SEQ ID NO: 17846 - protein, 26 aa, Artificial Sequence
  Cyclic GFR-binding peptide
LSAISVLYLDDSSNVILKNYQNMVVR

SEQ ID NO: 17847 - protein, 39 aa, Artificial Sequence
  Cyclic GFR-binding peptide
  MOD_RES (5)..(6)..(38): Xaa is C or S
IPKAXXVPTELEPLTMLYYDEYDKVVEQLSNEMVVEGXG

SEQ ID NO: 17848 - protein, 42 aa, Artificial Sequence; identical to SEQ ID NO: 7533
  Cyclic GFR-binding peptide
  MOD_RES (6)..(7)..(39)..(41): Xaa is C or S

SEQ ID NO: 17849 - protein, 32 aa, Artificial Sequence
  Cyclic GFR-binding peptide
  MOD_RES (2)..(3): Xaa is C or S
PXXAPTKLEPLTVLYYDDSSNVIEQLSNNMVV

SEQ ID NO: 17850 - protein, 25 aa, Artificial Sequence
  Cyclic GFR-binding peptide
PTQLSAISVLYLDDSSNVILKNYQN

SEQ ID NO: 17851 - protein, 30 aa, Artificial Sequence
  Cyclic GFR-binding peptide
  MOD_RES (1)..(1): Xaa is C or S
XVPTRLEPLPIVYYDSANNVVEQLSNDMVV

SEQ ID NO: 17852 - protein, 31 aa, Artificial Sequence
  Cyclic GFR-binding peptide
  MOD_RES (2)..(3): Xaa is C or S
PXXAPTKLSPISVLFIDDSSNVIYKQYENMV

SEQ ID NO: 17853 - protein, 33 aa, Artificial Sequence; identical to SEQ ID NO: 7538
  Cyclic GFR-binding peptide
  MOD_RES (1)..(2)..(33): Xaa is C or S

SEQ ID NO: 17854 - protein, 28 aa, Artificial Sequence
  Cyclic GFR-binding peptide
  MOD_RES (2)..(3): Xaa is C or S
PXXAPTKLSAISVLYLDDSSNVILKNYQ

SEQ ID NO: 17855 - protein, 29 aa, Artificial Sequence
  Cyclic GFR-binding peptide
  MOD_RES (2)..(3): Xaa is C or S
PXXAPTQLSPISVLFIDDSSNVIYKQYEN

SEQ ID NO: 17856 - protein, 37 aa, Artificial Sequence
  Cyclic GFR-binding peptide
  MOD_RES (1)..(2)..(34)..(36): Xaa is C or S
XXAPTKLEPLPVVYYDDSSNVIEQLSNNMVVRSXGXH

SEQ ID NO: 17857 - protein, 27 aa, Artificial Sequence
  Cyclic GFR-binding peptide
QLSAISVLYLDDSSNVILKNYQNMVVR

SEQ ID NO: 17858 - protein, 33 aa, Artificial Sequence; identical to SEQ ID NO: 7546
  Cyclic GFR-binding peptide
  MOD_RES (4)..(5): Xaa is C or S

SEQ ID NO: 17859 - protein, 40 aa, Artificial Sequence
  Cyclic GFR-binding peptide
  MOD_RES (5)..(6)..(38)..(40): Xaa is C or S
TPPTXXVPTRLEPLPIVYYDSANNVVEQLSNDMVVESXGX

SEQ ID NO: 17860 - protein, 32 aa, Artificial Sequence
  Cyclic GFR-binding peptide
  MOD_RES (29)..(31): Xaa is C or S
ELSPISMLFIDEYDKVVYKQYEEMVVEGXGXR

SEQ ID NO: 17861 - protein, 30 aa, Artificial Sequence
  Cyclic GFR-binding peptide
  MOD_RES (27)..(29): Xaa is C or S
LEPLTILYYVGRKPKVEQLSNMIVRSXKXS

SEQ ID NO: 17862 - protein, 22 aa, Artificial Sequence
  Cyclic GFR-binding peptide
NAISILYFVGRKPKVLKKYRMI

SEQ ID NO: 17863 - protein, 34 aa, Artificial Sequence
  Cyclic GFR-binding peptide
  MOD_RES (6)..(7): Xaa is C or S
SIPKAXXVPTELSPISMLFIDEYDKVVYKQYEEM

SEQ ID NO: 17864 - protein, 30 aa, Artificial Sequence; identical to SEQ ID NO: 7551
  Cyclic GFR-binding peptide
  MOD_RES (30)..(30): Xaa is C or S

SEQ ID NO: 17865 - protein, 34 aa, Artificial Sequence
  Cyclic GFR-binding peptide
  MOD_RES (31)..(33): Xaa is C or S
PTELEPLPMVYYDENEKVVEQLSNDMVVEGXGXR

SEQ ID NO: 17866 - protein, 27 aa, Artificial Sequence
  Cyclic GFR-binding peptide
  MOD_RES (26)..(26): Xaa is C or S
NAISILYFVGRKPKVLKKYRMIVRSXK

SEQ ID NO: 17867 - protein, 33 aa, Artificial Sequence; identical to SEQ ID NO: 7554
  Cyclic GFR-binding peptide
  MOD_RES (2)..(3): Xaa is C or S

SEQ ID NO: 17868 - protein, 34 aa, Artificial Sequence
  Cyclic GFR-binding peptide
  MOD_RES (6)..(6): Xaa is C or S
VTKPTXAPTKLEPLPVVYYDDSSNVIEQLSNNMV

SEQ ID NO: 17869 - protein, 31 aa, Artificial Sequence
  Cyclic GFR-binding peptide
  MOD_RES (28)..(30): Xaa is C or S
ALEPLTILYYVGRKPKVEQLSNMIVRSXKXS

SEQ ID NO: 17870 - protein, 33 aa, Artificial Sequence; identical to SEQ ID NO: 7556
  Cyclic GFR-binding peptide
  MOD_RES (2)..(3): Xaa is C or S

SEQ ID NO: 17871 - protein, 27 aa, Artificial Sequence
  Cyclic GFR-binding peptide
PQALSAISILYLVGRKPKVLKNYQMIV

SEQ ID NO: 17872 - protein, 35 aa, Artificial Sequence
  Cyclic GFR-binding peptide
  MOD_RES (1)..(33)..(35): Xaa is C or S
XVPTRLEPLTILYYDSANNVVEQLSNDMVVESXGX

SEQ ID NO: 17873 - protein, 36 aa, Artificial Sequence
  Cyclic GFR-binding peptide
  MOD_RES (5)..(6): Xaa is C or S
SAAPXXVPQALSPISILFIVGRKPKVYKQYEMIVRS

SEQ ID NO: 17874 - protein, 33 aa, Artificial Sequence
  Cyclic GFR-binding peptide
  MOD_RES (4)..(5): Xaa is C or S
PKAXXVPTELEPLPMVYYDEYDKVVEQLSNEMV

SEQ ID NO: 17875 - protein, 32 aa, Artificial Sequence; identical to SEQ ID NO: 7560
  Cyclic GFR-binding peptide
  MOD_RES (31)..(31): Xaa is C or S

SEQ ID NO: 17876 - protein, 25 aa, Artificial Sequence
  Cyclic GFR-binding peptide
VPTRLEPLPIVYYDSANNVVEQLSN

SEQ ID NO: 17877 - protein, 41 aa, Artificial Sequence
  Cyclic GFR-binding peptide
  MOD_RES (5)..(6)..(38)..(40): Xaa is C or S
VPKPXXAPTQLSPISVLFIDDSSNVIYKQYENMVVRAXGXH

SEQ ID NO: 17878 - protein, 30 aa, Artificial Sequence; identical to SEQ ID NO: 7561
  Cyclic GFR-binding peptide
  MOD_RES (2)..(3): Xaa is C or S

SEQ ID NO: 17879 - protein, 22 aa, Artificial Sequence
  Cyclic GFR-binding peptide
EPLTMLYYDENEKVVEQLSNDM

SEQ ID NO: 17880 - protein, 40 aa, Artificial Sequence
  Cyclic GFR-binding peptide
  MOD_RES (6)..(7)..(38)..(40): Xaa is C or S
ASASPXXVSQDLSPISILFIIGKTPKIYKQYEMIVKSXKX

SEQ ID NO: 17881 - protein, 33 aa, Artificial Sequence; identical to SEQ ID NO: 7563
  Cyclic GFR-binding peptide
  MOD_RES (4)..(5): Xaa is C or S

SEQ ID NO: 17882 - protein, 40 aa, Artificial Sequence
  Cyclic GFR-binding peptide
  MOD_RES (6)..(7)..(38)..(40): Xaa is C or S
ASASPXXVSQDLEPLPIVYYIGKTPKIEQLSNMIVKSXKX

SEQ ID NO: 17883 - protein, 25 aa, Artificial Sequence
  Cyclic GFR-binding peptide
RLNAISILYFDSANNVVLKKYRDMV

SEQ ID NO: 17884 - protein, 30 aa, Artificial Sequence
  Cyclic GFR-binding peptide
  MOD_RES (1)..(1): Xaa is C or S
XVSQDLSPISILFIIGKTPKIYKQYEMIVK

SEQ ID NO: 17885 - protein, 35 aa, Artificial Sequence
  Cyclic GFR-binding peptide
  MOD_RES (3)..(4): Xaa is C or S
KAXXVPTELEPLTMLYYDEYDKVVEQLSNEMVVEG

SEQ ID NO: 17886 - protein, 34 aa, Artificial Sequence; identical to SEQ ID NO: 7564
  Cyclic GFR-binding peptide
  MOD_RES (4)..(5): Xaa is C or S

SEQ ID NO: 17887 - protein, 36 aa, Artificial Sequence; identical to SEQ ID NO: 7565
  Cyclic GFR-binding peptide
  MOD_RES (1)..(33)..(35): Xaa is C or S

SEQ ID NO: 17888 - protein, 35 aa, Artificial Sequence
  Cyclic GFR-binding peptide
  MOD_RES (1)..(32)..(34): Xaa is C or S
XVSQDLSPISILFIIGKTPKIYKQYEMIVKSXKXS

SEQ ID NO: 17889 - protein, 22 aa, Artificial Sequence
  Cyclic GFR-binding peptide
LEPLTILYYVGRKPKVEQLSNM

SEQ ID NO: 17890 - protein, 33 aa, Artificial Sequence
  Cyclic GFR-binding peptide
  MOD_RES (31)..(33): Xaa is C or S
VPQALSPISILFIVGRKPKVYKQYEMIVRSXKX

SEQ ID NO: 17891 - protein, 35 aa, Artificial Sequence
  Cyclic GFR-binding peptide
  MOD_RES (4)..(5): Xaa is C or S
PPTXXVPTRLSAISILYLDSANNVVLKNYQDMVVE

SEQ ID NO: 17892 - protein, 32 aa, Artificial Sequence
  Cyclic GFR-binding peptide
  MOD_RES (3)..(3): Xaa is C or S
PTXAPTKLSPISVLFIDDSSNVIYKQYENMVV

SEQ ID NO: 17893 - protein, 32 aa, Artificial Sequence
  Cyclic GFR-binding peptide
  MOD_RES (31)..(31): Xaa is C or S
PTELSPISMLFIDENEKVVYKQYEDMVVEGXG

SEQ ID NO: 17894 - protein, 42 aa, Artificial Sequence; identical to SEQ ID NO: 7575
  Cyclic GFR-binding peptide
  MOD_RES (6)..(7)..(39)..(41): Xaa is C or S

SEQ ID NO: 17895 - protein, 21 aa, Artificial Sequence
  Cyclic GFR-binding peptide
SPISILFIIGKTPKIYKQYEM

SEQ ID NO: 17896 - protein, 28 aa, Artificial Sequence
  Cyclic GFR-binding peptide
  MOD_RES (1)..(1): Xaa is C or S
XVPQDLNAISILYFVGRTPKVLKKYRMV

SEQ ID NO: 17897 - protein, 23 aa, Artificial Sequence
  Cyclic GFR-binding peptide
SPISMLFIDEYDKVVYKQYEEMV

SEQ ID NO: 17898 - protein, 32 aa, Artificial Sequence; identical to SEQ ID NO: 7580
  Cyclic GFR-binding peptide
  MOD_RES (2)..(3): Xaa is C or S

SEQ ID NO: 17899 - protein, 42 aa, Artificial Sequence; identical to SEQ ID NO: 7581
  Cyclic GFR-binding peptide
  MOD_RES (6)..(7)..(39)..(41): Xaa is C or S

SEQ ID NO: 17900 - protein, 35 aa, Artificial Sequence
  Cyclic GFR-binding peptide
  MOD_RES (32)..(34): Xaa is C or S
APTQLEPLPVVYYDDSSNVIEQLSNNMVVRAXGXH

SEQ ID NO: 17901 - protein, 24 aa, Artificial Sequence
  Cyclic GFR-binding peptide
PQALSPISILFIVGRKPKVYKQYE

SEQ ID NO: 17902 - protein, 32 aa, Artificial Sequence
  Cyclic GFR-binding peptide
  MOD_RES (4)..(5): Xaa is C or S
ASPXXVPQDLSPISILFIVGRTPKVYKQYEMV

SEQ ID NO: 17903 - protein, 29 aa, Artificial Sequence
  Cyclic GFR-binding peptide
  MOD_RES (27)..(29): Xaa is C or S
SPISVLFIDDSSNVIYKQYENMVVRSXGX

SEQ ID NO: 17904 - protein, 24 aa, Artificial Sequence
  Cyclic GFR-binding peptide
SQDLSPISILFIIGKTPKIYKQYE

SEQ ID NO: 17905 - protein, 28 aa, Artificial Sequence
  Cyclic GFR-binding peptide
APTKLEPLTVLYYDDSSNVIEQLSNNMV

SEQ ID NO: 17906 - protein, 33 aa, Artificial Sequence
  Cyclic GFR-binding peptide
  MOD_RES (5)..(6): Xaa is C or S
VPKPXXAPTKLSPISVLFIDDSSNVIYKQYENM

SEQ ID NO: 17907 - protein, 29 aa, Artificial Sequence
  Cyclic GFR-binding peptide
  MOD_RES (28)..(28): Xaa is C or S
DLSPISILFIIGKTPKIYKQYEMIVKSXK

SEQ ID NO: 17908 - protein, 33 aa, Artificial Sequence; identical to SEQ ID NO: 7592
  Cyclic GFR-binding peptide
  MOD_RES (1)..(32): Xaa is C or S

SEQ ID NO: 17909 - protein, 31 aa, Artificial Sequence; identical to SEQ ID NO: 7593
  Cyclic GFR-binding peptide
  MOD_RES (30)..(30): Xaa is C or S

SEQ ID NO: 17910 - protein, 36 aa, Artificial Sequence
  Cyclic GFR-binding peptide
  MOD_RES (4)..(5)..(36): Xaa is C or S
ASPXXVSQDLSPISILFIIGKTPKIYKQYEMIVKSX

SEQ ID NO: 17911 - protein, 23 aa, Artificial Sequence
  Cyclic GFR-binding peptide
TELEPLTMLYYDEYDKVVEQLSN

SEQ ID NO: 17912 - protein, 29 aa, Artificial Sequence
  Cyclic GFR-binding peptide
  MOD_RES (1)..(1): Xaa is C or S
XVPTRLEPLTILYYDSANNVVEQLSNDMV

SEQ ID NO: 17913 - protein, 33 aa, Artificial Sequence
  Cyclic GFR-binding peptide
  MOD_RES (30)..(32): Xaa is C or S
TQLEPLPVVYYDDSSNVIEQLSNNMVVRAXGXH

SEQ ID NO: 17914 - protein, 29 aa, Artificial Sequence
  Cyclic GFR-binding peptide
  MOD_RES (3)..(4): Xaa is C or S
KPXXAPTQLSAISVLYLDDSSNVILKNYQ

SEQ ID NO: 17915 - protein, 36 aa, Artificial Sequence; identical to SEQ ID NO: 7603
  Cyclic GFR-binding peptide
  MOD_RES (1)..(33)..(35): Xaa is C or S

SEQ ID NO: 17916 - protein, 27 aa, Artificial Sequence
  Cyclic GFR-binding peptide
LNAISILYFDSANNVVLKKYRDMVVES

SEQ ID NO: 17917 - protein, 26 aa, Artificial Sequence
  Cyclic GFR-binding peptide
  MOD_RES (1)..(1): Xaa is C or S
XVPQALNAISILYFVGRKPKVLKKYR

SEQ ID NO: 17918 - protein, 27 aa, Artificial Sequence
  Cyclic GFR-binding peptide
  MOD_RES (1)..(1): Xaa is C or S
XVPTRLSAISILYLDSANNVVLKNYQD

SEQ ID NO: 17919 - protein, 30 aa, Artificial Sequence
  Cyclic GFR-binding peptide
  MOD_RES (3)..(4): Xaa is C or S
KAXXVPTELEPLPMVYYDEYDKVVEQLSNE

SEQ ID NO: 17920 - protein, 26 aa, Artificial Sequence
  Cyclic GFR-binding peptide
DLNAISILYFIGKTPKILKKYRMIVK

SEQ ID NO: 17921 - protein, 38 aa, Artificial Sequence
  Cyclic GFR-binding peptide
  MOD_RES (4)..(5)..(37): Xaa is C or S
PKPXXAPTKLSPISVLFIDDSSNVIYKQYENMVVRSXG

SEQ ID NO: 17922 - protein, 34 aa, Artificial Sequence
  Cyclic GFR-binding peptide
  MOD_RES (4)..(5): Xaa is C or S
PKAXXVPTELEPLTMLYYDEYDKVVEQLSNEMVV

SEQ ID NO: 17923 - protein, 23 aa, Artificial Sequence
  Cyclic GFR-binding peptide
SAISILYLVGRTPKVLKNYQMVV

SEQ ID NO: 17924 - protein, 39 aa, Artificial Sequence
  Cyclic GFR-binding peptide
  MOD_RES (7)..(39): Xaa is C or S
HVTKPTXAPTKLSPISVLFIDDSSNVIYKQYENMVVRSX

SEQ ID NO: 17925 - protein, 26 aa, Artificial Sequence
  Cyclic GFR-binding peptide
  MOD_RES (1)..(1): Xaa is C or S
XAPTKLEPLPVVYYDDSSNVIEQLSN

SEQ ID NO: 17926 - protein, 31 aa, Artificial Sequence; identical to SEQ ID NO: 7616
  Cyclic GFR-binding peptide
  MOD_RES (2)..(3): Xaa is C or S

SEQ ID NO: 17927 - protein, 36 aa, Artificial Sequence
  Cyclic GFR-binding peptide
  MOD_RES (1)..(33)..(35): Xaa is C or S
XVPTELEPLTMLYYDEYDKVVEQLSNEMVVEGXGXR

SEQ ID NO: 17928 - protein, 42 aa, Artificial Sequence
  Cyclic GFR-binding peptide
  MOD_RES (6)..(7)..(39)..(41): Xaa is C or S
KIPKAXXVPTELSPISMLFIDENEKVVYKQYEDMVVEGXGXR

SEQ ID NO: 17929 - protein, 39 aa, Artificial Sequence
  Cyclic GFR-binding peptide
  MOD_RES (4)..(5)..(36)..(38): Xaa is C or S
AAPXXVPQALSPISILFIVGRKPKVYKQYEMIVRSXKXS

SEQ ID NO: 17930 - protein, 31 aa, Artificial Sequence
  Cyclic GFR-binding peptide
  MOD_RES (31)..(31): Xaa is C or S
PTQLEPLTVLYYDDSSNVIEQLSNNMVVRAX

SEQ ID NO: 17931 - protein, 30 aa, Artificial Sequence
  Cyclic GFR-binding peptide
  MOD_RES (30)..(30): Xaa is C or S
TELSPISMLFIDENEKVVYKQYEDMVVEGX

SEQ ID NO: 17932 - protein, 22 aa, Artificial Sequence
  Cyclic GFR-binding peptide
KLEPLPVVYYDDSSNVIEQLSN

SEQ ID NO: 17933 - protein, 26 aa, Artificial Sequence
  Cyclic GFR-binding peptide
ELNAISMLYFDENEKVVLKKYRDMVV

SEQ ID NO: 17934 - protein, 30 aa, Artificial Sequence
  Cyclic GFR-binding peptide
  MOD_RES (27)..(29): Xaa is C or S
SAISILYLDSANNVVLKNYQDMVVESXGXR

SEQ ID NO: 17935 - protein, 29 aa, Artificial Sequence
  Cyclic GFR-binding peptide
  MOD_RES (1)..(2): Xaa is C or S
XXAPTQLSAISVLYLDDSSNVILKNYQNM

SEQ ID NO: 17936 - protein, 30 aa, Artificial Sequence; identical to SEQ ID NO: 7623
  Cyclic GFR-binding peptide
  MOD_RES (30)..(30): Xaa is C or S

SEQ ID NO: 17937 - protein, 32 aa, Artificial Sequence
  Cyclic GFR-binding peptide
  MOD_RES (5)..(6): Xaa is C or S
IPKAXXVPTELEPLPMVYYDENEKVVEQLSND

SEQ ID NO: 17938 - protein, 31 aa, Artificial Sequence; identical to SEQ ID NO: 7625
  Cyclic GFR-binding peptide
  MOD_RES (1)..(2): Xaa is C or S

SEQ ID NO: 17939 - protein, 38 aa, Artificial Sequence
  Cyclic GFR-binding peptide
  MOD_RES (5)..(6)..(38): Xaa is C or S
TPPTXXVPTRLEPLPIVYYDSANNVVEQLSNDMVVESX

SEQ ID NO: 17940 - protein, 29 aa, Artificial Sequence
  Cyclic GFR-binding peptide
SQDLNAISILYFIGKTPKILKKYRMIVKS

SEQ ID NO: 17941 - protein, 36 aa, Artificial Sequence; identical to SEQ ID NO: 7629
  Cyclic GFR-binding peptide
  MOD_RES (2)..(3)..(35): Xaa is C or S

SEQ ID NO: 17942 - protein, 28 aa, Artificial Sequence
  Cyclic GFR-binding peptide
  MOD_RES (1)..(1): Xaa is C or S
XAPTKLSAISVLYLDDSSNVILKNYQNM

SEQ ID NO: 17943 - protein, 37 aa, Artificial Sequence; identical to SEQ ID NO: 7632
  Cyclic GFR-binding peptide
  MOD_RES (7)..(7): Xaa is C or S

SEQ ID NO: 17944 - protein, 33 aa, Artificial Sequence
  Cyclic GFR-binding peptide
  MOD_RES (1)..(2): Xaa is C or S
XXAPTQLEPLTVLYYDDSSNVIEQLSNNMVVRA

SEQ ID NO: 17945 - protein, 28 aa, Artificial Sequence
  Cyclic GFR-binding peptide
  MOD_RES (28)..(28): Xaa is C or S
DLEPLPIVYYVGRTPKVEQLSNMVVKSX

SEQ ID NO: 17946 - protein, 37 aa, Artificial Sequence
  Cyclic GFR-binding peptide
  MOD_RES (2)..(3)..(35)..(37): Xaa is C or S
AXXVPTELEPLPMVYYDEYDKVVEQLSNEMVVEGXGX

SEQ ID NO: 17947 - protein, 32 aa, Artificial Sequence
  Cyclic GFR-binding peptide
  MOD_RES (1)..(1): Xaa is C or S
XVPTRLSAISILYLDSANNVVLKNYQDMVVES

SEQ ID NO: 17948 - protein, 31 aa, Artificial Sequence
  Cyclic GFR-binding peptide
  MOD_RES (4)..(5): Xaa is C or S
ASPXXVSQDLEPLPIVYYIGKTPKIEQLSNM

SEQ ID NO: 17949 - protein, 31 aa, Artificial Sequence; identical to SEQ ID NO: 7640
  Cyclic GFR-binding peptide
  MOD_RES (4)..(5): Xaa is C or S

SEQ ID NO: 17950 - protein, 37 aa, Artificial Sequence
  Cyclic GFR-binding peptide
  MOD_RES (5)..(6): Xaa is C or S
VPKPXXAPTQLEPLTVLYYDDSSNVIEQLSNNMVVRA

SEQ ID NO: 17951 - protein, 35 aa, Artificial Sequence
  Cyclic GFR-binding peptide
  MOD_RES (1)..(2)..(34): Xaa is C or S
XXVPTELEPLTMLYYDEYDKVVEQLSNEMVVEGXG

SEQ ID NO: 17952 - protein, 37 aa, Artificial Sequence
  Cyclic GFR-binding peptide
  MOD_RES (4)..(5)..(37): Xaa is C or S
PKPXXAPTQLEPLPVVYYDDSSNVIEQLSNNMVVRAX

SEQ ID NO: 17953 - protein, 39 aa, Artificial Sequence
  Cyclic GFR-binding peptide
  MOD_RES (6)..(7)..(39): Xaa is C or S
STPPTXXVPTRLEPLTILYYDSANNVVEQLSNDMVVESX

SEQ ID NO: 17954 - protein, 36 aa, Artificial Sequence
  Cyclic GFR-binding peptide
  MOD_RES (2)..(3)..(34)..(36): Xaa is C or S
PXXVPQALSPISILFIVGRKPKVYKQYEMIVRSXKX

SEQ ID NO: 17955 - protein, 29 aa, Artificial Sequence
  Cyclic GFR-binding peptide
  MOD_RES (2)..(3): Xaa is C or S
AXXVPTELEPLPMVYYDEYDKVVEQLSNE

SEQ ID NO: 17956 - protein, 32 aa, Artificial Sequence
  Cyclic GFR-binding peptide
  MOD_RES (6)..(7): Xaa is C or S
ASAAPXXVPQALEPLTILYYVGRKPKVEQLSN

SEQ ID NO: 17957 - protein, 21 aa, Artificial Sequence
  Cyclic GFR-binding peptide
SAISILYLIGKTPKILKNYQM

SEQ ID NO: 17958 - protein, 31 aa, Artificial Sequence
  Cyclic GFR-binding peptide
  MOD_RES (29)..(31): Xaa is C or S
ELSPISMLFIDENEKVVYKQYEDMVVEGXGX

SEQ ID NO: 17959 - protein, 30 aa, Artificial Sequence
  Cyclic GFR-binding peptide
  MOD_RES (29)..(29): Xaa is C or S
QLEPLTVLYYDDSSNVIEQLSNNMVVRAXG

SEQ ID NO: 17960 - protein, 31 aa, Artificial Sequence
  Cyclic GFR-binding peptide
  MOD_RES (2)..(3): Xaa is C or S
AXXVPTELSPISMLFIDEYDKVVYKQYEEMV

SEQ ID NO: 17961 - protein, 31 aa, Artificial Sequence
  Cyclic GFR-binding peptide
  MOD_RES (29)..(31): Xaa is C or S
KLEPLPVVYYDDSSNVIEQLSNNMVVRSXGX

SEQ ID NO: 17962 - protein, 30 aa, Artificial Sequence
  Cyclic GFR-binding peptide
VPTELSPISMLFIDEYDKVVYKQYEEMVVE

SEQ ID NO: 17963 - protein, 38 aa, Artificial Sequence
  Cyclic GFR-binding peptide
  MOD_RES (4)..(5)..(37): Xaa is C or S
PKAXXVPTELEPLPMVYYDEYDKVVEQLSNEMVVEGXG

SEQ ID NO: 17964 - protein, 34 aa, Artificial Sequence
  Cyclic GFR-binding peptide
  MOD_RES (6)..(7): Xaa is C or S
STPPTXXVPTRLSAISILYLDSANNVVLKNYQDM

SEQ ID NO: 17965 - protein, 22 aa, Artificial Sequence
  Cyclic GFR-binding peptide
LSAISILYLVGRKPKVLKNYQM

SEQ ID NO: 17966 - protein, 33 aa, Artificial Sequence
  Cyclic GFR-binding peptide
  MOD_RES (3)..(4): Xaa is C or S
PTXXVPTRLNAISILYFDSANNVVLKKYRDMVV

SEQ ID NO: 17967 - protein, 29 aa, Artificial Sequence
  Cyclic GFR-binding peptide
  MOD_RES (27)..(29): Xaa is C or S
LSAISILYLVGRKPKVLKNYQMIVRSXKX

SEQ ID NO: 17968 - protein, 28 aa, Artificial Sequence
  Cyclic GFR-binding peptide
  MOD_RES (1)..(2): Xaa is C or S
XXVPQDLEPLPIVYYVGRTPKVEQLSNM

SEQ ID NO: 17969 - protein, 29 aa, Artificial Sequence
  Cyclic GFR-binding peptide
  MOD_RES (29)..(29): Xaa is C or S
RLNAISILYFDSANNVVLKKYRDMVVESX

SEQ ID NO: 17970 - protein, 35 aa, Artificial Sequence
  Cyclic GFR-binding peptide
  MOD_RES (7)..(7): Xaa is C or S
HVTKPTXAPTKLEPLTVLYYDDSSNVIEQLSNNMV

SEQ ID NO: 17971 - protein, 20 aa, Artificial Sequence
  Cyclic GFR-binding peptide
SPISMLFIDENEKVVYKQYE

SEQ ID NO: 17972 - protein, 32 aa, Artificial Sequence
  Cyclic GFR-binding peptide
  MOD_RES (5)..(5): Xaa is C or S
TKPTXAPTKLSPISVLFIDDSSNVIYKQYENM

SEQ ID NO: 17973 - protein, 23 aa, Artificial Sequence
  Cyclic GFR-binding peptide
DLNAISILYFIGKTPKILKKYRM

SEQ ID NO: 17974 - protein, 39 aa, Artificial Sequence; identical to SEQ ID NO: 7668
  Cyclic GFR-binding peptide
  MOD_RES (6)..(7)..(39): Xaa is C or S

SEQ ID NO: 17975 - protein, 37 aa, Artificial Sequence
  Cyclic GFR-binding peptide
  MOD_RES (3)..(4)..(36): Xaa is C or S
PTXXVPTRLSAISILYLDSANNVVLKNYQDMVVESXG

SEQ ID NO: 17976 - protein, 31 aa, Artificial Sequence
  Cyclic GFR-binding peptide
  MOD_RES (29)..(31): Xaa is C or S
ELEPLTMLYYDENEKVVEQLSNDMVVEGXGX

SEQ ID NO: 17977 - protein, 33 aa, Artificial Sequence
  Cyclic GFR-binding peptide
  MOD_RES (3)..(3): Xaa is C or S
PTXAPTKLSPISVLFIDDSSNVIYKQYENMVVR

SEQ ID NO: 17978 - protein, 25 aa, Artificial Sequence
  Cyclic GFR-binding peptide
VPQDLNAISILYFVGRTPKVLKKYR

SEQ ID NO: 17979 - protein, 30 aa, Artificial Sequence
  Cyclic GFR-binding peptide
  MOD_RES (2)..(3): Xaa is C or S
TXXVPTRLSAISILYLDSANNVVLKNYQDM

SEQ ID NO: 17980 - protein, 33 aa, Artificial Sequence
  Cyclic GFR-binding peptide
  MOD_RES (4)..(5): Xaa is C or S
ASPXXVPQDLSPISILFIVGRTPKVYKQYEMVV

SEQ ID NO: 17981 - protein, 25 aa, Artificial Sequence
  Cyclic GFR-binding peptide
LSPISMLFIDENEKVVYKQYEDMVV

SEQ ID NO: 17982 - protein, 41 aa, Artificial Sequence
  Cyclic GFR-binding peptide
  MOD_RES (6)..(7)..(39)..(41): Xaa is C or S
SIPKAXXVPTELSPISMLFIDEYDKVVYKQYEEMVVEGXGX

SEQ ID NO: 17983 - protein, 24 aa, Artificial Sequence
  Cyclic GFR-binding peptide
PTQLEPLTVLYYDDSSNVIEQLSN

SEQ ID NO: 17984 - protein, 29 aa, Artificial Sequence
  Cyclic GFR-binding peptide
  MOD_RES (3)..(4): Xaa is C or S
SPXXVSQDLSAISILYLIGKTPKILKNYQ

SEQ ID NO: 17985 - protein, 23 aa, Artificial Sequence
  Cyclic GFR-binding peptide
NAISILYFIGKTPKILKKYRMIV

SEQ ID NO: 17986 - protein, 37 aa, Artificial Sequence; identical to SEQ ID NO: 7680
  Cyclic GFR-binding peptide
  MOD_RES (5)..(6)..(37): Xaa is C or S

SEQ ID NO: 17987 - protein, 37 aa, Artificial Sequence; identical to SEQ ID NO: 7683
  Cyclic GFR-binding peptide
  MOD_RES (5)..(6)..(37): Xaa is C or S

SEQ ID NO: 17988 - protein, 29 aa, Artificial Sequence
  Cyclic GFR-binding peptide
  MOD_RES (1)..(2): Xaa is C or S
XXAPTQLEPLPVVYYDDSSNVIEQLSNNM

SEQ ID NO: 17989 - protein, 21 aa, Artificial Sequence
  Cyclic GFR-binding peptide
LSAISILYLDSANNVVLKNYQ

SEQ ID NO: 17990 - protein, 33 aa, Artificial Sequence
  Cyclic GFR-binding peptide
  MOD_RES (6)..(7): Xaa is C or S
TVPKPXXAPTQLEPLTVLYYDDSSNVIEQLSNN

SEQ ID NO: 17991 - protein, 27 aa, Artificial Sequence
  Cyclic GFR-binding peptide
APTKLEPLTVLYYDDSSNVIEQLSNNM

SEQ ID NO: 17992 - protein, 30 aa, Artificial Sequence; identical to SEQ ID NO: 7693
  Cyclic GFR-binding peptide
  MOD_RES (27)..(29): Xaa is C or S

SEQ ID NO: 17993 - protein, 22 aa, Artificial Sequence
  Cyclic GFR-binding peptide
SPISMLFIDENEKVVYKQYEDM

SEQ ID NO: 17994 - protein, 33 aa, Artificial Sequence
  Cyclic GFR-binding peptide
  MOD_RES (7)..(7): Xaa is C or S
HVTKPTXAPTKLEPLTVLYYDDSSNVIEQLSNN

SEQ ID NO: 17995 - protein, 24 aa, Artificial Sequence
  Cyclic GFR-binding peptide
NAISILYFVGRKPKVLKKYRMIVR

SEQ ID NO: 17996 - protein, 40 aa, Artificial Sequence
  Cyclic GFR-binding peptide
  MOD_RES (6)..(7)..(39): Xaa is C or S
TVPKPXXAPTQLSPISVLFIDDSSNVIYKQYENMVVRAXG

SEQ ID NO: 17997 - protein, 32 aa, Artificial Sequence
  Cyclic GFR-binding peptide
  MOD_RES (31)..(31): Xaa is C or S
VSQDLEPLPIVYYIGKTPKIEQLSNMIVKSXK

SEQ ID NO: 17998 - protein, 34 aa, Artificial Sequence
  Cyclic GFR-binding peptide
  MOD_RES (6)..(7): Xaa is C or S
TVPKPXXAPTQLEPLTVLYYDDSSNVIEQLSNNM

SEQ ID NO: 17999 - protein, 38 aa, Artificial Sequence
  Cyclic GFR-binding peptide
  MOD_RES (6)..(7): Xaa is C or S
TVPKPXXAPTQLEPLPVVYYDDSSNVIEQLSNNMVVRA

SEQ ID NO: 18000 - protein, 25 aa, Artificial Sequence
  Cyclic GFR-binding peptide
TELEPLTMLYYDEYDKVVEQLSNEM

SEQ ID NO: 18001 - protein, 24 aa, Artificial Sequence
  Cyclic GFR-binding peptide
LSAISILYLIGKTPKILKNYQMIV

SEQ ID NO: 18002 - protein, 28 aa, Artificial Sequence
  Cyclic GFR-binding peptide
  MOD_RES (1)..(1): Xaa is C or S
XAPTKLEPLPVVYYDDSSNVIEQLSNNM

SEQ ID NO: 18003 - protein, 32 aa, Artificial Sequence; identical to SEQ ID NO: 7711
  Cyclic GFR-binding peptide
  MOD_RES (6)..(7): Xaa is C or S

SEQ ID NO: 18004 - protein, 34 aa, Artificial Sequence
  Cyclic GFR-binding peptide
  MOD_RES (1)..(32)..(34): Xaa is C or S
XVPQDLSPISILFIVGRTPKVYKQYEMVVKSXKX

SEQ ID NO: 18005 - protein, 35 aa, Artificial Sequence
  Cyclic GFR-binding peptide
  MOD_RES (4)..(4): Xaa is C or S
KPTXAPTKLSPISVLFIDDSSNVIYKQYENMVVRS

SEQ ID NO: 18006 - protein, 29 aa, Artificial Sequence
  Cyclic GFR-binding peptide
  MOD_RES (26)..(28): Xaa is C or S
NAISILYFVGRTPKVLKKYRMVVKSXKXS

SEQ ID NO: 18007 - protein, 35 aa, Artificial Sequence
  Cyclic GFR-binding peptide
  MOD_RES (4)..(5): Xaa is C or S
ASPXXVPQDLSPISILFIVGRTPKVYKQYEMVVKS

SEQ ID NO: 18008 - protein, 37 aa, Artificial Sequence; identical to SEQ ID NO: 7715
  Cyclic GFR-binding peptide
  MOD_RES (1)..(2)..(34)..(36): Xaa is C or S

SEQ ID NO: 18009 - protein, 35 aa, Artificial Sequence; identical to SEQ ID NO: 7717
  Cyclic GFR-binding peptide
  MOD_RES (6)..(7): Xaa is C or S

SEQ ID NO: 18010 - protein, 24 aa, Artificial Sequence
  Cyclic GFR-binding peptide
TRLEPLTILYYDSANNVVEQLSND

SEQ ID NO: 18011 - protein, 21 aa, Artificial Sequence
  Cyclic GFR-binding peptide
SPISILFIVGRTPKVYKQYEM

SEQ ID NO: 18012 - protein, 31 aa, Artificial Sequence
  Cyclic GFR-binding peptide
VPTELEPLPMVYYDENEKVVEQLSNDMVVEG

SEQ ID NO: 18013 - protein, 37 aa, Artificial Sequence; identical to SEQ ID NO: 7720
  Cyclic GFR-binding peptide
  MOD_RES (3)..(4)..(35)..(37): Xaa is C or S

SEQ ID NO: 18014 - protein, 33 aa, Artificial Sequence
  Cyclic GFR-binding peptide
  MOD_RES (3)..(4): Xaa is C or S
KAXXVPTELSPISMLFIDENEKVVYKQYEDMVV

SEQ ID NO: 18015 - protein, 26 aa, Artificial Sequence
  Cyclic GFR-binding peptide
QLSPISVLFIDDSSNVIYKQYENMVV

SEQ ID NO: 18016 - protein, 40 aa, Artificial Sequence
  Cyclic GFR-binding peptide
  MOD_RES (6)..(7)..(39): Xaa is C or S
KIPKAXXVPTELEPLTMLYYDENEKVVEQLSNDMVVEGXG

SEQ ID NO: 18017 - protein, 28 aa, Artificial Sequence
  Cyclic GFR-binding peptide
  MOD_RES (27)..(27): Xaa is C or S
EPLPMVYYDENEKVVEQLSNDMVVEGXG

SEQ ID NO: 18018 - protein, 36 aa, Artificial Sequence; identical to SEQ ID NO: 7722
  Cyclic GFR-binding peptide
  MOD_RES (3)..(4)..(35): Xaa is C or S

SEQ ID NO: 18019 - protein, 34 aa, Artificial Sequence; identical to SEQ ID NO: 7723
  Cyclic GFR-binding peptide
  MOD_RES (5)..(6): Xaa is C or S

SEQ ID NO: 18020 - protein, 29 aa, Artificial Sequence
  Cyclic GFR-binding peptide
  MOD_RES (3)..(4): Xaa is C or S
PTXXVPTRLEPLPIVYYDSANNVVEQLSN

SEQ ID NO: 18021 - protein, 32 aa, Artificial Sequence
  Cyclic GFR-binding peptide
  MOD_RES (30)..(32): Xaa is C or S
TRLEPLTILYYDSANNVVEQLSNDMVVESXGX

SEQ ID NO: 18022 - protein, 32 aa, Artificial Sequence
  Cyclic GFR-binding peptide
  MOD_RES (5)..(6): Xaa is C or S
TPPTXXVPTRLSAISILYLDSANNVVLKNYQD

SEQ ID NO: 18023 - protein, 31 aa, Artificial Sequence
  Cyclic GFR-binding peptide
  MOD_RES (28)..(30): Xaa is C or S
LNAISILYFDSANNVVLKKYRDMVVESXGXR

SEQ ID NO: 18024 - protein, 26 aa, Artificial Sequence
  Cyclic GFR-binding peptide
LSAISILYLDSANNVVLKNYQDMVVE

SEQ ID NO: 18025 - protein, 39 aa, Artificial Sequence
  Cyclic GFR-binding peptide
  MOD_RES (5)..(6)..(38): Xaa is C or S
IPKAXXVPTELEPLPMVYYDENEKVVEQLSNDMVVEGXG

SEQ ID NO: 18026 - protein, 32 aa, Artificial Sequence
  Cyclic GFR-binding peptide
  MOD_RES (5)..(6): Xaa is C or S
TPPTXXVPTRLEPLPIVYYDSANNVVEQLSND

SEQ ID NO: 18027 - protein, 26 aa, Artificial Sequence
  Cyclic GFR-binding peptide
APTQLSAISVLYLDDSSNVILKNYQN

SEQ ID NO: 18028 - protein, 29 aa, Artificial Sequence
  Cyclic GFR-binding peptide
VPTRLSAISILYLDSANNVVLKNYQDMVV

SEQ ID NO: 18029 - protein, 36 aa, Artificial Sequence; identical to SEQ ID NO: 7729
  Cyclic GFR-binding peptide
  MOD_RES (2)..(3)..(34)..(36): Xaa is C or S

SEQ ID NO: 18030 - protein, 26 aa, Artificial Sequence
  Cyclic GFR-binding peptide
APTQLEPLPVVYYDDSSNVIEQLSNN

SEQ ID NO: 18031 - protein, 29 aa, Artificial Sequence
  Cyclic GFR-binding peptide
  MOD_RES (1)..(1): Xaa is C or S
XVPTELSPISMLFIDEYDKVVYKQYEEMV

SEQ ID NO: 18032 - protein, 38 aa, Artificial Sequence
  Cyclic GFR-binding peptide
  MOD_RES (4)..(5)..(37): Xaa is C or S
PKPXXAPTQLEPLTVLYYDDSSNVIEQLSNNMVVRAXG

SEQ ID NO: 18033 - protein, 30 aa, Artificial Sequence; identical to SEQ ID NO: 7732
  Cyclic GFR-binding peptide
  MOD_RES (1)..(1): Xaa is C or S

SEQ ID NO: 18034 - protein, 32 aa, Artificial Sequence; identical to SEQ ID NO: 7734
  Cyclic GFR-binding peptide
  MOD_RES (3)..(4): Xaa is C or S

SEQ ID NO: 18035 - protein, 40 aa, Artificial Sequence
  Cyclic GFR-binding peptide
  MOD_RES (5)..(6)..(38)..(40): Xaa is C or S
TPPTXXVPTRLNAISILYFDSANNVVLKKYRDMVVESXGX

SEQ ID NO: 18036 - protein, 30 aa, Artificial Sequence; identical to SEQ ID NO: 7737
  Cyclic GFR-binding peptide
  MOD_RES (3)..(4): Xaa is C or S

SEQ ID NO: 18037 - protein, 36 aa, Artificial Sequence; identical to SEQ ID NO: 7738
  Cyclic GFR-binding peptide
  MOD_RES (1)..(33)..(35): Xaa is C or S

SEQ ID NO: 18038 - protein, 28 aa, Artificial Sequence
  Cyclic GFR-binding peptide
PTRLEPLTILYYDSANNVVEQLSNDMVV

SEQ ID NO: 18039 - protein, 28 aa, Artificial Sequence
  Cyclic GFR-binding peptide
  MOD_RES (2)..(3): Xaa is C or S
PXXVPQDLEPLPIVYYVGRTPKVEQLSN

SEQ ID NO: 18040 - protein, 28 aa, Artificial Sequence
  Cyclic GFR-binding peptide
  MOD_RES (27)..(27): Xaa is C or S
LNAISILYFVGRTPKVLKKYRMVVKSXK

SEQ ID NO: 18041 - protein, 26 aa, Artificial Sequence
  Cyclic GFR-binding peptide
EPLTMLYYDEYDKVVEQLSNEMVVEG

SEQ ID NO: 18042 - protein, 23 aa, Artificial Sequence
  Cyclic GFR-binding peptide
TQLSAISVLYLDDSSNVILKNYQ

SEQ ID NO: 18043 - protein, 25 aa, Artificial Sequence
  Cyclic GFR-binding peptide
SAISILYLDSANNVVLKNYQDMVVE

SEQ ID NO: 18044 - protein, 31 aa, Artificial Sequence; identical to SEQ ID NO: 7750
  Cyclic GFR-binding peptide
  MOD_RES (5)..(6): Xaa is C or S

SEQ ID NO: 18045 - protein, 26 aa, Artificial Sequence
  Cyclic GFR-binding peptide
  MOD_RES (1)..(1): Xaa is C or S
XVPQDLSPISILFIVGRTPKVYKQYE

SEQ ID NO: 18046 - protein, 32 aa, Artificial Sequence
  Cyclic GFR-binding peptide
  MOD_RES (4)..(5): Xaa is C or S
AAPXXVPQALEPLTILYYVGRKPKVEQLSNMI

SEQ ID NO: 18047 - protein, 34 aa, Artificial Sequence
  Cyclic GFR-binding peptide
  MOD_RES (31)..(33): Xaa is C or S
PTQLSPISVLFIDDSSNVIYKQYENMVVRAXGXH

SEQ ID NO: 18048 - protein, 29 aa, Artificial Sequence
  Cyclic GFR-binding peptide
PTQLSAISVLYLDDSSNVILKNYQNMVVR

SEQ ID NO: 18049 - protein, 24 aa, Artificial Sequence
  Cyclic GFR-binding peptide
LEPLPVVYYDDSSNVIEQLSNNMV

SEQ ID NO: 18050 - protein, 30 aa, Artificial Sequence; identical to SEQ ID NO: 7754
  Cyclic GFR-binding peptide
  MOD_RES (1)..(1): Xaa is C or S

SEQ ID NO: 18051 - protein, 25 aa, Artificial Sequence
  Cyclic GFR-binding peptide
NAISILYFVGRTPKVLKKYRMVVKS

SEQ ID NO: 18052 - protein, 26 aa, Artificial Sequence
  Cyclic GFR-binding peptide
  MOD_RES (1)..(1): Xaa is C or S
XVPQALEPLTILYYVGRKPKVEQLSN

SEQ ID NO: 18053 - protein, 29 aa, Artificial Sequence
  Cyclic GFR-binding peptide
  MOD_RES (1)..(1): Xaa is C or S
XVPQALSAISILYLVGRKPKVLKNYQMIV

SEQ ID NO: 18054 - protein, 35 aa, Artificial Sequence
  Cyclic GFR-binding peptide
  MOD_RES (1)..(32)..(34): Xaa is C or S
XVSQDLEPLPIVYYIGKTPKIEQLSNMIVKSXKXS

SEQ ID NO: 18055 - protein, 28 aa, Artificial Sequence
  Cyclic GFR-binding peptide
QDLNAISILYFIGKTPKILKKYRMIVKS

SEQ ID NO: 18056 - protein, 24 aa, Artificial Sequence
  Cyclic GFR-binding peptide
QDLEPLPIVYYIGKTPKIEQLSNM

SEQ ID NO: 18057 - protein, 30 aa, Artificial Sequence
  Cyclic GFR-binding peptide
  MOD_RES (1)..(1): Xaa is C or S
XVPQALSPISILFIVGRKPKVYKQYEMIVR

SEQ ID NO: 18058 - protein, 38 aa, Artificial Sequence
  Cyclic GFR-binding peptide
  MOD_RES (3)..(35)..(37): Xaa is C or S
PTXAPTKLSPISVLFIDDSSNVIYKQYENMVVRSXGXH

SEQ ID NO: 18059 - protein, 33 aa, Artificial Sequence
  Cyclic GFR-binding peptide
  MOD_RES (5)..(6): Xaa is C or S
TPPTXXVPTRLNAISILYFDSANNVVLKKYRDM

SEQ ID NO: 18060 - protein, 32 aa, Artificial Sequence
  Cyclic GFR-binding peptide
  MOD_RES (30)..(32): Xaa is C or S
TELEPLPMVYYDEYDKVVEQLSNEMVVEGXGX

SEQ ID NO: 18061 - protein, 25 aa, Artificial Sequence
  Cyclic GFR-binding peptide
LSPISILFIIGKTPKIYKQYEMIVK

SEQ ID NO: 18062 - protein, 27 aa, Artificial Sequence
  Cyclic GFR-binding peptide
  MOD_RES (27)..(27): Xaa is C or S
NAISMLYFDEYDKVVLKKYREMVVEGX

SEQ ID NO: 18063 - protein, 40 aa, Artificial Sequence
  Cyclic GFR-binding peptide
  MOD_RES (4)..(5)..(37)..(39): Xaa is C or S
PPTXXVPTRLEPLTILYYDSANNVVEQLSNDMVVESXGXR

SEQ ID NO: 18064 - protein, 36 aa, Artificial Sequence
  Cyclic GFR-binding peptide
  MOD_RES (4)..(36): Xaa is C or S
KPTXAPTKLSPISVLFIDDSSNVIYKQYENMVVRSX

SEQ ID NO: 18065 - protein, 30 aa, Artificial Sequence
  Cyclic GFR-binding peptide
  MOD_RES (27)..(29): Xaa is C or S
SPISVLFIDDSSNVIYKQYENMVVRAXGXH

SEQ ID NO: 18066 - protein, 29 aa, Artificial Sequence
  Cyclic GFR-binding peptide
VPQDLSAISILYLVGRTPKVLKNYQMVVK

SEQ ID NO: 18067 - protein, 34 aa, Artificial Sequence; identical to SEQ ID NO: 7765
  Cyclic GFR-binding peptide
  MOD_RES (5)..(6): Xaa is C or S

SEQ ID NO: 18068 - protein, 32 aa, Artificial Sequence
  Cyclic GFR-binding peptide
  MOD_RES (5)..(6): Xaa is C or S
VPKPXXAPTKLSPISVLFIDDSSNVIYKQYEN

SEQ ID NO: 18069 - protein, 26 aa, Artificial Sequence
  Cyclic GFR-binding peptide
LSPISILFIVGRKPKVYKQYEMIVRS

SEQ ID NO: 18070 - protein, 24 aa, Artificial Sequence
  Cyclic GFR-binding peptide
LNAISILYFDSANNVVLKKYRDMV

SEQ ID NO: 18071 - protein, 27 aa, Artificial Sequence
  Cyclic GFR-binding peptide
  MOD_RES (27)..(27): Xaa is C or S
SPISMLFIDENEKVVYKQYEDMVVEGX

SEQ ID NO: 18072 - protein, 37 aa, Artificial Sequence
  Cyclic GFR-binding peptide
  MOD_RES (4)..(5)..(37): Xaa is C or S
PKAXXVPTELEPLTMLYYDENEKVVEQLSNDMVVEGX

SEQ ID NO: 18073 - protein, 30 aa, Artificial Sequence
  Cyclic GFR-binding peptide
  MOD_RES (28)..(30): Xaa is C or S
LEPLPMVYYDENEKVVEQLSNDMVVEGXGX

SEQ ID NO: 18074 - protein, 33 aa, Artificial Sequence
  Cyclic GFR-binding peptide
  MOD_RES (1)..(2): Xaa is C or S
XXVPTELEPLTMLYYDEYDKVVEQLSNEMVVEG

SEQ ID NO: 18075 - protein, 28 aa, Artificial Sequence
  Cyclic GFR-binding peptide
  MOD_RES (28)..(28): Xaa is C or S
ALSPISILFIVGRKPKVYKQYEMIVRSX

SEQ ID NO: 18076 - protein, 25 aa, Artificial Sequence
  Cyclic GFR-binding peptide
PTRLEPLTILYYDSANNVVEQLSND

SEQ ID NO: 18077 - protein, 31 aa, Artificial Sequence
  Cyclic GFR-binding peptide
  MOD_RES (4)..(5): Xaa is C or S
PKAXXVPTELEPLPMVYYDENEKVVEQLSND

SEQ ID NO: 18078 - protein, 37 aa, Artificial Sequence
  Cyclic GFR-binding peptide
  MOD_RES (5)..(37): Xaa is C or S
TKPTXAPTKLEPLPVVYYDDSSNVIEQLSNNMVVRSX

SEQ ID NO: 18079 - protein, 33 aa, Artificial Sequence
  Cyclic GFR-binding peptide
  MOD_RES (30)..(32): Xaa is C or S
PQDLEPLPIVYYVGRTPKVEQLSNMVVKSXKXS

SEQ ID NO: 18080 - protein, 36 aa, Artificial Sequence
  Cyclic GFR-binding peptide
  MOD_RES (5)..(6): Xaa is C or S
SASPXXVSQDLSPISILFIIGKTPKIYKQYEMIVKS

SEQ ID NO: 18081 - protein, 36 aa, Artificial Sequence; identical to SEQ ID NO: 7780
  Cyclic GFR-binding peptide
  MOD_RES (3)..(4)..(35): Xaa is C or S

SEQ ID NO: 18082 - protein, 32 aa, Artificial Sequence
  Cyclic GFR-binding peptide
  MOD_RES (6)..(6): Xaa is C or S
VTKPTXAPTKLSPISVLFIDDSSNVIYKQYEN

SEQ ID NO: 18083 - protein, 30 aa, Artificial Sequence
  Cyclic GFR-binding peptide
  MOD_RES (29)..(29): Xaa is C or S
QDLSPISILFIIGKTPKIYKQYEMIVKSXK

SEQ ID NO: 18084 - protein, 35 aa, Artificial Sequence
  Cyclic GFR-binding peptide
  MOD_RES (4)..(5): Xaa is C or S
ASPXXVPQDLEPLPIVYYVGRTPKVEQLSNMVVKS

SEQ ID NO: 18085 - protein, 32 aa, Artificial Sequence
  Cyclic GFR-binding peptide
  MOD_RES (6)..(7): Xaa is C or S
TVPKPXXAPTQLEPLTVLYYDDSSNVIEQLSN

SEQ ID NO: 18086 - protein, 30 aa, Artificial Sequence
  Cyclic GFR-binding peptide
PTRLNAISILYFDSANNVVLKKYRDMVVES

SEQ ID NO: 18087 - protein, 34 aa, Artificial Sequence
  Cyclic GFR-binding peptide
  MOD_RES (6)..(7): Xaa is C or S
STPPTXXVPTRLEPLPIVYYDSANNVVEQLSNDM

SEQ ID NO: 18088 - protein, 27 aa, Artificial Sequence
  Cyclic GFR-binding peptide
LEPLTVLYYDDSSNVIEQLSNNMVVRS

SEQ ID NO: 18089 - protein, 26 aa, Artificial Sequence
  Cyclic GFR-binding peptide
QALSAISILYLVGRKPKVLKNYQMIV

SEQ ID NO: 18090 - protein, 27 aa, Artificial Sequence
  Cyclic GFR-binding peptide
VPQALEPLTILYYVGRKPKVEQLSNMI

SEQ ID NO: 18091 - protein, 31 aa, Artificial Sequence
  Cyclic GFR-binding peptide
  MOD_RES (2)..(3): Xaa is C or S
PXXVPQALSPISILFIVGRKPKVYKQYEMIV

SEQ ID NO: 18092 - protein, 33 aa, Artificial Sequence
  Cyclic GFR-binding peptide
  MOD_RES (5)..(6): Xaa is C or S
VPKPXXAPTQLSPISVLFIDDSSNVIYKQYENM

SEQ ID NO: 18093 - protein, 22 aa, Artificial Sequence
  Cyclic GFR-binding peptide
ELNAISMLYFDEYDKVVLKKYR

SEQ ID NO: 18094 - protein, 33 aa, Artificial Sequence
  Cyclic GFR-binding peptide
  MOD_RES (31)..(33): Xaa is C or S
PTRLSAISILYLDSANNVVLKNYQDMVVESXGX

SEQ ID NO: 18095 - protein, 28 aa, Artificial Sequence
  Cyclic GFR-binding peptide
PTKLEPLPVVYYDDSSNVIEQLSNNMVV

SEQ ID NO: 18096 - protein, 29 aa, Artificial Sequence
  Cyclic GFR-binding peptide
  MOD_RES (1)..(1): Xaa is C or S
XVPTELSPISMLFIDENEKVVYKQYEDMV

SEQ ID NO: 18097 - protein, 27 aa, Artificial Sequence
  Cyclic GFR-binding peptide
  MOD_RES (1)..(2): Xaa is C or S
XXVPTELEPLPMVYYDEYDKVVEQLSN

SEQ ID NO: 18098 - protein, 31 aa, Artificial Sequence
  Cyclic GFR-binding peptide
  MOD_RES (4)..(5): Xaa is C or S
ASPXXVPQDLEPLPIVYYVGRTPKVEQLSNM

SEQ ID NO: 18099 - protein, 28 aa, Artificial Sequence
  Cyclic GFR-binding peptide
  MOD_RES (27)..(27): Xaa is C or S
EPLTVLYYDDSSNVIEQLSNNMVVRAXG

SEQ ID NO: 18100 - protein, 32 aa, Artificial Sequence
  Cyclic GFR-binding peptide
  MOD_RES (6)..(7): Xaa is C or S
KIPKAXXVPTELEPLTMLYYDENEKVVEQLSN

SEQ ID NO: 18101 - protein, 31 aa, Artificial Sequence; identical to SEQ ID NO: 7802
  Cyclic GFR-binding peptide
  MOD_RES (4)..(5): Xaa is C or S

SEQ ID NO: 18102 - protein, 33 aa, Artificial Sequence
  Cyclic GFR-binding peptide
  MOD_RES (30)..(32): Xaa is C or S
TELEPLPMVYYDENEKVVEQLSNDMVVEGXGXR

SEQ ID NO: 18103 - protein, 37 aa, Artificial Sequence
  Cyclic GFR-binding peptide
  MOD_RES (1)..(2)..(34)..(36): Xaa is C or S
XXVPTELEPLTMLYYDEYDKVVEQLSNEMVVEGXGXR

SEQ ID NO: 18104 - protein, 31 aa, Artificial Sequence; identical to SEQ ID NO: 7805
  Cyclic GFR-binding peptide
  MOD_RES (29)..(31): Xaa is C or S

SEQ ID NO: 18105 - protein, 30 aa, Artificial Sequence
  Cyclic GFR-binding peptide
  MOD_RES (30)..(30): Xaa is C or S
PQALSPISILFIVGRKPKVYKQYEMIVRSX

SEQ ID NO: 18106 - protein, 40 aa, Artificial Sequence; identical to SEQ ID NO: 7808
  Cyclic GFR-binding peptide
  MOD_RES (5)..(6)..(37)..(39): Xaa is C or S

SEQ ID NO: 18107 - protein, 41 aa, Artificial Sequence
  Cyclic GFR-binding peptide
  MOD_RES (6)..(7)..(39)..(41): Xaa is C or S
TVPKPXXAPTQLEPLTVLYYDDSSNVIEQLSNNMVVRAXGX

SEQ ID NO: 18108 - protein, 28 aa, Artificial Sequence
  Cyclic GFR-binding peptide
  MOD_RES (1)..(2): Xaa is C or S
XXAPTKLSPISVLFIDDSSNVIYKQYEN

SEQ ID NO: 18109 - protein, 22 aa, Artificial Sequence
  Cyclic GFR-binding peptide
DLNAISILYFVGRTPKVLKKYR

SEQ ID NO: 18110 - protein, 38 aa, Artificial Sequence
  Cyclic GFR-binding peptide
  MOD_RES (3)..(4)..(35)..(37): Xaa is C or S
SPXXVPQDLSPISILFIVGRTPKVYKQYEMVVKSXKXS

SEQ ID NO: 18111 - protein, 30 aa, Artificial Sequence; identical to SEQ ID NO: 7812
  Cyclic GFR-binding peptide

SEQ ID NO: 18112 - protein, 32 aa, Artificial Sequence
  Cyclic GFR-binding peptide
  MOD_RES (1)..(2): Xaa is C or S
XXVPTELSPISMLFIDENEKVVYKQYEDMVVE

SEQ ID NO: 18113 - protein, 37 aa, Artificial Sequence
  Cyclic GFR-binding peptide
  MOD_RES (6)..(7): Xaa is C or S
STPPTXXVPTRLEPLPIVYYDSANNVVEQLSNDMVVE

SEQ ID NO: 18114 - protein, 34 aa, Artificial Sequence
  Cyclic GFR-binding peptide
  MOD_RES (1)..(2)..(34): Xaa is C or S
XXAPTKLEPLPVVYYDDSSNVIEQLSNNMVVRSX

SEQ ID NO: 18115 - protein, 38 aa, Artificial Sequence
  Cyclic GFR-binding peptide
  MOD_RES (2)..(3)..(35)..(37): Xaa is C or S
PXXAPTKLEPLPVVYYDDSSNVIEQLSNNMVVRSXGXH

SEQ ID NO: 18116 - protein, 33 aa, Artificial Sequence
  Cyclic GFR-binding peptide
  MOD_RES (3)..(3): Xaa is C or S
PTXAPTKLEPLPVVYYDDSSNVIEQLSNNMVVR

SEQ ID NO: 18117 - protein, 38 aa, Artificial Sequence
  Cyclic GFR-binding peptide
  MOD_RES (2)..(3)..(35)..(37): Xaa is C or S
PXXAPTQLSPISVLFIDDSSNVIYKQYENMVVRAXGXH

SEQ ID NO: 18118 - protein, 32 aa, Artificial Sequence; identical to SEQ ID NO: 7819
  Cyclic GFR-binding peptide
  MOD_RES (30)..(32): Xaa is C or S

SEQ ID NO: 18119 - protein, 36 aa, Artificial Sequence
  Cyclic GFR-binding peptide
  MOD_RES (3)..(4)..(35): Xaa is C or S
APXXVPQALSPISILFIVGRKPKVYKQYEMIVRSXK

SEQ ID NO: 18120 - protein, 30 aa, Artificial Sequence
  Cyclic GFR-binding peptide
PTRLEPLTILYYDSANNVVEQLSNDMVVES

SEQ ID NO: 18121 - protein, 38 aa, Artificial Sequence; identical to SEQ ID NO: 7827
  Cyclic GFR-binding peptide
  MOD_RES (6)..(7)..(38): Xaa is C or S

SEQ ID NO: 18122 - protein, 29 aa, Artificial Sequence
  Cyclic GFR-binding peptide
  MOD_RES (29)..(29): Xaa is C or S
QLEPLTVLYYDDSSNVIEQLSNNMVVRAX

SEQ ID NO: 18123 - protein, 23 aa, Artificial Sequence
  Cyclic GFR-binding peptide
QLSPISVLFIDDSSNVIYKQYEN

SEQ ID NO: 18124 - protein, 28 aa, Artificial Sequence
  Cyclic GFR-binding peptide
QALEPLTILYYVGRKPKVEQLSNMIVRS

SEQ ID NO: 18125 - protein, 34 aa, Artificial Sequence; identical to SEQ ID NO: 7829
  Cyclic GFR-binding peptide
  MOD_RES (4)..(5): Xaa is C or S

SEQ ID NO: 18126 - protein, 31 aa, Artificial Sequence
  Cyclic GFR-binding peptide
  MOD_RES (1)..(2): Xaa is C or S
XXAPTQLEPLTVLYYDDSSNVIEQLSNNMVV

SEQ ID NO: 18127 - protein, 31 aa, Artificial Sequence
  Cyclic GFR-binding peptide
  MOD_RES (4)..(5): Xaa is C or S
AAPXXVPQALEPLTILYYVGRKPKVEQLSNM

SEQ ID NO: 18128 - protein, 41 aa, Artificial Sequence
  Cyclic GFR-binding peptide
  MOD_RES (6)..(7)..(39)..(41): Xaa is C or S
SIPKAXXVPTELEPLTMLYYDEYDKVVEQLSNEMVVEGXGX

SEQ ID NO: 18129 - protein, 28 aa, Artificial Sequence
  Cyclic GFR-binding peptide
  MOD_RES (2)..(3): Xaa is C or S
PXXAPTQLEPLPVVYYDDSSNVIEQLSN

SEQ ID NO: 18130 - protein, 28 aa, Artificial Sequence
  Cyclic GFR-binding peptide
PQDLSAISILYLVGRTPKVLKNYQMVVK

SEQ ID NO: 18131 - protein, 26 aa, Artificial Sequence
  Cyclic GFR-binding peptide
LSPISILFIIGKTPKIYKQYEMIVKS

SEQ ID NO: 18132 - protein, 27 aa, Artificial Sequence
  Cyclic GFR-binding peptide
  MOD_RES (27)..(27): Xaa is C or S
LSPISILFIVGRTPKVYKQYEMVVKSX

SEQ ID NO: 18133 - protein, 34 aa, Artificial Sequence; identical to SEQ ID NO: 7834
  Cyclic GFR-binding peptide
  MOD_RES (3)..(4): Xaa is C or S

SEQ ID NO: 18134 - protein, 31 aa, Artificial Sequence
  Cyclic GFR-binding peptide
  MOD_RES (2)..(3): Xaa is C or S
AXXVPTELEPLPMVYYDEYDKVVEQLSNEMV

SEQ ID NO: 18135 - protein, 39 aa, Artificial Sequence
  Cyclic GFR-binding peptide
  MOD_RES (4)..(5)..(36)..(38): Xaa is C or S
ASPXXVSQDLEPLPIVYYIGKTPKIEQLSNMIVKSXKXS

SEQ ID NO: 18136 - protein, 34 aa, Artificial Sequence
  Cyclic GFR-binding peptide
  MOD_RES (3)..(4): Xaa is C or S
KPXXAPTQLEPLTVLYYDDSSNVIEQLSNNMVVR

SEQ ID NO: 18137 - protein, 39 aa, Artificial Sequence; identical to SEQ ID NO: 7838
  Cyclic GFR-binding peptide
  MOD_RES (5)..(6)..(38): Xaa is C or S

SEQ ID NO: 18138 - protein, 30 aa, Artificial Sequence
  Cyclic GFR-binding peptide
  MOD_RES (1)..(1): Xaa is C or S
XVPTRLSAISILYLDSANNVVLKNYQDMVV

SEQ ID NO: 18139 - protein, 29 aa, Artificial Sequence
  Cyclic GFR-binding peptide
  MOD_RES (27)..(29): Xaa is C or S
EPLTVLYYDDSSNVIEQLSNNMVVRSXGX

SEQ ID NO: 18140 - protein, 34 aa, Artificial Sequence
  Cyclic GFR-binding peptide
  MOD_RES (3)..(4): Xaa is C or S
KPXXAPTQLEPLPVVYYDDSSNVIEQLSNNMVVR

SEQ ID NO: 18141 - protein, 33 aa, Artificial Sequence
  Cyclic GFR-binding peptide
  MOD_RES (3)..(4): Xaa is C or S
KPXXAPTQLEPLPVVYYDDSSNVIEQLSNNMVV

SEQ ID NO: 18142 - protein, 26 aa, Artificial Sequence
  Cyclic GFR-binding peptide
TKLEPLPVVYYDDSSNVIEQLSNNMV

SEQ ID NO: 18143 - protein, 38 aa, Artificial Sequence
  Cyclic GFR-binding peptide
  MOD_RES (2)..(3)..(35)..(37): Xaa is C or S
AXXVPTELSPISMLFIDEYDKVVYKQYEEMVVEGXGXR

SEQ ID NO: 18144 - protein, 29 aa, Artificial Sequence
  Cyclic GFR-binding peptide
  MOD_RES (1)..(2): Xaa is C or S
XXVPTRLNAISILYFDSANNVVLKKYRDM

SEQ ID NO: 18145 - protein, 21 aa, Artificial Sequence
  Cyclic GFR-binding peptide
LSPISVLFIDDSSNVIYKQYE

SEQ ID NO: 18146 - protein, 34 aa, Artificial Sequence; identical to SEQ ID NO: 7849
  Cyclic GFR-binding peptide
  MOD_RES (31)..(33): Xaa is C or S

SEQ ID NO: 18147 - protein, 35 aa, Artificial Sequence; identical to SEQ ID NO: 7852
  Cyclic GFR-binding peptide
  MOD_RES (4)..(5): Xaa is C or S

SEQ ID NO: 18148 - protein, 33 aa, Artificial Sequence; identical to SEQ ID NO: 7853
  Cyclic GFR-binding peptide
  MOD_RES (4)..(5): Xaa is C or S

SEQ ID NO: 18149 - protein, 25 aa, Artificial Sequence
  Cyclic GFR-binding peptide
LSPISMLFIDEYDKVVYKQYEEMVV

SEQ ID NO: 18150 - protein, 27 aa, Artificial Sequence
  Cyclic GFR-binding peptide
ELNAISMLYFDEYDKVVLKKYREMVVE

SEQ ID NO: 18151 - protein, 36 aa, Artificial Sequence
  Cyclic GFR-binding peptide
  MOD_RES (3)..(4)..(36): Xaa is C or S
KPXXAPTQLEPLTVLYYDDSSNVIEQLSNNMVVRAX

SEQ ID NO: 18152 - protein, 31 aa, Artificial Sequence
  Cyclic GFR-binding peptide
  MOD_RES (30)..(30): Xaa is C or S
TELEPLTMLYYDEYDKVVEQLSNEMVVEGXG

SEQ ID NO: 18153 - protein, 32 aa, Artificial Sequence; identical to SEQ ID NO: 7856
  Cyclic GFR-binding peptide
  MOD_RES (6)..(7): Xaa is C or S

SEQ ID NO: 18154 - protein, 29 aa, Artificial Sequence
  Cyclic GFR-binding peptide
  MOD_RES (28)..(28): Xaa is C or S
ALSPISILFIVGRKPKVYKQYEMIVRSXK

SEQ ID NO: 18155 - protein, 25 aa, Artificial Sequence
  Cyclic GFR-binding peptide
QDLEPLPIVYYIGKTPKIEQLSNMI

SEQ ID NO: 18156 - protein, 25 aa, Artificial Sequence
  Cyclic GFR-binding peptide
LEPLPIVYYDSANNVVEQLSNDMVV

SEQ ID NO: 18157 - protein, 28 aa, Artificial Sequence
  Cyclic GFR-binding peptide
  MOD_RES (1)..(2): Xaa is C or S
XXVPTRLNAISILYFDSANNVVLKKYRD

SEQ ID NO: 18158 - protein, 31 aa, Artificial Sequence
  Cyclic GFR-binding peptide
  MOD_RES (28)..(30): Xaa is C or S
LEPLPMVYYDENEKVVEQLSNDMVVEGXGXR

SEQ ID NO: 18159 - protein, 36 aa, Artificial Sequence
  Cyclic GFR-binding peptide
  MOD_RES (2)..(3)..(35): Xaa is C or S
PXXAPTQLEPLPVVYYDDSSNVIEQLSNNMVVRAXG

SEQ ID NO: 18160 - protein, 42 aa, Artificial Sequence
  Cyclic GFR-binding peptide
  MOD_RES (6)..(7)..(39)..(41): Xaa is C or S
STPPTXXVPTRLEPLTILYYDSANNVVEQLSNDMVVESXGXR

SEQ ID NO: 18161 - protein, 32 aa, Artificial Sequence
  Cyclic GFR-binding peptide
  MOD_RES (32)..(32): Xaa is C or S
VPTRLNAISILYFDSANNVVLKKYRDMVVESX

SEQ ID NO: 18162 - protein, 27 aa, Artificial Sequence
  Cyclic GFR-binding peptide
  MOD_RES (1)..(1): Xaa is C or S
XVPTELEPLPMVYYDEYDKVVEQLSNE

SEQ ID NO: 18163 - protein, 24 aa, Artificial Sequence
  Cyclic GFR-binding peptide
LSPISVLFIDDSSNVIYKQYENMV

SEQ ID NO: 18164 - protein, 33 aa, Artificial Sequence
  Cyclic GFR-binding peptide
  MOD_RES (32)..(32): Xaa is C or S
APTQLEPLPVVYYDDSSNVIEQLSNNMVVRAXG

SEQ ID NO: 18165 - protein, 29 aa, Artificial Sequence
  Cyclic GFR-binding peptide
  MOD_RES (1)..(2): Xaa is C or S
XXVPTELNAISMLYFDENEKVVLKKYRDM

SEQ ID NO: 18166 - protein, 21 aa, Artificial Sequence
  Cyclic GFR-binding peptide
SPISMLFIDEYDKVVYKQYEE

SEQ ID NO: 18167 - protein, 27 aa, Artificial Sequence
  Cyclic GFR-binding peptide
VSQDLSPISILFIIGKTPKIYKQYEMI

SEQ ID NO: 18168 - protein, 32 aa, Artificial Sequence
  Cyclic GFR-binding peptide
  MOD_RES (1)..(1): Xaa is C or S
XVPTRLEPLPIVYYDSANNVVEQLSNDMVVES

SEQ ID NO: 18169 - protein, 29 aa, Artificial Sequence
  Cyclic GFR-binding peptide
  MOD_RES (3)..(4): Xaa is C or S
KPXXAPTKLEPLPVVYYDDSSNVIEQLSN

SEQ ID NO: 18170 - protein, 23 aa, Artificial Sequence
  Cyclic GFR-binding peptide
EPLTMLYYDEYDKVVEQLSNEMV

SEQ ID NO: 18171 - protein, 40 aa, Artificial Sequence
  Cyclic GFR-binding peptide
  MOD_RES (6)..(7)..(39): Xaa is C or S
SIPKAXXVPTELEPLPMVYYDEYDKVVEQLSNEMVVEGXG

SEQ ID NO: 18172 - protein, 27 aa, Artificial Sequence
  Cyclic GFR-binding peptide
LEPLTVLYYDDSSNVIEQLSNNMVVRA

SEQ ID NO: 18173 - protein, 32 aa, Artificial Sequence
  Cyclic GFR-binding peptide
  MOD_RES (3)..(4): Xaa is C or S
KAXXVPTELEPLPMVYYDENEKVVEQLSNDMV

SEQ ID NO: 18174 - protein, 37 aa, Artificial Sequence
  Cyclic GFR-binding peptide
  MOD_RES (6)..(6): Xaa is C or S
VTKPTXAPTKLSPISVLFIDDSSNVIYKQYENMVVRS

SEQ ID NO: 18175 - protein, 30 aa, Artificial Sequence
  Cyclic GFR-binding peptide
  MOD_RES (1)..(2): Xaa is C or S
XXAPTKLEPLTVLYYDDSSNVIEQLSNNMV

SEQ ID NO: 18176 - protein, 23 aa, Artificial Sequence
  Cyclic GFR-binding peptide
LSPISILFIVGRTPKVYKQYEMV

SEQ ID NO: 18177 - protein, 32 aa, Artificial Sequence
  Cyclic GFR-binding peptide
  MOD_RES (2)..(2): Xaa is C or S
TXAPTKLEPLPVVYYDDSSNVIEQLSNNMVVR

SEQ ID NO: 18178 - protein, 31 aa, Artificial Sequence; identical to SEQ ID NO: 7867
  Cyclic GFR-binding peptide
  MOD_RES (29)..(31): Xaa is C or S

SEQ ID NO: 18179 - protein, 33 aa, Artificial Sequence
  Cyclic GFR-binding peptide
  MOD_RES (30)..(32): Xaa is C or S
TELEPLPMVYYDEYDKVVEQLSNEMVVEGXGXR

SEQ ID NO: 18180 - protein, 31 aa, Artificial Sequence; identical to SEQ ID NO: 7868
  Cyclic GFR-binding peptide
  MOD_RES (30)..(30): Xaa is C or S

SEQ ID NO: 18181 - protein, 25 aa, Artificial Sequence
  Cyclic GFR-binding peptide
LSPISILFIVGRTPKVYKQYEMVVK

SEQ ID NO: 18182 - protein, 23 aa, Artificial Sequence
  Cyclic GFR-binding peptide
LNAISMLYFDEYDKVVLKKYREM

SEQ ID NO: 18183 - protein, 28 aa, Artificial Sequence
  Cyclic GFR-binding peptide
PQALSPISILFIVGRKPKVYKQYEMIVR

SEQ ID NO: 18184 - protein, 35 aa, Artificial Sequence
  Cyclic GFR-binding peptide
  MOD_RES (4)..(5): Xaa is C or S
PPTXXVPTRLNAISILYFDSANNVVLKKYRDMVVE

SEQ ID NO: 18185 - protein, 29 aa, Artificial Sequence
  Cyclic GFR-binding peptide
VPTELNAISMLYFDEYDKVVLKKYREMVV

SEQ ID NO: 18186 - protein, 22 aa, Artificial Sequence
  Cyclic GFR-binding peptide
ELEPLTMLYYDEYDKVVEQLSN

SEQ ID NO: 18187 - protein, 33 aa, Artificial Sequence
  Cyclic GFR-binding peptide
  MOD_RES (2)..(3): Xaa is C or S
AXXVPTELEPLTMLYYDENEKVVEQLSNDMVVE

SEQ ID NO: 18188 - protein, 28 aa, Artificial Sequence
  Cyclic GFR-binding peptide
APTQLSPISVLFIDDSSNVIYKQYENMV

SEQ ID NO: 18189 - protein, 34 aa, Artificial Sequence; identical to SEQ ID NO: 7878
  Cyclic GFR-binding peptide
  MOD_RES (3)..(3): Xaa is C or S

SEQ ID NO: 18190 - protein, 34 aa, Artificial Sequence
  Cyclic GFR-binding peptide
  MOD_RES (4)..(5): Xaa is C or S
PKPXXAPTKLEPLPVVYYDDSSNVIEQLSNNMVV

SEQ ID NO: 18191 - protein, 37 aa, Artificial Sequence; identical to SEQ ID NO: 7879
  Cyclic GFR-binding peptide
  MOD_RES (2)..(3)..(34)..(36): Xaa is C or S

SEQ ID NO: 18192 - protein, 30 aa, Artificial Sequence; identical to SEQ ID NO: 7880
  Cyclic GFR-binding peptide
  MOD_RES (2)..(3): Xaa is C or S

SEQ ID NO: 18193 - protein, 32 aa, Artificial Sequence
  Cyclic GFR-binding peptide
  MOD_RES (31)..(31): Xaa is C or S
VSQDLSPISILFIIGKTPKIYKQYEMIVKSXK

SEQ ID NO: 18194 - protein, 34 aa, Artificial Sequence; identical to SEQ ID NO: 7883
  Cyclic GFR-binding peptide
  MOD_RES (1)..(33): Xaa is C or S

SEQ ID NO: 18195 - protein, 41 aa, Artificial Sequence
  Cyclic GFR-binding peptide
  MOD_RES (6)..(7)..(39)..(41): Xaa is C or S
STPPTXXVPTRLEPLPIVYYDSANNVVEQLSNDMVVESXGX

SEQ ID NO: 18196 - protein, 37 aa, Artificial Sequence
  Cyclic GFR-binding peptide
  MOD_RES (3)..(4)..(36): Xaa is C or S
KAXXVPTELEPLTMLYYDENEKVVEQLSNDMVVEGXG

SEQ ID NO: 18197 - protein, 29 aa, Artificial Sequence
  Cyclic GFR-binding peptide
PTELEPLPMVYYDEYDKVVEQLSNEMVVE

SEQ ID NO: 18198 - protein, 23 aa, Artificial Sequence
  Cyclic GFR-binding peptide
KLEPLPVVYYDDSSNVIEQLSNN

SEQ ID NO: 18199 - protein, 23 aa, Artificial Sequence
  Cyclic GFR-binding peptide
KLSAISVLYLDDSSNVILKNYQN

SEQ ID NO: 18200 - protein, 39 aa, Artificial Sequence
  Cyclic GFR-binding peptide
  MOD_RES (3)..(4)..(36)..(38): Xaa is C or S
KAXXVPTELEPLTMLYYDENEKVVEQLSNDMVVEGXGXR

SEQ ID NO: 18201 - protein, 26 aa, Artificial Sequence
  Cyclic GFR-binding peptide
LNAISILYFVGRKPKVLKKYRMIVRS

SEQ ID NO: 18202 - protein, 26 aa, Artificial Sequence
  Cyclic GFR-binding peptide
VPQDLSPISILFIVGRTPKVYKQYEM

SEQ ID NO: 18203 - protein, 34 aa, Artificial Sequence; identical to SEQ ID NO: 7890
  Cyclic GFR-binding peptide
  MOD_RES (2)..(3)..(34): Xaa is C or S

SEQ ID NO: 18204 - protein, 31 aa, Artificial Sequence
  Cyclic GFR-binding peptide
  MOD_RES (1)..(2): Xaa is C or S
XXVPTRLEPLPIVYYDSANNVVEQLSNDMVV

SEQ ID NO: 18205 - protein, 28 aa, Artificial Sequence
  Cyclic GFR-binding peptide
  MOD_RES (28)..(28): Xaa is C or S
LEPLTMLYYDEYDKVVEQLSNEMVVEGX

SEQ ID NO: 18206 - protein, 36 aa, Artificial Sequence; identical to SEQ ID NO: 7893
  Cyclic GFR-binding peptide
  MOD_RES (2)..(3)..(34)..(36): Xaa is C or S

SEQ ID NO: 18207 - protein, 20 aa, Artificial Sequence
  Cyclic GFR-binding peptide
EPLPIVYYIGKTPKIEQLSN

SEQ ID NO: 18208 - protein, 38 aa, Artificial Sequence; identical to SEQ ID NO: 7894
  Cyclic GFR-binding peptide
  MOD_RES (3)..(4)..(35)..(37): Xaa is C or S

SEQ ID NO: 18209 - protein, 41 aa, Artificial Sequence
  Cyclic GFR-binding peptide
  MOD_RES (6)..(7)..(39)..(41): Xaa is C or S
TVPKPXXAPTQLSPISVLFIDDSSNVIYKQYENMVVRAXGX

SEQ ID NO: 18210 - protein, 32 aa, Artificial Sequence
  Cyclic GFR-binding peptide
  MOD_RES (4)..(5): Xaa is C or S
PKPXXAPTKLSPISVLFIDDSSNVIYKQYENM

SEQ ID NO: 18211 - protein, 32 aa, Artificial Sequence; identical to SEQ ID NO: 7897
  Cyclic GFR-binding peptide
  MOD_RES (29)..(31): Xaa is C or S

SEQ ID NO: 18212 - protein, 31 aa, Artificial Sequence
  Cyclic GFR-binding peptide
  MOD_RES (2)..(3): Xaa is C or S
PXXAPTQLEPLPVVYYDDSSNVIEQLSNNMV

SEQ ID NO: 18213 - protein, 23 aa, Artificial Sequence
  Cyclic GFR-binding peptide
EPLPIVYYIGKTPKIEQLSNMIV

SEQ ID NO: 18214 - protein, 36 aa, Artificial Sequence
  Cyclic GFR-binding peptide
  MOD_RES (1)..(33)..(35): Xaa is C or S
XVPTELSPISMLFIDENEKVVYKQYEDMVVEGXGXR

SEQ ID NO: 18215 - protein, 30 aa, Artificial Sequence
  Cyclic GFR-binding peptide
VPQALSPISILFIVGRKPKVYKQYEMIVRS

SEQ ID NO: 18216 - protein, 29 aa, Artificial Sequence
  Cyclic GFR-binding peptide
  MOD_RES (3)..(4): Xaa is C or S
KAXXVPTELEPLTMLYYDENEKVVEQLSN

SEQ ID NO: 18217 - protein, 32 aa, Artificial Sequence
  Cyclic GFR-binding peptide
  MOD_RES (30)..(32): Xaa is C or S
TELEPLPMVYYDENEKVVEQLSNDMVVEGXGX

SEQ ID NO: 18218 - protein, 23 aa, Artificial Sequence
  Cyclic GFR-binding peptide
SPISMLFIDENEKVVYKQYEDMV

SEQ ID NO: 18219 - protein, 36 aa, Artificial Sequence; identical to SEQ ID NO: 7902
  Cyclic GFR-binding peptide
  MOD_RES (4)..(5): Xaa is C or S

SEQ ID NO: 18220 - protein, 31 aa, Artificial Sequence
  Cyclic GFR-binding peptide
  MOD_RES (3)..(4): Xaa is C or S
SPXXVPQDLEPLPIVYYVGRTPKVEQLSNMV

SEQ ID NO: 18221 - protein, 30 aa, Artificial Sequence
  Cyclic GFR-binding peptide
  MOD_RES (28)..(30): Xaa is C or S
LEPLPMVYYDEYDKVVEQLSNEMVVEGXGX

SEQ ID NO: 18222 - protein, 35 aa, Artificial Sequence
  Cyclic GFR-binding peptide
  MOD_RES (1)..(33)..(35): Xaa is C or S
XVPTELSPISMLFIDENEKVVYKQYEDMVVEGXGX

SEQ ID NO: 18223 - protein, 38 aa, Artificial Sequence
  Cyclic GFR-binding peptide
  MOD_RES (4)..(5)..(36)..(38): Xaa is C or S
ASPXXVSQDLSPISILFIIGKTPKIYKQYEMIVKSXKX

SEQ ID NO: 18224 - protein, 34 aa, Artificial Sequence; identical to SEQ ID NO: 7904
  Cyclic GFR-binding peptide
  MOD_RES (31)..(33): Xaa is C or S

SEQ ID NO: 18225 - protein, 29 aa, Artificial Sequence
  Cyclic GFR-binding peptide
VPQALSPISILFIVGRKPKVYKQYEMIVR

SEQ ID NO: 18226 - protein, 30 aa, Artificial Sequence; identical to SEQ ID NO: 7906
  Cyclic GFR-binding peptide
  MOD_RES (1)..(1): Xaa is C or S

SEQ ID NO: 18227 - protein, 31 aa, Artificial Sequence
  Cyclic GFR-binding peptide
  MOD_RES (28)..(30): Xaa is C or S
LEPLPMVYYDEYDKVVEQLSNEMVVEGXGXR

SEQ ID NO: 18228 - protein, 28 aa, Artificial Sequence
  Cyclic GFR-binding peptide
TELNAISMLYFDENEKVVLKKYRDMVVE

SEQ ID NO: 18229 - protein, 29 aa, Artificial Sequence
  Cyclic GFR-binding peptide
  MOD_RES (3)..(4): Xaa is C or S
KPXXAPTQLSPISVLFIDDSSNVIYKQYE

SEQ ID NO: 18230 - protein, 27 aa, Artificial Sequence
  Cyclic GFR-binding peptide
  MOD_RES (1)..(1): Xaa is C or S
XAPTQLEPLPVVYYDDSSNVIEQLSNN

SEQ ID NO: 18231 - protein, 33 aa, Artificial Sequence; identical to SEQ ID NO: 7913
  Cyclic GFR-binding peptide
  MOD_RES (31)..(33): Xaa is C or S

SEQ ID NO: 18232 - protein, 29 aa, Artificial Sequence
  Cyclic GFR-binding peptide
PTELSPISMLFIDENEKVVYKQYEDMVVE

SEQ ID NO: 18233 - protein, 25 aa, Artificial Sequence
  Cyclic GFR-binding peptide
TQLSAISVLYLDDSSNVILKNYQNM

SEQ ID NO: 18234 - protein, 30 aa, Artificial Sequence; identical to SEQ ID NO: 7918
  Cyclic GFR-binding peptide
  MOD_RES (27)..(29): Xaa is C or S

SEQ ID NO: 18235 - protein, 36 aa, Artificial Sequence
  Cyclic GFR-binding peptide
  MOD_RES (1)..(33)..(35): Xaa is C or S
XVPTELEPLTMLYYDENEKVVEQLSNDMVVEGXGXR

SEQ ID NO: 18236 - protein, 35 aa, Artificial Sequence
  Cyclic GFR-binding peptide
  MOD_RES (1)..(2)..(34): Xaa is C or S
XXVPTRLEPLTILYYDSANNVVEQLSNDMVVESXG

SEQ ID NO: 18237 - protein, 34 aa, Artificial Sequence; identical to SEQ ID NO: 7921
  Cyclic GFR-binding peptide
  MOD_RES (1)..(2)..(33): Xaa is C or S

SEQ ID NO: 18238 - protein, 30 aa, Artificial Sequence; identical to SEQ ID NO: 7922
  Cyclic GFR-binding peptide
  MOD_RES (2)..(3): Xaa is C or S

SEQ ID NO: 18239 - protein, 34 aa, Artificial Sequence
  Cyclic GFR-binding peptide
  MOD_RES (32)..(34): Xaa is C or S
APTKLEPLTVLYYDDSSNVIEQLSNNMVVRSXGX

SEQ ID NO: 18240 - protein, 24 aa, Artificial Sequence
  Cyclic GFR-binding peptide
TELEPLTMLYYDENEKVVEQLSND

SEQ ID NO: 18241 - protein, 32 aa, Artificial Sequence
  Cyclic GFR-binding peptide
  MOD_RES (2)..(3): Xaa is C or S
PXXAPTQLEPLTVLYYDDSSNVIEQLSNNMVV

SEQ ID NO: 18242 - protein, 27 aa, Artificial Sequence
  Cyclic GFR-binding peptide
  MOD_RES (26)..(26): Xaa is C or S
EPLTILYYVGRKPKVEQLSNMIVRSXK

SEQ ID NO: 18243 - protein, 32 aa, Artificial Sequence
  Cyclic GFR-binding peptide
  MOD_RES (32)..(32): Xaa is C or S
APTKLEPLPVVYYDDSSNVIEQLSNNMVVRSX

SEQ ID NO: 18244 - protein, 37 aa, Artificial Sequence
  Cyclic GFR-binding peptide
  MOD_RES (2)..(3)..(35)..(37): Xaa is C or S
TXXVPTRLEPLTILYYDSANNVVEQLSNDMVVESXGX

SEQ ID NO: 18245 - protein, 26 aa, Artificial Sequence
  Cyclic GFR-binding peptide
  MOD_RES (26)..(26): Xaa is C or S
NAISILYFIGKTPKILKKYRMIVKSX

SEQ ID NO: 18246 - protein, 36 aa, Artificial Sequence
  Cyclic GFR-binding peptide
  MOD_RES (1)..(33)..(35): Xaa is C or S
XAPTKLSPISVLFIDDSSNVIYKQYENMVVRSXGXH

SEQ ID NO: 18247 - protein, 22 aa, Artificial Sequence
  Cyclic GFR-binding peptide
DLSPISILFIIGKTPKIYKQYE

SEQ ID NO: 18248 - protein, 29 aa, Artificial Sequence
  Cyclic GFR-binding peptide
PTRLEPLPIVYYDSANNVVEQLSNDMVVE

SEQ ID NO: 18249 - protein, 34 aa, Artificial Sequence
  Cyclic GFR-binding peptide
  MOD_RES (4)..(5): Xaa is C or S
PKAXXVPTELEPLTMLYYDENEKVVEQLSNDMVV

SEQ ID NO: 18250 - protein, 38 aa, Artificial Sequence
  Cyclic GFR-binding peptide
  MOD_RES (6)..(7): Xaa is C or S
KIPKAXXVPTELEPLPMVYYDENEKVVEQLSNDMVVEG

SEQ ID NO: 18251 - protein, 32 aa, Artificial Sequence
  Cyclic GFR-binding peptide
  MOD_RES (2)..(3): Xaa is C or S
TXXVPTRLSAISILYLDSANNVVLKNYQDMVV

SEQ ID NO: 18252 - protein, 23 aa, Artificial Sequence
  Cyclic GFR-binding peptide
QDLSPISILFIIGKTPKIYKQYE

SEQ ID NO: 18253 - protein, 37 aa, Artificial Sequence
  Cyclic GFR-binding peptide
  MOD_RES (2)..(34)..(36): Xaa is C or S
TXAPTKLSPISVLFIDDSSNVIYKQYENMVVRSXGXH

SEQ ID NO: 18254 - protein, 26 aa, Artificial Sequence
  Cyclic GFR-binding peptide
  MOD_RES (1)..(1): Xaa is C or S
XVPQDLSAISILYLVGRTPKVLKNYQ

SEQ ID NO: 18255 - protein, 29 aa, Artificial Sequence
  Cyclic GFR-binding peptide
TKLSAISVLYLDDSSNVILKNYQNMVVRS

SEQ ID NO: 18256 - protein, 34 aa, Artificial Sequence; identical to SEQ ID NO: 7937
  Cyclic GFR-binding peptide
  MOD_RES (2)..(3): Xaa is C or S

SEQ ID NO: 18257 - protein, 31 aa, Artificial Sequence
  Cyclic GFR-binding peptide
  MOD_RES (1)..(1): Xaa is C or S
XVPTELEPLPMVYYDENEKVVEQLSNDMVVE

SEQ ID NO: 18258 - protein, 28 aa, Artificial Sequence
  Cyclic GFR-binding peptide
QLEPLTVLYYDDSSNVIEQLSNNMVVRA

SEQ ID NO: 18259 - protein, 29 aa, Artificial Sequence
  Cyclic GFR-binding peptide
APTQLEPLPVVYYDDSSNVIEQLSNNMVV

SEQ ID NO: 18260 - protein, 27 aa, Artificial Sequence
  Cyclic GFR-binding peptide
KLSAISVLYLDDSSNVILKNYQNMVVR

SEQ ID NO: 18261 - protein, 34 aa, Artificial Sequence
  Cyclic GFR-binding peptide
  MOD_RES (32)..(34): Xaa is C or S
APTKLSPISVLFIDDSSNVIYKQYENMVVRSXGX

SEQ ID NO: 18262 - protein, 39 aa, Artificial Sequence; identical to SEQ ID NO: 7945
  Cyclic GFR-binding peptide
  MOD_RES (6)..(7)..(38): Xaa is C or S

SEQ ID NO: 18263 - protein, 41 aa, Artificial Sequence
  Cyclic GFR-binding peptide
  MOD_RES (6)..(7)..(39)..(41): Xaa is C or S
KIPKAXXVPTELEPLPMVYYDENEKVVEQLSNDMVVEGXGX

SEQ ID NO: 18264 - protein, 32 aa, Artificial Sequence
  Cyclic GFR-binding peptide
  MOD_RES (30)..(32): Xaa is C or S
TQLEPLTVLYYDDSSNVIEQLSNNMVVRAXGX

SEQ ID NO: 18265 - protein, 30 aa, Artificial Sequence
  Cyclic GFR-binding peptide
VPTELEPLPMVYYDEYDKVVEQLSNEMVVE

SEQ ID NO: 18266 - protein, 24 aa, Artificial Sequence
  Cyclic GFR-binding peptide
PQALSAISILYLVGRKPKVLKNYQ

SEQ ID NO: 18267 - protein, 35 aa, Artificial Sequence; identical to SEQ ID NO: 7953
  Cyclic GFR-binding peptide
  MOD_RES (32)..(34): Xaa is C or S

SEQ ID NO: 18268 - protein, 36 aa, Artificial Sequence; identical to SEQ ID NO: 7954
  Cyclic GFR-binding peptide
  MOD_RES (5)..(6): Xaa is C or S

SEQ ID NO: 18269 - protein, 33 aa, Artificial Sequence
  Cyclic GFR-binding peptide
  MOD_RES (1)..(2): Xaa is C or S
XXVPTRLNAISILYFDSANNVVLKKYRDMVVES

SEQ ID NO: 18270 - protein, 27 aa, Artificial Sequence
  Cyclic GFR-binding peptide
QDLSPISILFIIGKTPKIYKQYEMIVK

SEQ ID NO: 18271 - protein, 28 aa, Artificial Sequence
  Cyclic GFR-binding peptide
  MOD_RES (1)..(2): Xaa is C or S
XXVPQALSAISILYLVGRKPKVLKNYQM

SEQ ID NO: 18272 - protein, 36 aa, Artificial Sequence
  Cyclic GFR-binding peptide
  MOD_RES (3)..(35): Xaa is C or S
PTXAPTKLEPLTVLYYDDSSNVIEQLSNNMVVRSXG

SEQ ID NO: 18273 - protein, 32 aa, Artificial Sequence; identical to SEQ ID NO: 7960
  Cyclic GFR-binding peptide
  MOD_RES (5)..(6): Xaa is C or S

SEQ ID NO: 18274 - protein, 29 aa, Artificial Sequence
  Cyclic GFR-binding peptide
  MOD_RES (2)..(3): Xaa is C or S
PXXAPTKLEPLTVLYYDDSSNVIEQLSNN

SEQ ID NO: 18275 - protein, 32 aa, Artificial Sequence
  Cyclic GFR-binding peptide
  MOD_RES (30)..(32): Xaa is C or S
TQLSPISVLFIDDSSNVIYKQYENMVVRAXGX

SEQ ID NO: 18276 - protein, 23 aa, Artificial Sequence
  Cyclic GFR-binding peptide
TQLSPISVLFIDDSSNVIYKQYE

SEQ ID NO: 18277 - protein, 32 aa, Artificial Sequence
  Cyclic GFR-binding peptide
  MOD_RES (29)..(31): Xaa is C or S
KLEPLTVLYYDDSSNVIEQLSNNMVVRSXGXH

SEQ ID NO: 18278 - protein, 36 aa, Artificial Sequence
  Cyclic GFR-binding peptide
  MOD_RES (6)..(7): Xaa is C or S
KIPKAXXVPTELSPISMLFIDENEKVVYKQYEDMVV

SEQ ID NO: 18279 - protein, 32 aa, Artificial Sequence
  Cyclic GFR-binding peptide
  MOD_RES (30)..(32): Xaa is C or S
PQDLEPLPIVYYVGRTPKVEQLSNMVVKSXKX

SEQ ID NO: 18280 - protein, 35 aa, Artificial Sequence
  Cyclic GFR-binding peptide
  MOD_RES (1)..(33)..(35): Xaa is C or S
XVPTELEPLTMLYYDENEKVVEQLSNDMVVEGXGX

SEQ ID NO: 18281 - protein, 24 aa, Artificial Sequence
  Cyclic GFR-binding peptide
DLSPISILFIIGKTPKIYKQYEMI

SEQ ID NO: 18282 - protein, 33 aa, Artificial Sequence
  Cyclic GFR-binding peptide
  MOD_RES (5)..(6): Xaa is C or S
IPKAXXVPTELEPLPMVYYDENEKVVEQLSNDM

SEQ ID NO: 18283 - protein, 30 aa, Artificial Sequence; identical to SEQ ID NO: 7968
  Cyclic GFR-binding peptide

SEQ ID NO: 18284 - protein, 36 aa, Artificial Sequence
  Cyclic GFR-binding peptide
  MOD_RES (2)..(3)..(35): Xaa is C or S
PXXAPTKLEPLTVLYYDDSSNVIEQLSNNMVVRSXG

SEQ ID NO: 18285 - protein, 26 aa, Artificial Sequence
  Cyclic GFR-binding peptide
  MOD_RES (26)..(26): Xaa is C or S
EPLTILYYVGRKPKVEQLSNMIVRSX

SEQ ID NO: 18286 - protein, 27 aa, Artificial Sequence
  Cyclic GFR-binding peptide
TELEPLPMVYYDENEKVVEQLSNDMVV

SEQ ID NO: 18287 - protein, 30 aa, Artificial Sequence
  Cyclic GFR-binding peptide
  MOD_RES (27)..(29): Xaa is C or S
EPLTVLYYDDSSNVIEQLSNNMVVRSXGXH

SEQ ID NO: 18288 - protein, 31 aa, Artificial Sequence
  Cyclic GFR-binding peptide
  MOD_RES (6)..(6): Xaa is C or S
VTKPTXAPTKLSPISVLFIDDSSNVIYKQYE

SEQ ID NO: 18289 - protein, 40 aa, Artificial Sequence
  Cyclic GFR-binding peptide
  MOD_RES (6)..(7)..(39): Xaa is C or S
TVPKPXXAPTQLEPLPVVYYDDSSNVIEQLSNNMVVRAXG

SEQ ID NO: 18290 - protein, 38 aa, Artificial Sequence; identical to SEQ ID NO: 7972
  Cyclic GFR-binding peptide
  MOD_RES (3)..(4)..(35)..(37): Xaa is C or S

SEQ ID NO: 18291 - protein, 20 aa, Artificial Sequence
  Cyclic GFR-binding peptide
SAISVLYLDDSSNVILKNYQ

SEQ ID NO: 18292 - protein, 32 aa, Artificial Sequence
  Cyclic GFR-binding peptide
  MOD_RES (31)..(31): Xaa is C or S
VPQDLEPLPIVYYVGRTPKVEQLSNMVVKSXK

SEQ ID NO: 18293 - protein, 24 aa, Artificial Sequence
  Cyclic GFR-binding peptide
PTRLEPLTILYYDSANNVVEQLSN

SEQ ID NO: 18294 - protein, 20 aa, Artificial Sequence
  Cyclic GFR-binding peptide
SPISMLFIDEYDKVVYKQYE

SEQ ID NO: 18295 - protein, 30 aa, Artificial Sequence; identical to SEQ ID NO: 7977
  Cyclic GFR-binding peptide
  MOD_RES (27)..(29): Xaa is C or S

SEQ ID NO: 18296 - protein, 37 aa, Artificial Sequence
  Cyclic GFR-binding peptide
  MOD_RES (7)..(7): Xaa is C or S
HVTKPTXAPTKLEPLTVLYYDDSSNVIEQLSNNMVVR

SEQ ID NO: 18297 - protein, 37 aa, Artificial Sequence
  Cyclic GFR-binding peptide
  MOD_RES (3)..(4)..(36): Xaa is C or S
KAXXVPTELSPISMLFIDEYDKVVYKQYEEMVVEGXG

SEQ ID NO: 18298 - protein, 30 aa, Artificial Sequence
  Cyclic GFR-binding peptide
  MOD_RES (27)..(29): Xaa is C or S
SPISVLFIDDSSNVIYKQYENMVVRSXGXH

SEQ ID NO: 18299 - protein, 27 aa, Artificial Sequence
  Cyclic GFR-binding peptide
TKLEPLTVLYYDDSSNVIEQLSNNMVV

SEQ ID NO: 18300 - protein, 30 aa, Artificial Sequence
  Cyclic GFR-binding peptide
  MOD_RES (4)..(5): Xaa is C or S
ASPXXVSQDLSPISILFIIGKTPKIYKQYE

SEQ ID NO: 18301 - protein, 37 aa, Artificial Sequence
  Cyclic GFR-binding peptide
  MOD_RES (3)..(4)..(36): Xaa is C or S
KPXXAPTKLSPISVLFIDDSSNVIYKQYENMVVRSXG

SEQ ID NO: 18302 - protein, 31 aa, Artificial Sequence
  Cyclic GFR-binding peptide
  MOD_RES (2)..(3): Xaa is C or S
TXXVPTRLEPLTILYYDSANNVVEQLSNDMV

SEQ ID NO: 18303 - protein, 32 aa, Artificial Sequence
  Cyclic GFR-binding peptide
  MOD_RES (29)..(31): Xaa is C or S
QDLSPISILFIIGKTPKIYKQYEMIVKSXKXS

SEQ ID NO: 18304 - protein, 25 aa, Artificial Sequence
  Cyclic GFR-binding peptide
APTQLSAISVLYLDDSSNVILKNYQ

SEQ ID NO: 18305 - protein, 37 aa, Artificial Sequence
  Cyclic GFR-binding peptide
  MOD_RES (2)..(3)..(34)..(36): Xaa is C or S
PXXVPQDLSPISILFIVGRTPKVYKQYEMVVKSXKXS

SEQ ID NO: 18306 - protein, 34 aa, Artificial Sequence; identical to SEQ ID NO: 7990
  Cyclic GFR-binding peptide
  MOD_RES (31)..(33): Xaa is C or S

SEQ ID NO: 18307 - protein, 38 aa, Artificial Sequence; identical to SEQ ID NO: 7992
  Cyclic GFR-binding peptide
  MOD_RES (3)..(35)..(37): Xaa is C or S

SEQ ID NO: 18308 - protein, 29 aa, Artificial Sequence
  Cyclic GFR-binding peptide
  MOD_RES (1)..(1): Xaa is C or S
XVPTELEPLTMLYYDEYDKVVEQLSNEMV

SEQ ID NO: 18309 - protein, 35 aa, Artificial Sequence
  Cyclic GFR-binding peptide
  MOD_RES (4)..(5): Xaa is C or S
PKPXXAPTQLEPLTVLYYDDSSNVIEQLSNNMVVR

SEQ ID NO: 18310 - protein, 37 aa, Artificial Sequence
  Cyclic GFR-binding peptide
  MOD_RES (2)..(34)..(36): Xaa is C or S
TXAPTKLEPLTVLYYDDSSNVIEQLSNNMVVRSXGXH

SEQ ID NO: 18311 - protein, 28 aa, Artificial Sequence
  Cyclic GFR-binding peptide
QALSAISILYLVGRKPKVLKNYQMIVRS

SEQ ID NO: 18312 - protein, 25 aa, Artificial Sequence
  Cyclic GFR-binding peptide
LNAISILYFDSANNVVLKKYRDMVV

SEQ ID NO: 18313 - protein, 29 aa, Artificial Sequence
  Cyclic GFR-binding peptide
  MOD_RES (29)..(29): Xaa is C or S
QDLSAISILYLIGKTPKILKNYQMIVKSX

SEQ ID NO: 18314 - protein, 39 aa, Artificial Sequence; identical to SEQ ID NO: 8006
  Cyclic GFR-binding peptide
  MOD_RES (5)..(6)..(37)..(39): Xaa is C or S

SEQ ID NO: 18315 - protein, 34 aa, Artificial Sequence
  Cyclic GFR-binding peptide
  MOD_RES (1)..(33): Xaa is C or S
XVPTELEPLPMVYYDENEKVVEQLSNDMVVEGXG

SEQ ID NO: 18316 - protein, 30 aa, Artificial Sequence
  Cyclic GFR-binding peptide
  MOD_RES (1)..(2): Xaa is C or S
XXAPTQLSPISVLFIDDSSNVIYKQYENMV

SEQ ID NO: 18317 - protein, 33 aa, Artificial Sequence
  Cyclic GFR-binding peptide
  MOD_RES (5)..(6): Xaa is C or S
SAAPXXVPQALEPLTILYYVGRKPKVEQLSNMI

SEQ ID NO: 18318 - protein, 32 aa, Artificial Sequence
  Cyclic GFR-binding peptide
  MOD_RES (4)..(5): Xaa is C or S
ASPXXVSQDLSPISILFIIGKTPKIYKQYEMI

SEQ ID NO: 18319 - protein, 21 aa, Artificial Sequence
  Cyclic GFR-binding peptide
LEPLPIVYYIGKTPKIEQLSN

SEQ ID NO: 18320 - protein, 30 aa, Artificial Sequence; identical to SEQ ID NO: 8008
  Cyclic GFR-binding peptide
  MOD_RES (29)..(29): Xaa is C or S

SEQ ID NO: 18321 - protein, 40 aa, Artificial Sequence
  Cyclic GFR-binding peptide
  MOD_RES (7)..(39): Xaa is C or S
HVTKPTXAPTKLEPLTVLYYDDSSNVIEQLSNNMVVRSXG

SEQ ID NO: 18322 - protein, 29 aa, Artificial Sequence
  Cyclic GFR-binding peptide
  MOD_RES (1)..(2): Xaa is C or S
XXVPTELSPISMLFIDENEKVVYKQYEDM

SEQ ID NO: 18323 - protein, 39 aa, Artificial Sequence
  Cyclic GFR-binding peptide
  MOD_RES (6)..(7)..(39): Xaa is C or S
KIPKAXXVPTELSPISMLFIDENEKVVYKQYEDMVVEGX

SEQ ID NO: 18324 - protein, 21 aa, Artificial Sequence
  Cyclic GFR-binding peptide
LEPLTMLYYDENEKVVEQLSN

SEQ ID NO: 18325 - protein, 37 aa, Artificial Sequence
  Cyclic GFR-binding peptide
  MOD_RES (3)..(4)..(36): Xaa is C or S
KAXXVPTELEPLPMVYYDEYDKVVEQLSNEMVVEGXG

SEQ ID NO: 18326 - protein, 34 aa, Artificial Sequence; identical to SEQ ID NO: 8013
  Cyclic GFR-binding peptide
  MOD_RES (3)..(4): Xaa is C or S

SEQ ID NO: 18327 - protein, 38 aa, Artificial Sequence
  Cyclic GFR-binding peptide
  MOD_RES (4)..(5)..(37): Xaa is C or S
PPTXXVPTRLSAISILYLDSANNVVLKNYQDMVVESXG

SEQ ID NO: 18328 - protein, 35 aa, Artificial Sequence; identical to SEQ ID NO: 8015
  Cyclic GFR-binding peptide
  MOD_RES (5)..(6): Xaa is C or S

SEQ ID NO: 18329 - protein, 34 aa, Artificial Sequence; identical to SEQ ID NO: 8016
  Cyclic GFR-binding peptide
  MOD_RES (4)..(5): Xaa is C or S

SEQ ID NO: 18330 - protein, 22 aa, Artificial Sequence
  Cyclic GFR-binding peptide
QLSPISVLFIDDSSNVIYKQYE

SEQ ID NO: 18331 - protein, 27 aa, Artificial Sequence
  Cyclic GFR-binding peptide
LSPISVLFIDDSSNVIYKQYENMVVRA

SEQ ID NO: 18332 - protein, 36 aa, Artificial Sequence
  Cyclic GFR-binding peptide
  MOD_RES (5)..(6): Xaa is C or S
IPKAXXVPTELEPLTMLYYDENEKVVEQLSNDMVVE

SEQ ID NO: 18333 - protein, 31 aa, Artificial Sequence
  Cyclic GFR-binding peptide
  MOD_RES (30)..(30): Xaa is C or S
PQALEPLTILYYVGRKPKVEQLSNMIVRSXK

SEQ ID NO: 18334 - protein, 29 aa, Artificial Sequence
  Cyclic GFR-binding peptide
  MOD_RES (27)..(29): Xaa is C or S
LNAISILYFIGKTPKILKKYRMIVKSXKX

SEQ ID NO: 18335 - protein, 37 aa, Artificial Sequence
  Cyclic GFR-binding peptide
  MOD_RES (1)..(2)..(34)..(36): Xaa is C or S
XXAPTQLEPLPVVYYDDSSNVIEQLSNNMVVRAXGXH

SEQ ID NO: 18336 - protein, 30 aa, Artificial Sequence
  Cyclic GFR-binding peptide
  MOD_RES (1)..(1): Xaa is C or S
XAPTQLSPISVLFIDDSSNVIYKQYENMVV

SEQ ID NO: 18337 - protein, 24 aa, Artificial Sequence
  Cyclic GFR-binding peptide
KLEPLTVLYYDDSSNVIEQLSNNM

SEQ ID NO: 18338 - protein, 29 aa, Artificial Sequence
  Cyclic GFR-binding peptide
  MOD_RES (2)..(3): Xaa is C or S
PXXVPQALSPISILFIVGRKPKVYKQYEM

SEQ ID NO: 18339 - protein, 28 aa, Artificial Sequence
  Cyclic GFR-binding peptide
  MOD_RES (1)..(2): Xaa is C or S
XXVPQDLSPISILFIVGRTPKVYKQYEM

SEQ ID NO: 18340 - protein, 31 aa, Artificial Sequence; identical to SEQ ID NO: 8022
  Cyclic GFR-binding peptide
  MOD_RES (4)..(5): Xaa is C or S

SEQ ID NO: 18341 - protein, 33 aa, Artificial Sequence; identical to SEQ ID NO: 8024
  Cyclic GFR-binding peptide
  MOD_RES (5)..(6): Xaa is C or S

SEQ ID NO: 18342 - protein, 27 aa, Artificial Sequence
  Cyclic GFR-binding peptide
LSPISVLFIDDSSNVIYKQYENMVVRS

SEQ ID NO: 18343 - protein, 29 aa, Artificial Sequence
  Cyclic GFR-binding peptide
  MOD_RES (2)..(3): Xaa is C or S
PXXVSQDLNAISILYFIGKTPKILKKYRM

SEQ ID NO: 18344 - protein, 30 aa, Artificial Sequence
  Cyclic GFR-binding peptide
  MOD_RES (2)..(3): Xaa is C or S
AXXVPTELEPLPMVYYDENEKVVEQLSNDM

SEQ ID NO: 18345 - protein, 30 aa, Artificial Sequence
  Cyclic GFR-binding peptide
APTKLEPLTVLYYDDSSNVIEQLSNNMVVR

SEQ ID NO: 18346 - protein, 39 aa, Artificial Sequence
  Cyclic GFR-binding peptide
  MOD_RES (3)..(4)..(36)..(38): Xaa is C or S
KPXXAPTQLEPLPVVYYDDSSNVIEQLSNNMVVRAXGXH

SEQ ID NO: 18347 - protein, 26 aa, Artificial Sequence
  Cyclic GFR-binding peptide
VPQALSPISILFIVGRKPKVYKQYEM

SEQ ID NO: 18348 - protein, 22 aa, Artificial Sequence
  Cyclic GFR-binding peptide
LEPLTMLYYDENEKVVEQLSND

SEQ ID NO: 18349 - protein, 31 aa, Artificial Sequence; identical to SEQ ID NO: 8031
  Cyclic GFR-binding peptide
  MOD_RES (30)..(30): Xaa is C or S

SEQ ID NO: 18350 - protein, 32 aa, Artificial Sequence
  Cyclic GFR-binding peptide
  MOD_RES (3)..(4): Xaa is C or S
KAXXVPTELSPISMLFIDENEKVVYKQYEDMV

SEQ ID NO: 18351 - protein, 29 aa, Artificial Sequence
  Cyclic GFR-binding peptide
  MOD_RES (28)..(28): Xaa is C or S
LSAISILYLDSANNVVLKNYQDMVVESXG

SEQ ID NO: 18352 - protein, 33 aa, Artificial Sequence; identical to SEQ ID NO: 8034
  Cyclic GFR-binding peptide
  MOD_RES (1)..(33): Xaa is C or S

SEQ ID NO: 18353 - protein, 42 aa, Artificial Sequence
  Cyclic GFR-binding peptide
  MOD_RES (6)..(7)..(39)..(41): Xaa is C or S
SIPKAXXVPTELEPLPMVYYDEYDKVVEQLSNEMVVEGXGXR

SEQ ID NO: 18354 - protein, 32 aa, Artificial Sequence; identical to SEQ ID NO: 8037
  Cyclic GFR-binding peptide
  MOD_RES (6)..(6): Xaa is C or S

SEQ ID NO: 18355 - protein, 32 aa, Artificial Sequence
  Cyclic GFR-binding peptide
  MOD_RES (31)..(31): Xaa is C or S
PTKLSPISVLFIDDSSNVIYKQYENMVVRSXG

SEQ ID NO: 18356 - protein, 32 aa, Artificial Sequence; identical to SEQ ID NO: 8038
  Cyclic GFR-binding peptide
  MOD_RES (5)..(6): Xaa is C or S

SEQ ID NO: 18357 - protein, 34 aa, Artificial Sequence; identical to SEQ ID NO: 8040
  Cyclic GFR-binding peptide
  MOD_RES (1)..(2)..(34): Xaa is C or S

SEQ ID NO: 18358 - protein, 31 aa, Artificial Sequence; identical to SEQ ID NO: 8042
  Cyclic GFR-binding peptide
  MOD_RES (2)..(3): Xaa is C or S

SEQ ID NO: 18359 - protein, 24 aa, Artificial Sequence
  Cyclic GFR-binding peptide
PQALNAISILYFVGRKPKVLKKYR

SEQ ID NO: 18360 - protein, 34 aa, Artificial Sequence
  Cyclic GFR-binding peptide
  MOD_RES (1)..(2)..(33): Xaa is C or S
XXVSQDLEPLPIVYYIGKTPKIEQLSNMIVKSXK

SEQ ID NO: 18361 - protein, 37 aa, Artificial Sequence
  Cyclic GFR-binding peptide
  MOD_RES (3)..(4)..(36): Xaa is C or S
KPXXAPTKLEPLTVLYYDDSSNVIEQLSNNMVVRSXG

SEQ ID NO: 18362 - protein, 38 aa, Artificial Sequence
  Cyclic GFR-binding peptide
  MOD_RES (5)..(6)..(37): Xaa is C or S
SASPXXVSQDLEPLPIVYYIGKTPKIEQLSNMIVKSXK

SEQ ID NO: 18363 - protein, 25 aa, Artificial Sequence
  Cyclic GFR-binding peptide
QALSAISILYLVGRKPKVLKNYQMI

SEQ ID NO: 18364 - protein, 34 aa, Artificial Sequence
  Cyclic GFR-binding peptide
  MOD_RES (2)..(3): Xaa is C or S
PXXAPTKLEPLTVLYYDDSSNVIEQLSNNMVVRS

SEQ ID NO: 18365 - protein, 27 aa, Artificial Sequence
  Cyclic GFR-binding peptide
DLSAISILYLVGRTPKVLKNYQMVVKS

SEQ ID NO: 18366 - protein, 32 aa, Artificial Sequence
  Cyclic GFR-binding peptide
  MOD_RES (29)..(31): Xaa is C or S
ELEPLPMVYYDENEKVVEQLSNDMVVEGXGXR

SEQ ID NO: 18367 - protein, 36 aa, Artificial Sequence; identical to SEQ ID NO: 8049
  Cyclic GFR-binding peptide
  MOD_RES (6)..(7): Xaa is C or S

SEQ ID NO: 18368 - protein, 27 aa, Artificial Sequence
  Cyclic GFR-binding peptide
  MOD_RES (1)..(1): Xaa is C or S
XAPTKLSAISVLYLDDSSNVILKNYQN

SEQ ID NO: 18369 - protein, 37 aa, Artificial Sequence
  Cyclic GFR-binding peptide
  MOD_RES (4)..(5)..(37): Xaa is C or S
PKPXXAPTQLEPLTVLYYDDSSNVIEQLSNNMVVRAX

SEQ ID NO: 18370 - protein, 32 aa, Artificial Sequence
  Cyclic GFR-binding peptide
  MOD_RES (4)..(5): Xaa is C or S
PPTXXVPTRLSAISILYLDSANNVVLKNYQDM

SEQ ID NO: 18371 - protein, 36 aa, Artificial Sequence; identical to SEQ ID NO: 8053
  Cyclic GFR-binding peptide
  MOD_RES (1)..(2)..(33)..(35): Xaa is C or S

SEQ ID NO: 18372 - protein, 29 aa, Artificial Sequence
  Cyclic GFR-binding peptide
  MOD_RES (2)..(3): Xaa is C or S
TXXVPTRLEPLPIVYYDSANNVVEQLSND

SEQ ID NO: 18373 - protein, 23 aa, Artificial Sequence
  Cyclic GFR-binding peptide
TKLEPLPVVYYDDSSNVIEQLSN

SEQ ID NO: 18374 - protein, 42 aa, Artificial Sequence
  Cyclic GFR-binding peptide
  MOD_RES (7)..(39)..(41): Xaa is C or S
HVTKPTXAPTKLEPLTVLYYDDSSNVIEQLSNNMVVRSXGXH

SEQ ID NO: 18375 - protein, 26 aa, Artificial Sequence
  Cyclic GFR-binding peptide
  MOD_RES (1)..(1): Xaa is C or S
XVPQDLNAISILYFVGRTPKVLKKYR

SEQ ID NO: 18376 - protein, 29 aa, Artificial Sequence
  Cyclic GFR-binding peptide
  MOD_RES (3)..(4): Xaa is C or S
APXXVPQALNAISILYFVGRKPKVLKKYR

SEQ ID NO: 18377 - protein, 32 aa, Artificial Sequence; identical to SEQ ID NO: 8057
  Cyclic GFR-binding peptide
  MOD_RES (32)..(32): Xaa is C or S

SEQ ID NO: 18378 - protein, 33 aa, Artificial Sequence
  Cyclic GFR-binding peptide
  MOD_RES (1)..(2): Xaa is C or S
XXAPTQLEPLPVVYYDDSSNVIEQLSNNMVVRA

SEQ ID NO: 18379 - protein, 38 aa, Artificial Sequence; identical to SEQ ID NO: 8060
  Cyclic GFR-binding peptide
  MOD_RES (5)..(6)..(38): Xaa is C or S

SEQ ID NO: 18380 - protein, 37 aa, Artificial Sequence; identical to SEQ ID NO: 8061
  Cyclic GFR-binding peptide
  MOD_RES (6)..(7): Xaa is C or S

SEQ ID NO: 18381 - protein, 40 aa, Artificial Sequence
  Cyclic GFR-binding peptide
  MOD_RES (5)..(6)..(38)..(40): Xaa is C or S
IPKAXXVPTELEPLPMVYYDENEKVVEQLSNDMVVEGXGX

SEQ ID NO: 18382 - protein, 33 aa, Artificial Sequence
  Cyclic GFR-binding peptide
  MOD_RES (6)..(7): Xaa is C or S
STPPTXXVPTRLSAISILYLDSANNVVLKNYQD

SEQ ID NO: 18383 - protein, 26 aa, Artificial Sequence
  Cyclic GFR-binding peptide
RLSAISILYLDSANNVVLKNYQDMVV

SEQ ID NO: 18384 - protein, 24 aa, Artificial Sequence
  Cyclic GFR-binding peptide
PQDLSAISILYLVGRTPKVLKNYQ

SEQ ID NO: 18385 - protein, 31 aa, Artificial Sequence
  Cyclic GFR-binding peptide
  MOD_RES (1)..(1): Xaa is C or S
XAPTQLEPLTVLYYDDSSNVIEQLSNNMVVR

SEQ ID NO: 18386 - protein, 30 aa, Artificial Sequence
  Cyclic GFR-binding peptide
  MOD_RES (3)..(4): Xaa is C or S
KAXXVPTELSPISMLFIDEYDKVVYKQYEE

SEQ ID NO: 18387 - protein, 27 aa, Artificial Sequence
  Cyclic GFR-binding peptide
VPQALSPISILFIVGRKPKVYKQYEMI

SEQ ID NO: 18388 - protein, 27 aa, Artificial Sequence
  Cyclic GFR-binding peptide
KLEPLTVLYYDDSSNVIEQLSNNMVVR

SEQ ID NO: 18389 - protein, 30 aa, Artificial Sequence
  Cyclic GFR-binding peptide
  MOD_RES (29)..(29): Xaa is C or S
KLSPISVLFIDDSSNVIYKQYENMVVRSXG

SEQ ID NO: 18390 - protein, 37 aa, Artificial Sequence
  Cyclic GFR-binding peptide
  MOD_RES (1)..(2)..(34)..(36): Xaa is C or S
XXVPTELSPISMLFIDEYDKVVYKQYEEMVVEGXGXR

SEQ ID NO: 18391 - protein, 27 aa, Artificial Sequence
  Cyclic GFR-binding peptide
  MOD_RES (1)..(2): Xaa is C or S
XXVPQALSAISILYLVGRKPKVLKNYQ

SEQ ID NO: 18392 - protein, 30 aa, Artificial Sequence
  Cyclic GFR-binding peptide
PTKLEPLPVVYYDDSSNVIEQLSNNMVVRS

SEQ ID NO: 18393 - protein, 29 aa, Artificial Sequence
  Cyclic GFR-binding peptide
  MOD_RES (1)..(1): Xaa is C or S
XVSQDLSAISILYLIGKTPKILKNYQMIV

SEQ ID NO: 18394 - protein, 31 aa, Artificial Sequence
  Cyclic GFR-binding peptide
  MOD_RES (29)..(31): Xaa is C or S
ELEPLTMLYYDEYDKVVEQLSNEMVVEGXGX

SEQ ID NO: 18395 - protein, 26 aa, Artificial Sequence
  Cyclic GFR-binding peptide
PTRLSAISILYLDSANNVVLKNYQDM

SEQ ID NO: 18396 - protein, 24 aa, Artificial Sequence
  Cyclic GFR-binding peptide
EPLPIVYYDSANNVVEQLSNDMVV

SEQ ID NO: 18397 - protein, 40 aa, Artificial Sequence
  Cyclic GFR-binding peptide
  MOD_RES (5)..(6)..(37)..(39): Xaa is C or S
SASPXXVPQDLEPLPIVYYVGRTPKVEQLSNMVVKSXKXS

SEQ ID NO: 18398 - protein, 32 aa, Artificial Sequence; identical to SEQ ID NO: 8082
  Cyclic GFR-binding peptide
  MOD_RES (5)..(6): Xaa is C or S

SEQ ID NO: 18399 - protein, 28 aa, Artificial Sequence
  Cyclic GFR-binding peptide
  MOD_RES (1)..(1): Xaa is C or S
XAPTQLEPLPVVYYDDSSNVIEQLSNNM

SEQ ID NO: 18400 - protein, 34 aa, Artificial Sequence
  Cyclic GFR-binding peptide
  MOD_RES (6)..(7): Xaa is C or S
YVPKPXXAPTKLEPLTVLYYDDSSNVIEQLSNNM

SEQ ID NO: 18401 - protein, 33 aa, Artificial Sequence
  Cyclic GFR-binding peptide
  MOD_RES (31)..(33): Xaa is C or S
PTQLEPLPVVYYDDSSNVIEQLSNNMVVRAXGX

SEQ ID NO: 18402 - protein, 23 aa, Artificial Sequence
  Cyclic GFR-binding peptide
ALSAISILYLVGRKPKVLKNYQM

SEQ ID NO: 18403 - protein, 32 aa, Artificial Sequence; identical to SEQ ID NO: 8085
  Cyclic GFR-binding peptide
  MOD_RES (4)..(5): Xaa is C or S

SEQ ID NO: 18404 - protein, 36 aa, Artificial Sequence; identical to SEQ ID NO: 8087
  Cyclic GFR-binding peptide
  MOD_RES (1)..(2)..(34)..(36): Xaa is C or S

SEQ ID NO: 18405 - protein, 26 aa, Artificial Sequence
  Cyclic GFR-binding peptide
VPTELNAISMLYFDENEKVVLKKYRD

SEQ ID NO: 18406 - protein, 31 aa, Artificial Sequence
  Cyclic GFR-binding peptide
  MOD_RES (28)..(30): Xaa is C or S
LEPLTVLYYDDSSNVIEQLSNNMVVRAXGXH

SEQ ID NO: 18407 - protein, 30 aa, Artificial Sequence
  Cyclic GFR-binding peptide
  MOD_RES (4)..(5): Xaa is C or S
PKPXXAPTQLEPLTVLYYDDSSNVIEQLSN

SEQ ID NO: 18408 - protein, 41 aa, Artificial Sequence; identical to SEQ ID NO: 8094
  Cyclic GFR-binding peptide
  MOD_RES (6)..(7)..(39)..(41): Xaa is C or S

SEQ ID NO: 18409 - protein, 28 aa, Artificial Sequence
  Cyclic GFR-binding peptide
  MOD_RES (28)..(28): Xaa is C or S
LEPLPVVYYDDSSNVIEQLSNNMVVRSX

SEQ ID NO: 18410 - protein, 31 aa, Artificial Sequence; identical to SEQ ID NO: 8095
  Cyclic GFR-binding peptide
  MOD_RES (2)..(2): Xaa is C or S

SEQ ID NO: 18411 - protein, 32 aa, Artificial Sequence
  Cyclic GFR-binding peptide
  MOD_RES (32)..(32): Xaa is C or S
VPTELEPLTMLYYDEYDKVVEQLSNEMVVEGX

SEQ ID NO: 18412 - protein, 36 aa, Artificial Sequence
  Cyclic GFR-binding peptide
  MOD_RES (5)..(6): Xaa is C or S
TPPTXXVPTRLEPLTILYYDSANNVVEQLSNDMVVE

SEQ ID NO: 18413 - protein, 21 aa, Artificial Sequence
  Cyclic GFR-binding peptide
LSPISILFIVGRTPKVYKQYE

SEQ ID NO: 18414 - protein, 32 aa, Artificial Sequence
  Cyclic GFR-binding peptide
  MOD_RES (1)..(2): Xaa is C or S
XXVPTELEPLPMVYYDENEKVVEQLSNDMVVE

SEQ ID NO: 18415 - protein, 38 aa, Artificial Sequence
  Cyclic GFR-binding peptide
  MOD_RES (4)..(5)..(36)..(38): Xaa is C or S
ASPXXVPQDLSPISILFIVGRTPKVYKQYEMVVKSXKX

SEQ ID NO: 18416 - protein, 24 aa, Artificial Sequence
  Cyclic GFR-binding peptide
ELNAISMLYFDENEKVVLKKYRDM

SEQ ID NO: 18417 - protein, 35 aa, Artificial Sequence
  Cyclic GFR-binding peptide
  MOD_RES (7)..(7): Xaa is C or S
HVTKPTXAPTKLEPLPVVYYDDSSNVIEQLSNNMV

SEQ ID NO: 18418 - protein, 34 aa, Artificial Sequence; identical to SEQ ID NO: 8107
  Cyclic GFR-binding peptide
  MOD_RES (2)..(3)..(34): Xaa is C or S

SEQ ID NO: 18419 - protein, 29 aa, Artificial Sequence
  Cyclic GFR-binding peptide
  MOD_RES (1)..(1): Xaa is C or S
XAPTQLSAISVLYLDDSSNVILKNYQNMV

SEQ ID NO: 18420 - protein, 27 aa, Artificial Sequence
  Cyclic GFR-binding peptide
  MOD_RES (1)..(2): Xaa is C or S
XXVPTRLEPLTILYYDSANNVVEQLSN

SEQ ID NO: 18421 - protein, 31 aa, Artificial Sequence
  Cyclic GFR-binding peptide
  MOD_RES (2)..(3): Xaa is C or S
AXXVPTELEPLPMVYYDENEKVVEQLSNDMV

SEQ ID NO: 18422 - protein, 28 aa, Artificial Sequence
  Cyclic GFR-binding peptide
  MOD_RES (27)..(27): Xaa is C or S
NAISMLYFDEYDKVVLKKYREMVVEGXG

SEQ ID NO: 18423 - protein, 33 aa, Artificial Sequence
  Cyclic GFR-binding peptide
  MOD_RES (31)..(33): Xaa is C or S
VPQDLSPISILFIVGRTPKVYKQYEMVVKSXKX

SEQ ID NO: 18424 - protein, 26 aa, Artificial Sequence
  Cyclic GFR-binding peptide
QDLNAISILYFVGRTPKVLKKYRMVV

SEQ ID NO: 18425 - protein, 34 aa, Artificial Sequence
  Cyclic GFR-binding peptide
  MOD_RES (2)..(3): Xaa is C or S
AXXVPTELSPISMLFIDENEKVVYKQYEDMVVEG

SEQ ID NO: 18426 - protein, 32 aa, Artificial Sequence
  Cyclic GFR-binding peptide
  MOD_RES (1)..(32): Xaa is C or S
XVPQALSPISILFIVGRKPKVYKQYEMIVRSX

SEQ ID NO: 18427 - protein, 41 aa, Artificial Sequence; identical to SEQ ID NO: 8120
  Cyclic GFR-binding peptide
  MOD_RES (6)..(7)..(38)..(40): Xaa is C or S

SEQ ID NO: 18428 - protein, 25 aa, Artificial Sequence
  Cyclic GFR-binding peptide
LNAISILYFVGRKPKVLKKYRMIVR

SEQ ID NO: 18429 - protein, 37 aa, Artificial Sequence
  Cyclic GFR-binding peptide
  MOD_RES (3)..(4)..(36): Xaa is C or S
KPXXAPTQLEPLTVLYYDDSSNVIEQLSNNMVVRAXG

SEQ ID NO: 18430 - protein, 28 aa, Artificial Sequence
  Cyclic GFR-binding peptide
ELSPISMLFIDEYDKVVYKQYEEMVVEG

SEQ ID NO: 18431 - protein, 40 aa, Artificial Sequence; identical to SEQ ID NO: 8124
  Cyclic GFR-binding peptide
  MOD_RES (6)..(7)..(38)..(40): Xaa is C or S

SEQ ID NO: 18432 - protein, 34 aa, Artificial Sequence; identical to SEQ ID NO: 8125
  Cyclic GFR-binding peptide
  MOD_RES (1)..(33): Xaa is C or S

SEQ ID NO: 18433 - protein, 32 aa, Artificial Sequence
  Cyclic GFR-binding peptide
  MOD_RES (30)..(32): Xaa is C or S
SQDLEPLPIVYYIGKTPKIEQLSNMIVKSXKX

SEQ ID NO: 18434 - protein, 37 aa, Artificial Sequence; identical to SEQ ID NO: 8130
  Cyclic GFR-binding peptide
  MOD_RES (6)..(7): Xaa is C or S

SEQ ID NO: 18435 - protein, 32 aa, Artificial Sequence
  Cyclic GFR-binding peptide
  MOD_RES (2)..(2): Xaa is C or S
TXAPTKLSPISVLFIDDSSNVIYKQYENMVVR

SEQ ID NO: 18436 - protein, 29 aa, Artificial Sequence
  Cyclic GFR-binding peptide
VPTELNAISMLYFDENEKVVLKKYRDMVV

SEQ ID NO: 18437 - protein, 36 aa, Artificial Sequence; identical to SEQ ID NO: 8134
  Cyclic GFR-binding peptide
  MOD_RES (1)..(2)..(33)..(35): Xaa is C or S

SEQ ID NO: 18438 - protein, 36 aa, Artificial Sequence; identical to SEQ ID NO: 8135
  Cyclic GFR-binding peptide
  MOD_RES (5)..(6): Xaa is C or S

SEQ ID NO: 18439 - protein, 33 aa, Artificial Sequence
  Cyclic GFR-binding peptide
  MOD_RES (4)..(5): Xaa is C or S
PKPXXAPTQLSPISVLFIDDSSNVIYKQYENMV

SEQ ID NO: 18440 - protein, 30 aa, Artificial Sequence
  Cyclic GFR-binding peptide
  MOD_RES (30)..(30): Xaa is C or S
TKLSPISVLFIDDSSNVIYKQYENMVVRSX

SEQ ID NO: 18441 - protein, 37 aa, Artificial Sequence
  Cyclic GFR-binding peptide
  MOD_RES (3)..(35)..(37): Xaa is C or S
PTXAPTKLSPISVLFIDDSSNVIYKQYENMVVRSXGX

SEQ ID NO: 18442 - protein, 32 aa, Artificial Sequence
  Cyclic GFR-binding peptide
  MOD_RES (31)..(31): Xaa is C or S
PTKLEPLTVLYYDDSSNVIEQLSNNMVVRSXG

SEQ ID NO: 18443 - protein, 33 aa, Artificial Sequence; identical to SEQ ID NO: 8138
  Cyclic GFR-binding peptide
  MOD_RES (6)..(7): Xaa is C or S

SEQ ID NO: 18444 - protein, 26 aa, Artificial Sequence
  Cyclic GFR-binding peptide
VPTELEPLTMLYYDEYDKVVEQLSNE

SEQ ID NO: 18445 - protein, 33 aa, Artificial Sequence; identical to SEQ ID NO: 8140
  Cyclic GFR-binding peptide
  MOD_RES (1)..(2): Xaa is C or S

SEQ ID NO: 18446 - protein, 32 aa, Artificial Sequence; identical to SEQ ID NO: 8143
  Cyclic GFR-binding peptide
  MOD_RES (2)..(3): Xaa is C or S

SEQ ID NO: 18447 - protein, 30 aa, Artificial Sequence
  Cyclic GFR-binding peptide
  MOD_RES (29)..(29): Xaa is C or S
RLSAISILYLDSANNVVLKNYQDMVVESXG

SEQ ID NO: 18448 - protein, 31 aa, Artificial Sequence
  Cyclic GFR-binding peptide
  MOD_RES (29)..(31): Xaa is C or S
ELSPISMLFIDEYDKVVYKQYEEMVVEGXGX

SEQ ID NO: 18449 - protein, 28 aa, Artificial Sequence
  Cyclic GFR-binding peptide
  MOD_RES (28)..(28): Xaa is C or S
LEPLPMVYYDEYDKVVEQLSNEMVVEGX

SEQ ID NO: 18450 - protein, 37 aa, Artificial Sequence
  Cyclic GFR-binding peptide
  MOD_RES (4)..(5)..(36): Xaa is C or S
ASPXXVPQDLSPISILFIVGRTPKVYKQYEMVVKSXK

SEQ ID NO: 18451 - protein, 34 aa, Artificial Sequence
  Cyclic GFR-binding peptide
  MOD_RES (31)..(33): Xaa is C or S
PTELSPISMLFIDEYDKVVYKQYEEMVVEGXGXR

SEQ ID NO: 18452 - protein, 25 aa, Artificial Sequence
  Cyclic GFR-binding peptide
DLEPLPIVYYVGRTPKVEQLSNMVV

SEQ ID NO: 18453 - protein, 32 aa, Artificial Sequence
  Cyclic GFR-binding peptide
  MOD_RES (5)..(5): Xaa is C or S
TKPTXAPTKLEPLTVLYYDDSSNVIEQLSNNM

SEQ ID NO: 18454 - protein, 26 aa, Artificial Sequence
  Cyclic GFR-binding peptide
VPTELEPLPMVYYDEYDKVVEQLSNE

SEQ ID NO: 18455 - protein, 26 aa, Artificial Sequence
  Cyclic GFR-binding peptide
SAISILYLDSANNVVLKNYQDMVVES

SEQ ID NO: 18456 - protein, 27 aa, Artificial Sequence
  Cyclic GFR-binding peptide
VPTRLEPLTILYYDSANNVVEQLSNDM

SEQ ID NO: 18457 - protein, 37 aa, Artificial Sequence; identical to SEQ ID NO: 8149
  Cyclic GFR-binding peptide
  MOD_RES (1)..(2)..(34)..(36): Xaa is C or S

SEQ ID NO: 18458 - protein, 26 aa, Artificial Sequence
  Cyclic GFR-binding peptide
EPLPMVYYDEYDKVVEQLSNEMVVEG

SEQ ID NO: 18459 - protein, 36 aa, Artificial Sequence; identical to SEQ ID NO: 8157
  Cyclic GFR-binding peptide
  MOD_RES (5)..(6): Xaa is C or S

SEQ ID NO: 18460 - protein, 31 aa, Artificial Sequence
  Cyclic GFR-binding peptide
  MOD_RES (2)..(2): Xaa is C or S
TXAPTKLSPISVLFIDDSSNVIYKQYENMVV

SEQ ID NO: 18461 - protein, 39 aa, Artificial Sequence
  Cyclic GFR-binding peptide
  MOD_RES (4)..(5)..(36)..(38): Xaa is C or S
AAPXXVPQALEPLTILYYVGRKPKVEQLSNMIVRSXKXS

SEQ ID NO: 18462 - protein, 22 aa, Artificial Sequence
  Cyclic GFR-binding peptide
LEPLTVLYYDDSSNVIEQLSNN

SEQ ID NO: 18463 - protein, 40 aa, Artificial Sequence
  Cyclic GFR-binding peptide
  MOD_RES (5)..(6)..(38)..(40): Xaa is C or S
VPKPXXAPTQLEPLPVVYYDDSSNVIEQLSNNMVVRAXGX

SEQ ID NO: 18464 - protein, 27 aa, Artificial Sequence
  Cyclic GFR-binding peptide
  MOD_RES (27)..(27): Xaa is C or S
EPLTMLYYDENEKVVEQLSNDMVVEGX

SEQ ID NO: 18465 - protein, 32 aa, Artificial Sequence
  Cyclic GFR-binding peptide
  MOD_RES (1)..(2): Xaa is C or S
XXAPTQLEPLTVLYYDDSSNVIEQLSNNMVVR

SEQ ID NO: 18466 - protein, 34 aa, Artificial Sequence
  Cyclic GFR-binding peptide
  MOD_RES (5)..(6): Xaa is C or S
TPPTXXVPTRLSAISILYLDSANNVVLKNYQDMV

SEQ ID NO: 18467 - protein, 32 aa, Artificial Sequence
  Cyclic GFR-binding peptide
  MOD_RES (5)..(6): Xaa is C or S
IPKAXXVPTELSPISMLFIDENEKVVYKQYED

SEQ ID NO: 18468 - protein, 34 aa, Artificial Sequence
  Cyclic GFR-binding peptide
  MOD_RES (2)..(3): Xaa is C or S
PXXAPTKLEPLPVVYYDDSSNVIEQLSNNMVVRS

SEQ ID NO: 18469 - protein, 25 aa, Artificial Sequence
  Cyclic GFR-binding peptide
LEPLPVVYYDDSSNVIEQLSNNMVV

SEQ ID NO: 18470 - protein, 40 aa, Artificial Sequence
  Cyclic GFR-binding peptide
  MOD_RES (7)..(39): Xaa is C or S
HVTKPTXAPTKLSPISVLFIDDSSNVIYKQYENMVVRSXG

SEQ ID NO: 18471 - protein, 23 aa, Artificial Sequence
  Cyclic GFR-binding peptide
EPLTMLYYDENEKVVEQLSNDMV

SEQ ID NO: 18472 - protein, 32 aa, Artificial Sequence
  Cyclic GFR-binding peptide
  MOD_RES (4)..(5): Xaa is C or S
PKAXXVPTELEPLTMLYYDENEKVVEQLSNDM

SEQ ID NO: 18473 - protein, 38 aa, Artificial Sequence
  Cyclic GFR-binding peptide
  MOD_RES (6)..(7)..(38): Xaa is C or S
ASASPXXVSQDLSPISILFIIGKTPKIYKQYEMIVKSX

SEQ ID NO: 18474 - protein, 27 aa, Artificial Sequence
  Cyclic GFR-binding peptide
QDLSPISILFIVGRTPKVYKQYEMVVK

SEQ ID NO: 18475 - protein, 41 aa, Artificial Sequence
  Cyclic GFR-binding peptide
  MOD_RES (6)..(7)..(39)..(41): Xaa is C or S
YVPKPXXAPTKLEPLPVVYYDDSSNVIEQLSNNMVVRSXGX

SEQ ID NO: 18476 - protein, 35 aa, Artificial Sequence
  Cyclic GFR-binding peptide
  MOD_RES (1)..(33)..(35): Xaa is C or S
XVPTELSPISMLFIDEYDKVVYKQYEEMVVEGXGX

SEQ ID NO: 18477 - protein, 27 aa, Artificial Sequence
  Cyclic GFR-binding peptide
  MOD_RES (1)..(1): Xaa is C or S
XAPTQLSPISVLFIDDSSNVIYKQYEN

SEQ ID NO: 18478 - protein, 26 aa, Artificial Sequence
  Cyclic GFR-binding peptide
DLNAISILYFVGRTPKVLKKYRMVVK

SEQ ID NO: 18479 - protein, 31 aa, Artificial Sequence
  Cyclic GFR-binding peptide
  MOD_RES (3)..(4): Xaa is C or S
SPXXVSQDLEPLPIVYYIGKTPKIEQLSNMI

SEQ ID NO: 18480 - protein, 27 aa, Artificial Sequence
  Cyclic GFR-binding peptide
PTELSPISMLFIDEYDKVVYKQYEEMV

SEQ ID NO: 18481 - protein, 34 aa, Artificial Sequence
  Cyclic GFR-binding peptide
  MOD_RES (31)..(33): Xaa is C or S
VPQDLEPLPIVYYVGRTPKVEQLSNMVVKSXKXS

SEQ ID NO: 18482 - protein, 33 aa, Artificial Sequence
  Cyclic GFR-binding peptide
  MOD_RES (6)..(6): Xaa is C or S
VTKPTXAPTKLEPLPVVYYDDSSNVIEQLSNNM

SEQ ID NO: 18483 - protein, 33 aa, Artificial Sequence; identical to SEQ ID NO: 8180
  Cyclic GFR-binding peptide
  MOD_RES (3)..(4): Xaa is C or S

SEQ ID NO: 18484 - protein, 29 aa, Artificial Sequence
  Cyclic GFR-binding peptide
  MOD_RES (1)..(2): Xaa is C or S
XXAPTKLEPLPVVYYDDSSNVIEQLSNNM

SEQ ID NO: 18485 - protein, 28 aa, Artificial Sequence
  Cyclic GFR-binding peptide
  MOD_RES (1)..(2): Xaa is C or S
XXAPTQLEPLTVLYYDDSSNVIEQLSNN

SEQ ID NO: 18486 - protein, 27 aa, Artificial Sequence
  Cyclic GFR-binding peptide
DLSAISILYLIGKTPKILKNYQMIVKS

SEQ ID NO: 18487 - protein, 29 aa, Artificial Sequence
  Cyclic GFR-binding peptide
  MOD_RES (26)..(28): Xaa is C or S
SAISILYLVGRKPKVLKNYQMIVRSXKXS

SEQ ID NO: 18488 - protein, 36 aa, Artificial Sequence
  Cyclic GFR-binding peptide
  MOD_RES (1)..(2)..(34)..(36): Xaa is C or S
XXAPTKLEPLPVVYYDDSSNVIEQLSNNMVVRSXGX

SEQ ID NO: 18489 - protein, 36 aa, Artificial Sequence
  Cyclic GFR-binding peptide
  MOD_RES (3)..(35): Xaa is C or S
PTXAPTKLSPISVLFIDDSSNVIYKQYENMVVRSXG

SEQ ID NO: 18490 - protein, 39 aa, Artificial Sequence
  Cyclic GFR-binding peptide
  MOD_RES (6)..(7)..(39): Xaa is C or S
SIPKAXXVPTELEPLPMVYYDEYDKVVEQLSNEMVVEGX

SEQ ID NO: 18491 - protein, 32 aa, Artificial Sequence
  Cyclic GFR-binding peptide
  MOD_RES (31)..(31): Xaa is C or S
PTQLEPLTVLYYDDSSNVIEQLSNNMVVRAXG

SEQ ID NO: 18492 - protein, 28 aa, Artificial Sequence
  Cyclic GFR-binding peptide
  MOD_RES (1)..(1): Xaa is C or S
XVPTELSPISMLFIDENEKVVYKQYEDM

SEQ ID NO: 18493 - protein, 29 aa, Artificial Sequence
  Cyclic GFR-binding peptide
TKLEPLPVVYYDDSSNVIEQLSNNMVVRS

SEQ ID NO: 18494 - protein, 27 aa, Artificial Sequence
  Cyclic GFR-binding peptide
  MOD_RES (1)..(2): Xaa is C or S
XXAPTKLSPISVLFIDDSSNVIYKQYE

SEQ ID NO: 18495 - protein, 29 aa, Artificial Sequence
  Cyclic GFR-binding peptide
VPTELEPLTMLYYDENEKVVEQLSNDMVV

SEQ ID NO: 18496 - protein, 28 aa, Artificial Sequence
  Cyclic GFR-binding peptide
  MOD_RES (26)..(28): Xaa is C or S
SAISILYLIGKTPKILKNYQMIVKSXKX

SEQ ID NO: 18497 - protein, 39 aa, Artificial Sequence
  Cyclic GFR-binding peptide
  MOD_RES (4)..(5)..(37)..(39): Xaa is C or S
PKAXXVPTELEPLPMVYYDEYDKVVEQLSNEMVVEGXGX

SEQ ID NO: 18498 - protein, 29 aa, Artificial Sequence
  Cyclic GFR-binding peptide
  MOD_RES (28)..(28): Xaa is C or S
ALEPLTILYYVGRKPKVEQLSNMIVRSXK

SEQ ID NO: 18499 - protein, 33 aa, Artificial Sequence
  Cyclic GFR-binding peptide
  MOD_RES (31)..(33): Xaa is C or S
VSQDLSPISILFIIGKTPKIYKQYEMIVKSXKX

SEQ ID NO: 18500 - protein, 29 aa, Artificial Sequence
  Cyclic GFR-binding peptide
PQDLSAISILYLVGRTPKVLKNYQMVVKS

SEQ ID NO: 18501 - protein, 34 aa, Artificial Sequence; identical to SEQ ID NO: 8198
  Cyclic GFR-binding peptide
  MOD_RES (4)..(5): Xaa is C or S

SEQ ID NO: 18502 - protein, 35 aa, Artificial Sequence
  Cyclic GFR-binding peptide
  MOD_RES (1)..(33)..(35): Xaa is C or S
XVPTELEPLTMLYYDEYDKVVEQLSNEMVVEGXGX

SEQ ID NO: 18503 - protein, 37 aa, Artificial Sequence
  Cyclic GFR-binding peptide
  MOD_RES (3)..(35)..(37): Xaa is C or S
PTXAPTKLEPLTVLYYDDSSNVIEQLSNNMVVRSXGX

SEQ ID NO: 18504 - protein, 26 aa, Artificial Sequence
  Cyclic GFR-binding peptide
RLEPLTILYYDSANNVVEQLSNDMVV

SEQ ID NO: 18505 - protein, 30 aa, Artificial Sequence
  Cyclic GFR-binding peptide
  MOD_RES (27)..(29): Xaa is C or S
EPLTMLYYDEYDKVVEQLSNEMVVEGXGXR

SEQ ID NO: 18506 - protein, 29 aa, Artificial Sequence
  Cyclic GFR-binding peptide
  MOD_RES (3)..(4): Xaa is C or S
KAXXVPTELEPLPMVYYDEYDKVVEQLSN

SEQ ID NO: 18507 - protein, 28 aa, Artificial Sequence
  Cyclic GFR-binding peptide
  MOD_RES (26)..(28): Xaa is C or S
SAISILYLVGRKPKVLKNYQMIVRSXKX

SEQ ID NO: 18508 - protein, 30 aa, Artificial Sequence
  Cyclic GFR-binding peptide
  MOD_RES (29)..(29): Xaa is C or S
KLEPLPVVYYDDSSNVIEQLSNNMVVRSXG

SEQ ID NO: 18509 - protein, 24 aa, Artificial Sequence
  Cyclic GFR-binding peptide
ALSPISILFIVGRKPKVYKQYEMI

SEQ ID NO: 18510 - protein, 29 aa, Artificial Sequence
  Cyclic GFR-binding peptide
PTELSPISMLFIDEYDKVVYKQYEEMVVE

SEQ ID NO: 18511 - protein, 29 aa, Artificial Sequence
  Cyclic GFR-binding peptide
  MOD_RES (29)..(29): Xaa is C or S
QLEPLPVVYYDDSSNVIEQLSNNMVVRAX

SEQ ID NO: 18512 - protein, 31 aa, Artificial Sequence
  Cyclic GFR-binding peptide
  MOD_RES (2)..(3): Xaa is C or S
PXXVPQALEPLTILYYVGRKPKVEQLSNMIV

SEQ ID NO: 18513 - protein, 35 aa, Artificial Sequence; identical to SEQ ID NO: 8212
  Cyclic GFR-binding peptide
  MOD_RES (5)..(6): Xaa is C or S

SEQ ID NO: 18514 - protein, 32 aa, Artificial Sequence
  Cyclic GFR-binding peptide
  MOD_RES (4)..(5): Xaa is C or S
PKAXXVPTELEPLPMVYYDEYDKVVEQLSNEM

SEQ ID NO: 18515 - protein, 35 aa, Artificial Sequence
  Cyclic GFR-binding peptide
  MOD_RES (6)..(7): Xaa is C or S
ASASPXXVPQDLSPISILFIVGRTPKVYKQYEMVV

SEQ ID NO: 18516 - protein, 33 aa, Artificial Sequence
  Cyclic GFR-binding peptide
  MOD_RES (31)..(33): Xaa is C or S
PTELEPLTMLYYDENEKVVEQLSNDMVVEGXGX

SEQ ID NO: 18517 - protein, 24 aa, Artificial Sequence
  Cyclic GFR-binding peptide
LEPLTILYYDSANNVVEQLSNDMV

SEQ ID NO: 18518 - protein, 23 aa, Artificial Sequence
  Cyclic GFR-binding peptide
DLEPLPIVYYVGRTPKVEQLSNM

SEQ ID NO: 18519 - protein, 31 aa, Artificial Sequence
  Cyclic GFR-binding peptide
  MOD_RES (4)..(5): Xaa is C or S
PPTXXVPTRLNAISILYFDSANNVVLKKYRD

SEQ ID NO: 18520 - protein, 39 aa, Artificial Sequence; identical to SEQ ID NO: 8216
  Cyclic GFR-binding peptide
  MOD_RES (5)..(6)..(37)..(39): Xaa is C or S

SEQ ID NO: 18521 - protein, 36 aa, Artificial Sequence
  Cyclic GFR-binding peptide
  MOD_RES (1)..(33)..(35): Xaa is C or S
XVPTELSPISMLFIDEYDKVVYKQYEEMVVEGXGXR

SEQ ID NO: 18522 - protein, 22 aa, Artificial Sequence
  Cyclic GFR-binding peptide
ALNAISILYFVGRKPKVLKKYR

SEQ ID NO: 18523 - protein, 28 aa, Artificial Sequence
  Cyclic GFR-binding peptide
  MOD_RES (2)..(3): Xaa is C or S
PXXVSQDLEPLPIVYYIGKTPKIEQLSN

SEQ ID NO: 18524 - protein, 38 aa, Artificial Sequence
  Cyclic GFR-binding peptide
  MOD_RES (3)..(4)..(36)..(38): Xaa is C or S
KPXXAPTQLEPLPVVYYDDSSNVIEQLSNNMVVRAXGX

SEQ ID NO: 18525 - protein, 21 aa, Artificial Sequence
  Cyclic GFR-binding peptide
SAISILYLVGRTPKVLKNYQM

SEQ ID NO: 18526 - protein, 37 aa, Artificial Sequence; identical to SEQ ID NO: 8225
  Cyclic GFR-binding peptide
  MOD_RES (6)..(7): Xaa is C or S

SEQ ID NO: 18527 - protein, 24 aa, Artificial Sequence
  Cyclic GFR-binding peptide
TRLSAISILYLDSANNVVLKNYQD

SEQ ID NO: 18528 - protein, 29 aa, Artificial Sequence
  Cyclic GFR-binding peptide
APTQLSPISVLFIDDSSNVIYKQYENMVV

SEQ ID NO: 18529 - protein, 28 aa, Artificial Sequence
  Cyclic GFR-binding peptide
  MOD_RES (28)..(28): Xaa is C or S
DLSAISILYLIGKTPKILKNYQMIVKSX

SEQ ID NO: 18530 - protein, 31 aa, Artificial Sequence; identical to SEQ ID NO: 8232
  Cyclic GFR-binding peptide
  MOD_RES (1)..(2): Xaa is C or S

SEQ ID NO: 18531 - protein, 38 aa, Artificial Sequence; identical to SEQ ID NO: 8233
  Cyclic GFR-binding peptide
  MOD_RES (4)..(5)..(37): Xaa is C or S

SEQ ID NO: 18532 - protein, 32 aa, Artificial Sequence; identical to SEQ ID NO: 8234
  Cyclic GFR-binding peptide
  MOD_RES (2)..(3): Xaa is C or S

SEQ ID NO: 18533 - protein, 32 aa, Artificial Sequence
  Cyclic GFR-binding peptide
  MOD_RES (1)..(2): Xaa is C or S
XXAPTKLEPLTVLYYDDSSNVIEQLSNNMVVR

SEQ ID NO: 18534 - protein, 26 aa, Artificial Sequence
  Cyclic GFR-binding peptide
APTQLEPLTVLYYDDSSNVIEQLSNN

SEQ ID NO: 18535 - protein, 31 aa, Artificial Sequence; identical to SEQ ID NO: 8235
  Cyclic GFR-binding peptide
  MOD_RES (1)..(2): Xaa is C or S

SEQ ID NO: 18536 - protein, 32 aa, Artificial Sequence
  Cyclic GFR-binding peptide
  MOD_RES (30)..(32): Xaa is C or S
PQALEPLTILYYVGRKPKVEQLSNMIVRSXKX

SEQ ID NO: 18537 - protein, 31 aa, Artificial Sequence; identical to SEQ ID NO: 8236
  Cyclic GFR-binding peptide
  MOD_RES (30)..(30): Xaa is C or S

SEQ ID NO: 18538 - protein, 27 aa, Artificial Sequence
  Cyclic GFR-binding peptide
  MOD_RES (1)..(2): Xaa is C or S
XXVPTRLSAISILYLDSANNVVLKNYQ

SEQ ID NO: 18539 - protein, 31 aa, Artificial Sequence; identical to SEQ ID NO: 8247
  Cyclic GFR-binding peptide
  MOD_RES (31)..(31): Xaa is C or S

SEQ ID NO: 18540 - protein, 26 aa, Artificial Sequence
  Cyclic GFR-binding peptide
APTQLSPISVLFIDDSSNVIYKQYEN

SEQ ID NO: 18541 - protein, 29 aa, Artificial Sequence
  Cyclic GFR-binding peptide
  MOD_RES (2)..(3): Xaa is C or S
TXXVPTRLEPLTILYYDSANNVVEQLSND

SEQ ID NO: 18542 - protein, 26 aa, Artificial Sequence
  Cyclic GFR-binding peptide
SPISMLFIDEYDKVVYKQYEEMVVEG

SEQ ID NO: 18543 - protein, 36 aa, Artificial Sequence
  Cyclic GFR-binding peptide
  MOD_RES (2)..(3)..(35): Xaa is C or S
AXXVPTELEPLPMVYYDENEKVVEQLSNDMVVEGXG

SEQ ID NO: 18544 - protein, 30 aa, Artificial Sequence
  Cyclic GFR-binding peptide
  MOD_RES (4)..(5): Xaa is C or S
PKPXXAPTKLSPISVLFIDDSSNVIYKQYE

SEQ ID NO: 18545 - protein, 27 aa, Artificial Sequence
  Cyclic GFR-binding peptide
TELEPLPMVYYDEYDKVVEQLSNEMVV

SEQ ID NO: 18546 - protein, 31 aa, Artificial Sequence
  Cyclic GFR-binding peptide
  MOD_RES (1)..(2): Xaa is C or S
XXVPQDLSPISILFIVGRTPKVYKQYEMVVK

SEQ ID NO: 18547 - protein, 38 aa, Artificial Sequence
  Cyclic GFR-binding peptide
  MOD_RES (6)..(7)..(38): Xaa is C or S
ASAAPXXVPQALEPLTILYYVGRKPKVEQLSNMIVRSX

SEQ ID NO: 18548 - protein, 29 aa, Artificial Sequence
  Cyclic GFR-binding peptide
  MOD_RES (27)..(29): Xaa is C or S
SAISILYLDSANNVVLKNYQDMVVESXGX

SEQ ID NO: 18549 - protein, 35 aa, Artificial Sequence
  Cyclic GFR-binding peptide
  MOD_RES (32)..(34): Xaa is C or S
VPTELEPLPMVYYDENEKVVEQLSNDMVVEGXGXR

SEQ ID NO: 18550 - protein, 40 aa, Artificial Sequence
  Cyclic GFR-binding peptide
  MOD_RES (5)..(6)..(38)..(40): Xaa is C or S
IPKAXXVPTELEPLPMVYYDEYDKVVEQLSNEMVVEGXGX

SEQ ID NO: 18551 - protein, 30 aa, Artificial Sequence
  Cyclic GFR-binding peptide
  MOD_RES (28)..(30): Xaa is C or S
LSAISILYLDSANNVVLKNYQDMVVESXGX

SEQ ID NO: 18552 - protein, 31 aa, Artificial Sequence
  Cyclic GFR-binding peptide
  MOD_RES (2)..(3): Xaa is C or S
PXXVSQDLEPLPIVYYIGKTPKIEQLSNMIV

SEQ ID NO: 18553 - protein, 31 aa, Artificial Sequence
  Cyclic GFR-binding peptide
  MOD_RES (3)..(4): Xaa is C or S
KAXXVPTELEPLPMVYYDEYDKVVEQLSNEM

SEQ ID NO: 18554 - protein, 31 aa, Artificial Sequence
  Cyclic GFR-binding peptide
  MOD_RES (5)..(6): Xaa is C or S
SASPXXVSQDLEPLPIVYYIGKTPKIEQLSN

SEQ ID NO: 18555 - protein, 28 aa, Artificial Sequence
  Cyclic GFR-binding peptide
TRLNAISILYFDSANNVVLKKYRDMVVE

SEQ ID NO: 18556 - protein, 28 aa, Artificial Sequence
  Cyclic GFR-binding peptide
SQDLEPLPIVYYIGKTPKIEQLSNMIVK

SEQ ID NO: 18557 - protein, 34 aa, Artificial Sequence; identical to SEQ ID NO: 8264
  Cyclic GFR-binding peptide
  MOD_RES (6)..(7): Xaa is C or S

SEQ ID NO: 18558 - protein, 33 aa, Artificial Sequence
  Cyclic GFR-binding peptide
  MOD_RES (6)..(7): Xaa is C or S
TVPKPXXAPTQLEPLPVVYYDDSSNVIEQLSNN

SEQ ID NO: 18559 - protein, 30 aa, Artificial Sequence; identical to SEQ ID NO: 8266
  Cyclic GFR-binding peptide
  MOD_RES (3)..(4): Xaa is C or S

SEQ ID NO: 18560 - protein, 29 aa, Artificial Sequence
  Cyclic GFR-binding peptide
TELSPISMLFIDENEKVVYKQYEDMVVEG

SEQ ID NO: 18561 - protein, 33 aa, Artificial Sequence
  Cyclic GFR-binding peptide
  MOD_RES (1)..(2)..(33): Xaa is C or S
XXVSQDLSPISILFIIGKTPKIYKQYEMIVKSX

SEQ ID NO: 18562 - protein, 25 aa, Artificial Sequence
  Cyclic GFR-binding peptide
VPTELSPISMLFIDENEKVVYKQYE

SEQ ID NO: 18563 - protein, 26 aa, Artificial Sequence
  Cyclic GFR-binding peptide
  MOD_RES (1)..(1): Xaa is C or S
XVPTELEPLPMVYYDENEKVVEQLSN

SEQ ID NO: 18564 - protein, 30 aa, Artificial Sequence
  Cyclic GFR-binding peptide
  MOD_RES (30)..(30): Xaa is C or S
TQLSPISVLFIDDSSNVIYKQYENMVVRAX

SEQ ID NO: 18565 - protein, 34 aa, Artificial Sequence
  Cyclic GFR-binding peptide
  MOD_RES (6)..(7): Xaa is C or S
TVPKPXXAPTQLSPISVLFIDDSSNVIYKQYENM

SEQ ID NO: 18566 - protein, 27 aa, Artificial Sequence
  Cyclic GFR-binding peptide
SQDLSPISILFIIGKTPKIYKQYEMIV

SEQ ID NO: 18567 - protein, 31 aa, Artificial Sequence; identical to SEQ ID NO: 8272
  Cyclic GFR-binding peptide
  MOD_RES (1)..(2): Xaa is C or S

SEQ ID NO: 18568 - protein, 27 aa, Artificial Sequence
  Cyclic GFR-binding peptide
  MOD_RES (1)..(2): Xaa is C or S
XXVPQDLSAISILYLVGRTPKVLKNYQ

SEQ ID NO: 18569 - protein, 25 aa, Artificial Sequence
  Cyclic GFR-binding peptide
SQDLNAISILYFIGKTPKILKKYRM

SEQ ID NO: 18570 - protein, 28 aa, Artificial Sequence
  Cyclic GFR-binding peptide
  MOD_RES (1)..(1): Xaa is C or S
XVPTELEPLPMVYYDEYDKVVEQLSNEM

SEQ ID NO: 18571 - protein, 26 aa, Artificial Sequence
  Cyclic GFR-binding peptide
TELEPLTMLYYDEYDKVVEQLSNEMV

SEQ ID NO: 18572 - protein, 32 aa, Artificial Sequence
  Cyclic GFR-binding peptide
  MOD_RES (3)..(4): Xaa is C or S
SPXXVPQDLEPLPIVYYVGRTPKVEQLSNMVV

SEQ ID NO: 18573 - protein, 34 aa, Artificial Sequence; identical to SEQ ID NO: 8279
  Cyclic GFR-binding peptide
  MOD_RES (7)..(7): Xaa is C or S

SEQ ID NO: 18574 - protein, 29 aa, Artificial Sequence
  Cyclic GFR-binding peptide
  MOD_RES (27)..(29): Xaa is C or S
LEPLPIVYYIGKTPKIEQLSNMIVKSXKX

SEQ ID NO: 18575 - protein, 36 aa, Artificial Sequence
  Cyclic GFR-binding peptide
  MOD_RES (5)..(6): Xaa is C or S
IPKAXXVPTELEPLPMVYYDENEKVVEQLSNDMVVE

SEQ ID NO: 18576 - protein, 35 aa, Artificial Sequence
  Cyclic GFR-binding peptide
  MOD_RES (5)..(6): Xaa is C or S
VPKPXXAPTQLEPLPVVYYDDSSNVIEQLSNNMVV

SEQ ID NO: 18577 - protein, 22 aa, Artificial Sequence
  Cyclic GFR-binding peptide
EPLPIVYYDSANNVVEQLSNDM

SEQ ID NO: 18578 - protein, 29 aa, Artificial Sequence
  Cyclic GFR-binding peptide
PTKLSAISVLYLDDSSNVILKNYQNMVVR

SEQ ID NO: 18579 - protein, 34 aa, Artificial Sequence
  Cyclic GFR-binding peptide
  MOD_RES (32)..(34): Xaa is C or S
VPTRLSAISILYLDSANNVVLKNYQDMVVESXGX

SEQ ID NO: 18580 - protein, 30 aa, Artificial Sequence
  Cyclic GFR-binding peptide
  MOD_RES (1)..(1): Xaa is C or S
XVPTELEPLTMLYYDEYDKVVEQLSNEMVV

SEQ ID NO: 18581 - protein, 34 aa, Artificial Sequence
  Cyclic GFR-binding peptide
  MOD_RES (7)..(7): Xaa is C or S
HVTKPTXAPTKLEPLPVVYYDDSSNVIEQLSNNM

SEQ ID NO: 18582 - protein, 26 aa, Artificial Sequence
  Cyclic GFR-binding peptide
  MOD_RES (1)..(1): Xaa is C or S
XVPTRLEPLTILYYDSANNVVEQLSN

SEQ ID NO: 18583 - protein, 24 aa, Artificial Sequence
  Cyclic GFR-binding peptide
QDLNAISILYFVGRTPKVLKKYRM

SEQ ID NO: 18584 - protein, 23 aa, Artificial Sequence
  Cyclic GFR-binding peptide
DLSAISILYLVGRTPKVLKNYQM

SEQ ID NO: 18585 - protein, 32 aa, Artificial Sequence
  Cyclic GFR-binding peptide
  MOD_RES (1)..(2): Xaa is C or S
XXAPTQLEPLPVVYYDDSSNVIEQLSNNMVVR

SEQ ID NO: 18586 - protein, 26 aa, Artificial Sequence
  Cyclic GFR-binding peptide
ELEPLTMLYYDENEKVVEQLSNDMVV

SEQ ID NO: 18587 - protein, 29 aa, Artificial Sequence
  Cyclic GFR-binding peptide
  MOD_RES (2)..(3): Xaa is C or S
AXXVPTELNAISMLYFDENEKVVLKKYRD

SEQ ID NO: 18588 - protein, 30 aa, Artificial Sequence; identical to SEQ ID NO: 8296
  Cyclic GFR-binding peptide
  MOD_RES (28)..(30): Xaa is C or S

SEQ ID NO: 18589 - protein, 30 aa, Artificial Sequence
  Cyclic GFR-binding peptide
  MOD_RES (30)..(30): Xaa is C or S
TRLEPLTILYYDSANNVVEQLSNDMVVESX

SEQ ID NO: 18590 - protein, 39 aa, Artificial Sequence; identical to SEQ ID NO: 8298
  Cyclic GFR-binding peptide
  MOD_RES (6)..(7)..(39): Xaa is C or S

SEQ ID NO: 18591 - protein, 25 aa, Artificial Sequence
  Cyclic GFR-binding peptide
SAISILYLVGRTPKVLKNYQMVVKS

SEQ ID NO: 18592 - protein, 32 aa, Artificial Sequence
  Cyclic GFR-binding peptide
  MOD_RES (5)..(6): Xaa is C or S
TPPTXXVPTRLEPLTILYYDSANNVVEQLSND

SEQ ID NO: 18593 - protein, 35 aa, Artificial Sequence; identical to SEQ ID NO: 8300
  Cyclic GFR-binding peptide
  MOD_RES (2)..(3)..(34): Xaa is C or S

SEQ ID NO: 18594 - protein, 29 aa, Artificial Sequence
  Cyclic GFR-binding peptide
  MOD_RES (29)..(29): Xaa is C or S
ELSPISMLFIDEYDKVVYKQYEEMVVEGX

SEQ ID NO: 18595 - protein, 33 aa, Artificial Sequence
  Cyclic GFR-binding peptide
  MOD_RES (4)..(4): Xaa is C or S
KPTXAPTKLEPLPVVYYDDSSNVIEQLSNNMVV

SEQ ID NO: 18596 - protein, 35 aa, Artificial Sequence; identical to SEQ ID NO: 8304
  Cyclic GFR-binding peptide
  MOD_RES (4)..(5): Xaa is C or S

SEQ ID NO: 18597 - protein, 32 aa, Artificial Sequence
  Cyclic GFR-binding peptide
  MOD_RES (3)..(4): Xaa is C or S
KAXXVPTELSPISMLFIDEYDKVVYKQYEEMV

SEQ ID NO: 18598 - protein, 28 aa, Artificial Sequence
  Cyclic GFR-binding peptide
  MOD_RES (28)..(28): Xaa is C or S
LSPISMLFIDENEKVVYKQYEDMVVEGX

SEQ ID NO: 18599 - protein, 37 aa, Artificial Sequence
  Cyclic GFR-binding peptide
  MOD_RES (3)..(4)..(36): Xaa is C or S
KAXXVPTELSPISMLFIDENEKVVYKQYEDMVVEGXG

SEQ ID NO: 18600 - protein, 30 aa, Artificial Sequence; identical to SEQ ID NO: 8309
  Cyclic GFR-binding peptide
  MOD_RES (28)..(30): Xaa is C or S

SEQ ID NO: 18601 - protein, 20 aa, Artificial Sequence
  Cyclic GFR-binding peptide
EPLPIVYYVGRTPKVEQLSN

SEQ ID NO: 18602 - protein, 32 aa, Artificial Sequence; identical to SEQ ID NO: 8311
  Cyclic GFR-binding peptide
  MOD_RES (4)..(5): Xaa is C or S

SEQ ID NO: 18603 - protein, 30 aa, Artificial Sequence
  Cyclic GFR-binding peptide
  MOD_RES (2)..(3): Xaa is C or S
PXXVPQALSPISILFIVGRKPKVYKQYEMI

SEQ ID NO: 18604 - protein, 40 aa, Artificial Sequence
  Cyclic GFR-binding peptide
  MOD_RES (6)..(7)..(39): Xaa is C or S
YVPKPXXAPTKLEPLPVVYYDDSSNVIEQLSNNMVVRSXG

SEQ ID NO: 18605 - protein, 29 aa, Artificial Sequence
  Cyclic GFR-binding peptide
PQALSPISILFIVGRKPKVYKQYEMIVRS

SEQ ID NO: 18606 - protein, 27 aa, Artificial Sequence
  Cyclic GFR-binding peptide
QALNAISILYFVGRKPKVLKKYRMIVR

SEQ ID NO: 18607 - protein, 22 aa, Artificial Sequence
  Cyclic GFR-binding peptide
LSPISVLFIDDSSNVIYKQYEN

SEQ ID NO: 18608 - protein, 21 aa, Artificial Sequence
  Cyclic GFR-binding peptide
EPLPIVYYVGRTPKVEQLSNM

SEQ ID NO: 18609 - protein, 32 aa, Artificial Sequence; identical to SEQ ID NO: 8316
  Cyclic GFR-binding peptide
  MOD_RES (32)..(32): Xaa is C or S

SEQ ID NO: 18610 - protein, 28 aa, Artificial Sequence
  Cyclic GFR-binding peptide
  MOD_RES (1)..(1): Xaa is C or S
XVPTRLSAISILYLDSANNVVLKNYQDM

SEQ ID NO: 18611 - protein, 36 aa, Artificial Sequence
  Cyclic GFR-binding peptide
  MOD_RES (4)..(5)..(36): Xaa is C or S
AAPXXVPQALSPISILFIVGRKPKVYKQYEMIVRSX

SEQ ID NO: 18612 - protein, 24 aa, Artificial Sequence
  Cyclic GFR-binding peptide
PQALEPLTILYYVGRKPKVEQLSN

SEQ ID NO: 18613 - protein, 34 aa, Artificial Sequence
  Cyclic GFR-binding peptide
  MOD_RES (31)..(33): Xaa is C or S
PTKLEPLTVLYYDDSSNVIEQLSNNMVVRSXGXH

SEQ ID NO: 18614 - protein, 33 aa, Artificial Sequence
  Cyclic GFR-binding peptide
  MOD_RES (6)..(7): Xaa is C or S
STPPTXXVPTRLEPLPIVYYDSANNVVEQLSND

SEQ ID NO: 18615 - protein, 33 aa, Artificial Sequence
  Cyclic GFR-binding peptide
  MOD_RES (1)..(2): Xaa is C or S
XXAPTQLSPISVLFIDDSSNVIYKQYENMVVRA

SEQ ID NO: 18616 - protein, 33 aa, Artificial Sequence
  Cyclic GFR-binding peptide
  MOD_RES (1)..(2): Xaa is C or S
XXVPTRLEPLTILYYDSANNVVEQLSNDMVVES

SEQ ID NO: 18617 - protein, 31 aa, Artificial Sequence; identical to SEQ ID NO: 8322
  Cyclic GFR-binding peptide
  MOD_RES (3)..(4): Xaa is C or S

SEQ ID NO: 18618 - protein, 35 aa, Artificial Sequence; identical to SEQ ID NO: 8323
  Cyclic GFR-binding peptide
  MOD_RES (5)..(6): Xaa is C or S

SEQ ID NO: 18619 - protein, 31 aa, Artificial Sequence
  Cyclic GFR-binding peptide
  MOD_RES (30)..(30): Xaa is C or S
TQLEPLPVVYYDDSSNVIEQLSNNMVVRAXG

SEQ ID NO: 18620 - protein, 22 aa, Artificial Sequence
  Cyclic GFR-binding peptide
ALEPLTILYYVGRKPKVEQLSN

SEQ ID NO: 18621 - protein, 29 aa, Artificial Sequence
  Cyclic GFR-binding peptide
PTELEPLPMVYYDENEKVVEQLSNDMVVE

SEQ ID NO: 18622 - protein, 25 aa, Artificial Sequence
  Cyclic GFR-binding peptide
PQDLNAISILYFVGRTPKVLKKYRM

SEQ ID NO: 18623 - protein, 28 aa, Artificial Sequence
  Cyclic GFR-binding peptide
  MOD_RES (1)..(1): Xaa is C or S
XVPQDLSPISILFIVGRTPKVYKQYEMV

SEQ ID NO: 18624 - protein, 31 aa, Artificial Sequence
  Cyclic GFR-binding peptide
  MOD_RES (4)..(5): Xaa is C or S
PKAXXVPTELSPISMLFIDENEKVVYKQYED

SEQ ID NO: 18625 - protein, 29 aa, Artificial Sequence
  Cyclic GFR-binding peptide
  MOD_RES (29)..(29): Xaa is C or S
QDLNAISILYFIGKTPKILKKYRMIVKSX

SEQ ID NO: 18626 - protein, 37 aa, Artificial Sequence
  Cyclic GFR-binding peptide
  MOD_RES (5)..(6): Xaa is C or S
VPKPXXAPTQLSPISVLFIDDSSNVIYKQYENMVVRA

SEQ ID NO: 18627 - protein, 34 aa, Artificial Sequence; identical to SEQ ID NO: 8330
  Cyclic GFR-binding peptide
  MOD_RES (31)..(33): Xaa is C or S

SEQ ID NO: 18628 - protein, 31 aa, Artificial Sequence; identical to SEQ ID NO: 8331
  Cyclic GFR-binding peptide
  MOD_RES (28)..(30): Xaa is C or S

SEQ ID NO: 18629 - protein, 39 aa, Artificial Sequence
  Cyclic GFR-binding peptide
  MOD_RES (4)..(5)..(37)..(39): Xaa is C or S
PKPXXAPTQLEPLPVVYYDDSSNVIEQLSNNMVVRAXGX

SEQ ID NO: 18630 - protein, 32 aa, Artificial Sequence
  Cyclic GFR-binding peptide
  MOD_RES (2)..(3): Xaa is C or S
PXXVPQDLSPISILFIVGRTPKVYKQYEMVVK

SEQ ID NO: 18631 - protein, 33 aa, Artificial Sequence
  Cyclic GFR-binding peptide
  MOD_RES (32)..(32): Xaa is C or S
VPTRLEPLTILYYDSANNVVEQLSNDMVVESXG

SEQ ID NO: 18632 - protein, 35 aa, Artificial Sequence
  Cyclic GFR-binding peptide
  MOD_RES (6)..(7): Xaa is C or S
TVPKPXXAPTQLEPLTVLYYDDSSNVIEQLSNNMV

SEQ ID NO: 18633 - protein, 25 aa, Artificial Sequence
  Cyclic GFR-binding peptide
LEPLPIVYYIGKTPKIEQLSNMIVK

SEQ ID NO: 18634 - protein, 30 aa, Artificial Sequence; identical to SEQ ID NO: 8335
  Cyclic GFR-binding peptide
  MOD_RES (2)..(3): Xaa is C or S

SEQ ID NO: 18635 - protein, 39 aa, Artificial Sequence; identical to SEQ ID NO: 8336
  Cyclic GFR-binding peptide
  MOD_RES (6)..(38): Xaa is C or S

SEQ ID NO: 18636 - protein, 29 aa, Artificial Sequence
  Cyclic GFR-binding peptide
PTRLEPLTILYYDSANNVVEQLSNDMVVE

SEQ ID NO: 18637 - protein, 22 aa, Artificial Sequence
  Cyclic GFR-binding peptide
LSPISILFIIGKTPKIYKQYEM

SEQ ID NO: 18638 - protein, 31 aa, Artificial Sequence
  Cyclic GFR-binding peptide
  MOD_RES (31)..(31): Xaa is C or S
PTELEPLTMLYYDENEKVVEQLSNDMVVEGX

SEQ ID NO: 18639 - protein, 34 aa, Artificial Sequence
  Cyclic GFR-binding peptide
  MOD_RES (31)..(33): Xaa is C or S
PTRLNAISILYFDSANNVVLKKYRDMVVESXGXR

SEQ ID NO: 18640 - protein, 34 aa, Artificial Sequence
  Cyclic GFR-binding peptide
  MOD_RES (4)..(5): Xaa is C or S
PPTXXVPTRLSAISILYLDSANNVVLKNYQDMVV

SEQ ID NO: 18641 - protein, 40 aa, Artificial Sequence; identical to SEQ ID NO: 8347
  Cyclic GFR-binding peptide
  MOD_RES (6)..(7)..(39): Xaa is C or S

SEQ ID NO: 18642 - protein, 34 aa, Artificial Sequence
  Cyclic GFR-binding peptide
  MOD_RES (3)..(4): Xaa is C or S
APXXVPQALSPISILFIVGRKPKVYKQYEMIVRS

SEQ ID NO: 18643 - protein, 25 aa, Artificial Sequence
  Cyclic GFR-binding peptide
ELEPLTMLYYDENEKVVEQLSNDMV

SEQ ID NO: 18644 - protein, 42 aa, Artificial Sequence
  Cyclic GFR-binding peptide
  MOD_RES (6)..(7)..(39)..(41): Xaa is C or S
KIPKAXXVPTELEPLTMLYYDENEKVVEQLSNDMVVEGXGXR

SEQ ID NO: 18645 - protein, 39 aa, Artificial Sequence
  Cyclic GFR-binding peptide
  MOD_RES (3)..(4)..(36)..(38): Xaa is C or S
KAXXVPTELEPLTMLYYDEYDKVVEQLSNEMVVEGXGXR

SEQ ID NO: 18646 - protein, 34 aa, Artificial Sequence; identical to SEQ ID NO: 8348
  Cyclic GFR-binding peptide
  MOD_RES (1)..(2)..(33): Xaa is C or S

SEQ ID NO: 18647 - protein, 34 aa, Artificial Sequence
  Cyclic GFR-binding peptide
  MOD_RES (5)..(6): Xaa is C or S
IPKAXXVPTELEPLPMVYYDENEKVVEQLSNDMV

SEQ ID NO: 18648 - protein, 23 aa, Artificial Sequence
  Cyclic GFR-binding peptide
TRLEPLTILYYDSANNVVEQLSN

SEQ ID NO: 18649 - protein, 32 aa, Artificial Sequence
  Cyclic GFR-binding peptide
  MOD_RES (5)..(6): Xaa is C or S
IPKAXXVPTELEPLTMLYYDENEKVVEQLSND

SEQ ID NO: 18650 - protein, 38 aa, Artificial Sequence
  Cyclic GFR-binding peptide
  MOD_RES (5)..(6)..(37): Xaa is C or S
SASPXXVPQDLEPLPIVYYVGRTPKVEQLSNMVVKSXK

SEQ ID NO: 18651 - protein, 38 aa, Artificial Sequence
  Cyclic GFR-binding peptide
  MOD_RES (3)..(4)..(36)..(38): Xaa is C or S
KPXXAPTKLEPLPVVYYDDSSNVIEQLSNNMVVRSXGX

SEQ ID NO: 18652 - protein, 31 aa, Artificial Sequence
  Cyclic GFR-binding peptide
  MOD_RES (31)..(31): Xaa is C or S
PTKLSPISVLFIDDSSNVIYKQYENMVVRSX

SEQ ID NO: 18653 - protein, 28 aa, Artificial Sequence
  Cyclic GFR-binding peptide
QDLSAISILYLIGKTPKILKNYQMIVKS

SEQ ID NO: 18654 - protein, 23 aa, Artificial Sequence
  Cyclic GFR-binding peptide
SPISILFIVGRTPKVYKQYEMVV

SEQ ID NO: 18655 - protein, 34 aa, Artificial Sequence; identical to SEQ ID NO: 8353
  Cyclic GFR-binding peptide
  MOD_RES (5)..(6): Xaa is C or S

SEQ ID NO: 18656 - protein, 35 aa, Artificial Sequence
  Cyclic GFR-binding peptide
  MOD_RES (3)..(4): Xaa is C or S
KPXXAPTKLEPLPVVYYDDSSNVIEQLSNNMVVRS

SEQ ID NO: 18657 - protein, 25 aa, Artificial Sequence
  Cyclic GFR-binding peptide
PTELSPISMLFIDENEKVVYKQYED

SEQ ID NO: 18658 - protein, 35 aa, Artificial Sequence
  Cyclic GFR-binding peptide
  MOD_RES (1)..(2)..(34): Xaa is C or S
XXVPTELSPISMLFIDEYDKVVYKQYEEMVVEGXG

SEQ ID NO: 18659 - protein, 35 aa, Artificial Sequence
  Cyclic GFR-binding peptide
  MOD_RES (4)..(5): Xaa is C or S
ASPXXVSQDLEPLPIVYYIGKTPKIEQLSNMIVKS

SEQ ID NO: 18660 - protein, 34 aa, Artificial Sequence
  Cyclic GFR-binding peptide
  MOD_RES (6)..(6): Xaa is C or S
VTKPTXAPTKLSPISVLFIDDSSNVIYKQYENMV

SEQ ID NO: 18661 - protein, 37 aa, Artificial Sequence
  Cyclic GFR-binding peptide
  MOD_RES (3)..(4)..(35)..(37): Xaa is C or S
SPXXVPQDLSPISILFIVGRTPKVYKQYEMVVKSXKX

SEQ ID NO: 18662 - protein, 36 aa, Artificial Sequence
  Cyclic GFR-binding peptide
  MOD_RES (6)..(7): Xaa is C or S
TVPKPXXAPTQLEPLTVLYYDDSSNVIEQLSNNMVV

SEQ ID NO: 18663 - protein, 33 aa, Artificial Sequence; identical to SEQ ID NO: 8362
  Cyclic GFR-binding peptide
  MOD_RES (7)..(7): Xaa is C or S

SEQ ID NO: 18664 - protein, 26 aa, Artificial Sequence
  Cyclic GFR-binding peptide
  MOD_RES (26)..(26): Xaa is C or S
SPISILFIIGKTPKIYKQYEMIVKSX

SEQ ID NO: 18665 - protein, 25 aa, Artificial Sequence
  Cyclic GFR-binding peptide
TKLSAISVLYLDDSSNVILKNYQNM

SEQ ID NO: 18666 - protein, 36 aa, Artificial Sequence; identical to SEQ ID NO: 8366
  Cyclic GFR-binding peptide
  MOD_RES (2)..(3)..(34)..(36): Xaa is C or S

SEQ ID NO: 18667 - protein, 24 aa, Artificial Sequence
  Cyclic GFR-binding peptide
LEPLTMLYYDENEKVVEQLSNDMV

SEQ ID NO: 18668 - protein, 34 aa, Artificial Sequence
  Cyclic GFR-binding peptide
  MOD_RES (32)..(34): Xaa is C or S
VPTRLEPLPIVYYDSANNVVEQLSNDMVVESXGX

SEQ ID NO: 18669 - protein, 30 aa, Artificial Sequence
  Cyclic GFR-binding peptide
  MOD_RES (3)..(4): Xaa is C or S
KAXXVPTELEPLTMLYYDEYDKVVEQLSNE

SEQ ID NO: 18670 - protein, 28 aa, Artificial Sequence
  Cyclic GFR-binding peptide
  MOD_RES (1)..(1): Xaa is C or S
XVPTRLNAISILYFDSANNVVLKKYRDM

SEQ ID NO: 18671 - protein, 36 aa, Artificial Sequence; identical to SEQ ID NO: 8374
  Cyclic GFR-binding peptide
  MOD_RES (6)..(7): Xaa is C or S

SEQ ID NO: 18672 - protein, 25 aa, Artificial Sequence
  Cyclic GFR-binding peptide
VPQDLSAISILYLVGRTPKVLKNYQ

SEQ ID NO: 18673 - protein, 29 aa, Artificial Sequence
  Cyclic GFR-binding peptide
  MOD_RES (1)..(2): Xaa is C or S
XXVPTELEPLTMLYYDENEKVVEQLSNDM

SEQ ID NO: 18674 - protein, 27 aa, Artificial Sequence
  Cyclic GFR-binding peptide
  MOD_RES (26)..(26): Xaa is C or S
SPISILFIVGRTPKVYKQYEMVVKSXK

SEQ ID NO: 18675 - protein, 39 aa, Artificial Sequence
  Cyclic GFR-binding peptide
  MOD_RES (4)..(5)..(37)..(39): Xaa is C or S
PPTXXVPTRLSAISILYLDSANNVVLKNYQDMVVESXGX

SEQ ID NO: 18676 - protein, 21 aa, Artificial Sequence
  Cyclic GFR-binding peptide
LSPISMLFIDENEKVVYKQYE

SEQ ID NO: 18677 - protein, 32 aa, Artificial Sequence; identical to SEQ ID NO: 8382
  Cyclic GFR-binding peptide
  MOD_RES (6)..(7): Xaa is C or S

SEQ ID NO: 18678 - protein, 38 aa, Artificial Sequence; identical to SEQ ID NO: 8383
  Cyclic GFR-binding peptide
  MOD_RES (3)..(4)..(36)..(38): Xaa is C or S

SEQ ID NO: 18679 - protein, 34 aa, Artificial Sequence
  Cyclic GFR-binding peptide
  MOD_RES (5)..(6): Xaa is C or S
TPPTXXVPTRLEPLPIVYYDSANNVVEQLSNDMV

SEQ ID NO: 18680 - protein, 25 aa, Artificial Sequence
  Cyclic GFR-binding peptide
VPQALNAISILYFVGRKPKVLKKYR

SEQ ID NO: 18681 - protein, 31 aa, Artificial Sequence
  Cyclic GFR-binding peptide
  MOD_RES (4)..(4): Xaa is C or S
KPTXAPTKLEPLPVVYYDDSSNVIEQLSNNM

SEQ ID NO: 18682 - protein, 29 aa, Artificial Sequence
  Cyclic GFR-binding peptide
  MOD_RES (29)..(29): Xaa is C or S
QDLSPISILFIIGKTPKIYKQYEMIVKSX

SEQ ID NO: 18683 - protein, 26 aa, Artificial Sequence
  Cyclic GFR-binding peptide
NAISMLYFDEYDKVVLKKYREMVVEG

SEQ ID NO: 18684 - protein, 23 aa, Artificial Sequence
  Cyclic GFR-binding peptide
TQLEPLTVLYYDDSSNVIEQLSN

SEQ ID NO: 18685 - protein, 40 aa, Artificial Sequence
  Cyclic GFR-binding peptide
  MOD_RES (5)..(37)..(39): Xaa is C or S
TKPTXAPTKLEPLPVVYYDDSSNVIEQLSNNMVVRSXGXH

SEQ ID NO: 18686 - protein, 29 aa, Artificial Sequence
  Cyclic GFR-binding peptide
  MOD_RES (27)..(29): Xaa is C or S
EPLPIVYYDSANNVVEQLSNDMVVESXGX

SEQ ID NO: 18687 - protein, 25 aa, Artificial Sequence
  Cyclic GFR-binding peptide
VSQDLNAISILYFIGKTPKILKKYR

SEQ ID NO: 18688 - protein, 31 aa, Artificial Sequence; identical to SEQ ID NO: 8398
  Cyclic GFR-binding peptide
  MOD_RES (5)..(6): Xaa is C or S

SEQ ID NO: 18689 - protein, 32 aa, Artificial Sequence
  Cyclic GFR-binding peptide
  MOD_RES (3)..(4): Xaa is C or S
KPXXAPTQLEPLPVVYYDDSSNVIEQLSNNMV

SEQ ID NO: 18690 - protein, 30 aa, Artificial Sequence; identical to SEQ ID NO: 8401
  Cyclic GFR-binding peptide
  MOD_RES (29)..(29): Xaa is C or S

SEQ ID NO: 18691 - protein, 29 aa, Artificial Sequence
  Cyclic GFR-binding peptide
  MOD_RES (28)..(28): Xaa is C or S
LEPLPIVYYDSANNVVEQLSNDMVVESXG

SEQ ID NO: 18692 - protein, 26 aa, Artificial Sequence
  Cyclic GFR-binding peptide
  MOD_RES (1)..(1): Xaa is C or S
XVSQDLSPISILFIIGKTPKIYKQYE

SEQ ID NO: 18693 - protein, 35 aa, Artificial Sequence
  Cyclic GFR-binding peptide
  MOD_RES (3)..(4): Xaa is C or S
PTXXVPTRLSAISILYLDSANNVVLKNYQDMVVES

SEQ ID NO: 18694 - protein, 27 aa, Artificial Sequence
  Cyclic GFR-binding peptide
  MOD_RES (1)..(2): Xaa is C or S
XXVSQDLSPISILFIIGKTPKIYKQYE

SEQ ID NO: 18695 - protein, 31 aa, Artificial Sequence
  Cyclic GFR-binding peptide
  MOD_RES (30)..(30): Xaa is C or S
TRLEPLTILYYDSANNVVEQLSNDMVVESXG

SEQ ID NO: 18696 - protein, 26 aa, Artificial Sequence
  Cyclic GFR-binding peptide
PTRLEPLTILYYDSANNVVEQLSNDM

SEQ ID NO: 18697 - protein, 28 aa, Artificial Sequence
  Cyclic GFR-binding peptide
  MOD_RES (1)..(1): Xaa is C or S
XVPTELNAISMLYFDEYDKVVLKKYREM

SEQ ID NO: 18698 - protein, 39 aa, Artificial Sequence
  Cyclic GFR-binding peptide
  MOD_RES (4)..(5)..(37)..(39): Xaa is C or S
PKPXXAPTKLEPLPVVYYDDSSNVIEQLSNNMVVRSXGX

SEQ ID NO: 18699 - protein, 39 aa, Artificial Sequence; identical to SEQ ID NO: 8412
  Cyclic GFR-binding peptide
  MOD_RES (4)..(5)..(37)..(39): Xaa is C or S

SEQ ID NO: 18700 - protein, 30 aa, Artificial Sequence
  Cyclic GFR-binding peptide
  MOD_RES (28)..(30): Xaa is C or S
LEPLPIVYYDSANNVVEQLSNDMVVESXGX

SEQ ID NO: 18701 - protein, 39 aa, Artificial Sequence
  Cyclic GFR-binding peptide
  MOD_RES (5)..(6)..(38): Xaa is C or S
IPKAXXVPTELSPISMLFIDENEKVVYKQYEDMVVEGXG

SEQ ID NO: 18702 - protein, 33 aa, Artificial Sequence
  Cyclic GFR-binding peptide
  MOD_RES (3)..(4): Xaa is C or S
KAXXVPTELEPLPMVYYDEYDKVVEQLSNEMVV

SEQ ID NO: 18703 - protein, 35 aa, Artificial Sequence
  Cyclic GFR-binding peptide
  MOD_RES (5)..(6): Xaa is C or S
VPKPXXAPTKLEPLPVVYYDDSSNVIEQLSNNMVV

SEQ ID NO: 18704 - protein, 33 aa, Artificial Sequence
  Cyclic GFR-binding peptide
  MOD_RES (5)..(6): Xaa is C or S
SASPXXVPQDLSPISILFIVGRTPKVYKQYEMV

SEQ ID NO: 18705 - protein, 32 aa, Artificial Sequence; identical to SEQ ID NO: 8415
  Cyclic GFR-binding peptide
  MOD_RES (3)..(4): Xaa is C or S

SEQ ID NO: 18706 - protein, 38 aa, Artificial Sequence; identical to SEQ ID NO: 8416
  Cyclic GFR-binding peptide
  MOD_RES (4)..(5)..(36)..(38): Xaa is C or S

SEQ ID NO: 18707 - protein, 32 aa, Artificial Sequence
  Cyclic GFR-binding peptide
  MOD_RES (6)..(7): Xaa is C or S
YVPKPXXAPTKLSPISVLFIDDSSNVIYKQYE

SEQ ID NO: 18708 - protein, 27 aa, Artificial Sequence
  Cyclic GFR-binding peptide
LEPLPMVYYDEYDKVVEQLSNEMVVEG

SEQ ID NO: 18709 - protein, 37 aa, Artificial Sequence
  Cyclic GFR-binding peptide
  MOD_RES (5)..(6)..(37): Xaa is C or S
SAAPXXVPQALEPLTILYYVGRKPKVEQLSNMIVRSX

SEQ ID NO: 18710 - protein, 21 aa, Artificial Sequence
  Cyclic GFR-binding peptide
LEPLPMVYYDEYDKVVEQLSN

SEQ ID NO: 18711 - protein, 21 aa, Artificial Sequence
  Cyclic GFR-binding peptide
LEPLTILYYDSANNVVEQLSN

SEQ ID NO: 18712 - protein, 27 aa, Artificial Sequence
  Cyclic GFR-binding peptide
TQLEPLTVLYYDDSSNVIEQLSNNMVV

SEQ ID NO: 18713 - protein, 41 aa, Artificial Sequence
  Cyclic GFR-binding peptide
  MOD_RES (7)..(39)..(41): Xaa is C or S
HVTKPTXAPTKLEPLPVVYYDDSSNVIEQLSNNMVVRSXGX

SEQ ID NO: 18714 - protein, 40 aa, Artificial Sequence; identical to SEQ ID NO: 8422
  Cyclic GFR-binding peptide
  MOD_RES (5)..(6)..(38)..(40): Xaa is C or S

SEQ ID NO: 18715 - protein, 27 aa, Artificial Sequence
  Cyclic GFR-binding peptide
  MOD_RES (27)..(27): Xaa is C or S
LEPLPIVYYIGKTPKIEQLSNMIVKSX

SEQ ID NO: 18716 - protein, 35 aa, Artificial Sequence
  Cyclic GFR-binding peptide
  MOD_RES (4)..(5): Xaa is C or S
PKPXXAPTQLEPLPVVYYDDSSNVIEQLSNNMVVR

SEQ ID NO: 18717 - protein, 34 aa, Artificial Sequence; identical to SEQ ID NO: 8426
  Cyclic GFR-binding peptide
  MOD_RES (32)..(34): Xaa is C or S

SEQ ID NO: 18718 - protein, 29 aa, Artificial Sequence
  Cyclic GFR-binding peptide
  MOD_RES (3)..(4): Xaa is C or S
KPXXAPTQLEPLTVLYYDDSSNVIEQLSN

SEQ ID NO: 18719 - protein, 28 aa, Artificial Sequence
  Cyclic GFR-binding peptide
APTQLSAISVLYLDDSSNVILKNYQNMV

SEQ ID NO: 18720 - protein, 36 aa, Artificial Sequence; identical to SEQ ID NO: 8432
  Cyclic GFR-binding peptide
  MOD_RES (2)..(3)..(35): Xaa is C or S

SEQ ID NO: 18721 - protein, 26 aa, Artificial Sequence
  Cyclic GFR-binding peptide
VPQDLEPLPIVYYVGRTPKVEQLSNM

SEQ ID NO: 18722 - protein, 37 aa, Artificial Sequence; identical to SEQ ID NO: 8434
  Cyclic GFR-binding peptide
  MOD_RES (2)..(3)..(34)..(36): Xaa is C or S

SEQ ID NO: 18723 - protein, 38 aa, Artificial Sequence
  Cyclic GFR-binding peptide
  MOD_RES (4)..(5)..(37): Xaa is C or S
PKPXXAPTKLEPLTVLYYDDSSNVIEQLSNNMVVRSXG

SEQ ID NO: 18724 - protein, 30 aa, Artificial Sequence
  Cyclic GFR-binding peptide
APTQLEPLTVLYYDDSSNVIEQLSNNMVVR

SEQ ID NO: 18725 - protein, 31 aa, Artificial Sequence
  Cyclic GFR-binding peptide
  MOD_RES (3)..(4): Xaa is C or S
KPXXAPTQLSPISVLFIDDSSNVIYKQYENM

SEQ ID NO: 18726 - protein, 29 aa, Artificial Sequence
  Cyclic GFR-binding peptide
  MOD_RES (4)..(4): Xaa is C or S
KPTXAPTKLEPLPVVYYDDSSNVIEQLSN

SEQ ID NO: 18727 - protein, 28 aa, Artificial Sequence
  Cyclic GFR-binding peptide
PTELEPLTMLYYDEYDKVVEQLSNEMVV

SEQ ID NO: 18728 - protein, 24 aa, Artificial Sequence
  Cyclic GFR-binding peptide
DLSPISILFIVGRTPKVYKQYEMV

SEQ ID NO: 18729 - protein, 21 aa, Artificial Sequence
  Cyclic GFR-binding peptide
LSPISILFIVGRKPKVYKQYE

SEQ ID NO: 18730 - protein, 32 aa, Artificial Sequence; identical to SEQ ID NO: 8445
  Cyclic GFR-binding peptide
  MOD_RES (29)..(31): Xaa is C or S

SEQ ID NO: 18731 - protein, 35 aa, Artificial Sequence
  Cyclic GFR-binding peptide
  MOD_RES (1)..(2)..(34): Xaa is C or S
XXVPTRLEPLPIVYYDSANNVVEQLSNDMVVESXG

SEQ ID NO: 18732 - protein, 35 aa, Artificial Sequence; identical to SEQ ID NO: 8446
  Cyclic GFR-binding peptide
  MOD_RES (4)..(5): Xaa is C or S

SEQ ID NO: 18733 - protein, 26 aa, Artificial Sequence
  Cyclic GFR-binding peptide
  MOD_RES (1)..(1): Xaa is C or S
XAPTQLSPISVLFIDDSSNVIYKQYE

SEQ ID NO: 18734 - protein, 37 aa, Artificial Sequence
  Cyclic GFR-binding peptide
  MOD_RES (5)..(6): Xaa is C or S
IPKAXXVPTELEPLPMVYYDEYDKVVEQLSNEMVVEG

SEQ ID NO: 18735 - protein, 24 aa, Artificial Sequence
  Cyclic GFR-binding peptide
LSAISVLYLDDSSNVILKNYQNMV

SEQ ID NO: 18736 - protein, 30 aa, Artificial Sequence
  Cyclic GFR-binding peptide
  MOD_RES (1)..(1): Xaa is C or S
XVPTRLNAISILYFDSANNVVLKKYRDMVV

SEQ ID NO: 18737 - protein, 23 aa, Artificial Sequence
  Cyclic GFR-binding peptide
QDLEPLPIVYYIGKTPKIEQLSN

SEQ ID NO: 18738 - protein, 30 aa, Artificial Sequence
  Cyclic GFR-binding peptide
  MOD_RES (1)..(2): Xaa is C or S
XXVPTELEPLTMLYYDENEKVVEQLSNDMV

SEQ ID NO: 18739 - protein, 24 aa, Artificial Sequence
  Cyclic GFR-binding peptide
TELSPISMLFIDENEKVVYKQYED

SEQ ID NO: 18740 - protein, 27 aa, Artificial Sequence
  Cyclic GFR-binding peptide
  MOD_RES (1)..(1): Xaa is C or S
XVPQALEPLTILYYVGRKPKVEQLSNM

SEQ ID NO: 18741 - protein, 31 aa, Artificial Sequence
  Cyclic GFR-binding peptide
  MOD_RES (1)..(1): Xaa is C or S
XVPTELSPISMLFIDENEKVVYKQYEDMVVE

SEQ ID NO: 18742 - protein, 29 aa, Artificial Sequence
  Cyclic GFR-binding peptide
APTKLSPISVLFIDDSSNVIYKQYENMVV

SEQ ID NO: 18743 - protein, 34 aa, Artificial Sequence
  Cyclic GFR-binding peptide
  MOD_RES (31)..(33): Xaa is C or S
PTELEPLTMLYYDEYDKVVEQLSNEMVVEGXGXR

SEQ ID NO: 18744 - protein, 37 aa, Artificial Sequence; identical to SEQ ID NO: 8454
  Cyclic GFR-binding peptide
  MOD_RES (2)..(34)..(36): Xaa is C or S

SEQ ID NO: 18745 - protein, 26 aa, Artificial Sequence
  Cyclic GFR-binding peptide
LEPLTILYYDSANNVVEQLSNDMVVE

SEQ ID NO: 18746 - protein, 24 aa, Artificial Sequence
  Cyclic GFR-binding peptide
TRLEPLPIVYYDSANNVVEQLSND

SEQ ID NO: 18747 - protein, 27 aa, Artificial Sequence
  Cyclic GFR-binding peptide
  MOD_RES (26)..(26): Xaa is C or S
SAISILYLVGRTPKVLKNYQMVVKSXK

SEQ ID NO: 18748 - protein, 27 aa, Artificial Sequence
  Cyclic GFR-binding peptide
VPTRLSAISILYLDSANNVVLKNYQDM

SEQ ID NO: 18749 - protein, 34 aa, Artificial Sequence
  Cyclic GFR-binding peptide
  MOD_RES (2)..(3)..(34): Xaa is C or S
PXXVPQDLSPISILFIVGRTPKVYKQYEMVVKSX

SEQ ID NO: 18750 - protein, 26 aa, Artificial Sequence
  Cyclic GFR-binding peptide
PTELEPLTMLYYDENEKVVEQLSNDM

SEQ ID NO: 18751 - protein, 35 aa, Artificial Sequence; identical to SEQ ID NO: 8463
  Cyclic GFR-binding peptide
  MOD_RES (2)..(3)..(35): Xaa is C or S

SEQ ID NO: 18752 - protein, 27 aa, Artificial Sequence
  Cyclic GFR-binding peptide
TQLSAISVLYLDDSSNVILKNYQNMVV

SEQ ID NO: 18753 - protein, 32 aa, Artificial Sequence
  Cyclic GFR-binding peptide
  MOD_RES (3)..(4): Xaa is C or S
PTXXVPTRLEPLTILYYDSANNVVEQLSNDMV

SEQ ID NO: 18754 - protein, 31 aa, Artificial Sequence
  Cyclic GFR-binding peptide
  MOD_RES (4)..(5): Xaa is C or S
PKAXXVPTELEPLTMLYYDENEKVVEQLSND

SEQ ID NO: 18755 - protein, 32 aa, Artificial Sequence
  Cyclic GFR-binding peptide
  MOD_RES (1)..(1): Xaa is C or S
XVPTELSPISMLFIDEYDKVVYKQYEEMVVEG

SEQ ID NO: 18756 - protein, 35 aa, Artificial Sequence; identical to SEQ ID NO: 8469
  Cyclic GFR-binding peptide
  MOD_RES (1)..(2)..(33)..(35): Xaa is C or S

SEQ ID NO: 18757 - protein, 29 aa, Artificial Sequence
  Cyclic GFR-binding peptide
SQDLSAISILYLIGKTPKILKNYQMIVKS

SEQ ID NO: 18758 - protein, 27 aa, Artificial Sequence
  Cyclic GFR-binding peptide
VPQDLSPISILFIVGRTPKVYKQYEMV

SEQ ID NO: 18759 - protein, 35 aa, Artificial Sequence
  Cyclic GFR-binding peptide
  MOD_RES (3)..(4): Xaa is C or S
PTXXVPTRLNAISILYFDSANNVVLKKYRDMVVES

SEQ ID NO: 18760 - protein, 33 aa, Artificial Sequence
  Cyclic GFR-binding peptide
  MOD_RES (31)..(33): Xaa is C or S
PTRLEPLPIVYYDSANNVVEQLSNDMVVESXGX

SEQ ID NO: 18761 - protein, 32 aa, Artificial Sequence
  Cyclic GFR-binding peptide
  MOD_RES (29)..(31): Xaa is C or S
QDLSPISILFIVGRTPKVYKQYEMVVKSXKXS

SEQ ID NO: 18762 - protein, 39 aa, Artificial Sequence
  Cyclic GFR-binding peptide
  MOD_RES (4)..(36)..(38): Xaa is C or S
KPTXAPTKLSPISVLFIDDSSNVIYKQYENMVVRSXGXH

SEQ ID NO: 18763 - protein, 29 aa, Artificial Sequence
  Cyclic GFR-binding peptide
PTQLEPLTVLYYDDSSNVIEQLSNNMVVR

SEQ ID NO: 18764 - protein, 35 aa, Artificial Sequence
  Cyclic GFR-binding peptide
  MOD_RES (6)..(7): Xaa is C or S
SIPKAXXVPTELSPISMLFIDEYDKVVYKQYEEMV

SEQ ID NO: 18765 - protein, 34 aa, Artificial Sequence
  Cyclic GFR-binding peptide
  MOD_RES (31)..(33): Xaa is C or S
VSQDLSPISILFIIGKTPKIYKQYEMIVKSXKXS

SEQ ID NO: 18766 - protein, 25 aa, Artificial Sequence
  Cyclic GFR-binding peptide
PTRLEPLPIVYYDSANNVVEQLSND

SEQ ID NO: 18767 - protein, 38 aa, Artificial Sequence; identical to SEQ ID NO: 8477
  Cyclic GFR-binding peptide
  MOD_RES (6)..(38): Xaa is C or S

SEQ ID NO: 18768 - protein, 25 aa, Artificial Sequence
  Cyclic GFR-binding peptide
PTRLSAISILYLDSANNVVLKNYQD

SEQ ID NO: 18769 - protein, 32 aa, Artificial Sequence
  Cyclic GFR-binding peptide
  MOD_RES (4)..(5): Xaa is C or S
PKPXXAPTKLEPLTVLYYDDSSNVIEQLSNNM

SEQ ID NO: 18770 - protein, 35 aa, Artificial Sequence; identical to SEQ ID NO: 8479
  Cyclic GFR-binding peptide
  MOD_RES (1)..(2)..(33)..(35): Xaa is C or S

SEQ ID NO: 18771 - protein, 29 aa, Artificial Sequence
  Cyclic GFR-binding peptide
  MOD_RES (29)..(29): Xaa is C or S
KLEPLPVVYYDDSSNVIEQLSNNMVVRSX

SEQ ID NO: 18772 - protein, 25 aa, Artificial Sequence
  Cyclic GFR-binding peptide
DLNAISILYFVGRTPKVLKKYRMVV

SEQ ID NO: 18773 - protein, 33 aa, Artificial Sequence
  Cyclic GFR-binding peptide
  MOD_RES (3)..(4): Xaa is C or S
PTXXVPTRLEPLPIVYYDSANNVVEQLSNDMVV

SEQ ID NO: 18774 - protein, 24 aa, Artificial Sequence
  Cyclic GFR-binding peptide
LSAISILYLVGRKPKVLKNYQMIV

SEQ ID NO: 18775 - protein, 41 aa, Artificial Sequence; identical to SEQ ID NO: 8493
  Cyclic GFR-binding peptide
  MOD_RES (7)..(39)..(41): Xaa is C or S

SEQ ID NO: 18776 - protein, 20 aa, Artificial Sequence
  Cyclic GFR-binding peptide
EPLPMVYYDEYDKVVEQLSN

SEQ ID NO: 18777 - protein, 34 aa, Artificial Sequence; identical to SEQ ID NO: 8494
  Cyclic GFR-binding peptide
  MOD_RES (32)..(34): Xaa is C or S

SEQ ID NO: 18778 - protein, 22 aa, Artificial Sequence
  Cyclic GFR-binding peptide
DLSAISILYLVGRTPKVLKNYQ

SEQ ID NO: 18779 - protein, 38 aa, Artificial Sequence
  Cyclic GFR-binding peptide
  MOD_RES (5)..(6)..(38): Xaa is C or S
IPKAXXVPTELSPISMLFIDENEKVVYKQYEDMVVEGX

SEQ ID NO: 18780 - protein, 29 aa, Artificial Sequence
  Cyclic GFR-binding peptide
  MOD_RES (1)..(2): Xaa is C or S
XXVPQALSPISILFIVGRKPKVYKQYEMI

SEQ ID NO: 18781 - protein, 23 aa, Artificial Sequence
  Cyclic GFR-binding peptide
LEPLTMLYYDENEKVVEQLSNDM

SEQ ID NO: 18782 - protein, 40 aa, Artificial Sequence
  Cyclic GFR-binding peptide
  MOD_RES (4)..(5)..(37)..(39): Xaa is C or S
PKAXXVPTELEPLPMVYYDEYDKVVEQLSNEMVVEGXGXR

SEQ ID NO: 18783 - protein, 33 aa, Artificial Sequence
  Cyclic GFR-binding peptide
  MOD_RES (1)..(2): Xaa is C or S
XXVPTELEPLPMVYYDEYDKVVEQLSNEMVVEG

SEQ ID NO: 18784 - protein, 38 aa, Artificial Sequence
  Cyclic GFR-binding peptide
  MOD_RES (6)..(38): Xaa is C or S
VTKPTXAPTKLSPISVLFIDDSSNVIYKQYENMVVRSX

SEQ ID NO: 18785 - protein, 25 aa, Artificial Sequence
  Cyclic GFR-binding peptide
TKLEPLPVVYYDDSSNVIEQLSNNM

SEQ ID NO: 18786 - protein, 38 aa, Artificial Sequence
  Cyclic GFR-binding peptide
  MOD_RES (3)..(4)..(36)..(38): Xaa is C or S
PTXXVPTRLSAISILYLDSANNVVLKNYQDMVVESXGX

SEQ ID NO: 18787 - protein, 34 aa, Artificial Sequence
  Cyclic GFR-binding peptide
  MOD_RES (4)..(5): Xaa is C or S
ASPXXVPQDLEPLPIVYYVGRTPKVEQLSNMVVK

SEQ ID NO: 18788 - protein, 39 aa, Artificial Sequence; identical to SEQ ID NO: 8499
  Cyclic GFR-binding peptide
  MOD_RES (3)..(4)..(36)..(38): Xaa is C or S

SEQ ID NO: 18789 - protein, 27 aa, Artificial Sequence
  Cyclic GFR-binding peptide
LSAISVLYLDDSSNVILKNYQNMVVRS

SEQ ID NO: 18790 - protein, 33 aa, Artificial Sequence
  Cyclic GFR-binding peptide
  MOD_RES (4)..(5): Xaa is C or S
ASPXXVSQDLSPISILFIIGKTPKIYKQYEMIV

SEQ ID NO: 18791 - protein, 30 aa, Artificial Sequence
  Cyclic GFR-binding peptide
  MOD_RES (4)..(5): Xaa is C or S
ASPXXVSQDLEPLPIVYYIGKTPKIEQLSN

SEQ ID NO: 18792 - protein, 39 aa, Artificial Sequence
  Cyclic GFR-binding peptide
  MOD_RES (6)..(38): Xaa is C or S
VTKPTXAPTKLEPLTVLYYDDSSNVIEQLSNNMVVRSXG

SEQ ID NO: 18793 - protein, 27 aa, Artificial Sequence
  Cyclic GFR-binding peptide
LEPLTILYYDSANNVVEQLSNDMVVES

SEQ ID NO: 18794 - protein, 22 aa, Artificial Sequence
  Cyclic GFR-binding peptide
LSPISMLFIDENEKVVYKQYED

SEQ ID NO: 18795 - protein, 27 aa, Artificial Sequence
  Cyclic GFR-binding peptide
  MOD_RES (26)..(26): Xaa is C or S
SPISILFIIGKTPKIYKQYEMIVKSXK

SEQ ID NO: 18796 - protein, 29 aa, Artificial Sequence
  Cyclic GFR-binding peptide
  MOD_RES (2)..(3): Xaa is C or S
PXXVPQALEPLTILYYVGRKPKVEQLSNM

SEQ ID NO: 18797 - protein, 33 aa, Artificial Sequence
  Cyclic GFR-binding peptide
  MOD_RES (3)..(3): Xaa is C or S
PTXAPTKLEPLTVLYYDDSSNVIEQLSNNMVVR

SEQ ID NO: 18798 - protein, 27 aa, Artificial Sequence
  Cyclic GFR-binding peptide
LSAISVLYLDDSSNVILKNYQNMVVRA

SEQ ID NO: 18799 - protein, 28 aa, Artificial Sequence
  Cyclic GFR-binding peptide
TKLSPISVLFIDDSSNVIYKQYENMVVR

SEQ ID NO: 18800 - protein, 36 aa, Artificial Sequence
  Cyclic GFR-binding peptide
  MOD_RES (3)..(4)..(36): Xaa is C or S
KPXXAPTKLSPISVLFIDDSSNVIYKQYENMVVRSX

SEQ ID NO: 18801 - protein, 33 aa, Artificial Sequence; identical to SEQ ID NO: 8513
  Cyclic GFR-binding peptide
  MOD_RES (5)..(6): Xaa is C or S

SEQ ID NO: 18802 - protein, 24 aa, Artificial Sequence
  Cyclic GFR-binding peptide
LEPLPIVYYIGKTPKIEQLSNMIV

SEQ ID NO: 18803 - protein, 32 aa, Artificial Sequence
  Cyclic GFR-binding peptide
  MOD_RES (6)..(7): Xaa is C or S
TVPKPXXAPTQLSPISVLFIDDSSNVIYKQYE

SEQ ID NO: 18804 - protein, 25 aa, Artificial Sequence
  Cyclic GFR-binding peptide
PTELEPLTMLYYDENEKVVEQLSND

SEQ ID NO: 18805 - protein, 26 aa, Artificial Sequence
  Cyclic GFR-binding peptide
  MOD_RES (26)..(26): Xaa is C or S
SAISILYLVGRTPKVLKNYQMVVKSX

SEQ ID NO: 18806 - protein, 31 aa, Artificial Sequence; identical to SEQ ID NO: 8517
  Cyclic GFR-binding peptide
  MOD_RES (4)..(4): Xaa is C or S

SEQ ID NO: 18807 - protein, 39 aa, Artificial Sequence
  Cyclic GFR-binding peptide
  MOD_RES (5)..(6)..(37)..(39): Xaa is C or S
SAAPXXVPQALEPLTILYYVGRKPKVEQLSNMIVRSXKX

SEQ ID NO: 18808 - protein, 34 aa, Artificial Sequence
  Cyclic GFR-binding peptide
  MOD_RES (1)..(2)..(34): Xaa is C or S
XXVPTRLSAISILYLDSANNVVLKNYQDMVVESX

SEQ ID NO: 18809 - protein, 29 aa, Artificial Sequence
  Cyclic GFR-binding peptide
  MOD_RES (26)..(28): Xaa is C or S
NAISILYFIGKTPKILKKYRMIVKSXKXS

SEQ ID NO: 18810 - protein, 31 aa, Artificial Sequence
  Cyclic GFR-binding peptide
  MOD_RES (3)..(4): Xaa is C or S
KPXXAPTKLEPLTVLYYDDSSNVIEQLSNNM

SEQ ID NO: 18811 - protein, 21 aa, Artificial Sequence
  Cyclic GFR-binding peptide
LEPLTVLYYDDSSNVIEQLSN

SEQ ID NO: 18812 - protein, 31 aa, Artificial Sequence
  Cyclic GFR-binding peptide
  MOD_RES (5)..(6): Xaa is C or S
SASPXXVPQDLSPISILFIVGRTPKVYKQYE

SEQ ID NO: 18813 - protein, 34 aa, Artificial Sequence; identical to SEQ ID NO: 8522
  Cyclic GFR-binding peptide
  MOD_RES (3)..(4): Xaa is C or S

SEQ ID NO: 18814 - protein, 30 aa, Artificial Sequence
  Cyclic GFR-binding peptide
PTELEPLTMLYYDEYDKVVEQLSNEMVVEG

SEQ ID NO: 18815 - protein, 36 aa, Artificial Sequence; identical to SEQ ID NO: 8525
  Cyclic GFR-binding peptide
  MOD_RES (2)..(3)..(34)..(36): Xaa is C or S

SEQ ID NO: 18816 - protein, 28 aa, Artificial Sequence
  Cyclic GFR-binding peptide
ELEPLTMLYYDEYDKVVEQLSNEMVVEG

SEQ ID NO: 18817 - protein, 27 aa, Artificial Sequence
  Cyclic GFR-binding peptide
PTKLEPLTVLYYDDSSNVIEQLSNNMV

SEQ ID NO: 18818 - protein, 28 aa, Artificial Sequence
  Cyclic GFR-binding peptide
  MOD_RES (1)..(2): Xaa is C or S
XXVPQALEPLTILYYVGRKPKVEQLSNM

SEQ ID NO: 18819 - protein, 32 aa, Artificial Sequence
  Cyclic GFR-binding peptide
  MOD_RES (2)..(3): Xaa is C or S
AXXVPTELEPLTMLYYDEYDKVVEQLSNEMVV

SEQ ID NO: 18820 - protein, 31 aa, Artificial Sequence
  Cyclic GFR-binding peptide
  MOD_RES (30)..(30): Xaa is C or S
TRLSAISILYLDSANNVVLKNYQDMVVESXG

SEQ ID NO: 18821 - protein, 31 aa, Artificial Sequence; identical to SEQ ID NO: 8531
  Cyclic GFR-binding peptide
  MOD_RES (2)..(3): Xaa is C or S

SEQ ID NO: 18822 - protein, 23 aa, Artificial Sequence
  Cyclic GFR-binding peptide
ELNAISMLYFDENEKVVLKKYRD

SEQ ID NO: 18823 - protein, 31 aa, Artificial Sequence
  Cyclic GFR-binding peptide
  MOD_RES (31)..(31): Xaa is C or S
PTRLEPLTILYYDSANNVVEQLSNDMVVESX

SEQ ID NO: 18824 - protein, 39 aa, Artificial Sequence
  Cyclic GFR-binding peptide
  MOD_RES (4)..(5)..(37)..(39): Xaa is C or S
PPTXXVPTRLEPLPIVYYDSANNVVEQLSNDMVVESXGX

SEQ ID NO: 18825 - protein, 28 aa, Artificial Sequence
  Cyclic GFR-binding peptide
TELEPLTMLYYDEYDKVVEQLSNEMVVE

SEQ ID NO: 18826 - protein, 25 aa, Artificial Sequence
  Cyclic GFR-binding peptide
VPTELEPLPMVYYDEYDKVVEQLSN

SEQ ID NO: 18827 - protein, 25 aa, Artificial Sequence
  Cyclic GFR-binding peptide
ALSAISILYLVGRKPKVLKNYQMIV

SEQ ID NO: 18828 - protein, 33 aa, Artificial Sequence; identical to SEQ ID NO: 8536
  Cyclic GFR-binding peptide
  MOD_RES (30)..(32): Xaa is C or S

SEQ ID NO: 18829 - protein, 28 aa, Artificial Sequence
  Cyclic GFR-binding peptide
  MOD_RES (26)..(28): Xaa is C or S
EPLPIVYYVGRTPKVEQLSNMVVKSXKX

SEQ ID NO: 18830 - protein, 23 aa, Artificial Sequence
  Cyclic GFR-binding peptide
ELEPLPMVYYDEYDKVVEQLSNE

SEQ ID NO: 18831 - protein, 27 aa, Artificial Sequence
  Cyclic GFR-binding peptide
PTELSPISMLFIDENEKVVYKQYEDMV

SEQ ID NO: 18832 - protein, 30 aa, Artificial Sequence; identical to SEQ ID NO: 8542
  Cyclic GFR-binding peptide
  MOD_RES (30)..(30): Xaa is C or S

SEQ ID NO: 18833 - protein, 34 aa, Artificial Sequence
  Cyclic GFR-binding peptide
  MOD_RES (2)..(3): Xaa is C or S
TXXVPTRLEPLTILYYDSANNVVEQLSNDMVVES

SEQ ID NO: 18834 - protein, 32 aa, Artificial Sequence; identical to SEQ ID NO: 8545
  Cyclic GFR-binding peptide
  MOD_RES (3)..(4): Xaa is C or S

SEQ ID NO: 18835 - protein, 23 aa, Artificial Sequence
  Cyclic GFR-binding peptide
EPLPVVYYDDSSNVIEQLSNNMV

SEQ ID NO: 18836 - protein, 28 aa, Artificial Sequence
  Cyclic GFR-binding peptide
  MOD_RES (26)..(28): Xaa is C or S
SAISILYLVGRTPKVLKNYQMVVKSXKX

SEQ ID NO: 18837 - protein, 33 aa, Artificial Sequence
  Cyclic GFR-binding peptide
  MOD_RES (4)..(5): Xaa is C or S
PKPXXAPTKLEPLTVLYYDDSSNVIEQLSNNMV

SEQ ID NO: 18838 - protein, 34 aa, Artificial Sequence
  Cyclic GFR-binding peptide
  MOD_RES (3)..(4): Xaa is C or S
KPXXAPTKLEPLTVLYYDDSSNVIEQLSNNMVVR

SEQ ID NO: 18839 - protein, 30 aa, Artificial Sequence
  Cyclic GFR-binding peptide
PTRLSAISILYLDSANNVVLKNYQDMVVES

SEQ ID NO: 18840 - protein, 29 aa, Artificial Sequence
  Cyclic GFR-binding peptide
  MOD_RES (27)..(29): Xaa is C or S
LEPLTILYYVGRKPKVEQLSNMIVRSXKX

SEQ ID NO: 18841 - protein, 25 aa, Artificial Sequence
  Cyclic GFR-binding peptide
SPISILFIVGRKPKVYKQYEMIVRS

SEQ ID NO: 18842 - protein, 29 aa, Artificial Sequence
  Cyclic GFR-binding peptide
VPTELEPLTMLYYDEYDKVVEQLSNEMVV

SEQ ID NO: 18843 - protein, 31 aa, Artificial Sequence
  Cyclic GFR-binding peptide
  MOD_RES (1)..(1): Xaa is C or S
XAPTKLEPLTVLYYDDSSNVIEQLSNNMVVR

SEQ ID NO: 18844 - protein, 33 aa, Artificial Sequence
  Cyclic GFR-binding peptide
  MOD_RES (1)..(2): Xaa is C or S
XXVPTELSPISMLFIDEYDKVVYKQYEEMVVEG

SEQ ID NO: 18845 - protein, 39 aa, Artificial Sequence; identical to SEQ ID NO: 8552
  Cyclic GFR-binding peptide
  MOD_RES (4)..(5)..(37)..(39): Xaa is C or S

SEQ ID NO: 18846 - protein, 34 aa, Artificial Sequence
  Cyclic GFR-binding peptide
  MOD_RES (32)..(34): Xaa is C or S
APTQLEPLTVLYYDDSSNVIEQLSNNMVVRAXGX

SEQ ID NO: 18847 - protein, 27 aa, Artificial Sequence
  Cyclic GFR-binding peptide
  MOD_RES (1)..(2): Xaa is C or S
XXVPTELEPLPMVYYDENEKVVEQLSN

SEQ ID NO: 18848 - protein, 32 aa, Artificial Sequence; identical to SEQ ID NO: 8555
  Cyclic GFR-binding peptide
  MOD_RES (6)..(7): Xaa is C or S

SEQ ID NO: 18849 - protein, 38 aa, Artificial Sequence
  Cyclic GFR-binding peptide
  MOD_RES (3)..(4)..(36)..(38): Xaa is C or S
PTXXVPTRLEPLPIVYYDSANNVVEQLSNDMVVESXGX

SEQ ID NO: 18850 - protein, 24 aa, Artificial Sequence
  Cyclic GFR-binding peptide
QLSAISVLYLDDSSNVILKNYQNM

SEQ ID NO: 18851 - protein, 34 aa, Artificial Sequence
  Cyclic GFR-binding peptide
  MOD_RES (2)..(3): Xaa is C or S
PXXAPTKLSPISVLFIDDSSNVIYKQYENMVVRS

SEQ ID NO: 18852 - protein, 40 aa, Artificial Sequence
  Cyclic GFR-binding peptide
  MOD_RES (4)..(5)..(37)..(39): Xaa is C or S
PKAXXVPTELSPISMLFIDENEKVVYKQYEDMVVEGXGXR

SEQ ID NO: 18853 - protein, 32 aa, Artificial Sequence
  Cyclic GFR-binding peptide
  MOD_RES (5)..(6): Xaa is C or S
VPKPXXAPTKLEPLPVVYYDDSSNVIEQLSNN

SEQ ID NO: 18854 - protein, 33 aa, Artificial Sequence
  Cyclic GFR-binding peptide
  MOD_RES (4)..(5): Xaa is C or S
AAPXXVPQALEPLTILYYVGRKPKVEQLSNMIV

SEQ ID NO: 18855 - protein, 28 aa, Artificial Sequence
  Cyclic GFR-binding peptide
  MOD_RES (2)..(3): Xaa is C or S
AXXVPTELEPLPMVYYDENEKVVEQLSN

SEQ ID NO: 18856 - protein, 36 aa, Artificial Sequence; identical to SEQ ID NO: 8558
  Cyclic GFR-binding peptide
  MOD_RES (4)..(5)..(36): Xaa is C or S

SEQ ID NO: 18857 - protein, 29 aa, Artificial Sequence
  Cyclic GFR-binding peptide
  MOD_RES (28)..(28): Xaa is C or S
DLSAISILYLVGRTPKVLKNYQMVVKSXK

SEQ ID NO: 18858 - protein, 26 aa, Artificial Sequence
  Cyclic GFR-binding peptide
TRLEPLTILYYDSANNVVEQLSNDMV

SEQ ID NO: 18859 - protein, 31 aa, Artificial Sequence
  Cyclic GFR-binding peptide
  MOD_RES (5)..(6): Xaa is C or S
VPKPXXAPTQLEPLPVVYYDDSSNVIEQLSN

SEQ ID NO: 18860 - protein, 26 aa, Artificial Sequence
  Cyclic GFR-binding peptide
LEPLTMLYYDENEKVVEQLSNDMVVE

SEQ ID NO: 18861 - protein, 32 aa, Artificial Sequence; identical to SEQ ID NO: 8562
  Cyclic GFR-binding peptide
  MOD_RES (4)..(4): Xaa is C or S

SEQ ID NO: 18862 - protein, 30 aa, Artificial Sequence; identical to SEQ ID NO: 8563
  Cyclic GFR-binding peptide
  MOD_RES (1)..(1): Xaa is C or S

SEQ ID NO: 18863 - protein, 27 aa, Artificial Sequence
  Cyclic GFR-binding peptide
APTKLSAISVLYLDDSSNVILKNYQNM

SEQ ID NO: 18864 - protein, 37 aa, Artificial Sequence
  Cyclic GFR-binding peptide
  MOD_RES (3)..(4)..(35)..(37): Xaa is C or S
SPXXVSQDLSPISILFIIGKTPKIYKQYEMIVKSXKX

SEQ ID NO: 18865 - protein, 38 aa, Artificial Sequence
  Cyclic GFR-binding peptide
  MOD_RES (4)..(5)..(37): Xaa is C or S
PKAXXVPTELEPLTMLYYDENEKVVEQLSNDMVVEGXG

SEQ ID NO: 18866 - protein, 28 aa, Artificial Sequence
  Cyclic GFR-binding peptide
PTRLSAISILYLDSANNVVLKNYQDMVV

SEQ ID NO: 18867 - protein, 38 aa, Artificial Sequence; identical to SEQ ID NO: 8571
  Cyclic GFR-binding peptide
  MOD_RES (3)..(4)..(36)..(38): Xaa is C or S

SEQ ID NO: 18868 - protein, 26 aa, Artificial Sequence
  Cyclic GFR-binding peptide
PTELNAISMLYFDEYDKVVLKKYREM

SEQ ID NO: 18869 - protein, 28 aa, Artificial Sequence
  Cyclic GFR-binding peptide
  MOD_RES (27)..(27): Xaa is C or S
SAISILYLDSANNVVLKNYQDMVVESXG

SEQ ID NO: 18870 - protein, 28 aa, Artificial Sequence
  Cyclic GFR-binding peptide
VPQALNAISILYFVGRKPKVLKKYRMIV

SEQ ID NO: 18871 - protein, 34 aa, Artificial Sequence
  Cyclic GFR-binding peptide
  MOD_RES (1)..(2)..(33): Xaa is C or S
XXVPQDLEPLPIVYYVGRTPKVEQLSNMVVKSXK

SEQ ID NO: 18872 - protein, 37 aa, Artificial Sequence; identical to SEQ ID NO: 8576
  Cyclic GFR-binding peptide
  MOD_RES (5)..(6)..(37): Xaa is C or S

SEQ ID NO: 18873 - protein, 29 aa, Artificial Sequence
  Cyclic GFR-binding peptide
  MOD_RES (1)..(1): Xaa is C or S
XVPQALNAISILYFVGRKPKVLKKYRMIV

SEQ ID NO: 18874 - protein, 36 aa, Artificial Sequence
  Cyclic GFR-binding peptide
  MOD_RES (7)..(7): Xaa is C or S
HVTKPTXAPTKLSPISVLFIDDSSNVIYKQYENMVV

SEQ ID NO: 18875 - protein, 29 aa, Artificial Sequence
  Cyclic GFR-binding peptide
TKLSPISVLFIDDSSNVIYKQYENMVVRS

SEQ ID NO: 18876 - protein, 39 aa, Artificial Sequence
  Cyclic GFR-binding peptide
  MOD_RES (3)..(4)..(36)..(38): Xaa is C or S
PTXXVPTRLNAISILYFDSANNVVLKKYRDMVVESXGXR

SEQ ID NO: 18877 - protein, 26 aa, Artificial Sequence
  Cyclic GFR-binding peptide
ELEPLTMLYYDEYDKVVEQLSNEMVV

SEQ ID NO: 18878 - protein, 35 aa, Artificial Sequence
  Cyclic GFR-binding peptide
  MOD_RES (3)..(4)..(35): Xaa is C or S
SPXXVPQDLEPLPIVYYVGRTPKVEQLSNMVVKSX

SEQ ID NO: 18879 - protein, 30 aa, Artificial Sequence
  Cyclic GFR-binding peptide
  MOD_RES (4)..(5): Xaa is C or S
PKAXXVPTELSPISMLFIDEYDKVVYKQYE

SEQ ID NO: 18880 - protein, 30 aa, Artificial Sequence
  Cyclic GFR-binding peptide
  MOD_RES (1)..(2): Xaa is C or S
XXVPTELEPLTMLYYDEYDKVVEQLSNEMV

SEQ ID NO: 18881 - protein, 30 aa, Artificial Sequence
  Cyclic GFR-binding peptide
  MOD_RES (30)..(30): Xaa is C or S
PQDLEPLPIVYYVGRTPKVEQLSNMVVKSX

SEQ ID NO: 18882 - protein, 24 aa, Artificial Sequence
  Cyclic GFR-binding peptide
TELNAISMLYFDEYDKVVLKKYRE

SEQ ID NO: 18883 - protein, 24 aa, Artificial Sequence
  Cyclic GFR-binding peptide
PTRLNAISILYFDSANNVVLKKYR

SEQ ID NO: 18884 - protein, 34 aa, Artificial Sequence
  Cyclic GFR-binding peptide
  MOD_RES (1)..(33): Xaa is C or S
XAPTKLEPLPVVYYDDSSNVIEQLSNNMVVRSXG

SEQ ID NO: 18885 - protein, 35 aa, Artificial Sequence
  Cyclic GFR-binding peptide
  MOD_RES (4)..(5): Xaa is C or S
PKPXXAPTKLEPLTVLYYDDSSNVIEQLSNNMVVR

SEQ ID NO: 18886 - protein, 36 aa, Artificial Sequence
  Cyclic GFR-binding peptide
  MOD_RES (1)..(2)..(34)..(36): Xaa is C or S
XXVPTELEPLPMVYYDEYDKVVEQLSNEMVVEGXGX

SEQ ID NO: 18887 - protein, 32 aa, Artificial Sequence
  Cyclic GFR-binding peptide
  MOD_RES (6)..(7): Xaa is C or S
SIPKAXXVPTELEPLTMLYYDEYDKVVEQLSN

SEQ ID NO: 18888 - protein, 29 aa, Artificial Sequence
  Cyclic GFR-binding peptide
  MOD_RES (3)..(4): Xaa is C or S
KPXXAPTKLSPISVLFIDDSSNVIYKQYE

SEQ ID NO: 18889 - protein, 38 aa, Artificial Sequence
  Cyclic GFR-binding peptide
  MOD_RES (2)..(3)..(35)..(37): Xaa is C or S
TXXVPTRLNAISILYFDSANNVVLKKYRDMVVESXGXR

SEQ ID NO: 18890 - protein, 33 aa, Artificial Sequence
  Cyclic GFR-binding peptide
  MOD_RES (1)..(2)..(33): Xaa is C or S
XXVPQDLSPISILFIVGRTPKVYKQYEMVVKSX

SEQ ID NO: 18891 - protein, 27 aa, Artificial Sequence
  Cyclic GFR-binding peptide
QLEPLTVLYYDDSSNVIEQLSNNMVVR

SEQ ID NO: 18892 - protein, 31 aa, Artificial Sequence
  Cyclic GFR-binding peptide
  MOD_RES (31)..(31): Xaa is C or S
PTRLEPLPIVYYDSANNVVEQLSNDMVVESX

SEQ ID NO: 18893 - protein, 27 aa, Artificial Sequence
  Cyclic GFR-binding peptide
  MOD_RES (1)..(1): Xaa is C or S
XVPQALSPISILFIVGRKPKVYKQYEM

SEQ ID NO: 18894 - protein, 30 aa, Artificial Sequence
  Cyclic GFR-binding peptide
  MOD_RES (1)..(1): Xaa is C or S
XVSQDLEPLPIVYYIGKTPKIEQLSNMIVK

SEQ ID NO: 18895 - protein, 26 aa, Artificial Sequence
  Cyclic GFR-binding peptide
EPLTVLYYDDSSNVIEQLSNNMVVRA

SEQ ID NO: 18896 - protein, 36 aa, Artificial Sequence
  Cyclic GFR-binding peptide
  MOD_RES (6)..(7): Xaa is C or S
SIPKAXXVPTELEPLTMLYYDEYDKVVEQLSNEMVV

SEQ ID NO: 18897 - protein, 28 aa, Artificial Sequence
  Cyclic GFR-binding peptide
  MOD_RES (27)..(27): Xaa is C or S
EPLTILYYDSANNVVEQLSNDMVVESXG

SEQ ID NO: 18898 - protein, 28 aa, Artificial Sequence
  Cyclic GFR-binding peptide
  MOD_RES (1)..(1): Xaa is C or S
XAPTQLSAISVLYLDDSSNVILKNYQNM

SEQ ID NO: 18899 - protein, 35 aa, Artificial Sequence
  Cyclic GFR-binding peptide
  MOD_RES (2)..(34): Xaa is C or S
TXAPTKLSPISVLFIDDSSNVIYKQYENMVVRSXG

SEQ ID NO: 18900 - protein, 27 aa, Artificial Sequence
  Cyclic GFR-binding peptide
  MOD_RES (2)..(2): Xaa is C or S
TXAPTKLSAISVLYLDDSSNVILKNYQ

SEQ ID NO: 18901 - protein, 25 aa, Artificial Sequence
  Cyclic GFR-binding peptide
TQLEPLPVVYYDDSSNVIEQLSNNM

SEQ ID NO: 18902 - protein, 30 aa, Artificial Sequence
  Cyclic GFR-binding peptide
  MOD_RES (5)..(5): Xaa is C or S
TKPTXAPTKLEPLTVLYYDDSSNVIEQLSN

SEQ ID NO: 18903 - protein, 33 aa, Artificial Sequence
  Cyclic GFR-binding peptide
  MOD_RES (3)..(4): Xaa is C or S
KPXXAPTKLSPISVLFIDDSSNVIYKQYENMVV

SEQ ID NO: 18904 - protein, 25 aa, Artificial Sequence
  Cyclic GFR-binding peptide
EPLPVVYYDDSSNVIEQLSNNMVVR

SEQ ID NO: 18905 - protein, 27 aa, Artificial Sequence
  Cyclic GFR-binding peptide
ALEPLTILYYVGRKPKVEQLSNMIVRS

SEQ ID NO: 18906 - protein, 24 aa, Artificial Sequence
  Cyclic GFR-binding peptide
PTQLSAISVLYLDDSSNVILKNYQ

SEQ ID NO: 18907 - protein, 23 aa, Artificial Sequence
  Cyclic GFR-binding peptide
ELSPISMLFIDEYDKVVYKQYEE

SEQ ID NO: 18908 - protein, 35 aa, Artificial Sequence
  Cyclic GFR-binding peptide
  MOD_RES (3)..(4): Xaa is C or S
KAXXVPTELEPLPMVYYDENEKVVEQLSNDMVVEG

SEQ ID NO: 18909 - protein, 40 aa, Artificial Sequence
  Cyclic GFR-binding peptide
  MOD_RES (5)..(6)..(37)..(39): Xaa is C or S
SAAPXXVPQALEPLTILYYVGRKPKVEQLSNMIVRSXKXS

SEQ ID NO: 18910 - protein, 36 aa, Artificial Sequence; identical to SEQ ID NO: 8607
  Cyclic GFR-binding peptide
  MOD_RES (6)..(7): Xaa is C or S

SEQ ID NO: 18911 - protein, 27 aa, Artificial Sequence
  Cyclic GFR-binding peptide
  MOD_RES (27)..(27): Xaa is C or S
EPLPIVYYDSANNVVEQLSNDMVVESX

SEQ ID NO: 18912 - protein, 30 aa, Artificial Sequence; identical to SEQ ID NO: 8610
  Cyclic GFR-binding peptide
  MOD_RES (2)..(3): Xaa is C or S

SEQ ID NO: 18913 - protein, 34 aa, Artificial Sequence; identical to SEQ ID NO: 8612
  Cyclic GFR-binding peptide
  MOD_RES (5)..(6): Xaa is C or S

SEQ ID NO: 18914 - protein, 28 aa, Artificial Sequence
  Cyclic GFR-binding peptide
  MOD_RES (1)..(1): Xaa is C or S
XVPTELEPLTMLYYDENEKVVEQLSNDM

SEQ ID NO: 18915 - protein, 33 aa, Artificial Sequence
  Cyclic GFR-binding peptide
  MOD_RES (5)..(6): Xaa is C or S
SASPXXVSQDLSPISILFIIGKTPKIYKQYEMI

SEQ ID NO: 18916 - protein, 38 aa, Artificial Sequence; identical to SEQ ID NO: 8613
  Cyclic GFR-binding peptide
  MOD_RES (2)..(3)..(35)..(37): Xaa is C or S

SEQ ID NO: 18917 - protein, 23 aa, Artificial Sequence
  Cyclic GFR-binding peptide
LSPISILFIIGKTPKIYKQYEMI

SEQ ID NO: 18918 - protein, 30 aa, Artificial Sequence
  Cyclic GFR-binding peptide
  MOD_RES (3)..(4): Xaa is C or S
KPXXAPTKLEPLTVLYYDDSSNVIEQLSNN

SEQ ID NO: 18919 - protein, 35 aa, Artificial Sequence; identical to SEQ ID NO: 8614
  Cyclic GFR-binding peptide
  MOD_RES (2)..(34): Xaa is C or S

SEQ ID NO: 18920 - protein, 33 aa, Artificial Sequence
  Cyclic GFR-binding peptide
  MOD_RES (4)..(5): Xaa is C or S
PKAXXVPTELEPLTMLYYDENEKVVEQLSNDMV

SEQ ID NO: 18921 - protein, 33 aa, Artificial Sequence
  Cyclic GFR-binding peptide
  MOD_RES (6)..(7): Xaa is C or S
STPPTXXVPTRLEPLTILYYDSANNVVEQLSND

SEQ ID NO: 18922 - protein, 38 aa, Artificial Sequence
  Cyclic GFR-binding peptide
  MOD_RES (4)..(5)..(37): Xaa is C or S
PKAXXVPTELSPISMLFIDENEKVVYKQYEDMVVEGXG

SEQ ID NO: 18923 - protein, 33 aa, Artificial Sequence
  Cyclic GFR-binding peptide
  MOD_RES (1)..(33): Xaa is C or S
XVPTRLSAISILYLDSANNVVLKNYQDMVVESX

SEQ ID NO: 18924 - protein, 29 aa, Artificial Sequence
  Cyclic GFR-binding peptide
TELEPLPMVYYDENEKVVEQLSNDMVVEG

SEQ ID NO: 18925 - protein, 32 aa, Artificial Sequence; identical to SEQ ID NO: 8618
  Cyclic GFR-binding peptide
  MOD_RES (31)..(31): Xaa is C or S

SEQ ID NO: 18926 - protein, 26 aa, Artificial Sequence
  Cyclic GFR-binding peptide
  MOD_RES (1)..(1): Xaa is C or S
XVPTRLSAISILYLDSANNVVLKNYQ

SEQ ID NO: 18927 - protein, 30 aa, Artificial Sequence
  Cyclic GFR-binding peptide
  MOD_RES (3)..(3): Xaa is C or S
PTXAPTKLEPLPVVYYDDSSNVIEQLSNNM

SEQ ID NO: 18928 - protein, 32 aa, Artificial Sequence
  Cyclic GFR-binding peptide
  MOD_RES (5)..(6): Xaa is C or S
SAAPXXVPQALEPLTILYYVGRKPKVEQLSNM

SEQ ID NO: 18929 - protein, 33 aa, Artificial Sequence
  Cyclic GFR-binding peptide
  MOD_RES (3)..(4): Xaa is C or S
APXXVPQALSPISILFIVGRKPKVYKQYEMIVR

SEQ ID NO: 18930 - protein, 31 aa, Artificial Sequence
  Cyclic GFR-binding peptide
  MOD_RES (3)..(4): Xaa is C or S
KPXXAPTKLSPISVLFIDDSSNVIYKQYENM

SEQ ID NO: 18931 - protein, 25 aa, Artificial Sequence
  Cyclic GFR-binding peptide
EPLTMLYYDEYDKVVEQLSNEMVVE

SEQ ID NO: 18932 - protein, 27 aa, Artificial Sequence
  Cyclic GFR-binding peptide
LSPISMLFIDEYDKVVYKQYEEMVVEG

SEQ ID NO: 18933 - protein, 41 aa, Artificial Sequence
  Cyclic GFR-binding peptide
  MOD_RES (5)..(6)..(38)..(40): Xaa is C or S
VPKPXXAPTKLEPLPVVYYDDSSNVIEQLSNNMVVRSXGXH

SEQ ID NO: 18934 - protein, 25 aa, Artificial Sequence
  Cyclic GFR-binding peptide
RLEPLTILYYDSANNVVEQLSNDMV

SEQ ID NO: 18935 - protein, 31 aa, Artificial Sequence; identical to SEQ ID NO: 8624
  Cyclic GFR-binding peptide
  MOD_RES (29)..(31): Xaa is C or S

SEQ ID NO: 18936 - protein, 35 aa, Artificial Sequence
  Cyclic GFR-binding peptide
  MOD_RES (5)..(6): Xaa is C or S
SAAPXXVPQALEPLTILYYVGRKPKVEQLSNMIVR

SEQ ID NO: 18937 - protein, 33 aa, Artificial Sequence; identical to SEQ ID NO: 8627
  Cyclic GFR-binding peptide
  MOD_RES (6)..(7): Xaa is C or S

SEQ ID NO: 18938 - protein, 39 aa, Artificial Sequence
  Cyclic GFR-binding peptide
  MOD_RES (5)..(6)..(38): Xaa is C or S
IPKAXXVPTELEPLPMVYYDEYDKVVEQLSNEMVVEGXG

SEQ ID NO: 18939 - protein, 30 aa, Artificial Sequence; identical to SEQ ID NO: 8629
  Cyclic GFR-binding peptide
  MOD_RES (4)..(5): Xaa is C or S

SEQ ID NO: 18940 - protein, 26 aa, Artificial Sequence
  Cyclic GFR-binding peptide
EPLTVLYYDDSSNVIEQLSNNMVVRS

SEQ ID NO: 18941 - protein, 29 aa, Artificial Sequence
  Cyclic GFR-binding peptide
  MOD_RES (1)..(1): Xaa is C or S
XAPTQLSPISVLFIDDSSNVIYKQYENMV

SEQ ID NO: 18942 - protein, 34 aa, Artificial Sequence
  Cyclic GFR-binding peptide
  MOD_RES (5)..(6): Xaa is C or S
IPKAXXVPTELEPLPMVYYDEYDKVVEQLSNEMV

SEQ ID NO: 18943 - protein, 24 aa, Artificial Sequence
  Cyclic GFR-binding peptide
PTRLSAISILYLDSANNVVLKNYQ

SEQ ID NO: 18944 - protein, 31 aa, Artificial Sequence; identical to SEQ ID NO: 8634
  Cyclic GFR-binding peptide
  MOD_RES (3)..(4): Xaa is C or S

SEQ ID NO: 18945 - protein, 22 aa, Artificial Sequence
  Cyclic GFR-binding peptide
LNAISMLYFDEYDKVVLKKYRE

SEQ ID NO: 18946 - protein, 33 aa, Artificial Sequence
  Cyclic GFR-binding peptide
  MOD_RES (30)..(32): Xaa is C or S
SQDLSPISILFIIGKTPKIYKQYEMIVKSXKXS

SEQ ID NO: 18947 - protein, 32 aa, Artificial Sequence
  Cyclic GFR-binding peptide
  MOD_RES (32)..(32): Xaa is C or S
VPTRLSAISILYLDSANNVVLKNYQDMVVESX

SEQ ID NO: 18948 - protein, 21 aa, Artificial Sequence
  Cyclic GFR-binding peptide
EPLPIVYYDSANNVVEQLSND

SEQ ID NO: 18949 - protein, 28 aa, Artificial Sequence
  Cyclic GFR-binding peptide
RLSAISILYLDSANNVVLKNYQDMVVES

SEQ ID NO: 18950 - protein, 31 aa, Artificial Sequence
  Cyclic GFR-binding peptide
  MOD_RES (5)..(6): Xaa is C or S
IPKAXXVPTELEPLTMLYYDENEKVVEQLSN

SEQ ID NO: 18951 - protein, 30 aa, Artificial Sequence
  Cyclic GFR-binding peptide
  MOD_RES (3)..(4): Xaa is C or S
PTXXVPTRLEPLTILYYDSANNVVEQLSND

SEQ ID NO: 18952 - protein, 25 aa, Artificial Sequence
  Cyclic GFR-binding peptide
APTQLEPLTVLYYDDSSNVIEQLSN

SEQ ID NO: 18953 - protein, 25 aa, Artificial Sequence
  Cyclic GFR-binding peptide
ELEPLTMLYYDEYDKVVEQLSNEMV

SEQ ID NO: 18954 - protein, 33 aa, Artificial Sequence
  Cyclic GFR-binding peptide
  MOD_RES (7)..(7): Xaa is C or S
HVTKPTXAPTKLEPLPVVYYDDSSNVIEQLSNN

SEQ ID NO: 18955 - protein, 27 aa, Artificial Sequence
  Cyclic GFR-binding peptide
  MOD_RES (27)..(27): Xaa is C or S
EPLTILYYDSANNVVEQLSNDMVVESX

SEQ ID NO: 18956 - protein, 23 aa, Artificial Sequence
  Cyclic GFR-binding peptide
NAISILYFVGRKPKVLKKYRMIV

SEQ ID NO: 18957 - protein, 34 aa, Artificial Sequence
  Cyclic GFR-binding peptide
  MOD_RES (2)..(3): Xaa is C or S
AXXVPTELEPLTMLYYDENEKVVEQLSNDMVVEG

SEQ ID NO: 18958 - protein, 37 aa, Artificial Sequence
  Cyclic GFR-binding peptide
  MOD_RES (4)..(5)..(37): Xaa is C or S
PKPXXAPTKLSPISVLFIDDSSNVIYKQYENMVVRSX

SEQ ID NO: 18959 - protein, 29 aa, Artificial Sequence
  Cyclic GFR-binding peptide
  MOD_RES (2)..(3): Xaa is C or S
AXXVPTELSPISMLFIDEYDKVVYKQYEE

SEQ ID NO: 18960 - protein, 30 aa, Artificial Sequence; identical to SEQ ID NO: 8644
  Cyclic GFR-binding peptide

SEQ ID NO: 18961 - protein, 23 aa, Artificial Sequence
  Cyclic GFR-binding peptide
LSPISMLFIDENEKVVYKQYEDM

SEQ ID NO: 18962 - protein, 35 aa, Artificial Sequence
  Cyclic GFR-binding peptide
  MOD_RES (6)..(7): Xaa is C or S
ASAAPXXVPQALSPISILFIVGRKPKVYKQYEMIV

SEQ ID NO: 18963 - protein, 29 aa, Artificial Sequence
  Cyclic GFR-binding peptide
  MOD_RES (27)..(29): Xaa is C or S
LNAISILYFVGRTPKVLKKYRMVVKSXKX

SEQ ID NO: 18964 - protein, 28 aa, Artificial Sequence
  Cyclic GFR-binding peptide
  MOD_RES (28)..(28): Xaa is C or S
DLNAISILYFIGKTPKILKKYRMIVKSX

SEQ ID NO: 18965 - protein, 40 aa, Artificial Sequence; identical to SEQ ID NO: 8654
  Cyclic GFR-binding peptide
  MOD_RES (6)..(7)..(38)..(40): Xaa is C or S

SEQ ID NO: 18966 - protein, 30 aa, Artificial Sequence
  Cyclic GFR-binding peptide
  MOD_RES (3)..(4): Xaa is C or S
KPXXAPTKLEPLPVVYYDDSSNVIEQLSNN

SEQ ID NO: 18967 - protein, 38 aa, Artificial Sequence; identical to SEQ ID NO: 8656
  Cyclic GFR-binding peptide
  MOD_RES (6)..(7)..(38): Xaa is C or S

SEQ ID NO: 18968 - protein, 27 aa, Artificial Sequence
  Cyclic GFR-binding peptide
  MOD_RES (1)..(2): Xaa is C or S
XXVPTRLNAISILYFDSANNVVLKKYR

SEQ ID NO: 18969 - protein, 30 aa, Artificial Sequence
  Cyclic GFR-binding peptide
  MOD_RES (2)..(3): Xaa is C or S
PXXAPTKLEPLPVVYYDDSSNVIEQLSNNM

SEQ ID NO: 18970 - protein, 39 aa, Artificial Sequence; identical to SEQ ID NO: 8659
  Cyclic GFR-binding peptide
  MOD_RES (5)..(6)..(37)..(39): Xaa is C or S

SEQ ID NO: 18971 - protein, 31 aa, Artificial Sequence
  Cyclic GFR-binding peptide
APTKLSPISVLFIDDSSNVIYKQYENMVVRS

SEQ ID NO: 18972 - protein, 25 aa, Artificial Sequence
  Cyclic GFR-binding peptide
QLEPLTVLYYDDSSNVIEQLSNNMV

SEQ ID NO: 18973 - protein, 26 aa, Artificial Sequence
  Cyclic GFR-binding peptide
SAISVLYLDDSSNVILKNYQNMVVRS

SEQ ID NO: 18974 - protein, 34 aa, Artificial Sequence; identical to SEQ ID NO: 8668
  Cyclic GFR-binding peptide
  MOD_RES (3)..(4): Xaa is C or S

SEQ ID NO: 18975 - protein, 40 aa, Artificial Sequence
  Cyclic GFR-binding peptide
  MOD_RES (6)..(7)..(39): Xaa is C or S
KIPKAXXVPTELSPISMLFIDENEKVVYKQYEDMVVEGXG

SEQ ID NO: 18976 - protein, 29 aa, Artificial Sequence
  Cyclic GFR-binding peptide
  MOD_RES (2)..(3): Xaa is C or S
AXXVPTELEPLTMLYYDEYDKVVEQLSNE

SEQ ID NO: 18977 - protein, 35 aa, Artificial Sequence
  Cyclic GFR-binding peptide
  MOD_RES (32)..(34): Xaa is C or S
VPTRLEPLPIVYYDSANNVVEQLSNDMVVESXGXR

SEQ ID NO: 18978 - protein, 40 aa, Artificial Sequence
  Cyclic GFR-binding peptide
  MOD_RES (6)..(7)..(38)..(40): Xaa is C or S
ASAAPXXVPQALEPLTILYYVGRKPKVEQLSNMIVRSXKX

SEQ ID NO: 18979 - protein, 32 aa, Artificial Sequence
  Cyclic GFR-binding peptide
  MOD_RES (5)..(6): Xaa is C or S
VPKPXXAPTKLEPLTVLYYDDSSNVIEQLSNN

SEQ ID NO: 18980 - protein, 33 aa, Artificial Sequence
  Cyclic GFR-binding peptide
  MOD_RES (1)..(32): Xaa is C or S
XVPQDLEPLPIVYYVGRTPKVEQLSNMVVKSXK

SEQ ID NO: 18981 - protein, 31 aa, Artificial Sequence
  Cyclic GFR-binding peptide
  MOD_RES (3)..(4): Xaa is C or S
KPXXAPTQLEPLTVLYYDDSSNVIEQLSNNM

SEQ ID NO: 18982 - protein, 26 aa, Artificial Sequence
  Cyclic GFR-binding peptide
  MOD_RES (1)..(1): Xaa is C or S
XVPTRLNAISILYFDSANNVVLKKYR

SEQ ID NO: 18983 - protein, 31 aa, Artificial Sequence; identical to SEQ ID NO: 8673
  Cyclic GFR-binding peptide
  MOD_RES (28)..(30): Xaa is C or S

SEQ ID NO: 18984 - protein, 32 aa, Artificial Sequence
  Cyclic GFR-binding peptide
  MOD_RES (1)..(1): Xaa is C or S
XAPTQLSPISVLFIDDSSNVIYKQYENMVVRA

SEQ ID NO: 18985 - protein, 36 aa, Artificial Sequence; identical to SEQ ID NO: 8676
  Cyclic GFR-binding peptide
  MOD_RES (1)..(2)..(33)..(35): Xaa is C or S

SEQ ID NO: 18986 - protein, 36 aa, Artificial Sequence; identical to SEQ ID NO: 8678
  Cyclic GFR-binding peptide
  MOD_RES (3)..(4)..(36): Xaa is C or S

SEQ ID NO: 18987 - protein, 29 aa, Artificial Sequence
  Cyclic GFR-binding peptide
  MOD_RES (1)..(1): Xaa is C or S
XVSQDLSPISILFIIGKTPKIYKQYEMIV

SEQ ID NO: 18988 - protein, 30 aa, Artificial Sequence
  Cyclic GFR-binding peptide
  MOD_RES (1)..(1): Xaa is C or S
XAPTKLSPISVLFIDDSSNVIYKQYENMVV

SEQ ID NO: 18989 - protein, 34 aa, Artificial Sequence
  Cyclic GFR-binding peptide
  MOD_RES (2)..(3)..(34): Xaa is C or S
PXXVPQALEPLTILYYVGRKPKVEQLSNMIVRSX

SEQ ID NO: 18990 - protein, 26 aa, Artificial Sequence
  Cyclic GFR-binding peptide
PQDLSPISILFIVGRTPKVYKQYEMV

SEQ ID NO: 18991 - protein, 29 aa, Artificial Sequence
  Cyclic GFR-binding peptide
  MOD_RES (1)..(2): Xaa is C or S
XXVPTELEPLPMVYYDEYDKVVEQLSNEM

SEQ ID NO: 18992 - protein, 36 aa, Artificial Sequence; identical to SEQ ID NO: 8682
  Cyclic GFR-binding peptide
  MOD_RES (5)..(6): Xaa is C or S

SEQ ID NO: 18993 - protein, 30 aa, Artificial Sequence
  Cyclic GFR-binding peptide
  MOD_RES (28)..(30): Xaa is C or S
ALSPISILFIVGRKPKVYKQYEMIVRSXKX

SEQ ID NO: 18994 - protein, 37 aa, Artificial Sequence
  Cyclic GFR-binding peptide
  MOD_RES (6)..(7): Xaa is C or S
TVPKPXXAPTQLEPLTVLYYDDSSNVIEQLSNNMVVR

SEQ ID NO: 18995 - protein, 24 aa, Artificial Sequence
  Cyclic GFR-binding peptide
SPISILFIIGKTPKIYKQYEMIVK

SEQ ID NO: 18996 - protein, 37 aa, Artificial Sequence
  Cyclic GFR-binding peptide
  MOD_RES (5)..(6): Xaa is C or S
VPKPXXAPTQLEPLPVVYYDDSSNVIEQLSNNMVVRA

SEQ ID NO: 18997 - protein, 26 aa, Artificial Sequence
  Cyclic GFR-binding peptide
ALSPISILFIVGRKPKVYKQYEMIVR

SEQ ID NO: 18998 - protein, 23 aa, Artificial Sequence
  Cyclic GFR-binding peptide
QALSPISILFIVGRKPKVYKQYE

SEQ ID NO: 18999 - protein, 31 aa, Artificial Sequence
  Cyclic GFR-binding peptide
VPTELSPISMLFIDENEKVVYKQYEDMVVEG

SEQ ID NO: 19000 - protein, 32 aa, Artificial Sequence
  Cyclic GFR-binding peptide
  MOD_RES (1)..(1): Xaa is C or S
XVPTELEPLPMVYYDEYDKVVEQLSNEMVVEG

SEQ ID NO: 19001 - protein, 35 aa, Artificial Sequence; identical to SEQ ID NO: 8685
  Cyclic GFR-binding peptide
  MOD_RES (4)..(5): Xaa is C or S

SEQ ID NO: 19002 - protein, 29 aa, Artificial Sequence
  Cyclic GFR-binding peptide
  MOD_RES (27)..(29): Xaa is C or S
EPLTVLYYDDSSNVIEQLSNNMVVRAXGX

SEQ ID NO: 19003 - protein, 37 aa, Artificial Sequence; identical to SEQ ID NO: 8687
  Cyclic GFR-binding peptide
  MOD_RES (5)..(6)..(37): Xaa is C or S

SEQ ID NO: 19004 - protein, 30 aa, Artificial Sequence
  Cyclic GFR-binding peptide
  MOD_RES (2)..(2): Xaa is C or S
TXAPTKLEPLPVVYYDDSSNVIEQLSNNMV

SEQ ID NO: 19005 - protein, 29 aa, Artificial Sequence
  Cyclic GFR-binding peptide
  MOD_RES (3)..(4): Xaa is C or S
APXXVPQALEPLTILYYVGRKPKVEQLSN

SEQ ID NO: 19006 - protein, 37 aa, Artificial Sequence; identical to SEQ ID NO: 8690
  Cyclic GFR-binding peptide
  MOD_RES (4)..(5)..(37): Xaa is C or S

SEQ ID NO: 19007 - protein, 38 aa, Artificial Sequence
  Cyclic GFR-binding peptide
  MOD_RES (4)..(5)..(37): Xaa is C or S
PKPXXAPTQLSPISVLFIDDSSNVIYKQYENMVVRAXG

SEQ ID NO: 19008 - protein, 37 aa, Artificial Sequence
  Cyclic GFR-binding peptide
  MOD_RES (2)..(3)..(35)..(37): Xaa is C or S
AXXVPTELEPLPMVYYDENEKVVEQLSNDMVVEGXGX

SEQ ID NO: 19009 - protein, 27 aa, Artificial Sequence
  Cyclic GFR-binding peptide
PQALNAISILYFVGRKPKVLKKYRMIV

SEQ ID NO: 19010 - protein, 37 aa, Artificial Sequence
  Cyclic GFR-binding peptide
  MOD_RES (4)..(5)..(36): Xaa is C or S
AAPXXVPQALEPLTILYYVGRKPKVEQLSNMIVRSXK

SEQ ID NO: 19011 - protein, 20 aa, Artificial Sequence
  Cyclic GFR-binding peptide
EPLTVLYYDDSSNVIEQLSN

SEQ ID NO: 19012 - protein, 23 aa, Artificial Sequence
  Cyclic GFR-binding peptide
ELEPLTMLYYDEYDKVVEQLSNE

SEQ ID NO: 19013 - protein, 33 aa, Artificial Sequence
  Cyclic GFR-binding peptide
  MOD_RES (7)..(7): Xaa is C or S
HVTKPTXAPTKLSPISVLFIDDSSNVIYKQYEN

SEQ ID NO: 19014 - protein, 24 aa, Artificial Sequence
  Cyclic GFR-binding peptide
SPISILFIVGRTPKVYKQYEMVVK

SEQ ID NO: 19015 - protein, 26 aa, Artificial Sequence
  Cyclic GFR-binding peptide
SAISVLYLDDSSNVILKNYQNMVVRA

SEQ ID NO: 19016 - protein, 21 aa, Artificial Sequence
  Cyclic GFR-binding peptide
EPLTILYYDSANNVVEQLSND

SEQ ID NO: 19017 - protein, 34 aa, Artificial Sequence
  Cyclic GFR-binding peptide
  MOD_RES (6)..(7): Xaa is C or S
YVPKPXXAPTKLSPISVLFIDDSSNVIYKQYENM

SEQ ID NO: 19018 - protein, 39 aa, Artificial Sequence; identical to SEQ ID NO: 8718
  Cyclic GFR-binding peptide
  MOD_RES (4)..(36)..(38): Xaa is C or S

SEQ ID NO: 19019 - protein, 31 aa, Artificial Sequence; identical to SEQ ID NO: 8721
  Cyclic GFR-binding peptide
  MOD_RES (3)..(4): Xaa is C or S

SEQ ID NO: 19020 - protein, 34 aa, Artificial Sequence
  Cyclic GFR-binding peptide
  MOD_RES (2)..(3): Xaa is C or S
TXXVPTRLSAISILYLDSANNVVLKNYQDMVVES

SEQ ID NO: 19021 - protein, 29 aa, Artificial Sequence
  Cyclic GFR-binding peptide
VSQDLEPLPIVYYIGKTPKIEQLSNMIVK

SEQ ID NO: 19022 - protein, 29 aa, Artificial Sequence
  Cyclic GFR-binding peptide
  MOD_RES (1)..(2): Xaa is C or S
XXVPTRLSAISILYLDSANNVVLKNYQDM

SEQ ID NO: 19023 - protein, 27 aa, Artificial Sequence
  Cyclic GFR-binding peptide
VPTELNAISMLYFDEYDKVVLKKYREM

SEQ ID NO: 19024 - protein, 30 aa, Artificial Sequence
  Cyclic GFR-binding peptide
  MOD_RES (29)..(29): Xaa is C or S
QALSPISILFIVGRKPKVYKQYEMIVRSXK

SEQ ID NO: 19025 - protein, 29 aa, Artificial Sequence
  Cyclic GFR-binding peptide
  MOD_RES (1)..(2): Xaa is C or S
XXAPTKLSAISVLYLDDSSNVILKNYQNM

SEQ ID NO: 19026 - protein, 31 aa, Artificial Sequence
  Cyclic GFR-binding peptide
  MOD_RES (3)..(4): Xaa is C or S
KAXXVPTELEPLTMLYYDENEKVVEQLSNDM

SEQ ID NO: 19027 - protein, 30 aa, Artificial Sequence; identical to SEQ ID NO: 8733
  Cyclic GFR-binding peptide

SEQ ID NO: 19028 - protein, 38 aa, Artificial Sequence
  Cyclic GFR-binding peptide
  MOD_RES (2)..(3)..(35)..(37): Xaa is C or S
AXXVPTELEPLTMLYYDEYDKVVEQLSNEMVVEGXGXR

SEQ ID NO: 19029 - protein, 37 aa, Artificial Sequence
  Cyclic GFR-binding peptide
  MOD_RES (4)..(5)..(36): Xaa is C or S
ASPXXVSQDLSPISILFIIGKTPKIYKQYEMIVKSXK

SEQ ID NO: 19030 - protein, 39 aa, Artificial Sequence
  Cyclic GFR-binding peptide
  MOD_RES (4)..(36)..(38): Xaa is C or S
KPTXAPTKLEPLTVLYYDDSSNVIEQLSNNMVVRSXGXH

SEQ ID NO: 19031 - protein, 26 aa, Artificial Sequence
  Cyclic GFR-binding peptide
VPQALSAISILYLVGRKPKVLKNYQM

SEQ ID NO: 19032 - protein, 27 aa, Artificial Sequence
  Cyclic GFR-binding peptide
ELEPLPMVYYDENEKVVEQLSNDMVVE

SEQ ID NO: 19033 - protein, 31 aa, Artificial Sequence
  Cyclic GFR-binding peptide
  MOD_RES (4)..(5): Xaa is C or S
ASPXXVSQDLSPISILFIIGKTPKIYKQYEM

SEQ ID NO: 19034 - protein, 30 aa, Artificial Sequence
  Cyclic GFR-binding peptide
  MOD_RES (4)..(5): Xaa is C or S
ASPXXVPQDLSPISILFIVGRTPKVYKQYE

SEQ ID NO: 19035 - protein, 36 aa, Artificial Sequence
  Cyclic GFR-binding peptide
  MOD_RES (1)..(2)..(33)..(35): Xaa is C or S
XXVPQDLSPISILFIVGRTPKVYKQYEMVVKSXKXS

SEQ ID NO: 19036 - protein, 41 aa, Artificial Sequence
  Cyclic GFR-binding peptide
  MOD_RES (6)..(38)..(40): Xaa is C or S
VTKPTXAPTKLEPLPVVYYDDSSNVIEQLSNNMVVRSXGXH

SEQ ID NO: 19037 - protein, 38 aa, Artificial Sequence; identical to SEQ ID NO: 8750
  Cyclic GFR-binding peptide
  MOD_RES (3)..(4)..(35)..(37): Xaa is C or S

SEQ ID NO: 19038 - protein, 28 aa, Artificial Sequence
  Cyclic GFR-binding peptide
  MOD_RES (2)..(3): Xaa is C or S
PXXVPQDLSPISILFIVGRTPKVYKQYE

SEQ ID NO: 19039 - protein, 29 aa, Artificial Sequence
  Cyclic GFR-binding peptide
  MOD_RES (2)..(3): Xaa is C or S
PXXAPTKLSAISVLYLDDSSNVILKNYQN

SEQ ID NO: 19040 - protein, 36 aa, Artificial Sequence
  Cyclic GFR-binding peptide
  MOD_RES (4)..(5): Xaa is C or S
PPTXXVPTRLEPLPIVYYDSANNVVEQLSNDMVVES

SEQ ID NO: 19041 - protein, 38 aa, Artificial Sequence; identical to SEQ ID NO: 8758
  Cyclic GFR-binding peptide
  MOD_RES (6)..(7)..(38): Xaa is C or S

SEQ ID NO: 19042 - protein, 33 aa, Artificial Sequence
  Cyclic GFR-binding peptide
  MOD_RES (32)..(32): Xaa is C or S
VPTRLSAISILYLDSANNVVLKNYQDMVVESXG

SEQ ID NO: 19043 - protein, 34 aa, Artificial Sequence
  Cyclic GFR-binding peptide
  MOD_RES (5)..(5): Xaa is C or S
TKPTXAPTKLSPISVLFIDDSSNVIYKQYENMVV

SEQ ID NO: 19044 - protein, 34 aa, Artificial Sequence; identical to SEQ ID NO: 8760
  Cyclic GFR-binding peptide
  MOD_RES (2)..(3): Xaa is C or S

SEQ ID NO: 19045 - protein, 29 aa, Artificial Sequence
  Cyclic GFR-binding peptide
  MOD_RES (27)..(29): Xaa is C or S
SPISVLFIDDSSNVIYKQYENMVVRAXGX

SEQ ID NO: 19046 - protein, 23 aa, Artificial Sequence
  Cyclic GFR-binding peptide
RLNAISILYFDSANNVVLKKYRD

SEQ ID NO: 19047 - protein, 28 aa, Artificial Sequence
  Cyclic GFR-binding peptide
PTELEPLTMLYYDENEKVVEQLSNDMVV

SEQ ID NO: 19048 - protein, 31 aa, Artificial Sequence
  Cyclic GFR-binding peptide
  MOD_RES (29)..(31): Xaa is C or S
RLNAISILYFDSANNVVLKKYRDMVVESXGX

SEQ ID NO: 19049 - protein, 31 aa, Artificial Sequence; identical to SEQ ID NO: 8764
  Cyclic GFR-binding peptide
  MOD_RES (3)..(4): Xaa is C or S

SEQ ID NO: 19050 - protein, 33 aa, Artificial Sequence
  Cyclic GFR-binding peptide
  MOD_RES (5)..(5): Xaa is C or S
TKPTXAPTKLEPLPVVYYDDSSNVIEQLSNNMV

SEQ ID NO: 19051 - protein, 32 aa, Artificial Sequence
  Cyclic GFR-binding peptide
  MOD_RES (5)..(6): Xaa is C or S
SAAPXXVPQALSPISILFIVGRKPKVYKQYEM

SEQ ID NO: 19052 - protein, 21 aa, Artificial Sequence
  Cyclic GFR-binding peptide
NAISILYFVGRKPKVLKKYRM

SEQ ID NO: 19053 - protein, 27 aa, Artificial Sequence
  Cyclic GFR-binding peptide
VPTELEPLTMLYYDENEKVVEQLSNDM

SEQ ID NO: 19054 - protein, 31 aa, Artificial Sequence; identical to SEQ ID NO: 8766
  Cyclic GFR-binding peptide
  MOD_RES (2)..(3): Xaa is C or S

SEQ ID NO: 19055 - protein, 32 aa, Artificial Sequence
  Cyclic GFR-binding peptide
  MOD_RES (31)..(31): Xaa is C or S
PTELEPLPMVYYDENEKVVEQLSNDMVVEGXG

SEQ ID NO: 19056 - protein, 36 aa, Artificial Sequence
  Cyclic GFR-binding peptide
  MOD_RES (1)..(2)..(34)..(36): Xaa is C or S
XXVPTELEPLPMVYYDENEKVVEQLSNDMVVEGXGX

SEQ ID NO: 19057 - protein, 34 aa, Artificial Sequence
  Cyclic GFR-binding peptide
  MOD_RES (1)..(33): Xaa is C or S
XAPTQLEPLPVVYYDDSSNVIEQLSNNMVVRAXG

SEQ ID NO: 19058 - protein, 30 aa, Artificial Sequence; identical to SEQ ID NO: 8770
  Cyclic GFR-binding peptide
  MOD_RES (27)..(29): Xaa is C or S

SEQ ID NO: 19059 - protein, 34 aa, Artificial Sequence; identical to SEQ ID NO: 8772
  Cyclic GFR-binding peptide
  MOD_RES (31)..(33): Xaa is C or S

SEQ ID NO: 19060 - protein, 24 aa, Artificial Sequence
  Cyclic GFR-binding peptide
PTELEPLPMVYYDENEKVVEQLSN

SEQ ID NO: 19061 - protein, 41 aa, Artificial Sequence; identical to SEQ ID NO: 8776
  Cyclic GFR-binding peptide
  MOD_RES (6)..(7)..(38)..(40): Xaa is C or S

SEQ ID NO: 19062 - protein, 26 aa, Artificial Sequence
  Cyclic GFR-binding peptide
LEPLPIVYYIGKTPKIEQLSNMIVKS

SEQ ID NO: 19063 - protein, 28 aa, Artificial Sequence
  Cyclic GFR-binding peptide
  MOD_RES (1)..(2): Xaa is C or S
XXVPQALSPISILFIVGRKPKVYKQYEM

SEQ ID NO: 19064 - protein, 30 aa, Artificial Sequence
  Cyclic GFR-binding peptide
  MOD_RES (2)..(3): Xaa is C or S
TXXVPTRLEPLPIVYYDSANNVVEQLSNDM

SEQ ID NO: 19065 - protein, 33 aa, Artificial Sequence
  Cyclic GFR-binding peptide
  MOD_RES (4)..(5): Xaa is C or S
PPTXXVPTRLSAISILYLDSANNVVLKNYQDMV

SEQ ID NO: 19066 - protein, 28 aa, Artificial Sequence
  Cyclic GFR-binding peptide
ELNAISMLYFDEYDKVVLKKYREMVVEG

SEQ ID NO: 19067 - protein, 31 aa, Artificial Sequence; identical to SEQ ID NO: 8784
  Cyclic GFR-binding peptide
  MOD_RES (4)..(5): Xaa is C or S

SEQ ID NO: 19068 - protein, 32 aa, Artificial Sequence
  Cyclic GFR-binding peptide
  MOD_RES (1)..(2): Xaa is C or S
XXVPTRLEPLPIVYYDSANNVVEQLSNDMVVE

SEQ ID NO: 19069 - protein, 35 aa, Artificial Sequence
  Cyclic GFR-binding peptide
  MOD_RES (1)..(33)..(35): Xaa is C or S
XVPTRLNAISILYFDSANNVVLKKYRDMVVESXGX

SEQ ID NO: 19070 - protein, 30 aa, Artificial Sequence
  Cyclic GFR-binding peptide
  MOD_RES (2)..(3): Xaa is C or S
PXXVPQALEPLTILYYVGRKPKVEQLSNMI

SEQ ID NO: 19071 - protein, 22 aa, Artificial Sequence
  Cyclic GFR-binding peptide
EPLTMLYYDEYDKVVEQLSNEM

SEQ ID NO: 19072 - protein, 32 aa, Artificial Sequence
  Cyclic GFR-binding peptide
  MOD_RES (6)..(7): Xaa is C or S
STPPTXXVPTRLEPLPIVYYDSANNVVEQLSN

SEQ ID NO: 19073 - protein, 27 aa, Artificial Sequence
  Cyclic GFR-binding peptide
  MOD_RES (1)..(2): Xaa is C or S
XXVPQALEPLTILYYVGRKPKVEQLSN

SEQ ID NO: 19074 - protein, 27 aa, Artificial Sequence
  Cyclic GFR-binding peptide
APTQLSAISVLYLDDSSNVILKNYQNM

SEQ ID NO: 19075 - protein, 30 aa, Artificial Sequence
  Cyclic GFR-binding peptide
  MOD_RES (3)..(4): Xaa is C or S
KPXXAPTKLSPISVLFIDDSSNVIYKQYEN

SEQ ID NO: 19076 - protein, 29 aa, Artificial Sequence
  Cyclic GFR-binding peptide
  MOD_RES (29)..(29): Xaa is C or S
KLEPLTVLYYDDSSNVIEQLSNNMVVRSX

SEQ ID NO: 19077 - protein, 35 aa, Artificial Sequence
  Cyclic GFR-binding peptide
  MOD_RES (5)..(6): Xaa is C or S
IPKAXXVPTELEPLPMVYYDENEKVVEQLSNDMVV

SEQ ID NO: 19078 - protein, 25 aa, Artificial Sequence
  Cyclic GFR-binding peptide
PTELNAISMLYFDEYDKVVLKKYRE

SEQ ID NO: 19079 - protein, 28 aa, Artificial Sequence
  Cyclic GFR-binding peptide
  MOD_RES (28)..(28): Xaa is C or S
LEPLPVVYYDDSSNVIEQLSNNMVVRAX

SEQ ID NO: 19080 - protein, 31 aa, Artificial Sequence
  Cyclic GFR-binding peptide
  MOD_RES (1)..(1): Xaa is C or S
XVPTRLEPLPIVYYDSANNVVEQLSNDMVVE

SEQ ID NO: 19081 - protein, 32 aa, Artificial Sequence; identical to SEQ ID NO: 8797
  Cyclic GFR-binding peptide
  MOD_RES (1)..(32): Xaa is C or S

SEQ ID NO: 19082 - protein, 31 aa, Artificial Sequence; identical to SEQ ID NO: 8798
  Cyclic GFR-binding peptide
  MOD_RES (31)..(31): Xaa is C or S

SEQ ID NO: 19083 - protein, 23 aa, Artificial Sequence
  Cyclic GFR-binding peptide
TELNAISMLYFDEYDKVVLKKYR

SEQ ID NO: 19084 - protein, 28 aa, Artificial Sequence
  Cyclic GFR-binding peptide
  MOD_RES (27)..(27): Xaa is C or S
LSAISILYLIGKTPKILKNYQMIVKSXK

SEQ ID NO: 19085 - protein, 24 aa, Artificial Sequence
  Cyclic GFR-binding peptide
SPISVLFIDDSSNVIYKQYENMVV

SEQ ID NO: 19086 - protein, 30 aa, Artificial Sequence; identical to SEQ ID NO: 8804
  Cyclic GFR-binding peptide
  MOD_RES (3)..(4): Xaa is C or S

SEQ ID NO: 19087 - protein, 35 aa, Artificial Sequence
  Cyclic GFR-binding peptide
  MOD_RES (2)..(34): Xaa is C or S
TXAPTKLEPLTVLYYDDSSNVIEQLSNNMVVRSXG

SEQ ID NO: 19088 - protein, 40 aa, Artificial Sequence; identical to SEQ ID NO: 8807
  Cyclic GFR-binding peptide
  MOD_RES (6)..(7)..(38)..(40): Xaa is C or S

SEQ ID NO: 19089 - protein, 26 aa, Artificial Sequence
  Cyclic GFR-binding peptide
SQDLSPISILFIIGKTPKIYKQYEMI

SEQ ID NO: 19090 - protein, 30 aa, Artificial Sequence; identical to SEQ ID NO: 8810
  Cyclic GFR-binding peptide
  MOD_RES (29)..(29): Xaa is C or S

SEQ ID NO: 19091 - protein, 30 aa, Artificial Sequence
  Cyclic GFR-binding peptide
  MOD_RES (27)..(29): Xaa is C or S
EPLPIVYYDSANNVVEQLSNDMVVESXGXR

SEQ ID NO: 19092 - protein, 24 aa, Artificial Sequence
  Cyclic GFR-binding peptide
TQLEPLTVLYYDDSSNVIEQLSNN

SEQ ID NO: 19093 - protein, 25 aa, Artificial Sequence
  Cyclic GFR-binding peptide
ELSPISMLFIDENEKVVYKQYEDMV

SEQ ID NO: 19094 - protein, 37 aa, Artificial Sequence; identical to SEQ ID NO: 8814
  Cyclic GFR-binding peptide
  MOD_RES (2)..(3)..(34)..(36): Xaa is C or S

SEQ ID NO: 19095 - protein, 34 aa, Artificial Sequence
  Cyclic GFR-binding peptide
  MOD_RES (2)..(3)..(34): Xaa is C or S
PXXVSQDLSPISILFIIGKTPKIYKQYEMIVKSX

SEQ ID NO: 19096 - protein, 28 aa, Artificial Sequence
  Cyclic GFR-binding peptide
  MOD_RES (1)..(1): Xaa is C or S
XAPTQLSPISVLFIDDSSNVIYKQYENM

SEQ ID NO: 19097 - protein, 31 aa, Artificial Sequence
  Cyclic GFR-binding peptide
  MOD_RES (4)..(5): Xaa is C or S
PKAXXVPTELEPLTMLYYDEYDKVVEQLSNE

SEQ ID NO: 19098 - protein, 29 aa, Artificial Sequence
  Cyclic GFR-binding peptide
  MOD_RES (29)..(29): Xaa is C or S
ELEPLPMVYYDENEKVVEQLSNDMVVEGX

SEQ ID NO: 19099 - protein, 39 aa, Artificial Sequence
  Cyclic GFR-binding peptide
  MOD_RES (6)..(7)..(38): Xaa is C or S
ASASPXXVSQDLSPISILFIIGKTPKIYKQYEMIVKSXK

SEQ ID NO: 19100 - protein, 27 aa, Artificial Sequence
  Cyclic GFR-binding peptide
LEPLTMLYYDENEKVVEQLSNDMVVEG

SEQ ID NO: 19101 - protein, 36 aa, Artificial Sequence
  Cyclic GFR-binding peptide
  MOD_RES (6)..(6): Xaa is C or S
VTKPTXAPTKLEPLPVVYYDDSSNVIEQLSNNMVVR

SEQ ID NO: 19102 - protein, 32 aa, Artificial Sequence
  Cyclic GFR-binding peptide
  MOD_RES (5)..(6): Xaa is C or S
VPKPXXAPTQLEPLPVVYYDDSSNVIEQLSNN

SEQ ID NO: 19103 - protein, 26 aa, Artificial Sequence
  Cyclic GFR-binding peptide
  MOD_RES (1)..(1): Xaa is C or S
XVPTELEPLTMLYYDEYDKVVEQLSN

SEQ ID NO: 19104 - protein, 29 aa, Artificial Sequence
  Cyclic GFR-binding peptide
  MOD_RES (26)..(28): Xaa is C or S
NAISILYFVGRKPKVLKKYRMIVRSXKXS

SEQ ID NO: 19105 - protein, 28 aa, Artificial Sequence
  Cyclic GFR-binding peptide
  MOD_RES (27)..(27): Xaa is C or S
SPISMLFIDEYDKVVYKQYEEMVVEGXG

SEQ ID NO: 19106 - protein, 29 aa, Artificial Sequence
  Cyclic GFR-binding peptide
  MOD_RES (28)..(28): Xaa is C or S
LSPISMLFIDEYDKVVYKQYEEMVVEGXG

SEQ ID NO: 19107 - protein, 35 aa, Artificial Sequence
  Cyclic GFR-binding peptide
  MOD_RES (6)..(7): Xaa is C or S
ASASPXXVSQDLEPLPIVYYIGKTPKIEQLSNMIV

SEQ ID NO: 19108 - protein, 27 aa, Artificial Sequence
  Cyclic GFR-binding peptide
TRLNAISILYFDSANNVVLKKYRDMVV

SEQ ID NO: 19109 - protein, 34 aa, Artificial Sequence
  Cyclic GFR-binding peptide
  MOD_RES (6)..(7): Xaa is C or S
YVPKPXXAPTKLEPLPVVYYDDSSNVIEQLSNNM

SEQ ID NO: 19110 - protein, 35 aa, Artificial Sequence
  Cyclic GFR-binding peptide
  MOD_RES (1)..(33)..(35): Xaa is C or S
XVPTRLEPLPIVYYDSANNVVEQLSNDMVVESXGX

SEQ ID NO: 19111 - protein, 34 aa, Artificial Sequence
  Cyclic GFR-binding peptide
  MOD_RES (2)..(3): Xaa is C or S
AXXVPTELEPLPMVYYDEYDKVVEQLSNEMVVEG

SEQ ID NO: 19112 - protein, 33 aa, Artificial Sequence
  Cyclic GFR-binding peptide
  MOD_RES (2)..(3): Xaa is C or S
AXXVPTELSPISMLFIDEYDKVVYKQYEEMVVE

SEQ ID NO: 19113 - protein, 34 aa, Artificial Sequence
  Cyclic GFR-binding peptide
  MOD_RES (2)..(3)..(34): Xaa is C or S
PXXVPQDLEPLPIVYYVGRTPKVEQLSNMVVKSX

SEQ ID NO: 19114 - protein, 30 aa, Artificial Sequence
  Cyclic GFR-binding peptide
  MOD_RES (28)..(30): Xaa is C or S
LSPISVLFIDDSSNVIYKQYENMVVRSXGX

SEQ ID NO: 19115 - protein, 29 aa, Artificial Sequence
  Cyclic GFR-binding peptide
  MOD_RES (3)..(4): Xaa is C or S
KAXXVPTELSPISMLFIDEYDKVVYKQYE

SEQ ID NO: 19116 - protein, 35 aa, Artificial Sequence
  Cyclic GFR-binding peptide
  MOD_RES (6)..(7): Xaa is C or S
ASASPXXVSQDLSPISILFIIGKTPKIYKQYEMIV

SEQ ID NO: 19117 - protein, 35 aa, Artificial Sequence; identical to SEQ ID NO: 8838
  Cyclic GFR-binding peptide
  MOD_RES (1)..(32)..(34): Xaa is C or S

SEQ ID NO: 19118 - protein, 29 aa, Artificial Sequence
  Cyclic GFR-binding peptide
  MOD_RES (3)..(4): Xaa is C or S
SPXXVPQDLNAISILYFVGRTPKVLKKYR

SEQ ID NO: 19119 - protein, 32 aa, Artificial Sequence
  Cyclic GFR-binding peptide
  MOD_RES (3)..(4): Xaa is C or S
PTXXVPTRLNAISILYFDSANNVVLKKYRDMV

SEQ ID NO: 19120 - protein, 32 aa, Artificial Sequence
  Cyclic GFR-binding peptide
  MOD_RES (32)..(32): Xaa is C or S
VPTELSPISMLFIDENEKVVYKQYEDMVVEGX

SEQ ID NO: 19121 - protein, 27 aa, Artificial Sequence
  Cyclic GFR-binding peptide
QALEPLTILYYVGRKPKVEQLSNMIVR

SEQ ID NO: 19122 - protein, 29 aa, Artificial Sequence
  Cyclic GFR-binding peptide
  MOD_RES (2)..(2): Xaa is C or S
TXAPTKLSAISVLYLDDSSNVILKNYQNM

SEQ ID NO: 19123 - protein, 32 aa, Artificial Sequence
  Cyclic GFR-binding peptide
  MOD_RES (5)..(6): Xaa is C or S
TPPTXXVPTRLNAISILYFDSANNVVLKKYRD

SEQ ID NO: 19124 - protein, 39 aa, Artificial Sequence
  Cyclic GFR-binding peptide
  MOD_RES (3)..(4)..(36)..(38): Xaa is C or S
KAXXVPTELSPISMLFIDEYDKVVYKQYEEMVVEGXGXR

SEQ ID NO: 19125 - protein, 27 aa, Artificial Sequence
  Cyclic GFR-binding peptide
  MOD_RES (27)..(27): Xaa is C or S
LNAISILYFVGRTPKVLKKYRMVVKSX

SEQ ID NO: 19126 - protein, 22 aa, Artificial Sequence
  Cyclic GFR-binding peptide
LSAISVLYLDDSSNVILKNYQN

SEQ ID NO: 19127 - protein, 28 aa, Artificial Sequence
  Cyclic GFR-binding peptide
VPTELNAISMLYFDENEKVVLKKYRDMV

SEQ ID NO: 19128 - protein, 38 aa, Artificial Sequence
  Cyclic GFR-binding peptide
  MOD_RES (4)..(5)..(37): Xaa is C or S
PKPXXAPTQLEPLPVVYYDDSSNVIEQLSNNMVVRAXG

SEQ ID NO: 19129 - protein, 41 aa, Artificial Sequence; identical to SEQ ID NO: 8854
  Cyclic GFR-binding peptide
  MOD_RES (5)..(6)..(38)..(40): Xaa is C or S

SEQ ID NO: 19130 - protein, 36 aa, Artificial Sequence
  Cyclic GFR-binding peptide
  MOD_RES (2)..(3)..(34)..(36): Xaa is C or S
PXXVSQDLSPISILFIIGKTPKIYKQYEMIVKSXKX

SEQ ID NO: 19131 - protein, 24 aa, Artificial Sequence
  Cyclic GFR-binding peptide
LNAISILYFVGRKPKVLKKYRMIV

SEQ ID NO: 19132 - protein, 37 aa, Artificial Sequence
  Cyclic GFR-binding peptide
  MOD_RES (6)..(6): Xaa is C or S
VTKPTXAPTKLEPLPVVYYDDSSNVIEQLSNNMVVRS

SEQ ID NO: 19133 - protein, 31 aa, Artificial Sequence
  Cyclic GFR-binding peptide
  MOD_RES (5)..(6): Xaa is C or S
IPKAXXVPTELSPISMLFIDEYDKVVYKQYE

SEQ ID NO: 19134 - protein, 36 aa, Artificial Sequence
  Cyclic GFR-binding peptide
  MOD_RES (1)..(2)..(34)..(36): Xaa is C or S
XXVPTELSPISMLFIDEYDKVVYKQYEEMVVEGXGX

SEQ ID NO: 19135 - protein, 33 aa, Artificial Sequence
  Cyclic GFR-binding peptide
  MOD_RES (1)..(33): Xaa is C or S
XVPTRLNAISILYFDSANNVVLKKYRDMVVESX

SEQ ID NO: 19136 - protein, 29 aa, Artificial Sequence
  Cyclic GFR-binding peptide
  MOD_RES (1)..(1): Xaa is C or S
XAPTKLSAISVLYLDDSSNVILKNYQNMV

SEQ ID NO: 19137 - protein, 23 aa, Artificial Sequence
  Cyclic GFR-binding peptide
QDLSPISILFIVGRTPKVYKQYE

SEQ ID NO: 19138 - protein, 29 aa, Artificial Sequence
  Cyclic GFR-binding peptide
  MOD_RES (27)..(29): Xaa is C or S
EPLTMLYYDEYDKVVEQLSNEMVVEGXGX

SEQ ID NO: 19139 - protein, 27 aa, Artificial Sequence
  Cyclic GFR-binding peptide
QDLNAISILYFVGRTPKVLKKYRMVVK

SEQ ID NO: 19140 - protein, 32 aa, Artificial Sequence
  Cyclic GFR-binding peptide
  MOD_RES (2)..(3): Xaa is C or S
TXXVPTRLNAISILYFDSANNVVLKKYRDMVV

SEQ ID NO: 19141 - protein, 35 aa, Artificial Sequence
  Cyclic GFR-binding peptide
  MOD_RES (2)..(3)..(35): Xaa is C or S
AXXVPTELEPLTMLYYDENEKVVEQLSNDMVVEGX

SEQ ID NO: 19142 - protein, 33 aa, Artificial Sequence
  Cyclic GFR-binding peptide
  MOD_RES (3)..(4): Xaa is C or S
KPXXAPTKLEPLPVVYYDDSSNVIEQLSNNMVV

SEQ ID NO: 19143 - protein, 22 aa, Artificial Sequence
  Cyclic GFR-binding peptide
LEPLPIVYYIGKTPKIEQLSNM

SEQ ID NO: 19144 - protein, 36 aa, Artificial Sequence; identical to SEQ ID NO: 8868
  Cyclic GFR-binding peptide
  MOD_RES (3)..(4)..(35): Xaa is C or S

SEQ ID NO: 19145 - protein, 40 aa, Artificial Sequence
  Cyclic GFR-binding peptide
  MOD_RES (4)..(5)..(37)..(39): Xaa is C or S
PKAXXVPTELEPLTMLYYDEYDKVVEQLSNEMVVEGXGXR

SEQ ID NO: 19146 - protein, 35 aa, Artificial Sequence; identical to SEQ ID NO: 8869
  Cyclic GFR-binding peptide
  MOD_RES (5)..(6): Xaa is C or S

SEQ ID NO: 19147 - protein, 27 aa, Artificial Sequence
  Cyclic GFR-binding peptide
  MOD_RES (1)..(1): Xaa is C or S
XVPQDLEPLPIVYYVGRTPKVEQLSNM

SEQ ID NO: 19148 - protein, 34 aa, Artificial Sequence; identical to SEQ ID NO: 8872
  Cyclic GFR-binding peptide
  MOD_RES (6)..(6): Xaa is C or S

SEQ ID NO: 19149 - protein, 26 aa, Artificial Sequence
  Cyclic GFR-binding peptide
KLSPISVLFIDDSSNVIYKQYENMVV

SEQ ID NO: 19150 - protein, 36 aa, Artificial Sequence
  Cyclic GFR-binding peptide
  MOD_RES (1)..(2)..(34)..(36): Xaa is C or S
XXVPTRLNAISILYFDSANNVVLKKYRDMVVESXGX

SEQ ID NO: 19151 - protein, 28 aa, Artificial Sequence
  Cyclic GFR-binding peptide
  MOD_RES (27)..(27): Xaa is C or S
EPLPVVYYDDSSNVIEQLSNNMVVRAXG

SEQ ID NO: 19152 - protein, 30 aa, Artificial Sequence; identical to SEQ ID NO: 8873
  Cyclic GFR-binding peptide
  MOD_RES (3)..(4): Xaa is C or S

SEQ ID NO: 19153 - protein, 23 aa, Artificial Sequence
  Cyclic GFR-binding peptide
LEPLTILYYDSANNVVEQLSNDM

SEQ ID NO: 19154 - protein, 22 aa, Artificial Sequence
  Cyclic GFR-binding peptide
LNAISILYFDSANNVVLKKYRD

SEQ ID NO: 19155 - protein, 36 aa, Artificial Sequence
  Cyclic GFR-binding peptide
  MOD_RES (6)..(7): Xaa is C or S
YVPKPXXAPTKLSPISVLFIDDSSNVIYKQYENMVV

SEQ ID NO: 19156 - protein, 24 aa, Artificial Sequence
  Cyclic GFR-binding peptide
SPISILFIVGRKPKVYKQYEMIVR

SEQ ID NO: 19157 - protein, 27 aa, Artificial Sequence
  Cyclic GFR-binding peptide
ELEPLTMLYYDEYDKVVEQLSNEMVVE

SEQ ID NO: 19158 - protein, 38 aa, Artificial Sequence
  Cyclic GFR-binding peptide
  MOD_RES (4)..(5)..(37): Xaa is C or S
PKAXXVPTELEPLTMLYYDEYDKVVEQLSNEMVVEGXG

SEQ ID NO: 19159 - protein, 39 aa, Artificial Sequence
  Cyclic GFR-binding peptide
  MOD_RES (6)..(7)..(38): Xaa is C or S
ASASPXXVPQDLEPLPIVYYVGRTPKVEQLSNMVVKSXK

SEQ ID NO: 19160 - protein, 28 aa, Artificial Sequence
  Cyclic GFR-binding peptide
QDLEPLPIVYYVGRTPKVEQLSNMVVKS

SEQ ID NO: 19161 - protein, 34 aa, Artificial Sequence; identical to SEQ ID NO: 8879
  Cyclic GFR-binding peptide
  MOD_RES (2)..(3)..(34): Xaa is C or S

SEQ ID NO: 19162 - protein, 24 aa, Artificial Sequence
  Cyclic GFR-binding peptide
RLEPLPIVYYDSANNVVEQLSNDM

SEQ ID NO: 19163 - protein, 25 aa, Artificial Sequence
  Cyclic GFR-binding peptide
PQALEPLTILYYVGRKPKVEQLSNM

SEQ ID NO: 19164 - protein, 28 aa, Artificial Sequence
  Cyclic GFR-binding peptide
  MOD_RES (2)..(3): Xaa is C or S
AXXVPTELNAISMLYFDENEKVVLKKYR

SEQ ID NO: 19165 - protein, 30 aa, Artificial Sequence
  Cyclic GFR-binding peptide
  MOD_RES (1)..(1): Xaa is C or S
XAPTQLEPLTVLYYDDSSNVIEQLSNNMVV

SEQ ID NO: 19166 - protein, 36 aa, Artificial Sequence
  Cyclic GFR-binding peptide
  MOD_RES (3)..(4)..(35): Xaa is C or S
SPXXVPQDLEPLPIVYYVGRTPKVEQLSNMVVKSXK

SEQ ID NO: 19167 - protein, 36 aa, Artificial Sequence
  Cyclic GFR-binding peptide
  MOD_RES (3)..(4)..(36): Xaa is C or S
KAXXVPTELEPLPMVYYDENEKVVEQLSNDMVVEGX

SEQ ID NO: 19168 - protein, 25 aa, Artificial Sequence
  Cyclic GFR-binding peptide
QDLSPISILFIIGKTPKIYKQYEMI

SEQ ID NO: 19169 - protein, 39 aa, Artificial Sequence; identical to SEQ ID NO: 8887
  Cyclic GFR-binding peptide
  MOD_RES (7)..(39): Xaa is C or S

SEQ ID NO: 19170 - protein, 31 aa, Artificial Sequence
  Cyclic GFR-binding peptide
  MOD_RES (1)..(1): Xaa is C or S
XVPTRLNAISILYFDSANNVVLKKYRDMVVE

SEQ ID NO: 19171 - protein, 25 aa, Artificial Sequence
  Cyclic GFR-binding peptide
LSAISILYLVGRKPKVLKNYQMIVR

SEQ ID NO: 19172 - protein, 36 aa, Artificial Sequence
  Cyclic GFR-binding peptide
  MOD_RES (3)..(4)..(35): Xaa is C or S
SPXXVSQDLSPISILFIIGKTPKIYKQYEMIVKSXK

SEQ ID NO: 19173 - protein, 30 aa, Artificial Sequence; identical to SEQ ID NO: 8890
  Cyclic GFR-binding peptide
  MOD_RES (28)..(30): Xaa is C or S

SEQ ID NO: 19174 - protein, 26 aa, Artificial Sequence
  Cyclic GFR-binding peptide
ELSPISMLFIDENEKVVYKQYEDMVV

SEQ ID NO: 19175 - protein, 40 aa, Artificial Sequence
  Cyclic GFR-binding peptide
  MOD_RES (4)..(5)..(37)..(39): Xaa is C or S
PKPXXAPTQLEPLTVLYYDDSSNVIEQLSNNMVVRAXGXH

SEQ ID NO: 19176 - protein, 31 aa, Artificial Sequence
  Cyclic GFR-binding peptide
  MOD_RES (31)..(31): Xaa is C or S
PTELEPLPMVYYDENEKVVEQLSNDMVVEGX

SEQ ID NO: 19177 - protein, 29 aa, Artificial Sequence
  Cyclic GFR-binding peptide
  MOD_RES (2)..(3): Xaa is C or S
TXXVPTRLNAISILYFDSANNVVLKKYRD

SEQ ID NO: 19178 - protein, 33 aa, Artificial Sequence; identical to SEQ ID NO: 8894
  Cyclic GFR-binding peptide
  MOD_RES (6)..(7): Xaa is C or S

SEQ ID NO: 19179 - protein, 35 aa, Artificial Sequence
  Cyclic GFR-binding peptide
  MOD_RES (1)..(33)..(35): Xaa is C or S
XAPTKLEPLTVLYYDDSSNVIEQLSNNMVVRSXGX

SEQ ID NO: 19180 - protein, 22 aa, Artificial Sequence
  Cyclic GFR-binding peptide
NAISILYFVGRTPKVLKKYRMV

SEQ ID NO: 19181 - protein, 30 aa, Artificial Sequence; identical to SEQ ID NO: 8899
  Cyclic GFR-binding peptide
  MOD_RES (4)..(5): Xaa is C or S

SEQ ID NO: 19182 - protein, 39 aa, Artificial Sequence; identical to SEQ ID NO: 8902
  Cyclic GFR-binding peptide
  MOD_RES (6)..(7)..(38): Xaa is C or S

SEQ ID NO: 19183 - protein, 35 aa, Artificial Sequence
  Cyclic GFR-binding peptide
  MOD_RES (1)..(2)..(34): Xaa is C or S
XXAPTQLSPISVLFIDDSSNVIYKQYENMVVRAXG

SEQ ID NO: 19184 - protein, 37 aa, Artificial Sequence
  Cyclic GFR-binding peptide
  MOD_RES (3)..(4)..(36): Xaa is C or S
KAXXVPTELEPLPMVYYDENEKVVEQLSNDMVVEGXG

SEQ ID NO: 19185 - protein, 24 aa, Artificial Sequence
  Cyclic GFR-binding peptide
ELSPISMLFIDEYDKVVYKQYEEM

SEQ ID NO: 19186 - protein, 42 aa, Artificial Sequence
  Cyclic GFR-binding peptide
  MOD_RES (6)..(7)..(39)..(41): Xaa is C or S
TVPKPXXAPTQLEPLPVVYYDDSSNVIEQLSNNMVVRAXGXH

SEQ ID NO: 19187 - protein, 40 aa, Artificial Sequence
  Cyclic GFR-binding peptide
  MOD_RES (5)..(6)..(37)..(39): Xaa is C or S
SASPXXVSQDLEPLPIVYYIGKTPKIEQLSNMIVKSXKXS

SEQ ID NO: 19188 - protein, 31 aa, Artificial Sequence; identical to SEQ ID NO: 8907
  Cyclic GFR-binding peptide
  MOD_RES (28)..(30): Xaa is C or S

SEQ ID NO: 19189 - protein, 39 aa, Artificial Sequence
  Cyclic GFR-binding peptide
  MOD_RES (3)..(4)..(36)..(38): Xaa is C or S
KPXXAPTQLSPISVLFIDDSSNVIYKQYENMVVRAXGXH

SEQ ID NO: 19190 - protein, 31 aa, Artificial Sequence; identical to SEQ ID NO: 8909
  Cyclic GFR-binding peptide
  MOD_RES (3)..(4): Xaa is C or S

SEQ ID NO: 19191 - protein, 32 aa, Artificial Sequence
  Cyclic GFR-binding peptide
  MOD_RES (5)..(5): Xaa is C or S
TKPTXAPTKLEPLPVVYYDDSSNVIEQLSNNM

SEQ ID NO: 19192 - protein, 26 aa, Artificial Sequence
  Cyclic GFR-binding peptide
DLSAISILYLVGRTPKVLKNYQMVVK

SEQ ID NO: 19193 - protein, 31 aa, Artificial Sequence; identical to SEQ ID NO: 8915
  Cyclic GFR-binding peptide
  MOD_RES (30)..(30): Xaa is C or S

SEQ ID NO: 19194 - protein, 33 aa, Artificial Sequence; identical to SEQ ID NO: 8916
  Cyclic GFR-binding peptide
  MOD_RES (1)..(32): Xaa is C or S

SEQ ID NO: 19195 - protein, 30 aa, Artificial Sequence; identical to SEQ ID NO: 8918
  Cyclic GFR-binding peptide
  MOD_RES (27)..(29): Xaa is C or S

SEQ ID NO: 19196 - protein, 28 aa, Artificial Sequence
  Cyclic GFR-binding peptide
VSQDLSPISILFIIGKTPKIYKQYEMIV

SEQ ID NO: 19197 - protein, 33 aa, Artificial Sequence
  Cyclic GFR-binding peptide
  MOD_RES (30)..(32): Xaa is C or S
TRLEPLTILYYDSANNVVEQLSNDMVVESXGXR

SEQ ID NO: 19198 - protein, 33 aa, Artificial Sequence; identical to SEQ ID NO: 8921
  Cyclic GFR-binding peptide
  MOD_RES (1)..(32): Xaa is C or S

SEQ ID NO: 19199 - protein, 28 aa, Artificial Sequence
  Cyclic GFR-binding peptide
  MOD_RES (2)..(3): Xaa is C or S
AXXVPTELEPLPMVYYDEYDKVVEQLSN

SEQ ID NO: 19200 - protein, 32 aa, Artificial Sequence
  Cyclic GFR-binding peptide
  MOD_RES (2)..(3): Xaa is C or S
AXXVPTELEPLTMLYYDENEKVVEQLSNDMVV

SEQ ID NO: 19201 - protein, 24 aa, Artificial Sequence
  Cyclic GFR-binding peptide
LSPISMLFIDENEKVVYKQYEDMV

SEQ ID NO: 19202 - protein, 39 aa, Artificial Sequence
  Cyclic GFR-binding peptide
  MOD_RES (5)..(6)..(38): Xaa is C or S
VPKPXXAPTKLEPLTVLYYDDSSNVIEQLSNNMVVRSXG

SEQ ID NO: 19203 - protein, 36 aa, Artificial Sequence; identical to SEQ ID NO: 8928
  Cyclic GFR-binding peptide
  MOD_RES (1)..(2)..(33)..(35): Xaa is C or S

SEQ ID NO: 19204 - protein, 40 aa, Artificial Sequence; identical to SEQ ID NO: 8929
  Cyclic GFR-binding peptide
  MOD_RES (4)..(5)..(37)..(39): Xaa is C or S

SEQ ID NO: 19205 - protein, 36 aa, Artificial Sequence
  Cyclic GFR-binding peptide
  MOD_RES (1)..(2)..(34)..(36): Xaa is C or S
XXAPTQLEPLPVVYYDDSSNVIEQLSNNMVVRAXGX

SEQ ID NO: 19206 - protein, 32 aa, Artificial Sequence; identical to SEQ ID NO: 8931
  Cyclic GFR-binding peptide
  MOD_RES (1)..(2): Xaa is C or S

SEQ ID NO: 19207 - protein, 32 aa, Artificial Sequence
  Cyclic GFR-binding peptide
  MOD_RES (5)..(6): Xaa is C or S
SASPXXVSQDLSPISILFIIGKTPKIYKQYEM

SEQ ID NO: 19208 - protein, 33 aa, Artificial Sequence
  Cyclic GFR-binding peptide
  MOD_RES (4)..(5): Xaa is C or S
PKAXXVPTELEPLTMLYYDEYDKVVEQLSNEMV

SEQ ID NO: 19209 - protein, 28 aa, Artificial Sequence
  Cyclic GFR-binding peptide
VPTELEPLPMVYYDEYDKVVEQLSNEMV

SEQ ID NO: 19210 - protein, 28 aa, Artificial Sequence
  Cyclic GFR-binding peptide
  MOD_RES (2)..(3): Xaa is C or S
PXXVPQALSPISILFIVGRKPKVYKQYE

SEQ ID NO: 19211 - protein, 26 aa, Artificial Sequence
  Cyclic GFR-binding peptide
LSPISVLFIDDSSNVIYKQYENMVVR

SEQ ID NO: 19212 - protein, 32 aa, Artificial Sequence; identical to SEQ ID NO: 8936
  Cyclic GFR-binding peptide
  MOD_RES (32)..(32): Xaa is C or S

SEQ ID NO: 19213 - protein, 35 aa, Artificial Sequence
  Cyclic GFR-binding peptide
  MOD_RES (6)..(7): Xaa is C or S
KIPKAXXVPTELSPISMLFIDENEKVVYKQYEDMV

SEQ ID NO: 19214 - protein, 23 aa, Artificial Sequence
  Cyclic GFR-binding peptide
QALNAISILYFVGRKPKVLKKYR

SEQ ID NO: 19215 - protein, 36 aa, Artificial Sequence
  Cyclic GFR-binding peptide
  MOD_RES (3)..(4)..(35): Xaa is C or S
SPXXVPQDLSPISILFIVGRTPKVYKQYEMVVKSXK

SEQ ID NO: 19216 - protein, 29 aa, Artificial Sequence
  Cyclic GFR-binding peptide
  MOD_RES (2)..(3): Xaa is C or S
AXXVPTELSPISMLFIDENEKVVYKQYED

SEQ ID NO: 19217 - protein, 30 aa, Artificial Sequence
  Cyclic GFR-binding peptide
  MOD_RES (2)..(3): Xaa is C or S
PXXVSQDLEPLPIVYYIGKTPKIEQLSNMI

SEQ ID NO: 19218 - protein, 34 aa, Artificial Sequence
  Cyclic GFR-binding peptide
  MOD_RES (6)..(6): Xaa is C or S
VTKPTXAPTKLEPLTVLYYDDSSNVIEQLSNNMV

SEQ ID NO: 19219 - protein, 27 aa, Artificial Sequence
  Cyclic GFR-binding peptide
PQDLSPISILFIVGRTPKVYKQYEMVV

SEQ ID NO: 19220 - protein, 32 aa, Artificial Sequence
  Cyclic GFR-binding peptide
  MOD_RES (3)..(4): Xaa is C or S
SPXXVSQDLSPISILFIIGKTPKIYKQYEMIV

SEQ ID NO: 19221 - protein, 33 aa, Artificial Sequence
  Cyclic GFR-binding peptide
  MOD_RES (32)..(32): Xaa is C or S
APTQLEPLTVLYYDDSSNVIEQLSNNMVVRAXG

SEQ ID NO: 19222 - protein, 24 aa, Artificial Sequence
  Cyclic GFR-binding peptide
EPLTMLYYDEYDKVVEQLSNEMVV

SEQ ID NO: 19223 - protein, 28 aa, Artificial Sequence
  Cyclic GFR-binding peptide
  MOD_RES (28)..(28): Xaa is C or S
LEPLTILYYDSANNVVEQLSNDMVVESX

SEQ ID NO: 19224 - protein, 26 aa, Artificial Sequence
  Cyclic GFR-binding peptide
QDLSAISILYLVGRTPKVLKNYQMVV

SEQ ID NO: 19225 - protein, 26 aa, Artificial Sequence
  Cyclic GFR-binding peptide
PTELSPISMLFIDENEKVVYKQYEDM

SEQ ID NO: 19226 - protein, 27 aa, Artificial Sequence
  Cyclic GFR-binding peptide
VPTELSPISMLFIDENEKVVYKQYEDM

SEQ ID NO: 19227 - protein, 30 aa, Artificial Sequence
  Cyclic GFR-binding peptide
  MOD_RES (4)..(5): Xaa is C or S
PKPXXAPTKLEPLPVVYYDDSSNVIEQLSN

SEQ ID NO: 19228 - protein, 25 aa, Artificial Sequence
  Cyclic GFR-binding peptide
VPQALSAISILYLVGRKPKVLKNYQ

SEQ ID NO: 19229 - protein, 22 aa, Artificial Sequence
  Cyclic GFR-binding peptide
ALSAISILYLVGRKPKVLKNYQ

SEQ ID NO: 19230 - protein, 31 aa, Artificial Sequence
  Cyclic GFR-binding peptide
  MOD_RES (30)..(30): Xaa is C or S
TKLEPLPVVYYDDSSNVIEQLSNNMVVRSXG

SEQ ID NO: 19231 - protein, 33 aa, Artificial Sequence
  Cyclic GFR-binding peptide
  MOD_RES (4)..(5): Xaa is C or S
PKAXXVPTELSPISMLFIDENEKVVYKQYEDMV

SEQ ID NO: 19232 - protein, 37 aa, Artificial Sequence
  Cyclic GFR-binding peptide
  MOD_RES (3)..(4)..(36): Xaa is C or S
KPXXAPTQLSPISVLFIDDSSNVIYKQYENMVVRAXG

SEQ ID NO: 19233 - protein, 31 aa, Artificial Sequence
  Cyclic GFR-binding peptide
  MOD_RES (30)..(30): Xaa is C or S
TELEPLPMVYYDEYDKVVEQLSNEMVVEGXG

SEQ ID NO: 19234 - protein, 28 aa, Artificial Sequence
  Cyclic GFR-binding peptide
  MOD_RES (26)..(28): Xaa is C or S
NAISILYFVGRKPKVLKKYRMIVRSXKX

SEQ ID NO: 19235 - protein, 24 aa, Artificial Sequence
  Cyclic GFR-binding peptide
ALSAISILYLVGRKPKVLKNYQMI

SEQ ID NO: 19236 - protein, 27 aa, Artificial Sequence
  Cyclic GFR-binding peptide
PTELEPLTMLYYDEYDKVVEQLSNEMV

SEQ ID NO: 19237 - protein, 29 aa, Artificial Sequence
  Cyclic GFR-binding peptide
  MOD_RES (3)..(4): Xaa is C or S
PTXXVPTRLSAISILYLDSANNVVLKNYQ

SEQ ID NO: 19238 - protein, 26 aa, Artificial Sequence
  Cyclic GFR-binding peptide
  MOD_RES (1)..(1): Xaa is C or S
XVPTELSPISMLFIDENEKVVYKQYE

SEQ ID NO: 19239 - protein, 32 aa, Artificial Sequence; identical to SEQ ID NO: 8984
  Cyclic GFR-binding peptide
  MOD_RES (5)..(5): Xaa is C or S

SEQ ID NO: 19240 - protein, 32 aa, Artificial Sequence; identical to SEQ ID NO: 8985
  Cyclic GFR-binding peptide
  MOD_RES (29)..(31): Xaa is C or S

SEQ ID NO: 19241 - protein, 23 aa, Artificial Sequence
  Cyclic GFR-binding peptide
LEPLTILYYVGRKPKVEQLSNMI

SEQ ID NO: 19242 - protein, 25 aa, Artificial Sequence
  Cyclic GFR-binding peptide
SPISVLFIDDSSNVIYKQYENMVVR

SEQ ID NO: 19243 - protein, 32 aa, Artificial Sequence
  Cyclic GFR-binding peptide
  MOD_RES (1)..(2): Xaa is C or S
XXAPTKLEPLPVVYYDDSSNVIEQLSNNMVVR

SEQ ID NO: 19244 - protein, 36 aa, Artificial Sequence
  Cyclic GFR-binding peptide
  MOD_RES (2)..(3)..(35): Xaa is C or S
PXXAPTQLEPLTVLYYDDSSNVIEQLSNNMVVRAXG

SEQ ID NO: 19245 - protein, 34 aa, Artificial Sequence; identical to SEQ ID NO: 8988
  Cyclic GFR-binding peptide
  MOD_RES (2)..(3)..(34): Xaa is C or S

SEQ ID NO: 19246 - protein, 34 aa, Artificial Sequence
  Cyclic GFR-binding peptide
  MOD_RES (32)..(34): Xaa is C or S
VPTELEPLPMVYYDENEKVVEQLSNDMVVEGXGX

SEQ ID NO: 19247 - protein, 37 aa, Artificial Sequence
  Cyclic GFR-binding peptide
  MOD_RES (6)..(7): Xaa is C or S
SIPKAXXVPTELEPLPMVYYDEYDKVVEQLSNEMVVE

SEQ ID NO: 19248 - protein, 28 aa, Artificial Sequence
  Cyclic GFR-binding peptide
RLEPLTILYYDSANNVVEQLSNDMVVES

SEQ ID NO: 19249 - protein, 33 aa, Artificial Sequence
  Cyclic GFR-binding peptide
  MOD_RES (2)..(3): Xaa is C or S
PXXVSQDLEPLPIVYYIGKTPKIEQLSNMIVKS

SEQ ID NO: 19250 - protein, 34 aa, Artificial Sequence
  Cyclic GFR-binding peptide
  MOD_RES (4)..(5): Xaa is C or S
ASPXXVSQDLSPISILFIIGKTPKIYKQYEMIVK

SEQ ID NO: 19251 - protein, 28 aa, Artificial Sequence
  Cyclic GFR-binding peptide
VSQDLEPLPIVYYIGKTPKIEQLSNMIV

SEQ ID NO: 19252 - protein, 26 aa, Artificial Sequence
  Cyclic GFR-binding peptide
LSPISMLFIDENEKVVYKQYEDMVVE

SEQ ID NO: 19253 - protein, 38 aa, Artificial Sequence
  Cyclic GFR-binding peptide
  MOD_RES (3)..(4)..(35)..(37): Xaa is C or S
SPXXVSQDLEPLPIVYYIGKTPKIEQLSNMIVKSXKXS

SEQ ID NO: 19254 - protein, 31 aa, Artificial Sequence
  Cyclic GFR-binding peptide
  MOD_RES (5)..(6): Xaa is C or S
VPKPXXAPTKLEPLPVVYYDDSSNVIEQLSN

SEQ ID NO: 19255 - protein, 28 aa, Artificial Sequence
  Cyclic GFR-binding peptide
  MOD_RES (1)..(1): Xaa is C or S
XVPQALSPISILFIVGRKPKVYKQYEMI

SEQ ID NO: 19256 - protein, 35 aa, Artificial Sequence
  Cyclic GFR-binding peptide
  MOD_RES (5)..(6): Xaa is C or S
VPKPXXAPTQLEPLTVLYYDDSSNVIEQLSNNMVV

SEQ ID NO: 19257 - protein, 35 aa, Artificial Sequence; identical to SEQ ID NO: 9002
  Cyclic GFR-binding peptide
  MOD_RES (5)..(6): Xaa is C or S

SEQ ID NO: 19258 - protein, 34 aa, Artificial Sequence
  Cyclic GFR-binding peptide
  MOD_RES (3)..(4): Xaa is C or S
KAXXVPTELEPLTMLYYDEYDKVVEQLSNEMVVE

SEQ ID NO: 19259 - protein, 23 aa, Artificial Sequence
  Cyclic GFR-binding peptide
EPLTVLYYDDSSNVIEQLSNNMV

SEQ ID NO: 19260 - protein, 30 aa, Artificial Sequence; identical to SEQ ID NO: 9006
  Cyclic GFR-binding peptide
  MOD_RES (2)..(3): Xaa is C or S

SEQ ID NO: 19261 - protein, 26 aa, Artificial Sequence
  Cyclic GFR-binding peptide
PTRLNAISILYFDSANNVVLKKYRDM

SEQ ID NO: 19262 - protein, 27 aa, Artificial Sequence
  Cyclic GFR-binding peptide
  MOD_RES (1)..(1): Xaa is C or S
XVPQALSAISILYLVGRKPKVLKNYQM

SEQ ID NO: 19263 - protein, 36 aa, Artificial Sequence
  Cyclic GFR-binding peptide
  MOD_RES (6)..(7): Xaa is C or S
TVPKPXXAPTQLSPISVLFIDDSSNVIYKQYENMVV

SEQ ID NO: 19264 - protein, 36 aa, Artificial Sequence
  Cyclic GFR-binding peptide
  MOD_RES (5)..(6): Xaa is C or S
SASPXXVPQDLEPLPIVYYVGRTPKVEQLSNMVVKS

SEQ ID NO: 19265 - protein, 28 aa, Artificial Sequence
  Cyclic GFR-binding peptide
  MOD_RES (1)..(1): Xaa is C or S
XVPTRLEPLTILYYDSANNVVEQLSNDM

SEQ ID NO: 19266 - protein, 37 aa, Artificial Sequence
  Cyclic GFR-binding peptide
  MOD_RES (3)..(4)..(36): Xaa is C or S
PTXXVPTRLEPLTILYYDSANNVVEQLSNDMVVESXG

SEQ ID NO: 19267 - protein, 33 aa, Artificial Sequence
  Cyclic GFR-binding peptide
  MOD_RES (5)..(6): Xaa is C or S
TPPTXXVPTRLSAISILYLDSANNVVLKNYQDM

SEQ ID NO: 19268 - protein, 34 aa, Artificial Sequence
  Cyclic GFR-binding peptide
  MOD_RES (32)..(34): Xaa is C or S
VPTELSPISMLFIDENEKVVYKQYEDMVVEGXGX

SEQ ID NO: 19269 - protein, 27 aa, Artificial Sequence
  Cyclic GFR-binding peptide
DLSPISILFIIGKTPKIYKQYEMIVKS

SEQ ID NO: 19270 - protein, 35 aa, Artificial Sequence
  Cyclic GFR-binding peptide
  MOD_RES (5)..(5): Xaa is C or S
TKPTXAPTKLSPISVLFIDDSSNVIYKQYENMVVR

SEQ ID NO: 19271 - protein, 30 aa, Artificial Sequence
  Cyclic GFR-binding peptide
VPTRLEPLTILYYDSANNVVEQLSNDMVVE

SEQ ID NO: 19272 - protein, 35 aa, Artificial Sequence
  Cyclic GFR-binding peptide
  MOD_RES (32)..(34): Xaa is C or S
VPTRLNAISILYFDSANNVVLKKYRDMVVESXGXR

SEQ ID NO: 19273 - protein, 33 aa, Artificial Sequence
  Cyclic GFR-binding peptide
  MOD_RES (5)..(5): Xaa is C or S
TKPTXAPTKLEPLTVLYYDDSSNVIEQLSNNMV

SEQ ID NO: 19274 - protein, 36 aa, Artificial Sequence; identical to SEQ ID NO: 9027
  Cyclic GFR-binding peptide
  MOD_RES (3)..(35): Xaa is C or S

SEQ ID NO: 19275 - protein, 30 aa, Artificial Sequence
  Cyclic GFR-binding peptide
  MOD_RES (4)..(5): Xaa is C or S
PPTXXVPTRLEPLPIVYYDSANNVVEQLSN

SEQ ID NO: 19276 - protein, 31 aa, Artificial Sequence
  Cyclic GFR-binding peptide
  MOD_RES (28)..(30): Xaa is C or S
LSPISMLFIDENEKVVYKQYEDMVVEGXGXR

SEQ ID NO: 19277 - protein, 32 aa, Artificial Sequence
  Cyclic GFR-binding peptide
  MOD_RES (4)..(5): Xaa is C or S
PPTXXVPTRLEPLTILYYDSANNVVEQLSNDM

SEQ ID NO: 19278 - protein, 39 aa, Artificial Sequence
  Cyclic GFR-binding peptide
  MOD_RES (6)..(7)..(38): Xaa is C or S
ASASPXXVSQDLEPLPIVYYIGKTPKIEQLSNMIVKSXK

SEQ ID NO: 19279 - protein, 28 aa, Artificial Sequence
  Cyclic GFR-binding peptide
VPQALEPLTILYYVGRKPKVEQLSNMIV

SEQ ID NO: 19280 - protein, 33 aa, Artificial Sequence; identical to SEQ ID NO: 9041
  Cyclic GFR-binding peptide
  MOD_RES (31)..(33): Xaa is C or S

SEQ ID NO: 19281 - protein, 37 aa, Artificial Sequence
  Cyclic GFR-binding peptide
  MOD_RES (4)..(5)..(36): Xaa is C or S
AAPXXVPQALSPISILFIVGRKPKVYKQYEMIVRSXK

SEQ ID NO: 19282 - protein, 30 aa, Artificial Sequence; identical to SEQ ID NO: 9042
  Cyclic GFR-binding peptide
  MOD_RES (29)..(29): Xaa is C or S

SEQ ID NO: 19283 - protein, 25 aa, Artificial Sequence
  Cyclic GFR-binding peptide
TQLEPLTVLYYDDSSNVIEQLSNNM

SEQ ID NO: 19284 - protein, 34 aa, Artificial Sequence; identical to SEQ ID NO: 9046
  Cyclic GFR-binding peptide
  MOD_RES (6)..(7): Xaa is C or S

SEQ ID NO: 19285 - protein, 28 aa, Artificial Sequence
  Cyclic GFR-binding peptide
VPQDLNAISILYFVGRTPKVLKKYRMVV

SEQ ID NO: 19286 - protein, 24 aa, Artificial Sequence
  Cyclic GFR-binding peptide
KLSAISVLYLDDSSNVILKNYQNM

SEQ ID NO: 19287 - protein, 33 aa, Artificial Sequence; identical to SEQ ID NO: 9051
  Cyclic GFR-binding peptide
  MOD_RES (6)..(7): Xaa is C or S

SEQ ID NO: 19288 - protein, 29 aa, Artificial Sequence
  Cyclic GFR-binding peptide
  MOD_RES (3)..(4): Xaa is C or S
SPXXVSQDLEPLPIVYYIGKTPKIEQLSN

SEQ ID NO: 19289 - protein, 21 aa, Artificial Sequence
  Cyclic GFR-binding peptide
LSAISILYLIGKTPKILKNYQ

SEQ ID NO: 19290 - protein, 27 aa, Artificial Sequence
  Cyclic GFR-binding peptide
DLNAISILYFVGRTPKVLKKYRMVVKS

SEQ ID NO: 19291 - protein, 24 aa, Artificial Sequence
  Cyclic GFR-binding peptide
RLSAISILYLDSANNVVLKNYQDM

SEQ ID NO: 19292 - protein, 31 aa, Artificial Sequence; identical to SEQ ID NO: 9056
  Cyclic GFR-binding peptide
  MOD_RES (5)..(6): Xaa is C or S

SEQ ID NO: 19293 - protein, 35 aa, Artificial Sequence
  Cyclic GFR-binding peptide
  MOD_RES (3)..(4): Xaa is C or S
KPXXAPTKLEPLTVLYYDDSSNVIEQLSNNMVVRS

SEQ ID NO: 19294 - protein, 36 aa, Artificial Sequence
  Cyclic GFR-binding peptide
  MOD_RES (7)..(7): Xaa is C or S
HVTKPTXAPTKLEPLPVVYYDDSSNVIEQLSNNMVV

SEQ ID NO: 19295 - protein, 33 aa, Artificial Sequence
  Cyclic GFR-binding peptide
  MOD_RES (30)..(32): Xaa is C or S
TELSPISMLFIDEYDKVVYKQYEEMVVEGXGXR

SEQ ID NO: 19296 - protein, 28 aa, Artificial Sequence
  Cyclic GFR-binding peptide
  MOD_RES (1)..(2): Xaa is C or S
XXVPTRLSAISILYLDSANNVVLKNYQD

SEQ ID NO: 19297 - protein, 36 aa, Artificial Sequence
  Cyclic GFR-binding peptide
  MOD_RES (5)..(6): Xaa is C or S
SAAPXXVPQALEPLTILYYVGRKPKVEQLSNMIVRS

SEQ ID NO: 19298 - protein, 36 aa, Artificial Sequence
  Cyclic GFR-binding peptide
  MOD_RES (6)..(7): Xaa is C or S
SIPKAXXVPTELSPISMLFIDEYDKVVYKQYEEMVV

SEQ ID NO: 19299 - protein, 34 aa, Artificial Sequence
  Cyclic GFR-binding peptide
  MOD_RES (31)..(33): Xaa is C or S
PTKLSPISVLFIDDSSNVIYKQYENMVVRSXGXH

SEQ ID NO: 19300 - protein, 33 aa, Artificial Sequence
  Cyclic GFR-binding peptide
  MOD_RES (6)..(6): Xaa is C or S
VTKPTXAPTKLSPISVLFIDDSSNVIYKQYENM

SEQ ID NO: 19301 - protein, 25 aa, Artificial Sequence
  Cyclic GFR-binding peptide
QALNAISILYFVGRKPKVLKKYRMI

SEQ ID NO: 19302 - protein, 38 aa, Artificial Sequence
  Cyclic GFR-binding peptide
  MOD_RES (6)..(7): Xaa is C or S
STPPTXXVPTRLEPLTILYYDSANNVVEQLSNDMVVES

SEQ ID NO: 19303 - protein, 25 aa, Artificial Sequence
  Cyclic GFR-binding peptide
LEPLTMLYYDEYDKVVEQLSNEMVV

SEQ ID NO: 19304 - protein, 32 aa, Artificial Sequence; identical to SEQ ID NO: 9064
  Cyclic GFR-binding peptide
  MOD_RES (30)..(32): Xaa is C or S

SEQ ID NO: 19305 - protein, 41 aa, Artificial Sequence
  Cyclic GFR-binding peptide
  MOD_RES (6)..(7)..(38)..(40): Xaa is C or S
ASAAPXXVPQALEPLTILYYVGRKPKVEQLSNMIVRSXKXS

SEQ ID NO: 19306 - protein, 34 aa, Artificial Sequence; identical to SEQ ID NO: 9068
  Cyclic GFR-binding peptide
  MOD_RES (1)..(33): Xaa is C or S

SEQ ID NO: 19307 - protein, 28 aa, Artificial Sequence
  Cyclic GFR-binding peptide
VPTRLEPLTILYYDSANNVVEQLSNDMV

SEQ ID NO: 19308 - protein, 22 aa, Artificial Sequence
  Cyclic GFR-binding peptide
QLEPLPVVYYDDSSNVIEQLSN

SEQ ID NO: 19309 - protein, 32 aa, Artificial Sequence
  Cyclic GFR-binding peptide
  MOD_RES (32)..(32): Xaa is C or S
VPTELEPLPMVYYDENEKVVEQLSNDMVVEGX

SEQ ID NO: 19310 - protein, 35 aa, Artificial Sequence; identical to SEQ ID NO: 9070
  Cyclic GFR-binding peptide
  MOD_RES (2)..(3)..(34): Xaa is C or S

SEQ ID NO: 19311 - protein, 35 aa, Artificial Sequence; identical to SEQ ID NO: 9072
  Cyclic GFR-binding peptide
  MOD_RES (1)..(2)..(33)..(35): Xaa is C or S

SEQ ID NO: 19312 - protein, 32 aa, Artificial Sequence
  Cyclic GFR-binding peptide
  MOD_RES (1)..(1): Xaa is C or S
XAPTQLEPLPVVYYDDSSNVIEQLSNNMVVRA

SEQ ID NO: 19313 - protein, 29 aa, Artificial Sequence
  Cyclic GFR-binding peptide
PTQLEPLPVVYYDDSSNVIEQLSNNMVVR

SEQ ID NO: 19314 - protein, 28 aa, Artificial Sequence
  Cyclic GFR-binding peptide
  MOD_RES (27)..(27): Xaa is C or S
SAISVLYLDDSSNVILKNYQNMVVRAXG

SEQ ID NO: 19315 - protein, 39 aa, Artificial Sequence
  Cyclic GFR-binding peptide
  MOD_RES (3)..(4)..(36)..(38): Xaa is C or S
KPXXAPTKLEPLPVVYYDDSSNVIEQLSNNMVVRSXGXH

SEQ ID NO: 19316 - protein, 29 aa, Artificial Sequence
  Cyclic GFR-binding peptide
  MOD_RES (1)..(1): Xaa is C or S
XVPQDLSAISILYLVGRTPKVLKNYQMVV

SEQ ID NO: 19317 - protein, 31 aa, Artificial Sequence
  Cyclic GFR-binding peptide
  MOD_RES (3)..(3): Xaa is C or S
PTXAPTKLEPLTVLYYDDSSNVIEQLSNNMV

SEQ ID NO: 19318 - protein, 33 aa, Artificial Sequence; identical to SEQ ID NO: 9080
  Cyclic GFR-binding peptide
  MOD_RES (2)..(3): Xaa is C or S

SEQ ID NO: 19319 - protein, 33 aa, Artificial Sequence; identical to SEQ ID NO: 9081
  Cyclic GFR-binding peptide
  MOD_RES (2)..(3): Xaa is C or S

SEQ ID NO: 19320 - protein, 24 aa, Artificial Sequence
  Cyclic GFR-binding peptide
LEPLPMVYYDENEKVVEQLSNDMV

SEQ ID NO: 19321 - protein, 25 aa, Artificial Sequence
  Cyclic GFR-binding peptide
VPTRLEPLTILYYDSANNVVEQLSN

SEQ ID NO: 19322 - protein, 32 aa, Artificial Sequence
  Cyclic GFR-binding peptide
  MOD_RES (2)..(3): Xaa is C or S
TXXVPTRLEPLPIVYYDSANNVVEQLSNDMVV

SEQ ID NO: 19323 - protein, 38 aa, Artificial Sequence
  Cyclic GFR-binding peptide
  MOD_RES (2)..(3)..(35)..(37): Xaa is C or S
PXXAPTKLSPISVLFIDDSSNVIYKQYENMVVRSXGXH

SEQ ID NO: 19324 - protein, 40 aa, Artificial Sequence
  Cyclic GFR-binding peptide
  MOD_RES (4)..(5)..(37)..(39): Xaa is C or S
PPTXXVPTRLSAISILYLDSANNVVLKNYQDMVVESXGXR

SEQ ID NO: 19325 - protein, 33 aa, Artificial Sequence; identical to SEQ ID NO: 9086
  Cyclic GFR-binding peptide
  MOD_RES (5)..(6): Xaa is C or S

SEQ ID NO: 19326 - protein, 36 aa, Artificial Sequence
  Cyclic GFR-binding peptide
  MOD_RES (6)..(7): Xaa is C or S
STPPTXXVPTRLEPLPIVYYDSANNVVEQLSNDMVV

SEQ ID NO: 19327 - protein, 34 aa, Artificial Sequence
  Cyclic GFR-binding peptide
  MOD_RES (32)..(34): Xaa is C or S
VPTELEPLTMLYYDEYDKVVEQLSNEMVVEGXGX

SEQ ID NO: 19328 - protein, 34 aa, Artificial Sequence
  Cyclic GFR-binding peptide
  MOD_RES (2)..(3)..(34): Xaa is C or S
PXXVPQALSPISILFIVGRKPKVYKQYEMIVRSX

SEQ ID NO: 19329 - protein, 33 aa, Artificial Sequence; identical to SEQ ID NO: 9089
  Cyclic GFR-binding peptide
  MOD_RES (2)..(3): Xaa is C or S

SEQ ID NO: 19330 - protein, 36 aa, Artificial Sequence
  Cyclic GFR-binding peptide
  MOD_RES (2)..(3)..(34)..(36): Xaa is C or S
PXXVPQDLEPLPIVYYVGRTPKVEQLSNMVVKSXKX

SEQ ID NO: 19331 - protein, 38 aa, Artificial Sequence; identical to SEQ ID NO: 9090
  Cyclic GFR-binding peptide
  MOD_RES (5)..(6)..(37): Xaa is C or S

SEQ ID NO: 19332 - protein, 42 aa, Artificial Sequence
  Cyclic GFR-binding peptide
  MOD_RES (6)..(7)..(39)..(41): Xaa is C or S
TVPKPXXAPTQLEPLTVLYYDDSSNVIEQLSNNMVVRAXGXH

SEQ ID NO: 19333 - protein, 27 aa, Artificial Sequence
  Cyclic GFR-binding peptide
  MOD_RES (1)..(1): Xaa is C or S
XVPTELEPLTMLYYDEYDKVVEQLSNE

SEQ ID NO: 19334 - protein, 25 aa, Artificial Sequence
  Cyclic GFR-binding peptide
LNAISMLYFDEYDKVVLKKYREMVV

SEQ ID NO: 19335 - protein, 33 aa, Artificial Sequence
  Cyclic GFR-binding peptide
  MOD_RES (30)..(32): Xaa is C or S
TRLEPLPIVYYDSANNVVEQLSNDMVVESXGXR

SEQ ID NO: 19336 - protein, 25 aa, Artificial Sequence
  Cyclic GFR-binding peptide
LNAISILYFVGRTPKVLKKYRMVVK

SEQ ID NO: 19337 - protein, 23 aa, Artificial Sequence
  Cyclic GFR-binding peptide
TKLSAISVLYLDDSSNVILKNYQ

SEQ ID NO: 19338 - protein, 37 aa, Artificial Sequence
  Cyclic GFR-binding peptide
  MOD_RES (7)..(7): Xaa is C or S
HVTKPTXAPTKLSPISVLFIDDSSNVIYKQYENMVVR

SEQ ID NO: 19339 - protein, 20 aa, Artificial Sequence
  Cyclic GFR-binding peptide
EPLPVVYYDDSSNVIEQLSN

SEQ ID NO: 19340 - protein, 38 aa, Artificial Sequence
  Cyclic GFR-binding peptide
  MOD_RES (2)..(3)..(35)..(37): Xaa is C or S
AXXVPTELEPLPMVYYDENEKVVEQLSNDMVVEGXGXR

SEQ ID NO: 19341 - protein, 29 aa, Artificial Sequence
  Cyclic GFR-binding peptide
  MOD_RES (1)..(1): Xaa is C or S
XAPTQLEPLPVVYYDDSSNVIEQLSNNMV

SEQ ID NO: 19342 - protein, 23 aa, Artificial Sequence
  Cyclic GFR-binding peptide
DLSPISILFIVGRTPKVYKQYEM

SEQ ID NO: 19343 - protein, 38 aa, Artificial Sequence
  Cyclic GFR-binding peptide
  MOD_RES (6)..(7): Xaa is C or S
KIPKAXXVPTELSPISMLFIDENEKVVYKQYEDMVVEG

SEQ ID NO: 19344 - protein, 33 aa, Artificial Sequence; identical to SEQ ID NO: 9107
  Cyclic GFR-binding peptide
  MOD_RES (1)..(2)..(33): Xaa is C or S

SEQ ID NO: 19345 - protein, 27 aa, Artificial Sequence
  Cyclic GFR-binding peptide
  MOD_RES (2)..(2): Xaa is C or S
TXAPTKLEPLPVVYYDDSSNVIEQLSN

SEQ ID NO: 19346 - protein, 31 aa, Artificial Sequence
  Cyclic GFR-binding peptide
APTQLSPISVLFIDDSSNVIYKQYENMVVRA

SEQ ID NO: 19347 - protein, 32 aa, Artificial Sequence
  Cyclic GFR-binding peptide
  MOD_RES (6)..(7): Xaa is C or S
YVPKPXXAPTKLEPLTVLYYDDSSNVIEQLSN

SEQ ID NO: 19348 - protein, 32 aa, Artificial Sequence
  Cyclic GFR-binding peptide
  MOD_RES (2)..(3): Xaa is C or S
PXXAPTQLSPISVLFIDDSSNVIYKQYENMVV

SEQ ID NO: 19349 - protein, 20 aa, Artificial Sequence
  Cyclic GFR-binding peptide
EPLTILYYDSANNVVEQLSN

SEQ ID NO: 19350 - protein, 36 aa, Artificial Sequence
  Cyclic GFR-binding peptide
  MOD_RES (3)..(4)..(36): Xaa is C or S
KAXXVPTELSPISMLFIDENEKVVYKQYEDMVVEGX

SEQ ID NO: 19351 - protein, 25 aa, Artificial Sequence
  Cyclic GFR-binding peptide
ALEPLTILYYVGRKPKVEQLSNMIV

SEQ ID NO: 19352 - protein, 30 aa, Artificial Sequence
  Cyclic GFR-binding peptide
  MOD_RES (4)..(5): Xaa is C or S
PKAXXVPTELEPLTMLYYDENEKVVEQLSN

SEQ ID NO: 19353 - protein, 32 aa, Artificial Sequence; identical to SEQ ID NO: 9117
  Cyclic GFR-binding peptide
  MOD_RES (31)..(31): Xaa is C or S

SEQ ID NO: 19354 - protein, 38 aa, Artificial Sequence; identical to SEQ ID NO: 9121
  Cyclic GFR-binding peptide
  MOD_RES (4)..(5)..(37): Xaa is C or S

SEQ ID NO: 19355 - protein, 36 aa, Artificial Sequence
  Cyclic GFR-binding peptide
  MOD_RES (2)..(34)..(36): Xaa is C or S
TXAPTKLEPLPVVYYDDSSNVIEQLSNNMVVRSXGX

SEQ ID NO: 19356 - protein, 24 aa, Artificial Sequence
  Cyclic GFR-binding peptide
KLEPLPVVYYDDSSNVIEQLSNNM

SEQ ID NO: 19357 - protein, 39 aa, Artificial Sequence; identical to SEQ ID NO: 9122
  Cyclic GFR-binding peptide
  MOD_RES (4)..(5)..(36)..(38): Xaa is C or S

SEQ ID NO: 19358 - protein, 33 aa, Artificial Sequence
  Cyclic GFR-binding peptide
  MOD_RES (4)..(5): Xaa is C or S
PKAXXVPTELEPLPMVYYDENEKVVEQLSNDMV

SEQ ID NO: 19359 - protein, 29 aa, Artificial Sequence
  Cyclic GFR-binding peptide
  MOD_RES (28)..(28): Xaa is C or S
LEPLPVVYYDDSSNVIEQLSNNMVVRAXG

SEQ ID NO: 19360 - protein, 23 aa, Artificial Sequence
  Cyclic GFR-binding peptide
DLEPLPIVYYIGKTPKIEQLSNM

SEQ ID NO: 19361 - protein, 31 aa, Artificial Sequence; identical to SEQ ID NO: 9124
  Cyclic GFR-binding peptide
  MOD_RES (31)..(31): Xaa is C or S

SEQ ID NO: 19362 - protein, 33 aa, Artificial Sequence
  Cyclic GFR-binding peptide
  MOD_RES (5)..(6): Xaa is C or S
TPPTXXVPTRLEPLPIVYYDSANNVVEQLSNDM

SEQ ID NO: 19363 - protein, 32 aa, Artificial Sequence
  Cyclic GFR-binding peptide
  MOD_RES (31)..(31): Xaa is C or S
PTRLEPLTILYYDSANNVVEQLSNDMVVESXG

SEQ ID NO: 19364 - protein, 32 aa, Artificial Sequence
  Cyclic GFR-binding peptide
  MOD_RES (3)..(4): Xaa is C or S
SPXXVSQDLEPLPIVYYIGKTPKIEQLSNMIV

SEQ ID NO: 19365 - protein, 32 aa, Artificial Sequence
  Cyclic GFR-binding peptide
  MOD_RES (29)..(31): Xaa is C or S
QLSPISVLFIDDSSNVIYKQYENMVVRAXGXH

SEQ ID NO: 19366 - protein, 27 aa, Artificial Sequence
  Cyclic GFR-binding peptide
  MOD_RES (1)..(2): Xaa is C or S
XXVPQALNAISILYFVGRKPKVLKKYR

SEQ ID NO: 19367 - protein, 37 aa, Artificial Sequence
  Cyclic GFR-binding peptide
  MOD_RES (1)..(2)..(34)..(36): Xaa is C or S
XXVPTRLSAISILYLDSANNVVLKNYQDMVVESXGXR

SEQ ID NO: 19368 - protein, 31 aa, Artificial Sequence
  Cyclic GFR-binding peptide
  MOD_RES (1)..(1): Xaa is C or S
XVPQALSPISILFIVGRKPKVYKQYEMIVRS

SEQ ID NO: 19369 - protein, 39 aa, Artificial Sequence; identical to SEQ ID NO: 9137
  Cyclic GFR-binding peptide
  MOD_RES (5)..(6)..(38): Xaa is C or S

SEQ ID NO: 19370 - protein, 29 aa, Artificial Sequence
  Cyclic GFR-binding peptide
  MOD_RES (1)..(2): Xaa is C or S
XXVPTELNAISMLYFDEYDKVVLKKYREM

SEQ ID NO: 19371 - protein, 37 aa, Artificial Sequence
  Cyclic GFR-binding peptide
  MOD_RES (2)..(3)..(34)..(36): Xaa is C or S
PXXVPQALEPLTILYYVGRKPKVEQLSNMIVRSXKXS

SEQ ID NO: 19372 - protein, 24 aa, Artificial Sequence
  Cyclic GFR-binding peptide
LEPLPIVYYVGRTPKVEQLSNMVV

SEQ ID NO: 19373 - protein, 27 aa, Artificial Sequence
  Cyclic GFR-binding peptide
VPTELEPLPMVYYDEYDKVVEQLSNEM

SEQ ID NO: 19374 - protein, 37 aa, Artificial Sequence
  Cyclic GFR-binding peptide
  MOD_RES (3)..(4)..(36): Xaa is C or S
KPXXAPTQLEPLPVVYYDDSSNVIEQLSNNMVVRAXG

SEQ ID NO: 19375 - protein, 31 aa, Artificial Sequence
  Cyclic GFR-binding peptide
  MOD_RES (1)..(2): Xaa is C or S
XXVPTRLSAISILYLDSANNVVLKNYQDMVV

SEQ ID NO: 19376 - protein, 30 aa, Artificial Sequence
  Cyclic GFR-binding peptide
VPTRLSAISILYLDSANNVVLKNYQDMVVE

SEQ ID NO: 19377 - protein, 36 aa, Artificial Sequence
  Cyclic GFR-binding peptide
  MOD_RES (1)..(2)..(34)..(36): Xaa is C or S
XXVPTRLEPLTILYYDSANNVVEQLSNDMVVESXGX

SEQ ID NO: 19378 - protein, 32 aa, Artificial Sequence
  Cyclic GFR-binding peptide
  MOD_RES (5)..(6): Xaa is C or S
SASPXXVPQDLEPLPIVYYVGRTPKVEQLSNM

SEQ ID NO: 19379 - protein, 37 aa, Artificial Sequence
  Cyclic GFR-binding peptide
  MOD_RES (3)..(4)..(36): Xaa is C or S
KAXXVPTELEPLTMLYYDEYDKVVEQLSNEMVVEGXG

SEQ ID NO: 19380 - protein, 34 aa, Artificial Sequence; identical to SEQ ID NO: 9141
  Cyclic GFR-binding peptide
  MOD_RES (1)..(32)..(34): Xaa is C or S

SEQ ID NO: 19381 - protein, 38 aa, Artificial Sequence
  Cyclic GFR-binding peptide
  MOD_RES (6)..(7)..(38): Xaa is C or S
ASASPXXVSQDLEPLPIVYYIGKTPKIEQLSNMIVKSX

SEQ ID NO: 19382 - protein, 26 aa, Artificial Sequence
  Cyclic GFR-binding peptide
TELEPLTMLYYDENEKVVEQLSNDMV

SEQ ID NO: 19383 - protein, 28 aa, Artificial Sequence
  Cyclic GFR-binding peptide
  MOD_RES (3)..(3): Xaa is C or S
PTXAPTKLEPLPVVYYDDSSNVIEQLSN

SEQ ID NO: 19384 - protein, 32 aa, Artificial Sequence
  Cyclic GFR-binding peptide
  MOD_RES (3)..(4): Xaa is C or S
KPXXAPTKLSPISVLFIDDSSNVIYKQYENMV

SEQ ID NO: 19385 - protein, 25 aa, Artificial Sequence
  Cyclic GFR-binding peptide
APTKLSAISVLYLDDSSNVILKNYQ

SEQ ID NO: 19386 - protein, 29 aa, Artificial Sequence
  Cyclic GFR-binding peptide
  MOD_RES (26)..(28): Xaa is C or S
EPLTILYYVGRKPKVEQLSNMIVRSXKXS

SEQ ID NO: 19387 - protein, 32 aa, Artificial Sequence
  Cyclic GFR-binding peptide
  MOD_RES (4)..(4): Xaa is C or S
KPTXAPTKLSPISVLFIDDSSNVIYKQYENMV

SEQ ID NO: 19388 - protein, 30 aa, Artificial Sequence
  Cyclic GFR-binding peptide
  MOD_RES (2)..(3): Xaa is C or S
PXXAPTQLEPLPVVYYDDSSNVIEQLSNNM

SEQ ID NO: 19389 - protein, 31 aa, Artificial Sequence
  Cyclic GFR-binding peptide
  MOD_RES (1)..(1): Xaa is C or S
XAPTQLEPLPVVYYDDSSNVIEQLSNNMVVR

SEQ ID NO: 19390 - protein, 38 aa, Artificial Sequence
  Cyclic GFR-binding peptide
  MOD_RES (6)..(7): Xaa is C or S
YVPKPXXAPTKLEPLPVVYYDDSSNVIEQLSNNMVVRS

SEQ ID NO: 19391 - protein, 31 aa, Artificial Sequence
  Cyclic GFR-binding peptide
  MOD_RES (29)..(31): Xaa is C or S
QALSPISILFIVGRKPKVYKQYEMIVRSXKX

SEQ ID NO: 19392 - protein, 37 aa, Artificial Sequence; identical to SEQ ID NO: 9157
  Cyclic GFR-binding peptide
  MOD_RES (3)..(4)..(36): Xaa is C or S

SEQ ID NO: 19393 - protein, 27 aa, Artificial Sequence
  Cyclic GFR-binding peptide
  MOD_RES (1)..(2): Xaa is C or S
XXAPTKLEPLPVVYYDDSSNVIEQLSN

SEQ ID NO: 19394 - protein, 36 aa, Artificial Sequence
  Cyclic GFR-binding peptide
  MOD_RES (3)..(4)..(36): Xaa is C or S
KPXXAPTKLEPLPVVYYDDSSNVIEQLSNNMVVRSX

SEQ ID NO: 19395 - protein, 25 aa, Artificial Sequence
  Cyclic GFR-binding peptide
LSPISILFIVGRKPKVYKQYEMIVR

SEQ ID NO: 19396 - protein, 33 aa, Artificial Sequence; identical to SEQ ID NO: 9158
  Cyclic GFR-binding peptide
  MOD_RES (4)..(5): Xaa is C or S

SEQ ID NO: 19397 - protein, 30 aa, Artificial Sequence
  Cyclic GFR-binding peptide
  MOD_RES (29)..(29): Xaa is C or S
ELEPLTMLYYDEYDKVVEQLSNEMVVEGXG

SEQ ID NO: 19398 - protein, 28 aa, Artificial Sequence
  Cyclic GFR-binding peptide
  MOD_RES (2)..(3): Xaa is C or S
TXXVPTRLEPLTILYYDSANNVVEQLSN

SEQ ID NO: 19399 - protein, 35 aa, Artificial Sequence
  Cyclic GFR-binding peptide
  MOD_RES (5)..(6): Xaa is C or S
IPKAXXVPTELEPLPMVYYDEYDKVVEQLSNEMVV

SEQ ID NO: 19400 - protein, 26 aa, Artificial Sequence
  Cyclic GFR-binding peptide
  MOD_RES (1)..(1): Xaa is C or S
XAPTQLEPLTVLYYDDSSNVIEQLSN

SEQ ID NO: 19401 - protein, 24 aa, Artificial Sequence
  Cyclic GFR-binding peptide
LSPISILFIVGRTPKVYKQYEMVV

SEQ ID NO: 19402 - protein, 34 aa, Artificial Sequence
  Cyclic GFR-binding peptide
  MOD_RES (6)..(7): Xaa is C or S
STPPTXXVPTRLEPLTILYYDSANNVVEQLSNDM

SEQ ID NO: 19403 - protein, 31 aa, Artificial Sequence
  Cyclic GFR-binding peptide
  MOD_RES (30)..(30): Xaa is C or S
TELSPISMLFIDENEKVVYKQYEDMVVEGXG

SEQ ID NO: 19404 - protein, 32 aa, Artificial Sequence; identical to SEQ ID NO: 9167
  Cyclic GFR-binding peptide
  MOD_RES (3)..(4): Xaa is C or S

SEQ ID NO: 19405 - protein, 35 aa, Artificial Sequence
  Cyclic GFR-binding peptide
  MOD_RES (2)..(3)..(34): Xaa is C or S
PXXVSQDLSPISILFIIGKTPKIYKQYEMIVKSXK

SEQ ID NO: 19406 - protein, 38 aa, Artificial Sequence
  Cyclic GFR-binding peptide
  MOD_RES (3)..(4)..(36)..(38): Xaa is C or S
PTXXVPTRLNAISILYFDSANNVVLKKYRDMVVESXGX

SEQ ID NO: 19407 - protein, 33 aa, Artificial Sequence
  Cyclic GFR-binding peptide
  MOD_RES (3)..(4): Xaa is C or S
KPXXAPTQLEPLTVLYYDDSSNVIEQLSNNMVV

SEQ ID NO: 19408 - protein, 36 aa, Artificial Sequence
  Cyclic GFR-binding peptide
  MOD_RES (1)..(33)..(35): Xaa is C or S
XVPTRLNAISILYFDSANNVVLKKYRDMVVESXGXR

SEQ ID NO: 19409 - protein, 27 aa, Artificial Sequence
  Cyclic GFR-binding peptide
TRLEPLPIVYYDSANNVVEQLSNDMVV

SEQ ID NO: 19410 - protein, 31 aa, Artificial Sequence; identical to SEQ ID NO: 9172
  Cyclic GFR-binding peptide
  MOD_RES (31)..(31): Xaa is C or S

SEQ ID NO: 19411 - protein, 34 aa, Artificial Sequence; identical to SEQ ID NO: 9175
  Cyclic GFR-binding peptide
  MOD_RES (1)..(2)..(33): Xaa is C or S

SEQ ID NO: 19412 - protein, 35 aa, Artificial Sequence
  Cyclic GFR-binding peptide
  MOD_RES (2)..(3)..(35): Xaa is C or S
PXXAPTKLEPLTVLYYDDSSNVIEQLSNNMVVRSX

SEQ ID NO: 19413 - protein, 35 aa, Artificial Sequence; identical to SEQ ID NO: 9176
  Cyclic GFR-binding peptide
  MOD_RES (6)..(7): Xaa is C or S

SEQ ID NO: 19414 - protein, 27 aa, Artificial Sequence
  Cyclic GFR-binding peptide
  MOD_RES (1)..(1): Xaa is C or S
XVPTELSPISMLFIDENEKVVYKQYED

SEQ ID NO: 19415 - protein, 41 aa, Artificial Sequence; identical to SEQ ID NO: 9179
  Cyclic GFR-binding peptide
  MOD_RES (6)..(7)..(39)..(41): Xaa is C or S

SEQ ID NO: 19416 - protein, 33 aa, Artificial Sequence
  Cyclic GFR-binding peptide
  MOD_RES (4)..(4): Xaa is C or S
KPTXAPTKLSPISVLFIDDSSNVIYKQYENMVV

SEQ ID NO: 19417 - protein, 38 aa, Artificial Sequence; identical to SEQ ID NO: 9181
  Cyclic GFR-binding peptide
  MOD_RES (6)..(7)..(38): Xaa is C or S

SEQ ID NO: 19418 - protein, 33 aa, Artificial Sequence
  Cyclic GFR-binding peptide
  MOD_RES (1)..(2): Xaa is C or S
XXAPTKLEPLPVVYYDDSSNVIEQLSNNMVVRS

SEQ ID NO: 19419 - protein, 30 aa, Artificial Sequence
  Cyclic GFR-binding peptide
  MOD_RES (1)..(1): Xaa is C or S
XVPTELSPISMLFIDENEKVVYKQYEDMVV

SEQ ID NO: 19420 - protein, 23 aa, Artificial Sequence
  Cyclic GFR-binding peptide
EPLTILYYDSANNVVEQLSNDMV

SEQ ID NO: 19421 - protein, 30 aa, Artificial Sequence
  Cyclic GFR-binding peptide
  MOD_RES (28)..(30): Xaa is C or S
DLSPISILFIVGRTPKVYKQYEMVVKSXKX

SEQ ID NO: 19422 - protein, 31 aa, Artificial Sequence; identical to SEQ ID NO: 9189
  Cyclic GFR-binding peptide
  MOD_RES (1)..(2): Xaa is C or S

SEQ ID NO: 19423 - protein, 38 aa, Artificial Sequence; identical to SEQ ID NO: 9190
  Cyclic GFR-binding peptide
  MOD_RES (4)..(5)..(36)..(38): Xaa is C or S

SEQ ID NO: 19424 - protein, 31 aa, Artificial Sequence
  Cyclic GFR-binding peptide
  MOD_RES (4)..(4): Xaa is C or S
KPTXAPTKLSPISVLFIDDSSNVIYKQYENM

SEQ ID NO: 19425 - protein, 31 aa, Artificial Sequence
  Cyclic GFR-binding peptide
  MOD_RES (2)..(3): Xaa is C or S
TXXVPTRLEPLPIVYYDSANNVVEQLSNDMV

SEQ ID NO: 19426 - protein, 36 aa, Artificial Sequence
  Cyclic GFR-binding peptide
  MOD_RES (3)..(4)..(35): Xaa is C or S
SPXXVSQDLEPLPIVYYIGKTPKIEQLSNMIVKSXK

SEQ ID NO: 19427 - protein, 36 aa, Artificial Sequence
  Cyclic GFR-binding peptide
  MOD_RES (4)..(5): Xaa is C or S
PKAXXVPTELEPLTMLYYDENEKVVEQLSNDMVVEG

SEQ ID NO: 19428 - protein, 23 aa, Artificial Sequence
  Cyclic GFR-binding peptide
LSAISILYLVGRTPKVLKNYQMV

SEQ ID NO: 19429 - protein, 37 aa, Artificial Sequence; identical to SEQ ID NO: 9199
  Cyclic GFR-binding peptide
  MOD_RES (3)..(4)..(36): Xaa is C or S

SEQ ID NO: 19430 - protein, 29 aa, Artificial Sequence
  Cyclic GFR-binding peptide
  MOD_RES (2)..(3): Xaa is C or S
PXXVSQDLEPLPIVYYIGKTPKIEQLSNM

SEQ ID NO: 19431 - protein, 27 aa, Artificial Sequence
  Cyclic GFR-binding peptide
LEPLTMLYYDEYDKVVEQLSNEMVVEG

SEQ ID NO: 19432 - protein, 41 aa, Artificial Sequence
  Cyclic GFR-binding peptide
  MOD_RES (6)..(7)..(38)..(40): Xaa is C or S
ASASPXXVSQDLSPISILFIIGKTPKIYKQYEMIVKSXKXS

SEQ ID NO: 19433 - protein, 29 aa, Artificial Sequence
  Cyclic GFR-binding peptide
  MOD_RES (3)..(4): Xaa is C or S
SPXXVPQDLEPLPIVYYVGRTPKVEQLSN

SEQ ID NO: 19434 - protein, 34 aa, Artificial Sequence
  Cyclic GFR-binding peptide
  MOD_RES (1)..(2)..(34): Xaa is C or S
XXVPTELEPLPMVYYDEYDKVVEQLSNEMVVEGX

SEQ ID NO: 19435 - protein, 41 aa, Artificial Sequence
  Cyclic GFR-binding peptide
  MOD_RES (5)..(6)..(38)..(40): Xaa is C or S
IPKAXXVPTELSPISMLFIDEYDKVVYKQYEEMVVEGXGXR

SEQ ID NO: 19436 - protein, 23 aa, Artificial Sequence
  Cyclic GFR-binding peptide
LEPLPMVYYDEYDKVVEQLSNEM

SEQ ID NO: 19437 - protein, 37 aa, Artificial Sequence; identical to SEQ ID NO: 9209
  Cyclic GFR-binding peptide
  MOD_RES (2)..(3)..(34)..(36): Xaa is C or S

SEQ ID NO: 19438 - protein, 33 aa, Artificial Sequence
  Cyclic GFR-binding peptide
  MOD_RES (31)..(33): Xaa is C or S
PTELEPLPMVYYDENEKVVEQLSNDMVVEGXGX

SEQ ID NO: 19439 - protein, 29 aa, Artificial Sequence
  Cyclic GFR-binding peptide
  MOD_RES (1)..(2): Xaa is C or S
XXVPQALEPLTILYYVGRKPKVEQLSNMI

SEQ ID NO: 19440 - protein, 32 aa, Artificial Sequence; identical to SEQ ID NO: 9210
  Cyclic GFR-binding peptide
  MOD_RES (30)..(32): Xaa is C or S

SEQ ID NO: 19441 - protein, 37 aa, Artificial Sequence
  Cyclic GFR-binding peptide
  MOD_RES (1)..(2)..(34)..(36): Xaa is C or S
XXVPTRLNAISILYFDSANNVVLKKYRDMVVESXGXR

SEQ ID NO: 19442 - protein, 21 aa, Artificial Sequence
  Cyclic GFR-binding peptide
LNAISILYFVGRKPKVLKKYR

SEQ ID NO: 19443 - protein, 29 aa, Artificial Sequence
  Cyclic GFR-binding peptide
TRLNAISILYFDSANNVVLKKYRDMVVES

SEQ ID NO: 19444 - protein, 36 aa, Artificial Sequence
  Cyclic GFR-binding peptide
  MOD_RES (4)..(5): Xaa is C or S
PKAXXVPTELEPLPMVYYDENEKVVEQLSNDMVVEG

SEQ ID NO: 19445 - protein, 30 aa, Artificial Sequence
  Cyclic GFR-binding peptide
  MOD_RES (2)..(3): Xaa is C or S
PXXVPQDLEPLPIVYYVGRTPKVEQLSNMV

SEQ ID NO: 19446 - protein, 29 aa, Artificial Sequence
  Cyclic GFR-binding peptide
TKLEPLTVLYYDDSSNVIEQLSNNMVVRS

SEQ ID NO: 19447 - protein, 38 aa, Artificial Sequence
  Cyclic GFR-binding peptide
  MOD_RES (6)..(7): Xaa is C or S
KIPKAXXVPTELEPLTMLYYDENEKVVEQLSNDMVVEG

SEQ ID NO: 19448 - protein, 35 aa, Artificial Sequence
  Cyclic GFR-binding peptide
  MOD_RES (5)..(6): Xaa is C or S
SASPXXVPQDLSPISILFIVGRTPKVYKQYEMVVK

SEQ ID NO: 19449 - protein, 32 aa, Artificial Sequence
  Cyclic GFR-binding peptide
  MOD_RES (1)..(1): Xaa is C or S
XAPTQLEPLTVLYYDDSSNVIEQLSNNMVVRA

SEQ ID NO: 19450 - protein, 29 aa, Artificial Sequence
  Cyclic GFR-binding peptide
TELSPISMLFIDEYDKVVYKQYEEMVVEG

SEQ ID NO: 19451 - protein, 26 aa, Artificial Sequence
  Cyclic GFR-binding peptide
PTELEPLPMVYYDEYDKVVEQLSNEM

SEQ ID NO: 19452 - protein, 38 aa, Artificial Sequence
  Cyclic GFR-binding peptide
  MOD_RES (3)..(35)..(37): Xaa is C or S
PTXAPTKLEPLPVVYYDDSSNVIEQLSNNMVVRSXGXH

SEQ ID NO: 19453 - protein, 27 aa, Artificial Sequence
  Cyclic GFR-binding peptide
PTELEPLPMVYYDENEKVVEQLSNDMV

SEQ ID NO: 19454 - protein, 36 aa, Artificial Sequence
  Cyclic GFR-binding peptide
  MOD_RES (5)..(6): Xaa is C or S
TPPTXXVPTRLSAISILYLDSANNVVLKNYQDMVVE

SEQ ID NO: 19455 - protein, 36 aa, Artificial Sequence; identical to SEQ ID NO: 9222
  Cyclic GFR-binding peptide
  MOD_RES (4)..(36): Xaa is C or S

SEQ ID NO: 19456 - protein, 29 aa, Artificial Sequence
  Cyclic GFR-binding peptide
TQLEPLPVVYYDDSSNVIEQLSNNMVVRA

SEQ ID NO: 19457 - protein, 31 aa, Artificial Sequence; identical to SEQ ID NO: 9223
  Cyclic GFR-binding peptide
  MOD_RES (31)..(31): Xaa is C or S

SEQ ID NO: 19458 - protein, 21 aa, Artificial Sequence
  Cyclic GFR-binding peptide
EPLTMLYYDEYDKVVEQLSNE

SEQ ID NO: 19459 - protein, 28 aa, Artificial Sequence
  Cyclic GFR-binding peptide
  MOD_RES (27)..(27): Xaa is C or S
SPISVLFIDDSSNVIYKQYENMVVRAXG

SEQ ID NO: 19460 - protein, 26 aa, Artificial Sequence
  Cyclic GFR-binding peptide
PTQLSPISVLFIDDSSNVIYKQYENM

SEQ ID NO: 19461 - protein, 29 aa, Artificial Sequence
  Cyclic GFR-binding peptide
  MOD_RES (29)..(29): Xaa is C or S
RLEPLTILYYDSANNVVEQLSNDMVVESX

SEQ ID NO: 19462 - protein, 40 aa, Artificial Sequence
  Cyclic GFR-binding peptide
  MOD_RES (6)..(7)..(38)..(40): Xaa is C or S
ASAAPXXVPQALSPISILFIVGRKPKVYKQYEMIVRSXKX

SEQ ID NO: 19463 - protein, 34 aa, Artificial Sequence
  Cyclic GFR-binding peptide
  MOD_RES (5)..(6): Xaa is C or S
SASPXXVPQDLEPLPIVYYVGRTPKVEQLSNMVV

SEQ ID NO: 19464 - protein, 31 aa, Artificial Sequence
  Cyclic GFR-binding peptide
VPTRLSAISILYLDSANNVVLKNYQDMVVES

SEQ ID NO: 19465 - protein, 26 aa, Artificial Sequence
  Cyclic GFR-binding peptide
NAISILYFDSANNVVLKKYRDMVVES

SEQ ID NO: 19466 - protein, 34 aa, Artificial Sequence; identical to SEQ ID NO: 9230
  Cyclic GFR-binding peptide
  MOD_RES (31)..(33): Xaa is C or S

SEQ ID NO: 19467 - protein, 33 aa, Artificial Sequence
  Cyclic GFR-binding peptide
  MOD_RES (1)..(32): Xaa is C or S
XVSQDLEPLPIVYYIGKTPKIEQLSNMIVKSXK

SEQ ID NO: 19468 - protein, 30 aa, Artificial Sequence
  Cyclic GFR-binding peptide
  MOD_RES (2)..(3): Xaa is C or S
TXXVPTRLEPLTILYYDSANNVVEQLSNDM

SEQ ID NO: 19469 - protein, 36 aa, Artificial Sequence
  Cyclic GFR-binding peptide
  MOD_RES (2)..(34)..(36): Xaa is C or S
TXAPTKLSPISVLFIDDSSNVIYKQYENMVVRSXGX

SEQ ID NO: 19470 - protein, 33 aa, Artificial Sequence
  Cyclic GFR-binding peptide
  MOD_RES (30)..(32): Xaa is C or S
PQALSPISILFIVGRKPKVYKQYEMIVRSXKXS

SEQ ID NO: 19471 - protein, 34 aa, Artificial Sequence; identical to SEQ ID NO: 9238
  Cyclic GFR-binding peptide
  MOD_RES (1)..(2)..(33): Xaa is C or S

SEQ ID NO: 19472 - protein, 30 aa, Artificial Sequence; identical to SEQ ID NO: 9239
  Cyclic GFR-binding peptide
  MOD_RES (1)..(2): Xaa is C or S

SEQ ID NO: 19473 - protein, 38 aa, Artificial Sequence
  Cyclic GFR-binding peptide
  MOD_RES (3)..(4)..(36)..(38): Xaa is C or S
KAXXVPTELEPLPMVYYDEYDKVVEQLSNEMVVEGXGX

SEQ ID NO: 19474 - protein, 26 aa, Artificial Sequence
  Cyclic GFR-binding peptide
  MOD_RES (26)..(26): Xaa is C or S
SPISILFIVGRKPKVYKQYEMIVRSX

SEQ ID NO: 19475 - protein, 38 aa, Artificial Sequence; identical to SEQ ID NO: 9243
  Cyclic GFR-binding peptide
  MOD_RES (5)..(37): Xaa is C or S

SEQ ID NO: 19476 - protein, 32 aa, Artificial Sequence
  Cyclic GFR-binding peptide
  MOD_RES (1)..(2): Xaa is C or S
XXAPTQLSPISVLFIDDSSNVIYKQYENMVVR

SEQ ID NO: 19477 - protein, 29 aa, Artificial Sequence
  Cyclic GFR-binding peptide
  MOD_RES (1)..(2): Xaa is C or S
XXAPTQLSPISVLFIDDSSNVIYKQYENM

SEQ ID NO: 19478 - protein, 24 aa, Artificial Sequence
  Cyclic GFR-binding peptide
PTKLEPLPVVYYDDSSNVIEQLSN

SEQ ID NO: 19479 - protein, 26 aa, Artificial Sequence
  Cyclic GFR-binding peptide
VPTELEPLPMVYYDENEKVVEQLSND

SEQ ID NO: 19480 - protein, 28 aa, Artificial Sequence
  Cyclic GFR-binding peptide
  MOD_RES (28)..(28): Xaa is C or S
DLSPISILFIIGKTPKIYKQYEMIVKSX

SEQ ID NO: 19481 - protein, 39 aa, Artificial Sequence; identical to SEQ ID NO: 9245
  Cyclic GFR-binding peptide
  MOD_RES (3)..(4)..(36)..(38): Xaa is C or S

SEQ ID NO: 19482 - protein, 28 aa, Artificial Sequence
  Cyclic GFR-binding peptide
  MOD_RES (1)..(1): Xaa is C or S
XVSQDLSPISILFIIGKTPKIYKQYEMI

SEQ ID NO: 19483 - protein, 38 aa, Artificial Sequence
  Cyclic GFR-binding peptide
  MOD_RES (3)..(4)..(35)..(37): Xaa is C or S
SPXXVSQDLSPISILFIIGKTPKIYKQYEMIVKSXKXS

SEQ ID NO: 19484 - protein, 38 aa, Artificial Sequence
  Cyclic GFR-binding peptide
  MOD_RES (6)..(7): Xaa is C or S
STPPTXXVPTRLEPLPIVYYDSANNVVEQLSNDMVVES

SEQ ID NO: 19485 - protein, 35 aa, Artificial Sequence
  Cyclic GFR-binding peptide
  MOD_RES (2)..(3)..(34): Xaa is C or S
PXXVPQDLEPLPIVYYVGRTPKVEQLSNMVVKSXK

SEQ ID NO: 19486 - protein, 22 aa, Artificial Sequence
  Cyclic GFR-binding peptide
EPLPMVYYDENEKVVEQLSNDM

SEQ ID NO: 19487 - protein, 30 aa, Artificial Sequence
  Cyclic GFR-binding peptide
  MOD_RES (29)..(29): Xaa is C or S
KLEPLTVLYYDDSSNVIEQLSNNMVVRSXG

SEQ ID NO: 19488 - protein, 35 aa, Artificial Sequence; identical to SEQ ID NO: 9246
  Cyclic GFR-binding peptide
  MOD_RES (6)..(7): Xaa is C or S

SEQ ID NO: 19489 - protein, 27 aa, Artificial Sequence
  Cyclic GFR-binding peptide
  MOD_RES (1)..(1): Xaa is C or S
XAPTQLEPLTVLYYDDSSNVIEQLSNN

SEQ ID NO: 19490 - protein, 34 aa, Artificial Sequence
  Cyclic GFR-binding peptide
  MOD_RES (7)..(7): Xaa is C or S
HVTKPTXAPTKLSPISVLFIDDSSNVIYKQYENM

SEQ ID NO: 19491 - protein, 34 aa, Artificial Sequence; identical to SEQ ID NO: 9250
  Cyclic GFR-binding peptide
  MOD_RES (5)..(6): Xaa is C or S

SEQ ID NO: 19492 - protein, 37 aa, Artificial Sequence
  Cyclic GFR-binding peptide
  MOD_RES (6)..(6): Xaa is C or S
VTKPTXAPTKLEPLTVLYYDDSSNVIEQLSNNMVVRS

SEQ ID NO: 19493 - protein, 35 aa, Artificial Sequence
  Cyclic GFR-binding peptide
  MOD_RES (4)..(5): Xaa is C or S
ASPXXVSQDLSPISILFIIGKTPKIYKQYEMIVKS

SEQ ID NO: 19494 - protein, 34 aa, Artificial Sequence
  Cyclic GFR-binding peptide
  MOD_RES (6)..(7): Xaa is C or S
KIPKAXXVPTELSPISMLFIDENEKVVYKQYEDM

SEQ ID NO: 19495 - protein, 23 aa, Artificial Sequence
  Cyclic GFR-binding peptide
NAISMLYFDEYDKVVLKKYREMV

SEQ ID NO: 19496 - protein, 41 aa, Artificial Sequence
  Cyclic GFR-binding peptide
  MOD_RES (5)..(6)..(38)..(40): Xaa is C or S
IPKAXXVPTELEPLTMLYYDEYDKVVEQLSNEMVVEGXGXR

SEQ ID NO: 19497 - protein, 28 aa, Artificial Sequence
  Cyclic GFR-binding peptide
  MOD_RES (26)..(28): Xaa is C or S
EPLPIVYYIGKTPKIEQLSNMIVKSXKX

SEQ ID NO: 19498 - protein, 20 aa, Artificial Sequence
  Cyclic GFR-binding peptide
SAISILYLVGRKPKVLKNYQ

SEQ ID NO: 19499 - protein, 22 aa, Artificial Sequence
  Cyclic GFR-binding peptide
SPISILFIVGRKPKVYKQYEMI

SEQ ID NO: 19500 - protein, 28 aa, Artificial Sequence
  Cyclic GFR-binding peptide
SQDLNAISILYFIGKTPKILKKYRMIVK

SEQ ID NO: 19501 - protein, 33 aa, Artificial Sequence
  Cyclic GFR-binding peptide
  MOD_RES (31)..(33): Xaa is C or S
PTELEPLTMLYYDEYDKVVEQLSNEMVVEGXGX

SEQ ID NO: 19502 - protein, 28 aa, Artificial Sequence
  Cyclic GFR-binding peptide
  MOD_RES (26)..(28): Xaa is C or S
SPISILFIIGKTPKIYKQYEMIVKSXKX

SEQ ID NO: 19503 - protein, 28 aa, Artificial Sequence
  Cyclic GFR-binding peptide
  MOD_RES (27)..(27): Xaa is C or S
EPLPMVYYDEYDKVVEQLSNEMVVEGXG

SEQ ID NO: 19504 - protein, 40 aa, Artificial Sequence
  Cyclic GFR-binding peptide
  MOD_RES (6)..(7)..(39): Xaa is C or S
SIPKAXXVPTELEPLTMLYYDEYDKVVEQLSNEMVVEGXG

SEQ ID NO: 19505 - protein, 39 aa, Artificial Sequence; identical to SEQ ID NO: 9265
  Cyclic GFR-binding peptide
  MOD_RES (4)..(5)..(37)..(39): Xaa is C or S

SEQ ID NO: 19506 - protein, 27 aa, Artificial Sequence
  Cyclic GFR-binding peptide
QDLEPLPIVYYVGRTPKVEQLSNMVVK

SEQ ID NO: 19507 - protein, 28 aa, Artificial Sequence
  Cyclic GFR-binding peptide
  MOD_RES (1)..(1): Xaa is C or S
XVPQDLEPLPIVYYVGRTPKVEQLSNMV

SEQ ID NO: 19508 - protein, 40 aa, Artificial Sequence
  Cyclic GFR-binding peptide
  MOD_RES (6)..(7)..(39): Xaa is C or S
TVPKPXXAPTQLEPLTVLYYDDSSNVIEQLSNNMVVRAXG

SEQ ID NO: 19509 - protein, 31 aa, Artificial Sequence; identical to SEQ ID NO: 9267
  Cyclic GFR-binding peptide
  MOD_RES (30)..(30): Xaa is C or S

SEQ ID NO: 19510 - protein, 28 aa, Artificial Sequence
  Cyclic GFR-binding peptide
PTKLSPISVLFIDDSSNVIYKQYENMVV

SEQ ID NO: 19511 - protein, 33 aa, Artificial Sequence
  Cyclic GFR-binding peptide
  MOD_RES (1)..(2): Xaa is C or S
XXAPTKLEPLTVLYYDDSSNVIEQLSNNMVVRS

SEQ ID NO: 19512 - protein, 31 aa, Artificial Sequence
  Cyclic GFR-binding peptide
  MOD_RES (3)..(4): Xaa is C or S
KPXXAPTKLEPLPVVYYDDSSNVIEQLSNNM

SEQ ID NO: 19513 - protein, 28 aa, Artificial Sequence
  Cyclic GFR-binding peptide
  MOD_RES (1)..(2): Xaa is C or S
XXAPTQLSPISVLFIDDSSNVIYKQYEN

SEQ ID NO: 19514 - protein, 33 aa, Artificial Sequence
  Cyclic GFR-binding peptide
  MOD_RES (3)..(4): Xaa is C or S
SPXXVPQDLSPISILFIVGRTPKVYKQYEMVVK

SEQ ID NO: 19515 - protein, 24 aa, Artificial Sequence
  Cyclic GFR-binding peptide
LEPLTMLYYDEYDKVVEQLSNEMV

SEQ ID NO: 19516 - protein, 39 aa, Artificial Sequence
  Cyclic GFR-binding peptide
  MOD_RES (6)..(7)..(38): Xaa is C or S
ASASPXXVPQDLSPISILFIVGRTPKVYKQYEMVVKSXK

SEQ ID NO: 19517 - protein, 21 aa, Artificial Sequence
  Cyclic GFR-binding peptide
SAISILYLDSANNVVLKNYQD

SEQ ID NO: 19518 - protein, 31 aa, Artificial Sequence
  Cyclic GFR-binding peptide
  MOD_RES (5)..(6): Xaa is C or S
SASPXXVSQDLSPISILFIIGKTPKIYKQYE

SEQ ID NO: 19519 - protein, 28 aa, Artificial Sequence
  Cyclic GFR-binding peptide
PTQLEPLPVVYYDDSSNVIEQLSNNMVV

SEQ ID NO: 19520 - protein, 31 aa, Artificial Sequence; identical to SEQ ID NO: 9283
  Cyclic GFR-binding peptide

SEQ ID NO: 19521 - protein, 35 aa, Artificial Sequence
  Cyclic GFR-binding peptide
  MOD_RES (3)..(4): Xaa is C or S
KAXXVPTELSPISMLFIDENEKVVYKQYEDMVVEG

SEQ ID NO: 19522 - protein, 29 aa, Artificial Sequence
  Cyclic GFR-binding peptide
  MOD_RES (2)..(2): Xaa is C or S
TXAPTKLEPLPVVYYDDSSNVIEQLSNNM

SEQ ID NO: 19523 - protein, 25 aa, Artificial Sequence
  Cyclic GFR-binding peptide
LEPLPIVYYVGRTPKVEQLSNMVVK

SEQ ID NO: 19524 - protein, 30 aa, Artificial Sequence
  Cyclic GFR-binding peptide
  MOD_RES (3)..(4): Xaa is C or S
PTXXVPTRLSAISILYLDSANNVVLKNYQD

SEQ ID NO: 19525 - protein, 27 aa, Artificial Sequence
  Cyclic GFR-binding peptide
VPTRLNAISILYFDSANNVVLKKYRDM

SEQ ID NO: 19526 - protein, 36 aa, Artificial Sequence
  Cyclic GFR-binding peptide
  MOD_RES (1)..(33)..(35): Xaa is C or S
XVPTRLEPLTILYYDSANNVVEQLSNDMVVESXGXR

SEQ ID NO: 19527 - protein, 29 aa, Artificial Sequence
  Cyclic GFR-binding peptide
APTQLEPLTVLYYDDSSNVIEQLSNNMVV

SEQ ID NO: 19528 - protein, 29 aa, Artificial Sequence
  Cyclic GFR-binding peptide
  MOD_RES (29)..(29): Xaa is C or S
QLSAISVLYLDDSSNVILKNYQNMVVRAX

SEQ ID NO: 19529 - protein, 33 aa, Artificial Sequence; identical to SEQ ID NO: 9297
  Cyclic GFR-binding peptide
  MOD_RES (3)..(3): Xaa is C or S

SEQ ID NO: 19530 - protein, 33 aa, Artificial Sequence; identical to SEQ ID NO: 9298
  Cyclic GFR-binding peptide
  MOD_RES (1)..(2)..(33): Xaa is C or S

SEQ ID NO: 19531 - protein, 37 aa, Artificial Sequence
  Cyclic GFR-binding peptide
  MOD_RES (2)..(3)..(35)..(37): Xaa is C or S
TXXVPTRLSAISILYLDSANNVVLKNYQDMVVESXGX

SEQ ID NO: 19532 - protein, 29 aa, Artificial Sequence
  Cyclic GFR-binding peptide
PQDLEPLPIVYYVGRTPKVEQLSNMVVKS

SEQ ID NO: 19533 - protein, 36 aa, Artificial Sequence; identical to SEQ ID NO: 9302
  Cyclic GFR-binding peptide
  MOD_RES (3)..(4)..(36): Xaa is C or S

SEQ ID NO: 19534 - protein, 34 aa, Artificial Sequence
  Cyclic GFR-binding peptide
  MOD_RES (4)..(5): Xaa is C or S
PKAXXVPTELSPISMLFIDENEKVVYKQYEDMVV

SEQ ID NO: 19535 - protein, 32 aa, Artificial Sequence
  Cyclic GFR-binding peptide
  MOD_RES (4)..(5): Xaa is C or S
PKAXXVPTELEPLTMLYYDEYDKVVEQLSNEM

SEQ ID NO: 19536 - protein, 34 aa, Artificial Sequence; identical to SEQ ID NO: 9312
  Cyclic GFR-binding peptide
  MOD_RES (1)..(32)..(34): Xaa is C or S

SEQ ID NO: 19537 - protein, 35 aa, Artificial Sequence
  Cyclic GFR-binding peptide
  MOD_RES (4)..(4): Xaa is C or S
KPTXAPTKLEPLPVVYYDDSSNVIEQLSNNMVVRS

SEQ ID NO: 19538 - protein, 36 aa, Artificial Sequence
  Cyclic GFR-binding peptide
  MOD_RES (1)..(33)..(35): Xaa is C or S
XVPTRLSAISILYLDSANNVVLKNYQDMVVESXGXR

SEQ ID NO: 19539 - protein, 30 aa, Artificial Sequence
  Cyclic GFR-binding peptide
  MOD_RES (29)..(29): Xaa is C or S
QLEPLPVVYYDDSSNVIEQLSNNMVVRAXG

SEQ ID NO: 19540 - protein, 31 aa, Artificial Sequence
  Cyclic GFR-binding peptide
  MOD_RES (3)..(4): Xaa is C or S
KAXXVPTELSPISMLFIDENEKVVYKQYEDM

SEQ ID NO: 19541 - protein, 30 aa, Artificial Sequence
  Cyclic GFR-binding peptide
  MOD_RES (3)..(4): Xaa is C or S
KPXXAPTQLSPISVLFIDDSSNVIYKQYEN

SEQ ID NO: 19542 - protein, 30 aa, Artificial Sequence; identical to SEQ ID NO: 9315
  Cyclic GFR-binding peptide
  MOD_RES (3)..(4): Xaa is C or S

SEQ ID NO: 19543 - protein, 34 aa, Artificial Sequence
  Cyclic GFR-binding peptide
  MOD_RES (4)..(5): Xaa is C or S
AAPXXVPQALEPLTILYYVGRKPKVEQLSNMIVR

SEQ ID NO: 19544 - protein, 34 aa, Artificial Sequence
  Cyclic GFR-binding peptide
  MOD_RES (5)..(6): Xaa is C or S
TPPTXXVPTRLNAISILYFDSANNVVLKKYRDMV

SEQ ID NO: 19545 - protein, 29 aa, Artificial Sequence
  Cyclic GFR-binding peptide
  MOD_RES (1)..(2): Xaa is C or S
XXVPQDLSPISILFIVGRTPKVYKQYEMV

SEQ ID NO: 19546 - protein, 36 aa, Artificial Sequence; identical to SEQ ID NO: 9326
  Cyclic GFR-binding peptide
  MOD_RES (1)..(2)..(34)..(36): Xaa is C or S

SEQ ID NO: 19547 - protein, 23 aa, Artificial Sequence
  Cyclic GFR-binding peptide
NAISILYFDSANNVVLKKYRDMV

SEQ ID NO: 19548 - protein, 26 aa, Artificial Sequence
  Cyclic GFR-binding peptide
VPTELNAISMLYFDEYDKVVLKKYRE

SEQ ID NO: 19549 - protein, 32 aa, Artificial Sequence
  Cyclic GFR-binding peptide
  MOD_RES (3)..(4): Xaa is C or S
APXXVPQALEPLTILYYVGRKPKVEQLSNMIV

SEQ ID NO: 19550 - protein, 31 aa, Artificial Sequence
  Cyclic GFR-binding peptide
  MOD_RES (6)..(6): Xaa is C or S
VTKPTXAPTKLEPLPVVYYDDSSNVIEQLSN

SEQ ID NO: 19551 - protein, 25 aa, Artificial Sequence
  Cyclic GFR-binding peptide
KLEPLPVVYYDDSSNVIEQLSNNMV

SEQ ID NO: 19552 - protein, 30 aa, Artificial Sequence
  Cyclic GFR-binding peptide
  MOD_RES (28)..(30): Xaa is C or S
DLEPLPIVYYVGRTPKVEQLSNMVVKSXKX

SEQ ID NO: 19553 - protein, 36 aa, Artificial Sequence
  Cyclic GFR-binding peptide
  MOD_RES (3)..(35): Xaa is C or S
PTXAPTKLEPLPVVYYDDSSNVIEQLSNNMVVRSXG

SEQ ID NO: 19554 - protein, 35 aa, Artificial Sequence; identical to SEQ ID NO: 9332
  Cyclic GFR-binding peptide
  MOD_RES (6)..(7): Xaa is C or S

SEQ ID NO: 19555 - protein, 20 aa, Artificial Sequence
  Cyclic GFR-binding peptide
NAISILYFVGRKPKVLKKYR

SEQ ID NO: 19556 - protein, 39 aa, Artificial Sequence
  Cyclic GFR-binding peptide
  MOD_RES (5)..(37)..(39): Xaa is C or S
TKPTXAPTKLEPLTVLYYDDSSNVIEQLSNNMVVRSXGX

SEQ ID NO: 19557 - protein, 34 aa, Artificial Sequence
  Cyclic GFR-binding peptide
  MOD_RES (3)..(4): Xaa is C or S
KAXXVPTELEPLTMLYYDENEKVVEQLSNDMVVE

SEQ ID NO: 19558 - protein, 31 aa, Artificial Sequence; identical to SEQ ID NO: 9339
  Cyclic GFR-binding peptide
  MOD_RES (5)..(5): Xaa is C or S

SEQ ID NO: 19559 - protein, 24 aa, Artificial Sequence
  Cyclic GFR-binding peptide
ELEPLTMLYYDEYDKVVEQLSNEM

SEQ ID NO: 19560 - protein, 30 aa, Artificial Sequence
  Cyclic GFR-binding peptide
  MOD_RES (4)..(5): Xaa is C or S
PPTXXVPTRLNAISILYFDSANNVVLKKYR

SEQ ID NO: 19561 - protein, 36 aa, Artificial Sequence
  Cyclic GFR-binding peptide
  MOD_RES (6)..(7): Xaa is C or S
STPPTXXVPTRLNAISILYFDSANNVVLKKYRDMVV

SEQ ID NO: 19562 - protein, 37 aa, Artificial Sequence; identical to SEQ ID NO: 9340
  Cyclic GFR-binding peptide
  MOD_RES (3)..(35)..(37): Xaa is C or S

SEQ ID NO: 19563 - protein, 32 aa, Artificial Sequence
  Cyclic GFR-binding peptide
  MOD_RES (5)..(6): Xaa is C or S
VPKPXXAPTQLSPISVLFIDDSSNVIYKQYEN

SEQ ID NO: 19564 - protein, 36 aa, Artificial Sequence; identical to SEQ ID NO: 9341
  Cyclic GFR-binding peptide
  MOD_RES (4)..(5)..(36): Xaa is C or S

SEQ ID NO: 19565 - protein, 33 aa, Artificial Sequence; identical to SEQ ID NO: 9343
  Cyclic GFR-binding peptide
  MOD_RES (31)..(33): Xaa is C or S

SEQ ID NO: 19566 - protein, 29 aa, Artificial Sequence
  Cyclic GFR-binding peptide
  MOD_RES (29)..(29): Xaa is C or S
ELNAISMLYFDEYDKVVLKKYREMVVEGX

SEQ ID NO: 19567 - protein, 29 aa, Artificial Sequence
  Cyclic GFR-binding peptide
  MOD_RES (3)..(4): Xaa is C or S
KAXXVPTELSPISMLFIDENEKVVYKQYE

SEQ ID NO: 19568 - protein, 29 aa, Artificial Sequence
  Cyclic GFR-binding peptide
  MOD_RES (27)..(29): Xaa is C or S
LSPISILFIIGKTPKIYKQYEMIVKSXKX

SEQ ID NO: 19569 - protein, 37 aa, Artificial Sequence; identical to SEQ ID NO: 9347
  Cyclic GFR-binding peptide
  MOD_RES (3)..(4)..(36): Xaa is C or S

SEQ ID NO: 19570 - protein, 33 aa, Artificial Sequence
  Cyclic GFR-binding peptide
  MOD_RES (1)..(2)..(33): Xaa is C or S
XXVPQALEPLTILYYVGRKPKVEQLSNMIVRSX

SEQ ID NO: 19571 - protein, 33 aa, Artificial Sequence
  Cyclic GFR-binding peptide
  MOD_RES (2)..(3): Xaa is C or S
PXXVPQALEPLTILYYVGRKPKVEQLSNMIVRS

SEQ ID NO: 19572 - protein, 31 aa, Artificial Sequence; identical to SEQ ID NO: 9349
  Cyclic GFR-binding peptide
  MOD_RES (29)..(31): Xaa is C or S

SEQ ID NO: 19573 - protein, 26 aa, Artificial Sequence
  Cyclic GFR-binding peptide
VPTELSPISMLFIDENEKVVYKQYED

SEQ ID NO: 19574 - protein, 38 aa, Artificial Sequence; identical to SEQ ID NO: 9353
  Cyclic GFR-binding peptide
  MOD_RES (2)..(3)..(35)..(37): Xaa is C or S

SEQ ID NO: 19575 - protein, 28 aa, Artificial Sequence
  Cyclic GFR-binding peptide
  MOD_RES (2)..(3): Xaa is C or S
PXXAPTKLEPLTVLYYDDSSNVIEQLSN

SEQ ID NO: 19576 - protein, 28 aa, Artificial Sequence
  Cyclic GFR-binding peptide
PTKLSAISVLYLDDSSNVILKNYQNMVV

SEQ ID NO: 19577 - protein, 23 aa, Artificial Sequence
  Cyclic GFR-binding peptide
LNAISILYFIGKTPKILKKYRMI

SEQ ID NO: 19578 - protein, 29 aa, Artificial Sequence
  Cyclic GFR-binding peptide
VPTELSPISMLFIDENEKVVYKQYEDMVV

SEQ ID NO: 19579 - protein, 30 aa, Artificial Sequence
  Cyclic GFR-binding peptide
  MOD_RES (1)..(2): Xaa is C or S
XXVPTELEPLPMVYYDENEKVVEQLSNDMV

SEQ ID NO: 19580 - protein, 40 aa, Artificial Sequence
  Cyclic GFR-binding peptide
  MOD_RES (6)..(38)..(40): Xaa is C or S
VTKPTXAPTKLSPISVLFIDDSSNVIYKQYENMVVRSXGX

SEQ ID NO: 19581 - protein, 38 aa, Artificial Sequence
  Cyclic GFR-binding peptide
  MOD_RES (5)..(6)..(38): Xaa is C or S
VPKPXXAPTKLEPLPVVYYDDSSNVIEQLSNNMVVRSX

SEQ ID NO: 19582 - protein, 29 aa, Artificial Sequence
  Cyclic GFR-binding peptide
  MOD_RES (3)..(4): Xaa is C or S
KPXXAPTKLSAISVLYLDDSSNVILKNYQ

SEQ ID NO: 19583 - protein, 35 aa, Artificial Sequence
  Cyclic GFR-binding peptide
  MOD_RES (6)..(7): Xaa is C or S
KIPKAXXVPTELEPLPMVYYDENEKVVEQLSNDMV

SEQ ID NO: 19584 - protein, 28 aa, Artificial Sequence
  Cyclic GFR-binding peptide
VPTELSPISMLFIDEYDKVVYKQYEEMV

SEQ ID NO: 19585 - protein, 29 aa, Artificial Sequence
  Cyclic GFR-binding peptide
  MOD_RES (1)..(2): Xaa is C or S
XXVSQDLSPISILFIIGKTPKIYKQYEMI

SEQ ID NO: 19586 - protein, 36 aa, Artificial Sequence
  Cyclic GFR-binding peptide
  MOD_RES (4)..(5): Xaa is C or S
PKAXXVPTELEPLTMLYYDEYDKVVEQLSNEMVVEG

SEQ ID NO: 19587 - protein, 31 aa, Artificial Sequence
  Cyclic GFR-binding peptide
  MOD_RES (2)..(2): Xaa is C or S
TXAPTKLEPLTVLYYDDSSNVIEQLSNNMVV

SEQ ID NO: 19588 - protein, 25 aa, Artificial Sequence
  Cyclic GFR-binding peptide
LEPLTILYYDSANNVVEQLSNDMVV

SEQ ID NO: 19589 - protein, 30 aa, Artificial Sequence
  Cyclic GFR-binding peptide
  MOD_RES (28)..(30): Xaa is C or S
LSPISVLFIDDSSNVIYKQYENMVVRAXGX

SEQ ID NO: 19590 - protein, 27 aa, Artificial Sequence
  Cyclic GFR-binding peptide
  MOD_RES (27)..(27): Xaa is C or S
EPLTMLYYDEYDKVVEQLSNEMVVEGX

SEQ ID NO: 19591 - protein, 38 aa, Artificial Sequence
  Cyclic GFR-binding peptide
  MOD_RES (4)..(5)..(37): Xaa is C or S
PPTXXVPTRLEPLTILYYDSANNVVEQLSNDMVVESXG

SEQ ID NO: 19592 - protein, 38 aa, Artificial Sequence; identical to SEQ ID NO: 9368
  Cyclic GFR-binding peptide
  MOD_RES (4)..(5)..(36)..(38): Xaa is C or S

SEQ ID NO: 19593 - protein, 22 aa, Artificial Sequence
  Cyclic GFR-binding peptide
EPLPVVYYDDSSNVIEQLSNNM

SEQ ID NO: 19594 - protein, 41 aa, Artificial Sequence
  Cyclic GFR-binding peptide
  MOD_RES (6)..(7)..(38)..(40): Xaa is C or S
ASASPXXVSQDLEPLPIVYYIGKTPKIEQLSNMIVKSXKXS

SEQ ID NO: 19595 - protein, 34 aa, Artificial Sequence
  Cyclic GFR-binding peptide
  MOD_RES (6)..(7): Xaa is C or S
TVPKPXXAPTQLEPLPVVYYDDSSNVIEQLSNNM

SEQ ID NO: 19596 - protein, 33 aa, Artificial Sequence
  Cyclic GFR-binding peptide
  MOD_RES (1)..(32): Xaa is C or S
XVPQALEPLTILYYVGRKPKVEQLSNMIVRSXK

SEQ ID NO: 19597 - protein, 31 aa, Artificial Sequence
  Cyclic GFR-binding peptide
  MOD_RES (4)..(5): Xaa is C or S
PPTXXVPTRLEPLPIVYYDSANNVVEQLSND

SEQ ID NO: 19598 - protein, 30 aa, Artificial Sequence
  Cyclic GFR-binding peptide
  MOD_RES (27)..(29): Xaa is C or S
EPLTILYYDSANNVVEQLSNDMVVESXGXR

SEQ ID NO: 19599 - protein, 30 aa, Artificial Sequence
  Cyclic GFR-binding peptide
VPTELSPISMLFIDENEKVVYKQYEDMVVE

SEQ ID NO: 19600 - protein, 39 aa, Artificial Sequence
  Cyclic GFR-binding peptide
  MOD_RES (5)..(6)..(37)..(39): Xaa is C or S
SAAPXXVPQALSPISILFIVGRKPKVYKQYEMIVRSXKX

SEQ ID NO: 19601 - protein, 41 aa, Artificial Sequence
  Cyclic GFR-binding peptide
  MOD_RES (5)..(6)..(38)..(40): Xaa is C or S
VPKPXXAPTQLEPLPVVYYDDSSNVIEQLSNNMVVRAXGXH

SEQ ID NO: 19602 - protein, 34 aa, Artificial Sequence
  Cyclic GFR-binding peptide
  MOD_RES (5)..(6): Xaa is C or S
VPKPXXAPTKLEPLTVLYYDDSSNVIEQLSNNMV

SEQ ID NO: 19603 - protein, 32 aa, Artificial Sequence; identical to SEQ ID NO: 9379
  Cyclic GFR-binding peptide
  MOD_RES (4)..(5): Xaa is C or S

SEQ ID NO: 19604 - protein, 33 aa, Artificial Sequence
  Cyclic GFR-binding peptide
  MOD_RES (31)..(33): Xaa is C or S
PTELSPISMLFIDENEKVVYKQYEDMVVEGXGX

SEQ ID NO: 19605 - protein, 32 aa, Artificial Sequence; identical to SEQ ID NO: 9381
  Cyclic GFR-binding peptide
  MOD_RES (30)..(32): Xaa is C or S

SEQ ID NO: 19606 - protein, 33 aa, Artificial Sequence; identical to SEQ ID NO: 9383
  Cyclic GFR-binding peptide
  MOD_RES (3)..(4): Xaa is C or S

SEQ ID NO: 19607 - protein, 32 aa, Artificial Sequence
  Cyclic GFR-binding peptide
  MOD_RES (5)..(6): Xaa is C or S
SASPXXVPQDLSPISILFIVGRTPKVYKQYEM

SEQ ID NO: 19608 - protein, 36 aa, Artificial Sequence
  Cyclic GFR-binding peptide
  MOD_RES (1)..(2)..(34)..(36): Xaa is C or S
XXAPTQLSPISVLFIDDSSNVIYKQYENMVVRAXGX

SEQ ID NO: 19609 - protein, 36 aa, Artificial Sequence
  Cyclic GFR-binding peptide
  MOD_RES (5)..(6): Xaa is C or S
IPKAXXVPTELEPLPMVYYDEYDKVVEQLSNEMVVE

SEQ ID NO: 19610 - protein, 33 aa, Artificial Sequence; identical to SEQ ID NO: 9384
  Cyclic GFR-binding peptide
  MOD_RES (5)..(6): Xaa is C or S

SEQ ID NO: 19611 - protein, 38 aa, Artificial Sequence; identical to SEQ ID NO: 9385
  Cyclic GFR-binding peptide
  MOD_RES (4)..(5)..(36)..(38): Xaa is C or S

SEQ ID NO: 19612 - protein, 28 aa, Artificial Sequence
  Cyclic GFR-binding peptide
  MOD_RES (1)..(2): Xaa is C or S
XXAPTQLEPLPVVYYDDSSNVIEQLSNN

SEQ ID NO: 19613 - protein, 28 aa, Artificial Sequence
  Cyclic GFR-binding peptide
  MOD_RES (2)..(3): Xaa is C or S
PXXAPTKLSPISVLFIDDSSNVIYKQYE

SEQ ID NO: 19614 - protein, 32 aa, Artificial Sequence
  Cyclic GFR-binding peptide
  MOD_RES (30)..(32): Xaa is C or S
TELEPLTMLYYDENEKVVEQLSNDMVVEGXGX

SEQ ID NO: 19615 - protein, 27 aa, Artificial Sequence
  Cyclic GFR-binding peptide
DLEPLPIVYYVGRTPKVEQLSNMVVKS

SEQ ID NO: 19616 - protein, 23 aa, Artificial Sequence
  Cyclic GFR-binding peptide
SAISILYLDSANNVVLKNYQDMV

SEQ ID NO: 19617 - protein, 36 aa, Artificial Sequence
  Cyclic GFR-binding peptide
  MOD_RES (5)..(6): Xaa is C or S
IPKAXXVPTELEPLTMLYYDEYDKVVEQLSNEMVVE

SEQ ID NO: 19618 - protein, 27 aa, Artificial Sequence
  Cyclic GFR-binding peptide
SQDLSAISILYLIGKTPKILKNYQMIV

SEQ ID NO: 19619 - protein, 28 aa, Artificial Sequence
  Cyclic GFR-binding peptide
  MOD_RES (2)..(3): Xaa is C or S
PXXVPQDLSAISILYLVGRTPKVLKNYQ

SEQ ID NO: 19620 - protein, 34 aa, Artificial Sequence
  Cyclic GFR-binding peptide
  MOD_RES (1)..(33): Xaa is C or S
XVPTRLEPLPIVYYDSANNVVEQLSNDMVVESXG

SEQ ID NO: 19621 - protein, 31 aa, Artificial Sequence
  Cyclic GFR-binding peptide
  MOD_RES (31)..(31): Xaa is C or S
PTKLEPLPVVYYDDSSNVIEQLSNNMVVRSX

SEQ ID NO: 19622 - protein, 27 aa, Artificial Sequence
  Cyclic GFR-binding peptide
  MOD_RES (27)..(27): Xaa is C or S
LSAISILYLVGRTPKVLKNYQMVVKSX

SEQ ID NO: 19623 - protein, 31 aa, Artificial Sequence; identical to SEQ ID NO: 9403
  Cyclic GFR-binding peptide

SEQ ID NO: 19624 - protein, 34 aa, Artificial Sequence
  Cyclic GFR-binding peptide
  MOD_RES (1)..(33): Xaa is C or S
XVPTELEPLTMLYYDENEKVVEQLSNDMVVEGXG

SEQ ID NO: 19625 - protein, 36 aa, Artificial Sequence
  Cyclic GFR-binding peptide
  MOD_RES (4)..(5)..(36): Xaa is C or S
ASPXXVPQDLSPISILFIVGRTPKVYKQYEMVVKSX

SEQ ID NO: 19626 - protein, 32 aa, Artificial Sequence
  Cyclic GFR-binding peptide
  MOD_RES (5)..(6): Xaa is C or S
IPKAXXVPTELEPLTMLYYDEYDKVVEQLSNE

SEQ ID NO: 19627 - protein, 20 aa, Artificial Sequence
  Cyclic GFR-binding peptide
SPISILFIVGRTPKVYKQYE

SEQ ID NO: 19628 - protein, 35 aa, Artificial Sequence
  Cyclic GFR-binding peptide
  MOD_RES (1)..(32)..(34): Xaa is C or S
XVPQALSPISILFIVGRKPKVYKQYEMIVRSXKXS

SEQ ID NO: 19629 - protein, 40 aa, Artificial Sequence; identical to SEQ ID NO: 9407
  Cyclic GFR-binding peptide
  MOD_RES (5)..(6)..(38)..(40): Xaa is C or S

SEQ ID NO: 19630 - protein, 28 aa, Artificial Sequence
  Cyclic GFR-binding peptide
KLSAISVLYLDDSSNVILKNYQNMVVRS

SEQ ID NO: 19631 - protein, 31 aa, Artificial Sequence; identical to SEQ ID NO: 9413
  Cyclic GFR-binding peptide
  MOD_RES (3)..(3): Xaa is C or S

SEQ ID NO: 19632 - protein, 27 aa, Artificial Sequence
  Cyclic GFR-binding peptide
  MOD_RES (1)..(1): Xaa is C or S
XVPQDLSPISILFIVGRTPKVYKQYEM

SEQ ID NO: 19633 - protein, 29 aa, Artificial Sequence
  Cyclic GFR-binding peptide
  MOD_RES (1)..(1): Xaa is C or S
XAPTKLEPLTVLYYDDSSNVIEQLSNNMV

SEQ ID NO: 19634 - protein, 32 aa, Artificial Sequence; identical to SEQ ID NO: 9417
  Cyclic GFR-binding peptide
  MOD_RES (30)..(32): Xaa is C or S

SEQ ID NO: 19635 - protein, 27 aa, Artificial Sequence
  Cyclic GFR-binding peptide
  MOD_RES (27)..(27): Xaa is C or S
EPLTVLYYDDSSNVIEQLSNNMVVRSX

SEQ ID NO: 19636 - protein, 29 aa, Artificial Sequence
  Cyclic GFR-binding peptide
  MOD_RES (29)..(29): Xaa is C or S
ELNAISMLYFDENEKVVLKKYRDMVVEGX

SEQ ID NO: 19637 - protein, 34 aa, Artificial Sequence
  Cyclic GFR-binding peptide
  MOD_RES (3)..(4): Xaa is C or S
KAXXVPTELEPLPMVYYDENEKVVEQLSNDMVVE

SEQ ID NO: 19638 - protein, 31 aa, Artificial Sequence
  Cyclic GFR-binding peptide
  MOD_RES (1)..(2): Xaa is C or S
XXAPTKLEPLTVLYYDDSSNVIEQLSNNMVV

SEQ ID NO: 19639 - protein, 39 aa, Artificial Sequence
  Cyclic GFR-binding peptide
  MOD_RES (5)..(6)..(38): Xaa is C or S
VPKPXXAPTQLEPLPVVYYDDSSNVIEQLSNNMVVRAXG

SEQ ID NO: 19640 - protein, 33 aa, Artificial Sequence
  Cyclic GFR-binding peptide
  MOD_RES (6)..(7): Xaa is C or S
KIPKAXXVPTELEPLTMLYYDENEKVVEQLSND

SEQ ID NO: 19641 - protein, 25 aa, Artificial Sequence
  Cyclic GFR-binding peptide
PTQLEPLTVLYYDDSSNVIEQLSNN

SEQ ID NO: 19642 - protein, 29 aa, Artificial Sequence
  Cyclic GFR-binding peptide
  MOD_RES (3)..(4): Xaa is C or S
SPXXVSQDLNAISILYFIGKTPKILKKYR

SEQ ID NO: 19643 - protein, 35 aa, Artificial Sequence
  Cyclic GFR-binding peptide
  MOD_RES (1)..(2)..(34): Xaa is C or S
XXVPTRLSAISILYLDSANNVVLKNYQDMVVESXG

SEQ ID NO: 19644 - protein, 34 aa, Artificial Sequence
  Cyclic GFR-binding peptide
  MOD_RES (1)..(2)..(33): Xaa is C or S
XXVPQALEPLTILYYVGRKPKVEQLSNMIVRSXK

SEQ ID NO: 19645 - protein, 36 aa, Artificial Sequence; identical to SEQ ID NO: 9429
  Cyclic GFR-binding peptide
  MOD_RES (3)..(4)..(35): Xaa is C or S

SEQ ID NO: 19646 - protein, 26 aa, Artificial Sequence
  Cyclic GFR-binding peptide
LSPISMLFIDEYDKVVYKQYEEMVVE

SEQ ID NO: 19647 - protein, 28 aa, Artificial Sequence
  Cyclic GFR-binding peptide
  MOD_RES (27)..(27): Xaa is C or S
LSPISILFIIGKTPKIYKQYEMIVKSXK

SEQ ID NO: 19648 - protein, 32 aa, Artificial Sequence; identical to SEQ ID NO: 9433
  Cyclic GFR-binding peptide
  MOD_RES (1)..(32): Xaa is C or S

SEQ ID NO: 19649 - protein, 21 aa, Artificial Sequence
  Cyclic GFR-binding peptide
SPISVLFIDDSSNVIYKQYEN

SEQ ID NO: 19650 - protein, 26 aa, Artificial Sequence
  Cyclic GFR-binding peptide
DLSPISILFIVGRTPKVYKQYEMVVK

SEQ ID NO: 19651 - protein, 35 aa, Artificial Sequence
  Cyclic GFR-binding peptide
  MOD_RES (5)..(6): Xaa is C or S
IPKAXXVPTELEPLTMLYYDEYDKVVEQLSNEMVV

SEQ ID NO: 19652 - protein, 31 aa, Artificial Sequence
  Cyclic GFR-binding peptide
  MOD_RES (1)..(2): Xaa is C or S
XXVPTELEPLPMVYYDENEKVVEQLSNDMVV

SEQ ID NO: 19653 - protein, 28 aa, Artificial Sequence
  Cyclic GFR-binding peptide
APTQLEPLTVLYYDDSSNVIEQLSNNMV

SEQ ID NO: 19654 - protein, 34 aa, Artificial Sequence
  Cyclic GFR-binding peptide
  MOD_RES (3)..(4): Xaa is C or S
PTXXVPTRLEPLPIVYYDSANNVVEQLSNDMVVE

SEQ ID NO: 19655 - protein, 29 aa, Artificial Sequence
  Cyclic GFR-binding peptide
  MOD_RES (29)..(29): Xaa is C or S
ELEPLPMVYYDEYDKVVEQLSNEMVVEGX

SEQ ID NO: 19656 - protein, 33 aa, Artificial Sequence
  Cyclic GFR-binding peptide
  MOD_RES (1)..(2): Xaa is C or S
XXVPTRLEPLPIVYYDSANNVVEQLSNDMVVES

SEQ ID NO: 19657 - protein, 27 aa, Artificial Sequence
  Cyclic GFR-binding peptide
  MOD_RES (27)..(27): Xaa is C or S
LEPLPIVYYVGRTPKVEQLSNMVVKSX

SEQ ID NO: 19658 - protein, 22 aa, Artificial Sequence
  Cyclic GFR-binding peptide
KLSPISVLFIDDSSNVIYKQYE

SEQ ID NO: 19659 - protein, 32 aa, Artificial Sequence
  Cyclic GFR-binding peptide
  MOD_RES (2)..(3): Xaa is C or S
TXXVPTRLEPLTILYYDSANNVVEQLSNDMVV

SEQ ID NO: 19660 - protein, 25 aa, Artificial Sequence
  Cyclic GFR-binding peptide
ELEPLPMVYYDENEKVVEQLSNDMV

SEQ ID NO: 19661 - protein, 27 aa, Artificial Sequence
  Cyclic GFR-binding peptide
PQDLEPLPIVYYVGRTPKVEQLSNMVV

SEQ ID NO: 19662 - protein, 30 aa, Artificial Sequence
  Cyclic GFR-binding peptide
  MOD_RES (29)..(29): Xaa is C or S
QLSPISVLFIDDSSNVIYKQYENMVVRAXG

SEQ ID NO: 19663 - protein, 30 aa, Artificial Sequence
  Cyclic GFR-binding peptide
  MOD_RES (4)..(5): Xaa is C or S
PKAXXVPTELSPISMLFIDENEKVVYKQYE

SEQ ID NO: 19664 - protein, 33 aa, Artificial Sequence
  Cyclic GFR-binding peptide
  MOD_RES (1)..(32): Xaa is C or S
XVPQDLSPISILFIVGRTPKVYKQYEMVVKSXK

SEQ ID NO: 19665 - protein, 31 aa, Artificial Sequence
  Cyclic GFR-binding peptide
  MOD_RES (30)..(30): Xaa is C or S
TELSPISMLFIDEYDKVVYKQYEEMVVEGXG

SEQ ID NO: 19666 - protein, 32 aa, Artificial Sequence
  Cyclic GFR-binding peptide
  MOD_RES (4)..(5): Xaa is C or S
PKPXXAPTQLEPLPVVYYDDSSNVIEQLSNNM

SEQ ID NO: 19667 - protein, 38 aa, Artificial Sequence
  Cyclic GFR-binding peptide
  MOD_RES (3)..(35)..(37): Xaa is C or S
PTXAPTKLEPLTVLYYDDSSNVIEQLSNNMVVRSXGXH

SEQ ID NO: 19668 - protein, 35 aa, Artificial Sequence
  Cyclic GFR-binding peptide
  MOD_RES (4)..(4): Xaa is C or S
KPTXAPTKLEPLTVLYYDDSSNVIEQLSNNMVVRS

SEQ ID NO: 19669 - protein, 24 aa, Artificial Sequence
  Cyclic GFR-binding peptide
QLEPLTVLYYDDSSNVIEQLSNNM

SEQ ID NO: 19670 - protein, 35 aa, Artificial Sequence
  Cyclic GFR-binding peptide
  MOD_RES (1)..(33)..(35): Xaa is C or S
XVPTELEPLPMVYYDENEKVVEQLSNDMVVEGXGX

SEQ ID NO: 19671 - protein, 30 aa, Artificial Sequence; identical to SEQ ID NO: 9447
  Cyclic GFR-binding peptide
  MOD_RES (30)..(30): Xaa is C or S

SEQ ID NO: 19672 - protein, 34 aa, Artificial Sequence; identical to SEQ ID NO: 9450
  Cyclic GFR-binding peptide
  MOD_RES (1)..(2)..(33): Xaa is C or S

SEQ ID NO: 19673 - protein, 38 aa, Artificial Sequence
  Cyclic GFR-binding peptide
  MOD_RES (5)..(6)..(37): Xaa is C or S
SASPXXVSQDLSPISILFIIGKTPKIYKQYEMIVKSXK

SEQ ID NO: 19674 - protein, 38 aa, Artificial Sequence; identical to SEQ ID NO: 9452
  Cyclic GFR-binding peptide
  MOD_RES (5)..(6)..(38): Xaa is C or S

SEQ ID NO: 19675 - protein, 29 aa, Artificial Sequence
  Cyclic GFR-binding peptide
  MOD_RES (1)..(2): Xaa is C or S
XXVPQDLEPLPIVYYVGRTPKVEQLSNMV

SEQ ID NO: 19676 - protein, 32 aa, Artificial Sequence; identical to SEQ ID NO: 9455
  Cyclic GFR-binding peptide
  MOD_RES (2)..(3): Xaa is C or S

SEQ ID NO: 19677 - protein, 23 aa, Artificial Sequence
  Cyclic GFR-binding peptide
LEPLTVLYYDDSSNVIEQLSNNM

SEQ ID NO: 19678 - protein, 30 aa, Artificial Sequence
  Cyclic GFR-binding peptide
  MOD_RES (27)..(29): Xaa is C or S
EPLPMVYYDENEKVVEQLSNDMVVEGXGXR

SEQ ID NO: 19679 - protein, 31 aa, Artificial Sequence
  Cyclic GFR-binding peptide
  MOD_RES (1)..(2): Xaa is C or S
XXAPTKLEPLPVVYYDDSSNVIEQLSNNMVV

SEQ ID NO: 19680 - protein, 35 aa, Artificial Sequence; identical to SEQ ID NO: 9458
  Cyclic GFR-binding peptide
  MOD_RES (1)..(2)..(33)..(35): Xaa is C or S

SEQ ID NO: 19681 - protein, 31 aa, Artificial Sequence
  Cyclic GFR-binding peptide
  MOD_RES (30)..(30): Xaa is C or S
TKLSPISVLFIDDSSNVIYKQYENMVVRSXG

SEQ ID NO: 19682 - protein, 38 aa, Artificial Sequence; identical to SEQ ID NO: 9459
  Cyclic GFR-binding peptide
  MOD_RES (3)..(4)..(35)..(37): Xaa is C or S

SEQ ID NO: 19683 - protein, 22 aa, Artificial Sequence
  Cyclic GFR-binding peptide
LEPLTILYYDSANNVVEQLSND

SEQ ID NO: 19684 - protein, 37 aa, Artificial Sequence
  Cyclic GFR-binding peptide
  MOD_RES (2)..(3)..(35)..(37): Xaa is C or S
PXXAPTKLSPISVLFIDDSSNVIYKQYENMVVRSXGX

SEQ ID NO: 19685 - protein, 30 aa, Artificial Sequence
  Cyclic GFR-binding peptide
  MOD_RES (1)..(2): Xaa is C or S
XXVPQALSPISILFIVGRKPKVYKQYEMIV

SEQ ID NO: 19686 - protein, 28 aa, Artificial Sequence
  Cyclic GFR-binding peptide
QDLSPISILFIIGKTPKIYKQYEMIVKS

SEQ ID NO: 19687 - protein, 36 aa, Artificial Sequence; identical to SEQ ID NO: 9461
  Cyclic GFR-binding peptide
  MOD_RES (1)..(2)..(34)..(36): Xaa is C or S

SEQ ID NO: 19688 - protein, 37 aa, Artificial Sequence; identical to SEQ ID NO: 9465
  Cyclic GFR-binding peptide
  MOD_RES (5)..(6)..(37): Xaa is C or S

SEQ ID NO: 19689 - protein, 33 aa, Artificial Sequence
  Cyclic GFR-binding peptide
  MOD_RES (6)..(7): Xaa is C or S
KIPKAXXVPTELEPLPMVYYDENEKVVEQLSND

SEQ ID NO: 19690 - protein, 29 aa, Artificial Sequence
  Cyclic GFR-binding peptide
  MOD_RES (26)..(28): Xaa is C or S
SAISILYLVGRTPKVLKNYQMVVKSXKXS

SEQ ID NO: 19691 - protein, 37 aa, Artificial Sequence
  Cyclic GFR-binding peptide
  MOD_RES (5)..(6)..(37): Xaa is C or S
SASPXXVPQDLSPISILFIVGRTPKVYKQYEMVVKSX

SEQ ID NO: 19692 - protein, 27 aa, Artificial Sequence
  Cyclic GFR-binding peptide
  MOD_RES (27)..(27): Xaa is C or S
NAISILYFDSANNVVLKKYRDMVVESX

SEQ ID NO: 19693 - protein, 37 aa, Artificial Sequence
  Cyclic GFR-binding peptide
  MOD_RES (6)..(7): Xaa is C or S
SIPKAXXVPTELEPLTMLYYDEYDKVVEQLSNEMVVE

SEQ ID NO: 19694 - protein, 25 aa, Artificial Sequence
  Cyclic GFR-binding peptide
PQALNAISILYFVGRKPKVLKKYRM

SEQ ID NO: 19695 - protein, 24 aa, Artificial Sequence
  Cyclic GFR-binding peptide
LNAISMLYFDEYDKVVLKKYREMV

SEQ ID NO: 19696 - protein, 38 aa, Artificial Sequence
  Cyclic GFR-binding peptide
  MOD_RES (3)..(4)..(36)..(38): Xaa is C or S
KAXXVPTELSPISMLFIDEYDKVVYKQYEEMVVEGXGX

SEQ ID NO: 19697 - protein, 37 aa, Artificial Sequence; identical to SEQ ID NO: 9474
  Cyclic GFR-binding peptide
  MOD_RES (5)..(6): Xaa is C or S

SEQ ID NO: 19698 - protein, 22 aa, Artificial Sequence
  Cyclic GFR-binding peptide
LEPLPIVYYVGRTPKVEQLSNM

SEQ ID NO: 19699 - protein, 33 aa, Artificial Sequence
  Cyclic GFR-binding peptide
  MOD_RES (5)..(6): Xaa is C or S
VPKPXXAPTKLEPLTVLYYDDSSNVIEQLSNNM

SEQ ID NO: 19700 - protein, 31 aa, Artificial Sequence
  Cyclic GFR-binding peptide
  MOD_RES (31)..(31): Xaa is C or S
PTELEPLPMVYYDEYDKVVEQLSNEMVVEGX

SEQ ID NO: 19701 - protein, 28 aa, Artificial Sequence
  Cyclic GFR-binding peptide
  MOD_RES (1)..(1): Xaa is C or S
XAPTQLEPLTVLYYDDSSNVIEQLSNNM

SEQ ID NO: 19702 - protein, 32 aa, Artificial Sequence
  Cyclic GFR-binding peptide
  MOD_RES (2)..(3): Xaa is C or S
PXXVPQALEPLTILYYVGRKPKVEQLSNMIVR

SEQ ID NO: 19703 - protein, 22 aa, Artificial Sequence
  Cyclic GFR-binding peptide
SAISILYLVGRKPKVLKNYQMI

SEQ ID NO: 19704 - protein, 32 aa, Artificial Sequence; identical to SEQ ID NO: 9480
  Cyclic GFR-binding peptide
  MOD_RES (1)..(2): Xaa is C or S

SEQ ID NO: 19705 - protein, 33 aa, Artificial Sequence; identical to SEQ ID NO: 9481
  Cyclic GFR-binding peptide
  MOD_RES (6)..(7): Xaa is C or S

SEQ ID NO: 19706 - protein, 36 aa, Artificial Sequence
  Cyclic GFR-binding peptide
  MOD_RES (4)..(5): Xaa is C or S
PKPXXAPTKLEPLPVVYYDDSSNVIEQLSNNMVVRS

SEQ ID NO: 19707 - protein, 32 aa, Artificial Sequence
  Cyclic GFR-binding peptide
  MOD_RES (7)..(7): Xaa is C or S
HVTKPTXAPTKLEPLPVVYYDDSSNVIEQLSN

SEQ ID NO: 19708 - protein, 31 aa, Artificial Sequence; identical to SEQ ID NO: 9484
  Cyclic GFR-binding peptide
  MOD_RES (28)..(30): Xaa is C or S

SEQ ID NO: 19709 - protein, 30 aa, Artificial Sequence
  Cyclic GFR-binding peptide
  MOD_RES (27)..(29): Xaa is C or S
SPISMLFIDEYDKVVYKQYEEMVVEGXGXR

SEQ ID NO: 19710 - protein, 36 aa, Artificial Sequence
  Cyclic GFR-binding peptide
  MOD_RES (3)..(4)..(36): Xaa is C or S
PTXXVPTRLEPLPIVYYDSANNVVEQLSNDMVVESX

SEQ ID NO: 19711 - protein, 28 aa, Artificial Sequence
  Cyclic GFR-binding peptide
  MOD_RES (1)..(1): Xaa is C or S
XVSQDLSAISILYLIGKTPKILKNYQMI

SEQ ID NO: 19712 - protein, 25 aa, Artificial Sequence
  Cyclic GFR-binding peptide
TRLEPLPIVYYDSANNVVEQLSNDM

SEQ ID NO: 19713 - protein, 38 aa, Artificial Sequence
  Cyclic GFR-binding peptide
  MOD_RES (5)..(6)..(38): Xaa is C or S
VPKPXXAPTQLSPISVLFIDDSSNVIYKQYENMVVRAX

SEQ ID NO: 19714 - protein, 31 aa, Artificial Sequence
  Cyclic GFR-binding peptide
  MOD_RES (28)..(30): Xaa is C or S
LSAISILYLDSANNVVLKNYQDMVVESXGXR

SEQ ID NO: 19715 - protein, 24 aa, Artificial Sequence
  Cyclic GFR-binding peptide
NAISMLYFDEYDKVVLKKYREMVV

SEQ ID NO: 19716 - protein, 22 aa, Artificial Sequence
  Cyclic GFR-binding peptide
DLSPISILFIVGRTPKVYKQYE

SEQ ID NO: 19717 - protein, 29 aa, Artificial Sequence
  Cyclic GFR-binding peptide
  MOD_RES (27)..(29): Xaa is C or S
LSAISILYLVGRTPKVLKNYQMVVKSXKX

SEQ ID NO: 19718 - protein, 23 aa, Artificial Sequence
  Cyclic GFR-binding peptide
DLSPISILFIIGKTPKIYKQYEM

SEQ ID NO: 19719 - protein, 32 aa, Artificial Sequence
  Cyclic GFR-binding peptide
  MOD_RES (32)..(32): Xaa is C or S
APTQLEPLPVVYYDDSSNVIEQLSNNMVVRAX

SEQ ID NO: 19720 - protein, 32 aa, Artificial Sequence
  Cyclic GFR-binding peptide
  MOD_RES (30)..(32): Xaa is C or S
TQLEPLPVVYYDDSSNVIEQLSNNMVVRAXGX

SEQ ID NO: 19721 - protein, 33 aa, Artificial Sequence
  Cyclic GFR-binding peptide
  MOD_RES (2)..(3): Xaa is C or S
AXXVPTELSPISMLFIDENEKVVYKQYEDMVVE

SEQ ID NO: 19722 - protein, 24 aa, Artificial Sequence
  Cyclic GFR-binding peptide
QDLSPISILFIIGKTPKIYKQYEM

SEQ ID NO: 19723 - protein, 32 aa, Artificial Sequence
  Cyclic GFR-binding peptide
  MOD_RES (6)..(7): Xaa is C or S
ASAAPXXVPQALSPISILFIVGRKPKVYKQYE

SEQ ID NO: 19724 - protein, 25 aa, Artificial Sequence
  Cyclic GFR-binding peptide
LEPLPMVYYDEYDKVVEQLSNEMVV

SEQ ID NO: 19725 - protein, 29 aa, Artificial Sequence
  Cyclic GFR-binding peptide
  MOD_RES (1)..(1): Xaa is C or S
XVPQALSPISILFIVGRKPKVYKQYEMIV

SEQ ID NO: 19726 - protein, 25 aa, Artificial Sequence
  Cyclic GFR-binding peptide
TELSPISMLFIDEYDKVVYKQYEEM

SEQ ID NO: 19727 - protein, 32 aa, Artificial Sequence; identical to SEQ ID NO: 9500
  Cyclic GFR-binding peptide
  MOD_RES (2)..(3): Xaa is C or S

SEQ ID NO: 19728 - protein, 39 aa, Artificial Sequence
  Cyclic GFR-binding peptide
  MOD_RES (3)..(4)..(36)..(38): Xaa is C or S
KPXXAPTQLEPLTVLYYDDSSNVIEQLSNNMVVRAXGXH

SEQ ID NO: 19729 - protein, 34 aa, Artificial Sequence
  Cyclic GFR-binding peptide
  MOD_RES (3)..(4): Xaa is C or S
PTXXVPTRLEPLTILYYDSANNVVEQLSNDMVVE

SEQ ID NO: 19730 - protein, 36 aa, Artificial Sequence
  Cyclic GFR-binding peptide
  MOD_RES (3)..(4)..(36): Xaa is C or S
KPXXAPTQLEPLPVVYYDDSSNVIEQLSNNMVVRAX

SEQ ID NO: 19731 - protein, 35 aa, Artificial Sequence
  Cyclic GFR-binding peptide
  MOD_RES (32)..(34): Xaa is C or S
VPTELSPISMLFIDEYDKVVYKQYEEMVVEGXGXR

SEQ ID NO: 19732 - protein, 32 aa, Artificial Sequence
  Cyclic GFR-binding peptide
  MOD_RES (1)..(2): Xaa is C or S
XXVPQDLSPISILFIVGRTPKVYKQYEMVVKS

SEQ ID NO: 19733 - protein, 37 aa, Artificial Sequence; identical to SEQ ID NO: 9503
  Cyclic GFR-binding peptide
  MOD_RES (6)..(7): Xaa is C or S

SEQ ID NO: 19734 - protein, 31 aa, Artificial Sequence
  Cyclic GFR-binding peptide
  MOD_RES (3)..(4): Xaa is C or S
KAXXVPTELEPLPMVYYDENEKVVEQLSNDM

SEQ ID NO: 19735 - protein, 35 aa, Artificial Sequence
  Cyclic GFR-binding peptide
  MOD_RES (6)..(7): Xaa is C or S
YVPKPXXAPTKLEPLPVVYYDDSSNVIEQLSNNMV

SEQ ID NO: 19736 - protein, 34 aa, Artificial Sequence
  Cyclic GFR-binding peptide
  MOD_RES (1)..(2)..(34): Xaa is C or S
XXVPTELSPISMLFIDENEKVVYKQYEDMVVEGX

SEQ ID NO: 19737 - protein, 30 aa, Artificial Sequence
  Cyclic GFR-binding peptide
  MOD_RES (27)..(29): Xaa is C or S
NAISILYFDSANNVVLKKYRDMVVESXGXR

SEQ ID NO: 19738 - protein, 31 aa, Artificial Sequence
  Cyclic GFR-binding peptide
  MOD_RES (1)..(1): Xaa is C or S
XVPQDLEPLPIVYYVGRTPKVEQLSNMVVKS

SEQ ID NO: 19739 - protein, 28 aa, Artificial Sequence
  Cyclic GFR-binding peptide
RLEPLPIVYYDSANNVVEQLSNDMVVES

SEQ ID NO: 19740 - protein, 33 aa, Artificial Sequence; identical to SEQ ID NO: 9506
  Cyclic GFR-binding peptide
  MOD_RES (2)..(3): Xaa is C or S

SEQ ID NO: 19741 - protein, 29 aa, Artificial Sequence
  Cyclic GFR-binding peptide
  MOD_RES (27)..(29): Xaa is C or S
LSAISILYLIGKTPKILKNYQMIVKSXKX

SEQ ID NO: 19742 - protein, 34 aa, Artificial Sequence
  Cyclic GFR-binding peptide
  MOD_RES (4)..(4): Xaa is C or S
KPTXAPTKLSPISVLFIDDSSNVIYKQYENMVVR

SEQ ID NO: 19743 - protein, 35 aa, Artificial Sequence
  Cyclic GFR-binding peptide
  MOD_RES (6)..(7): Xaa is C or S
STPPTXXVPTRLEPLTILYYDSANNVVEQLSNDMV

SEQ ID NO: 19744 - protein, 35 aa, Artificial Sequence
  Cyclic GFR-binding peptide
  MOD_RES (2)..(3)..(35): Xaa is C or S
PXXAPTQLEPLTVLYYDDSSNVIEQLSNNMVVRAX

SEQ ID NO: 19745 - protein, 37 aa, Artificial Sequence; identical to SEQ ID NO: 9508
  Cyclic GFR-binding peptide
  MOD_RES (2)..(3)..(35)..(37): Xaa is C or S

SEQ ID NO: 19746 - protein, 31 aa, Artificial Sequence; identical to SEQ ID NO: 9510
  Cyclic GFR-binding peptide
  MOD_RES (30)..(30): Xaa is C or S

SEQ ID NO: 19747 - protein, 39 aa, Artificial Sequence
  Cyclic GFR-binding peptide
  MOD_RES (4)..(5)..(37)..(39): Xaa is C or S
PKAXXVPTELEPLPMVYYDENEKVVEQLSNDMVVEGXGX

SEQ ID NO: 19748 - protein, 34 aa, Artificial Sequence; identical to SEQ ID NO: 9515
  Cyclic GFR-binding peptide
  MOD_RES (4)..(5): Xaa is C or S

SEQ ID NO: 19749 - protein, 32 aa, Artificial Sequence
  Cyclic GFR-binding peptide
  MOD_RES (2)..(3): Xaa is C or S
PXXAPTQLEPLPVVYYDDSSNVIEQLSNNMVV

SEQ ID NO: 19750 - protein, 34 aa, Artificial Sequence; identical to SEQ ID NO: 9517
  Cyclic GFR-binding peptide
  MOD_RES (3)..(4): Xaa is C or S

SEQ ID NO: 19751 - protein, 32 aa, Artificial Sequence
  Cyclic GFR-binding peptide
  MOD_RES (5)..(6): Xaa is C or S
IPKAXXVPTELEPLPMVYYDEYDKVVEQLSNE

SEQ ID NO: 19752 - protein, 28 aa, Artificial Sequence
  Cyclic GFR-binding peptide
  MOD_RES (28)..(28): Xaa is C or S
LSAISILYLDSANNVVLKNYQDMVVESX

SEQ ID NO: 19753 - protein, 34 aa, Artificial Sequence
  Cyclic GFR-binding peptide
  MOD_RES (4)..(5): Xaa is C or S
PKAXXVPTELEPLPMVYYDENEKVVEQLSNDMVV

SEQ ID NO: 19754 - protein, 30 aa, Artificial Sequence; identical to SEQ ID NO: 9519
  Cyclic GFR-binding peptide
  MOD_RES (30)..(30): Xaa is C or S

SEQ ID NO: 19755 - protein, 26 aa, Artificial Sequence
  Cyclic GFR-binding peptide
QLEPLTVLYYDDSSNVIEQLSNNMVV

SEQ ID NO: 19756 - protein, 29 aa, Artificial Sequence
  Cyclic GFR-binding peptide
  MOD_RES (1)..(1): Xaa is C or S
XVPTELEPLTMLYYDENEKVVEQLSNDMV

SEQ ID NO: 19757 - protein, 33 aa, Artificial Sequence; identical to SEQ ID NO: 9529
  Cyclic GFR-binding peptide
  MOD_RES (6)..(7): Xaa is C or S

SEQ ID NO: 19758 - protein, 33 aa, Artificial Sequence; identical to SEQ ID NO: 9530
  Cyclic GFR-binding peptide
  MOD_RES (31)..(33): Xaa is C or S

SEQ ID NO: 19759 - protein, 37 aa, Artificial Sequence
  Cyclic GFR-binding peptide
  MOD_RES (1)..(2)..(34)..(36): Xaa is C or S
XXVPTRLEPLTILYYDSANNVVEQLSNDMVVESXGXR

SEQ ID NO: 19760 - protein, 30 aa, Artificial Sequence; identical to SEQ ID NO: 9534
  Cyclic GFR-binding peptide
  MOD_RES (4)..(5): Xaa is C or S

SEQ ID NO: 19761 - protein, 39 aa, Artificial Sequence; identical to SEQ ID NO: 9535
  Cyclic GFR-binding peptide
  MOD_RES (5)..(6)..(37)..(39): Xaa is C or S

SEQ ID NO: 19762 - protein, 21 aa, Artificial Sequence
  Cyclic GFR-binding peptide
LNAISILYFIGKTPKILKKYR

SEQ ID NO: 19763 - protein, 31 aa, Artificial Sequence
  Cyclic GFR-binding peptide
  MOD_RES (5)..(6): Xaa is C or S
TPPTXXVPTRLEPLPIVYYDSANNVVEQLSN

SEQ ID NO: 19764 - protein, 37 aa, Artificial Sequence
  Cyclic GFR-binding peptide
  MOD_RES (3)..(4)..(36): Xaa is C or S
PTXXVPTRLNAISILYFDSANNVVLKKYRDMVVESXG

SEQ ID NO: 19765 - protein, 40 aa, Artificial Sequence; identical to SEQ ID NO: 9541
  Cyclic GFR-binding peptide
  MOD_RES (5)..(6)..(37)..(39): Xaa is C or S

SEQ ID NO: 19766 - protein, 36 aa, Artificial Sequence
  Cyclic GFR-binding peptide
  MOD_RES (4)..(5)..(36): Xaa is C or S
AAPXXVPQALEPLTILYYVGRKPKVEQLSNMIVRSX

SEQ ID NO: 19767 - protein, 33 aa, Artificial Sequence; identical to SEQ ID NO: 9544
  Cyclic GFR-binding peptide
  MOD_RES (30)..(32): Xaa is C or S

SEQ ID NO: 19768 - protein, 29 aa, Artificial Sequence
  Cyclic GFR-binding peptide
  MOD_RES (2)..(3): Xaa is C or S
PXXAPTQLEPLTVLYYDDSSNVIEQLSNN

SEQ ID NO: 19769 - protein, 23 aa, Artificial Sequence
  Cyclic GFR-binding peptide
QLSAISVLYLDDSSNVILKNYQN

SEQ ID NO: 19770 - protein, 25 aa, Artificial Sequence
  Cyclic GFR-binding peptide
ALNAISILYFVGRKPKVLKKYRMIV

SEQ ID NO: 19771 - protein, 31 aa, Artificial Sequence
  Cyclic GFR-binding peptide
  MOD_RES (29)..(31): Xaa is C or S
QALEPLTILYYVGRKPKVEQLSNMIVRSXKX

SEQ ID NO: 19772 - protein, 28 aa, Artificial Sequence
  Cyclic GFR-binding peptide
  MOD_RES (1)..(1): Xaa is C or S
XVSQDLEPLPIVYYIGKTPKIEQLSNMI

SEQ ID NO: 19773 - protein, 32 aa, Artificial Sequence; identical to SEQ ID NO: 9547
  Cyclic GFR-binding peptide
  MOD_RES (2)..(3): Xaa is C or S

SEQ ID NO: 19774 - protein, 29 aa, Artificial Sequence
  Cyclic GFR-binding peptide
VPQALSAISILYLVGRKPKVLKNYQMIVR

SEQ ID NO: 19775 - protein, 31 aa, Artificial Sequence
  Cyclic GFR-binding peptide
  MOD_RES (1)..(2): Xaa is C or S
XXVPTELSPISMLFIDENEKVVYKQYEDMVV

SEQ ID NO: 19776 - protein, 30 aa, Artificial Sequence; identical to SEQ ID NO: 9554
  Cyclic GFR-binding peptide
  MOD_RES (28)..(30): Xaa is C or S

SEQ ID NO: 19777 - protein, 28 aa, Artificial Sequence
  Cyclic GFR-binding peptide
QDLNAISILYFVGRTPKVLKKYRMVVKS

SEQ ID NO: 19778 - protein, 36 aa, Artificial Sequence
  Cyclic GFR-binding peptide
  MOD_RES (4)..(5): Xaa is C or S
PKAXXVPTELEPLPMVYYDEYDKVVEQLSNEMVVEG

SEQ ID NO: 19779 - protein, 34 aa, Artificial Sequence
  Cyclic GFR-binding peptide
  MOD_RES (5)..(5): Xaa is C or S
TKPTXAPTKLEPLTVLYYDDSSNVIEQLSNNMVV

SEQ ID NO: 19780 - protein, 30 aa, Artificial Sequence
  Cyclic GFR-binding peptide
  MOD_RES (1)..(2): Xaa is C or S
XXAPTKLEPLPVVYYDDSSNVIEQLSNNMV

SEQ ID NO: 19781 - protein, 34 aa, Artificial Sequence
  Cyclic GFR-binding peptide
  MOD_RES (3)..(4): Xaa is C or S
KAXXVPTELEPLPMVYYDEYDKVVEQLSNEMVVE

SEQ ID NO: 19782 - protein, 32 aa, Artificial Sequence; identical to SEQ ID NO: 9561
  Cyclic GFR-binding peptide
  MOD_RES (29)..(31): Xaa is C or S

SEQ ID NO: 19783 - protein, 20 aa, Artificial Sequence
  Cyclic GFR-binding peptide
EPLTMLYYDENEKVVEQLSN

SEQ ID NO: 19784 - protein, 34 aa, Artificial Sequence
  Cyclic GFR-binding peptide
  MOD_RES (3)..(4): Xaa is C or S
PTXXVPTRLNAISILYFDSANNVVLKKYRDMVVE

SEQ ID NO: 19785 - protein, 32 aa, Artificial Sequence
  Cyclic GFR-binding peptide
  MOD_RES (29)..(31): Xaa is C or S
QLEPLPVVYYDDSSNVIEQLSNNMVVRAXGXH

SEQ ID NO: 19786 - protein, 38 aa, Artificial Sequence; identical to SEQ ID NO: 9570
  Cyclic GFR-binding peptide
  MOD_RES (5)..(6)..(37): Xaa is C or S

SEQ ID NO: 19787 - protein, 33 aa, Artificial Sequence
  Cyclic GFR-binding peptide
  MOD_RES (1)..(33): Xaa is C or S
XVPTELEPLPMVYYDEYDKVVEQLSNEMVVEGX

SEQ ID NO: 19788 - protein, 36 aa, Artificial Sequence
  Cyclic GFR-binding peptide
  MOD_RES (3)..(4)..(36): Xaa is C or S
KAXXVPTELEPLPMVYYDEYDKVVEQLSNEMVVEGX

SEQ ID NO: 19789 - protein, 34 aa, Artificial Sequence
  Cyclic GFR-binding peptide
  MOD_RES (3)..(4): Xaa is C or S
KPXXAPTKLEPLPVVYYDDSSNVIEQLSNNMVVR

SEQ ID NO: 19790 - protein, 36 aa, Artificial Sequence; identical to SEQ ID NO: 9572
  Cyclic GFR-binding peptide
  MOD_RES (5)..(6): Xaa is C or S

SEQ ID NO: 19791 - protein, 36 aa, Artificial Sequence
  Cyclic GFR-binding peptide
  MOD_RES (5)..(6): Xaa is C or S
VPKPXXAPTKLEPLPVVYYDDSSNVIEQLSNNMVVR

SEQ ID NO: 19792 - protein, 34 aa, Artificial Sequence; identical to SEQ ID NO: 9576
  Cyclic GFR-binding peptide
  MOD_RES (3)..(4): Xaa is C or S

SEQ ID NO: 19793 - protein, 28 aa, Artificial Sequence
  Cyclic GFR-binding peptide
  MOD_RES (1)..(2): Xaa is C or S
XXAPTKLEPLPVVYYDDSSNVIEQLSNN

SEQ ID NO: 19794 - protein, 36 aa, Artificial Sequence
  Cyclic GFR-binding peptide
  MOD_RES (2)..(3)..(35): Xaa is C or S
AXXVPTELEPLTMLYYDENEKVVEQLSNDMVVEGXG

SEQ ID NO: 19795 - protein, 39 aa, Artificial Sequence
  Cyclic GFR-binding peptide
  MOD_RES (6)..(7)..(39): Xaa is C or S
STPPTXXVPTRLEPLPIVYYDSANNVVEQLSNDMVVESX

SEQ ID NO: 19796 - protein, 41 aa, Artificial Sequence
  Cyclic GFR-binding peptide
  MOD_RES (6)..(7)..(38)..(40): Xaa is C or S
ASASPXXVPQDLEPLPIVYYVGRTPKVEQLSNMVVKSXKXS

SEQ ID NO: 19797 - protein, 29 aa, Artificial Sequence
  Cyclic GFR-binding peptide
VSQDLNAISILYFIGKTPKILKKYRMIVK

SEQ ID NO: 19798 - protein, 32 aa, Artificial Sequence; identical to SEQ ID NO: 9581
  Cyclic GFR-binding peptide
  MOD_RES (4)..(5): Xaa is C or S

SEQ ID NO: 19799 - protein, 39 aa, Artificial Sequence
  Cyclic GFR-binding peptide
  MOD_RES (4)..(5)..(36)..(38): Xaa is C or S
ASPXXVPQDLEPLPIVYYVGRTPKVEQLSNMVVKSXKXS

SEQ ID NO: 19800 - protein, 39 aa, Artificial Sequence
  Cyclic GFR-binding peptide
  MOD_RES (6)..(7)..(39): Xaa is C or S
YVPKPXXAPTKLSPISVLFIDDSSNVIYKQYENMVVRSX

SEQ ID NO: 19801 - protein, 24 aa, Artificial Sequence
  Cyclic GFR-binding peptide
LSPISILFIIGKTPKIYKQYEMIV

SEQ ID NO: 19802 - protein, 23 aa, Artificial Sequence
  Cyclic GFR-binding peptide
LSPISILFIVGRKPKVYKQYEMI

SEQ ID NO: 19803 - protein, 31 aa, Artificial Sequence
  Cyclic GFR-binding peptide
  MOD_RES (4)..(5): Xaa is C or S
ASPXXVPQDLSPISILFIVGRTPKVYKQYEM

SEQ ID NO: 19804 - protein, 37 aa, Artificial Sequence
  Cyclic GFR-binding peptide
  MOD_RES (3)..(4)..(36): Xaa is C or S
KPXXAPTKLEPLPVVYYDDSSNVIEQLSNNMVVRSXG

SEQ ID NO: 19805 - protein, 37 aa, Artificial Sequence
  Cyclic GFR-binding peptide
  MOD_RES (6)..(7): Xaa is C or S
ASASPXXVSQDLEPLPIVYYIGKTPKIEQLSNMIVKS

SEQ ID NO: 19806 - protein, 31 aa, Artificial Sequence
  Cyclic GFR-binding peptide
  MOD_RES (3)..(4): Xaa is C or S
PTXXVPTRLNAISILYFDSANNVVLKKYRDM

SEQ ID NO: 19807 - protein, 33 aa, Artificial Sequence; identical to SEQ ID NO: 9589
  Cyclic GFR-binding peptide
  MOD_RES (5)..(6): Xaa is C or S

SEQ ID NO: 19808 - protein, 32 aa, Artificial Sequence
  Cyclic GFR-binding peptide
  MOD_RES (1)..(1): Xaa is C or S
XVPTRLEPLTILYYDSANNVVEQLSNDMVVES

SEQ ID NO: 19809 - protein, 39 aa, Artificial Sequence
  Cyclic GFR-binding peptide
  MOD_RES (4)..(5)..(37)..(39): Xaa is C or S
PKAXXVPTELEPLTMLYYDEYDKVVEQLSNEMVVEGXGX

SEQ ID NO: 19810 - protein, 22 aa, Artificial Sequence
  Cyclic GFR-binding peptide
LSPISILFIVGRKPKVYKQYEM

SEQ ID NO: 19811 - protein, 29 aa, Artificial Sequence
  Cyclic GFR-binding peptide
  MOD_RES (3)..(4): Xaa is C or S
APXXVPQALSAISILYLVGRKPKVLKNYQ

SEQ ID NO: 19812 - protein, 33 aa, Artificial Sequence; identical to SEQ ID NO: 9597
  Cyclic GFR-binding peptide
  MOD_RES (31)..(33): Xaa is C or S

SEQ ID NO: 19813 - protein, 33 aa, Artificial Sequence; identical to SEQ ID NO: 9598
  Cyclic GFR-binding peptide
  MOD_RES (31)..(33): Xaa is C or S

SEQ ID NO: 19814 - protein, 31 aa, Artificial Sequence; identical to SEQ ID NO: 9600
  Cyclic GFR-binding peptide
  MOD_RES (31)..(31): Xaa is C or S

SEQ ID NO: 19815 - protein, 31 aa, Artificial Sequence; identical to SEQ ID NO: 9602
  Cyclic GFR-binding peptide
  MOD_RES (2)..(3): Xaa is C or S

SEQ ID NO: 19816 - protein, 37 aa, Artificial Sequence; identical to SEQ ID NO: 9603
  Cyclic GFR-binding peptide
  MOD_RES (5)..(6): Xaa is C or S

SEQ ID NO: 19817 - protein, 33 aa, Artificial Sequence; identical to SEQ ID NO: 9605
  Cyclic GFR-binding peptide
  MOD_RES (1)..(2)..(33): Xaa is C or S

SEQ ID NO: 19818 - protein, 36 aa, Artificial Sequence
  Cyclic GFR-binding peptide
  MOD_RES (6)..(7): Xaa is C or S
ASASPXXVSQDLEPLPIVYYIGKTPKIEQLSNMIVK

SEQ ID NO: 19819 - protein, 28 aa, Artificial Sequence
  Cyclic GFR-binding peptide
QLSAISVLYLDDSSNVILKNYQNMVVRA

SEQ ID NO: 19820 - protein, 26 aa, Artificial Sequence
  Cyclic GFR-binding peptide
TKLEPLTVLYYDDSSNVIEQLSNNMV

SEQ ID NO: 19821 - protein, 32 aa, Artificial Sequence; identical to SEQ ID NO: 9608
  Cyclic GFR-binding peptide
  MOD_RES (7)..(7): Xaa is C or S

SEQ ID NO: 19822 - protein, 42 aa, Artificial Sequence
  Cyclic GFR-binding peptide
  MOD_RES (6)..(7)..(39)..(41): Xaa is C or S
STPPTXXVPTRLSAISILYLDSANNVVLKNYQDMVVESXGXR

SEQ ID NO: 19823 - protein, 33 aa, Artificial Sequence; identical to SEQ ID NO: 9609
  Cyclic GFR-binding peptide
  MOD_RES (1)..(32): Xaa is C or S

SEQ ID NO: 19824 - protein, 32 aa, Artificial Sequence
  Cyclic GFR-binding peptide
  MOD_RES (32)..(32): Xaa is C or S
VPTELSPISMLFIDEYDKVVYKQYEEMVVEGX

SEQ ID NO: 19825 - protein, 38 aa, Artificial Sequence
  Cyclic GFR-binding peptide
  MOD_RES (2)..(3)..(35)..(37): Xaa is C or S
TXXVPTRLSAISILYLDSANNVVLKNYQDMVVESXGXR

SEQ ID NO: 19826 - protein, 39 aa, Artificial Sequence; identical to SEQ ID NO: 9613
  Cyclic GFR-binding peptide
  MOD_RES (6)..(7)..(39): Xaa is C or S

SEQ ID NO: 19827 - protein, 36 aa, Artificial Sequence; identical to SEQ ID NO: 9614
  Cyclic GFR-binding peptide
  MOD_RES (5)..(6): Xaa is C or S

SEQ ID NO: 19828 - protein, 33 aa, Artificial Sequence; identical to SEQ ID NO: 9615
  Cyclic GFR-binding peptide
  MOD_RES (5)..(6): Xaa is C or S

SEQ ID NO: 19829 - protein, 28 aa, Artificial Sequence
  Cyclic GFR-binding peptide
  MOD_RES (27)..(27): Xaa is C or S
LNAISILYFIGKTPKILKKYRMIVKSXK

SEQ ID NO: 19830 - protein, 28 aa, Artificial Sequence
  Cyclic GFR-binding peptide
QLSPISVLFIDDSSNVIYKQYENMVVRA

SEQ ID NO: 19831 - protein, 37 aa, Artificial Sequence; identical to SEQ ID NO: 9619
  Cyclic GFR-binding peptide
  MOD_RES (6)..(7): Xaa is C or S

SEQ ID NO: 19832 - protein, 30 aa, Artificial Sequence
  Cyclic GFR-binding peptide
  MOD_RES (4)..(5): Xaa is C or S
PKAXXVPTELEPLTMLYYDEYDKVVEQLSN

SEQ ID NO: 19833 - protein, 35 aa, Artificial Sequence
  Cyclic GFR-binding peptide
  MOD_RES (1)..(2)..(34): Xaa is C or S
XXAPTKLEPLPVVYYDDSSNVIEQLSNNMVVRSXG

SEQ ID NO: 19834 - protein, 26 aa, Artificial Sequence
  Cyclic GFR-binding peptide
SPISVLFIDDSSNVIYKQYENMVVRS

SEQ ID NO: 19835 - protein, 33 aa, Artificial Sequence
  Cyclic GFR-binding peptide
  MOD_RES (2)..(2): Xaa is C or S
TXAPTKLEPLPVVYYDDSSNVIEQLSNNMVVRS

SEQ ID NO: 19836 - protein, 39 aa, Artificial Sequence; identical to SEQ ID NO: 9625
  Cyclic GFR-binding peptide
  MOD_RES (4)..(5)..(36)..(38): Xaa is C or S

SEQ ID NO: 19837 - protein, 39 aa, Artificial Sequence
  Cyclic GFR-binding peptide
  MOD_RES (6)..(7)..(38): Xaa is C or S
ASAAPXXVPQALEPLTILYYVGRKPKVEQLSNMIVRSXK

SEQ ID NO: 19838 - protein, 31 aa, Artificial Sequence
  Cyclic GFR-binding peptide
  MOD_RES (5)..(6): Xaa is C or S
IPKAXXVPTELEPLTMLYYDEYDKVVEQLSN

SEQ ID NO: 19839 - protein, 29 aa, Artificial Sequence
  Cyclic GFR-binding peptide
  MOD_RES (27)..(29): Xaa is C or S
LNAISILYFVGRKPKVLKKYRMIVRSXKX

SEQ ID NO: 19840 - protein, 28 aa, Artificial Sequence
  Cyclic GFR-binding peptide
TELSPISMLFIDEYDKVVYKQYEEMVVE

SEQ ID NO: 19841 - protein, 34 aa, Artificial Sequence
  Cyclic GFR-binding peptide
  MOD_RES (31)..(33): Xaa is C or S
VPQALSPISILFIVGRKPKVYKQYEMIVRSXKXS

SEQ ID NO: 19842 - protein, 28 aa, Artificial Sequence
  Cyclic GFR-binding peptide
  MOD_RES (26)..(28): Xaa is C or S
NAISILYFVGRTPKVLKKYRMVVKSXKX

SEQ ID NO: 19843 - protein, 33 aa, Artificial Sequence; identical to SEQ ID NO: 9629
  Cyclic GFR-binding peptide
  MOD_RES (31)..(33): Xaa is C or S

SEQ ID NO: 19844 - protein, 27 aa, Artificial Sequence
  Cyclic GFR-binding peptide
  MOD_RES (27)..(27): Xaa is C or S
LSAISILYLIGKTPKILKNYQMIVKSX

SEQ ID NO: 19845 - protein, 22 aa, Artificial Sequence
  Cyclic GFR-binding peptide
ELNAISMLYFDENEKVVLKKYR

SEQ ID NO: 19846 - protein, 29 aa, Artificial Sequence
  Cyclic GFR-binding peptide
  MOD_RES (29)..(29): Xaa is C or S
RLSAISILYLDSANNVVLKNYQDMVVESX

SEQ ID NO: 19847 - protein, 39 aa, Artificial Sequence
  Cyclic GFR-binding peptide
  MOD_RES (3)..(4)..(36)..(38): Xaa is C or S
PTXXVPTRLSAISILYLDSANNVVLKNYQDMVVESXGXR

SEQ ID NO: 19848 - protein, 32 aa, Artificial Sequence; identical to SEQ ID NO: 9632
  Cyclic GFR-binding peptide
  MOD_RES (1)..(1): Xaa is C or S

SEQ ID NO: 19849 - protein, 37 aa, Artificial Sequence; identical to SEQ ID NO: 9633
  Cyclic GFR-binding peptide
  MOD_RES (2)..(3)..(35)..(37): Xaa is C or S

SEQ ID NO: 19850 - protein, 24 aa, Artificial Sequence
  Cyclic GFR-binding peptide
PQDLSPISILFIVGRTPKVYKQYE

SEQ ID NO: 19851 - protein, 30 aa, Artificial Sequence
  Cyclic GFR-binding peptide
  MOD_RES (1)..(1): Xaa is C or S
XAPTQLEPLPVVYYDDSSNVIEQLSNNMVV

SEQ ID NO: 19852 - protein, 26 aa, Artificial Sequence
  Cyclic GFR-binding peptide
LSAISILYLVGRTPKVLKNYQMVVKS

SEQ ID NO: 19853 - protein, 36 aa, Artificial Sequence
  Cyclic GFR-binding peptide
  MOD_RES (2)..(3)..(34)..(36): Xaa is C or S
PXXVPQALEPLTILYYVGRKPKVEQLSNMIVRSXKX

SEQ ID NO: 19854 - protein, 36 aa, Artificial Sequence
  Cyclic GFR-binding peptide
  MOD_RES (6)..(7): Xaa is C or S
ASAAPXXVPQALEPLTILYYVGRKPKVEQLSNMIVR

SEQ ID NO: 19855 - protein, 24 aa, Artificial Sequence
  Cyclic GFR-binding peptide
DLNAISILYFVGRTPKVLKKYRMV

SEQ ID NO: 19856 - protein, 26 aa, Artificial Sequence
  Cyclic GFR-binding peptide
  MOD_RES (1)..(1): Xaa is C or S
XVPQALSAISILYLVGRKPKVLKNYQ

SEQ ID NO: 19857 - protein, 32 aa, Artificial Sequence; identical to SEQ ID NO: 9643
  Cyclic GFR-binding peptide
  MOD_RES (1)..(1): Xaa is C or S

SEQ ID NO: 19858 - protein, 31 aa, Artificial Sequence
  Cyclic GFR-binding peptide
  MOD_RES (29)..(31): Xaa is C or S
ELEPLPMVYYDEYDKVVEQLSNEMVVEGXGX

SEQ ID NO: 19859 - protein, 36 aa, Artificial Sequence; identical to SEQ ID NO: 9644
  Cyclic GFR-binding peptide
  MOD_RES (2)..(3)..(34)..(36): Xaa is C or S

SEQ ID NO: 19860 - protein, 36 aa, Artificial Sequence; identical to SEQ ID NO: 9645
  Cyclic GFR-binding peptide
  MOD_RES (2)..(3)..(34)..(36): Xaa is C or S

SEQ ID NO: 19861 - protein, 28 aa, Artificial Sequence
  Cyclic GFR-binding peptide
  MOD_RES (2)..(3): Xaa is C or S
PXXAPTQLSPISVLFIDDSSNVIYKQYE

SEQ ID NO: 19862 - protein, 27 aa, Artificial Sequence
  Cyclic GFR-binding peptide
PTKLSPISVLFIDDSSNVIYKQYENMV

SEQ ID NO: 19863 - protein, 40 aa, Artificial Sequence; identical to SEQ ID NO: 9647
  Cyclic GFR-binding peptide
  MOD_RES (6)..(7)..(39): Xaa is C or S

SEQ ID NO: 19864 - protein, 36 aa, Artificial Sequence; identical to SEQ ID NO: 9650
  Cyclic GFR-binding peptide
  MOD_RES (6)..(7): Xaa is C or S

SEQ ID NO: 19865 - protein, 38 aa, Artificial Sequence
  Cyclic GFR-binding peptide
  MOD_RES (5)..(6)..(38): Xaa is C or S
VPKPXXAPTQLEPLPVVYYDDSSNVIEQLSNNMVVRAX

SEQ ID NO: 19866 - protein, 30 aa, Artificial Sequence; identical to SEQ ID NO: 9652
  Cyclic GFR-binding peptide
  MOD_RES (1)..(2): Xaa is C or S

SEQ ID NO: 19867 - protein, 27 aa, Artificial Sequence
  Cyclic GFR-binding peptide
PTQLSAISVLYLDDSSNVILKNYQNMV

SEQ ID NO: 19868 - protein, 37 aa, Artificial Sequence
  Cyclic GFR-binding peptide
  MOD_RES (4)..(5)..(37): Xaa is C or S
PPTXXVPTRLEPLTILYYDSANNVVEQLSNDMVVESX

SEQ ID NO: 19869 - protein, 35 aa, Artificial Sequence
  Cyclic GFR-binding peptide
  MOD_RES (3)..(4)..(35): Xaa is C or S
APXXVPQALEPLTILYYVGRKPKVEQLSNMIVRSX

SEQ ID NO: 19870 - protein, 35 aa, Artificial Sequence
  Cyclic GFR-binding peptide
  MOD_RES (4)..(5): Xaa is C or S
PKAXXVPTELSPISMLFIDENEKVVYKQYEDMVVE

SEQ ID NO: 19871 - protein, 30 aa, Artificial Sequence; identical to SEQ ID NO: 9655
  Cyclic GFR-binding peptide

SEQ ID NO: 19872 - protein, 32 aa, Artificial Sequence
  Cyclic GFR-binding peptide
  MOD_RES (1)..(32): Xaa is C or S
XVPQDLEPLPIVYYVGRTPKVEQLSNMVVKSX

SEQ ID NO: 19873 - protein, 34 aa, Artificial Sequence
  Cyclic GFR-binding peptide
  MOD_RES (4)..(5): Xaa is C or S
ASPXXVSQDLEPLPIVYYIGKTPKIEQLSNMIVK

SEQ ID NO: 19874 - protein, 30 aa, Artificial Sequence
  Cyclic GFR-binding peptide
  MOD_RES (1)..(2): Xaa is C or S
XXVPQDLEPLPIVYYVGRTPKVEQLSNMVV

SEQ ID NO: 19875 - protein, 31 aa, Artificial Sequence; identical to SEQ ID NO: 9657
  Cyclic GFR-binding peptide
  MOD_RES (1)..(2): Xaa is C or S

SEQ ID NO: 19876 - protein, 26 aa, Artificial Sequence
  Cyclic GFR-binding peptide
ALSAISILYLVGRKPKVLKNYQMIVR

SEQ ID NO: 19877 - protein, 36 aa, Artificial Sequence
  Cyclic GFR-binding peptide
  MOD_RES (2)..(3)..(34)..(36): Xaa is C or S
PXXVSQDLEPLPIVYYIGKTPKIEQLSNMIVKSXKX

SEQ ID NO: 19878 - protein, 23 aa, Artificial Sequence
  Cyclic GFR-binding peptide
KLSPISVLFIDDSSNVIYKQYEN

SEQ ID NO: 19879 - protein, 31 aa, Artificial Sequence
  Cyclic GFR-binding peptide
  MOD_RES (31)..(31): Xaa is C or S
VSQDLEPLPIVYYIGKTPKIEQLSNMIVKSX

SEQ ID NO: 19880 - protein, 37 aa, Artificial Sequence
  Cyclic GFR-binding peptide
  MOD_RES (2)..(3)..(35)..(37): Xaa is C or S
PXXAPTQLSPISVLFIDDSSNVIYKQYENMVVRAXGX

SEQ ID NO: 19881 - protein, 31 aa, Artificial Sequence
  Cyclic GFR-binding peptide
  MOD_RES (31)..(31): Xaa is C or S
PTQLEPLPVVYYDDSSNVIEQLSNNMVVRAX

SEQ ID NO: 19882 - protein, 30 aa, Artificial Sequence; identical to SEQ ID NO: 9663
  Cyclic GFR-binding peptide
  MOD_RES (3)..(4): Xaa is C or S

SEQ ID NO: 19883 - protein, 40 aa, Artificial Sequence
  Cyclic GFR-binding peptide
  MOD_RES (4)..(5)..(37)..(39): Xaa is C or S
PKPXXAPTQLEPLPVVYYDDSSNVIEQLSNNMVVRAXGXH

SEQ ID NO: 19884 - protein, 20 aa, Artificial Sequence
  Cyclic GFR-binding peptide
SAISILYLIGKTPKILKNYQ

SEQ ID NO: 19885 - protein, 26 aa, Artificial Sequence
  Cyclic GFR-binding peptide
SPISVLFIDDSSNVIYKQYENMVVRA

SEQ ID NO: 19886 - protein, 33 aa, Artificial Sequence
  Cyclic GFR-binding peptide
  MOD_RES (31)..(33): Xaa is C or S
PTQLSPISVLFIDDSSNVIYKQYENMVVRAXGX

SEQ ID NO: 19887 - protein, 41 aa, Artificial Sequence
  Cyclic GFR-binding peptide
  MOD_RES (5)..(6)..(38)..(40): Xaa is C or S
VPKPXXAPTQLEPLTVLYYDDSSNVIEQLSNNMVVRAXGXH

SEQ ID NO: 19888 - protein, 41 aa, Artificial Sequence; identical to SEQ ID NO: 9668
  Cyclic GFR-binding peptide
  MOD_RES (6)..(7)..(39)..(41): Xaa is C or S

SEQ ID NO: 19889 - protein, 32 aa, Artificial Sequence
  Cyclic GFR-binding peptide
  MOD_RES (2)..(3): Xaa is C or S
AXXVPTELSPISMLFIDEYDKVVYKQYEEMVV

SEQ ID NO: 19890 - protein, 29 aa, Artificial Sequence
  Cyclic GFR-binding peptide
  MOD_RES (29)..(29): Xaa is C or S
KLSPISVLFIDDSSNVIYKQYENMVVRSX

SEQ ID NO: 19891 - protein, 37 aa, Artificial Sequence; identical to SEQ ID NO: 9673
  Cyclic GFR-binding peptide
  MOD_RES (5)..(6)..(37): Xaa is C or S

SEQ ID NO: 19892 - protein, 37 aa, Artificial Sequence; identical to SEQ ID NO: 9674
  Cyclic GFR-binding peptide
  MOD_RES (2)..(3)..(34)..(36): Xaa is C or S

SEQ ID NO: 19893 - protein, 31 aa, Artificial Sequence; identical to SEQ ID NO: 9675
  Cyclic GFR-binding peptide
  MOD_RES (1)..(1): Xaa is C or S

SEQ ID NO: 19894 - protein, 30 aa, Artificial Sequence
  Cyclic GFR-binding peptide
  MOD_RES (1)..(2): Xaa is C or S
XXVPTRLEPLPIVYYDSANNVVEQLSNDMV

SEQ ID NO: 19895 - protein, 35 aa, Artificial Sequence
  Cyclic GFR-binding peptide
  MOD_RES (3)..(4): Xaa is C or S
KPXXAPTKLSPISVLFIDDSSNVIYKQYENMVVRS

SEQ ID NO: 19896 - protein, 21 aa, Artificial Sequence
  Cyclic GFR-binding peptide
EPLPMVYYDEYDKVVEQLSNE

SEQ ID NO: 19897 - protein, 29 aa, Artificial Sequence
  Cyclic GFR-binding peptide
  MOD_RES (1)..(2): Xaa is C or S
XXVSQDLSAISILYLIGKTPKILKNYQMI

SEQ ID NO: 19898 - protein, 28 aa, Artificial Sequence
  Cyclic GFR-binding peptide
  MOD_RES (1)..(1): Xaa is C or S
XVPQALEPLTILYYVGRKPKVEQLSNMI

SEQ ID NO: 19899 - protein, 39 aa, Artificial Sequence; identical to SEQ ID NO: 9678
  Cyclic GFR-binding peptide
  MOD_RES (3)..(4)..(36)..(38): Xaa is C or S

SEQ ID NO: 19900 - protein, 40 aa, Artificial Sequence
  Cyclic GFR-binding peptide
  MOD_RES (4)..(5)..(37)..(39): Xaa is C or S
PKPXXAPTKLEPLPVVYYDDSSNVIEQLSNNMVVRSXGXH

SEQ ID NO: 19901 - protein, 34 aa, Artificial Sequence; identical to SEQ ID NO: 9680
  Cyclic GFR-binding peptide
  MOD_RES (1)..(33): Xaa is C or S

SEQ ID NO: 19902 - protein, 38 aa, Artificial Sequence
  Cyclic GFR-binding peptide
  MOD_RES (2)..(3)..(35)..(37): Xaa is C or S
AXXVPTELSPISMLFIDENEKVVYKQYEDMVVEGXGXR

SEQ ID NO: 19903 - protein, 29 aa, Artificial Sequence
  Cyclic GFR-binding peptide
  MOD_RES (3)..(4): Xaa is C or S
KAXXVPTELEPLTMLYYDEYDKVVEQLSN

SEQ ID NO: 19904 - protein, 24 aa, Artificial Sequence
  Cyclic GFR-binding peptide
PTELNAISMLYFDEYDKVVLKKYR

SEQ ID NO: 19905 - protein, 36 aa, Artificial Sequence
  Cyclic GFR-binding peptide
  MOD_RES (3)..(4)..(36): Xaa is C or S
KAXXVPTELSPISMLFIDEYDKVVYKQYEEMVVEGX

SEQ ID NO: 19906 - protein, 37 aa, Artificial Sequence; identical to SEQ ID NO: 9687
  Cyclic GFR-binding peptide
  MOD_RES (3)..(4)..(35)..(37): Xaa is C or S

SEQ ID NO: 19907 - protein, 34 aa, Artificial Sequence
  Cyclic GFR-binding peptide
  MOD_RES (6)..(7): Xaa is C or S
SIPKAXXVPTELEPLPMVYYDEYDKVVEQLSNEM

SEQ ID NO: 19908 - protein, 27 aa, Artificial Sequence
  Cyclic GFR-binding peptide
  MOD_RES (27)..(27): Xaa is C or S
SAISVLYLDDSSNVILKNYQNMVVRSX

SEQ ID NO: 19909 - protein, 40 aa, Artificial Sequence
  Cyclic GFR-binding peptide
  MOD_RES (4)..(5)..(37)..(39): Xaa is C or S
PKAXXVPTELSPISMLFIDEYDKVVYKQYEEMVVEGXGXR

SEQ ID NO: 19910 - protein, 33 aa, Artificial Sequence; identical to SEQ ID NO: 9691
  Cyclic GFR-binding peptide
  MOD_RES (5)..(6): Xaa is C or S

SEQ ID NO: 19911 - protein, 27 aa, Artificial Sequence
  Cyclic GFR-binding peptide
  MOD_RES (27)..(27): Xaa is C or S
LSAISILYLVGRKPKVLKNYQMIVRSX

SEQ ID NO: 19912 - protein, 35 aa, Artificial Sequence
  Cyclic GFR-binding peptide
  MOD_RES (1)..(2)..(34): Xaa is C or S
XXAPTQLEPLPVVYYDDSSNVIEQLSNNMVVRAXG

SEQ ID NO: 19913 - protein, 29 aa, Artificial Sequence
  Cyclic GFR-binding peptide
  MOD_RES (28)..(28): Xaa is C or S
LEPLTILYYDSANNVVEQLSNDMVVESXG

SEQ ID NO: 19914 - protein, 33 aa, Artificial Sequence; identical to SEQ ID NO: 9695
  Cyclic GFR-binding peptide
  MOD_RES (6)..(7): Xaa is C or S

SEQ ID NO: 19915 - protein, 25 aa, Artificial Sequence
  Cyclic GFR-binding peptide
SPISMLFIDEYDKVVYKQYEEMVVE

SEQ ID NO: 19916 - protein, 30 aa, Artificial Sequence; identical to SEQ ID NO: 9696
  Cyclic GFR-binding peptide
  MOD_RES (1)..(1): Xaa is C or S

SEQ ID NO: 19917 - protein, 39 aa, Artificial Sequence
  Cyclic GFR-binding peptide
  MOD_RES (4)..(5)..(37)..(39): Xaa is C or S
PKAXXVPTELSPISMLFIDENEKVVYKQYEDMVVEGXGX

SEQ ID NO: 19918 - protein, 28 aa, Artificial Sequence
  Cyclic GFR-binding peptide
  MOD_RES (1)..(1): Xaa is C or S
XVPTELEPLPMVYYDENEKVVEQLSNDM

SEQ ID NO: 19919 - protein, 32 aa, Artificial Sequence
  Cyclic GFR-binding peptide
  MOD_RES (30)..(32): Xaa is C or S
TKLEPLPVVYYDDSSNVIEQLSNNMVVRSXGX

SEQ ID NO: 19920 - protein, 37 aa, Artificial Sequence
  Cyclic GFR-binding peptide
  MOD_RES (5)..(6): Xaa is C or S
TPPTXXVPTRLEPLPIVYYDSANNVVEQLSNDMVVES

SEQ ID NO: 19921 - protein, 24 aa, Artificial Sequence
  Cyclic GFR-binding peptide
SAISILYLIGKTPKILKNYQMIVK

SEQ ID NO: 19922 - protein, 29 aa, Artificial Sequence
  Cyclic GFR-binding peptide
  MOD_RES (1)..(2): Xaa is C or S
XXVPQDLSAISILYLVGRTPKVLKNYQMV

SEQ ID NO: 19923 - protein, 29 aa, Artificial Sequence
  Cyclic GFR-binding peptide
  MOD_RES (1)..(2): Xaa is C or S
XXVPTRLEPLTILYYDSANNVVEQLSNDM

SEQ ID NO: 19924 - protein, 28 aa, Artificial Sequence
  Cyclic GFR-binding peptide
PTQLSPISVLFIDDSSNVIYKQYENMVV

SEQ ID NO: 19925 - protein, 25 aa, Artificial Sequence
  Cyclic GFR-binding peptide
DLSPISILFIIGKTPKIYKQYEMIV

SEQ ID NO: 19926 - protein, 27 aa, Artificial Sequence
  Cyclic GFR-binding peptide
APTKLEPLPVVYYDDSSNVIEQLSNNM

SEQ ID NO: 19927 - protein, 29 aa, Artificial Sequence
  Cyclic GFR-binding peptide
  MOD_RES (28)..(28): Xaa is C or S
LSPISVLFIDDSSNVIYKQYENMVVRAXG

SEQ ID NO: 19928 - protein, 32 aa, Artificial Sequence
  Cyclic GFR-binding peptide
  MOD_RES (1)..(2): Xaa is C or S
XXVPTELEPLPMVYYDEYDKVVEQLSNEMVVE

SEQ ID NO: 19929 - protein, 33 aa, Artificial Sequence; identical to SEQ ID NO: 9707
  Cyclic GFR-binding peptide
  MOD_RES (30)..(32): Xaa is C or S

SEQ ID NO: 19930 - protein, 32 aa, Artificial Sequence
  Cyclic GFR-binding peptide
  MOD_RES (31)..(31): Xaa is C or S
VPQALEPLTILYYVGRKPKVEQLSNMIVRSXK

SEQ ID NO: 19931 - protein, 36 aa, Artificial Sequence
  Cyclic GFR-binding peptide
  MOD_RES (2)..(3)..(34)..(36): Xaa is C or S
PXXVPQDLSPISILFIVGRTPKVYKQYEMVVKSXKX

SEQ ID NO: 19932 - protein, 29 aa, Artificial Sequence
  Cyclic GFR-binding peptide
  MOD_RES (26)..(28): Xaa is C or S
SPISILFIIGKTPKIYKQYEMIVKSXKXS

SEQ ID NO: 19933 - protein, 32 aa, Artificial Sequence; identical to SEQ ID NO: 9710
  Cyclic GFR-binding peptide
  MOD_RES (30)..(32): Xaa is C or S

SEQ ID NO: 19934 - protein, 29 aa, Artificial Sequence
  Cyclic GFR-binding peptide
PQDLNAISILYFVGRTPKVLKKYRMVVKS

SEQ ID NO: 19935 - protein, 39 aa, Artificial Sequence
  Cyclic GFR-binding peptide
  MOD_RES (6)..(7)..(39): Xaa is C or S
TVPKPXXAPTQLEPLPVVYYDDSSNVIEQLSNNMVVRAX

SEQ ID NO: 19936 - protein, 27 aa, Artificial Sequence
  Cyclic GFR-binding peptide
  MOD_RES (1)..(2): Xaa is C or S
XXAPTQLEPLPVVYYDDSSNVIEQLSN

SEQ ID NO: 19937 - protein, 40 aa, Artificial Sequence
  Cyclic GFR-binding peptide
  MOD_RES (5)..(6)..(37)..(39): Xaa is C or S
SASPXXVSQDLSPISILFIIGKTPKIYKQYEMIVKSXKXS

SEQ ID NO: 19938 - protein, 34 aa, Artificial Sequence; identical to SEQ ID NO: 9714
  Cyclic GFR-binding peptide
  MOD_RES (1)..(32)..(34): Xaa is C or S

SEQ ID NO: 19939 - protein, 39 aa, Artificial Sequence
  Cyclic GFR-binding peptide
  MOD_RES (4)..(5)..(36)..(38): Xaa is C or S
ASPXXVPQDLSPISILFIVGRTPKVYKQYEMVVKSXKXS

SEQ ID NO: 19940 - protein, 39 aa, Artificial Sequence; identical to SEQ ID NO: 9716
  Cyclic GFR-binding peptide
  MOD_RES (6)..(7)..(38): Xaa is C or S

SEQ ID NO: 19941 - protein, 32 aa, Artificial Sequence; identical to SEQ ID NO: 9720
  Cyclic GFR-binding peptide
  MOD_RES (3)..(4): Xaa is C or S

SEQ ID NO: 19942 - protein, 30 aa, Artificial Sequence
  Cyclic GFR-binding peptide
VPTRLEPLPIVYYDSANNVVEQLSNDMVVE

SEQ ID NO: 19943 - protein, 35 aa, Artificial Sequence
  Cyclic GFR-binding peptide
  MOD_RES (6)..(7): Xaa is C or S
ASAAPXXVPQALEPLTILYYVGRKPKVEQLSNMIV

SEQ ID NO: 19944 - protein, 29 aa, Artificial Sequence
  Cyclic GFR-binding peptide
  MOD_RES (1)..(2): Xaa is C or S
XXVSQDLEPLPIVYYIGKTPKIEQLSNMI

SEQ ID NO: 19945 - protein, 30 aa, Artificial Sequence; identical to SEQ ID NO: 9735
  Cyclic GFR-binding peptide
  MOD_RES (1)..(1): Xaa is C or S

SEQ ID NO: 19946 - protein, 37 aa, Artificial Sequence
  Cyclic GFR-binding peptide
  MOD_RES (6)..(7): Xaa is C or S
STPPTXXVPTRLEPLTILYYDSANNVVEQLSNDMVVE

SEQ ID NO: 19947 - protein, 30 aa, Artificial Sequence; identical to SEQ ID NO: 9738
  Cyclic GFR-binding peptide
  MOD_RES (2)..(3): Xaa is C or S

SEQ ID NO: 19948 - protein, 27 aa, Artificial Sequence
  Cyclic GFR-binding peptide
ALSAISILYLVGRKPKVLKNYQMIVRS

SEQ ID NO: 19949 - protein, 25 aa, Artificial Sequence
  Cyclic GFR-binding peptide
RLEPLPIVYYDSANNVVEQLSNDMV

SEQ ID NO: 19950 - protein, 35 aa, Artificial Sequence
  Cyclic GFR-binding peptide
  MOD_RES (6)..(7): Xaa is C or S
STPPTXXVPTRLSAISILYLDSANNVVLKNYQDMV

SEQ ID NO: 19951 - protein, 27 aa, Artificial Sequence
  Cyclic GFR-binding peptide
  MOD_RES (27)..(27): Xaa is C or S
EPLPMVYYDENEKVVEQLSNDMVVEGX

SEQ ID NO: 19952 - protein, 32 aa, Artificial Sequence
  Cyclic GFR-binding peptide
  MOD_RES (3)..(4): Xaa is C or S
KPXXAPTKLEPLPVVYYDDSSNVIEQLSNNMV

SEQ ID NO: 19953 - protein, 21 aa, Artificial Sequence
  Cyclic GFR-binding peptide
NAISMLYFDEYDKVVLKKYRE

SEQ ID NO: 19954 - protein, 25 aa, Artificial Sequence
  Cyclic GFR-binding peptide
SQDLSAISILYLIGKTPKILKNYQM

SEQ ID NO: 19955 - protein, 33 aa, Artificial Sequence; identical to SEQ ID NO: 9746
  Cyclic GFR-binding peptide
  MOD_RES (4)..(5): Xaa is C or S

SEQ ID NO: 19956 - protein, 36 aa, Artificial Sequence; identical to SEQ ID NO: 9748
  Cyclic GFR-binding peptide
  MOD_RES (3)..(4)..(36): Xaa is C or S

SEQ ID NO: 19957 - protein, 38 aa, Artificial Sequence
  Cyclic GFR-binding peptide
  MOD_RES (2)..(3)..(35)..(37): Xaa is C or S
TXXVPTRLEPLTILYYDSANNVVEQLSNDMVVESXGXR

SEQ ID NO: 19958 - protein, 23 aa, Artificial Sequence
  Cyclic GFR-binding peptide
SAISILYLIGKTPKILKNYQMIV

SEQ ID NO: 19959 - protein, 35 aa, Artificial Sequence
  Cyclic GFR-binding peptide
  MOD_RES (2)..(3)..(35): Xaa is C or S
TXXVPTRLEPLTILYYDSANNVVEQLSNDMVVESX

SEQ ID NO: 19960 - protein, 34 aa, Artificial Sequence
  Cyclic GFR-binding peptide
  MOD_RES (1)..(33): Xaa is C or S
XVPTRLSAISILYLDSANNVVLKNYQDMVVESXG

SEQ ID NO: 19961 - protein, 21 aa, Artificial Sequence
  Cyclic GFR-binding peptide
LNAISMLYFDENEKVVLKKYR

SEQ ID NO: 19962 - protein, 29 aa, Artificial Sequence
  Cyclic GFR-binding peptide
  MOD_RES (2)..(3): Xaa is C or S
PXXVPQALSAISILYLVGRKPKVLKNYQM

SEQ ID NO: 19963 - protein, 34 aa, Artificial Sequence
  Cyclic GFR-binding peptide
  MOD_RES (2)..(3): Xaa is C or S
AXXVPTELEPLPMVYYDENEKVVEQLSNDMVVEG

SEQ ID NO: 19964 - protein, 37 aa, Artificial Sequence
  Cyclic GFR-binding peptide
  MOD_RES (1)..(2)..(34)..(36): Xaa is C or S
XXVPTRLEPLPIVYYDSANNVVEQLSNDMVVESXGXR

SEQ ID NO: 19965 - protein, 28 aa, Artificial Sequence
  Cyclic GFR-binding peptide
  MOD_RES (2)..(3): Xaa is C or S
AXXVPTELNAISMLYFDEYDKVVLKKYR

SEQ ID NO: 19966 - protein, 35 aa, Artificial Sequence; identical to SEQ ID NO: 9760
  Cyclic GFR-binding peptide
  MOD_RES (5)..(6): Xaa is C or S

SEQ ID NO: 19967 - protein, 27 aa, Artificial Sequence
  Cyclic GFR-binding peptide
  MOD_RES (1)..(1): Xaa is C or S
XVPTELNAISMLYFDEYDKVVLKKYRE

SEQ ID NO: 19968 - protein, 29 aa, Artificial Sequence
  Cyclic GFR-binding peptide
  MOD_RES (3)..(4): Xaa is C or S
PTXXVPTRLNAISILYFDSANNVVLKKYR

SEQ ID NO: 19969 - protein, 35 aa, Artificial Sequence; identical to SEQ ID NO: 9768
  Cyclic GFR-binding peptide
  MOD_RES (3)..(35): Xaa is C or S

SEQ ID NO: 19970 - protein, 32 aa, Artificial Sequence
  Cyclic GFR-binding peptide
  MOD_RES (4)..(4): Xaa is C or S
KPTXAPTKLEPLPVVYYDDSSNVIEQLSNNMV

SEQ ID NO: 19971 - protein, 26 aa, Artificial Sequence
  Cyclic GFR-binding peptide
QDLSAISILYLIGKTPKILKNYQMIV

SEQ ID NO: 19972 - protein, 33 aa, Artificial Sequence; identical to SEQ ID NO: 9770
  Cyclic GFR-binding peptide
  MOD_RES (6)..(7): Xaa is C or S

SEQ ID NO: 19973 - protein, 30 aa, Artificial Sequence
  Cyclic GFR-binding peptide
APTQLEPLPVVYYDDSSNVIEQLSNNMVVR

SEQ ID NO: 19974 - protein, 31 aa, Artificial Sequence
  Cyclic GFR-binding peptide
  MOD_RES (31)..(31): Xaa is C or S
VPQALEPLTILYYVGRKPKVEQLSNMIVRSX

SEQ ID NO: 19975 - protein, 35 aa, Artificial Sequence; identical to SEQ ID NO: 9775
  Cyclic GFR-binding peptide
  MOD_RES (3)..(4)..(35): Xaa is C or S

SEQ ID NO: 19976 - protein, 35 aa, Artificial Sequence
  Cyclic GFR-binding peptide
  MOD_RES (1)..(2)..(34): Xaa is C or S
XXVPTELEPLTMLYYDENEKVVEQLSNDMVVEGXG

SEQ ID NO: 19977 - protein, 35 aa, Artificial Sequence
  Cyclic GFR-binding peptide
  MOD_RES (1)..(2)..(34): Xaa is C or S
XXVPTRLNAISILYFDSANNVVLKKYRDMVVESXG

SEQ ID NO: 19978 - protein, 29 aa, Artificial Sequence
  Cyclic GFR-binding peptide
  MOD_RES (1)..(2): Xaa is C or S
XXVPTELEPLPMVYYDENEKVVEQLSNDM

SEQ ID NO: 19979 - protein, 39 aa, Artificial Sequence
  Cyclic GFR-binding peptide
  MOD_RES (7)..(39): Xaa is C or S
HVTKPTXAPTKLEPLTVLYYDDSSNVIEQLSNNMVVRSX

SEQ ID NO: 19980 - protein, 32 aa, Artificial Sequence
  Cyclic GFR-binding peptide
  MOD_RES (31)..(31): Xaa is C or S
PTRLNAISILYFDSANNVVLKKYRDMVVESXG

SEQ ID NO: 19981 - protein, 22 aa, Artificial Sequence
  Cyclic GFR-binding peptide
SPISILFIIGKTPKIYKQYEMI

SEQ ID NO: 19982 - protein, 33 aa, Artificial Sequence; identical to SEQ ID NO: 9777
  Cyclic GFR-binding peptide
  MOD_RES (1)..(2)..(33): Xaa is C or S

SEQ ID NO: 19983 - protein, 34 aa, Artificial Sequence
  Cyclic GFR-binding peptide
  MOD_RES (1)..(2)..(33): Xaa is C or S
XXVSQDLSPISILFIIGKTPKIYKQYEMIVKSXK

SEQ ID NO: 19984 - protein, 26 aa, Artificial Sequence
  Cyclic GFR-binding peptide
APTKLSAISVLYLDDSSNVILKNYQN

SEQ ID NO: 19985 - protein, 32 aa, Artificial Sequence
  Cyclic GFR-binding peptide
  MOD_RES (31)..(31): Xaa is C or S
PTELEPLTMLYYDENEKVVEQLSNDMVVEGXG

SEQ ID NO: 19986 - protein, 32 aa, Artificial Sequence
  Cyclic GFR-binding peptide
  MOD_RES (32)..(32): Xaa is C or S
VPTELEPLPMVYYDEYDKVVEQLSNEMVVEGX

SEQ ID NO: 19987 - protein, 28 aa, Artificial Sequence
  Cyclic GFR-binding peptide
  MOD_RES (1)..(1): Xaa is C or S
XVPQDLSAISILYLVGRTPKVLKNYQMV

SEQ ID NO: 19988 - protein, 31 aa, Artificial Sequence; identical to SEQ ID NO: 9783
  Cyclic GFR-binding peptide
  MOD_RES (5)..(6): Xaa is C or S

SEQ ID NO: 19989 - protein, 31 aa, Artificial Sequence
  Cyclic GFR-binding peptide
  MOD_RES (4)..(4): Xaa is C or S
KPTXAPTKLEPLTVLYYDDSSNVIEQLSNNM

SEQ ID NO: 19990 - protein, 27 aa, Artificial Sequence
  Cyclic GFR-binding peptide
  MOD_RES (1)..(1): Xaa is C or S
XVSQDLSPISILFIIGKTPKIYKQYEM

SEQ ID NO: 19991 - protein, 34 aa, Artificial Sequence
  Cyclic GFR-binding peptide
  MOD_RES (1)..(2)..(34): Xaa is C or S
XXAPTQLSPISVLFIDDSSNVIYKQYENMVVRAX

SEQ ID NO: 19992 - protein, 30 aa, Artificial Sequence; identical to SEQ ID NO: 9787
  Cyclic GFR-binding peptide
  MOD_RES (29)..(29): Xaa is C or S

SEQ ID NO: 19993 - protein, 22 aa, Artificial Sequence
  Cyclic GFR-binding peptide
RLEPLPIVYYDSANNVVEQLSN

SEQ ID NO: 19994 - protein, 31 aa, Artificial Sequence; identical to SEQ ID NO: 9793
  Cyclic GFR-binding peptide
  MOD_RES (2)..(3): Xaa is C or S

SEQ ID NO: 19995 - protein, 34 aa, Artificial Sequence
  Cyclic GFR-binding peptide
  MOD_RES (6)..(7): Xaa is C or S
KIPKAXXVPTELEPLTMLYYDENEKVVEQLSNDM

SEQ ID NO: 19996 - protein, 27 aa, Artificial Sequence
  Cyclic GFR-binding peptide
  MOD_RES (27)..(27): Xaa is C or S
SAISVLYLDDSSNVILKNYQNMVVRAX

SEQ ID NO: 19997 - protein, 30 aa, Artificial Sequence; identical to SEQ ID NO: 9797
  Cyclic GFR-binding peptide
  MOD_RES (4)..(5): Xaa is C or S

SEQ ID NO: 19998 - protein, 37 aa, Artificial Sequence
  Cyclic GFR-binding peptide
  MOD_RES (2)..(3)..(35)..(37): Xaa is C or S
PXXAPTKLEPLPVVYYDDSSNVIEQLSNNMVVRSXGX

SEQ ID NO: 19999 - protein, 22 aa, Artificial Sequence
  Cyclic GFR-binding peptide
ELSPISMLFIDEYDKVVYKQYE

SEQ ID NO: 20000 - protein, 36 aa, Artificial Sequence; identical to SEQ ID NO: 9799
  Cyclic GFR-binding peptide
  MOD_RES (6)..(7): Xaa is C or S

SEQ ID NO: 20001 - protein, 34 aa, Artificial Sequence
  Cyclic GFR-binding peptide
  MOD_RES (2)..(34): Xaa is C or S
TXAPTKLSPISVLFIDDSSNVIYKQYENMVVRSX

SEQ ID NO: 20002 - protein, 26 aa, Artificial Sequence
  Cyclic GFR-binding peptide
KLSAISVLYLDDSSNVILKNYQNMVV

SEQ ID NO: 20003 - protein, 32 aa, Artificial Sequence
  Cyclic GFR-binding peptide
  MOD_RES (3)..(4): Xaa is C or S
KPXXAPTQLEPLTVLYYDDSSNVIEQLSNNMV

SEQ ID NO: 20004 - protein, 34 aa, Artificial Sequence
  Cyclic GFR-binding peptide
  MOD_RES (5)..(6): Xaa is C or S
VPKPXXAPTQLSPISVLFIDDSSNVIYKQYENMV

SEQ ID NO: 20005 - protein, 31 aa, Artificial Sequence
  Cyclic GFR-binding peptide
  MOD_RES (28)..(30): Xaa is C or S
LEPLTVLYYDDSSNVIEQLSNNMVVRSXGXH

SEQ ID NO: 20006 - protein, 38 aa, Artificial Sequence; identical to SEQ ID NO: 9803
  Cyclic GFR-binding peptide
  MOD_RES (3)..(4)..(35)..(37): Xaa is C or S

SEQ ID NO: 20007 - protein, 29 aa, Artificial Sequence
  Cyclic GFR-binding peptide
  MOD_RES (29)..(29): Xaa is C or S
QALEPLTILYYVGRKPKVEQLSNMIVRSX

SEQ ID NO: 20008 - protein, 27 aa, Artificial Sequence
  Cyclic GFR-binding peptide
APTQLEPLTVLYYDDSSNVIEQLSNNM

SEQ ID NO: 20009 - protein, 32 aa, Artificial Sequence
  Cyclic GFR-binding peptide
  MOD_RES (30)..(32): Xaa is C or S
TKLSPISVLFIDDSSNVIYKQYENMVVRSXGX

SEQ ID NO: 20010 - protein, 26 aa, Artificial Sequence
  Cyclic GFR-binding peptide
KLEPLPVVYYDDSSNVIEQLSNNMVV

SEQ ID NO: 20011 - protein, 32 aa, Artificial Sequence
  Cyclic GFR-binding peptide
  MOD_RES (1)..(2): Xaa is C or S
XXVPTRLEPLTILYYDSANNVVEQLSNDMVVE

SEQ ID NO: 20012 - protein, 31 aa, Artificial Sequence
  Cyclic GFR-binding peptide
  MOD_RES (5)..(6): Xaa is C or S
TPPTXXVPTRLNAISILYFDSANNVVLKKYR

SEQ ID NO: 20013 - protein, 30 aa, Artificial Sequence
  Cyclic GFR-binding peptide
  MOD_RES (4)..(5): Xaa is C or S
ASPXXVPQDLEPLPIVYYVGRTPKVEQLSN

SEQ ID NO: 20014 - protein, 38 aa, Artificial Sequence
  Cyclic GFR-binding peptide
  MOD_RES (3)..(4)..(36)..(38): Xaa is C or S
KAXXVPTELEPLTMLYYDENEKVVEQLSNDMVVEGXGX

SEQ ID NO: 20015 - protein, 38 aa, Artificial Sequence; identical to SEQ ID NO: 9809
  Cyclic GFR-binding peptide
  MOD_RES (5)..(6)..(37): Xaa is C or S

SEQ ID NO: 20016 - protein, 39 aa, Artificial Sequence
  Cyclic GFR-binding peptide
  MOD_RES (4)..(5)..(37)..(39): Xaa is C or S
PPTXXVPTRLNAISILYFDSANNVVLKKYRDMVVESXGX

SEQ ID NO: 20017 - protein, 31 aa, Artificial Sequence; identical to SEQ ID NO: 9815
  Cyclic GFR-binding peptide
  MOD_RES (2)..(3): Xaa is C or S

SEQ ID NO: 20018 - protein, 26 aa, Artificial Sequence
  Cyclic GFR-binding peptide
VSQDLEPLPIVYYIGKTPKIEQLSNM

SEQ ID NO: 20019 - protein, 32 aa, Artificial Sequence
  Cyclic GFR-binding peptide
  MOD_RES (1)..(1): Xaa is C or S
XAPTKLEPLTVLYYDDSSNVIEQLSNNMVVRS

SEQ ID NO: 20020 - protein, 40 aa, Artificial Sequence
  Cyclic GFR-binding peptide
  MOD_RES (6)..(7)..(39): Xaa is C or S
YVPKPXXAPTKLSPISVLFIDDSSNVIYKQYENMVVRSXG

SEQ ID NO: 20021 - protein, 30 aa, Artificial Sequence; identical to SEQ ID NO: 9820
  Cyclic GFR-binding peptide
  MOD_RES (2)..(3): Xaa is C or S

SEQ ID NO: 20022 - protein, 26 aa, Artificial Sequence
  Cyclic GFR-binding peptide
QLEPLPVVYYDDSSNVIEQLSNNMVV

SEQ ID NO: 20023 - protein, 35 aa, Artificial Sequence; identical to SEQ ID NO: 9821
  Cyclic GFR-binding peptide
  MOD_RES (1)..(2)..(34): Xaa is C or S

SEQ ID NO: 20024 - protein, 31 aa, Artificial Sequence; identical to SEQ ID NO: 9825
  Cyclic GFR-binding peptide
  MOD_RES (1)..(2): Xaa is C or S

SEQ ID NO: 20025 - protein, 31 aa, Artificial Sequence; identical to SEQ ID NO: 9827
  Cyclic GFR-binding peptide
  MOD_RES (3)..(4): Xaa is C or S

SEQ ID NO: 20026 - protein, 35 aa, Artificial Sequence
  Cyclic GFR-binding peptide
  MOD_RES (5)..(6): Xaa is C or S
SAAPXXVPQALSPISILFIVGRKPKVYKQYEMIVR

SEQ ID NO: 20027 - protein, 31 aa, Artificial Sequence
  Cyclic GFR-binding peptide
  MOD_RES (31)..(31): Xaa is C or S
PTELSPISMLFIDENEKVVYKQYEDMVVEGX

SEQ ID NO: 20028 - protein, 37 aa, Artificial Sequence; identical to SEQ ID NO: 9835
  Cyclic GFR-binding peptide
  MOD_RES (3)..(4)..(35)..(37): Xaa is C or S

SEQ ID NO: 20029 - protein, 32 aa, Artificial Sequence
  Cyclic GFR-binding peptide
  MOD_RES (29)..(31): Xaa is C or S
QLEPLTVLYYDDSSNVIEQLSNNMVVRAXGXH

SEQ ID NO: 20030 - protein, 31 aa, Artificial Sequence; identical to SEQ ID NO: 9836
  Cyclic GFR-binding peptide
  MOD_RES (30)..(30): Xaa is C or S

SEQ ID NO: 20031 - protein, 27 aa, Artificial Sequence
  Cyclic GFR-binding peptide
  MOD_RES (1)..(2): Xaa is C or S
XXVPTELNAISMLYFDEYDKVVLKKYR

SEQ ID NO: 20032 - protein, 33 aa, Artificial Sequence
  Cyclic GFR-binding peptide
  MOD_RES (2)..(3): Xaa is C or S
PXXVPQDLEPLPIVYYVGRTPKVEQLSNMVVKS

SEQ ID NO: 20033 - protein, 31 aa, Artificial Sequence
  Cyclic GFR-binding peptide
  MOD_RES (4)..(5): Xaa is C or S
PKPXXAPTQLEPLTVLYYDDSSNVIEQLSNN

SEQ ID NO: 20034 - protein, 26 aa, Artificial Sequence
  Cyclic GFR-binding peptide
QALSPISILFIVGRKPKVYKQYEMIV

SEQ ID NO: 20035 - protein, 24 aa, Artificial Sequence
  Cyclic GFR-binding peptide
SAISILYLVGRKPKVLKNYQMIVR

SEQ ID NO: 20036 - protein, 29 aa, Artificial Sequence
  Cyclic GFR-binding peptide
  MOD_RES (26)..(28): Xaa is C or S
SAISILYLIGKTPKILKNYQMIVKSXKXS

SEQ ID NO: 20037 - protein, 37 aa, Artificial Sequence
  Cyclic GFR-binding peptide
  MOD_RES (2)..(3)..(35)..(37): Xaa is C or S
PXXAPTQLEPLPVVYYDDSSNVIEQLSNNMVVRAXGX

SEQ ID NO: 20038 - protein, 28 aa, Artificial Sequence
  Cyclic GFR-binding peptide
  MOD_RES (1)..(2): Xaa is C or S
XXAPTKLEPLTVLYYDDSSNVIEQLSNN

SEQ ID NO: 20039 - protein, 39 aa, Artificial Sequence
  Cyclic GFR-binding peptide
  MOD_RES (5)..(6)..(38): Xaa is C or S
TPPTXXVPTRLEPLTILYYDSANNVVEQLSNDMVVESXG

SEQ ID NO: 20040 - protein, 31 aa, Artificial Sequence
  Cyclic GFR-binding peptide
  MOD_RES (2)..(3): Xaa is C or S
PXXAPTQLEPLTVLYYDDSSNVIEQLSNNMV

SEQ ID NO: 20041 - protein, 33 aa, Artificial Sequence; identical to SEQ ID NO: 9848
  Cyclic GFR-binding peptide
  MOD_RES (5)..(5): Xaa is C or S

SEQ ID NO: 20042 - protein, 29 aa, Artificial Sequence
  Cyclic GFR-binding peptide
  MOD_RES (26)..(28): Xaa is C or S
EPLPIVYYIGKTPKIEQLSNMIVKSXKXS

SEQ ID NO: 20043 - protein, 32 aa, Artificial Sequence
  Cyclic GFR-binding peptide
  MOD_RES (2)..(3): Xaa is C or S
PXXVSQDLSPISILFIIGKTPKIYKQYEMIVK

SEQ ID NO: 20044 - protein, 24 aa, Artificial Sequence
  Cyclic GFR-binding peptide
QALEPLTILYYVGRKPKVEQLSNM

SEQ ID NO: 20045 - protein, 36 aa, Artificial Sequence; identical to SEQ ID NO: 9851
  Cyclic GFR-binding peptide
  MOD_RES (6)..(7): Xaa is C or S

SEQ ID NO: 20046 - protein, 28 aa, Artificial Sequence
  Cyclic GFR-binding peptide
  MOD_RES (1)..(2): Xaa is C or S
XXVPTELEPLTMLYYDEYDKVVEQLSNE

SEQ ID NO: 20047 - protein, 33 aa, Artificial Sequence
  Cyclic GFR-binding peptide
  MOD_RES (4)..(5): Xaa is C or S
AAPXXVPQALSPISILFIVGRKPKVYKQYEMIV

SEQ ID NO: 20048 - protein, 38 aa, Artificial Sequence
  Cyclic GFR-binding peptide
  MOD_RES (2)..(3)..(35)..(37): Xaa is C or S
AXXVPTELEPLTMLYYDENEKVVEQLSNDMVVEGXGXR

SEQ ID NO: 20049 - protein, 29 aa, Artificial Sequence
  Cyclic GFR-binding peptide
  MOD_RES (3)..(3): Xaa is C or S
PTXAPTKLEPLTVLYYDDSSNVIEQLSNN

SEQ ID NO: 20050 - protein, 33 aa, Artificial Sequence
  Cyclic GFR-binding peptide
  MOD_RES (3)..(4): Xaa is C or S
KPXXAPTKLEPLTVLYYDDSSNVIEQLSNNMVV

SEQ ID NO: 20051 - protein, 32 aa, Artificial Sequence; identical to SEQ ID NO: 9859
  Cyclic GFR-binding peptide
  MOD_RES (29)..(31): Xaa is C or S

SEQ ID NO: 20052 - protein, 27 aa, Artificial Sequence
  Cyclic GFR-binding peptide
ALSPISILFIVGRKPKVYKQYEMIVRS

SEQ ID NO: 20053 - protein, 32 aa, Artificial Sequence; identical to SEQ ID NO: 9863
  Cyclic GFR-binding peptide
  MOD_RES (1)..(1): Xaa is C or S

SEQ ID NO: 20054 - protein, 31 aa, Artificial Sequence
  Cyclic GFR-binding peptide
  MOD_RES (28)..(30): Xaa is C or S
LEPLTMLYYDENEKVVEQLSNDMVVEGXGXR

SEQ ID NO: 20055 - protein, 33 aa, Artificial Sequence
  Cyclic GFR-binding peptide
  MOD_RES (31)..(33): Xaa is C or S
PTKLEPLTVLYYDDSSNVIEQLSNNMVVRSXGX

SEQ ID NO: 20056 - protein, 28 aa, Artificial Sequence
  Cyclic GFR-binding peptide
  MOD_RES (1)..(1): Xaa is C or S
XVPTELNAISMLYFDENEKVVLKKYRDM

SEQ ID NO: 20057 - protein, 38 aa, Artificial Sequence
  Cyclic GFR-binding peptide
  MOD_RES (5)..(37): Xaa is C or S
TKPTXAPTKLEPLPVVYYDDSSNVIEQLSNNMVVRSXG

SEQ ID NO: 20058 - protein, 32 aa, Artificial Sequence
  Cyclic GFR-binding peptide
  MOD_RES (6)..(7): Xaa is C or S
TVPKPXXAPTQLEPLPVVYYDDSSNVIEQLSN

SEQ ID NO: 20059 - protein, 23 aa, Artificial Sequence
  Cyclic GFR-binding peptide
TRLSAISILYLDSANNVVLKNYQ

SEQ ID NO: 20060 - protein, 28 aa, Artificial Sequence
  Cyclic GFR-binding peptide
  MOD_RES (1)..(2): Xaa is C or S
XXVPTELEPLPMVYYDEYDKVVEQLSNE

SEQ ID NO: 20061 - protein, 29 aa, Artificial Sequence
  Cyclic GFR-binding peptide
PTELEPLTMLYYDENEKVVEQLSNDMVVE

SEQ ID NO: 20062 - protein, 29 aa, Artificial Sequence
  Cyclic GFR-binding peptide
  MOD_RES (28)..(28): Xaa is C or S
LNAISILYFDSANNVVLKKYRDMVVESXG

SEQ ID NO: 20063 - protein, 33 aa, Artificial Sequence
  Cyclic GFR-binding peptide
  MOD_RES (32)..(32): Xaa is C or S
VPTELSPISMLFIDEYDKVVYKQYEEMVVEGXG

SEQ ID NO: 20064 - protein, 33 aa, Artificial Sequence
  Cyclic GFR-binding peptide
  MOD_RES (4)..(5): Xaa is C or S
PPTXXVPTRLEPLPIVYYDSANNVVEQLSNDMV

SEQ ID NO: 20065 - protein, 30 aa, Artificial Sequence; identical to SEQ ID NO: 9867
  Cyclic GFR-binding peptide
  MOD_RES (30)..(30): Xaa is C or S

SEQ ID NO: 20066 - protein, 27 aa, Artificial Sequence
  Cyclic GFR-binding peptide
TELNAISMLYFDEYDKVVLKKYREMVV

SEQ ID NO: 20067 - protein, 32 aa, Artificial Sequence
  Cyclic GFR-binding peptide
  MOD_RES (32)..(32): Xaa is C or S
APTQLSPISVLFIDDSSNVIYKQYENMVVRAX

SEQ ID NO: 20068 - protein, 35 aa, Artificial Sequence
  Cyclic GFR-binding peptide
  MOD_RES (5)..(6): Xaa is C or S
TPPTXXVPTRLEPLTILYYDSANNVVEQLSNDMVV

SEQ ID NO: 20069 - protein, 38 aa, Artificial Sequence
  Cyclic GFR-binding peptide
  MOD_RES (4)..(5)..(37): Xaa is C or S
PKAXXVPTELEPLPMVYYDENEKVVEQLSNDMVVEGXG

SEQ ID NO: 20070 - protein, 35 aa, Artificial Sequence
  Cyclic GFR-binding peptide
  MOD_RES (3)..(35): Xaa is C or S
PTXAPTKLEPLPVVYYDDSSNVIEQLSNNMVVRSX

SEQ ID NO: 20071 - protein, 30 aa, Artificial Sequence
  Cyclic GFR-binding peptide
PTELEPLPMVYYDEYDKVVEQLSNEMVVEG

SEQ ID NO: 20072 - protein, 33 aa, Artificial Sequence
  Cyclic GFR-binding peptide
  MOD_RES (2)..(3): Xaa is C or S
PXXAPTKLSPISVLFIDDSSNVIYKQYENMVVR

SEQ ID NO: 20073 - protein, 23 aa, Artificial Sequence
  Cyclic GFR-binding peptide
SAISVLYLDDSSNVILKNYQNMV

SEQ ID NO: 20074 - protein, 32 aa, Artificial Sequence
  Cyclic GFR-binding peptide
  MOD_RES (30)..(32): Xaa is C or S
TRLNAISILYFDSANNVVLKKYRDMVVESXGX

SEQ ID NO: 20075 - protein, 37 aa, Artificial Sequence; identical to SEQ ID NO: 9881
  Cyclic GFR-binding peptide
  MOD_RES (5)..(6): Xaa is C or S

SEQ ID NO: 20076 - protein, 27 aa, Artificial Sequence
  Cyclic GFR-binding peptide
LEPLPIVYYDSANNVVEQLSNDMVVES

SEQ ID NO: 20077 - protein, 30 aa, Artificial Sequence
  Cyclic GFR-binding peptide
  MOD_RES (3)..(4): Xaa is C or S
APXXVPQALSPISILFIVGRKPKVYKQYEM

SEQ ID NO: 20078 - protein, 38 aa, Artificial Sequence
  Cyclic GFR-binding peptide
  MOD_RES (7)..(7): Xaa is C or S
HVTKPTXAPTKLEPLPVVYYDDSSNVIEQLSNNMVVRS

SEQ ID NO: 20079 - protein, 31 aa, Artificial Sequence
  Cyclic GFR-binding peptide
  MOD_RES (4)..(5): Xaa is C or S
AAPXXVPQALSPISILFIVGRKPKVYKQYEM

SEQ ID NO: 20080 - protein, 31 aa, Artificial Sequence
  Cyclic GFR-binding peptide
  MOD_RES (31)..(31): Xaa is C or S
PTQLSPISVLFIDDSSNVIYKQYENMVVRAX

SEQ ID NO: 20081 - protein, 40 aa, Artificial Sequence
  Cyclic GFR-binding peptide
  MOD_RES (5)..(6)..(38)..(40): Xaa is C or S
TPPTXXVPTRLEPLTILYYDSANNVVEQLSNDMVVESXGX

SEQ ID NO: 20082 - protein, 35 aa, Artificial Sequence
  Cyclic GFR-binding peptide
  MOD_RES (3)..(4): Xaa is C or S
KPXXAPTQLEPLTVLYYDDSSNVIEQLSNNMVVRA

SEQ ID NO: 20083 - protein, 35 aa, Artificial Sequence
  Cyclic GFR-binding peptide
  MOD_RES (4)..(5): Xaa is C or S
AAPXXVPQALEPLTILYYVGRKPKVEQLSNMIVRS

SEQ ID NO: 20084 - protein, 40 aa, Artificial Sequence; identical to SEQ ID NO: 9895
  Cyclic GFR-binding peptide
  MOD_RES (6)..(7)..(39): Xaa is C or S

SEQ ID NO: 20085 - protein, 27 aa, Artificial Sequence
  Cyclic GFR-binding peptide
TELSPISMLFIDEYDKVVYKQYEEMVV

SEQ ID NO: 20086 - protein, 35 aa, Artificial Sequence
  Cyclic GFR-binding peptide
  MOD_RES (2)..(3)..(34): Xaa is C or S
PXXVSQDLEPLPIVYYIGKTPKIEQLSNMIVKSXK

SEQ ID NO: 20087 - protein, 30 aa, Artificial Sequence; identical to SEQ ID NO: 9896
  Cyclic GFR-binding peptide
  MOD_RES (2)..(2): Xaa is C or S

SEQ ID NO: 20088 - protein, 31 aa, Artificial Sequence
  Cyclic GFR-binding peptide
  MOD_RES (28)..(30): Xaa is C or S
LSPISVLFIDDSSNVIYKQYENMVVRSXGXH

SEQ ID NO: 20089 - protein, 35 aa, Artificial Sequence; identical to SEQ ID NO: 9899
  Cyclic GFR-binding peptide
  MOD_RES (1)..(33)..(35): Xaa is C or S

SEQ ID NO: 20090 - protein, 31 aa, Artificial Sequence
  Cyclic GFR-binding peptide
  MOD_RES (4)..(5): Xaa is C or S
PKPXXAPTQLEPLPVVYYDDSSNVIEQLSNN

SEQ ID NO: 20091 - protein, 33 aa, Artificial Sequence; identical to SEQ ID NO: 9900
  Cyclic GFR-binding peptide
  MOD_RES (30)..(32): Xaa is C or S

SEQ ID NO: 20092 - protein, 27 aa, Artificial Sequence
  Cyclic GFR-binding peptide
ELEPLPMVYYDEYDKVVEQLSNEMVVE

SEQ ID NO: 20093 - protein, 40 aa, Artificial Sequence
  Cyclic GFR-binding peptide
  MOD_RES (4)..(5)..(37)..(39): Xaa is C or S
PPTXXVPTRLNAISILYFDSANNVVLKKYRDMVVESXGXR

SEQ ID NO: 20094 - protein, 26 aa, Artificial Sequence
  Cyclic GFR-binding peptide
VSQDLNAISILYFIGKTPKILKKYRM

SEQ ID NO: 20095 - protein, 32 aa, Artificial Sequence; identical to SEQ ID NO: 9907
  Cyclic GFR-binding peptide
  MOD_RES (2)..(3): Xaa is C or S

SEQ ID NO: 20096 - protein, 36 aa, Artificial Sequence
  Cyclic GFR-binding peptide
  MOD_RES (4)..(5): Xaa is C or S
PPTXXVPTRLEPLTILYYDSANNVVEQLSNDMVVES

SEQ ID NO: 20097 - protein, 31 aa, Artificial Sequence
  Cyclic GFR-binding peptide
  MOD_RES (30)..(30): Xaa is C or S
TQLSPISVLFIDDSSNVIYKQYENMVVRAXG

SEQ ID NO: 20098 - protein, 36 aa, Artificial Sequence; identical to SEQ ID NO: 9908
  Cyclic GFR-binding peptide
  MOD_RES (5)..(6): Xaa is C or S

SEQ ID NO: 20099 - protein, 26 aa, Artificial Sequence
  Cyclic GFR-binding peptide
  MOD_RES (1)..(1): Xaa is C or S
XVSQDLEPLPIVYYIGKTPKIEQLSN

SEQ ID NO: 20100 - protein, 24 aa, Artificial Sequence
  Cyclic GFR-binding peptide
PTKLSAISVLYLDDSSNVILKNYQ

SEQ ID NO: 20101 - protein, 35 aa, Artificial Sequence
  Cyclic GFR-binding peptide
  MOD_RES (2)..(3)..(34): Xaa is C or S
PXXVPQALEPLTILYYVGRKPKVEQLSNMIVRSXK

SEQ ID NO: 20102 - protein, 36 aa, Artificial Sequence
  Cyclic GFR-binding peptide
  MOD_RES (6)..(6): Xaa is C or S
VTKPTXAPTKLEPLTVLYYDDSSNVIEQLSNNMVVR

SEQ ID NO: 20103 - protein, 36 aa, Artificial Sequence
  Cyclic GFR-binding peptide
  MOD_RES (4)..(5): Xaa is C or S
PKAXXVPTELSPISMLFIDENEKVVYKQYEDMVVEG

SEQ ID NO: 20104 - protein, 31 aa, Artificial Sequence
  Cyclic GFR-binding peptide
  MOD_RES (1)..(1): Xaa is C or S
XAPTKLSPISVLFIDDSSNVIYKQYENMVVR

SEQ ID NO: 20105 - protein, 37 aa, Artificial Sequence
  Cyclic GFR-binding peptide
  MOD_RES (6)..(7): Xaa is C or S
ASASPXXVPQDLEPLPIVYYVGRTPKVEQLSNMVVKS

SEQ ID NO: 20106 - protein, 32 aa, Artificial Sequence
  Cyclic GFR-binding peptide
  MOD_RES (6)..(7): Xaa is C or S
SIPKAXXVPTELSPISMLFIDEYDKVVYKQYE

SEQ ID NO: 20107 - protein, 33 aa, Artificial Sequence
  Cyclic GFR-binding peptide
  MOD_RES (5)..(6): Xaa is C or S
SAAPXXVPQALSPISILFIVGRKPKVYKQYEMI

SEQ ID NO: 20108 - protein, 28 aa, Artificial Sequence
  Cyclic GFR-binding peptide
  MOD_RES (27)..(27): Xaa is C or S
LSPISILFIVGRKPKVYKQYEMIVRSXK

SEQ ID NO: 20109 - protein, 34 aa, Artificial Sequence
  Cyclic GFR-binding peptide
  MOD_RES (1)..(2)..(34): Xaa is C or S
XXVPTRLNAISILYFDSANNVVLKKYRDMVVESX

SEQ ID NO: 20110 - protein, 31 aa, Artificial Sequence
  Cyclic GFR-binding peptide
  MOD_RES (29)..(31): Xaa is C or S
RLSAISILYLDSANNVVLKNYQDMVVESXGX

SEQ ID NO: 20111 - protein, 26 aa, Artificial Sequence
  Cyclic GFR-binding peptide
VSQDLSPISILFIIGKTPKIYKQYEM

SEQ ID NO: 20112 - protein, 28 aa, Artificial Sequence
  Cyclic GFR-binding peptide
TQLEPLPVVYYDDSSNVIEQLSNNMVVR

SEQ ID NO: 20113 - protein, 33 aa, Artificial Sequence
  Cyclic GFR-binding peptide
  MOD_RES (1)..(33): Xaa is C or S
XVPTELSPISMLFIDENEKVVYKQYEDMVVEGX

SEQ ID NO: 20114 - protein, 35 aa, Artificial Sequence; identical to SEQ ID NO: 9925
  Cyclic GFR-binding peptide
  MOD_RES (1)..(2)..(33)..(35): Xaa is C or S

SEQ ID NO: 20115 - protein, 32 aa, Artificial Sequence
  Cyclic GFR-binding peptide
  MOD_RES (1)..(32): Xaa is C or S
XVPQDLSPISILFIVGRTPKVYKQYEMVVKSX

SEQ ID NO: 20116 - protein, 25 aa, Artificial Sequence
  Cyclic GFR-binding peptide
QDLNAISILYFVGRTPKVLKKYRMV

SEQ ID NO: 20117 - protein, 22 aa, Artificial Sequence
  Cyclic GFR-binding peptide
SAISILYLDSANNVVLKNYQDM

SEQ ID NO: 20118 - protein, 37 aa, Artificial Sequence
  Cyclic GFR-binding peptide
  MOD_RES (4)..(5)..(37): Xaa is C or S
PKPXXAPTQLSPISVLFIDDSSNVIYKQYENMVVRAX

SEQ ID NO: 20119 - protein, 39 aa, Artificial Sequence
  Cyclic GFR-binding peptide
  MOD_RES (5)..(6)..(38): Xaa is C or S
IPKAXXVPTELSPISMLFIDEYDKVVYKQYEEMVVEGXG

SEQ ID NO: 20120 - protein, 31 aa, Artificial Sequence
  Cyclic GFR-binding peptide
  MOD_RES (31)..(31): Xaa is C or S
PTELSPISMLFIDEYDKVVYKQYEEMVVEGX

SEQ ID NO: 20121 - protein, 27 aa, Artificial Sequence
  Cyclic GFR-binding peptide
PTQLEPLTVLYYDDSSNVIEQLSNNMV

SEQ ID NO: 20122 - protein, 24 aa, Artificial Sequence
  Cyclic GFR-binding peptide
KLSPISVLFIDDSSNVIYKQYENM

SEQ ID NO: 20123 - protein, 36 aa, Artificial Sequence
  Cyclic GFR-binding peptide
  MOD_RES (5)..(6): Xaa is C or S
SASPXXVSQDLEPLPIVYYIGKTPKIEQLSNMIVKS

SEQ ID NO: 20124 - protein, 24 aa, Artificial Sequence
  Cyclic GFR-binding peptide
EPLPIVYYVGRTPKVEQLSNMVVK

SEQ ID NO: 20125 - protein, 37 aa, Artificial Sequence
  Cyclic GFR-binding peptide
  MOD_RES (6)..(7): Xaa is C or S
KIPKAXXVPTELSPISMLFIDENEKVVYKQYEDMVVE

SEQ ID NO: 20126 - protein, 29 aa, Artificial Sequence
  Cyclic GFR-binding peptide
  MOD_RES (3)..(4): Xaa is C or S
SPXXVPQDLSAISILYLVGRTPKVLKNYQ

SEQ ID NO: 20127 - protein, 24 aa, Artificial Sequence
  Cyclic GFR-binding peptide
QALNAISILYFVGRKPKVLKKYRM

SEQ ID NO: 20128 - protein, 34 aa, Artificial Sequence; identical to SEQ ID NO: 9944
  Cyclic GFR-binding peptide
  MOD_RES (6)..(7): Xaa is C or S

SEQ ID NO: 20129 - protein, 33 aa, Artificial Sequence; identical to SEQ ID NO: 9946
  Cyclic GFR-binding peptide
  MOD_RES (6)..(6): Xaa is C or S

SEQ ID NO: 20130 - protein, 38 aa, Artificial Sequence; identical to SEQ ID NO: 9948
  Cyclic GFR-binding peptide
  MOD_RES (2)..(3)..(35)..(37): Xaa is C or S

SEQ ID NO: 20131 - protein, 34 aa, Artificial Sequence
  Cyclic GFR-binding peptide
  MOD_RES (1)..(33): Xaa is C or S
XAPTKLSPISVLFIDDSSNVIYKQYENMVVRSXG

SEQ ID NO: 20132 - protein, 22 aa, Artificial Sequence
  Cyclic GFR-binding peptide
ELEPLPMVYYDENEKVVEQLSN

SEQ ID NO: 20133 - protein, 32 aa, Artificial Sequence
  Cyclic GFR-binding peptide
  MOD_RES (5)..(6): Xaa is C or S
SASPXXVSQDLEPLPIVYYIGKTPKIEQLSNM

SEQ ID NO: 20134 - protein, 36 aa, Artificial Sequence
  Cyclic GFR-binding peptide
  MOD_RES (4)..(5): Xaa is C or S
PPTXXVPTRLSAISILYLDSANNVVLKNYQDMVVES

SEQ ID NO: 20135 - protein, 36 aa, Artificial Sequence
  Cyclic GFR-binding peptide
  MOD_RES (4)..(5): Xaa is C or S
PKAXXVPTELSPISMLFIDEYDKVVYKQYEEMVVEG

SEQ ID NO: 20136 - protein, 31 aa, Artificial Sequence
  Cyclic GFR-binding peptide
  MOD_RES (28)..(30): Xaa is C or S
ALSPISILFIVGRKPKVYKQYEMIVRSXKXS

SEQ ID NO: 20137 - protein, 36 aa, Artificial Sequence; identical to SEQ ID NO: 9955
  Cyclic GFR-binding peptide
  MOD_RES (4)..(5)..(36): Xaa is C or S

SEQ ID NO: 20138 - protein, 27 aa, Artificial Sequence
  Cyclic GFR-binding peptide
  MOD_RES (27)..(27): Xaa is C or S
EPLTVLYYDDSSNVIEQLSNNMVVRAX

SEQ ID NO: 20139 - protein, 23 aa, Artificial Sequence
  Cyclic GFR-binding peptide
ALNAISILYFVGRKPKVLKKYRM

SEQ ID NO: 20140 - protein, 30 aa, Artificial Sequence
  Cyclic GFR-binding peptide
  MOD_RES (28)..(30): Xaa is C or S
DLEPLPIVYYIGKTPKIEQLSNMIVKSXKX

SEQ ID NO: 20141 - protein, 35 aa, Artificial Sequence
  Cyclic GFR-binding peptide
  MOD_RES (6)..(7): Xaa is C or S
SIPKAXXVPTELEPLTMLYYDEYDKVVEQLSNEMV

SEQ ID NO: 20142 - protein, 22 aa, Artificial Sequence
  Cyclic GFR-binding peptide
LSPISILFIVGRTPKVYKQYEM

SEQ ID NO: 20143 - protein, 30 aa, Artificial Sequence; identical to SEQ ID NO: 9963
  Cyclic GFR-binding peptide
  MOD_RES (27)..(29): Xaa is C or S

SEQ ID NO: 20144 - protein, 29 aa, Artificial Sequence
  Cyclic GFR-binding peptide
  MOD_RES (27)..(29): Xaa is C or S
SPISMLFIDENEKVVYKQYEDMVVEGXGX

SEQ ID NO: 20145 - protein, 25 aa, Artificial Sequence
  Cyclic GFR-binding peptide
APTKLEPLPVVYYDDSSNVIEQLSN

SEQ ID NO: 20146 - protein, 27 aa, Artificial Sequence
  Cyclic GFR-binding peptide
  MOD_RES (1)..(1): Xaa is C or S
XAPTKLEPLTVLYYDDSSNVIEQLSNN

SEQ ID NO: 20147 - protein, 29 aa, Artificial Sequence
  Cyclic GFR-binding peptide
  MOD_RES (3)..(3): Xaa is C or S
PTXAPTKLSPISVLFIDDSSNVIYKQYEN

SEQ ID NO: 20148 - protein, 34 aa, Artificial Sequence; identical to SEQ ID NO: 9964
  Cyclic GFR-binding peptide
  MOD_RES (4)..(5): Xaa is C or S

SEQ ID NO: 20149 - protein, 27 aa, Artificial Sequence
  Cyclic GFR-binding peptide
  MOD_RES (1)..(1): Xaa is C or S
XVSQDLEPLPIVYYIGKTPKIEQLSNM

SEQ ID NO: 20150 - protein, 33 aa, Artificial Sequence; identical to SEQ ID NO: 9968
  Cyclic GFR-binding peptide
  MOD_RES (3)..(4): Xaa is C or S

SEQ ID NO: 20151 - protein, 29 aa, Artificial Sequence
  Cyclic GFR-binding peptide
  MOD_RES (2)..(3): Xaa is C or S
PXXVPQDLEPLPIVYYVGRTPKVEQLSNM

SEQ ID NO: 20152 - protein, 35 aa, Artificial Sequence; identical to SEQ ID NO: 9969
  Cyclic GFR-binding peptide
  MOD_RES (5)..(5): Xaa is C or S

SEQ ID NO: 20153 - protein, 30 aa, Artificial Sequence; identical to SEQ ID NO: 9970
  Cyclic GFR-binding peptide

SEQ ID NO: 20154 - protein, 31 aa, Artificial Sequence
  Cyclic GFR-binding peptide
  MOD_RES (1)..(1): Xaa is C or S
XVPTRLEPLTILYYDSANNVVEQLSNDMVVE

SEQ ID NO: 20155 - protein, 28 aa, Artificial Sequence
  Cyclic GFR-binding peptide
TQLSAISVLYLDDSSNVILKNYQNMVVR

SEQ ID NO: 20156 - protein, 34 aa, Artificial Sequence
  Cyclic GFR-binding peptide
  MOD_RES (3)..(4): Xaa is C or S
KPXXAPTQLSPISVLFIDDSSNVIYKQYENMVVR

SEQ ID NO: 20157 - protein, 40 aa, Artificial Sequence
  Cyclic GFR-binding peptide
  MOD_RES (5)..(6)..(38)..(40): Xaa is C or S
TPPTXXVPTRLSAISILYLDSANNVVLKNYQDMVVESXGX

SEQ ID NO: 20158 - protein, 29 aa, Artificial Sequence
  Cyclic GFR-binding peptide
APTKLEPLPVVYYDDSSNVIEQLSNNMVV

SEQ ID NO: 20159 - protein, 28 aa, Artificial Sequence
  Cyclic GFR-binding peptide
VPTELEPLTMLYYDENEKVVEQLSNDMV

SEQ ID NO: 20160 - protein, 34 aa, Artificial Sequence
  Cyclic GFR-binding peptide
  MOD_RES (1)..(33): Xaa is C or S
XAPTQLSPISVLFIDDSSNVIYKQYENMVVRAXG

SEQ ID NO: 20161 - protein, 36 aa, Artificial Sequence; identical to SEQ ID NO: 9979
  Cyclic GFR-binding peptide
  MOD_RES (5)..(6): Xaa is C or S

SEQ ID NO: 20162 - protein, 30 aa, Artificial Sequence; identical to SEQ ID NO: 9980
  Cyclic GFR-binding peptide
  MOD_RES (1)..(2): Xaa is C or S

SEQ ID NO: 20163 - protein, 33 aa, Artificial Sequence
  Cyclic GFR-binding peptide
  MOD_RES (1)..(33): Xaa is C or S
XAPTKLEPLTVLYYDDSSNVIEQLSNNMVVRSX

SEQ ID NO: 20164 - protein, 32 aa, Artificial Sequence; identical to SEQ ID NO: 9982
  Cyclic GFR-binding peptide
  MOD_RES (1)..(2): Xaa is C or S

SEQ ID NO: 20165 - protein, 29 aa, Artificial Sequence
  Cyclic GFR-binding peptide
  MOD_RES (27)..(29): Xaa is C or S
EPLPMVYYDENEKVVEQLSNDMVVEGXGX

SEQ ID NO: 20166 - protein, 39 aa, Artificial Sequence
  Cyclic GFR-binding peptide
  MOD_RES (5)..(6)..(38): Xaa is C or S
TPPTXXVPTRLNAISILYFDSANNVVLKKYRDMVVESXG

SEQ ID NO: 20167 - protein, 28 aa, Artificial Sequence
  Cyclic GFR-binding peptide
  MOD_RES (1)..(2): Xaa is C or S
XXVPQDLSAISILYLVGRTPKVLKNYQM

SEQ ID NO: 20168 - protein, 26 aa, Artificial Sequence
  Cyclic GFR-binding peptide
PQALEPLTILYYVGRKPKVEQLSNMI

SEQ ID NO: 20169 - protein, 25 aa, Artificial Sequence
  Cyclic GFR-binding peptide
VPTELSPISMLFIDEYDKVVYKQYE

SEQ ID NO: 20170 - protein, 30 aa, Artificial Sequence
  Cyclic GFR-binding peptide
  MOD_RES (1)..(2): Xaa is C or S
XXVPTELSPISMLFIDENEKVVYKQYEDMV

SEQ ID NO: 20171 - protein, 25 aa, Artificial Sequence
  Cyclic GFR-binding peptide
PTKLEPLTVLYYDDSSNVIEQLSNN

SEQ ID NO: 20172 - protein, 22 aa, Artificial Sequence
  Cyclic GFR-binding peptide
QLSAISVLYLDDSSNVILKNYQ

SEQ ID NO: 20173 - protein, 38 aa, Artificial Sequence
  Cyclic GFR-binding peptide
  MOD_RES (4)..(5)..(37): Xaa is C or S
PKPXXAPTKLEPLPVVYYDDSSNVIEQLSNNMVVRSXG

SEQ ID NO: 20174 - protein, 26 aa, Artificial Sequence
  Cyclic GFR-binding peptide
LEPLPIVYYVGRTPKVEQLSNMVVKS

SEQ ID NO: 20175 - protein, 22 aa, Artificial Sequence
  Cyclic GFR-binding peptide
SAISVLYLDDSSNVILKNYQNM

SEQ ID NO: 20176 - protein, 31 aa, Artificial Sequence
  Cyclic GFR-binding peptide
  MOD_RES (31)..(31): Xaa is C or S
VPQDLSPISILFIVGRTPKVYKQYEMVVKSX

SEQ ID NO: 20177 - protein, 30 aa, Artificial Sequence
  Cyclic GFR-binding peptide
  MOD_RES (1)..(1): Xaa is C or S
XAPTKLEPLPVVYYDDSSNVIEQLSNNMVV

SEQ ID NO: 20178 - protein, 27 aa, Artificial Sequence
  Cyclic GFR-binding peptide
  MOD_RES (1)..(2): Xaa is C or S
XXAPTQLSAISVLYLDDSSNVILKNYQ

SEQ ID NO: 20179 - protein, 35 aa, Artificial Sequence
  Cyclic GFR-binding peptide
  MOD_RES (1)..(33)..(35): Xaa is C or S
XAPTQLEPLTVLYYDDSSNVIEQLSNNMVVRAXGX

SEQ ID NO: 20180 - protein, 30 aa, Artificial Sequence
  Cyclic GFR-binding peptide
  MOD_RES (29)..(29): Xaa is C or S
ELEPLPMVYYDENEKVVEQLSNDMVVEGXG

SEQ ID NO: 20181 - protein, 38 aa, Artificial Sequence
  Cyclic GFR-binding peptide
  MOD_RES (5)..(6)..(38): Xaa is C or S
IPKAXXVPTELEPLTMLYYDEYDKVVEQLSNEMVVEGX

SEQ ID NO: 20182 - protein, 37 aa, Artificial Sequence
  Cyclic GFR-binding peptide
  MOD_RES (1)..(2)..(34)..(36): Xaa is C or S
XXVPTELEPLPMVYYDENEKVVEQLSNDMVVEGXGXR

SEQ ID NO: 20183 - protein, 32 aa, Artificial Sequence
  Cyclic GFR-binding peptide
  MOD_RES (1)..(32): Xaa is C or S
XVSQDLSPISILFIIGKTPKIYKQYEMIVKSX

SEQ ID NO: 20184 - protein, 30 aa, Artificial Sequence
  Cyclic GFR-binding peptide
  MOD_RES (27)..(29): Xaa is C or S
EPLPVVYYDDSSNVIEQLSNNMVVRSXGXH

SEQ ID NO: 20185 - protein, 29 aa, Artificial Sequence
  Cyclic GFR-binding peptide
  MOD_RES (2)..(3): Xaa is C or S
PXXVPQDLSPISILFIVGRTPKVYKQYEM

SEQ ID NO: 20186 - protein, 30 aa, Artificial Sequence; identical to SEQ ID NO: 10001
  Cyclic GFR-binding peptide
  MOD_RES (4)..(5): Xaa is C or S

SEQ ID NO: 20187 - protein, 37 aa, Artificial Sequence; identical to SEQ ID NO: 10002
  Cyclic GFR-binding peptide
  MOD_RES (5)..(6): Xaa is C or S

SEQ ID NO: 20188 - protein, 27 aa, Artificial Sequence
  Cyclic GFR-binding peptide
ELEPLTMLYYDENEKVVEQLSNDMVVE

SEQ ID NO: 20189 - protein, 35 aa, Artificial Sequence
  Cyclic GFR-binding peptide
  MOD_RES (5)..(6): Xaa is C or S
VPKPXXAPTKLSPISVLFIDDSSNVIYKQYENMVV

SEQ ID NO: 20190 - protein, 30 aa, Artificial Sequence; identical to SEQ ID NO: 10003
  Cyclic GFR-binding peptide
  MOD_RES (1)..(1): Xaa is C or S

SEQ ID NO: 20191 - protein, 23 aa, Artificial Sequence
  Cyclic GFR-binding peptide
ALEPLTILYYVGRKPKVEQLSNM

SEQ ID NO: 20192 - protein, 33 aa, Artificial Sequence; identical to SEQ ID NO: 10004
  Cyclic GFR-binding peptide
  MOD_RES (3)..(4): Xaa is C or S

SEQ ID NO: 20193 - protein, 29 aa, Artificial Sequence
  Cyclic GFR-binding peptide
  MOD_RES (1)..(2): Xaa is C or S
XXAPTQLEPLTVLYYDDSSNVIEQLSNNM

SEQ ID NO: 20194 - protein, 31 aa, Artificial Sequence
  Cyclic GFR-binding peptide
  MOD_RES (29)..(31): Xaa is C or S
RLEPLTILYYDSANNVVEQLSNDMVVESXGX

SEQ ID NO: 20195 - protein, 39 aa, Artificial Sequence
  Cyclic GFR-binding peptide
  MOD_RES (6)..(7)..(39): Xaa is C or S
STPPTXXVPTRLSAISILYLDSANNVVLKNYQDMVVESX

SEQ ID NO: 20196 - protein, 38 aa, Artificial Sequence; identical to SEQ ID NO: 10009
  Cyclic GFR-binding peptide
  MOD_RES (4)..(5)..(37): Xaa is C or S

SEQ ID NO: 20197 - protein, 31 aa, Artificial Sequence
  Cyclic GFR-binding peptide
  MOD_RES (30)..(30): Xaa is C or S
TKLEPLTVLYYDDSSNVIEQLSNNMVVRSXG

SEQ ID NO: 20198 - protein, 28 aa, Artificial Sequence
  Cyclic GFR-binding peptide
PTELSPISMLFIDENEKVVYKQYEDMVV

SEQ ID NO: 20199 - protein, 24 aa, Artificial Sequence
  Cyclic GFR-binding peptide
DLNAISILYFIGKTPKILKKYRMI

SEQ ID NO: 20200 - protein, 35 aa, Artificial Sequence
  Cyclic GFR-binding peptide
  MOD_RES (2)..(3)..(35): Xaa is C or S
AXXVPTELEPLTMLYYDEYDKVVEQLSNEMVVEGX

SEQ ID NO: 20201 - protein, 28 aa, Artificial Sequence
  Cyclic GFR-binding peptide
  MOD_RES (27)..(27): Xaa is C or S
LSPISILFIVGRTPKVYKQYEMVVKSXK

SEQ ID NO: 20202 - protein, 34 aa, Artificial Sequence
  Cyclic GFR-binding peptide
  MOD_RES (1)..(2)..(34): Xaa is C or S
XXVPTELSPISMLFIDEYDKVVYKQYEEMVVEGX

SEQ ID NO: 20203 - protein, 29 aa, Artificial Sequence
  Cyclic GFR-binding peptide
TELEPLTMLYYDENEKVVEQLSNDMVVEG

SEQ ID NO: 20204 - protein, 30 aa, Artificial Sequence
  Cyclic GFR-binding peptide
  MOD_RES (30)..(30): Xaa is C or S
TELEPLTMLYYDENEKVVEQLSNDMVVEGX

SEQ ID NO: 20205 - protein, 29 aa, Artificial Sequence
  Cyclic GFR-binding peptide
  MOD_RES (2)..(3): Xaa is C or S
TXXVPTRLSAISILYLDSANNVVLKNYQD

SEQ ID NO: 20206 - protein, 26 aa, Artificial Sequence
  Cyclic GFR-binding peptide
EPLPVVYYDDSSNVIEQLSNNMVVRS

SEQ ID NO: 20207 - protein, 37 aa, Artificial Sequence; identical to SEQ ID NO: 10015
  Cyclic GFR-binding peptide
  MOD_RES (6)..(7): Xaa is C or S

SEQ ID NO: 20208 - protein, 41 aa, Artificial Sequence
  Cyclic GFR-binding peptide
  MOD_RES (6)..(7)..(38)..(40): Xaa is C or S
ASASPXXVPQDLSPISILFIVGRTPKVYKQYEMVVKSXKXS

SEQ ID NO: 20209 - protein, 29 aa, Artificial Sequence
  Cyclic GFR-binding peptide
  MOD_RES (2)..(3): Xaa is C or S
PXXVPQDLNAISILYFVGRTPKVLKKYRM

SEQ ID NO: 20210 - protein, 28 aa, Artificial Sequence
  Cyclic GFR-binding peptide
  MOD_RES (1)..(2): Xaa is C or S
XXVPTELSPISMLFIDEYDKVVYKQYEE

SEQ ID NO: 20211 - protein, 31 aa, Artificial Sequence
  Cyclic GFR-binding peptide
  MOD_RES (1)..(1): Xaa is C or S
XVPTELSPISMLFIDEYDKVVYKQYEEMVVE

SEQ ID NO: 20212 - protein, 28 aa, Artificial Sequence
  Cyclic GFR-binding peptide
  MOD_RES (2)..(3): Xaa is C or S
PXXVPQALEPLTILYYVGRKPKVEQLSN

SEQ ID NO: 20213 - protein, 38 aa, Artificial Sequence
  Cyclic GFR-binding peptide
  MOD_RES (5)..(6)..(38): Xaa is C or S
IPKAXXVPTELEPLTMLYYDENEKVVEQLSNDMVVEGX

SEQ ID NO: 20214 - protein, 34 aa, Artificial Sequence; identical to SEQ ID NO: 10022
  Cyclic GFR-binding peptide
  MOD_RES (6)..(7): Xaa is C or S

SEQ ID NO: 20215 - protein, 39 aa, Artificial Sequence; identical to SEQ ID NO: 10023
  Cyclic GFR-binding peptide
  MOD_RES (6)..(7)..(39): Xaa is C or S

SEQ ID NO: 20216 - protein, 34 aa, Artificial Sequence
  Cyclic GFR-binding peptide
  MOD_RES (4)..(5): Xaa is C or S
PKPXXAPTKLEPLTVLYYDDSSNVIEQLSNNMVV

SEQ ID NO: 20217 - protein, 36 aa, Artificial Sequence; identical to SEQ ID NO: 10024
  Cyclic GFR-binding peptide
  MOD_RES (1)..(2)..(33)..(35): Xaa is C or S

SEQ ID NO: 20218 - protein, 29 aa, Artificial Sequence
  Cyclic GFR-binding peptide
  MOD_RES (3)..(3): Xaa is C or S
PTXAPTKLEPLPVVYYDDSSNVIEQLSNN

SEQ ID NO: 20219 - protein, 34 aa, Artificial Sequence
  Cyclic GFR-binding peptide
  MOD_RES (5)..(6): Xaa is C or S
IPKAXXVPTELEPLTMLYYDENEKVVEQLSNDMV

SEQ ID NO: 20220 - protein, 21 aa, Artificial Sequence
  Cyclic GFR-binding peptide
NAISILYFIGKTPKILKKYRM

SEQ ID NO: 20221 - protein, 30 aa, Artificial Sequence
  Cyclic GFR-binding peptide
  MOD_RES (27)..(29): Xaa is C or S
LSPISILFIVGRKPKVYKQYEMIVRSXKXS

SEQ ID NO: 20222 - protein, 31 aa, Artificial Sequence; identical to SEQ ID NO: 10030
  Cyclic GFR-binding peptide
  MOD_RES (1)..(1): Xaa is C or S

SEQ ID NO: 20223 - protein, 33 aa, Artificial Sequence
  Cyclic GFR-binding peptide
  MOD_RES (2)..(3): Xaa is C or S
TXXVPTRLNAISILYFDSANNVVLKKYRDMVVE

SEQ ID NO: 20224 - protein, 35 aa, Artificial Sequence
  Cyclic GFR-binding peptide
  MOD_RES (2)..(3)..(34): Xaa is C or S
PXXVPQDLSPISILFIVGRTPKVYKQYEMVVKSXK

SEQ ID NO: 20225 - protein, 31 aa, Artificial Sequence; identical to SEQ ID NO: 10032
  Cyclic GFR-binding peptide
  MOD_RES (3)..(4): Xaa is C or S

SEQ ID NO: 20226 - protein, 22 aa, Artificial Sequence
  Cyclic GFR-binding peptide
RLNAISILYFDSANNVVLKKYR

SEQ ID NO: 20227 - protein, 29 aa, Artificial Sequence
  Cyclic GFR-binding peptide
  MOD_RES (28)..(28): Xaa is C or S
LSAISVLYLDDSSNVILKNYQNMVVRAXG

SEQ ID NO: 20228 - protein, 36 aa, Artificial Sequence; identical to SEQ ID NO: 10034
  Cyclic GFR-binding peptide
  MOD_RES (2)..(3)..(35): Xaa is C or S

SEQ ID NO: 20229 - protein, 24 aa, Artificial Sequence
  Cyclic GFR-binding peptide
PTELEPLPMVYYDEYDKVVEQLSN

SEQ ID NO: 20230 - protein, 38 aa, Artificial Sequence
  Cyclic GFR-binding peptide
  MOD_RES (4)..(36)..(38): Xaa is C or S
KPTXAPTKLEPLTVLYYDDSSNVIEQLSNNMVVRSXGX

SEQ ID NO: 20231 - protein, 28 aa, Artificial Sequence
  Cyclic GFR-binding peptide
  MOD_RES (28)..(28): Xaa is C or S
DLSAISILYLVGRTPKVLKNYQMVVKSX

SEQ ID NO: 20232 - protein, 31 aa, Artificial Sequence
  Cyclic GFR-binding peptide
  MOD_RES (3)..(4): Xaa is C or S
PTXXVPTRLSAISILYLDSANNVVLKNYQDM

SEQ ID NO: 20233 - protein, 22 aa, Artificial Sequence
  Cyclic GFR-binding peptide
DLSAISILYLIGKTPKILKNYQ

SEQ ID NO: 20234 - protein, 23 aa, Artificial Sequence
  Cyclic GFR-binding peptide
LSPISVLFIDDSSNVIYKQYENM

SEQ ID NO: 20235 - protein, 27 aa, Artificial Sequence
  Cyclic GFR-binding peptide
  MOD_RES (27)..(27): Xaa is C or S
LNAISILYFVGRKPKVLKKYRMIVRSX

SEQ ID NO: 20236 - protein, 33 aa, Artificial Sequence
  Cyclic GFR-binding peptide
  MOD_RES (30)..(32): Xaa is C or S
TRLSAISILYLDSANNVVLKNYQDMVVESXGXR

SEQ ID NO: 20237 - protein, 35 aa, Artificial Sequence
  Cyclic GFR-binding peptide
  MOD_RES (3)..(4): Xaa is C or S
KAXXVPTELEPLTMLYYDENEKVVEQLSNDMVVEG

SEQ ID NO: 20238 - protein, 32 aa, Artificial Sequence
  Cyclic GFR-binding peptide
  MOD_RES (3)..(4): Xaa is C or S
KAXXVPTELEPLPMVYYDEYDKVVEQLSNEMV

SEQ ID NO: 20239 - protein, 27 aa, Artificial Sequence
  Cyclic GFR-binding peptide
APTKLSPISVLFIDDSSNVIYKQYENM

SEQ ID NO: 20240 - protein, 29 aa, Artificial Sequence
  Cyclic GFR-binding peptide
TELEPLTMLYYDEYDKVVEQLSNEMVVEG

SEQ ID NO: 20241 - protein, 36 aa, Artificial Sequence
  Cyclic GFR-binding peptide
  MOD_RES (3)..(4)..(35): Xaa is C or S
APXXVPQALEPLTILYYVGRKPKVEQLSNMIVRSXK

SEQ ID NO: 20242 - protein, 30 aa, Artificial Sequence
  Cyclic GFR-binding peptide
  MOD_RES (30)..(30): Xaa is C or S
TELEPLTMLYYDEYDKVVEQLSNEMVVEGX

SEQ ID NO: 20243 - protein, 32 aa, Artificial Sequence; identical to SEQ ID NO: 10053
  Cyclic GFR-binding peptide
  MOD_RES (3)..(4): Xaa is C or S

SEQ ID NO: 20244 - protein, 25 aa, Artificial Sequence
  Cyclic GFR-binding peptide
SPISILFIIGKTPKIYKQYEMIVKS

SEQ ID NO: 20245 - protein, 31 aa, Artificial Sequence; identical to SEQ ID NO: 10056
  Cyclic GFR-binding peptide
  MOD_RES (3)..(4): Xaa is C or S

SEQ ID NO: 20246 - protein, 32 aa, Artificial Sequence; identical to SEQ ID NO: 10057
  Cyclic GFR-binding peptide
  MOD_RES (1)..(2): Xaa is C or S

SEQ ID NO: 20247 - protein, 24 aa, Artificial Sequence
  Cyclic GFR-binding peptide
QALSPISILFIVGRKPKVYKQYEM

SEQ ID NO: 20248 - protein, 25 aa, Artificial Sequence
  Cyclic GFR-binding peptide
VPTELEPLTMLYYDENEKVVEQLSN

SEQ ID NO: 20249 - protein, 32 aa, Artificial Sequence; identical to SEQ ID NO: 10058
  Cyclic GFR-binding peptide
  MOD_RES (30)..(32): Xaa is C or S

SEQ ID NO: 20250 - protein, 33 aa, Artificial Sequence
  Cyclic GFR-binding peptide
  MOD_RES (1)..(33): Xaa is C or S
XVPTELSPISMLFIDEYDKVVYKQYEEMVVEGX

SEQ ID NO: 20251 - protein, 30 aa, Artificial Sequence; identical to SEQ ID NO: 10059
  Cyclic GFR-binding peptide

SEQ ID NO: 20252 - protein, 36 aa, Artificial Sequence
  Cyclic GFR-binding peptide
  MOD_RES (3)..(4)..(36): Xaa is C or S
KPXXAPTQLSPISVLFIDDSSNVIYKQYENMVVRAX

SEQ ID NO: 20253 - protein, 31 aa, Artificial Sequence; identical to SEQ ID NO: 10061
  Cyclic GFR-binding peptide
  MOD_RES (5)..(6): Xaa is C or S

SEQ ID NO: 20254 - protein, 28 aa, Artificial Sequence
  Cyclic GFR-binding peptide
VPTRLSAISILYLDSANNVVLKNYQDMV

SEQ ID NO: 20255 - protein, 33 aa, Artificial Sequence
  Cyclic GFR-binding peptide
  MOD_RES (1)..(32): Xaa is C or S
XVSQDLSPISILFIIGKTPKIYKQYEMIVKSXK

SEQ ID NO: 20256 - protein, 36 aa, Artificial Sequence
  Cyclic GFR-binding peptide
  MOD_RES (7)..(7): Xaa is C or S
HVTKPTXAPTKLEPLTVLYYDDSSNVIEQLSNNMVV

SEQ ID NO: 20257 - protein, 34 aa, Artificial Sequence; identical to SEQ ID NO: 10063
  Cyclic GFR-binding peptide
  MOD_RES (6)..(7): Xaa is C or S

SEQ ID NO: 20258 - protein, 31 aa, Artificial Sequence
  Cyclic GFR-binding peptide
  MOD_RES (5)..(6): Xaa is C or S
IPKAXXVPTELSPISMLFIDENEKVVYKQYE

SEQ ID NO: 20259 - protein, 32 aa, Artificial Sequence; identical to SEQ ID NO: 10066
  Cyclic GFR-binding peptide
  MOD_RES (3)..(4): Xaa is C or S

SEQ ID NO: 20260 - protein, 26 aa, Artificial Sequence
  Cyclic GFR-binding peptide
EPLPVVYYDDSSNVIEQLSNNMVVRA

SEQ ID NO: 20261 - protein, 34 aa, Artificial Sequence
  Cyclic GFR-binding peptide
  MOD_RES (2)..(3): Xaa is C or S
TXXVPTRLEPLPIVYYDSANNVVEQLSNDMVVES

SEQ ID NO: 20262 - protein, 27 aa, Artificial Sequence
  Cyclic GFR-binding peptide
  MOD_RES (1)..(2): Xaa is C or S
XXVPQDLSPISILFIVGRTPKVYKQYE

SEQ ID NO: 20263 - protein, 24 aa, Artificial Sequence
  Cyclic GFR-binding peptide
TKLEPLTVLYYDDSSNVIEQLSNN

SEQ ID NO: 20264 - protein, 28 aa, Artificial Sequence
  Cyclic GFR-binding peptide
VPQALSAISILYLVGRKPKVLKNYQMIV

SEQ ID NO: 20265 - protein, 26 aa, Artificial Sequence
  Cyclic GFR-binding peptide
TQLSPISVLFIDDSSNVIYKQYENMV

SEQ ID NO: 20266 - protein, 22 aa, Artificial Sequence
  Cyclic GFR-binding peptide
NAISMLYFDEYDKVVLKKYREM

SEQ ID NO: 20267 - protein, 35 aa, Artificial Sequence
  Cyclic GFR-binding peptide
  MOD_RES (4)..(5): Xaa is C or S
PKPXXAPTKLSPISVLFIDDSSNVIYKQYENMVVR

SEQ ID NO: 20268 - protein, 24 aa, Artificial Sequence
  Cyclic GFR-binding peptide
DLSAISILYLVGRTPKVLKNYQMV

SEQ ID NO: 20269 - protein, 36 aa, Artificial Sequence; identical to SEQ ID NO: 10081
  Cyclic GFR-binding peptide
  MOD_RES (3)..(4)..(35): Xaa is C or S

SEQ ID NO: 20270 - protein, 28 aa, Artificial Sequence
  Cyclic GFR-binding peptide
TELEPLTMLYYDENEKVVEQLSNDMVVE

SEQ ID NO: 20271 - protein, 25 aa, Artificial Sequence
  Cyclic GFR-binding peptide
ELNAISMLYFDEYDKVVLKKYREMV

SEQ ID NO: 20272 - protein, 25 aa, Artificial Sequence
  Cyclic GFR-binding peptide
VSQDLSPISILFIIGKTPKIYKQYE

SEQ ID NO: 20273 - protein, 26 aa, Artificial Sequence
  Cyclic GFR-binding peptide
PTQLEPLTVLYYDDSSNVIEQLSNNM

SEQ ID NO: 20274 - protein, 23 aa, Artificial Sequence
  Cyclic GFR-binding peptide
EPLPIVYYVGRTPKVEQLSNMVV

SEQ ID NO: 20275 - protein, 35 aa, Artificial Sequence; identical to SEQ ID NO: 10093
  Cyclic GFR-binding peptide
  MOD_RES (3)..(4)..(35): Xaa is C or S

SEQ ID NO: 20276 - protein, 30 aa, Artificial Sequence
  Cyclic GFR-binding peptide
  MOD_RES (5)..(5): Xaa is C or S
TKPTXAPTKLSPISVLFIDDSSNVIYKQYE

SEQ ID NO: 20277 - protein, 30 aa, Artificial Sequence
  Cyclic GFR-binding peptide
  MOD_RES (30)..(30): Xaa is C or S
TQLEPLTVLYYDDSSNVIEQLSNNMVVRAX

SEQ ID NO: 20278 - protein, 41 aa, Artificial Sequence
  Cyclic GFR-binding peptide
  MOD_RES (6)..(7)..(39)..(41): Xaa is C or S
KIPKAXXVPTELSPISMLFIDENEKVVYKQYEDMVVEGXGX

SEQ ID NO: 20279 - protein, 39 aa, Artificial Sequence
  Cyclic GFR-binding peptide
  MOD_RES (3)..(4)..(36)..(38): Xaa is C or S
KPXXAPTKLSPISVLFIDDSSNVIYKQYENMVVRSXGXH

SEQ ID NO: 20280 - protein, 24 aa, Artificial Sequence
  Cyclic GFR-binding peptide
QDLSAISILYLIGKTPKILKNYQM

SEQ ID NO: 20281 - protein, 39 aa, Artificial Sequence
  Cyclic GFR-binding peptide
  MOD_RES (6)..(7)..(39): Xaa is C or S
KIPKAXXVPTELEPLTMLYYDENEKVVEQLSNDMVVEGX

SEQ ID NO: 20282 - protein, 33 aa, Artificial Sequence; identical to SEQ ID NO: 10101
  Cyclic GFR-binding peptide
  MOD_RES (3)..(4): Xaa is C or S

SEQ ID NO: 20283 - protein, 26 aa, Artificial Sequence
  Cyclic GFR-binding peptide
  MOD_RES (1)..(1): Xaa is C or S
XVSQDLNAISILYFIGKTPKILKKYR

SEQ ID NO: 20284 - protein, 30 aa, Artificial Sequence
  Cyclic GFR-binding peptide
  MOD_RES (4)..(5): Xaa is C or S
PKPXXAPTQLEPLPVVYYDDSSNVIEQLSN

SEQ ID NO: 20285 - protein, 30 aa, Artificial Sequence
  Cyclic GFR-binding peptide
  MOD_RES (29)..(29): Xaa is C or S
QDLEPLPIVYYIGKTPKIEQLSNMIVKSXK

SEQ ID NO: 20286 - protein, 34 aa, Artificial Sequence
  Cyclic GFR-binding peptide
  MOD_RES (31)..(33): Xaa is C or S
VPQDLSPISILFIVGRTPKVYKQYEMVVKSXKXS

SEQ ID NO: 20287 - protein, 30 aa, Artificial Sequence
  Cyclic GFR-binding peptide
  MOD_RES (1)..(1): Xaa is C or S
XVPTELEPLPMVYYDENEKVVEQLSNDMVV

SEQ ID NO: 20288 - protein, 32 aa, Artificial Sequence; identical to SEQ ID NO: 10110
  Cyclic GFR-binding peptide
  MOD_RES (4)..(5): Xaa is C or S

SEQ ID NO: 20289 - protein, 30 aa, Artificial Sequence
  Cyclic GFR-binding peptide
  MOD_RES (29)..(29): Xaa is C or S
ELEPLTMLYYDENEKVVEQLSNDMVVEGXG

SEQ ID NO: 20290 - protein, 40 aa, Artificial Sequence
  Cyclic GFR-binding peptide
  MOD_RES (4)..(5)..(37)..(39): Xaa is C or S
PKPXXAPTKLEPLTVLYYDDSSNVIEQLSNNMVVRSXGXH

SEQ ID NO: 20291 - protein, 37 aa, Artificial Sequence
  Cyclic GFR-binding peptide
  MOD_RES (4)..(5)..(37): Xaa is C or S
PKAXXVPTELSPISMLFIDEYDKVVYKQYEEMVVEGX

SEQ ID NO: 20292 - protein, 34 aa, Artificial Sequence
  Cyclic GFR-binding peptide
  MOD_RES (1)..(2)..(34): Xaa is C or S
XXAPTKLSPISVLFIDDSSNVIYKQYENMVVRSX

SEQ ID NO: 20293 - protein, 32 aa, Artificial Sequence; identical to SEQ ID NO: 10118
  Cyclic GFR-binding peptide
  MOD_RES (1)..(2): Xaa is C or S

SEQ ID NO: 20294 - protein, 36 aa, Artificial Sequence
  Cyclic GFR-binding peptide
  MOD_RES (4)..(5)..(36): Xaa is C or S
ASPXXVPQDLEPLPIVYYVGRTPKVEQLSNMVVKSX

SEQ ID NO: 20295 - protein, 30 aa, Artificial Sequence
  Cyclic GFR-binding peptide
  MOD_RES (2)..(3): Xaa is C or S
PXXVSQDLSPISILFIIGKTPKIYKQYEMI

SEQ ID NO: 20296 - protein, 40 aa, Artificial Sequence; identical to SEQ ID NO: 10124
  Cyclic GFR-binding peptide
  MOD_RES (5)..(6)..(37)..(39): Xaa is C or S

SEQ ID NO: 20297 - protein, 27 aa, Artificial Sequence
  Cyclic GFR-binding peptide
  MOD_RES (1)..(2): Xaa is C or S
XXVPTELNAISMLYFDENEKVVLKKYR

SEQ ID NO: 20298 - protein, 32 aa, Artificial Sequence
  Cyclic GFR-binding peptide
  MOD_RES (1)..(2): Xaa is C or S
XXVSQDLSPISILFIIGKTPKIYKQYEMIVKS

SEQ ID NO: 20299 - protein, 37 aa, Artificial Sequence; identical to SEQ ID NO: 10127
  Cyclic GFR-binding peptide
  MOD_RES (6)..(7): Xaa is C or S

SEQ ID NO: 20300 - protein, 29 aa, Artificial Sequence
  Cyclic GFR-binding peptide
  MOD_RES (4)..(4): Xaa is C or S
KPTXAPTKLSPISVLFIDDSSNVIYKQYE

SEQ ID NO: 20301 - protein, 41 aa, Artificial Sequence; identical to SEQ ID NO: 10128
  Cyclic GFR-binding peptide
  MOD_RES (6)..(7)..(38)..(40): Xaa is C or S

SEQ ID NO: 20302 - protein, 21 aa, Artificial Sequence
  Cyclic GFR-binding peptide
EPLPMVYYDENEKVVEQLSND

SEQ ID NO: 20303 - protein, 24 aa, Artificial Sequence
  Cyclic GFR-binding peptide
TQLSPISVLFIDDSSNVIYKQYEN

SEQ ID NO: 20304 - protein, 31 aa, Artificial Sequence
  Cyclic GFR-binding peptide
  MOD_RES (28)..(30): Xaa is C or S
DLEPLPIVYYVGRTPKVEQLSNMVVKSXKXS

SEQ ID NO: 20305 - protein, 29 aa, Artificial Sequence
  Cyclic GFR-binding peptide
PQALEPLTILYYVGRKPKVEQLSNMIVRS

SEQ ID NO: 20306 - protein, 26 aa, Artificial Sequence
  Cyclic GFR-binding peptide
LNAISILYFVGRTPKVLKKYRMVVKS

SEQ ID NO: 20307 - protein, 28 aa, Artificial Sequence
  Cyclic GFR-binding peptide
  MOD_RES (28)..(28): Xaa is C or S
LSPISMLFIDEYDKVVYKQYEEMVVEGX

SEQ ID NO: 20308 - protein, 31 aa, Artificial Sequence
  Cyclic GFR-binding peptide
APTQLEPLPVVYYDDSSNVIEQLSNNMVVRA

SEQ ID NO: 20309 - protein, 34 aa, Artificial Sequence
  Cyclic GFR-binding peptide
  MOD_RES (32)..(34): Xaa is C or S
APTKLEPLPVVYYDDSSNVIEQLSNNMVVRSXGX

SEQ ID NO: 20310 - protein, 35 aa, Artificial Sequence
  Cyclic GFR-binding peptide
  MOD_RES (5)..(6): Xaa is C or S
IPKAXXVPTELSPISMLFIDEYDKVVYKQYEEMVV

SEQ ID NO: 20311 - protein, 37 aa, Artificial Sequence
  Cyclic GFR-binding peptide
  MOD_RES (2)..(3)..(35)..(37): Xaa is C or S
TXXVPTRLNAISILYFDSANNVVLKKYRDMVVESXGX

SEQ ID NO: 20312 - protein, 36 aa, Artificial Sequence; identical to SEQ ID NO: 10136
  Cyclic GFR-binding peptide
  MOD_RES (4)..(5)..(36): Xaa is C or S

SEQ ID NO: 20313 - protein, 30 aa, Artificial Sequence
  Cyclic GFR-binding peptide
  MOD_RES (1)..(1): Xaa is C or S
XAPTKLEPLTVLYYDDSSNVIEQLSNNMVV

SEQ ID NO: 20314 - protein, 28 aa, Artificial Sequence
  Cyclic GFR-binding peptide
  MOD_RES (26)..(28): Xaa is C or S
EPLTILYYVGRKPKVEQLSNMIVRSXKX

SEQ ID NO: 20315 - protein, 24 aa, Artificial Sequence
  Cyclic GFR-binding peptide
ELEPLPMVYYDEYDKVVEQLSNEM

SEQ ID NO: 20316 - protein, 35 aa, Artificial Sequence
  Cyclic GFR-binding peptide
  MOD_RES (6)..(7): Xaa is C or S
STPPTXXVPTRLEPLPIVYYDSANNVVEQLSNDMV

SEQ ID NO: 20317 - protein, 24 aa, Artificial Sequence
  Cyclic GFR-binding peptide
PTRLEPLPIVYYDSANNVVEQLSN

SEQ ID NO: 20318 - protein, 34 aa, Artificial Sequence
  Cyclic GFR-binding peptide
  MOD_RES (31)..(33): Xaa is C or S
PTRLEPLPIVYYDSANNVVEQLSNDMVVESXGXR

SEQ ID NO: 20319 - protein, 33 aa, Artificial Sequence; identical to SEQ ID NO: 10142
  Cyclic GFR-binding peptide
  MOD_RES (30)..(32): Xaa is C or S

SEQ ID NO: 20320 - protein, 28 aa, Artificial Sequence
  Cyclic GFR-binding peptide
  MOD_RES (2)..(2): Xaa is C or S
TXAPTKLEPLPVVYYDDSSNVIEQLSNN

SEQ ID NO: 20321 - protein, 31 aa, Artificial Sequence; identical to SEQ ID NO: 10143
  Cyclic GFR-binding peptide
  MOD_RES (1)..(1): Xaa is C or S

SEQ ID NO: 20322 - protein, 38 aa, Artificial Sequence
  Cyclic GFR-binding peptide
  MOD_RES (7)..(7): Xaa is C or S
HVTKPTXAPTKLSPISVLFIDDSSNVIYKQYENMVVRS

SEQ ID NO: 20323 - protein, 21 aa, Artificial Sequence
  Cyclic GFR-binding peptide
LEPLPMVYYDENEKVVEQLSN

SEQ ID NO: 20324 - protein, 30 aa, Artificial Sequence; identical to SEQ ID NO: 10144
  Cyclic GFR-binding peptide
  MOD_RES (1)..(2): Xaa is C or S

SEQ ID NO: 20325 - protein, 28 aa, Artificial Sequence
  Cyclic GFR-binding peptide
  MOD_RES (2)..(3): Xaa is C or S
PXXAPTQLEPLTVLYYDDSSNVIEQLSN

SEQ ID NO: 20326 - protein, 25 aa, Artificial Sequence
  Cyclic GFR-binding peptide
SAISVLYLDDSSNVILKNYQNMVVR

SEQ ID NO: 20327 - protein, 35 aa, Artificial Sequence; identical to SEQ ID NO: 10152
  Cyclic GFR-binding peptide
  MOD_RES (32)..(34): Xaa is C or S

SEQ ID NO: 20328 - protein, 25 aa, Artificial Sequence
  Cyclic GFR-binding peptide
PQALSPISILFIVGRKPKVYKQYEM

SEQ ID NO: 20329 - protein, 27 aa, Artificial Sequence
  Cyclic GFR-binding peptide
  MOD_RES (27)..(27): Xaa is C or S
LEPLTILYYVGRKPKVEQLSNMIVRSX

SEQ ID NO: 20330 - protein, 33 aa, Artificial Sequence
  Cyclic GFR-binding peptide
  MOD_RES (32)..(32): Xaa is C or S
VPTRLNAISILYFDSANNVVLKKYRDMVVESXG

SEQ ID NO: 20331 - protein, 24 aa, Artificial Sequence
  Cyclic GFR-binding peptide
EPLTVLYYDDSSNVIEQLSNNMVV

SEQ ID NO: 20332 - protein, 38 aa, Artificial Sequence; identical to SEQ ID NO: 10161
  Cyclic GFR-binding peptide
  MOD_RES (3)..(4)..(36)..(38): Xaa is C or S

SEQ ID NO: 20333 - protein, 21 aa, Artificial Sequence
  Cyclic GFR-binding peptide
SAISVLYLDDSSNVILKNYQN

SEQ ID NO: 20334 - protein, 33 aa, Artificial Sequence
  Cyclic GFR-binding peptide
  MOD_RES (1)..(33): Xaa is C or S
XVPTELEPLPMVYYDENEKVVEQLSNDMVVEGX

SEQ ID NO: 20335 - protein, 34 aa, Artificial Sequence; identical to SEQ ID NO: 10164
  Cyclic GFR-binding peptide
  MOD_RES (5)..(6): Xaa is C or S

SEQ ID NO: 20336 - protein, 40 aa, Artificial Sequence; identical to SEQ ID NO: 10166
  Cyclic GFR-binding peptide
  MOD_RES (5)..(6)..(38)..(40): Xaa is C or S

SEQ ID NO: 20337 - protein, 33 aa, Artificial Sequence
  Cyclic GFR-binding peptide
  MOD_RES (31)..(33): Xaa is C or S
VPQDLEPLPIVYYVGRTPKVEQLSNMVVKSXKX

SEQ ID NO: 20338 - protein, 39 aa, Artificial Sequence; identical to SEQ ID NO: 10167
  Cyclic GFR-binding peptide
  MOD_RES (6)..(7)..(38): Xaa is C or S

SEQ ID NO: 20339 - protein, 35 aa, Artificial Sequence
  Cyclic GFR-binding peptide
  MOD_RES (5)..(6): Xaa is C or S
TPPTXXVPTRLEPLPIVYYDSANNVVEQLSNDMVV

SEQ ID NO: 20340 - protein, 25 aa, Artificial Sequence
  Cyclic GFR-binding peptide
SQDLSPISILFIIGKTPKIYKQYEM

SEQ ID NO: 20341 - protein, 28 aa, Artificial Sequence
  Cyclic GFR-binding peptide
PTELEPLPMVYYDEYDKVVEQLSNEMVV

SEQ ID NO: 20342 - protein, 33 aa, Artificial Sequence
  Cyclic GFR-binding peptide
  MOD_RES (2)..(3): Xaa is C or S
PXXAPTKLEPLPVVYYDDSSNVIEQLSNNMVVR

SEQ ID NO: 20343 - protein, 35 aa, Artificial Sequence; identical to SEQ ID NO: 10168
  Cyclic GFR-binding peptide
  MOD_RES (7)..(7): Xaa is C or S

SEQ ID NO: 20344 - protein, 33 aa, Artificial Sequence
  Cyclic GFR-binding peptide
  MOD_RES (32)..(32): Xaa is C or S
VPTELSPISMLFIDENEKVVYKQYEDMVVEGXG

SEQ ID NO: 20345 - protein, 30 aa, Artificial Sequence; identical to SEQ ID NO: 10171
  Cyclic GFR-binding peptide
  MOD_RES (4)..(5): Xaa is C or S

SEQ ID NO: 20346 - protein, 28 aa, Artificial Sequence
  Cyclic GFR-binding peptide
  MOD_RES (27)..(27): Xaa is C or S
EPLTVLYYDDSSNVIEQLSNNMVVRSXG

SEQ ID NO: 20347 - protein, 27 aa, Artificial Sequence
  Cyclic GFR-binding peptide
TELNAISMLYFDENEKVVLKKYRDMVV

SEQ ID NO: 20348 - protein, 35 aa, Artificial Sequence; identical to SEQ ID NO: 10173
  Cyclic GFR-binding peptide
  MOD_RES (1)..(32)..(34): Xaa is C or S

SEQ ID NO: 20349 - protein, 36 aa, Artificial Sequence
  Cyclic GFR-binding peptide
  MOD_RES (4)..(5): Xaa is C or S
PKPXXAPTKLEPLTVLYYDDSSNVIEQLSNNMVVRS

SEQ ID NO: 20350 - protein, 27 aa, Artificial Sequence
  Cyclic GFR-binding peptide
QLEPLPVVYYDDSSNVIEQLSNNMVVR

SEQ ID NO: 20351 - protein, 35 aa, Artificial Sequence
  Cyclic GFR-binding peptide
  MOD_RES (3)..(35): Xaa is C or S
PTXAPTKLEPLTVLYYDDSSNVIEQLSNNMVVRSX

SEQ ID NO: 20352 - protein, 28 aa, Artificial Sequence
  Cyclic GFR-binding peptide
  MOD_RES (27)..(27): Xaa is C or S
LSAISILYLVGRKPKVLKNYQMIVRSXK

SEQ ID NO: 20353 - protein, 42 aa, Artificial Sequence
  Cyclic GFR-binding peptide
  MOD_RES (6)..(7)..(39)..(41): Xaa is C or S
SIPKAXXVPTELEPLTMLYYDEYDKVVEQLSNEMVVEGXGXR

SEQ ID NO: 20354 - protein, 38 aa, Artificial Sequence
  Cyclic GFR-binding peptide
  MOD_RES (6)..(7): Xaa is C or S
YVPKPXXAPTKLSPISVLFIDDSSNVIYKQYENMVVRS

SEQ ID NO: 20355 - protein, 29 aa, Artificial Sequence
  Cyclic GFR-binding peptide
  MOD_RES (1)..(1): Xaa is C or S
XVPTRLSAISILYLDSANNVVLKNYQDMV

SEQ ID NO: 20356 - protein, 26 aa, Artificial Sequence
  Cyclic GFR-binding peptide
DLEPLPIVYYVGRTPKVEQLSNMVVK

SEQ ID NO: 20357 - protein, 27 aa, Artificial Sequence
  Cyclic GFR-binding peptide
  MOD_RES (1)..(1): Xaa is C or S
XVPTRLEPLPIVYYDSANNVVEQLSND

SEQ ID NO: 20358 - protein, 31 aa, Artificial Sequence; identical to SEQ ID NO: 10179
  Cyclic GFR-binding peptide
  MOD_RES (28)..(30): Xaa is C or S

SEQ ID NO: 20359 - protein, 26 aa, Artificial Sequence
  Cyclic GFR-binding peptide
TELEPLPMVYYDEYDKVVEQLSNEMV

SEQ ID NO: 20360 - protein, 24 aa, Artificial Sequence
  Cyclic GFR-binding peptide
QDLSPISILFIVGRTPKVYKQYEM

SEQ ID NO: 20361 - protein, 29 aa, Artificial Sequence
  Cyclic GFR-binding peptide
  MOD_RES (28)..(28): Xaa is C or S
LEPLPMVYYDENEKVVEQLSNDMVVEGXG

SEQ ID NO: 20362 - protein, 35 aa, Artificial Sequence; identical to SEQ ID NO: 10188
  Cyclic GFR-binding peptide
  MOD_RES (2)..(3)..(35): Xaa is C or S

SEQ ID NO: 20363 - protein, 31 aa, Artificial Sequence
  Cyclic GFR-binding peptide
  MOD_RES (4)..(5): Xaa is C or S
PPTXXVPTRLEPLTILYYDSANNVVEQLSND

SEQ ID NO: 20364 - protein, 39 aa, Artificial Sequence
  Cyclic GFR-binding peptide
  MOD_RES (3)..(4)..(36)..(38): Xaa is C or S
KAXXVPTELEPLPMVYYDENEKVVEQLSNDMVVEGXGXR

SEQ ID NO: 20365 - protein, 34 aa, Artificial Sequence
  Cyclic GFR-binding peptide
  MOD_RES (1)..(2)..(34): Xaa is C or S
XXVPTRLEPLTILYYDSANNVVEQLSNDMVVESX

SEQ ID NO: 20366 - protein, 42 aa, Artificial Sequence; identical to SEQ ID NO: 10193
  Cyclic GFR-binding peptide
  MOD_RES (6)..(7)..(39)..(41): Xaa is C or S

SEQ ID NO: 20367 - protein, 27 aa, Artificial Sequence
  Cyclic GFR-binding peptide
PTRLNAISILYFDSANNVVLKKYRDMV

SEQ ID NO: 20368 - protein, 35 aa, Artificial Sequence; identical to SEQ ID NO: 10195
  Cyclic GFR-binding peptide
  MOD_RES (1)..(33)..(35): Xaa is C or S

SEQ ID NO: 20369 - protein, 39 aa, Artificial Sequence; identical to SEQ ID NO: 10198
  Cyclic GFR-binding peptide
  MOD_RES (6)..(7)..(38): Xaa is C or S

SEQ ID NO: 20370 - protein, 38 aa, Artificial Sequence
  Cyclic GFR-binding peptide
  MOD_RES (6)..(7)..(38): Xaa is C or S
ASASPXXVPQDLEPLPIVYYVGRTPKVEQLSNMVVKSX

SEQ ID NO: 20371 - protein, 32 aa, Artificial Sequence; identical to SEQ ID NO: 10201
  Cyclic GFR-binding peptide
  MOD_RES (3)..(3): Xaa is C or S

SEQ ID NO: 20372 - protein, 29 aa, Artificial Sequence
  Cyclic GFR-binding peptide
  MOD_RES (28)..(28): Xaa is C or S
LEPLTVLYYDDSSNVIEQLSNNMVVRAXG

SEQ ID NO: 20373 - protein, 34 aa, Artificial Sequence; identical to SEQ ID NO: 10203
  Cyclic GFR-binding peptide
  MOD_RES (32)..(34): Xaa is C or S

SEQ ID NO: 20374 - protein, 25 aa, Artificial Sequence
  Cyclic GFR-binding peptide
PTELNAISMLYFDENEKVVLKKYRD

SEQ ID NO: 20375 - protein, 30 aa, Artificial Sequence
  Cyclic GFR-binding peptide
  MOD_RES (28)..(30): Xaa is C or S
LSPISMLFIDEYDKVVYKQYEEMVVEGXGX

SEQ ID NO: 20376 - protein, 29 aa, Artificial Sequence
  Cyclic GFR-binding peptide
  MOD_RES (2)..(3): Xaa is C or S
PXXAPTQLSAISVLYLDDSSNVILKNYQN

SEQ ID NO: 20377 - protein, 20 aa, Artificial Sequence
  Cyclic GFR-binding peptide
NAISILYFIGKTPKILKKYR

SEQ ID NO: 20378 - protein, 27 aa, Artificial Sequence
  Cyclic GFR-binding peptide
TQLSPISVLFIDDSSNVIYKQYENMVV

SEQ ID NO: 20379 - protein, 35 aa, Artificial Sequence; identical to SEQ ID NO: 10210
  Cyclic GFR-binding peptide
  MOD_RES (32)..(34): Xaa is C or S

SEQ ID NO: 20380 - protein, 33 aa, Artificial Sequence
  Cyclic GFR-binding peptide
  MOD_RES (4)..(4): Xaa is C or S
KPTXAPTKLEPLTVLYYDDSSNVIEQLSNNMVV

SEQ ID NO: 20381 - protein, 29 aa, Artificial Sequence
  Cyclic GFR-binding peptide
TRLEPLPIVYYDSANNVVEQLSNDMVVES

SEQ ID NO: 20382 - protein, 33 aa, Artificial Sequence
  Cyclic GFR-binding peptide
  MOD_RES (6)..(7): Xaa is C or S
KIPKAXXVPTELSPISMLFIDENEKVVYKQYED

SEQ ID NO: 20383 - protein, 36 aa, Artificial Sequence; identical to SEQ ID NO: 10213
  Cyclic GFR-binding peptide
  MOD_RES (5)..(6): Xaa is C or S

SEQ ID NO: 20384 - protein, 26 aa, Artificial Sequence
  Cyclic GFR-binding peptide
TKLSPISVLFIDDSSNVIYKQYENMV

SEQ ID NO: 20385 - protein, 40 aa, Artificial Sequence
  Cyclic GFR-binding peptide
  MOD_RES (5)..(37)..(39): Xaa is C or S
TKPTXAPTKLEPLTVLYYDDSSNVIEQLSNNMVVRSXGXH

SEQ ID NO: 20386 - protein, 30 aa, Artificial Sequence
  Cyclic GFR-binding peptide
APTQLSPISVLFIDDSSNVIYKQYENMVVR

SEQ ID NO: 20387 - protein, 22 aa, Artificial Sequence
  Cyclic GFR-binding peptide
LNAISILYFIGKTPKILKKYRM

SEQ ID NO: 20388 - protein, 37 aa, Artificial Sequence
  Cyclic GFR-binding peptide
  MOD_RES (6)..(7): Xaa is C or S
TVPKPXXAPTQLSPISVLFIDDSSNVIYKQYENMVVR

SEQ ID NO: 20389 - protein, 27 aa, Artificial Sequence
  Cyclic GFR-binding peptide
  MOD_RES (1)..(2): Xaa is C or S
XXVPTELEPLTMLYYDENEKVVEQLSN

SEQ ID NO: 20390 - protein, 31 aa, Artificial Sequence
  Cyclic GFR-binding peptide
  MOD_RES (28)..(30): Xaa is C or S
LEPLPVVYYDDSSNVIEQLSNNMVVRSXGXH

SEQ ID NO: 20391 - protein, 41 aa, Artificial Sequence
  Cyclic GFR-binding peptide
  MOD_RES (6)..(7)..(39)..(41): Xaa is C or S
YVPKPXXAPTKLEPLTVLYYDDSSNVIEQLSNNMVVRSXGX

SEQ ID NO: 20392 - protein, 32 aa, Artificial Sequence
  Cyclic GFR-binding peptide
  MOD_RES (3)..(4): Xaa is C or S
KAXXVPTELEPLTMLYYDEYDKVVEQLSNEMV

SEQ ID NO: 20393 - protein, 34 aa, Artificial Sequence
  Cyclic GFR-binding peptide
  MOD_RES (1)..(33): Xaa is C or S
XVPTELSPISMLFIDENEKVVYKQYEDMVVEGXG

SEQ ID NO: 20394 - protein, 26 aa, Artificial Sequence
  Cyclic GFR-binding peptide
  MOD_RES (26)..(26): Xaa is C or S
EPLPIVYYIGKTPKIEQLSNMIVKSX

SEQ ID NO: 20395 - protein, 38 aa, Artificial Sequence; identical to SEQ ID NO: 10223
  Cyclic GFR-binding peptide
  MOD_RES (5)..(6)..(38): Xaa is C or S

SEQ ID NO: 20396 - protein, 23 aa, Artificial Sequence
  Cyclic GFR-binding peptide
LNAISILYFVGRTPKVLKKYRMV

SEQ ID NO: 20397 - protein, 22 aa, Artificial Sequence
  Cyclic GFR-binding peptide
RLSAISILYLDSANNVVLKNYQ

SEQ ID NO: 20398 - protein, 41 aa, Artificial Sequence
  Cyclic GFR-binding peptide
  MOD_RES (6)..(7)..(39)..(41): Xaa is C or S
YVPKPXXAPTKLSPISVLFIDDSSNVIYKQYENMVVRSXGX

SEQ ID NO: 20399 - protein, 32 aa, Artificial Sequence; identical to SEQ ID NO: 10226
  Cyclic GFR-binding peptide
  MOD_RES (31)..(31): Xaa is C or S

SEQ ID NO: 20400 - protein, 30 aa, Artificial Sequence
  Cyclic GFR-binding peptide
  MOD_RES (28)..(30): Xaa is C or S
LEPLTMLYYDEYDKVVEQLSNEMVVEGXGX

SEQ ID NO: 20401 - protein, 31 aa, Artificial Sequence
  Cyclic GFR-binding peptide
  MOD_RES (31)..(31): Xaa is C or S
PTRLNAISILYFDSANNVVLKKYRDMVVESX

SEQ ID NO: 20402 - protein, 24 aa, Artificial Sequence
  Cyclic GFR-binding peptide
QLSPISVLFIDDSSNVIYKQYENM

SEQ ID NO: 20403 - protein, 33 aa, Artificial Sequence
  Cyclic GFR-binding peptide
  MOD_RES (2)..(3): Xaa is C or S
PXXVPQALSPISILFIVGRKPKVYKQYEMIVRS

SEQ ID NO: 20404 - protein, 23 aa, Artificial Sequence
  Cyclic GFR-binding peptide
RLEPLTILYYDSANNVVEQLSND

SEQ ID NO: 20405 - protein, 22 aa, Artificial Sequence
  Cyclic GFR-binding peptide
ELSPISMLFIDENEKVVYKQYE

SEQ ID NO: 20406 - protein, 34 aa, Artificial Sequence
  Cyclic GFR-binding peptide
  MOD_RES (5)..(5): Xaa is C or S
TKPTXAPTKLEPLPVVYYDDSSNVIEQLSNNMVV

SEQ ID NO: 20407 - protein, 30 aa, Artificial Sequence
  Cyclic GFR-binding peptide
VPTRLNAISILYFDSANNVVLKKYRDMVVE

SEQ ID NO: 20408 - protein, 32 aa, Artificial Sequence
  Cyclic GFR-binding peptide
  MOD_RES (6)..(7): Xaa is C or S
ASASPXXVSQDLSPISILFIIGKTPKIYKQYE

SEQ ID NO: 20409 - protein, 39 aa, Artificial Sequence
  Cyclic GFR-binding peptide
  MOD_RES (5)..(6)..(37)..(39): Xaa is C or S
SASPXXVSQDLEPLPIVYYIGKTPKIEQLSNMIVKSXKX

SEQ ID NO: 20410 - protein, 28 aa, Artificial Sequence
  Cyclic GFR-binding peptide
VPQDLSAISILYLVGRTPKVLKNYQMVV

SEQ ID NO: 20411 - protein, 32 aa, Artificial Sequence
  Cyclic GFR-binding peptide
  MOD_RES (29)..(31): Xaa is C or S
QALEPLTILYYVGRKPKVEQLSNMIVRSXKXS

SEQ ID NO: 20412 - protein, 23 aa, Artificial Sequence
  Cyclic GFR-binding peptide
LEPLPVVYYDDSSNVIEQLSNNM

SEQ ID NO: 20413 - protein, 28 aa, Artificial Sequence
  Cyclic GFR-binding peptide
  MOD_RES (1)..(1): Xaa is C or S
XVPTELEPLTMLYYDEYDKVVEQLSNEM

SEQ ID NO: 20414 - protein, 32 aa, Artificial Sequence; identical to SEQ ID NO: 10247
  Cyclic GFR-binding peptide
  MOD_RES (29)..(31): Xaa is C or S

SEQ ID NO: 20415 - protein, 33 aa, Artificial Sequence; identical to SEQ ID NO: 10249
  Cyclic GFR-binding peptide
  MOD_RES (1)..(33): Xaa is C or S

SEQ ID NO: 20416 - protein, 25 aa, Artificial Sequence
  Cyclic GFR-binding peptide
QDLSAISILYLIGKTPKILKNYQMI

SEQ ID NO: 20417 - protein, 28 aa, Artificial Sequence
  Cyclic GFR-binding peptide
PTQLSAISVLYLDDSSNVILKNYQNMVV

SEQ ID NO: 20418 - protein, 41 aa, Artificial Sequence
  Cyclic GFR-binding peptide
  MOD_RES (6)..(7)..(39)..(41): Xaa is C or S
STPPTXXVPTRLEPLTILYYDSANNVVEQLSNDMVVESXGX

SEQ ID NO: 20419 - protein, 22 aa, Artificial Sequence
  Cyclic GFR-binding peptide
SAISILYLVGRTPKVLKNYQMV

SEQ ID NO: 20420 - protein, 30 aa, Artificial Sequence
  Cyclic GFR-binding peptide
  MOD_RES (2)..(3): Xaa is C or S
AXXVPTELEPLTMLYYDEYDKVVEQLSNEM

SEQ ID NO: 20421 - protein, 32 aa, Artificial Sequence
  Cyclic GFR-binding peptide
  MOD_RES (5)..(6): Xaa is C or S
IPKAXXVPTELSPISMLFIDEYDKVVYKQYEE

SEQ ID NO: 20422 - protein, 32 aa, Artificial Sequence
  Cyclic GFR-binding peptide
  MOD_RES (31)..(31): Xaa is C or S
PTELSPISMLFIDEYDKVVYKQYEEMVVEGXG

SEQ ID NO: 20423 - protein, 24 aa, Artificial Sequence
  Cyclic GFR-binding peptide
NAISILYFDSANNVVLKKYRDMVV

SEQ ID NO: 20424 - protein, 21 aa, Artificial Sequence
  Cyclic GFR-binding peptide
NAISILYFDSANNVVLKKYRD

SEQ ID NO: 20425 - protein, 37 aa, Artificial Sequence
  Cyclic GFR-binding peptide
  MOD_RES (6)..(7): Xaa is C or S
KIPKAXXVPTELEPLPMVYYDENEKVVEQLSNDMVVE

SEQ ID NO: 20426 - protein, 33 aa, Artificial Sequence
  Cyclic GFR-binding peptide
  MOD_RES (1)..(2): Xaa is C or S
XXVPTELEPLTMLYYDENEKVVEQLSNDMVVEG

SEQ ID NO: 20427 - protein, 30 aa, Artificial Sequence; identical to SEQ ID NO: 10267
  Cyclic GFR-binding peptide
  MOD_RES (3)..(4): Xaa is C or S

SEQ ID NO: 20428 - protein, 31 aa, Artificial Sequence; identical to SEQ ID NO: 10268
  Cyclic GFR-binding peptide
  MOD_RES (1)..(1): Xaa is C or S

SEQ ID NO: 20429 - protein, 30 aa, Artificial Sequence
  Cyclic GFR-binding peptide
  MOD_RES (2)..(3): Xaa is C or S
PXXAPTQLEPLTVLYYDDSSNVIEQLSNNM

SEQ ID NO: 20430 - protein, 34 aa, Artificial Sequence
  Cyclic GFR-binding peptide
  MOD_RES (5)..(6): Xaa is C or S
SAAPXXVPQALSPISILFIVGRKPKVYKQYEMIV

SEQ ID NO: 20431 - protein, 35 aa, Artificial Sequence
  Cyclic GFR-binding peptide
  MOD_RES (1)..(2)..(33)..(35): Xaa is C or S
XXVPQDLSPISILFIVGRTPKVYKQYEMVVKSXKX

SEQ ID NO: 20432 - protein, 25 aa, Artificial Sequence
  Cyclic GFR-binding peptide
LSAISILYLVGRTPKVLKNYQMVVK

SEQ ID NO: 20433 - protein, 38 aa, Artificial Sequence; identical to SEQ ID NO: 10274
  Cyclic GFR-binding peptide
  MOD_RES (3)..(4)..(36)..(38): Xaa is C or S

SEQ ID NO: 20434 - protein, 30 aa, Artificial Sequence
  Cyclic GFR-binding peptide
PTELEPLPMVYYDENEKVVEQLSNDMVVEG

SEQ ID NO: 20435 - protein, 26 aa, Artificial Sequence
  Cyclic GFR-binding peptide
SQDLNAISILYFIGKTPKILKKYRMI

SEQ ID NO: 20436 - protein, 29 aa, Artificial Sequence
  Cyclic GFR-binding peptide
  MOD_RES (1)..(1): Xaa is C or S
XVPQDLNAISILYFVGRTPKVLKKYRMVV

SEQ ID NO: 20437 - protein, 29 aa, Artificial Sequence
  Cyclic GFR-binding peptide
  MOD_RES (1)..(1): Xaa is C or S
XVPTELEPLPMVYYDENEKVVEQLSNDMV

SEQ ID NO: 20438 - protein, 35 aa, Artificial Sequence
  Cyclic GFR-binding peptide
  MOD_RES (2)..(3)..(34): Xaa is C or S
PXXVPQALSPISILFIVGRKPKVYKQYEMIVRSXK

SEQ ID NO: 20439 - protein, 31 aa, Artificial Sequence
  Cyclic GFR-binding peptide
VPTRLNAISILYFDSANNVVLKKYRDMVVES

SEQ ID NO: 20440 - protein, 36 aa, Artificial Sequence
  Cyclic GFR-binding peptide
  MOD_RES (1)..(2)..(33)..(35): Xaa is C or S
XXVPQDLEPLPIVYYVGRTPKVEQLSNMVVKSXKXS

SEQ ID NO: 20441 - protein, 32 aa, Artificial Sequence; identical to SEQ ID NO: 10284
  Cyclic GFR-binding peptide
  MOD_RES (1)..(2): Xaa is C or S

SEQ ID NO: 20442 - protein, 30 aa, Artificial Sequence; identical to SEQ ID NO: 10285
  Cyclic GFR-binding peptide
  MOD_RES (28)..(30): Xaa is C or S

SEQ ID NO: 20443 - protein, 34 aa, Artificial Sequence; identical to SEQ ID NO: 10290
  Cyclic GFR-binding peptide
  MOD_RES (1)..(32)..(34): Xaa is C or S

SEQ ID NO: 20444 - protein, 33 aa, Artificial Sequence
  Cyclic GFR-binding peptide
  MOD_RES (1)..(33): Xaa is C or S
XAPTQLEPLTVLYYDDSSNVIEQLSNNMVVRAX

SEQ ID NO: 20445 - protein, 39 aa, Artificial Sequence
  Cyclic GFR-binding peptide
  MOD_RES (7)..(39): Xaa is C or S
HVTKPTXAPTKLEPLPVVYYDDSSNVIEQLSNNMVVRSX

SEQ ID NO: 20446 - protein, 25 aa, Artificial Sequence
  Cyclic GFR-binding peptide
DLSAISILYLVGRTPKVLKNYQMVV

SEQ ID NO: 20447 - protein, 37 aa, Artificial Sequence; identical to SEQ ID NO: 10293
  Cyclic GFR-binding peptide
  MOD_RES (6)..(7): Xaa is C or S

SEQ ID NO: 20448 - protein, 36 aa, Artificial Sequence
  Cyclic GFR-binding peptide
  MOD_RES (5)..(6): Xaa is C or S
VPKPXXAPTKLEPLTVLYYDDSSNVIEQLSNNMVVR

SEQ ID NO: 20449 - protein, 34 aa, Artificial Sequence
  Cyclic GFR-binding peptide
  MOD_RES (4)..(5): Xaa is C or S
PKPXXAPTQLSPISVLFIDDSSNVIYKQYENMVV

SEQ ID NO: 20450 - protein, 36 aa, Artificial Sequence
  Cyclic GFR-binding peptide
  MOD_RES (6)..(7): Xaa is C or S
ASASPXXVPQDLEPLPIVYYVGRTPKVEQLSNMVVK

SEQ ID NO: 20451 - protein, 37 aa, Artificial Sequence
  Cyclic GFR-binding peptide
  MOD_RES (5)..(6): Xaa is C or S
TPPTXXVPTRLEPLTILYYDSANNVVEQLSNDMVVES

SEQ ID NO: 20452 - protein, 29 aa, Artificial Sequence
  Cyclic GFR-binding peptide
  MOD_RES (29)..(29): Xaa is C or S
QDLSPISILFIVGRTPKVYKQYEMVVKSX

SEQ ID NO: 20453 - protein, 26 aa, Artificial Sequence
  Cyclic GFR-binding peptide
TELSPISMLFIDEYDKVVYKQYEEMV

SEQ ID NO: 20454 - protein, 38 aa, Artificial Sequence
  Cyclic GFR-binding peptide
  MOD_RES (6)..(7): Xaa is C or S
SIPKAXXVPTELEPLTMLYYDEYDKVVEQLSNEMVVEG

SEQ ID NO: 20455 - protein, 32 aa, Artificial Sequence
  Cyclic GFR-binding peptide
  MOD_RES (2)..(3): Xaa is C or S
AXXVPTELEPLPMVYYDEYDKVVEQLSNEMVV

SEQ ID NO: 20456 - protein, 37 aa, Artificial Sequence
  Cyclic GFR-binding peptide
  MOD_RES (3)..(4)..(36): Xaa is C or S
PTXXVPTRLEPLPIVYYDSANNVVEQLSNDMVVESXG

SEQ ID NO: 20457 - protein, 37 aa, Artificial Sequence
  Cyclic GFR-binding peptide
  MOD_RES (4)..(5)..(37): Xaa is C or S
PKPXXAPTKLEPLTVLYYDDSSNVIEQLSNNMVVRSX

SEQ ID NO: 20458 - protein, 23 aa, Artificial Sequence
  Cyclic GFR-binding peptide
TELSPISMLFIDENEKVVYKQYE

SEQ ID NO: 20459 - protein, 34 aa, Artificial Sequence
  Cyclic GFR-binding peptide
  MOD_RES (6)..(7): Xaa is C or S
ASASPXXVPQDLSPISILFIVGRTPKVYKQYEMV

SEQ ID NO: 20460 - protein, 29 aa, Artificial Sequence
  Cyclic GFR-binding peptide
TQLSPISVLFIDDSSNVIYKQYENMVVRA

SEQ ID NO: 20461 - protein, 27 aa, Artificial Sequence
  Cyclic GFR-binding peptide
  MOD_RES (27)..(27): Xaa is C or S
EPLPMVYYDEYDKVVEQLSNEMVVEGX

SEQ ID NO: 20462 - protein, 37 aa, Artificial Sequence
  Cyclic GFR-binding peptide
  MOD_RES (3)..(4)..(35)..(37): Xaa is C or S
SPXXVSQDLEPLPIVYYIGKTPKIEQLSNMIVKSXKX

SEQ ID NO: 20463 - protein, 30 aa, Artificial Sequence
  Cyclic GFR-binding peptide
  MOD_RES (29)..(29): Xaa is C or S
ELSPISMLFIDEYDKVVYKQYEEMVVEGXG

SEQ ID NO: 20464 - protein, 33 aa, Artificial Sequence
  Cyclic GFR-binding peptide
  MOD_RES (4)..(5): Xaa is C or S
ASPXXVPQDLEPLPIVYYVGRTPKVEQLSNMVV

SEQ ID NO: 20465 - protein, 26 aa, Artificial Sequence
  Cyclic GFR-binding peptide
  MOD_RES (1)..(1): Xaa is C or S
XAPTQLSAISVLYLDDSSNVILKNYQ

SEQ ID NO: 20466 - protein, 28 aa, Artificial Sequence
  Cyclic GFR-binding peptide
PTELEPLPMVYYDENEKVVEQLSNDMVV

SEQ ID NO: 20467 - protein, 33 aa, Artificial Sequence; identical to SEQ ID NO: 10306
  Cyclic GFR-binding peptide
  MOD_RES (2)..(3): Xaa is C or S

SEQ ID NO: 20468 - protein, 26 aa, Artificial Sequence
  Cyclic GFR-binding peptide
VPTELEPLTMLYYDENEKVVEQLSND

SEQ ID NO: 20469 - protein, 28 aa, Artificial Sequence
  Cyclic GFR-binding peptide
TELSPISMLFIDENEKVVYKQYEDMVVE

SEQ ID NO: 20470 - protein, 35 aa, Artificial Sequence
  Cyclic GFR-binding peptide
  MOD_RES (6)..(7): Xaa is C or S
STPPTXXVPTRLNAISILYFDSANNVVLKKYRDMV

SEQ ID NO: 20471 - protein, 35 aa, Artificial Sequence; identical to SEQ ID NO: 10309
  Cyclic GFR-binding peptide
  MOD_RES (5)..(6): Xaa is C or S

SEQ ID NO: 20472 - protein, 25 aa, Artificial Sequence
  Cyclic GFR-binding peptide
PQDLSPISILFIVGRTPKVYKQYEM

SEQ ID NO: 20473 - protein, 30 aa, Artificial Sequence
  Cyclic GFR-binding peptide
  MOD_RES (2)..(2): Xaa is C or S
TXAPTKLEPLTVLYYDDSSNVIEQLSNNMV

SEQ ID NO: 20474 - protein, 39 aa, Artificial Sequence
  Cyclic GFR-binding peptide
  MOD_RES (4)..(36)..(38): Xaa is C or S
KPTXAPTKLEPLPVVYYDDSSNVIEQLSNNMVVRSXGXH

SEQ ID NO: 20475 - protein, 36 aa, Artificial Sequence; identical to SEQ ID NO: 10312
  Cyclic GFR-binding peptide
  MOD_RES (2)..(34)..(36): Xaa is C or S

SEQ ID NO: 20476 - protein, 30 aa, Artificial Sequence
  Cyclic GFR-binding peptide
  MOD_RES (3)..(4): Xaa is C or S
KAXXVPTELEPLTMLYYDENEKVVEQLSND

SEQ ID NO: 20477 - protein, 36 aa, Artificial Sequence
  Cyclic GFR-binding peptide
  MOD_RES (5)..(6): Xaa is C or S
VPKPXXAPTQLEPLPVVYYDDSSNVIEQLSNNMVVR

SEQ ID NO: 20478 - protein, 22 aa, Artificial Sequence
  Cyclic GFR-binding peptide
EPLTILYYDSANNVVEQLSNDM

SEQ ID NO: 20479 - protein, 29 aa, Artificial Sequence
  Cyclic GFR-binding peptide
APTKLSAISVLYLDDSSNVILKNYQNMVV

SEQ ID NO: 20480 - protein, 26 aa, Artificial Sequence
  Cyclic GFR-binding peptide
TELNAISMLYFDEYDKVVLKKYREMV

SEQ ID NO: 20481 - protein, 29 aa, Artificial Sequence
  Cyclic GFR-binding peptide
  MOD_RES (1)..(1): Xaa is C or S
XVPQALEPLTILYYVGRKPKVEQLSNMIV

SEQ ID NO: 20482 - protein, 27 aa, Artificial Sequence
  Cyclic GFR-binding peptide
TELEPLTMLYYDEYDKVVEQLSNEMVV

SEQ ID NO: 20483 - protein, 39 aa, Artificial Sequence
  Cyclic GFR-binding peptide
  MOD_RES (4)..(5)..(36)..(38): Xaa is C or S
ASPXXVSQDLSPISILFIIGKTPKIYKQYEMIVKSXKXS

SEQ ID NO: 20484 - protein, 33 aa, Artificial Sequence
  Cyclic GFR-binding peptide
  MOD_RES (4)..(5): Xaa is C or S
PKPXXAPTKLEPLPVVYYDDSSNVIEQLSNNMV

SEQ ID NO: 20485 - protein, 33 aa, Artificial Sequence; identical to SEQ ID NO: 10316
  Cyclic GFR-binding peptide
  MOD_RES (6)..(7): Xaa is C or S

SEQ ID NO: 20486 - protein, 29 aa, Artificial Sequence
  Cyclic GFR-binding peptide
APTKLEPLTVLYYDDSSNVIEQLSNNMVV

SEQ ID NO: 20487 - protein, 32 aa, Artificial Sequence
  Cyclic GFR-binding peptide
  MOD_RES (1)..(2): Xaa is C or S
XXVPTELEPLTMLYYDEYDKVVEQLSNEMVVE

SEQ ID NO: 20488 - protein, 23 aa, Artificial Sequence
  Cyclic GFR-binding peptide
TELEPLPMVYYDEYDKVVEQLSN

SEQ ID NO: 20489 - protein, 39 aa, Artificial Sequence
  Cyclic GFR-binding peptide
  MOD_RES (3)..(4)..(36)..(38): Xaa is C or S
KAXXVPTELEPLPMVYYDEYDKVVEQLSNEMVVEGXGXR

SEQ ID NO: 20490 - protein, 24 aa, Artificial Sequence
  Cyclic GFR-binding peptide
TELNAISMLYFDENEKVVLKKYRD

SEQ ID NO: 20491 - protein, 41 aa, Artificial Sequence; identical to SEQ ID NO: 10322
  Cyclic GFR-binding peptide
  MOD_RES (6)..(38)..(40): Xaa is C or S

SEQ ID NO: 20492 - protein, 35 aa, Artificial Sequence
  Cyclic GFR-binding peptide
  MOD_RES (32)..(34): Xaa is C or S
VPTELEPLTMLYYDEYDKVVEQLSNEMVVEGXGXR

SEQ ID NO: 20493 - protein, 34 aa, Artificial Sequence
  Cyclic GFR-binding peptide
  MOD_RES (7)..(7): Xaa is C or S
HVTKPTXAPTKLEPLTVLYYDDSSNVIEQLSNNM

SEQ ID NO: 20494 - protein, 39 aa, Artificial Sequence; identical to SEQ ID NO: 10323
  Cyclic GFR-binding peptide
  MOD_RES (5)..(6)..(38): Xaa is C or S

SEQ ID NO: 20495 - protein, 36 aa, Artificial Sequence; identical to SEQ ID NO: 10325
  Cyclic GFR-binding peptide
  MOD_RES (6)..(7): Xaa is C or S

SEQ ID NO: 20496 - protein, 28 aa, Artificial Sequence
  Cyclic GFR-binding peptide
APTKLSAISVLYLDDSSNVILKNYQNMV

SEQ ID NO: 20497 - protein, 40 aa, Artificial Sequence; identical to SEQ ID NO: 10330
  Cyclic GFR-binding peptide
  MOD_RES (5)..(6)..(37)..(39): Xaa is C or S

SEQ ID NO: 20498 - protein, 35 aa, Artificial Sequence; identical to SEQ ID NO: 10331
  Cyclic GFR-binding peptide
  MOD_RES (4)..(5): Xaa is C or S

SEQ ID NO: 20499 - protein, 28 aa, Artificial Sequence
  Cyclic GFR-binding peptide
  MOD_RES (1)..(2): Xaa is C or S
XXVSQDLEPLPIVYYIGKTPKIEQLSNM

SEQ ID NO: 20500 - protein, 42 aa, Artificial Sequence
  Cyclic GFR-binding peptide
  MOD_RES (6)..(7)..(39)..(41): Xaa is C or S
STPPTXXVPTRLNAISILYFDSANNVVLKKYRDMVVESXGXR

SEQ ID NO: 20501 - protein, 36 aa, Artificial Sequence
  Cyclic GFR-binding peptide
  MOD_RES (1)..(33)..(35): Xaa is C or S
XAPTQLEPLPVVYYDDSSNVIEQLSNNMVVRAXGXH

SEQ ID NO: 20502 - protein, 30 aa, Artificial Sequence
  Cyclic GFR-binding peptide
  MOD_RES (29)..(29): Xaa is C or S
ELEPLPMVYYDEYDKVVEQLSNEMVVEGXG

SEQ ID NO: 20503 - protein, 31 aa, Artificial Sequence; identical to SEQ ID NO: 10334
  Cyclic GFR-binding peptide
  MOD_RES (6)..(6): Xaa is C or S

SEQ ID NO: 20504 - protein, 34 aa, Artificial Sequence
  Cyclic GFR-binding peptide
  MOD_RES (5)..(6): Xaa is C or S
VPKPXXAPTKLSPISVLFIDDSSNVIYKQYENMV

SEQ ID NO: 20505 - protein, 37 aa, Artificial Sequence
  Cyclic GFR-binding peptide
  MOD_RES (5)..(6)..(37): Xaa is C or S
SASPXXVSQDLEPLPIVYYIGKTPKIEQLSNMIVKSX

SEQ ID NO: 20506 - protein, 29 aa, Artificial Sequence
  Cyclic GFR-binding peptide
  MOD_RES (3)..(4): Xaa is C or S
PTXXVPTRLEPLTILYYDSANNVVEQLSN

SEQ ID NO: 20507 - protein, 29 aa, Artificial Sequence
  Cyclic GFR-binding peptide
  MOD_RES (29)..(29): Xaa is C or S
ELEPLTMLYYDEYDKVVEQLSNEMVVEGX

SEQ ID NO: 20508 - protein, 31 aa, Artificial Sequence
  Cyclic GFR-binding peptide
  MOD_RES (1)..(1): Xaa is C or S
XVSQDLEPLPIVYYIGKTPKIEQLSNMIVKS

SEQ ID NO: 20509 - protein, 39 aa, Artificial Sequence
  Cyclic GFR-binding peptide
  MOD_RES (5)..(6)..(38): Xaa is C or S
TPPTXXVPTRLSAISILYLDSANNVVLKNYQDMVVESXG

SEQ ID NO: 20510 - protein, 35 aa, Artificial Sequence
  Cyclic GFR-binding peptide
  MOD_RES (32)..(34): Xaa is C or S
VPTELEPLTMLYYDENEKVVEQLSNDMVVEGXGXR

SEQ ID NO: 20511 - protein, 28 aa, Artificial Sequence
  Cyclic GFR-binding peptide
  MOD_RES (28)..(28): Xaa is C or S
LEPLTMLYYDENEKVVEQLSNDMVVEGX

SEQ ID NO: 20512 - protein, 32 aa, Artificial Sequence
  Cyclic GFR-binding peptide
  MOD_RES (1)..(2): Xaa is C or S
XXVSQDLEPLPIVYYIGKTPKIEQLSNMIVKS

SEQ ID NO: 20513 - protein, 34 aa, Artificial Sequence
  Cyclic GFR-binding peptide
  MOD_RES (5)..(6): Xaa is C or S
TPPTXXVPTRLEPLTILYYDSANNVVEQLSNDMV

SEQ ID NO: 20514 - protein, 31 aa, Artificial Sequence
  Cyclic GFR-binding peptide
  MOD_RES (1)..(2): Xaa is C or S
XXVPTELEPLTMLYYDENEKVVEQLSNDMVV

SEQ ID NO: 20515 - protein, 29 aa, Artificial Sequence
  Cyclic GFR-binding peptide
VPTELEPLPMVYYDENEKVVEQLSNDMVV

SEQ ID NO: 20516 - protein, 22 aa, Artificial Sequence
  Cyclic GFR-binding peptide
LNAISMLYFDENEKVVLKKYRD

SEQ ID NO: 20517 - protein, 32 aa, Artificial Sequence
  Cyclic GFR-binding peptide
  MOD_RES (32)..(32): Xaa is C or S
VPTRLEPLPIVYYDSANNVVEQLSNDMVVESX

SEQ ID NO: 20518 - protein, 24 aa, Artificial Sequence
  Cyclic GFR-binding peptide
SPISMLFIDENEKVVYKQYEDMVV

SEQ ID NO: 20519 - protein, 39 aa, Artificial Sequence
  Cyclic GFR-binding peptide
  MOD_RES (4)..(5)..(37)..(39): Xaa is C or S
PKPXXAPTQLEPLTVLYYDDSSNVIEQLSNNMVVRAXGX

SEQ ID NO: 20520 - protein, 36 aa, Artificial Sequence
  Cyclic GFR-binding peptide
  MOD_RES (5)..(5): Xaa is C or S
TKPTXAPTKLEPLTVLYYDDSSNVIEQLSNNMVVRS

SEQ ID NO: 20521 - protein, 37 aa, Artificial Sequence; identical to SEQ ID NO: 10353
  Cyclic GFR-binding peptide
  MOD_RES (1)..(2)..(34)..(36): Xaa is C or S

SEQ ID NO: 20522 - protein, 29 aa, Artificial Sequence
  Cyclic GFR-binding peptide
PTELNAISMLYFDENEKVVLKKYRDMVVE

SEQ ID NO: 20523 - protein, 33 aa, Artificial Sequence
  Cyclic GFR-binding peptide
  MOD_RES (3)..(4): Xaa is C or S
SPXXVPQDLEPLPIVYYVGRTPKVEQLSNMVVK

SEQ ID NO: 20524 - protein, 30 aa, Artificial Sequence
  Cyclic GFR-binding peptide
  MOD_RES (29)..(29): Xaa is C or S
RLEPLPIVYYDSANNVVEQLSNDMVVESXG

SEQ ID NO: 20525 - protein, 28 aa, Artificial Sequence
  Cyclic GFR-binding peptide
  MOD_RES (28)..(28): Xaa is C or S
DLNAISILYFVGRTPKVLKKYRMVVKSX

SEQ ID NO: 20526 - protein, 22 aa, Artificial Sequence
  Cyclic GFR-binding peptide
SPISVLFIDDSSNVIYKQYENM

SEQ ID NO: 20527 - protein, 32 aa, Artificial Sequence
  Cyclic GFR-binding peptide
  MOD_RES (29)..(31): Xaa is C or S
QDLEPLPIVYYIGKTPKIEQLSNMIVKSXKXS

SEQ ID NO: 20528 - protein, 31 aa, Artificial Sequence; identical to SEQ ID NO: 10364
  Cyclic GFR-binding peptide
  MOD_RES (29)..(31): Xaa is C or S

SEQ ID NO: 20529 - protein, 33 aa, Artificial Sequence
  Cyclic GFR-binding peptide
  MOD_RES (5)..(6): Xaa is C or S
IPKAXXVPTELEPLTMLYYDEYDKVVEQLSNEM

SEQ ID NO: 20530 - protein, 34 aa, Artificial Sequence
  Cyclic GFR-binding peptide
  MOD_RES (2)..(34): Xaa is C or S
TXAPTKLEPLPVVYYDDSSNVIEQLSNNMVVRSX

SEQ ID NO: 20531 - protein, 35 aa, Artificial Sequence
  Cyclic GFR-binding peptide
  MOD_RES (4)..(5): Xaa is C or S
PKAXXVPTELEPLPMVYYDEYDKVVEQLSNEMVVE

SEQ ID NO: 20532 - protein, 32 aa, Artificial Sequence; identical to SEQ ID NO: 10370
  Cyclic GFR-binding peptide
  MOD_RES (6)..(7): Xaa is C or S

SEQ ID NO: 20533 - protein, 29 aa, Artificial Sequence
  Cyclic GFR-binding peptide
  MOD_RES (2)..(2): Xaa is C or S
TXAPTKLSPISVLFIDDSSNVIYKQYENM

SEQ ID NO: 20534 - protein, 28 aa, Artificial Sequence
  Cyclic GFR-binding peptide
PTELNAISMLYFDEYDKVVLKKYREMVV

SEQ ID NO: 20535 - protein, 24 aa, Artificial Sequence
  Cyclic GFR-binding peptide
PTQLEPLPVVYYDDSSNVIEQLSN

SEQ ID NO: 20536 - protein, 29 aa, Artificial Sequence
  Cyclic GFR-binding peptide
  MOD_RES (28)..(28): Xaa is C or S
LNAISMLYFDEYDKVVLKKYREMVVEGXG

SEQ ID NO: 20537 - protein, 30 aa, Artificial Sequence
  Cyclic GFR-binding peptide
  MOD_RES (30)..(30): Xaa is C or S
TELEPLPMVYYDENEKVVEQLSNDMVVEGX

SEQ ID NO: 20538 - protein, 22 aa, Artificial Sequence
  Cyclic GFR-binding peptide
EPLPIVYYVGRTPKVEQLSNMV

SEQ ID NO: 20539 - protein, 22 aa, Artificial Sequence
  Cyclic GFR-binding peptide
LSAISILYLDSANNVVLKNYQD

SEQ ID NO: 20540 - protein, 22 aa, Artificial Sequence
  Cyclic GFR-binding peptide
LEPLPIVYYDSANNVVEQLSND

SEQ ID NO: 20541 - protein, 32 aa, Artificial Sequence; identical to SEQ ID NO: 10381
  Cyclic GFR-binding peptide
  MOD_RES (1)..(2): Xaa is C or S

SEQ ID NO: 20542 - protein, 37 aa, Artificial Sequence
  Cyclic GFR-binding peptide
  MOD_RES (2)..(3)..(34)..(36): Xaa is C or S
PXXVSQDLSPISILFIIGKTPKIYKQYEMIVKSXKXS

SEQ ID NO: 20543 - protein, 39 aa, Artificial Sequence
  Cyclic GFR-binding peptide
  MOD_RES (4)..(5)..(37)..(39): Xaa is C or S
PKPXXAPTQLSPISVLFIDDSSNVIYKQYENMVVRAXGX

SEQ ID NO: 20544 - protein, 29 aa, Artificial Sequence
  Cyclic GFR-binding peptide
  MOD_RES (2)..(3): Xaa is C or S
AXXVPTELEPLTMLYYDENEKVVEQLSND

SEQ ID NO: 20545 - protein, 24 aa, Artificial Sequence
  Cyclic GFR-binding peptide
SQDLSAISILYLIGKTPKILKNYQ

SEQ ID NO: 20546 - protein, 32 aa, Artificial Sequence
  Cyclic GFR-binding peptide
  MOD_RES (2)..(3): Xaa is C or S
PXXVPQDLEPLPIVYYVGRTPKVEQLSNMVVK

SEQ ID NO: 20547 - protein, 32 aa, Artificial Sequence
  Cyclic GFR-binding peptide
  MOD_RES (29)..(31): Xaa is C or S
RLSAISILYLDSANNVVLKNYQDMVVESXGXR

SEQ ID NO: 20548 - protein, 31 aa, Artificial Sequence
  Cyclic GFR-binding peptide
  MOD_RES (1)..(1): Xaa is C or S
XVPQDLSPISILFIVGRTPKVYKQYEMVVKS

SEQ ID NO: 20549 - protein, 31 aa, Artificial Sequence; identical to SEQ ID NO: 10394
  Cyclic GFR-binding peptide
  MOD_RES (31)..(31): Xaa is C or S

SEQ ID NO: 20550 - protein, 24 aa, Artificial Sequence
  Cyclic GFR-binding peptide
TKLSAISVLYLDDSSNVILKNYQN

SEQ ID NO: 20551 - protein, 29 aa, Artificial Sequence
  Cyclic GFR-binding peptide
  MOD_RES (2)..(3): Xaa is C or S
PXXVPQALNAISILYFVGRKPKVLKKYRM

SEQ ID NO: 20552 - protein, 36 aa, Artificial Sequence
  Cyclic GFR-binding peptide
  MOD_RES (5)..(6): Xaa is C or S
VPKPXXAPTQLEPLTVLYYDDSSNVIEQLSNNMVVR

SEQ ID NO: 20553 - protein, 33 aa, Artificial Sequence
  Cyclic GFR-binding peptide
  MOD_RES (2)..(2): Xaa is C or S
TXAPTKLEPLTVLYYDDSSNVIEQLSNNMVVRS

SEQ ID NO: 20554 - protein, 35 aa, Artificial Sequence
  Cyclic GFR-binding peptide
  MOD_RES (6)..(6): Xaa is C or S
VTKPTXAPTKLEPLTVLYYDDSSNVIEQLSNNMVV

SEQ ID NO: 20555 - protein, 28 aa, Artificial Sequence
  Cyclic GFR-binding peptide
PQALSAISILYLVGRKPKVLKNYQMIVR

SEQ ID NO: 20556 - protein, 28 aa, Artificial Sequence
  Cyclic GFR-binding peptide
  MOD_RES (1)..(2): Xaa is C or S
XXVSQDLSAISILYLIGKTPKILKNYQM

SEQ ID NO: 20557 - protein, 28 aa, Artificial Sequence
  Cyclic GFR-binding peptide
SQDLSPISILFIIGKTPKIYKQYEMIVK

SEQ ID NO: 20558 - protein, 27 aa, Artificial Sequence
  Cyclic GFR-binding peptide
  MOD_RES (1)..(2): Xaa is C or S
XXVPTELEPLTMLYYDEYDKVVEQLSN

SEQ ID NO: 20559 - protein, 26 aa, Artificial Sequence
  Cyclic GFR-binding peptide
QLSAISVLYLDDSSNVILKNYQNMVV

SEQ ID NO: 20560 - protein, 27 aa, Artificial Sequence
  Cyclic GFR-binding peptide
SQDLNAISILYFIGKTPKILKKYRMIV

SEQ ID NO: 20561 - protein, 25 aa, Artificial Sequence
  Cyclic GFR-binding peptide
NAISILYFIGKTPKILKKYRMIVKS

SEQ ID NO: 20562 - protein, 36 aa, Artificial Sequence
  Cyclic GFR-binding peptide
  MOD_RES (4)..(36): Xaa is C or S
KPTXAPTKLEPLPVVYYDDSSNVIEQLSNNMVVRSX

SEQ ID NO: 20563 - protein, 30 aa, Artificial Sequence
  Cyclic GFR-binding peptide
  MOD_RES (4)..(5): Xaa is C or S
AAPXXVPQALEPLTILYYVGRKPKVEQLSN

SEQ ID NO: 20564 - protein, 26 aa, Artificial Sequence
  Cyclic GFR-binding peptide
PTKLEPLPVVYYDDSSNVIEQLSNNM

SEQ ID NO: 20565 - protein, 28 aa, Artificial Sequence
  Cyclic GFR-binding peptide
  MOD_RES (1)..(2): Xaa is C or S
XXVSQDLSPISILFIIGKTPKIYKQYEM

SEQ ID NO: 20566 - protein, 37 aa, Artificial Sequence; identical to SEQ ID NO: 10410
  Cyclic GFR-binding peptide
  MOD_RES (4)..(5)..(36): Xaa is C or S

SEQ ID NO: 20567 - protein, 38 aa, Artificial Sequence
  Cyclic GFR-binding peptide
  MOD_RES (5)..(37): Xaa is C or S
TKPTXAPTKLEPLTVLYYDDSSNVIEQLSNNMVVRSXG

SEQ ID NO: 20568 - protein, 38 aa, Artificial Sequence; identical to SEQ ID NO: 10415
  Cyclic GFR-binding peptide
  MOD_RES (5)..(6)..(38): Xaa is C or S

SEQ ID NO: 20569 - protein, 31 aa, Artificial Sequence
  Cyclic GFR-binding peptide
  MOD_RES (5)..(6): Xaa is C or S
TPPTXXVPTRLEPLTILYYDSANNVVEQLSN

SEQ ID NO: 20570 - protein, 28 aa, Artificial Sequence
  Cyclic GFR-binding peptide
QDLSAISILYLVGRTPKVLKNYQMVVKS

SEQ ID NO: 20571 - protein, 33 aa, Artificial Sequence
  Cyclic GFR-binding peptide
  MOD_RES (2)..(3): Xaa is C or S
PXXAPTQLSPISVLFIDDSSNVIYKQYENMVVR

SEQ ID NO: 20572 - protein, 25 aa, Artificial Sequence
  Cyclic GFR-binding peptide
PTQLEPLPVVYYDDSSNVIEQLSNN

SEQ ID NO: 20573 - protein, 32 aa, Artificial Sequence
  Cyclic GFR-binding peptide
  MOD_RES (6)..(7): Xaa is C or S
KIPKAXXVPTELEPLPMVYYDENEKVVEQLSN

SEQ ID NO: 20574 - protein, 31 aa, Artificial Sequence
  Cyclic GFR-binding peptide
  MOD_RES (2)..(3): Xaa is C or S
TXXVPTRLSAISILYLDSANNVVLKNYQDMV

SEQ ID NO: 20575 - protein, 28 aa, Artificial Sequence
  Cyclic GFR-binding peptide
  MOD_RES (27)..(27): Xaa is C or S
SPISMLFIDENEKVVYKQYEDMVVEGXG

SEQ ID NO: 20576 - protein, 26 aa, Artificial Sequence
  Cyclic GFR-binding peptide
ELEPLPMVYYDENEKVVEQLSNDMVV

SEQ ID NO: 20577 - protein, 40 aa, Artificial Sequence
  Cyclic GFR-binding peptide
  MOD_RES (5)..(6)..(38)..(40): Xaa is C or S
IPKAXXVPTELEPLTMLYYDEYDKVVEQLSNEMVVEGXGX

SEQ ID NO: 20578 - protein, 32 aa, Artificial Sequence
  Cyclic GFR-binding peptide
  MOD_RES (1)..(1): Xaa is C or S
XVPTELSPISMLFIDENEKVVYKQYEDMVVEG

SEQ ID NO: 20579 - protein, 29 aa, Artificial Sequence
  Cyclic GFR-binding peptide
  MOD_RES (1)..(2): Xaa is C or S
XXVPTELEPLTMLYYDEYDKVVEQLSNEM

SEQ ID NO: 20580 - protein, 25 aa, Artificial Sequence
  Cyclic GFR-binding peptide
VPQDLEPLPIVYYVGRTPKVEQLSN

SEQ ID NO: 20581 - protein, 26 aa, Artificial Sequence
  Cyclic GFR-binding peptide
TRLEPLPIVYYDSANNVVEQLSNDMV

SEQ ID NO: 20582 - protein, 31 aa, Artificial Sequence
  Cyclic GFR-binding peptide
  MOD_RES (30)..(30): Xaa is C or S
SQDLEPLPIVYYIGKTPKIEQLSNMIVKSXK

SEQ ID NO: 20583 - protein, 32 aa, Artificial Sequence; identical to SEQ ID NO: 10430
  Cyclic GFR-binding peptide
  MOD_RES (1)..(2): Xaa is C or S

SEQ ID NO: 20584 - protein, 32 aa, Artificial Sequence; identical to SEQ ID NO: 10434
  Cyclic GFR-binding peptide
  MOD_RES (30)..(32): Xaa is C or S

SEQ ID NO: 20585 - protein, 30 aa, Artificial Sequence
  Cyclic GFR-binding peptide
  MOD_RES (1)..(1): Xaa is C or S
XVPTELEPLPMVYYDEYDKVVEQLSNEMVV

SEQ ID NO: 20586 - protein, 35 aa, Artificial Sequence
  Cyclic GFR-binding peptide
  MOD_RES (3)..(4)..(35): Xaa is C or S
SPXXVSQDLSPISILFIIGKTPKIYKQYEMIVKSX

SEQ ID NO: 20587 - protein, 38 aa, Artificial Sequence
  Cyclic GFR-binding peptide
  MOD_RES (4)..(5)..(36)..(38): Xaa is C or S
ASPXXVPQDLEPLPIVYYVGRTPKVEQLSNMVVKSXKX

SEQ ID NO: 20588 - protein, 35 aa, Artificial Sequence
  Cyclic GFR-binding peptide
  MOD_RES (3)..(4): Xaa is C or S
KPXXAPTQLSPISVLFIDDSSNVIYKQYENMVVRA

SEQ ID NO: 20589 - protein, 31 aa, Artificial Sequence
  Cyclic GFR-binding peptide
  MOD_RES (1)..(2): Xaa is C or S
XXAPTKLSPISVLFIDDSSNVIYKQYENMVV

SEQ ID NO: 20590 - protein, 31 aa, Artificial Sequence; identical to SEQ ID NO: 10444
  Cyclic GFR-binding peptide
  MOD_RES (1)..(2): Xaa is C or S

SEQ ID NO: 20591 - protein, 33 aa, Artificial Sequence; identical to SEQ ID NO: 10445
  Cyclic GFR-binding peptide
  MOD_RES (4)..(5): Xaa is C or S

SEQ ID NO: 20592 - protein, 37 aa, Artificial Sequence
  Cyclic GFR-binding peptide
  MOD_RES (4)..(5)..(37): Xaa is C or S
PKPXXAPTKLEPLPVVYYDDSSNVIEQLSNNMVVRSX

SEQ ID NO: 20593 - protein, 27 aa, Artificial Sequence
  Cyclic GFR-binding peptide
QLSPISVLFIDDSSNVIYKQYENMVVR

SEQ ID NO: 20594 - protein, 31 aa, Artificial Sequence; identical to SEQ ID NO: 10452
  Cyclic GFR-binding peptide
  MOD_RES (29)..(31): Xaa is C or S

SEQ ID NO: 20595 - protein, 35 aa, Artificial Sequence
  Cyclic GFR-binding peptide
  MOD_RES (3)..(35): Xaa is C or S
PTXAPTKLSPISVLFIDDSSNVIYKQYENMVVRSX

SEQ ID NO: 20596 - protein, 27 aa, Artificial Sequence
  Cyclic GFR-binding peptide
  MOD_RES (1)..(1): Xaa is C or S
XVPTELEPLTMLYYDENEKVVEQLSND

SEQ ID NO: 20597 - protein, 30 aa, Artificial Sequence
  Cyclic GFR-binding peptide
  MOD_RES (30)..(30): Xaa is C or S
TRLSAISILYLDSANNVVLKNYQDMVVESX

SEQ ID NO: 20598 - protein, 29 aa, Artificial Sequence
  Cyclic GFR-binding peptide
  MOD_RES (27)..(29): Xaa is C or S
EPLPVVYYDDSSNVIEQLSNNMVVRSXGX

SEQ ID NO: 20599 - protein, 40 aa, Artificial Sequence
  Cyclic GFR-binding peptide
  MOD_RES (5)..(6)..(38)..(40): Xaa is C or S
IPKAXXVPTELSPISMLFIDEYDKVVYKQYEEMVVEGXGX

SEQ ID NO: 20600 - protein, 38 aa, Artificial Sequence
  Cyclic GFR-binding peptide
  MOD_RES (6)..(7): Xaa is C or S
SIPKAXXVPTELEPLPMVYYDEYDKVVEQLSNEMVVEG

SEQ ID NO: 20601 - protein, 32 aa, Artificial Sequence
  Cyclic GFR-binding peptide
  MOD_RES (30)..(32): Xaa is C or S
SQDLSPISILFIIGKTPKIYKQYEMIVKSXKX

SEQ ID NO: 20602 - protein, 26 aa, Artificial Sequence
  Cyclic GFR-binding peptide
VPTRLEPLTILYYDSANNVVEQLSND

SEQ ID NO: 20603 - protein, 30 aa, Artificial Sequence
  Cyclic GFR-binding peptide
  MOD_RES (27)..(29): Xaa is C or S
EPLTMLYYDENEKVVEQLSNDMVVEGXGXR

SEQ ID NO: 20604 - protein, 26 aa, Artificial Sequence
  Cyclic GFR-binding peptide
APTKLEPLTVLYYDDSSNVIEQLSNN

SEQ ID NO: 20605 - protein, 31 aa, Artificial Sequence
  Cyclic GFR-binding peptide
  MOD_RES (5)..(6): Xaa is C or S
VPKPXXAPTKLSPISVLFIDDSSNVIYKQYE

SEQ ID NO: 20606 - protein, 30 aa, Artificial Sequence
  Cyclic GFR-binding peptide
PTKLEPLTVLYYDDSSNVIEQLSNNMVVRS

SEQ ID NO: 20607 - protein, 31 aa, Artificial Sequence
  Cyclic GFR-binding peptide
VPTRLEPLTILYYDSANNVVEQLSNDMVVES

SEQ ID NO: 20608 - protein, 37 aa, Artificial Sequence
  Cyclic GFR-binding peptide
  MOD_RES (4)..(5)..(37): Xaa is C or S
PKAXXVPTELEPLTMLYYDEYDKVVEQLSNEMVVEGX

SEQ ID NO: 20609 - protein, 31 aa, Artificial Sequence
  Cyclic GFR-binding peptide
  MOD_RES (29)..(31): Xaa is C or S
ELEPLPMVYYDENEKVVEQLSNDMVVEGXGX

SEQ ID NO: 20610 - protein, 31 aa, Artificial Sequence; identical to SEQ ID NO: 10466
  Cyclic GFR-binding peptide
  MOD_RES (2)..(3): Xaa is C or S

SEQ ID NO: 20611 - protein, 38 aa, Artificial Sequence
  Cyclic GFR-binding peptide
  MOD_RES (5)..(6)..(38): Xaa is C or S
IPKAXXVPTELEPLPMVYYDENEKVVEQLSNDMVVEGX

SEQ ID NO: 20612 - protein, 42 aa, Artificial Sequence
  Cyclic GFR-binding peptide
  MOD_RES (6)..(7)..(39)..(41): Xaa is C or S
TVPKPXXAPTQLSPISVLFIDDSSNVIYKQYENMVVRAXGXH

SEQ ID NO: 20613 - protein, 35 aa, Artificial Sequence
  Cyclic GFR-binding peptide
  MOD_RES (4)..(5): Xaa is C or S
AAPXXVPQALSPISILFIVGRKPKVYKQYEMIVRS

SEQ ID NO: 20614 - protein, 33 aa, Artificial Sequence
  Cyclic GFR-binding peptide
  MOD_RES (2)..(3): Xaa is C or S
TXXVPTRLEPLPIVYYDSANNVVEQLSNDMVVE

SEQ ID NO: 20615 - protein, 36 aa, Artificial Sequence
  Cyclic GFR-binding peptide
  MOD_RES (2)..(3)..(35): Xaa is C or S
TXXVPTRLEPLPIVYYDSANNVVEQLSNDMVVESXG

SEQ ID NO: 20616 - protein, 36 aa, Artificial Sequence
  Cyclic GFR-binding peptide
  MOD_RES (6)..(7): Xaa is C or S
TVPKPXXAPTQLEPLPVVYYDDSSNVIEQLSNNMVV

SEQ ID NO: 20617 - protein, 30 aa, Artificial Sequence
  Cyclic GFR-binding peptide
  MOD_RES (30)..(30): Xaa is C or S
SQDLSPISILFIIGKTPKIYKQYEMIVKSX

SEQ ID NO: 20618 - protein, 23 aa, Artificial Sequence
  Cyclic GFR-binding peptide
TELEPLTMLYYDENEKVVEQLSN

SEQ ID NO: 20619 - protein, 32 aa, Artificial Sequence
  Cyclic GFR-binding peptide
  MOD_RES (2)..(3): Xaa is C or S
AXXVPTELEPLPMVYYDENEKVVEQLSNDMVV

SEQ ID NO: 20620 - protein, 36 aa, Artificial Sequence
  Cyclic GFR-binding peptide
  MOD_RES (2)..(3)..(35): Xaa is C or S
AXXVPTELEPLTMLYYDEYDKVVEQLSNEMVVEGXG

SEQ ID NO: 20621 - protein, 29 aa, Artificial Sequence
  Cyclic GFR-binding peptide
PTELEPLTMLYYDEYDKVVEQLSNEMVVE

SEQ ID NO: 20622 - protein, 21 aa, Artificial Sequence
  Cyclic GFR-binding peptide
LSAISILYLVGRKPKVLKNYQ

SEQ ID NO: 20623 - protein, 26 aa, Artificial Sequence
  Cyclic GFR-binding peptide
VPQALNAISILYFVGRKPKVLKKYRM

SEQ ID NO: 20624 - protein, 36 aa, Artificial Sequence
  Cyclic GFR-binding peptide
  MOD_RES (5)..(5): Xaa is C or S
TKPTXAPTKLSPISVLFIDDSSNVIYKQYENMVVRS

SEQ ID NO: 20625 - protein, 40 aa, Artificial Sequence
  Cyclic GFR-binding peptide
  MOD_RES (5)..(6)..(37)..(39): Xaa is C or S
SASPXXVPQDLSPISILFIVGRTPKVYKQYEMVVKSXKXS

SEQ ID NO: 20626 - protein, 22 aa, Artificial Sequence
  Cyclic GFR-binding peptide
KLEPLTVLYYDDSSNVIEQLSN

SEQ ID NO: 20627 - protein, 30 aa, Artificial Sequence
  Cyclic GFR-binding peptide
  MOD_RES (4)..(5): Xaa is C or S
PPTXXVPTRLSAISILYLDSANNVVLKNYQ

SEQ ID NO: 20628 - protein, 40 aa, Artificial Sequence
  Cyclic GFR-binding peptide
  MOD_RES (6)..(7)..(39): Xaa is C or S
STPPTXXVPTRLEPLPIVYYDSANNVVEQLSNDMVVESXG

SEQ ID NO: 20629 - protein, 28 aa, Artificial Sequence
  Cyclic GFR-binding peptide
QLEPLPVVYYDDSSNVIEQLSNNMVVRA

SEQ ID NO: 20630 - protein, 29 aa, Artificial Sequence
  Cyclic GFR-binding peptide
  MOD_RES (2)..(3): Xaa is C or S
PXXVSQDLSPISILFIIGKTPKIYKQYEM

SEQ ID NO: 20631 - protein, 34 aa, Artificial Sequence
  Cyclic GFR-binding peptide
  MOD_RES (2)..(3): Xaa is C or S
PXXAPTQLSPISVLFIDDSSNVIYKQYENMVVRA

SEQ ID NO: 20632 - protein, 38 aa, Artificial Sequence
  Cyclic GFR-binding peptide
  MOD_RES (4)..(5)..(37): Xaa is C or S
PPTXXVPTRLNAISILYFDSANNVVLKKYRDMVVESXG

SEQ ID NO: 20633 - protein, 33 aa, Artificial Sequence
  Cyclic GFR-binding peptide
  MOD_RES (6)..(7): Xaa is C or S
YVPKPXXAPTKLEPLTVLYYDDSSNVIEQLSNN

SEQ ID NO: 20634 - protein, 32 aa, Artificial Sequence
  Cyclic GFR-binding peptide
  MOD_RES (4)..(4): Xaa is C or S
KPTXAPTKLEPLTVLYYDDSSNVIEQLSNNMV

SEQ ID NO: 20635 - protein, 33 aa, Artificial Sequence
  Cyclic GFR-binding peptide
  MOD_RES (6)..(7): Xaa is C or S
ASAAPXXVPQALSPISILFIVGRKPKVYKQYEM

SEQ ID NO: 20636 - protein, 37 aa, Artificial Sequence
  Cyclic GFR-binding peptide
  MOD_RES (1)..(2)..(34)..(36): Xaa is C or S
XXVPTELSPISMLFIDENEKVVYKQYEDMVVEGXGXR

SEQ ID NO: 20637 - protein, 30 aa, Artificial Sequence; identical to SEQ ID NO: 10491
  Cyclic GFR-binding peptide
  MOD_RES (28)..(30): Xaa is C or S

SEQ ID NO: 20638 - protein, 31 aa, Artificial Sequence
  Cyclic GFR-binding peptide
VPTELEPLPMVYYDEYDKVVEQLSNEMVVEG

SEQ ID NO: 20639 - protein, 36 aa, Artificial Sequence
  Cyclic GFR-binding peptide
  MOD_RES (6)..(7): Xaa is C or S
YVPKPXXAPTKLEPLPVVYYDDSSNVIEQLSNNMVV

SEQ ID NO: 20640 - protein, 25 aa, Artificial Sequence
  Cyclic GFR-binding peptide
PTQLSPISVLFIDDSSNVIYKQYEN

SEQ ID NO: 20641 - protein, 30 aa, Artificial Sequence
  Cyclic GFR-binding peptide
  MOD_RES (3)..(4): Xaa is C or S
KPXXAPTQLEPLPVVYYDDSSNVIEQLSNN

SEQ ID NO: 20642 - protein, 29 aa, Artificial Sequence
  Cyclic GFR-binding peptide
  MOD_RES (29)..(29): Xaa is C or S
QDLEPLPIVYYIGKTPKIEQLSNMIVKSX

SEQ ID NO: 20643 - protein, 30 aa, Artificial Sequence
  Cyclic GFR-binding peptide
  MOD_RES (28)..(30): Xaa is C or S
LEPLPVVYYDDSSNVIEQLSNNMVVRAXGX

SEQ ID NO: 20644 - protein, 30 aa, Artificial Sequence; identical to SEQ ID NO: 10498
  Cyclic GFR-binding peptide
  MOD_RES (27)..(29): Xaa is C or S

SEQ ID NO: 20645 - protein, 25 aa, Artificial Sequence
  Cyclic GFR-binding peptide
DLNAISILYFIGKTPKILKKYRMIV

SEQ ID NO: 20646 - protein, 27 aa, Artificial Sequence
  Cyclic GFR-binding peptide
VPTELEPLPMVYYDENEKVVEQLSNDM

SEQ ID NO: 20647 - protein, 34 aa, Artificial Sequence
  Cyclic GFR-binding peptide
  MOD_RES (3)..(4): Xaa is C or S
PTXXVPTRLSAISILYLDSANNVVLKNYQDMVVE

SEQ ID NO: 20648 - protein, 37 aa, Artificial Sequence
  Cyclic GFR-binding peptide
  MOD_RES (5)..(6): Xaa is C or S
IPKAXXVPTELSPISMLFIDENEKVVYKQYEDMVVEG

SEQ ID NO: 20649 - protein, 27 aa, Artificial Sequence
  Cyclic GFR-binding peptide
VPTELSPISMLFIDEYDKVVYKQYEEM

SEQ ID NO: 20650 - protein, 29 aa, Artificial Sequence
  Cyclic GFR-binding peptide
  MOD_RES (1)..(1): Xaa is C or S
XVSQDLNAISILYFIGKTPKILKKYRMIV

SEQ ID NO: 20651 - protein, 25 aa, Artificial Sequence
  Cyclic GFR-binding peptide
PQDLEPLPIVYYVGRTPKVEQLSNM

SEQ ID NO: 20652 - protein, 26 aa, Artificial Sequence
  Cyclic GFR-binding peptide
PQDLNAISILYFVGRTPKVLKKYRMV

SEQ ID NO: 20653 - protein, 31 aa, Artificial Sequence
  Cyclic GFR-binding peptide
  MOD_RES (1)..(1): Xaa is C or S
XVPTELEPLTMLYYDENEKVVEQLSNDMVVE

SEQ ID NO: 20654 - protein, 26 aa, Artificial Sequence
  Cyclic GFR-binding peptide
DLEPLPIVYYIGKTPKIEQLSNMIVK

SEQ ID NO: 20655 - protein, 36 aa, Artificial Sequence
  Cyclic GFR-binding peptide
  MOD_RES (1)..(2)..(34)..(36): Xaa is C or S
XXAPTKLEPLTVLYYDDSSNVIEQLSNNMVVRSXGX

SEQ ID NO: 20656 - protein, 28 aa, Artificial Sequence
  Cyclic GFR-binding peptide
  MOD_RES (26)..(28): Xaa is C or S
SPISILFIVGRKPKVYKQYEMIVRSXKX

SEQ ID NO: 20657 - protein, 29 aa, Artificial Sequence
  Cyclic GFR-binding peptide
  MOD_RES (4)..(4): Xaa is C or S
KPTXAPTKLSAISVLYLDDSSNVILKNYQ

SEQ ID NO: 20658 - protein, 26 aa, Artificial Sequence
  Cyclic GFR-binding peptide
PTELEPLPMVYYDENEKVVEQLSNDM

SEQ ID NO: 20659 - protein, 31 aa, Artificial Sequence; identical to SEQ ID NO: 10509
  Cyclic GFR-binding peptide

SEQ ID NO: 20660 - protein, 33 aa, Artificial Sequence
  Cyclic GFR-binding peptide
  MOD_RES (4)..(5): Xaa is C or S
PKPXXAPTKLSPISVLFIDDSSNVIYKQYENMV

SEQ ID NO: 20661 - protein, 34 aa, Artificial Sequence
  Cyclic GFR-binding peptide
  MOD_RES (6)..(7): Xaa is C or S
ASASPXXVSQDLSPISILFIIGKTPKIYKQYEMI

SEQ ID NO: 20662 - protein, 32 aa, Artificial Sequence
  Cyclic GFR-binding peptide
  MOD_RES (31)..(31): Xaa is C or S
PTRLSAISILYLDSANNVVLKNYQDMVVESXG

SEQ ID NO: 20663 - protein, 27 aa, Artificial Sequence
  Cyclic GFR-binding peptide
  MOD_RES (1)..(2): Xaa is C or S
XXVPTRLEPLPIVYYDSANNVVEQLSN

SEQ ID NO: 20664 - protein, 28 aa, Artificial Sequence
  Cyclic GFR-binding peptide
  MOD_RES (2)..(3): Xaa is C or S
PXXVPQDLNAISILYFVGRTPKVLKKYR

SEQ ID NO: 20665 - protein, 23 aa, Artificial Sequence
  Cyclic GFR-binding peptide
LEPLPMVYYDENEKVVEQLSNDM

SEQ ID NO: 20666 - protein, 34 aa, Artificial Sequence; identical to SEQ ID NO: 10515
  Cyclic GFR-binding peptide
  MOD_RES (31)..(33): Xaa is C or S

SEQ ID NO: 20667 - protein, 32 aa, Artificial Sequence
  Cyclic GFR-binding peptide
  MOD_RES (29)..(31): Xaa is C or S
QALSPISILFIVGRKPKVYKQYEMIVRSXKXS

SEQ ID NO: 20668 - protein, 29 aa, Artificial Sequence
  Cyclic GFR-binding peptide
  MOD_RES (1)..(1): Xaa is C or S
XVPQDLEPLPIVYYVGRTPKVEQLSNMVV

SEQ ID NO: 20669 - protein, 34 aa, Artificial Sequence
  Cyclic GFR-binding peptide
  MOD_RES (2)..(3)..(34): Xaa is C or S
PXXVSQDLEPLPIVYYIGKTPKIEQLSNMIVKSX

SEQ ID NO: 20670 - protein, 27 aa, Artificial Sequence
  Cyclic GFR-binding peptide
QDLSAISILYLVGRTPKVLKNYQMVVK

SEQ ID NO: 20671 - protein, 37 aa, Artificial Sequence
  Cyclic GFR-binding peptide
  MOD_RES (6)..(7): Xaa is C or S
ASASPXXVSQDLSPISILFIIGKTPKIYKQYEMIVKS

SEQ ID NO: 20672 - protein, 32 aa, Artificial Sequence
  Cyclic GFR-binding peptide
  MOD_RES (30)..(32): Xaa is C or S
TELSPISMLFIDEYDKVVYKQYEEMVVEGXGX

SEQ ID NO: 20673 - protein, 30 aa, Artificial Sequence; identical to SEQ ID NO: 10522
  Cyclic GFR-binding peptide
  MOD_RES (28)..(30): Xaa is C or S

SEQ ID NO: 20674 - protein, 22 aa, Artificial Sequence
  Cyclic GFR-binding peptide
EPLPMVYYDEYDKVVEQLSNEM

SEQ ID NO: 20675 - protein, 37 aa, Artificial Sequence
  Cyclic GFR-binding peptide
  MOD_RES (1)..(2)..(34)..(36): Xaa is C or S
XXVPTELEPLTMLYYDENEKVVEQLSNDMVVEGXGXR

SEQ ID NO: 20676 - protein, 29 aa, Artificial Sequence
  Cyclic GFR-binding peptide
  MOD_RES (28)..(28): Xaa is C or S
LSPISMLFIDENEKVVYKQYEDMVVEGXG

SEQ ID NO: 20677 - protein, 33 aa, Artificial Sequence; identical to SEQ ID NO: 10530
  Cyclic GFR-binding peptide
  MOD_RES (4)..(5): Xaa is C or S

SEQ ID NO: 20678 - protein, 26 aa, Artificial Sequence
  Cyclic GFR-binding peptide
LNAISILYFIGKTPKILKKYRMIVKS

SEQ ID NO: 20679 - protein, 27 aa, Artificial Sequence
  Cyclic GFR-binding peptide
  MOD_RES (1)..(1): Xaa is C or S
XVPTELEPLPMVYYDENEKVVEQLSND

SEQ ID NO: 20680 - protein, 36 aa, Artificial Sequence
  Cyclic GFR-binding peptide
  MOD_RES (1)..(2)..(34)..(36): Xaa is C or S
XXAPTKLSPISVLFIDDSSNVIYKQYENMVVRSXGX

SEQ ID NO: 20681 - protein, 26 aa, Artificial Sequence
  Cyclic GFR-binding peptide
EPLTMLYYDENEKVVEQLSNDMVVEG

SEQ ID NO: 20682 - protein, 38 aa, Artificial Sequence
  Cyclic GFR-binding peptide
  MOD_RES (5)..(6)..(37): Xaa is C or S
SAAPXXVPQALSPISILFIVGRKPKVYKQYEMIVRSXK

SEQ ID NO: 20683 - protein, 38 aa, Artificial Sequence
  Cyclic GFR-binding peptide
  MOD_RES (5)..(6)..(38): Xaa is C or S
VPKPXXAPTQLEPLTVLYYDDSSNVIEQLSNNMVVRAX

SEQ ID NO: 20684 - protein, 34 aa, Artificial Sequence
  Cyclic GFR-binding peptide
  MOD_RES (1)..(33): Xaa is C or S
XVPTELEPLPMVYYDEYDKVVEQLSNEMVVEGXG

SEQ ID NO: 20685 - protein, 37 aa, Artificial Sequence
  Cyclic GFR-binding peptide
  MOD_RES (5)..(6)..(37): Xaa is C or S
SAAPXXVPQALSPISILFIVGRKPKVYKQYEMIVRSX

SEQ ID NO: 20686 - protein, 29 aa, Artificial Sequence
  Cyclic GFR-binding peptide
VPTELEPLPMVYYDEYDKVVEQLSNEMVV

SEQ ID NO: 20687 - protein, 35 aa, Artificial Sequence; identical to SEQ ID NO: 10543
  Cyclic GFR-binding peptide
  MOD_RES (2)..(3)..(34): Xaa is C or S

SEQ ID NO: 20688 - protein, 34 aa, Artificial Sequence
  Cyclic GFR-binding peptide
  MOD_RES (3)..(4): Xaa is C or S
SPXXVSQDLSPISILFIIGKTPKIYKQYEMIVKS

SEQ ID NO: 20689 - protein, 26 aa, Artificial Sequence
  Cyclic GFR-binding peptide
TELNAISMLYFDENEKVVLKKYRDMV

SEQ ID NO: 20690 - protein, 28 aa, Artificial Sequence
  Cyclic GFR-binding peptide
TRLEPLPIVYYDSANNVVEQLSNDMVVE

SEQ ID NO: 20691 - protein, 29 aa, Artificial Sequence
  Cyclic GFR-binding peptide
  MOD_RES (1)..(1): Xaa is C or S
XVSQDLEPLPIVYYIGKTPKIEQLSNMIV

SEQ ID NO: 20692 - protein, 39 aa, Artificial Sequence
  Cyclic GFR-binding peptide
  MOD_RES (5)..(6)..(38): Xaa is C or S
VPKPXXAPTQLEPLTVLYYDDSSNVIEQLSNNMVVRAXG

SEQ ID NO: 20693 - protein, 31 aa, Artificial Sequence
  Cyclic GFR-binding peptide
  MOD_RES (31)..(31): Xaa is C or S
PTELEPLTMLYYDEYDKVVEQLSNEMVVEGX

SEQ ID NO: 20694 - protein, 21 aa, Artificial Sequence
  Cyclic GFR-binding peptide
SPISMLFIDENEKVVYKQYED

SEQ ID NO: 20695 - protein, 38 aa, Artificial Sequence
  Cyclic GFR-binding peptide
  MOD_RES (4)..(5)..(37): Xaa is C or S
PPTXXVPTRLEPLPIVYYDSANNVVEQLSNDMVVESXG

SEQ ID NO: 20696 - protein, 31 aa, Artificial Sequence
  Cyclic GFR-binding peptide
  MOD_RES (4)..(5): Xaa is C or S
PKPXXAPTKLEPLTVLYYDDSSNVIEQLSNN

SEQ ID NO: 20697 - protein, 30 aa, Artificial Sequence
  Cyclic GFR-binding peptide
  MOD_RES (28)..(30): Xaa is C or S
LSPISMLFIDENEKVVYKQYEDMVVEGXGX

SEQ ID NO: 20698 - protein, 30 aa, Artificial Sequence
  Cyclic GFR-binding peptide
  MOD_RES (27)..(29): Xaa is C or S
LEPLPIVYYVGRTPKVEQLSNMVVKSXKXS

SEQ ID NO: 20699 - protein, 34 aa, Artificial Sequence
  Cyclic GFR-binding peptide
  MOD_RES (1)..(33): Xaa is C or S
XVPTRLNAISILYFDSANNVVLKKYRDMVVESXG

SEQ ID NO: 20700 - protein, 35 aa, Artificial Sequence
  Cyclic GFR-binding peptide
  MOD_RES (3)..(4): Xaa is C or S
KAXXVPTELSPISMLFIDEYDKVVYKQYEEMVVEG

SEQ ID NO: 20701 - protein, 32 aa, Artificial Sequence
  Cyclic GFR-binding peptide
  MOD_RES (5)..(6): Xaa is C or S
VPKPXXAPTQLEPLTVLYYDDSSNVIEQLSNN

SEQ ID NO: 20702 - protein, 23 aa, Artificial Sequence
  Cyclic GFR-binding peptide
QALSAISILYLVGRKPKVLKNYQ

SEQ ID NO: 20703 - protein, 32 aa, Artificial Sequence
  Cyclic GFR-binding peptide
  MOD_RES (2)..(3): Xaa is C or S
AXXVPTELSPISMLFIDENEKVVYKQYEDMVV

SEQ ID NO: 20704 - protein, 33 aa, Artificial Sequence; identical to SEQ ID NO: 10579
  Cyclic GFR-binding peptide
  MOD_RES (5)..(6): Xaa is C or S

SEQ ID NO: 20705 - protein, 35 aa, Artificial Sequence
  Cyclic GFR-binding peptide
  MOD_RES (5)..(6): Xaa is C or S
SASPXXVPQDLEPLPIVYYVGRTPKVEQLSNMVVK

SEQ ID NO: 20706 - protein, 34 aa, Artificial Sequence
  Cyclic GFR-binding peptide
  MOD_RES (1)..(2)..(34): Xaa is C or S
XXAPTQLEPLPVVYYDDSSNVIEQLSNNMVVRAX

SEQ ID NO: 20707 - protein, 29 aa, Artificial Sequence
  Cyclic GFR-binding peptide
  MOD_RES (1)..(2): Xaa is C or S
XXVPQALSAISILYLVGRKPKVLKNYQMI

SEQ ID NO: 20708 - protein, 38 aa, Artificial Sequence; identical to SEQ ID NO: 10582
  Cyclic GFR-binding peptide
  MOD_RES (5)..(6)..(37): Xaa is C or S

SEQ ID NO: 20709 - protein, 25 aa, Artificial Sequence
  Cyclic GFR-binding peptide
NAISILYFVGRKPKVLKKYRMIVRS

SEQ ID NO: 20710 - protein, 25 aa, Artificial Sequence
  Cyclic GFR-binding peptide
TELSPISMLFIDENEKVVYKQYEDM

SEQ ID NO: 20711 - protein, 24 aa, Artificial Sequence
  Cyclic GFR-binding peptide
TQLEPLPVVYYDDSSNVIEQLSNN

SEQ ID NO: 20712 - protein, 28 aa, Artificial Sequence
  Cyclic GFR-binding peptide
  MOD_RES (2)..(2): Xaa is C or S
TXAPTKLSAISVLYLDDSSNVILKNYQN

SEQ ID NO: 20713 - protein, 36 aa, Artificial Sequence; identical to SEQ ID NO: 10590
  Cyclic GFR-binding peptide
  MOD_RES (1)..(33)..(35): Xaa is C or S

SEQ ID NO: 20714 - protein, 31 aa, Artificial Sequence; identical to SEQ ID NO: 10591
  Cyclic GFR-binding peptide
  MOD_RES (29)..(31): Xaa is C or S

SEQ ID NO: 20715 - protein, 31 aa, Artificial Sequence
  Cyclic GFR-binding peptide
  MOD_RES (5)..(6): Xaa is C or S
SAAPXXVPQALSPISILFIVGRKPKVYKQYE

SEQ ID NO: 20716 - protein, 37 aa, Artificial Sequence; identical to SEQ ID NO: 10593
  Cyclic GFR-binding peptide
  MOD_RES (4)..(5)..(36): Xaa is C or S

SEQ ID NO: 20717 - protein, 34 aa, Artificial Sequence; identical to SEQ ID NO: 10595
  Cyclic GFR-binding peptide
  MOD_RES (3)..(4): Xaa is C or S

SEQ ID NO: 20718 - protein, 41 aa, Artificial Sequence
  Cyclic GFR-binding peptide
  MOD_RES (6)..(7)..(39)..(41): Xaa is C or S
KIPKAXXVPTELEPLTMLYYDENEKVVEQLSNDMVVEGXGX

SEQ ID NO: 20719 - protein, 30 aa, Artificial Sequence
  Cyclic GFR-binding peptide
  MOD_RES (28)..(30): Xaa is C or S
ALEPLTILYYVGRKPKVEQLSNMIVRSXKX

SEQ ID NO: 20720 - protein, 30 aa, Artificial Sequence; identical to SEQ ID NO: 10596
  Cyclic GFR-binding peptide
  MOD_RES (29)..(29): Xaa is C or S

SEQ ID NO: 20721 - protein, 40 aa, Artificial Sequence; identical to SEQ ID NO: 10599
  Cyclic GFR-binding peptide
  MOD_RES (4)..(5)..(37)..(39): Xaa is C or S

SEQ ID NO: 20722 - protein, 32 aa, Artificial Sequence
  Cyclic GFR-binding peptide
  MOD_RES (1)..(2): Xaa is C or S
XXVPQALEPLTILYYVGRKPKVEQLSNMIVRS

SEQ ID NO: 20723 - protein, 29 aa, Artificial Sequence
  Cyclic GFR-binding peptide
  MOD_RES (28)..(28): Xaa is C or S
DLEPLPIVYYIGKTPKIEQLSNMIVKSXK

SEQ ID NO: 20724 - protein, 38 aa, Artificial Sequence
  Cyclic GFR-binding peptide
  MOD_RES (6)..(38): Xaa is C or S
VTKPTXAPTKLEPLTVLYYDDSSNVIEQLSNNMVVRSX

SEQ ID NO: 20725 - protein, 33 aa, Artificial Sequence; identical to SEQ ID NO: 10604
  Cyclic GFR-binding peptide
  MOD_RES (3)..(4): Xaa is C or S

SEQ ID NO: 20726 - protein, 35 aa, Artificial Sequence
  Cyclic GFR-binding peptide
  MOD_RES (2)..(3)..(35): Xaa is C or S
TXXVPTRLSAISILYLDSANNVVLKNYQDMVVESX

SEQ ID NO: 20727 - protein, 20 aa, Artificial Sequence
  Cyclic GFR-binding peptide
EPLTMLYYDEYDKVVEQLSN

SEQ ID NO: 20728 - protein, 36 aa, Artificial Sequence
  Cyclic GFR-binding peptide
  MOD_RES (5)..(6): Xaa is C or S
VPKPXXAPTQLSPISVLFIDDSSNVIYKQYENMVVR

SEQ ID NO: 20729 - protein, 31 aa, Artificial Sequence
  Cyclic GFR-binding peptide
  MOD_RES (30)..(30): Xaa is C or S
TELEPLPMVYYDENEKVVEQLSNDMVVEGXG

SEQ ID NO: 20730 - protein, 26 aa, Artificial Sequence
  Cyclic GFR-binding peptide
TKLSAISVLYLDDSSNVILKNYQNMV

SEQ ID NO: 20731 - protein, 30 aa, Artificial Sequence
  Cyclic GFR-binding peptide
  MOD_RES (2)..(2): Xaa is C or S
TXAPTKLSPISVLFIDDSSNVIYKQYENMV

SEQ ID NO: 20732 - protein, 27 aa, Artificial Sequence
  Cyclic GFR-binding peptide
PTKLEPLPVVYYDDSSNVIEQLSNNMV

SEQ ID NO: 20733 - protein, 28 aa, Artificial Sequence
  Cyclic GFR-binding peptide
  MOD_RES (27)..(27): Xaa is C or S
LEPLPIVYYVGRTPKVEQLSNMVVKSXK

SEQ ID NO: 20734 - protein, 38 aa, Artificial Sequence
  Cyclic GFR-binding peptide
  MOD_RES (2)..(3)..(35)..(37): Xaa is C or S
TXXVPTRLEPLPIVYYDSANNVVEQLSNDMVVESXGXR

SEQ ID NO: 20735 - protein, 21 aa, Artificial Sequence
  Cyclic GFR-binding peptide
EPLPVVYYDDSSNVIEQLSNN

SEQ ID NO: 20736 - protein, 41 aa, Artificial Sequence; identical to SEQ ID NO: 10613
  Cyclic GFR-binding peptide
  MOD_RES (6)..(7)..(38)..(40): Xaa is C or S

SEQ ID NO: 20737 - protein, 36 aa, Artificial Sequence
  Cyclic GFR-binding peptide
  MOD_RES (3)..(4)..(36): Xaa is C or S
KAXXVPTELEPLTMLYYDEYDKVVEQLSNEMVVEGX

SEQ ID NO: 20738 - protein, 30 aa, Artificial Sequence
  Cyclic GFR-binding peptide
APTKLEPLPVVYYDDSSNVIEQLSNNMVVR

SEQ ID NO: 20739 - protein, 31 aa, Artificial Sequence; identical to SEQ ID NO: 10615
  Cyclic GFR-binding peptide
  MOD_RES (2)..(3): Xaa is C or S

SEQ ID NO: 20740 - protein, 33 aa, Artificial Sequence; identical to SEQ ID NO: 10616
  Cyclic GFR-binding peptide
  MOD_RES (4)..(4): Xaa is C or S

SEQ ID NO: 20741 - protein, 32 aa, Artificial Sequence
  Cyclic GFR-binding peptide
  MOD_RES (3)..(4): Xaa is C or S
SPXXVPQDLSPISILFIVGRTPKVYKQYEMVV

SEQ ID NO: 20742 - protein, 30 aa, Artificial Sequence; identical to SEQ ID NO: 10617
  Cyclic GFR-binding peptide
  MOD_RES (28)..(30): Xaa is C or S

SEQ ID NO: 20743 - protein, 26 aa, Artificial Sequence
  Cyclic GFR-binding peptide
  MOD_RES (1)..(1): Xaa is C or S
XAPTKLEPLTVLYYDDSSNVIEQLSN

SEQ ID NO: 20744 - protein, 39 aa, Artificial Sequence; identical to SEQ ID NO: 10618
  Cyclic GFR-binding peptide
  MOD_RES (4)..(5)..(36)..(38): Xaa is C or S

SEQ ID NO: 20745 - protein, 34 aa, Artificial Sequence
  Cyclic GFR-binding peptide
  MOD_RES (31)..(33): Xaa is C or S
PTELSPISMLFIDENEKVVYKQYEDMVVEGXGXR

SEQ ID NO: 20746 - protein, 28 aa, Artificial Sequence
  Cyclic GFR-binding peptide
  MOD_RES (1)..(1): Xaa is C or S
XVPQALSAISILYLVGRKPKVLKNYQMI

SEQ ID NO: 20747 - protein, 37 aa, Artificial Sequence
  Cyclic GFR-binding peptide
  MOD_RES (1)..(2)..(34)..(36): Xaa is C or S
XXAPTKLSPISVLFIDDSSNVIYKQYENMVVRSXGXH

SEQ ID NO: 20748 - protein, 36 aa, Artificial Sequence
  Cyclic GFR-binding peptide
  MOD_RES (6)..(7): Xaa is C or S
KIPKAXXVPTELEPLTMLYYDENEKVVEQLSNDMVV

SEQ ID NO: 20749 - protein, 27 aa, Artificial Sequence
  Cyclic GFR-binding peptide
PQALSPISILFIVGRKPKVYKQYEMIV

SEQ ID NO: 20750 - protein, 33 aa, Artificial Sequence
  Cyclic GFR-binding peptide
  MOD_RES (1)..(33): Xaa is C or S
XAPTQLEPLPVVYYDDSSNVIEQLSNNMVVRAX

SEQ ID NO: 20751 - protein, 36 aa, Artificial Sequence
  Cyclic GFR-binding peptide
  MOD_RES (1)..(2)..(34)..(36): Xaa is C or S
XXVPTRLEPLPIVYYDSANNVVEQLSNDMVVESXGX

SEQ ID NO: 20752 - protein, 38 aa, Artificial Sequence
  Cyclic GFR-binding peptide
  MOD_RES (6)..(7)..(38): Xaa is C or S
ASAAPXXVPQALSPISILFIVGRKPKVYKQYEMIVRSX

SEQ ID NO: 20753 - protein, 33 aa, Artificial Sequence
  Cyclic GFR-binding peptide
  MOD_RES (31)..(33): Xaa is C or S
VSQDLEPLPIVYYIGKTPKIEQLSNMIVKSXKX

SEQ ID NO: 20754 - protein, 24 aa, Artificial Sequence
  Cyclic GFR-binding peptide
ELEPLTMLYYDENEKVVEQLSNDM

SEQ ID NO: 20755 - protein, 33 aa, Artificial Sequence; identical to SEQ ID NO: 10627
  Cyclic GFR-binding peptide
  MOD_RES (32)..(32): Xaa is C or S

SEQ ID NO: 20756 - protein, 30 aa, Artificial Sequence
  Cyclic GFR-binding peptide
  MOD_RES (28)..(30): Xaa is C or S
LEPLTMLYYDENEKVVEQLSNDMVVEGXGX

SEQ ID NO: 20757 - protein, 31 aa, Artificial Sequence
  Cyclic GFR-binding peptide
VPTELEPLTMLYYDEYDKVVEQLSNEMVVEG

SEQ ID NO: 20758 - protein, 30 aa, Artificial Sequence
  Cyclic GFR-binding peptide
  MOD_RES (4)..(4): Xaa is C or S
KPTXAPTKLEPLTVLYYDDSSNVIEQLSNN

SEQ ID NO: 20759 - protein, 25 aa, Artificial Sequence
  Cyclic GFR-binding peptide
TKLSPISVLFIDDSSNVIYKQYENM

SEQ ID NO: 20760 - protein, 37 aa, Artificial Sequence
  Cyclic GFR-binding peptide
  MOD_RES (2)..(3)..(34)..(36): Xaa is C or S
PXXVPQDLEPLPIVYYVGRTPKVEQLSNMVVKSXKXS

SEQ ID NO: 20761 - protein, 35 aa, Artificial Sequence
  Cyclic GFR-binding peptide
  MOD_RES (4)..(5): Xaa is C or S
PKAXXVPTELSPISMLFIDEYDKVVYKQYEEMVVE

SEQ ID NO: 20762 - protein, 40 aa, Artificial Sequence
  Cyclic GFR-binding peptide
  MOD_RES (4)..(5)..(37)..(39): Xaa is C or S
PPTXXVPTRLEPLPIVYYDSANNVVEQLSNDMVVESXGXR

SEQ ID NO: 20763 - protein, 40 aa, Artificial Sequence; identical to SEQ ID NO: 10629
  Cyclic GFR-binding peptide
  MOD_RES (5)..(6)..(38)..(40): Xaa is C or S

SEQ ID NO: 20764 - protein, 29 aa, Artificial Sequence
  Cyclic GFR-binding peptide
  MOD_RES (27)..(29): Xaa is C or S
NAISILYFDSANNVVLKKYRDMVVESXGX

SEQ ID NO: 20765 - protein, 26 aa, Artificial Sequence
  Cyclic GFR-binding peptide
EPLPMVYYDENEKVVEQLSNDMVVEG

SEQ ID NO: 20766 - protein, 30 aa, Artificial Sequence
  Cyclic GFR-binding peptide
  MOD_RES (3)..(3): Xaa is C or S
PTXAPTKLEPLTVLYYDDSSNVIEQLSNNM

SEQ ID NO: 20767 - protein, 29 aa, Artificial Sequence
  Cyclic GFR-binding peptide
  MOD_RES (3)..(4): Xaa is C or S
KAXXVPTELEPLPMVYYDENEKVVEQLSN

SEQ ID NO: 20768 - protein, 37 aa, Artificial Sequence
  Cyclic GFR-binding peptide
  MOD_RES (4)..(5)..(36): Xaa is C or S
ASPXXVSQDLEPLPIVYYIGKTPKIEQLSNMIVKSXK

SEQ ID NO: 20769 - protein, 31 aa, Artificial Sequence
  Cyclic GFR-binding peptide
  MOD_RES (1)..(1): Xaa is C or S
XVSQDLSPISILFIIGKTPKIYKQYEMIVKS

SEQ ID NO: 20770 - protein, 35 aa, Artificial Sequence
  Cyclic GFR-binding peptide
  MOD_RES (32)..(34): Xaa is C or S
APTKLSPISVLFIDDSSNVIYKQYENMVVRSXGXH

SEQ ID NO: 20771 - protein, 34 aa, Artificial Sequence
  Cyclic GFR-binding peptide
  MOD_RES (2)..(3): Xaa is C or S
AXXVPTELSPISMLFIDEYDKVVYKQYEEMVVEG

SEQ ID NO: 20772 - protein, 40 aa, Artificial Sequence
  Cyclic GFR-binding peptide
  MOD_RES (5)..(6)..(38)..(40): Xaa is C or S
IPKAXXVPTELSPISMLFIDENEKVVYKQYEDMVVEGXGX

SEQ ID NO: 20773 - protein, 30 aa, Artificial Sequence; identical to SEQ ID NO: 10638
  Cyclic GFR-binding peptide

SEQ ID NO: 20774 - protein, 31 aa, Artificial Sequence; identical to SEQ ID NO: 10640
  Cyclic GFR-binding peptide
  MOD_RES (29)..(31): Xaa is C or S

SEQ ID NO: 20775 - protein, 40 aa, Artificial Sequence
  Cyclic GFR-binding peptide
  MOD_RES (5)..(6)..(38)..(40): Xaa is C or S
IPKAXXVPTELEPLTMLYYDENEKVVEQLSNDMVVEGXGX

SEQ ID NO: 20776 - protein, 22 aa, Artificial Sequence
  Cyclic GFR-binding peptide
LSAISILYLVGRTPKVLKNYQM

SEQ ID NO: 20777 - protein, 34 aa, Artificial Sequence
  Cyclic GFR-binding peptide
  MOD_RES (1)..(2)..(33): Xaa is C or S
XXVPQDLSPISILFIVGRTPKVYKQYEMVVKSXK

SEQ ID NO: 20778 - protein, 29 aa, Artificial Sequence
  Cyclic GFR-binding peptide
  MOD_RES (27)..(29): Xaa is C or S
EPLTILYYDSANNVVEQLSNDMVVESXGX

SEQ ID NO: 20779 - protein, 23 aa, Artificial Sequence
  Cyclic GFR-binding peptide
SPISILFIVGRKPKVYKQYEMIV

SEQ ID NO: 20780 - protein, 33 aa, Artificial Sequence; identical to SEQ ID NO: 10651
  Cyclic GFR-binding peptide
  MOD_RES (31)..(33): Xaa is C or S

SEQ ID NO: 20781 - protein, 37 aa, Artificial Sequence
  Cyclic GFR-binding peptide
  MOD_RES (5)..(6): Xaa is C or S
VPKPXXAPTKLSPISVLFIDDSSNVIYKQYENMVVRS

SEQ ID NO: 20782 - protein, 34 aa, Artificial Sequence
  Cyclic GFR-binding peptide
  MOD_RES (1)..(2)..(34): Xaa is C or S
XXVPTELEPLPMVYYDENEKVVEQLSNDMVVEGX

SEQ ID NO: 20783 - protein, 41 aa, Artificial Sequence
  Cyclic GFR-binding peptide
  MOD_RES (6)..(38)..(40): Xaa is C or S
VTKPTXAPTKLSPISVLFIDDSSNVIYKQYENMVVRSXGXH

SEQ ID NO: 20784 - protein, 39 aa, Artificial Sequence
  Cyclic GFR-binding peptide
  MOD_RES (5)..(6)..(38): Xaa is C or S
VPKPXXAPTQLSPISVLFIDDSSNVIYKQYENMVVRAXG

SEQ ID NO: 20785 - protein, 31 aa, Artificial Sequence
  Cyclic GFR-binding peptide
  MOD_RES (3)..(4): Xaa is C or S
PTXXVPTRLEPLPIVYYDSANNVVEQLSNDM

SEQ ID NO: 20786 - protein, 39 aa, Artificial Sequence
  Cyclic GFR-binding peptide
  MOD_RES (5)..(6)..(38): Xaa is C or S
VPKPXXAPTKLEPLPVVYYDDSSNVIEQLSNNMVVRSXG

SEQ ID NO: 20787 - protein, 38 aa, Artificial Sequence
  Cyclic GFR-binding peptide
  MOD_RES (2)..(3)..(35)..(37): Xaa is C or S
PXXAPTKLEPLTVLYYDDSSNVIEQLSNNMVVRSXGXH

SEQ ID NO: 20788 - protein, 36 aa, Artificial Sequence
  Cyclic GFR-binding peptide
  MOD_RES (6)..(7): Xaa is C or S
STPPTXXVPTRLSAISILYLDSANNVVLKNYQDMVV

SEQ ID NO: 20789 - protein, 27 aa, Artificial Sequence
  Cyclic GFR-binding peptide
  MOD_RES (1)..(1): Xaa is C or S
XVPQDLNAISILYFVGRTPKVLKKYRM

SEQ ID NO: 20790 - protein, 39 aa, Artificial Sequence; identical to SEQ ID NO: 10663
  Cyclic GFR-binding peptide
  MOD_RES (5)..(37)..(39): Xaa is C or S

SEQ ID NO: 20791 - protein, 33 aa, Artificial Sequence; identical to SEQ ID NO: 10664
  Cyclic GFR-binding peptide
  MOD_RES (4)..(5): Xaa is C or S

SEQ ID NO: 20792 - protein, 30 aa, Artificial Sequence
  Cyclic GFR-binding peptide
  MOD_RES (2)..(3): Xaa is C or S
PXXAPTKLEPLTVLYYDDSSNVIEQLSNNM

SEQ ID NO: 20793 - protein, 36 aa, Artificial Sequence
  Cyclic GFR-binding peptide
  MOD_RES (5)..(6): Xaa is C or S
TPPTXXVPTRLEPLPIVYYDSANNVVEQLSNDMVVE

SEQ ID NO: 20794 - protein, 33 aa, Artificial Sequence; identical to SEQ ID NO: 10668
  Cyclic GFR-binding peptide
  MOD_RES (32)..(32): Xaa is C or S

SEQ ID NO: 20795 - protein, 28 aa, Artificial Sequence
  Cyclic GFR-binding peptide
ELSPISMLFIDENEKVVYKQYEDMVVEG

SEQ ID NO: 20796 - protein, 36 aa, Artificial Sequence
  Cyclic GFR-binding peptide
  MOD_RES (1)..(2)..(34)..(36): Xaa is C or S
XXVPTRLSAISILYLDSANNVVLKNYQDMVVESXGX

SEQ ID NO: 20797 - protein, 30 aa, Artificial Sequence
  Cyclic GFR-binding peptide
  MOD_RES (1)..(2): Xaa is C or S
XXAPTKLSPISVLFIDDSSNVIYKQYENMV

SEQ ID NO: 20798 - protein, 33 aa, Artificial Sequence
  Cyclic GFR-binding peptide
  MOD_RES (30)..(32): Xaa is C or S
TQLEPLTVLYYDDSSNVIEQLSNNMVVRAXGXH

SEQ ID NO: 20799 - protein, 33 aa, Artificial Sequence; identical to SEQ ID NO: 10679
  Cyclic GFR-binding peptide
  MOD_RES (1)..(32): Xaa is C or S

SEQ ID NO: 20800 - protein, 35 aa, Artificial Sequence
  Cyclic GFR-binding peptide
  MOD_RES (32)..(34): Xaa is C or S
VPTELSPISMLFIDENEKVVYKQYEDMVVEGXGXR

SEQ ID NO: 20801 - protein, 33 aa, Artificial Sequence
  Cyclic GFR-binding peptide
  MOD_RES (3)..(4): Xaa is C or S
PTXXVPTRLEPLTILYYDSANNVVEQLSNDMVV

SEQ ID NO: 20802 - protein, 35 aa, Artificial Sequence; identical to SEQ ID NO: 10685
  Cyclic GFR-binding peptide
  MOD_RES (1)..(33)..(35): Xaa is C or S

SEQ ID NO: 20803 - protein, 34 aa, Artificial Sequence
  Cyclic GFR-binding peptide
  MOD_RES (5)..(6): Xaa is C or S
IPKAXXVPTELSPISMLFIDEYDKVVYKQYEEMV

SEQ ID NO: 20804 - protein, 33 aa, Artificial Sequence; identical to SEQ ID NO: 10686
  Cyclic GFR-binding peptide
  MOD_RES (5)..(6): Xaa is C or S

SEQ ID NO: 20805 - protein, 30 aa, Artificial Sequence; identical to SEQ ID NO: 10687
  Cyclic GFR-binding peptide
  MOD_RES (1)..(2): Xaa is C or S

SEQ ID NO: 20806 - protein, 25 aa, Artificial Sequence
  Cyclic GFR-binding peptide
SPISILFIVGRTPKVYKQYEMVVKS

SEQ ID NO: 20807 - protein, 37 aa, Artificial Sequence; identical to SEQ ID NO: 10693
  Cyclic GFR-binding peptide
  MOD_RES (3)..(4)..(36): Xaa is C or S

SEQ ID NO: 20808 - protein, 32 aa, Artificial Sequence
  Cyclic GFR-binding peptide
  MOD_RES (32)..(32): Xaa is C or S
VPTRLEPLTILYYDSANNVVEQLSNDMVVESX

SEQ ID NO: 20809 - protein, 27 aa, Artificial Sequence
  Cyclic GFR-binding peptide
PTELNAISMLYFDENEKVVLKKYRDMV

SEQ ID NO: 20810 - protein, 28 aa, Artificial Sequence
  Cyclic GFR-binding peptide
  MOD_RES (27)..(27): Xaa is C or S
SPISVLFIDDSSNVIYKQYENMVVRSXG

SEQ ID NO: 20811 - protein, 26 aa, Artificial Sequence
  Cyclic GFR-binding peptide
PTQLSAISVLYLDDSSNVILKNYQNM

SEQ ID NO: 20812 - protein, 28 aa, Artificial Sequence
  Cyclic GFR-binding peptide
  MOD_RES (28)..(28): Xaa is C or S
LSPISVLFIDDSSNVIYKQYENMVVRAX

SEQ ID NO: 20813 - protein, 27 aa, Artificial Sequence
  Cyclic GFR-binding peptide
  MOD_RES (27)..(27): Xaa is C or S
LNAISILYFIGKTPKILKKYRMIVKSX

SEQ ID NO: 20814 - protein, 24 aa, Artificial Sequence
  Cyclic GFR-binding peptide
TRLNAISILYFDSANNVVLKKYRD

SEQ ID NO: 20815 - protein, 35 aa, Artificial Sequence; identical to SEQ ID NO: 10700
  Cyclic GFR-binding peptide
  MOD_RES (3)..(4)..(35): Xaa is C or S

SEQ ID NO: 20816 - protein, 36 aa, Artificial Sequence
  Cyclic GFR-binding peptide
  MOD_RES (6)..(7): Xaa is C or S
STPPTXXVPTRLEPLTILYYDSANNVVEQLSNDMVV

SEQ ID NO: 20817 - protein, 24 aa, Artificial Sequence
  Cyclic GFR-binding peptide
EPLPMVYYDENEKVVEQLSNDMVV

SEQ ID NO: 20818 - protein, 21 aa, Artificial Sequence
  Cyclic GFR-binding peptide
LEPLTMLYYDEYDKVVEQLSN

SEQ ID NO: 20819 - protein, 35 aa, Artificial Sequence; identical to SEQ ID NO: 10702
  Cyclic GFR-binding peptide
  MOD_RES (2)..(3)..(34): Xaa is C or S

SEQ ID NO: 20820 - protein, 34 aa, Artificial Sequence
  Cyclic GFR-binding peptide
  MOD_RES (5)..(6): Xaa is C or S
IPKAXXVPTELSPISMLFIDENEKVVYKQYEDMV

SEQ ID NO: 20821 - protein, 25 aa, Artificial Sequence
  Cyclic GFR-binding peptide
PTELEPLPMVYYDEYDKVVEQLSNE

SEQ ID NO: 20822 - protein, 33 aa, Artificial Sequence
  Cyclic GFR-binding peptide
  MOD_RES (5)..(6): Xaa is C or S
SASPXXVPQDLEPLPIVYYVGRTPKVEQLSNMV

SEQ ID NO: 20823 - protein, 37 aa, Artificial Sequence
  Cyclic GFR-binding peptide
  MOD_RES (6)..(7): Xaa is C or S
STPPTXXVPTRLNAISILYFDSANNVVLKKYRDMVVE

SEQ ID NO: 20824 - protein, 35 aa, Artificial Sequence
  Cyclic GFR-binding peptide
  MOD_RES (6)..(7): Xaa is C or S
KIPKAXXVPTELEPLTMLYYDENEKVVEQLSNDMV

SEQ ID NO: 20825 - protein, 21 aa, Artificial Sequence
  Cyclic GFR-binding peptide
EPLTVLYYDDSSNVIEQLSNN

SEQ ID NO: 20826 - protein, 29 aa, Artificial Sequence
  Cyclic GFR-binding peptide
  MOD_RES (2)..(3): Xaa is C or S
AXXVPTELEPLPMVYYDENEKVVEQLSND

SEQ ID NO: 20827 - protein, 31 aa, Artificial Sequence
  Cyclic GFR-binding peptide
  MOD_RES (4)..(5): Xaa is C or S
PPTXXVPTRLSAISILYLDSANNVVLKNYQD

SEQ ID NO: 20828 - protein, 31 aa, Artificial Sequence; identical to SEQ ID NO: 10712
  Cyclic GFR-binding peptide

SEQ ID NO: 20829 - protein, 41 aa, Artificial Sequence
  Cyclic GFR-binding peptide
  MOD_RES (6)..(7)..(39)..(41): Xaa is C or S
TVPKPXXAPTQLEPLPVVYYDDSSNVIEQLSNNMVVRAXGX

SEQ ID NO: 20830 - protein, 32 aa, Artificial Sequence; identical to SEQ ID NO: 10714
  Cyclic GFR-binding peptide
  MOD_RES (2)..(3): Xaa is C or S

SEQ ID NO: 20831 - protein, 31 aa, Artificial Sequence
  Cyclic GFR-binding peptide
  MOD_RES (2)..(3): Xaa is C or S
PXXVSQDLSPISILFIIGKTPKIYKQYEMIV

SEQ ID NO: 20832 - protein, 40 aa, Artificial Sequence
  Cyclic GFR-binding peptide
  MOD_RES (5)..(6)..(38)..(40): Xaa is C or S
VPKPXXAPTKLSPISVLFIDDSSNVIYKQYENMVVRSXGX

SEQ ID NO: 20833 - protein, 23 aa, Artificial Sequence
  Cyclic GFR-binding peptide
RLEPLPIVYYDSANNVVEQLSND

SEQ ID NO: 20834 - protein, 39 aa, Artificial Sequence
  Cyclic GFR-binding peptide
  MOD_RES (3)..(4)..(36)..(38): Xaa is C or S
KPXXAPTKLEPLTVLYYDDSSNVIEQLSNNMVVRSXGXH

SEQ ID NO: 20835 - protein, 30 aa, Artificial Sequence
  Cyclic GFR-binding peptide
  MOD_RES (2)..(3): Xaa is C or S
PXXAPTKLSPISVLFIDDSSNVIYKQYENM

SEQ ID NO: 20836 - protein, 23 aa, Artificial Sequence
  Cyclic GFR-binding peptide
QDLSAISILYLIGKTPKILKNYQ

SEQ ID NO: 20837 - protein, 25 aa, Artificial Sequence
  Cyclic GFR-binding peptide
TELNAISMLYFDEYDKVVLKKYREM

SEQ ID NO: 20838 - protein, 23 aa, Artificial Sequence
  Cyclic GFR-binding peptide
NAISMLYFDENEKVVLKKYRDMV

SEQ ID NO: 20839 - protein, 31 aa, Artificial Sequence
  Cyclic GFR-binding peptide
  MOD_RES (1)..(2): Xaa is C or S
XXVSQDLEPLPIVYYIGKTPKIEQLSNMIVK

SEQ ID NO: 20840 - protein, 32 aa, Artificial Sequence
  Cyclic GFR-binding peptide
  MOD_RES (30)..(32): Xaa is C or S
TELSPISMLFIDENEKVVYKQYEDMVVEGXGX

SEQ ID NO: 20841 - protein, 33 aa, Artificial Sequence
  Cyclic GFR-binding peptide
  MOD_RES (2)..(3): Xaa is C or S
PXXAPTQLEPLPVVYYDDSSNVIEQLSNNMVVR

SEQ ID NO: 20842 - protein, 24 aa, Artificial Sequence
  Cyclic GFR-binding peptide
DLEPLPIVYYVGRTPKVEQLSNMV

SEQ ID NO: 20843 - protein, 32 aa, Artificial Sequence
  Cyclic GFR-binding peptide
  MOD_RES (29)..(31): Xaa is C or S
KLEPLPVVYYDDSSNVIEQLSNNMVVRSXGXH

SEQ ID NO: 20844 - protein, 27 aa, Artificial Sequence
  Cyclic GFR-binding peptide
KLEPLPVVYYDDSSNVIEQLSNNMVVR

SEQ ID NO: 20845 - protein, 30 aa, Artificial Sequence
  Cyclic GFR-binding peptide
  MOD_RES (5)..(5): Xaa is C or S
TKPTXAPTKLEPLPVVYYDDSSNVIEQLSN

SEQ ID NO: 20846 - protein, 34 aa, Artificial Sequence
  Cyclic GFR-binding peptide
  MOD_RES (4)..(5): Xaa is C or S
PPTXXVPTRLEPLPIVYYDSANNVVEQLSNDMVV

SEQ ID NO: 20847 - protein, 24 aa, Artificial Sequence
  Cyclic GFR-binding peptide
QDLEPLPIVYYVGRTPKVEQLSNM

SEQ ID NO: 20848 - protein, 31 aa, Artificial Sequence
  Cyclic GFR-binding peptide
  MOD_RES (3)..(3): Xaa is C or S
PTXAPTKLSPISVLFIDDSSNVIYKQYENMV

SEQ ID NO: 20849 - protein, 39 aa, Artificial Sequence; identical to SEQ ID NO: 10725
  Cyclic GFR-binding peptide
  MOD_RES (5)..(6)..(38): Xaa is C or S

SEQ ID NO: 20850 - protein, 40 aa, Artificial Sequence
  Cyclic GFR-binding peptide
  MOD_RES (5)..(6)..(38)..(40): Xaa is C or S
VPKPXXAPTQLEPLTVLYYDDSSNVIEQLSNNMVVRAXGX

SEQ ID NO: 20851 - protein, 39 aa, Artificial Sequence
  Cyclic GFR-binding peptide
  MOD_RES (6)..(7)..(39): Xaa is C or S
YVPKPXXAPTKLEPLPVVYYDDSSNVIEQLSNNMVVRSX

SEQ ID NO: 20852 - protein, 31 aa, Artificial Sequence
  Cyclic GFR-binding peptide
  MOD_RES (1)..(2): Xaa is C or S
XXAPTQLEPLPVVYYDDSSNVIEQLSNNMVV

SEQ ID NO: 20853 - protein, 39 aa, Artificial Sequence
  Cyclic GFR-binding peptide
  MOD_RES (5)..(6)..(38): Xaa is C or S
VPKPXXAPTKLSPISVLFIDDSSNVIYKQYENMVVRSXG

SEQ ID NO: 20854 - protein, 28 aa, Artificial Sequence
  Cyclic GFR-binding peptide
ELEPLTMLYYDENEKVVEQLSNDMVVEG

SEQ ID NO: 20855 - protein, 27 aa, Artificial Sequence
  Cyclic GFR-binding peptide
  MOD_RES (27)..(27): Xaa is C or S
NAISMLYFDENEKVVLKKYRDMVVEGX

SEQ ID NO: 20856 - protein, 35 aa, Artificial Sequence; identical to SEQ ID NO: 10735
  Cyclic GFR-binding peptide
  MOD_RES (4)..(5): Xaa is C or S

SEQ ID NO: 20857 - protein, 27 aa, Artificial Sequence
  Cyclic GFR-binding peptide
QDLSAISILYLIGKTPKILKNYQMIVK

SEQ ID NO: 20858 - protein, 36 aa, Artificial Sequence
  Cyclic GFR-binding peptide
  MOD_RES (1)..(2)..(33)..(35): Xaa is C or S
XXVPQALEPLTILYYVGRKPKVEQLSNMIVRSXKXS

SEQ ID NO: 20859 - protein, 36 aa, Artificial Sequence
  Cyclic GFR-binding peptide
  MOD_RES (1)..(33)..(35): Xaa is C or S
XVPTELEPLPMVYYDENEKVVEQLSNDMVVEGXGXR

SEQ ID NO: 20860 - protein, 31 aa, Artificial Sequence; identical to SEQ ID NO: 10739
  Cyclic GFR-binding peptide
  MOD_RES (28)..(30): Xaa is C or S

SEQ ID NO: 20861 - protein, 38 aa, Artificial Sequence; identical to SEQ ID NO: 10742
  Cyclic GFR-binding peptide
  MOD_RES (5)..(6)..(37): Xaa is C or S

SEQ ID NO: 20862 - protein, 35 aa, Artificial Sequence; identical to SEQ ID NO: 10743
  Cyclic GFR-binding peptide
  MOD_RES (6)..(7): Xaa is C or S

SEQ ID NO: 20863 - protein, 36 aa, Artificial Sequence
  Cyclic GFR-binding peptide
  MOD_RES (1)..(2)..(33)..(35): Xaa is C or S
XXVSQDLSPISILFIIGKTPKIYKQYEMIVKSXKXS

SEQ ID NO: 20864 - protein, 32 aa, Artificial Sequence; identical to SEQ ID NO: 10745
  Cyclic GFR-binding peptide
  MOD_RES (3)..(4): Xaa is C or S

SEQ ID NO: 20865 - protein, 30 aa, Artificial Sequence
  Cyclic GFR-binding peptide
  MOD_RES (29)..(29): Xaa is C or S
RLNAISILYFDSANNVVLKKYRDMVVESXG

SEQ ID NO: 20866 - protein, 32 aa, Artificial Sequence
  Cyclic GFR-binding peptide
  MOD_RES (2)..(3): Xaa is C or S
PXXVSQDLEPLPIVYYIGKTPKIEQLSNMIVK

SEQ ID NO: 20867 - protein, 38 aa, Artificial Sequence
  Cyclic GFR-binding peptide
  MOD_RES (3)..(4)..(36)..(38): Xaa is C or S
PTXXVPTRLEPLTILYYDSANNVVEQLSNDMVVESXGX

SEQ ID NO: 20868 - protein, 30 aa, Artificial Sequence
  Cyclic GFR-binding peptide
PTELEPLTMLYYDENEKVVEQLSNDMVVEG

SEQ ID NO: 20869 - protein, 39 aa, Artificial Sequence
  Cyclic GFR-binding peptide
  MOD_RES (4)..(5)..(37)..(39): Xaa is C or S
PPTXXVPTRLEPLTILYYDSANNVVEQLSNDMVVESXGX

SEQ ID NO: 20870 - protein, 35 aa, Artificial Sequence
  Cyclic GFR-binding peptide
  MOD_RES (6)..(7): Xaa is C or S
YVPKPXXAPTKLSPISVLFIDDSSNVIYKQYENMV

SEQ ID NO: 20871 - protein, 23 aa, Artificial Sequence
  Cyclic GFR-binding peptide
LNAISILYFDSANNVVLKKYRDM

SEQ ID NO: 20872 - protein, 35 aa, Artificial Sequence
  Cyclic GFR-binding peptide
  MOD_RES (5)..(6): Xaa is C or S
SASPXXVSQDLSPISILFIIGKTPKIYKQYEMIVK

SEQ ID NO: 20873 - protein, 33 aa, Artificial Sequence
  Cyclic GFR-binding peptide
  MOD_RES (32)..(32): Xaa is C or S
VPTELEPLTMLYYDENEKVVEQLSNDMVVEGXG

SEQ ID NO: 20874 - protein, 25 aa, Artificial Sequence
  Cyclic GFR-binding peptide
APTQLEPLPVVYYDDSSNVIEQLSN

SEQ ID NO: 20875 - protein, 39 aa, Artificial Sequence; identical to SEQ ID NO: 10757
  Cyclic GFR-binding peptide
  MOD_RES (4)..(5)..(36)..(38): Xaa is C or S

SEQ ID NO: 20876 - protein, 28 aa, Artificial Sequence
  Cyclic GFR-binding peptide
VPQALSPISILFIVGRKPKVYKQYEMIV

SEQ ID NO: 20877 - protein, 32 aa, Artificial Sequence
  Cyclic GFR-binding peptide
  MOD_RES (31)..(31): Xaa is C or S
PTELEPLTMLYYDEYDKVVEQLSNEMVVEGXG

SEQ ID NO: 20878 - protein, 33 aa, Artificial Sequence
  Cyclic GFR-binding peptide
  MOD_RES (1)..(2)..(33): Xaa is C or S
XXVPQDLEPLPIVYYVGRTPKVEQLSNMVVKSX

SEQ ID NO: 20879 - protein, 33 aa, Artificial Sequence
  Cyclic GFR-binding peptide
  MOD_RES (1)..(2): Xaa is C or S
XXVPTELSPISMLFIDENEKVVYKQYEDMVVEG

SEQ ID NO: 20880 - protein, 27 aa, Artificial Sequence
  Cyclic GFR-binding peptide
  MOD_RES (26)..(26): Xaa is C or S
EPLPIVYYVGRTPKVEQLSNMVVKSXK

SEQ ID NO: 20881 - protein, 35 aa, Artificial Sequence
  Cyclic GFR-binding peptide
  MOD_RES (3)..(4)..(35): Xaa is C or S
SPXXVPQDLSPISILFIVGRTPKVYKQYEMVVKSX

SEQ ID NO: 20882 - protein, 41 aa, Artificial Sequence
  Cyclic GFR-binding peptide
  MOD_RES (5)..(6)..(38)..(40): Xaa is C or S
IPKAXXVPTELEPLPMVYYDEYDKVVEQLSNEMVVEGXGXR

SEQ ID NO: 20883 - protein, 21 aa, Artificial Sequence
  Cyclic GFR-binding peptide
LNAISMLYFDEYDKVVLKKYR

SEQ ID NO: 20884 - protein, 32 aa, Artificial Sequence
  Cyclic GFR-binding peptide
  MOD_RES (30)..(32): Xaa is C or S
TELEPLTMLYYDEYDKVVEQLSNEMVVEGXGX

SEQ ID NO: 20885 - protein, 32 aa, Artificial Sequence
  Cyclic GFR-binding peptide
  MOD_RES (30)..(32): Xaa is C or S
PQDLSPISILFIVGRTPKVYKQYEMVVKSXKX

SEQ ID NO: 20886 - protein, 33 aa, Artificial Sequence
  Cyclic GFR-binding peptide
  MOD_RES (30)..(32): Xaa is C or S
TELEPLTMLYYDEYDKVVEQLSNEMVVEGXGXR

SEQ ID NO: 20887 - protein, 35 aa, Artificial Sequence; identical to SEQ ID NO: 10771
  Cyclic GFR-binding peptide
  MOD_RES (5)..(6): Xaa is C or S

SEQ ID NO: 20888 - protein, 25 aa, Artificial Sequence
  Cyclic GFR-binding peptide
TRLNAISILYFDSANNVVLKKYRDM

SEQ ID NO: 20889 - protein, 31 aa, Artificial Sequence
  Cyclic GFR-binding peptide
  MOD_RES (30)..(30): Xaa is C or S
PQDLEPLPIVYYVGRTPKVEQLSNMVVKSXK

SEQ ID NO: 20890 - protein, 32 aa, Artificial Sequence
  Cyclic GFR-binding peptide
  MOD_RES (1)..(2): Xaa is C or S
XXVPTRLSAISILYLDSANNVVLKNYQDMVVE

SEQ ID NO: 20891 - protein, 29 aa, Artificial Sequence
  Cyclic GFR-binding peptide
  MOD_RES (27)..(29): Xaa is C or S
LSPISILFIVGRKPKVYKQYEMIVRSXKX

SEQ ID NO: 20892 - protein, 29 aa, Artificial Sequence
  Cyclic GFR-binding peptide
  MOD_RES (4)..(4): Xaa is C or S
KPTXAPTKLEPLTVLYYDDSSNVIEQLSN

SEQ ID NO: 20893 - protein, 40 aa, Artificial Sequence
  Cyclic GFR-binding peptide
  MOD_RES (5)..(6)..(38)..(40): Xaa is C or S
VPKPXXAPTQLSPISVLFIDDSSNVIYKQYENMVVRAXGX

SEQ ID NO: 20894 - protein, 30 aa, Artificial Sequence; identical to SEQ ID NO: 10780
  Cyclic GFR-binding peptide
  MOD_RES (4)..(5): Xaa is C or S

SEQ ID NO: 20895 - protein, 22 aa, Artificial Sequence
  Cyclic GFR-binding peptide
EPLTVLYYDDSSNVIEQLSNNM

SEQ ID NO: 20896 - protein, 33 aa, Artificial Sequence
  Cyclic GFR-binding peptide
  MOD_RES (2)..(3): Xaa is C or S
PXXAPTKLEPLTVLYYDDSSNVIEQLSNNMVVR

SEQ ID NO: 20897 - protein, 39 aa, Artificial Sequence
  Cyclic GFR-binding peptide
  MOD_RES (6)..(7)..(39): Xaa is C or S
TVPKPXXAPTQLSPISVLFIDDSSNVIYKQYENMVVRAX

SEQ ID NO: 20898 - protein, 33 aa, Artificial Sequence
  Cyclic GFR-binding peptide
  MOD_RES (4)..(5): Xaa is C or S
PKPXXAPTQLEPLPVVYYDDSSNVIEQLSNNMV

SEQ ID NO: 20899 - protein, 24 aa, Artificial Sequence
  Cyclic GFR-binding peptide
LSAISILYLDSANNVVLKNYQDMV

SEQ ID NO: 20900 - protein, 26 aa, Artificial Sequence
  Cyclic GFR-binding peptide
  MOD_RES (1)..(1): Xaa is C or S
XVPTELSPISMLFIDEYDKVVYKQYE

SEQ ID NO: 20901 - protein, 24 aa, Artificial Sequence
  Cyclic GFR-binding peptide
LNAISILYFVGRTPKVLKKYRMVV

SEQ ID NO: 20902 - protein, 33 aa, Artificial Sequence
  Cyclic GFR-binding peptide
  MOD_RES (1)..(33): Xaa is C or S
XAPTKLSPISVLFIDDSSNVIYKQYENMVVRSX

SEQ ID NO: 20903 - protein, 23 aa, Artificial Sequence
  Cyclic GFR-binding peptide
RLSAISILYLDSANNVVLKNYQD

SEQ ID NO: 20904 - protein, 37 aa, Artificial Sequence
  Cyclic GFR-binding peptide
  MOD_RES (2)..(3)..(35)..(37): Xaa is C or S
AXXVPTELEPLTMLYYDENEKVVEQLSNDMVVEGXGX

SEQ ID NO: 20905 - protein, 30 aa, Artificial Sequence
  Cyclic GFR-binding peptide
  MOD_RES (2)..(3): Xaa is C or S
AXXVPTELSPISMLFIDENEKVVYKQYEDM

SEQ ID NO: 20906 - protein, 29 aa, Artificial Sequence
  Cyclic GFR-binding peptide
  MOD_RES (1)..(1): Xaa is C or S
XAPTKLEPLPVVYYDDSSNVIEQLSNNMV

SEQ ID NO: 20907 - protein, 28 aa, Artificial Sequence
  Cyclic GFR-binding peptide
  MOD_RES (28)..(28): Xaa is C or S
LSAISVLYLDDSSNVILKNYQNMVVRAX

SEQ ID NO: 20908 - protein, 30 aa, Artificial Sequence
  Cyclic GFR-binding peptide
  MOD_RES (29)..(29): Xaa is C or S
ELSPISMLFIDENEKVVYKQYEDMVVEGXG

SEQ ID NO: 20909 - protein, 29 aa, Artificial Sequence
  Cyclic GFR-binding peptide
PTKLSPISVLFIDDSSNVIYKQYENMVVR

SEQ ID NO: 20910 - protein, 40 aa, Artificial Sequence
  Cyclic GFR-binding peptide
  MOD_RES (4)..(5)..(37)..(39): Xaa is C or S
PKPXXAPTQLSPISVLFIDDSSNVIYKQYENMVVRAXGXH

SEQ ID NO: 20911 - protein, 25 aa, Artificial Sequence
  Cyclic GFR-binding peptide
VPTELNAISMLYFDEYDKVVLKKYR

SEQ ID NO: 20912 - protein, 35 aa, Artificial Sequence
  Cyclic GFR-binding peptide
  MOD_RES (3)..(4): Xaa is C or S
KAXXVPTELEPLPMVYYDEYDKVVEQLSNEMVVEG

SEQ ID NO: 20913 - protein, 32 aa, Artificial Sequence
  Cyclic GFR-binding peptide
  MOD_RES (4)..(5): Xaa is C or S
PKAXXVPTELSPISMLFIDEYDKVVYKQYEEM

SEQ ID NO: 20914 - protein, 27 aa, Artificial Sequence
  Cyclic GFR-binding peptide
QALSPISILFIVGRKPKVYKQYEMIVR

SEQ ID NO: 20915 - protein, 34 aa, Artificial Sequence; identical to SEQ ID NO: 10796
  Cyclic GFR-binding peptide
  MOD_RES (1)..(2)..(34): Xaa is C or S

SEQ ID NO: 20916 - protein, 33 aa, Artificial Sequence
  Cyclic GFR-binding peptide
  MOD_RES (32)..(32): Xaa is C or S
APTKLEPLTVLYYDDSSNVIEQLSNNMVVRSXG

SEQ ID NO: 20917 - protein, 25 aa, Artificial Sequence
  Cyclic GFR-binding peptide
PQDLSAISILYLVGRTPKVLKNYQM

SEQ ID NO: 20918 - protein, 42 aa, Artificial Sequence
  Cyclic GFR-binding peptide
  MOD_RES (6)..(7)..(39)..(41): Xaa is C or S
SIPKAXXVPTELSPISMLFIDEYDKVVYKQYEEMVVEGXGXR

SEQ ID NO: 20919 - protein, 41 aa, Artificial Sequence
  Cyclic GFR-binding peptide
  MOD_RES (5)..(6)..(38)..(40): Xaa is C or S
TPPTXXVPTRLSAISILYLDSANNVVLKNYQDMVVESXGXR

SEQ ID NO: 20920 - protein, 37 aa, Artificial Sequence; identical to SEQ ID NO: 10802
  Cyclic GFR-binding peptide
  MOD_RES (4)..(5)..(36): Xaa is C or S

SEQ ID NO: 20921 - protein, 23 aa, Artificial Sequence
  Cyclic GFR-binding peptide
EPLPMVYYDEYDKVVEQLSNEMV

SEQ ID NO: 20922 - protein, 27 aa, Artificial Sequence
  Cyclic GFR-binding peptide
ELNAISMLYFDENEKVVLKKYRDMVVE

SEQ ID NO: 20923 - protein, 40 aa, Artificial Sequence
  Cyclic GFR-binding peptide
  MOD_RES (6)..(7)..(39): Xaa is C or S
STPPTXXVPTRLSAISILYLDSANNVVLKNYQDMVVESXG

SEQ ID NO: 20924 - protein, 25 aa, Artificial Sequence
  Cyclic GFR-binding peptide
PTKLSAISVLYLDDSSNVILKNYQN

SEQ ID NO: 20925 - protein, 25 aa, Artificial Sequence
  Cyclic GFR-binding peptide
TQLSPISVLFIDDSSNVIYKQYENM

SEQ ID NO: 20926 - protein, 27 aa, Artificial Sequence
  Cyclic GFR-binding peptide
  MOD_RES (26)..(26): Xaa is C or S
SAISILYLVGRKPKVLKNYQMIVRSXK

SEQ ID NO: 20927 - protein, 36 aa, Artificial Sequence
  Cyclic GFR-binding peptide
  MOD_RES (6)..(7): Xaa is C or S
SIPKAXXVPTELEPLPMVYYDEYDKVVEQLSNEMVV

SEQ ID NO: 20928 - protein, 25 aa, Artificial Sequence
  Cyclic GFR-binding peptide
DLEPLPIVYYIGKTPKIEQLSNMIV

SEQ ID NO: 20929 - protein, 25 aa, Artificial Sequence
  Cyclic GFR-binding peptide
EPLPMVYYDENEKVVEQLSNDMVVE

SEQ ID NO: 20930 - protein, 27 aa, Artificial Sequence
  Cyclic GFR-binding peptide
LSPISMLFIDENEKVVYKQYEDMVVEG

SEQ ID NO: 20931 - protein, 32 aa, Artificial Sequence; identical to SEQ ID NO: 10816
  Cyclic GFR-binding peptide
  MOD_RES (1)..(32): Xaa is C or S

SEQ ID NO: 20932 - protein, 33 aa, Artificial Sequence
  Cyclic GFR-binding peptide
  MOD_RES (5)..(6): Xaa is C or S
TPPTXXVPTRLEPLTILYYDSANNVVEQLSNDM

SEQ ID NO: 20933 - protein, 31 aa, Artificial Sequence
  Cyclic GFR-binding peptide
  MOD_RES (3)..(4): Xaa is C or S
APXXVPQALSPISILFIVGRKPKVYKQYEMI

SEQ ID NO: 20934 - protein, 24 aa, Artificial Sequence
  Cyclic GFR-binding peptide
NAISILYFIGKTPKILKKYRMIVK

SEQ ID NO: 20935 - protein, 21 aa, Artificial Sequence
  Cyclic GFR-binding peptide
NAISILYFVGRTPKVLKKYRM

SEQ ID NO: 20936 - protein, 40 aa, Artificial Sequence; identical to SEQ ID NO: 10820
  Cyclic GFR-binding peptide
  MOD_RES (6)..(38)..(40): Xaa is C or S

SEQ ID NO: 20937 - protein, 31 aa, Artificial Sequence; identical to SEQ ID NO: 10821
  Cyclic GFR-binding peptide
  MOD_RES (1)..(2): Xaa is C or S

SEQ ID NO: 20938 - protein, 32 aa, Artificial Sequence
  Cyclic GFR-binding peptide
  MOD_RES (32)..(32): Xaa is C or S
APTKLSPISVLFIDDSSNVIYKQYENMVVRSX

SEQ ID NO: 20939 - protein, 27 aa, Artificial Sequence
  Cyclic GFR-binding peptide
  MOD_RES (26)..(26): Xaa is C or S
SPISILFIVGRKPKVYKQYEMIVRSXK

SEQ ID NO: 20940 - protein, 37 aa, Artificial Sequence
  Cyclic GFR-binding peptide
  MOD_RES (3)..(35)..(37): Xaa is C or S
PTXAPTKLEPLPVVYYDDSSNVIEQLSNNMVVRSXGX

SEQ ID NO: 20941 - protein, 26 aa, Artificial Sequence
  Cyclic GFR-binding peptide
PTQLEPLPVVYYDDSSNVIEQLSNNM

SEQ ID NO: 20942 - protein, 28 aa, Artificial Sequence
  Cyclic GFR-binding peptide
TQLEPLTVLYYDDSSNVIEQLSNNMVVR

SEQ ID NO: 20943 - protein, 26 aa, Artificial Sequence
  Cyclic GFR-binding peptide
TQLEPLPVVYYDDSSNVIEQLSNNMV

SEQ ID NO: 20944 - protein, 21 aa, Artificial Sequence
  Cyclic GFR-binding peptide
EPLTILYYVGRKPKVEQLSNM

SEQ ID NO: 20945 - protein, 25 aa, Artificial Sequence
  Cyclic GFR-binding peptide
LSAISILYLIGKTPKILKNYQMIVK

SEQ ID NO: 20946 - protein, 34 aa, Artificial Sequence
  Cyclic GFR-binding peptide
  MOD_RES (1)..(2)..(34): Xaa is C or S
XXAPTQLEPLTVLYYDDSSNVIEQLSNNMVVRAX

SEQ ID NO: 20947 - protein, 33 aa, Artificial Sequence
  Cyclic GFR-binding peptide
  MOD_RES (3)..(4): Xaa is C or S
SPXXVSQDLSPISILFIIGKTPKIYKQYEMIVK

SEQ ID NO: 20948 - protein, 27 aa, Artificial Sequence
  Cyclic GFR-binding peptide
PTELEPLPMVYYDEYDKVVEQLSNEMV

SEQ ID NO: 20949 - protein, 29 aa, Artificial Sequence
  Cyclic GFR-binding peptide
  MOD_RES (1)..(1): Xaa is C or S
XVPTRLNAISILYFDSANNVVLKKYRDMV

SEQ ID NO: 20950 - protein, 29 aa, Artificial Sequence
  Cyclic GFR-binding peptide
  MOD_RES (29)..(29): Xaa is C or S
KLSAISVLYLDDSSNVILKNYQNMVVRSX

SEQ ID NO: 20951 - protein, 33 aa, Artificial Sequence
  Cyclic GFR-binding peptide
  MOD_RES (4)..(5): Xaa is C or S
PKAXXVPTELSPISMLFIDEYDKVVYKQYEEMV

SEQ ID NO: 20952 - protein, 41 aa, Artificial Sequence
  Cyclic GFR-binding peptide
  MOD_RES (7)..(39)..(41): Xaa is C or S
HVTKPTXAPTKLSPISVLFIDDSSNVIYKQYENMVVRSXGX

SEQ ID NO: 20953 - protein, 28 aa, Artificial Sequence
  Cyclic GFR-binding peptide
  MOD_RES (2)..(3): Xaa is C or S
AXXVPTELSPISMLFIDEYDKVVYKQYE

SEQ ID NO: 20954 - protein, 25 aa, Artificial Sequence
  Cyclic GFR-binding peptide
VPQDLSPISILFIVGRTPKVYKQYE

SEQ ID NO: 20955 - protein, 32 aa, Artificial Sequence; identical to SEQ ID NO: 10839
  Cyclic GFR-binding peptide
  MOD_RES (1)..(32): Xaa is C or S

SEQ ID NO: 20956 - protein, 31 aa, Artificial Sequence
  Cyclic GFR-binding peptide
APTQLEPLTVLYYDDSSNVIEQLSNNMVVRA

SEQ ID NO: 20957 - protein, 33 aa, Artificial Sequence; identical to SEQ ID NO: 10844
  Cyclic GFR-binding peptide
  MOD_RES (30)..(32): Xaa is C or S

SEQ ID NO: 20958 - protein, 38 aa, Artificial Sequence
  Cyclic GFR-binding peptide
  MOD_RES (6)..(7): Xaa is C or S
YVPKPXXAPTKLEPLTVLYYDDSSNVIEQLSNNMVVRS

SEQ ID NO: 20959 - protein, 31 aa, Artificial Sequence
  Cyclic GFR-binding peptide
  MOD_RES (28)..(30): Xaa is C or S
LEPLPVVYYDDSSNVIEQLSNNMVVRAXGXH

SEQ ID NO: 20960 - protein, 34 aa, Artificial Sequence; identical to SEQ ID NO: 10848
  Cyclic GFR-binding peptide
  MOD_RES (5)..(6): Xaa is C or S

SEQ ID NO: 20961 - protein, 25 aa, Artificial Sequence
  Cyclic GFR-binding peptide
QDLSPISILFIVGRTPKVYKQYEMV

SEQ ID NO: 20962 - protein, 41 aa, Artificial Sequence
  Cyclic GFR-binding peptide
  MOD_RES (6)..(7)..(39)..(41): Xaa is C or S
STPPTXXVPTRLNAISILYFDSANNVVLKKYRDMVVESXGX

SEQ ID NO: 20963 - protein, 22 aa, Artificial Sequence
  Cyclic GFR-binding peptide
LEPLPMVYYDEYDKVVEQLSNE

SEQ ID NO: 20964 - protein, 31 aa, Artificial Sequence
  Cyclic GFR-binding peptide
  MOD_RES (2)..(3): Xaa is C or S
AXXVPTELEPLTMLYYDENEKVVEQLSNDMV

SEQ ID NO: 20965 - protein, 34 aa, Artificial Sequence; identical to SEQ ID NO: 10853
  Cyclic GFR-binding peptide
  MOD_RES (6)..(7): Xaa is C or S

SEQ ID NO: 20966 - protein, 33 aa, Artificial Sequence
  Cyclic GFR-binding peptide
  MOD_RES (6)..(6): Xaa is C or S
VTKPTXAPTKLEPLTVLYYDDSSNVIEQLSNNM

SEQ ID NO: 20967 - protein, 31 aa, Artificial Sequence; identical to SEQ ID NO: 10854
  Cyclic GFR-binding peptide
  MOD_RES (31)..(31): Xaa is C or S

SEQ ID NO: 20968 - protein, 37 aa, Artificial Sequence
  Cyclic GFR-binding peptide
  MOD_RES (1)..(2)..(34)..(36): Xaa is C or S
XXAPTQLSPISVLFIDDSSNVIYKQYENMVVRAXGXH

SEQ ID NO: 20969 - protein, 34 aa, Artificial Sequence; identical to SEQ ID NO: 10860
  Cyclic GFR-binding peptide
  MOD_RES (31)..(33): Xaa is C or S

SEQ ID NO: 20970 - protein, 35 aa, Artificial Sequence
  Cyclic GFR-binding peptide
  MOD_RES (5)..(6): Xaa is C or S
IPKAXXVPTELEPLTMLYYDENEKVVEQLSNDMVV

SEQ ID NO: 20971 - protein, 30 aa, Artificial Sequence; identical to SEQ ID NO: 10862
  Cyclic GFR-binding peptide

SEQ ID NO: 20972 - protein, 34 aa, Artificial Sequence
  Cyclic GFR-binding peptide
  MOD_RES (6)..(7): Xaa is C or S
KIPKAXXVPTELEPLPMVYYDENEKVVEQLSNDM

SEQ ID NO: 20973 - protein, 25 aa, Artificial Sequence
  Cyclic GFR-binding peptide
LSAISVLYLDDSSNVILKNYQNMVV

SEQ ID NO: 20974 - protein, 26 aa, Artificial Sequence
  Cyclic GFR-binding peptide
  MOD_RES (1)..(1): Xaa is C or S
XVPQDLEPLPIVYYVGRTPKVEQLSN

SEQ ID NO: 20975 - protein, 26 aa, Artificial Sequence
  Cyclic GFR-binding peptide
VPTRLEPLPIVYYDSANNVVEQLSND

SEQ ID NO: 20976 - protein, 36 aa, Artificial Sequence
  Cyclic GFR-binding peptide
  MOD_RES (2)..(3)..(35): Xaa is C or S
AXXVPTELSPISMLFIDEYDKVVYKQYEEMVVEGXG

SEQ ID NO: 20977 - protein, 38 aa, Artificial Sequence; identical to SEQ ID NO: 10865
  Cyclic GFR-binding peptide
  MOD_RES (5)..(6)..(37): Xaa is C or S

SEQ ID NO: 20978 - protein, 35 aa, Artificial Sequence
  Cyclic GFR-binding peptide
  MOD_RES (32)..(34): Xaa is C or S
VPTRLSAISILYLDSANNVVLKNYQDMVVESXGXR

SEQ ID NO: 20979 - protein, 33 aa, Artificial Sequence; identical to SEQ ID NO: 10867
  Cyclic GFR-binding peptide
  MOD_RES (30)..(32): Xaa is C or S

SEQ ID NO: 20980 - protein, 38 aa, Artificial Sequence; identical to SEQ ID NO: 10868
  Cyclic GFR-binding peptide
  MOD_RES (4)..(5)..(36)..(38): Xaa is C or S

SEQ ID NO: 20981 - protein, 31 aa, Artificial Sequence
  Cyclic GFR-binding peptide
  MOD_RES (5)..(6): Xaa is C or S
VPKPXXAPTQLEPLTVLYYDDSSNVIEQLSN

SEQ ID NO: 20982 - protein, 35 aa, Artificial Sequence; identical to SEQ ID NO: 10870
  Cyclic GFR-binding peptide
  MOD_RES (3)..(4)..(35): Xaa is C or S

SEQ ID NO: 20983 - protein, 31 aa, Artificial Sequence
  Cyclic GFR-binding peptide
  MOD_RES (1)..(1): Xaa is C or S
XVPTELEPLTMLYYDEYDKVVEQLSNEMVVE

SEQ ID NO: 20984 - protein, 28 aa, Artificial Sequence
  Cyclic GFR-binding peptide
VPTRLEPLPIVYYDSANNVVEQLSNDMV

SEQ ID NO: 20985 - protein, 30 aa, Artificial Sequence
  Cyclic GFR-binding peptide
  MOD_RES (30)..(30): Xaa is C or S
PQDLSPISILFIVGRTPKVYKQYEMVVKSX

SEQ ID NO: 20986 - protein, 33 aa, Artificial Sequence
  Cyclic GFR-binding peptide
  MOD_RES (32)..(32): Xaa is C or S
APTQLSPISVLFIDDSSNVIYKQYENMVVRAXG

SEQ ID NO: 20987 - protein, 38 aa, Artificial Sequence
  Cyclic GFR-binding peptide
  MOD_RES (3)..(4)..(35)..(37): Xaa is C or S
SPXXVPQDLEPLPIVYYVGRTPKVEQLSNMVVKSXKXS

SEQ ID NO: 20988 - protein, 38 aa, Artificial Sequence
  Cyclic GFR-binding peptide
  MOD_RES (5)..(6)..(37): Xaa is C or S
SASPXXVPQDLSPISILFIVGRTPKVYKQYEMVVKSXK

SEQ ID NO: 20989 - protein, 36 aa, Artificial Sequence
  Cyclic GFR-binding peptide
  MOD_RES (1)..(33)..(35): Xaa is C or S
XVPTRLEPLPIVYYDSANNVVEQLSNDMVVESXGXR

SEQ ID NO: 20990 - protein, 41 aa, Artificial Sequence
  Cyclic GFR-binding peptide
  MOD_RES (5)..(6)..(38)..(40): Xaa is C or S
VPKPXXAPTKLEPLTVLYYDDSSNVIEQLSNNMVVRSXGXH

SEQ ID NO: 20991 - protein, 24 aa, Artificial Sequence
  Cyclic GFR-binding peptide
PTELEPLTMLYYDENEKVVEQLSN

SEQ ID NO: 20992 - protein, 25 aa, Artificial Sequence
  Cyclic GFR-binding peptide
PTRLNAISILYFDSANNVVLKKYRD

SEQ ID NO: 20993 - protein, 34 aa, Artificial Sequence
  Cyclic GFR-binding peptide
  MOD_RES (3)..(4): Xaa is C or S
SPXXVSQDLEPLPIVYYIGKTPKIEQLSNMIVKS

SEQ ID NO: 20994 - protein, 33 aa, Artificial Sequence
  Cyclic GFR-binding peptide
  MOD_RES (1)..(33): Xaa is C or S
XVPTRLEPLTILYYDSANNVVEQLSNDMVVESX

SEQ ID NO: 20995 - protein, 27 aa, Artificial Sequence
  Cyclic GFR-binding peptide
LEPLPMVYYDENEKVVEQLSNDMVVEG

SEQ ID NO: 20996 - protein, 34 aa, Artificial Sequence; identical to SEQ ID NO: 10888
  Cyclic GFR-binding peptide
  MOD_RES (3)..(4): Xaa is C or S

SEQ ID NO: 20997 - protein, 32 aa, Artificial Sequence
  Cyclic GFR-binding peptide
  MOD_RES (6)..(7): Xaa is C or S
ASASPXXVPQDLSPISILFIVGRTPKVYKQYE

SEQ ID NO: 20998 - protein, 27 aa, Artificial Sequence
  Cyclic GFR-binding peptide
PQDLSAISILYLVGRTPKVLKNYQMVV

SEQ ID NO: 20999 - protein, 36 aa, Artificial Sequence; identical to SEQ ID NO: 10892
  Cyclic GFR-binding peptide
  MOD_RES (3)..(4)..(35): Xaa is C or S

SEQ ID NO: 21000 - protein, 39 aa, Artificial Sequence
  Cyclic GFR-binding peptide
  MOD_RES (6)..(7)..(39): Xaa is C or S
STPPTXXVPTRLNAISILYFDSANNVVLKKYRDMVVESX

SEQ ID NO: 21001 - protein, 29 aa, Artificial Sequence
  Cyclic GFR-binding peptide
PQALSAISILYLVGRKPKVLKNYQMIVRS

SEQ ID NO: 21002 - protein, 30 aa, Artificial Sequence; identical to SEQ ID NO: 10896
  Cyclic GFR-binding peptide
  MOD_RES (30)..(30): Xaa is C or S

SEQ ID NO: 21003 - protein, 29 aa, Artificial Sequence
  Cyclic GFR-binding peptide
PTRLNAISILYFDSANNVVLKKYRDMVVE

SEQ ID NO: 21004 - protein, 27 aa, Artificial Sequence
  Cyclic GFR-binding peptide
RLSAISILYLDSANNVVLKNYQDMVVE

SEQ ID NO: 21005 - protein, 21 aa, Artificial Sequence
  Cyclic GFR-binding peptide
LEPLPVVYYDDSSNVIEQLSN

SEQ ID NO: 21006 - protein, 40 aa, Artificial Sequence
  Cyclic GFR-binding peptide
  MOD_RES (6)..(38)..(40): Xaa is C or S
VTKPTXAPTKLEPLPVVYYDDSSNVIEQLSNNMVVRSXGX

SEQ ID NO: 21007 - protein, 26 aa, Artificial Sequence
  Cyclic GFR-binding peptide
QDLSPISILFIVGRTPKVYKQYEMVV

SEQ ID NO: 21008 - protein, 35 aa, Artificial Sequence; identical to SEQ ID NO: 10900
  Cyclic GFR-binding peptide
  MOD_RES (2)..(3)..(34): Xaa is C or S

SEQ ID NO: 21009 - protein, 34 aa, Artificial Sequence
  Cyclic GFR-binding peptide
  MOD_RES (1)..(33): Xaa is C or S
XVPTELEPLTMLYYDEYDKVVEQLSNEMVVEGXG

SEQ ID NO: 21010 - protein, 29 aa, Artificial Sequence
  Cyclic GFR-binding peptide
  MOD_RES (28)..(28): Xaa is C or S
LEPLPMVYYDEYDKVVEQLSNEMVVEGXG

SEQ ID NO: 21011 - protein, 29 aa, Artificial Sequence
  Cyclic GFR-binding peptide
SQDLEPLPIVYYIGKTPKIEQLSNMIVKS

SEQ ID NO: 21012 - protein, 26 aa, Artificial Sequence
  Cyclic GFR-binding peptide
LEPLTVLYYDDSSNVIEQLSNNMVVR

SEQ ID NO: 21013 - protein, 35 aa, Artificial Sequence; identical to SEQ ID NO: 10905
  Cyclic GFR-binding peptide
  MOD_RES (6)..(7): Xaa is C or S

SEQ ID NO: 21014 - protein, 40 aa, Artificial Sequence
  Cyclic GFR-binding peptide
  MOD_RES (5)..(37)..(39): Xaa is C or S
TKPTXAPTKLSPISVLFIDDSSNVIYKQYENMVVRSXGXH

SEQ ID NO: 21015 - protein, 30 aa, Artificial Sequence
  Cyclic GFR-binding peptide
APTKLSPISVLFIDDSSNVIYKQYENMVVR

SEQ ID NO: 21016 - protein, 31 aa, Artificial Sequence
  Cyclic GFR-binding peptide
  MOD_RES (2)..(2): Xaa is C or S
TXAPTKLEPLPVVYYDDSSNVIEQLSNNMVV

SEQ ID NO: 21017 - protein, 23 aa, Artificial Sequence
  Cyclic GFR-binding peptide
LEPLPIVYYIGKTPKIEQLSNMI

SEQ ID NO: 21018 - protein, 27 aa, Artificial Sequence
  Cyclic GFR-binding peptide
VPQALNAISILYFVGRKPKVLKKYRMI

SEQ ID NO: 21019 - protein, 26 aa, Artificial Sequence
  Cyclic GFR-binding peptide
TELEPLPMVYYDENEKVVEQLSNDMV

SEQ ID NO: 21020 - protein, 24 aa, Artificial Sequence
  Cyclic GFR-binding peptide
SAISILYLDSANNVVLKNYQDMVV

SEQ ID NO: 21021 - protein, 28 aa, Artificial Sequence
  Cyclic GFR-binding peptide
  MOD_RES (26)..(28): Xaa is C or S
NAISILYFIGKTPKILKKYRMIVKSXKX

SEQ ID NO: 21022 - protein, 35 aa, Artificial Sequence
  Cyclic GFR-binding peptide
  MOD_RES (32)..(34): Xaa is C or S
VPTRLEPLTILYYDSANNVVEQLSNDMVVESXGXR

SEQ ID NO: 21023 - protein, 36 aa, Artificial Sequence; identical to SEQ ID NO: 10914
  Cyclic GFR-binding peptide
  MOD_RES (5)..(5): Xaa is C or S

SEQ ID NO: 21024 - protein, 25 aa, Artificial Sequence
  Cyclic GFR-binding peptide
LEPLTVLYYDDSSNVIEQLSNNMVV

SEQ ID NO: 21025 - protein, 34 aa, Artificial Sequence
  Cyclic GFR-binding peptide
  MOD_RES (32)..(34): Xaa is C or S
VPTRLEPLTILYYDSANNVVEQLSNDMVVESXGX

SEQ ID NO: 21026 - protein, 30 aa, Artificial Sequence
  Cyclic GFR-binding peptide
  MOD_RES (30)..(30): Xaa is C or S
TELSPISMLFIDEYDKVVYKQYEEMVVEGX

SEQ ID NO: 21027 - protein, 27 aa, Artificial Sequence
  Cyclic GFR-binding peptide
TRLEPLTILYYDSANNVVEQLSNDMVV

SEQ ID NO: 21028 - protein, 34 aa, Artificial Sequence; identical to SEQ ID NO: 10916
  Cyclic GFR-binding peptide
  MOD_RES (2)..(3): Xaa is C or S

SEQ ID NO: 21029 - protein, 32 aa, Artificial Sequence; identical to SEQ ID NO: 10917
  Cyclic GFR-binding peptide
  MOD_RES (29)..(31): Xaa is C or S

SEQ ID NO: 21030 - protein, 30 aa, Artificial Sequence
  Cyclic GFR-binding peptide
VSQDLSPISILFIIGKTPKIYKQYEMIVKS

SEQ ID NO: 21031 - protein, 34 aa, Artificial Sequence; identical to SEQ ID NO: 10920
  Cyclic GFR-binding peptide
  MOD_RES (6)..(7): Xaa is C or S

SEQ ID NO: 21032 - protein, 27 aa, Artificial Sequence
  Cyclic GFR-binding peptide
  MOD_RES (1)..(2): Xaa is C or S
XXVPTELSPISMLFIDEYDKVVYKQYE

SEQ ID NO: 21033 - protein, 25 aa, Artificial Sequence
  Cyclic GFR-binding peptide
QLSAISVLYLDDSSNVILKNYQNMV

SEQ ID NO: 21034 - protein, 32 aa, Artificial Sequence
  Cyclic GFR-binding peptide
  MOD_RES (6)..(7): Xaa is C or S
STPPTXXVPTRLEPLTILYYDSANNVVEQLSN

SEQ ID NO: 21035 - protein, 33 aa, Artificial Sequence
  Cyclic GFR-binding peptide
  MOD_RES (30)..(32): Xaa is C or S
SQDLEPLPIVYYIGKTPKIEQLSNMIVKSXKXS

SEQ ID NO: 21036 - protein, 38 aa, Artificial Sequence
  Cyclic GFR-binding peptide
  MOD_RES (5)..(37): Xaa is C or S
TKPTXAPTKLSPISVLFIDDSSNVIYKQYENMVVRSXG

SEQ ID NO: 21037 - protein, 24 aa, Artificial Sequence
  Cyclic GFR-binding peptide
EPLTILYYDSANNVVEQLSNDMVV

SEQ ID NO: 21038 - protein, 23 aa, Artificial Sequence
  Cyclic GFR-binding peptide
LSAISILYLDSANNVVLKNYQDM

SEQ ID NO: 21039 - protein, 34 aa, Artificial Sequence
  Cyclic GFR-binding peptide
  MOD_RES (3)..(4): Xaa is C or S
SPXXVPQDLSPISILFIVGRTPKVYKQYEMVVKS

SEQ ID NO: 21040 - protein, 26 aa, Artificial Sequence
  Cyclic GFR-binding peptide
ELEPLPMVYYDEYDKVVEQLSNEMVV

SEQ ID NO: 21041 - protein, 30 aa, Artificial Sequence
  Cyclic GFR-binding peptide
  MOD_RES (4)..(5): Xaa is C or S
AAPXXVPQALSPISILFIVGRKPKVYKQYE

SEQ ID NO: 21042 - protein, 41 aa, Artificial Sequence; identical to SEQ ID NO: 10931
  Cyclic GFR-binding peptide
  MOD_RES (6)..(7)..(38)..(40): Xaa is C or S

SEQ ID NO: 21043 - protein, 27 aa, Artificial Sequence
  Cyclic GFR-binding peptide
KLSPISVLFIDDSSNVIYKQYENMVVR

SEQ ID NO: 21044 - protein, 35 aa, Artificial Sequence; identical to SEQ ID NO: 10933
  Cyclic GFR-binding peptide
  MOD_RES (4)..(5): Xaa is C or S

SEQ ID NO: 21045 - protein, 41 aa, Artificial Sequence
  Cyclic GFR-binding peptide
  MOD_RES (7)..(39)..(41): Xaa is C or S
HVTKPTXAPTKLEPLTVLYYDDSSNVIEQLSNNMVVRSXGX

SEQ ID NO: 21046 - protein, 32 aa, Artificial Sequence
  Cyclic GFR-binding peptide
  MOD_RES (29)..(31): Xaa is C or S
RLEPLTILYYDSANNVVEQLSNDMVVESXGXR

SEQ ID NO: 21047 - protein, 31 aa, Artificial Sequence
  Cyclic GFR-binding peptide
  MOD_RES (2)..(3): Xaa is C or S
PXXAPTKLEPLTVLYYDDSSNVIEQLSNNMV

SEQ ID NO: 21048 - protein, 35 aa, Artificial Sequence; identical to SEQ ID NO: 10934
  Cyclic GFR-binding peptide
  MOD_RES (1)..(2)..(34): Xaa is C or S

SEQ ID NO: 21049 - protein, 30 aa, Artificial Sequence; identical to SEQ ID NO: 10936
  Cyclic GFR-binding peptide
  MOD_RES (2)..(3): Xaa is C or S

SEQ ID NO: 21050 - protein, 30 aa, Artificial Sequence
  Cyclic GFR-binding peptide
  MOD_RES (30)..(30): Xaa is C or S
TKLEPLTVLYYDDSSNVIEQLSNNMVVRSX

SEQ ID NO: 21051 - protein, 23 aa, Artificial Sequence
  Cyclic GFR-binding peptide
DLNAISILYFVGRTPKVLKKYRM

SEQ ID NO: 21052 - protein, 30 aa, Artificial Sequence
  Cyclic GFR-binding peptide
VPQDLEPLPIVYYVGRTPKVEQLSNMVVKS

SEQ ID NO: 21053 - protein, 26 aa, Artificial Sequence
  Cyclic GFR-binding peptide
NAISMLYFDENEKVVLKKYRDMVVEG

SEQ ID NO: 21054 - protein, 29 aa, Artificial Sequence
  Cyclic GFR-binding peptide
  MOD_RES (1)..(1): Xaa is C or S
XVPTELNAISMLYFDEYDKVVLKKYREMV

SEQ ID NO: 21055 - protein, 29 aa, Artificial Sequence
  Cyclic GFR-binding peptide
  MOD_RES (29)..(29): Xaa is C or S
QALNAISILYFVGRKPKVLKKYRMIVRSX

SEQ ID NO: 21056 - protein, 25 aa, Artificial Sequence
  Cyclic GFR-binding peptide
TELEPLPMVYYDEYDKVVEQLSNEM

SEQ ID NO: 21057 - protein, 23 aa, Artificial Sequence
  Cyclic GFR-binding peptide
LNAISILYFVGRKPKVLKKYRMI

SEQ ID NO: 21058 - protein, 33 aa, Artificial Sequence
  Cyclic GFR-binding peptide
  MOD_RES (30)..(32): Xaa is C or S
PQDLSPISILFIVGRTPKVYKQYEMVVKSXKXS

SEQ ID NO: 21059 - protein, 32 aa, Artificial Sequence
  Cyclic GFR-binding peptide
  MOD_RES (1)..(1): Xaa is C or S
XAPTKLSPISVLFIDDSSNVIYKQYENMVVRS

SEQ ID NO: 21060 - protein, 40 aa, Artificial Sequence
  Cyclic GFR-binding peptide
  MOD_RES (5)..(6)..(38)..(40): Xaa is C or S
VPKPXXAPTKLEPLTVLYYDDSSNVIEQLSNNMVVRSXGX

SEQ ID NO: 21061 - protein, 36 aa, Artificial Sequence
  Cyclic GFR-binding peptide
  MOD_RES (6)..(7): Xaa is C or S
ASASPXXVSQDLSPISILFIIGKTPKIYKQYEMIVK

SEQ ID NO: 21062 - protein, 30 aa, Artificial Sequence
  Cyclic GFR-binding peptide
  MOD_RES (3)..(4): Xaa is C or S
KAXXVPTELEPLPMVYYDENEKVVEQLSND

SEQ ID NO: 21063 - protein, 35 aa, Artificial Sequence
  Cyclic GFR-binding peptide
  MOD_RES (32)..(34): Xaa is C or S
APTKLEPLTVLYYDDSSNVIEQLSNNMVVRSXGXH

SEQ ID NO: 21064 - protein, 33 aa, Artificial Sequence
  Cyclic GFR-binding peptide
  MOD_RES (3)..(4): Xaa is C or S
KAXXVPTELEPLTMLYYDENEKVVEQLSNDMVV

SEQ ID NO: 21065 - protein, 25 aa, Artificial Sequence
  Cyclic GFR-binding peptide
EPLPIVYYVGRTPKVEQLSNMVVKS

SEQ ID NO: 21066 - protein, 33 aa, Artificial Sequence
  Cyclic GFR-binding peptide
  MOD_RES (1)..(33): Xaa is C or S
XVPTELEPLTMLYYDENEKVVEQLSNDMVVEGX

SEQ ID NO: 21067 - protein, 32 aa, Artificial Sequence; identical to SEQ ID NO: 10960
  Cyclic GFR-binding peptide
  MOD_RES (31)..(31): Xaa is C or S

SEQ ID NO: 21068 - protein, 34 aa, Artificial Sequence
  Cyclic GFR-binding peptide
  MOD_RES (2)..(3): Xaa is C or S
PXXAPTQLEPLTVLYYDDSSNVIEQLSNNMVVRA

SEQ ID NO: 21069 - protein, 30 aa, Artificial Sequence
  Cyclic GFR-binding peptide
  MOD_RES (27)..(29): Xaa is C or S
SPISMLFIDENEKVVYKQYEDMVVEGXGXR

SEQ ID NO: 21070 - protein, 35 aa, Artificial Sequence
  Cyclic GFR-binding peptide
  MOD_RES (3)..(4): Xaa is C or S
KPXXAPTQLEPLPVVYYDDSSNVIEQLSNNMVVRA

SEQ ID NO: 21071 - protein, 34 aa, Artificial Sequence
  Cyclic GFR-binding peptide
  MOD_RES (31)..(33): Xaa is C or S
PTKLEPLPVVYYDDSSNVIEQLSNNMVVRSXGXH

SEQ ID NO: 21072 - protein, 29 aa, Artificial Sequence
  Cyclic GFR-binding peptide
  MOD_RES (3)..(4): Xaa is C or S
KAXXVPTELNAISMLYFDEYDKVVLKKYR

SEQ ID NO: 21073 - protein, 38 aa, Artificial Sequence; identical to SEQ ID NO: 10969
  Cyclic GFR-binding peptide
  MOD_RES (6)..(7): Xaa is C or S

SEQ ID NO: 21074 - protein, 37 aa, Artificial Sequence
  Cyclic GFR-binding peptide
  MOD_RES (2)..(3)..(34)..(36): Xaa is C or S
PXXVPQALSPISILFIVGRKPKVYKQYEMIVRSXKXS

SEQ ID NO: 21075 - protein, 26 aa, Artificial Sequence
  Cyclic GFR-binding peptide
TRLSAISILYLDSANNVVLKNYQDMV

SEQ ID NO: 21076 - protein, 26 aa, Artificial Sequence
  Cyclic GFR-binding peptide
  MOD_RES (1)..(1): Xaa is C or S
XVPTELEPLTMLYYDENEKVVEQLSN

SEQ ID NO: 21077 - protein, 26 aa, Artificial Sequence
  Cyclic GFR-binding peptide
  MOD_RES (1)..(1): Xaa is C or S
XVPTRLEPLPIVYYDSANNVVEQLSN

SEQ ID NO: 21078 - protein, 33 aa, Artificial Sequence
  Cyclic GFR-binding peptide
  MOD_RES (1)..(2): Xaa is C or S
XXVPTELEPLPMVYYDENEKVVEQLSNDMVVEG

SEQ ID NO: 21079 - protein, 28 aa, Artificial Sequence
  Cyclic GFR-binding peptide
  MOD_RES (27)..(27): Xaa is C or S
EPLTMLYYDEYDKVVEQLSNEMVVEGXG

SEQ ID NO: 21080 - protein, 40 aa, Artificial Sequence; identical to SEQ ID NO: 10971
  Cyclic GFR-binding peptide
  MOD_RES (5)..(6)..(37)..(39): Xaa is C or S

SEQ ID NO: 21081 - protein, 26 aa, Artificial Sequence
  Cyclic GFR-binding peptide
PQDLEPLPIVYYVGRTPKVEQLSNMV

SEQ ID NO: 21082 - protein, 37 aa, Artificial Sequence; identical to SEQ ID NO: 10972
  Cyclic GFR-binding peptide
  MOD_RES (4)..(36): Xaa is C or S

SEQ ID NO: 21083 - protein, 32 aa, Artificial Sequence
  Cyclic GFR-binding peptide
  MOD_RES (6)..(7): Xaa is C or S
STPPTXXVPTRLNAISILYFDSANNVVLKKYR

SEQ ID NO: 21084 - protein, 28 aa, Artificial Sequence
  Cyclic GFR-binding peptide
  MOD_RES (27)..(27): Xaa is C or S
LNAISILYFVGRKPKVLKKYRMIVRSXK

SEQ ID NO: 21085 - protein, 29 aa, Artificial Sequence
  Cyclic GFR-binding peptide
TQLEPLTVLYYDDSSNVIEQLSNNMVVRA

SEQ ID NO: 21086 - protein, 38 aa, Artificial Sequence
  Cyclic GFR-binding peptide
  MOD_RES (6)..(7): Xaa is C or S
SIPKAXXVPTELSPISMLFIDEYDKVVYKQYEEMVVEG

SEQ ID NO: 21087 - protein, 37 aa, Artificial Sequence
  Cyclic GFR-binding peptide
  MOD_RES (6)..(7): Xaa is C or S
YVPKPXXAPTKLSPISVLFIDDSSNVIYKQYENMVVR

SEQ ID NO: 21088 - protein, 24 aa, Artificial Sequence
  Cyclic GFR-binding peptide
PTELNAISMLYFDENEKVVLKKYR

SEQ ID NO: 21089 - protein, 29 aa, Artificial Sequence
  Cyclic GFR-binding peptide
VPQALNAISILYFVGRKPKVLKKYRMIVR

SEQ ID NO: 21090 - protein, 39 aa, Artificial Sequence; identical to SEQ ID NO: 10986
  Cyclic GFR-binding peptide
  MOD_RES (6)..(7)..(38): Xaa is C or S

SEQ ID NO: 21091 - protein, 25 aa, Artificial Sequence
  Cyclic GFR-binding peptide
TRLSAISILYLDSANNVVLKNYQDM

SEQ ID NO: 21092 - protein, 25 aa, Artificial Sequence
  Cyclic GFR-binding peptide
SQDLEPLPIVYYIGKTPKIEQLSNM

SEQ ID NO: 21093 - protein, 26 aa, Artificial Sequence
  Cyclic GFR-binding peptide
  MOD_RES (1)..(1): Xaa is C or S
XVPTELNAISMLYFDENEKVVLKKYR

SEQ ID NO: 21094 - protein, 27 aa, Artificial Sequence
  Cyclic GFR-binding peptide
PTELNAISMLYFDEYDKVVLKKYREMV

SEQ ID NO: 21095 - protein, 37 aa, Artificial Sequence
  Cyclic GFR-binding peptide
  MOD_RES (5)..(37): Xaa is C or S
TKPTXAPTKLSPISVLFIDDSSNVIYKQYENMVVRSX

SEQ ID NO: 21096 - protein, 31 aa, Artificial Sequence
  Cyclic GFR-binding peptide
  MOD_RES (29)..(31): Xaa is C or S
KLSPISVLFIDDSSNVIYKQYENMVVRSXGX

SEQ ID NO: 21097 - protein, 35 aa, Artificial Sequence
  Cyclic GFR-binding peptide
  MOD_RES (5)..(5): Xaa is C or S
TKPTXAPTKLEPLTVLYYDDSSNVIEQLSNNMVVR

SEQ ID NO: 21098 - protein, 36 aa, Artificial Sequence
  Cyclic GFR-binding peptide
  MOD_RES (3)..(4)..(36): Xaa is C or S
PTXXVPTRLNAISILYFDSANNVVLKKYRDMVVESX

SEQ ID NO: 21099 - protein, 34 aa, Artificial Sequence; identical to SEQ ID NO: 10992
  Cyclic GFR-binding peptide
  MOD_RES (6)..(7): Xaa is C or S

SEQ ID NO: 21100 - protein, 33 aa, Artificial Sequence
  Cyclic GFR-binding peptide
  MOD_RES (5)..(6): Xaa is C or S
VPKPXXAPTQLEPLPVVYYDDSSNVIEQLSNNM

SEQ ID NO: 21101 - protein, 34 aa, Artificial Sequence
  Cyclic GFR-binding peptide
  MOD_RES (5)..(6): Xaa is C or S
VPKPXXAPTQLEPLPVVYYDDSSNVIEQLSNNMV

SEQ ID NO: 21102 - protein, 24 aa, Artificial Sequence
  Cyclic GFR-binding peptide
TELSPISMLFIDEYDKVVYKQYEE

SEQ ID NO: 21103 - protein, 39 aa, Artificial Sequence
  Cyclic GFR-binding peptide
  MOD_RES (5)..(6)..(38): Xaa is C or S
TPPTXXVPTRLEPLPIVYYDSANNVVEQLSNDMVVESXG

SEQ ID NO: 21104 - protein, 33 aa, Artificial Sequence
  Cyclic GFR-binding peptide
  MOD_RES (3)..(4): Xaa is C or S
KAXXVPTELEPLTMLYYDEYDKVVEQLSNEMVV

SEQ ID NO: 21105 - protein, 33 aa, Artificial Sequence
  Cyclic GFR-binding peptide
  MOD_RES (6)..(7): Xaa is C or S
SIPKAXXVPTELEPLTMLYYDEYDKVVEQLSNE

SEQ ID NO: 21106 - protein, 35 aa, Artificial Sequence
  Cyclic GFR-binding peptide
  MOD_RES (1)..(2)..(34): Xaa is C or S
XXAPTKLSPISVLFIDDSSNVIYKQYENMVVRSXG

SEQ ID NO: 21107 - protein, 34 aa, Artificial Sequence; identical to SEQ ID NO: 11003
  Cyclic GFR-binding peptide
  MOD_RES (1)..(32)..(34): Xaa is C or S

SEQ ID NO: 21108 - protein, 37 aa, Artificial Sequence
  Cyclic GFR-binding peptide
  MOD_RES (5)..(6): Xaa is C or S
TPPTXXVPTRLSAISILYLDSANNVVLKNYQDMVVES

SEQ ID NO: 21109 - protein, 37 aa, Artificial Sequence
  Cyclic GFR-binding peptide
  MOD_RES (6)..(7): Xaa is C or S
KIPKAXXVPTELEPLTMLYYDENEKVVEQLSNDMVVE

SEQ ID NO: 21110 - protein, 33 aa, Artificial Sequence
  Cyclic GFR-binding peptide
  MOD_RES (4)..(5): Xaa is C or S
PPTXXVPTRLEPLTILYYDSANNVVEQLSNDMV

SEQ ID NO: 21111 - protein, 29 aa, Artificial Sequence
  Cyclic GFR-binding peptide
  MOD_RES (2)..(2): Xaa is C or S
TXAPTKLEPLTVLYYDDSSNVIEQLSNNM

SEQ ID NO: 21112 - protein, 33 aa, Artificial Sequence
  Cyclic GFR-binding peptide
  MOD_RES (1)..(33): Xaa is C or S
XVPTRLEPLPIVYYDSANNVVEQLSNDMVVESX

SEQ ID NO: 21113 - protein, 33 aa, Artificial Sequence
  Cyclic GFR-binding peptide
  MOD_RES (1)..(2)..(33): Xaa is C or S
XXVSQDLEPLPIVYYIGKTPKIEQLSNMIVKSX

SEQ ID NO: 21114 - protein, 41 aa, Artificial Sequence
  Cyclic GFR-binding peptide
  MOD_RES (6)..(7)..(39)..(41): Xaa is C or S
SIPKAXXVPTELEPLPMVYYDEYDKVVEQLSNEMVVEGXGX

SEQ ID NO: 21115 - protein, 34 aa, Artificial Sequence
  Cyclic GFR-binding peptide
  MOD_RES (5)..(6): Xaa is C or S
SASPXXVPQDLSPISILFIVGRTPKVYKQYEMVV

SEQ ID NO: 21116 - protein, 29 aa, Artificial Sequence
  Cyclic GFR-binding peptide
  MOD_RES (28)..(28): Xaa is C or S
ALNAISILYFVGRKPKVLKKYRMIVRSXK

SEQ ID NO: 21117 - protein, 26 aa, Artificial Sequence
  Cyclic GFR-binding peptide
SPISMLFIDENEKVVYKQYEDMVVEG

SEQ ID NO: 21118 - protein, 26 aa, Artificial Sequence
  Cyclic GFR-binding peptide
VPQDLNAISILYFVGRTPKVLKKYRM

SEQ ID NO: 21119 - protein, 31 aa, Artificial Sequence
  Cyclic GFR-binding peptide
  MOD_RES (29)..(31): Xaa is C or S
QLEPLTVLYYDDSSNVIEQLSNNMVVRAXGX

SEQ ID NO: 21120 - protein, 36 aa, Artificial Sequence
  Cyclic GFR-binding peptide
  MOD_RES (1)..(2)..(34)..(36): Xaa is C or S
XXVPTELEPLTMLYYDENEKVVEQLSNDMVVEGXGX

SEQ ID NO: 21121 - protein, 26 aa, Artificial Sequence
  Cyclic GFR-binding peptide
LEPLTILYYVGRKPKVEQLSNMIVRS

SEQ ID NO: 21122 - protein, 24 aa, Artificial Sequence
  Cyclic GFR-binding peptide
TELEPLTMLYYDEYDKVVEQLSNE

SEQ ID NO: 21123 - protein, 31 aa, Artificial Sequence
  Cyclic GFR-binding peptide
  MOD_RES (1)..(1): Xaa is C or S
XVPTRLSAISILYLDSANNVVLKNYQDMVVE

SEQ ID NO: 21124 - protein, 26 aa, Artificial Sequence
  Cyclic GFR-binding peptide
QDLEPLPIVYYIGKTPKIEQLSNMIV

SEQ ID NO: 21125 - protein, 33 aa, Artificial Sequence
  Cyclic GFR-binding peptide
  MOD_RES (6)..(7): Xaa is C or S
SIPKAXXVPTELSPISMLFIDEYDKVVYKQYEE

SEQ ID NO: 21126 - protein, 31 aa, Artificial Sequence; identical to SEQ ID NO: 11020
  Cyclic GFR-binding peptide
  MOD_RES (5)..(6): Xaa is C or S

SEQ ID NO: 21127 - protein, 30 aa, Artificial Sequence
  Cyclic GFR-binding peptide
VPQDLSPISILFIVGRTPKVYKQYEMVVKS

SEQ ID NO: 21128 - protein, 22 aa, Artificial Sequence
  Cyclic GFR-binding peptide
LEPLTMLYYDEYDKVVEQLSNE

SEQ ID NO: 21129 - protein, 21 aa, Artificial Sequence
  Cyclic GFR-binding peptide
LNAISILYFVGRTPKVLKKYR

SEQ ID NO: 21130 - protein, 38 aa, Artificial Sequence
  Cyclic GFR-binding peptide
  MOD_RES (5)..(6)..(38): Xaa is C or S
TPPTXXVPTRLNAISILYFDSANNVVLKKYRDMVVESX

SEQ ID NO: 21131 - protein, 38 aa, Artificial Sequence
  Cyclic GFR-binding peptide
  MOD_RES (3)..(4)..(36)..(38): Xaa is C or S
KPXXAPTQLSPISVLFIDDSSNVIYKQYENMVVRAXGX

SEQ ID NO: 21132 - protein, 38 aa, Artificial Sequence
  Cyclic GFR-binding peptide
  MOD_RES (6)..(38): Xaa is C or S
VTKPTXAPTKLEPLPVVYYDDSSNVIEQLSNNMVVRSX

SEQ ID NO: 21133 - protein, 33 aa, Artificial Sequence
  Cyclic GFR-binding peptide
  MOD_RES (30)..(32): Xaa is C or S
TRLNAISILYFDSANNVVLKKYRDMVVESXGXR

SEQ ID NO: 21134 - protein, 34 aa, Artificial Sequence
  Cyclic GFR-binding peptide
  MOD_RES (5)..(6): Xaa is C or S
SASPXXVSQDLEPLPIVYYIGKTPKIEQLSNMIV

SEQ ID NO: 21135 - protein, 32 aa, Artificial Sequence
  Cyclic GFR-binding peptide
  MOD_RES (30)..(32): Xaa is C or S
TRLEPLPIVYYDSANNVVEQLSNDMVVESXGX

SEQ ID NO: 21136 - protein, 37 aa, Artificial Sequence
  Cyclic GFR-binding peptide
  MOD_RES (5)..(6): Xaa is C or S
VPKPXXAPTKLEPLPVVYYDDSSNVIEQLSNNMVVRS

SEQ ID NO: 21137 - protein, 38 aa, Artificial Sequence; identical to SEQ ID NO: 11029
  Cyclic GFR-binding peptide
  MOD_RES (4)..(5)..(37): Xaa is C or S

SEQ ID NO: 21138 - protein, 28 aa, Artificial Sequence
  Cyclic GFR-binding peptide
  MOD_RES (2)..(3): Xaa is C or S
PXXVSQDLNAISILYFIGKTPKILKKYR

SEQ ID NO: 21139 - protein, 30 aa, Artificial Sequence; identical to SEQ ID NO: 11032
  Cyclic GFR-binding peptide
  MOD_RES (4)..(4): Xaa is C or S

SEQ ID NO: 21140 - protein, 26 aa, Artificial Sequence
  Cyclic GFR-binding peptide
LNAISMLYFDEYDKVVLKKYREMVVE

SEQ ID NO: 21141 - protein, 35 aa, Artificial Sequence; identical to SEQ ID NO: 11041
  Cyclic GFR-binding peptide
  MOD_RES (1)..(2)..(34): Xaa is C or S

SEQ ID NO: 21142 - protein, 20 aa, Artificial Sequence
  Cyclic GFR-binding peptide
SAISILYLVGRTPKVLKNYQ

SEQ ID NO: 21143 - protein, 29 aa, Artificial Sequence
  Cyclic GFR-binding peptide
  MOD_RES (27)..(29): Xaa is C or S
NAISMLYFDEYDKVVLKKYREMVVEGXGX

SEQ ID NO: 21144 - protein, 27 aa, Artificial Sequence
  Cyclic GFR-binding peptide
TRLSAISILYLDSANNVVLKNYQDMVV

SEQ ID NO: 21145 - protein, 28 aa, Artificial Sequence
  Cyclic GFR-binding peptide
PTQLEPLTVLYYDDSSNVIEQLSNNMVV

SEQ ID NO: 21146 - protein, 38 aa, Artificial Sequence
  Cyclic GFR-binding peptide
  MOD_RES (3)..(4)..(35)..(37): Xaa is C or S
APXXVPQALEPLTILYYVGRKPKVEQLSNMIVRSXKXS

SEQ ID NO: 21147 - protein, 36 aa, Artificial Sequence; identical to SEQ ID NO: 11052
  Cyclic GFR-binding peptide
  MOD_RES (6)..(6): Xaa is C or S

SEQ ID NO: 21148 - protein, 32 aa, Artificial Sequence
  Cyclic GFR-binding peptide
  MOD_RES (30)..(32): Xaa is C or S
PQALSPISILFIVGRKPKVYKQYEMIVRSXKX

SEQ ID NO: 21149 - protein, 23 aa, Artificial Sequence
  Cyclic GFR-binding peptide
SPISILFIIGKTPKIYKQYEMIV

SEQ ID NO: 21150 - protein, 29 aa, Artificial Sequence
  Cyclic GFR-binding peptide
  MOD_RES (2)..(3): Xaa is C or S
PXXVSQDLSAISILYLIGKTPKILKNYQM

SEQ ID NO: 21151 - protein, 30 aa, Artificial Sequence
  Cyclic GFR-binding peptide
  MOD_RES (27)..(29): Xaa is C or S
EPLPMVYYDEYDKVVEQLSNEMVVEGXGXR

SEQ ID NO: 21152 - protein, 23 aa, Artificial Sequence
  Cyclic GFR-binding peptide
ELEPLPMVYYDENEKVVEQLSND

SEQ ID NO: 21153 - protein, 22 aa, Artificial Sequence
  Cyclic GFR-binding peptide
NAISILYFIGKTPKILKKYRMI

SEQ ID NO: 21154 - protein, 37 aa, Artificial Sequence
  Cyclic GFR-binding peptide
  MOD_RES (2)..(3)..(35)..(37): Xaa is C or S
AXXVPTELSPISMLFIDEYDKVVYKQYEEMVVEGXGX

SEQ ID NO: 21155 - protein, 37 aa, Artificial Sequence
  Cyclic GFR-binding peptide
  MOD_RES (2)..(3)..(35)..(37): Xaa is C or S
AXXVPTELEPLTMLYYDEYDKVVEQLSNEMVVEGXGX

SEQ ID NO: 21156 - protein, 33 aa, Artificial Sequence
  Cyclic GFR-binding peptide
  MOD_RES (32)..(32): Xaa is C or S
VPTELEPLPMVYYDEYDKVVEQLSNEMVVEGXG

SEQ ID NO: 21157 - protein, 23 aa, Artificial Sequence
  Cyclic GFR-binding peptide
LSAISVLYLDDSSNVILKNYQNM

SEQ ID NO: 21158 - protein, 33 aa, Artificial Sequence; identical to SEQ ID NO: 11078
  Cyclic GFR-binding peptide
  MOD_RES (30)..(32): Xaa is C or S

SEQ ID NO: 21159 - protein, 30 aa, Artificial Sequence; identical to SEQ ID NO: 11082
  Cyclic GFR-binding peptide
  MOD_RES (1)..(1): Xaa is C or S

SEQ ID NO: 21160 - protein, 28 aa, Artificial Sequence
  Cyclic GFR-binding peptide
  MOD_RES (28)..(28): Xaa is C or S
DLSPISILFIVGRTPKVYKQYEMVVKSX

SEQ ID NO: 21161 - protein, 23 aa, Artificial Sequence
  Cyclic GFR-binding peptide
ELNAISMLYFDEYDKVVLKKYRE

SEQ ID NO: 21162 - protein, 32 aa, Artificial Sequence
  Cyclic GFR-binding peptide
  MOD_RES (29)..(31): Xaa is C or S
ELEPLTMLYYDENEKVVEQLSNDMVVEGXGXR

SEQ ID NO: 21163 - protein, 37 aa, Artificial Sequence
  Cyclic GFR-binding peptide
  MOD_RES (4)..(36): Xaa is C or S
KPTXAPTKLEPLTVLYYDDSSNVIEQLSNNMVVRSXG

SEQ ID NO: 21164 - protein, 31 aa, Artificial Sequence; identical to SEQ ID NO: 11087
  Cyclic GFR-binding peptide
  MOD_RES (29)..(31): Xaa is C or S

SEQ ID NO: 21165 - protein, 32 aa, Artificial Sequence
  Cyclic GFR-binding peptide
  MOD_RES (29)..(31): Xaa is C or S
QDLEPLPIVYYVGRTPKVEQLSNMVVKSXKXS

SEQ ID NO: 21166 - protein, 38 aa, Artificial Sequence
  Cyclic GFR-binding peptide
  MOD_RES (5)..(6)..(38): Xaa is C or S
VPKPXXAPTKLSPISVLFIDDSSNVIYKQYENMVVRSX

SEQ ID NO: 21167 - protein, 32 aa, Artificial Sequence
  Cyclic GFR-binding peptide
  MOD_RES (3)..(3): Xaa is C or S
PTXAPTKLEPLTVLYYDDSSNVIEQLSNNMVV

SEQ ID NO: 21168 - protein, 33 aa, Artificial Sequence; identical to SEQ ID NO: 11092
  Cyclic GFR-binding peptide
  MOD_RES (3)..(4): Xaa is C or S

SEQ ID NO: 21169 - protein, 32 aa, Artificial Sequence
  Cyclic GFR-binding peptide
  MOD_RES (31)..(31): Xaa is C or S
PTRLEPLPIVYYDSANNVVEQLSNDMVVESXG

SEQ ID NO: 21170 - protein, 33 aa, Artificial Sequence
  Cyclic GFR-binding peptide
  MOD_RES (5)..(6): Xaa is C or S
IPKAXXVPTELSPISMLFIDEYDKVVYKQYEEM

SEQ ID NO: 21171 - protein, 42 aa, Artificial Sequence
  Cyclic GFR-binding peptide
  MOD_RES (7)..(39)..(41): Xaa is C or S
HVTKPTXAPTKLEPLPVVYYDDSSNVIEQLSNNMVVRSXGXH

SEQ ID NO: 21172 - protein, 33 aa, Artificial Sequence; identical to SEQ ID NO: 11097
  Cyclic GFR-binding peptide
  MOD_RES (4)..(5): Xaa is C or S

SEQ ID NO: 21173 - protein, 32 aa, Artificial Sequence
  Cyclic GFR-binding peptide
  MOD_RES (3)..(4): Xaa is C or S
KPXXAPTKLEPLTVLYYDDSSNVIEQLSNNMV

SEQ ID NO: 21174 - protein, 28 aa, Artificial Sequence
  Cyclic GFR-binding peptide
  MOD_RES (27)..(27): Xaa is C or S
NAISILYFDSANNVVLKKYRDMVVESXG

SEQ ID NO: 21175 - protein, 31 aa, Artificial Sequence
  Cyclic GFR-binding peptide
  MOD_RES (29)..(31): Xaa is C or S
KLEPLTVLYYDDSSNVIEQLSNNMVVRSXGX

SEQ ID NO: 21176 - protein, 32 aa, Artificial Sequence; identical to SEQ ID NO: 11100
  Cyclic GFR-binding peptide
  MOD_RES (4)..(5): Xaa is C or S

SEQ ID NO: 21177 - protein, 39 aa, Artificial Sequence
  Cyclic GFR-binding peptide
  MOD_RES (4)..(5)..(37)..(39): Xaa is C or S
PKPXXAPTKLSPISVLFIDDSSNVIYKQYENMVVRSXGX

SEQ ID NO: 21178 - protein, 37 aa, Artificial Sequence
  Cyclic GFR-binding peptide
  MOD_RES (6)..(7): Xaa is C or S
STPPTXXVPTRLSAISILYLDSANNVVLKNYQDMVVE

SEQ ID NO: 21179 - protein, 25 aa, Artificial Sequence
  Cyclic GFR-binding peptide
DLSPISILFIVGRTPKVYKQYEMVV

SEQ ID NO: 21180 - protein, 38 aa, Artificial Sequence
  Cyclic GFR-binding peptide
  MOD_RES (3)..(4)..(36)..(38): Xaa is C or S
KPXXAPTQLEPLTVLYYDDSSNVIEQLSNNMVVRAXGX

SEQ ID NO: 21181 - protein, 24 aa, Artificial Sequence
  Cyclic GFR-binding peptide
ALNAISILYFVGRKPKVLKKYRMI

SEQ ID NO: 21182 - protein, 29 aa, Artificial Sequence
  Cyclic GFR-binding peptide
  MOD_RES (27)..(29): Xaa is C or S
EPLPVVYYDDSSNVIEQLSNNMVVRAXGX

SEQ ID NO: 21183 - protein, 28 aa, Artificial Sequence
  Cyclic GFR-binding peptide
VPTELNAISMLYFDEYDKVVLKKYREMV

SEQ ID NO: 21184 - protein, 37 aa, Artificial Sequence
  Cyclic GFR-binding peptide
  MOD_RES (2)..(3)..(35)..(37): Xaa is C or S
AXXVPTELSPISMLFIDENEKVVYKQYEDMVVEGXGX

SEQ ID NO: 21185 - protein, 24 aa, Artificial Sequence
  Cyclic GFR-binding peptide
EPLPMVYYDEYDKVVEQLSNEMVV

SEQ ID NO: 21186 - protein, 33 aa, Artificial Sequence
  Cyclic GFR-binding peptide
  MOD_RES (30)..(32): Xaa is C or S
TKLEPLTVLYYDDSSNVIEQLSNNMVVRSXGXH

SEQ ID NO: 21187 - protein, 25 aa, Artificial Sequence
  Cyclic GFR-binding peptide
VSQDLEPLPIVYYIGKTPKIEQLSN

SEQ ID NO: 21188 - protein, 35 aa, Artificial Sequence
  Cyclic GFR-binding peptide
  MOD_RES (5)..(6): Xaa is C or S
TPPTXXVPTRLNAISILYFDSANNVVLKKYRDMVV

SEQ ID NO: 21189 - protein, 32 aa, Artificial Sequence; identical to SEQ ID NO: 11118
  Cyclic GFR-binding peptide
  MOD_RES (1)..(32): Xaa is C or S

SEQ ID NO: 21190 - protein, 36 aa, Artificial Sequence
  Cyclic GFR-binding peptide
  MOD_RES (1)..(2)..(34)..(36): Xaa is C or S
XXVPTELSPISMLFIDENEKVVYKQYEDMVVEGXGX

SEQ ID NO: 21191 - protein, 22 aa, Artificial Sequence
  Cyclic GFR-binding peptide
LSPISMLFIDEYDKVVYKQYEE

SEQ ID NO: 21192 - protein, 30 aa, Artificial Sequence
  Cyclic GFR-binding peptide
  MOD_RES (28)..(30): Xaa is C or S
LEPLTILYYDSANNVVEQLSNDMVVESXGX

SEQ ID NO: 21193 - protein, 20 aa, Artificial Sequence
  Cyclic GFR-binding peptide
NAISILYFVGRTPKVLKKYR

SEQ ID NO: 21194 - protein, 29 aa, Artificial Sequence
  Cyclic GFR-binding peptide
  MOD_RES (3)..(4): Xaa is C or S
SPXXVSQDLSPISILFIIGKTPKIYKQYE

SEQ ID NO: 21195 - protein, 36 aa, Artificial Sequence
  Cyclic GFR-binding peptide
  MOD_RES (4)..(36): Xaa is C or S
KPTXAPTKLEPLTVLYYDDSSNVIEQLSNNMVVRSX

SEQ ID NO: 21196 - protein, 36 aa, Artificial Sequence; identical to SEQ ID NO: 11125
  Cyclic GFR-binding peptide
  MOD_RES (4)..(5): Xaa is C or S

SEQ ID NO: 21197 - protein, 24 aa, Artificial Sequence
  Cyclic GFR-binding peptide
TELEPLPMVYYDEYDKVVEQLSNE

SEQ ID NO: 21198 - protein, 23 aa, Artificial Sequence
  Cyclic GFR-binding peptide
EPLPMVYYDENEKVVEQLSNDMV

SEQ ID NO: 21199 - protein, 24 aa, Artificial Sequence
  Cyclic GFR-binding peptide
ELSPISMLFIDENEKVVYKQYEDM

SEQ ID NO: 21200 - protein, 37 aa, Artificial Sequence
  Cyclic GFR-binding peptide
  MOD_RES (6)..(7): Xaa is C or S
ASAAPXXVPQALEPLTILYYVGRKPKVEQLSNMIVRS

SEQ ID NO: 21201 - protein, 27 aa, Artificial Sequence
  Cyclic GFR-binding peptide
  MOD_RES (1)..(1): Xaa is C or S
XVPQALNAISILYFVGRKPKVLKKYRM

SEQ ID NO: 21202 - protein, 26 aa, Artificial Sequence
  Cyclic GFR-binding peptide
ALNAISILYFVGRKPKVLKKYRMIVR

SEQ ID NO: 21203 - protein, 31 aa, Artificial Sequence
  Cyclic GFR-binding peptide
  MOD_RES (2)..(3): Xaa is C or S
PXXAPTQLSPISVLFIDDSSNVIYKQYENMV

SEQ ID NO: 21204 - protein, 30 aa, Artificial Sequence
  Cyclic GFR-binding peptide
  MOD_RES (28)..(30): Xaa is C or S
LEPLPVVYYDDSSNVIEQLSNNMVVRSXGX

SEQ ID NO: 21205 - protein, 27 aa, Artificial Sequence
  Cyclic GFR-binding peptide
PTRLEPLPIVYYDSANNVVEQLSNDMV

SEQ ID NO: 21206 - protein, 41 aa, Artificial Sequence; identical to SEQ ID NO: 11132
  Cyclic GFR-binding peptide
  MOD_RES (5)..(6)..(38)..(40): Xaa is C or S

SEQ ID NO: 21207 - protein, 32 aa, Artificial Sequence; identical to SEQ ID NO: 11135
  Cyclic GFR-binding peptide
  MOD_RES (31)..(31): Xaa is C or S

SEQ ID NO: 21208 - protein, 28 aa, Artificial Sequence
  Cyclic GFR-binding peptide
  MOD_RES (2)..(3): Xaa is C or S
PXXAPTQLSAISVLYLDDSSNVILKNYQ

SEQ ID NO: 21209 - protein, 37 aa, Artificial Sequence
  Cyclic GFR-binding peptide
  MOD_RES (4)..(5)..(37): Xaa is C or S
PPTXXVPTRLNAISILYFDSANNVVLKKYRDMVVESX

SEQ ID NO: 21210 - protein, 28 aa, Artificial Sequence
  Cyclic GFR-binding peptide
  MOD_RES (2)..(3): Xaa is C or S
PXXVSQDLSAISILYLIGKTPKILKNYQ

SEQ ID NO: 21211 - protein, 37 aa, Artificial Sequence
  Cyclic GFR-binding peptide
  MOD_RES (3)..(4)..(35)..(37): Xaa is C or S
SPXXVPQDLEPLPIVYYVGRTPKVEQLSNMVVKSXKX

SEQ ID NO: 21212 - protein, 34 aa, Artificial Sequence
  Cyclic GFR-binding peptide
  MOD_RES (31)..(33): Xaa is C or S
VSQDLEPLPIVYYIGKTPKIEQLSNMIVKSXKXS

SEQ ID NO: 21213 - protein, 25 aa, Artificial Sequence
  Cyclic GFR-binding peptide
SPISMLFIDENEKVVYKQYEDMVVE

SEQ ID NO: 21214 - protein, 29 aa, Artificial Sequence
  Cyclic GFR-binding peptide
VPQDLSPISILFIVGRTPKVYKQYEMVVK

SEQ ID NO: 21215 - protein, 37 aa, Artificial Sequence; identical to SEQ ID NO: 11142
  Cyclic GFR-binding peptide
  MOD_RES (1)..(2)..(34)..(36): Xaa is C or S

SEQ ID NO: 21216 - protein, 33 aa, Artificial Sequence
  Cyclic GFR-binding peptide
  MOD_RES (30)..(32): Xaa is C or S
TKLSPISVLFIDDSSNVIYKQYENMVVRSXGXH

SEQ ID NO: 21217 - protein, 23 aa, Artificial Sequence
  Cyclic GFR-binding peptide
ELEPLTMLYYDENEKVVEQLSND

SEQ ID NO: 21218 - protein, 33 aa, Artificial Sequence
  Cyclic GFR-binding peptide
  MOD_RES (5)..(6): Xaa is C or S
SASPXXVSQDLEPLPIVYYIGKTPKIEQLSNMI

SEQ ID NO: 21219 - protein, 30 aa, Artificial Sequence
  Cyclic GFR-binding peptide
  MOD_RES (1)..(2): Xaa is C or S
XXVSQDLEPLPIVYYIGKTPKIEQLSNMIV

SEQ ID NO: 21220 - protein, 36 aa, Artificial Sequence; identical to SEQ ID NO: 11148
  Cyclic GFR-binding peptide
  MOD_RES (3)..(4)..(36): Xaa is C or S

SEQ ID NO: 21221 - protein, 30 aa, Artificial Sequence
  Cyclic GFR-binding peptide
  MOD_RES (3)..(3): Xaa is C or S
PTXAPTKLSPISVLFIDDSSNVIYKQYENM

SEQ ID NO: 21222 - protein, 32 aa, Artificial Sequence
  Cyclic GFR-binding peptide
  MOD_RES (3)..(4): Xaa is C or S
KAXXVPTELEPLTMLYYDENEKVVEQLSNDMV

SEQ ID NO: 21223 - protein, 34 aa, Artificial Sequence; identical to SEQ ID NO: 11151
  Cyclic GFR-binding peptide
  MOD_RES (4)..(5): Xaa is C or S

SEQ ID NO: 21224 - protein, 35 aa, Artificial Sequence
  Cyclic GFR-binding peptide
  MOD_RES (1)..(2)..(34): Xaa is C or S
XXVPTELEPLPMVYYDENEKVVEQLSNDMVVEGXG

SEQ ID NO: 21225 - protein, 28 aa, Artificial Sequence
  Cyclic GFR-binding peptide
  MOD_RES (2)..(2): Xaa is C or S
TXAPTKLEPLTVLYYDDSSNVIEQLSNN

SEQ ID NO: 21226 - protein, 29 aa, Artificial Sequence
  Cyclic GFR-binding peptide
  MOD_RES (29)..(29): Xaa is C or S
ELSPISMLFIDENEKVVYKQYEDMVVEGX

SEQ ID NO: 21227 - protein, 28 aa, Artificial Sequence
  Cyclic GFR-binding peptide
  MOD_RES (2)..(2): Xaa is C or S
TXAPTKLSPISVLFIDDSSNVIYKQYEN

SEQ ID NO: 21228 - protein, 27 aa, Artificial Sequence
  Cyclic GFR-binding peptide
  MOD_RES (27)..(27): Xaa is C or S
SAISILYLDSANNVVLKNYQDMVVESX

SEQ ID NO: 21229 - protein, 30 aa, Artificial Sequence
  Cyclic GFR-binding peptide
  MOD_RES (1)..(2): Xaa is C or S
XXVPQDLSPISILFIVGRTPKVYKQYEMVV

SEQ ID NO: 21230 - protein, 23 aa, Artificial Sequence
  Cyclic GFR-binding peptide
LEPLPIVYYVGRTPKVEQLSNMV

SEQ ID NO: 21231 - protein, 34 aa, Artificial Sequence
  Cyclic GFR-binding peptide
  MOD_RES (2)..(3): Xaa is C or S
AXXVPTELEPLTMLYYDEYDKVVEQLSNEMVVEG

SEQ ID NO: 21232 - protein, 24 aa, Artificial Sequence
  Cyclic GFR-binding peptide
LEPLTVLYYDDSSNVIEQLSNNMV

SEQ ID NO: 21233 - protein, 31 aa, Artificial Sequence
  Cyclic GFR-binding peptide
VPTELSPISMLFIDEYDKVVYKQYEEMVVEG

SEQ ID NO: 21234 - protein, 34 aa, Artificial Sequence
  Cyclic GFR-binding peptide
  MOD_RES (31)..(33): Xaa is C or S
PTELEPLPMVYYDEYDKVVEQLSNEMVVEGXGXR

SEQ ID NO: 21235 - protein, 29 aa, Artificial Sequence
  Cyclic GFR-binding peptide
TELEPLPMVYYDEYDKVVEQLSNEMVVEG

SEQ ID NO: 21236 - protein, 22 aa, Artificial Sequence
  Cyclic GFR-binding peptide
DLEPLPIVYYVGRTPKVEQLSN

SEQ ID NO: 21237 - protein, 33 aa, Artificial Sequence
  Cyclic GFR-binding peptide
  MOD_RES (6)..(7): Xaa is C or S
STPPTXXVPTRLNAISILYFDSANNVVLKKYRD

SEQ ID NO: 21238 - protein, 29 aa, Artificial Sequence
  Cyclic GFR-binding peptide
  MOD_RES (1)..(1): Xaa is C or S
XVPTELEPLPMVYYDEYDKVVEQLSNEMV

SEQ ID NO: 21239 - protein, 31 aa, Artificial Sequence; identical to SEQ ID NO: 11168
  Cyclic GFR-binding peptide
  MOD_RES (5)..(6): Xaa is C or S

SEQ ID NO: 21240 - protein, 31 aa, Artificial Sequence
  Cyclic GFR-binding peptide
  MOD_RES (5)..(6): Xaa is C or S
IPKAXXVPTELEPLPMVYYDENEKVVEQLSN

SEQ ID NO: 21241 - protein, 21 aa, Artificial Sequence
  Cyclic GFR-binding peptide
LSAISILYLVGRTPKVLKNYQ

SEQ ID NO: 21242 - protein, 29 aa, Artificial Sequence
  Cyclic GFR-binding peptide
  MOD_RES (28)..(28): Xaa is C or S
DLEPLPIVYYVGRTPKVEQLSNMVVKSXK

SEQ ID NO: 21243 - protein, 28 aa, Artificial Sequence
  Cyclic GFR-binding peptide
  MOD_RES (26)..(28): Xaa is C or S
SPISILFIVGRTPKVYKQYEMVVKSXKX

SEQ ID NO: 21244 - protein, 38 aa, Artificial Sequence
  Cyclic GFR-binding peptide
  MOD_RES (7)..(7): Xaa is C or S
HVTKPTXAPTKLEPLTVLYYDDSSNVIEQLSNNMVVRS

SEQ ID NO: 21245 - protein, 27 aa, Artificial Sequence
  Cyclic GFR-binding peptide
  MOD_RES (1)..(2): Xaa is C or S
XXVPQDLEPLPIVYYVGRTPKVEQLSN

SEQ ID NO: 21246 - protein, 35 aa, Artificial Sequence
  Cyclic GFR-binding peptide
  MOD_RES (1)..(2)..(34): Xaa is C or S
XXAPTQLEPLTVLYYDDSSNVIEQLSNNMVVRAXG

SEQ ID NO: 21247 - protein, 30 aa, Artificial Sequence
  Cyclic GFR-binding peptide
  MOD_RES (1)..(2): Xaa is C or S
XXVPQALEPLTILYYVGRKPKVEQLSNMIV

SEQ ID NO: 21248 - protein, 25 aa, Artificial Sequence
  Cyclic GFR-binding peptide
PTELEPLTMLYYDEYDKVVEQLSNE

SEQ ID NO: 21249 - protein, 27 aa, Artificial Sequence
  Cyclic GFR-binding peptide
  MOD_RES (27)..(27): Xaa is C or S
LSPISILFIIGKTPKIYKQYEMIVKSX

SEQ ID NO: 21250 - protein, 32 aa, Artificial Sequence
  Cyclic GFR-binding peptide
  MOD_RES (1)..(1): Xaa is C or S
XAPTKLEPLPVVYYDDSSNVIEQLSNNMVVRS

SEQ ID NO: 21251 - protein, 33 aa, Artificial Sequence
  Cyclic GFR-binding peptide
  MOD_RES (6)..(7): Xaa is C or S
SIPKAXXVPTELEPLPMVYYDEYDKVVEQLSNE

SEQ ID NO: 21252 - protein, 36 aa, Artificial Sequence; identical to SEQ ID NO: 11174
  Cyclic GFR-binding peptide
  MOD_RES (5)..(6): Xaa is C or S

SEQ ID NO: 21253 - protein, 34 aa, Artificial Sequence; identical to SEQ ID NO: 11177
  Cyclic GFR-binding peptide
  MOD_RES (1)..(2)..(33): Xaa is C or S

SEQ ID NO: 21254 - protein, 39 aa, Artificial Sequence
  Cyclic GFR-binding peptide
  MOD_RES (6)..(7)..(39): Xaa is C or S
YVPKPXXAPTKLEPLTVLYYDDSSNVIEQLSNNMVVRSX

SEQ ID NO: 21255 - protein, 40 aa, Artificial Sequence; identical to SEQ ID NO: 11179
  Cyclic GFR-binding peptide
  MOD_RES (5)..(37)..(39): Xaa is C or S

SEQ ID NO: 21256 - protein, 30 aa, Artificial Sequence
  Cyclic GFR-binding peptide
  MOD_RES (3)..(4): Xaa is C or S
SPXXVSQDLSPISILFIIGKTPKIYKQYEM

SEQ ID NO: 21257 - protein, 30 aa, Artificial Sequence
  Cyclic GFR-binding peptide
  MOD_RES (3)..(4): Xaa is C or S
PTXXVPTRLNAISILYFDSANNVVLKKYRD

SEQ ID NO: 21258 - protein, 26 aa, Artificial Sequence
  Cyclic GFR-binding peptide
PQALSAISILYLVGRKPKVLKNYQMI

SEQ ID NO: 21259 - protein, 27 aa, Artificial Sequence
  Cyclic GFR-binding peptide
TELEPLTMLYYDENEKVVEQLSNDMVV

SEQ ID NO: 21260 - protein, 29 aa, Artificial Sequence
  Cyclic GFR-binding peptide
  MOD_RES (28)..(28): Xaa is C or S
LEPLPVVYYDDSSNVIEQLSNNMVVRSXG

SEQ ID NO: 21261 - protein, 34 aa, Artificial Sequence
  Cyclic GFR-binding peptide
  MOD_RES (1)..(2)..(34): Xaa is C or S
XXVPTRLEPLPIVYYDSANNVVEQLSNDMVVESX

SEQ ID NO: 21262 - protein, 24 aa, Artificial Sequence
  Cyclic GFR-binding peptide
NAISILYFVGRTPKVLKKYRMVVK

SEQ ID NO: 21263 - protein, 30 aa, Artificial Sequence
  Cyclic GFR-binding peptide
  MOD_RES (4)..(5): Xaa is C or S
PKAXXVPTELEPLPMVYYDENEKVVEQLSN

SEQ ID NO: 21264 - protein, 22 aa, Artificial Sequence
  Cyclic GFR-binding peptide
KLSAISVLYLDDSSNVILKNYQ

SEQ ID NO: 21265 - protein, 28 aa, Artificial Sequence
  Cyclic GFR-binding peptide
  MOD_RES (3)..(3): Xaa is C or S
PTXAPTKLSAISVLYLDDSSNVILKNYQ

SEQ ID NO: 21266 - protein, 26 aa, Artificial Sequence
  Cyclic GFR-binding peptide
QALEPLTILYYVGRKPKVEQLSNMIV

SEQ ID NO: 21267 - protein, 38 aa, Artificial Sequence
  Cyclic GFR-binding peptide
  MOD_RES (3)..(4)..(35)..(37): Xaa is C or S
APXXVPQALSPISILFIVGRKPKVYKQYEMIVRSXKXS

SEQ ID NO: 21268 - protein, 31 aa, Artificial Sequence
  Cyclic GFR-binding peptide
  MOD_RES (4)..(5): Xaa is C or S
PKAXXVPTELEPLPMVYYDEYDKVVEQLSNE

SEQ ID NO: 21269 - protein, 39 aa, Artificial Sequence
  Cyclic GFR-binding peptide
  MOD_RES (6)..(7)..(39): Xaa is C or S
SIPKAXXVPTELSPISMLFIDEYDKVVYKQYEEMVVEGX

SEQ ID NO: 21270 - protein, 36 aa, Artificial Sequence
  Cyclic GFR-binding peptide
  MOD_RES (1)..(2)..(34)..(36): Xaa is C or S
XXVPTELEPLTMLYYDEYDKVVEQLSNEMVVEGXGX

SEQ ID NO: 21271 - protein, 28 aa, Artificial Sequence
  Cyclic GFR-binding peptide
  MOD_RES (27)..(27): Xaa is C or S
LEPLPIVYYIGKTPKIEQLSNMIVKSXK

SEQ ID NO: 21272 - protein, 28 aa, Artificial Sequence
  Cyclic GFR-binding peptide
VPTRLNAISILYFDSANNVVLKKYRDMV

SEQ ID NO: 21273 - protein, 27 aa, Artificial Sequence
  Cyclic GFR-binding peptide
RLNAISILYFDSANNVVLKKYRDMVVE

SEQ ID NO: 21274 - protein, 26 aa, Artificial Sequence
  Cyclic GFR-binding peptide
  MOD_RES (1)..(1): Xaa is C or S
XAPTKLSAISVLYLDDSSNVILKNYQ

SEQ ID NO: 21275 - protein, 35 aa, Artificial Sequence; identical to SEQ ID NO: 11202
  Cyclic GFR-binding peptide
  MOD_RES (5)..(6): Xaa is C or S

SEQ ID NO: 21276 - protein, 30 aa, Artificial Sequence; identical to SEQ ID NO: 11203
  Cyclic GFR-binding peptide

SEQ ID NO: 21277 - protein, 29 aa, Artificial Sequence
  Cyclic GFR-binding peptide
  MOD_RES (29)..(29): Xaa is C or S
QLSPISVLFIDDSSNVIYKQYENMVVRAX

SEQ ID NO: 21278 - protein, 27 aa, Artificial Sequence
  Cyclic GFR-binding peptide
  MOD_RES (1)..(2): Xaa is C or S
XXAPTKLSAISVLYLDDSSNVILKNYQ

SEQ ID NO: 21279 - protein, 37 aa, Artificial Sequence
  Cyclic GFR-binding peptide
  MOD_RES (5)..(6): Xaa is C or S
TPPTXXVPTRLNAISILYFDSANNVVLKKYRDMVVES

SEQ ID NO: 21280 - protein, 34 aa, Artificial Sequence
  Cyclic GFR-binding peptide
  MOD_RES (32)..(34): Xaa is C or S
APTQLEPLPVVYYDDSSNVIEQLSNNMVVRAXGX

SEQ ID NO: 21281 - protein, 25 aa, Artificial Sequence
  Cyclic GFR-binding peptide
VPTELEPLTMLYYDEYDKVVEQLSN

SEQ ID NO: 21282 - protein, 24 aa, Artificial Sequence
  Cyclic GFR-binding peptide
LEPLTILYYVGRKPKVEQLSNMIV

SEQ ID NO: 21283 - protein, 25 aa, Artificial Sequence
  Cyclic GFR-binding peptide
RLSAISILYLDSANNVVLKNYQDMV

SEQ ID NO: 21284 - protein, 26 aa, Artificial Sequence
  Cyclic GFR-binding peptide
PQALNAISILYFVGRKPKVLKKYRMI

SEQ ID NO: 21285 - protein, 25 aa, Artificial Sequence
  Cyclic GFR-binding peptide
KLSPISVLFIDDSSNVIYKQYENMV

SEQ ID NO: 21286 - protein, 37 aa, Artificial Sequence
  Cyclic GFR-binding peptide
  MOD_RES (2)..(34)..(36): Xaa is C or S
TXAPTKLEPLPVVYYDDSSNVIEQLSNNMVVRSXGXH

SEQ ID NO: 21287 - protein, 25 aa, Artificial Sequence
  Cyclic GFR-binding peptide
TELEPLTMLYYDENEKVVEQLSNDM

SEQ ID NO: 21288 - protein, 29 aa, Artificial Sequence
  Cyclic GFR-binding peptide
  MOD_RES (1)..(1): Xaa is C or S
XVPTELNAISMLYFDENEKVVLKKYRDMV

SEQ ID NO: 21289 - protein, 37 aa, Artificial Sequence
  Cyclic GFR-binding peptide
  MOD_RES (4)..(36): Xaa is C or S
KPTXAPTKLSPISVLFIDDSSNVIYKQYENMVVRSXG

SEQ ID NO: 21290 - protein, 33 aa, Artificial Sequence; identical to SEQ ID NO: 11216
  Cyclic GFR-binding peptide
  MOD_RES (31)..(33): Xaa is C or S

SEQ ID NO: 21291 - protein, 39 aa, Artificial Sequence
  Cyclic GFR-binding peptide
  MOD_RES (6)..(7)..(38): Xaa is C or S
ASAAPXXVPQALSPISILFIVGRKPKVYKQYEMIVRSXK

SEQ ID NO: 21292 - protein, 29 aa, Artificial Sequence
  Cyclic GFR-binding peptide
SQDLSPISILFIIGKTPKIYKQYEMIVKS

SEQ ID NO: 21293 - protein, 28 aa, Artificial Sequence
  Cyclic GFR-binding peptide
TELEPLPMVYYDENEKVVEQLSNDMVVE

SEQ ID NO: 21294 - protein, 23 aa, Artificial Sequence
  Cyclic GFR-binding peptide
LSAISILYLVGRKPKVLKNYQMI

SEQ ID NO: 21295 - protein, 24 aa, Artificial Sequence
  Cyclic GFR-binding peptide
RLEPLTILYYDSANNVVEQLSNDM

SEQ ID NO: 21296 - protein, 35 aa, Artificial Sequence
  Cyclic GFR-binding peptide
  MOD_RES (7)..(7): Xaa is C or S
HVTKPTXAPTKLSPISVLFIDDSSNVIYKQYENMV

SEQ ID NO: 21297 - protein, 22 aa, Artificial Sequence
  Cyclic GFR-binding peptide
ELEPLPMVYYDEYDKVVEQLSN

SEQ ID NO: 21298 - protein, 35 aa, Artificial Sequence; identical to SEQ ID NO: 11224
  Cyclic GFR-binding peptide
  MOD_RES (4)..(5): Xaa is C or S

SEQ ID NO: 21299 - protein, 31 aa, Artificial Sequence
  Cyclic GFR-binding peptide
  MOD_RES (2)..(3): Xaa is C or S
AXXVPTELEPLTMLYYDEYDKVVEQLSNEMV

SEQ ID NO: 21300 - protein, 30 aa, Artificial Sequence
  Cyclic GFR-binding peptide
  MOD_RES (30)..(30): Xaa is C or S
TKLEPLPVVYYDDSSNVIEQLSNNMVVRSX

SEQ ID NO: 21301 - protein, 37 aa, Artificial Sequence
  Cyclic GFR-binding peptide
  MOD_RES (1)..(2)..(34)..(36): Xaa is C or S
XXAPTQLEPLTVLYYDDSSNVIEQLSNNMVVRAXGXH

SEQ ID NO: 21302 - protein, 28 aa, Artificial Sequence
  Cyclic GFR-binding peptide
  MOD_RES (28)..(28): Xaa is C or S
LNAISILYFDSANNVVLKKYRDMVVESX

SEQ ID NO: 21303 - protein, 34 aa, Artificial Sequence; identical to SEQ ID NO: 11231
  Cyclic GFR-binding peptide
  MOD_RES (2)..(3): Xaa is C or S

SEQ ID NO: 21304 - protein, 35 aa, Artificial Sequence
  Cyclic GFR-binding peptide
  MOD_RES (5)..(6): Xaa is C or S
VPKPXXAPTKLEPLTVLYYDDSSNVIEQLSNNMVV

SEQ ID NO: 21305 - protein, 35 aa, Artificial Sequence
  Cyclic GFR-binding peptide
  MOD_RES (1)..(2)..(34): Xaa is C or S
XXAPTKLEPLTVLYYDDSSNVIEQLSNNMVVRSXG

SEQ ID NO: 21306 - protein, 38 aa, Artificial Sequence
  Cyclic GFR-binding peptide
  MOD_RES (3)..(4)..(36)..(38): Xaa is C or S
KPXXAPTKLSPISVLFIDDSSNVIYKQYENMVVRSXGX

SEQ ID NO: 21307 - protein, 31 aa, Artificial Sequence
  Cyclic GFR-binding peptide
  MOD_RES (28)..(30): Xaa is C or S
LEPLTMLYYDEYDKVVEQLSNEMVVEGXGXR

SEQ ID NO: 21308 - protein, 22 aa, Artificial Sequence
  Cyclic GFR-binding peptide
SAISILYLIGKTPKILKNYQMI

SEQ ID NO: 21309 - protein, 37 aa, Artificial Sequence; identical to SEQ ID NO: 11236
  Cyclic GFR-binding peptide
  MOD_RES (4)..(5)..(37): Xaa is C or S

SEQ ID NO: 21310 - protein, 22 aa, Artificial Sequence
  Cyclic GFR-binding peptide
EPLTILYYVGRKPKVEQLSNMI

SEQ ID NO: 21311 - protein, 32 aa, Artificial Sequence; identical to SEQ ID NO: 11239
  Cyclic GFR-binding peptide
  MOD_RES (5)..(6): Xaa is C or S

SEQ ID NO: 21312 - protein, 32 aa, Artificial Sequence; identical to SEQ ID NO: 11244
  Cyclic GFR-binding peptide
  MOD_RES (5)..(6): Xaa is C or S

SEQ ID NO: 21313 - protein, 31 aa, Artificial Sequence
  Cyclic GFR-binding peptide
  MOD_RES (1)..(2): Xaa is C or S
XXVPQALSPISILFIVGRKPKVYKQYEMIVR

SEQ ID NO: 21314 - protein, 26 aa, Artificial Sequence
  Cyclic GFR-binding peptide
QDLNAISILYFIGKTPKILKKYRMIV

SEQ ID NO: 21315 - protein, 31 aa, Artificial Sequence; identical to SEQ ID NO: 11249
  Cyclic GFR-binding peptide
  MOD_RES (30)..(30): Xaa is C or S

SEQ ID NO: 21316 - protein, 31 aa, Artificial Sequence
  Cyclic GFR-binding peptide
  MOD_RES (3)..(4): Xaa is C or S
APXXVPQALEPLTILYYVGRKPKVEQLSNMI

SEQ ID NO: 21317 - protein, 31 aa, Artificial Sequence; identical to SEQ ID NO: 11251
  Cyclic GFR-binding peptide
  MOD_RES (4)..(5): Xaa is C or S

SEQ ID NO: 21318 - protein, 30 aa, Artificial Sequence; identical to SEQ ID NO: 11252
  Cyclic GFR-binding peptide

SEQ ID NO: 21319 - protein, 29 aa, Artificial Sequence
  Cyclic GFR-binding peptide
  MOD_RES (29)..(29): Xaa is C or S
QALSAISILYLVGRKPKVLKNYQMIVRSX

SEQ ID NO: 21320 - protein, 40 aa, Artificial Sequence; identical to SEQ ID NO: 11254
  Cyclic GFR-binding peptide
  MOD_RES (6)..(7)..(39): Xaa is C or S

SEQ ID NO: 21321 - protein, 32 aa, Artificial Sequence
  Cyclic GFR-binding peptide
  MOD_RES (29)..(31): Xaa is C or S
ELSPISMLFIDENEKVVYKQYEDMVVEGXGXR

SEQ ID NO: 21322 - protein, 29 aa, Artificial Sequence
  Cyclic GFR-binding peptide
  MOD_RES (27)..(29): Xaa is C or S
NAISMLYFDENEKVVLKKYRDMVVEGXGX

SEQ ID NO: 21323 - protein, 37 aa, Artificial Sequence; identical to SEQ ID NO: 11259
  Cyclic GFR-binding peptide
  MOD_RES (3)..(4)..(35)..(37): Xaa is C or S

SEQ ID NO: 21324 - protein, 30 aa, Artificial Sequence
  Cyclic GFR-binding peptide
  MOD_RES (1)..(1): Xaa is C or S
XVPQDLSPISILFIVGRTPKVYKQYEMVVK

SEQ ID NO: 21325 - protein, 20 aa, Artificial Sequence
  Cyclic GFR-binding peptide
NAISMLYFDEYDKVVLKKYR

SEQ ID NO: 21326 - protein, 32 aa, Artificial Sequence
  Cyclic GFR-binding peptide
  MOD_RES (2)..(3): Xaa is C or S
PXXAPTKLSPISVLFIDDSSNVIYKQYENMVV

SEQ ID NO: 21327 - protein, 28 aa, Artificial Sequence
  Cyclic GFR-binding peptide
APTKLEPLPVVYYDDSSNVIEQLSNNMV

SEQ ID NO: 21328 - protein, 30 aa, Artificial Sequence; identical to SEQ ID NO: 11270
  Cyclic GFR-binding peptide

SEQ ID NO: 21329 - protein, 29 aa, Artificial Sequence
  Cyclic GFR-binding peptide
  MOD_RES (27)..(29): Xaa is C or S
SAISVLYLDDSSNVILKNYQNMVVRAXGX

SEQ ID NO: 21330 - protein, 30 aa, Artificial Sequence; identical to SEQ ID NO: 11272
  Cyclic GFR-binding peptide
  MOD_RES (28)..(30): Xaa is C or S

SEQ ID NO: 21331 - protein, 39 aa, Artificial Sequence
  Cyclic GFR-binding peptide
  MOD_RES (6)..(7)..(39): Xaa is C or S
KIPKAXXVPTELEPLPMVYYDENEKVVEQLSNDMVVEGX

SEQ ID NO: 21332 - protein, 25 aa, Artificial Sequence
  Cyclic GFR-binding peptide
PTELSPISMLFIDEYDKVVYKQYEE

SEQ ID NO: 21333 - protein, 28 aa, Artificial Sequence
  Cyclic GFR-binding peptide
  MOD_RES (28)..(28): Xaa is C or S
LSPISVLFIDDSSNVIYKQYENMVVRSX

SEQ ID NO: 21334 - protein, 36 aa, Artificial Sequence
  Cyclic GFR-binding peptide
  MOD_RES (1)..(2)..(33)..(35): Xaa is C or S
XXVPQALSPISILFIVGRKPKVYKQYEMIVRSXKXS

SEQ ID NO: 21335 - protein, 29 aa, Artificial Sequence
  Cyclic GFR-binding peptide
  MOD_RES (1)..(1): Xaa is C or S
XVPTRLEPLPIVYYDSANNVVEQLSNDMV

SEQ ID NO: 21336 - protein, 24 aa, Artificial Sequence
  Cyclic GFR-binding peptide
QDLSAISILYLVGRTPKVLKNYQM

SEQ ID NO: 21337 - protein, 32 aa, Artificial Sequence
  Cyclic GFR-binding peptide
  MOD_RES (3)..(4): Xaa is C or S
PTXXVPTRLSAISILYLDSANNVVLKNYQDMV

SEQ ID NO: 21338 - protein, 23 aa, Artificial Sequence
  Cyclic GFR-binding peptide
ELSPISMLFIDENEKVVYKQYED

SEQ ID NO: 21339 - protein, 32 aa, Artificial Sequence; identical to SEQ ID NO: 11282
  Cyclic GFR-binding peptide
  MOD_RES (4)..(5): Xaa is C or S

SEQ ID NO: 21340 - protein, 35 aa, Artificial Sequence; identical to SEQ ID NO: 11283
  Cyclic GFR-binding peptide
  MOD_RES (1)..(2)..(34): Xaa is C or S

SEQ ID NO: 21341 - protein, 31 aa, Artificial Sequence
  Cyclic GFR-binding peptide
  MOD_RES (31)..(31): Xaa is C or S
PTRLSAISILYLDSANNVVLKNYQDMVVESX

SEQ ID NO: 21342 - protein, 39 aa, Artificial Sequence; identical to SEQ ID NO: 11285
  Cyclic GFR-binding peptide
  MOD_RES (3)..(4)..(36)..(38): Xaa is C or S

SEQ ID NO: 21343 - protein, 23 aa, Artificial Sequence
  Cyclic GFR-binding peptide
QDLNAISILYFIGKTPKILKKYR

SEQ ID NO: 21344 - protein, 31 aa, Artificial Sequence; identical to SEQ ID NO: 11287
  Cyclic GFR-binding peptide
  MOD_RES (28)..(30): Xaa is C or S

SEQ ID NO: 21345 - protein, 28 aa, Artificial Sequence
  Cyclic GFR-binding peptide
QALSPISILFIVGRKPKVYKQYEMIVRS

SEQ ID NO: 21346 - protein, 26 aa, Artificial Sequence
  Cyclic GFR-binding peptide
PTKLSAISVLYLDDSSNVILKNYQNM

SEQ ID NO: 21347 - protein, 32 aa, Artificial Sequence
  Cyclic GFR-binding peptide
  MOD_RES (1)..(1): Xaa is C or S
XVPTELEPLPMVYYDENEKVVEQLSNDMVVEG

SEQ ID NO: 21348 - protein, 25 aa, Artificial Sequence
  Cyclic GFR-binding peptide
EPLPIVYYDSANNVVEQLSNDMVVE

SEQ ID NO: 21349 - protein, 21 aa, Artificial Sequence
  Cyclic GFR-binding peptide
SPISILFIVGRKPKVYKQYEM

SEQ ID NO: 21350 - protein, 30 aa, Artificial Sequence
  Cyclic GFR-binding peptide
  MOD_RES (1)..(2): Xaa is C or S
XXAPTQLEPLPVVYYDDSSNVIEQLSNNMV

SEQ ID NO: 21351 - protein, 33 aa, Artificial Sequence
  Cyclic GFR-binding peptide
  MOD_RES (1)..(2): Xaa is C or S
XXAPTKLSPISVLFIDDSSNVIYKQYENMVVRS

SEQ ID NO: 21352 - protein, 34 aa, Artificial Sequence
  Cyclic GFR-binding peptide
  MOD_RES (3)..(4): Xaa is C or S
SPXXVPQDLEPLPIVYYVGRTPKVEQLSNMVVKS

SEQ ID NO: 21353 - protein, 28 aa, Artificial Sequence
  Cyclic GFR-binding peptide
  MOD_RES (1)..(2): Xaa is C or S
XXVPQALNAISILYFVGRKPKVLKKYRM

SEQ ID NO: 21354 - protein, 22 aa, Artificial Sequence
  Cyclic GFR-binding peptide
NAISMLYFDENEKVVLKKYRDM

SEQ ID NO: 21355 - protein, 37 aa, Artificial Sequence
  Cyclic GFR-binding peptide
  MOD_RES (1)..(2)..(34)..(36): Xaa is C or S
XXVPTELEPLPMVYYDEYDKVVEQLSNEMVVEGXGXR

SEQ ID NO: 21356 - protein, 37 aa, Artificial Sequence; identical to SEQ ID NO: 11302
  Cyclic GFR-binding peptide
  MOD_RES (3)..(4)..(35)..(37): Xaa is C or S

SEQ ID NO: 21357 - protein, 31 aa, Artificial Sequence
  Cyclic GFR-binding peptide
  MOD_RES (4)..(5): Xaa is C or S
PKAXXVPTELSPISMLFIDEYDKVVYKQYEE

SEQ ID NO: 21358 - protein, 30 aa, Artificial Sequence
  Cyclic GFR-binding peptide
  MOD_RES (2)..(3): Xaa is C or S
PXXAPTQLSPISVLFIDDSSNVIYKQYENM

SEQ ID NO: 21359 - protein, 29 aa, Artificial Sequence
  Cyclic GFR-binding peptide
  MOD_RES (2)..(3): Xaa is C or S
AXXVPTELNAISMLYFDEYDKVVLKKYRE

SEQ ID NO: 21360 - protein, 31 aa, Artificial Sequence
  Cyclic GFR-binding peptide
  MOD_RES (1)..(2): Xaa is C or S
XXVPTELEPLTMLYYDEYDKVVEQLSNEMVV

SEQ ID NO: 21361 - protein, 30 aa, Artificial Sequence; identical to SEQ ID NO: 11311
  Cyclic GFR-binding peptide
  MOD_RES (4)..(5): Xaa is C or S

SEQ ID NO: 21362 - protein, 35 aa, Artificial Sequence; identical to SEQ ID NO: 11312
  Cyclic GFR-binding peptide
  MOD_RES (1)..(32)..(34): Xaa is C or S

SEQ ID NO: 21363 - protein, 30 aa, Artificial Sequence
  Cyclic GFR-binding peptide
VSQDLEPLPIVYYIGKTPKIEQLSNMIVKS

SEQ ID NO: 21364 - protein, 28 aa, Artificial Sequence
  Cyclic GFR-binding peptide
ELNAISMLYFDENEKVVLKKYRDMVVEG

SEQ ID NO: 21365 - protein, 38 aa, Artificial Sequence
  Cyclic GFR-binding peptide
  MOD_RES (3)..(4)..(36)..(38): Xaa is C or S
KPXXAPTKLEPLTVLYYDDSSNVIEQLSNNMVVRSXGX

SEQ ID NO: 21366 - protein, 33 aa, Artificial Sequence; identical to SEQ ID NO: 11316
  Cyclic GFR-binding peptide
  MOD_RES (2)..(3): Xaa is C or S

SEQ ID NO: 21367 - protein, 34 aa, Artificial Sequence; identical to SEQ ID NO: 11318
  Cyclic GFR-binding peptide
  MOD_RES (4)..(5): Xaa is C or S

SEQ ID NO: 21368 - protein, 33 aa, Artificial Sequence; identical to SEQ ID NO: 11320
  Cyclic GFR-binding peptide
  MOD_RES (1)..(32): Xaa is C or S

SEQ ID NO: 21369 - protein, 32 aa, Artificial Sequence
  Cyclic GFR-binding peptide
  MOD_RES (4)..(5): Xaa is C or S
ASPXXVSQDLNAISILYFIGKTPKILKKYRMS

SEQ ID NO: 21370 - protein, 37 aa, Artificial Sequence
  Cyclic GFR-binding peptide
  MOD_RES (33)..(33): Xaa is C or S
ELRSMEGLLKPKKRVYEMIQVTINSHHVRSPQXKVSS

SEQ ID NO: 21371 - protein, 29 aa, Artificial Sequence
  Cyclic GFR-binding peptide
HEELRVTAKKLKPKKRVYEIKRVQVPRHH

SEQ ID NO: 21372 - protein, 23 aa, Artificial Sequence
  Cyclic GFR-binding peptide
RVTAKKLKPKKRVYEIKRVQVPR

SEQ ID NO: 21373 - protein, 31 aa, Artificial Sequence
  Cyclic GFR-binding peptide
  MOD_RES (30)..(30): Xaa is C or S
SMEGILKPKKRVYEMIQVTINSHHVRSPQXK

SEQ ID NO: 21374 - protein, 29 aa, Artificial Sequence
  Cyclic GFR-binding peptide
ELRSMEGLLKPKKRVYEMIQVTINSHHVR

SEQ ID NO: 21375 - protein, 36 aa, Artificial Sequence
  Cyclic GFR-binding peptide
  MOD_RES (1)..(3): Xaa is C or S
XEXQSHEELSMEGIHQGQHPKIRMIQMTINSQGTPV

SEQ ID NO: 21376 - protein, 34 aa, Artificial Sequence
  Cyclic GFR-binding peptide
  MOD_RES (34)..(34): Xaa is C or S
EELRSMEGILKPKKRVYEMIQVTINSHHVRSPQX

SEQ ID NO: 21377 - protein, 43 aa, Artificial Sequence
  Cyclic GFR-binding peptide
  MOD_RES (1)..(3)..(37): Xaa is C or S
XEXKNHQLFSMEGLHQGQHPKIRMIQMTINSEETPVXELGEDN

SEQ ID NO: 21378 - protein, 35 aa, Artificial Sequence
  Cyclic GFR-binding peptide
  MOD_RES (1)..(35): Xaa is C or S
XQSHEELSMEGIHQGQHPKIRMIQMTINSQGTPVX

SEQ ID NO: 21379 - protein, 26 aa, Artificial Sequence
  Cyclic GFR-binding peptide
LFVQVEKHQGQHPKIRVKAMKVSREE

SEQ ID NO: 21380 - protein, 31 aa, Artificial Sequence
  Cyclic GFR-binding peptide
NHQLFSMEGLHQGQHPKIRMIQMTINSEETP

SEQ ID NO: 21381 - protein, 36 aa, Artificial Sequence
  Cyclic GFR-binding peptide
  MOD_RES (30)..(30): Xaa is C or S
ELVTAKKHQGQHPKIRIKRMQVPRQGTPVXELGEDN

SEQ ID NO: 21382 - protein, 30 aa, Artificial Sequence
  Cyclic GFR-binding peptide
DELTVQVEKFIPKKRVIEVKAVKVSRLQVQ

SEQ ID NO: 21383 - protein, 32 aa, Artificial Sequence
  Cyclic GFR-binding peptide
NHQLFVTAKKHQGQHPKIRIKRMQVPREETPV

SEQ ID NO: 21384 - protein, 34 aa, Artificial Sequence
  Cyclic GFR-binding peptide
  MOD_RES (34)..(34): Xaa is C or S
EELRSMEGLLKPKKRVYEMIQVTINSHHVRSPQX

SEQ ID NO: 21385 - protein, 42 aa, Artificial Sequence
  Cyclic GFR-binding peptide
  MOD_RES (1)..(38): Xaa is C or S
XELHEELRVTAKKLKPKKRVYEIKRVQVPRHHVRSPQXKVSS

SEQ ID NO: 21386 - protein, 27 aa, Artificial Sequence
  Cyclic GFR-binding peptide
LVTAKKHQGQHPKIRIKRMQVPRQGTP

SEQ ID NO: 21387 - protein, 26 aa, Artificial Sequence
  Cyclic GFR-binding peptide
ELRSMEGILKPKKRVYEMIQVTINSH

SEQ ID NO: 21388 - protein, 31 aa, Artificial Sequence
  Cyclic GFR-binding peptide
  MOD_RES (31)..(31): Xaa is C or S
QLFSMEGIHQGQHPKIRMIQMTINSEETPVX

SEQ ID NO: 21389 - protein, 31 aa, Artificial Sequence
  Cyclic GFR-binding peptide
  MOD_RES (2)..(2): Xaa is C or S
KXALHDELTSMEGIFIPKKRVIEMIQVTINS

SEQ ID NO: 21390 - protein, 32 aa, Artificial Sequence
  Cyclic GFR-binding peptide
  MOD_RES (31)..(31): Xaa is C or S
RSMEGILKPKKRVYEMIQVTINSHHVRSPQXK

SEQ ID NO: 21391 - protein, 31 aa, Artificial Sequence
  Cyclic GFR-binding peptide
  MOD_RES (31)..(31): Xaa is C or S
TVQVEKFIPKKRVIEVKAVKVSRLQVQTPRX

SEQ ID NO: 21392 - protein, 31 aa, Artificial Sequence
  Cyclic GFR-binding peptide
  MOD_RES (30)..(30): Xaa is C or S
VQVEKFIPKKRVIEVKAVKVSRLQVQTPRXQ

SEQ ID NO: 21393 - protein, 24 aa, Artificial Sequence
  Cyclic GFR-binding peptide
LRSMEGLLKPKKRVYEMIQVTINS

SEQ ID NO: 21394 - protein, 26 aa, Artificial Sequence
  Cyclic GFR-binding peptide
VQVEKFIPKKRVIEVKAVKVSRLQVQ

SEQ ID NO: 21395 - protein, 35 aa, Artificial Sequence
  Cyclic GFR-binding peptide
  MOD_RES (2)..(2): Xaa is C or S
EXKNHQLFSMEGLHQGQHPKIRMIQMTINSEETPV

SEQ ID NO: 21396 - protein, 29 aa, Artificial Sequence
  Cyclic GFR-binding peptide
  MOD_RES (29)..(29): Xaa is C or S
FSMEGLHQGQHPKIRMIQMTINSEETPVX

SEQ ID NO: 21397 - protein, 36 aa, Artificial Sequence
  Cyclic GFR-binding peptide
  MOD_RES (1)..(3): Xaa is C or S
XKXALHDELTSMEGLFIPKKRVIEMIQVTINSLQVQ

SEQ ID NO: 21398 - protein, 39 aa, Artificial Sequence
  Cyclic GFR-binding peptide
  MOD_RES (1)..(38): Xaa is C or S
XELHEELRSMEGILKPKKRVYEMIQVTINSHHVRSPQXK

SEQ ID NO: 21399 - protein, 36 aa, Artificial Sequence
  Cyclic GFR-binding peptide
  MOD_RES (1)..(3): Xaa is C or S
XEXKNHQLFVQVEKHQGQHPKIRVKAMKVSREETPV

SEQ ID NO: 21400 - protein, 35 aa, Artificial Sequence
  Cyclic GFR-binding peptide
  MOD_RES (31)..(31): Xaa is C or S
RVTAKKLKPKKRVYEIKRVQVPRHHVRSPQXKVSS

SEQ ID NO: 21401 - protein, 34 aa, Artificial Sequence
  Cyclic GFR-binding peptide
  MOD_RES (2)..(4): Xaa is C or S
RXEXKNHQLFSMEGIHQGQHPKIRMIQMTINSEE

SEQ ID NO: 21402 - protein, 37 aa, Artificial Sequence
  Cyclic GFR-binding peptide
  MOD_RES (37)..(37): Xaa is C or S
ALHDELTVQVEKFIPKKRVIEVKAVKVSRLQVQTPRX

SEQ ID NO: 21403 - protein, 36 aa, Artificial Sequence
  Cyclic GFR-binding peptide
  MOD_RES (36)..(36): Xaa is C or S
LHEELRSMEGILKPKKRVYEMIQVTINSHHVRSPQX

SEQ ID NO: 21404 - protein, 45 aa, Artificial Sequence
  Cyclic GFR-binding peptide
  MOD_RES (2)..(4)..(41): Xaa is C or S
AXAXELHEELRSMEGILKPKKRVYEMIQVTINSHHVRSPQXKVSS

SEQ ID NO: 21405 - protein, 31 aa, Artificial Sequence
  Cyclic GFR-binding peptide
  MOD_RES (1)..(1): Xaa is C or S
XALHDELTVQVEKFIPKKRVIEVKAVKVSRL

SEQ ID NO: 21406 - protein, 34 aa, Artificial Sequence
  Cyclic GFR-binding peptide
ELHEELRVTAKKLKPKKRVYEIKRVQVPRHHVRS

SEQ ID NO: 21407 - protein, 29 aa, Artificial Sequence
  Cyclic GFR-binding peptide
EELRSMEGILKPKKRVYEMIQVTINSHHV

SEQ ID NO: 21408 - protein, 37 aa, Artificial Sequence
  Cyclic GFR-binding peptide
  MOD_RES (2)..(4): Xaa is C or S
RXEXQSHEELVTAKKHQGQHPKIRIKRMQVPRQGTPV

SEQ ID NO: 21409 - protein, 35 aa, Artificial Sequence
  Cyclic GFR-binding peptide
  MOD_RES (35)..(35): Xaa is C or S
HDELTSMEGIFIPKKRVIEMIQVTINSLQVQTPRX

SEQ ID NO: 21410 - protein, 27 aa, Artificial Sequence
  Cyclic GFR-binding peptide
FSMEGIHQGQHPKIRMIQMTINSEETP

SEQ ID NO: 21411 - protein, 34 aa, Artificial Sequence
  Cyclic GFR-binding peptide
  MOD_RES (2)..(2): Xaa is C or S
KXALHDELTVQVEKFIPKKRVIEVKAVKVSRLQV

SEQ ID NO: 21412 - protein, 34 aa, Artificial Sequence
  Cyclic GFR-binding peptide
  MOD_RES (34)..(34): Xaa is C or S
DELTVQVEKFIPKKRVIEVKAVKVSRLQVQTPRX

SEQ ID NO: 21413 - protein, 33 aa, Artificial Sequence
  Cyclic GFR-binding peptide
KNHQLFSMEGLHQGQHPKIRMIQMTINSEETPV

SEQ ID NO: 21414 - protein, 44 aa, Artificial Sequence
  Cyclic GFR-binding peptide
  MOD_RES (2)..(4)..(41): Xaa is C or S
EXKXALHDELTSMEGIFIPKKRVIEMIQVTINSLQVQTPRXQVN

SEQ ID NO: 21415 - protein, 34 aa, Artificial Sequence
  Cyclic GFR-binding peptide
  MOD_RES (1)..(3): Xaa is C or S
XEXKNHQLFVQVEKHQGQHPKIRVKAMKVSREET

SEQ ID NO: 21416 - protein, 32 aa, Artificial Sequence
  Cyclic GFR-binding peptide
  MOD_RES (32)..(32): Xaa is C or S
HQLFVQVEKHQGQHPKIRVKAMKVSREETPVX

SEQ ID NO: 21417 - protein, 30 aa, Artificial Sequence
  Cyclic GFR-binding peptide
ALHDELTVQVEKFIPKKRVIEVKAVKVSRL

SEQ ID NO: 21418 - protein, 38 aa, Artificial Sequence
  Cyclic GFR-binding peptide
  MOD_RES (2)..(2): Xaa is C or S
AXELHEELRVTAKKLKPKKRVYEIKRVQVPRHHVRSPQ

SEQ ID NO: 21419 - protein, 38 aa, Artificial Sequence
  Cyclic GFR-binding peptide
  MOD_RES (2)..(36): Xaa is C or S
EXQSHEELVQVEKHQGQHPKIRVKAMKVSRQGTPVXEL

SEQ ID NO: 21420 - protein, 28 aa, Artificial Sequence
  Cyclic GFR-binding peptide
LRVTAKKLKPKKRVYEIKRVQVPRHHVR

SEQ ID NO: 21421 - protein, 40 aa, Artificial Sequence
  Cyclic GFR-binding peptide
  MOD_RES (1)..(35): Xaa is C or S
XQSHEELSMEGIHQGQHPKIRMIQMTINSQGTPVXELGED

SEQ ID NO: 21422 - protein, 28 aa, Artificial Sequence
  Cyclic GFR-binding peptide
RSMEGLLKPKKRVYEMIQVTINSHHVRS

SEQ ID NO: 21423 - protein, 27 aa, Artificial Sequence
  Cyclic GFR-binding peptide
RSMEGLLKPKKRVYEMIQVTINSHHVR

SEQ ID NO: 21424 - protein, 37 aa, Artificial Sequence
  Cyclic GFR-binding peptide
  MOD_RES (35)..(35): Xaa is C or S
HDELTSMEGIFIPKKRVIEMIQVTINSLQVQTPRXQV

SEQ ID NO: 21425 - protein, 33 aa, Artificial Sequence
  Cyclic GFR-binding peptide
  MOD_RES (32)..(32): Xaa is C or S
LRVTAKKLKPKKRVYEIKRVQVPRHHVRSPQXK

SEQ ID NO: 21426 - protein, 42 aa, Artificial Sequence
  Cyclic GFR-binding peptide
  MOD_RES (1)..(3)..(37): Xaa is C or S
XEXKNHQLFVTAKKHQGQHPKIRIKRMQVPREETPVXELGED

SEQ ID NO: 21427 - protein, 41 aa, Artificial Sequence
  Cyclic GFR-binding peptide
  MOD_RES (1)..(38): Xaa is C or S
XELHEELRSMEGILKPKKRVYEMIQVTINSHHVRSPQXKVS

SEQ ID NO: 21428 - protein, 38 aa, Artificial Sequence
  Cyclic GFR-binding peptide
  MOD_RES (35)..(35): Xaa is C or S
HEELRVTAKKLKPKKRVYEIKRVQVPRHHVRSPQXKVS

SEQ ID NO: 21429 - protein, 37 aa, Artificial Sequence
  Cyclic GFR-binding peptide
  MOD_RES (33)..(33): Xaa is C or S
NHQLFVQVEKHQGQHPKIRVKAMKVSREETPVXELGE

SEQ ID NO: 21430 - protein, 38 aa, Artificial Sequence
  Cyclic GFR-binding peptide
  MOD_RES (2)..(4)..(38): Xaa is C or S
RXEXQSHEELVTAKKHQGQHPKIRIKRMQVPRQGTPVX

SEQ ID NO: 21431 - protein, 29 aa, Artificial Sequence
  Cyclic GFR-binding peptide
LRSMEGLLKPKKRVYEMIQVTINSHHVRS

SEQ ID NO: 21432 - protein, 30 aa, Artificial Sequence
  Cyclic GFR-binding peptide
  MOD_RES (29)..(29): Xaa is C or S
FVQVEKHQGQHPKIRVKAMKVSREETPVXE

SEQ ID NO: 21433 - protein, 28 aa, Artificial Sequence
  Cyclic GFR-binding peptide
ELSMEGIHQGQHPKIRMIQMTINSQGTP

SEQ ID NO: 21434 - protein, 35 aa, Artificial Sequence
  Cyclic GFR-binding peptide
  MOD_RES (35)..(35): Xaa is C or S
HEELRVTAKKLKPKKRVYEIKRVQVPRHHVRSPQX

SEQ ID NO: 21435 - protein, 39 aa, Artificial Sequence
  Cyclic GFR-binding peptide
  MOD_RES (2)..(4)..(38): Xaa is C or S
RXEXQSHEELSMEGIHQGQHPKIRMIQMTINSQGTPVXE

SEQ ID NO: 21436 - protein, 36 aa, Artificial Sequence
  Cyclic GFR-binding peptide
  MOD_RES (34)..(34): Xaa is C or S
DELTVQVEKFIPKKRVIEVKAVKVSRLQVQTPRXQV

SEQ ID NO: 21437 - protein, 26 aa, Artificial Sequence
  Cyclic GFR-binding peptide
LSMEGIHQGQHPKIRMIQMTINSQGT

SEQ ID NO: 21438 - protein, 35 aa, Artificial Sequence
  Cyclic GFR-binding peptide
  MOD_RES (33)..(33): Xaa is C or S
NHQLFVQVEKHQGQHPKIRVKAMKVSREETPVXEL

SEQ ID NO: 21439 - protein, 32 aa, Artificial Sequence
  Cyclic GFR-binding peptide
ELTSMEGIFIPKKRVIEMIQVTINSLQVQTPR

SEQ ID NO: 21440 - protein, 40 aa, Artificial Sequence
  Cyclic GFR-binding peptide
  MOD_RES (37)..(37): Xaa is C or S
ALHDELTSMEGLFIPKKRVIEMIQVTINSLQVQTPRXQVN

SEQ ID NO: 21441 - protein, 38 aa, Artificial Sequence
  Cyclic GFR-binding peptide
  MOD_RES (2)..(4)..(38): Xaa is C or S
RXEXQSHEELVQVEKHQGQHPKIRVKAMKVSRQGTPVX

SEQ ID NO: 21442 - protein, 37 aa, Artificial Sequence
  Cyclic GFR-binding peptide
  MOD_RES (31)..(31): Xaa is C or S
QLFSMEGLHQGQHPKIRMIQMTINSEETPVXELGEDN

SEQ ID NO: 21443 - protein, 34 aa, Artificial Sequence
  Cyclic GFR-binding peptide
  MOD_RES (1)..(3): Xaa is C or S
XEXQSHEELSMEGIHQGQHPKIRMIQMTINSQGT

SEQ ID NO: 21444 - protein, 31 aa, Artificial Sequence
  Cyclic GFR-binding peptide
LHEELRVTAKKLKPKKRVYEIKRVQVPRHHV

SEQ ID NO: 21445 - protein, 34 aa, Artificial Sequence
  Cyclic GFR-binding peptide
  MOD_RES (1)..(1): Xaa is C or S
XELHEELRVTAKKLKPKKRVYEIKRVQVPRHHVR

SEQ ID NO: 21446 - protein, 29 aa, Artificial Sequence
  Cyclic GFR-binding peptide
EELRSMEGLLKPKKRVYEMIQVTINSHHV

SEQ ID NO: 21447 - protein, 26 aa, Artificial Sequence
  Cyclic GFR-binding peptide
SMEGIFIPKKRVIEMIQVTINSLQVQ

SEQ ID NO: 21448 - protein, 39 aa, Artificial Sequence
  Cyclic GFR-binding peptide
  MOD_RES (1)..(3)..(37): Xaa is C or S
XEXKNHQLFSMEGIHQGQHPKIRMIQMTINSEETPVXEL

SEQ ID NO: 21449 - protein, 25 aa, Artificial Sequence
  Cyclic GFR-binding peptide
EELVTAKKHQGQHPKIRIKRMQVPR

SEQ ID NO: 21450 - protein, 31 aa, Artificial Sequence
  Cyclic GFR-binding peptide
  MOD_RES (30)..(30): Xaa is C or S
SMEGIFIPKKRVIEMIQVTINSLQVQTPRXQ

SEQ ID NO: 21451 - protein, 45 aa, Artificial Sequence
  Cyclic GFR-binding peptide
  MOD_RES (2)..(4)..(41): Xaa is C or S
EXKXALHDELTSMEGLFIPKKRVIEMIQVTINSLQVQTPRXQVNR

SEQ ID NO: 21452 - protein, 34 aa, Artificial Sequence
  Cyclic GFR-binding peptide
  MOD_RES (30)..(30): Xaa is C or S
SMEGLLKPKKRVYEMIQVTINSHHVRSPQXKVSS

SEQ ID NO: 21453 - protein, 39 aa, Artificial Sequence
  Cyclic GFR-binding peptide
  MOD_RES (34)..(34): Xaa is C or S
KNHQLFSMEGIHQGQHPKIRMIQMTINSEETPVXELGED

SEQ ID NO: 21454 - protein, 39 aa, Artificial Sequence
  Cyclic GFR-binding peptide
  MOD_RES (1)..(35): Xaa is C or S
XKNHQLFSMEGLHQGQHPKIRMIQMTINSEETPVXELGE

SEQ ID NO: 21455 - protein, 29 aa, Artificial Sequence
  Cyclic GFR-binding peptide
ALHDELTVQVEKFIPKKRVIEVKAVKVSR

SEQ ID NO: 21456 - protein, 42 aa, Artificial Sequence
  Cyclic GFR-binding peptide
  MOD_RES (1)..(38): Xaa is C or S
XALHDELTSMEGIFIPKKRVIEMIQVTINSLQVQTPRXQVNR

SEQ ID NO: 21457 - protein, 31 aa, Artificial Sequence
  Cyclic GFR-binding peptide
  MOD_RES (30)..(30): Xaa is C or S
LFVQVEKHQGQHPKIRVKAMKVSREETPVXE

SEQ ID NO: 21458 - protein, 38 aa, Artificial Sequence
  Cyclic GFR-binding peptide
  MOD_RES (34)..(34): Xaa is C or S
EELRSMEGILKPKKRVYEMIQVTINSHHVRSPQXKVSS

SEQ ID NO: 21459 - protein, 27 aa, Artificial Sequence
  Cyclic GFR-binding peptide
EELVQVEKHQGQHPKIRVKAMKVSRQG

SEQ ID NO: 21460 - protein, 31 aa, Artificial Sequence
  Cyclic GFR-binding peptide
HDELTSMEGIFIPKKRVIEMIQVTINSLQVQ

SEQ ID NO: 21461 - protein, 29 aa, Artificial Sequence
  Cyclic GFR-binding peptide
SHEELVQVEKHQGQHPKIRVKAMKVSRQG

SEQ ID NO: 21462 - protein, 31 aa, Artificial Sequence
  Cyclic GFR-binding peptide
  MOD_RES (1)..(1): Xaa is C or S
XALHDELTSMEGLFIPKKRVIEMIQVTINSL

SEQ ID NO: 21463 - protein, 32 aa, Artificial Sequence
  Cyclic GFR-binding peptide
  MOD_RES (1)..(3): Xaa is C or S
XEXKNHQLFVTAKKHQGQHPKIRIKRMQVPRE

SEQ ID NO: 21464 - protein, 27 aa, Artificial Sequence
  Cyclic GFR-binding peptide
SMEGIFIPKKRVIEMIQVTINSLQVQT

SEQ ID NO: 21465 - protein, 33 aa, Artificial Sequence
  Cyclic GFR-binding peptide
QSHEELVTAKKHQGQHPKIRIKRMQVPRQGTPV

SEQ ID NO: 21466 - protein, 34 aa, Artificial Sequence
  Cyclic GFR-binding peptide
  MOD_RES (33)..(33): Xaa is C or S
ELRSMEGLLKPKKRVYEMIQVTINSHHVRSPQXK

SEQ ID NO: 21467 - protein, 36 aa, Artificial Sequence
  Cyclic GFR-binding peptide
  MOD_RES (32)..(32): Xaa is C or S
LTVQVEKFIPKKRVIEVKAVKVSRLQVQTPRXQVNR

SEQ ID NO: 21468 - protein, 38 aa, Artificial Sequence
  Cyclic GFR-binding peptide
  MOD_RES (2)..(36): Xaa is C or S
EXKNHQLFSMEGIHQGQHPKIRMIQMTINSEETPVXEL

SEQ ID NO: 21469 - protein, 40 aa, Artificial Sequence
  Cyclic GFR-binding peptide
  MOD_RES (36)..(36): Xaa is C or S
LHDELTSMEGLFIPKKRVIEMIQVTINSLQVQTPRXQVNR

SEQ ID NO: 21470 - protein, 35 aa, Artificial Sequence
  Cyclic GFR-binding peptide
LHDELTVQVEKFIPKKRVIEVKAVKVSRLQVQTPR

SEQ ID NO: 21471 - protein, 39 aa, Artificial Sequence
  Cyclic GFR-binding peptide
  MOD_RES (1)..(3)..(37): Xaa is C or S
XEXQSHEELVTAKKHQGQHPKIRIKRMQVPRQGTPVXEL

SEQ ID NO: 21472 - protein, 28 aa, Artificial Sequence
  Cyclic GFR-binding peptide
  MOD_RES (28)..(28): Xaa is C or S
SMEGIHQGQHPKIRMIQMTINSEETPVX

SEQ ID NO: 21473 - protein, 41 aa, Artificial Sequence
  Cyclic GFR-binding peptide
  MOD_RES (37)..(37): Xaa is C or S
ALHDELTVQVEKFIPKKRVIEVKAVKVSRLQVQTPRXQVNR

SEQ ID NO: 21474 - protein, 26 aa, Artificial Sequence
  Cyclic GFR-binding peptide
SMEGILKPKKRVYEMIQVTINSHHVR

SEQ ID NO: 21475 - protein, 35 aa, Artificial Sequence
  Cyclic GFR-binding peptide
  MOD_RES (2)..(2): Xaa is C or S
EXKNHQLFVQVEKHQGQHPKIRVKAMKVSREETPV

SEQ ID NO: 21476 - protein, 32 aa, Artificial Sequence
  Cyclic GFR-binding peptide
  MOD_RES (31)..(31): Xaa is C or S
QLFSMEGLHQGQHPKIRMIQMTINSEETPVXE

SEQ ID NO: 21477 - protein, 35 aa, Artificial Sequence
  Cyclic GFR-binding peptide
  MOD_RES (33)..(33): Xaa is C or S
ELTSMEGLFIPKKRVIEMIQVTINSLQVQTPRXQV

SEQ ID NO: 21478 - protein, 37 aa, Artificial Sequence
  Cyclic GFR-binding peptide
  MOD_RES (31)..(31): Xaa is C or S
QLFSMEGIHQGQHPKIRMIQMTINSEETPVXELGEDN

SEQ ID NO: 21479 - protein, 27 aa, Artificial Sequence
  Cyclic GFR-binding peptide
LFVQVEKHQGQHPKIRVKAMKVSREET

SEQ ID NO: 21480 - protein, 29 aa, Artificial Sequence
  Cyclic GFR-binding peptide
  MOD_RES (28)..(28): Xaa is C or S
VQVEKHQGQHPKIRVKAMKVSRQGTPVXE

SEQ ID NO: 21481 - protein, 27 aa, Artificial Sequence
  Cyclic GFR-binding peptide
NHQLFVTAKKHQGQHPKIRIKRMQVPR

SEQ ID NO: 21482 - protein, 32 aa, Artificial Sequence
  Cyclic GFR-binding peptide
LHDELTVQVEKFIPKKRVIEVKAVKVSRLQVQ

SEQ ID NO: 21483 - protein, 31 aa, Artificial Sequence
  Cyclic GFR-binding peptide
  MOD_RES (2)..(2): Xaa is C or S
EXKNHQLFSMEGIHQGQHPKIRMIQMTINSE

SEQ ID NO: 21484 - protein, 38 aa, Artificial Sequence
  Cyclic GFR-binding peptide
  MOD_RES (34)..(34): Xaa is C or S
EELRSMEGLLKPKKRVYEMIQVTINSHHVRSPQXKVSS

SEQ ID NO: 21485 - protein, 24 aa, Artificial Sequence
  Cyclic GFR-binding peptide
LVTAKKHQGQHPKIRIKRMQVPRQ

SEQ ID NO: 21486 - protein, 32 aa, Artificial Sequence
  Cyclic GFR-binding peptide
  MOD_RES (28)..(28): Xaa is C or S
VQVEKHQGQHPKIRVKAMKVSRQGTPVXELGE

SEQ ID NO: 21487 - protein, 29 aa, Artificial Sequence
  Cyclic GFR-binding peptide
ELHEELRSMEGILKPKKRVYEMIQVTINS

SEQ ID NO: 21488 - protein, 41 aa, Artificial Sequence
  Cyclic GFR-binding peptide
  MOD_RES (1)..(38): Xaa is C or S
XALHDELTSMEGIFIPKKRVIEMIQVTINSLQVQTPRXQVN

SEQ ID NO: 21489 - protein, 34 aa, Artificial Sequence
  Cyclic GFR-binding peptide
  MOD_RES (31)..(31): Xaa is C or S
EELVTAKKHQGQHPKIRIKRMQVPRQGTPVXELG

SEQ ID NO: 21490 - protein, 32 aa, Artificial Sequence
  Cyclic GFR-binding peptide
  MOD_RES (31)..(31): Xaa is C or S
QLFVTAKKHQGQHPKIRIKRMQVPREETPVXE

SEQ ID NO: 21491 - protein, 32 aa, Artificial Sequence
  Cyclic GFR-binding peptide
  MOD_RES (32)..(32): Xaa is C or S
HEELSMEGIHQGQHPKIRMIQMTINSQGTPVX

SEQ ID NO: 21492 - protein, 36 aa, Artificial Sequence
  Cyclic GFR-binding peptide
  MOD_RES (1)..(35): Xaa is C or S
XKNHQLFVTAKKHQGQHPKIRIKRMQVPREETPVXE

SEQ ID NO: 21493 - protein, 37 aa, Artificial Sequence
  Cyclic GFR-binding peptide
  MOD_RES (33)..(33): Xaa is C or S
ELRSMEGILKPKKRVYEMIQVTINSHHVRSPQXKVSS

SEQ ID NO: 21494 - protein, 37 aa, Artificial Sequence
  Cyclic GFR-binding peptide
  MOD_RES (37)..(37): Xaa is C or S
ELHEELRVTAKKLKPKKRVYEIKRVQVPRHHVRSPQX

SEQ ID NO: 21495 - protein, 40 aa, Artificial Sequence
  Cyclic GFR-binding peptide
  MOD_RES (1)..(38): Xaa is C or S
XALHDELTVQVEKFIPKKRVIEVKAVKVSRLQVQTPRXQV

SEQ ID NO: 21496 - protein, 43 aa, Artificial Sequence
  Cyclic GFR-binding peptide
  MOD_RES (2)..(4)..(38): Xaa is C or S
RXEXKNHQLFVTAKKHQGQHPKIRIKRMQVPREETPVXELGED

SEQ ID NO: 21497 - protein, 27 aa, Artificial Sequence
  Cyclic GFR-binding peptide
SHEELVTAKKHQGQHPKIRIKRMQVPR

SEQ ID NO: 21498 - protein, 40 aa, Artificial Sequence
  Cyclic GFR-binding peptide
  MOD_RES (2)..(39): Xaa is C or S
KXALHDELTVQVEKFIPKKRVIEVKAVKVSRLQVQTPRXQ

SEQ ID NO: 21499 - protein, 35 aa, Artificial Sequence
  Cyclic GFR-binding peptide
  MOD_RES (34)..(34): Xaa is C or S
KNHQLFVQVEKHQGQHPKIRVKAMKVSREETPVXE

SEQ ID NO: 21500 - protein, 25 aa, Artificial Sequence
  Cyclic GFR-binding peptide
SMEGLFIPKKRVIEMIQVTINSLQV

SEQ ID NO: 21501 - protein, 37 aa, Artificial Sequence
  Cyclic GFR-binding peptide
  MOD_RES (37)..(37): Xaa is C or S
ELHEELRSMEGLLKPKKRVYEMIQVTINSHHVRSPQX

SEQ ID NO: 21502 - protein, 34 aa, Artificial Sequence
  Cyclic GFR-binding peptide
  MOD_RES (28)..(28): Xaa is C or S
VTAKKHQGQHPKIRIKRMQVPREETPVXELGEDN

SEQ ID NO: 21503 - protein, 36 aa, Artificial Sequence
  Cyclic GFR-binding peptide
  MOD_RES (1)..(3): Xaa is C or S
XAXELHEELRSMEGLLKPKKRVYEMIQVTINSHHVR

SEQ ID NO: 21504 - protein, 31 aa, Artificial Sequence
  Cyclic GFR-binding peptide
LHDELTVQVEKFIPKKRVIEVKAVKVSRLQV

SEQ ID NO: 21505 - protein, 35 aa, Artificial Sequence
  Cyclic GFR-binding peptide
LHEELRVTAKKLKPKKRVYEIKRVQVPRHHVRSPQ

SEQ ID NO: 21506 - protein, 32 aa, Artificial Sequence
  Cyclic GFR-binding peptide
  MOD_RES (31)..(31): Xaa is C or S
QLFSMEGIHQGQHPKIRMIQMTINSEETPVXE

SEQ ID NO: 21507 - protein, 36 aa, Artificial Sequence
  Cyclic GFR-binding peptide
  MOD_RES (1)..(35): Xaa is C or S
XKNHQLFSMEGLHQGQHPKIRMIQMTINSEETPVXE

SEQ ID NO: 21508 - protein, 35 aa, Artificial Sequence
  Cyclic GFR-binding peptide
  MOD_RES (2)..(4): Xaa is C or S
RXEXQSHEELVQVEKHQGQHPKIRVKAMKVSRQGT

SEQ ID NO: 21509 - protein, 27 aa, Artificial Sequence
  Cyclic GFR-binding peptide
SHEELSMEGIHQGQHPKIRMIQMTINS

SEQ ID NO: 21510 - protein, 29 aa, Artificial Sequence
  Cyclic GFR-binding peptide
ELRVTAKKLKPKKRVYEIKRVQVPRHHVR

SEQ ID NO: 21511 - protein, 30 aa, Artificial Sequence
  Cyclic GFR-binding peptide
KNHQLFSMEGLHQGQHPKIRMIQMTINSEE

SEQ ID NO: 21512 - protein, 24 aa, Artificial Sequence
  Cyclic GFR-binding peptide
LRVTAKKLKPKKRVYEIKRVQVPR

SEQ ID NO: 21513 - protein, 26 aa, Artificial Sequence
  Cyclic GFR-binding peptide
VTAKKHQGQHPKIRIKRMQVPREETP

SEQ ID NO: 21514 - protein, 33 aa, Artificial Sequence
  Cyclic GFR-binding peptide
  MOD_RES (1)..(3): Xaa is C or S
XAXELHEELRVTAKKLKPKKRVYEIKRVQVPRH

SEQ ID NO: 21515 - protein, 29 aa, Artificial Sequence
  Cyclic GFR-binding peptide
QSHEELVQVEKHQGQHPKIRVKAMKVSRQ

SEQ ID NO: 21516 - protein, 44 aa, Artificial Sequence
  Cyclic GFR-binding peptide
  MOD_RES (2)..(4)..(41): Xaa is C or S
AXAXELHEELRSMEGILKPKKRVYEMIQVTINSHHVRSPQXKVS

SEQ ID NO: 21517 - protein, 27 aa, Artificial Sequence
  Cyclic GFR-binding peptide
ELTVQVEKFIPKKRVIEVKAVKVSRLQ

SEQ ID NO: 21518 - protein, 43 aa, Artificial Sequence
  Cyclic GFR-binding peptide
  MOD_RES (2)..(39): Xaa is C or S
AXELHEELRSMEGILKPKKRVYEMIQVTINSHHVRSPQXKVSS

SEQ ID NO: 21519 - protein, 40 aa, Artificial Sequence
  Cyclic GFR-binding peptide
  MOD_RES (34)..(34): Xaa is C or S
KNHQLFSMEGIHQGQHPKIRMIQMTINSEETPVXELGEDN

SEQ ID NO: 21520 - protein, 30 aa, Artificial Sequence
  Cyclic GFR-binding peptide
TSMEGLFIPKKRVIEMIQVTINSLQVQTPR

SEQ ID NO: 21521 - protein, 35 aa, Artificial Sequence
  Cyclic GFR-binding peptide
  MOD_RES (32)..(32): Xaa is C or S
HEELVTAKKHQGQHPKIRIKRMQVPRQGTPVXELG

SEQ ID NO: 21522 - protein, 38 aa, Artificial Sequence
  Cyclic GFR-binding peptide
  MOD_RES (34)..(34): Xaa is C or S
KNHQLFVQVEKHQGQHPKIRVKAMKVSREETPVXELGE

SEQ ID NO: 21523 - protein, 25 aa, Artificial Sequence
  Cyclic GFR-binding peptide
EELSMEGIHQGQHPKIRMIQMTINS

SEQ ID NO: 21524 - protein, 31 aa, Artificial Sequence
  Cyclic GFR-binding peptide
LTVQVEKFIPKKRVIEVKAVKVSRLQVQTPR

SEQ ID NO: 21525 - protein, 31 aa, Artificial Sequence
  Cyclic GFR-binding peptide
  MOD_RES (1)..(1): Xaa is C or S
XKNHQLFVQVEKHQGQHPKIRVKAMKVSREE

SEQ ID NO: 21526 - protein, 29 aa, Artificial Sequence
  Cyclic GFR-binding peptide
LTVQVEKFIPKKRVIEVKAVKVSRLQVQT

SEQ ID NO: 21527 - protein, 35 aa, Artificial Sequence
  Cyclic GFR-binding peptide
ELHEELRSMEGILKPKKRVYEMIQVTINSHHVRSP

SEQ ID NO: 21528 - protein, 32 aa, Artificial Sequence
  Cyclic GFR-binding peptide
  MOD_RES (32)..(32): Xaa is C or S
LTSMEGLFIPKKRVIEMIQVTINSLQVQTPRX

SEQ ID NO: 21529 - protein, 28 aa, Artificial Sequence
  Cyclic GFR-binding peptide
HEELRSMEGLLKPKKRVYEMIQVTINSH

SEQ ID NO: 21530 - protein, 31 aa, Artificial Sequence
  Cyclic GFR-binding peptide
  MOD_RES (2)..(2): Xaa is C or S
AXELHEELRVTAKKLKPKKRVYEIKRVQVPR

SEQ ID NO: 21531 - protein, 35 aa, Artificial Sequence
  Cyclic GFR-binding peptide
  MOD_RES (30)..(30): Xaa is C or S
LFVTAKKHQGQHPKIRIKRMQVPREETPVXELGED

SEQ ID NO: 21532 - protein, 31 aa, Artificial Sequence
  Cyclic GFR-binding peptide
  MOD_RES (2)..(2): Xaa is C or S
KXALHDELTSMEGLFIPKKRVIEMIQVTINS

SEQ ID NO: 21533 - protein, 32 aa, Artificial Sequence
  Cyclic GFR-binding peptide
  MOD_RES (32)..(32): Xaa is C or S
LRSMEGILKPKKRVYEMIQVTINSHHVRSPQX

SEQ ID NO: 21534 - protein, 38 aa, Artificial Sequence
  Cyclic GFR-binding peptide
  MOD_RES (1)..(35): Xaa is C or S
XKNHQLFVTAKKHQGQHPKIRIKRMQVPREETPVXELG

SEQ ID NO: 21535 - protein, 26 aa, Artificial Sequence
  Cyclic GFR-binding peptide
EELRSMEGLLKPKKRVYEMIQVTINS

SEQ ID NO: 21536 - protein, 37 aa, Artificial Sequence
  Cyclic GFR-binding peptide
  MOD_RES (35)..(35): Xaa is C or S
HEELRVTAKKLKPKKRVYEIKRVQVPRHHVRSPQXKV

SEQ ID NO: 21537 - protein, 26 aa, Artificial Sequence
  Cyclic GFR-binding peptide
RSMEGLLKPKKRVYEMIQVTINSHHV

SEQ ID NO: 21538 - protein, 33 aa, Artificial Sequence
  Cyclic GFR-binding peptide
  MOD_RES (31)..(31): Xaa is C or S
EELVQVEKHQGQHPKIRVKAMKVSRQGTPVXEL

SEQ ID NO: 21539 - protein, 29 aa, Artificial Sequence
  Cyclic GFR-binding peptide
  MOD_RES (28)..(28): Xaa is C or S
SMEGIHQGQHPKIRMIQMTINSQGTPVXE

SEQ ID NO: 21540 - protein, 30 aa, Artificial Sequence
  Cyclic GFR-binding peptide
  MOD_RES (2)..(2): Xaa is C or S
EXQSHEELSMEGIHQGQHPKIRMIQMTINS

SEQ ID NO: 21541 - protein, 24 aa, Artificial Sequence
  Cyclic GFR-binding peptide
TSMEGIFIPKKRVIEMIQVTINSL

SEQ ID NO: 21542 - protein, 34 aa, Artificial Sequence
  Cyclic GFR-binding peptide
HEELRSMEGILKPKKRVYEMIQVTINSHHVRSPQ

SEQ ID NO: 21543 - protein, 24 aa, Artificial Sequence
  Cyclic GFR-binding peptide
TVQVEKFIPKKRVIEVKAVKVSRL

SEQ ID NO: 21544 - protein, 23 aa, Artificial Sequence
  Cyclic GFR-binding peptide
FSMEGLHQGQHPKIRMIQMTINS

SEQ ID NO: 21545 - protein, 29 aa, Artificial Sequence
  Cyclic GFR-binding peptide
  MOD_RES (1)..(1): Xaa is C or S
XQSHEELSMEGIHQGQHPKIRMIQMTINS

SEQ ID NO: 21546 - protein, 30 aa, Artificial Sequence
  Cyclic GFR-binding peptide
  MOD_RES (1)..(1): Xaa is C or S
XKNHQLFVQVEKHQGQHPKIRVKAMKVSRE

SEQ ID NO: 21547 - protein, 39 aa, Artificial Sequence
  Cyclic GFR-binding peptide
  MOD_RES (2)..(36): Xaa is C or S
EXQSHEELVTAKKHQGQHPKIRIKRMQVPRQGTPVXELG

SEQ ID NO: 21548 - protein, 31 aa, Artificial Sequence
  Cyclic GFR-binding peptide
  MOD_RES (31)..(31): Xaa is C or S
QLFSMEGLHQGQHPKIRMIQMTINSEETPVX

SEQ ID NO: 21549 - protein, 32 aa, Artificial Sequence
  Cyclic GFR-binding peptide
  MOD_RES (28)..(28): Xaa is C or S
SMEGIHQGQHPKIRMIQMTINSQGTPVXELGE

SEQ ID NO: 21550 - protein, 36 aa, Artificial Sequence
  Cyclic GFR-binding peptide
  MOD_RES (32)..(32): Xaa is C or S
HEELSMEGIHQGQHPKIRMIQMTINSQGTPVXELGE

SEQ ID NO: 21551 - protein, 40 aa, Artificial Sequence
  Cyclic GFR-binding peptide
  MOD_RES (34)..(34): Xaa is C or S
QSHEELSMEGIHQGQHPKIRMIQMTINSQGTPVXELGEDN

SEQ ID NO: 21552 - protein, 34 aa, Artificial Sequence
  Cyclic GFR-binding peptide
  MOD_RES (2)..(2): Xaa is C or S
EXQSHEELSMEGIHQGQHPKIRMIQMTINSQGTP

SEQ ID NO: 21553 - protein, 30 aa, Artificial Sequence
  Cyclic GFR-binding peptide
LHDELTVQVEKFIPKKRVIEVKAVKVSRLQ

SEQ ID NO: 21554 - protein, 43 aa, Artificial Sequence
  Cyclic GFR-binding peptide
  MOD_RES (2)..(39): Xaa is C or S
KXALHDELTVQVEKFIPKKRVIEVKAVKVSRLQVQTPRXQVNR

SEQ ID NO: 21555 - protein, 27 aa, Artificial Sequence
  Cyclic GFR-binding peptide
HEELSMEGIHQGQHPKIRMIQMTINSQ

SEQ ID NO: 21556 - protein, 39 aa, Artificial Sequence
  Cyclic GFR-binding peptide
  MOD_RES (1)..(35): Xaa is C or S
XQSHEELVQVEKHQGQHPKIRVKAMKVSRQGTPVXELGE

SEQ ID NO: 21557 - protein, 25 aa, Artificial Sequence
  Cyclic GFR-binding peptide
LFSMEGIHQGQHPKIRMIQMTINSE

SEQ ID NO: 21558 - protein, 22 aa, Artificial Sequence
  Cyclic GFR-binding peptide
VTAKKLKPKKRVYEIKRVQVPR

SEQ ID NO: 21559 - protein, 34 aa, Artificial Sequence
  Cyclic GFR-binding peptide
  MOD_RES (32)..(32): Xaa is C or S
LTSMEGIFIPKKRVIEMIQVTINSLQVQTPRXQV

SEQ ID NO: 21560 - protein, 38 aa, Artificial Sequence
  Cyclic GFR-binding peptide
  MOD_RES (1)..(38): Xaa is C or S
XELHEELRVTAKKLKPKKRVYEIKRVQVPRHHVRSPQX

SEQ ID NO: 21561 - protein, 32 aa, Artificial Sequence
  Cyclic GFR-binding peptide
  MOD_RES (2)..(2): Xaa is C or S
AXELHEELRSMEGLLKPKKRVYEMIQVTINSH

SEQ ID NO: 21562 - protein, 37 aa, Artificial Sequence
  Cyclic GFR-binding peptide
  MOD_RES (34)..(34): Xaa is C or S
QSHEELSMEGIHQGQHPKIRMIQMTINSQGTPVXELG

SEQ ID NO: 21563 - protein, 29 aa, Artificial Sequence
  Cyclic GFR-binding peptide
LRVTAKKLKPKKRVYEIKRVQVPRHHVRS

SEQ ID NO: 21564 - protein, 32 aa, Artificial Sequence
  Cyclic GFR-binding peptide
  MOD_RES (32)..(32): Xaa is C or S
HQLFVTAKKHQGQHPKIRIKRMQVPREETPVX

SEQ ID NO: 21565 - protein, 35 aa, Artificial Sequence
  Cyclic GFR-binding peptide
  MOD_RES (1)..(3): Xaa is C or S
XAXELHEELRSMEGLLKPKKRVYEMIQVTINSHHV

SEQ ID NO: 21566 - protein, 27 aa, Artificial Sequence
  Cyclic GFR-binding peptide
DELTSMEGLFIPKKRVIEMIQVTINSL

SEQ ID NO: 21567 - protein, 35 aa, Artificial Sequence
  Cyclic GFR-binding peptide
  MOD_RES (1)..(1): Xaa is C or S
XALHDELTSMEGLFIPKKRVIEMIQVTINSLQVQT

SEQ ID NO: 21568 - protein, 33 aa, Artificial Sequence
  Cyclic GFR-binding peptide
  MOD_RES (1)..(3): Xaa is C or S
XEXKNHQLFSMEGIHQGQHPKIRMIQMTINSEE

SEQ ID NO: 21569 - protein, 28 aa, Artificial Sequence
  Cyclic GFR-binding peptide
QSHEELSMEGIHQGQHPKIRMIQMTINS

SEQ ID NO: 21570 - protein, 32 aa, Artificial Sequence
  Cyclic GFR-binding peptide
  MOD_RES (2)..(4): Xaa is C or S
RXEXKNHQLFVQVEKHQGQHPKIRVKAMKVSR

SEQ ID NO: 21571 - protein, 32 aa, Artificial Sequence
  Cyclic GFR-binding peptide
ALHDELTSMEGIFIPKKRVIEMIQVTINSLQV

SEQ ID NO: 21572 - protein, 33 aa, Artificial Sequence
  Cyclic GFR-binding peptide
  MOD_RES (33)..(33): Xaa is C or S
NHQLFVQVEKHQGQHPKIRVKAMKVSREETPVX

SEQ ID NO: 21573 - protein, 36 aa, Artificial Sequence
  Cyclic GFR-binding peptide
  MOD_RES (31)..(31): Xaa is C or S
QLFSMEGLHQGQHPKIRMIQMTINSEETPVXELGED

SEQ ID NO: 21574 - protein, 31 aa, Artificial Sequence
  Cyclic GFR-binding peptide
  MOD_RES (29)..(29): Xaa is C or S
FSMEGLHQGQHPKIRMIQMTINSEETPVXEL

SEQ ID NO: 21575 - protein, 41 aa, Artificial Sequence
  Cyclic GFR-binding peptide
  MOD_RES (2)..(36): Xaa is C or S
EXKNHQLFVTAKKHQGQHPKIRIKRMQVPREETPVXELGED

SEQ ID NO: 21576 - protein, 25 aa, Artificial Sequence
  Cyclic GFR-binding peptide
SMEGIHQGQHPKIRMIQMTINSEET

SEQ ID NO: 21577 - protein, 28 aa, Artificial Sequence
  Cyclic GFR-binding peptide
HDELTSMEGLFIPKKRVIEMIQVTINSL

SEQ ID NO: 21578 - protein, 34 aa, Artificial Sequence
  Cyclic GFR-binding peptide
ELHEELRSMEGLLKPKKRVYEMIQVTINSHHVRS

SEQ ID NO: 21579 - protein, 32 aa, Artificial Sequence
  Cyclic GFR-binding peptide
DELTVQVEKFIPKKRVIEVKAVKVSRLQVQTP

SEQ ID NO: 21580 - protein, 43 aa, Artificial Sequence
  Cyclic GFR-binding peptide
  MOD_RES (2)..(39): Xaa is C or S
AXELHEELRSMEGLLKPKKRVYEMIQVTINSHHVRSPQXKVSS

SEQ ID NO: 21581 - protein, 42 aa, Artificial Sequence
  Cyclic GFR-binding peptide
  MOD_RES (2)..(36): Xaa is C or S
EXQSHEELVTAKKHQGQHPKIRIKRMQVPRQGTPVXELGEDN

SEQ ID NO: 21582 - protein, 30 aa, Artificial Sequence
  Cyclic GFR-binding peptide
KNHQLFVTAKKHQGQHPKIRIKRMQVPREE

SEQ ID NO: 21583 - protein, 23 aa, Artificial Sequence
  Cyclic GFR-binding peptide
SMEGLFIPKKRVIEMIQVTINSL

SEQ ID NO: 21584 - protein, 40 aa, Artificial Sequence
  Cyclic GFR-binding peptide
  MOD_RES (2)..(36): Xaa is C or S
EXKNHQLFSMEGIHQGQHPKIRMIQMTINSEETPVXELGE

SEQ ID NO: 21585 - protein, 27 aa, Artificial Sequence
  Cyclic GFR-binding peptide
TVQVEKFIPKKRVIEVKAVKVSRLQVQ

SEQ ID NO: 21586 - protein, 37 aa, Artificial Sequence
  Cyclic GFR-binding peptide
  MOD_RES (34)..(34): Xaa is C or S
KNHQLFSMEGIHQGQHPKIRMIQMTINSEETPVXELG

SEQ ID NO: 21587 - protein, 31 aa, Artificial Sequence
  Cyclic GFR-binding peptide
  MOD_RES (31)..(31): Xaa is C or S
RSMEGLLKPKKRVYEMIQVTINSHHVRSPQX

SEQ ID NO: 21588 - protein, 45 aa, Artificial Sequence
  Cyclic GFR-binding peptide
  MOD_RES (2)..(4)..(41): Xaa is C or S
EXKXALHDELTVQVEKFIPKKRVIEVKAVKVSRLQVQTPRXQVNR

SEQ ID NO: 21589 - protein, 37 aa, Artificial Sequence
  Cyclic GFR-binding peptide
  MOD_RES (31)..(31): Xaa is C or S
QLFVTAKKHQGQHPKIRIKRMQVPREETPVXELGEDN

SEQ ID NO: 21590 - protein, 36 aa, Artificial Sequence
  Cyclic GFR-binding peptide
  MOD_RES (1)..(3): Xaa is C or S
XEXKNHQLFVTAKKHQGQHPKIRIKRMQVPREETPV

SEQ ID NO: 21591 - protein, 38 aa, Artificial Sequence
  Cyclic GFR-binding peptide
  MOD_RES (37)..(37): Xaa is C or S
ALHDELTSMEGIFIPKKRVIEMIQVTINSLQVQTPRXQ

SEQ ID NO: 21592 - protein, 37 aa, Artificial Sequence
  Cyclic GFR-binding peptide
  MOD_RES (36)..(36): Xaa is C or S
LHDELTSMEGLFIPKKRVIEMIQVTINSLQVQTPRXQ

SEQ ID NO: 21593 - protein, 30 aa, Artificial Sequence
  Cyclic GFR-binding peptide
QSHEELVTAKKHQGQHPKIRIKRMQVPRQG

SEQ ID NO: 21594 - protein, 34 aa, Artificial Sequence
  Cyclic GFR-binding peptide
  MOD_RES (1)..(3): Xaa is C or S
XEXKNHQLFVTAKKHQGQHPKIRIKRMQVPREET

SEQ ID NO: 21595 - protein, 35 aa, Artificial Sequence
  Cyclic GFR-binding peptide
  MOD_RES (32)..(32): Xaa is C or S
LRSMEGILKPKKRVYEMIQVTINSHHVRSPQXKVS

SEQ ID NO: 21596 - protein, 29 aa, Artificial Sequence
  Cyclic GFR-binding peptide
KNHQLFVTAKKHQGQHPKIRIKRMQVPRE

SEQ ID NO: 21597 - protein, 24 aa, Artificial Sequence
  Cyclic GFR-binding peptide
FVQVEKHQGQHPKIRVKAMKVSRE

SEQ ID NO: 21598 - protein, 38 aa, Artificial Sequence
  Cyclic GFR-binding peptide
  MOD_RES (1)..(38): Xaa is C or S
XELHEELRSMEGLLKPKKRVYEMIQVTINSHHVRSPQX

SEQ ID NO: 21599 - protein, 30 aa, Artificial Sequence
  Cyclic GFR-binding peptide
  MOD_RES (1)..(1): Xaa is C or S
XKNHQLFVTAKKHQGQHPKIRIKRMQVPRE

SEQ ID NO: 21600 - protein, 33 aa, Artificial Sequence
  Cyclic GFR-binding peptide
HEELRSMEGLLKPKKRVYEMIQVTINSHHVRSP

SEQ ID NO: 21601 - protein, 33 aa, Artificial Sequence
  Cyclic GFR-binding peptide
  MOD_RES (1)..(3): Xaa is C or S
XEXQSHEELVTAKKHQGQHPKIRIKRMQVPRQG

SEQ ID NO: 21602 - protein, 34 aa, Artificial Sequence
  Cyclic GFR-binding peptide
  MOD_RES (2)..(4): Xaa is C or S
EXKXALHDELTSMEGIFIPKKRVIEMIQVTINSL

SEQ ID NO: 21603 - protein, 41 aa, Artificial Sequence
  Cyclic GFR-binding peptide
  MOD_RES (2)..(39): Xaa is C or S
KXALHDELTVQVEKFIPKKRVIEVKAVKVSRLQVQTPRXQV

SEQ ID NO: 21604 - protein, 37 aa, Artificial Sequence
  Cyclic GFR-binding peptide
  MOD_RES (2)..(4): Xaa is C or S
EXKXALHDELTSMEGIFIPKKRVIEMIQVTINSLQVQ

SEQ ID NO: 21605 - protein, 42 aa, Artificial Sequence
  Cyclic GFR-binding peptide
  MOD_RES (1)..(3)..(40): Xaa is C or S
XKXALHDELTSMEGIFIPKKRVIEMIQVTINSLQVQTPRXQV

SEQ ID NO: 21606 - protein, 40 aa, Artificial Sequence
  Cyclic GFR-binding peptide
  MOD_RES (2)..(36): Xaa is C or S
EXQSHEELVTAKKHQGQHPKIRIKRMQVPRQGTPVXELGE

SEQ ID NO: 21607 - protein, 40 aa, Artificial Sequence
  Cyclic GFR-binding peptide
  MOD_RES (2)..(4): Xaa is C or S
EXKXALHDELTSMEGLFIPKKRVIEMIQVTINSLQVQTPR

SEQ ID NO: 21608 - protein, 32 aa, Artificial Sequence
  Cyclic GFR-binding peptide
  MOD_RES (2)..(2): Xaa is C or S
AXELHEELRSMEGILKPKKRVYEMIQVTINSH

SEQ ID NO: 21609 - protein, 25 aa, Artificial Sequence
  Cyclic GFR-binding peptide
TSMEGLFIPKKRVIEMIQVTINSLQ

SEQ ID NO: 21610 - protein, 32 aa, Artificial Sequence
  Cyclic GFR-binding peptide
  MOD_RES (32)..(32): Xaa is C or S
LRSMEGLLKPKKRVYEMIQVTINSHHVRSPQX

SEQ ID NO: 21611 - protein, 23 aa, Artificial Sequence
  Cyclic GFR-binding peptide
VTAKKHQGQHPKIRIKRMQVPRE

SEQ ID NO: 21612 - protein, 31 aa, Artificial Sequence
  Cyclic GFR-binding peptide
HEELRVTAKKLKPKKRVYEIKRVQVPRHHVR

SEQ ID NO: 21613 - protein, 34 aa, Artificial Sequence
  Cyclic GFR-binding peptide
  MOD_RES (28)..(28): Xaa is C or S
SMEGIHQGQHPKIRMIQMTINSQGTPVXELGEDN

SEQ ID NO: 21614 - protein, 39 aa, Artificial Sequence
  Cyclic GFR-binding peptide
  MOD_RES (36)..(36): Xaa is C or S
LHDELTVQVEKFIPKKRVIEVKAVKVSRLQVQTPRXQVN

SEQ ID NO: 21615 - protein, 28 aa, Artificial Sequence
  Cyclic GFR-binding peptide
FVTAKKHQGQHPKIRIKRMQVPREETPV

SEQ ID NO: 21616 - protein, 39 aa, Artificial Sequence
  Cyclic GFR-binding peptide
  MOD_RES (1)..(35): Xaa is C or S
XQSHEELVTAKKHQGQHPKIRIKRMQVPRQGTPVXELGE

SEQ ID NO: 21617 - protein, 25 aa, Artificial Sequence
  Cyclic GFR-binding peptide
RSMEGLLKPKKRVYEMIQVTINSHH

SEQ ID NO: 21618 - protein, 24 aa, Artificial Sequence
  Cyclic GFR-binding peptide
FSMEGIHQGQHPKIRMIQMTINSE

SEQ ID NO: 21619 - protein, 37 aa, Artificial Sequence
  Cyclic GFR-binding peptide
  MOD_RES (2)..(36): Xaa is C or S
EXKNHQLFVQVEKHQGQHPKIRVKAMKVSREETPVXE

SEQ ID NO: 21620 - protein, 36 aa, Artificial Sequence
  Cyclic GFR-binding peptide
  MOD_RES (33)..(33): Xaa is C or S
ELTVQVEKFIPKKRVIEVKAVKVSRLQVQTPRXQVN

SEQ ID NO: 21621 - protein, 30 aa, Artificial Sequence
  Cyclic GFR-binding peptide
HEELVTAKKHQGQHPKIRIKRMQVPRQGTP

SEQ ID NO: 21622 - protein, 37 aa, Artificial Sequence
  Cyclic GFR-binding peptide
  MOD_RES (34)..(34): Xaa is C or S
EELRSMEGILKPKKRVYEMIQVTINSHHVRSPQXKVS

SEQ ID NO: 21623 - protein, 36 aa, Artificial Sequence
  Cyclic GFR-binding peptide
  MOD_RES (30)..(30): Xaa is C or S
LFSMEGLHQGQHPKIRMIQMTINSEETPVXELGEDN

SEQ ID NO: 21624 - protein, 35 aa, Artificial Sequence
  Cyclic GFR-binding peptide
  MOD_RES (33)..(33): Xaa is C or S
SHEELSMEGIHQGQHPKIRMIQMTINSQGTPVXEL

SEQ ID NO: 21625 - protein, 37 aa, Artificial Sequence
  Cyclic GFR-binding peptide
  MOD_RES (1)..(3)..(37): Xaa is C or S
XEXKNHQLFSMEGLHQGQHPKIRMIQMTINSEETPVX

SEQ ID NO: 21626 - protein, 32 aa, Artificial Sequence
  Cyclic GFR-binding peptide
  MOD_RES (30)..(30): Xaa is C or S
LFSMEGLHQGQHPKIRMIQMTINSEETPVXEL

SEQ ID NO: 21627 - protein, 34 aa, Artificial Sequence
  Cyclic GFR-binding peptide
LHDELTSMEGIFIPKKRVIEMIQVTINSLQVQTP

SEQ ID NO: 21628 - protein, 30 aa, Artificial Sequence
  Cyclic GFR-binding peptide
EELRSMEGILKPKKRVYEMIQVTINSHHVR

SEQ ID NO: 21629 - protein, 37 aa, Artificial Sequence
  Cyclic GFR-binding peptide
  MOD_RES (2)..(4): Xaa is C or S
AXAXELHEELRVQVEKLKPKKRVYEVKAVKVSRHHVR

SEQ ID NO: 21630 - protein, 40 aa, Artificial Sequence
  Cyclic GFR-binding peptide
  MOD_RES (37)..(37): Xaa is C or S
ELHEELRVTAKKLKPKKRVYEIKRVQVPRHHVRSPQXKVS

SEQ ID NO: 21631 - protein, 35 aa, Artificial Sequence
  Cyclic GFR-binding peptide
  MOD_RES (33)..(33): Xaa is C or S
ELRVTAKKLKPKKRVYEIKRVQVPRHHVRSPQXKV

SEQ ID NO: 21632 - protein, 30 aa, Artificial Sequence
  Cyclic GFR-binding peptide
ELTSMEGIFIPKKRVIEMIQVTINSLQVQT

SEQ ID NO: 21633 - protein, 25 aa, Artificial Sequence
  Cyclic GFR-binding peptide
VQVEKHQGQHPKIRVKAMKVSREET

SEQ ID NO: 21634 - protein, 34 aa, Artificial Sequence
  Cyclic GFR-binding peptide
  MOD_RES (32)..(32): Xaa is C or S
HQLFSMEGLHQGQHPKIRMIQMTINSEETPVXEL

SEQ ID NO: 21635 - protein, 28 aa, Artificial Sequence
  Cyclic GFR-binding peptide
LTSMEGLFIPKKRVIEMIQVTINSLQVQ

SEQ ID NO: 21636 - protein, 34 aa, Artificial Sequence
  Cyclic GFR-binding peptide
  MOD_RES (1)..(3): Xaa is C or S
XKXALHDELTSMEGIFIPKKRVIEMIQVTINSLQ

SEQ ID NO: 21637 - protein, 40 aa, Artificial Sequence
  Cyclic GFR-binding peptide
  MOD_RES (37)..(37): Xaa is C or S
ELHEELRSMEGLLKPKKRVYEMIQVTINSHHVRSPQXKVS

SEQ ID NO: 21638 - protein, 33 aa, Artificial Sequence
  Cyclic GFR-binding peptide
  MOD_RES (29)..(29): Xaa is C or S
LSMEGIHQGQHPKIRMIQMTINSQGTPVXELGE

SEQ ID NO: 21639 - protein, 35 aa, Artificial Sequence
  Cyclic GFR-binding peptide
  MOD_RES (2)..(2): Xaa is C or S
EXQSHEELSMEGIHQGQHPKIRMIQMTINSQGTPV

SEQ ID NO: 21640 - protein, 33 aa, Artificial Sequence
  Cyclic GFR-binding peptide
  MOD_RES (2)..(4): Xaa is C or S
EXKXALHDELTSMEGLFIPKKRVIEMIQVTINS

SEQ ID NO: 21641 - protein, 31 aa, Artificial Sequence
  Cyclic GFR-binding peptide
HEELVQVEKHQGQHPKIRVKAMKVSRQGTPV

SEQ ID NO: 21642 - protein, 22 aa, Artificial Sequence
  Cyclic GFR-binding peptide
SMEGLLKPKKRVYEMIQVTINS

SEQ ID NO: 21643 - protein, 37 aa, Artificial Sequence
  Cyclic GFR-binding peptide
  MOD_RES (32)..(32): Xaa is C or S
HQLFVTAKKHQGQHPKIRIKRMQVPREETPVXELGED

SEQ ID NO: 21644 - protein, 32 aa, Artificial Sequence
  Cyclic GFR-binding peptide
NHQLFSMEGIHQGQHPKIRMIQMTINSEETPV

SEQ ID NO: 21645 - protein, 38 aa, Artificial Sequence
  Cyclic GFR-binding peptide
  MOD_RES (2)..(4): Xaa is C or S
AXAXELHEELRSMEGILKPKKRVYEMIQVTINSHHVRS

SEQ ID NO: 21646 - protein, 33 aa, Artificial Sequence
  Cyclic GFR-binding peptide
ELHEELRSMEGILKPKKRVYEMIQVTINSHHVR

SEQ ID NO: 21647 - protein, 42 aa, Artificial Sequence
  Cyclic GFR-binding peptide
  MOD_RES (2)..(4)..(38): Xaa is C or S
RXEXQSHEELVTAKKHQGQHPKIRIKRMQVPRQGTPVXELGE

SEQ ID NO: 21648 - protein, 32 aa, Artificial Sequence
  Cyclic GFR-binding peptide
  MOD_RES (31)..(31): Xaa is C or S
TSMEGLFIPKKRVIEMIQVTINSLQVQTPRXQ

SEQ ID NO: 21649 - protein, 33 aa, Artificial Sequence
  Cyclic GFR-binding peptide
  MOD_RES (33)..(33): Xaa is C or S
NHQLFSMEGLHQGQHPKIRMIQMTINSEETPVX

SEQ ID NO: 21650 - protein, 39 aa, Artificial Sequence
  Cyclic GFR-binding peptide
  MOD_RES (36)..(36): Xaa is C or S
LHEELRSMEGILKPKKRVYEMIQVTINSHHVRSPQXKVS

SEQ ID NO: 21651 - protein, 41 aa, Artificial Sequence
  Cyclic GFR-binding peptide
  MOD_RES (2)..(4)..(38): Xaa is C or S
RXEXQSHEELVTAKKHQGQHPKIRIKRMQVPRQGTPVXELG

SEQ ID NO: 21652 - protein, 37 aa, Artificial Sequence
  Cyclic GFR-binding peptide
  MOD_RES (34)..(34): Xaa is C or S
EELRSMEGLLKPKKRVYEMIQVTINSHHVRSPQXKVS

SEQ ID NO: 21653 - protein, 35 aa, Artificial Sequence
  Cyclic GFR-binding peptide
  MOD_RES (2)..(2): Xaa is C or S
KXALHDELTVQVEKFIPKKRVIEVKAVKVSRLQVQ

SEQ ID NO: 21654 - protein, 38 aa, Artificial Sequence
  Cyclic GFR-binding peptide
  MOD_RES (33)..(33): Xaa is C or S
SHEELVTAKKHQGQHPKIRIKRMQVPRQGTPVXELGED

SEQ ID NO: 21655 - protein, 32 aa, Artificial Sequence
  Cyclic GFR-binding peptide
LHDELTSMEGLFIPKKRVIEMIQVTINSLQVQ

SEQ ID NO: 21656 - protein, 28 aa, Artificial Sequence
  Cyclic GFR-binding peptide
KNHQLFSMEGIHQGQHPKIRMIQMTINS

SEQ ID NO: 21657 - protein, 39 aa, Artificial Sequence
  Cyclic GFR-binding peptide
  MOD_RES (1)..(38): Xaa is C or S
XALHDELTSMEGIFIPKKRVIEMIQVTINSLQVQTPRXQ

SEQ ID NO: 21658 - protein, 24 aa, Artificial Sequence
  Cyclic GFR-binding peptide
LVQVEKHQGQHPKIRVKAMKVSRQ

SEQ ID NO: 21659 - protein, 35 aa, Artificial Sequence
  Cyclic GFR-binding peptide
  MOD_RES (31)..(31): Xaa is C or S
QLFVQVEKHQGQHPKIRVKAMKVSREETPVXELGE

SEQ ID NO: 21660 - protein, 30 aa, Artificial Sequence
  Cyclic GFR-binding peptide
HDELTSMEGIFIPKKRVIEMIQVTINSLQV

SEQ ID NO: 21661 - protein, 39 aa, Artificial Sequence
  Cyclic GFR-binding peptide
  MOD_RES (36)..(36): Xaa is C or S
LHEELRVTAKKLKPKKRVYEIKRVQVPRHHVRSPQXKVS

SEQ ID NO: 21662 - protein, 42 aa, Artificial Sequence
  Cyclic GFR-binding peptide
  MOD_RES (2)..(4)..(38): Xaa is C or S
RXEXQSHEELVQVEKHQGQHPKIRVKAMKVSRQGTPVXELGE

SEQ ID NO: 21663 - protein, 42 aa, Artificial Sequence
  Cyclic GFR-binding peptide
  MOD_RES (2)..(39): Xaa is C or S
AXELHEELRSMEGILKPKKRVYEMIQVTINSHHVRSPQXKVS

SEQ ID NO: 21664 - protein, 34 aa, Artificial Sequence
  Cyclic GFR-binding peptide
  MOD_RES (2)..(2): Xaa is C or S
EXKNHQLFSMEGLHQGQHPKIRMIQMTINSEETP

SEQ ID NO: 21665 - protein, 43 aa, Artificial Sequence
  Cyclic GFR-binding peptide
  MOD_RES (1)..(3)..(37): Xaa is C or S
XEXKNHQLFVQVEKHQGQHPKIRVKAMKVSREETPVXELGEDN

SEQ ID NO: 21666 - protein, 30 aa, Artificial Sequence
  Cyclic GFR-binding peptide
EELRSMEGLLKPKKRVYEMIQVTINSHHVR

SEQ ID NO: 21667 - protein, 26 aa, Artificial Sequence
  Cyclic GFR-binding peptide
SMEGLHQGQHPKIRMIQMTINSEETP

SEQ ID NO: 21668 - protein, 31 aa, Artificial Sequence
  Cyclic GFR-binding peptide
  MOD_RES (31)..(31): Xaa is C or S
EELVTAKKHQGQHPKIRIKRMQVPRQGTPVX

SEQ ID NO: 21669 - protein, 34 aa, Artificial Sequence
  Cyclic GFR-binding peptide
LHEELRVTAKKLKPKKRVYEIKRVQVPRHHVRSP

SEQ ID NO: 21670 - protein, 38 aa, Artificial Sequence
  Cyclic GFR-binding peptide
  MOD_RES (36)..(36): Xaa is C or S
LHEELRSMEGLLKPKKRVYEMIQVTINSHHVRSPQXKV

SEQ ID NO: 21671 - protein, 32 aa, Artificial Sequence
  Cyclic GFR-binding peptide
  MOD_RES (30)..(30): Xaa is C or S
ELVQVEKHQGQHPKIRVKAMKVSRQGTPVXEL

SEQ ID NO: 21672 - protein, 34 aa, Artificial Sequence
  Cyclic GFR-binding peptide
  MOD_RES (30)..(30): Xaa is C or S
LFSMEGIHQGQHPKIRMIQMTINSEETPVXELGE

SEQ ID NO: 21673 - protein, 34 aa, Artificial Sequence
  Cyclic GFR-binding peptide
  MOD_RES (34)..(34): Xaa is C or S
KNHQLFSMEGIHQGQHPKIRMIQMTINSEETPVX

SEQ ID NO: 21674 - protein, 34 aa, Artificial Sequence
  Cyclic GFR-binding peptide
LHEELRSMEGILKPKKRVYEMIQVTINSHHVRSP

SEQ ID NO: 21675 - protein, 37 aa, Artificial Sequence
  Cyclic GFR-binding peptide
  MOD_RES (31)..(31): Xaa is C or S
EELVTAKKHQGQHPKIRIKRMQVPRQGTPVXELGEDN

SEQ ID NO: 21676 - protein, 32 aa, Artificial Sequence
  Cyclic GFR-binding peptide
  MOD_RES (31)..(31): Xaa is C or S
TSMEGIFIPKKRVIEMIQVTINSLQVQTPRXQ

SEQ ID NO: 21677 - protein, 34 aa, Artificial Sequence
  Cyclic GFR-binding peptide
  MOD_RES (30)..(30): Xaa is C or S
VTAKKLKPKKRVYEIKRVQVPRHHVRSPQXKVSS

SEQ ID NO: 21678 - protein, 33 aa, Artificial Sequence
  Cyclic GFR-binding peptide
EELRVTAKKLKPKKRVYEIKRVQVPRHHVRSPQ

SEQ ID NO: 21679 - protein, 32 aa, Artificial Sequence
  Cyclic GFR-binding peptide
ELTSMEGLFIPKKRVIEMIQVTINSLQVQTPR

SEQ ID NO: 21680 - protein, 24 aa, Artificial Sequence
  Cyclic GFR-binding peptide
SMEGILKPKKRVYEMIQVTINSHH

SEQ ID NO: 21681 - protein, 26 aa, Artificial Sequence
  Cyclic GFR-binding peptide
QLFVTAKKHQGQHPKIRIKRMQVPRE

SEQ ID NO: 21682 - protein, 30 aa, Artificial Sequence
  Cyclic GFR-binding peptide
HEELRVTAKKLKPKKRVYEIKRVQVPRHHV

SEQ ID NO: 21683 - protein, 27 aa, Artificial Sequence
  Cyclic GFR-binding peptide
HQLFVQVEKHQGQHPKIRVKAMKVSRE

SEQ ID NO: 21684 - protein, 35 aa, Artificial Sequence
  Cyclic GFR-binding peptide
  MOD_RES (1)..(35): Xaa is C or S
XKNHQLFSMEGIHQGQHPKIRMIQMTINSEETPVX

SEQ ID NO: 21685 - protein, 29 aa, Artificial Sequence
  Cyclic GFR-binding peptide
SHEELVTAKKHQGQHPKIRIKRMQVPRQG

SEQ ID NO: 21686 - protein, 26 aa, Artificial Sequence
  Cyclic GFR-binding peptide
EELRSMEGILKPKKRVYEMIQVTINS

SEQ ID NO: 21687 - protein, 38 aa, Artificial Sequence
  Cyclic GFR-binding peptide
  MOD_RES (35)..(35): Xaa is C or S
HDELTSMEGLFIPKKRVIEMIQVTINSLQVQTPRXQVN

SEQ ID NO: 21688 - protein, 35 aa, Artificial Sequence
  Cyclic GFR-binding peptide
  MOD_RES (34)..(34): Xaa is C or S
QSHEELVQVEKHQGQHPKIRVKAMKVSRQGTPVXE

SEQ ID NO: 21689 - protein, 34 aa, Artificial Sequence
  Cyclic GFR-binding peptide
  MOD_RES (33)..(33): Xaa is C or S
NHQLFSMEGIHQGQHPKIRMIQMTINSEETPVXE

SEQ ID NO: 21690 - protein, 26 aa, Artificial Sequence
  Cyclic GFR-binding peptide
LVQVEKHQGQHPKIRVKAMKVSRQGT

SEQ ID NO: 21691 - protein, 25 aa, Artificial Sequence
  Cyclic GFR-binding peptide
LFSMEGLHQGQHPKIRMIQMTINSE

SEQ ID NO: 21692 - protein, 35 aa, Artificial Sequence
  Cyclic GFR-binding peptide
  MOD_RES (32)..(32): Xaa is C or S
HEELVQVEKHQGQHPKIRVKAMKVSRQGTPVXELG

SEQ ID NO: 21693 - protein, 37 aa, Artificial Sequence
  Cyclic GFR-binding peptide
  MOD_RES (32)..(32): Xaa is C or S
HEELSMEGIHQGQHPKIRMIQMTINSQGTPVXELGED

SEQ ID NO: 21694 - protein, 36 aa, Artificial Sequence
  Cyclic GFR-binding peptide
  MOD_RES (2)..(4): Xaa is C or S
RXEXKNHQLFVTAKKHQGQHPKIRIKRMQVPREETP

SEQ ID NO: 21695 - protein, 36 aa, Artificial Sequence
  Cyclic GFR-binding peptide
  MOD_RES (1)..(35): Xaa is C or S
XQSHEELVTAKKHQGQHPKIRIKRMQVPRQGTPVXE

SEQ ID NO: 21696 - protein, 42 aa, Artificial Sequence
  Cyclic GFR-binding peptide
  MOD_RES (1)..(3)..(37): Xaa is C or S
XEXKNHQLFVQVEKHQGQHPKIRVKAMKVSREETPVXELGED

SEQ ID NO: 21697 - protein, 38 aa, Artificial Sequence
  Cyclic GFR-binding peptide
  MOD_RES (2)..(36): Xaa is C or S
EXQSHEELVTAKKHQGQHPKIRIKRMQVPRQGTPVXEL

SEQ ID NO: 21698 - protein, 37 aa, Artificial Sequence
  Cyclic GFR-binding peptide
  MOD_RES (33)..(33): Xaa is C or S
NHQLFVTAKKHQGQHPKIRIKRMQVPREETPVXELGE

SEQ ID NO: 21699 - protein, 39 aa, Artificial Sequence
  Cyclic GFR-binding peptide
  MOD_RES (33)..(33): Xaa is C or S
NHQLFSMEGIHQGQHPKIRMIQMTINSEETPVXELGEDN

SEQ ID NO: 21700 - protein, 30 aa, Artificial Sequence
  Cyclic GFR-binding peptide
  MOD_RES (29)..(29): Xaa is C or S
FVTAKKHQGQHPKIRIKRMQVPREETPVXE

SEQ ID NO: 21701 - protein, 33 aa, Artificial Sequence
  Cyclic GFR-binding peptide
  MOD_RES (1)..(3): Xaa is C or S
XEXQSHEELVQVEKHQGQHPKIRVKAMKVSRQG

SEQ ID NO: 21702 - protein, 25 aa, Artificial Sequence
  Cyclic GFR-binding peptide
FVTAKKHQGQHPKIRIKRMQVPREE

SEQ ID NO: 21703 - protein, 30 aa, Artificial Sequence
  Cyclic GFR-binding peptide
  MOD_RES (2)..(2): Xaa is C or S
EXKNHQLFSMEGIHQGQHPKIRMIQMTINS

SEQ ID NO: 21704 - protein, 29 aa, Artificial Sequence
  Cyclic GFR-binding peptide
HEELVTAKKHQGQHPKIRIKRMQVPRQGT

SEQ ID NO: 21705 - protein, 35 aa, Artificial Sequence
  Cyclic GFR-binding peptide
  MOD_RES (33)..(33): Xaa is C or S
NHQLFVTAKKHQGQHPKIRIKRMQVPREETPVXEL

SEQ ID NO: 21706 - protein, 27 aa, Artificial Sequence
  Cyclic GFR-binding peptide
SMEGIHQGQHPKIRMIQMTINSQGTPV

SEQ ID NO: 21707 - protein, 28 aa, Artificial Sequence
  Cyclic GFR-binding peptide
HDELTVQVEKFIPKKRVIEVKAVKVSRL

SEQ ID NO: 21708 - protein, 31 aa, Artificial Sequence
  Cyclic GFR-binding peptide
  MOD_RES (28)..(28): Xaa is C or S
SMEGIHQGQHPKIRMIQMTINSQGTPVXELG

SEQ ID NO: 21709 - protein, 30 aa, Artificial Sequence
  Cyclic GFR-binding peptide
  MOD_RES (29)..(29): Xaa is C or S
FSMEGIHQGQHPKIRMIQMTINSEETPVXE

SEQ ID NO: 21710 - protein, 38 aa, Artificial Sequence
  Cyclic GFR-binding peptide
  MOD_RES (32)..(32): Xaa is C or S
HEELVQVEKHQGQHPKIRVKAMKVSRQGTPVXELGEDN

SEQ ID NO: 21711 - protein, 34 aa, Artificial Sequence
  Cyclic GFR-binding peptide
  MOD_RES (33)..(33): Xaa is C or S
ELRSMEGILKPKKRVYEMIQVTINSHHVRSPQXK

SEQ ID NO: 21712 - protein, 27 aa, Artificial Sequence
  Cyclic GFR-binding peptide
LTVQVEKFIPKKRVIEVKAVKVSRLQV

SEQ ID NO: 21713 - protein, 24 aa, Artificial Sequence
  Cyclic GFR-binding peptide
RSMEGILKPKKRVYEMIQVTINSH

SEQ ID NO: 21714 - protein, 34 aa, Artificial Sequence
  Cyclic GFR-binding peptide
  MOD_RES (1)..(1): Xaa is C or S
XELHEELRSMEGLLKPKKRVYEMIQVTINSHHVR

SEQ ID NO: 21715 - protein, 29 aa, Artificial Sequence
  Cyclic GFR-binding peptide
  MOD_RES (1)..(1): Xaa is C or S
XQSHEELVQVEKHQGQHPKIRVKAMKVSR

SEQ ID NO: 21716 - protein, 33 aa, Artificial Sequence
  Cyclic GFR-binding peptide
  MOD_RES (33)..(33): Xaa is C or S
ELTSMEGIFIPKKRVIEMIQVTINSLQVQTPRX

SEQ ID NO: 21717 - protein, 33 aa, Artificial Sequence
  Cyclic GFR-binding peptide
  MOD_RES (2)..(2): Xaa is C or S
KXALHDELTVQVEKFIPKKRVIEVKAVKVSRLQ

SEQ ID NO: 21718 - protein, 30 aa, Artificial Sequence
  Cyclic GFR-binding peptide
NHQLFSMEGIHQGQHPKIRMIQMTINSEET

SEQ ID NO: 21719 - protein, 40 aa, Artificial Sequence
  Cyclic GFR-binding peptide
  MOD_RES (1)..(35): Xaa is C or S
XKNHQLFSMEGIHQGQHPKIRMIQMTINSEETPVXELGED

SEQ ID NO: 21720 - protein, 26 aa, Artificial Sequence
  Cyclic GFR-binding peptide
ELTSMEGIFIPKKRVIEMIQVTINSL

SEQ ID NO: 21721 - protein, 40 aa, Artificial Sequence
  Cyclic GFR-binding peptide
  MOD_RES (2)..(4): Xaa is C or S
EXKXALHDELTVQVEKFIPKKRVIEVKAVKVSRLQVQTPR

SEQ ID NO: 21722 - protein, 37 aa, Artificial Sequence
  Cyclic GFR-binding peptide
  MOD_RES (2)..(2): Xaa is C or S
KXALHDELTSMEGIFIPKKRVIEMIQVTINSLQVQTP

SEQ ID NO: 21723 - protein, 33 aa, Artificial Sequence
  Cyclic GFR-binding peptide
  MOD_RES (30)..(30): Xaa is C or S
ELVQVEKHQGQHPKIRVKAMKVSRQGTPVXELG

SEQ ID NO: 21724 - protein, 38 aa, Artificial Sequence
  Cyclic GFR-binding peptide
  MOD_RES (37)..(37): Xaa is C or S
ELHEELRSMEGLLKPKKRVYEMIQVTINSHHVRSPQXK

SEQ ID NO: 21725 - protein, 31 aa, Artificial Sequence
  Cyclic GFR-binding peptide
  MOD_RES (1)..(3): Xaa is C or S
XEXKNHQLFVTAKKHQGQHPKIRIKRMQVPR

SEQ ID NO: 21726 - protein, 35 aa, Artificial Sequence
  Cyclic GFR-binding peptide
  MOD_RES (2)..(2): Xaa is C or S
EXKNHQLFVTAKKHQGQHPKIRIKRMQVPREETPV

SEQ ID NO: 21727 - protein, 33 aa, Artificial Sequence
  Cyclic GFR-binding peptide
  MOD_RES (33)..(33): Xaa is C or S
SHEELSMEGIHQGQHPKIRMIQMTINSQGTPVX

SEQ ID NO: 21728 - protein, 39 aa, Artificial Sequence
  Cyclic GFR-binding peptide
  MOD_RES (35)..(35): Xaa is C or S
HEELRSMEGLLKPKKRVYEMIQVTINSHHVRSPQXKVSS

SEQ ID NO: 21729 - protein, 28 aa, Artificial Sequence
  Cyclic GFR-binding peptide
SHEELSMEGIHQGQHPKIRMIQMTINSQ

SEQ ID NO: 21730 - protein, 42 aa, Artificial Sequence
  Cyclic GFR-binding peptide
  MOD_RES (2)..(39): Xaa is C or S
KXALHDELTSMEGLFIPKKRVIEMIQVTINSLQVQTPRXQVN

SEQ ID NO: 21731 - protein, 36 aa, Artificial Sequence
  Cyclic GFR-binding peptide
  MOD_RES (32)..(32): Xaa is C or S
HQLFVQVEKHQGQHPKIRVKAMKVSREETPVXELGE

SEQ ID NO: 21732 - protein, 33 aa, Artificial Sequence
  Cyclic GFR-binding peptide
  MOD_RES (32)..(32): Xaa is C or S
HEELSMEGIHQGQHPKIRMIQMTINSQGTPVXE

SEQ ID NO: 21733 - protein, 33 aa, Artificial Sequence
  Cyclic GFR-binding peptide
  MOD_RES (32)..(32): Xaa is C or S
HQLFSMEGLHQGQHPKIRMIQMTINSEETPVXE

SEQ ID NO: 21734 - protein, 32 aa, Artificial Sequence
  Cyclic GFR-binding peptide
EELRSMEGILKPKKRVYEMIQVTINSHHVRSP

SEQ ID NO: 21735 - protein, 38 aa, Artificial Sequence
  Cyclic GFR-binding peptide
  MOD_RES (34)..(34): Xaa is C or S
KNHQLFSMEGLHQGQHPKIRMIQMTINSEETPVXELGE

SEQ ID NO: 21736 - protein, 32 aa, Artificial Sequence
  Cyclic GFR-binding peptide
  MOD_RES (31)..(31): Xaa is C or S
EELVTAKKHQGQHPKIRIKRMQVPRQGTPVXE

SEQ ID NO: 21737 - protein, 30 aa, Artificial Sequence
  Cyclic GFR-binding peptide
RSMEGILKPKKRVYEMIQVTINSHHVRSPQ

SEQ ID NO: 21738 - protein, 27 aa, Artificial Sequence
  Cyclic GFR-binding peptide
NHQLFVQVEKHQGQHPKIRVKAMKVSR

SEQ ID NO: 21739 - protein, 26 aa, Artificial Sequence
  Cyclic GFR-binding peptide
SMEGIHQGQHPKIRMIQMTINSQGTP

SEQ ID NO: 21740 - protein, 29 aa, Artificial Sequence
  Cyclic GFR-binding peptide
HQLFVTAKKHQGQHPKIRIKRMQVPREET

SEQ ID NO: 21741 - protein, 29 aa, Artificial Sequence
  Cyclic GFR-binding peptide
EELSMEGIHQGQHPKIRMIQMTINSQGTP

SEQ ID NO: 21742 - protein, 32 aa, Artificial Sequence
  Cyclic GFR-binding peptide
ELHEELRSMEGLLKPKKRVYEMIQVTINSHHV

SEQ ID NO: 21743 - protein, 22 aa, Artificial Sequence
  Cyclic GFR-binding peptide
SMEGIFIPKKRVIEMIQVTINS

SEQ ID NO: 21744 - protein, 29 aa, Artificial Sequence
  Cyclic GFR-binding peptide
SMEGILKPKKRVYEMIQVTINSHHVRSPQ

SEQ ID NO: 21745 - protein, 28 aa, Artificial Sequence
  Cyclic GFR-binding peptide
FVQVEKHQGQHPKIRVKAMKVSREETPV

SEQ ID NO: 21746 - protein, 41 aa, Artificial Sequence
  Cyclic GFR-binding peptide
  MOD_RES (1)..(35): Xaa is C or S
XKNHQLFSMEGIHQGQHPKIRMIQMTINSEETPVXELGEDN

SEQ ID NO: 21747 - protein, 29 aa, Artificial Sequence
  Cyclic GFR-binding peptide
  MOD_RES (29)..(29): Xaa is C or S
LSMEGIHQGQHPKIRMIQMTINSQGTPVX

SEQ ID NO: 21748 - protein, 36 aa, Artificial Sequence
  Cyclic GFR-binding peptide
  MOD_RES (30)..(30): Xaa is C or S
LFSMEGIHQGQHPKIRMIQMTINSEETPVXELGEDN

SEQ ID NO: 21749 - protein, 39 aa, Artificial Sequence
  Cyclic GFR-binding peptide
  MOD_RES (1)..(3): Xaa is C or S
XKXALHDELTVQVEKFIPKKRVIEVKAVKVSRLQVQTPR

SEQ ID NO: 21750 - protein, 33 aa, Artificial Sequence
  Cyclic GFR-binding peptide
  MOD_RES (30)..(30): Xaa is C or S
SMEGIFIPKKRVIEMIQVTINSLQVQTPRXQVN

SEQ ID NO: 21751 - protein, 29 aa, Artificial Sequence
  Cyclic GFR-binding peptide
HEELSMEGIHQGQHPKIRMIQMTINSQGT

SEQ ID NO: 21752 - protein, 33 aa, Artificial Sequence
  Cyclic GFR-binding peptide
  MOD_RES (2)..(2): Xaa is C or S
EXQSHEELVTAKKHQGQHPKIRIKRMQVPRQGT

SEQ ID NO: 21753 - protein, 28 aa, Artificial Sequence
  Cyclic GFR-binding peptide
LFVQVEKHQGQHPKIRVKAMKVSREETP

SEQ ID NO: 21754 - protein, 32 aa, Artificial Sequence
  Cyclic GFR-binding peptide
  MOD_RES (2)..(4): Xaa is C or S
RXEXKNHQLFSMEGIHQGQHPKIRMIQMTINS

SEQ ID NO: 21755 - protein, 24 aa, Artificial Sequence
  Cyclic GFR-binding peptide
ELVTAKKHQGQHPKIRIKRMQVPR

SEQ ID NO: 21756 - protein, 24 aa, Artificial Sequence
  Cyclic GFR-binding peptide
VTAKKHQGQHPKIRIKRMQVPRQG

SEQ ID NO: 21757 - protein, 28 aa, Artificial Sequence
  Cyclic GFR-binding peptide
HEELSMEGIHQGQHPKIRMIQMTINSQG

SEQ ID NO: 21758 - protein, 38 aa, Artificial Sequence
  Cyclic GFR-binding peptide
  MOD_RES (1)..(38): Xaa is C or S
XALHDELTSMEGIFIPKKRVIEMIQVTINSLQVQTPRX

SEQ ID NO: 21759 - protein, 39 aa, Artificial Sequence
  Cyclic GFR-binding peptide
  MOD_RES (1)..(3)..(37): Xaa is C or S
XEXQSHEELVQVEKHQGQHPKIRVKAMKVSRQGTPVXEL

SEQ ID NO: 21760 - protein, 24 aa, Artificial Sequence
  Cyclic GFR-binding peptide
LTVQVEKFIPKKRVIEVKAVKVSR

SEQ ID NO: 21761 - protein, 30 aa, Artificial Sequence
  Cyclic GFR-binding peptide
LTSMEGIFIPKKRVIEMIQVTINSLQVQTP

SEQ ID NO: 21762 - protein, 34 aa, Artificial Sequence
  Cyclic GFR-binding peptide
  MOD_RES (31)..(31): Xaa is C or S
EELSMEGIHQGQHPKIRMIQMTINSQGTPVXELG

SEQ ID NO: 21763 - protein, 28 aa, Artificial Sequence
  Cyclic GFR-binding peptide
EELSMEGIHQGQHPKIRMIQMTINSQGT

SEQ ID NO: 21764 - protein, 36 aa, Artificial Sequence
  Cyclic GFR-binding peptide
ALHDELTSMEGIFIPKKRVIEMIQVTINSLQVQTPR

SEQ ID NO: 21765 - protein, 32 aa, Artificial Sequence
  Cyclic GFR-binding peptide
KNHQLFVTAKKHQGQHPKIRIKRMQVPREETP

SEQ ID NO: 21766 - protein, 38 aa, Artificial Sequence
  Cyclic GFR-binding peptide
  MOD_RES (34)..(34): Xaa is C or S
DELTSMEGLFIPKKRVIEMIQVTINSLQVQTPRXQVNR

SEQ ID NO: 21767 - protein, 30 aa, Artificial Sequence
  Cyclic GFR-binding peptide
  MOD_RES (28)..(28): Xaa is C or S
VQVEKHQGQHPKIRVKAMKVSREETPVXEL

SEQ ID NO: 21768 - protein, 35 aa, Artificial Sequence
  Cyclic GFR-binding peptide
  MOD_RES (1)..(1): Xaa is C or S
XALHDELTVQVEKFIPKKRVIEVKAVKVSRLQVQT

SEQ ID NO: 21769 - protein, 29 aa, Artificial Sequence
  Cyclic GFR-binding peptide
ELSMEGIHQGQHPKIRMIQMTINSQGTPV

SEQ ID NO: 21770 - protein, 44 aa, Artificial Sequence
  Cyclic GFR-binding peptide
  MOD_RES (1)..(3)..(40): Xaa is C or S
XAXELHEELRSMEGLLKPKKRVYEMIQVTINSHHVRSPQXKVSS

SEQ ID NO: 21771 - protein, 30 aa, Artificial Sequence
  Cyclic GFR-binding peptide
LHEELRVTAKKLKPKKRVYEIKRVQVPRHH

SEQ ID NO: 21772 - protein, 33 aa, Artificial Sequence
  Cyclic GFR-binding peptide
  MOD_RES (32)..(32): Xaa is C or S
HQLFSMEGIHQGQHPKIRMIQMTINSEETPVXE

SEQ ID NO: 21773 - protein, 37 aa, Artificial Sequence
  Cyclic GFR-binding peptide
  MOD_RES (32)..(32): Xaa is C or S
HQLFSMEGLHQGQHPKIRMIQMTINSEETPVXELGED

SEQ ID NO: 21774 - protein, 37 aa, Artificial Sequence
  Cyclic GFR-binding peptide
  MOD_RES (33)..(33): Xaa is C or S
ELTSMEGLFIPKKRVIEMIQVTINSLQVQTPRXQVNR

SEQ ID NO: 21775 - protein, 32 aa, Artificial Sequence
  Cyclic GFR-binding peptide
  MOD_RES (30)..(30): Xaa is C or S
SMEGIFIPKKRVIEMIQVTINSLQVQTPRXQV

SEQ ID NO: 21776 - protein, 30 aa, Artificial Sequence
  Cyclic GFR-binding peptide
  MOD_RES (28)..(28): Xaa is C or S
VQVEKHQGQHPKIRVKAMKVSRQGTPVXEL

SEQ ID NO: 21777 - protein, 42 aa, Artificial Sequence
  Cyclic GFR-binding peptide
  MOD_RES (2)..(36): Xaa is C or S
EXQSHEELVQVEKHQGQHPKIRVKAMKVSRQGTPVXELGEDN

SEQ ID NO: 21778 - protein, 36 aa, Artificial Sequence
  Cyclic GFR-binding peptide
  MOD_RES (31)..(31): Xaa is C or S
EELVTAKKHQGQHPKIRIKRMQVPRQGTPVXELGED

SEQ ID NO: 21779 - protein, 33 aa, Artificial Sequence
  Cyclic GFR-binding peptide
  MOD_RES (1)..(1): Xaa is C or S
XKNHQLFSMEGIHQGQHPKIRMIQMTINSEETP

SEQ ID NO: 21780 - protein, 34 aa, Artificial Sequence
  Cyclic GFR-binding peptide
  MOD_RES (1)..(1): Xaa is C or S
XKNHQLFSMEGIHQGQHPKIRMIQMTINSEETPV

SEQ ID NO: 21781 - protein, 28 aa, Artificial Sequence
  Cyclic GFR-binding peptide
  MOD_RES (28)..(28): Xaa is C or S
VQVEKHQGQHPKIRVKAMKVSREETPVX

SEQ ID NO: 21782 - protein, 29 aa, Artificial Sequence
  Cyclic GFR-binding peptide
VQVEKFIPKKRVIEVKAVKVSRLQVQTPR

SEQ ID NO: 21783 - protein, 34 aa, Artificial Sequence
  Cyclic GFR-binding peptide
HDELTSMEGIFIPKKRVIEMIQVTINSLQVQTPR

SEQ ID NO: 21784 - protein, 36 aa, Artificial Sequence
  Cyclic GFR-binding peptide
  MOD_RES (1)..(35): Xaa is C or S
XQSHEELVQVEKHQGQHPKIRVKAMKVSRQGTPVXE

SEQ ID NO: 21785 - protein, 38 aa, Artificial Sequence
  Cyclic GFR-binding peptide
  MOD_RES (1)..(3)..(37): Xaa is C or S
XEXKNHQLFSMEGIHQGQHPKIRMIQMTINSEETPVXE

SEQ ID NO: 21786 - protein, 35 aa, Artificial Sequence
  Cyclic GFR-binding peptide
  MOD_RES (2)..(4): Xaa is C or S
AXAXELHEELRSMEGLLKPKKRVYEMIQVTINSHH

SEQ ID NO: 21787 - protein, 33 aa, Artificial Sequence
  Cyclic GFR-binding peptide
  MOD_RES (2)..(4): Xaa is C or S
AXAXELHEELRSMEGLLKPKKRVYEMIQVTINS

SEQ ID NO: 21788 - protein, 31 aa, Artificial Sequence
  Cyclic GFR-binding peptide
  MOD_RES (1)..(3): Xaa is C or S
XEXQSHEELVTAKKHQGQHPKIRIKRMQVPR

SEQ ID NO: 21789 - protein, 39 aa, Artificial Sequence
  Cyclic GFR-binding peptide
  MOD_RES (2)..(36): Xaa is C or S
EXQSHEELVQVEKHQGQHPKIRVKAMKVSRQGTPVXELG

SEQ ID NO: 21790 - protein, 27 aa, Artificial Sequence
  Cyclic GFR-binding peptide
SMEGLHQGQHPKIRMIQMTINSEETPV

SEQ ID NO: 21791 - protein, 31 aa, Artificial Sequence
  Cyclic GFR-binding peptide
  MOD_RES (1)..(1): Xaa is C or S
XQSHEELVQVEKHQGQHPKIRVKAMKVSRQG

SEQ ID NO: 21792 - protein, 37 aa, Artificial Sequence
  Cyclic GFR-binding peptide
  MOD_RES (33)..(33): Xaa is C or S
ELRVTAKKLKPKKRVYEIKRVQVPRHHVRSPQXKVSS

SEQ ID NO: 21793 - protein, 26 aa, Artificial Sequence
  Cyclic GFR-binding peptide
ELRSMEGLLKPKKRVYEMIQVTINSH

SEQ ID NO: 21794 - protein, 36 aa, Artificial Sequence
  Cyclic GFR-binding peptide
  MOD_RES (2)..(4): Xaa is C or S
RXEXKNHQLFSMEGLHQGQHPKIRMIQMTINSEETP

SEQ ID NO: 21795 - protein, 34 aa, Artificial Sequence
  Cyclic GFR-binding peptide
  MOD_RES (30)..(30): Xaa is C or S
ELSMEGIHQGQHPKIRMIQMTINSQGTPVXELGE

SEQ ID NO: 21796 - protein, 36 aa, Artificial Sequence
  Cyclic GFR-binding peptide
  MOD_RES (31)..(31): Xaa is C or S
QLFSMEGIHQGQHPKIRMIQMTINSEETPVXELGED

SEQ ID NO: 21797 - protein, 27 aa, Artificial Sequence
  Cyclic GFR-binding peptide
FVQVEKHQGQHPKIRVKAMKVSREETP

SEQ ID NO: 21798 - protein, 33 aa, Artificial Sequence
  Cyclic GFR-binding peptide
  MOD_RES (28)..(28): Xaa is C or S
VQVEKHQGQHPKIRVKAMKVSREETPVXELGED

SEQ ID NO: 21799 - protein, 34 aa, Artificial Sequence
  Cyclic GFR-binding peptide
  MOD_RES (33)..(33): Xaa is C or S
ELTSMEGIFIPKKRVIEMIQVTINSLQVQTPRXQ

SEQ ID NO: 21800 - protein, 43 aa, Artificial Sequence
  Cyclic GFR-binding peptide
  MOD_RES (2)..(4)..(38): Xaa is C or S
RXEXKNHQLFVQVEKHQGQHPKIRVKAMKVSREETPVXELGED

SEQ ID NO: 21801 - protein, 40 aa, Artificial Sequence
  Cyclic GFR-binding peptide
  MOD_RES (1)..(38): Xaa is C or S
XALHDELTSMEGLFIPKKRVIEMIQVTINSLQVQTPRXQV

SEQ ID NO: 21802 - protein, 33 aa, Artificial Sequence
  Cyclic GFR-binding peptide
  MOD_RES (30)..(30): Xaa is C or S
LFSMEGLHQGQHPKIRMIQMTINSEETPVXELG

SEQ ID NO: 21803 - protein, 28 aa, Artificial Sequence
  Cyclic GFR-binding peptide
HQLFVTAKKHQGQHPKIRIKRMQVPREE

SEQ ID NO: 21804 - protein, 33 aa, Artificial Sequence
  Cyclic GFR-binding peptide
KNHQLFVTAKKHQGQHPKIRIKRMQVPREETPV

SEQ ID NO: 21805 - protein, 36 aa, Artificial Sequence
  Cyclic GFR-binding peptide
  MOD_RES (2)..(2): Xaa is C or S
KXALHDELTVQVEKFIPKKRVIEVKAVKVSRLQVQT

SEQ ID NO: 21806 - protein, 22 aa, Artificial Sequence
  Cyclic GFR-binding peptide
SMEGLHQGQHPKIRMIQMTINS

SEQ ID NO: 21807 - protein, 30 aa, Artificial Sequence
  Cyclic GFR-binding peptide
  MOD_RES (30)..(30): Xaa is C or S
VQVEKFIPKKRVIEVKAVKVSRLQVQTPRX

SEQ ID NO: 21808 - protein, 30 aa, Artificial Sequence
  Cyclic GFR-binding peptide
  MOD_RES (29)..(29): Xaa is C or S
LVQVEKHQGQHPKIRVKAMKVSRQGTPVXE

SEQ ID NO: 21809 - protein, 27 aa, Artificial Sequence
  Cyclic GFR-binding peptide
SMEGLLKPKKRVYEMIQVTINSHHVRS

SEQ ID NO: 21810 - protein, 40 aa, Artificial Sequence
  Cyclic GFR-binding peptide
  MOD_RES (1)..(3)..(37): Xaa is C or S
XEXQSHEELVTAKKHQGQHPKIRIKRMQVPRQGTPVXELG

SEQ ID NO: 21811 - protein, 40 aa, Artificial Sequence
  Cyclic GFR-binding peptide
  MOD_RES (2)..(36): Xaa is C or S
EXQSHEELVQVEKHQGQHPKIRVKAMKVSRQGTPVXELGE

SEQ ID NO: 21812 - protein, 30 aa, Artificial Sequence
  Cyclic GFR-binding peptide
  MOD_RES (1)..(1): Xaa is C or S
XALHDELTSMEGIFIPKKRVIEMIQVTINS

SEQ ID NO: 21813 - protein, 24 aa, Artificial Sequence
  Cyclic GFR-binding peptide
SMEGIFIPKKRVIEMIQVTINSLQ

SEQ ID NO: 21814 - protein, 25 aa, Artificial Sequence
  Cyclic GFR-binding peptide
FVQVEKHQGQHPKIRVKAMKVSREE

SEQ ID NO: 21815 - protein, 35 aa, Artificial Sequence
  Cyclic GFR-binding peptide
  MOD_RES (30)..(30): Xaa is C or S
ELVQVEKHQGQHPKIRVKAMKVSRQGTPVXELGED

SEQ ID NO: 21816 - protein, 27 aa, Artificial Sequence
  Cyclic GFR-binding peptide
LSMEGIHQGQHPKIRMIQMTINSQGTP

SEQ ID NO: 21817 - protein, 30 aa, Artificial Sequence
  Cyclic GFR-binding peptide
  MOD_RES (1)..(1): Xaa is C or S
XQSHEELSMEGIHQGQHPKIRMIQMTINSQ

SEQ ID NO: 21818 - protein, 32 aa, Artificial Sequence
  Cyclic GFR-binding peptide
  MOD_RES (31)..(31): Xaa is C or S
RVTAKKLKPKKRVYEIKRVQVPRHHVRSPQXK

SEQ ID NO: 21819 - protein, 31 aa, Artificial Sequence
  Cyclic GFR-binding peptide
ALHDELTVQVEKFIPKKRVIEVKAVKVSRLQ

SEQ ID NO: 21820 - protein, 39 aa, Artificial Sequence
  Cyclic GFR-binding peptide
  MOD_RES (33)..(33): Xaa is C or S
NHQLFVTAKKHQGQHPKIRIKRMQVPREETPVXELGEDN

SEQ ID NO: 21821 - protein, 30 aa, Artificial Sequence
  Cyclic GFR-binding peptide
LHEELRSMEGLLKPKKRVYEMIQVTINSHH

SEQ ID NO: 21822 - protein, 33 aa, Artificial Sequence
  Cyclic GFR-binding peptide
  MOD_RES (31)..(31): Xaa is C or S
RSMEGLLKPKKRVYEMIQVTINSHHVRSPQXKV

SEQ ID NO: 21823 - protein, 41 aa, Artificial Sequence
  Cyclic GFR-binding peptide
  MOD_RES (37)..(37): Xaa is C or S
ELHEELRSMEGLLKPKKRVYEMIQVTINSHHVRSPQXKVSS

SEQ ID NO: 21824 - protein, 37 aa, Artificial Sequence
  Cyclic GFR-binding peptide
  MOD_RES (2)..(36): Xaa is C or S
EXKNHQLFSMEGLHQGQHPKIRMIQMTINSEETPVXE

SEQ ID NO: 21825 - protein, 29 aa, Artificial Sequence
  Cyclic GFR-binding peptide
DELTSMEGIFIPKKRVIEMIQVTINSLQV

SEQ ID NO: 21826 - protein, 39 aa, Artificial Sequence
  Cyclic GFR-binding peptide
  MOD_RES (33)..(33): Xaa is C or S
NHQLFVQVEKHQGQHPKIRVKAMKVSREETPVXELGEDN

SEQ ID NO: 21827 - protein, 34 aa, Artificial Sequence
  Cyclic GFR-binding peptide
  MOD_RES (2)..(4): Xaa is C or S
RXEXKNHQLFVQVEKHQGQHPKIRVKAMKVSREE

SEQ ID NO: 21828 - protein, 39 aa, Artificial Sequence
  Cyclic GFR-binding peptide
  MOD_RES (1)..(3): Xaa is C or S
XAXELHEELRSMEGILKPKKRVYEMIQVTINSHHVRSPQ

SEQ ID NO: 21829 - protein, 31 aa, Artificial Sequence
  Cyclic GFR-binding peptide
  MOD_RES (29)..(29): Xaa is C or S
LSMEGIHQGQHPKIRMIQMTINSQGTPVXEL

SEQ ID NO: 21830 - protein, 36 aa, Artificial Sequence
  Cyclic GFR-binding peptide
  MOD_RES (34)..(34): Xaa is C or S
KNHQLFSMEGIHQGQHPKIRMIQMTINSEETPVXEL

SEQ ID NO: 21831 - protein, 38 aa, Artificial Sequence
  Cyclic GFR-binding peptide
  MOD_RES (33)..(33): Xaa is C or S
SHEELVQVEKHQGQHPKIRVKAMKVSRQGTPVXELGED

SEQ ID NO: 21832 - protein, 32 aa, Artificial Sequence
  Cyclic GFR-binding peptide
  MOD_RES (2)..(2): Xaa is C or S
EXQSHEELVTAKKHQGQHPKIRIKRMQVPRQG

SEQ ID NO: 21833 - protein, 32 aa, Artificial Sequence
  Cyclic GFR-binding peptide
KNHQLFSMEGLHQGQHPKIRMIQMTINSEETP

SEQ ID NO: 21834 - protein, 33 aa, Artificial Sequence
  Cyclic GFR-binding peptide
  MOD_RES (2)..(4): Xaa is C or S
AXAXELHEELRVTAKKLKPKKRVYEIKRVQVPR

SEQ ID NO: 21835 - protein, 37 aa, Artificial Sequence
  Cyclic GFR-binding peptide
  MOD_RES (2)..(2): Xaa is C or S
AXELHEELRVTAKKLKPKKRVYEIKRVQVPRHHVRSP

SEQ ID NO: 21836 - protein, 33 aa, Artificial Sequence
  Cyclic GFR-binding peptide
  MOD_RES (2)..(2): Xaa is C or S
AXELHEELRVTAKKLKPKKRVYEIKRVQVPRHH

SEQ ID NO: 21837 - protein, 27 aa, Artificial Sequence
  Cyclic GFR-binding peptide
HDELTSMEGLFIPKKRVIEMIQVTINS

SEQ ID NO: 21838 - protein, 30 aa, Artificial Sequence
  Cyclic GFR-binding peptide
NHQLFVQVEKHQGQHPKIRVKAMKVSREET

SEQ ID NO: 21839 - protein, 43 aa, Artificial Sequence
  Cyclic GFR-binding peptide
  MOD_RES (2)..(4)..(41): Xaa is C or S
AXAXELHEELRSMEGILKPKKRVYEMIQVTINSHHVRSPQXKV

SEQ ID NO: 21840 - protein, 34 aa, Artificial Sequence
  Cyclic GFR-binding peptide
  MOD_RES (2)..(2): Xaa is C or S
AXELHEELRVTAKKLKPKKRVYEIKRVQVPRHHV

SEQ ID NO: 21841 - protein, 37 aa, Artificial Sequence
  Cyclic GFR-binding peptide
  MOD_RES (2)..(2): Xaa is C or S
AXELHEELRSMEGLLKPKKRVYEMIQVTINSHHVRSP

SEQ ID NO: 21842 - protein, 30 aa, Artificial Sequence
  Cyclic GFR-binding peptide
NHQLFVTAKKHQGQHPKIRIKRMQVPREET

SEQ ID NO: 21843 - protein, 35 aa, Artificial Sequence
  Cyclic GFR-binding peptide
  MOD_RES (31)..(31): Xaa is C or S
TSMEGIFIPKKRVIEMIQVTINSLQVQTPRXQVNR

SEQ ID NO: 21844 - protein, 33 aa, Artificial Sequence
  Cyclic GFR-binding peptide
  MOD_RES (31)..(31): Xaa is C or S
QLFVTAKKHQGQHPKIRIKRMQVPREETPVXEL

SEQ ID NO: 21845 - protein, 25 aa, Artificial Sequence
  Cyclic GFR-binding peptide
VTAKKLKPKKRVYEIKRVQVPRHHV

SEQ ID NO: 21846 - protein, 30 aa, Artificial Sequence
  Cyclic GFR-binding peptide
  MOD_RES (30)..(30): Xaa is C or S
SMEGILKPKKRVYEMIQVTINSHHVRSPQX

SEQ ID NO: 21847 - protein, 40 aa, Artificial Sequence
  Cyclic GFR-binding peptide
  MOD_RES (1)..(38): Xaa is C or S
XELHEELRSMEGILKPKKRVYEMIQVTINSHHVRSPQXKV

SEQ ID NO: 21848 - protein, 30 aa, Artificial Sequence
  Cyclic GFR-binding peptide
ELRSMEGILKPKKRVYEMIQVTINSHHVRS

SEQ ID NO: 21849 - protein, 30 aa, Artificial Sequence
  Cyclic GFR-binding peptide
  MOD_RES (30)..(30): Xaa is C or S
ELSMEGIHQGQHPKIRMIQMTINSQGTPVX

SEQ ID NO: 21850 - protein, 34 aa, Artificial Sequence
  Cyclic GFR-binding peptide
  MOD_RES (1)..(3): Xaa is C or S
XEXKNHQLFSMEGLHQGQHPKIRMIQMTINSEET

SEQ ID NO: 21851 - protein, 35 aa, Artificial Sequence
  Cyclic GFR-binding peptide
  MOD_RES (2)..(4): Xaa is C or S
AXAXELHEELRVTAKKLKPKKRVYEIKRVQVPRHH

SEQ ID NO: 21852 - protein, 39 aa, Artificial Sequence
  Cyclic GFR-binding peptide
  MOD_RES (35)..(35): Xaa is C or S
HDELTSMEGLFIPKKRVIEMIQVTINSLQVQTPRXQVNR

SEQ ID NO: 21853 - protein, 24 aa, Artificial Sequence
  Cyclic GFR-binding peptide
LFVTAKKHQGQHPKIRIKRMQVPR

SEQ ID NO: 21854 - protein, 41 aa, Artificial Sequence
  Cyclic GFR-binding peptide
  MOD_RES (2)..(36): Xaa is C or S
EXQSHEELSMEGIHQGQHPKIRMIQMTINSQGTPVXELGED

SEQ ID NO: 21855 - protein, 34 aa, Artificial Sequence
  Cyclic GFR-binding peptide
  MOD_RES (2)..(4): Xaa is C or S
AXAXELHEELRSMEGILKPKKRVYEMIQVTINSH

SEQ ID NO: 21856 - protein, 33 aa, Artificial Sequence
  Cyclic GFR-binding peptide
  MOD_RES (32)..(32): Xaa is C or S
LTVQVEKFIPKKRVIEVKAVKVSRLQVQTPRXQ

SEQ ID NO: 21857 - protein, 31 aa, Artificial Sequence
  Cyclic GFR-binding peptide
  MOD_RES (1)..(1): Xaa is C or S
XELHEELRVTAKKLKPKKRVYEIKRVQVPRH

SEQ ID NO: 21858 - protein, 38 aa, Artificial Sequence
  Cyclic GFR-binding peptide
  MOD_RES (33)..(33): Xaa is C or S
NHQLFSMEGLHQGQHPKIRMIQMTINSEETPVXELGED

SEQ ID NO: 21859 - protein, 31 aa, Artificial Sequence
  Cyclic GFR-binding peptide
  MOD_RES (28)..(28): Xaa is C or S
SMEGIHQGQHPKIRMIQMTINSEETPVXELG

SEQ ID NO: 21860 - protein, 35 aa, Artificial Sequence
  Cyclic GFR-binding peptide
  MOD_RES (2)..(4): Xaa is C or S
RXEXKNHQLFSMEGIHQGQHPKIRMIQMTINSEET

SEQ ID NO: 21861 - protein, 26 aa, Artificial Sequence
  Cyclic GFR-binding peptide
HQLFVQVEKHQGQHPKIRVKAMKVSR

SEQ ID NO: 21862 - protein, 33 aa, Artificial Sequence
  Cyclic GFR-binding peptide
  MOD_RES (32)..(32): Xaa is C or S
HQLFVTAKKHQGQHPKIRIKRMQVPREETPVXE

SEQ ID NO: 21863 - protein, 35 aa, Artificial Sequence
  Cyclic GFR-binding peptide
  MOD_RES (33)..(33): Xaa is C or S
NHQLFSMEGLHQGQHPKIRMIQMTINSEETPVXEL

SEQ ID NO: 21864 - protein, 30 aa, Artificial Sequence
  Cyclic GFR-binding peptide
KNHQLFVQVEKHQGQHPKIRVKAMKVSREE

SEQ ID NO: 21865 - protein, 39 aa, Artificial Sequence
  Cyclic GFR-binding peptide
  MOD_RES (1)..(35): Xaa is C or S
XKNHQLFVTAKKHQGQHPKIRIKRMQVPREETPVXELGE

SEQ ID NO: 21866 - protein, 41 aa, Artificial Sequence
  Cyclic GFR-binding peptide
  MOD_RES (1)..(3)..(37): Xaa is C or S
XEXQSHEELVTAKKHQGQHPKIRIKRMQVPRQGTPVXELGE

SEQ ID NO: 21867 - protein, 33 aa, Artificial Sequence
  Cyclic GFR-binding peptide
  MOD_RES (2)..(4): Xaa is C or S
RXEXKNHQLFSMEGIHQGQHPKIRMIQMTINSE

SEQ ID NO: 21868 - protein, 27 aa, Artificial Sequence
  Cyclic GFR-binding peptide
NHQLFSMEGIHQGQHPKIRMIQMTINS

SEQ ID NO: 21869 - protein, 37 aa, Artificial Sequence
  Cyclic GFR-binding peptide
  MOD_RES (37)..(37): Xaa is C or S
ALHDELTSMEGIFIPKKRVIEMIQVTINSLQVQTPRX

SEQ ID NO: 21870 - protein, 29 aa, Artificial Sequence
  Cyclic GFR-binding peptide
LHDELTSMEGIFIPKKRVIEMIQVTINSL

SEQ ID NO: 21871 - protein, 42 aa, Artificial Sequence
  Cyclic GFR-binding peptide
  MOD_RES (1)..(3)..(37): Xaa is C or S
XEXKNHQLFSMEGLHQGQHPKIRMIQMTINSEETPVXELGED

SEQ ID NO: 21872 - protein, 38 aa, Artificial Sequence
  Cyclic GFR-binding peptide
  MOD_RES (35)..(35): Xaa is C or S
HEELRSMEGLLKPKKRVYEMIQVTINSHHVRSPQXKVS

SEQ ID NO: 21873 - protein, 23 aa, Artificial Sequence
  Cyclic GFR-binding peptide
SMEGIHQGQHPKIRMIQMTINSQ

SEQ ID NO: 21874 - protein, 33 aa, Artificial Sequence
  Cyclic GFR-binding peptide
  MOD_RES (31)..(31): Xaa is C or S
TSMEGLFIPKKRVIEMIQVTINSLQVQTPRXQV

SEQ ID NO: 21875 - protein, 38 aa, Artificial Sequence
  Cyclic GFR-binding peptide
  MOD_RES (1)..(3): Xaa is C or S
XKXALHDELTVQVEKFIPKKRVIEVKAVKVSRLQVQTP

SEQ ID NO: 21876 - protein, 41 aa, Artificial Sequence
  Cyclic GFR-binding peptide
  MOD_RES (2)..(39): Xaa is C or S
KXALHDELTSMEGLFIPKKRVIEMIQVTINSLQVQTPRXQV

SEQ ID NO: 21877 - protein, 35 aa, Artificial Sequence
  Cyclic GFR-binding peptide
  MOD_RES (32)..(32): Xaa is C or S
HQLFVTAKKHQGQHPKIRIKRMQVPREETPVXELG

SEQ ID NO: 21878 - protein, 40 aa, Artificial Sequence
  Cyclic GFR-binding peptide
  MOD_RES (2)..(4): Xaa is C or S
AXAXELHEELRSMEGILKPKKRVYEMIQVTINSHHVRSPQ

SEQ ID NO: 21879 - protein, 31 aa, Artificial Sequence
  Cyclic GFR-binding peptide
ELHEELRSMEGILKPKKRVYEMIQVTINSHH

SEQ ID NO: 21880 - protein, 30 aa, Artificial Sequence
  Cyclic GFR-binding peptide
ALHDELTSMEGIFIPKKRVIEMIQVTINSL

SEQ ID NO: 21881 - protein, 37 aa, Artificial Sequence
  Cyclic GFR-binding peptide
  MOD_RES (1)..(1): Xaa is C or S
XELHEELRSMEGLLKPKKRVYEMIQVTINSHHVRSPQ

SEQ ID NO: 21882 - protein, 40 aa, Artificial Sequence
  Cyclic GFR-binding peptide
  MOD_RES (1)..(35): Xaa is C or S
XKNHQLFVTAKKHQGQHPKIRIKRMQVPREETPVXELGED

SEQ ID NO: 21883 - protein, 28 aa, Artificial Sequence
  Cyclic GFR-binding peptide
HQLFSMEGIHQGQHPKIRMIQMTINSEE

SEQ ID NO: 21884 - protein, 33 aa, Artificial Sequence
  Cyclic GFR-binding peptide
  MOD_RES (1)..(3): Xaa is C or S
XKXALHDELTSMEGIFIPKKRVIEMIQVTINSL

SEQ ID NO: 21885 - protein, 30 aa, Artificial Sequence
  Cyclic GFR-binding peptide
HQLFSMEGIHQGQHPKIRMIQMTINSEETP

SEQ ID NO: 21886 - protein, 27 aa, Artificial Sequence
  Cyclic GFR-binding peptide
ELSMEGIHQGQHPKIRMIQMTINSQGT

SEQ ID NO: 21887 - protein, 38 aa, Artificial Sequence
  Cyclic GFR-binding peptide
  MOD_RES (1)..(3)..(37): Xaa is C or S
XEXQSHEELVQVEKHQGQHPKIRVKAMKVSRQGTPVXE

SEQ ID NO: 21888 - protein, 36 aa, Artificial Sequence
  Cyclic GFR-binding peptide
  MOD_RES (2)..(4): Xaa is C or S
AXAXELHEELRSMEGILKPKKRVYEMIQVTINSHHV

SEQ ID NO: 21889 - protein, 41 aa, Artificial Sequence
  Cyclic GFR-binding peptide
  MOD_RES (2)..(4)..(38): Xaa is C or S
RXEXQSHEELSMEGIHQGQHPKIRMIQMTINSQGTPVXELG

SEQ ID NO: 21890 - protein, 30 aa, Artificial Sequence
  Cyclic GFR-binding peptide
HQLFSMEGLHQGQHPKIRMIQMTINSEETP

SEQ ID NO: 21891 - protein, 42 aa, Artificial Sequence
  Cyclic GFR-binding peptide
  MOD_RES (1)..(3)..(40): Xaa is C or S
XAXELHEELRSMEGILKPKKRVYEMIQVTINSHHVRSPQXKV

SEQ ID NO: 21892 - protein, 37 aa, Artificial Sequence
  Cyclic GFR-binding peptide
  MOD_RES (1)..(35): Xaa is C or S
XKNHQLFSMEGIHQGQHPKIRMIQMTINSEETPVXEL

SEQ ID NO: 21893 - protein, 37 aa, Artificial Sequence
  Cyclic GFR-binding peptide
  MOD_RES (34)..(34): Xaa is C or S
DELTSMEGIFIPKKRVIEMIQVTINSLQVQTPRXQVN

SEQ ID NO: 21894 - protein, 37 aa, Artificial Sequence
  Cyclic GFR-binding peptide
  MOD_RES (1)..(3)..(37): Xaa is C or S
XEXQSHEELVQVEKHQGQHPKIRVKAMKVSRQGTPVX

SEQ ID NO: 21895 - protein, 26 aa, Artificial Sequence
  Cyclic GFR-binding peptide
HQLFVTAKKHQGQHPKIRIKRMQVPR

SEQ ID NO: 21896 - protein, 39 aa, Artificial Sequence
  Cyclic GFR-binding peptide
  MOD_RES (36)..(36): Xaa is C or S
LHDELTSMEGLFIPKKRVIEMIQVTINSLQVQTPRXQVN

SEQ ID NO: 21897 - protein, 30 aa, Artificial Sequence
  Cyclic GFR-binding peptide
EELVQVEKHQGQHPKIRVKAMKVSRQGTPV

SEQ ID NO: 21898 - protein, 42 aa, Artificial Sequence
  Cyclic GFR-binding peptide
  MOD_RES (2)..(4)..(41): Xaa is C or S
AXAXELHEELRSMEGLLKPKKRVYEMIQVTINSHHVRSPQXK

SEQ ID NO: 21899 - protein, 29 aa, Artificial Sequence
  Cyclic GFR-binding peptide
  MOD_RES (28)..(28): Xaa is C or S
VTAKKHQGQHPKIRIKRMQVPREETPVXE

SEQ ID NO: 21900 - protein, 35 aa, Artificial Sequence
  Cyclic GFR-binding peptide
  MOD_RES (33)..(33): Xaa is C or S
NHQLFSMEGIHQGQHPKIRMIQMTINSEETPVXEL

SEQ ID NO: 21901 - protein, 23 aa, Artificial Sequence
  Cyclic GFR-binding peptide
SMEGILKPKKRVYEMIQVTINSH

SEQ ID NO: 21902 - protein, 23 aa, Artificial Sequence
  Cyclic GFR-binding peptide
TSMEGLFIPKKRVIEMIQVTINS

SEQ ID NO: 21903 - protein, 42 aa, Artificial Sequence
  Cyclic GFR-binding peptide
  MOD_RES (2)..(36): Xaa is C or S
EXKNHQLFVQVEKHQGQHPKIRVKAMKVSREETPVXELGEDN

SEQ ID NO: 21904 - protein, 31 aa, Artificial Sequence
  Cyclic GFR-binding peptide
  MOD_RES (30)..(30): Xaa is C or S
ELSMEGIHQGQHPKIRMIQMTINSQGTPVXE

SEQ ID NO: 21905 - protein, 37 aa, Artificial Sequence
  Cyclic GFR-binding peptide
  MOD_RES (1)..(1): Xaa is C or S
XALHDELTSMEGLFIPKKRVIEMIQVTINSLQVQTPR

SEQ ID NO: 21906 - protein, 34 aa, Artificial Sequence
  Cyclic GFR-binding peptide
  MOD_RES (31)..(31): Xaa is C or S
TVQVEKFIPKKRVIEVKAVKVSRLQVQTPRXQVN

SEQ ID NO: 21907 - protein, 33 aa, Artificial Sequence
  Cyclic GFR-binding peptide
  MOD_RES (33)..(33): Xaa is C or S
NHQLFSMEGIHQGQHPKIRMIQMTINSEETPVX

SEQ ID NO: 21908 - protein, 26 aa, Artificial Sequence
  Cyclic GFR-binding peptide
QLFVQVEKHQGQHPKIRVKAMKVSRE

SEQ ID NO: 21909 - protein, 38 aa, Artificial Sequence
  Cyclic GFR-binding peptide
  MOD_RES (1)..(3): Xaa is C or S
XAXELHEELRVTAKKLKPKKRVYEIKRVQVPRHHVRSP

SEQ ID NO: 21910 - protein, 31 aa, Artificial Sequence
  Cyclic GFR-binding peptide
  MOD_RES (28)..(28): Xaa is C or S
VQVEKHQGQHPKIRVKAMKVSREETPVXELG

SEQ ID NO: 21911 - protein, 38 aa, Artificial Sequence
  Cyclic GFR-binding peptide
  MOD_RES (33)..(33): Xaa is C or S
SHEELSMEGIHQGQHPKIRMIQMTINSQGTPVXELGED

SEQ ID NO: 21912 - protein, 40 aa, Artificial Sequence
  Cyclic GFR-binding peptide
  MOD_RES (1)..(35): Xaa is C or S
XQSHEELVQVEKHQGQHPKIRVKAMKVSRQGTPVXELGED

SEQ ID NO: 21913 - protein, 25 aa, Artificial Sequence
  Cyclic GFR-binding peptide
ELTSMEGLFIPKKRVIEMIQVTINS

SEQ ID NO: 21914 - protein, 29 aa, Artificial Sequence
  Cyclic GFR-binding peptide
DELTSMEGLFIPKKRVIEMIQVTINSLQV

SEQ ID NO: 21915 - protein, 39 aa, Artificial Sequence
  Cyclic GFR-binding peptide
  MOD_RES (2)..(4): Xaa is C or S
EXKXALHDELTVQVEKFIPKKRVIEVKAVKVSRLQVQTP

SEQ ID NO: 21916 - protein, 39 aa, Artificial Sequence
  Cyclic GFR-binding peptide
  MOD_RES (2)..(39): Xaa is C or S
AXELHEELRSMEGILKPKKRVYEMIQVTINSHHVRSPQX

SEQ ID NO: 21917 - protein, 35 aa, Artificial Sequence
  Cyclic GFR-binding peptide
  MOD_RES (30)..(30): Xaa is C or S
LFVQVEKHQGQHPKIRVKAMKVSREETPVXELGED

SEQ ID NO: 21918 - protein, 33 aa, Artificial Sequence
  Cyclic GFR-binding peptide
  MOD_RES (2)..(4): Xaa is C or S
AXAXELHEELRVQVEKLKPKKRVYEVKAVKVSR

SEQ ID NO: 21919 - protein, 37 aa, Artificial Sequence
  Cyclic GFR-binding peptide
  MOD_RES (1)..(35): Xaa is C or S
XKNHQLFSMEGLHQGQHPKIRMIQMTINSEETPVXEL

SEQ ID NO: 21920 - protein, 43 aa, Artificial Sequence
  Cyclic GFR-binding peptide
  MOD_RES (2)..(4)..(41): Xaa is C or S
EXKXALHDELTSMEGLFIPKKRVIEMIQVTINSLQVQTPRXQV

SEQ ID NO: 21921 - protein, 24 aa, Artificial Sequence
  Cyclic GFR-binding peptide
LSMEGIHQGQHPKIRMIQMTINSQ

SEQ ID NO: 21922 - protein, 39 aa, Artificial Sequence
  Cyclic GFR-binding peptide
  MOD_RES (1)..(35): Xaa is C or S
XKNHQLFVQVEKHQGQHPKIRVKAMKVSREETPVXELGE

SEQ ID NO: 21923 - protein, 32 aa, Artificial Sequence
  Cyclic GFR-binding peptide
  MOD_RES (2)..(2): Xaa is C or S
KXALHDELTSMEGIFIPKKRVIEMIQVTINSL

SEQ ID NO: 21924 - protein, 32 aa, Artificial Sequence
  Cyclic GFR-binding peptide
  MOD_RES (29)..(29): Xaa is C or S
FSMEGLHQGQHPKIRMIQMTINSEETPVXELG

SEQ ID NO: 21925 - protein, 33 aa, Artificial Sequence
  Cyclic GFR-binding peptide
  MOD_RES (31)..(31): Xaa is C or S
QLFSMEGLHQGQHPKIRMIQMTINSEETPVXEL

SEQ ID NO: 21926 - protein, 35 aa, Artificial Sequence
  Cyclic GFR-binding peptide
  MOD_RES (30)..(30): Xaa is C or S
ELVTAKKHQGQHPKIRIKRMQVPRQGTPVXELGED

SEQ ID NO: 21927 - protein, 38 aa, Artificial Sequence
  Cyclic GFR-binding peptide
  MOD_RES (2)..(4)..(38): Xaa is C or S
RXEXKNHQLFSMEGIHQGQHPKIRMIQMTINSEETPVX

SEQ ID NO: 21928 - protein, 23 aa, Artificial Sequence
  Cyclic GFR-binding peptide
FSMEGIHQGQHPKIRMIQMTINS

SEQ ID NO: 21929 - protein, 39 aa, Artificial Sequence
  Cyclic GFR-binding peptide
  MOD_RES (36)..(36): Xaa is C or S
LHEELRSMEGLLKPKKRVYEMIQVTINSHHVRSPQXKVS

SEQ ID NO: 21930 - protein, 29 aa, Artificial Sequence
  Cyclic GFR-binding peptide
ALHDELTSMEGIFIPKKRVIEMIQVTINS

SEQ ID NO: 21931 - protein, 27 aa, Artificial Sequence
  Cyclic GFR-binding peptide
DELTVQVEKFIPKKRVIEVKAVKVSRL

SEQ ID NO: 21932 - protein, 38 aa, Artificial Sequence
  Cyclic GFR-binding peptide
  MOD_RES (1)..(3)..(37): Xaa is C or S
XEXKNHQLFVQVEKHQGQHPKIRVKAMKVSREETPVXE

SEQ ID NO: 21933 - protein, 38 aa, Artificial Sequence
  Cyclic GFR-binding peptide
  MOD_RES (2)..(2): Xaa is C or S
KXALHDELTSMEGLFIPKKRVIEMIQVTINSLQVQTPR

SEQ ID NO: 21934 - protein, 28 aa, Artificial Sequence
  Cyclic GFR-binding peptide
HQLFSMEGLHQGQHPKIRMIQMTINSEE

SEQ ID NO: 21935 - protein, 35 aa, Artificial Sequence
  Cyclic GFR-binding peptide
  MOD_RES (32)..(32): Xaa is C or S
HEELSMEGIHQGQHPKIRMIQMTINSQGTPVXELG

SEQ ID NO: 21936 - protein, 37 aa, Artificial Sequence
  Cyclic GFR-binding peptide
  MOD_RES (33)..(33): Xaa is C or S
ELTSMEGIFIPKKRVIEMIQVTINSLQVQTPRXQVNR

SEQ ID NO: 21937 - protein, 39 aa, Artificial Sequence
  Cyclic GFR-binding peptide
  MOD_RES (2)..(36): Xaa is C or S
EXKNHQLFVQVEKHQGQHPKIRVKAMKVSREETPVXELG

SEQ ID NO: 21938 - protein, 23 aa, Artificial Sequence
  Cyclic GFR-binding peptide
LSMEGIHQGQHPKIRMIQMTINS

SEQ ID NO: 21939 - protein, 36 aa, Artificial Sequence
  Cyclic GFR-binding peptide
  MOD_RES (32)..(32): Xaa is C or S
HQLFSMEGLHQGQHPKIRMIQMTINSEETPVXELGE

SEQ ID NO: 21940 - protein, 25 aa, Artificial Sequence
  Cyclic GFR-binding peptide
LVQVEKHQGQHPKIRVKAMKVSRQG

SEQ ID NO: 21941 - protein, 31 aa, Artificial Sequence
  Cyclic GFR-binding peptide
DELTSMEGLFIPKKRVIEMIQVTINSLQVQT

SEQ ID NO: 21942 - protein, 38 aa, Artificial Sequence
  Cyclic GFR-binding peptide
  MOD_RES (2)..(4): Xaa is C or S
AXAXELHEELRVTAKKLKPKKRVYEIKRVQVPRHHVRS

SEQ ID NO: 21943 - protein, 35 aa, Artificial Sequence
  Cyclic GFR-binding peptide
  MOD_RES (32)..(32): Xaa is C or S
HQLFVQVEKHQGQHPKIRVKAMKVSREETPVXELG

SEQ ID NO: 21944 - protein, 40 aa, Artificial Sequence
  Cyclic GFR-binding peptide
  MOD_RES (1)..(38): Xaa is C or S
XELHEELRSMEGLLKPKKRVYEMIQVTINSHHVRSPQXKV

SEQ ID NO: 21945 - protein, 29 aa, Artificial Sequence
  Cyclic GFR-binding peptide
HDELTSMEGIFIPKKRVIEMIQVTINSLQ

SEQ ID NO: 21946 - protein, 27 aa, Artificial Sequence
  Cyclic GFR-binding peptide
QLFSMEGLHQGQHPKIRMIQMTINSEE

SEQ ID NO: 21947 - protein, 36 aa, Artificial Sequence
  Cyclic GFR-binding peptide
  MOD_RES (2)..(4): Xaa is C or S
AXAXELHEELRSMEGLLKPKKRVYEMIQVTINSHHV

SEQ ID NO: 21948 - protein, 25 aa, Artificial Sequence
  Cyclic GFR-binding peptide
LTSMEGLFIPKKRVIEMIQVTINSL

SEQ ID NO: 21949 - protein, 37 aa, Artificial Sequence
  Cyclic GFR-binding peptide
  MOD_RES (1)..(3)..(37): Xaa is C or S
XEXQSHEELSMEGIHQGQHPKIRMIQMTINSQGTPVX

SEQ ID NO: 21950 - protein, 27 aa, Artificial Sequence
  Cyclic GFR-binding peptide
QLFSMEGIHQGQHPKIRMIQMTINSEE

SEQ ID NO: 21951 - protein, 23 aa, Artificial Sequence
  Cyclic GFR-binding peptide
VQVEKHQGQHPKIRVKAMKVSRQ

SEQ ID NO: 21952 - protein, 31 aa, Artificial Sequence
  Cyclic GFR-binding peptide
  MOD_RES (31)..(31): Xaa is C or S
EELSMEGIHQGQHPKIRMIQMTINSQGTPVX

SEQ ID NO: 21953 - protein, 39 aa, Artificial Sequence
  Cyclic GFR-binding peptide
  MOD_RES (34)..(34): Xaa is C or S
KNHQLFVTAKKHQGQHPKIRIKRMQVPREETPVXELGED

SEQ ID NO: 21954 - protein, 25 aa, Artificial Sequence
  Cyclic GFR-binding peptide
ELRSMEGILKPKKRVYEMIQVTINS

SEQ ID NO: 21955 - protein, 41 aa, Artificial Sequence
  Cyclic GFR-binding peptide
  MOD_RES (2)..(39): Xaa is C or S
AXELHEELRSMEGLLKPKKRVYEMIQVTINSHHVRSPQXKV

SEQ ID NO: 21956 - protein, 29 aa, Artificial Sequence
  Cyclic GFR-binding peptide
  MOD_RES (1)..(1): Xaa is C or S
XKNHQLFSMEGLHQGQHPKIRMIQMTINS

SEQ ID NO: 21957 - protein, 26 aa, Artificial Sequence
  Cyclic GFR-binding peptide
LTSMEGLFIPKKRVIEMIQVTINSLQ

SEQ ID NO: 21958 - protein, 32 aa, Artificial Sequence
  Cyclic GFR-binding peptide
  MOD_RES (1)..(1): Xaa is C or S
XALHDELTVQVEKFIPKKRVIEVKAVKVSRLQ

SEQ ID NO: 21959 - protein, 39 aa, Artificial Sequence
  Cyclic GFR-binding peptide
  MOD_RES (1)..(3): Xaa is C or S
XKXALHDELTSMEGIFIPKKRVIEMIQVTINSLQVQTPR

SEQ ID NO: 21960 - protein, 33 aa, Artificial Sequence
  Cyclic GFR-binding peptide
  MOD_RES (32)..(32): Xaa is C or S
LRSMEGILKPKKRVYEMIQVTINSHHVRSPQXK

SEQ ID NO: 21961 - protein, 43 aa, Artificial Sequence
  Cyclic GFR-binding peptide
  MOD_RES (1)..(3)..(40): Xaa is C or S
XKXALHDELTSMEGIFIPKKRVIEMIQVTINSLQVQTPRXQVN

SEQ ID NO: 21962 - protein, 33 aa, Artificial Sequence
  Cyclic GFR-binding peptide
QSHEELVQVEKHQGQHPKIRVKAMKVSRQGTPV

SEQ ID NO: 21963 - protein, 44 aa, Artificial Sequence
  Cyclic GFR-binding peptide
  MOD_RES (1)..(3)..(40): Xaa is C or S
XKXALHDELTSMEGIFIPKKRVIEMIQVTINSLQVQTPRXQVNR

SEQ ID NO: 21964 - protein, 44 aa, Artificial Sequence
  Cyclic GFR-binding peptide
  MOD_RES (1)..(3)..(40): Xaa is C or S
XKXALHDELTSMEGLFIPKKRVIEMIQVTINSLQVQTPRXQVNR

SEQ ID NO: 21965 - protein, 38 aa, Artificial Sequence
  Cyclic GFR-binding peptide
  MOD_RES (2)..(4): Xaa is C or S
EXKXALHDELTSMEGLFIPKKRVIEMIQVTINSLQVQT

SEQ ID NO: 21966 - protein, 25 aa, Artificial Sequence
  Cyclic GFR-binding peptide
QLFSMEGIHQGQHPKIRMIQMTINS

SEQ ID NO: 21967 - protein, 33 aa, Artificial Sequence
  Cyclic GFR-binding peptide
QSHEELSMEGIHQGQHPKIRMIQMTINSQGTPV

SEQ ID NO: 21968 - protein, 35 aa, Artificial Sequence
  Cyclic GFR-binding peptide
  MOD_RES (1)..(35): Xaa is C or S
XKNHQLFVTAKKHQGQHPKIRIKRMQVPREETPVX

SEQ ID NO: 21969 - protein, 34 aa, Artificial Sequence
  Cyclic GFR-binding peptide
  MOD_RES (1)..(3): Xaa is C or S
XKXALHDELTVQVEKFIPKKRVIEVKAVKVSRLQ

SEQ ID NO: 21970 - protein, 33 aa, Artificial Sequence
  Cyclic GFR-binding peptide
  MOD_RES (2)..(2): Xaa is C or S
KXALHDELTSMEGLFIPKKRVIEMIQVTINSLQ

SEQ ID NO: 21971 - protein, 39 aa, Artificial Sequence
  Cyclic GFR-binding peptide
  MOD_RES (2)..(4): Xaa is C or S
AXAXELHEELRSMEGILKPKKRVYEMIQVTINSHHVRSP

SEQ ID NO: 21972 - protein, 31 aa, Artificial Sequence
  Cyclic GFR-binding peptide
HEELRSMEGLLKPKKRVYEMIQVTINSHHVR

SEQ ID NO: 21973 - protein, 37 aa, Artificial Sequence
  Cyclic GFR-binding peptide
  MOD_RES (2)..(36): Xaa is C or S
EXQSHEELSMEGIHQGQHPKIRMIQMTINSQGTPVXE

SEQ ID NO: 21974 - protein, 27 aa, Artificial Sequence
  Cyclic GFR-binding peptide
HEELVTAKKHQGQHPKIRIKRMQVPRQ

SEQ ID NO: 21975 - protein, 30 aa, Artificial Sequence
  Cyclic GFR-binding peptide
LHEELRSMEGILKPKKRVYEMIQVTINSHH

SEQ ID NO: 21976 - protein, 34 aa, Artificial Sequence
  Cyclic GFR-binding peptide
  MOD_RES (34)..(34): Xaa is C or S
QSHEELSMEGIHQGQHPKIRMIQMTINSQGTPVX

SEQ ID NO: 21977 - protein, 32 aa, Artificial Sequence
  Cyclic GFR-binding peptide
  MOD_RES (32)..(32): Xaa is C or S
LTSMEGIFIPKKRVIEMIQVTINSLQVQTPRX

SEQ ID NO: 21978 - protein, 37 aa, Artificial Sequence
  Cyclic GFR-binding peptide
  MOD_RES (33)..(33): Xaa is C or S
SHEELVTAKKHQGQHPKIRIKRMQVPRQGTPVXELGE

SEQ ID NO: 21979 - protein, 33 aa, Artificial Sequence
  Cyclic GFR-binding peptide
  MOD_RES (33)..(33): Xaa is C or S
ELTSMEGLFIPKKRVIEMIQVTINSLQVQTPRX

SEQ ID NO: 21980 - protein, 32 aa, Artificial Sequence
  Cyclic GFR-binding peptide
  MOD_RES (1)..(1): Xaa is C or S
XQSHEELVTAKKHQGQHPKIRIKRMQVPRQGT

SEQ ID NO: 21981 - protein, 38 aa, Artificial Sequence
  Cyclic GFR-binding peptide
  MOD_RES (2)..(4): Xaa is C or S
EXKXALHDELTSMEGIFIPKKRVIEMIQVTINSLQVQT

SEQ ID NO: 21982 - protein, 34 aa, Artificial Sequence
  Cyclic GFR-binding peptide
  MOD_RES (2)..(4): Xaa is C or S
AXAXELHEELRVQVEKLKPKKRVYEVKAVKVSRH

SEQ ID NO: 21983 - protein, 30 aa, Artificial Sequence
  Cyclic GFR-binding peptide
  MOD_RES (28)..(28): Xaa is C or S
SMEGIHQGQHPKIRMIQMTINSQGTPVXEL

SEQ ID NO: 21984 - protein, 29 aa, Artificial Sequence
  Cyclic GFR-binding peptide
KNHQLFSMEGLHQGQHPKIRMIQMTINSE

SEQ ID NO: 21985 - protein, 32 aa, Artificial Sequence
  Cyclic GFR-binding peptide
SHEELSMEGIHQGQHPKIRMIQMTINSQGTPV

SEQ ID NO: 21986 - protein, 38 aa, Artificial Sequence
  Cyclic GFR-binding peptide
  MOD_RES (1)..(3)..(37): Xaa is C or S
XEXQSHEELSMEGIHQGQHPKIRMIQMTINSQGTPVXE

SEQ ID NO: 21987 - protein, 35 aa, Artificial Sequence
  Cyclic GFR-binding peptide
  MOD_RES (2)..(4): Xaa is C or S
RXEXQSHEELSMEGIHQGQHPKIRMIQMTINSQGT

SEQ ID NO: 21988 - protein, 39 aa, Artificial Sequence
  Cyclic GFR-binding peptide
  MOD_RES (37)..(37): Xaa is C or S
ELHEELRSMEGILKPKKRVYEMIQVTINSHHVRSPQXKV

SEQ ID NO: 21989 - protein, 27 aa, Artificial Sequence
  Cyclic GFR-binding peptide
LFVTAKKHQGQHPKIRIKRMQVPREET

SEQ ID NO: 21990 - protein, 36 aa, Artificial Sequence
  Cyclic GFR-binding peptide
  MOD_RES (33)..(33): Xaa is C or S
NHQLFVQVEKHQGQHPKIRVKAMKVSREETPVXELG

SEQ ID NO: 21991 - protein, 33 aa, Artificial Sequence
  Cyclic GFR-binding peptide
  MOD_RES (30)..(30): Xaa is C or S
ELVTAKKHQGQHPKIRIKRMQVPRQGTPVXELG

SEQ ID NO: 21992 - protein, 25 aa, Artificial Sequence
  Cyclic GFR-binding peptide
TSMEGIFIPKKRVIEMIQVTINSLQ

SEQ ID NO: 21993 - protein, 28 aa, Artificial Sequence
  Cyclic GFR-binding peptide
LVTAKKHQGQHPKIRIKRMQVPRQGTPV

SEQ ID NO: 21994 - protein, 31 aa, Artificial Sequence
  Cyclic GFR-binding peptide
EELRVTAKKLKPKKRVYEIKRVQVPRHHVRS

SEQ ID NO: 21995 - protein, 38 aa, Artificial Sequence
  Cyclic GFR-binding peptide
  MOD_RES (32)..(32): Xaa is C or S
HQLFSMEGIHQGQHPKIRMIQMTINSEETPVXELGEDN

SEQ ID NO: 21996 - protein, 37 aa, Artificial Sequence
  Cyclic GFR-binding peptide
  MOD_RES (1)..(3)..(37): Xaa is C or S
XEXKNHQLFVQVEKHQGQHPKIRVKAMKVSREETPVX

SEQ ID NO: 21997 - protein, 39 aa, Artificial Sequence
  Cyclic GFR-binding peptide
  MOD_RES (33)..(33): Xaa is C or S
NHQLFSMEGLHQGQHPKIRMIQMTINSEETPVXELGEDN

SEQ ID NO: 21998 - protein, 36 aa, Artificial Sequence
  Cyclic GFR-binding peptide
  MOD_RES (2)..(36): Xaa is C or S
EXQSHEELSMEGIHQGQHPKIRMIQMTINSQGTPVX

SEQ ID NO: 21999 - protein, 35 aa, Artificial Sequence
  Cyclic GFR-binding peptide
  MOD_RES (29)..(29): Xaa is C or S
LVQVEKHQGQHPKIRVKAMKVSRQGTPVXELGEDN

SEQ ID NO: 22000 - protein, 41 aa, Artificial Sequence
  Cyclic GFR-binding peptide
  MOD_RES (1)..(35): Xaa is C or S
XKNHQLFSMEGLHQGQHPKIRMIQMTINSEETPVXELGEDN

SEQ ID NO: 22001 - protein, 28 aa, Artificial Sequence
  Cyclic GFR-binding peptide
LHDELTSMEGLFIPKKRVIEMIQVTINS

SEQ ID NO: 22002 - protein, 36 aa, Artificial Sequence
  Cyclic GFR-binding peptide
  MOD_RES (33)..(33): Xaa is C or S
NHQLFVTAKKHQGQHPKIRIKRMQVPREETPVXELG

SEQ ID NO: 22003 - protein, 24 aa, Artificial Sequence
  Cyclic GFR-binding peptide
SMEGIHQGQHPKIRMIQMTINSEE

SEQ ID NO: 22004 - protein, 32 aa, Artificial Sequence
  Cyclic GFR-binding peptide
  MOD_RES (1)..(1): Xaa is C or S
XKNHQLFSMEGIHQGQHPKIRMIQMTINSEET

SEQ ID NO: 22005 - protein, 33 aa, Artificial Sequence
  Cyclic GFR-binding peptide
  MOD_RES (30)..(30): Xaa is C or S
SMEGLLKPKKRVYEMIQVTINSHHVRSPQXKVS

SEQ ID NO: 22006 - protein, 29 aa, Artificial Sequence
  Cyclic GFR-binding peptide
HDELTSMEGLFIPKKRVIEMIQVTINSLQ

SEQ ID NO: 22007 - protein, 35 aa, Artificial Sequence
  Cyclic GFR-binding peptide
  MOD_RES (1)..(3): Xaa is C or S
XKXALHDELTSMEGIFIPKKRVIEMIQVTINSLQV

SEQ ID NO: 22008 - protein, 31 aa, Artificial Sequence
  Cyclic GFR-binding peptide
ALHDELTSMEGIFIPKKRVIEMIQVTINSLQ

SEQ ID NO: 22009 - protein, 35 aa, Artificial Sequence
  Cyclic GFR-binding peptide
  MOD_RES (2)..(4): Xaa is C or S
EXKXALHDELTSMEGLFIPKKRVIEMIQVTINSLQ

SEQ ID NO: 22010 - protein, 43 aa, Artificial Sequence
  Cyclic GFR-binding peptide
  MOD_RES (2)..(39): Xaa is C or S
AXELHEELRVTAKKLKPKKRVYEIKRVQVPRHHVRSPQXKVSS

SEQ ID NO: 22011 - protein, 30 aa, Artificial Sequence
  Cyclic GFR-binding peptide
ELTSMEGLFIPKKRVIEMIQVTINSLQVQT

SEQ ID NO: 22012 - protein, 35 aa, Artificial Sequence
  Cyclic GFR-binding peptide
  MOD_RES (1)..(3): Xaa is C or S
XKXALHDELTSMEGLFIPKKRVIEMIQVTINSLQV

SEQ ID NO: 22013 - protein, 32 aa, Artificial Sequence
  Cyclic GFR-binding peptide
  MOD_RES (2)..(4): Xaa is C or S
RXEXQSHEELSMEGIHQGQHPKIRMIQMTINS

SEQ ID NO: 22014 - protein, 37 aa, Artificial Sequence
  Cyclic GFR-binding peptide
  MOD_RES (34)..(34): Xaa is C or S
KNHQLFVTAKKHQGQHPKIRIKRMQVPREETPVXELG

SEQ ID NO: 22015 - protein, 37 aa, Artificial Sequence
  Cyclic GFR-binding peptide
  MOD_RES (1)..(3)..(37): Xaa is C or S
XEXQSHEELVTAKKHQGQHPKIRIKRMQVPRQGTPVX

SEQ ID NO: 22016 - protein, 33 aa, Artificial Sequence
  Cyclic GFR-binding peptide
  MOD_RES (1)..(1): Xaa is C or S
XQSHEELSMEGIHQGQHPKIRMIQMTINSQGTP

SEQ ID NO: 22017 - protein, 25 aa, Artificial Sequence
  Cyclic GFR-binding peptide
ELVTAKKHQGQHPKIRIKRMQVPRQ

SEQ ID NO: 22018 - protein, 38 aa, Artificial Sequence
  Cyclic GFR-binding peptide
  MOD_RES (2)..(2): Xaa is C or S
KXALHDELTSMEGIFIPKKRVIEMIQVTINSLQVQTPR

SEQ ID NO: 22019 - protein, 41 aa, Artificial Sequence
  Cyclic GFR-binding peptide
  MOD_RES (2)..(4)..(41): Xaa is C or S
AXAXELHEELRSMEGILKPKKRVYEMIQVTINSHHVRSPQX

SEQ ID NO: 22020 - protein, 28 aa, Artificial Sequence
  Cyclic GFR-binding peptide
QLFSMEGIHQGQHPKIRMIQMTINSEET

SEQ ID NO: 22021 - protein, 39 aa, Artificial Sequence
  Cyclic GFR-binding peptide
  MOD_RES (2)..(4): Xaa is C or S
AXAXELHEELRSMEGLLKPKKRVYEMIQVTINSHHVRSP

SEQ ID NO: 22022 - protein, 37 aa, Artificial Sequence
  Cyclic GFR-binding peptide
  MOD_RES (2)..(4): Xaa is C or S
RXEXKNHQLFSMEGLHQGQHPKIRMIQMTINSEETPV

SEQ ID NO: 22023 - protein, 28 aa, Artificial Sequence
  Cyclic GFR-binding peptide
VQVEKFIPKKRVIEVKAVKVSRLQVQTP

SEQ ID NO: 22024 - protein, 33 aa, Artificial Sequence
  Cyclic GFR-binding peptide
  MOD_RES (33)..(33): Xaa is C or S
ELRSMEGILKPKKRVYEMIQVTINSHHVRSPQX

SEQ ID NO: 22025 - protein, 44 aa, Artificial Sequence
  Cyclic GFR-binding peptide
  MOD_RES (2)..(4)..(38): Xaa is C or S
RXEXQSHEELVTAKKHQGQHPKIRIKRMQVPRQGTPVXELGEDN

SEQ ID NO: 22026 - protein, 41 aa, Artificial Sequence
  Cyclic GFR-binding peptide
  MOD_RES (2)..(4)..(38): Xaa is C or S
RXEXKNHQLFSMEGLHQGQHPKIRMIQMTINSEETPVXELG

SEQ ID NO: 22027 - protein, 29 aa, Artificial Sequence
  Cyclic GFR-binding peptide
LHDELTVQVEKFIPKKRVIEVKAVKVSRL

SEQ ID NO: 22028 - protein, 33 aa, Artificial Sequence
  Cyclic GFR-binding peptide
  MOD_RES (1)..(1): Xaa is C or S
XQSHEELVTAKKHQGQHPKIRIKRMQVPRQGTP

SEQ ID NO: 22029 - protein, 35 aa, Artificial Sequence
  Cyclic GFR-binding peptide
  MOD_RES (1)..(35): Xaa is C or S
XQSHEELVQVEKHQGQHPKIRVKAMKVSRQGTPVX

SEQ ID NO: 22030 - protein, 37 aa, Artificial Sequence
  Cyclic GFR-binding peptide
  MOD_RES (1)..(1): Xaa is C or S
XELHEELRVTAKKLKPKKRVYEIKRVQVPRHHVRSPQ

SEQ ID NO: 22031 - protein, 35 aa, Artificial Sequence
  Cyclic GFR-binding peptide
  MOD_RES (32)..(32): Xaa is C or S
LRSMEGLLKPKKRVYEMIQVTINSHHVRSPQXKVS

SEQ ID NO: 22032 - protein, 45 aa, Artificial Sequence
  Cyclic GFR-binding peptide
  MOD_RES (2)..(4)..(41): Xaa is C or S
EXKXALHDELTVTAKKFIPKKRVIEIKRVQVPRLQVQTPRXQVNR

SEQ ID NO: 22033 - protein, 35 aa, Artificial Sequence
  Cyclic GFR-binding peptide
  MOD_RES (34)..(34): Xaa is C or S
EELRSMEGILKPKKRVYEMIQVTINSHHVRSPQXK

SEQ ID NO: 22034 - protein, 40 aa, Artificial Sequence
  Cyclic GFR-binding peptide
  MOD_RES (1)..(3)..(40): Xaa is C or S
XAXELHEELRVTAKKLKPKKRVYEIKRVQVPRHHVRSPQX

SEQ ID NO: 22035 - protein, 33 aa, Artificial Sequence
  Cyclic GFR-binding peptide
  MOD_RES (31)..(31): Xaa is C or S
QLFSMEGIHQGQHPKIRMIQMTINSEETPVXEL

SEQ ID NO: 22036 - protein, 25 aa, Artificial Sequence
  Cyclic GFR-binding peptide
ELTSMEGIFIPKKRVIEMIQVTINS

SEQ ID NO: 22037 - protein, 33 aa, Artificial Sequence
  Cyclic GFR-binding peptide
  MOD_RES (2)..(2): Xaa is C or S
KXALHDELTSMEGIFIPKKRVIEMIQVTINSLQ

SEQ ID NO: 22038 - protein, 35 aa, Artificial Sequence
  Cyclic GFR-binding peptide
  MOD_RES (1)..(3): Xaa is C or S
XAXELHEELRVTAKKLKPKKRVYEIKRVQVPRHHV

SEQ ID NO: 22039 - protein, 39 aa, Artificial Sequence
  Cyclic GFR-binding peptide
  MOD_RES (1)..(3): Xaa is C or S
XKXALHDELTSMEGLFIPKKRVIEMIQVTINSLQVQTPR

SEQ ID NO: 22040 - protein, 32 aa, Artificial Sequence
  Cyclic GFR-binding peptide
  MOD_RES (1)..(3): Xaa is C or S
XEXQSHEELVQVEKHQGQHPKIRVKAMKVSRQ

SEQ ID NO: 22041 - protein, 32 aa, Artificial Sequence
  Cyclic GFR-binding peptide
  MOD_RES (2)..(2): Xaa is C or S
EXQSHEELSMEGIHQGQHPKIRMIQMTINSQG

SEQ ID NO: 22042 - protein, 38 aa, Artificial Sequence
  Cyclic GFR-binding peptide
  MOD_RES (35)..(35): Xaa is C or S
HDELTVQVEKFIPKKRVIEVKAVKVSRLQVQTPRXQVN

SEQ ID NO: 22043 - protein, 43 aa, Artificial Sequence
  Cyclic GFR-binding peptide
  MOD_RES (1)..(3)..(37): Xaa is C or S
XEXKNHQLFSMEGIHQGQHPKIRMIQMTINSEETPVXELGEDN

SEQ ID NO: 22044 - protein, 29 aa, Artificial Sequence
  Cyclic GFR-binding peptide
NHQLFSMEGLHQGQHPKIRMIQMTINSEE

SEQ ID NO: 22045 - protein, 37 aa, Artificial Sequence
  Cyclic GFR-binding peptide
  MOD_RES (33)..(33): Xaa is C or S
NHQLFSMEGLHQGQHPKIRMIQMTINSEETPVXELGE

SEQ ID NO: 22046 - protein, 40 aa, Artificial Sequence
  Cyclic GFR-binding peptide
  MOD_RES (2)..(4)..(38): Xaa is C or S
RXEXKNHQLFVQVEKHQGQHPKIRVKAMKVSREETPVXEL

SEQ ID NO: 22047 - protein, 32 aa, Artificial Sequence
  Cyclic GFR-binding peptide
  MOD_RES (1)..(3): Xaa is C or S
XAXELHEELRSMEGILKPKKRVYEMIQVTINS

SEQ ID NO: 22048 - protein, 29 aa, Artificial Sequence
  Cyclic GFR-binding peptide
  MOD_RES (1)..(1): Xaa is C or S
XKNHQLFSMEGIHQGQHPKIRMIQMTINS

SEQ ID NO: 22049 - protein, 29 aa, Artificial Sequence
  Cyclic GFR-binding peptide
  MOD_RES (1)..(1): Xaa is C or S
XQSHEELVTAKKHQGQHPKIRIKRMQVPR

SEQ ID NO: 22050 - protein, 27 aa, Artificial Sequence
  Cyclic GFR-binding peptide
QLFVTAKKHQGQHPKIRIKRMQVPREE

SEQ ID NO: 22051 - protein, 32 aa, Artificial Sequence
  Cyclic GFR-binding peptide
  MOD_RES (32)..(32): Xaa is C or S
LRVTAKKLKPKKRVYEIKRVQVPRHHVRSPQX

SEQ ID NO: 22052 - protein, 33 aa, Artificial Sequence
  Cyclic GFR-binding peptide
  MOD_RES (28)..(28): Xaa is C or S
VTAKKHQGQHPKIRIKRMQVPRQGTPVXELGED

SEQ ID NO: 22053 - protein, 33 aa, Artificial Sequence
  Cyclic GFR-binding peptide
ELHEELRSMEGLLKPKKRVYEMIQVTINSHHVR

SEQ ID NO: 22054 - protein, 36 aa, Artificial Sequence
  Cyclic GFR-binding peptide
  MOD_RES (1)..(1): Xaa is C or S
XALHDELTVQVEKFIPKKRVIEVKAVKVSRLQVQTP

SEQ ID NO: 22055 - protein, 35 aa, Artificial Sequence
  Cyclic GFR-binding peptide
  MOD_RES (30)..(30): Xaa is C or S
LFSMEGIHQGQHPKIRMIQMTINSEETPVXELGED

SEQ ID NO: 22056 - protein, 32 aa, Artificial Sequence
  Cyclic GFR-binding peptide
  MOD_RES (29)..(29): Xaa is C or S
FVQVEKHQGQHPKIRVKAMKVSREETPVXELG

SEQ ID NO: 22057 - protein, 39 aa, Artificial Sequence
  Cyclic GFR-binding peptide
  MOD_RES (2)..(4): Xaa is C or S
AXAXELHEELRVTAKKLKPKKRVYEIKRVQVPRHHVRSP

SEQ ID NO: 22058 - protein, 41 aa, Artificial Sequence
  Cyclic GFR-binding peptide
  MOD_RES (37)..(37): Xaa is C or S
ALHDELTSMEGLFIPKKRVIEMIQVTINSLQVQTPRXQVNR

SEQ ID NO: 22059 - protein, 42 aa, Artificial Sequence
  Cyclic GFR-binding peptide
  MOD_RES (2)..(4)..(38): Xaa is C or S
RXEXKNHQLFVQVEKHQGQHPKIRVKAMKVSREETPVXELGE

SEQ ID NO: 22060 - protein, 39 aa, Artificial Sequence
  Cyclic GFR-binding peptide
  MOD_RES (1)..(38): Xaa is C or S
XALHDELTVQVEKFIPKKRVIEVKAVKVSRLQVQTPRXQ

SEQ ID NO: 22061 - protein, 32 aa, Artificial Sequence
  Cyclic GFR-binding peptide
NHQLFSMEGLHQGQHPKIRMIQMTINSEETPV

SEQ ID NO: 22062 - protein, 36 aa, Artificial Sequence
  Cyclic GFR-binding peptide
  MOD_RES (2)..(2): Xaa is C or S
KXALHDELTSMEGIFIPKKRVIEMIQVTINSLQVQT

SEQ ID NO: 22063 - protein, 34 aa, Artificial Sequence
  Cyclic GFR-binding peptide
  MOD_RES (32)..(32): Xaa is C or S
LRVTAKKLKPKKRVYEIKRVQVPRHHVRSPQXKV

SEQ ID NO: 22064 - protein, 29 aa, Artificial Sequence
  Cyclic GFR-binding peptide
  MOD_RES (29)..(29): Xaa is C or S
LVTAKKHQGQHPKIRIKRMQVPRQGTPVX

SEQ ID NO: 22065 - protein, 43 aa, Artificial Sequence
  Cyclic GFR-binding peptide
  MOD_RES (1)..(3)..(37): Xaa is C or S
XEXKNHQLFVTAKKHQGQHPKIRIKRMQVPREETPVXELGEDN

SEQ ID NO: 22066 - protein, 38 aa, Artificial Sequence
  Cyclic GFR-binding peptide
  MOD_RES (35)..(35): Xaa is C or S
HEELRSMEGILKPKKRVYEMIQVTINSHHVRSPQXKVS

SEQ ID NO: 22067 - protein, 32 aa, Artificial Sequence
  Cyclic GFR-binding peptide
  MOD_RES (1)..(3): Xaa is C or S
XAXELHEELRVTAKKLKPKKRVYEIKRVQVPR

SEQ ID NO: 22068 - protein, 25 aa, Artificial Sequence
  Cyclic GFR-binding peptide
ELRSMEGLLKPKKRVYEMIQVTINS

SEQ ID NO: 22069 - protein, 34 aa, Artificial Sequence
  Cyclic GFR-binding peptide
  MOD_RES (1)..(3): Xaa is C or S
XAXELHEELRSMEGLLKPKKRVYEMIQVTINSHH

SEQ ID NO: 22070 - protein, 34 aa, Artificial Sequence
  Cyclic GFR-binding peptide
  MOD_RES (2)..(4): Xaa is C or S
RXEXKNHQLFVTAKKHQGQHPKIRIKRMQVPREE

SEQ ID NO: 22071 - protein, 29 aa, Artificial Sequence
  Cyclic GFR-binding peptide
  MOD_RES (1)..(1): Xaa is C or S
XKNHQLFVTAKKHQGQHPKIRIKRMQVPR

SEQ ID NO: 22072 - protein, 32 aa, Artificial Sequence
  Cyclic GFR-binding peptide
HEELRSMEGILKPKKRVYEMIQVTINSHHVRS

SEQ ID NO: 22073 - protein, 34 aa, Artificial Sequence
  Cyclic GFR-binding peptide
  MOD_RES (29)..(29): Xaa is C or S
LSMEGIHQGQHPKIRMIQMTINSQGTPVXELGED

SEQ ID NO: 22074 - protein, 29 aa, Artificial Sequence
  Cyclic GFR-binding peptide
SHEELSMEGIHQGQHPKIRMIQMTINSQG

SEQ ID NO: 22075 - protein, 39 aa, Artificial Sequence
  Cyclic GFR-binding peptide
  MOD_RES (33)..(33): Xaa is C or S
SHEELSMEGIHQGQHPKIRMIQMTINSQGTPVXELGEDN

SEQ ID NO: 22076 - protein, 37 aa, Artificial Sequence
  Cyclic GFR-binding peptide
  MOD_RES (2)..(36): Xaa is C or S
EXQSHEELVTAKKHQGQHPKIRIKRMQVPRQGTPVXE

SEQ ID NO: 22077 - protein, 32 aa, Artificial Sequence
  Cyclic GFR-binding peptide
LHEELRSMEGILKPKKRVYEMIQVTINSHHVR

SEQ ID NO: 22078 - protein, 31 aa, Artificial Sequence
  Cyclic GFR-binding peptide
HDELTVQVEKFIPKKRVIEVKAVKVSRLQVQ

SEQ ID NO: 22079 - protein, 25 aa, Artificial Sequence
  Cyclic GFR-binding peptide
LFVTAKKHQGQHPKIRIKRMQVPRE

SEQ ID NO: 22080 - protein, 36 aa, Artificial Sequence
  Cyclic GFR-binding peptide
  MOD_RES (2)..(4): Xaa is C or S
EXKXALHDELTVTAKKFIPKKRVIEIKRVQVPRLQV

SEQ ID NO: 22081 - protein, 26 aa, Artificial Sequence
  Cyclic GFR-binding peptide
FSMEGIHQGQHPKIRMIQMTINSEET

SEQ ID NO: 22082 - protein, 34 aa, Artificial Sequence
  Cyclic GFR-binding peptide
  MOD_RES (32)..(32): Xaa is C or S
LTSMEGLFIPKKRVIEMIQVTINSLQVQTPRXQV

SEQ ID NO: 22083 - protein, 26 aa, Artificial Sequence
  Cyclic GFR-binding peptide
FVQVEKHQGQHPKIRVKAMKVSREET

SEQ ID NO: 22084 - protein, 29 aa, Artificial Sequence
  Cyclic GFR-binding peptide
LRSMEGILKPKKRVYEMIQVTINSHHVRS

SEQ ID NO: 22085 - protein, 26 aa, Artificial Sequence
  Cyclic GFR-binding peptide
ELSMEGIHQGQHPKIRMIQMTINSQG

SEQ ID NO: 22086 - protein, 37 aa, Artificial Sequence
  Cyclic GFR-binding peptide
  MOD_RES (33)..(33): Xaa is C or S
NHQLFSMEGIHQGQHPKIRMIQMTINSEETPVXELGE

SEQ ID NO: 22087 - protein, 30 aa, Artificial Sequence
  Cyclic GFR-binding peptide
  MOD_RES (2)..(2): Xaa is C or S
EXKNHQLFVQVEKHQGQHPKIRVKAMKVSR

SEQ ID NO: 22088 - protein, 28 aa, Artificial Sequence
  Cyclic GFR-binding peptide
ELTVQVEKFIPKKRVIEVKAVKVSRLQV

SEQ ID NO: 22089 - protein, 25 aa, Artificial Sequence
  Cyclic GFR-binding peptide
ELRVTAKKLKPKKRVYEIKRVQVPR

SEQ ID NO: 22090 - protein, 30 aa, Artificial Sequence
  Cyclic GFR-binding peptide
LTVQVEKFIPKKRVIEVKAVKVSRLQVQTP

SEQ ID NO: 22091 - protein, 28 aa, Artificial Sequence
  Cyclic GFR-binding peptide
QSHEELVTAKKHQGQHPKIRIKRMQVPR

SEQ ID NO: 22092 - protein, 41 aa, Artificial Sequence
  Cyclic GFR-binding peptide
  MOD_RES (1)..(3)..(40): Xaa is C or S
XKXALHDELTVQVEKFIPKKRVIEVKAVKVSRLQVQTPRXQ

SEQ ID NO: 22093 - protein, 31 aa, Artificial Sequence
  Cyclic GFR-binding peptide
  MOD_RES (2)..(2): Xaa is C or S
EXQSHEELSMEGIHQGQHPKIRMIQMTINSQ

SEQ ID NO: 22094 - protein, 32 aa, Artificial Sequence
  Cyclic GFR-binding peptide
  MOD_RES (28)..(28): Xaa is C or S
VTAKKHQGQHPKIRIKRMQVPREETPVXELGE

SEQ ID NO: 22095 - protein, 41 aa, Artificial Sequence
  Cyclic GFR-binding peptide
  MOD_RES (1)..(35): Xaa is C or S
XQSHEELSMEGIHQGQHPKIRMIQMTINSQGTPVXELGEDN

SEQ ID NO: 22096 - protein, 38 aa, Artificial Sequence
  Cyclic GFR-binding peptide
  MOD_RES (2)..(4): Xaa is C or S
EXKXALHDELTVQVEKFIPKKRVIEVKAVKVSRLQVQT

SEQ ID NO: 22097 - protein, 32 aa, Artificial Sequence
  Cyclic GFR-binding peptide
  MOD_RES (32)..(32): Xaa is C or S
HEELVTAKKHQGQHPKIRIKRMQVPRQGTPVX

SEQ ID NO: 22098 - protein, 37 aa, Artificial Sequence
  Cyclic GFR-binding peptide
  MOD_RES (1)..(3): Xaa is C or S
XKXALHDELTSMEGIFIPKKRVIEMIQVTINSLQVQT

SEQ ID NO: 22099 - protein, 37 aa, Artificial Sequence
  Cyclic GFR-binding peptide
  MOD_RES (33)..(33): Xaa is C or S
SHEELSMEGIHQGQHPKIRMIQMTINSQGTPVXELGE

SEQ ID NO: 22100 - protein, 28 aa, Artificial Sequence
  Cyclic GFR-binding peptide
SHEELVQVEKHQGQHPKIRVKAMKVSRQ

SEQ ID NO: 22101 - protein, 30 aa, Artificial Sequence
  Cyclic GFR-binding peptide
ELHEELRSMEGLLKPKKRVYEMIQVTINSH

SEQ ID NO: 22102 - protein, 23 aa, Artificial Sequence
  Cyclic GFR-binding peptide
VTAKKLKPKKRVYEIKRVQVPRH

SEQ ID NO: 22103 - protein, 41 aa, Artificial Sequence
  Cyclic GFR-binding peptide
  MOD_RES (1)..(35): Xaa is C or S
XQSHEELVTAKKHQGQHPKIRIKRMQVPRQGTPVXELGEDN

SEQ ID NO: 22104 - protein, 43 aa, Artificial Sequence
  Cyclic GFR-binding peptide
  MOD_RES (2)..(4)..(38): Xaa is C or S
RXEXKNHQLFSMEGLHQGQHPKIRMIQMTINSEETPVXELGED

SEQ ID NO: 22105 - protein, 36 aa, Artificial Sequence
  Cyclic GFR-binding peptide
  MOD_RES (2)..(2): Xaa is C or S
KXALHDELTSMEGLFIPKKRVIEMIQVTINSLQVQT

SEQ ID NO: 22106 - protein, 43 aa, Artificial Sequence
  Cyclic GFR-binding peptide
  MOD_RES (2)..(4)..(38): Xaa is C or S
RXEXKNHQLFSMEGIHQGQHPKIRMIQMTINSEETPVXELGED

SEQ ID NO: 22107 - protein, 36 aa, Artificial Sequence
  Cyclic GFR-binding peptide
  MOD_RES (34)..(34): Xaa is C or S
KNHQLFVQVEKHQGQHPKIRVKAMKVSREETPVXEL

SEQ ID NO: 22108 - protein, 33 aa, Artificial Sequence
  Cyclic GFR-binding peptide
  MOD_RES (33)..(33): Xaa is C or S
SHEELVQVEKHQGQHPKIRVKAMKVSRQGTPVX

SEQ ID NO: 22109 - protein, 30 aa, Artificial Sequence
  Cyclic GFR-binding peptide
ELRSMEGLLKPKKRVYEMIQVTINSHHVRS

SEQ ID NO: 22110 - protein, 35 aa, Artificial Sequence
  Cyclic GFR-binding peptide
  MOD_RES (30)..(30): Xaa is C or S
LFSMEGLHQGQHPKIRMIQMTINSEETPVXELGED

SEQ ID NO: 22111 - protein, 32 aa, Artificial Sequence
  Cyclic GFR-binding peptide
HDELTSMEGLFIPKKRVIEMIQVTINSLQVQT

SEQ ID NO: 22112 - protein, 28 aa, Artificial Sequence
  Cyclic GFR-binding peptide
LTVQVEKFIPKKRVIEVKAVKVSRLQVQ

SEQ ID NO: 22113 - protein, 38 aa, Artificial Sequence
  Cyclic GFR-binding peptide
  MOD_RES (37)..(37): Xaa is C or S
ELHEELRSMEGILKPKKRVYEMIQVTINSHHVRSPQXK

SEQ ID NO: 22114 - protein, 36 aa, Artificial Sequence
  Cyclic GFR-binding peptide
  MOD_RES (1)..(3): Xaa is C or S
XKXALHDELTVQVEKFIPKKRVIEVKAVKVSRLQVQ

SEQ ID NO: 22115 - protein, 39 aa, Artificial Sequence
  Cyclic GFR-binding peptide
  MOD_RES (1)..(35): Xaa is C or S
XQSHEELSMEGIHQGQHPKIRMIQMTINSQGTPVXELGE

SEQ ID NO: 22116 - protein, 33 aa, Artificial Sequence
  Cyclic GFR-binding peptide
  MOD_RES (33)..(33): Xaa is C or S
SHEELVTAKKHQGQHPKIRIKRMQVPRQGTPVX

SEQ ID NO: 22117 - protein, 38 aa, Artificial Sequence
  Cyclic GFR-binding peptide
  MOD_RES (34)..(34): Xaa is C or S
DELTSMEGIFIPKKRVIEMIQVTINSLQVQTPRXQVNR

SEQ ID NO: 22118 - protein, 34 aa, Artificial Sequence
  Cyclic GFR-binding peptide
  MOD_RES (30)..(30): Xaa is C or S
SMEGIFIPKKRVIEMIQVTINSLQVQTPRXQVNR

SEQ ID NO: 22119 - protein, 33 aa, Artificial Sequence
  Cyclic GFR-binding peptide
  MOD_RES (30)..(30): Xaa is C or S
LFVQVEKHQGQHPKIRVKAMKVSREETPVXELG

SEQ ID NO: 22120 - protein, 28 aa, Artificial Sequence
  Cyclic GFR-binding peptide
SHEELVTAKKHQGQHPKIRIKRMQVPRQ

SEQ ID NO: 22121 - protein, 37 aa, Artificial Sequence
  Cyclic GFR-binding peptide
  MOD_RES (1)..(3): Xaa is C or S
XKXALHDELTSMEGLFIPKKRVIEMIQVTINSLQVQT

SEQ ID NO: 22122 - protein, 35 aa, Artificial Sequence
  Cyclic GFR-binding peptide
  MOD_RES (2)..(2): Xaa is C or S
EXQSHEELVTAKKHQGQHPKIRIKRMQVPRQGTPV

SEQ ID NO: 22123 - protein, 44 aa, Artificial Sequence
  Cyclic GFR-binding peptide
  MOD_RES (2)..(4)..(38): Xaa is C or S
RXEXQSHEELSMEGIHQGQHPKIRMIQMTINSQGTPVXELGEDN

SEQ ID NO: 22124 - protein, 29 aa, Artificial Sequence
  Cyclic GFR-binding peptide
  MOD_RES (28)..(28): Xaa is C or S
SMEGLHQGQHPKIRMIQMTINSEETPVXE

SEQ ID NO: 22125 - protein, 35 aa, Artificial Sequence
  Cyclic GFR-binding peptide
  MOD_RES (31)..(31): Xaa is C or S
EELSMEGIHQGQHPKIRMIQMTINSQGTPVXELGE

SEQ ID NO: 22126 - protein, 34 aa, Artificial Sequence
  Cyclic GFR-binding peptide
  MOD_RES (31)..(31): Xaa is C or S
TSMEGIFIPKKRVIEMIQVTINSLQVQTPRXQVN

SEQ ID NO: 22127 - protein, 35 aa, Artificial Sequence
  Cyclic GFR-binding peptide
  MOD_RES (29)..(29): Xaa is C or S
FSMEGLHQGQHPKIRMIQMTINSEETPVXELGEDN

SEQ ID NO: 22128 - protein, 24 aa, Artificial Sequence
  Cyclic GFR-binding peptide
FVTAKKHQGQHPKIRIKRMQVPRE

SEQ ID NO: 22129 - protein, 34 aa, Artificial Sequence
  Cyclic GFR-binding peptide
  MOD_RES (34)..(34): Xaa is C or S
DELTSMEGLFIPKKRVIEMIQVTINSLQVQTPRX

SEQ ID NO: 22130 - protein, 31 aa, Artificial Sequence
  Cyclic GFR-binding peptide
LHEELRSMEGLLKPKKRVYEMIQVTINSHHV

SEQ ID NO: 22131 - protein, 32 aa, Artificial Sequence
  Cyclic GFR-binding peptide
NHQLFVQVEKHQGQHPKIRVKAMKVSREETPV

SEQ ID NO: 22132 - protein, 38 aa, Artificial Sequence
  Cyclic GFR-binding peptide
  MOD_RES (1)..(3)..(37): Xaa is C or S
XEXKNHQLFSMEGLHQGQHPKIRMIQMTINSEETPVXE

SEQ ID NO: 22133 - protein, 41 aa, Artificial Sequence
  Cyclic GFR-binding peptide
  MOD_RES (2)..(4)..(41): Xaa is C or S
EXKXALHDELTVQVEKFIPKKRVIEVKAVKVSRLQVQTPRX

SEQ ID NO: 22134 - protein, 42 aa, Artificial Sequence
  Cyclic GFR-binding peptide
  MOD_RES (1)..(3)..(37): Xaa is C or S
XEXQSHEELVQVEKHQGQHPKIRVKAMKVSRQGTPVXELGED

SEQ ID NO: 22135 - protein, 33 aa, Artificial Sequence
  Cyclic GFR-binding peptide
LHEELRVTAKKLKPKKRVYEIKRVQVPRHHVRS

SEQ ID NO: 22136 - protein, 42 aa, Artificial Sequence
  Cyclic GFR-binding peptide
  MOD_RES (2)..(4)..(41): Xaa is C or S
AXAXELHEELRVTAKKLKPKKRVYEIKRVQVPRHHVRSPQXK

SEQ ID NO: 22137 - protein, 32 aa, Artificial Sequence
  Cyclic GFR-binding peptide
HEELRSMEGLLKPKKRVYEMIQVTINSHHVRS

SEQ ID NO: 22138 - protein, 39 aa, Artificial Sequence
  Cyclic GFR-binding peptide
  MOD_RES (34)..(34): Xaa is C or S
KNHQLFVQVEKHQGQHPKIRVKAMKVSREETPVXELGED

SEQ ID NO: 22139 - protein, 32 aa, Artificial Sequence
  Cyclic GFR-binding peptide
DELTSMEGIFIPKKRVIEMIQVTINSLQVQTP

SEQ ID NO: 22140 - protein, 29 aa, Artificial Sequence
  Cyclic GFR-binding peptide
HQLFVQVEKHQGQHPKIRVKAMKVSREET

SEQ ID NO: 22141 - protein, 31 aa, Artificial Sequence
  Cyclic GFR-binding peptide
  MOD_RES (31)..(31): Xaa is C or S
QLFVTAKKHQGQHPKIRIKRMQVPREETPVX

SEQ ID NO: 22142 - protein, 32 aa, Artificial Sequence
  Cyclic GFR-binding peptide
HDELTSMEGIFIPKKRVIEMIQVTINSLQVQT

SEQ ID NO: 22143 - protein, 35 aa, Artificial Sequence
  Cyclic GFR-binding peptide
LHDELTSMEGLFIPKKRVIEMIQVTINSLQVQTPR

SEQ ID NO: 22144 - protein, 32 aa, Artificial Sequence
  Cyclic GFR-binding peptide
  MOD_RES (1)..(3): Xaa is C or S
XEXQSHEELVTAKKHQGQHPKIRIKRMQVPRQ

SEQ ID NO: 22145 - protein, 28 aa, Artificial Sequence
  Cyclic GFR-binding peptide
EELRSMEGILKPKKRVYEMIQVTINSHH

SEQ ID NO: 22146 - protein, 33 aa, Artificial Sequence
  Cyclic GFR-binding peptide
  MOD_RES (2)..(2): Xaa is C or S
EXQSHEELVQVEKHQGQHPKIRVKAMKVSRQGT

SEQ ID NO: 22147 - protein, 28 aa, Artificial Sequence
  Cyclic GFR-binding peptide
VTAKKLKPKKRVYEIKRVQVPRHHVRSP

SEQ ID NO: 22148 - protein, 40 aa, Artificial Sequence
  Cyclic GFR-binding peptide
  MOD_RES (2)..(39): Xaa is C or S
KXALHDELTSMEGIFIPKKRVIEMIQVTINSLQVQTPRXQ

SEQ ID NO: 22149 - protein, 29 aa, Artificial Sequence
  Cyclic GFR-binding peptide
QSHEELVTAKKHQGQHPKIRIKRMQVPRQ

SEQ ID NO: 22150 - protein, 33 aa, Artificial Sequence
  Cyclic GFR-binding peptide
  MOD_RES (1)..(1): Xaa is C or S
XKNHQLFVQVEKHQGQHPKIRVKAMKVSREETP

SEQ ID NO: 22151 - protein, 31 aa, Artificial Sequence
  Cyclic GFR-binding peptide
  MOD_RES (29)..(29): Xaa is C or S
LVTAKKHQGQHPKIRIKRMQVPRQGTPVXEL

SEQ ID NO: 22152 - protein, 27 aa, Artificial Sequence
  Cyclic GFR-binding peptide
EELRSMEGILKPKKRVYEMIQVTINSH

SEQ ID NO: 22153 - protein, 37 aa, Artificial Sequence
  Cyclic GFR-binding peptide
  MOD_RES (2)..(4): Xaa is C or S
RXEXQSHEELSMEGIHQGQHPKIRMIQMTINSQGTPV

SEQ ID NO: 22154 - protein, 27 aa, Artificial Sequence
  Cyclic GFR-binding peptide
VTAKKLKPKKRVYEIKRVQVPRHHVRS

SEQ ID NO: 22155 - protein, 34 aa, Artificial Sequence
  Cyclic GFR-binding peptide
  MOD_RES (34)..(34): Xaa is C or S
QSHEELVQVEKHQGQHPKIRVKAMKVSRQGTPVX

SEQ ID NO: 22156 - protein, 37 aa, Artificial Sequence
  Cyclic GFR-binding peptide
  MOD_RES (2)..(4): Xaa is C or S
EXKXALHDELTVQVEKFIPKKRVIEVKAVKVSRLQVQ

SEQ ID NO: 22157 - protein, 25 aa, Artificial Sequence
  Cyclic GFR-binding peptide
FSMEGIHQGQHPKIRMIQMTINSEE

SEQ ID NO: 22158 - protein, 33 aa, Artificial Sequence
  Cyclic GFR-binding peptide
  MOD_RES (1)..(1): Xaa is C or S
XALHDELTSMEGIFIPKKRVIEMIQVTINSLQV

SEQ ID NO: 22159 - protein, 22 aa, Artificial Sequence
  Cyclic GFR-binding peptide
VQVEKFIPKKRVIEVKAVKVSR

SEQ ID NO: 22160 - protein, 30 aa, Artificial Sequence
  Cyclic GFR-binding peptide
  MOD_RES (1)..(1): Xaa is C or S
XQSHEELVQVEKHQGQHPKIRVKAMKVSRQ

SEQ ID NO: 22161 - protein, 31 aa, Artificial Sequence
  Cyclic GFR-binding peptide
LHDELTSMEGIFIPKKRVIEMIQVTINSLQV

SEQ ID NO: 22162 - protein, 34 aa, Artificial Sequence
  Cyclic GFR-binding peptide
  MOD_RES (2)..(4): Xaa is C or S
AXAXELHEELRVTAKKLKPKKRVYEIKRVQVPRH

SEQ ID NO: 22163 - protein, 33 aa, Artificial Sequence
  Cyclic GFR-binding peptide
  MOD_RES (33)..(33): Xaa is C or S
NHQLFVTAKKHQGQHPKIRIKRMQVPREETPVX

SEQ ID NO: 22164 - protein, 35 aa, Artificial Sequence
  Cyclic GFR-binding peptide
  MOD_RES (2)..(4): Xaa is C or S
AXAXELHEELRVQVEKLKPKKRVYEVKAVKVSRHH

SEQ ID NO: 22165 - protein, 32 aa, Artificial Sequence
  Cyclic GFR-binding peptide
ELRVTAKKLKPKKRVYEIKRVQVPRHHVRSPQ

SEQ ID NO: 22166 - protein, 38 aa, Artificial Sequence
  Cyclic GFR-binding peptide
  MOD_RES (32)..(32): Xaa is C or S
HEELVTAKKHQGQHPKIRIKRMQVPRQGTPVXELGEDN

SEQ ID NO: 22167 - protein, 41 aa, Artificial Sequence
  Cyclic GFR-binding peptide
  MOD_RES (2)..(4)..(38): Xaa is C or S
RXEXQSHEELVQVEKHQGQHPKIRVKAMKVSRQGTPVXELG

SEQ ID NO: 22168 - protein, 31 aa, Artificial Sequence
  Cyclic GFR-binding peptide
HEELVTAKKHQGQHPKIRIKRMQVPRQGTPV

SEQ ID NO: 22169 - protein, 34 aa, Artificial Sequence
  Cyclic GFR-binding peptide
  MOD_RES (28)..(28): Xaa is C or S
SMEGLHQGQHPKIRMIQMTINSEETPVXELGEDN

SEQ ID NO: 22170 - protein, 41 aa, Artificial Sequence
  Cyclic GFR-binding peptide
  MOD_RES (1)..(35): Xaa is C or S
XKNHQLFVQVEKHQGQHPKIRVKAMKVSREETPVXELGEDN

SEQ ID NO: 22171 - protein, 36 aa, Artificial Sequence
  Cyclic GFR-binding peptide
  MOD_RES (32)..(32): Xaa is C or S
LRSMEGLLKPKKRVYEMIQVTINSHHVRSPQXKVSS

SEQ ID NO: 22172 - protein, 34 aa, Artificial Sequence
  Cyclic GFR-binding peptide
  MOD_RES (30)..(30): Xaa is C or S
LFVTAKKHQGQHPKIRIKRMQVPREETPVXELGE

SEQ ID NO: 22173 - protein, 30 aa, Artificial Sequence
  Cyclic GFR-binding peptide
RVTAKKLKPKKRVYEIKRVQVPRHHVRSPQ

SEQ ID NO: 22174 - protein, 35 aa, Artificial Sequence
  Cyclic GFR-binding peptide
  MOD_RES (33)..(33): Xaa is C or S
ELTVQVEKFIPKKRVIEVKAVKVSRLQVQTPRXQV

SEQ ID NO: 22175 - protein, 29 aa, Artificial Sequence
  Cyclic GFR-binding peptide
LHEELRSMEGLLKPKKRVYEMIQVTINSH

SEQ ID NO: 22176 - protein, 28 aa, Artificial Sequence
  Cyclic GFR-binding peptide
QSHEELVQVEKHQGQHPKIRVKAMKVSR

SEQ ID NO: 22177 - protein, 39 aa, Artificial Sequence
  Cyclic GFR-binding peptide
  MOD_RES (2)..(4): Xaa is C or S
EXKXALHDELTSMEGIFIPKKRVIEMIQVTINSLQVQTP

SEQ ID NO: 22178 - protein, 33 aa, Artificial Sequence
  Cyclic GFR-binding peptide
  MOD_RES (2)..(4): Xaa is C or S
AXAXELHEELRSMEGILKPKKRVYEMIQVTINS

SEQ ID NO: 22179 - protein, 34 aa, Artificial Sequence
  Cyclic GFR-binding peptide
  MOD_RES (28)..(28): Xaa is C or S
VQVEKHQGQHPKIRVKAMKVSRQGTPVXELGEDN

SEQ ID NO: 22180 - protein, 32 aa, Artificial Sequence
  Cyclic GFR-binding peptide
  MOD_RES (2)..(4): Xaa is C or S
RXEXQSHEELVQVEKHQGQHPKIRVKAMKVSR

SEQ ID NO: 22181 - protein, 40 aa, Artificial Sequence
  Cyclic GFR-binding peptide
  MOD_RES (1)..(3)..(37): Xaa is C or S
XEXQSHEELVQVEKHQGQHPKIRVKAMKVSRQGTPVXELG

SEQ ID NO: 22182 - protein, 25 aa, Artificial Sequence
  Cyclic GFR-binding peptide
FSMEGLHQGQHPKIRMIQMTINSEE

SEQ ID NO: 22183 - protein, 30 aa, Artificial Sequence
  Cyclic GFR-binding peptide
DELTSMEGLFIPKKRVIEMIQVTINSLQVQ

SEQ ID NO: 22184 - protein, 33 aa, Artificial Sequence
  Cyclic GFR-binding peptide
  MOD_RES (1)..(3): Xaa is C or S
XKXALHDELTVQVEKFIPKKRVIEVKAVKVSRL

SEQ ID NO: 22185 - protein, 33 aa, Artificial Sequence
  Cyclic GFR-binding peptide
  MOD_RES (32)..(32): Xaa is C or S
LRSMEGLLKPKKRVYEMIQVTINSHHVRSPQXK

SEQ ID NO: 22186 - protein, 32 aa, Artificial Sequence
  Cyclic GFR-binding peptide
  MOD_RES (1)..(3): Xaa is C or S
XEXQSHEELSMEGIHQGQHPKIRMIQMTINSQ

SEQ ID NO: 22187 - protein, 34 aa, Artificial Sequence
  Cyclic GFR-binding peptide
  MOD_RES (2)..(2): Xaa is C or S
EXQSHEELVQVEKHQGQHPKIRVKAMKVSRQGTP

SEQ ID NO: 22188 - protein, 41 aa, Artificial Sequence
  Cyclic GFR-binding peptide
  MOD_RES (1)..(3)..(37): Xaa is C or S
XEXQSHEELVQVEKHQGQHPKIRVKAMKVSRQGTPVXELGE

SEQ ID NO: 22189 - protein, 36 aa, Artificial Sequence
  Cyclic GFR-binding peptide
  MOD_RES (36)..(36): Xaa is C or S
LHDELTSMEGLFIPKKRVIEMIQVTINSLQVQTPRX

SEQ ID NO: 22190 - protein, 34 aa, Artificial Sequence
  Cyclic GFR-binding peptide
  MOD_RES (1)..(1): Xaa is C or S
XALHDELTVQVEKFIPKKRVIEVKAVKVSRLQVQ

SEQ ID NO: 22191 - protein, 26 aa, Artificial Sequence
  Cyclic GFR-binding peptide
HEELVTAKKHQGQHPKIRIKRMQVPR

SEQ ID NO: 22192 - protein, 38 aa, Artificial Sequence
  Cyclic GFR-binding peptide
  MOD_RES (2)..(4): Xaa is C or S
AXAXELHEELRSMEGLLKPKKRVYEMIQVTINSHHVRS

SEQ ID NO: 22193 - protein, 30 aa, Artificial Sequence
  Cyclic GFR-binding peptide
  MOD_RES (1)..(1): Xaa is C or S
XELHEELRSMEGILKPKKRVYEMIQVTINS

SEQ ID NO: 22194 - protein, 36 aa, Artificial Sequence
  Cyclic GFR-binding peptide
  MOD_RES (34)..(34): Xaa is C or S
EELRVTAKKLKPKKRVYEIKRVQVPRHHVRSPQXKV

SEQ ID NO: 22195 - protein, 26 aa, Artificial Sequence
  Cyclic GFR-binding peptide
FSMEGLHQGQHPKIRMIQMTINSEET

SEQ ID NO: 22196 - protein, 33 aa, Artificial Sequence
  Cyclic GFR-binding peptide
LHEELRSMEGILKPKKRVYEMIQVTINSHHVRS

SEQ ID NO: 22197 - protein, 31 aa, Artificial Sequence
  Cyclic GFR-binding peptide
HEELRSMEGILKPKKRVYEMIQVTINSHHVR

SEQ ID NO: 22198 - protein, 29 aa, Artificial Sequence
  Cyclic GFR-binding peptide
  MOD_RES (28)..(28): Xaa is C or S
VTAKKHQGQHPKIRIKRMQVPRQGTPVXE

SEQ ID NO: 22199 - protein, 31 aa, Artificial Sequence
  Cyclic GFR-binding peptide
ELRSMEGILKPKKRVYEMIQVTINSHHVRSP

SEQ ID NO: 22200 - protein, 34 aa, Artificial Sequence
  Cyclic GFR-binding peptide
  MOD_RES (2)..(2): Xaa is C or S
EXKNHQLFSMEGIHQGQHPKIRMIQMTINSEETP

SEQ ID NO: 22201 - protein, 36 aa, Artificial Sequence
  Cyclic GFR-binding peptide
  MOD_RES (2)..(36): Xaa is C or S
EXKNHQLFVQVEKHQGQHPKIRVKAMKVSREETPVX

SEQ ID NO: 22202 - protein, 35 aa, Artificial Sequence
  Cyclic GFR-binding peptide
ALHDELTVQVEKFIPKKRVIEVKAVKVSRLQVQTP

SEQ ID NO: 22203 - protein, 28 aa, Artificial Sequence
  Cyclic GFR-binding peptide
QLFVTAKKHQGQHPKIRIKRMQVPREET

SEQ ID NO: 22204 - protein, 44 aa, Artificial Sequence
  Cyclic GFR-binding peptide
  MOD_RES (2)..(4)..(38): Xaa is C or S
RXEXKNHQLFSMEGLHQGQHPKIRMIQMTINSEETPVXELGEDN

SEQ ID NO: 22205 - protein, 36 aa, Artificial Sequence
  Cyclic GFR-binding peptide
  MOD_RES (2)..(4): Xaa is C or S
RXEXKNHQLFVQVEKHQGQHPKIRVKAMKVSREETP

SEQ ID NO: 22206 - protein, 26 aa, Artificial Sequence
  Cyclic GFR-binding peptide
DELTVQVEKFIPKKRVIEVKAVKVSR

SEQ ID NO: 22207 - protein, 30 aa, Artificial Sequence
  Cyclic GFR-binding peptide
  MOD_RES (30)..(30): Xaa is C or S
LFVQVEKHQGQHPKIRVKAMKVSREETPVX

SEQ ID NO: 22208 - protein, 32 aa, Artificial Sequence
  Cyclic GFR-binding peptide
  MOD_RES (30)..(30): Xaa is C or S
SMEGILKPKKRVYEMIQVTINSHHVRSPQXKV

SEQ ID NO: 22209 - protein, 33 aa, Artificial Sequence
  Cyclic GFR-binding peptide
  MOD_RES (30)..(30): Xaa is C or S
VTAKKLKPKKRVYEIKRVQVPRHHVRSPQXKVS

SEQ ID NO: 22210 - protein, 31 aa, Artificial Sequence
  Cyclic GFR-binding peptide
  MOD_RES (2)..(2): Xaa is C or S
EXQSHEELVTAKKHQGQHPKIRIKRMQVPRQ

SEQ ID NO: 22211 - protein, 34 aa, Artificial Sequence
  Cyclic GFR-binding peptide
ALHDELTVQVEKFIPKKRVIEVKAVKVSRLQVQT

SEQ ID NO: 22212 - protein, 37 aa, Artificial Sequence
  Cyclic GFR-binding peptide
  MOD_RES (32)..(32): Xaa is C or S
HQLFVQVEKHQGQHPKIRVKAMKVSREETPVXELGED

SEQ ID NO: 22213 - protein, 36 aa, Artificial Sequence
  Cyclic GFR-binding peptide
  MOD_RES (33)..(33): Xaa is C or S
ELRVTAKKLKPKKRVYEIKRVQVPRHHVRSPQXKVS

SEQ ID NO: 22214 - protein, 38 aa, Artificial Sequence
  Cyclic GFR-binding peptide
  MOD_RES (1)..(35): Xaa is C or S
XQSHEELVQVEKHQGQHPKIRVKAMKVSRQGTPVXELG

SEQ ID NO: 22215 - protein, 32 aa, Artificial Sequence
  Cyclic GFR-binding peptide
HEELRVTAKKLKPKKRVYEIKRVQVPRHHVRS

SEQ ID NO: 22216 - protein, 29 aa, Artificial Sequence
  Cyclic GFR-binding peptide
QSHEELSMEGIHQGQHPKIRMIQMTINSQ

SEQ ID NO: 22217 - protein, 32 aa, Artificial Sequence
  Cyclic GFR-binding peptide
  MOD_RES (2)..(4): Xaa is C or S
RXEXQSHEELVTAKKHQGQHPKIRIKRMQVPR

SEQ ID NO: 22218 - protein, 32 aa, Artificial Sequence
  Cyclic GFR-binding peptide
  MOD_RES (31)..(31): Xaa is C or S
EELVQVEKHQGQHPKIRVKAMKVSRQGTPVXE

SEQ ID NO: 22219 - protein, 37 aa, Artificial Sequence
  Cyclic GFR-binding peptide
  MOD_RES (34)..(34): Xaa is C or S
DELTVQVEKFIPKKRVIEVKAVKVSRLQVQTPRXQVN

SEQ ID NO: 22220 - protein, 36 aa, Artificial Sequence
  Cyclic GFR-binding peptide
  MOD_RES (32)..(32): Xaa is C or S
LTSMEGIFIPKKRVIEMIQVTINSLQVQTPRXQVNR

SEQ ID NO: 22221 - protein, 42 aa, Artificial Sequence
  Cyclic GFR-binding peptide
  MOD_RES (1)..(3)..(40): Xaa is C or S
XAXELHEELRVTAKKLKPKKRVYEIKRVQVPRHHVRSPQXKV

SEQ ID NO: 22222 - protein, 33 aa, Artificial Sequence
  Cyclic GFR-binding peptide
  MOD_RES (2)..(2): Xaa is C or S
EXKNHQLFSMEGIHQGQHPKIRMIQMTINSEET

SEQ ID NO: 22223 - protein, 42 aa, Artificial Sequence
  Cyclic GFR-binding peptide
  MOD_RES (1)..(3)..(37): Xaa is C or S
XEXQSHEELVTAKKHQGQHPKIRIKRMQVPRQGTPVXELGED

SEQ ID NO: 22224 - protein, 25 aa, Artificial Sequence
  Cyclic GFR-binding peptide
QLFSMEGLHQGQHPKIRMIQMTINS

SEQ ID NO: 22225 - protein, 41 aa, Artificial Sequence
  Cyclic GFR-binding peptide
  MOD_RES (37)..(37): Xaa is C or S
ELHEELRVTAKKLKPKKRVYEIKRVQVPRHHVRSPQXKVSS

SEQ ID NO: 22226 - protein, 38 aa, Artificial Sequence
  Cyclic GFR-binding peptide
  MOD_RES (1)..(3): Xaa is C or S
XKXALHDELTSMEGIFIPKKRVIEMIQVTINSLQVQTP

SEQ ID NO: 22227 - protein, 24 aa, Artificial Sequence
  Cyclic GFR-binding peptide
ELSMEGIHQGQHPKIRMIQMTINS

SEQ ID NO: 22228 - protein, 36 aa, Artificial Sequence
  Cyclic GFR-binding peptide
  MOD_RES (33)..(33): Xaa is C or S
SHEELVQVEKHQGQHPKIRVKAMKVSRQGTPVXELG

SEQ ID NO: 22229 - protein, 32 aa, Artificial Sequence
  Cyclic GFR-binding peptide
  MOD_RES (1)..(1): Xaa is C or S
XKNHQLFSMEGLHQGQHPKIRMIQMTINSEET

SEQ ID NO: 22230 - protein, 28 aa, Artificial Sequence
  Cyclic GFR-binding peptide
SMEGLFIPKKRVIEMIQVTINSLQVQTP

SEQ ID NO: 22231 - protein, 37 aa, Artificial Sequence
  Cyclic GFR-binding peptide
  MOD_RES (36)..(36): Xaa is C or S
LHDELTVQVEKFIPKKRVIEVKAVKVSRLQVQTPRXQ

SEQ ID NO: 22232 - protein, 25 aa, Artificial Sequence
  Cyclic GFR-binding peptide
VQVEKFIPKKRVIEVKAVKVSRLQV

SEQ ID NO: 22233 - protein, 43 aa, Artificial Sequence
  Cyclic GFR-binding peptide
  MOD_RES (1)..(3)..(40): Xaa is C or S
XKXALHDELTVQVEKFIPKKRVIEVKAVKVSRLQVQTPRXQVN

SEQ ID NO: 22234 - protein, 36 aa, Artificial Sequence
  Cyclic GFR-binding peptide
  MOD_RES (33)..(33): Xaa is C or S
NHQLFSMEGIHQGQHPKIRMIQMTINSEETPVXELG

SEQ ID NO: 22235 - protein, 28 aa, Artificial Sequence
  Cyclic GFR-binding peptide
  MOD_RES (28)..(28): Xaa is C or S
VTAKKHQGQHPKIRIKRMQVPRQGTPVX

SEQ ID NO: 22236 - protein, 25 aa, Artificial Sequence
  Cyclic GFR-binding peptide
VTAKKHQGQHPKIRIKRMQVPREET

SEQ ID NO: 22237 - protein, 23 aa, Artificial Sequence
  Cyclic GFR-binding peptide
TVQVEKFIPKKRVIEVKAVKVSR

SEQ ID NO: 22238 - protein, 32 aa, Artificial Sequence
  Cyclic GFR-binding peptide
  MOD_RES (30)..(30): Xaa is C or S
LFVTAKKHQGQHPKIRIKRMQVPREETPVXEL

SEQ ID NO: 22239 - protein, 31 aa, Artificial Sequence
  Cyclic GFR-binding peptide
  MOD_RES (2)..(2): Xaa is C or S
EXKNHQLFVTAKKHQGQHPKIRIKRMQVPRE

SEQ ID NO: 22240 - protein, 29 aa, Artificial Sequence
  Cyclic GFR-binding peptide
ELTVQVEKFIPKKRVIEVKAVKVSRLQVQ

SEQ ID NO: 22241 - protein, 39 aa, Artificial Sequence
  Cyclic GFR-binding peptide
  MOD_RES (37)..(37): Xaa is C or S
ALHDELTSMEGIFIPKKRVIEMIQVTINSLQVQTPRXQV

SEQ ID NO: 22242 - protein, 35 aa, Artificial Sequence
  Cyclic GFR-binding peptide
  MOD_RES (2)..(4): Xaa is C or S
RXEXQSHEELVTAKKHQGQHPKIRIKRMQVPRQGT

SEQ ID NO: 22243 - protein, 41 aa, Artificial Sequence
  Cyclic GFR-binding peptide
  MOD_RES (2)..(36): Xaa is C or S
EXKNHQLFVQVEKHQGQHPKIRVKAMKVSREETPVXELGED

SEQ ID NO: 22244 - protein, 25 aa, Artificial Sequence
  Cyclic GFR-binding peptide
SMEGLLKPKKRVYEMIQVTINSHHV

SEQ ID NO: 22245 - protein, 32 aa, Artificial Sequence
  Cyclic GFR-binding peptide
  MOD_RES (1)..(3): Xaa is C or S
XEXKNHQLFVQVEKHQGQHPKIRVKAMKVSRE

SEQ ID NO: 22246 - protein, 36 aa, Artificial Sequence
  Cyclic GFR-binding peptide
  MOD_RES (33)..(33): Xaa is C or S
SHEELVTAKKHQGQHPKIRIKRMQVPRQGTPVXELG

SEQ ID NO: 22247 - protein, 37 aa, Artificial Sequence
  Cyclic GFR-binding peptide
  MOD_RES (31)..(31): Xaa is C or S
EELVQVEKHQGQHPKIRVKAMKVSRQGTPVXELGEDN

SEQ ID NO: 22248 - protein, 30 aa, Artificial Sequence
  Cyclic GFR-binding peptide
QLFSMEGLHQGQHPKIRMIQMTINSEETPV

SEQ ID NO: 22249 - protein, 32 aa, Artificial Sequence
  Cyclic GFR-binding peptide
QSHEELVTAKKHQGQHPKIRIKRMQVPRQGTP

SEQ ID NO: 22250 - protein, 38 aa, Artificial Sequence
  Cyclic GFR-binding peptide
  MOD_RES (1)..(3)..(37): Xaa is C or S
XEXQSHEELVTAKKHQGQHPKIRIKRMQVPRQGTPVXE

SEQ ID NO: 22251 - protein, 29 aa, Artificial Sequence
  Cyclic GFR-binding peptide
ELVTAKKHQGQHPKIRIKRMQVPRQGTPV

SEQ ID NO: 22252 - protein, 32 aa, Artificial Sequence
  Cyclic GFR-binding peptide
  MOD_RES (1)..(3): Xaa is C or S
XEXKNHQLFSMEGLHQGQHPKIRMIQMTINSE

SEQ ID NO: 22253 - protein, 33 aa, Artificial Sequence
  Cyclic GFR-binding peptide
  MOD_RES (33)..(33): Xaa is C or S
ELRVTAKKLKPKKRVYEIKRVQVPRHHVRSPQX

SEQ ID NO: 22254 - protein, 27 aa, Artificial Sequence
  Cyclic GFR-binding peptide
VQVEKFIPKKRVIEVKAVKVSRLQVQT

SEQ ID NO: 22255 - protein, 34 aa, Artificial Sequence
  Cyclic GFR-binding peptide
  MOD_RES (1)..(1): Xaa is C or S
XKNHQLFVTAKKHQGQHPKIRIKRMQVPREETPV

SEQ ID NO: 22256 - protein, 31 aa, Artificial Sequence
  Cyclic GFR-binding peptide
  MOD_RES (28)..(28): Xaa is C or S
VQVEKHQGQHPKIRVKAMKVSRQGTPVXELG

SEQ ID NO: 22257 - protein, 32 aa, Artificial Sequence
  Cyclic GFR-binding peptide
  MOD_RES (31)..(31): Xaa is C or S
TVQVEKFIPKKRVIEVKAVKVSRLQVQTPRXQ

SEQ ID NO: 22258 - protein, 37 aa, Artificial Sequence
  Cyclic GFR-binding peptide
  MOD_RES (36)..(36): Xaa is C or S
LHEELRVTAKKLKPKKRVYEIKRVQVPRHHVRSPQXK

SEQ ID NO: 22259 - protein, 36 aa, Artificial Sequence
  Cyclic GFR-binding peptide
ELHEELRSMEGILKPKKRVYEMIQVTINSHHVRSPQ

SEQ ID NO: 22260 - protein, 44 aa, Artificial Sequence
  Cyclic GFR-binding peptide
  MOD_RES (2)..(4)..(41): Xaa is C or S
EXKXALHDELTSMEGLFIPKKRVIEMIQVTINSLQVQTPRXQVN

SEQ ID NO: 22261 - protein, 32 aa, Artificial Sequence
  Cyclic GFR-binding peptide
  MOD_RES (2)..(4): Xaa is C or S
RXEXKNHQLFVTAKKHQGQHPKIRIKRMQVPR

SEQ ID NO: 22262 - protein, 28 aa, Artificial Sequence
  Cyclic GFR-binding peptide
HEELVQVEKHQGQHPKIRVKAMKVSRQG

SEQ ID NO: 22263 - protein, 36 aa, Artificial Sequence
  Cyclic GFR-binding peptide
  MOD_RES (33)..(33): Xaa is C or S
SHEELSMEGIHQGQHPKIRMIQMTINSQGTPVXELG

SEQ ID NO: 22264 - protein, 33 aa, Artificial Sequence
  Cyclic GFR-binding peptide
DELTSMEGLFIPKKRVIEMIQVTINSLQVQTPR

SEQ ID NO: 22265 - protein, 32 aa, Artificial Sequence
  Cyclic GFR-binding peptide
QSHEELSMEGIHQGQHPKIRMIQMTINSQGTP

SEQ ID NO: 22266 - protein, 30 aa, Artificial Sequence
  Cyclic GFR-binding peptide
  MOD_RES (1)..(1): Xaa is C or S
XELHEELRVTAKKLKPKKRVYEIKRVQVPR

SEQ ID NO: 22267 - protein, 34 aa, Artificial Sequence
  Cyclic GFR-binding peptide
  MOD_RES (2)..(2): Xaa is C or S
AXELHEELRSMEGILKPKKRVYEMIQVTINSHHV

SEQ ID NO: 22268 - protein, 40 aa, Artificial Sequence
  Cyclic GFR-binding peptide
  MOD_RES (2)..(4)..(38): Xaa is C or S
RXEXKNHQLFVTAKKHQGQHPKIRIKRMQVPREETPVXEL

SEQ ID NO: 22269 - protein, 34 aa, Artificial Sequence
  Cyclic GFR-binding peptide
  MOD_RES (32)..(32): Xaa is C or S
HEELSMEGIHQGQHPKIRMIQMTINSQGTPVXEL

SEQ ID NO: 22270 - protein, 25 aa, Artificial Sequence
  Cyclic GFR-binding peptide
LRSMEGLLKPKKRVYEMIQVTINSH

SEQ ID NO: 22271 - protein, 24 aa, Artificial Sequence
  Cyclic GFR-binding peptide
LFSMEGLHQGQHPKIRMIQMTINS

SEQ ID NO: 22272 - protein, 37 aa, Artificial Sequence
  Cyclic GFR-binding peptide
  MOD_RES (36)..(36): Xaa is C or S
LHEELRSMEGILKPKKRVYEMIQVTINSHHVRSPQXK

SEQ ID NO: 22273 - protein, 37 aa, Artificial Sequence
  Cyclic GFR-binding peptide
  MOD_RES (2)..(2): Xaa is C or S
KXALHDELTVQVEKFIPKKRVIEVKAVKVSRLQVQTP

SEQ ID NO: 22274 - protein, 27 aa, Artificial Sequence
  Cyclic GFR-binding peptide
VTAKKHQGQHPKIRIKRMQVPRQGTPV

SEQ ID NO: 22275 - protein, 44 aa, Artificial Sequence
  Cyclic GFR-binding peptide
  MOD_RES (2)..(4)..(38): Xaa is C or S
RXEXQSHEELVQVEKHQGQHPKIRVKAMKVSRQGTPVXELGEDN

SEQ ID NO: 22276 - protein, 36 aa, Artificial Sequence
  Cyclic GFR-binding peptide
  MOD_RES (36)..(36): Xaa is C or S
LHEELRSMEGLLKPKKRVYEMIQVTINSHHVRSPQX

SEQ ID NO: 22277 - protein, 35 aa, Artificial Sequence
  Cyclic GFR-binding peptide
  MOD_RES (35)..(35): Xaa is C or S
HEELRSMEGLLKPKKRVYEMIQVTINSHHVRSPQX

SEQ ID NO: 22278 - protein, 36 aa, Artificial Sequence
  Cyclic GFR-binding peptide
  MOD_RES (2)..(4): Xaa is C or S
RXEXKNHQLFSMEGIHQGQHPKIRMIQMTINSEETP

SEQ ID NO: 22279 - protein, 28 aa, Artificial Sequence
  Cyclic GFR-binding peptide
DELTSMEGIFIPKKRVIEMIQVTINSLQ

SEQ ID NO: 22280 - protein, 36 aa, Artificial Sequence
  Cyclic GFR-binding peptide
  MOD_RES (32)..(32): Xaa is C or S
HQLFVTAKKHQGQHPKIRIKRMQVPREETPVXELGE

SEQ ID NO: 22281 - protein, 25 aa, Artificial Sequence
  Cyclic GFR-binding peptide
VTAKKHQGQHPKIRIKRMQVPRQGT

SEQ ID NO: 22282 - protein, 35 aa, Artificial Sequence
  Cyclic GFR-binding peptide
  MOD_RES (2)..(4): Xaa is C or S
RXEXKNHQLFSMEGLHQGQHPKIRMIQMTINSEET

SEQ ID NO: 22283 - protein, 37 aa, Artificial Sequence
  Cyclic GFR-binding peptide
  MOD_RES (1)..(1): Xaa is C or S
XALHDELTSMEGIFIPKKRVIEMIQVTINSLQVQTPR

SEQ ID NO: 22284 - protein, 27 aa, Artificial Sequence
  Cyclic GFR-binding peptide
VTAKKHQGQHPKIRIKRMQVPREETPV

SEQ ID NO: 22285 - protein, 43 aa, Artificial Sequence
  Cyclic GFR-binding peptide
  MOD_RES (2)..(4)..(41): Xaa is C or S
AXAXELHEELRSMEGLLKPKKRVYEMIQVTINSHHVRSPQXKV

SEQ ID NO: 22286 - protein, 29 aa, Artificial Sequence
  Cyclic GFR-binding peptide
QLFSMEGIHQGQHPKIRMIQMTINSEETP

SEQ ID NO: 22287 - protein, 34 aa, Artificial Sequence
  Cyclic GFR-binding peptide
ALHDELTSMEGLFIPKKRVIEMIQVTINSLQVQT

SEQ ID NO: 22288 - protein, 31 aa, Artificial Sequence
  Cyclic GFR-binding peptide
HQLFSMEGIHQGQHPKIRMIQMTINSEETPV

SEQ ID NO: 22289 - protein, 37 aa, Artificial Sequence
  Cyclic GFR-binding peptide
  MOD_RES (34)..(34): Xaa is C or S
KNHQLFVQVEKHQGQHPKIRVKAMKVSREETPVXELG

SEQ ID NO: 22290 - protein, 34 aa, Artificial Sequence
  Cyclic GFR-binding peptide
  MOD_RES (2)..(2): Xaa is C or S
EXKNHQLFVTAKKHQGQHPKIRIKRMQVPREETP

SEQ ID NO: 22291 - protein, 37 aa, Artificial Sequence
  Cyclic GFR-binding peptide
  MOD_RES (1)..(35): Xaa is C or S
XQSHEELVTAKKHQGQHPKIRIKRMQVPRQGTPVXEL

SEQ ID NO: 22292 - protein, 25 aa, Artificial Sequence
  Cyclic GFR-binding peptide
LTSMEGIFIPKKRVIEMIQVTINSL

SEQ ID NO: 22293 - protein, 37 aa, Artificial Sequence
  Cyclic GFR-binding peptide
  MOD_RES (2)..(4): Xaa is C or S
RXEXQSHEELVQVEKHQGQHPKIRVKAMKVSRQGTPV

SEQ ID NO: 22294 - protein, 33 aa, Artificial Sequence
  Cyclic GFR-binding peptide
  MOD_RES (2)..(4): Xaa is C or S
RXEXQSHEELSMEGLHQGQHPKIRMIQMTINSQ

SEQ ID NO: 22295 - protein, 30 aa, Artificial Sequence
  Cyclic GFR-binding peptide
  MOD_RES (28)..(28): Xaa is C or S
SMEGIHQGQHPKIRMIQMTINSEETPVXEL

SEQ ID NO: 22296 - protein, 42 aa, Artificial Sequence
  Cyclic GFR-binding peptide
  MOD_RES (1)..(3)..(37): Xaa is C or S
XEXQSHEELSMEGIHQGQHPKIRMIQMTINSQGTPVXELGED

SEQ ID NO: 22297 - protein, 39 aa, Artificial Sequence
  Cyclic GFR-binding peptide
  MOD_RES (1)..(3): Xaa is C or S
XAXELHEELRSMEGLLKPKKRVYEMIQVTINSHHVRSPQ

SEQ ID NO: 22298 - protein, 32 aa, Artificial Sequence
  Cyclic GFR-binding peptide
ELHEELRVTAKKLKPKKRVYEIKRVQVPRHHV

SEQ ID NO: 22299 - protein, 36 aa, Artificial Sequence
  Cyclic GFR-binding peptide
  MOD_RES (31)..(31): Xaa is C or S
EELVQVEKHQGQHPKIRVKAMKVSRQGTPVXELGED

SEQ ID NO: 22300 - protein, 26 aa, Artificial Sequence
  Cyclic GFR-binding peptide
EELVQVEKHQGQHPKIRVKAMKVSRQ

SEQ ID NO: 22301 - protein, 35 aa, Artificial Sequence
  Cyclic GFR-binding peptide
  MOD_RES (35)..(35): Xaa is C or S
HEELRSMEGILKPKKRVYEMIQVTINSHHVRSPQX

SEQ ID NO: 22302 - protein, 34 aa, Artificial Sequence
  Cyclic GFR-binding peptide
  MOD_RES (2)..(4): Xaa is C or S
RXEXQSHEELSMEGLHQGQHPKIRMIQMTINSQG

SEQ ID NO: 22303 - protein, 36 aa, Artificial Sequence
  Cyclic GFR-binding peptide
  MOD_RES (33)..(33): Xaa is C or S
NHQLFSMEGLHQGQHPKIRMIQMTINSEETPVXELG

SEQ ID NO: 22304 - protein, 36 aa, Artificial Sequence
  Cyclic GFR-binding peptide
  MOD_RES (34)..(34): Xaa is C or S
EELRSMEGLLKPKKRVYEMIQVTINSHHVRSPQXKV

SEQ ID NO: 22305 - protein, 38 aa, Artificial Sequence
  Cyclic GFR-binding peptide
  MOD_RES (2)..(4)..(38): Xaa is C or S
RXEXKNHQLFVTAKKHQGQHPKIRIKRMQVPREETPVX

SEQ ID NO: 22306 - protein, 34 aa, Artificial Sequence
  Cyclic GFR-binding peptide
  MOD_RES (33)..(33): Xaa is C or S
ELRVTAKKLKPKKRVYEIKRVQVPRHHVRSPQXK

SEQ ID NO: 22307 - protein, 43 aa, Artificial Sequence
  Cyclic GFR-binding peptide
  MOD_RES (2)..(4)..(41): Xaa is C or S
AXAXELHEELRVTAKKLKPKKRVYEIKRVQVPRHHVRSPQXKV

SEQ ID NO: 22308 - protein, 29 aa, Artificial Sequence
  Cyclic GFR-binding peptide
LFVQVEKHQGQHPKIRVKAMKVSREETPV

SEQ ID NO: 22309 - protein, 30 aa, Artificial Sequence
  Cyclic GFR-binding peptide
HEELVQVEKHQGQHPKIRVKAMKVSRQGTP

SEQ ID NO: 22310 - protein, 36 aa, Artificial Sequence
  Cyclic GFR-binding peptide
  MOD_RES (2)..(4): Xaa is C or S
AXAXELHEELRVQVEKLKPKKRVYEVKAVKVSRHHV

SEQ ID NO: 22311 - protein, 38 aa, Artificial Sequence
  Cyclic GFR-binding peptide
  MOD_RES (36)..(36): Xaa is C or S
LHDELTSMEGLFIPKKRVIEMIQVTINSLQVQTPRXQV

SEQ ID NO: 22312 - protein, 35 aa, Artificial Sequence
  Cyclic GFR-binding peptide
LHEELRSMEGLLKPKKRVYEMIQVTINSHHVRSPQ

SEQ ID NO: 22313 - protein, 33 aa, Artificial Sequence
  Cyclic GFR-binding peptide
  MOD_RES (29)..(29): Xaa is C or S
LVTAKKHQGQHPKIRIKRMQVPRQGTPVXELGE

SEQ ID NO: 22314 - protein, 42 aa, Artificial Sequence
  Cyclic GFR-binding peptide
  MOD_RES (2)..(39): Xaa is C or S
AXELHEELRSMEGLLKPKKRVYEMIQVTINSHHVRSPQXKVS

SEQ ID NO: 22315 - protein, 22 aa, Artificial Sequence
  Cyclic GFR-binding peptide
VTAKKHQGQHPKIRIKRMQVPR

SEQ ID NO: 22316 - protein, 34 aa, Artificial Sequence
  Cyclic GFR-binding peptide
  MOD_RES (31)..(31): Xaa is C or S
TSMEGLFIPKKRVIEMIQVTINSLQVQTPRXQVN

SEQ ID NO: 22317 - protein, 39 aa, Artificial Sequence
  Cyclic GFR-binding peptide
  MOD_RES (2)..(39): Xaa is C or S
AXELHEELRVTAKKLKPKKRVYEIKRVQVPRHHVRSPQX

SEQ ID NO: 22318 - protein, 27 aa, Artificial Sequence
  Cyclic GFR-binding peptide
RSMEGILKPKKRVYEMIQVTINSHHVR

SEQ ID NO: 22319 - protein, 25 aa, Artificial Sequence
  Cyclic GFR-binding peptide
LRSMEGILKPKKRVYEMIQVTINSH

SEQ ID NO: 22320 - protein, 41 aa, Artificial Sequence
  Cyclic GFR-binding peptide
  MOD_RES (2)..(4)..(41): Xaa is C or S
EXKXALHDELTSMEGIFIPKKRVIEMIQVTINSLQVQTPRX

SEQ ID NO: 22321 - protein, 39 aa, Artificial Sequence
  Cyclic GFR-binding peptide
  MOD_RES (2)..(39): Xaa is C or S
AXELHEELRSMEGLLKPKKRVYEMIQVTINSHHVRSPQX

SEQ ID NO: 22322 - protein, 42 aa, Artificial Sequence
  Cyclic GFR-binding peptide
  MOD_RES (2)..(39): Xaa is C or S
AXELHEELRVTAKKLKPKKRVYEIKRVQVPRHHVRSPQXKVS

SEQ ID NO: 22323 - protein, 33 aa, Artificial Sequence
  Cyclic GFR-binding peptide
ALHDELTSMEGIFIPKKRVIEMIQVTINSLQVQ

SEQ ID NO: 22324 - protein, 31 aa, Artificial Sequence
  Cyclic GFR-binding peptide
  MOD_RES (1)..(1): Xaa is C or S
XQSHEELSMEGIHQGQHPKIRMIQMTINSQG

SEQ ID NO: 22325 - protein, 42 aa, Artificial Sequence
  Cyclic GFR-binding peptide
  MOD_RES (2)..(4)..(38): Xaa is C or S
RXEXKNHQLFSMEGIHQGQHPKIRMIQMTINSEETPVXELGE

SEQ ID NO: 22326 - protein, 30 aa, Artificial Sequence
  Cyclic GFR-binding peptide
  MOD_RES (30)..(30): Xaa is C or S
ELVTAKKHQGQHPKIRIKRMQVPRQGTPVX

SEQ ID NO: 22327 - protein, 33 aa, Artificial Sequence
  Cyclic GFR-binding peptide
  MOD_RES (2)..(2): Xaa is C or S
EXKNHQLFVTAKKHQGQHPKIRIKRMQVPREET

SEQ ID NO: 22328 - protein, 37 aa, Artificial Sequence
  Cyclic GFR-binding peptide
  MOD_RES (1)..(1): Xaa is C or S
XELHEELRSMEGILKPKKRVYEMIQVTINSHHVRSPQ

SEQ ID NO: 22329 - protein, 36 aa, Artificial Sequence
  Cyclic GFR-binding peptide
  MOD_RES (32)..(32): Xaa is C or S
LRSMEGILKPKKRVYEMIQVTINSHHVRSPQXKVSS

SEQ ID NO: 22330 - protein, 32 aa, Artificial Sequence
  Cyclic GFR-binding peptide
  MOD_RES (2)..(2): Xaa is C or S
KXALHDELTVQVEKFIPKKRVIEVKAVKVSRL

SEQ ID NO: 22331 - protein, 39 aa, Artificial Sequence
  Cyclic GFR-binding peptide
  MOD_RES (2)..(4)..(38): Xaa is C or S
RXEXKNHQLFVTAKKHQGQHPKIRIKRMQVPREETPVXE

SEQ ID NO: 22332 - protein, 31 aa, Artificial Sequence
  Cyclic GFR-binding peptide
ELTSMEGIFIPKKRVIEMIQVTINSLQVQTP

SEQ ID NO: 22333 - protein, 41 aa, Artificial Sequence
  Cyclic GFR-binding peptide
  MOD_RES (1)..(3)..(40): Xaa is C or S
XAXELHEELRSMEGLLKPKKRVYEMIQVTINSHHVRSPQXK

SEQ ID NO: 22334 - protein, 35 aa, Artificial Sequence
  Cyclic GFR-binding peptide
  MOD_RES (31)..(31): Xaa is C or S
RSMEGILKPKKRVYEMIQVTINSHHVRSPQXKVSS

SEQ ID NO: 22335 - protein, 24 aa, Artificial Sequence
  Cyclic GFR-binding peptide
LFSMEGIHQGQHPKIRMIQMTINS

SEQ ID NO: 22336 - protein, 34 aa, Artificial Sequence
  Cyclic GFR-binding peptide
  MOD_RES (2)..(4): Xaa is C or S
AXAXELHEELRSMEGLLKPKKRVYEMIQVTINSH

SEQ ID NO: 22337 - protein, 31 aa, Artificial Sequence
  Cyclic GFR-binding peptide
LRVTAKKLKPKKRVYEIKRVQVPRHHVRSPQ

SEQ ID NO: 22338 - protein, 33 aa, Artificial Sequence
  Cyclic GFR-binding peptide
  MOD_RES (2)..(4): Xaa is C or S
RXEXKNHQLFSMEGLHQGQHPKIRMIQMTINSE

SEQ ID NO: 22339 - protein, 27 aa, Artificial Sequence
  Cyclic GFR-binding peptide
HQLFSMEGLHQGQHPKIRMIQMTINSE

SEQ ID NO: 22340 - protein, 32 aa, Artificial Sequence
  Cyclic GFR-binding peptide
ELTVQVEKFIPKKRVIEVKAVKVSRLQVQTPR

SEQ ID NO: 22341 - protein, 32 aa, Artificial Sequence
  Cyclic GFR-binding peptide
  MOD_RES (30)..(30): Xaa is C or S
ELSMEGIHQGQHPKIRMIQMTINSQGTPVXEL

SEQ ID NO: 22342 - protein, 28 aa, Artificial Sequence
  Cyclic GFR-binding peptide
FSMEGLHQGQHPKIRMIQMTINSEETPV

SEQ ID NO: 22343 - protein, 31 aa, Artificial Sequence
  Cyclic GFR-binding peptide
LRSMEGILKPKKRVYEMIQVTINSHHVRSPQ

SEQ ID NO: 22344 - protein, 38 aa, Artificial Sequence
  Cyclic GFR-binding peptide
  MOD_RES (34)..(34): Xaa is C or S
KNHQLFSMEGIHQGQHPKIRMIQMTINSEETPVXELGE

SEQ ID NO: 22345 - protein, 29 aa, Artificial Sequence
  Cyclic GFR-binding peptide
ELHEELRVTAKKLKPKKRVYEIKRVQVPR

SEQ ID NO: 22346 - protein, 35 aa, Artificial Sequence
  Cyclic GFR-binding peptide
ALHDELTSMEGLFIPKKRVIEMIQVTINSLQVQTP

SEQ ID NO: 22347 - protein, 34 aa, Artificial Sequence
  Cyclic GFR-binding peptide
  MOD_RES (28)..(28): Xaa is C or S
VQVEKHQGQHPKIRVKAMKVSREETPVXELGEDN

SEQ ID NO: 22348 - protein, 29 aa, Artificial Sequence
  Cyclic GFR-binding peptide
ELHEELRSMEGLLKPKKRVYEMIQVTINS

SEQ ID NO: 22349 - protein, 22 aa, Artificial Sequence
  Cyclic GFR-binding peptide
SMEGLFIPKKRVIEMIQVTINS

SEQ ID NO: 22350 - protein, 41 aa, Artificial Sequence
  Cyclic GFR-binding peptide
  MOD_RES (1)..(3)..(37): Xaa is C or S
XEXKNHQLFVTAKKHQGQHPKIRIKRMQVPREETPVXELGE

SEQ ID NO: 22351 - protein, 25 aa, Artificial Sequence
  Cyclic GFR-binding peptide
LFVQVEKHQGQHPKIRVKAMKVSRE

SEQ ID NO: 22352 - protein, 22 aa, Artificial Sequence
  Cyclic GFR-binding peptide
SMEGIHQGQHPKIRMIQMTINS

SEQ ID NO: 22353 - protein, 24 aa, Artificial Sequence
  Cyclic GFR-binding peptide
VQVEKHQGQHPKIRVKAMKVSRQG

SEQ ID NO: 22354 - protein, 32 aa, Artificial Sequence
  Cyclic GFR-binding peptide
SHEELVQVEKHQGQHPKIRVKAMKVSRQGTPV

SEQ ID NO: 22355 - protein, 36 aa, Artificial Sequence
  Cyclic GFR-binding peptide
  MOD_RES (34)..(34): Xaa is C or S
KNHQLFSMEGLHQGQHPKIRMIQMTINSEETPVXEL

SEQ ID NO: 22356 - protein, 32 aa, Artificial Sequence
  Cyclic GFR-binding peptide
  MOD_RES (1)..(3): Xaa is C or S
XEXKNHQLFSMEGIHQGQHPKIRMIQMTINSE

SEQ ID NO: 22357 - protein, 36 aa, Artificial Sequence
  Cyclic GFR-binding peptide
  MOD_RES (31)..(31): Xaa is C or S
QLFVQVEKHQGQHPKIRVKAMKVSREETPVXELGED

SEQ ID NO: 22358 - protein, 35 aa, Artificial Sequence
  Cyclic GFR-binding peptide
  MOD_RES (34)..(34): Xaa is C or S
DELTSMEGLFIPKKRVIEMIQVTINSLQVQTPRXQ

SEQ ID NO: 22359 - protein, 32 aa, Artificial Sequence
  Cyclic GFR-binding peptide
  MOD_RES (30)..(30): Xaa is C or S
SMEGLLKPKKRVYEMIQVTINSHHVRSPQXKV

SEQ ID NO: 22360 - protein, 27 aa, Artificial Sequence
  Cyclic GFR-binding peptide
HQLFSMEGIHQGQHPKIRMIQMTINSE

SEQ ID NO: 22361 - protein, 31 aa, Artificial Sequence
  Cyclic GFR-binding peptide
LTSMEGLFIPKKRVIEMIQVTINSLQVQTPR

SEQ ID NO: 22362 - protein, 35 aa, Artificial Sequence
  Cyclic GFR-binding peptide
  MOD_RES (34)..(34): Xaa is C or S
QSHEELSMEGIHQGQHPKIRMIQMTINSQGTPVXE

SEQ ID NO: 22363 - protein, 29 aa, Artificial Sequence
  Cyclic GFR-binding peptide
  MOD_RES (1)..(1): Xaa is C or S
XKNHQLFVQVEKHQGQHPKIRVKAMKVSR

SEQ ID NO: 22364 - protein, 29 aa, Artificial Sequence
  Cyclic GFR-binding peptide
HQLFSMEGIHQGQHPKIRMIQMTINSEET

SEQ ID NO: 22365 - protein, 31 aa, Artificial Sequence
  Cyclic GFR-binding peptide
  MOD_RES (30)..(30): Xaa is C or S
ELVTAKKHQGQHPKIRIKRMQVPRQGTPVXE

SEQ ID NO: 22366 - protein, 36 aa, Artificial Sequence
  Cyclic GFR-binding peptide
  MOD_RES (2)..(4): Xaa is C or S
EXKXALHDELTVQVEKFIPKKRVIEVKAVKVSRLQV

SEQ ID NO: 22367 - protein, 28 aa, Artificial Sequence
  Cyclic GFR-binding peptide
HEELRSMEGILKPKKRVYEMIQVTINSH

SEQ ID NO: 22368 - protein, 43 aa, Artificial Sequence
  Cyclic GFR-binding peptide
  MOD_RES (2)..(4)..(38): Xaa is C or S
RXEXQSHEELVTAKKHQGQHPKIRIKRMQVPRQGTPVXELGED

SEQ ID NO: 22369 - protein, 33 aa, Artificial Sequence
  Cyclic GFR-binding peptide
LHDELTSMEGLFIPKKRVIEMIQVTINSLQVQT

SEQ ID NO: 22370 - protein, 35 aa, Artificial Sequence
  Cyclic GFR-binding peptide
  MOD_RES (31)..(31): Xaa is C or S
QLFVTAKKHQGQHPKIRIKRMQVPREETPVXELGE

SEQ ID NO: 22371 - protein, 42 aa, Artificial Sequence
  Cyclic GFR-binding peptide
  MOD_RES (1)..(38): Xaa is C or S
XELHEELRSMEGILKPKKRVYEMIQVTINSHHVRSPQXKVSS

SEQ ID NO: 22372 - protein, 36 aa, Artificial Sequence
  Cyclic GFR-binding peptide
  MOD_RES (34)..(34): Xaa is C or S
EELRSMEGILKPKKRVYEMIQVTINSHHVRSPQXKV

SEQ ID NO: 22373 - protein, 40 aa, Artificial Sequence
  Cyclic GFR-binding peptide
  MOD_RES (36)..(36): Xaa is C or S
LHEELRVTAKKLKPKKRVYEIKRVQVPRHHVRSPQXKVSS

SEQ ID NO: 22374 - protein, 35 aa, Artificial Sequence
  Cyclic GFR-binding peptide
  MOD_RES (2)..(4): Xaa is C or S
AXAXELHEELRSMEGILKPKKRVYEMIQVTINSHH

SEQ ID NO: 22375 - protein, 27 aa, Artificial Sequence
  Cyclic GFR-binding peptide
RVTAKKLKPKKRVYEIKRVQVPRHHVR

SEQ ID NO: 22376 - protein, 36 aa, Artificial Sequence
  Cyclic GFR-binding peptide
  MOD_RES (1)..(3): Xaa is C or S
XKXALHDELTSMEGIFIPKKRVIEMIQVTINSLQVQ

SEQ ID NO: 22377 - protein, 35 aa, Artificial Sequence
  Cyclic GFR-binding peptide
ELHEELRVTAKKLKPKKRVYEIKRVQVPRHHVRSP

SEQ ID NO: 22378 - protein, 36 aa, Artificial Sequence
  Cyclic GFR-binding peptide
  MOD_RES (35)..(35): Xaa is C or S
HDELTVQVEKFIPKKRVIEVKAVKVSRLQVQTPRXQ

SEQ ID NO: 22379 - protein, 30 aa, Artificial Sequence
  Cyclic GFR-binding peptide
SHEELVQVEKHQGQHPKIRVKAMKVSRQGT

SEQ ID NO: 22380 - protein, 34 aa, Artificial Sequence
  Cyclic GFR-binding peptide
  MOD_RES (2)..(4): Xaa is C or S
RXEXKNHQLFSMEGLHQGQHPKIRMIQMTINSEE

SEQ ID NO: 22381 - protein, 30 aa, Artificial Sequence
  Cyclic GFR-binding peptide
  MOD_RES (30)..(30): Xaa is C or S
LFSMEGLHQGQHPKIRMIQMTINSEETPVX

SEQ ID NO: 22382 - protein, 41 aa, Artificial Sequence
  Cyclic GFR-binding peptide
  MOD_RES (1)..(38): Xaa is C or S
XELHEELRSMEGLLKPKKRVYEMIQVTINSHHVRSPQXKVS

SEQ ID NO: 22383 - protein, 35 aa, Artificial Sequence
  Cyclic GFR-binding peptide
LHDELTSMEGIFIPKKRVIEMIQVTINSLQVQTPR

SEQ ID NO: 22384 - protein, 26 aa, Artificial Sequence
  Cyclic GFR-binding peptide
VQVEKHQGQHPKIRVKAMKVSREETP

SEQ ID NO: 22385 - protein, 39 aa, Artificial Sequence
  Cyclic GFR-binding peptide
  MOD_RES (1)..(3)..(37): Xaa is C or S
XEXQSHEELSMEGIHQGQHPKIRMIQMTINSQGTPVXEL

SEQ ID NO: 22386 - protein, 33 aa, Artificial Sequence
  Cyclic GFR-binding peptide
HEELRSMEGILKPKKRVYEMIQVTINSHHVRSP

SEQ ID NO: 22387 - protein, 37 aa, Artificial Sequence
  Cyclic GFR-binding peptide
  MOD_RES (1)..(3): Xaa is C or S
XAXELHEELRVTAKKLKPKKRVYEIKRVQVPRHHVRS

SEQ ID NO: 22388 - protein, 31 aa, Artificial Sequence
  Cyclic GFR-binding peptide
  MOD_RES (2)..(2): Xaa is C or S
EXKNHQLFSMEGLHQGQHPKIRMIQMTINSE

SEQ ID NO: 22389 - protein, 29 aa, Artificial Sequence
  Cyclic GFR-binding peptide
RVTAKKLKPKKRVYEIKRVQVPRHHVRSP

SEQ ID NO: 22390 - protein, 35 aa, Artificial Sequence
  Cyclic GFR-binding peptide
  MOD_RES (34)..(34): Xaa is C or S
DELTSMEGIFIPKKRVIEMIQVTINSLQVQTPRXQ

SEQ ID NO: 22391 - protein, 34 aa, Artificial Sequence
  Cyclic GFR-binding peptide
  MOD_RES (29)..(29): Xaa is C or S
LVTAKKHQGQHPKIRIKRMQVPRQGTPVXELGED

SEQ ID NO: 22392 - protein, 38 aa, Artificial Sequence
  Cyclic GFR-binding peptide
  MOD_RES (2)..(36): Xaa is C or S
EXKNHQLFSMEGLHQGQHPKIRMIQMTINSEETPVXEL

SEQ ID NO: 22393 - protein, 39 aa, Artificial Sequence
  Cyclic GFR-binding peptide
  MOD_RES (1)..(38): Xaa is C or S
XELHEELRVTAKKLKPKKRVYEIKRVQVPRHHVRSPQXK

SEQ ID NO: 22394 - protein, 36 aa, Artificial Sequence
  Cyclic GFR-binding peptide
  MOD_RES (1)..(3): Xaa is C or S
XEXKNHQLFSMEGIHQGQHPKIRMIQMTINSEETPV

SEQ ID NO: 22395 - protein, 22 aa, Artificial Sequence
  Cyclic GFR-binding peptide
SMEGILKPKKRVYEMIQVTINS

SEQ ID NO: 22396 - protein, 37 aa, Artificial Sequence
  Cyclic GFR-binding peptide
  MOD_RES (1)..(3): Xaa is C or S
XKXALHDELTVQVEKFIPKKRVIEVKAVKVSRLQVQT

SEQ ID NO: 22397 - protein, 33 aa, Artificial Sequence
  Cyclic GFR-binding peptide
  MOD_RES (29)..(29): Xaa is C or S
FVQVEKHQGQHPKIRVKAMKVSREETPVXELGE

SEQ ID NO: 22398 - protein, 43 aa, Artificial Sequence
  Cyclic GFR-binding peptide
  MOD_RES (2)..(4)..(38): Xaa is C or S
RXEXQSHEELVQVEKHQGQHPKIRVKAMKVSRQGTPVXELGED

SEQ ID NO: 22399 - protein, 37 aa, Artificial Sequence
  Cyclic GFR-binding peptide
  MOD_RES (37)..(37): Xaa is C or S
ELHEELRSMEGILKPKKRVYEMIQVTINSHHVRSPQX

SEQ ID NO: 22400 - protein, 33 aa, Artificial Sequence
  Cyclic GFR-binding peptide
  MOD_RES (28)..(28): Xaa is C or S
VTAKKHQGQHPKIRIKRMQVPREETPVXELGED

SEQ ID NO: 22401 - protein, 35 aa, Artificial Sequence
  Cyclic GFR-binding peptide
  MOD_RES (2)..(2): Xaa is C or S
KXALHDELTSMEGLFIPKKRVIEMIQVTINSLQVQ

SEQ ID NO: 22402 - protein, 35 aa, Artificial Sequence
  Cyclic GFR-binding peptide
  MOD_RES (30)..(30): Xaa is C or S
ELSMEGIHQGQHPKIRMIQMTINSQGTPVXELGED

SEQ ID NO: 22403 - protein, 30 aa, Artificial Sequence
  Cyclic GFR-binding peptide
TVQVEKFIPKKRVIEVKAVKVSRLQVQTPR

SEQ ID NO: 22404 - protein, 38 aa, Artificial Sequence
  Cyclic GFR-binding peptide
  MOD_RES (1)..(38): Xaa is C or S
XALHDELTVQVEKFIPKKRVIEVKAVKVSRLQVQTPRX

SEQ ID NO: 22405 - protein, 31 aa, Artificial Sequence
  Cyclic GFR-binding peptide
QSHEELVTAKKHQGQHPKIRIKRMQVPRQGT

SEQ ID NO: 22406 - protein, 29 aa, Artificial Sequence
  Cyclic GFR-binding peptide
  MOD_RES (29)..(29): Xaa is C or S
FVTAKKHQGQHPKIRIKRMQVPREETPVX

SEQ ID NO: 22407 - protein, 43 aa, Artificial Sequence
  Cyclic GFR-binding peptide
  MOD_RES (2)..(39): Xaa is C or S
KXALHDELTSMEGIFIPKKRVIEMIQVTINSLQVQTPRXQVNR

SEQ ID NO: 22408 - protein, 25 aa, Artificial Sequence
  Cyclic GFR-binding peptide
SMEGIFIPKKRVIEMIQVTINSLQV

SEQ ID NO: 22409 - protein, 38 aa, Artificial Sequence
  Cyclic GFR-binding peptide
  MOD_RES (36)..(36): Xaa is C or S
LHDELTVQVEKFIPKKRVIEVKAVKVSRLQVQTPRXQV

SEQ ID NO: 22410 - protein, 34 aa, Artificial Sequence
  Cyclic GFR-binding peptide
LHDELTSMEGLFIPKKRVIEMIQVTINSLQVQTP

SEQ ID NO: 22411 - protein, 26 aa, Artificial Sequence
  Cyclic GFR-binding peptide
LTSMEGIFIPKKRVIEMIQVTINSLQ

SEQ ID NO: 22412 - protein, 26 aa, Artificial Sequence
  Cyclic GFR-binding peptide
VTAKKLKPKKRVYEIKRVQVPRHHVR

SEQ ID NO: 22413 - protein, 28 aa, Artificial Sequence
  Cyclic GFR-binding peptide
  MOD_RES (28)..(28): Xaa is C or S
VTAKKHQGQHPKIRIKRMQVPREETPVX

SEQ ID NO: 22414 - protein, 24 aa, Artificial Sequence
  Cyclic GFR-binding peptide
ELVQVEKHQGQHPKIRVKAMKVSR

SEQ ID NO: 22415 - protein, 39 aa, Artificial Sequence
  Cyclic GFR-binding peptide
  MOD_RES (33)..(33): Xaa is C or S
SHEELVQVEKHQGQHPKIRVKAMKVSRQGTPVXELGEDN

SEQ ID NO: 22416 - protein, 30 aa, Artificial Sequence
  Cyclic GFR-binding peptide
  MOD_RES (30)..(30): Xaa is C or S
SMEGLFIPKKRVIEMIQVTINSLQVQTPRX

SEQ ID NO: 22417 - protein, 34 aa, Artificial Sequence
  Cyclic GFR-binding peptide
  MOD_RES (28)..(28): Xaa is C or S
SMEGIHQGQHPKIRMIQMTINSEETPVXELGEDN

SEQ ID NO: 22418 - protein, 40 aa, Artificial Sequence
  Cyclic GFR-binding peptide
  MOD_RES (2)..(36): Xaa is C or S
EXKNHQLFVTAKKHQGQHPKIRIKRMQVPREETPVXELGE

SEQ ID NO: 22419 - protein, 33 aa, Artificial Sequence
  Cyclic GFR-binding peptide
  MOD_RES (32)..(32): Xaa is C or S
HEELVQVEKHQGQHPKIRVKAMKVSRQGTPVXE

SEQ ID NO: 22420 - protein, 39 aa, Artificial Sequence
  Cyclic GFR-binding peptide
  MOD_RES (1)..(3)..(37): Xaa is C or S
XEXKNHQLFVTAKKHQGQHPKIRIKRMQVPREETPVXEL

SEQ ID NO: 22421 - protein, 34 aa, Artificial Sequence
  Cyclic GFR-binding peptide
  MOD_RES (2)..(2): Xaa is C or S
EXQSHEELVTAKKHQGQHPKIRIKRMQVPRQGTP

SEQ ID NO: 22422 - protein, 28 aa, Artificial Sequence
  Cyclic GFR-binding peptide
NHQLFSMEGLHQGQHPKIRMIQMTINSE

SEQ ID NO: 22423 - protein, 30 aa, Artificial Sequence
  Cyclic GFR-binding peptide
HDELTSMEGLFIPKKRVIEMIQVTINSLQV

SEQ ID NO: 22424 - protein, 34 aa, Artificial Sequence
  Cyclic GFR-binding peptide
  MOD_RES (2)..(4): Xaa is C or S
EXKXALHDELTVQVEKFIPKKRVIEVKAVKVSRL

SEQ ID NO: 22425 - protein, 31 aa, Artificial Sequence
  Cyclic GFR-binding peptide
  MOD_RES (30)..(30): Xaa is C or S
VTAKKLKPKKRVYEIKRVQVPRHHVRSPQXK

SEQ ID NO: 22426 - protein, 24 aa, Artificial Sequence
  Cyclic GFR-binding peptide
SMEGIHQGQHPKIRMIQMTINSQG

SEQ ID NO: 22427 - protein, 27 aa, Artificial Sequence
  Cyclic GFR-binding peptide
TSMEGLFIPKKRVIEMIQVTINSLQVQ

SEQ ID NO: 22428 - protein, 40 aa, Artificial Sequence
  Cyclic GFR-binding peptide
  MOD_RES (2)..(36): Xaa is C or S
EXKNHQLFSMEGLHQGQHPKIRMIQMTINSEETPVXELGE

SEQ ID NO: 22429 - protein, 34 aa, Artificial Sequence
  Cyclic GFR-binding peptide
  MOD_RES (29)..(29): Xaa is C or S
FSMEGIHQGQHPKIRMIQMTINSEETPVXELGED

SEQ ID NO: 22430 - protein, 29 aa, Artificial Sequence
  Cyclic GFR-binding peptide
NHQLFVTAKKHQGQHPKIRIKRMQVPREE

SEQ ID NO: 22431 - protein, 39 aa, Artificial Sequence
  Cyclic GFR-binding peptide
  MOD_RES (1)..(3)..(37): Xaa is C or S
XEXKNHQLFVQVEKHQGQHPKIRVKAMKVSREETPVXEL

SEQ ID NO: 22432 - protein, 33 aa, Artificial Sequence
  Cyclic GFR-binding peptide
  MOD_RES (31)..(31): Xaa is C or S
EELSMEGIHQGQHPKIRMIQMTINSQGTPVXEL

SEQ ID NO: 22433 - protein, 38 aa, Artificial Sequence
  Cyclic GFR-binding peptide
  MOD_RES (33)..(33): Xaa is C or S
NHQLFVTAKKHQGQHPKIRIKRMQVPREETPVXELGED

SEQ ID NO: 22434 - protein, 33 aa, Artificial Sequence
  Cyclic GFR-binding peptide
  MOD_RES (1)..(1): Xaa is C or S
XKNHQLFVTAKKHQGQHPKIRIKRMQVPREETP

SEQ ID NO: 22435 - protein, 41 aa, Artificial Sequence
  Cyclic GFR-binding peptide
  MOD_RES (2)..(36): Xaa is C or S
EXQSHEELVTAKKHQGQHPKIRIKRMQVPRQGTPVXELGED

SEQ ID NO: 22436 - protein, 23 aa, Artificial Sequence
  Cyclic GFR-binding peptide
RSMEGLLKPKKRVYEMIQVTINS

SEQ ID NO: 22437 - protein, 24 aa, Artificial Sequence
  Cyclic GFR-binding peptide
SMEGLFIPKKRVIEMIQVTINSLQ

SEQ ID NO: 22438 - protein, 26 aa, Artificial Sequence
  Cyclic GFR-binding peptide
EELSMEGIHQGQHPKIRMIQMTINSQ

SEQ ID NO: 22439 - protein, 36 aa, Artificial Sequence
  Cyclic GFR-binding peptide
  MOD_RES (1)..(3): Xaa is C or S
XEXQSHEELVQVEKHQGQHPKIRVKAMKVSRQGTPV

SEQ ID NO: 22440 - protein, 34 aa, Artificial Sequence
  Cyclic GFR-binding peptide
  MOD_RES (32)..(32): Xaa is C or S
HQLFVQVEKHQGQHPKIRVKAMKVSREETPVXEL

SEQ ID NO: 22441 - protein, 25 aa, Artificial Sequence
  Cyclic GFR-binding peptide
SMEGLHQGQHPKIRMIQMTINSEET

SEQ ID NO: 22442 - protein, 34 aa, Artificial Sequence
  Cyclic GFR-binding peptide
  MOD_RES (1)..(3): Xaa is C or S
XEXQSHEELVQVEKHQGQHPKIRVKAMKVSRQGT

SEQ ID NO: 22443 - protein, 31 aa, Artificial Sequence
  Cyclic GFR-binding peptide
ELRSMEGLLKPKKRVYEMIQVTINSHHVRSP

SEQ ID NO: 22444 - protein, 27 aa, Artificial Sequence
  Cyclic GFR-binding peptide
ELTSMEGLFIPKKRVIEMIQVTINSLQ

SEQ ID NO: 22445 - protein, 27 aa, Artificial Sequence
  Cyclic GFR-binding peptide
ELTSMEGIFIPKKRVIEMIQVTINSLQ

SEQ ID NO: 22446 - protein, 37 aa, Artificial Sequence
  Cyclic GFR-binding peptide
  MOD_RES (32)..(32): Xaa is C or S
HEELVQVEKHQGQHPKIRVKAMKVSRQGTPVXELGED

SEQ ID NO: 22447 - protein, 37 aa, Artificial Sequence
  Cyclic GFR-binding peptide
  MOD_RES (36)..(36): Xaa is C or S
LHDELTSMEGIFIPKKRVIEMIQVTINSLQVQTPRXQ

SEQ ID NO: 22448 - protein, 31 aa, Artificial Sequence
  Cyclic GFR-binding peptide
  MOD_RES (1)..(1): Xaa is C or S
XELHEELRSMEGILKPKKRVYEMIQVTINSH

SEQ ID NO: 22449 - protein, 30 aa, Artificial Sequence
  Cyclic GFR-binding peptide
  MOD_RES (30)..(30): Xaa is C or S
LFVTAKKHQGQHPKIRIKRMQVPREETPVX

SEQ ID NO: 22450 - protein, 35 aa, Artificial Sequence
  Cyclic GFR-binding peptide
  MOD_RES (31)..(31): Xaa is C or S
QLFSMEGLHQGQHPKIRMIQMTINSEETPVXELGE

SEQ ID NO: 22451 - protein, 38 aa, Artificial Sequence
  Cyclic GFR-binding peptide
  MOD_RES (37)..(37): Xaa is C or S
ALHDELTSMEGLFIPKKRVIEMIQVTINSLQVQTPRXQ

SEQ ID NO: 22452 - protein, 42 aa, Artificial Sequence
  Cyclic GFR-binding peptide
  MOD_RES (2)..(39): Xaa is C or S
KXALHDELTVQVEKFIPKKRVIEVKAVKVSRLQVQTPRXQVN

SEQ ID NO: 22453 - protein, 25 aa, Artificial Sequence
  Cyclic GFR-binding peptide
TVQVEKFIPKKRVIEVKAVKVSRLQ

SEQ ID NO: 22454 - protein, 40 aa, Artificial Sequence
  Cyclic GFR-binding peptide
  MOD_RES (2)..(36): Xaa is C or S
EXKNHQLFVQVEKHQGQHPKIRVKAMKVSREETPVXELGE

SEQ ID NO: 22455 - protein, 27 aa, Artificial Sequence
  Cyclic GFR-binding peptide
LTSMEGIFIPKKRVIEMIQVTINSLQV

SEQ ID NO: 22456 - protein, 36 aa, Artificial Sequence
  Cyclic GFR-binding peptide
  MOD_RES (1)..(1): Xaa is C or S
XELHEELRSMEGLLKPKKRVYEMIQVTINSHHVRSP

SEQ ID NO: 22457 - protein, 42 aa, Artificial Sequence
  Cyclic GFR-binding peptide
  MOD_RES (2)..(4)..(41): Xaa is C or S
EXKXALHDELTVQVEKFIPKKRVIEVKAVKVSRLQVQTPRXQ

SEQ ID NO: 22458 - protein, 34 aa, Artificial Sequence
  Cyclic GFR-binding peptide
  MOD_RES (34)..(34): Xaa is C or S
QSHEELVTAKKHQGQHPKIRIKRMQVPRQGTPVX

SEQ ID NO: 22459 - protein, 35 aa, Artificial Sequence
  Cyclic GFR-binding peptide
  MOD_RES (31)..(31): Xaa is C or S
RSMEGLLKPKKRVYEMIQVTINSHHVRSPQXKVSS

SEQ ID NO: 22460 - protein, 44 aa, Artificial Sequence
  Cyclic GFR-binding peptide
  MOD_RES (1)..(3)..(40): Xaa is C or S
XAXELHEELRVTAKKLKPKKRVYEIKRVQVPRHHVRSPQXKVSS

SEQ ID NO: 22461 - protein, 31 aa, Artificial Sequence
  Cyclic GFR-binding peptide
HDELTSMEGLFIPKKRVIEMIQVTINSLQVQ

SEQ ID NO: 22462 - protein, 30 aa, Artificial Sequence
  Cyclic GFR-binding peptide
QLFSMEGIHQGQHPKIRMIQMTINSEETPV

SEQ ID NO: 22463 - protein, 31 aa, Artificial Sequence
  Cyclic GFR-binding peptide
KNHQLFSMEGLHQGQHPKIRMIQMTINSEET

SEQ ID NO: 22464 - protein, 30 aa, Artificial Sequence
  Cyclic GFR-binding peptide
  MOD_RES (1)..(1): Xaa is C or S
XALHDELTVQVEKFIPKKRVIEVKAVKVSR

SEQ ID NO: 22465 - protein, 33 aa, Artificial Sequence
  Cyclic GFR-binding peptide
  MOD_RES (30)..(30): Xaa is C or S
ELSMEGIHQGQHPKIRMIQMTINSQGTPVXELG

SEQ ID NO: 22466 - protein, 41 aa, Artificial Sequence
  Cyclic GFR-binding peptide
  MOD_RES (37)..(37): Xaa is C or S
ELHEELRSMEGILKPKKRVYEMIQVTINSHHVRSPQXKVSS

SEQ ID NO: 22467 - protein, 34 aa, Artificial Sequence
  Cyclic GFR-binding peptide
  MOD_RES (33)..(33): Xaa is C or S
NHQLFSMEGLHQGQHPKIRMIQMTINSEETPVXE

SEQ ID NO: 22468 - protein, 25 aa, Artificial Sequence
  Cyclic GFR-binding peptide
RVTAKKLKPKKRVYEIKRVQVPRHH

SEQ ID NO: 22469 - protein, 39 aa, Artificial Sequence
  Cyclic GFR-binding peptide
  MOD_RES (35)..(35): Xaa is C or S
HEELRVTAKKLKPKKRVYEIKRVQVPRHHVRSPQXKVSS

SEQ ID NO: 22470 - protein, 42 aa, Artificial Sequence
  Cyclic GFR-binding peptide
  MOD_RES (1)..(38): Xaa is C or S
XALHDELTSMEGLFIPKKRVIEMIQVTINSLQVQTPRXQVNR

SEQ ID NO: 22471 - protein, 35 aa, Artificial Sequence
  Cyclic GFR-binding peptide
  MOD_RES (29)..(29): Xaa is C or S
FVQVEKHQGQHPKIRVKAMKVSREETPVXELGEDN

SEQ ID NO: 22472 - protein, 25 aa, Artificial Sequence
  Cyclic GFR-binding peptide
ELSMEGIHQGQHPKIRMIQMTINSQ

SEQ ID NO: 22473 - protein, 34 aa, Artificial Sequence
  Cyclic GFR-binding peptide
  MOD_RES (1)..(1): Xaa is C or S
XALHDELTSMEGLFIPKKRVIEMIQVTINSLQVQ

SEQ ID NO: 22474 - protein, 26 aa, Artificial Sequence
  Cyclic GFR-binding peptide
DELTSMEGIFIPKKRVIEMIQVTINS

SEQ ID NO: 22475 - protein, 35 aa, Artificial Sequence
  Cyclic GFR-binding peptide
  MOD_RES (2)..(2): Xaa is C or S
EXKNHQLFSMEGIHQGQHPKIRMIQMTINSEETPV

SEQ ID NO: 22476 - protein, 29 aa, Artificial Sequence
  Cyclic GFR-binding peptide
LFSMEGLHQGQHPKIRMIQMTINSEETPV

SEQ ID NO: 22477 - protein, 33 aa, Artificial Sequence
  Cyclic GFR-binding peptide
  MOD_RES (2)..(4): Xaa is C or S
RXEXQSHEELVQVEKHQGQHPKIRVKAMKVSRQ

SEQ ID NO: 22478 - protein, 37 aa, Artificial Sequence
  Cyclic GFR-binding peptide
  MOD_RES (2)..(4): Xaa is C or S
EXKXALHDELTSMEGLFIPKKRVIEMIQVTINSLQVQ

SEQ ID NO: 22479 - protein, 35 aa, Artificial Sequence
  Cyclic GFR-binding peptide
  MOD_RES (32)..(32): Xaa is C or S
HQLFSMEGLHQGQHPKIRMIQMTINSEETPVXELG

SEQ ID NO: 22480 - protein, 30 aa, Artificial Sequence
  Cyclic GFR-binding peptide
LRSMEGILKPKKRVYEMIQVTINSHHVRSP

SEQ ID NO: 22481 - protein, 39 aa, Artificial Sequence
  Cyclic GFR-binding peptide
  MOD_RES (1)..(38): Xaa is C or S
XELHEELRSMEGLLKPKKRVYEMIQVTINSHHVRSPQXK

SEQ ID NO: 22482 - protein, 32 aa, Artificial Sequence
  Cyclic GFR-binding peptide
  MOD_RES (1)..(1): Xaa is C or S
XKNHQLFVTAKKHQGQHPKIRIKRMQVPREET

SEQ ID NO: 22483 - protein, 37 aa, Artificial Sequence
  Cyclic GFR-binding peptide
  MOD_RES (31)..(31): Xaa is C or S
QLFVQVEKHQGQHPKIRVKAMKVSREETPVXELGEDN

SEQ ID NO: 22484 - protein, 36 aa, Artificial Sequence
  Cyclic GFR-binding peptide
  MOD_RES (32)..(32): Xaa is C or S
HEELVQVEKHQGQHPKIRVKAMKVSRQGTPVXELGE

SEQ ID NO: 22485 - protein, 43 aa, Artificial Sequence
  Cyclic GFR-binding peptide
  MOD_RES (1)..(3)..(40): Xaa is C or S
XAXELHEELRVTAKKLKPKKRVYEIKRVQVPRHHVRSPQXKVS

SEQ ID NO: 22486 - protein, 34 aa, Artificial Sequence
  Cyclic GFR-binding peptide
  MOD_RES (30)..(30): Xaa is C or S
ELVQVEKHQGQHPKIRVKAMKVSRQGTPVXELGE

SEQ ID NO: 22487 - protein, 34 aa, Artificial Sequence
  Cyclic GFR-binding peptide
  MOD_RES (1)..(1): Xaa is C or S
XQSHEELVTAKKHQGQHPKIRIKRMQVPRQGTPV

SEQ ID NO: 22488 - protein, 36 aa, Artificial Sequence
  Cyclic GFR-binding peptide
  MOD_RES (1)..(35): Xaa is C or S
XKNHQLFSMEGIHQGQHPKIRMIQMTINSEETPVXE

SEQ ID NO: 22489 - protein, 41 aa, Artificial Sequence
  Cyclic GFR-binding peptide
  MOD_RES (1)..(3)..(37): Xaa is C or S
XEXKNHQLFVQVEKHQGQHPKIRVKAMKVSREETPVXELGE

SEQ ID NO: 22490 - protein, 39 aa, Artificial Sequence
  Cyclic GFR-binding peptide
  MOD_RES (34)..(34): Xaa is C or S
QSHEELVTAKKHQGQHPKIRIKRMQVPRQGTPVXELGED

SEQ ID NO: 22491 - protein, 26 aa, Artificial Sequence
  Cyclic GFR-binding peptide
HQLFSMEGLHQGQHPKIRMIQMTINS

SEQ ID NO: 22492 - protein, 33 aa, Artificial Sequence
  Cyclic GFR-binding peptide
  MOD_RES (28)..(28): Xaa is C or S
SMEGLHQGQHPKIRMIQMTINSEETPVXELGED

SEQ ID NO: 22493 - protein, 39 aa, Artificial Sequence
  Cyclic GFR-binding peptide
  MOD_RES (34)..(34): Xaa is C or S
KNHQLFSMEGLHQGQHPKIRMIQMTINSEETPVXELGED

SEQ ID NO: 22494 - protein, 34 aa, Artificial Sequence
  Cyclic GFR-binding peptide
  MOD_RES (32)..(32): Xaa is C or S
HQLFVTAKKHQGQHPKIRIKRMQVPREETPVXEL

SEQ ID NO: 22495 - protein, 33 aa, Artificial Sequence
  Cyclic GFR-binding peptide
DELTVQVEKFIPKKRVIEVKAVKVSRLQVQTPR

SEQ ID NO: 22496 - protein, 36 aa, Artificial Sequence
  Cyclic GFR-binding peptide
  MOD_RES (2)..(4): Xaa is C or S
RXEXQSHEELVQVEKHQGQHPKIRVKAMKVSRQGTP

SEQ ID NO: 22497 - protein, 38 aa, Artificial Sequence
  Cyclic GFR-binding peptide
  MOD_RES (32)..(32): Xaa is C or S
HEELSMEGIHQGQHPKIRMIQMTINSQGTPVXELGEDN

SEQ ID NO: 22498 - protein, 36 aa, Artificial Sequence
  Cyclic GFR-binding peptide
  MOD_RES (1)..(3): Xaa is C or S
XAXELHEELRSMEGILKPKKRVYEMIQVTINSHHVR

SEQ ID NO: 22499 - protein, 33 aa, Artificial Sequence
  Cyclic GFR-binding peptide
  MOD_RES (1)..(3): Xaa is C or S
XEXKNHQLFVTAKKHQGQHPKIRIKRMQVPREE

SEQ ID NO: 22500 - protein, 32 aa, Artificial Sequence
  Cyclic GFR-binding peptide
  MOD_RES (2)..(2): Xaa is C or S
EXKNHQLFVQVEKHQGQHPKIRVKAMKVSREE

SEQ ID NO: 22501 - protein, 35 aa, Artificial Sequence
  Cyclic GFR-binding peptide
  MOD_RES (29)..(29): Xaa is C or S
FSMEGIHQGQHPKIRMIQMTINSEETPVXELGEDN

SEQ ID NO: 22502 - protein, 36 aa, Artificial Sequence
  Cyclic GFR-binding peptide
  MOD_RES (2)..(4): Xaa is C or S
EXKXALHDELTSMEGLFIPKKRVIEMIQVTINSLQV

SEQ ID NO: 22503 - protein, 27 aa, Artificial Sequence
  Cyclic GFR-binding peptide
VQVEKHQGQHPKIRVKAMKVSREETPV

SEQ ID NO: 22504 - protein, 33 aa, Artificial Sequence
  Cyclic GFR-binding peptide
EELRSMEGILKPKKRVYEMIQVTINSHHVRSPQ

SEQ ID NO: 22505 - protein, 30 aa, Artificial Sequence
  Cyclic GFR-binding peptide
  MOD_RES (1)..(1): Xaa is C or S
XALHDELTSMEGLFIPKKRVIEMIQVTINS

SEQ ID NO: 22506 - protein, 24 aa, Artificial Sequence
  Cyclic GFR-binding peptide
SMEGLLKPKKRVYEMIQVTINSHH

SEQ ID NO: 22507 - protein, 28 aa, Artificial Sequence
  Cyclic GFR-binding peptide
EELVQVEKHQGQHPKIRVKAMKVSRQGT

SEQ ID NO: 22508 - protein, 37 aa, Artificial Sequence
  Cyclic GFR-binding peptide
  MOD_RES (36)..(36): Xaa is C or S
LHEELRSMEGLLKPKKRVYEMIQVTINSHHVRSPQXK

SEQ ID NO: 22509 - protein, 32 aa, Artificial Sequence
  Cyclic GFR-binding peptide
  MOD_RES (1)..(1): Xaa is C or S
XQSHEELVQVEKHQGQHPKIRVKAMKVSRQGT

SEQ ID NO: 22510 - protein, 41 aa, Artificial Sequence
  Cyclic GFR-binding peptide
  MOD_RES (1)..(35): Xaa is C or S
XQSHEELVQVEKHQGQHPKIRVKAMKVSRQGTPVXELGEDN

SEQ ID NO: 22511 - protein, 28 aa, Artificial Sequence
  Cyclic GFR-binding peptide
  MOD_RES (28)..(28): Xaa is C or S
SMEGLHQGQHPKIRMIQMTINSEETPVX

SEQ ID NO: 22512 - protein, 29 aa, Artificial Sequence
  Cyclic GFR-binding peptide
VTAKKLKPKKRVYEIKRVQVPRHHVRSPQ

SEQ ID NO: 22513 - protein, 30 aa, Artificial Sequence
  Cyclic GFR-binding peptide
  MOD_RES (28)..(28): Xaa is C or S
SMEGLHQGQHPKIRMIQMTINSEETPVXEL

SEQ ID NO: 22514 - protein, 29 aa, Artificial Sequence
  Cyclic GFR-binding peptide
  MOD_RES (29)..(29): Xaa is C or S
FVQVEKHQGQHPKIRVKAMKVSREETPVX

SEQ ID NO: 22515 - protein, 33 aa, Artificial Sequence
  Cyclic GFR-binding peptide
  MOD_RES (31)..(31): Xaa is C or S
TSMEGIFIPKKRVIEMIQVTINSLQVQTPRXQV

SEQ ID NO: 22516 - protein, 34 aa, Artificial Sequence
  Cyclic GFR-binding peptide
  MOD_RES (33)..(33): Xaa is C or S
ELTVQVEKFIPKKRVIEVKAVKVSRLQVQTPRXQ

SEQ ID NO: 22517 - protein, 44 aa, Artificial Sequence
  Cyclic GFR-binding peptide
  MOD_RES (1)..(3)..(40): Xaa is C or S
XKXALHDELTVQVEKFIPKKRVIEVKAVKVSRLQVQTPRXQVNR

SEQ ID NO: 22518 - protein, 26 aa, Artificial Sequence
  Cyclic GFR-binding peptide
VTAKKHQGQHPKIRIKRMQVPRQGTP

SEQ ID NO: 22519 - protein, 34 aa, Artificial Sequence
  Cyclic GFR-binding peptide
  MOD_RES (1)..(3): Xaa is C or S
XEXKNHQLFSMEGIHQGQHPKIRMIQMTINSEET

SEQ ID NO: 22520 - protein, 32 aa, Artificial Sequence
  Cyclic GFR-binding peptide
  MOD_RES (31)..(31): Xaa is C or S
QLFVQVEKHQGQHPKIRVKAMKVSREETPVXE

SEQ ID NO: 22521 - protein, 38 aa, Artificial Sequence
  Cyclic GFR-binding peptide
  MOD_RES (36)..(36): Xaa is C or S
LHEELRSMEGILKPKKRVYEMIQVTINSHHVRSPQXKV

SEQ ID NO: 22522 - protein, 33 aa, Artificial Sequence
  Cyclic GFR-binding peptide
  MOD_RES (30)..(30): Xaa is C or S
SMEGILKPKKRVYEMIQVTINSHHVRSPQXKVS

SEQ ID NO: 22523 - protein, 34 aa, Artificial Sequence
  Cyclic GFR-binding peptide
ELHEELRSMEGILKPKKRVYEMIQVTINSHHVRS

SEQ ID NO: 22524 - protein, 37 aa, Artificial Sequence
  Cyclic GFR-binding peptide
  MOD_RES (2)..(4): Xaa is C or S
EXKXALHDELTVTAKKFIPKKRVIEIKRVQVPRLQVQ

SEQ ID NO: 22525 - protein, 32 aa, Artificial Sequence
  Cyclic GFR-binding peptide
LHDELTSMEGIFIPKKRVIEMIQVTINSLQVQ

SEQ ID NO: 22526 - protein, 32 aa, Artificial Sequence
  Cyclic GFR-binding peptide
ALHDELTSMEGLFIPKKRVIEMIQVTINSLQV

SEQ ID NO: 22527 - protein, 37 aa, Artificial Sequence
  Cyclic GFR-binding peptide
  MOD_RES (2)..(4): Xaa is C or S
RXEXKNHQLFVTAKKHQGQHPKIRIKRMQVPREETPV

SEQ ID NO: 22528 - protein, 32 aa, Artificial Sequence
  Cyclic GFR-binding peptide
  MOD_RES (29)..(29): Xaa is C or S
FSMEGIHQGQHPKIRMIQMTINSEETPVXELG

SEQ ID NO: 22529 - protein, 36 aa, Artificial Sequence
  Cyclic GFR-binding peptide
  MOD_RES (32)..(32): Xaa is C or S
LTSMEGLFIPKKRVIEMIQVTINSLQVQTPRXQVNR

SEQ ID NO: 22530 - protein, 25 aa, Artificial Sequence
  Cyclic GFR-binding peptide
SMEGILKPKKRVYEMIQVTINSHHV

SEQ ID NO: 22531 - protein, 29 aa, Artificial Sequence
  Cyclic GFR-binding peptide
QLFVTAKKHQGQHPKIRIKRMQVPREETP

SEQ ID NO: 22532 - protein, 34 aa, Artificial Sequence
  Cyclic GFR-binding peptide
  MOD_RES (32)..(32): Xaa is C or S
LRSMEGILKPKKRVYEMIQVTINSHHVRSPQXKV

SEQ ID NO: 22533 - protein, 32 aa, Artificial Sequence
  Cyclic GFR-binding peptide
  MOD_RES (30)..(30): Xaa is C or S
VTAKKLKPKKRVYEIKRVQVPRHHVRSPQXKV

SEQ ID NO: 22534 - protein, 35 aa, Artificial Sequence
  Cyclic GFR-binding peptide
  MOD_RES (2)..(4): Xaa is C or S
EXKXALHDELTVTAKKFIPKKRVIEIKRVQVPRLQ

SEQ ID NO: 22535 - protein, 38 aa, Artificial Sequence
  Cyclic GFR-binding peptide
  MOD_RES (1)..(35): Xaa is C or S
XKNHQLFSMEGIHQGQHPKIRMIQMTINSEETPVXELG

SEQ ID NO: 22536 - protein, 31 aa, Artificial Sequence
  Cyclic GFR-binding peptide
DELTVQVEKFIPKKRVIEVKAVKVSRLQVQT

SEQ ID NO: 22537 - protein, 33 aa, Artificial Sequence
  Cyclic GFR-binding peptide
HDELTVQVEKFIPKKRVIEVKAVKVSRLQVQTP

SEQ ID NO: 22538 - protein, 30 aa, Artificial Sequence
  Cyclic GFR-binding peptide
  MOD_RES (29)..(29): Xaa is C or S
FSMEGLHQGQHPKIRMIQMTINSEETPVXE

SEQ ID NO: 22539 - protein, 28 aa, Artificial Sequence
  Cyclic GFR-binding peptide
LFVTAKKHQGQHPKIRIKRMQVPREETP

SEQ ID NO: 22540 - protein, 28 aa, Artificial Sequence
  Cyclic GFR-binding peptide
TSMEGIFIPKKRVIEMIQVTINSLQVQT

SEQ ID NO: 22541 - protein, 26 aa, Artificial Sequence
  Cyclic GFR-binding peptide
TSMEGIFIPKKRVIEMIQVTINSLQV

SEQ ID NO: 22542 - protein, 32 aa, Artificial Sequence
  Cyclic GFR-binding peptide
QSHEELVQVEKHQGQHPKIRVKAMKVSRQGTP

SEQ ID NO: 22543 - protein, 30 aa, Artificial Sequence
  Cyclic GFR-binding peptide
ELTVQVEKFIPKKRVIEVKAVKVSRLQVQT

SEQ ID NO: 22544 - protein, 35 aa, Artificial Sequence
  Cyclic GFR-binding peptide
  MOD_RES (2)..(2): Xaa is C or S
AXELHEELRSMEGLLKPKKRVYEMIQVTINSHHVR

SEQ ID NO: 22545 - protein, 40 aa, Artificial Sequence
  Cyclic GFR-binding peptide
  MOD_RES (2)..(4): Xaa is C or S
EXKXALHDELTSMEGIFIPKKRVIEMIQVTINSLQVQTPR

SEQ ID NO: 22546 - protein, 29 aa, Artificial Sequence
  Cyclic GFR-binding peptide
ELTSMEGIFIPKKRVIEMIQVTINSLQVQ

SEQ ID NO: 22547 - protein, 45 aa, Artificial Sequence
  Cyclic GFR-binding peptide
  MOD_RES (2)..(4)..(41): Xaa is C or S
AXAXELHEELRSMEGLLKPKKRVYEMIQVTINSHHVRSPQXKVSS

SEQ ID NO: 22548 - protein, 34 aa, Artificial Sequence
  Cyclic GFR-binding peptide
  MOD_RES (1)..(1): Xaa is C or S
XQSHEELVQVEKHQGQHPKIRVKAMKVSRQGTPV

SEQ ID NO: 22549 - protein, 29 aa, Artificial Sequence
  Cyclic GFR-binding peptide
SMEGLLKPKKRVYEMIQVTINSHHVRSPQ

SEQ ID NO: 22550 - protein, 38 aa, Artificial Sequence
  Cyclic GFR-binding peptide
  MOD_RES (2)..(36): Xaa is C or S
EXQSHEELSMEGIHQGQHPKIRMIQMTINSQGTPVXEL

SEQ ID NO: 22551 - protein, 38 aa, Artificial Sequence
  Cyclic GFR-binding peptide
  MOD_RES (2)..(4)..(38): Xaa is C or S
RXEXKNHQLFVQVEKHQGQHPKIRVKAMKVSREETPVX

SEQ ID NO: 22552 - protein, 22 aa, Artificial Sequence
  Cyclic GFR-binding peptide
VQVEKHQGQHPKIRVKAMKVSR

SEQ ID NO: 22553 - protein, 33 aa, Artificial Sequence
  Cyclic GFR-binding peptide
  MOD_RES (31)..(31): Xaa is C or S
EELVTAKKHQGQHPKIRIKRMQVPRQGTPVXEL

SEQ ID NO: 22554 - protein, 29 aa, Artificial Sequence
  Cyclic GFR-binding peptide
QLFSMEGLHQGQHPKIRMIQMTINSEETP

SEQ ID NO: 22555 - protein, 26 aa, Artificial Sequence
  Cyclic GFR-binding peptide
ELVTAKKHQGQHPKIRIKRMQVPRQG

SEQ ID NO: 22556 - protein, 45 aa, Artificial Sequence
  Cyclic GFR-binding peptide
  MOD_RES (2)..(4)..(41): Xaa is C or S
AXAXELHEELRVTAKKLKPKKRVYEIKRVQVPRHHVRSPQXKVSS

SEQ ID NO: 22557 - protein, 32 aa, Artificial Sequence
  Cyclic GFR-binding peptide
LHEELRVTAKKLKPKKRVYEIKRVQVPRHHVR

SEQ ID NO: 22558 - protein, 36 aa, Artificial Sequence
  Cyclic GFR-binding peptide
  MOD_RES (30)..(30): Xaa is C or S
LFVQVEKHQGQHPKIRVKAMKVSREETPVXELGEDN

SEQ ID NO: 22559 - protein, 34 aa, Artificial Sequence
  Cyclic GFR-binding peptide
  MOD_RES (1)..(1): Xaa is C or S
XELHEELRSMEGILKPKKRVYEMIQVTINSHHVR

SEQ ID NO: 22560 - protein, 34 aa, Artificial Sequence
  Cyclic GFR-binding peptide
  MOD_RES (2)..(4): Xaa is C or S
EXKXALHDELTSMEGLFIPKKRVIEMIQVTINSL

SEQ ID NO: 22561 - protein, 30 aa, Artificial Sequence
  Cyclic GFR-binding peptide
  MOD_RES (2)..(2): Xaa is C or S
EXQSHEELVQVEKHQGQHPKIRVKAMKVSR

SEQ ID NO: 22562 - protein, 32 aa, Artificial Sequence
  Cyclic GFR-binding peptide
  MOD_RES (29)..(29): Xaa is C or S
LVTAKKHQGQHPKIRIKRMQVPRQGTPVXELG

SEQ ID NO: 22563 - protein, 32 aa, Artificial Sequence
  Cyclic GFR-binding peptide
  MOD_RES (30)..(30): Xaa is C or S
SMEGLFIPKKRVIEMIQVTINSLQVQTPRXQV

SEQ ID NO: 22564 - protein, 35 aa, Artificial Sequence
  Cyclic GFR-binding peptide
  MOD_RES (35)..(35): Xaa is C or S
HDELTSMEGLFIPKKRVIEMIQVTINSLQVQTPRX

SEQ ID NO: 22565 - protein, 27 aa, Artificial Sequence
  Cyclic GFR-binding peptide
SMEGLFIPKKRVIEMIQVTINSLQVQT

SEQ ID NO: 22566 - protein, 34 aa, Artificial Sequence
  Cyclic GFR-binding peptide
  MOD_RES (29)..(29): Xaa is C or S
LVQVEKHQGQHPKIRVKAMKVSRQGTPVXELGED

SEQ ID NO: 22567 - protein, 24 aa, Artificial Sequence
  Cyclic GFR-binding peptide
LTSMEGLFIPKKRVIEMIQVTINS

SEQ ID NO: 22568 - protein, 31 aa, Artificial Sequence
  Cyclic GFR-binding peptide
ELTSMEGLFIPKKRVIEMIQVTINSLQVQTP

SEQ ID NO: 22569 - protein, 26 aa, Artificial Sequence
  Cyclic GFR-binding peptide
LFSMEGLHQGQHPKIRMIQMTINSEE

SEQ ID NO: 22570 - protein, 40 aa, Artificial Sequence
  Cyclic GFR-binding peptide
  MOD_RES (1)..(3)..(37): Xaa is C or S
XEXKNHQLFSMEGLHQGQHPKIRMIQMTINSEETPVXELG

SEQ ID NO: 22571 - protein, 38 aa, Artificial Sequence
  Cyclic GFR-binding peptide
  MOD_RES (2)..(36): Xaa is C or S
EXKNHQLFVQVEKHQGQHPKIRVKAMKVSREETPVXEL

SEQ ID NO: 22572 - protein, 34 aa, Artificial Sequence
  Cyclic GFR-binding peptide
  MOD_RES (31)..(31): Xaa is C or S
EELVQVEKHQGQHPKIRVKAMKVSRQGTPVXELG

SEQ ID NO: 22573 - protein, 27 aa, Artificial Sequence
  Cyclic GFR-binding peptide
ELRSMEGILKPKKRVYEMIQVTINSHH

SEQ ID NO: 22574 - protein, 33 aa, Artificial Sequence
  Cyclic GFR-binding peptide
  MOD_RES (1)..(1): Xaa is C or S
XQSHEELVQVEKHQGQHPKIRVKAMKVSRQGTP

SEQ ID NO: 22575 - protein, 33 aa, Artificial Sequence
  Cyclic GFR-binding peptide
HDELTSMEGLFIPKKRVIEMIQVTINSLQVQTP

SEQ ID NO: 22576 - protein, 32 aa, Artificial Sequence
  Cyclic GFR-binding peptide
ELRSMEGILKPKKRVYEMIQVTINSHHVRSPQ

SEQ ID NO: 22577 - protein, 28 aa, Artificial Sequence
  Cyclic GFR-binding peptide
RVTAKKLKPKKRVYEIKRVQVPRHHVRS

SEQ ID NO: 22578 - protein, 29 aa, Artificial Sequence
  Cyclic GFR-binding peptide
NHQLFSMEGIHQGQHPKIRMIQMTINSEE

SEQ ID NO: 22579 - protein, 39 aa, Artificial Sequence
  Cyclic GFR-binding peptide
  MOD_RES (2)..(4)..(38): Xaa is C or S
RXEXKNHQLFVQVEKHQGQHPKIRVKAMKVSREETPVXE

SEQ ID NO: 22580 - protein, 30 aa, Artificial Sequence
  Cyclic GFR-binding peptide
  MOD_RES (30)..(30): Xaa is C or S
VTAKKLKPKKRVYEIKRVQVPRHHVRSPQX

SEQ ID NO: 22581 - protein, 29 aa, Artificial Sequence
  Cyclic GFR-binding peptide
SMEGLFIPKKRVIEMIQVTINSLQVQTPR

SEQ ID NO: 22582 - protein, 40 aa, Artificial Sequence
  Cyclic GFR-binding peptide
  MOD_RES (2)..(39): Xaa is C or S
AXELHEELRSMEGILKPKKRVYEMIQVTINSHHVRSPQXK

SEQ ID NO: 22583 - protein, 36 aa, Artificial Sequence
  Cyclic GFR-binding peptide
  MOD_RES (1)..(3): Xaa is C or S
XEXQSHEELVTAKKHQGQHPKIRIKRMQVPRQGTPV

SEQ ID NO: 22584 - protein, 31 aa, Artificial Sequence
  Cyclic GFR-binding peptide
  MOD_RES (31)..(31): Xaa is C or S
QLFVQVEKHQGQHPKIRVKAMKVSREETPVX

SEQ ID NO: 22585 - protein, 28 aa, Artificial Sequence
  Cyclic GFR-binding peptide
TVQVEKFIPKKRVIEVKAVKVSRLQVQT

SEQ ID NO: 22586 - protein, 35 aa, Artificial Sequence
  Cyclic GFR-binding peptide
ELHEELRSMEGLLKPKKRVYEMIQVTINSHHVRSP

SEQ ID NO: 22587 - protein, 34 aa, Artificial Sequence
  Cyclic GFR-binding peptide
  MOD_RES (1)..(3): Xaa is C or S
XEXQSHEELVTAKKHQGQHPKIRIKRMQVPRQGT

SEQ ID NO: 22588 - protein, 34 aa, Artificial Sequence
  Cyclic GFR-binding peptide
  MOD_RES (2)..(2): Xaa is C or S
KXALHDELTSMEGIFIPKKRVIEMIQVTINSLQV

SEQ ID NO: 22589 - protein, 27 aa, Artificial Sequence
  Cyclic GFR-binding peptide
SMEGIHQGQHPKIRMIQMTINSEETPV

SEQ ID NO: 22590 - protein, 34 aa, Artificial Sequence
  Cyclic GFR-binding peptide
  MOD_RES (1)..(3): Xaa is C or S
XAXELHEELRVTAKKLKPKKRVYEIKRVQVPRHH

SEQ ID NO: 22591 - protein, 32 aa, Artificial Sequence
  Cyclic GFR-binding peptide
SHEELVTAKKHQGQHPKIRIKRMQVPRQGTPV

SEQ ID NO: 22592 - protein, 44 aa, Artificial Sequence
  Cyclic GFR-binding peptide
  MOD_RES (2)..(4)..(41): Xaa is C or S
AXAXELHEELRVTAKKLKPKKRVYEIKRVQVPRHHVRSPQXKVS

SEQ ID NO: 22593 - protein, 31 aa, Artificial Sequence
  Cyclic GFR-binding peptide
  MOD_RES (2)..(2): Xaa is C or S
EXKNHQLFVQVEKHQGQHPKIRVKAMKVSRE

SEQ ID NO: 22594 - protein, 29 aa, Artificial Sequence
  Cyclic GFR-binding peptide
HDELTVQVEKFIPKKRVIEVKAVKVSRLQ

SEQ ID NO: 22595 - protein, 35 aa, Artificial Sequence
  Cyclic GFR-binding peptide
  MOD_RES (1)..(3): Xaa is C or S
XAXELHEELRSMEGILKPKKRVYEMIQVTINSHHV

SEQ ID NO: 22596 - protein, 38 aa, Artificial Sequence
  Cyclic GFR-binding peptide
  MOD_RES (1)..(38): Xaa is C or S
XALHDELTSMEGLFIPKKRVIEMIQVTINSLQVQTPRX

SEQ ID NO: 22597 - protein, 29 aa, Artificial Sequence
  Cyclic GFR-binding peptide
HQLFSMEGLHQGQHPKIRMIQMTINSEET

SEQ ID NO: 22598 - protein, 40 aa, Artificial Sequence
  Cyclic GFR-binding peptide
  MOD_RES (1)..(35): Xaa is C or S
XKNHQLFSMEGLHQGQHPKIRMIQMTINSEETPVXELGED

SEQ ID NO: 22599 - protein, 24 aa, Artificial Sequence
  Cyclic GFR-binding peptide
LFVQVEKHQGQHPKIRVKAMKVSR

SEQ ID NO: 22600 - protein, 42 aa, Artificial Sequence
  Cyclic GFR-binding peptide
  MOD_RES (1)..(3)..(40): Xaa is C or S
XKXALHDELTSMEGLFIPKKRVIEMIQVTINSLQVQTPRXQV

SEQ ID NO: 22601 - protein, 26 aa, Artificial Sequence
  Cyclic GFR-binding peptide
LRVTAKKLKPKKRVYEIKRVQVPRHH

SEQ ID NO: 22602 - protein, 35 aa, Artificial Sequence
  Cyclic GFR-binding peptide
  MOD_RES (2)..(2): Xaa is C or S
AXELHEELRSMEGILKPKKRVYEMIQVTINSHHVR

SEQ ID NO: 22603 - protein, 23 aa, Artificial Sequence
  Cyclic GFR-binding peptide
LVTAKKHQGQHPKIRIKRMQVPR

SEQ ID NO: 22604 - protein, 23 aa, Artificial Sequence
  Cyclic GFR-binding peptide
FVTAKKHQGQHPKIRIKRMQVPR

SEQ ID NO: 22605 - protein, 26 aa, Artificial Sequence
  Cyclic GFR-binding peptide
ELTVQVEKFIPKKRVIEVKAVKVSRL

SEQ ID NO: 22606 - protein, 33 aa, Artificial Sequence
  Cyclic GFR-binding peptide
  MOD_RES (2)..(2): Xaa is C or S
EXQSHEELSMEGIHQGQHPKIRMIQMTINSQGT

SEQ ID NO: 22607 - protein, 37 aa, Artificial Sequence
  Cyclic GFR-binding peptide
  MOD_RES (1)..(35): Xaa is C or S
XKNHQLFVQVEKHQGQHPKIRVKAMKVSREETPVXEL

SEQ ID NO: 22608 - protein, 31 aa, Artificial Sequence
  Cyclic GFR-binding peptide
EELRSMEGLLKPKKRVYEMIQVTINSHHVRS

SEQ ID NO: 22609 - protein, 30 aa, Artificial Sequence
  Cyclic GFR-binding peptide
  MOD_RES (28)..(28): Xaa is C or S
VTAKKHQGQHPKIRIKRMQVPREETPVXEL

SEQ ID NO: 22610 - protein, 28 aa, Artificial Sequence
  Cyclic GFR-binding peptide
KNHQLFVTAKKHQGQHPKIRIKRMQVPR

SEQ ID NO: 22611 - protein, 28 aa, Artificial Sequence
  Cyclic GFR-binding peptide
ELVQVEKHQGQHPKIRVKAMKVSRQGTP

SEQ ID NO: 22612 - protein, 33 aa, Artificial Sequence
  Cyclic GFR-binding peptide
  MOD_RES (2)..(4): Xaa is C or S
RXEXKNHQLFVQVEKHQGQHPKIRVKAMKVSRE

SEQ ID NO: 22613 - protein, 35 aa, Artificial Sequence
  Cyclic GFR-binding peptide
  MOD_RES (34)..(34): Xaa is C or S
KNHQLFSMEGIHQGQHPKIRMIQMTINSEETPVXE

SEQ ID NO: 22614 - protein, 28 aa, Artificial Sequence
  Cyclic GFR-binding peptide
QLFSMEGLHQGQHPKIRMIQMTINSEET

SEQ ID NO: 22615 - protein, 41 aa, Artificial Sequence
  Cyclic GFR-binding peptide
  MOD_RES (1)..(38): Xaa is C or S
XALHDELTVQVEKFIPKKRVIEVKAVKVSRLQVQTPRXQVN

SEQ ID NO: 22616 - protein, 28 aa, Artificial Sequence
  Cyclic GFR-binding peptide
HDELTSMEGIFIPKKRVIEMIQVTINSL

SEQ ID NO: 22617 - protein, 29 aa, Artificial Sequence
  Cyclic GFR-binding peptide
LFSMEGIHQGQHPKIRMIQMTINSEETPV

SEQ ID NO: 22618 - protein, 26 aa, Artificial Sequence
  Cyclic GFR-binding peptide
SMEGLFIPKKRVIEMIQVTINSLQVQ

SEQ ID NO: 22619 - protein, 30 aa, Artificial Sequence
  Cyclic GFR-binding peptide
LTSMEGLFIPKKRVIEMIQVTINSLQVQTP

SEQ ID NO: 22620 - protein, 31 aa, Artificial Sequence
  Cyclic GFR-binding peptide
  MOD_RES (1)..(3): Xaa is C or S
XEXKNHQLFSMEGLHQGQHPKIRMIQMTINS

SEQ ID NO: 22621 - protein, 40 aa, Artificial Sequence
  Cyclic GFR-binding peptide
  MOD_RES (1)..(3)..(37): Xaa is C or S
XEXKNHQLFVQVEKHQGQHPKIRVKAMKVSREETPVXELG

SEQ ID NO: 22622 - protein, 30 aa, Artificial Sequence
  Cyclic GFR-binding peptide
QLFVTAKKHQGQHPKIRIKRMQVPREETPV

SEQ ID NO: 22623 - protein, 38 aa, Artificial Sequence
  Cyclic GFR-binding peptide
  MOD_RES (32)..(32): Xaa is C or S
HQLFVQVEKHQGQHPKIRVKAMKVSREETPVXELGEDN

SEQ ID NO: 22624 - protein, 28 aa, Artificial Sequence
  Cyclic GFR-binding peptide
HEELVTAKKHQGQHPKIRIKRMQVPRQG

SEQ ID NO: 22625 - protein, 35 aa, Artificial Sequence
  Cyclic GFR-binding peptide
  MOD_RES (1)..(35): Xaa is C or S
XQSHEELVTAKKHQGQHPKIRIKRMQVPRQGTPVX

SEQ ID NO: 22626 - protein, 38 aa, Artificial Sequence
  Cyclic GFR-binding peptide
  MOD_RES (2)..(2): Xaa is C or S
KXALHDELTVQVEKFIPKKRVIEVKAVKVSRLQVQTPR

SEQ ID NO: 22627 - protein, 24 aa, Artificial Sequence
  Cyclic GFR-binding peptide
VTAKKLKPKKRVYEIKRVQVPRHH

SEQ ID NO: 22628 - protein, 34 aa, Artificial Sequence
  Cyclic GFR-binding peptide
  MOD_RES (30)..(30): Xaa is C or S
SMEGILKPKKRVYEMIQVTINSHHVRSPQXKVSS

SEQ ID NO: 22629 - protein, 32 aa, Artificial Sequence
  Cyclic GFR-binding peptide
HDELTVQVEKFIPKKRVIEVKAVKVSRLQVQT

SEQ ID NO: 22630 - protein, 38 aa, Artificial Sequence
  Cyclic GFR-binding peptide
  MOD_RES (1)..(3): Xaa is C or S
XAXELHEELRSMEGLLKPKKRVYEMIQVTINSHHVRSP

SEQ ID NO: 22631 - protein, 29 aa, Artificial Sequence
  Cyclic GFR-binding peptide
NHQLFVQVEKHQGQHPKIRVKAMKVSREE

SEQ ID NO: 22632 - protein, 30 aa, Artificial Sequence
  Cyclic GFR-binding peptide
SHEELVTAKKHQGQHPKIRIKRMQVPRQGT

SEQ ID NO: 22633 - protein, 34 aa, Artificial Sequence
  Cyclic GFR-binding peptide
  MOD_RES (33)..(33): Xaa is C or S
NHQLFVQVEKHQGQHPKIRVKAMKVSREETPVXE

SEQ ID NO: 22634 - protein, 33 aa, Artificial Sequence
  Cyclic GFR-binding peptide
  MOD_RES (1)..(3): Xaa is C or S
XEXQSHEELSMEGIHQGQHPKIRMIQMTINSQG

SEQ ID NO: 22635 - protein, 25 aa, Artificial Sequence
  Cyclic GFR-binding peptide
LSMEGIHQGQHPKIRMIQMTINSQG

SEQ ID NO: 22636 - protein, 30 aa, Artificial Sequence
  Cyclic GFR-binding peptide
  MOD_RES (1)..(1): Xaa is C or S
XELHEELRSMEGLLKPKKRVYEMIQVTINS

SEQ ID NO: 22637 - protein, 36 aa, Artificial Sequence
  Cyclic GFR-binding peptide
ELHEELRVTAKKLKPKKRVYEIKRVQVPRHHVRSPQ

SEQ ID NO: 22638 - protein, 36 aa, Artificial Sequence
  Cyclic GFR-binding peptide
  MOD_RES (1)..(1): Xaa is C or S
XELHEELRVTAKKLKPKKRVYEIKRVQVPRHHVRSP

SEQ ID NO: 22639 - protein, 31 aa, Artificial Sequence
  Cyclic GFR-binding peptide
  MOD_RES (30)..(30): Xaa is C or S
SMEGLFIPKKRVIEMIQVTINSLQVQTPRXQ

SEQ ID NO: 22640 - protein, 33 aa, Artificial Sequence
  Cyclic GFR-binding peptide
HEELRVTAKKLKPKKRVYEIKRVQVPRHHVRSP

SEQ ID NO: 22641 - protein, 35 aa, Artificial Sequence
  Cyclic GFR-binding peptide
  MOD_RES (33)..(33): Xaa is C or S
SHEELVQVEKHQGQHPKIRVKAMKVSRQGTPVXEL

SEQ ID NO: 22642 - protein, 30 aa, Artificial Sequence
  Cyclic GFR-binding peptide
HDELTVQVEKFIPKKRVIEVKAVKVSRLQV

SEQ ID NO: 22643 - protein, 35 aa, Artificial Sequence
  Cyclic GFR-binding peptide
  MOD_RES (2)..(4): Xaa is C or S
RXEXKNHQLFVQVEKHQGQHPKIRVKAMKVSREET

SEQ ID NO: 22644 - protein, 32 aa, Artificial Sequence
  Cyclic GFR-binding peptide
  MOD_RES (32)..(32): Xaa is C or S
HQLFSMEGIHQGQHPKIRMIQMTINSEETPVX

SEQ ID NO: 22645 - protein, 35 aa, Artificial Sequence
  Cyclic GFR-binding peptide
  MOD_RES (31)..(31): Xaa is C or S
QLFSMEGIHQGQHPKIRMIQMTINSEETPVXELGE

SEQ ID NO: 22646 - protein, 34 aa, Artificial Sequence
  Cyclic GFR-binding peptide
  MOD_RES (34)..(34): Xaa is C or S
KNHQLFVTAKKHQGQHPKIRIKRMQVPREETPVX

SEQ ID NO: 22647 - protein, 36 aa, Artificial Sequence
  Cyclic GFR-binding peptide
ALHDELTSMEGLFIPKKRVIEMIQVTINSLQVQTPR

SEQ ID NO: 22648 - protein, 44 aa, Artificial Sequence
  Cyclic GFR-binding peptide
  MOD_RES (2)..(4)..(41): Xaa is C or S
EXKXALHDELTVQVEKFIPKKRVIEVKAVKVSRLQVQTPRXQVN

SEQ ID NO: 22649 - protein, 25 aa, Artificial Sequence
  Cyclic GFR-binding peptide
QLFVTAKKHQGQHPKIRIKRMQVPR

SEQ ID NO: 22650 - protein, 31 aa, Artificial Sequence
  Cyclic GFR-binding peptide
  MOD_RES (28)..(28): Xaa is C or S
SMEGLHQGQHPKIRMIQMTINSEETPVXELG

SEQ ID NO: 22651 - protein, 30 aa, Artificial Sequence
  Cyclic GFR-binding peptide
  MOD_RES (30)..(30): Xaa is C or S
SMEGLLKPKKRVYEMIQVTINSHHVRSPQX

SEQ ID NO: 22652 - protein, 27 aa, Artificial Sequence
  Cyclic GFR-binding peptide
EELRSMEGLLKPKKRVYEMIQVTINSH

SEQ ID NO: 22653 - protein, 34 aa, Artificial Sequence
  Cyclic GFR-binding peptide
  MOD_RES (32)..(32): Xaa is C or S
LTVQVEKFIPKKRVIEVKAVKVSRLQVQTPRXQV

SEQ ID NO: 22654 - protein, 34 aa, Artificial Sequence
  Cyclic GFR-binding peptide
  MOD_RES (28)..(28): Xaa is C or S
VTAKKHQGQHPKIRIKRMQVPRQGTPVXELGEDN

SEQ ID NO: 22655 - protein, 44 aa, Artificial Sequence
  Cyclic GFR-binding peptide
  MOD_RES (2)..(4)..(41): Xaa is C or S
AXAXELHEELRSMEGLLKPKKRVYEMIQVTINSHHVRSPQXKVS

SEQ ID NO: 22656 - protein, 40 aa, Artificial Sequence
  Cyclic GFR-binding peptide
  MOD_RES (37)..(37): Xaa is C or S
ALHDELTVQVEKFIPKKRVIEVKAVKVSRLQVQTPRXQVN

SEQ ID NO: 22657 - protein, 24 aa, Artificial Sequence
  Cyclic GFR-binding peptide
TSMEGLFIPKKRVIEMIQVTINSL

SEQ ID NO: 22658 - protein, 31 aa, Artificial Sequence
  Cyclic GFR-binding peptide
  MOD_RES (28)..(28): Xaa is C or S
VTAKKHQGQHPKIRIKRMQVPRQGTPVXELG

SEQ ID NO: 22659 - protein, 41 aa, Artificial Sequence
  Cyclic GFR-binding peptide
  MOD_RES (2)..(39): Xaa is C or S
AXELHEELRVTAKKLKPKKRVYEIKRVQVPRHHVRSPQXKV

SEQ ID NO: 22660 - protein, 36 aa, Artificial Sequence
  Cyclic GFR-binding peptide
  MOD_RES (33)..(33): Xaa is C or S
ELRSMEGLLKPKKRVYEMIQVTINSHHVRSPQXKVS

SEQ ID NO: 22661 - protein, 41 aa, Artificial Sequence
  Cyclic GFR-binding peptide
  MOD_RES (2)..(4)..(41): Xaa is C or S
AXAXELHEELRSMEGLLKPKKRVYEMIQVTINSHHVRSPQX

SEQ ID NO: 22662 - protein, 38 aa, Artificial Sequence
  Cyclic GFR-binding peptide
  MOD_RES (33)..(33): Xaa is C or S
NHQLFVQVEKHQGQHPKIRVKAMKVSREETPVXELGED

SEQ ID NO: 22663 - protein, 39 aa, Artificial Sequence
  Cyclic GFR-binding peptide
  MOD_RES (33)..(33): Xaa is C or S
SHEELVTAKKHQGQHPKIRIKRMQVPRQGTPVXELGEDN

SEQ ID NO: 22664 - protein, 30 aa, Artificial Sequence
  Cyclic GFR-binding peptide
TSMEGIFIPKKRVIEMIQVTINSLQVQTPR

SEQ ID NO: 22665 - protein, 28 aa, Artificial Sequence
  Cyclic GFR-binding peptide
ELRVTAKKLKPKKRVYEIKRVQVPRHHV

SEQ ID NO: 22666 - protein, 34 aa, Artificial Sequence
  Cyclic GFR-binding peptide
  MOD_RES (33)..(33): Xaa is C or S
SHEELVTAKKHQGQHPKIRIKRMQVPRQGTPVXE

SEQ ID NO: 22667 - protein, 33 aa, Artificial Sequence
  Cyclic GFR-binding peptide
  MOD_RES (31)..(31): Xaa is C or S
RSMEGILKPKKRVYEMIQVTINSHHVRSPQXKV

SEQ ID NO: 22668 - protein, 34 aa, Artificial Sequence
  Cyclic GFR-binding peptide
  MOD_RES (31)..(31): Xaa is C or S
RVTAKKLKPKKRVYEIKRVQVPRHHVRSPQXKVS

SEQ ID NO: 22669 - protein, 45 aa, Artificial Sequence
  Cyclic GFR-binding peptide
  MOD_RES (2)..(4)..(41): Xaa is C or S
AXAXELHEELRVQVEKLKPKKRVYEVKAVKVSRHHVRSPQXKVSS

SEQ ID NO: 22670 - protein, 33 aa, Artificial Sequence
  Cyclic GFR-binding peptide
  MOD_RES (30)..(30): Xaa is C or S
SMEGLFIPKKRVIEMIQVTINSLQVQTPRXQVN

SEQ ID NO: 22671 - protein, 25 aa, Artificial Sequence
  Cyclic GFR-binding peptide
EELVQVEKHQGQHPKIRVKAMKVSR

SEQ ID NO: 22672 - protein, 37 aa, Artificial Sequence
  Cyclic GFR-binding peptide
  MOD_RES (1)..(3): Xaa is C or S
XAXELHEELRSMEGILKPKKRVYEMIQVTINSHHVRS

SEQ ID NO: 22673 - protein, 26 aa, Artificial Sequence
  Cyclic GFR-binding peptide
LFVTAKKHQGQHPKIRIKRMQVPREE

SEQ ID NO: 22674 - protein, 32 aa, Artificial Sequence
  Cyclic GFR-binding peptide
  MOD_RES (1)..(1): Xaa is C or S
XKNHQLFVQVEKHQGQHPKIRVKAMKVSREET

SEQ ID NO: 22675 - protein, 36 aa, Artificial Sequence
  Cyclic GFR-binding peptide
  MOD_RES (30)..(30): Xaa is C or S
ELVQVEKHQGQHPKIRVKAMKVSRQGTPVXELGEDN

SEQ ID NO: 22676 - protein, 33 aa, Artificial Sequence
  Cyclic GFR-binding peptide
  MOD_RES (29)..(29): Xaa is C or S
FVTAKKHQGQHPKIRIKRMQVPREETPVXELGE

SEQ ID NO: 22677 - protein, 34 aa, Artificial Sequence
  Cyclic GFR-binding peptide
  MOD_RES (31)..(31): Xaa is C or S
QLFVQVEKHQGQHPKIRVKAMKVSREETPVXELG

SEQ ID NO: 22678 - protein, 40 aa, Artificial Sequence
  Cyclic GFR-binding peptide
  MOD_RES (34)..(34): Xaa is C or S
KNHQLFSMEGLHQGQHPKIRMIQMTINSEETPVXELGEDN

SEQ ID NO: 22679 - protein, 37 aa, Artificial Sequence
  Cyclic GFR-binding peptide
  MOD_RES (33)..(33): Xaa is C or S
SHEELVQVEKHQGQHPKIRVKAMKVSRQGTPVXELGE

SEQ ID NO: 22680 - protein, 34 aa, Artificial Sequence
  Cyclic GFR-binding peptide
  MOD_RES (29)..(29): Xaa is C or S
FVQVEKHQGQHPKIRVKAMKVSREETPVXELGED

SEQ ID NO: 22681 - protein, 41 aa, Artificial Sequence
  Cyclic GFR-binding peptide
  MOD_RES (2)..(36): Xaa is C or S
EXQSHEELVQVEKHQGQHPKIRVKAMKVSRQGTPVXELGED

SEQ ID NO: 22682 - protein, 41 aa, Artificial Sequence
  Cyclic GFR-binding peptide
  MOD_RES (1)..(38): Xaa is C or S
XALHDELTSMEGLFIPKKRVIEMIQVTINSLQVQTPRXQVN

SEQ ID NO: 22683 - protein, 40 aa, Artificial Sequence
  Cyclic GFR-binding peptide
  MOD_RES (2)..(36): Xaa is C or S
EXQSHEELSMEGIHQGQHPKIRMIQMTINSQGTPVXELGE

SEQ ID NO: 22684 - protein, 24 aa, Artificial Sequence
  Cyclic GFR-binding peptide
FSMEGLHQGQHPKIRMIQMTINSE

SEQ ID NO: 22685 - protein, 27 aa, Artificial Sequence
  Cyclic GFR-binding peptide
ELRVTAKKLKPKKRVYEIKRVQVPRHH

SEQ ID NO: 22686 - protein, 29 aa, Artificial Sequence
  Cyclic GFR-binding peptide
LTSMEGLFIPKKRVIEMIQVTINSLQVQT

SEQ ID NO: 22687 - protein, 28 aa, Artificial Sequence
  Cyclic GFR-binding peptide
LHEELRSMEGILKPKKRVYEMIQVTINS

SEQ ID NO: 22688 - protein, 27 aa, Artificial Sequence
  Cyclic GFR-binding peptide
SMEGILKPKKRVYEMIQVTINSHHVRS

SEQ ID NO: 22689 - protein, 36 aa, Artificial Sequence
  Cyclic GFR-binding peptide
  MOD_RES (34)..(34): Xaa is C or S
DELTSMEGIFIPKKRVIEMIQVTINSLQVQTPRXQV

SEQ ID NO: 22690 - protein, 44 aa, Artificial Sequence
  Cyclic GFR-binding peptide
  MOD_RES (2)..(4)..(38): Xaa is C or S
RXEXKNHQLFSMEGIHQGQHPKIRMIQMTINSEETPVXELGEDN

SEQ ID NO: 22691 - protein, 32 aa, Artificial Sequence
  Cyclic GFR-binding peptide
  MOD_RES (2)..(2): Xaa is C or S
EXKNHQLFSMEGLHQGQHPKIRMIQMTINSEE

SEQ ID NO: 22692 - protein, 36 aa, Artificial Sequence
  Cyclic GFR-binding peptide
  MOD_RES (1)..(1): Xaa is C or S
XALHDELTSMEGLFIPKKRVIEMIQVTINSLQVQTP

SEQ ID NO: 22693 - protein, 42 aa, Artificial Sequence
  Cyclic GFR-binding peptide
  MOD_RES (2)..(36): Xaa is C or S
EXQSHEELSMEGIHQGQHPKIRMIQMTINSQGTPVXELGEDN

SEQ ID NO: 22694 - protein, 38 aa, Artificial Sequence
  Cyclic GFR-binding peptide
  MOD_RES (1)..(3): Xaa is C or S
XKXALHDELTSMEGLFIPKKRVIEMIQVTINSLQVQTP

SEQ ID NO: 22695 - protein, 32 aa, Artificial Sequence
  Cyclic GFR-binding peptide
  MOD_RES (1)..(1): Xaa is C or S
XQSHEELSMEGIHQGQHPKIRMIQMTINSQGT

SEQ ID NO: 22696 - protein, 23 aa, Artificial Sequence
  Cyclic GFR-binding peptide
SMEGIFIPKKRVIEMIQVTINSL

SEQ ID NO: 22697 - protein, 35 aa, Artificial Sequence
  Cyclic GFR-binding peptide
  MOD_RES (1)..(3): Xaa is C or S
XEXKNHQLFVTAKKHQGQHPKIRIKRMQVPREETP

SEQ ID NO: 22698 - protein, 40 aa, Artificial Sequence
  Cyclic GFR-binding peptide
  MOD_RES (1)..(3)..(37): Xaa is C or S
XEXQSHEELSMEGIHQGQHPKIRMIQMTINSQGTPVXELG

SEQ ID NO: 22699 - protein, 36 aa, Artificial Sequence
  Cyclic GFR-binding peptide
  MOD_RES (2)..(4): Xaa is C or S
AXAXELHEELRVTAKKLKPKKRVYEIKRVQVPRHHV

SEQ ID NO: 22700 - protein, 43 aa, Artificial Sequence
  Cyclic GFR-binding peptide
  MOD_RES (2)..(4)..(38): Xaa is C or S
RXEXQSHEELSMEGIHQGQHPKIRMIQMTINSQGTPVXELGED

SEQ ID NO: 22701 - protein, 31 aa, Artificial Sequence
  Cyclic GFR-binding peptide
  MOD_RES (1)..(1): Xaa is C or S
XKNHQLFSMEGLHQGQHPKIRMIQMTINSEE

SEQ ID NO: 22702 - protein, 33 aa, Artificial Sequence
  Cyclic GFR-binding peptide
  MOD_RES (2)..(2): Xaa is C or S
EXKNHQLFSMEGLHQGQHPKIRMIQMTINSEET

SEQ ID NO: 22703 - protein, 32 aa, Artificial Sequence
  Cyclic GFR-binding peptide
  MOD_RES (30)..(30): Xaa is C or S
LFSMEGIHQGQHPKIRMIQMTINSEETPVXEL

SEQ ID NO: 22704 - protein, 27 aa, Artificial Sequence
  Cyclic GFR-binding peptide
LRVTAKKLKPKKRVYEIKRVQVPRHHV

SEQ ID NO: 22705 - protein, 28 aa, Artificial Sequence
  Cyclic GFR-binding peptide
DELTVQVEKFIPKKRVIEVKAVKVSRLQ

SEQ ID NO: 22706 - protein, 28 aa, Artificial Sequence
  Cyclic GFR-binding peptide
LHEELRVTAKKLKPKKRVYEIKRVQVPR

SEQ ID NO: 22707 - protein, 28 aa, Artificial Sequence
  Cyclic GFR-binding peptide
LTSMEGIFIPKKRVIEMIQVTINSLQVQ

SEQ ID NO: 22708 - protein, 32 aa, Artificial Sequence
  Cyclic GFR-binding peptide
KNHQLFSMEGIHQGQHPKIRMIQMTINSEETP

SEQ ID NO: 22709 - protein, 29 aa, Artificial Sequence
  Cyclic GFR-binding peptide
ALHDELTSMEGLFIPKKRVIEMIQVTINS

SEQ ID NO: 22710 - protein, 38 aa, Artificial Sequence
  Cyclic GFR-binding peptide
  MOD_RES (35)..(35): Xaa is C or S
HDELTSMEGIFIPKKRVIEMIQVTINSLQVQTPRXQVN

SEQ ID NO: 22711 - protein, 35 aa, Artificial Sequence
  Cyclic GFR-binding peptide
  MOD_RES (1)..(1): Xaa is C or S
XELHEELRSMEGLLKPKKRVYEMIQVTINSHHVRS

SEQ ID NO: 22712 - protein, 32 aa, Artificial Sequence
  Cyclic GFR-binding peptide
  MOD_RES (28)..(28): Xaa is C or S
VTAKKHQGQHPKIRIKRMQVPRQGTPVXELGE

SEQ ID NO: 22713 - protein, 32 aa, Artificial Sequence
  Cyclic GFR-binding peptide
  MOD_RES (28)..(28): Xaa is C or S
SMEGIHQGQHPKIRMIQMTINSEETPVXELGE

SEQ ID NO: 22714 - protein, 40 aa, Artificial Sequence
  Cyclic GFR-binding peptide
  MOD_RES (2)..(4)..(38): Xaa is C or S
RXEXKNHQLFSMEGIHQGQHPKIRMIQMTINSEETPVXEL

SEQ ID NO: 22715 - protein, 41 aa, Artificial Sequence
  Cyclic GFR-binding peptide
  MOD_RES (1)..(3)..(37): Xaa is C or S
XEXQSHEELSMEGIHQGQHPKIRMIQMTINSQGTPVXELGE

SEQ ID NO: 22716 - protein, 26 aa, Artificial Sequence
  Cyclic GFR-binding peptide
FVTAKKHQGQHPKIRIKRMQVPREET

SEQ ID NO: 22717 - protein, 39 aa, Artificial Sequence
  Cyclic GFR-binding peptide
  MOD_RES (35)..(35): Xaa is C or S
HDELTSMEGIFIPKKRVIEMIQVTINSLQVQTPRXQVNR

SEQ ID NO: 22718 - protein, 38 aa, Artificial Sequence
  Cyclic GFR-binding peptide
  MOD_RES (2)..(2): Xaa is C or S
AXELHEELRSMEGILKPKKRVYEMIQVTINSHHVRSPQ

SEQ ID NO: 22719 - protein, 30 aa, Artificial Sequence
  Cyclic GFR-binding peptide
HQLFVTAKKHQGQHPKIRIKRMQVPREETP

SEQ ID NO: 22720 - protein, 31 aa, Artificial Sequence
  Cyclic GFR-binding peptide
  MOD_RES (2)..(2): Xaa is C or S
KXALHDELTVQVEKFIPKKRVIEVKAVKVSR

SEQ ID NO: 22721 - protein, 40 aa, Artificial Sequence
  Cyclic GFR-binding peptide
  MOD_RES (2)..(39): Xaa is C or S
KXALHDELTSMEGLFIPKKRVIEMIQVTINSLQVQTPRXQ

SEQ ID NO: 22722 - protein, 30 aa, Artificial Sequence
  Cyclic GFR-binding peptide
  MOD_RES (2)..(2): Xaa is C or S
EXKNHQLFVTAKKHQGQHPKIRIKRMQVPR

SEQ ID NO: 22723 - protein, 29 aa, Artificial Sequence
  Cyclic GFR-binding peptide
TSMEGIFIPKKRVIEMIQVTINSLQVQTP

SEQ ID NO: 22724 - protein, 39 aa, Artificial Sequence
  Cyclic GFR-binding peptide
  MOD_RES (2)..(4)..(38): Xaa is C or S
RXEXKNHQLFSMEGIHQGQHPKIRMIQMTINSEETPVXE

SEQ ID NO: 22725 - protein, 39 aa, Artificial Sequence
  Cyclic GFR-binding peptide
  MOD_RES (35)..(35): Xaa is C or S
HEELRSMEGILKPKKRVYEMIQVTINSHHVRSPQXKVSS

SEQ ID NO: 22726 - protein, 42 aa, Artificial Sequence
  Cyclic GFR-binding peptide
  MOD_RES (1)..(3)..(37): Xaa is C or S
XEXKNHQLFSMEGIHQGQHPKIRMIQMTINSEETPVXELGED

SEQ ID NO: 22727 - protein, 31 aa, Artificial Sequence
  Cyclic GFR-binding peptide
  MOD_RES (31)..(31): Xaa is C or S
TSMEGLFIPKKRVIEMIQVTINSLQVQTPRX

SEQ ID NO: 22728 - protein, 31 aa, Artificial Sequence
  Cyclic GFR-binding peptide
  MOD_RES (1)..(3): Xaa is C or S
XEXKNHQLFSMEGIHQGQHPKIRMIQMTINS

SEQ ID NO: 22729 - protein, 31 aa, Artificial Sequence
  Cyclic GFR-binding peptide
  MOD_RES (30)..(30): Xaa is C or S
LFVTAKKHQGQHPKIRIKRMQVPREETPVXE

SEQ ID NO: 22730 - protein, 40 aa, Artificial Sequence
  Cyclic GFR-binding peptide
  MOD_RES (36)..(36): Xaa is C or S
LHEELRSMEGLLKPKKRVYEMIQVTINSHHVRSPQXKVSS

SEQ ID NO: 22731 - protein, 31 aa, Artificial Sequence
  Cyclic GFR-binding peptide
  MOD_RES (1)..(3): Xaa is C or S
XEXQSHEELSMEGIHQGQHPKIRMIQMTINS

SEQ ID NO: 22732 - protein, 33 aa, Artificial Sequence
  Cyclic GFR-binding peptide
  MOD_RES (32)..(32): Xaa is C or S
HEELVTAKKHQGQHPKIRIKRMQVPRQGTPVXE

SEQ ID NO: 22733 - protein, 40 aa, Artificial Sequence
  Cyclic GFR-binding peptide
  MOD_RES (1)..(3)..(40): Xaa is C or S
XKXALHDELTSMEGLFIPKKRVIEMIQVTINSLQVQTPRX

SEQ ID NO: 22734 - protein, 41 aa, Artificial Sequence
  Cyclic GFR-binding peptide
  MOD_RES (2)..(4)..(41): Xaa is C or S
EXKXALHDELTSMEGLFIPKKRVIEMIQVTINSLQVQTPRX

SEQ ID NO: 22735 - protein, 29 aa, Artificial Sequence
  Cyclic GFR-binding peptide
LTSMEGIFIPKKRVIEMIQVTINSLQVQT

SEQ ID NO: 22736 - protein, 26 aa, Artificial Sequence
  Cyclic GFR-binding peptide
DELTSMEGLFIPKKRVIEMIQVTINS

SEQ ID NO: 22737 - protein, 37 aa, Artificial Sequence
  Cyclic GFR-binding peptide
  MOD_RES (37)..(37): Xaa is C or S
ALHDELTSMEGLFIPKKRVIEMIQVTINSLQVQTPRX

SEQ ID NO: 22738 - protein, 31 aa, Artificial Sequence
  Cyclic GFR-binding peptide
LTSMEGIFIPKKRVIEMIQVTINSLQVQTPR

SEQ ID NO: 22739 - protein, 42 aa, Artificial Sequence
  Cyclic GFR-binding peptide
  MOD_RES (2)..(36): Xaa is C or S
EXKNHQLFVTAKKHQGQHPKIRIKRMQVPREETPVXELGEDN

SEQ ID NO: 22740 - protein, 30 aa, Artificial Sequence
  Cyclic GFR-binding peptide
HEELSMEGIHQGQHPKIRMIQMTINSQGTP

SEQ ID NO: 22741 - protein, 36 aa, Artificial Sequence
  Cyclic GFR-binding peptide
  MOD_RES (2)..(2): Xaa is C or S
AXELHEELRSMEGILKPKKRVYEMIQVTINSHHVRS

SEQ ID NO: 22742 - protein, 23 aa, Artificial Sequence
  Cyclic GFR-binding peptide
SMEGIHQGQHPKIRMIQMTINSE

SEQ ID NO: 22743 - protein, 33 aa, Artificial Sequence
  Cyclic GFR-binding peptide
  MOD_RES (1)..(1): Xaa is C or S
XKNHQLFSMEGLHQGQHPKIRMIQMTINSEETP

SEQ ID NO: 22744 - protein, 30 aa, Artificial Sequence
  Cyclic GFR-binding peptide
EELRVTAKKLKPKKRVYEIKRVQVPRHHVR

SEQ ID NO: 22745 - protein, 37 aa, Artificial Sequence
  Cyclic GFR-binding peptide
  MOD_RES (34)..(34): Xaa is C or S
EELRVTAKKLKPKKRVYEIKRVQVPRHHVRSPQXKVS

SEQ ID NO: 22746 - protein, 36 aa, Artificial Sequence
  Cyclic GFR-binding peptide
  MOD_RES (2)..(4): Xaa is C or S
RXEXQSHEELVTAKKHQGQHPKIRIKRMQVPRQGTP

SEQ ID NO: 22747 - protein, 41 aa, Artificial Sequence
  Cyclic GFR-binding peptide
  MOD_RES (1)..(3)..(40): Xaa is C or S
XKXALHDELTSMEGIFIPKKRVIEMIQVTINSLQVQTPRXQ

SEQ ID NO: 22748 - protein, 34 aa, Artificial Sequence
  Cyclic GFR-binding peptide
  MOD_RES (1)..(1): Xaa is C or S
XKNHQLFSMEGLHQGQHPKIRMIQMTINSEETPV

SEQ ID NO: 22749 - protein, 39 aa, Artificial Sequence
  Cyclic GFR-binding peptide
  MOD_RES (35)..(35): Xaa is C or S
HDELTVQVEKFIPKKRVIEVKAVKVSRLQVQTPRXQVNR

SEQ ID NO: 22750 - protein, 33 aa, Artificial Sequence
  Cyclic GFR-binding peptide
KNHQLFSMEGIHQGQHPKIRMIQMTINSEETPV

SEQ ID NO: 22751 - protein, 39 aa, Artificial Sequence
  Cyclic GFR-binding peptide
  MOD_RES (2)..(4): Xaa is C or S
EXKXALHDELTSMEGLFIPKKRVIEMIQVTINSLQVQTP

SEQ ID NO: 22752 - protein, 37 aa, Artificial Sequence
  Cyclic GFR-binding peptide
  MOD_RES (32)..(32): Xaa is C or S
HEELVTAKKHQGQHPKIRIKRMQVPRQGTPVXELGED

SEQ ID NO: 22753 - protein, 34 aa, Artificial Sequence
  Cyclic GFR-binding peptide
HDELTVQVEKFIPKKRVIEVKAVKVSRLQVQTPR

SEQ ID NO: 22754 - protein, 31 aa, Artificial Sequence
  Cyclic GFR-binding peptide
  MOD_RES (29)..(29): Xaa is C or S
FVQVEKHQGQHPKIRVKAMKVSREETPVXEL

SEQ ID NO: 22755 - protein, 32 aa, Artificial Sequence
  Cyclic GFR-binding peptide
  MOD_RES (29)..(29): Xaa is C or S
LVQVEKHQGQHPKIRVKAMKVSRQGTPVXELG

SEQ ID NO: 22756 - protein, 29 aa, Artificial Sequence
  Cyclic GFR-binding peptide
KNHQLFVQVEKHQGQHPKIRVKAMKVSRE

SEQ ID NO: 22757 - protein, 28 aa, Artificial Sequence
  Cyclic GFR-binding peptide
KNHQLFSMEGLHQGQHPKIRMIQMTINS

SEQ ID NO: 22758 - protein, 32 aa, Artificial Sequence
  Cyclic GFR-binding peptide
  MOD_RES (1)..(3): Xaa is C or S
XKXALHDELTSMEGLFIPKKRVIEMIQVTINS

SEQ ID NO: 22759 - protein, 30 aa, Artificial Sequence
  Cyclic GFR-binding peptide
LHDELTSMEGIFIPKKRVIEMIQVTINSLQ

SEQ ID NO: 22760 - protein, 34 aa, Artificial Sequence
  Cyclic GFR-binding peptide
  MOD_RES (34)..(34): Xaa is C or S
KNHQLFSMEGLHQGQHPKIRMIQMTINSEETPVX

SEQ ID NO: 22761 - protein, 28 aa, Artificial Sequence
  Cyclic GFR-binding peptide
LSMEGIHQGQHPKIRMIQMTINSQGTPV

SEQ ID NO: 22762 - protein, 38 aa, Artificial Sequence
  Cyclic GFR-binding peptide
  MOD_RES (1)..(38): Xaa is C or S
XELHEELRSMEGILKPKKRVYEMIQVTINSHHVRSPQX

SEQ ID NO: 22763 - protein, 38 aa, Artificial Sequence
  Cyclic GFR-binding peptide
  MOD_RES (1)..(35): Xaa is C or S
XQSHEELSMEGIHQGQHPKIRMIQMTINSQGTPVXELG

SEQ ID NO: 22764 - protein, 24 aa, Artificial Sequence
  Cyclic GFR-binding peptide
VTAKKHQGQHPKIRIKRMQVPREE

SEQ ID NO: 22765 - protein, 39 aa, Artificial Sequence
  Cyclic GFR-binding peptide
  MOD_RES (2)..(39): Xaa is C or S
KXALHDELTVQVEKFIPKKRVIEVKAVKVSRLQVQTPRX

SEQ ID NO: 22766 - protein, 32 aa, Artificial Sequence
  Cyclic GFR-binding peptide
  MOD_RES (1)..(1): Xaa is C or S
XELHEELRSMEGLLKPKKRVYEMIQVTINSHH

SEQ ID NO: 22767 - protein, 37 aa, Artificial Sequence
  Cyclic GFR-binding peptide
  MOD_RES (34)..(34): Xaa is C or S
QSHEELVQVEKHQGQHPKIRVKAMKVSRQGTPVXELG

SEQ ID NO: 22768 - protein, 31 aa, Artificial Sequence
  Cyclic GFR-binding peptide
LRSMEGLLKPKKRVYEMIQVTINSHHVRSPQ

SEQ ID NO: 22769 - protein, 34 aa, Artificial Sequence
  Cyclic GFR-binding peptide
  MOD_RES (33)..(33): Xaa is C or S
SHEELSMEGIHQGQHPKIRMIQMTINSQGTPVXE

SEQ ID NO: 22770 - protein, 42 aa, Artificial Sequence
  Cyclic GFR-binding peptide
  MOD_RES (2)..(4)..(38): Xaa is C or S
RXEXKNHQLFVTAKKHQGQHPKIRIKRMQVPREETPVXELGE

SEQ ID NO: 22771 - protein, 35 aa, Artificial Sequence
  Cyclic GFR-binding peptide
  MOD_RES (1)..(3): Xaa is C or S
XKXALHDELTVQVEKFIPKKRVIEVKAVKVSRLQV

SEQ ID NO: 22772 - protein, 23 aa, Artificial Sequence
  Cyclic GFR-binding peptide
FVQVEKHQGQHPKIRVKAMKVSR

SEQ ID NO: 22773 - protein, 30 aa, Artificial Sequence
  Cyclic GFR-binding peptide
  MOD_RES (2)..(2): Xaa is C or S
EXQSHEELVTAKKHQGQHPKIRIKRMQVPR

SEQ ID NO: 22774 - protein, 37 aa, Artificial Sequence
  Cyclic GFR-binding peptide
  MOD_RES (1)..(35): Xaa is C or S
XQSHEELSMEGIHQGQHPKIRMIQMTINSQGTPVXEL

SEQ ID NO: 22775 - protein, 23 aa, Artificial Sequence
  Cyclic GFR-binding peptide
LVQVEKHQGQHPKIRVKAMKVSR

SEQ ID NO: 22776 - protein, 35 aa, Artificial Sequence
  Cyclic GFR-binding peptide
  MOD_RES (1)..(35): Xaa is C or S
XKNHQLFSMEGLHQGQHPKIRMIQMTINSEETPVX

SEQ ID NO: 22777 - protein, 41 aa, Artificial Sequence
  Cyclic GFR-binding peptide
  MOD_RES (1)..(3)..(40): Xaa is C or S
XAXELHEELRSMEGILKPKKRVYEMIQVTINSHHVRSPQXK

SEQ ID NO: 22778 - protein, 33 aa, Artificial Sequence
  Cyclic GFR-binding peptide
  MOD_RES (1)..(1): Xaa is C or S
XALHDELTSMEGLFIPKKRVIEMIQVTINSLQV

SEQ ID NO: 22779 - protein, 39 aa, Artificial Sequence
  Cyclic GFR-binding peptide
  MOD_RES (2)..(36): Xaa is C or S
EXQSHEELSMEGIHQGQHPKIRMIQMTINSQGTPVXELG

SEQ ID NO: 22780 - protein, 28 aa, Artificial Sequence
  Cyclic GFR-binding peptide
SMEGILKPKKRVYEMIQVTINSHHVRSP

SEQ ID NO: 22781 - protein, 33 aa, Artificial Sequence
  Cyclic GFR-binding peptide
EELRSMEGLLKPKKRVYEMIQVTINSHHVRSPQ

SEQ ID NO: 22782 - protein, 24 aa, Artificial Sequence
  Cyclic GFR-binding peptide
RSMEGLLKPKKRVYEMIQVTINSH

SEQ ID NO: 22783 - protein, 38 aa, Artificial Sequence
  Cyclic GFR-binding peptide
  MOD_RES (1)..(3)..(37): Xaa is C or S
XEXKNHQLFVTAKKHQGQHPKIRIKRMQVPREETPVXE

SEQ ID NO: 22784 - protein, 28 aa, Artificial Sequence
  Cyclic GFR-binding peptide
LHEELRSMEGLLKPKKRVYEMIQVTINS

SEQ ID NO: 22785 - protein, 29 aa, Artificial Sequence
  Cyclic GFR-binding peptide
  MOD_RES (28)..(28): Xaa is C or S
VQVEKHQGQHPKIRVKAMKVSREETPVXE

SEQ ID NO: 22786 - protein, 33 aa, Artificial Sequence
  Cyclic GFR-binding peptide
  MOD_RES (2)..(4): Xaa is C or S
RXEXQSHEELSMEGIHQGQHPKIRMIQMTINSQ

SEQ ID NO: 22787 - protein, 38 aa, Artificial Sequence
  Cyclic GFR-binding peptide
  MOD_RES (33)..(33): Xaa is C or S
NHQLFSMEGIHQGQHPKIRMIQMTINSEETPVXELGED

SEQ ID NO: 22788 - protein, 33 aa, Artificial Sequence
  Cyclic GFR-binding peptide
  MOD_RES (28)..(28): Xaa is C or S
VQVEKHQGQHPKIRVKAMKVSRQGTPVXELGED

SEQ ID NO: 22789 - protein, 29 aa, Artificial Sequence
  Cyclic GFR-binding peptide
EELRVTAKKLKPKKRVYEIKRVQVPRHHV

SEQ ID NO: 22790 - protein, 42 aa, Artificial Sequence
  Cyclic GFR-binding peptide
  MOD_RES (1)..(38): Xaa is C or S
XALHDELTVQVEKFIPKKRVIEVKAVKVSRLQVQTPRXQVNR

SEQ ID NO: 22791 - protein, 26 aa, Artificial Sequence
  Cyclic GFR-binding peptide
EELVTAKKHQGQHPKIRIKRMQVPRQ

SEQ ID NO: 22792 - protein, 31 aa, Artificial Sequence
  Cyclic GFR-binding peptide
ELRVTAKKLKPKKRVYEIKRVQVPRHHVRSP

SEQ ID NO: 22793 - protein, 34 aa, Artificial Sequence
  Cyclic GFR-binding peptide
  MOD_RES (2)..(4): Xaa is C or S
RXEXQSHEELSMEGIHQGQHPKIRMIQMTINSQG

SEQ ID NO: 22794 - protein, 23 aa, Artificial Sequence
  Cyclic GFR-binding peptide
TSMEGIFIPKKRVIEMIQVTINS

SEQ ID NO: 22795 - protein, 33 aa, Artificial Sequence
  Cyclic GFR-binding peptide
  MOD_RES (33)..(33): Xaa is C or S
ELTVQVEKFIPKKRVIEVKAVKVSRLQVQTPRX

SEQ ID NO: 22796 - protein, 36 aa, Artificial Sequence
  Cyclic GFR-binding peptide
  MOD_RES (33)..(33): Xaa is C or S
ELRSMEGILKPKKRVYEMIQVTINSHHVRSPQXKVS

SEQ ID NO: 22797 - protein, 34 aa, Artificial Sequence
  Cyclic GFR-binding peptide
  MOD_RES (2)..(2): Xaa is C or S
AXELHEELRSMEGLLKPKKRVYEMIQVTINSHHV

SEQ ID NO: 22798 - protein, 27 aa, Artificial Sequence
  Cyclic GFR-binding peptide
NHQLFSMEGLHQGQHPKIRMIQMTINS

SEQ ID NO: 22799 - protein, 37 aa, Artificial Sequence
  Cyclic GFR-binding peptide
  MOD_RES (2)..(4): Xaa is C or S
AXAXELHEELRSMEGILKPKKRVYEMIQVTINSHHVR

SEQ ID NO: 22800 - protein, 42 aa, Artificial Sequence
  Cyclic GFR-binding peptide
  MOD_RES (2)..(4)..(38): Xaa is C or S
RXEXKNHQLFSMEGLHQGQHPKIRMIQMTINSEETPVXELGE

SEQ ID NO: 22801 - protein, 28 aa, Artificial Sequence
  Cyclic GFR-binding peptide
LHDELTVQVEKFIPKKRVIEVKAVKVSR

SEQ ID NO: 22802 - protein, 27 aa, Artificial Sequence
  Cyclic GFR-binding peptide
HDELTSMEGIFIPKKRVIEMIQVTINS

SEQ ID NO: 22803 - protein, 33 aa, Artificial Sequence
  Cyclic GFR-binding peptide
  MOD_RES (30)..(30): Xaa is C or S
LFSMEGIHQGQHPKIRMIQMTINSEETPVXELG

SEQ ID NO: 22804 - protein, 39 aa, Artificial Sequence
  Cyclic GFR-binding peptide
  MOD_RES (37)..(37): Xaa is C or S
ELHEELRSMEGLLKPKKRVYEMIQVTINSHHVRSPQXKV

SEQ ID NO: 22805 - protein, 32 aa, Artificial Sequence
  Cyclic GFR-binding peptide
ELHEELRSMEGILKPKKRVYEMIQVTINSHHV

SEQ ID NO: 22806 - protein, 33 aa, Artificial Sequence
  Cyclic GFR-binding peptide
  MOD_RES (2)..(2): Xaa is C or S
AXELHEELRSMEGLLKPKKRVYEMIQVTINSHH

SEQ ID NO: 22807 - protein, 26 aa, Artificial Sequence
  Cyclic GFR-binding peptide
SMEGIHQGQHPKIRMIQMTINSEETP

SEQ ID NO: 22808 - protein, 29 aa, Artificial Sequence
  Cyclic GFR-binding peptide
EELVQVEKHQGQHPKIRVKAMKVSRQGTP

SEQ ID NO: 22809 - protein, 35 aa, Artificial Sequence
  Cyclic GFR-binding peptide
  MOD_RES (29)..(29): Xaa is C or S
FVTAKKHQGQHPKIRIKRMQVPREETPVXELGEDN

SEQ ID NO: 22810 - protein, 34 aa, Artificial Sequence
  Cyclic GFR-binding peptide
HDELTSMEGLFIPKKRVIEMIQVTINSLQVQTPR

SEQ ID NO: 22811 - protein, 36 aa, Artificial Sequence
  Cyclic GFR-binding peptide
  MOD_RES (34)..(34): Xaa is C or S
KNHQLFVTAKKHQGQHPKIRIKRMQVPREETPVXEL

SEQ ID NO: 22812 - protein, 25 aa, Artificial Sequence
  Cyclic GFR-binding peptide
LRVTAKKLKPKKRVYEIKRVQVPRH

SEQ ID NO: 22813 - protein, 40 aa, Artificial Sequence
  Cyclic GFR-binding peptide
  MOD_RES (37)..(37): Xaa is C or S
ALHDELTSMEGIFIPKKRVIEMIQVTINSLQVQTPRXQVN

SEQ ID NO: 22814 - protein, 36 aa, Artificial Sequence
  Cyclic GFR-binding peptide
  MOD_RES (2)..(36): Xaa is C or S
EXQSHEELVTAKKHQGQHPKIRIKRMQVPRQGTPVX

SEQ ID NO: 22815 - protein, 42 aa, Artificial Sequence
  Cyclic GFR-binding peptide
  MOD_RES (2)..(4)..(41): Xaa is C or S
EXKXALHDELTSMEGLFIPKKRVIEMIQVTINSLQVQTPRXQ

SEQ ID NO: 22816 - protein, 35 aa, Artificial Sequence
  Cyclic GFR-binding peptide
  MOD_RES (1)..(1): Xaa is C or S
XALHDELTSMEGIFIPKKRVIEMIQVTINSLQVQT

SEQ ID NO: 22817 - protein, 38 aa, Artificial Sequence
  Cyclic GFR-binding peptide
  MOD_RES (34)..(34): Xaa is C or S
KNHQLFVTAKKHQGQHPKIRIKRMQVPREETPVXELGE

SEQ ID NO: 22818 - protein, 35 aa, Artificial Sequence
  Cyclic GFR-binding peptide
  MOD_RES (2)..(2): Xaa is C or S
EXQSHEELVQVEKHQGQHPKIRVKAMKVSRQGTPV

SEQ ID NO: 22819 - protein, 27 aa, Artificial Sequence
  Cyclic GFR-binding peptide
ELVTAKKHQGQHPKIRIKRMQVPRQGT

SEQ ID NO: 22820 - protein, 35 aa, Artificial Sequence
  Cyclic GFR-binding peptide
  MOD_RES (1)..(3): Xaa is C or S
XEXQSHEELVQVEKHQGQHPKIRVKAMKVSRQGTP

SEQ ID NO: 22821 - protein, 33 aa, Artificial Sequence
  Cyclic GFR-binding peptide
  MOD_RES (33)..(33): Xaa is C or S
ELRSMEGLLKPKKRVYEMIQVTINSHHVRSPQX

SEQ ID NO: 22822 - protein, 31 aa, Artificial Sequence
  Cyclic GFR-binding peptide
HQLFVQVEKHQGQHPKIRVKAMKVSREETPV

SEQ ID NO: 22823 - protein, 36 aa, Artificial Sequence
  Cyclic GFR-binding peptide
  MOD_RES (32)..(32): Xaa is C or S
LRVTAKKLKPKKRVYEIKRVQVPRHHVRSPQXKVSS

SEQ ID NO: 22824 - protein, 33 aa, Artificial Sequence
  Cyclic GFR-binding peptide
  MOD_RES (1)..(1): Xaa is C or S
XELHEELRVTAKKLKPKKRVYEIKRVQVPRHHV

SEQ ID NO: 22825 - protein, 34 aa, Artificial Sequence
  Cyclic GFR-binding peptide
  MOD_RES (30)..(30): Xaa is C or S
LFSMEGLHQGQHPKIRMIQMTINSEETPVXELGE

SEQ ID NO: 22826 - protein, 40 aa, Artificial Sequence
  Cyclic GFR-binding peptide
  MOD_RES (34)..(34): Xaa is C or S
KNHQLFVQVEKHQGQHPKIRVKAMKVSREETPVXELGEDN

SEQ ID NO: 22827 - protein, 27 aa, Artificial Sequence
  Cyclic GFR-binding peptide
EELSMEGIHQGQHPKIRMIQMTINSQG

SEQ ID NO: 22828 - protein, 35 aa, Artificial Sequence
  Cyclic GFR-binding peptide
  MOD_RES (34)..(34): Xaa is C or S
KNHQLFVTAKKHQGQHPKIRIKRMQVPREETPVXE

SEQ ID NO: 22829 - protein, 30 aa, Artificial Sequence
  Cyclic GFR-binding peptide
RSMEGLLKPKKRVYEMIQVTINSHHVRSPQ

SEQ ID NO: 22830 - protein, 32 aa, Artificial Sequence
  Cyclic GFR-binding peptide
ELRSMEGLLKPKKRVYEMIQVTINSHHVRSPQ

SEQ ID NO: 22831 - protein, 31 aa, Artificial Sequence
  Cyclic GFR-binding peptide
  MOD_RES (1)..(1): Xaa is C or S
XQSHEELVTAKKHQGQHPKIRIKRMQVPRQG

SEQ ID NO: 22832 - protein, 38 aa, Artificial Sequence
  Cyclic GFR-binding peptide
  MOD_RES (1)..(35): Xaa is C or S
XKNHQLFVQVEKHQGQHPKIRVKAMKVSREETPVXELG

SEQ ID NO: 22833 - protein, 25 aa, Artificial Sequence
  Cyclic GFR-binding peptide
QLFVQVEKHQGQHPKIRVKAMKVSR

SEQ ID NO: 22834 - protein, 35 aa, Artificial Sequence
  Cyclic GFR-binding peptide
  MOD_RES (35)..(35): Xaa is C or S
HDELTVQVEKFIPKKRVIEVKAVKVSRLQVQTPRX

SEQ ID NO: 22835 - protein, 34 aa, Artificial Sequence
  Cyclic GFR-binding peptide
  MOD_RES (32)..(32): Xaa is C or S
HEELVTAKKHQGQHPKIRIKRMQVPRQGTPVXEL

SEQ ID NO: 22836 - protein, 36 aa, Artificial Sequence
  Cyclic GFR-binding peptide
  MOD_RES (30)..(30): Xaa is C or S
ELSMEGIHQGQHPKIRMIQMTINSQGTPVXELGEDN

SEQ ID NO: 22837 - protein, 28 aa, Artificial Sequence
  Cyclic GFR-binding peptide
ELTSMEGIFIPKKRVIEMIQVTINSLQV

SEQ ID NO: 22838 - protein, 30 aa, Artificial Sequence
  Cyclic GFR-binding peptide
SHEELSMEGIHQGQHPKIRMIQMTINSQGT

SEQ ID NO: 22839 - protein, 36 aa, Artificial Sequence
  Cyclic GFR-binding peptide
  MOD_RES (2)..(36): Xaa is C or S
EXQSHEELVQVEKHQGQHPKIRVKAMKVSRQGTPVX

SEQ ID NO: 22840 - protein, 34 aa, Artificial Sequence
  Cyclic GFR-binding peptide
  MOD_RES (30)..(30): Xaa is C or S
LFVQVEKHQGQHPKIRVKAMKVSREETPVXELGE

SEQ ID NO: 22841 - protein, 31 aa, Artificial Sequence
  Cyclic GFR-binding peptide
QSHEELSMEGIHQGQHPKIRMIQMTINSQGT

SEQ ID NO: 22842 - protein, 35 aa, Artificial Sequence
  Cyclic GFR-binding peptide
  MOD_RES (34)..(34): Xaa is C or S
QSHEELVTAKKHQGQHPKIRIKRMQVPRQGTPVXE

SEQ ID NO: 22843 - protein, 34 aa, Artificial Sequence
  Cyclic GFR-binding peptide
  MOD_RES (29)..(29): Xaa is C or S
FVTAKKHQGQHPKIRIKRMQVPREETPVXELGED

SEQ ID NO: 22844 - protein, 36 aa, Artificial Sequence
  Cyclic GFR-binding peptide
  MOD_RES (2)..(2): Xaa is C or S
AXELHEELRSMEGLLKPKKRVYEMIQVTINSHHVRS

SEQ ID NO: 22845 - protein, 31 aa, Artificial Sequence
  Cyclic GFR-binding peptide
ALHDELTSMEGLFIPKKRVIEMIQVTINSLQ

SEQ ID NO: 22846 - protein, 27 aa, Artificial Sequence
  Cyclic GFR-binding peptide
FVTAKKHQGQHPKIRIKRMQVPREETP

SEQ ID NO: 22847 - protein, 25 aa, Artificial Sequence
  Cyclic GFR-binding peptide
SMEGIHQGQHPKIRMIQMTINSQGT

SEQ ID NO: 22848 - protein, 35 aa, Artificial Sequence
  Cyclic GFR-binding peptide
  MOD_RES (33)..(33): Xaa is C or S
SHEELVTAKKHQGQHPKIRIKRMQVPRQGTPVXEL

SEQ ID NO: 22849 - protein, 41 aa, Artificial Sequence
  Cyclic GFR-binding peptide
  MOD_RES (37)..(37): Xaa is C or S
ALHDELTSMEGIFIPKKRVIEMIQVTINSLQVQTPRXQVNR

SEQ ID NO: 22850 - protein, 30 aa, Artificial Sequence
  Cyclic GFR-binding peptide
LRSMEGLLKPKKRVYEMIQVTINSHHVRSP

SEQ ID NO: 22851 - protein, 36 aa, Artificial Sequence
  Cyclic GFR-binding peptide
  MOD_RES (36)..(36): Xaa is C or S
LHDELTVQVEKFIPKKRVIEVKAVKVSRLQVQTPRX

SEQ ID NO: 22852 - protein, 35 aa, Artificial Sequence
  Cyclic GFR-binding peptide
  MOD_RES (2)..(4): Xaa is C or S
EXKXALHDELTVQVEKFIPKKRVIEVKAVKVSRLQ

SEQ ID NO: 22853 - protein, 34 aa, Artificial Sequence
  Cyclic GFR-binding peptide
  MOD_RES (31)..(31): Xaa is C or S
QLFSMEGLHQGQHPKIRMIQMTINSEETPVXELG

SEQ ID NO: 22854 - protein, 29 aa, Artificial Sequence
  Cyclic GFR-binding peptide
  MOD_RES (28)..(28): Xaa is C or S
SMEGIHQGQHPKIRMIQMTINSEETPVXE

SEQ ID NO: 22855 - protein, 35 aa, Artificial Sequence
  Cyclic GFR-binding peptide
  MOD_RES (32)..(32): Xaa is C or S
LTVQVEKFIPKKRVIEVKAVKVSRLQVQTPRXQVN

SEQ ID NO: 22856 - protein, 35 aa, Artificial Sequence
  Cyclic GFR-binding peptide
  MOD_RES (1)..(3): Xaa is C or S
XEXKNHQLFVQVEKHQGQHPKIRVKAMKVSREETP

SEQ ID NO: 22857 - protein, 32 aa, Artificial Sequence
  Cyclic GFR-binding peptide
LHEELRSMEGLLKPKKRVYEMIQVTINSHHVR

SEQ ID NO: 22858 - protein, 42 aa, Artificial Sequence
  Cyclic GFR-binding peptide
  MOD_RES (1)..(3)..(40): Xaa is C or S
XAXELHEELRSMEGLLKPKKRVYEMIQVTINSHHVRSPQXKV

SEQ ID NO: 22859 - protein, 35 aa, Artificial Sequence
  Cyclic GFR-binding peptide
  MOD_RES (32)..(32): Xaa is C or S
LRVTAKKLKPKKRVYEIKRVQVPRHHVRSPQXKVS

SEQ ID NO: 22860 - protein, 30 aa, Artificial Sequence
  Cyclic GFR-binding peptide
LHDELTSMEGLFIPKKRVIEMIQVTINSLQ

SEQ ID NO: 22861 - protein, 32 aa, Artificial Sequence
  Cyclic GFR-binding peptide
  MOD_RES (1)..(1): Xaa is C or S
XALHDELTSMEGLFIPKKRVIEMIQVTINSLQ

SEQ ID NO: 22862 - protein, 30 aa, Artificial Sequence
  Cyclic GFR-binding peptide
ELRVTAKKLKPKKRVYEIKRVQVPRHHVRS

SEQ ID NO: 22863 - protein, 34 aa, Artificial Sequence
  Cyclic GFR-binding peptide
  MOD_RES (30)..(30): Xaa is C or S
SMEGLFIPKKRVIEMIQVTINSLQVQTPRXQVNR

SEQ ID NO: 22864 - protein, 31 aa, Artificial Sequence
  Cyclic GFR-binding peptide
HQLFSMEGLHQGQHPKIRMIQMTINSEETPV

SEQ ID NO: 22865 - protein, 32 aa, Artificial Sequence
  Cyclic GFR-binding peptide
KNHQLFVQVEKHQGQHPKIRVKAMKVSREETP

SEQ ID NO: 22866 - protein, 28 aa, Artificial Sequence
  Cyclic GFR-binding peptide
  MOD_RES (28)..(28): Xaa is C or S
VQVEKHQGQHPKIRVKAMKVSRQGTPVX

SEQ ID NO: 22867 - protein, 34 aa, Artificial Sequence
  Cyclic GFR-binding peptide
  MOD_RES (2)..(4): Xaa is C or S
RXEXQSHEELVQVEKHQGQHPKIRVKAMKVSRQG

SEQ ID NO: 22868 - protein, 33 aa, Artificial Sequence
  Cyclic GFR-binding peptide
  MOD_RES (1)..(1): Xaa is C or S
XELHEELRSMEGLLKPKKRVYEMIQVTINSHHV

SEQ ID NO: 22869 - protein, 33 aa, Artificial Sequence
  Cyclic GFR-binding peptide
  MOD_RES (2)..(4): Xaa is C or S
EXKXALHDELTVTAKKFIPKKRVIEIKRVQVPR

SEQ ID NO: 22870 - protein, 37 aa, Artificial Sequence
  Cyclic GFR-binding peptide
  MOD_RES (34)..(34): Xaa is C or S
DELTSMEGLFIPKKRVIEMIQVTINSLQVQTPRXQVN

SEQ ID NO: 22871 - protein, 27 aa, Artificial Sequence
  Cyclic GFR-binding peptide
FSMEGLHQGQHPKIRMIQMTINSEETP

SEQ ID NO: 22872 - protein, 36 aa, Artificial Sequence
  Cyclic GFR-binding peptide
  MOD_RES (35)..(35): Xaa is C or S
HDELTSMEGIFIPKKRVIEMIQVTINSLQVQTPRXQ

SEQ ID NO: 22873 - protein, 31 aa, Artificial Sequence
  Cyclic GFR-binding peptide
LHDELTSMEGLFIPKKRVIEMIQVTINSLQV

SEQ ID NO: 22874 - protein, 28 aa, Artificial Sequence
  Cyclic GFR-binding peptide
LRSMEGILKPKKRVYEMIQVTINSHHVR

SEQ ID NO: 22875 - protein, 32 aa, Artificial Sequence
  Cyclic GFR-binding peptide
  MOD_RES (30)..(30): Xaa is C or S
ELVTAKKHQGQHPKIRIKRMQVPRQGTPVXEL

SEQ ID NO: 22876 - protein, 26 aa, Artificial Sequence
  Cyclic GFR-binding peptide
EELRVTAKKLKPKKRVYEIKRVQVPR

SEQ ID NO: 22877 - protein, 30 aa, Artificial Sequence
  Cyclic GFR-binding peptide
EELSMEGIHQGQHPKIRMIQMTINSQGTPV

SEQ ID NO: 22878 - protein, 34 aa, Artificial Sequence
  Cyclic GFR-binding peptide
  MOD_RES (2)..(4): Xaa is C or S
RXEXQSHEELVTAKKHQGQHPKIRIKRMQVPRQG

SEQ ID NO: 22879 - protein, 39 aa, Artificial Sequence
  Cyclic GFR-binding peptide
  MOD_RES (34)..(34): Xaa is C or S
QSHEELVQVEKHQGQHPKIRVKAMKVSRQGTPVXELGED

SEQ ID NO: 22880 - protein, 38 aa, Artificial Sequence
  Cyclic GFR-binding peptide
  MOD_RES (2)..(4)..(38): Xaa is C or S
RXEXKNHQLFSMEGLHQGQHPKIRMIQMTINSEETPVX

SEQ ID NO: 22881 - protein, 37 aa, Artificial Sequence
  Cyclic GFR-binding peptide
  MOD_RES (31)..(31): Xaa is C or S
EELSMEGIHQGQHPKIRMIQMTINSQGTPVXELGEDN

SEQ ID NO: 22882 - protein, 31 aa, Artificial Sequence
  Cyclic GFR-binding peptide
  MOD_RES (31)..(31): Xaa is C or S
EELVQVEKHQGQHPKIRVKAMKVSRQGTPVX

SEQ ID NO: 22883 - protein, 44 aa, Artificial Sequence
  Cyclic GFR-binding peptide
  MOD_RES (2)..(4)..(38): Xaa is C or S
RXEXKNHQLFVQVEKHQGQHPKIRVKAMKVSREETPVXELGEDN

SEQ ID NO: 22884 - protein, 36 aa, Artificial Sequence
  Cyclic GFR-binding peptide
  MOD_RES (36)..(36): Xaa is C or S
LHEELRVTAKKLKPKKRVYEIKRVQVPRHHVRSPQX

SEQ ID NO: 22885 - protein, 39 aa, Artificial Sequence
  Cyclic GFR-binding peptide
  MOD_RES (2)..(36): Xaa is C or S
EXKNHQLFSMEGLHQGQHPKIRMIQMTINSEETPVXELG

SEQ ID NO: 22886 - protein, 43 aa, Artificial Sequence
  Cyclic GFR-binding peptide
  MOD_RES (2)..(4)..(41): Xaa is C or S
EXKXALHDELTSMEGIFIPKKRVIEMIQVTINSLQVQTPRXQV

SEQ ID NO: 22887 - protein, 36 aa, Artificial Sequence
  Cyclic GFR-binding peptide
  MOD_RES (1)..(35): Xaa is C or S
XQSHEELSMEGIHQGQHPKIRMIQMTINSQGTPVXE

SEQ ID NO: 22888 - protein, 28 aa, Artificial Sequence
  Cyclic GFR-binding peptide
ELVTAKKHQGQHPKIRIKRMQVPRQGTP

SEQ ID NO: 22889 - protein, 25 aa, Artificial Sequence
  Cyclic GFR-binding peptide
RSMEGILKPKKRVYEMIQVTINSHH

SEQ ID NO: 22890 - protein, 42 aa, Artificial Sequence
  Cyclic GFR-binding peptide
  MOD_RES (2)..(4)..(38): Xaa is C or S
RXEXQSHEELSMEGIHQGQHPKIRMIQMTINSQGTPVXELGE

SEQ ID NO: 22891 - protein, 34 aa, Artificial Sequence
  Cyclic GFR-binding peptide
  MOD_RES (32)..(32): Xaa is C or S
LRSMEGLLKPKKRVYEMIQVTINSHHVRSPQXKV

SEQ ID NO: 22892 - protein, 33 aa, Artificial Sequence
  Cyclic GFR-binding peptide
  MOD_RES (30)..(30): Xaa is C or S
VQVEKFIPKKRVIEVKAVKVSRLQVQTPRXQVN

SEQ ID NO: 22893 - protein, 28 aa, Artificial Sequence
  Cyclic GFR-binding peptide
QLFVQVEKHQGQHPKIRVKAMKVSREET

SEQ ID NO: 22894 - protein, 29 aa, Artificial Sequence
  Cyclic GFR-binding peptide
ELVQVEKHQGQHPKIRVKAMKVSRQGTPV

SEQ ID NO: 22895 - protein, 32 aa, Artificial Sequence
  Cyclic GFR-binding peptide
  MOD_RES (1)..(1): Xaa is C or S
XELHEELRVTAKKLKPKKRVYEIKRVQVPRHH

SEQ ID NO: 22896 - protein, 44 aa, Artificial Sequence
  Cyclic GFR-binding peptide
  MOD_RES (2)..(4)..(38): Xaa is C or S
RXEXKNHQLFVTAKKHQGQHPKIRIKRMQVPREETPVXELGEDN

SEQ ID NO: 22897 - protein, 37 aa, Artificial Sequence
  Cyclic GFR-binding peptide
  MOD_RES (33)..(33): Xaa is C or S
ELTVQVEKFIPKKRVIEVKAVKVSRLQVQTPRXQVNR

SEQ ID NO: 22898 - protein, 32 aa, Artificial Sequence
  Cyclic GFR-binding peptide
  MOD_RES (29)..(29): Xaa is C or S
FVTAKKHQGQHPKIRIKRMQVPREETPVXELG

SEQ ID NO: 22899 - protein, 37 aa, Artificial Sequence
  Cyclic GFR-binding peptide
  MOD_RES (2)..(2): Xaa is C or S
KXALHDELTSMEGLFIPKKRVIEMIQVTINSLQVQTP

SEQ ID NO: 22900 - protein, 31 aa, Artificial Sequence
  Cyclic GFR-binding peptide
LHEELRSMEGILKPKKRVYEMIQVTINSHHV

SEQ ID NO: 22901 - protein, 36 aa, Artificial Sequence
  Cyclic GFR-binding peptide
  MOD_RES (2)..(4): Xaa is C or S
RXEXQSHEELSMEGLHQGQHPKIRMIQMTINSQGTP

SEQ ID NO: 22902 - protein, 36 aa, Artificial Sequence
  Cyclic GFR-binding peptide
  MOD_RES (33)..(33): Xaa is C or S
ELTSMEGLFIPKKRVIEMIQVTINSLQVQTPRXQVN

SEQ ID NO: 22903 - protein, 36 aa, Artificial Sequence
  Cyclic GFR-binding peptide
  MOD_RES (2)..(4): Xaa is C or S
RXEXQSHEELSMEGIHQGQHPKIRMIQMTINSQGTP

SEQ ID NO: 22904 - protein, 35 aa, Artificial Sequence
  Cyclic GFR-binding peptide
  MOD_RES (31)..(31): Xaa is C or S
EELVTAKKHQGQHPKIRIKRMQVPRQGTPVXELGE

SEQ ID NO: 22905 - protein, 30 aa, Artificial Sequence
  Cyclic GFR-binding peptide
NHQLFSMEGLHQGQHPKIRMIQMTINSEET

SEQ ID NO: 22906 - protein, 30 aa, Artificial Sequence
  Cyclic GFR-binding peptide
  MOD_RES (30)..(30): Xaa is C or S
LFSMEGIHQGQHPKIRMIQMTINSEETPVX

SEQ ID NO: 22907 - protein, 31 aa, Artificial Sequence
  Cyclic GFR-binding peptide
NHQLFVTAKKHQGQHPKIRIKRMQVPREETP

SEQ ID NO: 22908 - protein, 33 aa, Artificial Sequence
  Cyclic GFR-binding peptide
  MOD_RES (29)..(29): Xaa is C or S
LVQVEKHQGQHPKIRVKAMKVSRQGTPVXELGE

SEQ ID NO: 22909 - protein, 27 aa, Artificial Sequence
  Cyclic GFR-binding peptide
HDELTVQVEKFIPKKRVIEVKAVKVSR

SEQ ID NO: 22910 - protein, 34 aa, Artificial Sequence
  Cyclic GFR-binding peptide
  MOD_RES (33)..(33): Xaa is C or S
SHEELVQVEKHQGQHPKIRVKAMKVSRQGTPVXE

SEQ ID NO: 22911 - protein, 31 aa, Artificial Sequence
  Cyclic GFR-binding peptide
SHEELVQVEKHQGQHPKIRVKAMKVSRQGTP

SEQ ID NO: 22912 - protein, 39 aa, Artificial Sequence
  Cyclic GFR-binding peptide
  MOD_RES (2)..(39): Xaa is C or S
KXALHDELTSMEGLFIPKKRVIEMIQVTINSLQVQTPRX

SEQ ID NO: 22913 - protein, 23 aa, Artificial Sequence
  Cyclic GFR-binding peptide
VTAKKHQGQHPKIRIKRMQVPRQ

SEQ ID NO: 22914 - protein, 34 aa, Artificial Sequence
  Cyclic GFR-binding peptide
  MOD_RES (32)..(32): Xaa is C or S
HEELVQVEKHQGQHPKIRVKAMKVSRQGTPVXEL

SEQ ID NO: 22915 - protein, 38 aa, Artificial Sequence
  Cyclic GFR-binding peptide
  MOD_RES (34)..(34): Xaa is C or S
QSHEELVQVEKHQGQHPKIRVKAMKVSRQGTPVXELGE

SEQ ID NO: 22916 - protein, 30 aa, Artificial Sequence
  Cyclic GFR-binding peptide
  MOD_RES (28)..(28): Xaa is C or S
VTAKKHQGQHPKIRIKRMQVPRQGTPVXEL

SEQ ID NO: 22917 - protein, 24 aa, Artificial Sequence
  Cyclic GFR-binding peptide
SMEGLHQGQHPKIRMIQMTINSEE

SEQ ID NO: 22918 - protein, 32 aa, Artificial Sequence
  Cyclic GFR-binding peptide
  MOD_RES (31)..(31): Xaa is C or S
RSMEGLLKPKKRVYEMIQVTINSHHVRSPQXK

SEQ ID NO: 22919 - protein, 31 aa, Artificial Sequence
  Cyclic GFR-binding peptide
  MOD_RES (2)..(2): Xaa is C or S
AXELHEELRSMEGILKPKKRVYEMIQVTINS

SEQ ID NO: 22920 - protein, 36 aa, Artificial Sequence
  Cyclic GFR-binding peptide
  MOD_RES (32)..(32): Xaa is C or S
HQLFSMEGIHQGQHPKIRMIQMTINSEETPVXELGE

SEQ ID NO: 22921 - protein, 34 aa, Artificial Sequence
  Cyclic GFR-binding peptide
  MOD_RES (31)..(31): Xaa is C or S
QLFVTAKKHQGQHPKIRIKRMQVPREETPVXELG

SEQ ID NO: 22922 - protein, 33 aa, Artificial Sequence
  Cyclic GFR-binding peptide
  MOD_RES (28)..(28): Xaa is C or S
SMEGIHQGQHPKIRMIQMTINSQGTPVXELGED

SEQ ID NO: 22923 - protein, 32 aa, Artificial Sequence
  Cyclic GFR-binding peptide
ALHDELTVQVEKFIPKKRVIEVKAVKVSRLQV

SEQ ID NO: 22924 - protein, 38 aa, Artificial Sequence
  Cyclic GFR-binding peptide
  MOD_RES (32)..(32): Xaa is C or S
HQLFSMEGLHQGQHPKIRMIQMTINSEETPVXELGEDN

SEQ ID NO: 22925 - protein, 31 aa, Artificial Sequence
  Cyclic GFR-binding peptide
  MOD_RES (2)..(2): Xaa is C or S
EXQSHEELVQVEKHQGQHPKIRVKAMKVSRQ

SEQ ID NO: 22926 - protein, 43 aa, Artificial Sequence
  Cyclic GFR-binding peptide
  MOD_RES (1)..(3)..(40): Xaa is C or S
XKXALHDELTSMEGLFIPKKRVIEMIQVTINSLQVQTPRXQVN

SEQ ID NO: 22927 - protein, 30 aa, Artificial Sequence
  Cyclic GFR-binding peptide
  MOD_RES (1)..(1): Xaa is C or S
XKNHQLFSMEGLHQGQHPKIRMIQMTINSE

SEQ ID NO: 22928 - protein, 34 aa, Artificial Sequence
  Cyclic GFR-binding peptide
  MOD_RES (34)..(34): Xaa is C or S
KNHQLFVQVEKHQGQHPKIRVKAMKVSREETPVX

SEQ ID NO: 22929 - protein, 35 aa, Artificial Sequence
  Cyclic GFR-binding peptide
  MOD_RES (2)..(4): Xaa is C or S
RXEXQSHEELSMEGLHQGQHPKIRMIQMTINSQGT

SEQ ID NO: 22930 - protein, 39 aa, Artificial Sequence
  Cyclic GFR-binding peptide
  MOD_RES (37)..(37): Xaa is C or S
ELHEELRVTAKKLKPKKRVYEIKRVQVPRHHVRSPQXKV

SEQ ID NO: 22931 - protein, 29 aa, Artificial Sequence
  Cyclic GFR-binding peptide
RSMEGILKPKKRVYEMIQVTINSHHVRSP

SEQ ID NO: 22932 - protein, 35 aa, Artificial Sequence
  Cyclic GFR-binding peptide
  MOD_RES (34)..(34): Xaa is C or S
KNHQLFSMEGLHQGQHPKIRMIQMTINSEETPVXE

SEQ ID NO: 22933 - protein, 30 aa, Artificial Sequence
  Cyclic GFR-binding peptide
ELHEELRVTAKKLKPKKRVYEIKRVQVPRH

SEQ ID NO: 22934 - protein, 33 aa, Artificial Sequence
  Cyclic GFR-binding peptide
  MOD_RES (1)..(3): Xaa is C or S
XKXALHDELTSMEGLFIPKKRVIEMIQVTINSL

SEQ ID NO: 22935 - protein, 37 aa, Artificial Sequence
  Cyclic GFR-binding peptide
  MOD_RES (1)..(1): Xaa is C or S
XALHDELTVQVEKFIPKKRVIEVKAVKVSRLQVQTPR

SEQ ID NO: 22936 - protein, 30 aa, Artificial Sequence
  Cyclic GFR-binding peptide
ELHEELRSMEGILKPKKRVYEMIQVTINSH

SEQ ID NO: 22937 - protein, 36 aa, Artificial Sequence
  Cyclic GFR-binding peptide
  MOD_RES (2)..(36): Xaa is C or S
EXKNHQLFVTAKKHQGQHPKIRIKRMQVPREETPVX

SEQ ID NO: 22938 - protein, 40 aa, Artificial Sequence
  Cyclic GFR-binding peptide
  MOD_RES (2)..(4): Xaa is C or S
AXAXELHEELRSMEGLLKPKKRVYEMIQVTINSHHVRSPQ

SEQ ID NO: 22939 - protein, 37 aa, Artificial Sequence
  Cyclic GFR-binding peptide
  MOD_RES (32)..(32): Xaa is C or S
HQLFSMEGIHQGQHPKIRMIQMTINSEETPVXELGED

SEQ ID NO: 22940 - protein, 40 aa, Artificial Sequence
  Cyclic GFR-binding peptide
  MOD_RES (1)..(38): Xaa is C or S
XELHEELRVTAKKLKPKKRVYEIKRVQVPRHHVRSPQXKV

SEQ ID NO: 22941 - protein, 33 aa, Artificial Sequence
  Cyclic GFR-binding peptide
ALHDELTSMEGLFIPKKRVIEMIQVTINSLQVQ

SEQ ID NO: 22942 - protein, 36 aa, Artificial Sequence
  Cyclic GFR-binding peptide
  MOD_RES (34)..(34): Xaa is C or S
DELTSMEGLFIPKKRVIEMIQVTINSLQVQTPRXQV

SEQ ID NO: 22943 - protein, 36 aa, Artificial Sequence
  Cyclic GFR-binding peptide
  MOD_RES (35)..(35): Xaa is C or S
HEELRVTAKKLKPKKRVYEIKRVQVPRHHVRSPQXK

SEQ ID NO: 22944 - protein, 35 aa, Artificial Sequence
  Cyclic GFR-binding peptide
LHEELRSMEGILKPKKRVYEMIQVTINSHHVRSPQ

SEQ ID NO: 22945 - protein, 39 aa, Artificial Sequence
  Cyclic GFR-binding peptide
  MOD_RES (34)..(34): Xaa is C or S
QSHEELSMEGIHQGQHPKIRMIQMTINSQGTPVXELGED

SEQ ID NO: 22946 - protein, 31 aa, Artificial Sequence
  Cyclic GFR-binding peptide
ELHEELRSMEGLLKPKKRVYEMIQVTINSHH

SEQ ID NO: 22947 - protein, 43 aa, Artificial Sequence
  Cyclic GFR-binding peptide
  MOD_RES (1)..(3)..(37): Xaa is C or S
XEXQSHEELVTAKKHQGQHPKIRIKRMQVPRQGTPVXELGEDN

SEQ ID NO: 22948 - protein, 40 aa, Artificial Sequence
  Cyclic GFR-binding peptide
  MOD_RES (1)..(3)..(40): Xaa is C or S
XAXELHEELRSMEGLLKPKKRVYEMIQVTINSHHVRSPQX

SEQ ID NO: 22949 - protein, 40 aa, Artificial Sequence
  Cyclic GFR-binding peptide
  MOD_RES (1)..(3)..(40): Xaa is C or S
XAXELHEELRSMEGILKPKKRVYEMIQVTINSHHVRSPQX

SEQ ID NO: 22950 - protein, 37 aa, Artificial Sequence
  Cyclic GFR-binding peptide
  MOD_RES (1)..(3)..(37): Xaa is C or S
XEXKNHQLFSMEGIHQGQHPKIRMIQMTINSEETPVX

SEQ ID NO: 22951 - protein, 33 aa, Artificial Sequence
  Cyclic GFR-binding peptide
  MOD_RES (31)..(31): Xaa is C or S
TVQVEKFIPKKRVIEVKAVKVSRLQVQTPRXQV

SEQ ID NO: 22952 - protein, 36 aa, Artificial Sequence
  Cyclic GFR-binding peptide
  MOD_RES (36)..(36): Xaa is C or S
LHDELTSMEGIFIPKKRVIEMIQVTINSLQVQTPRX

SEQ ID NO: 22953 - protein, 24 aa, Artificial Sequence
  Cyclic GFR-binding peptide
LRSMEGILKPKKRVYEMIQVTINS

SEQ ID NO: 22954 - protein, 29 aa, Artificial Sequence
  Cyclic GFR-binding peptide
  MOD_RES (29)..(29): Xaa is C or S
FSMEGIHQGQHPKIRMIQMTINSEETPVX

SEQ ID NO: 22955 - protein, 33 aa, Artificial Sequence
  Cyclic GFR-binding peptide
HDELTSMEGIFIPKKRVIEMIQVTINSLQVQTP

SEQ ID NO: 22956 - protein, 28 aa, Artificial Sequence
  Cyclic GFR-binding peptide
ELTSMEGLFIPKKRVIEMIQVTINSLQV

SEQ ID NO: 22957 - protein, 33 aa, Artificial Sequence
  Cyclic GFR-binding peptide
  MOD_RES (1)..(1): Xaa is C or S
XELHEELRSMEGILKPKKRVYEMIQVTINSHHV

SEQ ID NO: 22958 - protein, 37 aa, Artificial Sequence
  Cyclic GFR-binding peptide
  MOD_RES (2)..(36): Xaa is C or S
EXKNHQLFSMEGIHQGQHPKIRMIQMTINSEETPVXE

SEQ ID NO: 22959 - protein, 33 aa, Artificial Sequence
  Cyclic GFR-binding peptide
LHDELTVQVEKFIPKKRVIEVKAVKVSRLQVQT

SEQ ID NO: 22960 - protein, 27 aa, Artificial Sequence
  Cyclic GFR-binding peptide
QLFVQVEKHQGQHPKIRVKAMKVSREE

SEQ ID NO: 22961 - protein, 28 aa, Artificial Sequence
  Cyclic GFR-binding peptide
EELVTAKKHQGQHPKIRIKRMQVPRQGT

SEQ ID NO: 22962 - protein, 34 aa, Artificial Sequence
  Cyclic GFR-binding peptide
LHEELRSMEGLLKPKKRVYEMIQVTINSHHVRSP

SEQ ID NO: 22963 - protein, 35 aa, Artificial Sequence
  Cyclic GFR-binding peptide
  MOD_RES (31)..(31): Xaa is C or S
TSMEGLFIPKKRVIEMIQVTINSLQVQTPRXQVNR

SEQ ID NO: 22964 - protein, 26 aa, Artificial Sequence
  Cyclic GFR-binding peptide
HEELSMEGIHQGQHPKIRMIQMTINS

SEQ ID NO: 22965 - protein, 40 aa, Artificial Sequence
  Cyclic GFR-binding peptide
  MOD_RES (37)..(37): Xaa is C or S
ELHEELRSMEGILKPKKRVYEMIQVTINSHHVRSPQXKVS

SEQ ID NO: 22966 - protein, 30 aa, Artificial Sequence
  Cyclic GFR-binding peptide
ALHDELTSMEGLFIPKKRVIEMIQVTINSL

SEQ ID NO: 22967 - protein, 30 aa, Artificial Sequence
  Cyclic GFR-binding peptide
LRVTAKKLKPKKRVYEIKRVQVPRHHVRSP

SEQ ID NO: 22968 - protein, 34 aa, Artificial Sequence
  Cyclic GFR-binding peptide
  MOD_RES (1)..(1): Xaa is C or S
XQSHEELSMEGIHQGQHPKIRMIQMTINSQGTPV

SEQ ID NO: 22969 - protein, 31 aa, Artificial Sequence
  Cyclic GFR-binding peptide
KNHQLFVQVEKHQGQHPKIRVKAMKVSREET

SEQ ID NO: 22970 - protein, 32 aa, Artificial Sequence
  Cyclic GFR-binding peptide
  MOD_RES (2)..(4): Xaa is C or S
RXEXQSHEELSMEGLHQGQHPKIRMIQMTINS

SEQ ID NO: 22971 - protein, 33 aa, Artificial Sequence
  Cyclic GFR-binding peptide
  MOD_RES (1)..(1): Xaa is C or S
XALHDELTVQVEKFIPKKRVIEVKAVKVSRLQV

SEQ ID NO: 22972 - protein, 34 aa, Artificial Sequence
  Cyclic GFR-binding peptide
  MOD_RES (34)..(34): Xaa is C or S
EELRVTAKKLKPKKRVYEIKRVQVPRHHVRSPQX

SEQ ID NO: 22973 - protein, 27 aa, Artificial Sequence
  Cyclic GFR-binding peptide
TSMEGIFIPKKRVIEMIQVTINSLQVQ

SEQ ID NO: 22974 - protein, 36 aa, Artificial Sequence
  Cyclic GFR-binding peptide
  MOD_RES (35)..(35): Xaa is C or S
HEELRSMEGILKPKKRVYEMIQVTINSHHVRSPQXK

SEQ ID NO: 22975 - protein, 31 aa, Artificial Sequence
  Cyclic GFR-binding peptide
ELHEELRVTAKKLKPKKRVYEIKRVQVPRHH

SEQ ID NO: 22976 - protein, 37 aa, Artificial Sequence
  Cyclic GFR-binding peptide
  MOD_RES (2)..(4): Xaa is C or S
RXEXKNHQLFSMEGIHQGQHPKIRMIQMTINSEETPV

SEQ ID NO: 22977 - protein, 40 aa, Artificial Sequence
  Cyclic GFR-binding peptide
  MOD_RES (34)..(34): Xaa is C or S
KNHQLFVTAKKHQGQHPKIRIKRMQVPREETPVXELGEDN

SEQ ID NO: 22978 - protein, 32 aa, Artificial Sequence
  Cyclic GFR-binding peptide
  MOD_RES (32)..(32): Xaa is C or S
HEELVQVEKHQGQHPKIRVKAMKVSRQGTPVX

SEQ ID NO: 22979 - protein, 31 aa, Artificial Sequence
  Cyclic GFR-binding peptide
QSHEELVQVEKHQGQHPKIRVKAMKVSRQGT

SEQ ID NO: 22980 - protein, 36 aa, Artificial Sequence
  Cyclic GFR-binding peptide
ALHDELTVQVEKFIPKKRVIEVKAVKVSRLQVQTPR

SEQ ID NO: 22981 - protein, 25 aa, Artificial Sequence
  Cyclic GFR-binding peptide
LTVQVEKFIPKKRVIEVKAVKVSRL

SEQ ID NO: 22982 - protein, 35 aa, Artificial Sequence
  Cyclic GFR-binding peptide
  MOD_RES (1)..(3): Xaa is C or S
XEXKNHQLFSMEGIHQGQHPKIRMIQMTINSEETP

SEQ ID NO: 22983 - protein, 26 aa, Artificial Sequence
  Cyclic GFR-binding peptide
TSMEGLFIPKKRVIEMIQVTINSLQV

SEQ ID NO: 22984 - protein, 40 aa, Artificial Sequence
  Cyclic GFR-binding peptide
  MOD_RES (2)..(39): Xaa is C or S
AXELHEELRSMEGLLKPKKRVYEMIQVTINSHHVRSPQXK

SEQ ID NO: 22985 - protein, 34 aa, Artificial Sequence
  Cyclic GFR-binding peptide
  MOD_RES (2)..(4): Xaa is C or S
EXKXALHDELTVTAKKFIPKKRVIEIKRVQVPRL

SEQ ID NO: 22986 - protein, 27 aa, Artificial Sequence
  Cyclic GFR-binding peptide
SHEELVQVEKHQGQHPKIRVKAMKVSR

SEQ ID NO: 22987 - protein, 38 aa, Artificial Sequence
  Cyclic GFR-binding peptide
  MOD_RES (36)..(36): Xaa is C or S
LHEELRVTAKKLKPKKRVYEIKRVQVPRHHVRSPQXKV

SEQ ID NO: 22988 - protein, 32 aa, Artificial Sequence
  Cyclic GFR-binding peptide
  MOD_RES (1)..(3): Xaa is C or S
XAXELHEELRSMEGLLKPKKRVYEMIQVTINS

SEQ ID NO: 22989 - protein, 38 aa, Artificial Sequence
  Cyclic GFR-binding peptide
  MOD_RES (2)..(4)..(38): Xaa is C or S
RXEXQSHEELSMEGIHQGQHPKIRMIQMTINSQGTPVX

SEQ ID NO: 22990 - protein, 35 aa, Artificial Sequence
  Cyclic GFR-binding peptide
  MOD_RES (32)..(32): Xaa is C or S
LTSMEGLFIPKKRVIEMIQVTINSLQVQTPRXQVN

SEQ ID NO: 22991 - protein, 43 aa, Artificial Sequence
  Cyclic GFR-binding peptide
  MOD_RES (1)..(3)..(40): Xaa is C or S
XAXELHEELRSMEGILKPKKRVYEMIQVTINSHHVRSPQXKVS

SEQ ID NO: 22992 - protein, 31 aa, Artificial Sequence
  Cyclic GFR-binding peptide
DELTSMEGIFIPKKRVIEMIQVTINSLQVQT

SEQ ID NO: 22993 - protein, 40 aa, Artificial Sequence
  Cyclic GFR-binding peptide
  MOD_RES (2)..(39): Xaa is C or S
AXELHEELRVTAKKLKPKKRVYEIKRVQVPRHHVRSPQXK

SEQ ID NO: 22994 - protein, 35 aa, Artificial Sequence
  Cyclic GFR-binding peptide
  MOD_RES (29)..(29): Xaa is C or S
LSMEGIHQGQHPKIRMIQMTINSQGTPVXELGEDN

SEQ ID NO: 22995 - protein, 43 aa, Artificial Sequence
  Cyclic GFR-binding peptide
  MOD_RES (1)..(3)..(40): Xaa is C or S
XAXELHEELRSMEGLLKPKKRVYEMIQVTINSHHVRSPQXKVS

SEQ ID NO: 22996 - protein, 26 aa, Artificial Sequence
  Cyclic GFR-binding peptide
ELTSMEGLFIPKKRVIEMIQVTINSL

SEQ ID NO: 22997 - protein, 39 aa, Artificial Sequence
  Cyclic GFR-binding peptide
  MOD_RES (2)..(36): Xaa is C or S
EXKNHQLFSMEGIHQGQHPKIRMIQMTINSEETPVXELG

SEQ ID NO: 22998 - protein, 43 aa, Artificial Sequence
  Cyclic GFR-binding peptide
  MOD_RES (2)..(4)..(41): Xaa is C or S
EXKXALHDELTVQVEKFIPKKRVIEVKAVKVSRLQVQTPRXQV

SEQ ID NO: 22999 - protein, 24 aa, Artificial Sequence
  Cyclic GFR-binding peptide
VQVEKHQGQHPKIRVKAMKVSREE

SEQ ID NO: 23000 - protein, 33 aa, Artificial Sequence
  Cyclic GFR-binding peptide
DELTSMEGIFIPKKRVIEMIQVTINSLQVQTPR

SEQ ID NO: 23001 - protein, 35 aa, Artificial Sequence
  Cyclic GFR-binding peptide
  MOD_RES (1)..(3): Xaa is C or S
XEXQSHEELVTAKKHQGQHPKIRIKRMQVPRQGTP

SEQ ID NO: 23002 - protein, 28 aa, Artificial Sequence
  Cyclic GFR-binding peptide
SMEGLLKPKKRVYEMIQVTINSHHVRSP

SEQ ID NO: 23003 - protein, 28 aa, Artificial Sequence
  Cyclic GFR-binding peptide
ELRSMEGILKPKKRVYEMIQVTINSHHV

SEQ ID NO: 23004 - protein, 29 aa, Artificial Sequence
  Cyclic GFR-binding peptide
QLFVQVEKHQGQHPKIRVKAMKVSREETP

SEQ ID NO: 23005 - protein, 41 aa, Artificial Sequence
  Cyclic GFR-binding peptide
  MOD_RES (2)..(4)..(38): Xaa is C or S
RXEXKNHQLFVTAKKHQGQHPKIRIKRMQVPREETPVXELG

SEQ ID NO: 23006 - protein, 31 aa, Artificial Sequence
  Cyclic GFR-binding peptide
  MOD_RES (2)..(2): Xaa is C or S
AXELHEELRSMEGLLKPKKRVYEMIQVTINS

SEQ ID NO: 23007 - protein, 27 aa, Artificial Sequence
  Cyclic GFR-binding peptide
LTSMEGLFIPKKRVIEMIQVTINSLQV

SEQ ID NO: 23008 - protein, 26 aa, Artificial Sequence
  Cyclic GFR-binding peptide
HEELVQVEKHQGQHPKIRVKAMKVSR

SEQ ID NO: 23009 - protein, 36 aa, Artificial Sequence
  Cyclic GFR-binding peptide
  MOD_RES (2)..(36): Xaa is C or S
EXKNHQLFSMEGLHQGQHPKIRMIQMTINSEETPVX

SEQ ID NO: 23010 - protein, 36 aa, Artificial Sequence
  Cyclic GFR-binding peptide
  MOD_RES (34)..(34): Xaa is C or S
QSHEELVQVEKHQGQHPKIRVKAMKVSRQGTPVXEL

SEQ ID NO: 23011 - protein, 35 aa, Artificial Sequence
  Cyclic GFR-binding peptide
  MOD_RES (2)..(2): Xaa is C or S
AXELHEELRVTAKKLKPKKRVYEIKRVQVPRHHVR

SEQ ID NO: 23012 - protein, 27 aa, Artificial Sequence
  Cyclic GFR-binding peptide
EELRVTAKKLKPKKRVYEIKRVQVPRH

SEQ ID NO: 23013 - protein, 39 aa, Artificial Sequence
  Cyclic GFR-binding peptide
  MOD_RES (2)..(36): Xaa is C or S
EXKNHQLFVTAKKHQGQHPKIRIKRMQVPREETPVXELG

SEQ ID NO: 23014 - protein, 32 aa, Artificial Sequence
  Cyclic GFR-binding peptide
  MOD_RES (2)..(2): Xaa is C or S
AXELHEELRVTAKKLKPKKRVYEIKRVQVPRH

SEQ ID NO: 23015 - protein, 37 aa, Artificial Sequence
  Cyclic GFR-binding peptide
  MOD_RES (35)..(35): Xaa is C or S
HDELTVQVEKFIPKKRVIEVKAVKVSRLQVQTPRXQV

SEQ ID NO: 23016 - protein, 33 aa, Artificial Sequence
  Cyclic GFR-binding peptide
  MOD_RES (1)..(3): Xaa is C or S
XAXELHEELRSMEGLLKPKKRVYEMIQVTINSH

SEQ ID NO: 23017 - protein, 24 aa, Artificial Sequence
  Cyclic GFR-binding peptide
LTSMEGIFIPKKRVIEMIQVTINS

SEQ ID NO: 23018 - protein, 40 aa, Artificial Sequence
  Cyclic GFR-binding peptide
  MOD_RES (2)..(4)..(38): Xaa is C or S
RXEXQSHEELVTAKKHQGQHPKIRIKRMQVPRQGTPVXEL

SEQ ID NO: 23019 - protein, 36 aa, Artificial Sequence
  Cyclic GFR-binding peptide
  MOD_RES (31)..(31): Xaa is C or S
QLFVTAKKHQGQHPKIRIKRMQVPREETPVXELGED

SEQ ID NO: 23020 - protein, 33 aa, Artificial Sequence
  Cyclic GFR-binding peptide
  MOD_RES (32)..(32): Xaa is C or S
LTSMEGIFIPKKRVIEMIQVTINSLQVQTPRXQ

SEQ ID NO: 23021 - protein, 23 aa, Artificial Sequence
  Cyclic GFR-binding peptide
SMEGLLKPKKRVYEMIQVTINSH

SEQ ID NO: 23022 - protein, 32 aa, Artificial Sequence
  Cyclic GFR-binding peptide
  MOD_RES (30)..(30): Xaa is C or S
LFVQVEKHQGQHPKIRVKAMKVSREETPVXEL

SEQ ID NO: 23023 - protein, 33 aa, Artificial Sequence
  Cyclic GFR-binding peptide
  MOD_RES (1)..(3): Xaa is C or S
XAXELHEELRSMEGILKPKKRVYEMIQVTINSH

SEQ ID NO: 23024 - protein, 41 aa, Artificial Sequence
  Cyclic GFR-binding peptide
  MOD_RES (1)..(3)..(37): Xaa is C or S
XEXKNHQLFSMEGLHQGQHPKIRMIQMTINSEETPVXELGE

SEQ ID NO: 23025 - protein, 30 aa, Artificial Sequence
  Cyclic GFR-binding peptide
HEELRSMEGILKPKKRVYEMIQVTINSHHV

SEQ ID NO: 23026 - protein, 31 aa, Artificial Sequence
  Cyclic GFR-binding peptide
  MOD_RES (1)..(1): Xaa is C or S
XKNHQLFSMEGIHQGQHPKIRMIQMTINSEE

SEQ ID NO: 23027 - protein, 35 aa, Artificial Sequence
  Cyclic GFR-binding peptide
  MOD_RES (2)..(4): Xaa is C or S
EXKXALHDELTSMEGIFIPKKRVIEMIQVTINSLQ

SEQ ID NO: 23028 - protein, 28 aa, Artificial Sequence
  Cyclic GFR-binding peptide
LFSMEGIHQGQHPKIRMIQMTINSEETP

SEQ ID NO: 23029 - protein, 34 aa, Artificial Sequence
  Cyclic GFR-binding peptide
  MOD_RES (1)..(3): Xaa is C or S
XAXELHEELRSMEGILKPKKRVYEMIQVTINSHH

SEQ ID NO: 23030 - protein, 36 aa, Artificial Sequence
  Cyclic GFR-binding peptide
  MOD_RES (1)..(35): Xaa is C or S
XKNHQLFVQVEKHQGQHPKIRVKAMKVSREETPVXE

SEQ ID NO: 23031 - protein, 31 aa, Artificial Sequence
  Cyclic GFR-binding peptide
  MOD_RES (28)..(28): Xaa is C or S
VTAKKHQGQHPKIRIKRMQVPREETPVXELG

SEQ ID NO: 23032 - protein, 40 aa, Artificial Sequence
  Cyclic GFR-binding peptide
  MOD_RES (1)..(3)..(40): Xaa is C or S
XKXALHDELTVQVEKFIPKKRVIEVKAVKVSRLQVQTPRX

SEQ ID NO: 23033 - protein, 30 aa, Artificial Sequence
  Cyclic GFR-binding peptide
  MOD_RES (1)..(1): Xaa is C or S
XKNHQLFSMEGIHQGQHPKIRMIQMTINSE

SEQ ID NO: 23034 - protein, 40 aa, Artificial Sequence
  Cyclic GFR-binding peptide
  MOD_RES (36)..(36): Xaa is C or S
LHEELRSMEGILKPKKRVYEMIQVTINSHHVRSPQXKVSS

SEQ ID NO: 23035 - protein, 29 aa, Artificial Sequence
  Cyclic GFR-binding peptide
TSMEGLFIPKKRVIEMIQVTINSLQVQTP

SEQ ID NO: 23036 - protein, 37 aa, Artificial Sequence
  Cyclic GFR-binding peptide
  MOD_RES (34)..(34): Xaa is C or S
QSHEELVTAKKHQGQHPKIRIKRMQVPRQGTPVXELG

SEQ ID NO: 23037 - protein, 30 aa, Artificial Sequence
  Cyclic GFR-binding peptide
KNHQLFSMEGIHQGQHPKIRMIQMTINSEE

SEQ ID NO: 23038 - protein, 23 aa, Artificial Sequence
  Cyclic GFR-binding peptide
SMEGLHQGQHPKIRMIQMTINSE

SEQ ID NO: 23039 - protein, 40 aa, Artificial Sequence
  Cyclic GFR-binding peptide
  MOD_RES (34)..(34): Xaa is C or S
QSHEELVTAKKHQGQHPKIRIKRMQVPRQGTPVXELGEDN

SEQ ID NO: 23040 - protein, 37 aa, Artificial Sequence
  Cyclic GFR-binding peptide
  MOD_RES (1)..(3)..(37): Xaa is C or S
XEXKNHQLFVTAKKHQGQHPKIRIKRMQVPREETPVX

SEQ ID NO: 23041 - protein, 31 aa, Artificial Sequence
  Cyclic GFR-binding peptide
  MOD_RES (31)..(31): Xaa is C or S
TSMEGIFIPKKRVIEMIQVTINSLQVQTPRX

SEQ ID NO: 23042 - protein, 30 aa, Artificial Sequence
  Cyclic GFR-binding peptide
  MOD_RES (29)..(29): Xaa is C or S
LVTAKKHQGQHPKIRIKRMQVPRQGTPVXE

SEQ ID NO: 23043 - protein, 34 aa, Artificial Sequence
  Cyclic GFR-binding peptide
  MOD_RES (33)..(33): Xaa is C or S
NHQLFVTAKKHQGQHPKIRIKRMQVPREETPVXE

SEQ ID NO: 23044 - protein, 34 aa, Artificial Sequence
  Cyclic GFR-binding peptide
  MOD_RES (33)..(33): Xaa is C or S
ELTSMEGLFIPKKRVIEMIQVTINSLQVQTPRXQ

SEQ ID NO: 23045 - protein, 28 aa, Artificial Sequence
  Cyclic GFR-binding peptide
KNHQLFVQVEKHQGQHPKIRVKAMKVSR

SEQ ID NO: 23046 - protein, 42 aa, Artificial Sequence
  Cyclic GFR-binding peptide
  MOD_RES (2)..(4)..(41): Xaa is C or S
AXAXELHEELRSMEGILKPKKRVYEMIQVTINSHHVRSPQXK

SEQ ID NO: 23047 - protein, 34 aa, Artificial Sequence
  Cyclic GFR-binding peptide
LHDELTVQVEKFIPKKRVIEVKAVKVSRLQVQTP

SEQ ID NO: 23048 - protein, 32 aa, Artificial Sequence
  Cyclic GFR-binding peptide
  MOD_RES (1)..(1): Xaa is C or S
XALHDELTSMEGIFIPKKRVIEMIQVTINSLQ

SEQ ID NO: 23049 - protein, 41 aa, Artificial Sequence
  Cyclic GFR-binding peptide
  MOD_RES (2)..(4)..(41): Xaa is C or S
AXAXELHEELRVTAKKLKPKKRVYEIKRVQVPRHHVRSPQX

SEQ ID NO: 23050 - protein, 31 aa, Artificial Sequence
  Cyclic GFR-binding peptide
  MOD_RES (1)..(3): Xaa is C or S
XEXKNHQLFVQVEKHQGQHPKIRVKAMKVSR

SEQ ID NO: 23051 - protein, 32 aa, Artificial Sequence
  Cyclic GFR-binding peptide
EELRVTAKKLKPKKRVYEIKRVQVPRHHVRSP

SEQ ID NO: 23052 - protein, 27 aa, Artificial Sequence
  Cyclic GFR-binding peptide
HEELVQVEKHQGQHPKIRVKAMKVSRQ

SEQ ID NO: 23053 - protein, 40 aa, Artificial Sequence
  Cyclic GFR-binding peptide
  MOD_RES (2)..(4)..(38): Xaa is C or S
RXEXQSHEELSMEGIHQGQHPKIRMIQMTINSQGTPVXEL

SEQ ID NO: 23054 - protein, 35 aa, Artificial Sequence
  Cyclic GFR-binding peptide
  MOD_RES (32)..(32): Xaa is C or S
LTSMEGIFIPKKRVIEMIQVTINSLQVQTPRXQVN

SEQ ID NO: 23055 - protein, 34 aa, Artificial Sequence
  Cyclic GFR-binding peptide
  MOD_RES (2)..(2): Xaa is C or S
EXKNHQLFVQVEKHQGQHPKIRVKAMKVSREETP

SEQ ID NO: 23056 - protein, 30 aa, Artificial Sequence
  Cyclic GFR-binding peptide
  MOD_RES (30)..(30): Xaa is C or S
ELVQVEKHQGQHPKIRVKAMKVSRQGTPVX

SEQ ID NO: 23057 - protein, 41 aa, Artificial Sequence
  Cyclic GFR-binding peptide
  MOD_RES (2)..(4)..(38): Xaa is C or S
RXEXKNHQLFSMEGIHQGQHPKIRMIQMTINSEETPVXELG

SEQ ID NO: 23058 - protein, 35 aa, Artificial Sequence
  Cyclic GFR-binding peptide
  MOD_RES (1)..(3): Xaa is C or S
XEXQSHEELSMEGIHQGQHPKIRMIQMTINSQGTP

SEQ ID NO: 23059 - protein, 31 aa, Artificial Sequence
  Cyclic GFR-binding peptide
  MOD_RES (30)..(30): Xaa is C or S
ELVQVEKHQGQHPKIRVKAMKVSRQGTPVXE

SEQ ID NO: 23060 - protein, 28 aa, Artificial Sequence
  Cyclic GFR-binding peptide
SMEGIFIPKKRVIEMIQVTINSLQVQTP

SEQ ID NO: 23061 - protein, 38 aa, Artificial Sequence
  Cyclic GFR-binding peptide
  MOD_RES (37)..(37): Xaa is C or S
ELHEELRVTAKKLKPKKRVYEIKRVQVPRHHVRSPQXK

SEQ ID NO: 23062 - protein, 33 aa, Artificial Sequence
  Cyclic GFR-binding peptide
  MOD_RES (2)..(2): Xaa is C or S
EXKNHQLFVQVEKHQGQHPKIRVKAMKVSREET

SEQ ID NO: 23063 - protein, 25 aa, Artificial Sequence
  Cyclic GFR-binding peptide
VQVEKHQGQHPKIRVKAMKVSRQGT

SEQ ID NO: 23064 - protein, 30 aa, Artificial Sequence
  Cyclic GFR-binding peptide
QSHEELSMEGIHQGQHPKIRMIQMTINSQG

SEQ ID NO: 23065 - protein, 35 aa, Artificial Sequence
  Cyclic GFR-binding peptide
  MOD_RES (33)..(33): Xaa is C or S
ELRSMEGILKPKKRVYEMIQVTINSHHVRSPQXKV

SEQ ID NO: 23066 - protein, 32 aa, Artificial Sequence
  Cyclic GFR-binding peptide
  MOD_RES (2)..(2): Xaa is C or S
KXALHDELTSMEGLFIPKKRVIEMIQVTINSL

SEQ ID NO: 23067 - protein, 34 aa, Artificial Sequence
  Cyclic GFR-binding peptide
  MOD_RES (31)..(31): Xaa is C or S
QLFSMEGIHQGQHPKIRMIQMTINSEETPVXELG

SEQ ID NO: 23068 - protein, 42 aa, Artificial Sequence
  Cyclic GFR-binding peptide
  MOD_RES (2)..(36): Xaa is C or S
EXKNHQLFSMEGIHQGQHPKIRMIQMTINSEETPVXELGEDN

SEQ ID NO: 23069 - protein, 40 aa, Artificial Sequence
  Cyclic GFR-binding peptide
  MOD_RES (1)..(38): Xaa is C or S
XALHDELTSMEGIFIPKKRVIEMIQVTINSLQVQTPRXQV

SEQ ID NO: 23070 - protein, 38 aa, Artificial Sequence
  Cyclic GFR-binding peptide
  MOD_RES (34)..(34): Xaa is C or S
DELTVQVEKFIPKKRVIEVKAVKVSRLQVQTPRXQVNR

SEQ ID NO: 23071 - protein, 44 aa, Artificial Sequence
  Cyclic GFR-binding peptide
  MOD_RES (2)..(4)..(38): Xaa is C or S
RXEXQSHEELSMEGLHQGQHPKIRMIQMTINSQGTPVXELGEDN

SEQ ID NO: 23072 - protein, 28 aa, Artificial Sequence
  Cyclic GFR-binding peptide
NHQLFVTAKKHQGQHPKIRIKRMQVPRE

SEQ ID NO: 23073 - protein, 29 aa, Artificial Sequence
  Cyclic GFR-binding peptide
KNHQLFSMEGIHQGQHPKIRMIQMTINSE

SEQ ID NO: 23074 - protein, 26 aa, Artificial Sequence
  Cyclic GFR-binding peptide
QLFSMEGLHQGQHPKIRMIQMTINSE

SEQ ID NO: 23075 - protein, 28 aa, Artificial Sequence
  Cyclic GFR-binding peptide
  MOD_RES (28)..(28): Xaa is C or S
SMEGIHQGQHPKIRMIQMTINSQGTPVX

SEQ ID NO: 23076 - protein, 32 aa, Artificial Sequence
  Cyclic GFR-binding peptide
  MOD_RES (1)..(1): Xaa is C or S
XELHEELRSMEGILKPKKRVYEMIQVTINSHH

SEQ ID NO: 23077 - protein, 31 aa, Artificial Sequence
  Cyclic GFR-binding peptide
  MOD_RES (1)..(1): Xaa is C or S
XKNHQLFVTAKKHQGQHPKIRIKRMQVPREE

SEQ ID NO: 23078 - protein, 32 aa, Artificial Sequence
  Cyclic GFR-binding peptide
  MOD_RES (28)..(28): Xaa is C or S
SMEGLHQGQHPKIRMIQMTINSEETPVXELGE

SEQ ID NO: 23079 - protein, 38 aa, Artificial Sequence
  Cyclic GFR-binding peptide
  MOD_RES (34)..(34): Xaa is C or S
EELRVTAKKLKPKKRVYEIKRVQVPRHHVRSPQXKVSS

SEQ ID NO: 23080 - protein, 33 aa, Artificial Sequence
  Cyclic GFR-binding peptide
LHEELRSMEGLLKPKKRVYEMIQVTINSHHVRS

SEQ ID NO: 23081 - protein, 27 aa, Artificial Sequence
  Cyclic GFR-binding peptide
ELVQVEKHQGQHPKIRVKAMKVSRQGT

SEQ ID NO: 23082 - protein, 40 aa, Artificial Sequence
  Cyclic GFR-binding peptide
  MOD_RES (36)..(36): Xaa is C or S
LHDELTSMEGIFIPKKRVIEMIQVTINSLQVQTPRXQVNR

SEQ ID NO: 23083 - protein, 26 aa, Artificial Sequence
  Cyclic GFR-binding peptide
LRSMEGILKPKKRVYEMIQVTINSHH

SEQ ID NO: 23084 - protein, 23 aa, Artificial Sequence
  Cyclic GFR-binding peptide
RSMEGILKPKKRVYEMIQVTINS

SEQ ID NO: 23085 - protein, 30 aa, Artificial Sequence
  Cyclic GFR-binding peptide
HEELRSMEGLLKPKKRVYEMIQVTINSHHV

SEQ ID NO: 23086 - protein, 36 aa, Artificial Sequence
  Cyclic GFR-binding peptide
  MOD_RES (1)..(1): Xaa is C or S
XALHDELTSMEGIFIPKKRVIEMIQVTINSLQVQTP

SEQ ID NO: 23087 - protein, 30 aa, Artificial Sequence
  Cyclic GFR-binding peptide
  MOD_RES (2)..(2): Xaa is C or S
EXKNHQLFSMEGLHQGQHPKIRMIQMTINS

SEQ ID NO: 23088 - protein, 27 aa, Artificial Sequence
  Cyclic GFR-binding peptide
LRSMEGLLKPKKRVYEMIQVTINSHHV

SEQ ID NO: 23089 - protein, 32 aa, Artificial Sequence
  Cyclic GFR-binding peptide
  MOD_RES (2)..(2): Xaa is C or S
EXKNHQLFSMEGIHQGQHPKIRMIQMTINSEE

SEQ ID NO: 23090 - protein, 43 aa, Artificial Sequence
  Cyclic GFR-binding peptide
  MOD_RES (1)..(3)..(37): Xaa is C or S
XEXQSHEELVQVEKHQGQHPKIRVKAMKVSRQGTPVXELGEDN

SEQ ID NO: 23091 - protein, 29 aa, Artificial Sequence
  Cyclic GFR-binding peptide
LFVTAKKHQGQHPKIRIKRMQVPREETPV

SEQ ID NO: 23092 - protein, 30 aa, Artificial Sequence
  Cyclic GFR-binding peptide
QSHEELVQVEKHQGQHPKIRVKAMKVSRQG

SEQ ID NO: 23093 - protein, 28 aa, Artificial Sequence
  Cyclic GFR-binding peptide
NHQLFVQVEKHQGQHPKIRVKAMKVSRE

SEQ ID NO: 23094 - protein, 29 aa, Artificial Sequence
  Cyclic GFR-binding peptide
HEELRSMEGILKPKKRVYEMIQVTINSHH

SEQ ID NO: 23095 - protein, 34 aa, Artificial Sequence
  Cyclic GFR-binding peptide
  MOD_RES (32)..(32): Xaa is C or S
HQLFSMEGIHQGQHPKIRMIQMTINSEETPVXEL

SEQ ID NO: 23096 - protein, 27 aa, Artificial Sequence
  Cyclic GFR-binding peptide
LFSMEGLHQGQHPKIRMIQMTINSEET

SEQ ID NO: 23097 - protein, 33 aa, Artificial Sequence
  Cyclic GFR-binding peptide
  MOD_RES (29)..(29): Xaa is C or S
FSMEGIHQGQHPKIRMIQMTINSEETPVXELGE

SEQ ID NO: 23098 - protein, 28 aa, Artificial Sequence
  Cyclic GFR-binding peptide
HQLFVQVEKHQGQHPKIRVKAMKVSREE

SEQ ID NO: 23099 - protein, 35 aa, Artificial Sequence
  Cyclic GFR-binding peptide
  MOD_RES (31)..(31): Xaa is C or S
EELVQVEKHQGQHPKIRVKAMKVSRQGTPVXELGE

SEQ ID NO: 23100 - protein, 31 aa, Artificial Sequence
  Cyclic GFR-binding peptide
  MOD_RES (29)..(29): Xaa is C or S
FVTAKKHQGQHPKIRIKRMQVPREETPVXEL

SEQ ID NO: 23101 - protein, 34 aa, Artificial Sequence
  Cyclic GFR-binding peptide
  MOD_RES (1)..(3): Xaa is C or S
XKXALHDELTSMEGLFIPKKRVIEMIQVTINSLQ

SEQ ID NO: 23102 - protein, 33 aa, Artificial Sequence
  Cyclic GFR-binding peptide
  MOD_RES (31)..(31): Xaa is C or S
RVTAKKLKPKKRVYEIKRVQVPRHHVRSPQXKV

SEQ ID NO: 23103 - protein, 26 aa, Artificial Sequence
  Cyclic GFR-binding peptide
LTVQVEKFIPKKRVIEVKAVKVSRLQ

SEQ ID NO: 23104 - protein, 38 aa, Artificial Sequence
  Cyclic GFR-binding peptide
  MOD_RES (1)..(3): Xaa is C or S
XAXELHEELRSMEGILKPKKRVYEMIQVTINSHHVRSP

SEQ ID NO: 23105 - protein, 35 aa, Artificial Sequence
  Cyclic GFR-binding peptide
  MOD_RES (29)..(29): Xaa is C or S
LVTAKKHQGQHPKIRIKRMQVPRQGTPVXELGEDN

SEQ ID NO: 23106 - protein, 31 aa, Artificial Sequence
  Cyclic GFR-binding peptide
ELTVQVEKFIPKKRVIEVKAVKVSRLQVQTP

SEQ ID NO: 23107 - protein, 36 aa, Artificial Sequence
  Cyclic GFR-binding peptide
  MOD_RES (2)..(4): Xaa is C or S
EXKXALHDELTSMEGIFIPKKRVIEMIQVTINSLQV

SEQ ID NO: 23108 - protein, 37 aa, Artificial Sequence
  Cyclic GFR-binding peptide
  MOD_RES (35)..(35): Xaa is C or S
HDELTSMEGLFIPKKRVIEMIQVTINSLQVQTPRXQV

SEQ ID NO: 23109 - protein, 32 aa, Artificial Sequence
  Cyclic GFR-binding peptide
  MOD_RES (2)..(2): Xaa is C or S
EXQSHEELVQVEKHQGQHPKIRVKAMKVSRQG

SEQ ID NO: 23110 - protein, 32 aa, Artificial Sequence
  Cyclic GFR-binding peptide
  MOD_RES (2)..(2): Xaa is C or S
EXKNHQLFVTAKKHQGQHPKIRIKRMQVPREE

SEQ ID NO: 23111 - protein, 31 aa, Artificial Sequence
  Cyclic GFR-binding peptide
  MOD_RES (30)..(30): Xaa is C or S
LFSMEGLHQGQHPKIRMIQMTINSEETPVXE

SEQ ID NO: 23112 - protein, 33 aa, Artificial Sequence
  Cyclic GFR-binding peptide
  MOD_RES (2)..(4): Xaa is C or S
RXEXKNHQLFVTAKKHQGQHPKIRIKRMQVPRE

SEQ ID NO: 23113 - protein, 30 aa, Artificial Sequence
  Cyclic GFR-binding peptide
  MOD_RES (29)..(29): Xaa is C or S
LSMEGIHQGQHPKIRMIQMTINSQGTPVXE

SEQ ID NO: 23114 - protein, 31 aa, Artificial Sequence
  Cyclic GFR-binding peptide
  MOD_RES (1)..(3): Xaa is C or S
XEXQSHEELVQVEKHQGQHPKIRVKAMKVSR

SEQ ID NO: 23115 - protein, 27 aa, Artificial Sequence
  Cyclic GFR-binding peptide
DELTSMEGIFIPKKRVIEMIQVTINSL

SEQ ID NO: 23116 - protein, 33 aa, Artificial Sequence
  Cyclic GFR-binding peptide
  MOD_RES (1)..(3): Xaa is C or S
XEXKNHQLFVQVEKHQGQHPKIRVKAMKVSREE

SEQ ID NO: 23117 - protein, 31 aa, Artificial Sequence
  Cyclic GFR-binding peptide
  MOD_RES (31)..(31): Xaa is C or S
RSMEGILKPKKRVYEMIQVTINSHHVRSPQX

SEQ ID NO: 23118 - protein, 26 aa, Artificial Sequence
  Cyclic GFR-binding peptide
TVQVEKFIPKKRVIEVKAVKVSRLQV

SEQ ID NO: 23119 - protein, 31 aa, Artificial Sequence
  Cyclic GFR-binding peptide
  MOD_RES (31)..(31): Xaa is C or S
RVTAKKLKPKKRVYEIKRVQVPRHHVRSPQX

SEQ ID NO: 23120 - protein, 28 aa, Artificial Sequence
  Cyclic GFR-binding peptide
HEELRVTAKKLKPKKRVYEIKRVQVPRH

SEQ ID NO: 23121 - protein, 30 aa, Artificial Sequence
  Cyclic GFR-binding peptide
EELVTAKKHQGQHPKIRIKRMQVPRQGTPV

SEQ ID NO: 23122 - protein, 27 aa, Artificial Sequence
  Cyclic GFR-binding peptide
VQVEKHQGQHPKIRVKAMKVSRQGTPV

SEQ ID NO: 23123 - protein, 25 aa, Artificial Sequence
  Cyclic GFR-binding peptide
LVTAKKHQGQHPKIRIKRMQVPRQG

SEQ ID NO: 23124 - protein, 35 aa, Artificial Sequence
  Cyclic GFR-binding peptide
  MOD_RES (1)..(1): Xaa is C or S
XELHEELRSMEGILKPKKRVYEMIQVTINSHHVRS

SEQ ID NO: 23125 - protein, 38 aa, Artificial Sequence
  Cyclic GFR-binding peptide
  MOD_RES (36)..(36): Xaa is C or S
LHDELTSMEGIFIPKKRVIEMIQVTINSLQVQTPRXQV

SEQ ID NO: 23126 - protein, 34 aa, Artificial Sequence
  Cyclic GFR-binding peptide
  MOD_RES (34)..(34): Xaa is C or S
DELTSMEGIFIPKKRVIEMIQVTINSLQVQTPRX

SEQ ID NO: 23127 - protein, 24 aa, Artificial Sequence
  Cyclic GFR-binding peptide
RVTAKKLKPKKRVYEIKRVQVPRH

SEQ ID NO: 23128 - protein, 42 aa, Artificial Sequence
  Cyclic GFR-binding peptide
  MOD_RES (2)..(39): Xaa is C or S
KXALHDELTSMEGIFIPKKRVIEMIQVTINSLQVQTPRXQVN

SEQ ID NO: 23129 - protein, 30 aa, Artificial Sequence
  Cyclic GFR-binding peptide
DELTSMEGIFIPKKRVIEMIQVTINSLQVQ

SEQ ID NO: 23130 - protein, 35 aa, Artificial Sequence
  Cyclic GFR-binding peptide
  MOD_RES (34)..(34): Xaa is C or S
DELTVQVEKFIPKKRVIEVKAVKVSRLQVQTPRXQ

SEQ ID NO: 23131 - protein, 38 aa, Artificial Sequence
  Cyclic GFR-binding peptide
  MOD_RES (34)..(34): Xaa is C or S
QSHEELSMEGIHQGQHPKIRMIQMTINSQGTPVXELGE

SEQ ID NO: 23132 - protein, 35 aa, Artificial Sequence
  Cyclic GFR-binding peptide
  MOD_RES (1)..(3): Xaa is C or S
XEXKNHQLFSMEGLHQGQHPKIRMIQMTINSEETP

SEQ ID NO: 23133 - protein, 35 aa, Artificial Sequence
  Cyclic GFR-binding peptide
  MOD_RES (1)..(1): Xaa is C or S
XELHEELRVTAKKLKPKKRVYEIKRVQVPRHHVRS

SEQ ID NO: 23134 - protein, 36 aa, Artificial Sequence
  Cyclic GFR-binding peptide
  MOD_RES (1)..(1): Xaa is C or S
XELHEELRSMEGILKPKKRVYEMIQVTINSHHVRSP

SEQ ID NO: 23135 - protein, 38 aa, Artificial Sequence
  Cyclic GFR-binding peptide
  MOD_RES (34)..(34): Xaa is C or S
QSHEELVTAKKHQGQHPKIRIKRMQVPRQGTPVXELGE

SEQ ID NO: 23136 - protein, 33 aa, Artificial Sequence
  Cyclic GFR-binding peptide
ALHDELTVQVEKFIPKKRVIEVKAVKVSRLQVQ

SEQ ID NO: 23137 - protein, 36 aa, Artificial Sequence
  Cyclic GFR-binding peptide
  MOD_RES (35)..(35): Xaa is C or S
HDELTSMEGLFIPKKRVIEMIQVTINSLQVQTPRXQ

SEQ ID NO: 23138 - protein, 33 aa, Artificial Sequence
  Cyclic GFR-binding peptide
LHDELTSMEGIFIPKKRVIEMIQVTINSLQVQT

SEQ ID NO: 23139 - protein, 34 aa, Artificial Sequence
  Cyclic GFR-binding peptide
  MOD_RES (2)..(2): Xaa is C or S
KXALHDELTSMEGLFIPKKRVIEMIQVTINSLQV

SEQ ID NO: 23140 - protein, 34 aa, Artificial Sequence
  Cyclic GFR-binding peptide
ALHDELTSMEGIFIPKKRVIEMIQVTINSLQVQT

SEQ ID NO: 23141 - protein, 26 aa, Artificial Sequence
  Cyclic GFR-binding peptide
LRSMEGLLKPKKRVYEMIQVTINSHH

SEQ ID NO: 23142 - protein, 34 aa, Artificial Sequence
  Cyclic GFR-binding peptide
  MOD_RES (30)..(30): Xaa is C or S
VQVEKFIPKKRVIEVKAVKVSRLQVQTPRXQVNR

SEQ ID NO: 23143 - protein, 26 aa, Artificial Sequence
  Cyclic GFR-binding peptide
RSMEGILKPKKRVYEMIQVTINSHHV

SEQ ID NO: 23144 - protein, 37 aa, Artificial Sequence
  Cyclic GFR-binding peptide
  MOD_RES (1)..(35): Xaa is C or S
XKNHQLFVTAKKHQGQHPKIRIKRMQVPREETPVXEL

SEQ ID NO: 23145 - protein, 36 aa, Artificial Sequence
  Cyclic GFR-binding peptide
  MOD_RES (35)..(35): Xaa is C or S
HEELRSMEGLLKPKKRVYEMIQVTINSHHVRSPQXK

SEQ ID NO: 23146 - protein, 29 aa, Artificial Sequence
  Cyclic GFR-binding peptide
LHDELTSMEGLFIPKKRVIEMIQVTINSL

SEQ ID NO: 23147 - protein, 33 aa, Artificial Sequence
  Cyclic GFR-binding peptide
  MOD_RES (32)..(32): Xaa is C or S
LTSMEGLFIPKKRVIEMIQVTINSLQVQTPRXQ

SEQ ID NO: 23148 - protein, 26 aa, Artificial Sequence
  Cyclic GFR-binding peptide
VQVEKHQGQHPKIRVKAMKVSRQGTP

SEQ ID NO: 23149 - protein, 38 aa, Artificial Sequence
  Cyclic GFR-binding peptide
  MOD_RES (37)..(37): Xaa is C or S
ALHDELTVQVEKFIPKKRVIEVKAVKVSRLQVQTPRXQ

SEQ ID NO: 23150 - protein, 31 aa, Artificial Sequence
  Cyclic GFR-binding peptide
SHEELVTAKKHQGQHPKIRIKRMQVPRQGTP

SEQ ID NO: 23151 - protein, 32 aa, Artificial Sequence
  Cyclic GFR-binding peptide
  MOD_RES (1)..(3): Xaa is C or S
XKXALHDELTVQVEKFIPKKRVIEVKAVKVSR

SEQ ID NO: 23152 - protein, 40 aa, Artificial Sequence
  Cyclic GFR-binding peptide
  MOD_RES (1)..(35): Xaa is C or S
XKNHQLFVQVEKHQGQHPKIRVKAMKVSREETPVXELGED

SEQ ID NO: 23153 - protein, 35 aa, Artificial Sequence
  Cyclic GFR-binding peptide
  MOD_RES (34)..(34): Xaa is C or S
EELRSMEGLLKPKKRVYEMIQVTINSHHVRSPQXK

SEQ ID NO: 23154 - protein, 40 aa, Artificial Sequence
  Cyclic GFR-binding peptide
  MOD_RES (1)..(35): Xaa is C or S
XQSHEELVTAKKHQGQHPKIRIKRMQVPRQGTPVXELGED

SEQ ID NO: 23155 - protein, 28 aa, Artificial Sequence
  Cyclic GFR-binding peptide
LHDELTSMEGIFIPKKRVIEMIQVTINS

SEQ ID NO: 23156 - protein, 26 aa, Artificial Sequence
  Cyclic GFR-binding peptide
RVTAKKLKPKKRVYEIKRVQVPRHHV

SEQ ID NO: 23157 - protein, 41 aa, Artificial Sequence
  Cyclic GFR-binding peptide
  MOD_RES (2)..(36): Xaa is C or S
EXKNHQLFSMEGLHQGQHPKIRMIQMTINSEETPVXELGED

SEQ ID NO: 23158 - protein, 36 aa, Artificial Sequence
  Cyclic GFR-binding peptide
  MOD_RES (33)..(33): Xaa is C or S
ELTSMEGIFIPKKRVIEMIQVTINSLQVQTPRXQVN

SEQ ID NO: 23159 - protein, 28 aa, Artificial Sequence
  Cyclic GFR-binding peptide
LFSMEGLHQGQHPKIRMIQMTINSEETP

SEQ ID NO: 23160 - protein, 40 aa, Artificial Sequence
  Cyclic GFR-binding peptide
  MOD_RES (2)..(4): Xaa is C or S
AXAXELHEELRVTAKKLKPKKRVYEIKRVQVPRHHVRSPQ

SEQ ID NO: 23161 - protein, 36 aa, Artificial Sequence
  Cyclic GFR-binding peptide
  MOD_RES (2)..(2): Xaa is C or S
AXELHEELRVTAKKLKPKKRVYEIKRVQVPRHHVRS

SEQ ID NO: 23162 - protein, 35 aa, Artificial Sequence
  Cyclic GFR-binding peptide
  MOD_RES (33)..(33): Xaa is C or S
ELTSMEGIFIPKKRVIEMIQVTINSLQVQTPRXQV

SEQ ID NO: 23163 - protein, 37 aa, Artificial Sequence
  Cyclic GFR-binding peptide
  MOD_RES (1)..(3): Xaa is C or S
XAXELHEELRSMEGLLKPKKRVYEMIQVTINSHHVRS

SEQ ID NO: 23164 - protein, 33 aa, Artificial Sequence
  Cyclic GFR-binding peptide
KNHQLFVQVEKHQGQHPKIRVKAMKVSREETPV

SEQ ID NO: 23165 - protein, 32 aa, Artificial Sequence
  Cyclic GFR-binding peptide
  MOD_RES (32)..(32): Xaa is C or S
HQLFSMEGLHQGQHPKIRMIQMTINSEETPVX

SEQ ID NO: 23166 - protein, 28 aa, Artificial Sequence
  Cyclic GFR-binding peptide
DELTSMEGLFIPKKRVIEMIQVTINSLQ

SEQ ID NO: 23167 - protein, 31 aa, Artificial Sequence
  Cyclic GFR-binding peptide
  MOD_RES (29)..(29): Xaa is C or S
FSMEGIHQGQHPKIRMIQMTINSEETPVXEL

SEQ ID NO: 23168 - protein, 27 aa, Artificial Sequence
  Cyclic GFR-binding peptide
EELVTAKKHQGQHPKIRIKRMQVPRQG

SEQ ID NO: 23169 - protein, 43 aa, Artificial Sequence
  Cyclic GFR-binding peptide
  MOD_RES (1)..(3)..(37): Xaa is C or S
XEXQSHEELSMEGIHQGQHPKIRMIQMTINSQGTPVXELGEDN

SEQ ID NO: 23170 - protein, 33 aa, Artificial Sequence
  Cyclic GFR-binding peptide
  MOD_RES (29)..(29): Xaa is C or S
FSMEGLHQGQHPKIRMIQMTINSEETPVXELGE

SEQ ID NO: 23171 - protein, 45 aa, Artificial Sequence
  Cyclic GFR-binding peptide
  MOD_RES (2)..(4)..(41): Xaa is C or S
EXKXALHDELTSMEGIFIPKKRVIEMIQVTINSLQVQTPRXQVNR

SEQ ID NO: 23172 - protein, 25 aa, Artificial Sequence
  Cyclic GFR-binding peptide
ELVQVEKHQGQHPKIRVKAMKVSRQ

SEQ ID NO: 23173 - protein, 29 aa, Artificial Sequence
  Cyclic GFR-binding peptide
TVQVEKFIPKKRVIEVKAVKVSRLQVQTP

SEQ ID NO: 23174 - protein, 28 aa, Artificial Sequence
  Cyclic GFR-binding peptide
ELRSMEGLLKPKKRVYEMIQVTINSHHV

SEQ ID NO: 23175 - protein, 36 aa, Artificial Sequence
  Cyclic GFR-binding peptide
  MOD_RES (32)..(32): Xaa is C or S
HEELVTAKKHQGQHPKIRIKRMQVPRQGTPVXELGE

SEQ ID NO: 23176 - protein, 31 aa, Artificial Sequence
  Cyclic GFR-binding peptide
  MOD_RES (1)..(1): Xaa is C or S
XALHDELTSMEGIFIPKKRVIEMIQVTINSL

SEQ ID NO: 23177 - protein, 34 aa, Artificial Sequence
  Cyclic GFR-binding peptide
HEELRSMEGLLKPKKRVYEMIQVTINSHHVRSPQ

SEQ ID NO: 23178 - protein, 37 aa, Artificial Sequence
  Cyclic GFR-binding peptide
  MOD_RES (34)..(34): Xaa is C or S
KNHQLFSMEGLHQGQHPKIRMIQMTINSEETPVXELG

SEQ ID NO: 23179 - protein, 32 aa, Artificial Sequence
  Cyclic GFR-binding peptide
EELRSMEGLLKPKKRVYEMIQVTINSHHVRSP

SEQ ID NO: 23180 - protein, 26 aa, Artificial Sequence
  Cyclic GFR-binding peptide
LFSMEGIHQGQHPKIRMIQMTINSEE

SEQ ID NO: 23181 - protein, 39 aa, Artificial Sequence
  Cyclic GFR-binding peptide
  MOD_RES (2)..(4)..(38): Xaa is C or S
RXEXQSHEELVQVEKHQGQHPKIRVKAMKVSRQGTPVXE

SEQ ID NO: 23182 - protein, 35 aa, Artificial Sequence
  Cyclic GFR-binding peptide
  MOD_RES (32)..(32): Xaa is C or S
HQLFSMEGIHQGQHPKIRMIQMTINSEETPVXELG

SEQ ID NO: 23183 - protein, 33 aa, Artificial Sequence
  Cyclic GFR-binding peptide
  MOD_RES (2)..(4): Xaa is C or S
EXKXALHDELTSMEGIFIPKKRVIEMIQVTINS

SEQ ID NO: 23184 - protein, 27 aa, Artificial Sequence
  Cyclic GFR-binding peptide
HEELRVTAKKLKPKKRVYEIKRVQVPR

SEQ ID NO: 23185 - protein, 28 aa, Artificial Sequence
  Cyclic GFR-binding peptide
TSMEGLFIPKKRVIEMIQVTINSLQVQT

SEQ ID NO: 23186 - protein, 41 aa, Artificial Sequence
  Cyclic GFR-binding peptide
  MOD_RES (2)..(36): Xaa is C or S
EXKNHQLFSMEGIHQGQHPKIRMIQMTINSEETPVXELGED

SEQ ID NO: 23187 - protein, 26 aa, Artificial Sequence
  Cyclic GFR-binding peptide
LVTAKKHQGQHPKIRIKRMQVPRQGT

SEQ ID NO: 23188 - protein, 31 aa, Artificial Sequence
  Cyclic GFR-binding peptide
NHQLFVQVEKHQGQHPKIRVKAMKVSREETP

SEQ ID NO: 23189 - protein, 28 aa, Artificial Sequence
  Cyclic GFR-binding peptide
NHQLFSMEGIHQGQHPKIRMIQMTINSE

SEQ ID NO: 23190 - protein, 39 aa, Artificial Sequence
  Cyclic GFR-binding peptide
  MOD_RES (2)..(39): Xaa is C or S
KXALHDELTSMEGIFIPKKRVIEMIQVTINSLQVQTPRX

SEQ ID NO: 23191 - protein, 36 aa, Artificial Sequence
  Cyclic GFR-binding peptide
  MOD_RES (1)..(3): Xaa is C or S
XAXELHEELRVTAKKLKPKKRVYEIKRVQVPRHHVR

SEQ ID NO: 23192 - protein, 32 aa, Artificial Sequence
  Cyclic GFR-binding peptide
  MOD_RES (32)..(32): Xaa is C or S
LTVQVEKFIPKKRVIEVKAVKVSRLQVQTPRX

SEQ ID NO: 23193 - protein, 29 aa, Artificial Sequence
  Cyclic GFR-binding peptide
SMEGIFIPKKRVIEMIQVTINSLQVQTPR

SEQ ID NO: 23194 - protein, 41 aa, Artificial Sequence
  Cyclic GFR-binding peptide
  MOD_RES (2)..(39): Xaa is C or S
AXELHEELRSMEGILKPKKRVYEMIQVTINSHHVRSPQXKV

SEQ ID NO: 23195 - protein, 39 aa, Artificial Sequence
  Cyclic GFR-binding peptide
  MOD_RES (1)..(3)..(37): Xaa is C or S
XEXKNHQLFSMEGLHQGQHPKIRMIQMTINSEETPVXEL

SEQ ID NO: 23196 - protein, 28 aa, Artificial Sequence
  Cyclic GFR-binding peptide
EELRSMEGLLKPKKRVYEMIQVTINSHH

SEQ ID NO: 23197 - protein, 38 aa, Artificial Sequence
  Cyclic GFR-binding peptide
  MOD_RES (2)..(2): Xaa is C or S
AXELHEELRSMEGLLKPKKRVYEMIQVTINSHHVRSPQ

SEQ ID NO: 23198 - protein, 39 aa, Artificial Sequence
  Cyclic GFR-binding peptide
  MOD_RES (2)..(4)..(38): Xaa is C or S
RXEXQSHEELVTAKKHQGQHPKIRIKRMQVPRQGTPVXE

SEQ ID NO: 23199 - protein, 31 aa, Artificial Sequence
  Cyclic GFR-binding peptide
  MOD_RES (30)..(30): Xaa is C or S
SMEGLLKPKKRVYEMIQVTINSHHVRSPQXK

SEQ ID NO: 23200 - protein, 40 aa, Artificial Sequence
  Cyclic GFR-binding peptide
  MOD_RES (1)..(3)..(37): Xaa is C or S
XEXKNHQLFVTAKKHQGQHPKIRIKRMQVPREETPVXELG

SEQ ID NO: 23201 - protein, 34 aa, Artificial Sequence
  Cyclic GFR-binding peptide
HEELRVTAKKLKPKKRVYEIKRVQVPRHHVRSPQ

SEQ ID NO: 23202 - protein, 39 aa, Artificial Sequence
  Cyclic GFR-binding peptide
  MOD_RES (1)..(38): Xaa is C or S
XALHDELTSMEGLFIPKKRVIEMIQVTINSLQVQTPRXQ

SEQ ID NO: 23203 - protein, 32 aa, Artificial Sequence
  Cyclic GFR-binding peptide
  MOD_RES (2)..(4): Xaa is C or S
RXEXKNHQLFSMEGLHQGQHPKIRMIQMTINS

SEQ ID NO: 23204 - protein, 27 aa, Artificial Sequence
  Cyclic GFR-binding peptide
HQLFVTAKKHQGQHPKIRIKRMQVPRE

SEQ ID NO: 23205 - protein, 42 aa, Artificial Sequence
  Cyclic GFR-binding peptide
  MOD_RES (1)..(38): Xaa is C or S
XELHEELRSMEGLLKPKKRVYEMIQVTINSHHVRSPQXKVSS

SEQ ID NO: 23206 - protein, 28 aa, Artificial Sequence
  Cyclic GFR-binding peptide
LVQVEKHQGQHPKIRVKAMKVSRQGTPV

SEQ ID NO: 23207 - protein, 36 aa, Artificial Sequence
  Cyclic GFR-binding peptide
  MOD_RES (30)..(30): Xaa is C or S
LFVTAKKHQGQHPKIRIKRMQVPREETPVXELGEDN

SEQ ID NO: 23208 - protein, 37 aa, Artificial Sequence
  Cyclic GFR-binding peptide
  MOD_RES (2)..(4): Xaa is C or S
AXAXELHEELRSMEGLLKPKKRVYEMIQVTINSHHVR

SEQ ID NO: 23209 - protein, 31 aa, Artificial Sequence
  Cyclic GFR-binding peptide
  MOD_RES (1)..(1): Xaa is C or S
XELHEELRSMEGLLKPKKRVYEMIQVTINSH

SEQ ID NO: 23210 - protein, 38 aa, Artificial Sequence
  Cyclic GFR-binding peptide
  MOD_RES (1)..(35): Xaa is C or S
XQSHEELVTAKKHQGQHPKIRIKRMQVPRQGTPVXELG

SEQ ID NO: 23211 - protein, 42 aa, Artificial Sequence
  Cyclic GFR-binding peptide
  MOD_RES (1)..(3)..(40): Xaa is C or S
XKXALHDELTVQVEKFIPKKRVIEVKAVKVSRLQVQTPRXQV

SEQ ID NO: 23212 - protein, 41 aa, Artificial Sequence
  Cyclic GFR-binding peptide
  MOD_RES (1)..(35): Xaa is C or S
XKNHQLFVTAKKHQGQHPKIRIKRMQVPREETPVXELGEDN

SEQ ID NO: 23213 - protein, 33 aa, Artificial Sequence
  Cyclic GFR-binding peptide
  MOD_RES (2)..(4): Xaa is C or S
EXKXALHDELTVQVEKFIPKKRVIEVKAVKVSR

SEQ ID NO: 23214 - protein, 27 aa, Artificial Sequence
  Cyclic GFR-binding peptide
LFSMEGIHQGQHPKIRMIQMTINSEET

SEQ ID NO: 23215 - protein, 27 aa, Artificial Sequence
  Cyclic GFR-binding peptide
LRSMEGILKPKKRVYEMIQVTINSHHV

SEQ ID NO: 23216 - protein, 37 aa, Artificial Sequence
  Cyclic GFR-binding peptide
  MOD_RES (2)..(4): Xaa is C or S
AXAXELHEELRVTAKKLKPKKRVYEIKRVQVPRHHVR

SEQ ID NO: 23217 - protein, 26 aa, Artificial Sequence
  Cyclic GFR-binding peptide
ELVQVEKHQGQHPKIRVKAMKVSRQG

SEQ ID NO: 23218 - protein, 40 aa, Artificial Sequence
  Cyclic GFR-binding peptide
  MOD_RES (2)..(4)..(38): Xaa is C or S
RXEXKNHQLFSMEGLHQGQHPKIRMIQMTINSEETPVXEL

SEQ ID NO: 23219 - protein, 32 aa, Artificial Sequence
  Cyclic GFR-binding peptide
  MOD_RES (29)..(29): Xaa is C or S
LSMEGIHQGQHPKIRMIQMTINSQGTPVXELG

SEQ ID NO: 23220 - protein, 36 aa, Artificial Sequence
  Cyclic GFR-binding peptide
  MOD_RES (31)..(31): Xaa is C or S
EELSMEGIHQGQHPKIRMIQMTINSQGTPVXELGED

SEQ ID NO: 23221 - protein, 33 aa, Artificial Sequence
  Cyclic GFR-binding peptide
  MOD_RES (31)..(31): Xaa is C or S
QLFVQVEKHQGQHPKIRVKAMKVSREETPVXEL

SEQ ID NO: 23222 - protein, 35 aa, Artificial Sequence
  Cyclic GFR-binding peptide
  MOD_RES (1)..(35): Xaa is C or S
XKNHQLFVQVEKHQGQHPKIRVKAMKVSREETPVX

SEQ ID NO: 23223 - protein, 39 aa, Artificial Sequence
  Cyclic GFR-binding peptide
  MOD_RES (2)..(4)..(38): Xaa is C or S
RXEXKNHQLFSMEGLHQGQHPKIRMIQMTINSEETPVXE

SEQ ID NO: 23224 - protein, 29 aa, Artificial Sequence
  Cyclic GFR-binding peptide
ELRSMEGILKPKKRVYEMIQVTINSHHVR

SEQ ID NO: 23225 - protein, 34 aa, Artificial Sequence
  Cyclic GFR-binding peptide
  MOD_RES (31)..(31): Xaa is C or S
RSMEGILKPKKRVYEMIQVTINSHHVRSPQXKVS

SEQ ID NO: 23226 - protein, 41 aa, Artificial Sequence
  Cyclic GFR-binding peptide
  MOD_RES (1)..(3)..(40): Xaa is C or S
XAXELHEELRVTAKKLKPKKRVYEIKRVQVPRHHVRSPQXK

SEQ ID NO: 23227 - protein, 37 aa, Artificial Sequence
  Cyclic GFR-binding peptide
  MOD_RES (2)..(4): Xaa is C or S
RXEXKNHQLFVQVEKHQGQHPKIRVKAMKVSREETPV

SEQ ID NO: 23228 - protein, 37 aa, Artificial Sequence
  Cyclic GFR-binding peptide
  MOD_RES (2)..(36): Xaa is C or S
EXKNHQLFVTAKKHQGQHPKIRIKRMQVPREETPVXE

SEQ ID NO: 23229 - protein, 35 aa, Artificial Sequence
  Cyclic GFR-binding peptide
  MOD_RES (33)..(33): Xaa is C or S
ELRSMEGLLKPKKRVYEMIQVTINSHHVRSPQXKV

SEQ ID NO: 23230 - protein, 40 aa, Artificial Sequence
  Cyclic GFR-binding peptide
  MOD_RES (1)..(3)..(40): Xaa is C or S
XKXALHDELTSMEGIFIPKKRVIEMIQVTINSLQVQTPRX

SEQ ID NO: 23231 - protein, 44 aa, Artificial Sequence
  Cyclic GFR-binding peptide
  MOD_RES (1)..(3)..(40): Xaa is C or S
XAXELHEELRSMEGILKPKKRVYEMIQVTINSHHVRSPQXKVSS

SEQ ID NO: 23232 - protein, 33 aa, Artificial Sequence
  Cyclic GFR-binding peptide
  MOD_RES (2)..(2): Xaa is C or S
AXELHEELRSMEGILKPKKRVYEMIQVTINSHH

SEQ ID NO: 23233 - protein, 33 aa, Artificial Sequence
  Cyclic GFR-binding peptide
ELHEELRVTAKKLKPKKRVYEIKRVQVPRHHVR

SEQ ID NO: 23234 - protein, 29 aa, Artificial Sequence
  Cyclic GFR-binding peptide
  MOD_RES (29)..(29): Xaa is C or S
LVQVEKHQGQHPKIRVKAMKVSRQGTPVX

SEQ ID NO: 23235 - protein, 26 aa, Artificial Sequence
  Cyclic GFR-binding peptide
SMEGLLKPKKRVYEMIQVTINSHHVR

SEQ ID NO: 23236 - protein, 31 aa, Artificial Sequence
  Cyclic GFR-binding peptide
HQLFVTAKKHQGQHPKIRIKRMQVPREETPV

SEQ ID NO: 23237 - protein, 33 aa, Artificial Sequence
  Cyclic GFR-binding peptide
  MOD_RES (32)..(32): Xaa is C or S
HQLFVQVEKHQGQHPKIRVKAMKVSREETPVXE

SEQ ID NO: 23238 - protein, 37 aa, Artificial Sequence
  Cyclic GFR-binding peptide
  MOD_RES (35)..(35): Xaa is C or S
HEELRSMEGLLKPKKRVYEMIQVTINSHHVRSPQXKV

SEQ ID NO: 23239 - protein, 28 aa, Artificial Sequence
  Cyclic GFR-binding peptide
FSMEGIHQGQHPKIRMIQMTINSEETPV

SEQ ID NO: 23240 - protein, 37 aa, Artificial Sequence
  Cyclic GFR-binding peptide
  MOD_RES (35)..(35): Xaa is C or S
HEELRSMEGILKPKKRVYEMIQVTINSHHVRSPQXKV

SEQ ID NO: 23241 - protein, 31 aa, Artificial Sequence
  Cyclic GFR-binding peptide
  MOD_RES (30)..(30): Xaa is C or S
LFSMEGIHQGQHPKIRMIQMTINSEETPVXE

SEQ ID NO: 23242 - protein, 23 aa, Artificial Sequence
  Cyclic GFR-binding peptide
VQVEKFIPKKRVIEVKAVKVSRL

SEQ ID NO: 23243 - protein, 29 aa, Artificial Sequence
  Cyclic GFR-binding peptide
LHEELRVTAKKLKPKKRVYEIKRVQVPRH

SEQ ID NO: 23244 - protein, 41 aa, Artificial Sequence
  Cyclic GFR-binding peptide
  MOD_RES (1)..(3)..(40): Xaa is C or S
XKXALHDELTSMEGLFIPKKRVIEMIQVTINSLQVQTPRXQ

SEQ ID NO: 23245 - protein, 37 aa, Artificial Sequence
  Cyclic GFR-binding peptide
  MOD_RES (2)..(36): Xaa is C or S
EXQSHEELVQVEKHQGQHPKIRVKAMKVSRQGTPVXE

SEQ ID NO: 23246 - protein, 40 aa, Artificial Sequence
  Cyclic GFR-binding peptide
  MOD_RES (1)..(3)..(37): Xaa is C or S
XEXKNHQLFSMEGIHQGQHPKIRMIQMTINSEETPVXELG

SEQ ID NO: 23247 - protein, 41 aa, Artificial Sequence
  Cyclic GFR-binding peptide
  MOD_RES (2)..(39): Xaa is C or S
KXALHDELTSMEGIFIPKKRVIEMIQVTINSLQVQTPRXQV

SEQ ID NO: 23248 - protein, 24 aa, Artificial Sequence
  Cyclic GFR-binding peptide
VQVEKFIPKKRVIEVKAVKVSRLQ

SEQ ID NO: 23249 - protein, 41 aa, Artificial Sequence
  Cyclic GFR-binding peptide
  MOD_RES (2)..(4)..(38): Xaa is C or S
RXEXKNHQLFVQVEKHQGQHPKIRVKAMKVSREETPVXELG

SEQ ID NO: 23250 - protein, 32 aa, Artificial Sequence
  Cyclic GFR-binding peptide
  MOD_RES (1)..(3): Xaa is C or S
XKXALHDELTSMEGIFIPKKRVIEMIQVTINS

SEQ ID NO: 23251 - protein, 40 aa, Artificial Sequence
  Cyclic GFR-binding peptide
  MOD_RES (2)..(4)..(38): Xaa is C or S
RXEXQSHEELVQVEKHQGQHPKIRVKAMKVSRQGTPVXEL

SEQ ID NO: 23252 - protein, 27 aa, Artificial Sequence
  Cyclic GFR-binding peptide
ELRSMEGLLKPKKRVYEMIQVTINSHH

SEQ ID NO: 23253 - protein, 33 aa, Artificial Sequence
  Cyclic GFR-binding peptide
  MOD_RES (2)..(4): Xaa is C or S
RXEXQSHEELVTAKKHQGQHPKIRIKRMQVPRQ

SEQ ID NO: 23254 - protein, 27 aa, Artificial Sequence
  Cyclic GFR-binding peptide
LVQVEKHQGQHPKIRVKAMKVSRQGTP

SEQ ID NO: 23255 - protein, 39 aa, Artificial Sequence
  Cyclic GFR-binding peptide
  MOD_RES (1)..(3): Xaa is C or S
XAXELHEELRVTAKKLKPKKRVYEIKRVQVPRHHVRSPQ

SEQ ID NO: 23256 - protein, 38 aa, Artificial Sequence
  Cyclic GFR-binding peptide
  MOD_RES (1)..(35): Xaa is C or S
XKNHQLFSMEGLHQGQHPKIRMIQMTINSEETPVXELG

SEQ ID NO: 23257 - protein, 39 aa, Artificial Sequence
  Cyclic GFR-binding peptide
  MOD_RES (37)..(37): Xaa is C or S
ALHDELTVQVEKFIPKKRVIEVKAVKVSRLQVQTPRXQV

SEQ ID NO: 23258 - protein, 40 aa, Artificial Sequence
  Cyclic GFR-binding peptide
  MOD_RES (34)..(34): Xaa is C or S
QSHEELVQVEKHQGQHPKIRVKAMKVSRQGTPVXELGEDN

SEQ ID NO: 23259 - protein, 29 aa, Artificial Sequence
  Cyclic GFR-binding peptide
LHEELRSMEGILKPKKRVYEMIQVTINSH

SEQ ID NO: 23260 - protein, 35 aa, Artificial Sequence
  Cyclic GFR-binding peptide
ALHDELTSMEGIFIPKKRVIEMIQVTINSLQVQTP

SEQ ID NO: 23261 - protein, 38 aa, Artificial Sequence
  Cyclic GFR-binding peptide
  MOD_RES (2)..(36): Xaa is C or S
EXKNHQLFVTAKKHQGQHPKIRIKRMQVPREETPVXEL

SEQ ID NO: 23262 - protein, 29 aa, Artificial Sequence
  Cyclic GFR-binding peptide
ELTSMEGLFIPKKRVIEMIQVTINSLQVQ

SEQ ID NO: 23263 - protein, 31 aa, Artificial Sequence
  Cyclic GFR-binding peptide
KNHQLFVTAKKHQGQHPKIRIKRMQVPREET

SEQ ID NO: 23264 - protein, 28 aa, Artificial Sequence
  Cyclic GFR-binding peptide
LRSMEGLLKPKKRVYEMIQVTINSHHVR

SEQ ID NO: 23265 - protein, 35 aa, Artificial Sequence
  Cyclic GFR-binding peptide
  MOD_RES (34)..(34): Xaa is C or S
EELRVTAKKLKPKKRVYEIKRVQVPRHHVRSPQXK

SEQ ID NO: 23266 - protein, 31 aa, Artificial Sequence
  Cyclic GFR-binding peptide
NHQLFSMEGIHQGQHPKIRMIQMTINSEETP

SEQ ID NO: 23267 - protein, 34 aa, Artificial Sequence
  Cyclic GFR-binding peptide
  MOD_RES (30)..(30): Xaa is C or S
ELVTAKKHQGQHPKIRIKRMQVPRQGTPVXELGE

SEQ ID NO: 23268 - protein, 39 aa, Artificial Sequence
  Cyclic GFR-binding peptide
  MOD_RES (36)..(36): Xaa is C or S
LHDELTSMEGIFIPKKRVIEMIQVTINSLQVQTPRXQVN

SEQ ID NO: 23269 - protein, 29 aa, Artificial Sequence
  Cyclic GFR-binding peptide
DELTVQVEKFIPKKRVIEVKAVKVSRLQV

SEQ ID NO: 23270 - protein, 31 aa, Artificial Sequence
  Cyclic GFR-binding peptide
HEELSMEGIHQGQHPKIRMIQMTINSQGTPV

SEQ ID NO: 23271 - protein, 29 aa, Artificial Sequence
  Cyclic GFR-binding peptide
HEELRSMEGLLKPKKRVYEMIQVTINSHH

SEQ ID NO: 23272 - protein, 32 aa, Artificial Sequence
  Cyclic GFR-binding peptide
  MOD_RES (28)..(28): Xaa is C or S
VQVEKHQGQHPKIRVKAMKVSREETPVXELGE

SEQ ID NO: 23273 - protein, 40 aa, Artificial Sequence
  Cyclic GFR-binding peptide
  MOD_RES (36)..(36): Xaa is C or S
LHDELTVQVEKFIPKKRVIEVKAVKVSRLQVQTPRXQVNR

SEQ ID NO: 23274 - protein, 37 aa, Artificial Sequence
  Cyclic GFR-binding peptide
  MOD_RES (2)..(2): Xaa is C or S
AXELHEELRSMEGILKPKKRVYEMIQVTINSHHVRSP

SEQ ID NO: 23275 - protein, 34 aa, Artificial Sequence
  Cyclic GFR-binding peptide
  MOD_RES (31)..(31): Xaa is C or S
RSMEGLLKPKKRVYEMIQVTINSHHVRSPQXKVS

SEQ ID NO: 23276 - protein, 26 aa, Artificial Sequence
  Cyclic GFR-binding peptide
HQLFSMEGIHQGQHPKIRMIQMTINS

SEQ ID NO: 23277 - protein, 42 aa, Artificial Sequence
  Cyclic GFR-binding peptide
  MOD_RES (2)..(36): Xaa is C or S
EXKNHQLFSMEGLHQGQHPKIRMIQMTINSEETPVXELGEDN

SEQ ID NO: 23278 - protein, 25 aa, Artificial Sequence
  Cyclic GFR-binding peptide
ELTVQVEKFIPKKRVIEVKAVKVSR

SEQ ID NO: 23279 - protein, 26 aa, Artificial Sequence
  Cyclic GFR-binding peptide
QLFSMEGIHQGQHPKIRMIQMTINSE

SEQ ID NO: 23280 - protein, 31 aa, Artificial Sequence
  Cyclic GFR-binding peptide
  MOD_RES (29)..(29): Xaa is C or S
LVQVEKHQGQHPKIRVKAMKVSRQGTPVXEL

SEQ ID NO: 23281 - protein, 31 aa, Artificial Sequence
  Cyclic GFR-binding peptide
EELRSMEGILKPKKRVYEMIQVTINSHHVRS

SEQ ID NO: 23282 - protein, 31 aa, Artificial Sequence
  Cyclic GFR-binding peptide
SHEELSMEGIHQGQHPKIRMIQMTINSQGTP

SEQ ID NO: 23283 - protein, 30 aa, Artificial Sequence
  Cyclic GFR-binding peptide
  MOD_RES (1)..(1): Xaa is C or S
XQSHEELVTAKKHQGQHPKIRIKRMQVPRQ

SEQ ID NO: 23284 - protein, 36 aa, Artificial Sequence
  Cyclic GFR-binding peptide
  MOD_RES (1)..(3): Xaa is C or S
XEXKNHQLFSMEGLHQGQHPKIRMIQMTINSEETPV

SEQ ID NO: 23285 - protein, 41 aa, Artificial Sequence
  Cyclic GFR-binding peptide
  MOD_RES (1)..(38): Xaa is C or S
XELHEELRVTAKKLKPKKRVYEIKRVQVPRHHVRSPQXKVS

SEQ ID NO: 23286 - protein, 41 aa, Artificial Sequence
  Cyclic GFR-binding peptide
  MOD_RES (1)..(3)..(37): Xaa is C or S
XEXKNHQLFSMEGIHQGQHPKIRMIQMTINSEETPVXELGE

SEQ ID NO: 23287 - protein, 36 aa, Artificial Sequence
  Cyclic GFR-binding peptide
  MOD_RES (34)..(34): Xaa is C or S
QSHEELVTAKKHQGQHPKIRIKRMQVPRQGTPVXEL

SEQ ID NO: 23288 - protein, 43 aa, Artificial Sequence
  Cyclic GFR-binding peptide
  MOD_RES (2)..(39): Xaa is C or S
KXALHDELTSMEGLFIPKKRVIEMIQVTINSLQVQTPRXQVNR

SEQ ID NO: 23289 - protein, 36 aa, Artificial Sequence
  Cyclic GFR-binding peptide
  MOD_RES (34)..(34): Xaa is C or S
QSHEELSMEGIHQGQHPKIRMIQMTINSQGTPVXEL

SEQ ID NO: 23290 - protein, 33 aa, Artificial Sequence
  Cyclic GFR-binding peptide
  MOD_RES (28)..(28): Xaa is C or S
SMEGIHQGQHPKIRMIQMTINSEETPVXELGED

SEQ ID NO: 23291 - protein, 28 aa, Artificial Sequence
  Cyclic GFR-binding peptide
RSMEGILKPKKRVYEMIQVTINSHHVRS

SEQ ID NO: 23292 - protein, 35 aa, Artificial Sequence
  Cyclic GFR-binding peptide
  MOD_RES (2)..(4): Xaa is C or S
RXEXKNHQLFVTAKKHQGQHPKIRIKRMQVPREET

SEQ ID NO: 23293 - protein, 26 aa, Artificial Sequence
  Cyclic GFR-binding peptide
ELRVTAKKLKPKKRVYEIKRVQVPRH

SEQ ID NO: 23294 - protein, 36 aa, Artificial Sequence
  Cyclic GFR-binding peptide
  MOD_RES (2)..(36): Xaa is C or S
EXKNHQLFSMEGIHQGQHPKIRMIQMTINSEETPVX

SEQ ID NO: 23295 - protein, 32 aa, Artificial Sequence
  Cyclic GFR-binding peptide
  MOD_RES (30)..(30): Xaa is C or S
VQVEKFIPKKRVIEVKAVKVSRLQVQTPRXQV

SEQ ID NO: 23296 - protein, 23 aa, Artificial Sequence
  Cyclic GFR-binding peptide
VQVEKHQGQHPKIRVKAMKVSRE

SEQ ID NO: 23297 - protein, 39 aa, Artificial Sequence
  Cyclic GFR-binding peptide
  MOD_RES (1)..(35): Xaa is C or S
XKNHQLFSMEGIHQGQHPKIRMIQMTINSEETPVXELGE

SEQ ID NO: 23298 - protein, 36 aa, Artificial Sequence
  Cyclic GFR-binding peptide
ELHEELRSMEGLLKPKKRVYEMIQVTINSHHVRSPQ

SEQ ID NO: 23299 - protein, 34 aa, Artificial Sequence
  Cyclic GFR-binding peptide
  MOD_RES (29)..(29): Xaa is C or S
FSMEGLHQGQHPKIRMIQMTINSEETPVXELGED

SEQ ID NO: 23300 - protein, 29 aa, Artificial Sequence
  Cyclic GFR-binding peptide
HEELVQVEKHQGQHPKIRVKAMKVSRQGT

SEQ ID NO: 23301 - protein, 38 aa, Artificial Sequence
  Cyclic GFR-binding peptide
  MOD_RES (32)..(32): Xaa is C or S
HQLFVTAKKHQGQHPKIRIKRMQVPREETPVXELGEDN

SEQ ID NO: 23302 - protein, 32 aa, Artificial Sequence
  Cyclic GFR-binding peptide
  MOD_RES (31)..(31): Xaa is C or S
EELSMEGIHQGQHPKIRMIQMTINSQGTPVXE

SEQ ID NO: 23303 - protein, 27 aa, Artificial Sequence
  Cyclic GFR-binding peptide
HEELRSMEGLLKPKKRVYEMIQVTINS

SEQ ID NO: 23304 - protein, 27 aa, Artificial Sequence
  Cyclic GFR-binding peptide
HEELRSMEGILKPKKRVYEMIQVTINS

SEQ ID NO: 23305 - protein, 42 aa, Artificial Sequence
  Cyclic GFR-binding peptide
  MOD_RES (2)..(4)..(41): Xaa is C or S
EXKXALHDELTSMEGIFIPKKRVIEMIQVTINSLQVQTPRXQ

SEQ ID NO: 23306 - protein, 30 aa, Artificial Sequence
  Cyclic GFR-binding peptide
QLFVQVEKHQGQHPKIRVKAMKVSREETPV

SEQ ID NO: 23307 - protein, 35 aa, Artificial Sequence
  Cyclic GFR-binding peptide
  MOD_RES (2)..(2): Xaa is C or S
KXALHDELTSMEGIFIPKKRVIEMIQVTINSLQVQ

SEQ ID NO: 23308 - protein, 29 aa, Artificial Sequence
  Cyclic GFR-binding peptide
EELVTAKKHQGQHPKIRIKRMQVPRQGTP

SEQ ID NO: 23309 - protein, 34 aa, Artificial Sequence
  Cyclic GFR-binding peptide
  MOD_RES (1)..(1): Xaa is C or S
XKNHQLFVQVEKHQGQHPKIRVKAMKVSREETPV

SEQ ID NO: 23310 - protein, 35 aa, Artificial Sequence
  Cyclic GFR-binding peptide
  MOD_RES (31)..(31): Xaa is C or S
TVQVEKFIPKKRVIEVKAVKVSRLQVQTPRXQVNR

SEQ ID NO: 23311 - protein, 30 aa, Artificial Sequence
  Cyclic GFR-binding peptide
  MOD_RES (30)..(30): Xaa is C or S
SMEGIFIPKKRVIEMIQVTINSLQVQTPRX

SEQ ID NO: 23312 - protein, 33 aa, Artificial Sequence
  Cyclic GFR-binding peptide
  MOD_RES (1)..(3): Xaa is C or S
XEXKNHQLFSMEGLHQGQHPKIRMIQMTINSEE

SEQ ID NO: 23313 - protein, 32 aa, Artificial Sequence
  Cyclic GFR-binding peptide
DELTSMEGLFIPKKRVIEMIQVTINSLQVQTP

SEQ ID NO: 23314 - protein, 39 aa, Artificial Sequence
  Cyclic GFR-binding peptide
  MOD_RES (37)..(37): Xaa is C or S
ALHDELTSMEGLFIPKKRVIEMIQVTINSLQVQTPRXQV

SEQ ID NO: 23315 - protein, 31 aa, Artificial Sequence
  Cyclic GFR-binding peptide
KNHQLFSMEGIHQGQHPKIRMIQMTINSEET

SEQ ID NO: 23316 - protein, 29 aa, Artificial Sequence
  Cyclic GFR-binding peptide
RSMEGLLKPKKRVYEMIQVTINSHHVRSP

SEQ ID NO: 23317 - protein, 37 aa, Artificial Sequence
  Cyclic GFR-binding peptide
  MOD_RES (1)..(35): Xaa is C or S
XQSHEELVQVEKHQGQHPKIRVKAMKVSRQGTPVXEL

SEQ ID NO: 23318 - protein, 30 aa, Artificial Sequence
  Cyclic GFR-binding peptide
HQLFVQVEKHQGQHPKIRVKAMKVSREETP

SEQ ID NO: 23319 - protein, 28 aa, Artificial Sequence
  Cyclic GFR-binding peptide
EELRVTAKKLKPKKRVYEIKRVQVPRHH

SEQ ID NO: 23320 - protein, 33 aa, Artificial Sequence
  Cyclic GFR-binding peptide
  MOD_RES (30)..(30): Xaa is C or S
LFVTAKKHQGQHPKIRIKRMQVPREETPVXELG

SEQ ID NO: 23321 - protein, 34 aa, Artificial Sequence
  Cyclic GFR-binding peptide
  MOD_RES (1)..(1): Xaa is C or S
XALHDELTSMEGIFIPKKRVIEMIQVTINSLQVQ

SEQ ID NO: 23322 - protein, 37 aa, Artificial Sequence
  Cyclic GFR-binding peptide
  MOD_RES (5)..(5): Xaa is C or S
SSVKXQPSRVHHSNITVQIMEYVRKKPKLLGEMSRLE

SEQ ID NO: 23323 - protein, 29 aa, Artificial Sequence
  Cyclic GFR-binding peptide
HHRPVQVRKIEYVRKKPKLKKATVRLEEH

SEQ ID NO: 23324 - protein, 23 aa, Artificial Sequence
  Cyclic GFR-binding peptide
RPVQVRKIEYVRKKPKLKKATVR

SEQ ID NO: 23325 - protein, 31 aa, Artificial Sequence
  Cyclic GFR-binding peptide
  MOD_RES (2)..(2): Xaa is C or S
KXQPSRVHHSNITVQIMEYVRKKPKLIGEMS

SEQ ID NO: 23326 - protein, 29 aa, Artificial Sequence
  Cyclic GFR-binding peptide
RVHHSNITVQIMEYVRKKPKLLGEMSRLE

SEQ ID NO: 23327 - protein, 36 aa, Artificial Sequence
  Cyclic GFR-binding peptide
  MOD_RES (34)..(36): Xaa is C or S
VPTGQSNITMQIMRIKPHQGQHIGEMSLEEHSQXEX

SEQ ID NO: 23328 - protein, 34 aa, Artificial Sequence
  Cyclic GFR-binding peptide
  MOD_RES (1)..(1): Xaa is C or S
XQPSRVHHSNITVQIMEYVRKKPKLIGEMSRLEE

SEQ ID NO: 23329 - protein, 43 aa, Artificial Sequence
  Cyclic GFR-binding peptide
  MOD_RES (7)..(41)..(43): Xaa is C or S
NDEGLEXVPTEESNITMQIMRIKPHQGQHLGEMSFLQHNKXEX

SEQ ID NO: 23330 - protein, 35 aa, Artificial Sequence
  Cyclic GFR-binding peptide
  MOD_RES (1)..(35): Xaa is C or S
XVPTGQSNITMQIMRIKPHQGQHIGEMSLEEHSQX

SEQ ID NO: 23331 - protein, 26 aa, Artificial Sequence
  Cyclic GFR-binding peptide
EERSVKMAKVRIKPHQGQHKEVQVFL

SEQ ID NO: 23332 - protein, 31 aa, Artificial Sequence
  Cyclic GFR-binding peptide
PTEESNITMQIMRIKPHQGQHLGEMSFLQHN

SEQ ID NO: 23333 - protein, 36 aa, Artificial Sequence
  Cyclic GFR-binding peptide
  MOD_RES (7)..(7): Xaa is C or S
NDEGLEXVPTGQRPVQMRKIRIKPHQGQHKKATVLE

SEQ ID NO: 23334 - protein, 30 aa, Artificial Sequence
  Cyclic GFR-binding peptide
QVQLRSVKVAKVEIVRKKPIFKEVQVTLED

SEQ ID NO: 23335 - protein, 32 aa, Artificial Sequence
  Cyclic GFR-binding peptide
VPTEERPVQMRKIRIKPHQGQHKKATVFLQHN

SEQ ID NO: 23336 - protein, 34 aa, Artificial Sequence
  Cyclic GFR-binding peptide
  MOD_RES (1)..(1): Xaa is C or S
XQPSRVHHSNITVQIMEYVRKKPKLLGEMSRLEE

SEQ ID NO: 23337 - protein, 42 aa, Artificial Sequence
  Cyclic GFR-binding peptide
  MOD_RES (5)..(42): Xaa is C or S
SSVKXQPSRVHHRPVQVRKIEYVRKKPKLKKATVRLEEHLEX

SEQ ID NO: 23338 - protein, 27 aa, Artificial Sequence
  Cyclic GFR-binding peptide
PTGQRPVQMRKIRIKPHQGQHKKATVL

SEQ ID NO: 23339 - protein, 26 aa, Artificial Sequence
  Cyclic GFR-binding peptide
HSNITVQIMEYVRKKPKLIGEMSRLE

SEQ ID NO: 23340 - protein, 31 aa, Artificial Sequence
  Cyclic GFR-binding peptide
  MOD_RES (30)..(30): Xaa is C or S
SNITVQIMEIVRKKPIFIGEMSTLEDHLAXK

SEQ ID NO: 23341 - protein, 32 aa, Artificial Sequence
  Cyclic GFR-binding peptide
  MOD_RES (2)..(2): Xaa is C or S
KXQPSRVHHSNITVQIMEYVRKKPKLIGEMSR

SEQ ID NO: 23342 - protein, 31 aa, Artificial Sequence
  Cyclic GFR-binding peptide
  MOD_RES (1)..(1): Xaa is C or S
XRPTQVQLRSVKVAKVEIVRKKPIFKEVQVT

SEQ ID NO: 23343 - protein, 31 aa, Artificial Sequence
  Cyclic GFR-binding peptide
  MOD_RES (2)..(2): Xaa is C or S
QXRPTQVQLRSVKVAKVEIVRKKPIFKEVQV

SEQ ID NO: 23344 - protein, 24 aa, Artificial Sequence
  Cyclic GFR-binding peptide
SNITVQIMEYVRKKPKLLGEMSRL

SEQ ID NO: 23345 - protein, 26 aa, Artificial Sequence
  Cyclic GFR-binding peptide
QVQLRSVKVAKVEIVRKKPIFKEVQV

SEQ ID NO: 23346 - protein, 35 aa, Artificial Sequence
  Cyclic GFR-binding peptide
  MOD_RES (34)..(34): Xaa is C or S
VPTEESNITMQIMRIKPHQGQHLGEMSFLQHNKXE

SEQ ID NO: 23347 - protein, 29 aa, Artificial Sequence
  Cyclic GFR-binding peptide
  MOD_RES (1)..(1): Xaa is C or S
XVPTEESNITMQIMRIKPHQGQHLGEMSF

SEQ ID NO: 23348 - protein, 36 aa, Artificial Sequence
  Cyclic GFR-binding peptide
  MOD_RES (34)..(36): Xaa is C or S
QVQLSNITVQIMEIVRKKPIFLGEMSTLEDHLAXKX

SEQ ID NO: 23349 - protein, 39 aa, Artificial Sequence
  Cyclic GFR-binding peptide
  MOD_RES (2)..(39): Xaa is C or S
KXQPSRVHHSNITVQIMEYVRKKPKLIGEMSRLEEHLEX

SEQ ID NO: 23350 - protein, 36 aa, Artificial Sequence
  Cyclic GFR-binding peptide
  MOD_RES (34)..(36): Xaa is C or S
VPTEERSVKMAKVRIKPHQGQHKEVQVFLQHNKXEX

SEQ ID NO: 23351 - protein, 35 aa, Artificial Sequence
  Cyclic GFR-binding peptide
  MOD_RES (5)..(5): Xaa is C or S
SSVKXQPSRVHHRPVQVRKIEYVRKKPKLKKATVR

SEQ ID NO: 23352 - protein, 37 aa, Artificial Sequence
  Cyclic GFR-binding peptide
  MOD_RES (1)..(1): Xaa is C or S
XRPTQVQLRSVKVAKVEIVRKKPIFKEVQVTLEDHLA

SEQ ID NO: 23353 - protein, 36 aa, Artificial Sequence
  Cyclic GFR-binding peptide
  MOD_RES (1)..(1): Xaa is C or S
XQPSRVHHSNITVQIMEYVRKKPKLIGEMSRLEEHL

SEQ ID NO: 23354 - protein, 45 aa, Artificial Sequence
  Cyclic GFR-binding peptide
  MOD_RES (5)..(42)..(44): Xaa is C or S
SSVKXQPSRVHHSNITVQIMEYVRKKPKLIGEMSRLEEHLEXAXA

SEQ ID NO: 23355 - protein, 31 aa, Artificial Sequence
  Cyclic GFR-binding peptide
  MOD_RES (31)..(31): Xaa is C or S
LRSVKVAKVEIVRKKPIFKEVQVTLEDHLAX

SEQ ID NO: 23356 - protein, 34 aa, Artificial Sequence
  Cyclic GFR-binding peptide
SRVHHRPVQVRKIEYVRKKPKLKKATVRLEEHLE

SEQ ID NO: 23357 - protein, 29 aa, Artificial Sequence
  Cyclic GFR-binding peptide
VHHSNITVQIMEYVRKKPKLIGEMSRLEE

SEQ ID NO: 23358 - protein, 37 aa, Artificial Sequence
  Cyclic GFR-binding peptide
  MOD_RES (34)..(36): Xaa is C or S
VPTGQRPVQMRKIRIKPHQGQHKKATVLEEHSQXEXR

SEQ ID NO: 23359 - protein, 35 aa, Artificial Sequence
  Cyclic GFR-binding peptide
  MOD_RES (1)..(1): Xaa is C or S
XRPTQVQLSNITVQIMEIVRKKPIFIGEMSTLEDH

SEQ ID NO: 23360 - protein, 34 aa, Artificial Sequence
  Cyclic GFR-binding peptide
  MOD_RES (33)..(33): Xaa is C or S
VQLRSVKVAKVEIVRKKPIFKEVQVTLEDHLAXK

SEQ ID NO: 23361 - protein, 34 aa, Artificial Sequence
  Cyclic GFR-binding peptide
  MOD_RES (1)..(1): Xaa is C or S
XRPTQVQLRSVKVAKVEIVRKKPIFKEVQVTLED

SEQ ID NO: 23362 - protein, 33 aa, Artificial Sequence
  Cyclic GFR-binding peptide
VPTEESNITMQIMRIKPHQGQHLGEMSFLQHNK

SEQ ID NO: 23363 - protein, 44 aa, Artificial Sequence
  Cyclic GFR-binding peptide
  MOD_RES (4)..(41)..(43): Xaa is C or S
NVQXRPTQVQLSNITVQIMEIVRKKPIFIGEMSTLEDHLAXKXE

SEQ ID NO: 23364 - protein, 34 aa, Artificial Sequence
  Cyclic GFR-binding peptide
  MOD_RES (32)..(34): Xaa is C or S
TEERSVKMAKVRIKPHQGQHKEVQVFLQHNKXEX

SEQ ID NO: 23365 - protein, 32 aa, Artificial Sequence
  Cyclic GFR-binding peptide
  MOD_RES (1)..(1): Xaa is C or S
XVPTEERSVKMAKVRIKPHQGQHKEVQVFLQH

SEQ ID NO: 23366 - protein, 30 aa, Artificial Sequence
  Cyclic GFR-binding peptide
LRSVKVAKVEIVRKKPIFKEVQVTLEDHLA

SEQ ID NO: 23367 - protein, 38 aa, Artificial Sequence
  Cyclic GFR-binding peptide
  MOD_RES (37)..(37): Xaa is C or S
QPSRVHHRPVQVRKIEYVRKKPKLKKATVRLEEHLEXA

SEQ ID NO: 23368 - protein, 38 aa, Artificial Sequence
  Cyclic GFR-binding peptide
  MOD_RES (3)..(37): Xaa is C or S
LEXVPTGQRSVKMAKVRIKPHQGQHKEVQVLEEHSQXE

SEQ ID NO: 23369 - protein, 28 aa, Artificial Sequence
  Cyclic GFR-binding peptide
RVHHRPVQVRKIEYVRKKPKLKKATVRL

SEQ ID NO: 23370 - protein, 40 aa, Artificial Sequence
  Cyclic GFR-binding peptide
  MOD_RES (6)..(40): Xaa is C or S
DEGLEXVPTGQSNITMQIMRIKPHQGQHIGEMSLEEHSQX

SEQ ID NO: 23371 - protein, 28 aa, Artificial Sequence
  Cyclic GFR-binding peptide
SRVHHSNITVQIMEYVRKKPKLLGEMSR

SEQ ID NO: 23372 - protein, 27 aa, Artificial Sequence
  Cyclic GFR-binding peptide
RVHHSNITVQIMEYVRKKPKLLGEMSR

SEQ ID NO: 23373 - protein, 37 aa, Artificial Sequence
  Cyclic GFR-binding peptide
  MOD_RES (3)..(3): Xaa is C or S
VQXRPTQVQLSNITVQIMEIVRKKPIFIGEMSTLEDH

SEQ ID NO: 23374 - protein, 33 aa, Artificial Sequence
  Cyclic GFR-binding peptide
  MOD_RES (2)..(2): Xaa is C or S
KXQPSRVHHRPVQVRKIEYVRKKPKLKKATVRL

SEQ ID NO: 23375 - protein, 42 aa, Artificial Sequence
  Cyclic GFR-binding peptide
  MOD_RES (6)..(40)..(42): Xaa is C or S
DEGLEXVPTEERPVQMRKIRIKPHQGQHKKATVFLQHNKXEX

SEQ ID NO: 23376 - protein, 41 aa, Artificial Sequence
  Cyclic GFR-binding peptide
  MOD_RES (4)..(41): Xaa is C or S
SVKXQPSRVHHSNITVQIMEYVRKKPKLIGEMSRLEEHLEX

SEQ ID NO: 23377 - protein, 38 aa, Artificial Sequence
  Cyclic GFR-binding peptide
  MOD_RES (4)..(4): Xaa is C or S
SVKXQPSRVHHRPVQVRKIEYVRKKPKLKKATVRLEEH

SEQ ID NO: 23378 - protein, 37 aa, Artificial Sequence
  Cyclic GFR-binding peptide
  MOD_RES (5)..(5): Xaa is C or S
EGLEXVPTEERSVKMAKVRIKPHQGQHKEVQVFLQHN

SEQ ID NO: 23379 - protein, 38 aa, Artificial Sequence
  Cyclic GFR-binding peptide
  MOD_RES (1)..(35)..(37): Xaa is C or S
XVPTGQRPVQMRKIRIKPHQGQHKKATVLEEHSQXEXR

SEQ ID NO: 23380 - protein, 29 aa, Artificial Sequence
  Cyclic GFR-binding peptide
SRVHHSNITVQIMEYVRKKPKLLGEMSRL

SEQ ID NO: 23381 - protein, 30 aa, Artificial Sequence
  Cyclic GFR-binding peptide
  MOD_RES (2)..(2): Xaa is C or S
EXVPTEERSVKMAKVRIKPHQGQHKEVQVF

SEQ ID NO: 23382 - protein, 28 aa, Artificial Sequence
  Cyclic GFR-binding peptide
PTGQSNITMQIMRIKPHQGQHIGEMSLE

SEQ ID NO: 23383 - protein, 35 aa, Artificial Sequence
  Cyclic GFR-binding peptide
  MOD_RES (1)..(1): Xaa is C or S
XQPSRVHHRPVQVRKIEYVRKKPKLKKATVRLEEH

SEQ ID NO: 23384 - protein, 39 aa, Artificial Sequence
  Cyclic GFR-binding peptide
  MOD_RES (2)..(36)..(38): Xaa is C or S
EXVPTGQSNITMQIMRIKPHQGQHIGEMSLEEHSQXEXR

SEQ ID NO: 23385 - protein, 36 aa, Artificial Sequence
  Cyclic GFR-binding peptide
  MOD_RES (3)..(3): Xaa is C or S
VQXRPTQVQLRSVKVAKVEIVRKKPIFKEVQVTLED

SEQ ID NO: 23386 - protein, 26 aa, Artificial Sequence
  Cyclic GFR-binding peptide
TGQSNITMQIMRIKPHQGQHIGEMSL

SEQ ID NO: 23387 - protein, 35 aa, Artificial Sequence
  Cyclic GFR-binding peptide
  MOD_RES (3)..(3): Xaa is C or S
LEXVPTEERSVKMAKVRIKPHQGQHKEVQVFLQHN

SEQ ID NO: 23388 - protein, 32 aa, Artificial Sequence
  Cyclic GFR-binding peptide
RPTQVQLSNITVQIMEIVRKKPIFIGEMSTLE

SEQ ID NO: 23389 - protein, 40 aa, Artificial Sequence
  Cyclic GFR-binding peptide
  MOD_RES (4)..(4): Xaa is C or S
NVQXRPTQVQLSNITVQIMEIVRKKPIFLGEMSTLEDHLA

SEQ ID NO: 23390 - protein, 38 aa, Artificial Sequence
  Cyclic GFR-binding peptide
  MOD_RES (1)..(35)..(37): Xaa is C or S
XVPTGQRSVKMAKVRIKPHQGQHKEVQVLEEHSQXEXR

SEQ ID NO: 23391 - protein, 37 aa, Artificial Sequence
  Cyclic GFR-binding peptide
  MOD_RES (7)..(7): Xaa is C or S
NDEGLEXVPTEESNITMQIMRIKPHQGQHLGEMSFLQ

SEQ ID NO: 23392 - protein, 34 aa, Artificial Sequence
  Cyclic GFR-binding peptide
  MOD_RES (32)..(34): Xaa is C or S
TGQSNITMQIMRIKPHQGQHIGEMSLEEHSQXEX

SEQ ID NO: 23393 - protein, 31 aa, Artificial Sequence
  Cyclic GFR-binding peptide
VHHRPVQVRKIEYVRKKPKLKKATVRLEEHL

SEQ ID NO: 23394 - protein, 34 aa, Artificial Sequence
  Cyclic GFR-binding peptide
  MOD_RES (34)..(34): Xaa is C or S
RVHHRPVQVRKIEYVRKKPKLKKATVRLEEHLEX

SEQ ID NO: 23395 - protein, 29 aa, Artificial Sequence
  Cyclic GFR-binding peptide
VHHSNITVQIMEYVRKKPKLLGEMSRLEE

SEQ ID NO: 23396 - protein, 26 aa, Artificial Sequence
  Cyclic GFR-binding peptide
QVQLSNITVQIMEIVRKKPIFIGEMS

SEQ ID NO: 23397 - protein, 25 aa, Artificial Sequence
  Cyclic GFR-binding peptide
RPVQMRKIRIKPHQGQHKKATVLEE

SEQ ID NO: 23398 - protein, 31 aa, Artificial Sequence
  Cyclic GFR-binding peptide
  MOD_RES (2)..(2): Xaa is C or S
QXRPTQVQLSNITVQIMEIVRKKPIFIGEMS

SEQ ID NO: 23399 - protein, 45 aa, Artificial Sequence
  Cyclic GFR-binding peptide
  MOD_RES (5)..(42)..(44): Xaa is C or S
RNVQXRPTQVQLSNITVQIMEIVRKKPIFLGEMSTLEDHLAXKXE

SEQ ID NO: 23400 - protein, 34 aa, Artificial Sequence
  Cyclic GFR-binding peptide
  MOD_RES (5)..(5): Xaa is C or S
SSVKXQPSRVHHSNITVQIMEYVRKKPKLLGEMS

SEQ ID NO: 23401 - protein, 39 aa, Artificial Sequence
  Cyclic GFR-binding peptide
  MOD_RES (5)..(39): Xaa is C or S
EGLEXVPTEESNITMQIMRIKPHQGQHLGEMSFLQHNKX

SEQ ID NO: 23402 - protein, 29 aa, Artificial Sequence
  Cyclic GFR-binding peptide
RSVKVAKVEIVRKKPIFKEVQVTLEDHLA

SEQ ID NO: 23403 - protein, 42 aa, Artificial Sequence
  Cyclic GFR-binding peptide
  MOD_RES (5)..(42): Xaa is C or S
RNVQXRPTQVQLSNITVQIMEIVRKKPIFIGEMSTLEDHLAX

SEQ ID NO: 23404 - protein, 31 aa, Artificial Sequence
  Cyclic GFR-binding peptide
  MOD_RES (2)..(2): Xaa is C or S
EXVPTEERSVKMAKVRIKPHQGQHKEVQVFL

SEQ ID NO: 23405 - protein, 38 aa, Artificial Sequence
  Cyclic GFR-binding peptide
  MOD_RES (5)..(5): Xaa is C or S
SSVKXQPSRVHHSNITVQIMEYVRKKPKLIGEMSRLEE

SEQ ID NO: 23406 - protein, 27 aa, Artificial Sequence
  Cyclic GFR-binding peptide
GQRSVKMAKVRIKPHQGQHKEVQVLEE

SEQ ID NO: 23407 - protein, 31 aa, Artificial Sequence
  Cyclic GFR-binding peptide
QVQLSNITVQIMEIVRKKPIFIGEMSTLEDH

SEQ ID NO: 23408 - protein, 29 aa, Artificial Sequence
  Cyclic GFR-binding peptide
GQRSVKMAKVRIKPHQGQHKEVQVLEEHS

SEQ ID NO: 23409 - protein, 31 aa, Artificial Sequence
  Cyclic GFR-binding peptide
  MOD_RES (31)..(31): Xaa is C or S
LSNITVQIMEIVRKKPIFLGEMSTLEDHLAX

SEQ ID NO: 23410 - protein, 32 aa, Artificial Sequence
  Cyclic GFR-binding peptide
  MOD_RES (30)..(32): Xaa is C or S
ERPVQMRKIRIKPHQGQHKKATVFLQHNKXEX

SEQ ID NO: 23411 - protein, 27 aa, Artificial Sequence
  Cyclic GFR-binding peptide
TQVQLSNITVQIMEIVRKKPIFIGEMS

SEQ ID NO: 23412 - protein, 33 aa, Artificial Sequence
  Cyclic GFR-binding peptide
VPTGQRPVQMRKIRIKPHQGQHKKATVLEEHSQ

SEQ ID NO: 23413 - protein, 34 aa, Artificial Sequence
  Cyclic GFR-binding peptide
  MOD_RES (2)..(2): Xaa is C or S
KXQPSRVHHSNITVQIMEYVRKKPKLLGEMSRLE

SEQ ID NO: 23414 - protein, 36 aa, Artificial Sequence
  Cyclic GFR-binding peptide
  MOD_RES (5)..(5): Xaa is C or S
RNVQXRPTQVQLRSVKVAKVEIVRKKPIFKEVQVTL

SEQ ID NO: 23415 - protein, 40 aa, Artificial Sequence
  Cyclic GFR-binding peptide
  MOD_RES (5)..(5): Xaa is C or S
RNVQXRPTQVQLSNITVQIMEIVRKKPIFLGEMSTLEDHL

SEQ ID NO: 23416 - protein, 35 aa, Artificial Sequence
  Cyclic GFR-binding peptide
RPTQVQLRSVKVAKVEIVRKKPIFKEVQVTLEDHL

SEQ ID NO: 23417 - protein, 39 aa, Artificial Sequence
  Cyclic GFR-binding peptide
  MOD_RES (3)..(37)..(39): Xaa is C or S
LEXVPTGQRPVQMRKIRIKPHQGQHKKATVLEEHSQXEX

SEQ ID NO: 23418 - protein, 41 aa, Artificial Sequence
  Cyclic GFR-binding peptide
  MOD_RES (5)..(5): Xaa is C or S
RNVQXRPTQVQLRSVKVAKVEIVRKKPIFKEVQVTLEDHLA

SEQ ID NO: 23419 - protein, 26 aa, Artificial Sequence
  Cyclic GFR-binding peptide
RVHHSNITVQIMEYVRKKPKLIGEMS

SEQ ID NO: 23420 - protein, 35 aa, Artificial Sequence
  Cyclic GFR-binding peptide
  MOD_RES (34)..(34): Xaa is C or S
VPTEERSVKMAKVRIKPHQGQHKEVQVFLQHNKXE

SEQ ID NO: 23421 - protein, 32 aa, Artificial Sequence
  Cyclic GFR-binding peptide
  MOD_RES (2)..(2): Xaa is C or S
EXVPTEESNITMQIMRIKPHQGQHLGEMSFLQ

SEQ ID NO: 23422 - protein, 35 aa, Artificial Sequence
  Cyclic GFR-binding peptide
  MOD_RES (3)..(3): Xaa is C or S
VQXRPTQVQLSNITVQIMEIVRKKPIFLGEMSTLE

SEQ ID NO: 23423 - protein, 27 aa, Artificial Sequence
  Cyclic GFR-binding peptide
TEERSVKMAKVRIKPHQGQHKEVQVFL

SEQ ID NO: 23424 - protein, 29 aa, Artificial Sequence
  Cyclic GFR-binding peptide
  MOD_RES (2)..(2): Xaa is C or S
EXVPTGQRSVKMAKVRIKPHQGQHKEVQV

SEQ ID NO: 23425 - protein, 27 aa, Artificial Sequence
  Cyclic GFR-binding peptide
RPVQMRKIRIKPHQGQHKKATVFLQHN

SEQ ID NO: 23426 - protein, 32 aa, Artificial Sequence
  Cyclic GFR-binding peptide
QVQLRSVKVAKVEIVRKKPIFKEVQVTLEDHL

SEQ ID NO: 23427 - protein, 38 aa, Artificial Sequence
  Cyclic GFR-binding peptide
  MOD_RES (5)..(5): Xaa is C or S
SSVKXQPSRVHHSNITVQIMEYVRKKPKLLGEMSRLEE

SEQ ID NO: 23428 - protein, 24 aa, Artificial Sequence
  Cyclic GFR-binding peptide
QRPVQMRKIRIKPHQGQHKKATVL

SEQ ID NO: 23429 - protein, 32 aa, Artificial Sequence
  Cyclic GFR-binding peptide
  MOD_RES (5)..(5): Xaa is C or S
EGLEXVPTGQRSVKMAKVRIKPHQGQHKEVQV

SEQ ID NO: 23430 - protein, 29 aa, Artificial Sequence
  Cyclic GFR-binding peptide
SNITVQIMEYVRKKPKLIGEMSRLEEHLE

SEQ ID NO: 23431 - protein, 41 aa, Artificial Sequence
  Cyclic GFR-binding peptide
  MOD_RES (4)..(41): Xaa is C or S
NVQXRPTQVQLSNITVQIMEIVRKKPIFIGEMSTLEDHLAX

SEQ ID NO: 23432 - protein, 34 aa, Artificial Sequence
  Cyclic GFR-binding peptide
  MOD_RES (4)..(4): Xaa is C or S
GLEXVPTGQRPVQMRKIRIKPHQGQHKKATVLEE

SEQ ID NO: 23433 - protein, 32 aa, Artificial Sequence
  Cyclic GFR-binding peptide
  MOD_RES (2)..(2): Xaa is C or S
EXVPTEERPVQMRKIRIKPHQGQHKKATVFLQ

SEQ ID NO: 23434 - protein, 32 aa, Artificial Sequence
  Cyclic GFR-binding peptide
  MOD_RES (1)..(1): Xaa is C or S
XVPTGQSNITMQIMRIKPHQGQHIGEMSLEEH

SEQ ID NO: 23435 - protein, 36 aa, Artificial Sequence
  Cyclic GFR-binding peptide
  MOD_RES (2)..(36): Xaa is C or S
EXVPTEERPVQMRKIRIKPHQGQHKKATVFLQHNKX

SEQ ID NO: 23436 - protein, 37 aa, Artificial Sequence
  Cyclic GFR-binding peptide
  MOD_RES (5)..(5): Xaa is C or S
SSVKXQPSRVHHSNITVQIMEYVRKKPKLIGEMSRLE

SEQ ID NO: 23437 - protein, 37 aa, Artificial Sequence
  Cyclic GFR-binding peptide
  MOD_RES (1)..(1): Xaa is C or S
XQPSRVHHRPVQVRKIEYVRKKPKLKKATVRLEEHLE

SEQ ID NO: 23438 - protein, 40 aa, Artificial Sequence
  Cyclic GFR-binding peptide
  MOD_RES (3)..(40): Xaa is C or S
VQXRPTQVQLRSVKVAKVEIVRKKPIFKEVQVTLEDHLAX

SEQ ID NO: 23439 - protein, 43 aa, Artificial Sequence
  Cyclic GFR-binding peptide
  MOD_RES (6)..(40)..(42): Xaa is C or S
DEGLEXVPTEERPVQMRKIRIKPHQGQHKKATVFLQHNKXEXR

SEQ ID NO: 23440 - protein, 27 aa, Artificial Sequence
  Cyclic GFR-binding peptide
RPVQMRKIRIKPHQGQHKKATVLEEHS

SEQ ID NO: 23441 - protein, 40 aa, Artificial Sequence
  Cyclic GFR-binding peptide
  MOD_RES (2)..(39): Xaa is C or S
QXRPTQVQLRSVKVAKVEIVRKKPIFKEVQVTLEDHLAXK

SEQ ID NO: 23442 - protein, 35 aa, Artificial Sequence
  Cyclic GFR-binding peptide
  MOD_RES (2)..(2): Xaa is C or S
EXVPTEERSVKMAKVRIKPHQGQHKEVQVFLQHNK

SEQ ID NO: 23443 - protein, 25 aa, Artificial Sequence
  Cyclic GFR-binding peptide
VQLSNITVQIMEIVRKKPIFLGEMS

SEQ ID NO: 23444 - protein, 37 aa, Artificial Sequence
  Cyclic GFR-binding peptide
  MOD_RES (1)..(1): Xaa is C or S
XQPSRVHHSNITVQIMEYVRKKPKLLGEMSRLEEHLE

SEQ ID NO: 23445 - protein, 34 aa, Artificial Sequence
  Cyclic GFR-binding peptide
  MOD_RES (7)..(7): Xaa is C or S
NDEGLEXVPTEERPVQMRKIRIKPHQGQHKKATV

SEQ ID NO: 23446 - protein, 36 aa, Artificial Sequence
  Cyclic GFR-binding peptide
  MOD_RES (34)..(36): Xaa is C or S
RVHHSNITVQIMEYVRKKPKLLGEMSRLEEHLEXAX

SEQ ID NO: 23447 - protein, 31 aa, Artificial Sequence
  Cyclic GFR-binding peptide
VQLRSVKVAKVEIVRKKPIFKEVQVTLEDHL

SEQ ID NO: 23448 - protein, 35 aa, Artificial Sequence
  Cyclic GFR-binding peptide
QPSRVHHRPVQVRKIEYVRKKPKLKKATVRLEEHL

SEQ ID NO: 23449 - protein, 36 aa, Artificial Sequence
  Cyclic GFR-binding peptide
  MOD_RES (2)..(36): Xaa is C or S
EXVPTEESNITMQIMRIKPHQGQHLGEMSFLQHNKX

SEQ ID NO: 23450 - protein, 35 aa, Artificial Sequence
  Cyclic GFR-binding peptide
  MOD_RES (32)..(34): Xaa is C or S
TGQRSVKMAKVRIKPHQGQHKEVQVLEEHSQXEXR

SEQ ID NO: 23451 - protein, 27 aa, Artificial Sequence
  Cyclic GFR-binding peptide
SNITMQIMRIKPHQGQHIGEMSLEEHS

SEQ ID NO: 23452 - protein, 29 aa, Artificial Sequence
  Cyclic GFR-binding peptide
RVHHRPVQVRKIEYVRKKPKLKKATVRLE

SEQ ID NO: 23453 - protein, 30 aa, Artificial Sequence
  Cyclic GFR-binding peptide
EESNITMQIMRIKPHQGQHLGEMSFLQHNK

SEQ ID NO: 23454 - protein, 24 aa, Artificial Sequence
  Cyclic GFR-binding peptide
RPVQVRKIEYVRKKPKLKKATVRL

SEQ ID NO: 23455 - protein, 26 aa, Artificial Sequence
  Cyclic GFR-binding peptide
PTEERPVQMRKIRIKPHQGQHKKATV

SEQ ID NO: 23456 - protein, 33 aa, Artificial Sequence
  Cyclic GFR-binding peptide
  MOD_RES (31)..(33): Xaa is C or S
HRPVQVRKIEYVRKKPKLKKATVRLEEHLEXAX

SEQ ID NO: 23457 - protein, 29 aa, Artificial Sequence
  Cyclic GFR-binding peptide
QRSVKMAKVRIKPHQGQHKEVQVLEEHSQ

SEQ ID NO: 23458 - protein, 44 aa, Artificial Sequence
  Cyclic GFR-binding peptide
  MOD_RES (4)..(41)..(43): Xaa is C or S
SVKXQPSRVHHSNITVQIMEYVRKKPKLIGEMSRLEEHLEXAXA

SEQ ID NO: 23459 - protein, 27 aa, Artificial Sequence
  Cyclic GFR-binding peptide
QLRSVKVAKVEIVRKKPIFKEVQVTLE

SEQ ID NO: 23460 - protein, 43 aa, Artificial Sequence
  Cyclic GFR-binding peptide
  MOD_RES (5)..(42): Xaa is C or S
SSVKXQPSRVHHSNITVQIMEYVRKKPKLIGEMSRLEEHLEXA

SEQ ID NO: 23461 - protein, 30 aa, Artificial Sequence
  Cyclic GFR-binding peptide
RPTQVQLSNITVQIMEIVRKKPIFLGEMST

SEQ ID NO: 23462 - protein, 35 aa, Artificial Sequence
  Cyclic GFR-binding peptide
  MOD_RES (4)..(4): Xaa is C or S
GLEXVPTGQRPVQMRKIRIKPHQGQHKKATVLEEH

SEQ ID NO: 23463 - protein, 38 aa, Artificial Sequence
  Cyclic GFR-binding peptide
  MOD_RES (5)..(5): Xaa is C or S
EGLEXVPTEERSVKMAKVRIKPHQGQHKEVQVFLQHNK

SEQ ID NO: 23464 - protein, 25 aa, Artificial Sequence
  Cyclic GFR-binding peptide
SNITMQIMRIKPHQGQHIGEMSLEE

SEQ ID NO: 23465 - protein, 31 aa, Artificial Sequence
  Cyclic GFR-binding peptide
RPTQVQLRSVKVAKVEIVRKKPIFKEVQVTL

SEQ ID NO: 23466 - protein, 31 aa, Artificial Sequence
  Cyclic GFR-binding peptide
  MOD_RES (31)..(31): Xaa is C or S
EERSVKMAKVRIKPHQGQHKEVQVFLQHNKX

SEQ ID NO: 23467 - protein, 29 aa, Artificial Sequence
  Cyclic GFR-binding peptide
TQVQLRSVKVAKVEIVRKKPIFKEVQVTL

SEQ ID NO: 23468 - protein, 35 aa, Artificial Sequence
  Cyclic GFR-binding peptide
PSRVHHSNITVQIMEYVRKKPKLIGEMSRLEEHLE

SEQ ID NO: 23469 - protein, 32 aa, Artificial Sequence
  Cyclic GFR-binding peptide
  MOD_RES (1)..(1): Xaa is C or S
XRPTQVQLSNITVQIMEIVRKKPIFLGEMSTL

SEQ ID NO: 23470 - protein, 28 aa, Artificial Sequence
  Cyclic GFR-binding peptide
HSNITVQIMEYVRKKPKLLGEMSRLEEH

SEQ ID NO: 23471 - protein, 31 aa, Artificial Sequence
  Cyclic GFR-binding peptide
  MOD_RES (30)..(30): Xaa is C or S
RPVQVRKIEYVRKKPKLKKATVRLEEHLEXA

SEQ ID NO: 23472 - protein, 35 aa, Artificial Sequence
  Cyclic GFR-binding peptide
  MOD_RES (6)..(6): Xaa is C or S
DEGLEXVPTEERPVQMRKIRIKPHQGQHKKATVFL

SEQ ID NO: 23473 - protein, 31 aa, Artificial Sequence
  Cyclic GFR-binding peptide
  MOD_RES (30)..(30): Xaa is C or S
SNITVQIMEIVRKKPIFLGEMSTLEDHLAXK

SEQ ID NO: 23474 - protein, 32 aa, Artificial Sequence
  Cyclic GFR-binding peptide
  MOD_RES (1)..(1): Xaa is C or S
XQPSRVHHSNITVQIMEYVRKKPKLIGEMSRL

SEQ ID NO: 23475 - protein, 38 aa, Artificial Sequence
  Cyclic GFR-binding peptide
  MOD_RES (4)..(38): Xaa is C or S
GLEXVPTEERPVQMRKIRIKPHQGQHKKATVFLQHNKX

SEQ ID NO: 23476 - protein, 26 aa, Artificial Sequence
  Cyclic GFR-binding peptide
SNITVQIMEYVRKKPKLLGEMSRLEE

SEQ ID NO: 23477 - protein, 37 aa, Artificial Sequence
  Cyclic GFR-binding peptide
  MOD_RES (3)..(3): Xaa is C or S
VKXQPSRVHHRPVQVRKIEYVRKKPKLKKATVRLEEH

SEQ ID NO: 23478 - protein, 26 aa, Artificial Sequence
  Cyclic GFR-binding peptide
VHHSNITVQIMEYVRKKPKLLGEMSR

SEQ ID NO: 23479 - protein, 33 aa, Artificial Sequence
  Cyclic GFR-binding peptide
  MOD_RES (3)..(3): Xaa is C or S
LEXVPTGQRSVKMAKVRIKPHQGQHKEVQVLEE

SEQ ID NO: 23480 - protein, 29 aa, Artificial Sequence
  Cyclic GFR-binding peptide
  MOD_RES (2)..(2): Xaa is C or S
EXVPTGQSNITMQIMRIKPHQGQHIGEMS

SEQ ID NO: 23481 - protein, 30 aa, Artificial Sequence
  Cyclic GFR-binding peptide
  MOD_RES (29)..(29): Xaa is C or S
SNITMQIMRIKPHQGQHIGEMSLEEHSQXE

SEQ ID NO: 23482 - protein, 24 aa, Artificial Sequence
  Cyclic GFR-binding peptide
LSNITVQIMEIVRKKPIFIGEMST

SEQ ID NO: 23483 - protein, 34 aa, Artificial Sequence
  Cyclic GFR-binding peptide
QPSRVHHSNITVQIMEYVRKKPKLIGEMSRLEEH

SEQ ID NO: 23484 - protein, 24 aa, Artificial Sequence
  Cyclic GFR-binding peptide
LRSVKVAKVEIVRKKPIFKEVQVT

SEQ ID NO: 23485 - protein, 23 aa, Artificial Sequence
  Cyclic GFR-binding peptide
SNITMQIMRIKPHQGQHLGEMSF

SEQ ID NO: 23486 - protein, 29 aa, Artificial Sequence
  Cyclic GFR-binding peptide
  MOD_RES (29)..(29): Xaa is C or S
SNITMQIMRIKPHQGQHIGEMSLEEHSQX

SEQ ID NO: 23487 - protein, 30 aa, Artificial Sequence
  Cyclic GFR-binding peptide
  MOD_RES (30)..(30): Xaa is C or S
ERSVKMAKVRIKPHQGQHKEVQVFLQHNKX

SEQ ID NO: 23488 - protein, 39 aa, Artificial Sequence
  Cyclic GFR-binding peptide
  MOD_RES (4)..(38): Xaa is C or S
GLEXVPTGQRPVQMRKIRIKPHQGQHKKATVLEEHSQXE

SEQ ID NO: 23489 - protein, 31 aa, Artificial Sequence
  Cyclic GFR-binding peptide
  MOD_RES (1)..(1): Xaa is C or S
XVPTEESNITMQIMRIKPHQGQHLGEMSFLQ

SEQ ID NO: 23490 - protein, 32 aa, Artificial Sequence
  Cyclic GFR-binding peptide
  MOD_RES (5)..(5): Xaa is C or S
EGLEXVPTGQSNITMQIMRIKPHQGQHIGEMS

SEQ ID NO: 23491 - protein, 36 aa, Artificial Sequence
  Cyclic GFR-binding peptide
  MOD_RES (5)..(5): Xaa is C or S
EGLEXVPTGQSNITMQIMRIKPHQGQHIGEMSLEEH

SEQ ID NO: 23492 - protein, 40 aa, Artificial Sequence
  Cyclic GFR-binding peptide
  MOD_RES (7)..(7): Xaa is C or S
NDEGLEXVPTGQSNITMQIMRIKPHQGQHIGEMSLEEHSQ

SEQ ID NO: 23493 - protein, 34 aa, Artificial Sequence
  Cyclic GFR-binding peptide
  MOD_RES (33)..(33): Xaa is C or S
PTGQSNITMQIMRIKPHQGQHIGEMSLEEHSQXE

SEQ ID NO: 23494 - protein, 30 aa, Artificial Sequence
  Cyclic GFR-binding peptide
QLRSVKVAKVEIVRKKPIFKEVQVTLEDHL

SEQ ID NO: 23495 - protein, 43 aa, Artificial Sequence
  Cyclic GFR-binding peptide
  MOD_RES (5)..(42): Xaa is C or S
RNVQXRPTQVQLRSVKVAKVEIVRKKPIFKEVQVTLEDHLAXK

SEQ ID NO: 23496 - protein, 27 aa, Artificial Sequence
  Cyclic GFR-binding peptide
QSNITMQIMRIKPHQGQHIGEMSLEEH

SEQ ID NO: 23497 - protein, 39 aa, Artificial Sequence
  Cyclic GFR-binding peptide
  MOD_RES (5)..(39): Xaa is C or S
EGLEXVPTGQRSVKMAKVRIKPHQGQHKEVQVLEEHSQX

SEQ ID NO: 23498 - protein, 22 aa, Artificial Sequence
  Cyclic GFR-binding peptide
RPVQVRKIEYVRKKPKLKKATV

SEQ ID NO: 23499 - protein, 34 aa, Artificial Sequence
  Cyclic GFR-binding peptide
  MOD_RES (3)..(3): Xaa is C or S
VQXRPTQVQLSNITVQIMEIVRKKPIFIGEMSTL

SEQ ID NO: 23500 - protein, 38 aa, Artificial Sequence
  Cyclic GFR-binding peptide
  MOD_RES (1)..(38): Xaa is C or S
XQPSRVHHRPVQVRKIEYVRKKPKLKKATVRLEEHLEX

SEQ ID NO: 23501 - protein, 32 aa, Artificial Sequence
  Cyclic GFR-binding peptide
  MOD_RES (31)..(31): Xaa is C or S
HSNITVQIMEYVRKKPKLLGEMSRLEEHLEXA

SEQ ID NO: 23502 - protein, 37 aa, Artificial Sequence
  Cyclic GFR-binding peptide
  MOD_RES (4)..(4): Xaa is C or S
GLEXVPTGQSNITMQIMRIKPHQGQHIGEMSLEEHSQ

SEQ ID NO: 23503 - protein, 29 aa, Artificial Sequence
  Cyclic GFR-binding peptide
SRVHHRPVQVRKIEYVRKKPKLKKATVRL

SEQ ID NO: 23504 - protein, 32 aa, Artificial Sequence
  Cyclic GFR-binding peptide
  MOD_RES (1)..(1): Xaa is C or S
XVPTEERPVQMRKIRIKPHQGQHKKATVFLQH

SEQ ID NO: 23505 - protein, 35 aa, Artificial Sequence
  Cyclic GFR-binding peptide
  MOD_RES (33)..(35): Xaa is C or S
VHHSNITVQIMEYVRKKPKLLGEMSRLEEHLEXAX

SEQ ID NO: 23506 - protein, 27 aa, Artificial Sequence
  Cyclic GFR-binding peptide
LSNITVQIMEIVRKKPIFLGEMSTLED

SEQ ID NO: 23507 - protein, 35 aa, Artificial Sequence
  Cyclic GFR-binding peptide
  MOD_RES (35)..(35): Xaa is C or S
TQVQLSNITVQIMEIVRKKPIFLGEMSTLEDHLAX

SEQ ID NO: 23508 - protein, 28 aa, Artificial Sequence
  Cyclic GFR-binding peptide
SNITMQIMRIKPHQGQHIGEMSLEEHSQ

SEQ ID NO: 23509 - protein, 32 aa, Artificial Sequence
  Cyclic GFR-binding peptide
  MOD_RES (29)..(31): Xaa is C or S
RSVKMAKVRIKPHQGQHKEVQVFLQHNKXEXR

SEQ ID NO: 23510 - protein, 32 aa, Artificial Sequence
  Cyclic GFR-binding peptide
VQLSNITVQIMEIVRKKPIFIGEMSTLEDHLA

SEQ ID NO: 23511 - protein, 33 aa, Artificial Sequence
  Cyclic GFR-binding peptide
  MOD_RES (1)..(1): Xaa is C or S
XVPTEERSVKMAKVRIKPHQGQHKEVQVFLQHN

SEQ ID NO: 23512 - protein, 36 aa, Artificial Sequence
  Cyclic GFR-binding peptide
  MOD_RES (6)..(6): Xaa is C or S
DEGLEXVPTEESNITMQIMRIKPHQGQHLGEMSFLQ

SEQ ID NO: 23513 - protein, 31 aa, Artificial Sequence
  Cyclic GFR-binding peptide
  MOD_RES (3)..(3): Xaa is C or S
LEXVPTEESNITMQIMRIKPHQGQHLGEMSF

SEQ ID NO: 23514 - protein, 41 aa, Artificial Sequence
  Cyclic GFR-binding peptide
  MOD_RES (6)..(40): Xaa is C or S
DEGLEXVPTEERPVQMRKIRIKPHQGQHKKATVFLQHNKXE

SEQ ID NO: 23515 - protein, 28 aa, Artificial Sequence
  Cyclic GFR-binding peptide
LSNITVQIMEIVRKKPIFLGEMSTLEDH

SEQ ID NO: 23516 - protein, 34 aa, Artificial Sequence
  Cyclic GFR-binding peptide
SRVHHSNITVQIMEYVRKKPKLLGEMSRLEEHLE

SEQ ID NO: 23517 - protein, 32 aa, Artificial Sequence
  Cyclic GFR-binding peptide
PTQVQLRSVKVAKVEIVRKKPIFKEVQVTLED

SEQ ID NO: 23518 - protein, 43 aa, Artificial Sequence
  Cyclic GFR-binding peptide
  MOD_RES (5)..(42): Xaa is C or S
SSVKXQPSRVHHSNITVQIMEYVRKKPKLLGEMSRLEEHLEXA

SEQ ID NO: 23519 - protein, 42 aa, Artificial Sequence
  Cyclic GFR-binding peptide
  MOD_RES (7)..(41): Xaa is C or S
NDEGLEXVPTGQRPVQMRKIRIKPHQGQHKKATVLEEHSQXE

SEQ ID NO: 23520 - protein, 30 aa, Artificial Sequence
  Cyclic GFR-binding peptide
EERPVQMRKIRIKPHQGQHKKATVFLQHNK

SEQ ID NO: 23521 - protein, 23 aa, Artificial Sequence
  Cyclic GFR-binding peptide
LSNITVQIMEIVRKKPIFLGEMS

SEQ ID NO: 23522 - protein, 27 aa, Artificial Sequence
  Cyclic GFR-binding peptide
QVQLRSVKVAKVEIVRKKPIFKEVQVT

SEQ ID NO: 23523 - protein, 31 aa, Artificial Sequence
  Cyclic GFR-binding peptide
  MOD_RES (1)..(1): Xaa is C or S
XQPSRVHHSNITVQIMEYVRKKPKLLGEMSR

SEQ ID NO: 23524 - protein, 45 aa, Artificial Sequence
  Cyclic GFR-binding peptide
  MOD_RES (5)..(42)..(44): Xaa is C or S
RNVQXRPTQVQLRSVKVAKVEIVRKKPIFKEVQVTLEDHLAXKXE

SEQ ID NO: 23525 - protein, 37 aa, Artificial Sequence
  Cyclic GFR-binding peptide
  MOD_RES (7)..(7): Xaa is C or S
NDEGLEXVPTEERPVQMRKIRIKPHQGQHKKATVFLQ

SEQ ID NO: 23526 - protein, 36 aa, Artificial Sequence
  Cyclic GFR-binding peptide
  MOD_RES (34)..(36): Xaa is C or S
VPTEERPVQMRKIRIKPHQGQHKKATVFLQHNKXEX

SEQ ID NO: 23527 - protein, 38 aa, Artificial Sequence
  Cyclic GFR-binding peptide
  MOD_RES (2)..(2): Xaa is C or S
QXRPTQVQLSNITVQIMEIVRKKPIFIGEMSTLEDHLA

SEQ ID NO: 23528 - protein, 37 aa, Artificial Sequence
  Cyclic GFR-binding peptide
  MOD_RES (2)..(2): Xaa is C or S
QXRPTQVQLSNITVQIMEIVRKKPIFLGEMSTLEDHL

SEQ ID NO: 23529 - protein, 30 aa, Artificial Sequence
  Cyclic GFR-binding peptide
GQRPVQMRKIRIKPHQGQHKKATVLEEHSQ

SEQ ID NO: 23530 - protein, 34 aa, Artificial Sequence
  Cyclic GFR-binding peptide
  MOD_RES (32)..(34): Xaa is C or S
TEERPVQMRKIRIKPHQGQHKKATVFLQHNKXEX

SEQ ID NO: 23531 - protein, 35 aa, Artificial Sequence
  Cyclic GFR-binding peptide
  MOD_RES (4)..(4): Xaa is C or S
SVKXQPSRVHHSNITVQIMEYVRKKPKLIGEMSRL

SEQ ID NO: 23532 - protein, 29 aa, Artificial Sequence
  Cyclic GFR-binding peptide
ERPVQMRKIRIKPHQGQHKKATVFLQHNK

SEQ ID NO: 23533 - protein, 24 aa, Artificial Sequence
  Cyclic GFR-binding peptide
ERSVKMAKVRIKPHQGQHKEVQVF

SEQ ID NO: 23534 - protein, 38 aa, Artificial Sequence
  Cyclic GFR-binding peptide
  MOD_RES (1)..(38): Xaa is C or S
XQPSRVHHSNITVQIMEYVRKKPKLLGEMSRLEEHLEX

SEQ ID NO: 23535 - protein, 30 aa, Artificial Sequence
  Cyclic GFR-binding peptide
  MOD_RES (30)..(30): Xaa is C or S
ERPVQMRKIRIKPHQGQHKKATVFLQHNKX

SEQ ID NO: 23536 - protein, 33 aa, Artificial Sequence
  Cyclic GFR-binding peptide
PSRVHHSNITVQIMEYVRKKPKLLGEMSRLEEH

SEQ ID NO: 23537 - protein, 33 aa, Artificial Sequence
  Cyclic GFR-binding peptide
  MOD_RES (31)..(33): Xaa is C or S
GQRPVQMRKIRIKPHQGQHKKATVLEEHSQXEX

SEQ ID NO: 23538 - protein, 34 aa, Artificial Sequence
  Cyclic GFR-binding peptide
  MOD_RES (31)..(33): Xaa is C or S
LSNITVQIMEIVRKKPIFIGEMSTLEDHLAXKXE

SEQ ID NO: 23539 - protein, 41 aa, Artificial Sequence
  Cyclic GFR-binding peptide
  MOD_RES (3)..(40): Xaa is C or S
VQXRPTQVQLRSVKVAKVEIVRKKPIFKEVQVTLEDHLAXK

SEQ ID NO: 23540 - protein, 37 aa, Artificial Sequence
  Cyclic GFR-binding peptide
  MOD_RES (34)..(36): Xaa is C or S
QVQLSNITVQIMEIVRKKPIFIGEMSTLEDHLAXKXE

SEQ ID NO: 23541 - protein, 42 aa, Artificial Sequence
  Cyclic GFR-binding peptide
  MOD_RES (3)..(40)..(42): Xaa is C or S
VQXRPTQVQLSNITVQIMEIVRKKPIFIGEMSTLEDHLAXKX

SEQ ID NO: 23542 - protein, 40 aa, Artificial Sequence
  Cyclic GFR-binding peptide
  MOD_RES (5)..(39): Xaa is C or S
EGLEXVPTGQRPVQMRKIRIKPHQGQHKKATVLEEHSQXE

SEQ ID NO: 23543 - protein, 40 aa, Artificial Sequence
  Cyclic GFR-binding peptide
  MOD_RES (37)..(39): Xaa is C or S
RPTQVQLSNITVQIMEIVRKKPIFLGEMSTLEDHLAXKXE

SEQ ID NO: 23544 - protein, 32 aa, Artificial Sequence
  Cyclic GFR-binding peptide
  MOD_RES (31)..(31): Xaa is C or S
HSNITVQIMEYVRKKPKLIGEMSRLEEHLEXA

SEQ ID NO: 23545 - protein, 25 aa, Artificial Sequence
  Cyclic GFR-binding peptide
QLSNITVQIMEIVRKKPIFLGEMST

SEQ ID NO: 23546 - protein, 32 aa, Artificial Sequence
  Cyclic GFR-binding peptide
  MOD_RES (1)..(1): Xaa is C or S
XQPSRVHHSNITVQIMEYVRKKPKLLGEMSRL

SEQ ID NO: 23547 - protein, 23 aa, Artificial Sequence
  Cyclic GFR-binding peptide
ERPVQMRKIRIKPHQGQHKKATV

SEQ ID NO: 23548 - protein, 31 aa, Artificial Sequence
  Cyclic GFR-binding peptide
RVHHRPVQVRKIEYVRKKPKLKKATVRLEEH

SEQ ID NO: 23549 - protein, 34 aa, Artificial Sequence
  Cyclic GFR-binding peptide
  MOD_RES (7)..(7): Xaa is C or S
NDEGLEXVPTGQSNITMQIMRIKPHQGQHIGEMS

SEQ ID NO: 23550 - protein, 39 aa, Artificial Sequence
  Cyclic GFR-binding peptide
  MOD_RES (4)..(4): Xaa is C or S
NVQXRPTQVQLRSVKVAKVEIVRKKPIFKEVQVTLEDHL

SEQ ID NO: 23551 - protein, 28 aa, Artificial Sequence
  Cyclic GFR-binding peptide
VPTEERPVQMRKIRIKPHQGQHKKATVF

SEQ ID NO: 23552 - protein, 39 aa, Artificial Sequence
  Cyclic GFR-binding peptide
  MOD_RES (5)..(39): Xaa is C or S
EGLEXVPTGQRPVQMRKIRIKPHQGQHKKATVLEEHSQX

SEQ ID NO: 23553 - protein, 25 aa, Artificial Sequence
  Cyclic GFR-binding peptide
HHSNITVQIMEYVRKKPKLLGEMSR

SEQ ID NO: 23554 - protein, 37 aa, Artificial Sequence
  Cyclic GFR-binding peptide
  MOD_RES (2)..(36): Xaa is C or S
EXVPTEERSVKMAKVRIKPHQGQHKEVQVFLQHNKXE

SEQ ID NO: 23555 - protein, 36 aa, Artificial Sequence
  Cyclic GFR-binding peptide
  MOD_RES (4)..(4): Xaa is C or S
NVQXRPTQVQLRSVKVAKVEIVRKKPIFKEVQVTLE

SEQ ID NO: 23556 - protein, 30 aa, Artificial Sequence
  Cyclic GFR-binding peptide
PTGQRPVQMRKIRIKPHQGQHKKATVLEEH

SEQ ID NO: 23557 - protein, 37 aa, Artificial Sequence
  Cyclic GFR-binding peptide
  MOD_RES (4)..(4): Xaa is C or S
SVKXQPSRVHHSNITVQIMEYVRKKPKLIGEMSRLEE

SEQ ID NO: 23558 - protein, 36 aa, Artificial Sequence
  Cyclic GFR-binding peptide
  MOD_RES (7)..(7): Xaa is C or S
NDEGLEXVPTEESNITMQIMRIKPHQGQHLGEMSFL

SEQ ID NO: 23559 - protein, 35 aa, Artificial Sequence
  Cyclic GFR-binding peptide
  MOD_RES (3)..(3): Xaa is C or S
LEXVPTGQSNITMQIMRIKPHQGQHIGEMSLEEHS

SEQ ID NO: 23560 - protein, 37 aa, Artificial Sequence
  Cyclic GFR-binding peptide
  MOD_RES (1)..(35)..(37): Xaa is C or S
XVPTEESNITMQIMRIKPHQGQHLGEMSFLQHNKXEX

SEQ ID NO: 23561 - protein, 32 aa, Artificial Sequence
  Cyclic GFR-binding peptide
  MOD_RES (3)..(3): Xaa is C or S
LEXVPTEESNITMQIMRIKPHQGQHLGEMSFL

SEQ ID NO: 23562 - protein, 34 aa, Artificial Sequence
  Cyclic GFR-binding peptide
PTQVQLSNITVQIMEIVRKKPIFIGEMSTLEDHL

SEQ ID NO: 23563 - protein, 30 aa, Artificial Sequence
  Cyclic GFR-binding peptide
RVHHSNITVQIMEYVRKKPKLIGEMSRLEE

SEQ ID NO: 23564 - protein, 40 aa, Artificial Sequence
  Cyclic GFR-binding peptide
  MOD_RES (4)..(4): Xaa is C or S
SVKXQPSRVHHRPVQVRKIEYVRKKPKLKKATVRLEEHLE

SEQ ID NO: 23565 - protein, 35 aa, Artificial Sequence
  Cyclic GFR-binding peptide
  MOD_RES (3)..(3): Xaa is C or S
VKXQPSRVHHRPVQVRKIEYVRKKPKLKKATVRLE

SEQ ID NO: 23566 - protein, 30 aa, Artificial Sequence
  Cyclic GFR-binding peptide
TQVQLSNITVQIMEIVRKKPIFIGEMSTLE

SEQ ID NO: 23567 - protein, 25 aa, Artificial Sequence
  Cyclic GFR-binding peptide
TEERSVKMAKVRIKPHQGQHKEVQV

SEQ ID NO: 23568 - protein, 34 aa, Artificial Sequence
  Cyclic GFR-binding peptide
  MOD_RES (3)..(3): Xaa is C or S
LEXVPTEESNITMQIMRIKPHQGQHLGEMSFLQH

SEQ ID NO: 23569 - protein, 28 aa, Artificial Sequence
  Cyclic GFR-binding peptide
QVQLSNITVQIMEIVRKKPIFLGEMSTL

SEQ ID NO: 23570 - protein, 34 aa, Artificial Sequence
  Cyclic GFR-binding peptide
  MOD_RES (32)..(34): Xaa is C or S
QLSNITVQIMEIVRKKPIFIGEMSTLEDHLAXKX

SEQ ID NO: 23571 - protein, 40 aa, Artificial Sequence
  Cyclic GFR-binding peptide
  MOD_RES (4)..(4): Xaa is C or S
SVKXQPSRVHHSNITVQIMEYVRKKPKLLGEMSRLEEHLE

SEQ ID NO: 23572 - protein, 33 aa, Artificial Sequence
  Cyclic GFR-binding peptide
  MOD_RES (5)..(5): Xaa is C or S
EGLEXVPTGQSNITMQIMRIKPHQGQHIGEMSL

SEQ ID NO: 23573 - protein, 35 aa, Artificial Sequence
  Cyclic GFR-binding peptide
  MOD_RES (34)..(34): Xaa is C or S
VPTGQSNITMQIMRIKPHQGQHIGEMSLEEHSQXE

SEQ ID NO: 23574 - protein, 33 aa, Artificial Sequence
  Cyclic GFR-binding peptide
  MOD_RES (30)..(32): Xaa is C or S
SNITVQIMEIVRKKPIFLGEMSTLEDHLAXKXE

SEQ ID NO: 23575 - protein, 31 aa, Artificial Sequence
  Cyclic GFR-binding peptide
VPTGQRSVKMAKVRIKPHQGQHKEVQVLEEH

SEQ ID NO: 23576 - protein, 22 aa, Artificial Sequence
  Cyclic GFR-binding peptide
SNITVQIMEYVRKKPKLLGEMS

SEQ ID NO: 23577 - protein, 37 aa, Artificial Sequence
  Cyclic GFR-binding peptide
  MOD_RES (6)..(6): Xaa is C or S
DEGLEXVPTEERPVQMRKIRIKPHQGQHKKATVFLQH

SEQ ID NO: 23578 - protein, 38 aa, Artificial Sequence
  Cyclic GFR-binding peptide
  MOD_RES (35)..(37): Xaa is C or S
SRVHHSNITVQIMEYVRKKPKLIGEMSRLEEHLEXAXA

SEQ ID NO: 23579 - protein, 33 aa, Artificial Sequence
  Cyclic GFR-binding peptide
RVHHSNITVQIMEYVRKKPKLIGEMSRLEEHLE

SEQ ID NO: 23580 - protein, 42 aa, Artificial Sequence
  Cyclic GFR-binding peptide
  MOD_RES (5)..(39)..(41): Xaa is C or S
EGLEXVPTGQRPVQMRKIRIKPHQGQHKKATVLEEHSQXEXR

SEQ ID NO: 23581 - protein, 32 aa, Artificial Sequence
  Cyclic GFR-binding peptide
  MOD_RES (2)..(2): Xaa is C or S
QXRPTQVQLSNITVQIMEIVRKKPIFLGEMST

SEQ ID NO: 23582 - protein, 33 aa, Artificial Sequence
  Cyclic GFR-binding peptide
  MOD_RES (1)..(1): Xaa is C or S
XVPTEESNITMQIMRIKPHQGQHLGEMSFLQHN

SEQ ID NO: 23583 - protein, 39 aa, Artificial Sequence
  Cyclic GFR-binding peptide
  MOD_RES (4)..(4): Xaa is C or S
SVKXQPSRVHHSNITVQIMEYVRKKPKLIGEMSRLEEHL

SEQ ID NO: 23584 - protein, 41 aa, Artificial Sequence
  Cyclic GFR-binding peptide
  MOD_RES (4)..(38)..(40): Xaa is C or S
GLEXVPTGQRPVQMRKIRIKPHQGQHKKATVLEEHSQXEXR

SEQ ID NO: 23585 - protein, 37 aa, Artificial Sequence
  Cyclic GFR-binding peptide
  MOD_RES (4)..(4): Xaa is C or S
SVKXQPSRVHHSNITVQIMEYVRKKPKLLGEMSRLEE

SEQ ID NO: 23586 - protein, 35 aa, Artificial Sequence
  Cyclic GFR-binding peptide
  MOD_RES (34)..(34): Xaa is C or S
QVQLRSVKVAKVEIVRKKPIFKEVQVTLEDHLAXK

SEQ ID NO: 23587 - protein, 38 aa, Artificial Sequence
  Cyclic GFR-binding peptide
  MOD_RES (6)..(6): Xaa is C or S
DEGLEXVPTGQRPVQMRKIRIKPHQGQHKKATVLEEHS

SEQ ID NO: 23588 - protein, 32 aa, Artificial Sequence
  Cyclic GFR-binding peptide
QVQLSNITVQIMEIVRKKPIFLGEMSTLEDHL

SEQ ID NO: 23589 - protein, 39 aa, Artificial Sequence
  Cyclic GFR-binding peptide
  MOD_RES (2)..(39): Xaa is C or S
QXRPTQVQLSNITVQIMEIVRKKPIFIGEMSTLEDHLAX

SEQ ID NO: 23590 - protein, 24 aa, Artificial Sequence
  Cyclic GFR-binding peptide
QRSVKMAKVRIKPHQGQHKEVQVL

SEQ ID NO: 23591 - protein, 35 aa, Artificial Sequence
  Cyclic GFR-binding peptide
  MOD_RES (5)..(5): Xaa is C or S
EGLEXVPTEERSVKMAKVRIKPHQGQHKEVQVFLQ

SEQ ID NO: 23592 - protein, 30 aa, Artificial Sequence
  Cyclic GFR-binding peptide
VQLSNITVQIMEIVRKKPIFIGEMSTLEDH

SEQ ID NO: 23593 - protein, 39 aa, Artificial Sequence
  Cyclic GFR-binding peptide
  MOD_RES (4)..(4): Xaa is C or S
SVKXQPSRVHHRPVQVRKIEYVRKKPKLKKATVRLEEHL

SEQ ID NO: 23594 - protein, 42 aa, Artificial Sequence
  Cyclic GFR-binding peptide
  MOD_RES (5)..(39)..(41): Xaa is C or S
EGLEXVPTGQRSVKMAKVRIKPHQGQHKEVQVLEEHSQXEXR

SEQ ID NO: 23595 - protein, 42 aa, Artificial Sequence
  Cyclic GFR-binding peptide
  MOD_RES (4)..(41): Xaa is C or S
SVKXQPSRVHHSNITVQIMEYVRKKPKLIGEMSRLEEHLEXA

SEQ ID NO: 23596 - protein, 34 aa, Artificial Sequence
  Cyclic GFR-binding peptide
  MOD_RES (33)..(33): Xaa is C or S
PTEESNITMQIMRIKPHQGQHLGEMSFLQHNKXE

SEQ ID NO: 23597 - protein, 43 aa, Artificial Sequence
  Cyclic GFR-binding peptide
  MOD_RES (7)..(41)..(43): Xaa is C or S
NDEGLEXVPTEERSVKMAKVRIKPHQGQHKEVQVFLQHNKXEX

SEQ ID NO: 23598 - protein, 30 aa, Artificial Sequence
  Cyclic GFR-binding peptide
RVHHSNITVQIMEYVRKKPKLLGEMSRLEE

SEQ ID NO: 23599 - protein, 26 aa, Artificial Sequence
  Cyclic GFR-binding peptide
PTEESNITMQIMRIKPHQGQHLGEMS

SEQ ID NO: 23600 - protein, 31 aa, Artificial Sequence
  Cyclic GFR-binding peptide
  MOD_RES (1)..(1): Xaa is C or S
XVPTGQRPVQMRKIRIKPHQGQHKKATVLEE

SEQ ID NO: 23601 - protein, 34 aa, Artificial Sequence
  Cyclic GFR-binding peptide
PSRVHHRPVQVRKIEYVRKKPKLKKATVRLEEHL

SEQ ID NO: 23602 - protein, 38 aa, Artificial Sequence
  Cyclic GFR-binding peptide
  MOD_RES (3)..(3): Xaa is C or S
VKXQPSRVHHSNITVQIMEYVRKKPKLLGEMSRLEEHL

SEQ ID NO: 23603 - protein, 32 aa, Artificial Sequence
  Cyclic GFR-binding peptide
  MOD_RES (3)..(3): Xaa is C or S
LEXVPTGQRSVKMAKVRIKPHQGQHKEVQVLE

SEQ ID NO: 23604 - protein, 34 aa, Artificial Sequence
  Cyclic GFR-binding peptide
PSRVHHSNITVQIMEYVRKKPKLIGEMSRLEEHL

SEQ ID NO: 23605 - protein, 37 aa, Artificial Sequence
  Cyclic GFR-binding peptide
  MOD_RES (7)..(7): Xaa is C or S
NDEGLEXVPTGQRPVQMRKIRIKPHQGQHKKATVLEE

SEQ ID NO: 23606 - protein, 32 aa, Artificial Sequence
  Cyclic GFR-binding peptide
  MOD_RES (2)..(2): Xaa is C or S
QXRPTQVQLSNITVQIMEIVRKKPIFIGEMST

SEQ ID NO: 23607 - protein, 34 aa, Artificial Sequence
  Cyclic GFR-binding peptide
  MOD_RES (5)..(5): Xaa is C or S
SSVKXQPSRVHHRPVQVRKIEYVRKKPKLKKATV

SEQ ID NO: 23608 - protein, 33 aa, Artificial Sequence
  Cyclic GFR-binding peptide
QPSRVHHRPVQVRKIEYVRKKPKLKKATVRLEE

SEQ ID NO: 23609 - protein, 32 aa, Artificial Sequence
  Cyclic GFR-binding peptide
RPTQVQLSNITVQIMEIVRKKPIFLGEMSTLE

SEQ ID NO: 23610 - protein, 24 aa, Artificial Sequence
  Cyclic GFR-binding peptide
HHSNITVQIMEYVRKKPKLIGEMS

SEQ ID NO: 23611 - protein, 26 aa, Artificial Sequence
  Cyclic GFR-binding peptide
ERPVQMRKIRIKPHQGQHKKATVFLQ

SEQ ID NO: 23612 - protein, 30 aa, Artificial Sequence
  Cyclic GFR-binding peptide
VHHRPVQVRKIEYVRKKPKLKKATVRLEEH

SEQ ID NO: 23613 - protein, 27 aa, Artificial Sequence
  Cyclic GFR-binding peptide
ERSVKMAKVRIKPHQGQHKEVQVFLQH

SEQ ID NO: 23614 - protein, 29 aa, Artificial Sequence
  Cyclic GFR-binding peptide
GQRPVQMRKIRIKPHQGQHKKATVLEEHS

SEQ ID NO: 23615 - protein, 26 aa, Artificial Sequence
  Cyclic GFR-binding peptide
SNITVQIMEYVRKKPKLIGEMSRLEE

SEQ ID NO: 23616 - protein, 38 aa, Artificial Sequence
  Cyclic GFR-binding peptide
  MOD_RES (4)..(4): Xaa is C or S
NVQXRPTQVQLSNITVQIMEIVRKKPIFLGEMSTLEDH

SEQ ID NO: 23617 - protein, 35 aa, Artificial Sequence
  Cyclic GFR-binding peptide
  MOD_RES (2)..(2): Xaa is C or S
EXVPTGQRSVKMAKVRIKPHQGQHKEVQVLEEHSQ

SEQ ID NO: 23618 - protein, 26 aa, Artificial Sequence
  Cyclic GFR-binding peptide
TGQRSVKMAKVRIKPHQGQHKEVQVL

SEQ ID NO: 23619 - protein, 25 aa, Artificial Sequence
  Cyclic GFR-binding peptide
ESNITMQIMRIKPHQGQHLGEMSFL

SEQ ID NO: 23620 - protein, 35 aa, Artificial Sequence
  Cyclic GFR-binding peptide
  MOD_RES (4)..(4): Xaa is C or S
GLEXVPTGQRSVKMAKVRIKPHQGQHKEVQVLEEH

SEQ ID NO: 23621 - protein, 37 aa, Artificial Sequence
  Cyclic GFR-binding peptide
  MOD_RES (6)..(6): Xaa is C or S
DEGLEXVPTGQSNITMQIMRIKPHQGQHIGEMSLEEH

SEQ ID NO: 23622 - protein, 36 aa, Artificial Sequence
  Cyclic GFR-binding peptide
  MOD_RES (33)..(35): Xaa is C or S
PTEERPVQMRKIRIKPHQGQHKKATVFLQHNKXEXR

SEQ ID NO: 23623 - protein, 36 aa, Artificial Sequence
  Cyclic GFR-binding peptide
  MOD_RES (2)..(36): Xaa is C or S
EXVPTGQRPVQMRKIRIKPHQGQHKKATVLEEHSQX

SEQ ID NO: 23624 - protein, 42 aa, Artificial Sequence
  Cyclic GFR-binding peptide
  MOD_RES (6)..(40)..(42): Xaa is C or S
DEGLEXVPTEERSVKMAKVRIKPHQGQHKEVQVFLQHNKXEX

SEQ ID NO: 23625 - protein, 38 aa, Artificial Sequence
  Cyclic GFR-binding peptide
  MOD_RES (3)..(37): Xaa is C or S
LEXVPTGQRPVQMRKIRIKPHQGQHKKATVLEEHSQXE

SEQ ID NO: 23626 - protein, 37 aa, Artificial Sequence
  Cyclic GFR-binding peptide
  MOD_RES (5)..(5): Xaa is C or S
EGLEXVPTEERPVQMRKIRIKPHQGQHKKATVFLQHN

SEQ ID NO: 23627 - protein, 30 aa, Artificial Sequence
  Cyclic GFR-binding peptide
  MOD_RES (2)..(2): Xaa is C or S
EXVPTEERPVQMRKIRIKPHQGQHKKATVF

SEQ ID NO: 23628 - protein, 33 aa, Artificial Sequence
  Cyclic GFR-binding peptide
  MOD_RES (31)..(33): Xaa is C or S
GQRSVKMAKVRIKPHQGQHKEVQVLEEHSQXEX

SEQ ID NO: 23629 - protein, 25 aa, Artificial Sequence
  Cyclic GFR-binding peptide
EERPVQMRKIRIKPHQGQHKKATVF

SEQ ID NO: 23630 - protein, 29 aa, Artificial Sequence
  Cyclic GFR-binding peptide
TGQRPVQMRKIRIKPHQGQHKKATVLEEH

SEQ ID NO: 23631 - protein, 35 aa, Artificial Sequence
  Cyclic GFR-binding peptide
  MOD_RES (3)..(3): Xaa is C or S
LEXVPTEERPVQMRKIRIKPHQGQHKKATVFLQHN

SEQ ID NO: 23632 - protein, 27 aa, Artificial Sequence
  Cyclic GFR-binding peptide
VPTGQSNITMQIMRIKPHQGQHIGEMS

SEQ ID NO: 23633 - protein, 28 aa, Artificial Sequence
  Cyclic GFR-binding peptide
LRSVKVAKVEIVRKKPIFKEVQVTLEDH

SEQ ID NO: 23634 - protein, 31 aa, Artificial Sequence
  Cyclic GFR-binding peptide
  MOD_RES (4)..(4): Xaa is C or S
GLEXVPTGQSNITMQIMRIKPHQGQHIGEMS

SEQ ID NO: 23635 - protein, 38 aa, Artificial Sequence
  Cyclic GFR-binding peptide
  MOD_RES (7)..(7): Xaa is C or S
NDEGLEXVPTGQRSVKMAKVRIKPHQGQHKEVQVLEEH

SEQ ID NO: 23636 - protein, 34 aa, Artificial Sequence
  Cyclic GFR-binding peptide
  MOD_RES (2)..(2): Xaa is C or S
KXQPSRVHHSNITVQIMEYVRKKPKLIGEMSRLE

SEQ ID NO: 23637 - protein, 27 aa, Artificial Sequence
  Cyclic GFR-binding peptide
VQLRSVKVAKVEIVRKKPIFKEVQVTL

SEQ ID NO: 23638 - protein, 24 aa, Artificial Sequence
  Cyclic GFR-binding peptide
HSNITVQIMEYVRKKPKLIGEMSR

SEQ ID NO: 23639 - protein, 34 aa, Artificial Sequence
  Cyclic GFR-binding peptide
  MOD_RES (34)..(34): Xaa is C or S
RVHHSNITVQIMEYVRKKPKLLGEMSRLEEHLEX

SEQ ID NO: 23640 - protein, 29 aa, Artificial Sequence
  Cyclic GFR-binding peptide
  MOD_RES (29)..(29): Xaa is C or S
RSVKMAKVRIKPHQGQHKEVQVLEEHSQX

SEQ ID NO: 23641 - protein, 33 aa, Artificial Sequence
  Cyclic GFR-binding peptide
  MOD_RES (1)..(1): Xaa is C or S
XRPTQVQLSNITVQIMEIVRKKPIFIGEMSTLE

SEQ ID NO: 23642 - protein, 33 aa, Artificial Sequence
  Cyclic GFR-binding peptide
  MOD_RES (32)..(32): Xaa is C or S
QLRSVKVAKVEIVRKKPIFKEVQVTLEDHLAXK

SEQ ID NO: 23643 - protein, 26 aa, Artificial Sequence
  Cyclic GFR-binding peptide
LSNITVQIMEIVRKKPIFIGEMSTLE

SEQ ID NO: 23644 - protein, 40 aa, Artificial Sequence
  Cyclic GFR-binding peptide
  MOD_RES (37)..(39): Xaa is C or S
RPTQVQLRSVKVAKVEIVRKKPIFKEVQVTLEDHLAXKXE

SEQ ID NO: 23645 - protein, 37 aa, Artificial Sequence
  Cyclic GFR-binding peptide
  MOD_RES (36)..(36): Xaa is C or S
PTQVQLSNITVQIMEIVRKKPIFIGEMSTLEDHLAXK

SEQ ID NO: 23646 - protein, 33 aa, Artificial Sequence
  Cyclic GFR-binding peptide
  MOD_RES (4)..(4): Xaa is C or S
GLEXVPTGQRSVKMAKVRIKPHQGQHKEVQVLE

SEQ ID NO: 23647 - protein, 38 aa, Artificial Sequence
  Cyclic GFR-binding peptide
  MOD_RES (2)..(2): Xaa is C or S
KXQPSRVHHSNITVQIMEYVRKKPKLLGEMSRLEEHLE

SEQ ID NO: 23648 - protein, 31 aa, Artificial Sequence
  Cyclic GFR-binding peptide
  MOD_RES (29)..(31): Xaa is C or S
RPVQMRKIRIKPHQGQHKKATVFLQHNKXEX

SEQ ID NO: 23649 - protein, 35 aa, Artificial Sequence
  Cyclic GFR-binding peptide
  MOD_RES (34)..(34): Xaa is C or S
VPTEERPVQMRKIRIKPHQGQHKKATVFLQHNKXE

SEQ ID NO: 23650 - protein, 33 aa, Artificial Sequence
  Cyclic GFR-binding peptide
  MOD_RES (1)..(1): Xaa is C or S
XVPTGQSNITMQIMRIKPHQGQHIGEMSLEEHS

SEQ ID NO: 23651 - protein, 39 aa, Artificial Sequence
  Cyclic GFR-binding peptide
  MOD_RES (5)..(5): Xaa is C or S
SSVKXQPSRVHHSNITVQIMEYVRKKPKLLGEMSRLEEH

SEQ ID NO: 23652 - protein, 28 aa, Artificial Sequence
  Cyclic GFR-binding peptide
QSNITMQIMRIKPHQGQHIGEMSLEEHS

SEQ ID NO: 23653 - protein, 42 aa, Artificial Sequence
  Cyclic GFR-binding peptide
  MOD_RES (4)..(41): Xaa is C or S
NVQXRPTQVQLSNITVQIMEIVRKKPIFLGEMSTLEDHLAXK

SEQ ID NO: 23654 - protein, 36 aa, Artificial Sequence
  Cyclic GFR-binding peptide
  MOD_RES (5)..(5): Xaa is C or S
EGLEXVPTEERSVKMAKVRIKPHQGQHKEVQVFLQH

SEQ ID NO: 23655 - protein, 33 aa, Artificial Sequence
  Cyclic GFR-binding peptide
  MOD_RES (2)..(2): Xaa is C or S
EXVPTGQSNITMQIMRIKPHQGQHIGEMSLEEH

SEQ ID NO: 23656 - protein, 33 aa, Artificial Sequence
  Cyclic GFR-binding peptide
  MOD_RES (2)..(2): Xaa is C or S
EXVPTEESNITMQIMRIKPHQGQHLGEMSFLQH

SEQ ID NO: 23657 - protein, 32 aa, Artificial Sequence
  Cyclic GFR-binding peptide
PSRVHHSNITVQIMEYVRKKPKLIGEMSRLEE

SEQ ID NO: 23658 - protein, 38 aa, Artificial Sequence
  Cyclic GFR-binding peptide
  MOD_RES (5)..(5): Xaa is C or S
EGLEXVPTEESNITMQIMRIKPHQGQHLGEMSFLQHNK

SEQ ID NO: 23659 - protein, 32 aa, Artificial Sequence
  Cyclic GFR-binding peptide
  MOD_RES (2)..(2): Xaa is C or S
EXVPTGQRPVQMRKIRIKPHQGQHKKATVLEE

SEQ ID NO: 23660 - protein, 30 aa, Artificial Sequence
  Cyclic GFR-binding peptide
QPSRVHHSNITVQIMEYVRKKPKLIGEMSR

SEQ ID NO: 23661 - protein, 27 aa, Artificial Sequence
  Cyclic GFR-binding peptide
RSVKMAKVRIKPHQGQHKEVQVFLQHN

SEQ ID NO: 23662 - protein, 26 aa, Artificial Sequence
  Cyclic GFR-binding peptide
PTGQSNITMQIMRIKPHQGQHIGEMS

SEQ ID NO: 23663 - protein, 29 aa, Artificial Sequence
  Cyclic GFR-binding peptide
TEERPVQMRKIRIKPHQGQHKKATVFLQH

SEQ ID NO: 23664 - protein, 29 aa, Artificial Sequence
  Cyclic GFR-binding peptide
PTGQSNITMQIMRIKPHQGQHIGEMSLEE

SEQ ID NO: 23665 - protein, 32 aa, Artificial Sequence
  Cyclic GFR-binding peptide
VHHSNITVQIMEYVRKKPKLLGEMSRLEEHLE

SEQ ID NO: 23666 - protein, 22 aa, Artificial Sequence
  Cyclic GFR-binding peptide
SNITVQIMEIVRKKPIFIGEMS

SEQ ID NO: 23667 - protein, 29 aa, Artificial Sequence
  Cyclic GFR-binding peptide
QPSRVHHSNITVQIMEYVRKKPKLIGEMS

SEQ ID NO: 23668 - protein, 28 aa, Artificial Sequence
  Cyclic GFR-binding peptide
VPTEERSVKMAKVRIKPHQGQHKEVQVF

SEQ ID NO: 23669 - protein, 29 aa, Artificial Sequence
  Cyclic GFR-binding peptide
  MOD_RES (1)..(1): Xaa is C or S
XVPTGQSNITMQIMRIKPHQGQHIGEMSL

SEQ ID NO: 23670 - protein, 39 aa, Artificial Sequence
  Cyclic GFR-binding peptide
  MOD_RES (37)..(39): Xaa is C or S
RPTQVQLRSVKVAKVEIVRKKPIFKEVQVTLEDHLAXKX

SEQ ID NO: 23671 - protein, 33 aa, Artificial Sequence
  Cyclic GFR-binding peptide
  MOD_RES (4)..(4): Xaa is C or S
NVQXRPTQVQLSNITVQIMEIVRKKPIFIGEMS

SEQ ID NO: 23672 - protein, 29 aa, Artificial Sequence
  Cyclic GFR-binding peptide
TGQSNITMQIMRIKPHQGQHIGEMSLEEH

SEQ ID NO: 23673 - protein, 33 aa, Artificial Sequence
  Cyclic GFR-binding peptide
  MOD_RES (32)..(32): Xaa is C or S
TGQRPVQMRKIRIKPHQGQHKKATVLEEHSQXE

SEQ ID NO: 23674 - protein, 28 aa, Artificial Sequence
  Cyclic GFR-binding peptide
PTEERSVKMAKVRIKPHQGQHKEVQVFL

SEQ ID NO: 23675 - protein, 24 aa, Artificial Sequence
  Cyclic GFR-binding peptide
RPVQMRKIRIKPHQGQHKKATVLE

SEQ ID NO: 23676 - protein, 24 aa, Artificial Sequence
  Cyclic GFR-binding peptide
GQRPVQMRKIRIKPHQGQHKKATV

SEQ ID NO: 23677 - protein, 28 aa, Artificial Sequence
  Cyclic GFR-binding peptide
GQSNITMQIMRIKPHQGQHIGEMSLEEH

SEQ ID NO: 23678 - protein, 38 aa, Artificial Sequence
  Cyclic GFR-binding peptide
  MOD_RES (1)..(38): Xaa is C or S
XRPTQVQLSNITVQIMEIVRKKPIFIGEMSTLEDHLAX

SEQ ID NO: 23679 - protein, 39 aa, Artificial Sequence
  Cyclic GFR-binding peptide
  MOD_RES (3)..(37)..(39): Xaa is C or S
LEXVPTGQRSVKMAKVRIKPHQGQHKEVQVLEEHSQXEX

SEQ ID NO: 23680 - protein, 24 aa, Artificial Sequence
  Cyclic GFR-binding peptide
RSVKVAKVEIVRKKPIFKEVQVTL

SEQ ID NO: 23681 - protein, 30 aa, Artificial Sequence
  Cyclic GFR-binding peptide
PTQVQLSNITVQIMEIVRKKPIFIGEMSTL

SEQ ID NO: 23682 - protein, 34 aa, Artificial Sequence
  Cyclic GFR-binding peptide
  MOD_RES (4)..(4): Xaa is C or S
GLEXVPTGQSNITMQIMRIKPHQGQHIGEMSLEE

SEQ ID NO: 23683 - protein, 28 aa, Artificial Sequence
  Cyclic GFR-binding peptide
TGQSNITMQIMRIKPHQGQHIGEMSLEE

SEQ ID NO: 23684 - protein, 36 aa, Artificial Sequence
  Cyclic GFR-binding peptide
RPTQVQLSNITVQIMEIVRKKPIFIGEMSTLEDHLA

SEQ ID NO: 23685 - protein, 32 aa, Artificial Sequence
  Cyclic GFR-binding peptide
PTEERPVQMRKIRIKPHQGQHKKATVFLQHNK

SEQ ID NO: 23686 - protein, 38 aa, Artificial Sequence
  Cyclic GFR-binding peptide
  MOD_RES (5)..(5): Xaa is C or S
RNVQXRPTQVQLSNITVQIMEIVRKKPIFLGEMSTLED

SEQ ID NO: 23687 - protein, 30 aa, Artificial Sequence
  Cyclic GFR-binding peptide
  MOD_RES (3)..(3): Xaa is C or S
LEXVPTEERSVKMAKVRIKPHQGQHKEVQV

SEQ ID NO: 23688 - protein, 35 aa, Artificial Sequence
  Cyclic GFR-binding peptide
  MOD_RES (35)..(35): Xaa is C or S
TQVQLRSVKVAKVEIVRKKPIFKEVQVTLEDHLAX

SEQ ID NO: 23689 - protein, 29 aa, Artificial Sequence
  Cyclic GFR-binding peptide
VPTGQSNITMQIMRIKPHQGQHIGEMSLE

SEQ ID NO: 23690 - protein, 44 aa, Artificial Sequence
  Cyclic GFR-binding peptide
  MOD_RES (5)..(42)..(44): Xaa is C or S
SSVKXQPSRVHHSNITVQIMEYVRKKPKLLGEMSRLEEHLEXAX

SEQ ID NO: 23691 - protein, 30 aa, Artificial Sequence
  Cyclic GFR-binding peptide
HHRPVQVRKIEYVRKKPKLKKATVRLEEHL

SEQ ID NO: 23692 - protein, 37 aa, Artificial Sequence
  Cyclic GFR-binding peptide
  MOD_RES (6)..(6): Xaa is C or S
DEGLEXVPTEESNITMQIMRIKPHQGQHLGEMSFLQH

SEQ ID NO: 23693 - protein, 37 aa, Artificial Sequence
  Cyclic GFR-binding peptide
  MOD_RES (5)..(5): Xaa is C or S
RNVQXRPTQVQLSNITVQIMEIVRKKPIFLGEMSTLE

SEQ ID NO: 23694 - protein, 32 aa, Artificial Sequence
  Cyclic GFR-binding peptide
  MOD_RES (3)..(3): Xaa is C or S
VQXRPTQVQLSNITVQIMEIVRKKPIFIGEMS

SEQ ID NO: 23695 - protein, 30 aa, Artificial Sequence
  Cyclic GFR-binding peptide
  MOD_RES (3)..(3): Xaa is C or S
LEXVPTGQRSVKMAKVRIKPHQGQHKEVQV

SEQ ID NO: 23696 - protein, 42 aa, Artificial Sequence
  Cyclic GFR-binding peptide
  MOD_RES (7)..(41): Xaa is C or S
NDEGLEXVPTGQRSVKMAKVRIKPHQGQHKEVQVLEEHSQXE

SEQ ID NO: 23697 - protein, 36 aa, Artificial Sequence
  Cyclic GFR-binding peptide
  MOD_RES (6)..(6): Xaa is C or S
DEGLEXVPTGQRPVQMRKIRIKPHQGQHKKATVLEE

SEQ ID NO: 23698 - protein, 28 aa, Artificial Sequence
  Cyclic GFR-binding peptide
  MOD_RES (1)..(1): Xaa is C or S
XVPTEERSVKMAKVRIKPHQGQHKEVQV

SEQ ID NO: 23699 - protein, 29 aa, Artificial Sequence
  Cyclic GFR-binding peptide
RPTQVQLRSVKVAKVEIVRKKPIFKEVQV

SEQ ID NO: 23700 - protein, 34 aa, Artificial Sequence
  Cyclic GFR-binding peptide
RPTQVQLSNITVQIMEIVRKKPIFIGEMSTLEDH

SEQ ID NO: 23701 - protein, 36 aa, Artificial Sequence
  Cyclic GFR-binding peptide
  MOD_RES (2)..(36): Xaa is C or S
EXVPTGQRSVKMAKVRIKPHQGQHKEVQVLEEHSQX

SEQ ID NO: 23702 - protein, 35 aa, Artificial Sequence
  Cyclic GFR-binding peptide
  MOD_RES (32)..(34): Xaa is C or S
HHSNITVQIMEYVRKKPKLLGEMSRLEEHLEXAXA

SEQ ID NO: 23703 - protein, 33 aa, Artificial Sequence
  Cyclic GFR-binding peptide
  MOD_RES (30)..(32): Xaa is C or S
SNITVQIMEYVRKKPKLLGEMSRLEEHLEXAXA

SEQ ID NO: 23704 - protein, 31 aa, Artificial Sequence
  Cyclic GFR-binding peptide
  MOD_RES (29)..(31): Xaa is C or S
RPVQMRKIRIKPHQGQHKKATVLEEHSQXEX

SEQ ID NO: 23705 - protein, 39 aa, Artificial Sequence
  Cyclic GFR-binding peptide
  MOD_RES (4)..(38): Xaa is C or S
GLEXVPTGQRSVKMAKVRIKPHQGQHKEVQVLEEHSQXE

SEQ ID NO: 23706 - protein, 27 aa, Artificial Sequence
  Cyclic GFR-binding peptide
VPTEESNITMQIMRIKPHQGQHLGEMS

SEQ ID NO: 23707 - protein, 31 aa, Artificial Sequence
  Cyclic GFR-binding peptide
  MOD_RES (31)..(31): Xaa is C or S
GQRSVKMAKVRIKPHQGQHKEVQVLEEHSQX

SEQ ID NO: 23708 - protein, 37 aa, Artificial Sequence
  Cyclic GFR-binding peptide
  MOD_RES (5)..(5): Xaa is C or S
SSVKXQPSRVHHRPVQVRKIEYVRKKPKLKKATVRLE

SEQ ID NO: 23709 - protein, 26 aa, Artificial Sequence
  Cyclic GFR-binding peptide
HSNITVQIMEYVRKKPKLLGEMSRLE

SEQ ID NO: 23710 - protein, 36 aa, Artificial Sequence
  Cyclic GFR-binding peptide
  MOD_RES (33)..(35): Xaa is C or S
PTEESNITMQIMRIKPHQGQHLGEMSFLQHNKXEXR

SEQ ID NO: 23711 - protein, 34 aa, Artificial Sequence
  Cyclic GFR-binding peptide
  MOD_RES (5)..(5): Xaa is C or S
EGLEXVPTGQSNITMQIMRIKPHQGQHIGEMSLE

SEQ ID NO: 23712 - protein, 27 aa, Artificial Sequence
  Cyclic GFR-binding peptide
PTEERSVKMAKVRIKPHQGQHKEVQVF

SEQ ID NO: 23713 - protein, 33 aa, Artificial Sequence
  Cyclic GFR-binding peptide
  MOD_RES (6)..(6): Xaa is C or S
DEGLEXVPTEERSVKMAKVRIKPHQGQHKEVQV

SEQ ID NO: 23714 - protein, 34 aa, Artificial Sequence
  Cyclic GFR-binding peptide
  MOD_RES (2)..(2): Xaa is C or S
QXRPTQVQLSNITVQIMEIVRKKPIFIGEMSTLE

SEQ ID NO: 23715 - protein, 43 aa, Artificial Sequence
  Cyclic GFR-binding peptide
  MOD_RES (6)..(40)..(42): Xaa is C or S
DEGLEXVPTEERSVKMAKVRIKPHQGQHKEVQVFLQHNKXEXR

SEQ ID NO: 23716 - protein, 40 aa, Artificial Sequence
  Cyclic GFR-binding peptide
  MOD_RES (3)..(40): Xaa is C or S
VQXRPTQVQLSNITVQIMEIVRKKPIFLGEMSTLEDHLAX

SEQ ID NO: 23717 - protein, 33 aa, Artificial Sequence
  Cyclic GFR-binding peptide
  MOD_RES (4)..(4): Xaa is C or S
GLEXVPTEESNITMQIMRIKPHQGQHLGEMSFL

SEQ ID NO: 23718 - protein, 28 aa, Artificial Sequence
  Cyclic GFR-binding peptide
EERPVQMRKIRIKPHQGQHKKATVFLQH

SEQ ID NO: 23719 - protein, 33 aa, Artificial Sequence
  Cyclic GFR-binding peptide
VPTEERPVQMRKIRIKPHQGQHKKATVFLQHNK

SEQ ID NO: 23720 - protein, 36 aa, Artificial Sequence
  Cyclic GFR-binding peptide
  MOD_RES (35)..(35): Xaa is C or S
TQVQLRSVKVAKVEIVRKKPIFKEVQVTLEDHLAXK

SEQ ID NO: 23721 - protein, 30 aa, Artificial Sequence
  Cyclic GFR-binding peptide
  MOD_RES (1)..(1): Xaa is C or S
XRPTQVQLRSVKVAKVEIVRKKPIFKEVQV

SEQ ID NO: 23722 - protein, 30 aa, Artificial Sequence
  Cyclic GFR-binding peptide
  MOD_RES (2)..(2): Xaa is C or S
EXVPTGQRSVKMAKVRIKPHQGQHKEVQVL

SEQ ID NO: 23723 - protein, 27 aa, Artificial Sequence
  Cyclic GFR-binding peptide
SRVHHSNITVQIMEYVRKKPKLLGEMS

SEQ ID NO: 23724 - protein, 40 aa, Artificial Sequence
  Cyclic GFR-binding peptide
  MOD_RES (4)..(38)..(40): Xaa is C or S
GLEXVPTGQRPVQMRKIRIKPHQGQHKKATVLEEHSQXEX

SEQ ID NO: 23725 - protein, 40 aa, Artificial Sequence
  Cyclic GFR-binding peptide
  MOD_RES (5)..(39): Xaa is C or S
EGLEXVPTGQRSVKMAKVRIKPHQGQHKEVQVLEEHSQXE

SEQ ID NO: 23726 - protein, 30 aa, Artificial Sequence
  Cyclic GFR-binding peptide
  MOD_RES (30)..(30): Xaa is C or S
SNITVQIMEIVRKKPIFIGEMSTLEDHLAX

SEQ ID NO: 23727 - protein, 24 aa, Artificial Sequence
  Cyclic GFR-binding peptide
QLSNITVQIMEIVRKKPIFIGEMS

SEQ ID NO: 23728 - protein, 25 aa, Artificial Sequence
  Cyclic GFR-binding peptide
EERSVKMAKVRIKPHQGQHKEVQVF

SEQ ID NO: 23729 - protein, 35 aa, Artificial Sequence
  Cyclic GFR-binding peptide
  MOD_RES (6)..(6): Xaa is C or S
DEGLEXVPTGQRSVKMAKVRIKPHQGQHKEVQVLE

SEQ ID NO: 23730 - protein, 27 aa, Artificial Sequence
  Cyclic GFR-binding peptide
PTGQSNITMQIMRIKPHQGQHIGEMSL

SEQ ID NO: 23731 - protein, 30 aa, Artificial Sequence
  Cyclic GFR-binding peptide
  MOD_RES (30)..(30): Xaa is C or S
QSNITMQIMRIKPHQGQHIGEMSLEEHSQX

SEQ ID NO: 23732 - protein, 32 aa, Artificial Sequence
  Cyclic GFR-binding peptide
  MOD_RES (2)..(2): Xaa is C or S
KXQPSRVHHRPVQVRKIEYVRKKPKLKKATVR

SEQ ID NO: 23733 - protein, 31 aa, Artificial Sequence
  Cyclic GFR-binding peptide
QLRSVKVAKVEIVRKKPIFKEVQVTLEDHLA

SEQ ID NO: 23734 - protein, 39 aa, Artificial Sequence
  Cyclic GFR-binding peptide
  MOD_RES (7)..(7): Xaa is C or S
NDEGLEXVPTEERPVQMRKIRIKPHQGQHKKATVFLQHN

SEQ ID NO: 23735 - protein, 30 aa, Artificial Sequence
  Cyclic GFR-binding peptide
HHSNITVQIMEYVRKKPKLLGEMSRLEEHL

SEQ ID NO: 23736 - protein, 33 aa, Artificial Sequence
  Cyclic GFR-binding peptide
  MOD_RES (3)..(3): Xaa is C or S
VKXQPSRVHHSNITVQIMEYVRKKPKLLGEMSR

SEQ ID NO: 23737 - protein, 41 aa, Artificial Sequence
  Cyclic GFR-binding peptide
  MOD_RES (5)..(5): Xaa is C or S
SSVKXQPSRVHHSNITVQIMEYVRKKPKLLGEMSRLEEHLE

SEQ ID NO: 23738 - protein, 37 aa, Artificial Sequence
  Cyclic GFR-binding peptide
  MOD_RES (2)..(36): Xaa is C or S
EXVPTEESNITMQIMRIKPHQGQHLGEMSFLQHNKXE

SEQ ID NO: 23739 - protein, 29 aa, Artificial Sequence
  Cyclic GFR-binding peptide
VQLSNITVQIMEIVRKKPIFIGEMSTLED

SEQ ID NO: 23740 - protein, 39 aa, Artificial Sequence
  Cyclic GFR-binding peptide
  MOD_RES (7)..(7): Xaa is C or S
NDEGLEXVPTEERSVKMAKVRIKPHQGQHKEVQVFLQHN

SEQ ID NO: 23741 - protein, 34 aa, Artificial Sequence
  Cyclic GFR-binding peptide
  MOD_RES (31)..(33): Xaa is C or S
EERSVKMAKVRIKPHQGQHKEVQVFLQHNKXEXR

SEQ ID NO: 23742 - protein, 39 aa, Artificial Sequence
  Cyclic GFR-binding peptide
  MOD_RES (37)..(39): Xaa is C or S
QPSRVHHSNITVQIMEYVRKKPKLIGEMSRLEEHLEXAX

SEQ ID NO: 23743 - protein, 31 aa, Artificial Sequence
  Cyclic GFR-binding peptide
  MOD_RES (3)..(3): Xaa is C or S
LEXVPTGQSNITMQIMRIKPHQGQHIGEMSL

SEQ ID NO: 23744 - protein, 38 aa, Artificial Sequence
  Cyclic GFR-binding peptide
  MOD_RES (6)..(6): Xaa is C or S
DEGLEXVPTGQRSVKMAKVRIKPHQGQHKEVQVLEEHS

SEQ ID NO: 23745 - protein, 32 aa, Artificial Sequence
  Cyclic GFR-binding peptide
  MOD_RES (31)..(31): Xaa is C or S
GQRPVQMRKIRIKPHQGQHKKATVLEEHSQXE

SEQ ID NO: 23746 - protein, 32 aa, Artificial Sequence
  Cyclic GFR-binding peptide
PTEESNITMQIMRIKPHQGQHLGEMSFLQHNK

SEQ ID NO: 23747 - protein, 33 aa, Artificial Sequence
  Cyclic GFR-binding peptide
  MOD_RES (30)..(32): Xaa is C or S
RPVQVRKIEYVRKKPKLKKATVRLEEHLEXAXA

SEQ ID NO: 23748 - protein, 37 aa, Artificial Sequence
  Cyclic GFR-binding peptide
  MOD_RES (36)..(36): Xaa is C or S
PSRVHHRPVQVRKIEYVRKKPKLKKATVRLEEHLEXA

SEQ ID NO: 23749 - protein, 33 aa, Artificial Sequence
  Cyclic GFR-binding peptide
  MOD_RES (32)..(32): Xaa is C or S
HHRPVQVRKIEYVRKKPKLKKATVRLEEHLEXA

SEQ ID NO: 23750 - protein, 27 aa, Artificial Sequence
  Cyclic GFR-binding peptide
SNITVQIMEIVRKKPIFLGEMSTLEDH

SEQ ID NO: 23751 - protein, 30 aa, Artificial Sequence
  Cyclic GFR-binding peptide
TEERSVKMAKVRIKPHQGQHKEVQVFLQHN

SEQ ID NO: 23752 - protein, 43 aa, Artificial Sequence
  Cyclic GFR-binding peptide
  MOD_RES (3)..(40)..(42): Xaa is C or S
VKXQPSRVHHSNITVQIMEYVRKKPKLIGEMSRLEEHLEXAXA

SEQ ID NO: 23753 - protein, 34 aa, Artificial Sequence
  Cyclic GFR-binding peptide
  MOD_RES (33)..(33): Xaa is C or S
VHHRPVQVRKIEYVRKKPKLKKATVRLEEHLEXA

SEQ ID NO: 23754 - protein, 37 aa, Artificial Sequence
  Cyclic GFR-binding peptide
  MOD_RES (36)..(36): Xaa is C or S
PSRVHHSNITVQIMEYVRKKPKLLGEMSRLEEHLEXA

SEQ ID NO: 23755 - protein, 30 aa, Artificial Sequence
  Cyclic GFR-binding peptide
TEERPVQMRKIRIKPHQGQHKKATVFLQHN

SEQ ID NO: 23756 - protein, 35 aa, Artificial Sequence
  Cyclic GFR-binding peptide
  MOD_RES (5)..(5): Xaa is C or S
RNVQXRPTQVQLSNITVQIMEIVRKKPIFIGEMST

SEQ ID NO: 23757 - protein, 33 aa, Artificial Sequence
  Cyclic GFR-binding peptide
  MOD_RES (3)..(3): Xaa is C or S
LEXVPTEERPVQMRKIRIKPHQGQHKKATVFLQ

SEQ ID NO: 23758 - protein, 25 aa, Artificial Sequence
  Cyclic GFR-binding peptide
VHHRPVQVRKIEYVRKKPKLKKATV

SEQ ID NO: 23759 - protein, 30 aa, Artificial Sequence
  Cyclic GFR-binding peptide
  MOD_RES (1)..(1): Xaa is C or S
XQPSRVHHSNITVQIMEYVRKKPKLIGEMS

SEQ ID NO: 23760 - protein, 40 aa, Artificial Sequence
  Cyclic GFR-binding peptide
  MOD_RES (3)..(40): Xaa is C or S
VKXQPSRVHHSNITVQIMEYVRKKPKLIGEMSRLEEHLEX

SEQ ID NO: 23761 - protein, 30 aa, Artificial Sequence
  Cyclic GFR-binding peptide
SRVHHSNITVQIMEYVRKKPKLIGEMSRLE

SEQ ID NO: 23762 - protein, 30 aa, Artificial Sequence
  Cyclic GFR-binding peptide
  MOD_RES (1)..(1): Xaa is C or S
XVPTGQSNITMQIMRIKPHQGQHIGEMSLE

SEQ ID NO: 23763 - protein, 34 aa, Artificial Sequence
  Cyclic GFR-binding peptide
  MOD_RES (32)..(34): Xaa is C or S
TEESNITMQIMRIKPHQGQHLGEMSFLQHNKXEX

SEQ ID NO: 23764 - protein, 35 aa, Artificial Sequence
  Cyclic GFR-binding peptide
  MOD_RES (32)..(34): Xaa is C or S
HHRPVQVRKIEYVRKKPKLKKATVRLEEHLEXAXA

SEQ ID NO: 23765 - protein, 39 aa, Artificial Sequence
  Cyclic GFR-binding peptide
  MOD_RES (5)..(5): Xaa is C or S
RNVQXRPTQVQLSNITVQIMEIVRKKPIFLGEMSTLEDH

SEQ ID NO: 23766 - protein, 24 aa, Artificial Sequence
  Cyclic GFR-binding peptide
RPVQMRKIRIKPHQGQHKKATVFL

SEQ ID NO: 23767 - protein, 41 aa, Artificial Sequence
  Cyclic GFR-binding peptide
  MOD_RES (6)..(40): Xaa is C or S
DEGLEXVPTGQSNITMQIMRIKPHQGQHIGEMSLEEHSQXE

SEQ ID NO: 23768 - protein, 34 aa, Artificial Sequence
  Cyclic GFR-binding peptide
  MOD_RES (31)..(33): Xaa is C or S
HSNITVQIMEYVRKKPKLIGEMSRLEEHLEXAXA

SEQ ID NO: 23769 - protein, 33 aa, Artificial Sequence
  Cyclic GFR-binding peptide
  MOD_RES (2)..(2): Xaa is C or S
QXRPTQVQLRSVKVAKVEIVRKKPIFKEVQVTL

SEQ ID NO: 23770 - protein, 31 aa, Artificial Sequence
  Cyclic GFR-binding peptide
  MOD_RES (31)..(31): Xaa is C or S
HRPVQVRKIEYVRKKPKLKKATVRLEEHLEX

SEQ ID NO: 23771 - protein, 38 aa, Artificial Sequence
  Cyclic GFR-binding peptide
  MOD_RES (6)..(6): Xaa is C or S
DEGLEXVPTEESNITMQIMRIKPHQGQHLGEMSFLQHN

SEQ ID NO: 23772 - protein, 26 aa, Artificial Sequence
  Cyclic GFR-binding peptide
RSVKMAKVRIKPHQGQHKEVQVFLQH

SEQ ID NO: 23773 - protein, 33 aa, Artificial Sequence
  Cyclic GFR-binding peptide
  MOD_RES (2)..(2): Xaa is C or S
EXVPTEERPVQMRKIRIKPHQGQHKKATVFLQH

SEQ ID NO: 23774 - protein, 35 aa, Artificial Sequence
  Cyclic GFR-binding peptide
  MOD_RES (3)..(3): Xaa is C or S
LEXVPTEESNITMQIMRIKPHQGQHLGEMSFLQHN

SEQ ID NO: 23775 - protein, 30 aa, Artificial Sequence
  Cyclic GFR-binding peptide
EERSVKMAKVRIKPHQGQHKEVQVFLQHNK

SEQ ID NO: 23776 - protein, 39 aa, Artificial Sequence
  Cyclic GFR-binding peptide
  MOD_RES (5)..(39): Xaa is C or S
EGLEXVPTEERPVQMRKIRIKPHQGQHKKATVFLQHNKX

SEQ ID NO: 23777 - protein, 41 aa, Artificial Sequence
  Cyclic GFR-binding peptide
  MOD_RES (5)..(39)..(41): Xaa is C or S
EGLEXVPTGQRPVQMRKIRIKPHQGQHKKATVLEEHSQXEX

SEQ ID NO: 23778 - protein, 37 aa, Artificial Sequence
  Cyclic GFR-binding peptide
  MOD_RES (1)..(1): Xaa is C or S
XRPTQVQLSNITVQIMEIVRKKPIFIGEMSTLEDHLA

SEQ ID NO: 23779 - protein, 29 aa, Artificial Sequence
  Cyclic GFR-binding peptide
LSNITVQIMEIVRKKPIFIGEMSTLEDHL

SEQ ID NO: 23780 - protein, 42 aa, Artificial Sequence
  Cyclic GFR-binding peptide
  MOD_RES (6)..(40)..(42): Xaa is C or S
DEGLEXVPTEESNITMQIMRIKPHQGQHLGEMSFLQHNKXEX

SEQ ID NO: 23781 - protein, 38 aa, Artificial Sequence
  Cyclic GFR-binding peptide
  MOD_RES (4)..(4): Xaa is C or S
SVKXQPSRVHHSNITVQIMEYVRKKPKLLGEMSRLEEH

SEQ ID NO: 23782 - protein, 23 aa, Artificial Sequence
  Cyclic GFR-binding peptide
QSNITMQIMRIKPHQGQHIGEMS

SEQ ID NO: 23783 - protein, 33 aa, Artificial Sequence
  Cyclic GFR-binding peptide
  MOD_RES (3)..(3): Xaa is C or S
VQXRPTQVQLSNITVQIMEIVRKKPIFLGEMST

SEQ ID NO: 23784 - protein, 38 aa, Artificial Sequence
  Cyclic GFR-binding peptide
  MOD_RES (36)..(38): Xaa is C or S
PTQVQLRSVKVAKVEIVRKKPIFKEVQVTLEDHLAXKX

SEQ ID NO: 23785 - protein, 41 aa, Artificial Sequence
  Cyclic GFR-binding peptide
  MOD_RES (3)..(40): Xaa is C or S
VQXRPTQVQLSNITVQIMEIVRKKPIFLGEMSTLEDHLAXK

SEQ ID NO: 23786 - protein, 35 aa, Artificial Sequence
  Cyclic GFR-binding peptide
  MOD_RES (4)..(4): Xaa is C or S
GLEXVPTEERPVQMRKIRIKPHQGQHKKATVFLQH

SEQ ID NO: 23787 - protein, 40 aa, Artificial Sequence
  Cyclic GFR-binding peptide
  MOD_RES (37)..(39): Xaa is C or S
QPSRVHHSNITVQIMEYVRKKPKLIGEMSRLEEHLEXAXA

SEQ ID NO: 23788 - protein, 31 aa, Artificial Sequence
  Cyclic GFR-binding peptide
HHSNITVQIMEYVRKKPKLIGEMSRLEEHLE

SEQ ID NO: 23789 - protein, 30 aa, Artificial Sequence
  Cyclic GFR-binding peptide
LSNITVQIMEIVRKKPIFIGEMSTLEDHLA

SEQ ID NO: 23790 - protein, 37 aa, Artificial Sequence
  Cyclic GFR-binding peptide
  MOD_RES (37)..(37): Xaa is C or S
QPSRVHHSNITVQIMEYVRKKPKLLGEMSRLEEHLEX

SEQ ID NO: 23791 - protein, 40 aa, Artificial Sequence
  Cyclic GFR-binding peptide
  MOD_RES (6)..(40): Xaa is C or S
DEGLEXVPTEERPVQMRKIRIKPHQGQHKKATVFLQHNKX

SEQ ID NO: 23792 - protein, 33 aa, Artificial Sequence
  Cyclic GFR-binding peptide
  MOD_RES (31)..(33): Xaa is C or S
LSNITVQIMEIVRKKPIFIGEMSTLEDHLAXKX

SEQ ID NO: 23793 - protein, 27 aa, Artificial Sequence
  Cyclic GFR-binding peptide
TGQSNITMQIMRIKPHQGQHIGEMSLE

SEQ ID NO: 23794 - protein, 38 aa, Artificial Sequence
  Cyclic GFR-binding peptide
  MOD_RES (2)..(36)..(38): Xaa is C or S
EXVPTGQRSVKMAKVRIKPHQGQHKEVQVLEEHSQXEX

SEQ ID NO: 23795 - protein, 36 aa, Artificial Sequence
  Cyclic GFR-binding peptide
  MOD_RES (33)..(35): Xaa is C or S
VHHSNITVQIMEYVRKKPKLIGEMSRLEEHLEXAXA

SEQ ID NO: 23796 - protein, 41 aa, Artificial Sequence
  Cyclic GFR-binding peptide
  MOD_RES (4)..(38)..(40): Xaa is C or S
GLEXVPTGQSNITMQIMRIKPHQGQHIGEMSLEEHSQXEXR

SEQ ID NO: 23797 - protein, 30 aa, Artificial Sequence
  Cyclic GFR-binding peptide
PTEESNITMQIMRIKPHQGQHLGEMSFLQH

SEQ ID NO: 23798 - protein, 42 aa, Artificial Sequence
  Cyclic GFR-binding peptide
  MOD_RES (3)..(40)..(42): Xaa is C or S
VKXQPSRVHHSNITVQIMEYVRKKPKLIGEMSRLEEHLEXAX

SEQ ID NO: 23799 - protein, 37 aa, Artificial Sequence
  Cyclic GFR-binding peptide
  MOD_RES (4)..(4): Xaa is C or S
NVQXRPTQVQLSNITVQIMEIVRKKPIFIGEMSTLED

SEQ ID NO: 23800 - protein, 37 aa, Artificial Sequence
  Cyclic GFR-binding peptide
  MOD_RES (1)..(35)..(37): Xaa is C or S
XVPTGQRSVKMAKVRIKPHQGQHKEVQVLEEHSQXEX

SEQ ID NO: 23801 - protein, 26 aa, Artificial Sequence
  Cyclic GFR-binding peptide
RPVQMRKIRIKPHQGQHKKATVFLQH

SEQ ID NO: 23802 - protein, 39 aa, Artificial Sequence
  Cyclic GFR-binding peptide
  MOD_RES (4)..(4): Xaa is C or S
NVQXRPTQVQLSNITVQIMEIVRKKPIFLGEMSTLEDHL

SEQ ID NO: 23803 - protein, 30 aa, Artificial Sequence
  Cyclic GFR-binding peptide
VPTGQRSVKMAKVRIKPHQGQHKEVQVLEE

SEQ ID NO: 23804 - protein, 42 aa, Artificial Sequence
  Cyclic GFR-binding peptide
  MOD_RES (2)..(39)..(41): Xaa is C or S
KXQPSRVHHSNITVQIMEYVRKKPKLLGEMSRLEEHLEXAXA

SEQ ID NO: 23805 - protein, 29 aa, Artificial Sequence
  Cyclic GFR-binding peptide
  MOD_RES (2)..(2): Xaa is C or S
EXVPTEERPVQMRKIRIKPHQGQHKKATV

SEQ ID NO: 23806 - protein, 23 aa, Artificial Sequence
  Cyclic GFR-binding peptide
HSNITVQIMEYVRKKPKLIGEMS

SEQ ID NO: 23807 - protein, 23 aa, Artificial Sequence
  Cyclic GFR-binding peptide
SNITVQIMEIVRKKPIFLGEMST

SEQ ID NO: 23808 - protein, 42 aa, Artificial Sequence
  Cyclic GFR-binding peptide
  MOD_RES (7)..(41): Xaa is C or S
NDEGLEXVPTEERSVKMAKVRIKPHQGQHKEVQVFLQHNKXE

SEQ ID NO: 23809 - protein, 31 aa, Artificial Sequence
  Cyclic GFR-binding peptide
  MOD_RES (2)..(2): Xaa is C or S
EXVPTGQSNITMQIMRIKPHQGQHIGEMSLE

SEQ ID NO: 23810 - protein, 37 aa, Artificial Sequence
  Cyclic GFR-binding peptide
  MOD_RES (37)..(37): Xaa is C or S
RPTQVQLSNITVQIMEIVRKKPIFLGEMSTLEDHLAX

SEQ ID NO: 23811 - protein, 34 aa, Artificial Sequence
  Cyclic GFR-binding peptide
  MOD_RES (4)..(4): Xaa is C or S
NVQXRPTQVQLRSVKVAKVEIVRKKPIFKEVQVT

SEQ ID NO: 23812 - protein, 26 aa, Artificial Sequence
  Cyclic GFR-binding peptide
ERSVKMAKVRIKPHQGQHKEVQVFLQ

SEQ ID NO: 23813 - protein, 38 aa, Artificial Sequence
  Cyclic GFR-binding peptide
  MOD_RES (36)..(38): Xaa is C or S
PSRVHHRPVQVRKIEYVRKKPKLKKATVRLEEHLEXAX

SEQ ID NO: 23814 - protein, 31 aa, Artificial Sequence
  Cyclic GFR-binding peptide
  MOD_RES (4)..(4): Xaa is C or S
GLEXVPTEERSVKMAKVRIKPHQGQHKEVQV

SEQ ID NO: 23815 - protein, 38 aa, Artificial Sequence
  Cyclic GFR-binding peptide
  MOD_RES (6)..(6): Xaa is C or S
DEGLEXVPTGQSNITMQIMRIKPHQGQHIGEMSLEEHS

SEQ ID NO: 23816 - protein, 40 aa, Artificial Sequence
  Cyclic GFR-binding peptide
  MOD_RES (6)..(40): Xaa is C or S
DEGLEXVPTGQRSVKMAKVRIKPHQGQHKEVQVLEEHSQX

SEQ ID NO: 23817 - protein, 25 aa, Artificial Sequence
  Cyclic GFR-binding peptide
SNITVQIMEIVRKKPIFLGEMSTLE

SEQ ID NO: 23818 - protein, 29 aa, Artificial Sequence
  Cyclic GFR-binding peptide
VQLSNITVQIMEIVRKKPIFLGEMSTLED

SEQ ID NO: 23819 - protein, 39 aa, Artificial Sequence
  Cyclic GFR-binding peptide
  MOD_RES (36)..(38): Xaa is C or S
PTQVQLRSVKVAKVEIVRKKPIFKEVQVTLEDHLAXKXE

SEQ ID NO: 23820 - protein, 39 aa, Artificial Sequence
  Cyclic GFR-binding peptide
  MOD_RES (1)..(38): Xaa is C or S
XQPSRVHHSNITVQIMEYVRKKPKLIGEMSRLEEHLEXA

SEQ ID NO: 23821 - protein, 35 aa, Artificial Sequence
  Cyclic GFR-binding peptide
  MOD_RES (6)..(6): Xaa is C or S
DEGLEXVPTEERSVKMAKVRIKPHQGQHKEVQVFL

SEQ ID NO: 23822 - protein, 37 aa, Artificial Sequence
  Cyclic GFR-binding peptide
  MOD_RES (3)..(37): Xaa is C or S
LEXVPTEESNITMQIMRIKPHQGQHLGEMSFLQHNKX

SEQ ID NO: 23823 - protein, 43 aa, Artificial Sequence
  Cyclic GFR-binding peptide
  MOD_RES (3)..(40)..(42): Xaa is C or S
VQXRPTQVQLSNITVQIMEIVRKKPIFLGEMSTLEDHLAXKXE

SEQ ID NO: 23824 - protein, 24 aa, Artificial Sequence
  Cyclic GFR-binding peptide
QSNITMQIMRIKPHQGQHIGEMSL

SEQ ID NO: 23825 - protein, 39 aa, Artificial Sequence
  Cyclic GFR-binding peptide
  MOD_RES (5)..(39): Xaa is C or S
EGLEXVPTEERSVKMAKVRIKPHQGQHKEVQVFLQHNKX

SEQ ID NO: 23826 - protein, 32 aa, Artificial Sequence
  Cyclic GFR-binding peptide
  MOD_RES (31)..(31): Xaa is C or S
LSNITVQIMEIVRKKPIFIGEMSTLEDHLAXK

SEQ ID NO: 23827 - protein, 32 aa, Artificial Sequence
  Cyclic GFR-binding peptide
  MOD_RES (4)..(4): Xaa is C or S
GLEXVPTEESNITMQIMRIKPHQGQHLGEMSF

SEQ ID NO: 23828 - protein, 33 aa, Artificial Sequence
  Cyclic GFR-binding peptide
  MOD_RES (3)..(3): Xaa is C or S
LEXVPTEESNITMQIMRIKPHQGQHLGEMSFLQ

SEQ ID NO: 23829 - protein, 35 aa, Artificial Sequence
  Cyclic GFR-binding peptide
  MOD_RES (6)..(6): Xaa is C or S
DEGLEXVPTGQRPVQMRKIRIKPHQGQHKKATVLE

SEQ ID NO: 23830 - protein, 39 aa, Artificial Sequence
  Cyclic GFR-binding peptide
  MOD_RES (4)..(4): Xaa is C or S
SVKXQPSRVHHSNITVQIMEYVRKKPKLLGEMSRLEEHL

SEQ ID NO: 23831 - protein, 29 aa, Artificial Sequence
  Cyclic GFR-binding peptide
SNITVQIMEIVRKKPIFIGEMSTLEDHLA

SEQ ID NO: 23832 - protein, 27 aa, Artificial Sequence
  Cyclic GFR-binding peptide
LRSVKVAKVEIVRKKPIFKEVQVTLED

SEQ ID NO: 23833 - protein, 38 aa, Artificial Sequence
  Cyclic GFR-binding peptide
  MOD_RES (2)..(36)..(38): Xaa is C or S
EXVPTEERSVKMAKVRIKPHQGQHKEVQVFLQHNKXEX

SEQ ID NO: 23834 - protein, 38 aa, Artificial Sequence
  Cyclic GFR-binding peptide
  MOD_RES (37)..(37): Xaa is C or S
RPTQVQLSNITVQIMEIVRKKPIFLGEMSTLEDHLAXK

SEQ ID NO: 23835 - protein, 28 aa, Artificial Sequence
  Cyclic GFR-binding peptide
EESNITMQIMRIKPHQGQHLGEMSFLQH

SEQ ID NO: 23836 - protein, 35 aa, Artificial Sequence
  Cyclic GFR-binding peptide
  MOD_RES (4)..(4): Xaa is C or S
GLEXVPTGQSNITMQIMRIKPHQGQHIGEMSLEEH

SEQ ID NO: 23837 - protein, 37 aa, Artificial Sequence
  Cyclic GFR-binding peptide
  MOD_RES (5)..(5): Xaa is C or S
RNVQXRPTQVQLSNITVQIMEIVRKKPIFIGEMSTLE

SEQ ID NO: 23838 - protein, 39 aa, Artificial Sequence
  Cyclic GFR-binding peptide
  MOD_RES (4)..(38): Xaa is C or S
GLEXVPTEERSVKMAKVRIKPHQGQHKEVQVFLQHNKXE

SEQ ID NO: 23839 - protein, 23 aa, Artificial Sequence
  Cyclic GFR-binding peptide
SNITMQIMRIKPHQGQHIGEMSL

SEQ ID NO: 23840 - protein, 36 aa, Artificial Sequence
  Cyclic GFR-binding peptide
  MOD_RES (5)..(5): Xaa is C or S
EGLEXVPTEESNITMQIMRIKPHQGQHLGEMSFLQH

SEQ ID NO: 23841 - protein, 25 aa, Artificial Sequence
  Cyclic GFR-binding peptide
GQRSVKMAKVRIKPHQGQHKEVQVL

SEQ ID NO: 23842 - protein, 31 aa, Artificial Sequence
  Cyclic GFR-binding peptide
TQVQLSNITVQIMEIVRKKPIFLGEMSTLED

SEQ ID NO: 23843 - protein, 38 aa, Artificial Sequence
  Cyclic GFR-binding peptide
  MOD_RES (35)..(37): Xaa is C or S
SRVHHRPVQVRKIEYVRKKPKLKKATVRLEEHLEXAXA

SEQ ID NO: 23844 - protein, 35 aa, Artificial Sequence
  Cyclic GFR-binding peptide
  MOD_RES (4)..(4): Xaa is C or S
GLEXVPTEERSVKMAKVRIKPHQGQHKEVQVFLQH

SEQ ID NO: 23845 - protein, 40 aa, Artificial Sequence
  Cyclic GFR-binding peptide
  MOD_RES (3)..(40): Xaa is C or S
VKXQPSRVHHSNITVQIMEYVRKKPKLLGEMSRLEEHLEX

SEQ ID NO: 23846 - protein, 29 aa, Artificial Sequence
  Cyclic GFR-binding peptide
QLSNITVQIMEIVRKKPIFIGEMSTLEDH

SEQ ID NO: 23847 - protein, 27 aa, Artificial Sequence
  Cyclic GFR-binding peptide
EESNITMQIMRIKPHQGQHLGEMSFLQ

SEQ ID NO: 23848 - protein, 36 aa, Artificial Sequence
  Cyclic GFR-binding peptide
  MOD_RES (33)..(35): Xaa is C or S
VHHSNITVQIMEYVRKKPKLLGEMSRLEEHLEXAXA

SEQ ID NO: 23849 - protein, 25 aa, Artificial Sequence
  Cyclic GFR-binding peptide
LSNITVQIMEIVRKKPIFLGEMSTL

SEQ ID NO: 23850 - protein, 37 aa, Artificial Sequence
  Cyclic GFR-binding peptide
  MOD_RES (1)..(35)..(37): Xaa is C or S
XVPTGQSNITMQIMRIKPHQGQHIGEMSLEEHSQXEX

SEQ ID NO: 23851 - protein, 23 aa, Artificial Sequence
  Cyclic GFR-binding peptide
QRSVKMAKVRIKPHQGQHKEVQV

SEQ ID NO: 23852 - protein, 31 aa, Artificial Sequence
  Cyclic GFR-binding peptide
  MOD_RES (1)..(1): Xaa is C or S
XVPTGQSNITMQIMRIKPHQGQHIGEMSLEE

SEQ ID NO: 23853 - protein, 39 aa, Artificial Sequence
  Cyclic GFR-binding peptide
  MOD_RES (6)..(6): Xaa is C or S
DEGLEXVPTEERPVQMRKIRIKPHQGQHKKATVFLQHNK

SEQ ID NO: 23854 - protein, 25 aa, Artificial Sequence
  Cyclic GFR-binding peptide
SNITVQIMEYVRKKPKLIGEMSRLE

SEQ ID NO: 23855 - protein, 41 aa, Artificial Sequence
  Cyclic GFR-binding peptide
  MOD_RES (3)..(40): Xaa is C or S
VKXQPSRVHHSNITVQIMEYVRKKPKLLGEMSRLEEHLEXA

SEQ ID NO: 23856 - protein, 29 aa, Artificial Sequence
  Cyclic GFR-binding peptide
  MOD_RES (29)..(29): Xaa is C or S
SNITMQIMRIKPHQGQHLGEMSFLQHNKX

SEQ ID NO: 23857 - protein, 26 aa, Artificial Sequence
  Cyclic GFR-binding peptide
QLSNITVQIMEIVRKKPIFLGEMSTL

SEQ ID NO: 23858 - protein, 32 aa, Artificial Sequence
  Cyclic GFR-binding peptide
  MOD_RES (32)..(32): Xaa is C or S
QLRSVKVAKVEIVRKKPIFKEVQVTLEDHLAX

SEQ ID NO: 23859 - protein, 39 aa, Artificial Sequence
  Cyclic GFR-binding peptide
  MOD_RES (37)..(39): Xaa is C or S
RPTQVQLSNITVQIMEIVRKKPIFIGEMSTLEDHLAXKX

SEQ ID NO: 23860 - protein, 33 aa, Artificial Sequence
  Cyclic GFR-binding peptide
  MOD_RES (2)..(2): Xaa is C or S
KXQPSRVHHSNITVQIMEYVRKKPKLIGEMSRL

SEQ ID NO: 23861 - protein, 43 aa, Artificial Sequence
  Cyclic GFR-binding peptide
  MOD_RES (4)..(41)..(43): Xaa is C or S
NVQXRPTQVQLSNITVQIMEIVRKKPIFIGEMSTLEDHLAXKX

SEQ ID NO: 23862 - protein, 33 aa, Artificial Sequence
  Cyclic GFR-binding peptide
VPTGQRSVKMAKVRIKPHQGQHKEVQVLEEHSQ

SEQ ID NO: 23863 - protein, 44 aa, Artificial Sequence
  Cyclic GFR-binding peptide
  MOD_RES (5)..(42)..(44): Xaa is C or S
RNVQXRPTQVQLSNITVQIMEIVRKKPIFIGEMSTLEDHLAXKX

SEQ ID NO: 23864 - protein, 44 aa, Artificial Sequence
  Cyclic GFR-binding peptide
  MOD_RES (5)..(42)..(44): Xaa is C or S
RNVQXRPTQVQLSNITVQIMEIVRKKPIFLGEMSTLEDHLAXKX

SEQ ID NO: 23865 - protein, 38 aa, Artificial Sequence
  Cyclic GFR-binding peptide
  MOD_RES (35)..(37): Xaa is C or S
TQVQLSNITVQIMEIVRKKPIFLGEMSTLEDHLAXKXE

SEQ ID NO: 23866 - protein, 33 aa, Artificial Sequence
  Cyclic GFR-binding peptide
VPTGQSNITMQIMRIKPHQGQHIGEMSLEEHSQ

SEQ ID NO: 23867 - protein, 35 aa, Artificial Sequence
  Cyclic GFR-binding peptide
  MOD_RES (1)..(35): Xaa is C or S
XVPTEERPVQMRKIRIKPHQGQHKKATVFLQHNKX

SEQ ID NO: 23868 - protein, 34 aa, Artificial Sequence
  Cyclic GFR-binding peptide
  MOD_RES (32)..(34): Xaa is C or S
QLRSVKVAKVEIVRKKPIFKEVQVTLEDHLAXKX

SEQ ID NO: 23869 - protein, 33 aa, Artificial Sequence
  Cyclic GFR-binding peptide
  MOD_RES (32)..(32): Xaa is C or S
QLSNITVQIMEIVRKKPIFLGEMSTLEDHLAXK

SEQ ID NO: 23870 - protein, 39 aa, Artificial Sequence
  Cyclic GFR-binding peptide
  MOD_RES (36)..(38): Xaa is C or S
PSRVHHSNITVQIMEYVRKKPKLIGEMSRLEEHLEXAXA

SEQ ID NO: 23871 - protein, 31 aa, Artificial Sequence
  Cyclic GFR-binding peptide
RVHHSNITVQIMEYVRKKPKLLGEMSRLEEH

SEQ ID NO: 23872 - protein, 37 aa, Artificial Sequence
  Cyclic GFR-binding peptide
  MOD_RES (2)..(36): Xaa is C or S
EXVPTGQSNITMQIMRIKPHQGQHIGEMSLEEHSQXE

SEQ ID NO: 23873 - protein, 27 aa, Artificial Sequence
  Cyclic GFR-binding peptide
QRPVQMRKIRIKPHQGQHKKATVLEEH

SEQ ID NO: 23874 - protein, 30 aa, Artificial Sequence
  Cyclic GFR-binding peptide
HHSNITVQIMEYVRKKPKLIGEMSRLEEHL

SEQ ID NO: 23875 - protein, 34 aa, Artificial Sequence
  Cyclic GFR-binding peptide
  MOD_RES (1)..(1): Xaa is C or S
XVPTGQSNITMQIMRIKPHQGQHIGEMSLEEHSQ

SEQ ID NO: 23876 - protein, 32 aa, Artificial Sequence
  Cyclic GFR-binding peptide
  MOD_RES (1)..(1): Xaa is C or S
XRPTQVQLSNITVQIMEIVRKKPIFIGEMSTL

SEQ ID NO: 23877 - protein, 37 aa, Artificial Sequence
  Cyclic GFR-binding peptide
  MOD_RES (5)..(5): Xaa is C or S
EGLEXVPTGQRPVQMRKIRIKPHQGQHKKATVLEEHS

SEQ ID NO: 23878 - protein, 33 aa, Artificial Sequence
  Cyclic GFR-binding peptide
  MOD_RES (1)..(1): Xaa is C or S
XRPTQVQLSNITVQIMEIVRKKPIFLGEMSTLE

SEQ ID NO: 23879 - protein, 32 aa, Artificial Sequence
  Cyclic GFR-binding peptide
  MOD_RES (32)..(32): Xaa is C or S
TGQRPVQMRKIRIKPHQGQHKKATVLEEHSQX

SEQ ID NO: 23880 - protein, 38 aa, Artificial Sequence
  Cyclic GFR-binding peptide
  MOD_RES (35)..(37): Xaa is C or S
TQVQLSNITVQIMEIVRKKPIFIGEMSTLEDHLAXKXE

SEQ ID NO: 23881 - protein, 30 aa, Artificial Sequence
  Cyclic GFR-binding peptide
  MOD_RES (3)..(3): Xaa is C or S
LEXVPTGQSNITMQIMRIKPHQGQHIGEMS

SEQ ID NO: 23882 - protein, 29 aa, Artificial Sequence
  Cyclic GFR-binding peptide
ESNITMQIMRIKPHQGQHLGEMSFLQHNK

SEQ ID NO: 23883 - protein, 32 aa, Artificial Sequence
  Cyclic GFR-binding peptide
VPTGQSNITMQIMRIKPHQGQHIGEMSLEEHS

SEQ ID NO: 23884 - protein, 38 aa, Artificial Sequence
  Cyclic GFR-binding peptide
  MOD_RES (2)..(36)..(38): Xaa is C or S
EXVPTGQSNITMQIMRIKPHQGQHIGEMSLEEHSQXEX

SEQ ID NO: 23885 - protein, 35 aa, Artificial Sequence
  Cyclic GFR-binding peptide
  MOD_RES (32)..(34): Xaa is C or S
TGQSNITMQIMRIKPHQGQHIGEMSLEEHSQXEXR

SEQ ID NO: 23886 - protein, 39 aa, Artificial Sequence
  Cyclic GFR-binding peptide
  MOD_RES (3)..(3): Xaa is C or S
VKXQPSRVHHSNITVQIMEYVRKKPKLIGEMSRLEEHLE

SEQ ID NO: 23887 - protein, 27 aa, Artificial Sequence
  Cyclic GFR-binding peptide
TEERPVQMRKIRIKPHQGQHKKATVFL

SEQ ID NO: 23888 - protein, 36 aa, Artificial Sequence
  Cyclic GFR-binding peptide
  MOD_RES (4)..(4): Xaa is C or S
GLEXVPTEERSVKMAKVRIKPHQGQHKEVQVFLQHN

SEQ ID NO: 23889 - protein, 33 aa, Artificial Sequence
  Cyclic GFR-binding peptide
  MOD_RES (4)..(4): Xaa is C or S
GLEXVPTGQRPVQMRKIRIKPHQGQHKKATVLE

SEQ ID NO: 23890 - protein, 25 aa, Artificial Sequence
  Cyclic GFR-binding peptide
QLSNITVQIMEIVRKKPIFIGEMST

SEQ ID NO: 23891 - protein, 28 aa, Artificial Sequence
  Cyclic GFR-binding peptide
VPTGQRPVQMRKIRIKPHQGQHKKATVL

SEQ ID NO: 23892 - protein, 31 aa, Artificial Sequence
  Cyclic GFR-binding peptide
SRVHHRPVQVRKIEYVRKKPKLKKATVRLEE

SEQ ID NO: 23893 - protein, 37 aa, Artificial Sequence
  Cyclic GFR-binding peptide
  MOD_RES (1)..(35)..(37): Xaa is C or S
XVPTEERSVKMAKVRIKPHQGQHKEVQVFLQHNKXEX

SEQ ID NO: 23894 - protein, 39 aa, Artificial Sequence
  Cyclic GFR-binding peptide
  MOD_RES (7)..(7): Xaa is C or S
NDEGLEXVPTEESNITMQIMRIKPHQGQHLGEMSFLQHN

SEQ ID NO: 23895 - protein, 36 aa, Artificial Sequence
  Cyclic GFR-binding peptide
  MOD_RES (1)..(35): Xaa is C or S
XVPTGQSNITMQIMRIKPHQGQHIGEMSLEEHSQXE

SEQ ID NO: 23896 - protein, 35 aa, Artificial Sequence
  Cyclic GFR-binding peptide
  MOD_RES (7)..(7): Xaa is C or S
NDEGLEXVPTGQRSVKMAKVRIKPHQGQHKEVQVL

SEQ ID NO: 23897 - protein, 41 aa, Artificial Sequence
  Cyclic GFR-binding peptide
  MOD_RES (7)..(41): Xaa is C or S
NDEGLEXVPTEESNITMQIMRIKPHQGQHLGEMSFLQHNKX

SEQ ID NO: 23898 - protein, 28 aa, Artificial Sequence
  Cyclic GFR-binding peptide
SNITVQIMEIVRKKPIFLGEMSTLEDHL

SEQ ID NO: 23899 - protein, 36 aa, Artificial Sequence
  Cyclic GFR-binding peptide
  MOD_RES (4)..(4): Xaa is C or S
GLEXVPTEERPVQMRKIRIKPHQGQHKKATVFLQHN

SEQ ID NO: 23900 - protein, 33 aa, Artificial Sequence
  Cyclic GFR-binding peptide
  MOD_RES (4)..(4): Xaa is C or S
SVKXQPSRVHHSNITVQIMEYVRKKPKLLGEMS

SEQ ID NO: 23901 - protein, 29 aa, Artificial Sequence
  Cyclic GFR-binding peptide
QLSNITVQIMEIVRKKPIFLGEMSTLEDH

SEQ ID NO: 23902 - protein, 35 aa, Artificial Sequence
  Cyclic GFR-binding peptide
  MOD_RES (33)..(35): Xaa is C or S
VQLSNITVQIMEIVRKKPIFIGEMSTLEDHLAXKX

SEQ ID NO: 23903 - protein, 31 aa, Artificial Sequence
  Cyclic GFR-binding peptide
QLSNITVQIMEIVRKKPIFIGEMSTLEDHLA

SEQ ID NO: 23904 - protein, 35 aa, Artificial Sequence
  Cyclic GFR-binding peptide
  MOD_RES (32)..(34): Xaa is C or S
QLSNITVQIMEIVRKKPIFLGEMSTLEDHLAXKXE

SEQ ID NO: 23905 - protein, 43 aa, Artificial Sequence
  Cyclic GFR-binding peptide
  MOD_RES (5)..(42): Xaa is C or S
SSVKXQPSRVHHRPVQVRKIEYVRKKPKLKKATVRLEEHLEXA

SEQ ID NO: 23906 - protein, 30 aa, Artificial Sequence
  Cyclic GFR-binding peptide
TQVQLSNITVQIMEIVRKKPIFLGEMSTLE

SEQ ID NO: 23907 - protein, 35 aa, Artificial Sequence
  Cyclic GFR-binding peptide
  MOD_RES (33)..(35): Xaa is C or S
VQLSNITVQIMEIVRKKPIFLGEMSTLEDHLAXKX

SEQ ID NO: 23908 - protein, 32 aa, Artificial Sequence
  Cyclic GFR-binding peptide
  MOD_RES (29)..(31): Xaa is C or S
SNITMQIMRIKPHQGQHIGEMSLEEHSQXEXR

SEQ ID NO: 23909 - protein, 37 aa, Artificial Sequence
  Cyclic GFR-binding peptide
  MOD_RES (4)..(4): Xaa is C or S
GLEXVPTEERPVQMRKIRIKPHQGQHKKATVFLQHNK

SEQ ID NO: 23910 - protein, 37 aa, Artificial Sequence
  Cyclic GFR-binding peptide
  MOD_RES (1)..(35)..(37): Xaa is C or S
XVPTGQRPVQMRKIRIKPHQGQHKKATVLEEHSQXEX

SEQ ID NO: 23911 - protein, 33 aa, Artificial Sequence
  Cyclic GFR-binding peptide
  MOD_RES (33)..(33): Xaa is C or S
PTGQSNITMQIMRIKPHQGQHIGEMSLEEHSQX

SEQ ID NO: 23912 - protein, 25 aa, Artificial Sequence
  Cyclic GFR-binding peptide
QRPVQMRKIRIKPHQGQHKKATVLE

SEQ ID NO: 23913 - protein, 38 aa, Artificial Sequence
  Cyclic GFR-binding peptide
  MOD_RES (37)..(37): Xaa is C or S
RPTQVQLSNITVQIMEIVRKKPIFIGEMSTLEDHLAXK

SEQ ID NO: 23914 - protein, 41 aa, Artificial Sequence
  Cyclic GFR-binding peptide
  MOD_RES (1)..(38)..(40): Xaa is C or S
XQPSRVHHSNITVQIMEYVRKKPKLIGEMSRLEEHLEXAXA

SEQ ID NO: 23915 - protein, 39 aa, Artificial Sequence
  Cyclic GFR-binding peptide
  MOD_RES (36)..(38): Xaa is C or S
PSRVHHSNITVQIMEYVRKKPKLLGEMSRLEEHLEXAXA

SEQ ID NO: 23916 - protein, 37 aa, Artificial Sequence
  Cyclic GFR-binding peptide
  MOD_RES (34)..(36): Xaa is C or S
VPTEESNITMQIMRIKPHQGQHLGEMSFLQHNKXEXR

SEQ ID NO: 23917 - protein, 28 aa, Artificial Sequence
  Cyclic GFR-binding peptide
PTQVQLRSVKVAKVEIVRKKPIFKEVQV

SEQ ID NO: 23918 - protein, 33 aa, Artificial Sequence
  Cyclic GFR-binding peptide
  MOD_RES (1)..(1): Xaa is C or S
XQPSRVHHSNITVQIMEYVRKKPKLIGEMSRLE

SEQ ID NO: 23919 - protein, 44 aa, Artificial Sequence
  Cyclic GFR-binding peptide
  MOD_RES (7)..(41)..(43): Xaa is C or S
NDEGLEXVPTGQRPVQMRKIRIKPHQGQHKKATVLEEHSQXEXR

SEQ ID NO: 23920 - protein, 41 aa, Artificial Sequence
  Cyclic GFR-binding peptide
  MOD_RES (4)..(38)..(40): Xaa is C or S
GLEXVPTEESNITMQIMRIKPHQGQHLGEMSFLQHNKXEXR

SEQ ID NO: 23921 - protein, 29 aa, Artificial Sequence
  Cyclic GFR-binding peptide
LRSVKVAKVEIVRKKPIFKEVQVTLEDHL

SEQ ID NO: 23922 - protein, 33 aa, Artificial Sequence
  Cyclic GFR-binding peptide
  MOD_RES (33)..(33): Xaa is C or S
PTGQRPVQMRKIRIKPHQGQHKKATVLEEHSQX

SEQ ID NO: 23923 - protein, 35 aa, Artificial Sequence
  Cyclic GFR-binding peptide
  MOD_RES (1)..(35): Xaa is C or S
XVPTGQRSVKMAKVRIKPHQGQHKEVQVLEEHSQX

SEQ ID NO: 23924 - protein, 37 aa, Artificial Sequence
  Cyclic GFR-binding peptide
  MOD_RES (37)..(37): Xaa is C or S
QPSRVHHRPVQVRKIEYVRKKPKLKKATVRLEEHLEX

SEQ ID NO: 23925 - protein, 35 aa, Artificial Sequence
  Cyclic GFR-binding peptide
  MOD_RES (4)..(4): Xaa is C or S
SVKXQPSRVHHSNITVQIMEYVRKKPKLLGEMSRL

SEQ ID NO: 23926 - protein, 35 aa, Artificial Sequence
  Cyclic GFR-binding peptide
  MOD_RES (2)..(2): Xaa is C or S
KXQPSRVHHSNITVQIMEYVRKKPKLIGEMSRLEE

SEQ ID NO: 23927 - protein, 40 aa, Artificial Sequence
  Cyclic GFR-binding peptide
  MOD_RES (1)..(38)..(40): Xaa is C or S
XQPSRVHHRPVQVRKIEYVRKKPKLKKATVRLEEHLEXAX

SEQ ID NO: 23928 - protein, 25 aa, Artificial Sequence
  Cyclic GFR-binding peptide
SNITVQIMEIVRKKPIFIGEMSTLE

SEQ ID NO: 23929 - protein, 33 aa, Artificial Sequence
  Cyclic GFR-binding peptide
  MOD_RES (32)..(32): Xaa is C or S
QLSNITVQIMEIVRKKPIFIGEMSTLEDHLAXK

SEQ ID NO: 23930 - protein, 35 aa, Artificial Sequence
  Cyclic GFR-binding peptide
  MOD_RES (33)..(35): Xaa is C or S
VHHRPVQVRKIEYVRKKPKLKKATVRLEEHLEXAX

SEQ ID NO: 23931 - protein, 39 aa, Artificial Sequence
  Cyclic GFR-binding peptide
  MOD_RES (37)..(39): Xaa is C or S
RPTQVQLSNITVQIMEIVRKKPIFLGEMSTLEDHLAXKX

SEQ ID NO: 23932 - protein, 32 aa, Artificial Sequence
  Cyclic GFR-binding peptide
  MOD_RES (30)..(32): Xaa is C or S
QRSVKMAKVRIKPHQGQHKEVQVLEEHSQXEX

SEQ ID NO: 23933 - protein, 32 aa, Artificial Sequence
  Cyclic GFR-binding peptide
  MOD_RES (31)..(31): Xaa is C or S
GQSNITMQIMRIKPHQGQHIGEMSLEEHSQXE

SEQ ID NO: 23934 - protein, 38 aa, Artificial Sequence
  Cyclic GFR-binding peptide
  MOD_RES (4)..(4): Xaa is C or S
NVQXRPTQVQLRSVKVAKVEIVRKKPIFKEVQVTLEDH

SEQ ID NO: 23935 - protein, 29 aa, Artificial Sequence
  Cyclic GFR-binding peptide
EESNITMQIMRIKPHQGQHLGEMSFLQHN

SEQ ID NO: 23936 - protein, 37 aa, Artificial Sequence
  Cyclic GFR-binding peptide
  MOD_RES (5)..(5): Xaa is C or S
EGLEXVPTEESNITMQIMRIKPHQGQHLGEMSFLQHN

SEQ ID NO: 23937 - protein, 40 aa, Artificial Sequence
  Cyclic GFR-binding peptide
  MOD_RES (3)..(37)..(39): Xaa is C or S
LEXVPTEERSVKMAKVRIKPHQGQHKEVQVFLQHNKXEXR

SEQ ID NO: 23938 - protein, 32 aa, Artificial Sequence
  Cyclic GFR-binding peptide
  MOD_RES (30)..(32): Xaa is C or S
SNITVQIMEYVRKKPKLIGEMSRLEEHLEXAX

SEQ ID NO: 23939 - protein, 29 aa, Artificial Sequence
  Cyclic GFR-binding peptide
  MOD_RES (29)..(29): Xaa is C or S
RPVQMRKIRIKPHQGQHKKATVLEEHSQX

SEQ ID NO: 23940 - protein, 27 aa, Artificial Sequence
  Cyclic GFR-binding peptide
EERPVQMRKIRIKPHQGQHKKATVFLQ

SEQ ID NO: 23941 - protein, 32 aa, Artificial Sequence
  Cyclic GFR-binding peptide
  MOD_RES (1)..(1): Xaa is C or S
XQPSRVHHRPVQVRKIEYVRKKPKLKKATVRL

SEQ ID NO: 23942 - protein, 33 aa, Artificial Sequence
  Cyclic GFR-binding peptide
  MOD_RES (6)..(6): Xaa is C or S
DEGLEXVPTGQRPVQMRKIRIKPHQGQHKKATV

SEQ ID NO: 23943 - protein, 33 aa, Artificial Sequence
  Cyclic GFR-binding peptide
RVHHSNITVQIMEYVRKKPKLLGEMSRLEEHLE

SEQ ID NO: 23944 - protein, 36 aa, Artificial Sequence
  Cyclic GFR-binding peptide
  MOD_RES (36)..(36): Xaa is C or S
PTQVQLRSVKVAKVEIVRKKPIFKEVQVTLEDHLAX

SEQ ID NO: 23945 - protein, 32 aa, Artificial Sequence
  Cyclic GFR-binding peptide
  MOD_RES (4)..(4): Xaa is C or S
GLEXVPTEERSVKMAKVRIKPHQGQHKEVQVF

SEQ ID NO: 23946 - protein, 39 aa, Artificial Sequence
  Cyclic GFR-binding peptide
  MOD_RES (36)..(38): Xaa is C or S
PSRVHHRPVQVRKIEYVRKKPKLKKATVRLEEHLEXAXA

SEQ ID NO: 23947 - protein, 41 aa, Artificial Sequence
  Cyclic GFR-binding peptide
  MOD_RES (5)..(5): Xaa is C or S
RNVQXRPTQVQLSNITVQIMEIVRKKPIFLGEMSTLEDHLA

SEQ ID NO: 23948 - protein, 42 aa, Artificial Sequence
  Cyclic GFR-binding peptide
  MOD_RES (5)..(39)..(41): Xaa is C or S
EGLEXVPTEERSVKMAKVRIKPHQGQHKEVQVFLQHNKXEXR

SEQ ID NO: 23949 - protein, 39 aa, Artificial Sequence
  Cyclic GFR-binding peptide
  MOD_RES (2)..(39): Xaa is C or S
QXRPTQVQLRSVKVAKVEIVRKKPIFKEVQVTLEDHLAX

SEQ ID NO: 23950 - protein, 32 aa, Artificial Sequence
  Cyclic GFR-binding peptide
VPTEESNITMQIMRIKPHQGQHLGEMSFLQHN

SEQ ID NO: 23951 - protein, 36 aa, Artificial Sequence
  Cyclic GFR-binding peptide
  MOD_RES (35)..(35): Xaa is C or S
TQVQLSNITVQIMEIVRKKPIFIGEMSTLEDHLAXK

SEQ ID NO: 23952 - protein, 34 aa, Artificial Sequence
  Cyclic GFR-binding peptide
  MOD_RES (3)..(3): Xaa is C or S
VKXQPSRVHHRPVQVRKIEYVRKKPKLKKATVRL

SEQ ID NO: 23953 - protein, 29 aa, Artificial Sequence
  Cyclic GFR-binding peptide
  MOD_RES (1)..(1): Xaa is C or S
XVPTGQRPVQMRKIRIKPHQGQHKKATVL

SEQ ID NO: 23954 - protein, 43 aa, Artificial Sequence
  Cyclic GFR-binding peptide
  MOD_RES (7)..(41)..(43): Xaa is C or S
NDEGLEXVPTEERPVQMRKIRIKPHQGQHKKATVFLQHNKXEX

SEQ ID NO: 23955 - protein, 38 aa, Artificial Sequence
  Cyclic GFR-binding peptide
  MOD_RES (4)..(4): Xaa is C or S
SVKXQPSRVHHSNITVQIMEYVRKKPKLIGEMSRLEEH

SEQ ID NO: 23956 - protein, 32 aa, Artificial Sequence
  Cyclic GFR-binding peptide
  MOD_RES (30)..(32): Xaa is C or S
RPVQVRKIEYVRKKPKLKKATVRLEEHLEXAX

SEQ ID NO: 23957 - protein, 25 aa, Artificial Sequence
  Cyclic GFR-binding peptide
SNITVQIMEYVRKKPKLLGEMSRLE

SEQ ID NO: 23958 - protein, 34 aa, Artificial Sequence
  Cyclic GFR-binding peptide
  MOD_RES (32)..(34): Xaa is C or S
HHSNITVQIMEYVRKKPKLLGEMSRLEEHLEXAX

SEQ ID NO: 23959 - protein, 34 aa, Artificial Sequence
  Cyclic GFR-binding peptide
  MOD_RES (31)..(33): Xaa is C or S
EERPVQMRKIRIKPHQGQHKKATVFLQHNKXEXR

SEQ ID NO: 23960 - protein, 29 aa, Artificial Sequence
  Cyclic GFR-binding peptide
  MOD_RES (29)..(29): Xaa is C or S
RPVQMRKIRIKPHQGQHKKATVFLQHNKX

SEQ ID NO: 23961 - protein, 32 aa, Artificial Sequence
  Cyclic GFR-binding peptide
SRVHHSNITVQIMEYVRKKPKLIGEMSRLEEH

SEQ ID NO: 23962 - protein, 34 aa, Artificial Sequence
  Cyclic GFR-binding peptide
  MOD_RES (6)..(6): Xaa is C or S
DEGLEXVPTGQSNITMQIMRIKPHQGQHIGEMSL

SEQ ID NO: 23963 - protein, 29 aa, Artificial Sequence
  Cyclic GFR-binding peptide
GQSNITMQIMRIKPHQGQHIGEMSLEEHS

SEQ ID NO: 23964 - protein, 39 aa, Artificial Sequence
  Cyclic GFR-binding peptide
  MOD_RES (7)..(7): Xaa is C or S
NDEGLEXVPTGQSNITMQIMRIKPHQGQHIGEMSLEEHS

SEQ ID NO: 23965 - protein, 37 aa, Artificial Sequence
  Cyclic GFR-binding peptide
  MOD_RES (2)..(36): Xaa is C or S
EXVPTGQRPVQMRKIRIKPHQGQHKKATVLEEHSQXE

SEQ ID NO: 23966 - protein, 32 aa, Artificial Sequence
  Cyclic GFR-binding peptide
RVHHSNITVQIMEYVRKKPKLIGEMSRLEEHL

SEQ ID NO: 23967 - protein, 31 aa, Artificial Sequence
  Cyclic GFR-binding peptide
QVQLRSVKVAKVEIVRKKPIFKEVQVTLEDH

SEQ ID NO: 23968 - protein, 25 aa, Artificial Sequence
  Cyclic GFR-binding peptide
ERPVQMRKIRIKPHQGQHKKATVFL

SEQ ID NO: 23969 - protein, 34 aa, Artificial Sequence
  Cyclic GFR-binding peptide
  MOD_RES (3)..(3): Xaa is C or S
VQXRPTQVQLSNITVQIMEIVRKKPIFLGEMSTL

SEQ ID NO: 23970 - protein, 26 aa, Artificial Sequence
  Cyclic GFR-binding peptide
TEERSVKMAKVRIKPHQGQHKEVQVF

SEQ ID NO: 23971 - protein, 29 aa, Artificial Sequence
  Cyclic GFR-binding peptide
SRVHHSNITVQIMEYVRKKPKLIGEMSRL

SEQ ID NO: 23972 - protein, 26 aa, Artificial Sequence
  Cyclic GFR-binding peptide
GQSNITMQIMRIKPHQGQHIGEMSLE

SEQ ID NO: 23973 - protein, 30 aa, Artificial Sequence
  Cyclic GFR-binding peptide
  MOD_RES (29)..(29): Xaa is C or S
RSVKMAKVRIKPHQGQHKEVQVFLQHNKXE

SEQ ID NO: 23974 - protein, 28 aa, Artificial Sequence
  Cyclic GFR-binding peptide
VQLRSVKVAKVEIVRKKPIFKEVQVTLE

SEQ ID NO: 23975 - protein, 25 aa, Artificial Sequence
  Cyclic GFR-binding peptide
RPVQVRKIEYVRKKPKLKKATVRLE

SEQ ID NO: 23976 - protein, 30 aa, Artificial Sequence
  Cyclic GFR-binding peptide
PTQVQLRSVKVAKVEIVRKKPIFKEVQVTL

SEQ ID NO: 23977 - protein, 28 aa, Artificial Sequence
  Cyclic GFR-binding peptide
RPVQMRKIRIKPHQGQHKKATVLEEHSQ

SEQ ID NO: 23978 - protein, 41 aa, Artificial Sequence
  Cyclic GFR-binding peptide
  MOD_RES (2)..(39)..(41): Xaa is C or S
QXRPTQVQLRSVKVAKVEIVRKKPIFKEVQVTLEDHLAXKX

SEQ ID NO: 23979 - protein, 31 aa, Artificial Sequence
  Cyclic GFR-binding peptide
  MOD_RES (30)..(30): Xaa is C or S
QSNITMQIMRIKPHQGQHIGEMSLEEHSQXE

SEQ ID NO: 23980 - protein, 32 aa, Artificial Sequence
  Cyclic GFR-binding peptide
  MOD_RES (5)..(5): Xaa is C or S
EGLEXVPTEERPVQMRKIRIKPHQGQHKKATV

SEQ ID NO: 23981 - protein, 41 aa, Artificial Sequence
  Cyclic GFR-binding peptide
  MOD_RES (7)..(41): Xaa is C or S
NDEGLEXVPTGQSNITMQIMRIKPHQGQHIGEMSLEEHSQX

SEQ ID NO: 23982 - protein, 38 aa, Artificial Sequence
  Cyclic GFR-binding peptide
  MOD_RES (35)..(37): Xaa is C or S
TQVQLRSVKVAKVEIVRKKPIFKEVQVTLEDHLAXKXE

SEQ ID NO: 23983 - protein, 32 aa, Artificial Sequence
  Cyclic GFR-binding peptide
  MOD_RES (1)..(1): Xaa is C or S
XVPTGQRPVQMRKIRIKPHQGQHKKATVLEEH

SEQ ID NO: 23984 - protein, 37 aa, Artificial Sequence
  Cyclic GFR-binding peptide
  MOD_RES (35)..(37): Xaa is C or S
TQVQLSNITVQIMEIVRKKPIFIGEMSTLEDHLAXKX

SEQ ID NO: 23985 - protein, 37 aa, Artificial Sequence
  Cyclic GFR-binding peptide
  MOD_RES (5)..(5): Xaa is C or S
EGLEXVPTGQSNITMQIMRIKPHQGQHIGEMSLEEHS

SEQ ID NO: 23986 - protein, 28 aa, Artificial Sequence
  Cyclic GFR-binding peptide
QRSVKMAKVRIKPHQGQHKEVQVLEEHS

SEQ ID NO: 23987 - protein, 30 aa, Artificial Sequence
  Cyclic GFR-binding peptide
HSNITVQIMEYVRKKPKLLGEMSRLEEHLE

SEQ ID NO: 23988 - protein, 23 aa, Artificial Sequence
  Cyclic GFR-binding peptide
HRPVQVRKIEYVRKKPKLKKATV

SEQ ID NO: 23989 - protein, 41 aa, Artificial Sequence
  Cyclic GFR-binding peptide
  MOD_RES (7)..(41): Xaa is C or S
NDEGLEXVPTGQRPVQMRKIRIKPHQGQHKKATVLEEHSQX

SEQ ID NO: 23990 - protein, 43 aa, Artificial Sequence
  Cyclic GFR-binding peptide
  MOD_RES (6)..(40)..(42): Xaa is C or S
DEGLEXVPTEESNITMQIMRIKPHQGQHLGEMSFLQHNKXEXR

SEQ ID NO: 23991 - protein, 36 aa, Artificial Sequence
  Cyclic GFR-binding peptide
  MOD_RES (35)..(35): Xaa is C or S
TQVQLSNITVQIMEIVRKKPIFLGEMSTLEDHLAXK

SEQ ID NO: 23992 - protein, 36 aa, Artificial Sequence
  Cyclic GFR-binding peptide
  MOD_RES (3)..(3): Xaa is C or S
LEXVPTEERSVKMAKVRIKPHQGQHKEVQVFLQHNK

SEQ ID NO: 23993 - protein, 33 aa, Artificial Sequence
  Cyclic GFR-binding peptide
  MOD_RES (1)..(1): Xaa is C or S
XVPTGQRSVKMAKVRIKPHQGQHKEVQVLEEHS

SEQ ID NO: 23994 - protein, 30 aa, Artificial Sequence
  Cyclic GFR-binding peptide
SRVHHSNITVQIMEYVRKKPKLLGEMSRLE

SEQ ID NO: 23995 - protein, 35 aa, Artificial Sequence
  Cyclic GFR-binding peptide
  MOD_RES (6)..(6): Xaa is C or S
DEGLEXVPTEESNITMQIMRIKPHQGQHLGEMSFL

SEQ ID NO: 23996 - protein, 32 aa, Artificial Sequence
  Cyclic GFR-binding peptide
TQVQLSNITVQIMEIVRKKPIFLGEMSTLEDH

SEQ ID NO: 23997 - protein, 28 aa, Artificial Sequence
  Cyclic GFR-binding peptide
QVQLRSVKVAKVEIVRKKPIFKEVQVTL

SEQ ID NO: 23998 - protein, 38 aa, Artificial Sequence
  Cyclic GFR-binding peptide
  MOD_RES (2)..(2): Xaa is C or S
KXQPSRVHHSNITVQIMEYVRKKPKLIGEMSRLEEHLE

SEQ ID NO: 23999 - protein, 36 aa, Artificial Sequence
  Cyclic GFR-binding peptide
  MOD_RES (34)..(36): Xaa is C or S
QVQLRSVKVAKVEIVRKKPIFKEVQVTLEDHLAXKX

SEQ ID NO: 24000 - protein, 39 aa, Artificial Sequence
  Cyclic GFR-binding peptide
  MOD_RES (5)..(39): Xaa is C or S
EGLEXVPTGQSNITMQIMRIKPHQGQHIGEMSLEEHSQX

SEQ ID NO: 24001 - protein, 33 aa, Artificial Sequence
  Cyclic GFR-binding peptide
  MOD_RES (1)..(1): Xaa is C or S
XVPTGQRPVQMRKIRIKPHQGQHKKATVLEEHS

SEQ ID NO: 24002 - protein, 38 aa, Artificial Sequence
  Cyclic GFR-binding peptide
  MOD_RES (5)..(5): Xaa is C or S
RNVQXRPTQVQLSNITVQIMEIVRKKPIFIGEMSTLED

SEQ ID NO: 24003 - protein, 34 aa, Artificial Sequence
  Cyclic GFR-binding peptide
  MOD_RES (5)..(5): Xaa is C or S
RNVQXRPTQVQLSNITVQIMEIVRKKPIFIGEMS

SEQ ID NO: 24004 - protein, 33 aa, Artificial Sequence
  Cyclic GFR-binding peptide
  MOD_RES (4)..(4): Xaa is C or S
GLEXVPTEERSVKMAKVRIKPHQGQHKEVQVFL

SEQ ID NO: 24005 - protein, 28 aa, Artificial Sequence
  Cyclic GFR-binding peptide
QRPVQMRKIRIKPHQGQHKKATVLEEHS

SEQ ID NO: 24006 - protein, 37 aa, Artificial Sequence
  Cyclic GFR-binding peptide
  MOD_RES (35)..(37): Xaa is C or S
TQVQLSNITVQIMEIVRKKPIFLGEMSTLEDHLAXKX

SEQ ID NO: 24007 - protein, 35 aa, Artificial Sequence
  Cyclic GFR-binding peptide
  MOD_RES (34)..(34): Xaa is C or S
VPTGQRPVQMRKIRIKPHQGQHKKATVLEEHSQXE

SEQ ID NO: 24008 - protein, 44 aa, Artificial Sequence
  Cyclic GFR-binding peptide
  MOD_RES (7)..(41)..(43): Xaa is C or S
NDEGLEXVPTGQSNITMQIMRIKPHQGQHIGEMSLEEHSQXEXR

SEQ ID NO: 24009 - protein, 29 aa, Artificial Sequence
  Cyclic GFR-binding peptide
  MOD_RES (2)..(2): Xaa is C or S
EXVPTEESNITMQIMRIKPHQGQHLGEMS

SEQ ID NO: 24010 - protein, 35 aa, Artificial Sequence
  Cyclic GFR-binding peptide
  MOD_RES (5)..(5): Xaa is C or S
EGLEXVPTGQSNITMQIMRIKPHQGQHIGEMSLEE

SEQ ID NO: 24011 - protein, 34 aa, Artificial Sequence
  Cyclic GFR-binding peptide
  MOD_RES (4)..(4): Xaa is C or S
NVQXRPTQVQLSNITVQIMEIVRKKPIFIGEMST

SEQ ID NO: 24012 - protein, 35 aa, Artificial Sequence
  Cyclic GFR-binding peptide
  MOD_RES (7)..(7): Xaa is C or S
NDEGLEXVPTEESNITMQIMRIKPHQGQHLGEMSF

SEQ ID NO: 24013 - protein, 24 aa, Artificial Sequence
  Cyclic GFR-binding peptide
ERPVQMRKIRIKPHQGQHKKATVF

SEQ ID NO: 24014 - protein, 34 aa, Artificial Sequence
  Cyclic GFR-binding peptide
  MOD_RES (1)..(1): Xaa is C or S
XRPTQVQLSNITVQIMEIVRKKPIFLGEMSTLED

SEQ ID NO: 24015 - protein, 31 aa, Artificial Sequence
  Cyclic GFR-binding peptide
VHHSNITVQIMEYVRKKPKLLGEMSRLEEHL

SEQ ID NO: 24016 - protein, 32 aa, Artificial Sequence
  Cyclic GFR-binding peptide
VPTEERSVKMAKVRIKPHQGQHKEVQVFLQHN

SEQ ID NO: 24017 - protein, 38 aa, Artificial Sequence
  Cyclic GFR-binding peptide
  MOD_RES (2)..(36)..(38): Xaa is C or S
EXVPTEESNITMQIMRIKPHQGQHLGEMSFLQHNKXEX

SEQ ID NO: 24018 - protein, 41 aa, Artificial Sequence
  Cyclic GFR-binding peptide
  MOD_RES (1)..(38)..(40): Xaa is C or S
XRPTQVQLRSVKVAKVEIVRKKPIFKEVQVTLEDHLAXKXE

SEQ ID NO: 24019 - protein, 42 aa, Artificial Sequence
  Cyclic GFR-binding peptide
  MOD_RES (6)..(40)..(42): Xaa is C or S
DEGLEXVPTGQRSVKMAKVRIKPHQGQHKEVQVLEEHSQXEX

SEQ ID NO: 24020 - protein, 33 aa, Artificial Sequence
  Cyclic GFR-binding peptide
SRVHHRPVQVRKIEYVRKKPKLKKATVRLEEHL

SEQ ID NO: 24021 - protein, 42 aa, Artificial Sequence
  Cyclic GFR-binding peptide
  MOD_RES (2)..(39)..(41): Xaa is C or S
KXQPSRVHHRPVQVRKIEYVRKKPKLKKATVRLEEHLEXAXA

SEQ ID NO: 24022 - protein, 32 aa, Artificial Sequence
  Cyclic GFR-binding peptide
SRVHHSNITVQIMEYVRKKPKLLGEMSRLEEH

SEQ ID NO: 24023 - protein, 39 aa, Artificial Sequence
  Cyclic GFR-binding peptide
  MOD_RES (6)..(6): Xaa is C or S
DEGLEXVPTEERSVKMAKVRIKPHQGQHKEVQVFLQHNK

SEQ ID NO: 24024 - protein, 32 aa, Artificial Sequence
  Cyclic GFR-binding peptide
PTQVQLSNITVQIMEIVRKKPIFIGEMSTLED

SEQ ID NO: 24025 - protein, 29 aa, Artificial Sequence
  Cyclic GFR-binding peptide
TEERSVKMAKVRIKPHQGQHKEVQVFLQH

SEQ ID NO: 24026 - protein, 31 aa, Artificial Sequence
  Cyclic GFR-binding peptide
  MOD_RES (1)..(1): Xaa is C or S
XVPTEERPVQMRKIRIKPHQGQHKKATVFLQ

SEQ ID NO: 24027 - protein, 32 aa, Artificial Sequence
  Cyclic GFR-binding peptide
TQVQLSNITVQIMEIVRKKPIFIGEMSTLEDH

SEQ ID NO: 24028 - protein, 35 aa, Artificial Sequence
  Cyclic GFR-binding peptide
RPTQVQLSNITVQIMEIVRKKPIFLGEMSTLEDHL

SEQ ID NO: 24029 - protein, 32 aa, Artificial Sequence
  Cyclic GFR-binding peptide
  MOD_RES (30)..(32): Xaa is C or S
QRPVQMRKIRIKPHQGQHKKATVLEEHSQXEX

SEQ ID NO: 24030 - protein, 28 aa, Artificial Sequence
  Cyclic GFR-binding peptide
HHSNITVQIMEYVRKKPKLIGEMSRLEE

SEQ ID NO: 24031 - protein, 33 aa, Artificial Sequence
  Cyclic GFR-binding peptide
  MOD_RES (32)..(32): Xaa is C or S
TGQRSVKMAKVRIKPHQGQHKEVQVLEEHSQXE

SEQ ID NO: 24032 - protein, 28 aa, Artificial Sequence
  Cyclic GFR-binding peptide
PSRVHHRPVQVRKIEYVRKKPKLKKATV

SEQ ID NO: 24033 - protein, 40 aa, Artificial Sequence
  Cyclic GFR-binding peptide
  MOD_RES (2)..(39): Xaa is C or S
QXRPTQVQLSNITVQIMEIVRKKPIFIGEMSTLEDHLAXK

SEQ ID NO: 24034 - protein, 29 aa, Artificial Sequence
  Cyclic GFR-binding peptide
QRPVQMRKIRIKPHQGQHKKATVLEEHSQ

SEQ ID NO: 24035 - protein, 33 aa, Artificial Sequence
  Cyclic GFR-binding peptide
  MOD_RES (33)..(33): Xaa is C or S
PTEERSVKMAKVRIKPHQGQHKEVQVFLQHNKX

SEQ ID NO: 24036 - protein, 31 aa, Artificial Sequence
  Cyclic GFR-binding peptide
  MOD_RES (3)..(3): Xaa is C or S
LEXVPTGQRPVQMRKIRIKPHQGQHKKATVL

SEQ ID NO: 24037 - protein, 27 aa, Artificial Sequence
  Cyclic GFR-binding peptide
HSNITVQIMEYVRKKPKLIGEMSRLEE

SEQ ID NO: 24038 - protein, 37 aa, Artificial Sequence
  Cyclic GFR-binding peptide
  MOD_RES (34)..(36): Xaa is C or S
VPTGQSNITMQIMRIKPHQGQHIGEMSLEEHSQXEXR

SEQ ID NO: 24039 - protein, 27 aa, Artificial Sequence
  Cyclic GFR-binding peptide
SRVHHRPVQVRKIEYVRKKPKLKKATV

SEQ ID NO: 24040 - protein, 34 aa, Artificial Sequence
  Cyclic GFR-binding peptide
  MOD_RES (1)..(1): Xaa is C or S
XVPTGQRSVKMAKVRIKPHQGQHKEVQVLEEHSQ

SEQ ID NO: 24041 - protein, 37 aa, Artificial Sequence
  Cyclic GFR-binding peptide
  MOD_RES (34)..(36): Xaa is C or S
QVQLRSVKVAKVEIVRKKPIFKEVQVTLEDHLAXKXE

SEQ ID NO: 24042 - protein, 33 aa, Artificial Sequence
  Cyclic GFR-binding peptide
  MOD_RES (33)..(33): Xaa is C or S
VQLSNITVQIMEIVRKKPIFIGEMSTLEDHLAX

SEQ ID NO: 24043 - protein, 22 aa, Artificial Sequence
  Cyclic GFR-binding peptide
RSVKVAKVEIVRKKPIFKEVQV

SEQ ID NO: 24044 - protein, 30 aa, Artificial Sequence
  Cyclic GFR-binding peptide
  MOD_RES (30)..(30): Xaa is C or S
QRSVKMAKVRIKPHQGQHKEVQVLEEHSQX

SEQ ID NO: 24045 - protein, 31 aa, Artificial Sequence
  Cyclic GFR-binding peptide
VQLSNITVQIMEIVRKKPIFIGEMSTLEDHL

SEQ ID NO: 24046 - protein, 34 aa, Artificial Sequence
  Cyclic GFR-binding peptide
  MOD_RES (31)..(33): Xaa is C or S
HRPVQVRKIEYVRKKPKLKKATVRLEEHLEXAXA

SEQ ID NO: 24047 - protein, 33 aa, Artificial Sequence
  Cyclic GFR-binding peptide
  MOD_RES (1)..(1): Xaa is C or S
XVPTEERPVQMRKIRIKPHQGQHKKATVFLQHN

SEQ ID NO: 24048 - protein, 32 aa, Artificial Sequence
  Cyclic GFR-binding peptide
QPSRVHHRPVQVRKIEYVRKKPKLKKATVRLE

SEQ ID NO: 24049 - protein, 38 aa, Artificial Sequence
  Cyclic GFR-binding peptide
  MOD_RES (7)..(7): Xaa is C or S
NDEGLEXVPTGQRPVQMRKIRIKPHQGQHKKATVLEEH

SEQ ID NO: 24050 - protein, 41 aa, Artificial Sequence
  Cyclic GFR-binding peptide
  MOD_RES (4)..(38)..(40): Xaa is C or S
GLEXVPTGQRSVKMAKVRIKPHQGQHKEVQVLEEHSQXEXR

SEQ ID NO: 24051 - protein, 31 aa, Artificial Sequence
  Cyclic GFR-binding peptide
VPTGQRPVQMRKIRIKPHQGQHKKATVLEEH

SEQ ID NO: 24052 - protein, 34 aa, Artificial Sequence
  Cyclic GFR-binding peptide
  MOD_RES (7)..(7): Xaa is C or S
NDEGLEXVPTEESNITMQIMRIKPHQGQHLGEMS

SEQ ID NO: 24053 - protein, 41 aa, Artificial Sequence
  Cyclic GFR-binding peptide
  MOD_RES (7)..(41): Xaa is C or S
NDEGLEXVPTEERSVKMAKVRIKPHQGQHKEVQVFLQHNKX

SEQ ID NO: 24054 - protein, 36 aa, Artificial Sequence
  Cyclic GFR-binding peptide
  MOD_RES (5)..(5): Xaa is C or S
SSVKXQPSRVHHSNITVQIMEYVRKKPKLLGEMSRL

SEQ ID NO: 24055 - protein, 34 aa, Artificial Sequence
  Cyclic GFR-binding peptide
  MOD_RES (5)..(5): Xaa is C or S
EGLEXVPTEERPVQMRKIRIKPHQGQHKKATVFL

SEQ ID NO: 24056 - protein, 30 aa, Artificial Sequence
  Cyclic GFR-binding peptide
QPSRVHHRPVQVRKIEYVRKKPKLKKATVR

SEQ ID NO: 24057 - protein, 35 aa, Artificial Sequence
  Cyclic GFR-binding peptide
  MOD_RES (3)..(3): Xaa is C or S
VQXRPTQVQLRSVKVAKVEIVRKKPIFKEVQVTLE

SEQ ID NO: 24058 - protein, 29 aa, Artificial Sequence
  Cyclic GFR-binding peptide
HSNITVQIMEYVRKKPKLLGEMSRLEEHL

SEQ ID NO: 24059 - protein, 28 aa, Artificial Sequence
  Cyclic GFR-binding peptide
RSVKMAKVRIKPHQGQHKEVQVLEEHSQ

SEQ ID NO: 24060 - protein, 39 aa, Artificial Sequence
  Cyclic GFR-binding peptide
  MOD_RES (36)..(38): Xaa is C or S
PTQVQLSNITVQIMEIVRKKPIFIGEMSTLEDHLAXKXE

SEQ ID NO: 24061 - protein, 33 aa, Artificial Sequence
  Cyclic GFR-binding peptide
  MOD_RES (30)..(32): Xaa is C or S
SNITVQIMEYVRKKPKLIGEMSRLEEHLEXAXA

SEQ ID NO: 24062 - protein, 34 aa, Artificial Sequence
  Cyclic GFR-binding peptide
  MOD_RES (7)..(7): Xaa is C or S
NDEGLEXVPTGQRSVKMAKVRIKPHQGQHKEVQV

SEQ ID NO: 24063 - protein, 32 aa, Artificial Sequence
  Cyclic GFR-binding peptide
  MOD_RES (29)..(31): Xaa is C or S
RSVKMAKVRIKPHQGQHKEVQVLEEHSQXEXR

SEQ ID NO: 24064 - protein, 40 aa, Artificial Sequence
  Cyclic GFR-binding peptide
  MOD_RES (4)..(38)..(40): Xaa is C or S
GLEXVPTGQRSVKMAKVRIKPHQGQHKEVQVLEEHSQXEX

SEQ ID NO: 24065 - protein, 25 aa, Artificial Sequence
  Cyclic GFR-binding peptide
EESNITMQIMRIKPHQGQHLGEMSF

SEQ ID NO: 24066 - protein, 30 aa, Artificial Sequence
  Cyclic GFR-binding peptide
QVQLSNITVQIMEIVRKKPIFLGEMSTLED

SEQ ID NO: 24067 - protein, 33 aa, Artificial Sequence
  Cyclic GFR-binding peptide
  MOD_RES (31)..(33): Xaa is C or S
LRSVKVAKVEIVRKKPIFKEVQVTLEDHLAXKX

SEQ ID NO: 24068 - protein, 33 aa, Artificial Sequence
  Cyclic GFR-binding peptide
  MOD_RES (2)..(2): Xaa is C or S
KXQPSRVHHSNITVQIMEYVRKKPKLLGEMSRL

SEQ ID NO: 24069 - protein, 32 aa, Artificial Sequence
  Cyclic GFR-binding peptide
  MOD_RES (30)..(32): Xaa is C or S
QSNITMQIMRIKPHQGQHIGEMSLEEHSQXEX

SEQ ID NO: 24070 - protein, 34 aa, Artificial Sequence
  Cyclic GFR-binding peptide
  MOD_RES (33)..(33): Xaa is C or S
PTGQRSVKMAKVRIKPHQGQHKEVQVLEEHSQXE

SEQ ID NO: 24071 - protein, 41 aa, Artificial Sequence
  Cyclic GFR-binding peptide
  MOD_RES (5)..(39)..(41): Xaa is C or S
EGLEXVPTGQRSVKMAKVRIKPHQGQHKEVQVLEEHSQXEX

SEQ ID NO: 24072 - protein, 36 aa, Artificial Sequence
  Cyclic GFR-binding peptide
  MOD_RES (1)..(1): Xaa is C or S
XRPTQVQLSNITVQIMEIVRKKPIFLGEMSTLEDHL

SEQ ID NO: 24073 - protein, 34 aa, Artificial Sequence
  Cyclic GFR-binding peptide
  MOD_RES (34)..(34): Xaa is C or S
QVQLRSVKVAKVEIVRKKPIFKEVQVTLEDHLAX

SEQ ID NO: 24074 - protein, 26 aa, Artificial Sequence
  Cyclic GFR-binding peptide
RPVQMRKIRIKPHQGQHKKATVLEEH

SEQ ID NO: 24075 - protein, 38 aa, Artificial Sequence
  Cyclic GFR-binding peptide
  MOD_RES (35)..(37): Xaa is C or S
SRVHHSNITVQIMEYVRKKPKLLGEMSRLEEHLEXAXA

SEQ ID NO: 24076 - protein, 30 aa, Artificial Sequence
  Cyclic GFR-binding peptide
  MOD_RES (30)..(30): Xaa is C or S
SNITVQIMEYVRKKPKLIGEMSRLEEHLEX

SEQ ID NO: 24077 - protein, 36 aa, Artificial Sequence
  Cyclic GFR-binding peptide
  MOD_RES (3)..(3): Xaa is C or S
VKXQPSRVHHRPVQVRKIEYVRKKPKLKKATVRLEE

SEQ ID NO: 24078 - protein, 26 aa, Artificial Sequence
  Cyclic GFR-binding peptide
TEESNITMQIMRIKPHQGQHLGEMSF

SEQ ID NO: 24079 - protein, 33 aa, Artificial Sequence
  Cyclic GFR-binding peptide
SRVHHSNITVQIMEYVRKKPKLIGEMSRLEEHL

SEQ ID NO: 24080 - protein, 31 aa, Artificial Sequence
  Cyclic GFR-binding peptide
RVHHSNITVQIMEYVRKKPKLIGEMSRLEEH

SEQ ID NO: 24081 - protein, 29 aa, Artificial Sequence
  Cyclic GFR-binding peptide
  MOD_RES (2)..(2): Xaa is C or S
EXVPTGQRPVQMRKIRIKPHQGQHKKATV

SEQ ID NO: 24082 - protein, 31 aa, Artificial Sequence
  Cyclic GFR-binding peptide
PSRVHHSNITVQIMEYVRKKPKLIGEMSRLE

SEQ ID NO: 24083 - protein, 36 aa, Artificial Sequence
  Cyclic GFR-binding peptide
  MOD_RES (1)..(35): Xaa is C or S
XVPTEERSVKMAKVRIKPHQGQHKEVQVFLQHNKXE

SEQ ID NO: 24084 - protein, 35 aa, Artificial Sequence
  Cyclic GFR-binding peptide
PTQVQLRSVKVAKVEIVRKKPIFKEVQVTLEDHLA

SEQ ID NO: 24085 - protein, 28 aa, Artificial Sequence
  Cyclic GFR-binding peptide
TEERPVQMRKIRIKPHQGQHKKATVFLQ

SEQ ID NO: 24086 - protein, 44 aa, Artificial Sequence
  Cyclic GFR-binding peptide
  MOD_RES (7)..(41)..(43): Xaa is C or S
NDEGLEXVPTEESNITMQIMRIKPHQGQHLGEMSFLQHNKXEXR

SEQ ID NO: 24087 - protein, 36 aa, Artificial Sequence
  Cyclic GFR-binding peptide
  MOD_RES (33)..(35): Xaa is C or S
PTEERSVKMAKVRIKPHQGQHKEVQVFLQHNKXEXR

SEQ ID NO: 24088 - protein, 26 aa, Artificial Sequence
  Cyclic GFR-binding peptide
RSVKVAKVEIVRKKPIFKEVQVTLED

SEQ ID NO: 24089 - protein, 30 aa, Artificial Sequence
  Cyclic GFR-binding peptide
  MOD_RES (1)..(1): Xaa is C or S
XVPTEERSVKMAKVRIKPHQGQHKEVQVFL

SEQ ID NO: 24090 - protein, 32 aa, Artificial Sequence
  Cyclic GFR-binding peptide
  MOD_RES (3)..(3): Xaa is C or S
VKXQPSRVHHSNITVQIMEYVRKKPKLIGEMS

SEQ ID NO: 24091 - protein, 33 aa, Artificial Sequence
  Cyclic GFR-binding peptide
  MOD_RES (4)..(4): Xaa is C or S
SVKXQPSRVHHRPVQVRKIEYVRKKPKLKKATV

SEQ ID NO: 24092 - protein, 31 aa, Artificial Sequence
  Cyclic GFR-binding peptide
  MOD_RES (30)..(30): Xaa is C or S
QRPVQMRKIRIKPHQGQHKKATVLEEHSQXE

SEQ ID NO: 24093 - protein, 34 aa, Artificial Sequence
  Cyclic GFR-binding peptide
TQVQLRSVKVAKVEIVRKKPIFKEVQVTLEDHLA

SEQ ID NO: 24094 - protein, 37 aa, Artificial Sequence
  Cyclic GFR-binding peptide
  MOD_RES (6)..(6): Xaa is C or S
DEGLEXVPTEERSVKMAKVRIKPHQGQHKEVQVFLQH

SEQ ID NO: 24095 - protein, 36 aa, Artificial Sequence
  Cyclic GFR-binding peptide
  MOD_RES (4)..(4): Xaa is C or S
SVKXQPSRVHHRPVQVRKIEYVRKKPKLKKATVRLE

SEQ ID NO: 24096 - protein, 38 aa, Artificial Sequence
  Cyclic GFR-binding peptide
  MOD_RES (4)..(38): Xaa is C or S
GLEXVPTGQRSVKMAKVRIKPHQGQHKEVQVLEEHSQX

SEQ ID NO: 24097 - protein, 32 aa, Artificial Sequence
  Cyclic GFR-binding peptide
SRVHHRPVQVRKIEYVRKKPKLKKATVRLEEH

SEQ ID NO: 24098 - protein, 29 aa, Artificial Sequence
  Cyclic GFR-binding peptide
QSNITMQIMRIKPHQGQHIGEMSLEEHSQ

SEQ ID NO: 24099 - protein, 32 aa, Artificial Sequence
  Cyclic GFR-binding peptide
  MOD_RES (29)..(31): Xaa is C or S
RPVQMRKIRIKPHQGQHKKATVLEEHSQXEXR

SEQ ID NO: 24100 - protein, 32 aa, Artificial Sequence
  Cyclic GFR-binding peptide
  MOD_RES (2)..(2): Xaa is C or S
EXVPTGQRSVKMAKVRIKPHQGQHKEVQVLEE

SEQ ID NO: 24101 - protein, 37 aa, Artificial Sequence
  Cyclic GFR-binding peptide
  MOD_RES (4)..(4): Xaa is C or S
NVQXRPTQVQLRSVKVAKVEIVRKKPIFKEVQVTLED

SEQ ID NO: 24102 - protein, 36 aa, Artificial Sequence
  Cyclic GFR-binding peptide
  MOD_RES (5)..(5): Xaa is C or S
RNVQXRPTQVQLSNITVQIMEIVRKKPIFIGEMSTL

SEQ ID NO: 24103 - protein, 42 aa, Artificial Sequence
  Cyclic GFR-binding peptide
  MOD_RES (3)..(40)..(42): Xaa is C or S
VKXQPSRVHHRPVQVRKIEYVRKKPKLKKATVRLEEHLEXAX

SEQ ID NO: 24104 - protein, 42 aa, Artificial Sequence
  Cyclic GFR-binding peptide
  MOD_RES (6)..(40)..(42): Xaa is C or S
DEGLEXVPTGQRPVQMRKIRIKPHQGQHKKATVLEEHSQXEX

SEQ ID NO: 24105 - protein, 25 aa, Artificial Sequence
  Cyclic GFR-binding peptide
SNITMQIMRIKPHQGQHLGEMSFLQ

SEQ ID NO: 24106 - protein, 41 aa, Artificial Sequence
  Cyclic GFR-binding peptide
  MOD_RES (5)..(5): Xaa is C or S
SSVKXQPSRVHHRPVQVRKIEYVRKKPKLKKATVRLEEHLE

SEQ ID NO: 24107 - protein, 38 aa, Artificial Sequence
  Cyclic GFR-binding peptide
  MOD_RES (36)..(38): Xaa is C or S
PTQVQLSNITVQIMEIVRKKPIFIGEMSTLEDHLAXKX

SEQ ID NO: 24108 - protein, 24 aa, Artificial Sequence
  Cyclic GFR-binding peptide
SNITMQIMRIKPHQGQHIGEMSLE

SEQ ID NO: 24109 - protein, 36 aa, Artificial Sequence
  Cyclic GFR-binding peptide
  MOD_RES (4)..(4): Xaa is C or S
GLEXVPTGQRSVKMAKVRIKPHQGQHKEVQVLEEHS

SEQ ID NO: 24110 - protein, 32 aa, Artificial Sequence
  Cyclic GFR-binding peptide
  MOD_RES (32)..(32): Xaa is C or S
TEESNITMQIMRIKPHQGQHLGEMSFLQHNKX

SEQ ID NO: 24111 - protein, 28 aa, Artificial Sequence
  Cyclic GFR-binding peptide
PTQVQLSNITVQIMEIVRKKPIFLGEMS

SEQ ID NO: 24112 - protein, 37 aa, Artificial Sequence
  Cyclic GFR-binding peptide
  MOD_RES (2)..(2): Xaa is C or S
QXRPTQVQLRSVKVAKVEIVRKKPIFKEVQVTLEDHL

SEQ ID NO: 24113 - protein, 25 aa, Artificial Sequence
  Cyclic GFR-binding peptide
VQLRSVKVAKVEIVRKKPIFKEVQV

SEQ ID NO: 24114 - protein, 43 aa, Artificial Sequence
  Cyclic GFR-binding peptide
  MOD_RES (4)..(41)..(43): Xaa is C or S
NVQXRPTQVQLRSVKVAKVEIVRKKPIFKEVQVTLEDHLAXKX

SEQ ID NO: 24115 - protein, 28 aa, Artificial Sequence
  Cyclic GFR-binding peptide
  MOD_RES (1)..(1): Xaa is C or S
XVPTGQRPVQMRKIRIKPHQGQHKKATV

SEQ ID NO: 24116 - protein, 25 aa, Artificial Sequence
  Cyclic GFR-binding peptide
TEERPVQMRKIRIKPHQGQHKKATV

SEQ ID NO: 24117 - protein, 23 aa, Artificial Sequence
  Cyclic GFR-binding peptide
RSVKVAKVEIVRKKPIFKEVQVT

SEQ ID NO: 24118 - protein, 32 aa, Artificial Sequence
  Cyclic GFR-binding peptide
  MOD_RES (3)..(3): Xaa is C or S
LEXVPTEERPVQMRKIRIKPHQGQHKKATVFL

SEQ ID NO: 24119 - protein, 31 aa, Artificial Sequence
  Cyclic GFR-binding peptide
  MOD_RES (30)..(30): Xaa is C or S
ERPVQMRKIRIKPHQGQHKKATVFLQHNKXE

SEQ ID NO: 24120 - protein, 29 aa, Artificial Sequence
  Cyclic GFR-binding peptide
QVQLRSVKVAKVEIVRKKPIFKEVQVTLE

SEQ ID NO: 24121 - protein, 39 aa, Artificial Sequence
  Cyclic GFR-binding peptide
  MOD_RES (3)..(3): Xaa is C or S
VQXRPTQVQLSNITVQIMEIVRKKPIFIGEMSTLEDHLA

SEQ ID NO: 24122 - protein, 35 aa, Artificial Sequence
  Cyclic GFR-binding peptide
  MOD_RES (32)..(34): Xaa is C or S
TGQRPVQMRKIRIKPHQGQHKKATVLEEHSQXEXR

SEQ ID NO: 24123 - protein, 41 aa, Artificial Sequence
  Cyclic GFR-binding peptide
  MOD_RES (6)..(40): Xaa is C or S
DEGLEXVPTEERSVKMAKVRIKPHQGQHKEVQVFLQHNKXE

SEQ ID NO: 24124 - protein, 25 aa, Artificial Sequence
  Cyclic GFR-binding peptide
VHHSNITVQIMEYVRKKPKLLGEMS

SEQ ID NO: 24125 - protein, 32 aa, Artificial Sequence
  Cyclic GFR-binding peptide
  MOD_RES (30)..(32): Xaa is C or S
ERSVKMAKVRIKPHQGQHKEVQVFLQHNKXEX

SEQ ID NO: 24126 - protein, 36 aa, Artificial Sequence
  Cyclic GFR-binding peptide
  MOD_RES (4)..(4): Xaa is C or S
GLEXVPTGQRPVQMRKIRIKPHQGQHKKATVLEEHS

SEQ ID NO: 24127 - protein, 37 aa, Artificial Sequence
  Cyclic GFR-binding peptide
  MOD_RES (7)..(7): Xaa is C or S
NDEGLEXVPTGQRSVKMAKVRIKPHQGQHKEVQVLEE

SEQ ID NO: 24128 - protein, 30 aa, Artificial Sequence
  Cyclic GFR-binding peptide
VPTEESNITMQIMRIKPHQGQHLGEMSFLQ

SEQ ID NO: 24129 - protein, 32 aa, Artificial Sequence
  Cyclic GFR-binding peptide
PTGQRPVQMRKIRIKPHQGQHKKATVLEEHSQ

SEQ ID NO: 24130 - protein, 38 aa, Artificial Sequence
  Cyclic GFR-binding peptide
  MOD_RES (2)..(36)..(38): Xaa is C or S
EXVPTGQRPVQMRKIRIKPHQGQHKKATVLEEHSQXEX

SEQ ID NO: 24131 - protein, 29 aa, Artificial Sequence
  Cyclic GFR-binding peptide
VPTGQRPVQMRKIRIKPHQGQHKKATVLE

SEQ ID NO: 24132 - protein, 32 aa, Artificial Sequence
  Cyclic GFR-binding peptide
  MOD_RES (30)..(32): Xaa is C or S
ESNITMQIMRIKPHQGQHLGEMSFLQHNKXEX

SEQ ID NO: 24133 - protein, 33 aa, Artificial Sequence
  Cyclic GFR-binding peptide
  MOD_RES (1)..(1): Xaa is C or S
XQPSRVHHRPVQVRKIEYVRKKPKLKKATVRLE

SEQ ID NO: 24134 - protein, 27 aa, Artificial Sequence
  Cyclic GFR-binding peptide
TQVQLRSVKVAKVEIVRKKPIFKEVQV

SEQ ID NO: 24135 - protein, 34 aa, Artificial Sequence
  Cyclic GFR-binding peptide
  MOD_RES (34)..(34): Xaa is C or S
VPTEERPVQMRKIRIKPHQGQHKKATVFLQHNKX

SEQ ID NO: 24136 - protein, 31 aa, Artificial Sequence
  Cyclic GFR-binding peptide
  MOD_RES (4)..(4): Xaa is C or S
GLEXVPTGQRSVKMAKVRIKPHQGQHKEVQV

SEQ ID NO: 24137 - protein, 32 aa, Artificial Sequence
  Cyclic GFR-binding peptide
  MOD_RES (2)..(2): Xaa is C or S
QXRPTQVQLRSVKVAKVEIVRKKPIFKEVQVT

SEQ ID NO: 24138 - protein, 37 aa, Artificial Sequence
  Cyclic GFR-binding peptide
  MOD_RES (2)..(2): Xaa is C or S
KXQPSRVHHRPVQVRKIEYVRKKPKLKKATVRLEEHL

SEQ ID NO: 24139 - protein, 36 aa, Artificial Sequence
  Cyclic GFR-binding peptide
QPSRVHHSNITVQIMEYVRKKPKLIGEMSRLEEHLE

SEQ ID NO: 24140 - protein, 44 aa, Artificial Sequence
  Cyclic GFR-binding peptide
  MOD_RES (4)..(41)..(43): Xaa is C or S
NVQXRPTQVQLSNITVQIMEIVRKKPIFLGEMSTLEDHLAXKXE

SEQ ID NO: 24141 - protein, 32 aa, Artificial Sequence
  Cyclic GFR-binding peptide
  MOD_RES (29)..(31): Xaa is C or S
RPVQMRKIRIKPHQGQHKKATVFLQHNKXEXR

SEQ ID NO: 24142 - protein, 28 aa, Artificial Sequence
  Cyclic GFR-binding peptide
GQRSVKMAKVRIKPHQGQHKEVQVLEEH

SEQ ID NO: 24143 - protein, 36 aa, Artificial Sequence
  Cyclic GFR-binding peptide
  MOD_RES (4)..(4): Xaa is C or S
GLEXVPTGQSNITMQIMRIKPHQGQHIGEMSLEEHS

SEQ ID NO: 24144 - protein, 33 aa, Artificial Sequence
  Cyclic GFR-binding peptide
RPTQVQLSNITVQIMEIVRKKPIFLGEMSTLED

SEQ ID NO: 24145 - protein, 32 aa, Artificial Sequence
  Cyclic GFR-binding peptide
PTGQSNITMQIMRIKPHQGQHIGEMSLEEHSQ

SEQ ID NO: 24146 - protein, 30 aa, Artificial Sequence
  Cyclic GFR-binding peptide
  MOD_RES (30)..(30): Xaa is C or S
RPVQVRKIEYVRKKPKLKKATVRLEEHLEX

SEQ ID NO: 24147 - protein, 34 aa, Artificial Sequence
  Cyclic GFR-binding peptide
  MOD_RES (33)..(33): Xaa is C or S
VHHSNITVQIMEYVRKKPKLIGEMSRLEEHLEXA

SEQ ID NO: 24148 - protein, 40 aa, Artificial Sequence
  Cyclic GFR-binding peptide
  MOD_RES (3)..(37)..(39): Xaa is C or S
LEXVPTEERPVQMRKIRIKPHQGQHKKATVFLQHNKXEXR

SEQ ID NO: 24149 - protein, 34 aa, Artificial Sequence
  Cyclic GFR-binding peptide
  MOD_RES (3)..(3): Xaa is C or S
LEXVPTGQSNITMQIMRIKPHQGQHIGEMSLEEH

SEQ ID NO: 24150 - protein, 25 aa, Artificial Sequence
  Cyclic GFR-binding peptide
HSNITVQIMEYVRKKPKLLGEMSRL

SEQ ID NO: 24151 - protein, 24 aa, Artificial Sequence
  Cyclic GFR-binding peptide
SNITMQIMRIKPHQGQHLGEMSFL

SEQ ID NO: 24152 - protein, 37 aa, Artificial Sequence
  Cyclic GFR-binding peptide
  MOD_RES (2)..(2): Xaa is C or S
KXQPSRVHHSNITVQIMEYVRKKPKLIGEMSRLEEHL

SEQ ID NO: 24153 - protein, 37 aa, Artificial Sequence
  Cyclic GFR-binding peptide
  MOD_RES (36)..(36): Xaa is C or S
PTQVQLRSVKVAKVEIVRKKPIFKEVQVTLEDHLAXK

SEQ ID NO: 24154 - protein, 27 aa, Artificial Sequence
  Cyclic GFR-binding peptide
VPTGQRPVQMRKIRIKPHQGQHKKATV

SEQ ID NO: 24155 - protein, 44 aa, Artificial Sequence
  Cyclic GFR-binding peptide
  MOD_RES (7)..(41)..(43): Xaa is C or S
NDEGLEXVPTGQRSVKMAKVRIKPHQGQHKEVQVLEEHSQXEXR

SEQ ID NO: 24156 - protein, 36 aa, Artificial Sequence
  Cyclic GFR-binding peptide
  MOD_RES (1)..(1): Xaa is C or S
XQPSRVHHSNITVQIMEYVRKKPKLLGEMSRLEEHL

SEQ ID NO: 24157 - protein, 35 aa, Artificial Sequence
  Cyclic GFR-binding peptide
  MOD_RES (1)..(1): Xaa is C or S
XQPSRVHHSNITVQIMEYVRKKPKLLGEMSRLEEH

SEQ ID NO: 24158 - protein, 28 aa, Artificial Sequence
  Cyclic GFR-binding peptide
QLSNITVQIMEIVRKKPIFIGEMSTLED

SEQ ID NO: 24159 - protein, 36 aa, Artificial Sequence
  Cyclic GFR-binding peptide
  MOD_RES (5)..(5): Xaa is C or S
EGLEXVPTEERPVQMRKIRIKPHQGQHKKATVFLQH

SEQ ID NO: 24160 - protein, 25 aa, Artificial Sequence
  Cyclic GFR-binding peptide
TGQRPVQMRKIRIKPHQGQHKKATV

SEQ ID NO: 24161 - protein, 35 aa, Artificial Sequence
  Cyclic GFR-binding peptide
  MOD_RES (32)..(34): Xaa is C or S
TEESNITMQIMRIKPHQGQHLGEMSFLQHNKXEXR

SEQ ID NO: 24162 - protein, 37 aa, Artificial Sequence
  Cyclic GFR-binding peptide
  MOD_RES (37)..(37): Xaa is C or S
RPTQVQLSNITVQIMEIVRKKPIFIGEMSTLEDHLAX

SEQ ID NO: 24163 - protein, 27 aa, Artificial Sequence
  Cyclic GFR-binding peptide
VPTEERPVQMRKIRIKPHQGQHKKATV

SEQ ID NO: 24164 - protein, 43 aa, Artificial Sequence
  Cyclic GFR-binding peptide
  MOD_RES (3)..(40)..(42): Xaa is C or S
VKXQPSRVHHSNITVQIMEYVRKKPKLLGEMSRLEEHLEXAXA

SEQ ID NO: 24165 - protein, 34 aa, Artificial Sequence
  Cyclic GFR-binding peptide
TQVQLSNITVQIMEIVRKKPIFLGEMSTLEDHLA

SEQ ID NO: 24166 - protein, 37 aa, Artificial Sequence
  Cyclic GFR-binding peptide
  MOD_RES (4)..(4): Xaa is C or S
GLEXVPTEERSVKMAKVRIKPHQGQHKEVQVFLQHNK

SEQ ID NO: 24167 - protein, 34 aa, Artificial Sequence
  Cyclic GFR-binding peptide
  MOD_RES (33)..(33): Xaa is C or S
PTEERPVQMRKIRIKPHQGQHKKATVFLQHNKXE

SEQ ID NO: 24168 - protein, 37 aa, Artificial Sequence
  Cyclic GFR-binding peptide
  MOD_RES (3)..(37): Xaa is C or S
LEXVPTGQRPVQMRKIRIKPHQGQHKKATVLEEHSQX

SEQ ID NO: 24169 - protein, 25 aa, Artificial Sequence
  Cyclic GFR-binding peptide
LSNITVQIMEIVRKKPIFIGEMSTL

SEQ ID NO: 24170 - protein, 37 aa, Artificial Sequence
  Cyclic GFR-binding peptide
  MOD_RES (34)..(36): Xaa is C or S
VPTGQRSVKMAKVRIKPHQGQHKEVQVLEEHSQXEXR

SEQ ID NO: 24171 - protein, 42 aa, Artificial Sequence
  Cyclic GFR-binding peptide
  MOD_RES (6)..(40)..(42): Xaa is C or S
DEGLEXVPTGQSNITMQIMRIKPHQGQHIGEMSLEEHSQXEX

SEQ ID NO: 24172 - protein, 39 aa, Artificial Sequence
  Cyclic GFR-binding peptide
  MOD_RES (37)..(39): Xaa is C or S
QPSRVHHSNITVQIMEYVRKKPKLLGEMSRLEEHLEXAX

SEQ ID NO: 24173 - protein, 32 aa, Artificial Sequence
  Cyclic GFR-binding peptide
VHHRPVQVRKIEYVRKKPKLKKATVRLEEHLE

SEQ ID NO: 24174 - protein, 36 aa, Artificial Sequence
  Cyclic GFR-binding peptide
  MOD_RES (6)..(6): Xaa is C or S
DEGLEXVPTGQRSVKMAKVRIKPHQGQHKEVQVLEE

SEQ ID NO: 24175 - protein, 26 aa, Artificial Sequence
  Cyclic GFR-binding peptide
QRSVKMAKVRIKPHQGQHKEVQVLEE

SEQ ID NO: 24176 - protein, 35 aa, Artificial Sequence
  Cyclic GFR-binding peptide
  MOD_RES (1)..(1): Xaa is C or S
XQPSRVHHSNITVQIMEYVRKKPKLIGEMSRLEEH

SEQ ID NO: 24177 - protein, 36 aa, Artificial Sequence
  Cyclic GFR-binding peptide
  MOD_RES (4)..(4): Xaa is C or S
GLEXVPTEESNITMQIMRIKPHQGQHLGEMSFLQHN

SEQ ID NO: 24178 - protein, 36 aa, Artificial Sequence
  Cyclic GFR-binding peptide
  MOD_RES (3)..(3): Xaa is C or S
VKXQPSRVHHSNITVQIMEYVRKKPKLLGEMSRLEE

SEQ ID NO: 24179 - protein, 38 aa, Artificial Sequence
  Cyclic GFR-binding peptide
  MOD_RES (1)..(35)..(37): Xaa is C or S
XVPTEERPVQMRKIRIKPHQGQHKKATVFLQHNKXEXR

SEQ ID NO: 24180 - protein, 34 aa, Artificial Sequence
  Cyclic GFR-binding peptide
  MOD_RES (2)..(2): Xaa is C or S
KXQPSRVHHRPVQVRKIEYVRKKPKLKKATVRLE

SEQ ID NO: 24181 - protein, 43 aa, Artificial Sequence
  Cyclic GFR-binding peptide
  MOD_RES (3)..(40)..(42): Xaa is C or S
VKXQPSRVHHRPVQVRKIEYVRKKPKLKKATVRLEEHLEXAXA

SEQ ID NO: 24182 - protein, 29 aa, Artificial Sequence
  Cyclic GFR-binding peptide
VPTEERSVKMAKVRIKPHQGQHKEVQVFL

SEQ ID NO: 24183 - protein, 30 aa, Artificial Sequence
  Cyclic GFR-binding peptide
PTGQRSVKMAKVRIKPHQGQHKEVQVLEEH

SEQ ID NO: 24184 - protein, 38 aa, Artificial Sequence
  Cyclic GFR-binding peptide
  MOD_RES (3)..(3): Xaa is C or S
VQXRPTQVQLSNITVQIMEIVRKKPIFLGEMSTLEDHL

SEQ ID NO: 24185 - protein, 35 aa, Artificial Sequence
  Cyclic GFR-binding peptide
QPSRVHHSNITVQIMEYVRKKPKLLGEMSRLEEHL

SEQ ID NO: 24186 - protein, 33 aa, Artificial Sequence
  Cyclic GFR-binding peptide
  MOD_RES (5)..(5): Xaa is C or S
EGLEXVPTGQRPVQMRKIRIKPHQGQHKKATVL

SEQ ID NO: 24187 - protein, 42 aa, Artificial Sequence
  Cyclic GFR-binding peptide
  MOD_RES (4)..(41): Xaa is C or S
SVKXQPSRVHHSNITVQIMEYVRKKPKLLGEMSRLEEHLEXA

SEQ ID NO: 24188 - protein, 22 aa, Artificial Sequence
  Cyclic GFR-binding peptide
RPVQMRKIRIKPHQGQHKKATV

SEQ ID NO: 24189 - protein, 34 aa, Artificial Sequence
  Cyclic GFR-binding peptide
  MOD_RES (4)..(4): Xaa is C or S
NVQXRPTQVQLSNITVQIMEIVRKKPIFLGEMST

SEQ ID NO: 24190 - protein, 39 aa, Artificial Sequence
  Cyclic GFR-binding peptide
  MOD_RES (1)..(38): Xaa is C or S
XQPSRVHHRPVQVRKIEYVRKKPKLKKATVRLEEHLEXA

SEQ ID NO: 24191 - protein, 27 aa, Artificial Sequence
  Cyclic GFR-binding peptide
RVHHSNITVQIMEYVRKKPKLIGEMSR

SEQ ID NO: 24192 - protein, 25 aa, Artificial Sequence
  Cyclic GFR-binding peptide
HSNITVQIMEYVRKKPKLIGEMSRL

SEQ ID NO: 24193 - protein, 41 aa, Artificial Sequence
  Cyclic GFR-binding peptide
  MOD_RES (1)..(38)..(40): Xaa is C or S
XRPTQVQLSNITVQIMEIVRKKPIFIGEMSTLEDHLAXKXE

SEQ ID NO: 24194 - protein, 39 aa, Artificial Sequence
  Cyclic GFR-binding peptide
  MOD_RES (1)..(38): Xaa is C or S
XQPSRVHHSNITVQIMEYVRKKPKLLGEMSRLEEHLEXA

SEQ ID NO: 24195 - protein, 42 aa, Artificial Sequence
  Cyclic GFR-binding peptide
  MOD_RES (4)..(41): Xaa is C or S
SVKXQPSRVHHRPVQVRKIEYVRKKPKLKKATVRLEEHLEXA

SEQ ID NO: 24196 - protein, 33 aa, Artificial Sequence
  Cyclic GFR-binding peptide
QVQLSNITVQIMEIVRKKPIFIGEMSTLEDHLA

SEQ ID NO: 24197 - protein, 31 aa, Artificial Sequence
  Cyclic GFR-binding peptide
  MOD_RES (31)..(31): Xaa is C or S
GQSNITMQIMRIKPHQGQHIGEMSLEEHSQX

SEQ ID NO: 24198 - protein, 30 aa, Artificial Sequence
  Cyclic GFR-binding peptide
  MOD_RES (1)..(1): Xaa is C or S
XVPTGQRPVQMRKIRIKPHQGQHKKATVLE

SEQ ID NO: 24199 - protein, 33 aa, Artificial Sequence
  Cyclic GFR-binding peptide
  MOD_RES (32)..(32): Xaa is C or S
TEERPVQMRKIRIKPHQGQHKKATVFLQHNKXE

SEQ ID NO: 24200 - protein, 37 aa, Artificial Sequence
  Cyclic GFR-binding peptide
  MOD_RES (37)..(37): Xaa is C or S
QPSRVHHSNITVQIMEYVRKKPKLIGEMSRLEEHLEX

SEQ ID NO: 24201 - protein, 36 aa, Artificial Sequence
  Cyclic GFR-binding peptide
  MOD_RES (5)..(5): Xaa is C or S
SSVKXQPSRVHHSNITVQIMEYVRKKPKLIGEMSRL

SEQ ID NO: 24202 - protein, 32 aa, Artificial Sequence
  Cyclic GFR-binding peptide
  MOD_RES (31)..(31): Xaa is C or S
LRSVKVAKVEIVRKKPIFKEVQVTLEDHLAXK

SEQ ID NO: 24203 - protein, 39 aa, Artificial Sequence
  Cyclic GFR-binding peptide
  MOD_RES (2)..(36)..(38): Xaa is C or S
EXVPTEERPVQMRKIRIKPHQGQHKKATVFLQHNKXEXR

SEQ ID NO: 24204 - protein, 31 aa, Artificial Sequence
  Cyclic GFR-binding peptide
PTQVQLSNITVQIMEIVRKKPIFIGEMSTLE

SEQ ID NO: 24205 - protein, 41 aa, Artificial Sequence
  Cyclic GFR-binding peptide
  MOD_RES (2)..(39)..(41): Xaa is C or S
KXQPSRVHHSNITVQIMEYVRKKPKLLGEMSRLEEHLEXAX

SEQ ID NO: 24206 - protein, 35 aa, Artificial Sequence
  Cyclic GFR-binding peptide
  MOD_RES (5)..(5): Xaa is C or S
SSVKXQPSRVHHSNITVQIMEYVRKKPKLIGEMSR

SEQ ID NO: 24207 - protein, 34 aa, Artificial Sequence
  Cyclic GFR-binding peptide
  MOD_RES (31)..(33): Xaa is C or S
HSNITVQIMEYVRKKPKLLGEMSRLEEHLEXAXA

SEQ ID NO: 24208 - protein, 31 aa, Artificial Sequence
  Cyclic GFR-binding peptide
QPSRVHHRPVQVRKIEYVRKKPKLKKATVRL

SEQ ID NO: 24209 - protein, 33 aa, Artificial Sequence
  Cyclic GFR-binding peptide
  MOD_RES (30)..(32): Xaa is C or S
ESNITMQIMRIKPHQGQHLGEMSFLQHNKXEXR

SEQ ID NO: 24210 - protein, 27 aa, Artificial Sequence
  Cyclic GFR-binding peptide
ESNITMQIMRIKPHQGQHLGEMSFLQH

SEQ ID NO: 24211 - protein, 32 aa, Artificial Sequence
  Cyclic GFR-binding peptide
RPTQVQLRSVKVAKVEIVRKKPIFKEVQVTLE

SEQ ID NO: 24212 - protein, 32 aa, Artificial Sequence
  Cyclic GFR-binding peptide
  MOD_RES (3)..(3): Xaa is C or S
LEXVPTGQSNITMQIMRIKPHQGQHIGEMSLE

SEQ ID NO: 24213 - protein, 28 aa, Artificial Sequence
  Cyclic GFR-binding peptide
VPTEESNITMQIMRIKPHQGQHLGEMSF

SEQ ID NO: 24214 - protein, 31 aa, Artificial Sequence
  Cyclic GFR-binding peptide
QPSRVHHSNITVQIMEYVRKKPKLIGEMSRL

SEQ ID NO: 24215 - protein, 29 aa, Artificial Sequence
  Cyclic GFR-binding peptide
RPVQVRKIEYVRKKPKLKKATVRLEEHLE

SEQ ID NO: 24216 - protein, 35 aa, Artificial Sequence
  Cyclic GFR-binding peptide
PTQVQLSNITVQIMEIVRKKPIFLGEMSTLEDHLA

SEQ ID NO: 24217 - protein, 34 aa, Artificial Sequence
  Cyclic GFR-binding peptide
  MOD_RES (7)..(7): Xaa is C or S
NDEGLEXVPTEERSVKMAKVRIKPHQGQHKEVQV

SEQ ID NO: 24218 - protein, 29 aa, Artificial Sequence
  Cyclic GFR-binding peptide
SNITVQIMEYVRKKPKLLGEMSRLEEHLE

SEQ ID NO: 24219 - protein, 22 aa, Artificial Sequence
  Cyclic GFR-binding peptide
SNITVQIMEIVRKKPIFLGEMS

SEQ ID NO: 24220 - protein, 41 aa, Artificial Sequence
  Cyclic GFR-binding peptide
  MOD_RES (5)..(39)..(41): Xaa is C or S
EGLEXVPTEERPVQMRKIRIKPHQGQHKKATVFLQHNKXEX

SEQ ID NO: 24221 - protein, 25 aa, Artificial Sequence
  Cyclic GFR-binding peptide
ERSVKMAKVRIKPHQGQHKEVQVFL

SEQ ID NO: 24222 - protein, 24 aa, Artificial Sequence
  Cyclic GFR-binding peptide
GQRSVKMAKVRIKPHQGQHKEVQV

SEQ ID NO: 24223 - protein, 32 aa, Artificial Sequence
  Cyclic GFR-binding peptide
VPTGQRSVKMAKVRIKPHQGQHKEVQVLEEHS

SEQ ID NO: 24224 - protein, 36 aa, Artificial Sequence
  Cyclic GFR-binding peptide
  MOD_RES (3)..(3): Xaa is C or S
LEXVPTEESNITMQIMRIKPHQGQHLGEMSFLQHNK

SEQ ID NO: 24225 - protein, 36 aa, Artificial Sequence
  Cyclic GFR-binding peptide
  MOD_RES (6)..(6): Xaa is C or S
DEGLEXVPTEERSVKMAKVRIKPHQGQHKEVQVFLQ

SEQ ID NO: 24226 - protein, 35 aa, Artificial Sequence
  Cyclic GFR-binding peptide
  MOD_RES (2)..(2): Xaa is C or S
QXRPTQVQLSNITVQIMEIVRKKPIFLGEMSTLED

SEQ ID NO: 24227 - protein, 32 aa, Artificial Sequence
  Cyclic GFR-binding peptide
  MOD_RES (3)..(3): Xaa is C or S
VKXQPSRVHHSNITVQIMEYVRKKPKLLGEMS

SEQ ID NO: 24228 - protein, 31 aa, Artificial Sequence
  Cyclic GFR-binding peptide
RPTQVQLSNITVQIMEIVRKKPIFLGEMSTL

SEQ ID NO: 24229 - protein, 35 aa, Artificial Sequence
  Cyclic GFR-binding peptide
  MOD_RES (2)..(2): Xaa is C or S
EXVPTGQSNITMQIMRIKPHQGQHIGEMSLEEHSQ

SEQ ID NO: 24230 - protein, 29 aa, Artificial Sequence
  Cyclic GFR-binding peptide
  MOD_RES (29)..(29): Xaa is C or S
RSVKMAKVRIKPHQGQHKEVQVFLQHNKX

SEQ ID NO: 24231 - protein, 31 aa, Artificial Sequence
  Cyclic GFR-binding peptide
  MOD_RES (2)..(2): Xaa is C or S
EXVPTGQRPVQMRKIRIKPHQGQHKKATVLE

SEQ ID NO: 24232 - protein, 36 aa, Artificial Sequence
  Cyclic GFR-binding peptide
  MOD_RES (33)..(35): Xaa is C or S
VQLRSVKVAKVEIVRKKPIFKEVQVTLEDHLAXKXE

SEQ ID NO: 24233 - protein, 28 aa, Artificial Sequence
  Cyclic GFR-binding peptide
HSNITVQIMEYVRKKPKLIGEMSRLEEH

SEQ ID NO: 24234 - protein, 43 aa, Artificial Sequence
  Cyclic GFR-binding peptide
  MOD_RES (6)..(40)..(42): Xaa is C or S
DEGLEXVPTGQRPVQMRKIRIKPHQGQHKKATVLEEHSQXEXR

SEQ ID NO: 24235 - protein, 33 aa, Artificial Sequence
  Cyclic GFR-binding peptide
TQVQLSNITVQIMEIVRKKPIFLGEMSTLEDHL

SEQ ID NO: 24236 - protein, 35 aa, Artificial Sequence
  Cyclic GFR-binding peptide
  MOD_RES (5)..(5): Xaa is C or S
EGLEXVPTEERPVQMRKIRIKPHQGQHKKATVFLQ

SEQ ID NO: 24237 - protein, 42 aa, Artificial Sequence
  Cyclic GFR-binding peptide
  MOD_RES (5)..(42): Xaa is C or S
SSVKXQPSRVHHSNITVQIMEYVRKKPKLIGEMSRLEEHLEX

SEQ ID NO: 24238 - protein, 36 aa, Artificial Sequence
  Cyclic GFR-binding peptide
  MOD_RES (3)..(3): Xaa is C or S
VKXQPSRVHHSNITVQIMEYVRKKPKLIGEMSRLEE

SEQ ID NO: 24239 - protein, 40 aa, Artificial Sequence
  Cyclic GFR-binding peptide
  MOD_RES (5)..(5): Xaa is C or S
SSVKXQPSRVHHRPVQVRKIEYVRKKPKLKKATVRLEEHL

SEQ ID NO: 24240 - protein, 35 aa, Artificial Sequence
  Cyclic GFR-binding peptide
  MOD_RES (32)..(34): Xaa is C or S
HHSNITVQIMEYVRKKPKLIGEMSRLEEHLEXAXA

SEQ ID NO: 24241 - protein, 27 aa, Artificial Sequence
  Cyclic GFR-binding peptide
RVHHRPVQVRKIEYVRKKPKLKKATVR

SEQ ID NO: 24242 - protein, 36 aa, Artificial Sequence
  Cyclic GFR-binding peptide
  MOD_RES (34)..(36): Xaa is C or S
QVQLSNITVQIMEIVRKKPIFIGEMSTLEDHLAXKX

SEQ ID NO: 24243 - protein, 35 aa, Artificial Sequence
  Cyclic GFR-binding peptide
PSRVHHRPVQVRKIEYVRKKPKLKKATVRLEEHLE

SEQ ID NO: 24244 - protein, 36 aa, Artificial Sequence
  Cyclic GFR-binding peptide
  MOD_RES (2)..(2): Xaa is C or S
QXRPTQVQLRSVKVAKVEIVRKKPIFKEVQVTLEDH

SEQ ID NO: 24245 - protein, 30 aa, Artificial Sequence
  Cyclic GFR-binding peptide
TGQRSVKMAKVRIKPHQGQHKEVQVLEEHS

SEQ ID NO: 24246 - protein, 34 aa, Artificial Sequence
  Cyclic GFR-binding peptide
  MOD_RES (31)..(33): Xaa is C or S
EESNITMQIMRIKPHQGQHLGEMSFLQHNKXEXR

SEQ ID NO: 24247 - protein, 30 aa, Artificial Sequence
  Cyclic GFR-binding peptide
  MOD_RES (1)..(1): Xaa is C or S
XVPTEESNITMQIMRIKPHQGQHLGEMSFL

SEQ ID NO: 24248 - protein, 41 aa, Artificial Sequence
  Cyclic GFR-binding peptide
  MOD_RES (4)..(41): Xaa is C or S
SVKXQPSRVHHSNITVQIMEYVRKKPKLLGEMSRLEEHLEX

SEQ ID NO: 24249 - protein, 35 aa, Artificial Sequence
  Cyclic GFR-binding peptide
RPTQVQLSNITVQIMEIVRKKPIFIGEMSTLEDHL

SEQ ID NO: 24250 - protein, 26 aa, Artificial Sequence
  Cyclic GFR-binding peptide
PTEERSVKMAKVRIKPHQGQHKEVQV

SEQ ID NO: 24251 - protein, 39 aa, Artificial Sequence
  Cyclic GFR-binding peptide
  MOD_RES (3)..(37)..(39): Xaa is C or S
LEXVPTGQSNITMQIMRIKPHQGQHIGEMSLEEHSQXEX

SEQ ID NO: 24252 - protein, 33 aa, Artificial Sequence
  Cyclic GFR-binding peptide
PSRVHHSNITVQIMEYVRKKPKLIGEMSRLEEH

SEQ ID NO: 24253 - protein, 37 aa, Artificial Sequence
  Cyclic GFR-binding peptide
  MOD_RES (35)..(37): Xaa is C or S
SRVHHRPVQVRKIEYVRKKPKLKKATVRLEEHLEXAX

SEQ ID NO: 24254 - protein, 31 aa, Artificial Sequence
  Cyclic GFR-binding peptide
  MOD_RES (30)..(30): Xaa is C or S
ESNITMQIMRIKPHQGQHLGEMSFLQHNKXE

SEQ ID NO: 24255 - protein, 29 aa, Artificial Sequence
  Cyclic GFR-binding peptide
PSRVHHRPVQVRKIEYVRKKPKLKKATVR

SEQ ID NO: 24256 - protein, 35 aa, Artificial Sequence
  Cyclic GFR-binding peptide
  MOD_RES (2)..(2): Xaa is C or S
QXRPTQVQLSNITVQIMEIVRKKPIFIGEMSTLED

SEQ ID NO: 24257 - protein, 34 aa, Artificial Sequence
  Cyclic GFR-binding peptide
  MOD_RES (6)..(6): Xaa is C or S
DEGLEXVPTGQRPVQMRKIRIKPHQGQHKKATVL

SEQ ID NO: 24258 - protein, 38 aa, Artificial Sequence
  Cyclic GFR-binding peptide
  MOD_RES (3)..(37): Xaa is C or S
LEXVPTEESNITMQIMRIKPHQGQHLGEMSFLQHNKXE

SEQ ID NO: 24259 - protein, 39 aa, Artificial Sequence
  Cyclic GFR-binding peptide
  MOD_RES (2)..(39): Xaa is C or S
KXQPSRVHHRPVQVRKIEYVRKKPKLKKATVRLEEHLEX

SEQ ID NO: 24260 - protein, 22 aa, Artificial Sequence
  Cyclic GFR-binding peptide
SNITVQIMEYVRKKPKLIGEMS

SEQ ID NO: 24261 - protein, 37 aa, Artificial Sequence
  Cyclic GFR-binding peptide
  MOD_RES (35)..(37): Xaa is C or S
TQVQLRSVKVAKVEIVRKKPIFKEVQVTLEDHLAXKX

SEQ ID NO: 24262 - protein, 33 aa, Artificial Sequence
  Cyclic GFR-binding peptide
  MOD_RES (5)..(5): Xaa is C or S
EGLEXVPTEERSVKMAKVRIKPHQGQHKEVQVF

SEQ ID NO: 24263 - protein, 43 aa, Artificial Sequence
  Cyclic GFR-binding peptide
  MOD_RES (6)..(40)..(42): Xaa is C or S
DEGLEXVPTGQRSVKMAKVRIKPHQGQHKEVQVLEEHSQXEXR

SEQ ID NO: 24264 - protein, 37 aa, Artificial Sequence
  Cyclic GFR-binding peptide
  MOD_RES (1)..(1): Xaa is C or S
XQPSRVHHSNITVQIMEYVRKKPKLIGEMSRLEEHLE

SEQ ID NO: 24265 - protein, 33 aa, Artificial Sequence
  Cyclic GFR-binding peptide
  MOD_RES (6)..(6): Xaa is C or S
DEGLEXVPTEERPVQMRKIRIKPHQGQHKKATV

SEQ ID NO: 24266 - protein, 35 aa, Artificial Sequence
  Cyclic GFR-binding peptide
  MOD_RES (34)..(34): Xaa is C or S
QVQLSNITVQIMEIVRKKPIFLGEMSTLEDHLAXK

SEQ ID NO: 24267 - protein, 35 aa, Artificial Sequence
  Cyclic GFR-binding peptide
  MOD_RES (6)..(6): Xaa is C or S
DEGLEXVPTGQSNITMQIMRIKPHQGQHIGEMSLE

SEQ ID NO: 24268 - protein, 30 aa, Artificial Sequence
  Cyclic GFR-binding peptide
RPTQVQLRSVKVAKVEIVRKKPIFKEVQVT

SEQ ID NO: 24269 - protein, 38 aa, Artificial Sequence
  Cyclic GFR-binding peptide
  MOD_RES (1)..(38): Xaa is C or S
XRPTQVQLRSVKVAKVEIVRKKPIFKEVQVTLEDHLAX

SEQ ID NO: 24270 - protein, 31 aa, Artificial Sequence
  Cyclic GFR-binding peptide
TGQRPVQMRKIRIKPHQGQHKKATVLEEHSQ

SEQ ID NO: 24271 - protein, 29 aa, Artificial Sequence
  Cyclic GFR-binding peptide
  MOD_RES (1)..(1): Xaa is C or S
XVPTEERPVQMRKIRIKPHQGQHKKATVF

SEQ ID NO: 24272 - protein, 43 aa, Artificial Sequence
  Cyclic GFR-binding peptide
  MOD_RES (5)..(42): Xaa is C or S
RNVQXRPTQVQLSNITVQIMEIVRKKPIFIGEMSTLEDHLAXK

SEQ ID NO: 24273 - protein, 25 aa, Artificial Sequence
  Cyclic GFR-binding peptide
VQLSNITVQIMEIVRKKPIFIGEMS

SEQ ID NO: 24274 - protein, 38 aa, Artificial Sequence
  Cyclic GFR-binding peptide
  MOD_RES (3)..(3): Xaa is C or S
VQXRPTQVQLRSVKVAKVEIVRKKPIFKEVQVTLEDHL

SEQ ID NO: 24275 - protein, 34 aa, Artificial Sequence
  Cyclic GFR-binding peptide
PTQVQLSNITVQIMEIVRKKPIFLGEMSTLEDHL

SEQ ID NO: 24276 - protein, 26 aa, Artificial Sequence
  Cyclic GFR-binding peptide
QLSNITVQIMEIVRKKPIFIGEMSTL

SEQ ID NO: 24277 - protein, 26 aa, Artificial Sequence
  Cyclic GFR-binding peptide
RVHHRPVQVRKIEYVRKKPKLKKATV

SEQ ID NO: 24278 - protein, 28 aa, Artificial Sequence
  Cyclic GFR-binding peptide
  MOD_RES (1)..(1): Xaa is C or S
XVPTEERPVQMRKIRIKPHQGQHKKATV

SEQ ID NO: 24279 - protein, 24 aa, Artificial Sequence
  Cyclic GFR-binding peptide
RSVKMAKVRIKPHQGQHKEVQVLE

SEQ ID NO: 24280 - protein, 39 aa, Artificial Sequence
  Cyclic GFR-binding peptide
  MOD_RES (7)..(7): Xaa is C or S
NDEGLEXVPTGQRSVKMAKVRIKPHQGQHKEVQVLEEHS

SEQ ID NO: 24281 - protein, 30 aa, Artificial Sequence
  Cyclic GFR-binding peptide
  MOD_RES (1)..(1): Xaa is C or S
XRPTQVQLSNITVQIMEIVRKKPIFLGEMS

SEQ ID NO: 24282 - protein, 40 aa, Artificial Sequence
  Cyclic GFR-binding peptide
  MOD_RES (5)..(39): Xaa is C or S
EGLEXVPTEERPVQMRKIRIKPHQGQHKKATVFLQHNKXE

SEQ ID NO: 24283 - protein, 33 aa, Artificial Sequence
  Cyclic GFR-binding peptide
  MOD_RES (2)..(2): Xaa is C or S
EXVPTGQRSVKMAKVRIKPHQGQHKEVQVLEEH

SEQ ID NO: 24284 - protein, 39 aa, Artificial Sequence
  Cyclic GFR-binding peptide
  MOD_RES (3)..(37)..(39): Xaa is C or S
LEXVPTEERPVQMRKIRIKPHQGQHKKATVFLQHNKXEX

SEQ ID NO: 24285 - protein, 34 aa, Artificial Sequence
  Cyclic GFR-binding peptide
  MOD_RES (33)..(33): Xaa is C or S
PTGQRPVQMRKIRIKPHQGQHKKATVLEEHSQXE

SEQ ID NO: 24286 - protein, 28 aa, Artificial Sequence
  Cyclic GFR-binding peptide
ESNITMQIMRIKPHQGQHLGEMSFLQHN

SEQ ID NO: 24287 - protein, 30 aa, Artificial Sequence
  Cyclic GFR-binding peptide
VQLSNITVQIMEIVRKKPIFLGEMSTLEDH

SEQ ID NO: 24288 - protein, 34 aa, Artificial Sequence
  Cyclic GFR-binding peptide
  MOD_RES (31)..(33): Xaa is C or S
LRSVKVAKVEIVRKKPIFKEVQVTLEDHLAXKXE

SEQ ID NO: 24289 - protein, 31 aa, Artificial Sequence
  Cyclic GFR-binding peptide
  MOD_RES (2)..(2): Xaa is C or S
KXQPSRVHHRPVQVRKIEYVRKKPKLKKATV

SEQ ID NO: 24290 - protein, 24 aa, Artificial Sequence
  Cyclic GFR-binding peptide
GQSNITMQIMRIKPHQGQHIGEMS

SEQ ID NO: 24291 - protein, 27 aa, Artificial Sequence
  Cyclic GFR-binding peptide
QVQLSNITVQIMEIVRKKPIFLGEMST

SEQ ID NO: 24292 - protein, 40 aa, Artificial Sequence
  Cyclic GFR-binding peptide
  MOD_RES (5)..(39): Xaa is C or S
EGLEXVPTEESNITMQIMRIKPHQGQHLGEMSFLQHNKXE

SEQ ID NO: 24293 - protein, 29 aa, Artificial Sequence
  Cyclic GFR-binding peptide
EERPVQMRKIRIKPHQGQHKKATVFLQHN

SEQ ID NO: 24294 - protein, 39 aa, Artificial Sequence
  Cyclic GFR-binding peptide
  MOD_RES (3)..(37)..(39): Xaa is C or S
LEXVPTEERSVKMAKVRIKPHQGQHKEVQVFLQHNKXEX

SEQ ID NO: 24295 - protein, 33 aa, Artificial Sequence
  Cyclic GFR-binding peptide
  MOD_RES (3)..(3): Xaa is C or S
LEXVPTGQSNITMQIMRIKPHQGQHIGEMSLEE

SEQ ID NO: 24296 - protein, 38 aa, Artificial Sequence
  Cyclic GFR-binding peptide
  MOD_RES (6)..(6): Xaa is C or S
DEGLEXVPTEERPVQMRKIRIKPHQGQHKKATVFLQHN

SEQ ID NO: 24297 - protein, 33 aa, Artificial Sequence
  Cyclic GFR-binding peptide
  MOD_RES (33)..(33): Xaa is C or S
PTEERPVQMRKIRIKPHQGQHKKATVFLQHNKX

SEQ ID NO: 24298 - protein, 41 aa, Artificial Sequence
  Cyclic GFR-binding peptide
  MOD_RES (6)..(40): Xaa is C or S
DEGLEXVPTGQRPVQMRKIRIKPHQGQHKKATVLEEHSQXE

SEQ ID NO: 24299 - protein, 23 aa, Artificial Sequence
  Cyclic GFR-binding peptide
SNITVQIMEYVRKKPKLLGEMSR

SEQ ID NO: 24300 - protein, 24 aa, Artificial Sequence
  Cyclic GFR-binding peptide
QLSNITVQIMEIVRKKPIFLGEMS

SEQ ID NO: 24301 - protein, 26 aa, Artificial Sequence
  Cyclic GFR-binding peptide
QSNITMQIMRIKPHQGQHIGEMSLEE

SEQ ID NO: 24302 - protein, 36 aa, Artificial Sequence
  Cyclic GFR-binding peptide
  MOD_RES (34)..(36): Xaa is C or S
VPTGQRSVKMAKVRIKPHQGQHKEVQVLEEHSQXEX

SEQ ID NO: 24303 - protein, 34 aa, Artificial Sequence
  Cyclic GFR-binding peptide
  MOD_RES (3)..(3): Xaa is C or S
LEXVPTEERSVKMAKVRIKPHQGQHKEVQVFLQH

SEQ ID NO: 24304 - protein, 25 aa, Artificial Sequence
  Cyclic GFR-binding peptide
TEESNITMQIMRIKPHQGQHLGEMS

SEQ ID NO: 24305 - protein, 34 aa, Artificial Sequence
  Cyclic GFR-binding peptide
  MOD_RES (32)..(34): Xaa is C or S
TGQRSVKMAKVRIKPHQGQHKEVQVLEEHSQXEX

SEQ ID NO: 24306 - protein, 31 aa, Artificial Sequence
  Cyclic GFR-binding peptide
PSRVHHSNITVQIMEYVRKKPKLLGEMSRLE

SEQ ID NO: 24307 - protein, 27 aa, Artificial Sequence
  Cyclic GFR-binding peptide
QLSNITVQIMEIVRKKPIFLGEMSTLE

SEQ ID NO: 24308 - protein, 27 aa, Artificial Sequence
  Cyclic GFR-binding peptide
QLSNITVQIMEIVRKKPIFIGEMSTLE

SEQ ID NO: 24309 - protein, 37 aa, Artificial Sequence
  Cyclic GFR-binding peptide
  MOD_RES (6)..(6): Xaa is C or S
DEGLEXVPTGQRSVKMAKVRIKPHQGQHKEVQVLEEH

SEQ ID NO: 24310 - protein, 37 aa, Artificial Sequence
  Cyclic GFR-binding peptide
  MOD_RES (2)..(2): Xaa is C or S
QXRPTQVQLSNITVQIMEIVRKKPIFIGEMSTLEDHL

SEQ ID NO: 24311 - protein, 31 aa, Artificial Sequence
  Cyclic GFR-binding peptide
  MOD_RES (31)..(31): Xaa is C or S
HSNITVQIMEYVRKKPKLIGEMSRLEEHLEX

SEQ ID NO: 24312 - protein, 30 aa, Artificial Sequence
  Cyclic GFR-binding peptide
  MOD_RES (1)..(1): Xaa is C or S
XVPTEERPVQMRKIRIKPHQGQHKKATVFL

SEQ ID NO: 24313 - protein, 35 aa, Artificial Sequence
  Cyclic GFR-binding peptide
  MOD_RES (5)..(5): Xaa is C or S
EGLEXVPTEESNITMQIMRIKPHQGQHLGEMSFLQ

SEQ ID NO: 24314 - protein, 38 aa, Artificial Sequence
  Cyclic GFR-binding peptide
  MOD_RES (2)..(2): Xaa is C or S
QXRPTQVQLSNITVQIMEIVRKKPIFLGEMSTLEDHLA

SEQ ID NO: 24315 - protein, 42 aa, Artificial Sequence
  Cyclic GFR-binding peptide
  MOD_RES (4)..(41): Xaa is C or S
NVQXRPTQVQLRSVKVAKVEIVRKKPIFKEVQVTLEDHLAXK

SEQ ID NO: 24316 - protein, 25 aa, Artificial Sequence
  Cyclic GFR-binding peptide
QLRSVKVAKVEIVRKKPIFKEVQVT

SEQ ID NO: 24317 - protein, 40 aa, Artificial Sequence
  Cyclic GFR-binding peptide
  MOD_RES (5)..(39): Xaa is C or S
EGLEXVPTEERSVKMAKVRIKPHQGQHKEVQVFLQHNKXE

SEQ ID NO: 24318 - protein, 27 aa, Artificial Sequence
  Cyclic GFR-binding peptide
VQLSNITVQIMEIVRKKPIFIGEMSTL

SEQ ID NO: 24319 - protein, 36 aa, Artificial Sequence
  Cyclic GFR-binding peptide
  MOD_RES (36)..(36): Xaa is C or S
PSRVHHSNITVQIMEYVRKKPKLLGEMSRLEEHLEX

SEQ ID NO: 24320 - protein, 42 aa, Artificial Sequence
  Cyclic GFR-binding peptide
  MOD_RES (2)..(39)..(41): Xaa is C or S
QXRPTQVQLRSVKVAKVEIVRKKPIFKEVQVTLEDHLAXKXE

SEQ ID NO: 24321 - protein, 34 aa, Artificial Sequence
  Cyclic GFR-binding peptide
  MOD_RES (1)..(1): Xaa is C or S
XVPTGQRPVQMRKIRIKPHQGQHKKATVLEEHSQ

SEQ ID NO: 24322 - protein, 35 aa, Artificial Sequence
  Cyclic GFR-binding peptide
  MOD_RES (5)..(5): Xaa is C or S
SSVKXQPSRVHHSNITVQIMEYVRKKPKLLGEMSR

SEQ ID NO: 24323 - protein, 44 aa, Artificial Sequence
  Cyclic GFR-binding peptide
  MOD_RES (5)..(42)..(44): Xaa is C or S
SSVKXQPSRVHHRPVQVRKIEYVRKKPKLKKATVRLEEHLEXAX

SEQ ID NO: 24324 - protein, 31 aa, Artificial Sequence
  Cyclic GFR-binding peptide
QVQLSNITVQIMEIVRKKPIFLGEMSTLEDH

SEQ ID NO: 24325 - protein, 31 aa, Artificial Sequence
  Cyclic GFR-binding peptide
TEESNITMQIMRIKPHQGQHLGEMSFLQHNK

SEQ ID NO: 24326 - protein, 30 aa, Artificial Sequence
  Cyclic GFR-binding peptide
  MOD_RES (30)..(30): Xaa is C or S
RSVKVAKVEIVRKKPIFKEVQVTLEDHLAX

SEQ ID NO: 24327 - protein, 33 aa, Artificial Sequence
  Cyclic GFR-binding peptide
  MOD_RES (4)..(4): Xaa is C or S
GLEXVPTGQSNITMQIMRIKPHQGQHIGEMSLE

SEQ ID NO: 24328 - protein, 41 aa, Artificial Sequence
  Cyclic GFR-binding peptide
  MOD_RES (5)..(5): Xaa is C or S
SSVKXQPSRVHHSNITVQIMEYVRKKPKLIGEMSRLEEHLE

SEQ ID NO: 24329 - protein, 34 aa, Artificial Sequence
  Cyclic GFR-binding peptide
  MOD_RES (2)..(2): Xaa is C or S
EXVPTEESNITMQIMRIKPHQGQHLGEMSFLQHN

SEQ ID NO: 24330 - protein, 25 aa, Artificial Sequence
  Cyclic GFR-binding peptide
HHRPVQVRKIEYVRKKPKLKKATVR

SEQ ID NO: 24331 - protein, 39 aa, Artificial Sequence
  Cyclic GFR-binding peptide
  MOD_RES (5)..(5): Xaa is C or S
SSVKXQPSRVHHRPVQVRKIEYVRKKPKLKKATVRLEEH

SEQ ID NO: 24332 - protein, 42 aa, Artificial Sequence
  Cyclic GFR-binding peptide
  MOD_RES (5)..(42): Xaa is C or S
RNVQXRPTQVQLSNITVQIMEIVRKKPIFLGEMSTLEDHLAX

SEQ ID NO: 24333 - protein, 35 aa, Artificial Sequence
  Cyclic GFR-binding peptide
  MOD_RES (7)..(7): Xaa is C or S
NDEGLEXVPTEERSVKMAKVRIKPHQGQHKEVQVF

SEQ ID NO: 24334 - protein, 25 aa, Artificial Sequence
  Cyclic GFR-binding peptide
QSNITMQIMRIKPHQGQHIGEMSLE

SEQ ID NO: 24335 - protein, 34 aa, Artificial Sequence
  Cyclic GFR-binding peptide
  MOD_RES (34)..(34): Xaa is C or S
QVQLSNITVQIMEIVRKKPIFLGEMSTLEDHLAX

SEQ ID NO: 24336 - protein, 26 aa, Artificial Sequence
  Cyclic GFR-binding peptide
SNITVQIMEIVRKKPIFIGEMSTLED

SEQ ID NO: 24337 - protein, 29 aa, Artificial Sequence
  Cyclic GFR-binding peptide
VPTEESNITMQIMRIKPHQGQHLGEMSFL

SEQ ID NO: 24338 - protein, 33 aa, Artificial Sequence
  Cyclic GFR-binding peptide
  MOD_RES (30)..(32): Xaa is C or S
QRSVKMAKVRIKPHQGQHKEVQVLEEHSQXEXR

SEQ ID NO: 24339 - protein, 37 aa, Artificial Sequence
  Cyclic GFR-binding peptide
  MOD_RES (34)..(36): Xaa is C or S
QVQLSNITVQIMEIVRKKPIFLGEMSTLEDHLAXKXE

SEQ ID NO: 24340 - protein, 35 aa, Artificial Sequence
  Cyclic GFR-binding peptide
  MOD_RES (4)..(4): Xaa is C or S
GLEXVPTEESNITMQIMRIKPHQGQHLGEMSFLQH

SEQ ID NO: 24341 - protein, 30 aa, Artificial Sequence
  Cyclic GFR-binding peptide
PSRVHHSNITVQIMEYVRKKPKLIGEMSRL

SEQ ID NO: 24342 - protein, 39 aa, Artificial Sequence
  Cyclic GFR-binding peptide
  MOD_RES (2)..(39): Xaa is C or S
KXQPSRVHHSNITVQIMEYVRKKPKLLGEMSRLEEHLEX

SEQ ID NO: 24343 - protein, 32 aa, Artificial Sequence
  Cyclic GFR-binding peptide
  MOD_RES (32)..(32): Xaa is C or S
TEERPVQMRKIRIKPHQGQHKKATVFLQHNKX

SEQ ID NO: 24344 - protein, 37 aa, Artificial Sequence
  Cyclic GFR-binding peptide
  MOD_RES (7)..(7): Xaa is C or S
NDEGLEXVPTEERSVKMAKVRIKPHQGQHKEVQVFLQ

SEQ ID NO: 24345 - protein, 36 aa, Artificial Sequence
  Cyclic GFR-binding peptide
  MOD_RES (5)..(5): Xaa is C or S
EGLEXVPTGQRSVKMAKVRIKPHQGQHKEVQVLEEH

SEQ ID NO: 24346 - protein, 43 aa, Artificial Sequence
  Cyclic GFR-binding peptide
  MOD_RES (4)..(41)..(43): Xaa is C or S
SVKXQPSRVHHRPVQVRKIEYVRKKPKLKKATVRLEEHLEXAX

SEQ ID NO: 24347 - protein, 34 aa, Artificial Sequence
  Cyclic GFR-binding peptide
  MOD_RES (5)..(5): Xaa is C or S
EGLEXVPTGQRSVKMAKVRIKPHQGQHKEVQVLE

SEQ ID NO: 24348 - protein, 34 aa, Artificial Sequence
  Cyclic GFR-binding peptide
  MOD_RES (34)..(34): Xaa is C or S
VPTGQRPVQMRKIRIKPHQGQHKKATVLEEHSQX

SEQ ID NO: 24349 - protein, 41 aa, Artificial Sequence
  Cyclic GFR-binding peptide
  MOD_RES (5)..(39)..(41): Xaa is C or S
EGLEXVPTEERSVKMAKVRIKPHQGQHKEVQVFLQHNKXEX

SEQ ID NO: 24350 - protein, 39 aa, Artificial Sequence
  Cyclic GFR-binding peptide
  MOD_RES (6)..(6): Xaa is C or S
DEGLEXVPTGQRPVQMRKIRIKPHQGQHKKATVLEEHSQ

SEQ ID NO: 24351 - protein, 26 aa, Artificial Sequence
  Cyclic GFR-binding peptide
SNITMQIMRIKPHQGQHLGEMSFLQH

SEQ ID NO: 24352 - protein, 33 aa, Artificial Sequence
  Cyclic GFR-binding peptide
  MOD_RES (6)..(6): Xaa is C or S
DEGLEXVPTEESNITMQIMRIKPHQGQHLGEMS

SEQ ID NO: 24353 - protein, 39 aa, Artificial Sequence
  Cyclic GFR-binding peptide
  MOD_RES (6)..(6): Xaa is C or S
DEGLEXVPTEESNITMQIMRIKPHQGQHLGEMSFLQHNK

SEQ ID NO: 24354 - protein, 34 aa, Artificial Sequence
  Cyclic GFR-binding peptide
  MOD_RES (3)..(3): Xaa is C or S
LEXVPTEERPVQMRKIRIKPHQGQHKKATVFLQH

SEQ ID NO: 24355 - protein, 33 aa, Artificial Sequence
  Cyclic GFR-binding peptide
RPTQVQLRSVKVAKVEIVRKKPIFKEVQVTLED

SEQ ID NO: 24356 - protein, 36 aa, Artificial Sequence
  Cyclic GFR-binding peptide
  MOD_RES (33)..(35): Xaa is C or S
PTGQRSVKMAKVRIKPHQGQHKEVQVLEEHSQXEXR

SEQ ID NO: 24357 - protein, 38 aa, Artificial Sequence
  Cyclic GFR-binding peptide
  MOD_RES (7)..(7): Xaa is C or S
NDEGLEXVPTGQSNITMQIMRIKPHQGQHIGEMSLEEH

SEQ ID NO: 24358 - protein, 36 aa, Artificial Sequence
  Cyclic GFR-binding peptide
  MOD_RES (34)..(36): Xaa is C or S
RVHHSNITVQIMEYVRKKPKLIGEMSRLEEHLEXAX

SEQ ID NO: 24359 - protein, 33 aa, Artificial Sequence
  Cyclic GFR-binding peptide
  MOD_RES (31)..(33): Xaa is C or S
EERPVQMRKIRIKPHQGQHKKATVFLQHNKXEX

SEQ ID NO: 24360 - protein, 32 aa, Artificial Sequence
  Cyclic GFR-binding peptide
  MOD_RES (31)..(31): Xaa is C or S
EERSVKMAKVRIKPHQGQHKEVQVFLQHNKXE

SEQ ID NO: 24361 - protein, 36 aa, Artificial Sequence
  Cyclic GFR-binding peptide
  MOD_RES (33)..(35): Xaa is C or S
VQLSNITVQIMEIVRKKPIFLGEMSTLEDHLAXKXE

SEQ ID NO: 24362 - protein, 27 aa, Artificial Sequence
  Cyclic GFR-binding peptide
VPTEERSVKMAKVRIKPHQGQHKEVQV

SEQ ID NO: 24363 - protein, 33 aa, Artificial Sequence
  Cyclic GFR-binding peptide
QPSRVHHSNITVQIMEYVRKKPKLIGEMSRLEE

SEQ ID NO: 24364 - protein, 30 aa, Artificial Sequence
  Cyclic GFR-binding peptide
  MOD_RES (30)..(30): Xaa is C or S
SNITVQIMEIVRKKPIFLGEMSTLEDHLAX

SEQ ID NO: 24365 - protein, 24 aa, Artificial Sequence
  Cyclic GFR-binding peptide
HHSNITVQIMEYVRKKPKLLGEMS

SEQ ID NO: 24366 - protein, 28 aa, Artificial Sequence
  Cyclic GFR-binding peptide
TGQRSVKMAKVRIKPHQGQHKEVQVLEE

SEQ ID NO: 24367 - protein, 37 aa, Artificial Sequence
  Cyclic GFR-binding peptide
  MOD_RES (2)..(2): Xaa is C or S
KXQPSRVHHSNITVQIMEYVRKKPKLLGEMSRLEEHL

SEQ ID NO: 24368 - protein, 32 aa, Artificial Sequence
  Cyclic GFR-binding peptide
  MOD_RES (32)..(32): Xaa is C or S
TGQRSVKMAKVRIKPHQGQHKEVQVLEEHSQX

SEQ ID NO: 24369 - protein, 41 aa, Artificial Sequence
  Cyclic GFR-binding peptide
  MOD_RES (7)..(41): Xaa is C or S
NDEGLEXVPTGQRSVKMAKVRIKPHQGQHKEVQVLEEHSQX

SEQ ID NO: 24370 - protein, 28 aa, Artificial Sequence
  Cyclic GFR-binding peptide
  MOD_RES (1)..(1): Xaa is C or S
XVPTEESNITMQIMRIKPHQGQHLGEMS

SEQ ID NO: 24371 - protein, 29 aa, Artificial Sequence
  Cyclic GFR-binding peptide
QPSRVHHRPVQVRKIEYVRKKPKLKKATV

SEQ ID NO: 24372 - protein, 30 aa, Artificial Sequence
  Cyclic GFR-binding peptide
  MOD_RES (3)..(3): Xaa is C or S
LEXVPTEESNITMQIMRIKPHQGQHLGEMS

SEQ ID NO: 24373 - protein, 29 aa, Artificial Sequence
  Cyclic GFR-binding peptide
  MOD_RES (1)..(1): Xaa is C or S
XVPTEERSVKMAKVRIKPHQGQHKEVQVF

SEQ ID NO: 24374 - protein, 33 aa, Artificial Sequence
  Cyclic GFR-binding peptide
  MOD_RES (3)..(3): Xaa is C or S
VQXRPTQVQLSNITVQIMEIVRKKPIFIGEMST

SEQ ID NO: 24375 - protein, 34 aa, Artificial Sequence
  Cyclic GFR-binding peptide
  MOD_RES (2)..(2): Xaa is C or S
QXRPTQVQLRSVKVAKVEIVRKKPIFKEVQVTLE

SEQ ID NO: 24376 - protein, 44 aa, Artificial Sequence
  Cyclic GFR-binding peptide
  MOD_RES (5)..(42)..(44): Xaa is C or S
RNVQXRPTQVQLRSVKVAKVEIVRKKPIFKEVQVTLEDHLAXKX

SEQ ID NO: 24377 - protein, 26 aa, Artificial Sequence
  Cyclic GFR-binding peptide
PTGQRPVQMRKIRIKPHQGQHKKATV

SEQ ID NO: 24378 - protein, 32 aa, Artificial Sequence
  Cyclic GFR-binding peptide
  MOD_RES (2)..(2): Xaa is C or S
EXVPTEERSVKMAKVRIKPHQGQHKEVQVFLQ

SEQ ID NO: 24379 - protein, 38 aa, Artificial Sequence
  Cyclic GFR-binding peptide
  MOD_RES (3)..(3): Xaa is C or S
VKXQPSRVHHSNITVQIMEYVRKKPKLIGEMSRLEEHL

SEQ ID NO: 24380 - protein, 33 aa, Artificial Sequence
  Cyclic GFR-binding peptide
  MOD_RES (4)..(4): Xaa is C or S
SVKXQPSRVHHSNITVQIMEYVRKKPKLIGEMS

SEQ ID NO: 24381 - protein, 34 aa, Artificial Sequence
  Cyclic GFR-binding peptide
SRVHHSNITVQIMEYVRKKPKLIGEMSRLEEHLE

SEQ ID NO: 24382 - protein, 32 aa, Artificial Sequence
  Cyclic GFR-binding peptide
QVQLSNITVQIMEIVRKKPIFIGEMSTLEDHL

SEQ ID NO: 24383 - protein, 32 aa, Artificial Sequence
  Cyclic GFR-binding peptide
VQLSNITVQIMEIVRKKPIFLGEMSTLEDHLA

SEQ ID NO: 24384 - protein, 37 aa, Artificial Sequence
  Cyclic GFR-binding peptide
  MOD_RES (34)..(36): Xaa is C or S
VPTEERPVQMRKIRIKPHQGQHKKATVFLQHNKXEXR

SEQ ID NO: 24385 - protein, 36 aa, Artificial Sequence
  Cyclic GFR-binding peptide
  MOD_RES (5)..(5): Xaa is C or S
RNVQXRPTQVQLSNITVQIMEIVRKKPIFLGEMSTL

SEQ ID NO: 24386 - protein, 25 aa, Artificial Sequence
  Cyclic GFR-binding peptide
VHHSNITVQIMEYVRKKPKLIGEMS

SEQ ID NO: 24387 - protein, 29 aa, Artificial Sequence
  Cyclic GFR-binding peptide
PTEERPVQMRKIRIKPHQGQHKKATVFLQ

SEQ ID NO: 24388 - protein, 34 aa, Artificial Sequence
  Cyclic GFR-binding peptide
  MOD_RES (3)..(3): Xaa is C or S
VKXQPSRVHHSNITVQIMEYVRKKPKLIGEMSRL

SEQ ID NO: 24389 - protein, 32 aa, Artificial Sequence
  Cyclic GFR-binding peptide
  MOD_RES (3)..(3): Xaa is C or S
VKXQPSRVHHRPVQVRKIEYVRKKPKLKKATV

SEQ ID NO: 24390 - protein, 31 aa, Artificial Sequence
  Cyclic GFR-binding peptide
TQVQLRSVKVAKVEIVRKKPIFKEVQVTLED

SEQ ID NO: 24391 - protein, 33 aa, Artificial Sequence
  Cyclic GFR-binding peptide
PTQVQLRSVKVAKVEIVRKKPIFKEVQVTLEDH

SEQ ID NO: 24392 - protein, 30 aa, Artificial Sequence
  Cyclic GFR-binding peptide
  MOD_RES (2)..(2): Xaa is C or S
EXVPTEESNITMQIMRIKPHQGQHLGEMSF

SEQ ID NO: 24393 - protein, 28 aa, Artificial Sequence
  Cyclic GFR-binding peptide
PTEERPVQMRKIRIKPHQGQHKKATVFL

SEQ ID NO: 24394 - protein, 28 aa, Artificial Sequence
  Cyclic GFR-binding peptide
TQVQLSNITVQIMEIVRKKPIFIGEMST

SEQ ID NO: 24395 - protein, 26 aa, Artificial Sequence
  Cyclic GFR-binding peptide
VQLSNITVQIMEIVRKKPIFIGEMST

SEQ ID NO: 24396 - protein, 32 aa, Artificial Sequence
  Cyclic GFR-binding peptide
PTGQRSVKMAKVRIKPHQGQHKEVQVLEEHSQ

SEQ ID NO: 24397 - protein, 30 aa, Artificial Sequence
  Cyclic GFR-binding peptide
TQVQLRSVKVAKVEIVRKKPIFKEVQVTLE

SEQ ID NO: 24398 - protein, 35 aa, Artificial Sequence
  Cyclic GFR-binding peptide
  MOD_RES (34)..(34): Xaa is C or S
RVHHSNITVQIMEYVRKKPKLLGEMSRLEEHLEXA

SEQ ID NO: 24399 - protein, 40 aa, Artificial Sequence
  Cyclic GFR-binding peptide
  MOD_RES (37)..(39): Xaa is C or S
RPTQVQLSNITVQIMEIVRKKPIFIGEMSTLEDHLAXKXE

SEQ ID NO: 24400 - protein, 29 aa, Artificial Sequence
  Cyclic GFR-binding peptide
QVQLSNITVQIMEIVRKKPIFIGEMSTLE

SEQ ID NO: 24401 - protein, 45 aa, Artificial Sequence
  Cyclic GFR-binding peptide
  MOD_RES (5)..(42)..(44): Xaa is C or S
SSVKXQPSRVHHSNITVQIMEYVRKKPKLLGEMSRLEEHLEXAXA

SEQ ID NO: 24402 - protein, 34 aa, Artificial Sequence
  Cyclic GFR-binding peptide
  MOD_RES (34)..(34): Xaa is C or S
VPTGQRSVKMAKVRIKPHQGQHKEVQVLEEHSQX

SEQ ID NO: 24403 - protein, 29 aa, Artificial Sequence
  Cyclic GFR-binding peptide
QPSRVHHSNITVQIMEYVRKKPKLLGEMS

SEQ ID NO: 24404 - protein, 38 aa, Artificial Sequence
  Cyclic GFR-binding peptide
  MOD_RES (3)..(37): Xaa is C or S
LEXVPTGQSNITMQIMRIKPHQGQHIGEMSLEEHSQXE

SEQ ID NO: 24405 - protein, 38 aa, Artificial Sequence
  Cyclic GFR-binding peptide
  MOD_RES (1)..(35)..(37): Xaa is C or S
XVPTEERSVKMAKVRIKPHQGQHKEVQVFLQHNKXEXR

SEQ ID NO: 24406 - protein, 22 aa, Artificial Sequence
  Cyclic GFR-binding peptide
RSVKMAKVRIKPHQGQHKEVQV

SEQ ID NO: 24407 - protein, 33 aa, Artificial Sequence
  Cyclic GFR-binding peptide
  MOD_RES (3)..(3): Xaa is C or S
LEXVPTGQRPVQMRKIRIKPHQGQHKKATVLEE

SEQ ID NO: 24408 - protein, 29 aa, Artificial Sequence
  Cyclic GFR-binding peptide
PTEESNITMQIMRIKPHQGQHLGEMSFLQ

SEQ ID NO: 24409 - protein, 26 aa, Artificial Sequence
  Cyclic GFR-binding peptide
GQRPVQMRKIRIKPHQGQHKKATVLE

SEQ ID NO: 24410 - protein, 45 aa, Artificial Sequence
  Cyclic GFR-binding peptide
  MOD_RES (5)..(42)..(44): Xaa is C or S
SSVKXQPSRVHHRPVQVRKIEYVRKKPKLKKATVRLEEHLEXAXA

SEQ ID NO: 24411 - protein, 32 aa, Artificial Sequence
  Cyclic GFR-binding peptide
RVHHRPVQVRKIEYVRKKPKLKKATVRLEEHL

SEQ ID NO: 24412 - protein, 36 aa, Artificial Sequence
  Cyclic GFR-binding peptide
  MOD_RES (7)..(7): Xaa is C or S
NDEGLEXVPTEERSVKMAKVRIKPHQGQHKEVQVFL

SEQ ID NO: 24413 - protein, 34 aa, Artificial Sequence
  Cyclic GFR-binding peptide
  MOD_RES (34)..(34): Xaa is C or S
RVHHSNITVQIMEYVRKKPKLIGEMSRLEEHLEX

SEQ ID NO: 24414 - protein, 34 aa, Artificial Sequence
  Cyclic GFR-binding peptide
  MOD_RES (31)..(33): Xaa is C or S
LSNITVQIMEIVRKKPIFLGEMSTLEDHLAXKXE

SEQ ID NO: 24415 - protein, 30 aa, Artificial Sequence
  Cyclic GFR-binding peptide
  MOD_RES (29)..(29): Xaa is C or S
RSVKMAKVRIKPHQGQHKEVQVLEEHSQXE

SEQ ID NO: 24416 - protein, 32 aa, Artificial Sequence
  Cyclic GFR-binding peptide
  MOD_RES (4)..(4): Xaa is C or S
GLEXVPTGQRPVQMRKIRIKPHQGQHKKATVL

SEQ ID NO: 24417 - protein, 32 aa, Artificial Sequence
  Cyclic GFR-binding peptide
  MOD_RES (3)..(3): Xaa is C or S
VQXRPTQVQLSNITVQIMEIVRKKPIFLGEMS

SEQ ID NO: 24418 - protein, 35 aa, Artificial Sequence
  Cyclic GFR-binding peptide
  MOD_RES (1)..(1): Xaa is C or S
XRPTQVQLSNITVQIMEIVRKKPIFLGEMSTLEDH

SEQ ID NO: 24419 - protein, 27 aa, Artificial Sequence
  Cyclic GFR-binding peptide
TQVQLSNITVQIMEIVRKKPIFLGEMS

SEQ ID NO: 24420 - protein, 34 aa, Artificial Sequence
  Cyclic GFR-binding peptide
  MOD_RES (6)..(6): Xaa is C or S
DEGLEXVPTGQRSVKMAKVRIKPHQGQHKEVQVL

SEQ ID NO: 24421 - protein, 24 aa, Artificial Sequence
  Cyclic GFR-binding peptide
SNITVQIMEIVRKKPIFLGEMSTL

SEQ ID NO: 24422 - protein, 31 aa, Artificial Sequence
  Cyclic GFR-binding peptide
PTQVQLSNITVQIMEIVRKKPIFLGEMSTLE

SEQ ID NO: 24423 - protein, 26 aa, Artificial Sequence
  Cyclic GFR-binding peptide
EESNITMQIMRIKPHQGQHLGEMSFL

SEQ ID NO: 24424 - protein, 40 aa, Artificial Sequence
  Cyclic GFR-binding peptide
  MOD_RES (4)..(38)..(40): Xaa is C or S
GLEXVPTEESNITMQIMRIKPHQGQHLGEMSFLQHNKXEX

SEQ ID NO: 24425 - protein, 38 aa, Artificial Sequence
  Cyclic GFR-binding peptide
  MOD_RES (3)..(37): Xaa is C or S
LEXVPTEERSVKMAKVRIKPHQGQHKEVQVFLQHNKXE

SEQ ID NO: 24426 - protein, 34 aa, Artificial Sequence
  Cyclic GFR-binding peptide
  MOD_RES (4)..(4): Xaa is C or S
GLEXVPTGQRSVKMAKVRIKPHQGQHKEVQVLEE

SEQ ID NO: 24427 - protein, 27 aa, Artificial Sequence
  Cyclic GFR-binding peptide
HHSNITVQIMEYVRKKPKLIGEMSRLE

SEQ ID NO: 24428 - protein, 33 aa, Artificial Sequence
  Cyclic GFR-binding peptide
  MOD_RES (33)..(33): Xaa is C or S
PTGQRSVKMAKVRIKPHQGQHKEVQVLEEHSQX

SEQ ID NO: 24429 - protein, 33 aa, Artificial Sequence
  Cyclic GFR-binding peptide
PTQVQLSNITVQIMEIVRKKPIFLGEMSTLEDH

SEQ ID NO: 24430 - protein, 32 aa, Artificial Sequence
  Cyclic GFR-binding peptide
QPSRVHHSNITVQIMEYVRKKPKLIGEMSRLE

SEQ ID NO: 24431 - protein, 28 aa, Artificial Sequence
  Cyclic GFR-binding peptide
SRVHHRPVQVRKIEYVRKKPKLKKATVR

SEQ ID NO: 24432 - protein, 39 aa, Artificial Sequence
  Cyclic GFR-binding peptide
  MOD_RES (2)..(36)..(38): Xaa is C or S
EXVPTEERSVKMAKVRIKPHQGQHKEVQVFLQHNKXEXR

SEQ ID NO: 24433 - protein, 30 aa, Artificial Sequence
  Cyclic GFR-binding peptide
  MOD_RES (1)..(1): Xaa is C or S
XQPSRVHHRPVQVRKIEYVRKKPKLKKATV

SEQ ID NO: 24434 - protein, 29 aa, Artificial Sequence
  Cyclic GFR-binding peptide
RPTQVQLSNITVQIMEIVRKKPIFLGEMS

SEQ ID NO: 24435 - protein, 40 aa, Artificial Sequence
  Cyclic GFR-binding peptide
  MOD_RES (2)..(39): Xaa is C or S
KXQPSRVHHSNITVQIMEYVRKKPKLIGEMSRLEEHLEXA

SEQ ID NO: 24436 - protein, 36 aa, Artificial Sequence
  Cyclic GFR-binding peptide
  MOD_RES (34)..(36): Xaa is C or S
VPTGQRPVQMRKIRIKPHQGQHKKATVLEEHSQXEX

SEQ ID NO: 24437 - protein, 31 aa, Artificial Sequence
  Cyclic GFR-binding peptide
  MOD_RES (1)..(1): Xaa is C or S
XVPTEERSVKMAKVRIKPHQGQHKEVQVFLQ

SEQ ID NO: 24438 - protein, 28 aa, Artificial Sequence
  Cyclic GFR-binding peptide
TQVQLRSVKVAKVEIVRKKPIFKEVQVT

SEQ ID NO: 24439 - protein, 35 aa, Artificial Sequence
  Cyclic GFR-binding peptide
PSRVHHSNITVQIMEYVRKKPKLLGEMSRLEEHLE

SEQ ID NO: 24440 - protein, 34 aa, Artificial Sequence
  Cyclic GFR-binding peptide
  MOD_RES (32)..(34): Xaa is C or S
TGQRPVQMRKIRIKPHQGQHKKATVLEEHSQXEX

SEQ ID NO: 24441 - protein, 34 aa, Artificial Sequence
  Cyclic GFR-binding peptide
  MOD_RES (33)..(33): Xaa is C or S
VQLSNITVQIMEIVRKKPIFIGEMSTLEDHLAXK

SEQ ID NO: 24442 - protein, 34 aa, Artificial Sequence
  Cyclic GFR-binding peptide
  MOD_RES (32)..(34): Xaa is C or S
HHRPVQVRKIEYVRKKPKLKKATVRLEEHLEXAX

SEQ ID NO: 24443 - protein, 32 aa, Artificial Sequence
  Cyclic GFR-binding peptide
VPTGQRPVQMRKIRIKPHQGQHKKATVLEEHS

SEQ ID NO: 24444 - protein, 44 aa, Artificial Sequence
  Cyclic GFR-binding peptide
  MOD_RES (4)..(41)..(43): Xaa is C or S
SVKXQPSRVHHRPVQVRKIEYVRKKPKLKKATVRLEEHLEXAXA

SEQ ID NO: 24445 - protein, 31 aa, Artificial Sequence
  Cyclic GFR-binding peptide
  MOD_RES (30)..(30): Xaa is C or S
ERSVKMAKVRIKPHQGQHKEVQVFLQHNKXE

SEQ ID NO: 24446 - protein, 29 aa, Artificial Sequence
  Cyclic GFR-binding peptide
QLRSVKVAKVEIVRKKPIFKEVQVTLEDH

SEQ ID NO: 24447 - protein, 35 aa, Artificial Sequence
  Cyclic GFR-binding peptide
  MOD_RES (33)..(35): Xaa is C or S
VHHSNITVQIMEYVRKKPKLIGEMSRLEEHLEXAX

SEQ ID NO: 24448 - protein, 38 aa, Artificial Sequence
  Cyclic GFR-binding peptide
  MOD_RES (1)..(38): Xaa is C or S
XRPTQVQLSNITVQIMEIVRKKPIFLGEMSTLEDHLAX

SEQ ID NO: 24449 - protein, 29 aa, Artificial Sequence
  Cyclic GFR-binding peptide
TEESNITMQIMRIKPHQGQHLGEMSFLQH

SEQ ID NO: 24450 - protein, 40 aa, Artificial Sequence
  Cyclic GFR-binding peptide
  MOD_RES (6)..(40): Xaa is C or S
DEGLEXVPTEESNITMQIMRIKPHQGQHLGEMSFLQHNKX

SEQ ID NO: 24451 - protein, 24 aa, Artificial Sequence
  Cyclic GFR-binding peptide
RSVKMAKVRIKPHQGQHKEVQVFL

SEQ ID NO: 24452 - protein, 42 aa, Artificial Sequence
  Cyclic GFR-binding peptide
  MOD_RES (3)..(40)..(42): Xaa is C or S
VQXRPTQVQLSNITVQIMEIVRKKPIFLGEMSTLEDHLAXKX

SEQ ID NO: 24453 - protein, 26 aa, Artificial Sequence
  Cyclic GFR-binding peptide
HHRPVQVRKIEYVRKKPKLKKATVRL

SEQ ID NO: 24454 - protein, 35 aa, Artificial Sequence
  Cyclic GFR-binding peptide
  MOD_RES (34)..(34): Xaa is C or S
RVHHSNITVQIMEYVRKKPKLIGEMSRLEEHLEXA

SEQ ID NO: 24455 - protein, 23 aa, Artificial Sequence
  Cyclic GFR-binding peptide
RPVQMRKIRIKPHQGQHKKATVL

SEQ ID NO: 24456 - protein, 23 aa, Artificial Sequence
  Cyclic GFR-binding peptide
RPVQMRKIRIKPHQGQHKKATVF

SEQ ID NO: 24457 - protein, 26 aa, Artificial Sequence
  Cyclic GFR-binding peptide
LRSVKVAKVEIVRKKPIFKEVQVTLE

SEQ ID NO: 24458 - protein, 33 aa, Artificial Sequence
  Cyclic GFR-binding peptide
  MOD_RES (32)..(32): Xaa is C or S
TGQSNITMQIMRIKPHQGQHIGEMSLEEHSQXE

SEQ ID NO: 24459 - protein, 37 aa, Artificial Sequence
  Cyclic GFR-binding peptide
  MOD_RES (3)..(37): Xaa is C or S
LEXVPTEERSVKMAKVRIKPHQGQHKEVQVFLQHNKX

SEQ ID NO: 24460 - protein, 31 aa, Artificial Sequence
  Cyclic GFR-binding peptide
SRVHHSNITVQIMEYVRKKPKLLGEMSRLEE

SEQ ID NO: 24461 - protein, 30 aa, Artificial Sequence
  Cyclic GFR-binding peptide
  MOD_RES (3)..(3): Xaa is C or S
LEXVPTEERPVQMRKIRIKPHQGQHKKATV

SEQ ID NO: 24462 - protein, 28 aa, Artificial Sequence
  Cyclic GFR-binding peptide
RPVQMRKIRIKPHQGQHKKATVFLQHNK

SEQ ID NO: 24463 - protein, 28 aa, Artificial Sequence
  Cyclic GFR-binding peptide
PTGQRSVKMAKVRIKPHQGQHKEVQVLE

SEQ ID NO: 24464 - protein, 33 aa, Artificial Sequence
  Cyclic GFR-binding peptide
  MOD_RES (30)..(32): Xaa is C or S
ERSVKMAKVRIKPHQGQHKEVQVFLQHNKXEXR

SEQ ID NO: 24465 - protein, 28 aa, Artificial Sequence
  Cyclic GFR-binding peptide
TEESNITMQIMRIKPHQGQHLGEMSFLQ

SEQ ID NO: 24466 - protein, 41 aa, Artificial Sequence
  Cyclic GFR-binding peptide
  MOD_RES (4)..(41): Xaa is C or S
NVQXRPTQVQLRSVKVAKVEIVRKKPIFKEVQVTLEDHLAX

SEQ ID NO: 24467 - protein, 28 aa, Artificial Sequence
  Cyclic GFR-binding peptide
LSNITVQIMEIVRKKPIFIGEMSTLEDH

SEQ ID NO: 24468 - protein, 26 aa, Artificial Sequence
  Cyclic GFR-binding peptide
QVQLSNITVQIMEIVRKKPIFLGEMS

SEQ ID NO: 24469 - protein, 30 aa, Artificial Sequence
  Cyclic GFR-binding peptide
PTQVQLSNITVQIMEIVRKKPIFLGEMSTL

SEQ ID NO: 24470 - protein, 31 aa, Artificial Sequence
  Cyclic GFR-binding peptide
  MOD_RES (29)..(31): Xaa is C or S
SNITMQIMRIKPHQGQHLGEMSFLQHNKXEX

SEQ ID NO: 24471 - protein, 40 aa, Artificial Sequence
  Cyclic GFR-binding peptide
  MOD_RES (4)..(38)..(40): Xaa is C or S
GLEXVPTEERSVKMAKVRIKPHQGQHKEVQVFLQHNKXEX

SEQ ID NO: 24472 - protein, 30 aa, Artificial Sequence
  Cyclic GFR-binding peptide
VPTEERPVQMRKIRIKPHQGQHKKATVFLQ

SEQ ID NO: 24473 - protein, 38 aa, Artificial Sequence
  Cyclic GFR-binding peptide
  MOD_RES (7)..(7): Xaa is C or S
NDEGLEXVPTEERSVKMAKVRIKPHQGQHKEVQVFLQH

SEQ ID NO: 24474 - protein, 28 aa, Artificial Sequence
  Cyclic GFR-binding peptide
GQRPVQMRKIRIKPHQGQHKKATVLEEH

SEQ ID NO: 24475 - protein, 35 aa, Artificial Sequence
  Cyclic GFR-binding peptide
  MOD_RES (1)..(35): Xaa is C or S
XVPTGQRPVQMRKIRIKPHQGQHKKATVLEEHSQX

SEQ ID NO: 24476 - protein, 38 aa, Artificial Sequence
  Cyclic GFR-binding peptide
  MOD_RES (37)..(37): Xaa is C or S
RPTQVQLRSVKVAKVEIVRKKPIFKEVQVTLEDHLAXK

SEQ ID NO: 24477 - protein, 24 aa, Artificial Sequence
  Cyclic GFR-binding peptide
HHRPVQVRKIEYVRKKPKLKKATV

SEQ ID NO: 24478 - protein, 34 aa, Artificial Sequence
  Cyclic GFR-binding peptide
  MOD_RES (5)..(5): Xaa is C or S
SSVKXQPSRVHHSNITVQIMEYVRKKPKLIGEMS

SEQ ID NO: 24479 - protein, 32 aa, Artificial Sequence
  Cyclic GFR-binding peptide
TQVQLRSVKVAKVEIVRKKPIFKEVQVTLEDH

SEQ ID NO: 24480 - protein, 38 aa, Artificial Sequence
  Cyclic GFR-binding peptide
  MOD_RES (36)..(38): Xaa is C or S
PSRVHHSNITVQIMEYVRKKPKLLGEMSRLEEHLEXAX

SEQ ID NO: 24481 - protein, 29 aa, Artificial Sequence
  Cyclic GFR-binding peptide
EERSVKMAKVRIKPHQGQHKEVQVFLQHN

SEQ ID NO: 24482 - protein, 30 aa, Artificial Sequence
  Cyclic GFR-binding peptide
TGQRPVQMRKIRIKPHQGQHKKATVLEEHS

SEQ ID NO: 24483 - protein, 34 aa, Artificial Sequence
  Cyclic GFR-binding peptide
  MOD_RES (2)..(2): Xaa is C or S
EXVPTEERSVKMAKVRIKPHQGQHKEVQVFLQHN

SEQ ID NO: 24484 - protein, 33 aa, Artificial Sequence
  Cyclic GFR-binding peptide
  MOD_RES (31)..(33): Xaa is C or S
GQSNITMQIMRIKPHQGQHIGEMSLEEHSQXEX

SEQ ID NO: 24485 - protein, 25 aa, Artificial Sequence
  Cyclic GFR-binding peptide
GQSNITMQIMRIKPHQGQHIGEMSL

SEQ ID NO: 24486 - protein, 30 aa, Artificial Sequence
  Cyclic GFR-binding peptide
  MOD_RES (30)..(30): Xaa is C or S
SNITVQIMEYVRKKPKLLGEMSRLEEHLEX

SEQ ID NO: 24487 - protein, 36 aa, Artificial Sequence
  Cyclic GFR-binding peptide
QPSRVHHRPVQVRKIEYVRKKPKLKKATVRLEEHLE

SEQ ID NO: 24488 - protein, 36 aa, Artificial Sequence
  Cyclic GFR-binding peptide
  MOD_RES (36)..(36): Xaa is C or S
PSRVHHRPVQVRKIEYVRKKPKLKKATVRLEEHLEX

SEQ ID NO: 24489 - protein, 31 aa, Artificial Sequence
  Cyclic GFR-binding peptide
  MOD_RES (2)..(2): Xaa is C or S
QXRPTQVQLSNITVQIMEIVRKKPIFLGEMS

SEQ ID NO: 24490 - protein, 33 aa, Artificial Sequence
  Cyclic GFR-binding peptide
PSRVHHRPVQVRKIEYVRKKPKLKKATVRLEEH

SEQ ID NO: 24491 - protein, 35 aa, Artificial Sequence
  Cyclic GFR-binding peptide
  MOD_RES (3)..(3): Xaa is C or S
LEXVPTGQRSVKMAKVRIKPHQGQHKEVQVLEEHS

SEQ ID NO: 24492 - protein, 30 aa, Artificial Sequence
  Cyclic GFR-binding peptide
VQLRSVKVAKVEIVRKKPIFKEVQVTLEDH

SEQ ID NO: 24493 - protein, 35 aa, Artificial Sequence
  Cyclic GFR-binding peptide
  MOD_RES (32)..(34): Xaa is C or S
TEERSVKMAKVRIKPHQGQHKEVQVFLQHNKXEXR

SEQ ID NO: 24494 - protein, 34 aa, Artificial Sequence
  Cyclic GFR-binding peptide
  MOD_RES (1)..(1): Xaa is C or S
XVPTEERPVQMRKIRIKPHQGQHKKATVFLQHNK

SEQ ID NO: 24495 - protein, 36 aa, Artificial Sequence
  Cyclic GFR-binding peptide
RPTQVQLSNITVQIMEIVRKKPIFLGEMSTLEDHLA

SEQ ID NO: 24496 - protein, 44 aa, Artificial Sequence
  Cyclic GFR-binding peptide
  MOD_RES (4)..(41)..(43): Xaa is C or S
NVQXRPTQVQLRSVKVAKVEIVRKKPIFKEVQVTLEDHLAXKXE

SEQ ID NO: 24497 - protein, 25 aa, Artificial Sequence
  Cyclic GFR-binding peptide
RPVQMRKIRIKPHQGQHKKATVFLQ

SEQ ID NO: 24498 - protein, 31 aa, Artificial Sequence
  Cyclic GFR-binding peptide
  MOD_RES (4)..(4): Xaa is C or S
GLEXVPTEESNITMQIMRIKPHQGQHLGEMS

SEQ ID NO: 24499 - protein, 30 aa, Artificial Sequence
  Cyclic GFR-binding peptide
  MOD_RES (1)..(1): Xaa is C or S
XQPSRVHHSNITVQIMEYVRKKPKLLGEMS

SEQ ID NO: 24500 - protein, 27 aa, Artificial Sequence
  Cyclic GFR-binding peptide
HSNITVQIMEYVRKKPKLLGEMSRLEE

SEQ ID NO: 24501 - protein, 34 aa, Artificial Sequence
  Cyclic GFR-binding peptide
  MOD_RES (3)..(3): Xaa is C or S
VQXRPTQVQLRSVKVAKVEIVRKKPIFKEVQVTL

SEQ ID NO: 24502 - protein, 34 aa, Artificial Sequence
  Cyclic GFR-binding peptide
  MOD_RES (7)..(7): Xaa is C or S
NDEGLEXVPTGQRPVQMRKIRIKPHQGQHKKATV

SEQ ID NO: 24503 - protein, 44 aa, Artificial Sequence
  Cyclic GFR-binding peptide
  MOD_RES (4)..(41)..(43): Xaa is C or S
SVKXQPSRVHHSNITVQIMEYVRKKPKLLGEMSRLEEHLEXAXA

SEQ ID NO: 24504 - protein, 40 aa, Artificial Sequence
  Cyclic GFR-binding peptide
  MOD_RES (4)..(4): Xaa is C or S
NVQXRPTQVQLRSVKVAKVEIVRKKPIFKEVQVTLEDHLA

SEQ ID NO: 24505 - protein, 24 aa, Artificial Sequence
  Cyclic GFR-binding peptide
LSNITVQIMEIVRKKPIFLGEMST

SEQ ID NO: 24506 - protein, 31 aa, Artificial Sequence
  Cyclic GFR-binding peptide
  MOD_RES (4)..(4): Xaa is C or S
GLEXVPTGQRPVQMRKIRIKPHQGQHKKATV

SEQ ID NO: 24507 - protein, 41 aa, Artificial Sequence
  Cyclic GFR-binding peptide
  MOD_RES (3)..(40): Xaa is C or S
VKXQPSRVHHRPVQVRKIEYVRKKPKLKKATVRLEEHLEXA

SEQ ID NO: 24508 - protein, 36 aa, Artificial Sequence
  Cyclic GFR-binding peptide
  MOD_RES (4)..(4): Xaa is C or S
SVKXQPSRVHHSNITVQIMEYVRKKPKLLGEMSRLE

SEQ ID NO: 24509 - protein, 41 aa, Artificial Sequence
  Cyclic GFR-binding peptide
  MOD_RES (1)..(38)..(40): Xaa is C or S
XQPSRVHHSNITVQIMEYVRKKPKLLGEMSRLEEHLEXAXA

SEQ ID NO: 24510 - protein, 38 aa, Artificial Sequence
  Cyclic GFR-binding peptide
  MOD_RES (6)..(6): Xaa is C or S
DEGLEXVPTEERSVKMAKVRIKPHQGQHKEVQVFLQHN

SEQ ID NO: 24511 - protein, 39 aa, Artificial Sequence
  Cyclic GFR-binding peptide
  MOD_RES (7)..(7): Xaa is C or S
NDEGLEXVPTGQRPVQMRKIRIKPHQGQHKKATVLEEHS

SEQ ID NO: 24512 - protein, 30 aa, Artificial Sequence
  Cyclic GFR-binding peptide
RPTQVQLSNITVQIMEIVRKKPIFIGEMST

SEQ ID NO: 24513 - protein, 28 aa, Artificial Sequence
  Cyclic GFR-binding peptide
VHHRPVQVRKIEYVRKKPKLKKATVRLE

SEQ ID NO: 24514 - protein, 34 aa, Artificial Sequence
  Cyclic GFR-binding peptide
  MOD_RES (2)..(2): Xaa is C or S
EXVPTGQRPVQMRKIRIKPHQGQHKKATVLEEHS

SEQ ID NO: 24515 - protein, 33 aa, Artificial Sequence
  Cyclic GFR-binding peptide
  MOD_RES (3)..(3): Xaa is C or S
VKXQPSRVHHSNITVQIMEYVRKKPKLIGEMSR

SEQ ID NO: 24516 - protein, 34 aa, Artificial Sequence
  Cyclic GFR-binding peptide
  MOD_RES (4)..(4): Xaa is C or S
SVKXQPSRVHHRPVQVRKIEYVRKKPKLKKATVR

SEQ ID NO: 24517 - protein, 33 aa, Artificial Sequence
  Cyclic GFR-binding peptide
  MOD_RES (4)..(4): Xaa is C or S
NVQXRPTQVQLSNITVQIMEIVRKKPIFLGEMS

SEQ ID NO: 24518 - protein, 25 aa, Artificial Sequence
  Cyclic GFR-binding peptide
RSVKMAKVRIKPHQGQHKEVQVLEE

SEQ ID NO: 24519 - protein, 37 aa, Artificial Sequence
  Cyclic GFR-binding peptide
  MOD_RES (35)..(37): Xaa is C or S
SRVHHSNITVQIMEYVRKKPKLIGEMSRLEEHLEXAX

SEQ ID NO: 24520 - protein, 26 aa, Artificial Sequence
  Cyclic GFR-binding peptide
EERPVQMRKIRIKPHQGQHKKATVFL

SEQ ID NO: 24521 - protein, 32 aa, Artificial Sequence
  Cyclic GFR-binding peptide
  MOD_RES (32)..(32): Xaa is C or S
TEERSVKMAKVRIKPHQGQHKEVQVFLQHNKX

SEQ ID NO: 24522 - protein, 36 aa, Artificial Sequence
  Cyclic GFR-binding peptide
  MOD_RES (7)..(7): Xaa is C or S
NDEGLEXVPTGQRSVKMAKVRIKPHQGQHKEVQVLE

SEQ ID NO: 24523 - protein, 33 aa, Artificial Sequence
  Cyclic GFR-binding peptide
  MOD_RES (5)..(5): Xaa is C or S
EGLEXVPTEERPVQMRKIRIKPHQGQHKKATVF

SEQ ID NO: 24524 - protein, 34 aa, Artificial Sequence
  Cyclic GFR-binding peptide
  MOD_RES (4)..(4): Xaa is C or S
GLEXVPTEERSVKMAKVRIKPHQGQHKEVQVFLQ

SEQ ID NO: 24525 - protein, 40 aa, Artificial Sequence
  Cyclic GFR-binding peptide
  MOD_RES (7)..(7): Xaa is C or S
NDEGLEXVPTEESNITMQIMRIKPHQGQHLGEMSFLQHNK

SEQ ID NO: 24526 - protein, 37 aa, Artificial Sequence
  Cyclic GFR-binding peptide
  MOD_RES (5)..(5): Xaa is C or S
EGLEXVPTGQRSVKMAKVRIKPHQGQHKEVQVLEEHS

SEQ ID NO: 24527 - protein, 34 aa, Artificial Sequence
  Cyclic GFR-binding peptide
  MOD_RES (6)..(6): Xaa is C or S
DEGLEXVPTEERSVKMAKVRIKPHQGQHKEVQVF

SEQ ID NO: 24528 - protein, 41 aa, Artificial Sequence
  Cyclic GFR-binding peptide
  MOD_RES (6)..(40): Xaa is C or S
DEGLEXVPTGQRSVKMAKVRIKPHQGQHKEVQVLEEHSQXE

SEQ ID NO: 24529 - protein, 41 aa, Artificial Sequence
  Cyclic GFR-binding peptide
  MOD_RES (4)..(41): Xaa is C or S
NVQXRPTQVQLSNITVQIMEIVRKKPIFLGEMSTLEDHLAX

SEQ ID NO: 24530 - protein, 40 aa, Artificial Sequence
  Cyclic GFR-binding peptide
  MOD_RES (5)..(39): Xaa is C or S
EGLEXVPTGQSNITMQIMRIKPHQGQHIGEMSLEEHSQXE

SEQ ID NO: 24531 - protein, 24 aa, Artificial Sequence
  Cyclic GFR-binding peptide
ESNITMQIMRIKPHQGQHLGEMSF

SEQ ID NO: 24532 - protein, 27 aa, Artificial Sequence
  Cyclic GFR-binding peptide
HHRPVQVRKIEYVRKKPKLKKATVRLE

SEQ ID NO: 24533 - protein, 29 aa, Artificial Sequence
  Cyclic GFR-binding peptide
TQVQLSNITVQIMEIVRKKPIFLGEMSTL

SEQ ID NO: 24534 - protein, 28 aa, Artificial Sequence
  Cyclic GFR-binding peptide
SNITVQIMEYVRKKPKLIGEMSRLEEHL

SEQ ID NO: 24535 - protein, 27 aa, Artificial Sequence
  Cyclic GFR-binding peptide
SRVHHSNITVQIMEYVRKKPKLIGEMS

SEQ ID NO: 24536 - protein, 36 aa, Artificial Sequence
  Cyclic GFR-binding peptide
  MOD_RES (3)..(3): Xaa is C or S
VQXRPTQVQLSNITVQIMEIVRKKPIFIGEMSTLED

SEQ ID NO: 24537 - protein, 32 aa, Artificial Sequence
  Cyclic GFR-binding peptide
  MOD_RES (31)..(31): Xaa is C or S
EESNITMQIMRIKPHQGQHLGEMSFLQHNKXE

SEQ ID NO: 24538 - protein, 36 aa, Artificial Sequence
  Cyclic GFR-binding peptide
  MOD_RES (36)..(36): Xaa is C or S
PTQVQLSNITVQIMEIVRKKPIFLGEMSTLEDHLAX

SEQ ID NO: 24539 - protein, 42 aa, Artificial Sequence
  Cyclic GFR-binding peptide
  MOD_RES (7)..(41): Xaa is C or S
NDEGLEXVPTGQSNITMQIMRIKPHQGQHIGEMSLEEHSQXE

SEQ ID NO: 24540 - protein, 38 aa, Artificial Sequence
  Cyclic GFR-binding peptide
  MOD_RES (36)..(38): Xaa is C or S
PTQVQLSNITVQIMEIVRKKPIFLGEMSTLEDHLAXKX

SEQ ID NO: 24541 - protein, 32 aa, Artificial Sequence
  Cyclic GFR-binding peptide
  MOD_RES (32)..(32): Xaa is C or S
TGQSNITMQIMRIKPHQGQHIGEMSLEEHSQX

SEQ ID NO: 24542 - protein, 23 aa, Artificial Sequence
  Cyclic GFR-binding peptide
LSNITVQIMEIVRKKPIFIGEMS

SEQ ID NO: 24543 - protein, 35 aa, Artificial Sequence
  Cyclic GFR-binding peptide
  MOD_RES (33)..(35): Xaa is C or S
PTEERPVQMRKIRIKPHQGQHKKATVFLQHNKXEX

SEQ ID NO: 24544 - protein, 40 aa, Artificial Sequence
  Cyclic GFR-binding peptide
  MOD_RES (4)..(38)..(40): Xaa is C or S
GLEXVPTGQSNITMQIMRIKPHQGQHIGEMSLEEHSQXEX

SEQ ID NO: 24545 - protein, 36 aa, Artificial Sequence
  Cyclic GFR-binding peptide
  MOD_RES (33)..(35): Xaa is C or S
VHHRPVQVRKIEYVRKKPKLKKATVRLEEHLEXAXA

SEQ ID NO: 24546 - protein, 43 aa, Artificial Sequence
  Cyclic GFR-binding peptide
  MOD_RES (6)..(40)..(42): Xaa is C or S
DEGLEXVPTGQSNITMQIMRIKPHQGQHIGEMSLEEHSQXEXR

SEQ ID NO: 24547 - protein, 31 aa, Artificial Sequence
  Cyclic GFR-binding peptide
  MOD_RES (31)..(31): Xaa is C or S
EESNITMQIMRIKPHQGQHLGEMSFLQHNKX

SEQ ID NO: 24548 - protein, 33 aa, Artificial Sequence
  Cyclic GFR-binding peptide
  MOD_RES (32)..(32): Xaa is C or S
TEESNITMQIMRIKPHQGQHLGEMSFLQHNKXE

SEQ ID NO: 24549 - protein, 27 aa, Artificial Sequence
  Cyclic GFR-binding peptide
VHHRPVQVRKIEYVRKKPKLKKATVRL

SEQ ID NO: 24550 - protein, 28 aa, Artificial Sequence
  Cyclic GFR-binding peptide
QLRSVKVAKVEIVRKKPIFKEVQVTLED

SEQ ID NO: 24551 - protein, 28 aa, Artificial Sequence
  Cyclic GFR-binding peptide
RPVQVRKIEYVRKKPKLKKATVRLEEHL

SEQ ID NO: 24552 - protein, 28 aa, Artificial Sequence
  Cyclic GFR-binding peptide
QVQLSNITVQIMEIVRKKPIFIGEMSTL

SEQ ID NO: 24553 - protein, 29 aa, Artificial Sequence
  Cyclic GFR-binding peptide
SNITVQIMEIVRKKPIFLGEMSTLEDHLA

SEQ ID NO: 24554 - protein, 38 aa, Artificial Sequence
  Cyclic GFR-binding peptide
  MOD_RES (4)..(4): Xaa is C or S
NVQXRPTQVQLSNITVQIMEIVRKKPIFIGEMSTLEDH

SEQ ID NO: 24555 - protein, 35 aa, Artificial Sequence
  Cyclic GFR-binding peptide
  MOD_RES (35)..(35): Xaa is C or S
SRVHHSNITVQIMEYVRKKPKLLGEMSRLEEHLEX

SEQ ID NO: 24556 - protein, 32 aa, Artificial Sequence
  Cyclic GFR-binding peptide
  MOD_RES (5)..(5): Xaa is C or S
EGLEXVPTGQRPVQMRKIRIKPHQGQHKKATV

SEQ ID NO: 24557 - protein, 41 aa, Artificial Sequence
  Cyclic GFR-binding peptide
  MOD_RES (5)..(39)..(41): Xaa is C or S
EGLEXVPTGQSNITMQIMRIKPHQGQHIGEMSLEEHSQXEX

SEQ ID NO: 24558 - protein, 26 aa, Artificial Sequence
  Cyclic GFR-binding peptide
TEERPVQMRKIRIKPHQGQHKKATVF

SEQ ID NO: 24559 - protein, 39 aa, Artificial Sequence
  Cyclic GFR-binding peptide
  MOD_RES (5)..(5): Xaa is C or S
RNVQXRPTQVQLSNITVQIMEIVRKKPIFIGEMSTLEDH

SEQ ID NO: 24560 - protein, 38 aa, Artificial Sequence
  Cyclic GFR-binding peptide
  MOD_RES (37)..(37): Xaa is C or S
QPSRVHHSNITVQIMEYVRKKPKLIGEMSRLEEHLEXA

SEQ ID NO: 24561 - protein, 30 aa, Artificial Sequence
  Cyclic GFR-binding peptide
PTEERPVQMRKIRIKPHQGQHKKATVFLQH

SEQ ID NO: 24562 - protein, 31 aa, Artificial Sequence
  Cyclic GFR-binding peptide
  MOD_RES (30)..(30): Xaa is C or S
RSVKVAKVEIVRKKPIFKEVQVTLEDHLAXK

SEQ ID NO: 24563 - protein, 40 aa, Artificial Sequence
  Cyclic GFR-binding peptide
  MOD_RES (2)..(39): Xaa is C or S
QXRPTQVQLSNITVQIMEIVRKKPIFLGEMSTLEDHLAXK

SEQ ID NO: 24564 - protein, 30 aa, Artificial Sequence
  Cyclic GFR-binding peptide
  MOD_RES (29)..(29): Xaa is C or S
RPVQMRKIRIKPHQGQHKKATVFLQHNKXE

SEQ ID NO: 24565 - protein, 29 aa, Artificial Sequence
  Cyclic GFR-binding peptide
PTQVQLSNITVQIMEIVRKKPIFIGEMST

SEQ ID NO: 24566 - protein, 39 aa, Artificial Sequence
  Cyclic GFR-binding peptide
  MOD_RES (5)..(5): Xaa is C or S
SSVKXQPSRVHHSNITVQIMEYVRKKPKLIGEMSRLEEH

SEQ ID NO: 24567 - protein, 31 aa, Artificial Sequence
  Cyclic GFR-binding peptide
  MOD_RES (1)..(1): Xaa is C or S
XRPTQVQLSNITVQIMEIVRKKPIFLGEMST

SEQ ID NO: 24568 - protein, 31 aa, Artificial Sequence
  Cyclic GFR-binding peptide
  MOD_RES (2)..(2): Xaa is C or S
EXVPTEERPVQMRKIRIKPHQGQHKKATVFL

SEQ ID NO: 24569 - protein, 40 aa, Artificial Sequence
  Cyclic GFR-binding peptide
  MOD_RES (5)..(5): Xaa is C or S
SSVKXQPSRVHHSNITVQIMEYVRKKPKLLGEMSRLEEHL

SEQ ID NO: 24570 - protein, 31 aa, Artificial Sequence
  Cyclic GFR-binding peptide
  MOD_RES (29)..(31): Xaa is C or S
SNITMQIMRIKPHQGQHIGEMSLEEHSQXEX

SEQ ID NO: 24571 - protein, 33 aa, Artificial Sequence
  Cyclic GFR-binding peptide
  MOD_RES (2)..(2): Xaa is C or S
EXVPTGQRPVQMRKIRIKPHQGQHKKATVLEEH

SEQ ID NO: 24572 - protein, 40 aa, Artificial Sequence
  Cyclic GFR-binding peptide
  MOD_RES (1)..(38)..(40): Xaa is C or S
XRPTQVQLSNITVQIMEIVRKKPIFLGEMSTLEDHLAXKX

SEQ ID NO: 24573 - protein, 41 aa, Artificial Sequence
  Cyclic GFR-binding peptide
  MOD_RES (1)..(38)..(40): Xaa is C or S
XRPTQVQLSNITVQIMEIVRKKPIFLGEMSTLEDHLAXKXE

SEQ ID NO: 24574 - protein, 29 aa, Artificial Sequence
  Cyclic GFR-binding peptide
TQVQLSNITVQIMEIVRKKPIFIGEMSTL

SEQ ID NO: 24575 - protein, 26 aa, Artificial Sequence
  Cyclic GFR-binding peptide
SNITVQIMEIVRKKPIFLGEMSTLED

SEQ ID NO: 24576 - protein, 37 aa, Artificial Sequence
  Cyclic GFR-binding peptide
  MOD_RES (1)..(1): Xaa is C or S
XRPTQVQLSNITVQIMEIVRKKPIFLGEMSTLEDHLA

SEQ ID NO: 24577 - protein, 31 aa, Artificial Sequence
  Cyclic GFR-binding peptide
RPTQVQLSNITVQIMEIVRKKPIFIGEMSTL

SEQ ID NO: 24578 - protein, 42 aa, Artificial Sequence
  Cyclic GFR-binding peptide
  MOD_RES (7)..(41): Xaa is C or S
NDEGLEXVPTEERPVQMRKIRIKPHQGQHKKATVFLQHNKXE

SEQ ID NO: 24579 - protein, 30 aa, Artificial Sequence
  Cyclic GFR-binding peptide
PTGQSNITMQIMRIKPHQGQHIGEMSLEEH

SEQ ID NO: 24580 - protein, 36 aa, Artificial Sequence
  Cyclic GFR-binding peptide
  MOD_RES (35)..(35): Xaa is C or S
SRVHHSNITVQIMEYVRKKPKLIGEMSRLEEHLEXA

SEQ ID NO: 24581 - protein, 33 aa, Artificial Sequence
  Cyclic GFR-binding peptide
  MOD_RES (33)..(33): Xaa is C or S
PTEESNITMQIMRIKPHQGQHLGEMSFLQHNKX

SEQ ID NO: 24582 - protein, 30 aa, Artificial Sequence
  Cyclic GFR-binding peptide
RVHHRPVQVRKIEYVRKKPKLKKATVRLEE

SEQ ID NO: 24583 - protein, 37 aa, Artificial Sequence
  Cyclic GFR-binding peptide
  MOD_RES (4)..(4): Xaa is C or S
SVKXQPSRVHHRPVQVRKIEYVRKKPKLKKATVRLEE

SEQ ID NO: 24584 - protein, 36 aa, Artificial Sequence
  Cyclic GFR-binding peptide
  MOD_RES (33)..(35): Xaa is C or S
PTGQRPVQMRKIRIKPHQGQHKKATVLEEHSQXEXR

SEQ ID NO: 24585 - protein, 41 aa, Artificial Sequence
  Cyclic GFR-binding peptide
  MOD_RES (2)..(39)..(41): Xaa is C or S
QXRPTQVQLSNITVQIMEIVRKKPIFIGEMSTLEDHLAXKX

SEQ ID NO: 24586 - protein, 34 aa, Artificial Sequence
  Cyclic GFR-binding peptide
  MOD_RES (34)..(34): Xaa is C or S
VPTEESNITMQIMRIKPHQGQHLGEMSFLQHNKX

SEQ ID NO: 24587 - protein, 39 aa, Artificial Sequence
  Cyclic GFR-binding peptide
  MOD_RES (5)..(5): Xaa is C or S
RNVQXRPTQVQLRSVKVAKVEIVRKKPIFKEVQVTLEDH

SEQ ID NO: 24588 - protein, 39 aa, Artificial Sequence
  Cyclic GFR-binding peptide
  MOD_RES (36)..(38): Xaa is C or S
PTQVQLSNITVQIMEIVRKKPIFLGEMSTLEDHLAXKXE

SEQ ID NO: 24589 - protein, 37 aa, Artificial Sequence
  Cyclic GFR-binding peptide
  MOD_RES (6)..(6): Xaa is C or S
DEGLEXVPTGQRPVQMRKIRIKPHQGQHKKATVLEEH

SEQ ID NO: 24590 - protein, 34 aa, Artificial Sequence
  Cyclic GFR-binding peptide
RPTQVQLRSVKVAKVEIVRKKPIFKEVQVTLEDH

SEQ ID NO: 24591 - protein, 31 aa, Artificial Sequence
  Cyclic GFR-binding peptide
  MOD_RES (3)..(3): Xaa is C or S
LEXVPTEERSVKMAKVRIKPHQGQHKEVQVF

SEQ ID NO: 24592 - protein, 32 aa, Artificial Sequence
  Cyclic GFR-binding peptide
  MOD_RES (4)..(4): Xaa is C or S
GLEXVPTGQRSVKMAKVRIKPHQGQHKEVQVL

SEQ ID NO: 24593 - protein, 29 aa, Artificial Sequence
  Cyclic GFR-binding peptide
ERSVKMAKVRIKPHQGQHKEVQVFLQHNK

SEQ ID NO: 24594 - protein, 28 aa, Artificial Sequence
  Cyclic GFR-binding peptide
SNITMQIMRIKPHQGQHLGEMSFLQHNK

SEQ ID NO: 24595 - protein, 32 aa, Artificial Sequence
  Cyclic GFR-binding peptide
  MOD_RES (30)..(32): Xaa is C or S
SNITVQIMEIVRKKPIFLGEMSTLEDHLAXKX

SEQ ID NO: 24596 - protein, 30 aa, Artificial Sequence
  Cyclic GFR-binding peptide
QLSNITVQIMEIVRKKPIFIGEMSTLEDHL

SEQ ID NO: 24597 - protein, 34 aa, Artificial Sequence
  Cyclic GFR-binding peptide
  MOD_RES (1)..(1): Xaa is C or S
XVPTEESNITMQIMRIKPHQGQHLGEMSFLQHNK

SEQ ID NO: 24598 - protein, 28 aa, Artificial Sequence
  Cyclic GFR-binding peptide
VPTGQSNITMQIMRIKPHQGQHIGEMSL

SEQ ID NO: 24599 - protein, 38 aa, Artificial Sequence
  Cyclic GFR-binding peptide
  MOD_RES (1)..(38): Xaa is C or S
XQPSRVHHSNITVQIMEYVRKKPKLIGEMSRLEEHLEX

SEQ ID NO: 24600 - protein, 38 aa, Artificial Sequence
  Cyclic GFR-binding peptide
  MOD_RES (4)..(38): Xaa is C or S
GLEXVPTGQSNITMQIMRIKPHQGQHIGEMSLEEHSQX

SEQ ID NO: 24601 - protein, 24 aa, Artificial Sequence
  Cyclic GFR-binding peptide
EERPVQMRKIRIKPHQGQHKKATV

SEQ ID NO: 24602 - protein, 39 aa, Artificial Sequence
  Cyclic GFR-binding peptide
  MOD_RES (1)..(38): Xaa is C or S
XRPTQVQLRSVKVAKVEIVRKKPIFKEVQVTLEDHLAXK

SEQ ID NO: 24603 - protein, 32 aa, Artificial Sequence
  Cyclic GFR-binding peptide
  MOD_RES (32)..(32): Xaa is C or S
HHSNITVQIMEYVRKKPKLLGEMSRLEEHLEX

SEQ ID NO: 24604 - protein, 37 aa, Artificial Sequence
  Cyclic GFR-binding peptide
  MOD_RES (4)..(4): Xaa is C or S
GLEXVPTGQRSVKMAKVRIKPHQGQHKEVQVLEEHSQ

SEQ ID NO: 24605 - protein, 31 aa, Artificial Sequence
  Cyclic GFR-binding peptide
QPSRVHHSNITVQIMEYVRKKPKLLGEMSRL

SEQ ID NO: 24606 - protein, 34 aa, Artificial Sequence
  Cyclic GFR-binding peptide
  MOD_RES (2)..(2): Xaa is C or S
EXVPTGQSNITMQIMRIKPHQGQHIGEMSLEEHS

SEQ ID NO: 24607 - protein, 42 aa, Artificial Sequence
  Cyclic GFR-binding peptide
  MOD_RES (5)..(39)..(41): Xaa is C or S
EGLEXVPTEERPVQMRKIRIKPHQGQHKKATVFLQHNKXEXR

SEQ ID NO: 24608 - protein, 35 aa, Artificial Sequence
  Cyclic GFR-binding peptide
  MOD_RES (33)..(35): Xaa is C or S
VQLRSVKVAKVEIVRKKPIFKEVQVTLEDHLAXKX

SEQ ID NO: 24609 - protein, 23 aa, Artificial Sequence
  Cyclic GFR-binding peptide
RSVKMAKVRIKPHQGQHKEVQVF

SEQ ID NO: 24610 - protein, 30 aa, Artificial Sequence
  Cyclic GFR-binding peptide
  MOD_RES (29)..(29): Xaa is C or S
RPVQMRKIRIKPHQGQHKKATVLEEHSQXE

SEQ ID NO: 24611 - protein, 37 aa, Artificial Sequence
  Cyclic GFR-binding peptide
  MOD_RES (3)..(37): Xaa is C or S
LEXVPTGQSNITMQIMRIKPHQGQHIGEMSLEEHSQX

SEQ ID NO: 24612 - protein, 23 aa, Artificial Sequence
  Cyclic GFR-binding peptide
RSVKMAKVRIKPHQGQHKEVQVL

SEQ ID NO: 24613 - protein, 35 aa, Artificial Sequence
  Cyclic GFR-binding peptide
  MOD_RES (1)..(35): Xaa is C or S
XVPTEESNITMQIMRIKPHQGQHLGEMSFLQHNKX

SEQ ID NO: 24614 - protein, 41 aa, Artificial Sequence
  Cyclic GFR-binding peptide
  MOD_RES (2)..(39)..(41): Xaa is C or S
KXQPSRVHHSNITVQIMEYVRKKPKLIGEMSRLEEHLEXAX

SEQ ID NO: 24615 - protein, 33 aa, Artificial Sequence
  Cyclic GFR-binding peptide
  MOD_RES (33)..(33): Xaa is C or S
VQLSNITVQIMEIVRKKPIFLGEMSTLEDHLAX

SEQ ID NO: 24616 - protein, 39 aa, Artificial Sequence
  Cyclic GFR-binding peptide
  MOD_RES (4)..(38): Xaa is C or S
GLEXVPTGQSNITMQIMRIKPHQGQHIGEMSLEEHSQXE

SEQ ID NO: 24617 - protein, 28 aa, Artificial Sequence
  Cyclic GFR-binding peptide
PSRVHHSNITVQIMEYVRKKPKLIGEMS

SEQ ID NO: 24618 - protein, 33 aa, Artificial Sequence
  Cyclic GFR-binding peptide
QPSRVHHSNITVQIMEYVRKKPKLLGEMSRLEE

SEQ ID NO: 24619 - protein, 24 aa, Artificial Sequence
  Cyclic GFR-binding peptide
HSNITVQIMEYVRKKPKLLGEMSR

SEQ ID NO: 24620 - protein, 38 aa, Artificial Sequence
  Cyclic GFR-binding peptide
  MOD_RES (2)..(36)..(38): Xaa is C or S
EXVPTEERPVQMRKIRIKPHQGQHKKATVFLQHNKXEX

SEQ ID NO: 24621 - protein, 28 aa, Artificial Sequence
  Cyclic GFR-binding peptide
SNITVQIMEYVRKKPKLLGEMSRLEEHL

SEQ ID NO: 24622 - protein, 29 aa, Artificial Sequence
  Cyclic GFR-binding peptide
  MOD_RES (2)..(2): Xaa is C or S
EXVPTEERSVKMAKVRIKPHQGQHKEVQV

SEQ ID NO: 24623 - protein, 33 aa, Artificial Sequence
  Cyclic GFR-binding peptide
  MOD_RES (30)..(32): Xaa is C or S
QSNITMQIMRIKPHQGQHIGEMSLEEHSQXEXR

SEQ ID NO: 24624 - protein, 33 aa, Artificial Sequence
  Cyclic GFR-binding peptide
  MOD_RES (6)..(6): Xaa is C or S
DEGLEXVPTGQRSVKMAKVRIKPHQGQHKEVQV

SEQ ID NO: 24625 - protein, 29 aa, Artificial Sequence
  Cyclic GFR-binding peptide
VHHRPVQVRKIEYVRKKPKLKKATVRLEE

SEQ ID NO: 24626 - protein, 42 aa, Artificial Sequence
  Cyclic GFR-binding peptide
  MOD_RES (5)..(42): Xaa is C or S
RNVQXRPTQVQLRSVKVAKVEIVRKKPIFKEVQVTLEDHLAX

SEQ ID NO: 24627 - protein, 26 aa, Artificial Sequence
  Cyclic GFR-binding peptide
QRPVQMRKIRIKPHQGQHKKATVLEE

SEQ ID NO: 24628 - protein, 31 aa, Artificial Sequence
  Cyclic GFR-binding peptide
PSRVHHRPVQVRKIEYVRKKPKLKKATVRLE

SEQ ID NO: 24629 - protein, 34 aa, Artificial Sequence
  Cyclic GFR-binding peptide
  MOD_RES (31)..(33): Xaa is C or S
GQSNITMQIMRIKPHQGQHIGEMSLEEHSQXEXR

SEQ ID NO: 24630 - protein, 23 aa, Artificial Sequence
  Cyclic GFR-binding peptide
SNITVQIMEIVRKKPIFIGEMST

SEQ ID NO: 24631 - protein, 33 aa, Artificial Sequence
  Cyclic GFR-binding peptide
  MOD_RES (1)..(1): Xaa is C or S
XRPTQVQLRSVKVAKVEIVRKKPIFKEVQVTLE

SEQ ID NO: 24632 - protein, 36 aa, Artificial Sequence
  Cyclic GFR-binding peptide
  MOD_RES (4)..(4): Xaa is C or S
SVKXQPSRVHHSNITVQIMEYVRKKPKLIGEMSRLE

SEQ ID NO: 24633 - protein, 34 aa, Artificial Sequence
  Cyclic GFR-binding peptide
  MOD_RES (33)..(33): Xaa is C or S
VHHSNITVQIMEYVRKKPKLLGEMSRLEEHLEXA

SEQ ID NO: 24634 - protein, 27 aa, Artificial Sequence
  Cyclic GFR-binding peptide
SNITMQIMRIKPHQGQHLGEMSFLQHN

SEQ ID NO: 24635 - protein, 37 aa, Artificial Sequence
  Cyclic GFR-binding peptide
  MOD_RES (34)..(36): Xaa is C or S
RVHHSNITVQIMEYVRKKPKLIGEMSRLEEHLEXAXA

SEQ ID NO: 24636 - protein, 42 aa, Artificial Sequence
  Cyclic GFR-binding peptide
  MOD_RES (5)..(39)..(41): Xaa is C or S
EGLEXVPTEESNITMQIMRIKPHQGQHLGEMSFLQHNKXEXR

SEQ ID NO: 24637 - protein, 28 aa, Artificial Sequence
  Cyclic GFR-binding peptide
RSVKVAKVEIVRKKPIFKEVQVTLEDHL

SEQ ID NO: 24638 - protein, 27 aa, Artificial Sequence
  Cyclic GFR-binding peptide
SNITVQIMEIVRKKPIFIGEMSTLEDH

SEQ ID NO: 24639 - protein, 39 aa, Artificial Sequence
  Cyclic GFR-binding peptide
  MOD_RES (3)..(3): Xaa is C or S
VKXQPSRVHHSNITVQIMEYVRKKPKLLGEMSRLEEHLE

SEQ ID NO: 24640 - protein, 32 aa, Artificial Sequence
  Cyclic GFR-binding peptide
VHHSNITVQIMEYVRKKPKLIGEMSRLEEHLE

SEQ ID NO: 24641 - protein, 33 aa, Artificial Sequence
  Cyclic GFR-binding peptide
  MOD_RES (32)..(32): Xaa is C or S
HHSNITVQIMEYVRKKPKLLGEMSRLEEHLEXA

SEQ ID NO: 24642 - protein, 29 aa, Artificial Sequence
  Cyclic GFR-binding peptide
PTGQRSVKMAKVRIKPHQGQHKEVQVLEE

SEQ ID NO: 24643 - protein, 35 aa, Artificial Sequence
  Cyclic GFR-binding peptide
  MOD_RES (7)..(7): Xaa is C or S
NDEGLEXVPTEERPVQMRKIRIKPHQGQHKKATVF

SEQ ID NO: 24644 - protein, 34 aa, Artificial Sequence
  Cyclic GFR-binding peptide
RPTQVQLSNITVQIMEIVRKKPIFLGEMSTLEDH

SEQ ID NO: 24645 - protein, 36 aa, Artificial Sequence
  Cyclic GFR-binding peptide
  MOD_RES (3)..(3): Xaa is C or S
LEXVPTEERPVQMRKIRIKPHQGQHKKATVFLQHNK

SEQ ID NO: 24646 - protein, 25 aa, Artificial Sequence
  Cyclic GFR-binding peptide
HRPVQVRKIEYVRKKPKLKKATVRL

SEQ ID NO: 24647 - protein, 40 aa, Artificial Sequence
  Cyclic GFR-binding peptide
  MOD_RES (4)..(4): Xaa is C or S
NVQXRPTQVQLSNITVQIMEIVRKKPIFIGEMSTLEDHLA

SEQ ID NO: 24648 - protein, 36 aa, Artificial Sequence
  Cyclic GFR-binding peptide
  MOD_RES (1)..(35): Xaa is C or S
XVPTGQRPVQMRKIRIKPHQGQHKKATVLEEHSQXE

SEQ ID NO: 24649 - protein, 42 aa, Artificial Sequence
  Cyclic GFR-binding peptide
  MOD_RES (2)..(39)..(41): Xaa is C or S
QXRPTQVQLSNITVQIMEIVRKKPIFLGEMSTLEDHLAXKXE

SEQ ID NO: 24650 - protein, 35 aa, Artificial Sequence
  Cyclic GFR-binding peptide
  MOD_RES (35)..(35): Xaa is C or S
TQVQLSNITVQIMEIVRKKPIFIGEMSTLEDHLAX

SEQ ID NO: 24651 - protein, 38 aa, Artificial Sequence
  Cyclic GFR-binding peptide
  MOD_RES (5)..(5): Xaa is C or S
EGLEXVPTEERPVQMRKIRIKPHQGQHKKATVFLQHNK

SEQ ID NO: 24652 - protein, 35 aa, Artificial Sequence
  Cyclic GFR-binding peptide
  MOD_RES (34)..(34): Xaa is C or S
VPTGQRSVKMAKVRIKPHQGQHKEVQVLEEHSQXE

SEQ ID NO: 24653 - protein, 27 aa, Artificial Sequence
  Cyclic GFR-binding peptide
TGQRPVQMRKIRIKPHQGQHKKATVLE

SEQ ID NO: 24654 - protein, 35 aa, Artificial Sequence
  Cyclic GFR-binding peptide
  MOD_RES (33)..(35): Xaa is C or S
PTGQRSVKMAKVRIKPHQGQHKEVQVLEEHSQXEX

SEQ ID NO: 24655 - protein, 33 aa, Artificial Sequence
  Cyclic GFR-binding peptide
  MOD_RES (1)..(1): Xaa is C or S
XQPSRVHHSNITVQIMEYVRKKPKLLGEMSRLE

SEQ ID NO: 24656 - protein, 31 aa, Artificial Sequence
  Cyclic GFR-binding peptide
VPTEERSVKMAKVRIKPHQGQHKEVQVFLQH

SEQ ID NO: 24657 - protein, 36 aa, Artificial Sequence
  Cyclic GFR-binding peptide
  MOD_RES (5)..(5): Xaa is C or S
SSVKXQPSRVHHRPVQVRKIEYVRKKPKLKKATVRL

SEQ ID NO: 24658 - protein, 33 aa, Artificial Sequence
  Cyclic GFR-binding peptide
  MOD_RES (33)..(33): Xaa is C or S
VHHRPVQVRKIEYVRKKPKLKKATVRLEEHLEX

SEQ ID NO: 24659 - protein, 34 aa, Artificial Sequence
  Cyclic GFR-binding peptide
  MOD_RES (5)..(5): Xaa is C or S
EGLEXVPTEESNITMQIMRIKPHQGQHLGEMSFL

SEQ ID NO: 24660 - protein, 40 aa, Artificial Sequence
  Cyclic GFR-binding peptide
  MOD_RES (7)..(7): Xaa is C or S
NDEGLEXVPTEERSVKMAKVRIKPHQGQHKEVQVFLQHNK

SEQ ID NO: 24661 - protein, 27 aa, Artificial Sequence
  Cyclic GFR-binding peptide
GQSNITMQIMRIKPHQGQHIGEMSLEE

SEQ ID NO: 24662 - protein, 35 aa, Artificial Sequence
  Cyclic GFR-binding peptide
  MOD_RES (2)..(2): Xaa is C or S
EXVPTEERPVQMRKIRIKPHQGQHKKATVFLQHNK

SEQ ID NO: 24663 - protein, 30 aa, Artificial Sequence
  Cyclic GFR-binding peptide
QPSRVHHSNITVQIMEYVRKKPKLLGEMSR

SEQ ID NO: 24664 - protein, 32 aa, Artificial Sequence
  Cyclic GFR-binding peptide
QPSRVHHSNITVQIMEYVRKKPKLLGEMSRLE

SEQ ID NO: 24665 - protein, 31 aa, Artificial Sequence
  Cyclic GFR-binding peptide
  MOD_RES (31)..(31): Xaa is C or S
GQRPVQMRKIRIKPHQGQHKKATVLEEHSQX

SEQ ID NO: 24666 - protein, 38 aa, Artificial Sequence
  Cyclic GFR-binding peptide
  MOD_RES (4)..(38): Xaa is C or S
GLEXVPTEERSVKMAKVRIKPHQGQHKEVQVFLQHNKX

SEQ ID NO: 24667 - protein, 25 aa, Artificial Sequence
  Cyclic GFR-binding peptide
RSVKMAKVRIKPHQGQHKEVQVFLQ

SEQ ID NO: 24668 - protein, 35 aa, Artificial Sequence
  Cyclic GFR-binding peptide
  MOD_RES (1)..(1): Xaa is C or S
XRPTQVQLRSVKVAKVEIVRKKPIFKEVQVTLEDH

SEQ ID NO: 24669 - protein, 34 aa, Artificial Sequence
  Cyclic GFR-binding peptide
  MOD_RES (3)..(3): Xaa is C or S
LEXVPTGQRPVQMRKIRIKPHQGQHKKATVLEEH

SEQ ID NO: 24670 - protein, 36 aa, Artificial Sequence
  Cyclic GFR-binding peptide
  MOD_RES (7)..(7): Xaa is C or S
NDEGLEXVPTGQSNITMQIMRIKPHQGQHIGEMSLE

SEQ ID NO: 24671 - protein, 28 aa, Artificial Sequence
  Cyclic GFR-binding peptide
VQLSNITVQIMEIVRKKPIFIGEMSTLE

SEQ ID NO: 24672 - protein, 30 aa, Artificial Sequence
  Cyclic GFR-binding peptide
TGQSNITMQIMRIKPHQGQHIGEMSLEEHS

SEQ ID NO: 24673 - protein, 36 aa, Artificial Sequence
  Cyclic GFR-binding peptide
  MOD_RES (1)..(35): Xaa is C or S
XVPTGQRSVKMAKVRIKPHQGQHKEVQVLEEHSQXE

SEQ ID NO: 24674 - protein, 34 aa, Artificial Sequence
  Cyclic GFR-binding peptide
  MOD_RES (5)..(5): Xaa is C or S
EGLEXVPTEERSVKMAKVRIKPHQGQHKEVQVFL

SEQ ID NO: 24675 - protein, 31 aa, Artificial Sequence
  Cyclic GFR-binding peptide
TGQSNITMQIMRIKPHQGQHIGEMSLEEHSQ

SEQ ID NO: 24676 - protein, 35 aa, Artificial Sequence
  Cyclic GFR-binding peptide
  MOD_RES (2)..(2): Xaa is C or S
EXVPTGQRPVQMRKIRIKPHQGQHKKATVLEEHSQ

SEQ ID NO: 24677 - protein, 34 aa, Artificial Sequence
  Cyclic GFR-binding peptide
  MOD_RES (6)..(6): Xaa is C or S
DEGLEXVPTEERPVQMRKIRIKPHQGQHKKATVF

SEQ ID NO: 24678 - protein, 36 aa, Artificial Sequence
  Cyclic GFR-binding peptide
  MOD_RES (35)..(35): Xaa is C or S
SRVHHSNITVQIMEYVRKKPKLLGEMSRLEEHLEXA

SEQ ID NO: 24679 - protein, 31 aa, Artificial Sequence
  Cyclic GFR-binding peptide
QLSNITVQIMEIVRKKPIFLGEMSTLEDHLA

SEQ ID NO: 24680 - protein, 27 aa, Artificial Sequence
  Cyclic GFR-binding peptide
PTEERPVQMRKIRIKPHQGQHKKATVF

SEQ ID NO: 24681 - protein, 25 aa, Artificial Sequence
  Cyclic GFR-binding peptide
TGQSNITMQIMRIKPHQGQHIGEMS

SEQ ID NO: 24682 - protein, 35 aa, Artificial Sequence
  Cyclic GFR-binding peptide
  MOD_RES (3)..(3): Xaa is C or S
LEXVPTGQRPVQMRKIRIKPHQGQHKKATVLEEHS

SEQ ID NO: 24683 - protein, 41 aa, Artificial Sequence
  Cyclic GFR-binding peptide
  MOD_RES (5)..(5): Xaa is C or S
RNVQXRPTQVQLSNITVQIMEIVRKKPIFIGEMSTLEDHLA

SEQ ID NO: 24684 - protein, 30 aa, Artificial Sequence
  Cyclic GFR-binding peptide
PSRVHHSNITVQIMEYVRKKPKLLGEMSRL

SEQ ID NO: 24685 - protein, 36 aa, Artificial Sequence
  Cyclic GFR-binding peptide
  MOD_RES (1)..(1): Xaa is C or S
XRPTQVQLRSVKVAKVEIVRKKPIFKEVQVTLEDHL

SEQ ID NO: 24686 - protein, 35 aa, Artificial Sequence
  Cyclic GFR-binding peptide
  MOD_RES (32)..(34): Xaa is C or S
QLRSVKVAKVEIVRKKPIFKEVQVTLEDHLAXKXE

SEQ ID NO: 24687 - protein, 34 aa, Artificial Sequence
  Cyclic GFR-binding peptide
  MOD_RES (4)..(4): Xaa is C or S
GLEXVPTEESNITMQIMRIKPHQGQHLGEMSFLQ

SEQ ID NO: 24688 - protein, 35 aa, Artificial Sequence
  Cyclic GFR-binding peptide
  MOD_RES (4)..(4): Xaa is C or S
NVQXRPTQVQLRSVKVAKVEIVRKKPIFKEVQVTL

SEQ ID NO: 24689 - protein, 35 aa, Artificial Sequence
  Cyclic GFR-binding peptide
  MOD_RES (33)..(35): Xaa is C or S
PTEERSVKMAKVRIKPHQGQHKEVQVFLQHNKXEX

SEQ ID NO: 24690 - protein, 32 aa, Artificial Sequence
  Cyclic GFR-binding peptide
RVHHSNITVQIMEYVRKKPKLLGEMSRLEEHL

SEQ ID NO: 24691 - protein, 42 aa, Artificial Sequence
  Cyclic GFR-binding peptide
  MOD_RES (3)..(40)..(42): Xaa is C or S
VKXQPSRVHHSNITVQIMEYVRKKPKLLGEMSRLEEHLEXAX

SEQ ID NO: 24692 - protein, 35 aa, Artificial Sequence
  Cyclic GFR-binding peptide
  MOD_RES (4)..(4): Xaa is C or S
SVKXQPSRVHHRPVQVRKIEYVRKKPKLKKATVRL

SEQ ID NO: 24693 - protein, 30 aa, Artificial Sequence
  Cyclic GFR-binding peptide
QLSNITVQIMEIVRKKPIFLGEMSTLEDHL

SEQ ID NO: 24694 - protein, 32 aa, Artificial Sequence
  Cyclic GFR-binding peptide
  MOD_RES (32)..(32): Xaa is C or S
QLSNITVQIMEIVRKKPIFLGEMSTLEDHLAX

SEQ ID NO: 24695 - protein, 30 aa, Artificial Sequence
  Cyclic GFR-binding peptide
SRVHHRPVQVRKIEYVRKKPKLKKATVRLE

SEQ ID NO: 24696 - protein, 34 aa, Artificial Sequence
  Cyclic GFR-binding peptide
  MOD_RES (5)..(5): Xaa is C or S
RNVQXRPTQVQLSNITVQIMEIVRKKPIFLGEMS

SEQ ID NO: 24697 - protein, 31 aa, Artificial Sequence
  Cyclic GFR-binding peptide
VPTEESNITMQIMRIKPHQGQHLGEMSFLQH

SEQ ID NO: 24698 - protein, 32 aa, Artificial Sequence
  Cyclic GFR-binding peptide
PTEERSVKMAKVRIKPHQGQHKEVQVFLQHNK

SEQ ID NO: 24699 - protein, 28 aa, Artificial Sequence
  Cyclic GFR-binding peptide
  MOD_RES (1)..(1): Xaa is C or S
XVPTGQRSVKMAKVRIKPHQGQHKEVQV

SEQ ID NO: 24700 - protein, 34 aa, Artificial Sequence
  Cyclic GFR-binding peptide
  MOD_RES (31)..(33): Xaa is C or S
GQRSVKMAKVRIKPHQGQHKEVQVLEEHSQXEXR

SEQ ID NO: 24701 - protein, 33 aa, Artificial Sequence
  Cyclic GFR-binding peptide
  MOD_RES (33)..(33): Xaa is C or S
VHHSNITVQIMEYVRKKPKLLGEMSRLEEHLEX

SEQ ID NO: 24702 - protein, 37 aa, Artificial Sequence
  Cyclic GFR-binding peptide
  MOD_RES (4)..(4): Xaa is C or S
NVQXRPTQVQLSNITVQIMEIVRKKPIFLGEMSTLED

SEQ ID NO: 24703 - protein, 27 aa, Artificial Sequence
  Cyclic GFR-binding peptide
PTEESNITMQIMRIKPHQGQHLGEMSF

SEQ ID NO: 24704 - protein, 36 aa, Artificial Sequence
  Cyclic GFR-binding peptide
  MOD_RES (2)..(2): Xaa is C or S
QXRPTQVQLSNITVQIMEIVRKKPIFIGEMSTLEDH

SEQ ID NO: 24705 - protein, 31 aa, Artificial Sequence
  Cyclic GFR-binding peptide
VQLSNITVQIMEIVRKKPIFLGEMSTLEDHL

SEQ ID NO: 24706 - protein, 28 aa, Artificial Sequence
  Cyclic GFR-binding peptide
RVHHSNITVQIMEYVRKKPKLIGEMSRL

SEQ ID NO: 24707 - protein, 32 aa, Artificial Sequence
  Cyclic GFR-binding peptide
  MOD_RES (3)..(3): Xaa is C or S
LEXVPTGQRPVQMRKIRIKPHQGQHKKATVLE

SEQ ID NO: 24708 - protein, 26 aa, Artificial Sequence
  Cyclic GFR-binding peptide
RPVQVRKIEYVRKKPKLKKATVRLEE

SEQ ID NO: 24709 - protein, 30 aa, Artificial Sequence
  Cyclic GFR-binding peptide
VPTGQSNITMQIMRIKPHQGQHIGEMSLEE

SEQ ID NO: 24710 - protein, 34 aa, Artificial Sequence
  Cyclic GFR-binding peptide
  MOD_RES (31)..(33): Xaa is C or S
GQRPVQMRKIRIKPHQGQHKKATVLEEHSQXEXR

SEQ ID NO: 24711 - protein, 39 aa, Artificial Sequence
  Cyclic GFR-binding peptide
  MOD_RES (6)..(6): Xaa is C or S
DEGLEXVPTGQRSVKMAKVRIKPHQGQHKEVQVLEEHSQ

SEQ ID NO: 24712 - protein, 38 aa, Artificial Sequence
  Cyclic GFR-binding peptide
  MOD_RES (1)..(35)..(37): Xaa is C or S
XVPTEESNITMQIMRIKPHQGQHLGEMSFLQHNKXEXR

SEQ ID NO: 24713 - protein, 37 aa, Artificial Sequence
  Cyclic GFR-binding peptide
  MOD_RES (7)..(7): Xaa is C or S
NDEGLEXVPTGQSNITMQIMRIKPHQGQHIGEMSLEE

SEQ ID NO: 24714 - protein, 31 aa, Artificial Sequence
  Cyclic GFR-binding peptide
  MOD_RES (1)..(1): Xaa is C or S
XVPTGQRSVKMAKVRIKPHQGQHKEVQVLEE

SEQ ID NO: 24715 - protein, 44 aa, Artificial Sequence
  Cyclic GFR-binding peptide
  MOD_RES (7)..(41)..(43): Xaa is C or S
NDEGLEXVPTEERSVKMAKVRIKPHQGQHKEVQVFLQHNKXEXR

SEQ ID NO: 24716 - protein, 36 aa, Artificial Sequence
  Cyclic GFR-binding peptide
  MOD_RES (1)..(1): Xaa is C or S
XQPSRVHHRPVQVRKIEYVRKKPKLKKATVRLEEHL

SEQ ID NO: 24717 - protein, 39 aa, Artificial Sequence
  Cyclic GFR-binding peptide
  MOD_RES (4)..(38): Xaa is C or S
GLEXVPTEESNITMQIMRIKPHQGQHLGEMSFLQHNKXE

SEQ ID NO: 24718 - protein, 43 aa, Artificial Sequence
  Cyclic GFR-binding peptide
  MOD_RES (3)..(40)..(42): Xaa is C or S
VQXRPTQVQLSNITVQIMEIVRKKPIFIGEMSTLEDHLAXKXE

SEQ ID NO: 24719 - protein, 36 aa, Artificial Sequence
  Cyclic GFR-binding peptide
  MOD_RES (2)..(36): Xaa is C or S
EXVPTGQSNITMQIMRIKPHQGQHIGEMSLEEHSQX

SEQ ID NO: 24720 - protein, 28 aa, Artificial Sequence
  Cyclic GFR-binding peptide
PTGQRPVQMRKIRIKPHQGQHKKATVLE

SEQ ID NO: 24721 - protein, 25 aa, Artificial Sequence
  Cyclic GFR-binding peptide
HHSNITVQIMEYVRKKPKLIGEMSR

SEQ ID NO: 24722 - protein, 42 aa, Artificial Sequence
  Cyclic GFR-binding peptide
  MOD_RES (5)..(39)..(41): Xaa is C or S
EGLEXVPTGQSNITMQIMRIKPHQGQHIGEMSLEEHSQXEXR

SEQ ID NO: 24723 - protein, 34 aa, Artificial Sequence
  Cyclic GFR-binding peptide
  MOD_RES (3)..(3): Xaa is C or S
VKXQPSRVHHSNITVQIMEYVRKKPKLLGEMSRL

SEQ ID NO: 24724 - protein, 33 aa, Artificial Sequence
  Cyclic GFR-binding peptide
  MOD_RES (4)..(4): Xaa is C or S
NVQXRPTQVQLRSVKVAKVEIVRKKPIFKEVQV

SEQ ID NO: 24725 - protein, 28 aa, Artificial Sequence
  Cyclic GFR-binding peptide
TEERSVKMAKVRIKPHQGQHKEVQVFLQ

SEQ ID NO: 24726 - protein, 29 aa, Artificial Sequence
  Cyclic GFR-binding peptide
VPTGQRSVKMAKVRIKPHQGQHKEVQVLE

SEQ ID NO: 24727 - protein, 32 aa, Artificial Sequence
  Cyclic GFR-binding peptide
  MOD_RES (32)..(32): Xaa is C or S
HHRPVQVRKIEYVRKKPKLKKATVRLEEHLEX

SEQ ID NO: 24728 - protein, 44 aa, Artificial Sequence
  Cyclic GFR-binding peptide
  MOD_RES (7)..(41)..(43): Xaa is C or S
NDEGLEXVPTEERPVQMRKIRIKPHQGQHKKATVFLQHNKXEXR

SEQ ID NO: 24729 - protein, 37 aa, Artificial Sequence
  Cyclic GFR-binding peptide
  MOD_RES (5)..(5): Xaa is C or S
RNVQXRPTQVQLRSVKVAKVEIVRKKPIFKEVQVTLE

SEQ ID NO: 24730 - protein, 32 aa, Artificial Sequence
  Cyclic GFR-binding peptide
  MOD_RES (4)..(4): Xaa is C or S
GLEXVPTEERPVQMRKIRIKPHQGQHKKATVF

SEQ ID NO: 24731 - protein, 37 aa, Artificial Sequence
  Cyclic GFR-binding peptide
  MOD_RES (36)..(36): Xaa is C or S
PTQVQLSNITVQIMEIVRKKPIFLGEMSTLEDHLAXK

SEQ ID NO: 24732 - protein, 31 aa, Artificial Sequence
  Cyclic GFR-binding peptide
VHHSNITVQIMEYVRKKPKLIGEMSRLEEHL

SEQ ID NO: 24733 - protein, 36 aa, Artificial Sequence
  Cyclic GFR-binding peptide
  MOD_RES (4)..(4): Xaa is C or S
NVQXRPTQVQLSNITVQIMEIVRKKPIFLGEMSTLE

SEQ ID NO: 24734 - protein, 36 aa, Artificial Sequence
  Cyclic GFR-binding peptide
  MOD_RES (33)..(35): Xaa is C or S
PTGQSNITMQIMRIKPHQGQHIGEMSLEEHSQXEXR

SEQ ID NO: 24735 - protein, 35 aa, Artificial Sequence
  Cyclic GFR-binding peptide
  MOD_RES (5)..(5): Xaa is C or S
EGLEXVPTGQRPVQMRKIRIKPHQGQHKKATVLEE

SEQ ID NO: 24736 - protein, 30 aa, Artificial Sequence
  Cyclic GFR-binding peptide
TEESNITMQIMRIKPHQGQHLGEMSFLQHN

SEQ ID NO: 24737 - protein, 31 aa, Artificial Sequence
  Cyclic GFR-binding peptide
PTEERPVQMRKIRIKPHQGQHKKATVFLQHN

SEQ ID NO: 24738 - protein, 33 aa, Artificial Sequence
  Cyclic GFR-binding peptide
  MOD_RES (5)..(5): Xaa is C or S
EGLEXVPTGQRSVKMAKVRIKPHQGQHKEVQVL

SEQ ID NO: 24739 - protein, 27 aa, Artificial Sequence
  Cyclic GFR-binding peptide
RSVKVAKVEIVRKKPIFKEVQVTLEDH

SEQ ID NO: 24740 - protein, 34 aa, Artificial Sequence
  Cyclic GFR-binding peptide
  MOD_RES (2)..(2): Xaa is C or S
EXVPTGQRSVKMAKVRIKPHQGQHKEVQVLEEHS

SEQ ID NO: 24741 - protein, 31 aa, Artificial Sequence
  Cyclic GFR-binding peptide
PTGQRSVKMAKVRIKPHQGQHKEVQVLEEHS

SEQ ID NO: 24742 - protein, 39 aa, Artificial Sequence
  Cyclic GFR-binding peptide
  MOD_RES (1)..(38): Xaa is C or S
XRPTQVQLSNITVQIMEIVRKKPIFLGEMSTLEDHLAXK

SEQ ID NO: 24743 - protein, 23 aa, Artificial Sequence
  Cyclic GFR-binding peptide
QRPVQMRKIRIKPHQGQHKKATV

SEQ ID NO: 24744 - protein, 34 aa, Artificial Sequence
  Cyclic GFR-binding peptide
  MOD_RES (3)..(3): Xaa is C or S
LEXVPTGQRSVKMAKVRIKPHQGQHKEVQVLEEH

SEQ ID NO: 24745 - protein, 38 aa, Artificial Sequence
  Cyclic GFR-binding peptide
  MOD_RES (5)..(5): Xaa is C or S
EGLEXVPTGQRSVKMAKVRIKPHQGQHKEVQVLEEHSQ

SEQ ID NO: 24746 - protein, 30 aa, Artificial Sequence
  Cyclic GFR-binding peptide
  MOD_RES (3)..(3): Xaa is C or S
LEXVPTGQRPVQMRKIRIKPHQGQHKKATV

SEQ ID NO: 24747 - protein, 24 aa, Artificial Sequence
  Cyclic GFR-binding peptide
EESNITMQIMRIKPHQGQHLGEMS

SEQ ID NO: 24748 - protein, 32 aa, Artificial Sequence
  Cyclic GFR-binding peptide
  MOD_RES (2)..(2): Xaa is C or S
KXQPSRVHHSNITVQIMEYVRKKPKLLGEMSR

SEQ ID NO: 24749 - protein, 31 aa, Artificial Sequence
  Cyclic GFR-binding peptide
  MOD_RES (30)..(30): Xaa is C or S
SNITVQIMEYVRKKPKLIGEMSRLEEHLEXA

SEQ ID NO: 24750 - protein, 34 aa, Artificial Sequence
  Cyclic GFR-binding peptide
  MOD_RES (4)..(4): Xaa is C or S
GLEXVPTEERPVQMRKIRIKPHQGQHKKATVFLQ

SEQ ID NO: 24751 - protein, 33 aa, Artificial Sequence
  Cyclic GFR-binding peptide
  MOD_RES (6)..(6): Xaa is C or S
DEGLEXVPTGQSNITMQIMRIKPHQGQHIGEMS

SEQ ID NO: 24752 - protein, 32 aa, Artificial Sequence
  Cyclic GFR-binding peptide
VQLRSVKVAKVEIVRKKPIFKEVQVTLEDHLA

SEQ ID NO: 24753 - protein, 38 aa, Artificial Sequence
  Cyclic GFR-binding peptide
  MOD_RES (7)..(7): Xaa is C or S
NDEGLEXVPTEESNITMQIMRIKPHQGQHLGEMSFLQH

SEQ ID NO: 24754 - protein, 31 aa, Artificial Sequence
  Cyclic GFR-binding peptide
  MOD_RES (30)..(30): Xaa is C or S
QRSVKMAKVRIKPHQGQHKEVQVLEEHSQXE

SEQ ID NO: 24755 - protein, 43 aa, Artificial Sequence
  Cyclic GFR-binding peptide
  MOD_RES (4)..(41)..(43): Xaa is C or S
NVQXRPTQVQLSNITVQIMEIVRKKPIFLGEMSTLEDHLAXKX

SEQ ID NO: 24756 - protein, 30 aa, Artificial Sequence
  Cyclic GFR-binding peptide
  MOD_RES (30)..(30): Xaa is C or S
ESNITMQIMRIKPHQGQHLGEMSFLQHNKX

SEQ ID NO: 24757 - protein, 34 aa, Artificial Sequence
  Cyclic GFR-binding peptide
  MOD_RES (1)..(1): Xaa is C or S
XVPTEERSVKMAKVRIKPHQGQHKEVQVFLQHNK

SEQ ID NO: 24758 - protein, 39 aa, Artificial Sequence
  Cyclic GFR-binding peptide
  MOD_RES (3)..(3): Xaa is C or S
VKXQPSRVHHRPVQVRKIEYVRKKPKLKKATVRLEEHLE

SEQ ID NO: 24759 - protein, 29 aa, Artificial Sequence
  Cyclic GFR-binding peptide
PSRVHHSNITVQIMEYVRKKPKLIGEMSR

SEQ ID NO: 24760 - protein, 35 aa, Artificial Sequence
  Cyclic GFR-binding peptide
  MOD_RES (2)..(2): Xaa is C or S
EXVPTEESNITMQIMRIKPHQGQHLGEMSFLQHNK

SEQ ID NO: 24761 - protein, 30 aa, Artificial Sequence
  Cyclic GFR-binding peptide
HRPVQVRKIEYVRKKPKLKKATVRLEEHLE

SEQ ID NO: 24762 - protein, 33 aa, Artificial Sequence
  Cyclic GFR-binding peptide
  MOD_RES (31)..(33): Xaa is C or S
LSNITVQIMEIVRKKPIFLGEMSTLEDHLAXKX

SEQ ID NO: 24763 - protein, 37 aa, Artificial Sequence
  Cyclic GFR-binding peptide
  MOD_RES (37)..(37): Xaa is C or S
RPTQVQLRSVKVAKVEIVRKKPIFKEVQVTLEDHLAX

SEQ ID NO: 24764 - protein, 30 aa, Artificial Sequence
  Cyclic GFR-binding peptide
HSNITVQIMEYVRKKPKLIGEMSRLEEHLE

SEQ ID NO: 24765 - protein, 36 aa, Artificial Sequence
  Cyclic GFR-binding peptide
  MOD_RES (1)..(35): Xaa is C or S
XVPTEERPVQMRKIRIKPHQGQHKKATVFLQHNKXE

SEQ ID NO: 24766 - protein, 40 aa, Artificial Sequence
  Cyclic GFR-binding peptide
  MOD_RES (37)..(39): Xaa is C or S
QPSRVHHSNITVQIMEYVRKKPKLLGEMSRLEEHLEXAXA

SEQ ID NO: 24767 - protein, 40 aa, Artificial Sequence
  Cyclic GFR-binding peptide
  MOD_RES (3)..(40): Xaa is C or S
VKXQPSRVHHRPVQVRKIEYVRKKPKLKKATVRLEEHLEX

SEQ ID NO: 24768 - protein, 33 aa, Artificial Sequence
  Cyclic GFR-binding peptide
QVQLSNITVQIMEIVRKKPIFLGEMSTLEDHLA

SEQ ID NO: 24769 - protein, 36 aa, Artificial Sequence
  Cyclic GFR-binding peptide
  MOD_RES (3)..(3): Xaa is C or S
VQXRPTQVQLSNITVQIMEIVRKKPIFLGEMSTLED

SEQ ID NO: 24770 - protein, 36 aa, Artificial Sequence
  Cyclic GFR-binding peptide
  MOD_RES (2)..(2): Xaa is C or S
KXQPSRVHHRPVQVRKIEYVRKKPKLKKATVRLEEH

SEQ ID NO: 24771 - protein, 35 aa, Artificial Sequence
  Cyclic GFR-binding peptide
QPSRVHHSNITVQIMEYVRKKPKLIGEMSRLEEHL

SEQ ID NO: 24772 - protein, 39 aa, Artificial Sequence
  Cyclic GFR-binding peptide
  MOD_RES (6)..(6): Xaa is C or S
DEGLEXVPTGQSNITMQIMRIKPHQGQHIGEMSLEEHSQ

SEQ ID NO: 24773 - protein, 31 aa, Artificial Sequence
  Cyclic GFR-binding peptide
HHSNITVQIMEYVRKKPKLLGEMSRLEEHLE

SEQ ID NO: 24774 - protein, 43 aa, Artificial Sequence
  Cyclic GFR-binding peptide
  MOD_RES (7)..(41)..(43): Xaa is C or S
NDEGLEXVPTGQRPVQMRKIRIKPHQGQHKKATVLEEHSQXEX

SEQ ID NO: 24775 - protein, 40 aa, Artificial Sequence
  Cyclic GFR-binding peptide
  MOD_RES (1)..(38)..(40): Xaa is C or S
XQPSRVHHSNITVQIMEYVRKKPKLLGEMSRLEEHLEXAX

SEQ ID NO: 24776 - protein, 40 aa, Artificial Sequence
  Cyclic GFR-binding peptide
  MOD_RES (1)..(38)..(40): Xaa is C or S
XQPSRVHHSNITVQIMEYVRKKPKLIGEMSRLEEHLEXAX

SEQ ID NO: 24777 - protein, 33 aa, Artificial Sequence
  Cyclic GFR-binding peptide
  MOD_RES (3)..(3): Xaa is C or S
VQXRPTQVQLRSVKVAKVEIVRKKPIFKEVQVT

SEQ ID NO: 24778 - protein, 36 aa, Artificial Sequence
  Cyclic GFR-binding peptide
  MOD_RES (1)..(1): Xaa is C or S
XRPTQVQLSNITVQIMEIVRKKPIFIGEMSTLEDHL

SEQ ID NO: 24779 - protein, 24 aa, Artificial Sequence
  Cyclic GFR-binding peptide
SNITVQIMEYVRKKPKLIGEMSRL

SEQ ID NO: 24780 - protein, 33 aa, Artificial Sequence
  Cyclic GFR-binding peptide
PTQVQLSNITVQIMEIVRKKPIFIGEMSTLEDH

SEQ ID NO: 24781 - protein, 28 aa, Artificial Sequence
  Cyclic GFR-binding peptide
VQLSNITVQIMEIVRKKPIFLGEMSTLE

SEQ ID NO: 24782 - protein, 33 aa, Artificial Sequence
  Cyclic GFR-binding peptide
  MOD_RES (33)..(33): Xaa is C or S
VHHSNITVQIMEYVRKKPKLIGEMSRLEEHLEX

SEQ ID NO: 24783 - protein, 33 aa, Artificial Sequence
  Cyclic GFR-binding peptide
TQVQLRSVKVAKVEIVRKKPIFKEVQVTLEDHL

SEQ ID NO: 24784 - protein, 27 aa, Artificial Sequence
  Cyclic GFR-binding peptide
EERSVKMAKVRIKPHQGQHKEVQVFLQ

SEQ ID NO: 24785 - protein, 28 aa, Artificial Sequence
  Cyclic GFR-binding peptide
TGQRPVQMRKIRIKPHQGQHKKATVLEE

SEQ ID NO: 24786 - protein, 34 aa, Artificial Sequence
  Cyclic GFR-binding peptide
PSRVHHSNITVQIMEYVRKKPKLLGEMSRLEEHL

SEQ ID NO: 24787 - protein, 35 aa, Artificial Sequence
  Cyclic GFR-binding peptide
  MOD_RES (5)..(5): Xaa is C or S
RNVQXRPTQVQLSNITVQIMEIVRKKPIFLGEMST

SEQ ID NO: 24788 - protein, 26 aa, Artificial Sequence
  Cyclic GFR-binding peptide
SNITMQIMRIKPHQGQHIGEMSLEEH

SEQ ID NO: 24789 - protein, 40 aa, Artificial Sequence
  Cyclic GFR-binding peptide
  MOD_RES (4)..(4): Xaa is C or S
SVKXQPSRVHHSNITVQIMEYVRKKPKLIGEMSRLEEHLE

SEQ ID NO: 24790 - protein, 30 aa, Artificial Sequence
  Cyclic GFR-binding peptide
LSNITVQIMEIVRKKPIFLGEMSTLEDHLA

SEQ ID NO: 24791 - protein, 30 aa, Artificial Sequence
  Cyclic GFR-binding peptide
PSRVHHRPVQVRKIEYVRKKPKLKKATVRL

SEQ ID NO: 24792 - protein, 34 aa, Artificial Sequence
  Cyclic GFR-binding peptide
  MOD_RES (34)..(34): Xaa is C or S
VPTGQSNITMQIMRIKPHQGQHIGEMSLEEHSQX

SEQ ID NO: 24793 - protein, 31 aa, Artificial Sequence
  Cyclic GFR-binding peptide
TEERSVKMAKVRIKPHQGQHKEVQVFLQHNK

SEQ ID NO: 24794 - protein, 33 aa, Artificial Sequence
  Cyclic GFR-binding peptide
  MOD_RES (33)..(33): Xaa is C or S
VQLRSVKVAKVEIVRKKPIFKEVQVTLEDHLAX

SEQ ID NO: 24795 - protein, 34 aa, Artificial Sequence
  Cyclic GFR-binding peptide
  MOD_RES (1)..(1): Xaa is C or S
XQPSRVHHRPVQVRKIEYVRKKPKLKKATVRLEE

SEQ ID NO: 24796 - protein, 27 aa, Artificial Sequence
  Cyclic GFR-binding peptide
QVQLSNITVQIMEIVRKKPIFIGEMST

SEQ ID NO: 24797 - protein, 36 aa, Artificial Sequence
  Cyclic GFR-binding peptide
  MOD_RES (2)..(2): Xaa is C or S
KXQPSRVHHSNITVQIMEYVRKKPKLIGEMSRLEEH

SEQ ID NO: 24798 - protein, 31 aa, Artificial Sequence
  Cyclic GFR-binding peptide
HHRPVQVRKIEYVRKKPKLKKATVRLEEHLE

SEQ ID NO: 24799 - protein, 40 aa, Artificial Sequence
  Cyclic GFR-binding peptide
  MOD_RES (7)..(7): Xaa is C or S
NDEGLEXVPTEERPVQMRKIRIKPHQGQHKKATVFLQHNK

SEQ ID NO: 24800 - protein, 32 aa, Artificial Sequence
  Cyclic GFR-binding peptide
  MOD_RES (1)..(1): Xaa is C or S
XVPTGQRSVKMAKVRIKPHQGQHKEVQVLEEH

SEQ ID NO: 24801 - protein, 31 aa, Artificial Sequence
  Cyclic GFR-binding peptide
TGQRSVKMAKVRIKPHQGQHKEVQVLEEHSQ

SEQ ID NO: 24802 - protein, 36 aa, Artificial Sequence
  Cyclic GFR-binding peptide
RPTQVQLRSVKVAKVEIVRKKPIFKEVQVTLEDHLA

SEQ ID NO: 24803 - protein, 25 aa, Artificial Sequence
  Cyclic GFR-binding peptide
LRSVKVAKVEIVRKKPIFKEVQVTL

SEQ ID NO: 24804 - protein, 26 aa, Artificial Sequence
  Cyclic GFR-binding peptide
VQLSNITVQIMEIVRKKPIFLGEMST

SEQ ID NO: 24805 - protein, 40 aa, Artificial Sequence
  Cyclic GFR-binding peptide
  MOD_RES (2)..(39): Xaa is C or S
KXQPSRVHHSNITVQIMEYVRKKPKLLGEMSRLEEHLEXA

SEQ ID NO: 24806 - protein, 27 aa, Artificial Sequence
  Cyclic GFR-binding peptide
RSVKMAKVRIKPHQGQHKEVQVLEEHS

SEQ ID NO: 24807 - protein, 38 aa, Artificial Sequence
  Cyclic GFR-binding peptide
  MOD_RES (3)..(3): Xaa is C or S
VKXQPSRVHHRPVQVRKIEYVRKKPKLKKATVRLEEHL

SEQ ID NO: 24808 - protein, 32 aa, Artificial Sequence
  Cyclic GFR-binding peptide
  MOD_RES (30)..(32): Xaa is C or S
SNITVQIMEYVRKKPKLLGEMSRLEEHLEXAX

SEQ ID NO: 24809 - protein, 38 aa, Artificial Sequence
  Cyclic GFR-binding peptide
  MOD_RES (1)..(35)..(37): Xaa is C or S
XVPTGQSNITMQIMRIKPHQGQHIGEMSLEEHSQXEXR

SEQ ID NO: 24810 - protein, 35 aa, Artificial Sequence
  Cyclic GFR-binding peptide
  MOD_RES (4)..(4): Xaa is C or S
NVQXRPTQVQLSNITVQIMEIVRKKPIFLGEMSTL

SEQ ID NO: 24811 - protein, 43 aa, Artificial Sequence
  Cyclic GFR-binding peptide
  MOD_RES (4)..(41)..(43): Xaa is C or S
SVKXQPSRVHHSNITVQIMEYVRKKPKLIGEMSRLEEHLEXAX

SEQ ID NO: 24812 - protein, 31 aa, Artificial Sequence
  Cyclic GFR-binding peptide
TQVQLSNITVQIMEIVRKKPIFIGEMSTLED

SEQ ID NO: 24813 - protein, 40 aa, Artificial Sequence
  Cyclic GFR-binding peptide
  MOD_RES (2)..(39): Xaa is C or S
KXQPSRVHHRPVQVRKIEYVRKKPKLKKATVRLEEHLEXA

SEQ ID NO: 24814 - protein, 35 aa, Artificial Sequence
  Cyclic GFR-binding peptide
  MOD_RES (7)..(7): Xaa is C or S
NDEGLEXVPTGQSNITMQIMRIKPHQGQHIGEMSL

SEQ ID NO: 24815 - protein, 43 aa, Artificial Sequence
  Cyclic GFR-binding peptide
  MOD_RES (4)..(41)..(43): Xaa is C or S
SVKXQPSRVHHSNITVQIMEYVRKKPKLLGEMSRLEEHLEXAX

SEQ ID NO: 24816 - protein, 26 aa, Artificial Sequence
  Cyclic GFR-binding peptide
LSNITVQIMEIVRKKPIFLGEMSTLE

SEQ ID NO: 24817 - protein, 43 aa, Artificial Sequence
  Cyclic GFR-binding peptide
  MOD_RES (3)..(40)..(42): Xaa is C or S
VQXRPTQVQLRSVKVAKVEIVRKKPIFKEVQVTLEDHLAXKXE

SEQ ID NO: 24818 - protein, 24 aa, Artificial Sequence
  Cyclic GFR-binding peptide
EERSVKMAKVRIKPHQGQHKEVQV

SEQ ID NO: 24819 - protein, 33 aa, Artificial Sequence
  Cyclic GFR-binding peptide
RPTQVQLSNITVQIMEIVRKKPIFIGEMSTLED

SEQ ID NO: 24820 - protein, 35 aa, Artificial Sequence
  Cyclic GFR-binding peptide
  MOD_RES (33)..(35): Xaa is C or S
PTGQRPVQMRKIRIKPHQGQHKKATVLEEHSQXEX

SEQ ID NO: 24821 - protein, 28 aa, Artificial Sequence
  Cyclic GFR-binding peptide
PSRVHHSNITVQIMEYVRKKPKLLGEMS

SEQ ID NO: 24822 - protein, 28 aa, Artificial Sequence
  Cyclic GFR-binding peptide
VHHSNITVQIMEYVRKKPKLIGEMSRLE

SEQ ID NO: 24823 - protein, 29 aa, Artificial Sequence
  Cyclic GFR-binding peptide
PTEERSVKMAKVRIKPHQGQHKEVQVFLQ

SEQ ID NO: 24824 - protein, 41 aa, Artificial Sequence
  Cyclic GFR-binding peptide
  MOD_RES (4)..(38)..(40): Xaa is C or S
GLEXVPTEERPVQMRKIRIKPHQGQHKKATVFLQHNKXEXR

SEQ ID NO: 24825 - protein, 31 aa, Artificial Sequence
  Cyclic GFR-binding peptide
  MOD_RES (30)..(30): Xaa is C or S
SNITVQIMEYVRKKPKLLGEMSRLEEHLEXA

SEQ ID NO: 24826 - protein, 27 aa, Artificial Sequence
  Cyclic GFR-binding peptide
VQLSNITVQIMEIVRKKPIFLGEMSTL

SEQ ID NO: 24827 - protein, 26 aa, Artificial Sequence
  Cyclic GFR-binding peptide
RSVKMAKVRIKPHQGQHKEVQVLEEH

SEQ ID NO: 24828 - protein, 36 aa, Artificial Sequence
  Cyclic GFR-binding peptide
  MOD_RES (1)..(35): Xaa is C or S
XVPTEESNITMQIMRIKPHQGQHLGEMSFLQHNKXE

SEQ ID NO: 24829 - protein, 36 aa, Artificial Sequence
  Cyclic GFR-binding peptide
  MOD_RES (3)..(3): Xaa is C or S
LEXVPTGQRSVKMAKVRIKPHQGQHKEVQVLEEHSQ

SEQ ID NO: 24830 - protein, 35 aa, Artificial Sequence
  Cyclic GFR-binding peptide
  MOD_RES (34)..(34): Xaa is C or S
RVHHRPVQVRKIEYVRKKPKLKKATVRLEEHLEXA

SEQ ID NO: 24831 - protein, 27 aa, Artificial Sequence
  Cyclic GFR-binding peptide
HRPVQVRKIEYVRKKPKLKKATVRLEE

SEQ ID NO: 24832 - protein, 39 aa, Artificial Sequence
  Cyclic GFR-binding peptide
  MOD_RES (4)..(38): Xaa is C or S
GLEXVPTEERPVQMRKIRIKPHQGQHKKATVFLQHNKXE

SEQ ID NO: 24833 - protein, 32 aa, Artificial Sequence
  Cyclic GFR-binding peptide
  MOD_RES (31)..(31): Xaa is C or S
HRPVQVRKIEYVRKKPKLKKATVRLEEHLEXA

SEQ ID NO: 24834 - protein, 37 aa, Artificial Sequence
  Cyclic GFR-binding peptide
  MOD_RES (3)..(3): Xaa is C or S
VQXRPTQVQLRSVKVAKVEIVRKKPIFKEVQVTLEDH

SEQ ID NO: 24835 - protein, 33 aa, Artificial Sequence
  Cyclic GFR-binding peptide
  MOD_RES (31)..(33): Xaa is C or S
HSNITVQIMEYVRKKPKLLGEMSRLEEHLEXAX

SEQ ID NO: 24836 - protein, 24 aa, Artificial Sequence
  Cyclic GFR-binding peptide
SNITVQIMEIVRKKPIFIGEMSTL

SEQ ID NO: 24837 - protein, 40 aa, Artificial Sequence
  Cyclic GFR-binding peptide
  MOD_RES (3)..(37)..(39): Xaa is C or S
LEXVPTGQRPVQMRKIRIKPHQGQHKKATVLEEHSQXEXR

SEQ ID NO: 24838 - protein, 36 aa, Artificial Sequence
  Cyclic GFR-binding peptide
  MOD_RES (6)..(6): Xaa is C or S
DEGLEXVPTEERPVQMRKIRIKPHQGQHKKATVFLQ

SEQ ID NO: 24839 - protein, 33 aa, Artificial Sequence
  Cyclic GFR-binding peptide
  MOD_RES (2)..(2): Xaa is C or S
QXRPTQVQLSNITVQIMEIVRKKPIFIGEMSTL

SEQ ID NO: 24840 - protein, 23 aa, Artificial Sequence
  Cyclic GFR-binding peptide
HSNITVQIMEYVRKKPKLLGEMS

SEQ ID NO: 24841 - protein, 32 aa, Artificial Sequence
  Cyclic GFR-binding peptide
  MOD_RES (3)..(3): Xaa is C or S
LEXVPTEERSVKMAKVRIKPHQGQHKEVQVFL

SEQ ID NO: 24842 - protein, 33 aa, Artificial Sequence
  Cyclic GFR-binding peptide
  MOD_RES (31)..(33): Xaa is C or S
HSNITVQIMEYVRKKPKLIGEMSRLEEHLEXAX

SEQ ID NO: 24843 - protein, 41 aa, Artificial Sequence
  Cyclic GFR-binding peptide
  MOD_RES (5)..(39)..(41): Xaa is C or S
EGLEXVPTEESNITMQIMRIKPHQGQHLGEMSFLQHNKXEX

SEQ ID NO: 24844 - protein, 30 aa, Artificial Sequence
  Cyclic GFR-binding peptide
VHHSNITVQIMEYVRKKPKLIGEMSRLEEH

SEQ ID NO: 24845 - protein, 35 aa, Artificial Sequence
  Cyclic GFR-binding peptide
  MOD_RES (32)..(34): Xaa is C or S
QLSNITVQIMEIVRKKPIFIGEMSTLEDHLAXKXE

SEQ ID NO: 24846 - protein, 34 aa, Artificial Sequence
  Cyclic GFR-binding peptide
  MOD_RES (32)..(34): Xaa is C or S
HHSNITVQIMEYVRKKPKLIGEMSRLEEHLEXAX

SEQ ID NO: 24847 - protein, 36 aa, Artificial Sequence
  Cyclic GFR-binding peptide
  MOD_RES (2)..(36): Xaa is C or S
EXVPTEERSVKMAKVRIKPHQGQHKEVQVFLQHNKX

SEQ ID NO: 24848 - protein, 31 aa, Artificial Sequence
  Cyclic GFR-binding peptide
  MOD_RES (4)..(4): Xaa is C or S
GLEXVPTEERPVQMRKIRIKPHQGQHKKATV

SEQ ID NO: 24849 - protein, 40 aa, Artificial Sequence
  Cyclic GFR-binding peptide
  MOD_RES (1)..(38)..(40): Xaa is C or S
XRPTQVQLRSVKVAKVEIVRKKPIFKEVQVTLEDHLAXKX

SEQ ID NO: 24850 - protein, 40 aa, Artificial Sequence
  Cyclic GFR-binding peptide
  MOD_RES (5)..(5): Xaa is C or S
SSVKXQPSRVHHSNITVQIMEYVRKKPKLIGEMSRLEEHL

SEQ ID NO: 24851 - protein, 29 aa, Artificial Sequence
  Cyclic GFR-binding peptide
PTQVQLSNITVQIMEIVRKKPIFLGEMST

SEQ ID NO: 24852 - protein, 37 aa, Artificial Sequence
  Cyclic GFR-binding peptide
  MOD_RES (4)..(4): Xaa is C or S
GLEXVPTGQRPVQMRKIRIKPHQGQHKKATVLEEHSQ

SEQ ID NO: 24853 - protein, 23 aa, Artificial Sequence
  Cyclic GFR-binding peptide
ESNITMQIMRIKPHQGQHLGEMS

SEQ ID NO: 24854 - protein, 40 aa, Artificial Sequence
  Cyclic GFR-binding peptide
  MOD_RES (7)..(7): Xaa is C or S
NDEGLEXVPTGQRPVQMRKIRIKPHQGQHKKATVLEEHSQ

SEQ ID NO: 24855 - protein, 37 aa, Artificial Sequence
  Cyclic GFR-binding peptide
  MOD_RES (1)..(35)..(37): Xaa is C or S
XVPTEERPVQMRKIRIKPHQGQHKKATVFLQHNKXEX

SEQ ID NO: 24856 - protein, 31 aa, Artificial Sequence
  Cyclic GFR-binding peptide
  MOD_RES (1)..(1): Xaa is C or S
XRPTQVQLSNITVQIMEIVRKKPIFIGEMST

SEQ ID NO: 24857 - protein, 30 aa, Artificial Sequence
  Cyclic GFR-binding peptide
  MOD_RES (2)..(2): Xaa is C or S
EXVPTGQRPVQMRKIRIKPHQGQHKKATVL

SEQ ID NO: 24858 - protein, 34 aa, Artificial Sequence
  Cyclic GFR-binding peptide
  MOD_RES (2)..(2): Xaa is C or S
EXVPTEERPVQMRKIRIKPHQGQHKKATVFLQHN

SEQ ID NO: 24859 - protein, 34 aa, Artificial Sequence
  Cyclic GFR-binding peptide
  MOD_RES (2)..(2): Xaa is C or S
QXRPTQVQLSNITVQIMEIVRKKPIFLGEMSTLE

SEQ ID NO: 24860 - protein, 28 aa, Artificial Sequence
  Cyclic GFR-binding peptide
RSVKMAKVRIKPHQGQHKEVQVFLQHNK

SEQ ID NO: 24861 - protein, 42 aa, Artificial Sequence
  Cyclic GFR-binding peptide
  MOD_RES (2)..(39)..(41): Xaa is C or S
KXQPSRVHHSNITVQIMEYVRKKPKLIGEMSRLEEHLEXAXA

SEQ ID NO: 24862 - protein, 34 aa, Artificial Sequence
  Cyclic GFR-binding peptide
PTQVQLRSVKVAKVEIVRKKPIFKEVQVTLEDHL

SEQ ID NO: 24863 - protein, 32 aa, Artificial Sequence
  Cyclic GFR-binding peptide
  MOD_RES (32)..(32): Xaa is C or S
QLSNITVQIMEIVRKKPIFIGEMSTLEDHLAX

SEQ ID NO: 24864 - protein, 41 aa, Artificial Sequence
  Cyclic GFR-binding peptide
  MOD_RES (1)..(38)..(40): Xaa is C or S
XQPSRVHHRPVQVRKIEYVRKKPKLKKATVRLEEHLEXAXA

SEQ ID NO: 24865 - protein, 31 aa, Artificial Sequence
  Cyclic GFR-binding peptide
  MOD_RES (29)..(31): Xaa is C or S
RSVKMAKVRIKPHQGQHKEVQVFLQHNKXEX

SEQ ID NO: 24866 - protein, 32 aa, Artificial Sequence
  Cyclic GFR-binding peptide
PSRVHHRPVQVRKIEYVRKKPKLKKATVRLEE

SEQ ID NO: 24867 - protein, 27 aa, Artificial Sequence
  Cyclic GFR-binding peptide
QRSVKMAKVRIKPHQGQHKEVQVLEEH

SEQ ID NO: 24868 - protein, 40 aa, Artificial Sequence
  Cyclic GFR-binding peptide
  MOD_RES (3)..(37)..(39): Xaa is C or S
LEXVPTGQSNITMQIMRIKPHQGQHIGEMSLEEHSQXEXR

SEQ ID NO: 24869 - protein, 35 aa, Artificial Sequence
  Cyclic GFR-binding peptide
  MOD_RES (4)..(4): Xaa is C or S
NVQXRPTQVQLSNITVQIMEIVRKKPIFIGEMSTL

SEQ ID NO: 24870 - protein, 34 aa, Artificial Sequence
  Cyclic GFR-binding peptide
  MOD_RES (33)..(33): Xaa is C or S
PTEERSVKMAKVRIKPHQGQHKEVQVFLQHNKXE

SEQ ID NO: 24871 - protein, 30 aa, Artificial Sequence
  Cyclic GFR-binding peptide
  MOD_RES (1)..(1): Xaa is C or S
XVPTGQRSVKMAKVRIKPHQGQHKEVQVLE

SEQ ID NO: 24872 - protein, 35 aa, Artificial Sequence
  Cyclic GFR-binding peptide
  MOD_RES (33)..(35): Xaa is C or S
PTGQSNITMQIMRIKPHQGQHIGEMSLEEHSQXEX

SEQ ID NO: 24873 - protein, 31 aa, Artificial Sequence
  Cyclic GFR-binding peptide
  MOD_RES (2)..(2): Xaa is C or S
EXVPTGQRSVKMAKVRIKPHQGQHKEVQVLE

SEQ ID NO: 24874 - protein, 28 aa, Artificial Sequence
  Cyclic GFR-binding peptide
PTQVQLSNITVQIMEIVRKKPIFIGEMS

SEQ ID NO: 24875 - protein, 38 aa, Artificial Sequence
  Cyclic GFR-binding peptide
  MOD_RES (2)..(2): Xaa is C or S
KXQPSRVHHRPVQVRKIEYVRKKPKLKKATVRLEEHLE

SEQ ID NO: 24876 - protein, 33 aa, Artificial Sequence
  Cyclic GFR-binding peptide
  MOD_RES (32)..(32): Xaa is C or S
TEERSVKMAKVRIKPHQGQHKEVQVFLQHNKXE

SEQ ID NO: 24877 - protein, 25 aa, Artificial Sequence
  Cyclic GFR-binding peptide
TGQRSVKMAKVRIKPHQGQHKEVQV

SEQ ID NO: 24878 - protein, 30 aa, Artificial Sequence
  Cyclic GFR-binding peptide
GQSNITMQIMRIKPHQGQHIGEMSLEEHSQ

SEQ ID NO: 24879 - protein, 35 aa, Artificial Sequence
  Cyclic GFR-binding peptide
  MOD_RES (3)..(3): Xaa is C or S
VKXQPSRVHHSNITVQIMEYVRKKPKLIGEMSRLE

SEQ ID NO: 24880 - protein, 32 aa, Artificial Sequence
  Cyclic GFR-binding peptide
  MOD_RES (31)..(31): Xaa is C or S
LSNITVQIMEIVRKKPIFLGEMSTLEDHLAXK

SEQ ID NO: 24881 - protein, 40 aa, Artificial Sequence
  Cyclic GFR-binding peptide
  MOD_RES (3)..(40): Xaa is C or S
VQXRPTQVQLSNITVQIMEIVRKKPIFIGEMSTLEDHLAX

SEQ ID NO: 24882 - protein, 38 aa, Artificial Sequence
  Cyclic GFR-binding peptide
  MOD_RES (5)..(5): Xaa is C or S
RNVQXRPTQVQLRSVKVAKVEIVRKKPIFKEVQVTLED

SEQ ID NO: 24883 - protein, 28 aa, Artificial Sequence
  Cyclic GFR-binding peptide
ERPVQMRKIRIKPHQGQHKKATVFLQHN

SEQ ID NO: 24884 - protein, 26 aa, Artificial Sequence
  Cyclic GFR-binding peptide
ESNITMQIMRIKPHQGQHLGEMSFLQ

SEQ ID NO: 24885 - protein, 28 aa, Artificial Sequence
  Cyclic GFR-binding peptide
  MOD_RES (1)..(1): Xaa is C or S
XVPTGQSNITMQIMRIKPHQGQHIGEMS

SEQ ID NO: 24886 - protein, 32 aa, Artificial Sequence
  Cyclic GFR-binding peptide
  MOD_RES (32)..(32): Xaa is C or S
HHSNITVQIMEYVRKKPKLIGEMSRLEEHLEX

SEQ ID NO: 24887 - protein, 31 aa, Artificial Sequence
  Cyclic GFR-binding peptide
  MOD_RES (31)..(31): Xaa is C or S
EERPVQMRKIRIKPHQGQHKKATVFLQHNKX

SEQ ID NO: 24888 - protein, 32 aa, Artificial Sequence
  Cyclic GFR-binding peptide
  MOD_RES (5)..(5): Xaa is C or S
EGLEXVPTEESNITMQIMRIKPHQGQHLGEMS

SEQ ID NO: 24889 - protein, 38 aa, Artificial Sequence
  Cyclic GFR-binding peptide
  MOD_RES (5)..(5): Xaa is C or S
SSVKXQPSRVHHRPVQVRKIEYVRKKPKLKKATVRLEE

SEQ ID NO: 24890 - protein, 33 aa, Artificial Sequence
  Cyclic GFR-binding peptide
SRVHHSNITVQIMEYVRKKPKLLGEMSRLEEHL

SEQ ID NO: 24891 - protein, 27 aa, Artificial Sequence
  Cyclic GFR-binding peptide
TGQRSVKMAKVRIKPHQGQHKEVQVLE

SEQ ID NO: 24892 - protein, 40 aa, Artificial Sequence
  Cyclic GFR-binding peptide
  MOD_RES (5)..(5): Xaa is C or S
RNVQXRPTQVQLSNITVQIMEIVRKKPIFIGEMSTLEDHL

SEQ ID NO: 24893 - protein, 26 aa, Artificial Sequence
  Cyclic GFR-binding peptide
HHSNITVQIMEYVRKKPKLIGEMSRL

SEQ ID NO: 24894 - protein, 23 aa, Artificial Sequence
  Cyclic GFR-binding peptide
SNITVQIMEYVRKKPKLIGEMSR

SEQ ID NO: 24895 - protein, 30 aa, Artificial Sequence
  Cyclic GFR-binding peptide
VHHSNITVQIMEYVRKKPKLLGEMSRLEEH

SEQ ID NO: 24896 - protein, 36 aa, Artificial Sequence
  Cyclic GFR-binding peptide
  MOD_RES (36)..(36): Xaa is C or S
PTQVQLSNITVQIMEIVRKKPIFIGEMSTLEDHLAX

SEQ ID NO: 24897 - protein, 30 aa, Artificial Sequence
  Cyclic GFR-binding peptide
  MOD_RES (29)..(29): Xaa is C or S
SNITMQIMRIKPHQGQHLGEMSFLQHNKXE

SEQ ID NO: 24898 - protein, 27 aa, Artificial Sequence
  Cyclic GFR-binding peptide
VHHSNITVQIMEYVRKKPKLLGEMSRL

SEQ ID NO: 24899 - protein, 43 aa, Artificial Sequence
  Cyclic GFR-binding peptide
  MOD_RES (7)..(41)..(43): Xaa is C or S
NDEGLEXVPTGQRSVKMAKVRIKPHQGQHKEVQVLEEHSQXEX

SEQ ID NO: 24900 - protein, 29 aa, Artificial Sequence
  Cyclic GFR-binding peptide
VPTEERPVQMRKIRIKPHQGQHKKATVFL

SEQ ID NO: 24901 - protein, 30 aa, Artificial Sequence
  Cyclic GFR-binding peptide
GQRSVKMAKVRIKPHQGQHKEVQVLEEHSQ

SEQ ID NO: 24902 - protein, 28 aa, Artificial Sequence
  Cyclic GFR-binding peptide
ERSVKMAKVRIKPHQGQHKEVQVFLQHN

SEQ ID NO: 24903 - protein, 29 aa, Artificial Sequence
  Cyclic GFR-binding peptide
HHSNITVQIMEYVRKKPKLIGEMSRLEEH

SEQ ID NO: 24904 - protein, 27 aa, Artificial Sequence
  Cyclic GFR-binding peptide
TEESNITMQIMRIKPHQGQHLGEMSFL

SEQ ID NO: 24905 - protein, 28 aa, Artificial Sequence
  Cyclic GFR-binding peptide
EERSVKMAKVRIKPHQGQHKEVQVFLQH

SEQ ID NO: 24906 - protein, 35 aa, Artificial Sequence
  Cyclic GFR-binding peptide
  MOD_RES (5)..(5): Xaa is C or S
EGLEXVPTGQRSVKMAKVRIKPHQGQHKEVQVLEE

SEQ ID NO: 24907 - protein, 31 aa, Artificial Sequence
  Cyclic GFR-binding peptide
  MOD_RES (3)..(3): Xaa is C or S
LEXVPTEERPVQMRKIRIKPHQGQHKKATVF

SEQ ID NO: 24908 - protein, 34 aa, Artificial Sequence
  Cyclic GFR-binding peptide
  MOD_RES (32)..(34): Xaa is C or S
QLSNITVQIMEIVRKKPIFLGEMSTLEDHLAXKX

SEQ ID NO: 24909 - protein, 33 aa, Artificial Sequence
  Cyclic GFR-binding peptide
  MOD_RES (3)..(3): Xaa is C or S
VKXQPSRVHHRPVQVRKIEYVRKKPKLKKATVR

SEQ ID NO: 24910 - protein, 26 aa, Artificial Sequence
  Cyclic GFR-binding peptide
QLRSVKVAKVEIVRKKPIFKEVQVTL

SEQ ID NO: 24911 - protein, 38 aa, Artificial Sequence
  Cyclic GFR-binding peptide
  MOD_RES (36)..(38): Xaa is C or S
PSRVHHSNITVQIMEYVRKKPKLIGEMSRLEEHLEXAX

SEQ ID NO: 24912 - protein, 35 aa, Artificial Sequence
  Cyclic GFR-binding peptide
  MOD_RES (7)..(7): Xaa is C or S
NDEGLEXVPTGQRPVQMRKIRIKPHQGQHKKATVL

SEQ ID NO: 24913 - protein, 31 aa, Artificial Sequence
  Cyclic GFR-binding peptide
PTQVQLRSVKVAKVEIVRKKPIFKEVQVTLE

SEQ ID NO: 24914 - protein, 36 aa, Artificial Sequence
  Cyclic GFR-binding peptide
  MOD_RES (33)..(35): Xaa is C or S
VQLSNITVQIMEIVRKKPIFIGEMSTLEDHLAXKXE

SEQ ID NO: 24915 - protein, 37 aa, Artificial Sequence
  Cyclic GFR-binding peptide
  MOD_RES (3)..(3): Xaa is C or S
VQXRPTQVQLSNITVQIMEIVRKKPIFLGEMSTLEDH

SEQ ID NO: 24916 - protein, 32 aa, Artificial Sequence
  Cyclic GFR-binding peptide
  MOD_RES (31)..(31): Xaa is C or S
GQRSVKMAKVRIKPHQGQHKEVQVLEEHSQXE

SEQ ID NO: 24917 - protein, 32 aa, Artificial Sequence
  Cyclic GFR-binding peptide
  MOD_RES (31)..(31): Xaa is C or S
EERPVQMRKIRIKPHQGQHKKATVFLQHNKXE

SEQ ID NO: 24918 - protein, 31 aa, Artificial Sequence
  Cyclic GFR-binding peptide
  MOD_RES (2)..(2): Xaa is C or S
EXVPTEESNITMQIMRIKPHQGQHLGEMSFL

SEQ ID NO: 24919 - protein, 33 aa, Artificial Sequence
  Cyclic GFR-binding peptide
  MOD_RES (30)..(32): Xaa is C or S
ERPVQMRKIRIKPHQGQHKKATVFLQHNKXEXR

SEQ ID NO: 24920 - protein, 30 aa, Artificial Sequence
  Cyclic GFR-binding peptide
  MOD_RES (2)..(2): Xaa is C or S
EXVPTGQSNITMQIMRIKPHQGQHIGEMSL

SEQ ID NO: 24921 - protein, 31 aa, Artificial Sequence
  Cyclic GFR-binding peptide
  MOD_RES (29)..(31): Xaa is C or S
RSVKMAKVRIKPHQGQHKEVQVLEEHSQXEX

SEQ ID NO: 24922 - protein, 27 aa, Artificial Sequence
  Cyclic GFR-binding peptide
LSNITVQIMEIVRKKPIFIGEMSTLED

SEQ ID NO: 24923 - protein, 33 aa, Artificial Sequence
  Cyclic GFR-binding peptide
  MOD_RES (31)..(33): Xaa is C or S
EERSVKMAKVRIKPHQGQHKEVQVFLQHNKXEX

SEQ ID NO: 24924 - protein, 31 aa, Artificial Sequence
  Cyclic GFR-binding peptide
  MOD_RES (1)..(1): Xaa is C or S
XQPSRVHHSNITVQIMEYVRKKPKLIGEMSR

SEQ ID NO: 24925 - protein, 26 aa, Artificial Sequence
  Cyclic GFR-binding peptide
VQLRSVKVAKVEIVRKKPIFKEVQVT

SEQ ID NO: 24926 - protein, 31 aa, Artificial Sequence
  Cyclic GFR-binding peptide
  MOD_RES (1)..(1): Xaa is C or S
XQPSRVHHRPVQVRKIEYVRKKPKLKKATVR

SEQ ID NO: 24927 - protein, 28 aa, Artificial Sequence
  Cyclic GFR-binding peptide
HRPVQVRKIEYVRKKPKLKKATVRLEEH

SEQ ID NO: 24928 - protein, 30 aa, Artificial Sequence
  Cyclic GFR-binding peptide
VPTGQRPVQMRKIRIKPHQGQHKKATVLEE

SEQ ID NO: 24929 - protein, 27 aa, Artificial Sequence
  Cyclic GFR-binding peptide
VPTGQRSVKMAKVRIKPHQGQHKEVQV

SEQ ID NO: 24930 - protein, 25 aa, Artificial Sequence
  Cyclic GFR-binding peptide
GQRPVQMRKIRIKPHQGQHKKATVL

SEQ ID NO: 24931 - protein, 35 aa, Artificial Sequence
  Cyclic GFR-binding peptide
  MOD_RES (35)..(35): Xaa is C or S
SRVHHSNITVQIMEYVRKKPKLIGEMSRLEEHLEX

SEQ ID NO: 24932 - protein, 38 aa, Artificial Sequence
  Cyclic GFR-binding peptide
  MOD_RES (3)..(3): Xaa is C or S
VQXRPTQVQLSNITVQIMEIVRKKPIFIGEMSTLEDHL

SEQ ID NO: 24933 - protein, 34 aa, Artificial Sequence
  Cyclic GFR-binding peptide
  MOD_RES (1)..(1): Xaa is C or S
XRPTQVQLSNITVQIMEIVRKKPIFIGEMSTLED

SEQ ID NO: 24934 - protein, 24 aa, Artificial Sequence
  Cyclic GFR-binding peptide
HRPVQVRKIEYVRKKPKLKKATVR

SEQ ID NO: 24935 - protein, 42 aa, Artificial Sequence
  Cyclic GFR-binding peptide
  MOD_RES (4)..(41): Xaa is C or S
NVQXRPTQVQLSNITVQIMEIVRKKPIFIGEMSTLEDHLAXK

SEQ ID NO: 24936 - protein, 30 aa, Artificial Sequence
  Cyclic GFR-binding peptide
QVQLSNITVQIMEIVRKKPIFIGEMSTLED

SEQ ID NO: 24937 - protein, 35 aa, Artificial Sequence
  Cyclic GFR-binding peptide
  MOD_RES (2)..(2): Xaa is C or S
QXRPTQVQLRSVKVAKVEIVRKKPIFKEVQVTLED

SEQ ID NO: 24938 - protein, 38 aa, Artificial Sequence
  Cyclic GFR-binding peptide
  MOD_RES (5)..(5): Xaa is C or S
EGLEXVPTGQSNITMQIMRIKPHQGQHIGEMSLEEHSQ

SEQ ID NO: 24939 - protein, 35 aa, Artificial Sequence
  Cyclic GFR-binding peptide
  MOD_RES (33)..(35): Xaa is C or S
PTEESNITMQIMRIKPHQGQHLGEMSFLQHNKXEX

SEQ ID NO: 24940 - protein, 35 aa, Artificial Sequence
  Cyclic GFR-binding peptide
  MOD_RES (35)..(35): Xaa is C or S
SRVHHRPVQVRKIEYVRKKPKLKKATVRLEEHLEX

SEQ ID NO: 24941 - protein, 36 aa, Artificial Sequence
  Cyclic GFR-binding peptide
  MOD_RES (36)..(36): Xaa is C or S
PSRVHHSNITVQIMEYVRKKPKLIGEMSRLEEHLEX

SEQ ID NO: 24942 - protein, 38 aa, Artificial Sequence
  Cyclic GFR-binding peptide
  MOD_RES (5)..(5): Xaa is C or S
EGLEXVPTGQRPVQMRKIRIKPHQGQHKKATVLEEHSQ

SEQ ID NO: 24943 - protein, 33 aa, Artificial Sequence
  Cyclic GFR-binding peptide
QVQLRSVKVAKVEIVRKKPIFKEVQVTLEDHLA

SEQ ID NO: 24944 - protein, 36 aa, Artificial Sequence
  Cyclic GFR-binding peptide
  MOD_RES (2)..(2): Xaa is C or S
QXRPTQVQLSNITVQIMEIVRKKPIFLGEMSTLEDH

SEQ ID NO: 24945 - protein, 33 aa, Artificial Sequence
  Cyclic GFR-binding peptide
TQVQLSNITVQIMEIVRKKPIFIGEMSTLEDHL

SEQ ID NO: 24946 - protein, 34 aa, Artificial Sequence
  Cyclic GFR-binding peptide
  MOD_RES (33)..(33): Xaa is C or S
VQLSNITVQIMEIVRKKPIFLGEMSTLEDHLAXK

SEQ ID NO: 24947 - protein, 34 aa, Artificial Sequence
  Cyclic GFR-binding peptide
TQVQLSNITVQIMEIVRKKPIFIGEMSTLEDHLA

SEQ ID NO: 24948 - protein, 26 aa, Artificial Sequence
  Cyclic GFR-binding peptide
HHSNITVQIMEYVRKKPKLLGEMSRL

SEQ ID NO: 24949 - protein, 34 aa, Artificial Sequence
  Cyclic GFR-binding peptide
  MOD_RES (5)..(5): Xaa is C or S
RNVQXRPTQVQLRSVKVAKVEIVRKKPIFKEVQV

SEQ ID NO: 24950 - protein, 26 aa, Artificial Sequence
  Cyclic GFR-binding peptide
VHHSNITVQIMEYVRKKPKLIGEMSR

SEQ ID NO: 24951 - protein, 37 aa, Artificial Sequence
  Cyclic GFR-binding peptide
  MOD_RES (3)..(37): Xaa is C or S
LEXVPTEERPVQMRKIRIKPHQGQHKKATVFLQHNKX

SEQ ID NO: 24952 - protein, 36 aa, Artificial Sequence
  Cyclic GFR-binding peptide
  MOD_RES (2)..(2): Xaa is C or S
KXQPSRVHHSNITVQIMEYVRKKPKLLGEMSRLEEH

SEQ ID NO: 24953 - protein, 29 aa, Artificial Sequence
  Cyclic GFR-binding peptide
LSNITVQIMEIVRKKPIFLGEMSTLEDHL

SEQ ID NO: 24954 - protein, 33 aa, Artificial Sequence
  Cyclic GFR-binding peptide
  MOD_RES (2)..(2): Xaa is C or S
QXRPTQVQLSNITVQIMEIVRKKPIFLGEMSTL

SEQ ID NO: 24955 - protein, 26 aa, Artificial Sequence
  Cyclic GFR-binding peptide
PTGQRSVKMAKVRIKPHQGQHKEVQV

SEQ ID NO: 24956 - protein, 38 aa, Artificial Sequence
  Cyclic GFR-binding peptide
  MOD_RES (2)..(2): Xaa is C or S
QXRPTQVQLRSVKVAKVEIVRKKPIFKEVQVTLEDHLA

SEQ ID NO: 24957 - protein, 31 aa, Artificial Sequence
  Cyclic GFR-binding peptide
PTGQRPVQMRKIRIKPHQGQHKKATVLEEHS

SEQ ID NO: 24958 - protein, 32 aa, Artificial Sequence
  Cyclic GFR-binding peptide
  MOD_RES (30)..(32): Xaa is C or S
RSVKVAKVEIVRKKPIFKEVQVTLEDHLAXKX

SEQ ID NO: 24959 - protein, 40 aa, Artificial Sequence
  Cyclic GFR-binding peptide
  MOD_RES (6)..(40): Xaa is C or S
DEGLEXVPTEERSVKMAKVRIKPHQGQHKEVQVFLQHNKX

SEQ ID NO: 24960 - protein, 35 aa, Artificial Sequence
  Cyclic GFR-binding peptide
  MOD_RES (2)..(2): Xaa is C or S
KXQPSRVHHSNITVQIMEYVRKKPKLLGEMSRLEE

SEQ ID NO: 24961 - protein, 40 aa, Artificial Sequence
  Cyclic GFR-binding peptide
  MOD_RES (6)..(40): Xaa is C or S
DEGLEXVPTGQRPVQMRKIRIKPHQGQHKKATVLEEHSQX

SEQ ID NO: 24962 - protein, 28 aa, Artificial Sequence
  Cyclic GFR-binding peptide
SNITVQIMEIVRKKPIFIGEMSTLEDHL

SEQ ID NO: 24963 - protein, 26 aa, Artificial Sequence
  Cyclic GFR-binding peptide
VHHRPVQVRKIEYVRKKPKLKKATVR

SEQ ID NO: 24964 - protein, 41 aa, Artificial Sequence
  Cyclic GFR-binding peptide
  MOD_RES (6)..(40): Xaa is C or S
DEGLEXVPTEESNITMQIMRIKPHQGQHLGEMSFLQHNKXE

SEQ ID NO: 24965 - protein, 36 aa, Artificial Sequence
  Cyclic GFR-binding peptide
  MOD_RES (4)..(4): Xaa is C or S
NVQXRPTQVQLSNITVQIMEIVRKKPIFIGEMSTLE

SEQ ID NO: 24966 - protein, 28 aa, Artificial Sequence
  Cyclic GFR-binding peptide
PTEESNITMQIMRIKPHQGQHLGEMSFL

SEQ ID NO: 24967 - protein, 40 aa, Artificial Sequence
  Cyclic GFR-binding peptide
  MOD_RES (37)..(39): Xaa is C or S
QPSRVHHRPVQVRKIEYVRKKPKLKKATVRLEEHLEXAXA

SEQ ID NO: 24968 - protein, 36 aa, Artificial Sequence
  Cyclic GFR-binding peptide
  MOD_RES (35)..(35): Xaa is C or S
SRVHHRPVQVRKIEYVRKKPKLKKATVRLEEHLEXA

SEQ ID NO: 24969 - protein, 35 aa, Artificial Sequence
  Cyclic GFR-binding peptide
  MOD_RES (3)..(3): Xaa is C or S
VQXRPTQVQLSNITVQIMEIVRKKPIFIGEMSTLE

SEQ ID NO: 24970 - protein, 37 aa, Artificial Sequence
  Cyclic GFR-binding peptide
  MOD_RES (35)..(37): Xaa is C or S
SRVHHSNITVQIMEYVRKKPKLLGEMSRLEEHLEXAX

SEQ ID NO: 24971 - protein, 33 aa, Artificial Sequence
  Cyclic GFR-binding peptide
VPTEERSVKMAKVRIKPHQGQHKEVQVFLQHNK

SEQ ID NO: 24972 - protein, 32 aa, Artificial Sequence
  Cyclic GFR-binding peptide
  MOD_RES (1)..(1): Xaa is C or S
XVPTEESNITMQIMRIKPHQGQHLGEMSFLQH

SEQ ID NO: 24973 - protein, 28 aa, Artificial Sequence
  Cyclic GFR-binding peptide
QLSNITVQIMEIVRKKPIFLGEMSTLED

SEQ ID NO: 24974 - protein, 27 aa, Artificial Sequence
  Cyclic GFR-binding peptide
GQRPVQMRKIRIKPHQGQHKKATVLEE

SEQ ID NO: 24975 - protein, 43 aa, Artificial Sequence
  Cyclic GFR-binding peptide
  MOD_RES (7)..(41)..(43): Xaa is C or S
NDEGLEXVPTGQSNITMQIMRIKPHQGQHIGEMSLEEHSQXEX

SEQ ID NO: 24976 - protein, 33 aa, Artificial Sequence
  Cyclic GFR-binding peptide
  MOD_RES (5)..(5): Xaa is C or S
EGLEXVPTEESNITMQIMRIKPHQGQHLGEMSF

SEQ ID NO: 24977 - protein, 45 aa, Artificial Sequence
  Cyclic GFR-binding peptide
  MOD_RES (5)..(42)..(44): Xaa is C or S
RNVQXRPTQVQLSNITVQIMEIVRKKPIFIGEMSTLEDHLAXKXE

SEQ ID NO: 24978 - protein, 25 aa, Artificial Sequence
  Cyclic GFR-binding peptide
QRSVKMAKVRIKPHQGQHKEVQVLE

SEQ ID NO: 24979 - protein, 29 aa, Artificial Sequence
  Cyclic GFR-binding peptide
PTQVQLRSVKVAKVEIVRKKPIFKEVQVT

SEQ ID NO: 24980 - protein, 28 aa, Artificial Sequence
  Cyclic GFR-binding peptide
VHHSNITVQIMEYVRKKPKLLGEMSRLE

SEQ ID NO: 24981 - protein, 36 aa, Artificial Sequence
  Cyclic GFR-binding peptide
  MOD_RES (5)..(5): Xaa is C or S
EGLEXVPTGQRPVQMRKIRIKPHQGQHKKATVLEEH

SEQ ID NO: 24982 - protein, 31 aa, Artificial Sequence
  Cyclic GFR-binding peptide
  MOD_RES (31)..(31): Xaa is C or S
LSNITVQIMEIVRKKPIFIGEMSTLEDHLAX

SEQ ID NO: 24983 - protein, 34 aa, Artificial Sequence
  Cyclic GFR-binding peptide
QPSRVHHSNITVQIMEYVRKKPKLLGEMSRLEEH

SEQ ID NO: 24984 - protein, 37 aa, Artificial Sequence
  Cyclic GFR-binding peptide
  MOD_RES (4)..(4): Xaa is C or S
GLEXVPTEESNITMQIMRIKPHQGQHLGEMSFLQHNK

SEQ ID NO: 24985 - protein, 32 aa, Artificial Sequence
  Cyclic GFR-binding peptide
PSRVHHSNITVQIMEYVRKKPKLLGEMSRLEE

SEQ ID NO: 24986 - protein, 39 aa, Artificial Sequence
  Cyclic GFR-binding peptide
  MOD_RES (2)..(36)..(38): Xaa is C or S
EXVPTGQRSVKMAKVRIKPHQGQHKEVQVLEEHSQXEXR

SEQ ID NO: 24987 - protein, 33 aa, Artificial Sequence
  Cyclic GFR-binding peptide
  MOD_RES (30)..(32): Xaa is C or S
SNITVQIMEIVRKKPIFIGEMSTLEDHLAXKXE

SEQ ID NO: 24988 - protein, 27 aa, Artificial Sequence
  Cyclic GFR-binding peptide
RPVQVRKIEYVRKKPKLKKATVRLEEH

SEQ ID NO: 24989 - protein, 28 aa, Artificial Sequence
  Cyclic GFR-binding peptide
TQVQLSNITVQIMEIVRKKPIFLGEMST

SEQ ID NO: 24990 - protein, 26 aa, Artificial Sequence
  Cyclic GFR-binding peptide
TGQRPVQMRKIRIKPHQGQHKKATVL

SEQ ID NO: 24991 - protein, 31 aa, Artificial Sequence
  Cyclic GFR-binding peptide
PTEERSVKMAKVRIKPHQGQHKEVQVFLQHN

SEQ ID NO: 24992 - protein, 39 aa, Artificial Sequence
  Cyclic GFR-binding peptide
  MOD_RES (1)..(38): Xaa is C or S
XRPTQVQLSNITVQIMEIVRKKPIFIGEMSTLEDHLAXK

SEQ ID NO: 24993 - protein, 36 aa, Artificial Sequence
  Cyclic GFR-binding peptide
  MOD_RES (34)..(36): Xaa is C or S
RVHHRPVQVRKIEYVRKKPKLKKATVRLEEHLEXAX

SEQ ID NO: 24994 - protein, 32 aa, Artificial Sequence
  Cyclic GFR-binding peptide
  MOD_RES (1)..(1): Xaa is C or S
XRPTQVQLRSVKVAKVEIVRKKPIFKEVQVTL

SEQ ID NO: 24995 - protein, 29 aa, Artificial Sequence
  Cyclic GFR-binding peptide
RPTQVQLSNITVQIMEIVRKKPIFIGEMS

SEQ ID NO: 24996 - protein, 41 aa, Artificial Sequence
  Cyclic GFR-binding peptide
  MOD_RES (3)..(40): Xaa is C or S
VKXQPSRVHHSNITVQIMEYVRKKPKLIGEMSRLEEHLEXA

SEQ ID NO: 24997 - protein, 39 aa, Artificial Sequence
  Cyclic GFR-binding peptide
  MOD_RES (3)..(37)..(39): Xaa is C or S
LEXVPTEESNITMQIMRIKPHQGQHLGEMSFLQHNKXEX

SEQ ID NO: 24998 - protein, 28 aa, Artificial Sequence
  Cyclic GFR-binding peptide
HHSNITVQIMEYVRKKPKLLGEMSRLEE

SEQ ID NO: 24999 - protein, 38 aa, Artificial Sequence
  Cyclic GFR-binding peptide
  MOD_RES (37)..(37): Xaa is C or S
QPSRVHHSNITVQIMEYVRKKPKLLGEMSRLEEHLEXA

SEQ ID NO: 25000 - protein, 39 aa, Artificial Sequence
  Cyclic GFR-binding peptide
  MOD_RES (2)..(36)..(38): Xaa is C or S
EXVPTGQRPVQMRKIRIKPHQGQHKKATVLEEHSQXEXR

SEQ ID NO: 25001 - protein, 31 aa, Artificial Sequence
  Cyclic GFR-binding peptide
  MOD_RES (2)..(2): Xaa is C or S
KXQPSRVHHSNITVQIMEYVRKKPKLLGEMS

SEQ ID NO: 25002 - protein, 40 aa, Artificial Sequence
  Cyclic GFR-binding peptide
  MOD_RES (4)..(38)..(40): Xaa is C or S
GLEXVPTEERPVQMRKIRIKPHQGQHKKATVFLQHNKXEX

SEQ ID NO: 25003 - protein, 34 aa, Artificial Sequence
  Cyclic GFR-binding peptide
QPSRVHHRPVQVRKIEYVRKKPKLKKATVRLEEH

SEQ ID NO: 25004 - protein, 39 aa, Artificial Sequence
  Cyclic GFR-binding peptide
  MOD_RES (2)..(39): Xaa is C or S
QXRPTQVQLSNITVQIMEIVRKKPIFLGEMSTLEDHLAX

SEQ ID NO: 25005 - protein, 32 aa, Artificial Sequence
  Cyclic GFR-binding peptide
  MOD_RES (29)..(31): Xaa is C or S
SNITMQIMRIKPHQGQHLGEMSFLQHNKXEXR

SEQ ID NO: 25006 - protein, 27 aa, Artificial Sequence
  Cyclic GFR-binding peptide
ERPVQMRKIRIKPHQGQHKKATVFLQH

SEQ ID NO: 25007 - protein, 42 aa, Artificial Sequence
  Cyclic GFR-binding peptide
  MOD_RES (5)..(42): Xaa is C or S
SSVKXQPSRVHHSNITVQIMEYVRKKPKLLGEMSRLEEHLEX

SEQ ID NO: 25008 - protein, 28 aa, Artificial Sequence
  Cyclic GFR-binding peptide
VPTGQRSVKMAKVRIKPHQGQHKEVQVL

SEQ ID NO: 25009 - protein, 36 aa, Artificial Sequence
  Cyclic GFR-binding peptide
  MOD_RES (7)..(7): Xaa is C or S
NDEGLEXVPTEERPVQMRKIRIKPHQGQHKKATVFL

SEQ ID NO: 25010 - protein, 37 aa, Artificial Sequence
  Cyclic GFR-binding peptide
  MOD_RES (34)..(36): Xaa is C or S
RVHHSNITVQIMEYVRKKPKLLGEMSRLEEHLEXAXA

SEQ ID NO: 25011 - protein, 31 aa, Artificial Sequence
  Cyclic GFR-binding peptide
  MOD_RES (31)..(31): Xaa is C or S
HSNITVQIMEYVRKKPKLLGEMSRLEEHLEX

SEQ ID NO: 25012 - protein, 38 aa, Artificial Sequence
  Cyclic GFR-binding peptide
  MOD_RES (4)..(38): Xaa is C or S
GLEXVPTGQRPVQMRKIRIKPHQGQHKKATVLEEHSQX

SEQ ID NO: 25013 - protein, 42 aa, Artificial Sequence
  Cyclic GFR-binding peptide
  MOD_RES (3)..(40)..(42): Xaa is C or S
VQXRPTQVQLRSVKVAKVEIVRKKPIFKEVQVTLEDHLAXKX

SEQ ID NO: 25014 - protein, 41 aa, Artificial Sequence
  Cyclic GFR-binding peptide
  MOD_RES (7)..(41): Xaa is C or S
NDEGLEXVPTEERPVQMRKIRIKPHQGQHKKATVFLQHNKX

SEQ ID NO: 25015 - protein, 33 aa, Artificial Sequence
  Cyclic GFR-binding peptide
  MOD_RES (30)..(32): Xaa is C or S
RSVKVAKVEIVRKKPIFKEVQVTLEDHLAXKXE

SEQ ID NO: 25016 - protein, 27 aa, Artificial Sequence
  Cyclic GFR-binding peptide
VHHSNITVQIMEYVRKKPKLIGEMSRL

SEQ ID NO: 25017 - protein, 37 aa, Artificial Sequence
  Cyclic GFR-binding peptide
  MOD_RES (34)..(36): Xaa is C or S
RVHHRPVQVRKIEYVRKKPKLKKATVRLEEHLEXAXA

SEQ ID NO: 25018 - protein, 26 aa, Artificial Sequence
  Cyclic GFR-binding peptide
GQRSVKMAKVRIKPHQGQHKEVQVLE

SEQ ID NO: 25019 - protein, 40 aa, Artificial Sequence
  Cyclic GFR-binding peptide
  MOD_RES (3)..(37)..(39): Xaa is C or S
LEXVPTEESNITMQIMRIKPHQGQHLGEMSFLQHNKXEXR

SEQ ID NO: 25020 - protein, 32 aa, Artificial Sequence
  Cyclic GFR-binding peptide
  MOD_RES (4)..(4): Xaa is C or S
GLEXVPTGQSNITMQIMRIKPHQGQHIGEMSL

SEQ ID NO: 25021 - protein, 36 aa, Artificial Sequence
  Cyclic GFR-binding peptide
  MOD_RES (6)..(6): Xaa is C or S
DEGLEXVPTGQSNITMQIMRIKPHQGQHIGEMSLEE

SEQ ID NO: 25022 - protein, 33 aa, Artificial Sequence
  Cyclic GFR-binding peptide
  MOD_RES (3)..(3): Xaa is C or S
LEXVPTEERSVKMAKVRIKPHQGQHKEVQVFLQ

SEQ ID NO: 25023 - protein, 35 aa, Artificial Sequence
  Cyclic GFR-binding peptide
  MOD_RES (1)..(35): Xaa is C or S
XVPTEERSVKMAKVRIKPHQGQHKEVQVFLQHNKX

SEQ ID NO: 25024 - protein, 39 aa, Artificial Sequence
  Cyclic GFR-binding peptide
  MOD_RES (2)..(36)..(38): Xaa is C or S
EXVPTEESNITMQIMRIKPHQGQHLGEMSFLQHNKXEXR

SEQ ID NO: 25025 - protein, 29 aa, Artificial Sequence
  Cyclic GFR-binding peptide
RVHHSNITVQIMEYVRKKPKLIGEMSRLE

SEQ ID NO: 25026 - protein, 34 aa, Artificial Sequence
  Cyclic GFR-binding peptide
  MOD_RES (4)..(4): Xaa is C or S
SVKXQPSRVHHSNITVQIMEYVRKKPKLIGEMSR

SEQ ID NO: 25027 - protein, 41 aa, Artificial Sequence
  Cyclic GFR-binding peptide
  MOD_RES (2)..(39)..(41): Xaa is C or S
KXQPSRVHHRPVQVRKIEYVRKKPKLKKATVRLEEHLEXAX

SEQ ID NO: 25028 - protein, 37 aa, Artificial Sequence
  Cyclic GFR-binding peptide
  MOD_RES (34)..(36): Xaa is C or S
VPTEERSVKMAKVRIKPHQGQHKEVQVFLQHNKXEXR

SEQ ID NO: 25029 - protein, 37 aa, Artificial Sequence
  Cyclic GFR-binding peptide
  MOD_RES (2)..(36): Xaa is C or S
EXVPTEERPVQMRKIRIKPHQGQHKKATVFLQHNKXE

SEQ ID NO: 25030 - protein, 35 aa, Artificial Sequence
  Cyclic GFR-binding peptide
  MOD_RES (3)..(3): Xaa is C or S
VKXQPSRVHHSNITVQIMEYVRKKPKLLGEMSRLE

SEQ ID NO: 25031 - protein, 40 aa, Artificial Sequence
  Cyclic GFR-binding peptide
  MOD_RES (1)..(38)..(40): Xaa is C or S
XRPTQVQLSNITVQIMEIVRKKPIFIGEMSTLEDHLAXKX

SEQ ID NO: 25032 - protein, 44 aa, Artificial Sequence
  Cyclic GFR-binding peptide
  MOD_RES (5)..(42)..(44): Xaa is C or S
SSVKXQPSRVHHSNITVQIMEYVRKKPKLIGEMSRLEEHLEXAX

SEQ ID NO: 25033 - protein, 33 aa, Artificial Sequence
  Cyclic GFR-binding peptide
  MOD_RES (32)..(32): Xaa is C or S
HHSNITVQIMEYVRKKPKLIGEMSRLEEHLEXA

SEQ ID NO: 25034 - protein, 33 aa, Artificial Sequence
  Cyclic GFR-binding peptide
RVHHRPVQVRKIEYVRKKPKLKKATVRLEEHLE

SEQ ID NO: 25035 - protein, 29 aa, Artificial Sequence
  Cyclic GFR-binding peptide
  MOD_RES (1)..(1): Xaa is C or S
XVPTGQRSVKMAKVRIKPHQGQHKEVQVL

SEQ ID NO: 25036 - protein, 26 aa, Artificial Sequence
  Cyclic GFR-binding peptide
RVHHSNITVQIMEYVRKKPKLLGEMS

SEQ ID NO: 25037 - protein, 31 aa, Artificial Sequence
  Cyclic GFR-binding peptide
VPTEERPVQMRKIRIKPHQGQHKKATVFLQH

SEQ ID NO: 25038 - protein, 33 aa, Artificial Sequence
  Cyclic GFR-binding peptide
  MOD_RES (2)..(2): Xaa is C or S
EXVPTEERSVKMAKVRIKPHQGQHKEVQVFLQH

SEQ ID NO: 25039 - protein, 37 aa, Artificial Sequence
  Cyclic GFR-binding peptide
  MOD_RES (3)..(3): Xaa is C or S
VKXQPSRVHHSNITVQIMEYVRKKPKLLGEMSRLEEH

SEQ ID NO: 25040 - protein, 37 aa, Artificial Sequence
  Cyclic GFR-binding peptide
  MOD_RES (3)..(3): Xaa is C or S
VKXQPSRVHHSNITVQIMEYVRKKPKLIGEMSRLEEH

SEQ ID NO: 25041 - protein, 23 aa, Artificial Sequence
  Cyclic GFR-binding peptide
LRSVKVAKVEIVRKKPIFKEVQV

SEQ ID NO: 25042 - protein, 29 aa, Artificial Sequence
  Cyclic GFR-binding peptide
HRPVQVRKIEYVRKKPKLKKATVRLEEHL

SEQ ID NO: 25043 - protein, 41 aa, Artificial Sequence
  Cyclic GFR-binding peptide
  MOD_RES (2)..(39)..(41): Xaa is C or S
QXRPTQVQLSNITVQIMEIVRKKPIFLGEMSTLEDHLAXKX

SEQ ID NO: 25044 - protein, 37 aa, Artificial Sequence
  Cyclic GFR-binding peptide
  MOD_RES (2)..(36): Xaa is C or S
EXVPTGQRSVKMAKVRIKPHQGQHKEVQVLEEHSQXE

SEQ ID NO: 25045 - protein, 41 aa, Artificial Sequence
  Cyclic GFR-binding peptide
  MOD_RES (3)..(40): Xaa is C or S
VQXRPTQVQLSNITVQIMEIVRKKPIFIGEMSTLEDHLAXK

SEQ ID NO: 25046 - protein, 24 aa, Artificial Sequence
  Cyclic GFR-binding peptide
QLRSVKVAKVEIVRKKPIFKEVQV

SEQ ID NO: 25047 - protein, 41 aa, Artificial Sequence
  Cyclic GFR-binding peptide
  MOD_RES (4)..(38)..(40): Xaa is C or S
GLEXVPTEERSVKMAKVRIKPHQGQHKEVQVFLQHNKXEXR

SEQ ID NO: 25048 - protein, 32 aa, Artificial Sequence
  Cyclic GFR-binding peptide
  MOD_RES (30)..(32): Xaa is C or S
SNITVQIMEIVRKKPIFIGEMSTLEDHLAXKX

SEQ ID NO: 25049 - protein, 40 aa, Artificial Sequence
  Cyclic GFR-binding peptide
  MOD_RES (3)..(37)..(39): Xaa is C or S
LEXVPTGQRSVKMAKVRIKPHQGQHKEVQVLEEHSQXEXR

SEQ ID NO: 25050 - protein, 27 aa, Artificial Sequence
  Cyclic GFR-binding peptide
HHSNITVQIMEYVRKKPKLLGEMSRLE

SEQ ID NO: 25051 - protein, 33 aa, Artificial Sequence
  Cyclic GFR-binding peptide
  MOD_RES (30)..(32): Xaa is C or S
QRPVQMRKIRIKPHQGQHKKATVLEEHSQXEXR

SEQ ID NO: 25052 - protein, 27 aa, Artificial Sequence
  Cyclic GFR-binding peptide
PTGQRSVKMAKVRIKPHQGQHKEVQVL

SEQ ID NO: 25053 - protein, 39 aa, Artificial Sequence
  Cyclic GFR-binding peptide
  MOD_RES (37)..(39): Xaa is C or S
QPSRVHHRPVQVRKIEYVRKKPKLKKATVRLEEHLEXAX

SEQ ID NO: 25054 - protein, 38 aa, Artificial Sequence
  Cyclic GFR-binding peptide
  MOD_RES (4)..(38): Xaa is C or S
GLEXVPTEESNITMQIMRIKPHQGQHLGEMSFLQHNKX

SEQ ID NO: 25055 - protein, 39 aa, Artificial Sequence
  Cyclic GFR-binding peptide
  MOD_RES (3)..(3): Xaa is C or S
VQXRPTQVQLRSVKVAKVEIVRKKPIFKEVQVTLEDHLA

SEQ ID NO: 25056 - protein, 40 aa, Artificial Sequence
  Cyclic GFR-binding peptide
  MOD_RES (7)..(7): Xaa is C or S
NDEGLEXVPTGQRSVKMAKVRIKPHQGQHKEVQVLEEHSQ

SEQ ID NO: 25057 - protein, 29 aa, Artificial Sequence
  Cyclic GFR-binding peptide
HSNITVQIMEYVRKKPKLIGEMSRLEEHL

SEQ ID NO: 25058 - protein, 35 aa, Artificial Sequence
  Cyclic GFR-binding peptide
PTQVQLSNITVQIMEIVRKKPIFIGEMSTLEDHLA

SEQ ID NO: 25059 - protein, 38 aa, Artificial Sequence
  Cyclic GFR-binding peptide
  MOD_RES (3)..(37): Xaa is C or S
LEXVPTEERPVQMRKIRIKPHQGQHKKATVFLQHNKXE

SEQ ID NO: 25060 - protein, 29 aa, Artificial Sequence
  Cyclic GFR-binding peptide
QVQLSNITVQIMEIVRKKPIFLGEMSTLE

SEQ ID NO: 25061 - protein, 31 aa, Artificial Sequence
  Cyclic GFR-binding peptide
TEERPVQMRKIRIKPHQGQHKKATVFLQHNK

SEQ ID NO: 25062 - protein, 28 aa, Artificial Sequence
  Cyclic GFR-binding peptide
RVHHSNITVQIMEYVRKKPKLLGEMSRL

SEQ ID NO: 25063 - protein, 35 aa, Artificial Sequence
  Cyclic GFR-binding peptide
  MOD_RES (2)..(2): Xaa is C or S
KXQPSRVHHRPVQVRKIEYVRKKPKLKKATVRLEE

SEQ ID NO: 25064 - protein, 34 aa, Artificial Sequence
  Cyclic GFR-binding peptide
  MOD_RES (5)..(5): Xaa is C or S
EGLEXVPTGQRPVQMRKIRIKPHQGQHKKATVLE

SEQ ID NO: 25065 - protein, 39 aa, Artificial Sequence
  Cyclic GFR-binding peptide
  MOD_RES (4)..(4): Xaa is C or S
NVQXRPTQVQLSNITVQIMEIVRKKPIFIGEMSTLEDHL

SEQ ID NO: 25066 - protein, 29 aa, Artificial Sequence
  Cyclic GFR-binding peptide
VQLRSVKVAKVEIVRKKPIFKEVQVTLED

SEQ ID NO: 25067 - protein, 31 aa, Artificial Sequence
  Cyclic GFR-binding peptide
VPTGQSNITMQIMRIKPHQGQHIGEMSLEEH

SEQ ID NO: 25068 - protein, 29 aa, Artificial Sequence
  Cyclic GFR-binding peptide
HHSNITVQIMEYVRKKPKLLGEMSRLEEH

SEQ ID NO: 25069 - protein, 32 aa, Artificial Sequence
  Cyclic GFR-binding peptide
  MOD_RES (5)..(5): Xaa is C or S
EGLEXVPTEERSVKMAKVRIKPHQGQHKEVQV

SEQ ID NO: 25070 - protein, 40 aa, Artificial Sequence
  Cyclic GFR-binding peptide
  MOD_RES (5)..(5): Xaa is C or S
RNVQXRPTQVQLRSVKVAKVEIVRKKPIFKEVQVTLEDHL

SEQ ID NO: 25071 - protein, 37 aa, Artificial Sequence
  Cyclic GFR-binding peptide
  MOD_RES (36)..(36): Xaa is C or S
PSRVHHSNITVQIMEYVRKKPKLIGEMSRLEEHLEXA

SEQ ID NO: 25072 - protein, 34 aa, Artificial Sequence
  Cyclic GFR-binding peptide
  MOD_RES (4)..(4): Xaa is C or S
SVKXQPSRVHHSNITVQIMEYVRKKPKLLGEMSR

SEQ ID NO: 25073 - protein, 42 aa, Artificial Sequence
  Cyclic GFR-binding peptide
  MOD_RES (7)..(41): Xaa is C or S
NDEGLEXVPTEESNITMQIMRIKPHQGQHLGEMSFLQHNKXE

SEQ ID NO: 25074 - protein, 25 aa, Artificial Sequence
  Cyclic GFR-binding peptide
RSVKVAKVEIVRKKPIFKEVQVTLE

SEQ ID NO: 25075 - protein, 31 aa, Artificial Sequence
  Cyclic GFR-binding peptide
  MOD_RES (3)..(3): Xaa is C or S
LEXVPTGQRSVKMAKVRIKPHQGQHKEVQVL

SEQ ID NO: 25076 - protein, 31 aa, Artificial Sequence
  Cyclic GFR-binding peptide
SRVHHSNITVQIMEYVRKKPKLIGEMSRLEE

SEQ ID NO: 25077 - protein, 31 aa, Artificial Sequence
  Cyclic GFR-binding peptide
PTGQSNITMQIMRIKPHQGQHIGEMSLEEHS

SEQ ID NO: 25078 - protein, 30 aa, Artificial Sequence
  Cyclic GFR-binding peptide
  MOD_RES (30)..(30): Xaa is C or S
QRPVQMRKIRIKPHQGQHKKATVLEEHSQX

SEQ ID NO: 25079 - protein, 36 aa, Artificial Sequence
  Cyclic GFR-binding peptide
  MOD_RES (34)..(36): Xaa is C or S
VPTEESNITMQIMRIKPHQGQHLGEMSFLQHNKXEX

SEQ ID NO: 25080 - protein, 41 aa, Artificial Sequence
  Cyclic GFR-binding peptide
  MOD_RES (4)..(41): Xaa is C or S
SVKXQPSRVHHRPVQVRKIEYVRKKPKLKKATVRLEEHLEX

SEQ ID NO: 25081 - protein, 36 aa, Artificial Sequence
  Cyclic GFR-binding peptide
  MOD_RES (3)..(3): Xaa is C or S
LEXVPTGQRPVQMRKIRIKPHQGQHKKATVLEEHSQ

SEQ ID NO: 25082 - protein, 43 aa, Artificial Sequence
  Cyclic GFR-binding peptide
  MOD_RES (5)..(42): Xaa is C or S
RNVQXRPTQVQLSNITVQIMEIVRKKPIFLGEMSTLEDHLAXK

SEQ ID NO: 25083 - protein, 36 aa, Artificial Sequence
  Cyclic GFR-binding peptide
  MOD_RES (3)..(3): Xaa is C or S
LEXVPTGQSNITMQIMRIKPHQGQHIGEMSLEEHSQ

SEQ ID NO: 25084 - protein, 28 aa, Artificial Sequence
  Cyclic GFR-binding peptide
SRVHHSNITVQIMEYVRKKPKLIGEMSR

SEQ ID NO: 25085 - protein, 35 aa, Artificial Sequence
  Cyclic GFR-binding peptide
  MOD_RES (32)..(34): Xaa is C or S
TEERPVQMRKIRIKPHQGQHKKATVFLQHNKXEXR

SEQ ID NO: 25086 - protein, 26 aa, Artificial Sequence
  Cyclic GFR-binding peptide
HRPVQVRKIEYVRKKPKLKKATVRLE

SEQ ID NO: 25087 - protein, 32 aa, Artificial Sequence
  Cyclic GFR-binding peptide
  MOD_RES (3)..(3): Xaa is C or S
VQXRPTQVQLRSVKVAKVEIVRKKPIFKEVQV

SEQ ID NO: 25088 - protein, 23 aa, Artificial Sequence
  Cyclic GFR-binding peptide
ERSVKMAKVRIKPHQGQHKEVQV

SEQ ID NO: 25089 - protein, 36 aa, Artificial Sequence
  Cyclic GFR-binding peptide
QPSRVHHSNITVQIMEYVRKKPKLLGEMSRLEEHLE

SEQ ID NO: 25090 - protein, 34 aa, Artificial Sequence
  Cyclic GFR-binding peptide
  MOD_RES (6)..(6): Xaa is C or S
DEGLEXVPTEESNITMQIMRIKPHQGQHLGEMSF

SEQ ID NO: 25091 - protein, 29 aa, Artificial Sequence
  Cyclic GFR-binding peptide
TGQRSVKMAKVRIKPHQGQHKEVQVLEEH

SEQ ID NO: 25092 - protein, 38 aa, Artificial Sequence
  Cyclic GFR-binding peptide
  MOD_RES (7)..(7): Xaa is C or S
NDEGLEXVPTEERPVQMRKIRIKPHQGQHKKATVFLQH

SEQ ID NO: 25093 - protein, 32 aa, Artificial Sequence
  Cyclic GFR-binding peptide
  MOD_RES (2)..(2): Xaa is C or S
EXVPTGQSNITMQIMRIKPHQGQHIGEMSLEE

SEQ ID NO: 25094 - protein, 27 aa, Artificial Sequence
  Cyclic GFR-binding peptide
SNITVQIMEYVRKKPKLLGEMSRLEEH

SEQ ID NO: 25095 - protein, 27 aa, Artificial Sequence
  Cyclic GFR-binding peptide
SNITVQIMEYVRKKPKLIGEMSRLEEH

SEQ ID NO: 25096 - protein, 42 aa, Artificial Sequence
  Cyclic GFR-binding peptide
  MOD_RES (2)..(39)..(41): Xaa is C or S
QXRPTQVQLSNITVQIMEIVRKKPIFIGEMSTLEDHLAXKXE

SEQ ID NO: 25097 - protein, 30 aa, Artificial Sequence
  Cyclic GFR-binding peptide
VPTEERSVKMAKVRIKPHQGQHKEVQVFLQ

SEQ ID NO: 25098 - protein, 35 aa, Artificial Sequence
  Cyclic GFR-binding peptide
  MOD_RES (34)..(34): Xaa is C or S
QVQLSNITVQIMEIVRKKPIFIGEMSTLEDHLAXK

SEQ ID NO: 25099 - protein, 29 aa, Artificial Sequence
  Cyclic GFR-binding peptide
PTGQRPVQMRKIRIKPHQGQHKKATVLEE

SEQ ID NO: 25100 - protein, 34 aa, Artificial Sequence
  Cyclic GFR-binding peptide
  MOD_RES (34)..(34): Xaa is C or S
VPTEERSVKMAKVRIKPHQGQHKEVQVFLQHNKX

SEQ ID NO: 25101 - protein, 35 aa, Artificial Sequence
  Cyclic GFR-binding peptide
  MOD_RES (5)..(5): Xaa is C or S
RNVQXRPTQVQLRSVKVAKVEIVRKKPIFKEVQVT

SEQ ID NO: 25102 - protein, 30 aa, Artificial Sequence
  Cyclic GFR-binding peptide
  MOD_RES (1)..(1): Xaa is C or S
XRPTQVQLSNITVQIMEIVRKKPIFIGEMS

SEQ ID NO: 25103 - protein, 33 aa, Artificial Sequence
  Cyclic GFR-binding peptide
  MOD_RES (31)..(33): Xaa is C or S
EESNITMQIMRIKPHQGQHLGEMSFLQHNKXEX

SEQ ID NO: 25104 - protein, 32 aa, Artificial Sequence
  Cyclic GFR-binding peptide
PTQVQLSNITVQIMEIVRKKPIFLGEMSTLED

SEQ ID NO: 25105 - protein, 39 aa, Artificial Sequence
  Cyclic GFR-binding peptide
  MOD_RES (3)..(3): Xaa is C or S
VQXRPTQVQLSNITVQIMEIVRKKPIFLGEMSTLEDHLA

SEQ ID NO: 25106 - protein, 29 aa, Artificial Sequence
  Cyclic GFR-binding peptide
PSRVHHSNITVQIMEYVRKKPKLLGEMSR

SEQ ID NO: 25107 - protein, 37 aa, Artificial Sequence
  Cyclic GFR-binding peptide
  MOD_RES (3)..(37): Xaa is C or S
LEXVPTGQRSVKMAKVRIKPHQGQHKEVQVLEEHSQX

SEQ ID NO: 25108 - protein, 30 aa, Artificial Sequence
  Cyclic GFR-binding peptide
PTEERSVKMAKVRIKPHQGQHKEVQVFLQH

SEQ ID NO: 25109 - protein, 28 aa, Artificial Sequence
  Cyclic GFR-binding peptide
HHRPVQVRKIEYVRKKPKLKKATVRLEE

SEQ ID NO: 25110 - protein, 33 aa, Artificial Sequence
  Cyclic GFR-binding peptide
  MOD_RES (4)..(4): Xaa is C or S
GLEXVPTEERPVQMRKIRIKPHQGQHKKATVFL

SEQ ID NO: 25111 - protein, 34 aa, Artificial Sequence
  Cyclic GFR-binding peptide
  MOD_RES (34)..(34): Xaa is C or S
QVQLSNITVQIMEIVRKKPIFIGEMSTLEDHLAX

SEQ ID NO: 25112 - protein, 37 aa, Artificial Sequence; identical to SEQ ID NO: 21370
  Cyclic GFR-binding peptide
  MOD_RES (33)..(33): Xaa is C or S

SEQ ID NO: 25113 - protein, 29 aa, Artificial Sequence
  Cyclic GFR-binding peptide
HEELRVTAKKLKPKKRVYEIKRVQVPRHH

SEQ ID NO: 25114 - protein, 23 aa, Artificial Sequence
  Cyclic GFR-binding peptide
RVTAKKLKPKKRVYEIKRVQVPR

SEQ ID NO: 25115 - protein, 31 aa, Artificial Sequence; identical to SEQ ID NO: 21373
  Cyclic GFR-binding peptide
  MOD_RES (30)..(30): Xaa is C or S

SEQ ID NO: 25116 - protein, 29 aa, Artificial Sequence
  Cyclic GFR-binding peptide
ELRSMEGLLKPKKRVYEMIQVTINSHHVR

SEQ ID NO: 25117 - protein, 36 aa, Artificial Sequence; identical to SEQ ID NO: 21375
  Cyclic GFR-binding peptide
  MOD_RES (1)..(3): Xaa is C or S

SEQ ID NO: 25118 - protein, 34 aa, Artificial Sequence; identical to SEQ ID NO: 21376
  Cyclic GFR-binding peptide
  MOD_RES (34)..(34): Xaa is C or S

SEQ ID NO: 25119 - protein, 43 aa, Artificial Sequence; identical to SEQ ID NO: 21377
  Cyclic GFR-binding peptide
  MOD_RES (1)..(3)..(37): Xaa is C or S

SEQ ID NO: 25120 - protein, 35 aa, Artificial Sequence; identical to SEQ ID NO: 21378
  Cyclic GFR-binding peptide
  MOD_RES (1)..(35): Xaa is C or S

SEQ ID NO: 25121 - protein, 26 aa, Artificial Sequence
  Cyclic GFR-binding peptide
LFVQVEKHQGQHPKIRVKAMKVSREE

SEQ ID NO: 25122 - protein, 31 aa, Artificial Sequence; identical to SEQ ID NO: 21380
  Cyclic GFR-binding peptide

SEQ ID NO: 25123 - protein, 36 aa, Artificial Sequence; identical to SEQ ID NO: 21381
  Cyclic GFR-binding peptide
  MOD_RES (30)..(30): Xaa is C or S

SEQ ID NO: 25124 - protein, 30 aa, Artificial Sequence; identical to SEQ ID NO: 21382
  Cyclic GFR-binding peptide

SEQ ID NO: 25125 - protein, 32 aa, Artificial Sequence; identical to SEQ ID NO: 21383
  Cyclic GFR-binding peptide

SEQ ID NO: 25126 - protein, 34 aa, Artificial Sequence; identical to SEQ ID NO: 21384
  Cyclic GFR-binding peptide
  MOD_RES (34)..(34): Xaa is C or S

SEQ ID NO: 25127 - protein, 42 aa, Artificial Sequence; identical to SEQ ID NO: 21385
  Cyclic GFR-binding peptide
  MOD_RES (1)..(38): Xaa is C or S

SEQ ID NO: 25128 - protein, 27 aa, Artificial Sequence
  Cyclic GFR-binding peptide
LVTAKKHQGQHPKIRIKRMQVPRQGTP

SEQ ID NO: 25129 - protein, 26 aa, Artificial Sequence
  Cyclic GFR-binding peptide
ELRSMEGILKPKKRVYEMIQVTINSH

SEQ ID NO: 25130 - protein, 31 aa, Artificial Sequence; identical to SEQ ID NO: 21388
  Cyclic GFR-binding peptide
  MOD_RES (31)..(31): Xaa is C or S

SEQ ID NO: 25131 - protein, 31 aa, Artificial Sequence; identical to SEQ ID NO: 21389
  Cyclic GFR-binding peptide
  MOD_RES (2)..(2): Xaa is C or S

SEQ ID NO: 25132 - protein, 32 aa, Artificial Sequence; identical to SEQ ID NO: 21390
  Cyclic GFR-binding peptide
  MOD_RES (31)..(31): Xaa is C or S

SEQ ID NO: 25133 - protein, 31 aa, Artificial Sequence; identical to SEQ ID NO: 21391
  Cyclic GFR-binding peptide
  MOD_RES (31)..(31): Xaa is C or S

SEQ ID NO: 25134 - protein, 31 aa, Artificial Sequence; identical to SEQ ID NO: 21392
  Cyclic GFR-binding peptide
  MOD_RES (30)..(30): Xaa is C or S

SEQ ID NO: 25135 - protein, 24 aa, Artificial Sequence
  Cyclic GFR-binding peptide
LRSMEGLLKPKKRVYEMIQVTINS

SEQ ID NO: 25136 - protein, 26 aa, Artificial Sequence
  Cyclic GFR-binding peptide
VQVEKFIPKKRVIEVKAVKVSRLQVQ

SEQ ID NO: 25137 - protein, 35 aa, Artificial Sequence; identical to SEQ ID NO: 21395
  Cyclic GFR-binding peptide
  MOD_RES (2)..(2): Xaa is C or S

SEQ ID NO: 25138 - protein, 29 aa, Artificial Sequence
  Cyclic GFR-binding peptide
  MOD_RES (29)..(29): Xaa is C or S
FSMEGLHQGQHPKIRMIQMTINSEETPVX

SEQ ID NO: 25139 - protein, 36 aa, Artificial Sequence; identical to SEQ ID NO: 21397
  Cyclic GFR-binding peptide
  MOD_RES (1)..(3): Xaa is C or S

SEQ ID NO: 25140 - protein, 39 aa, Artificial Sequence; identical to SEQ ID NO: 21398
  Cyclic GFR-binding peptide
  MOD_RES (1)..(38): Xaa is C or S

SEQ ID NO: 25141 - protein, 36 aa, Artificial Sequence; identical to SEQ ID NO: 21399
  Cyclic GFR-binding peptide
  MOD_RES (1)..(3): Xaa is C or S

SEQ ID NO: 25142 - protein, 35 aa, Artificial Sequence; identical to SEQ ID NO: 21400
  Cyclic GFR-binding peptide
  MOD_RES (31)..(31): Xaa is C or S

SEQ ID NO: 25143 - protein, 34 aa, Artificial Sequence; identical to SEQ ID NO: 21401
  Cyclic GFR-binding peptide
  MOD_RES (2)..(4): Xaa is C or S

SEQ ID NO: 25144 - protein, 37 aa, Artificial Sequence; identical to SEQ ID NO: 21402
  Cyclic GFR-binding peptide
  MOD_RES (37)..(37): Xaa is C or S

SEQ ID NO: 25145 - protein, 36 aa, Artificial Sequence; identical to SEQ ID NO: 21403
  Cyclic GFR-binding peptide
  MOD_RES (36)..(36): Xaa is C or S

SEQ ID NO: 25146 - protein, 45 aa, Artificial Sequence; identical to SEQ ID NO: 21404
  Cyclic GFR-binding peptide
  MOD_RES (2)..(4)..(41): Xaa is C or S

SEQ ID NO: 25147 - protein, 31 aa, Artificial Sequence; identical to SEQ ID NO: 21405
  Cyclic GFR-binding peptide
  MOD_RES (1)..(1): Xaa is C or S

SEQ ID NO: 25148 - protein, 34 aa, Artificial Sequence; identical to SEQ ID NO: 21406
  Cyclic GFR-binding peptide

SEQ ID NO: 25149 - protein, 29 aa, Artificial Sequence
  Cyclic GFR-binding peptide
EELRSMEGILKPKKRVYEMIQVTINSHHV

SEQ ID NO: 25150 - protein, 37 aa, Artificial Sequence; identical to SEQ ID NO: 21408
  Cyclic GFR-binding peptide
  MOD_RES (2)..(4): Xaa is C or S

SEQ ID NO: 25151 - protein, 35 aa, Artificial Sequence; identical to SEQ ID NO: 21409
  Cyclic GFR-binding peptide
  MOD_RES (35)..(35): Xaa is C or S

SEQ ID NO: 25152 - protein, 27 aa, Artificial Sequence
  Cyclic GFR-binding peptide
FSMEGIHQGQHPKIRMIQMTINSEETP

SEQ ID NO: 25153 - protein, 34 aa, Artificial Sequence; identical to SEQ ID NO: 21411
  Cyclic GFR-binding peptide
  MOD_RES (2)..(2): Xaa is C or S

SEQ ID NO: 25154 - protein, 34 aa, Artificial Sequence; identical to SEQ ID NO: 21412
  Cyclic GFR-binding peptide
  MOD_RES (34)..(34): Xaa is C or S

SEQ ID NO: 25155 - protein, 33 aa, Artificial Sequence; identical to SEQ ID NO: 21413
  Cyclic GFR-binding peptide

SEQ ID NO: 25156 - protein, 44 aa, Artificial Sequence; identical to SEQ ID NO: 21414
  Cyclic GFR-binding peptide
  MOD_RES (2)..(4)..(41): Xaa is C or S

SEQ ID NO: 25157 - protein, 34 aa, Artificial Sequence; identical to SEQ ID NO: 21415
  Cyclic GFR-binding peptide
  MOD_RES (1)..(3): Xaa is C or S

SEQ ID NO: 25158 - protein, 32 aa, Artificial Sequence; identical to SEQ ID NO: 21416
  Cyclic GFR-binding peptide
  MOD_RES (32)..(32): Xaa is C or S

SEQ ID NO: 25159 - protein, 30 aa, Artificial Sequence; identical to SEQ ID NO: 21417
  Cyclic GFR-binding peptide

SEQ ID NO: 25160 - protein, 38 aa, Artificial Sequence; identical to SEQ ID NO: 21418
  Cyclic GFR-binding peptide
  MOD_RES (2)..(2): Xaa is C or S

SEQ ID NO: 25161 - protein, 38 aa, Artificial Sequence; identical to SEQ ID NO: 21419
  Cyclic GFR-binding peptide
  MOD_RES (2)..(36): Xaa is C or S

SEQ ID NO: 25162 - protein, 28 aa, Artificial Sequence
  Cyclic GFR-binding peptide
LRVTAKKLKPKKRVYEIKRVQVPRHHVR

SEQ ID NO: 25163 - protein, 40 aa, Artificial Sequence; identical to SEQ ID NO: 21421
  Cyclic GFR-binding peptide
  MOD_RES (1)..(35): Xaa is C or S

SEQ ID NO: 25164 - protein, 28 aa, Artificial Sequence
  Cyclic GFR-binding peptide
RSMEGLLKPKKRVYEMIQVTINSHHVRS

SEQ ID NO: 25165 - protein, 27 aa, Artificial Sequence
  Cyclic GFR-binding peptide
RSMEGLLKPKKRVYEMIQVTINSHHVR

SEQ ID NO: 25166 - protein, 37 aa, Artificial Sequence; identical to SEQ ID NO: 21424
  Cyclic GFR-binding peptide
  MOD_RES (35)..(35): Xaa is C or S

SEQ ID NO: 25167 - protein, 33 aa, Artificial Sequence; identical to SEQ ID NO: 21425
  Cyclic GFR-binding peptide
  MOD_RES (32)..(32): Xaa is C or S

SEQ ID NO: 25168 - protein, 42 aa, Artificial Sequence; identical to SEQ ID NO: 21426
  Cyclic GFR-binding peptide
  MOD_RES (1)..(3)..(37): Xaa is C or S

SEQ ID NO: 25169 - protein, 41 aa, Artificial Sequence; identical to SEQ ID NO: 21427
  Cyclic GFR-binding peptide
  MOD_RES (1)..(38): Xaa is C or S

SEQ ID NO: 25170 - protein, 38 aa, Artificial Sequence; identical to SEQ ID NO: 21428
  Cyclic GFR-binding peptide
  MOD_RES (35)..(35): Xaa is C or S

SEQ ID NO: 25171 - protein, 37 aa, Artificial Sequence; identical to SEQ ID NO: 21429
  Cyclic GFR-binding peptide
  MOD_RES (33)..(33): Xaa is C or S

SEQ ID NO: 25172 - protein, 38 aa, Artificial Sequence; identical to SEQ ID NO: 21430
  Cyclic GFR-binding peptide
  MOD_RES (2)..(4)..(38): Xaa is C or S

SEQ ID NO: 25173 - protein, 29 aa, Artificial Sequence
  Cyclic GFR-binding peptide
LRSMEGLLKPKKRVYEMIQVTINSHHVRS

SEQ ID NO: 25174 - protein, 30 aa, Artificial Sequence; identical to SEQ ID NO: 21432
  Cyclic GFR-binding peptide
  MOD_RES (29)..(29): Xaa is C or S

SEQ ID NO: 25175 - protein, 28 aa, Artificial Sequence
  Cyclic GFR-binding peptide
ELSMEGIHQGQHPKIRMIQMTINSQGTP

SEQ ID NO: 25176 - protein, 35 aa, Artificial Sequence; identical to SEQ ID NO: 21434
  Cyclic GFR-binding peptide
  MOD_RES (35)..(35): Xaa is C or S

SEQ ID NO: 25177 - protein, 39 aa, Artificial Sequence; identical to SEQ ID NO: 21435
  Cyclic GFR-binding peptide
  MOD_RES (2)..(4)..(38): Xaa is C or S

SEQ ID NO: 25178 - protein, 36 aa, Artificial Sequence; identical to SEQ ID NO: 21436
  Cyclic GFR-binding peptide
  MOD_RES (34)..(34): Xaa is C or S

SEQ ID NO: 25179 - protein, 26 aa, Artificial Sequence
  Cyclic GFR-binding peptide
LSMEGIHQGQHPKIRMIQMTINSQGT

SEQ ID NO: 25180 - protein, 35 aa, Artificial Sequence; identical to SEQ ID NO: 21438
  Cyclic GFR-binding peptide
  MOD_RES (33)..(33): Xaa is C or S

SEQ ID NO: 25181 - protein, 32 aa, Artificial Sequence; identical to SEQ ID NO: 21439
  Cyclic GFR-binding peptide

SEQ ID NO: 25182 - protein, 40 aa, Artificial Sequence; identical to SEQ ID NO: 21440
  Cyclic GFR-binding peptide
  MOD_RES (37)..(37): Xaa is C or S

SEQ ID NO: 25183 - protein, 38 aa, Artificial Sequence; identical to SEQ ID NO: 21441
  Cyclic GFR-binding peptide
  MOD_RES (2)..(4)..(38): Xaa is C or S

SEQ ID NO: 25184 - protein, 37 aa, Artificial Sequence; identical to SEQ ID NO: 21442
  Cyclic GFR-binding peptide
  MOD_RES (31)..(31): Xaa is C or S

SEQ ID NO: 25185 - protein, 34 aa, Artificial Sequence; identical to SEQ ID NO: 21443
  Cyclic GFR-binding peptide
  MOD_RES (1)..(3): Xaa is C or S

SEQ ID NO: 25186 - protein, 31 aa, Artificial Sequence; identical to SEQ ID NO: 21444
  Cyclic GFR-binding peptide

SEQ ID NO: 25187 - protein, 34 aa, Artificial Sequence; identical to SEQ ID NO: 21445
  Cyclic GFR-binding peptide
  MOD_RES (1)..(1): Xaa is C or S

SEQ ID NO: 25188 - protein, 29 aa, Artificial Sequence
  Cyclic GFR-binding peptide
EELRSMEGLLKPKKRVYEMIQVTINSHHV

SEQ ID NO: 25189 - protein, 26 aa, Artificial Sequence
  Cyclic GFR-binding peptide
SMEGIFIPKKRVIEMIQVTINSLQVQ

SEQ ID NO: 25190 - protein, 39 aa, Artificial Sequence; identical to SEQ ID NO: 21448
  Cyclic GFR-binding peptide
  MOD_RES (1)..(3)..(37): Xaa is C or S

SEQ ID NO: 25191 - protein, 25 aa, Artificial Sequence
  Cyclic GFR-binding peptide
EELVTAKKHQGQHPKIRIKRMQVPR

SEQ ID NO: 25192 - protein, 31 aa, Artificial Sequence; identical to SEQ ID NO: 21450
  Cyclic GFR-binding peptide
  MOD_RES (30)..(30): Xaa is C or S

SEQ ID NO: 25193 - protein, 45 aa, Artificial Sequence; identical to SEQ ID NO: 21451
  Cyclic GFR-binding peptide
  MOD_RES (2)..(4)..(41): Xaa is C or S

SEQ ID NO: 25194 - protein, 34 aa, Artificial Sequence; identical to SEQ ID NO: 21452
  Cyclic GFR-binding peptide
  MOD_RES (30)..(30): Xaa is C or S

SEQ ID NO: 25195 - protein, 39 aa, Artificial Sequence; identical to SEQ ID NO: 21453
  Cyclic GFR-binding peptide
  MOD_RES (34)..(34): Xaa is C or S

SEQ ID NO: 25196 - protein, 39 aa, Artificial Sequence; identical to SEQ ID NO: 21454
  Cyclic GFR-binding peptide
  MOD_RES (1)..(35): Xaa is C or S

SEQ ID NO: 25197 - protein, 29 aa, Artificial Sequence
  Cyclic GFR-binding peptide
ALHDELTVQVEKFIPKKRVIEVKAVKVSR

SEQ ID NO: 25198 - protein, 42 aa, Artificial Sequence; identical to SEQ ID NO: 21456
  Cyclic GFR-binding peptide
  MOD_RES (1)..(38): Xaa is C or S

SEQ ID NO: 25199 - protein, 31 aa, Artificial Sequence; identical to SEQ ID NO: 21457
  Cyclic GFR-binding peptide
  MOD_RES (30)..(30): Xaa is C or S

SEQ ID NO: 25200 - protein, 38 aa, Artificial Sequence; identical to SEQ ID NO: 21458
  Cyclic GFR-binding peptide
  MOD_RES (34)..(34): Xaa is C or S

SEQ ID NO: 25201 - protein, 27 aa, Artificial Sequence
  Cyclic GFR-binding peptide
EELVQVEKHQGQHPKIRVKAMKVSRQG

SEQ ID NO: 25202 - protein, 31 aa, Artificial Sequence; identical to SEQ ID NO: 21460
  Cyclic GFR-binding peptide

SEQ ID NO: 25203 - protein, 29 aa, Artificial Sequence
  Cyclic GFR-binding peptide
SHEELVQVEKHQGQHPKIRVKAMKVSRQG

SEQ ID NO: 25204 - protein, 31 aa, Artificial Sequence; identical to SEQ ID NO: 21462
  Cyclic GFR-binding peptide
  MOD_RES (1)..(1): Xaa is C or S

SEQ ID NO: 25205 - protein, 32 aa, Artificial Sequence; identical to SEQ ID NO: 21463
  Cyclic GFR-binding peptide
  MOD_RES (1)..(3): Xaa is C or S

SEQ ID NO: 25206 - protein, 27 aa, Artificial Sequence
  Cyclic GFR-binding peptide
SMEGIFIPKKRVIEMIQVTINSLQVQT

SEQ ID NO: 25207 - protein, 33 aa, Artificial Sequence; identical to SEQ ID NO: 21465
  Cyclic GFR-binding peptide

SEQ ID NO: 25208 - protein, 34 aa, Artificial Sequence; identical to SEQ ID NO: 21466
  Cyclic GFR-binding peptide
  MOD_RES (33)..(33): Xaa is C or S

SEQ ID NO: 25209 - protein, 36 aa, Artificial Sequence; identical to SEQ ID NO: 21467
  Cyclic GFR-binding peptide
  MOD_RES (32)..(32): Xaa is C or S

SEQ ID NO: 25210 - protein, 38 aa, Artificial Sequence; identical to SEQ ID NO: 21468
  Cyclic GFR-binding peptide
  MOD_RES (2)..(36): Xaa is C or S

SEQ ID NO: 25211 - protein, 40 aa, Artificial Sequence; identical to SEQ ID NO: 21469
  Cyclic GFR-binding peptide
  MOD_RES (36)..(36): Xaa is C or S

SEQ ID NO: 25212 - protein, 35 aa, Artificial Sequence; identical to SEQ ID NO: 21470
  Cyclic GFR-binding peptide

SEQ ID NO: 25213 - protein, 39 aa, Artificial Sequence; identical to SEQ ID NO: 21471
  Cyclic GFR-binding peptide
  MOD_RES (1)..(3)..(37): Xaa is C or S

SEQ ID NO: 25214 - protein, 28 aa, Artificial Sequence
  Cyclic GFR-binding peptide
  MOD_RES (28)..(28): Xaa is C or S
SMEGIHQGQHPKIRMIQMTINSEETPVX

SEQ ID NO: 25215 - protein, 41 aa, Artificial Sequence; identical to SEQ ID NO: 21473
  Cyclic GFR-binding peptide
  MOD_RES (37)..(37): Xaa is C or S

SEQ ID NO: 25216 - protein, 26 aa, Artificial Sequence
  Cyclic GFR-binding peptide
SMEGILKPKKRVYEMIQVTINSHHVR

SEQ ID NO: 25217 - protein, 35 aa, Artificial Sequence; identical to SEQ ID NO: 21475
  Cyclic GFR-binding peptide
  MOD_RES (2)..(2): Xaa is C or S

SEQ ID NO: 25218 - protein, 32 aa, Artificial Sequence; identical to SEQ ID NO: 21476
  Cyclic GFR-binding peptide
  MOD_RES (31)..(31): Xaa is C or S

SEQ ID NO: 25219 - protein, 35 aa, Artificial Sequence; identical to SEQ ID NO: 21477
  Cyclic GFR-binding peptide
  MOD_RES (33)..(33): Xaa is C or S

SEQ ID NO: 25220 - protein, 37 aa, Artificial Sequence; identical to SEQ ID NO: 21478
  Cyclic GFR-binding peptide
  MOD_RES (31)..(31): Xaa is C or S

SEQ ID NO: 25221 - protein, 27 aa, Artificial Sequence
  Cyclic GFR-binding peptide
LFVQVEKHQGQHPKIRVKAMKVSREET

SEQ ID NO: 25222 - protein, 29 aa, Artificial Sequence
  Cyclic GFR-binding peptide
  MOD_RES (28)..(28): Xaa is C or S
VQVEKHQGQHPKIRVKAMKVSRQGTPVXE

SEQ ID NO: 25223 - protein, 27 aa, Artificial Sequence
  Cyclic GFR-binding peptide
NHQLFVTAKKHQGQHPKIRIKRMQVPR

SEQ ID NO: 25224 - protein, 32 aa, Artificial Sequence; identical to SEQ ID NO: 21482
  Cyclic GFR-binding peptide

SEQ ID NO: 25225 - protein, 31 aa, Artificial Sequence; identical to SEQ ID NO: 21483
  Cyclic GFR-binding peptide
  MOD_RES (2)..(2): Xaa is C or S

SEQ ID NO: 25226 - protein, 38 aa, Artificial Sequence; identical to SEQ ID NO: 21484
  Cyclic GFR-binding peptide
  MOD_RES (34)..(34): Xaa is C or S

SEQ ID NO: 25227 - protein, 24 aa, Artificial Sequence
  Cyclic GFR-binding peptide
LVTAKKHQGQHPKIRIKRMQVPRQ

SEQ ID NO: 25228 - protein, 32 aa, Artificial Sequence; identical to SEQ ID NO: 21486
  Cyclic GFR-binding peptide
  MOD_RES (28)..(28): Xaa is C or S

SEQ ID NO: 25229 - protein, 29 aa, Artificial Sequence
  Cyclic GFR-binding peptide
ELHEELRSMEGILKPKKRVYEMIQVTINS

SEQ ID NO: 25230 - protein, 41 aa, Artificial Sequence; identical to SEQ ID NO: 21488
  Cyclic GFR-binding peptide
  MOD_RES (1)..(38): Xaa is C or S

SEQ ID NO: 25231 - protein, 34 aa, Artificial Sequence; identical to SEQ ID NO: 21489
  Cyclic GFR-binding peptide
  MOD_RES (31)..(31): Xaa is C or S

SEQ ID NO: 25232 - protein, 32 aa, Artificial Sequence; identical to SEQ ID NO: 21490
  Cyclic GFR-binding peptide
  MOD_RES (31)..(31): Xaa is C or S

SEQ ID NO: 25233 - protein, 32 aa, Artificial Sequence; identical to SEQ ID NO: 21491
  Cyclic GFR-binding peptide
  MOD_RES (32)..(32): Xaa is C or S

SEQ ID NO: 25234 - protein, 36 aa, Artificial Sequence; identical to SEQ ID NO: 21492
  Cyclic GFR-binding peptide
  MOD_RES (1)..(35): Xaa is C or S

SEQ ID NO: 25235 - protein, 37 aa, Artificial Sequence; identical to SEQ ID NO: 21493
  Cyclic GFR-binding peptide
  MOD_RES (33)..(33): Xaa is C or S

SEQ ID NO: 25236 - protein, 37 aa, Artificial Sequence; identical to SEQ ID NO: 21494
  Cyclic GFR-binding peptide
  MOD_RES (37)..(37): Xaa is C or S

SEQ ID NO: 25237 - protein, 40 aa, Artificial Sequence; identical to SEQ ID NO: 21495
  Cyclic GFR-binding peptide
  MOD_RES (1)..(38): Xaa is C or S

SEQ ID NO: 25238 - protein, 43 aa, Artificial Sequence; identical to SEQ ID NO: 21496
  Cyclic GFR-binding peptide
  MOD_RES (2)..(4)..(38): Xaa is C or S

SEQ ID NO: 25239 - protein, 27 aa, Artificial Sequence
  Cyclic GFR-binding peptide
SHEELVTAKKHQGQHPKIRIKRMQVPR

SEQ ID NO: 25240 - protein, 40 aa, Artificial Sequence; identical to SEQ ID NO: 21498
  Cyclic GFR-binding peptide
  MOD_RES (2)..(39): Xaa is C or S

SEQ ID NO: 25241 - protein, 35 aa, Artificial Sequence; identical to SEQ ID NO: 21499
  Cyclic GFR-binding peptide
  MOD_RES (34)..(34): Xaa is C or S

SEQ ID NO: 25242 - protein, 25 aa, Artificial Sequence
  Cyclic GFR-binding peptide
SMEGLFIPKKRVIEMIQVTINSLQV

SEQ ID NO: 25243 - protein, 37 aa, Artificial Sequence; identical to SEQ ID NO: 21501
  Cyclic GFR-binding peptide
  MOD_RES (37)..(37): Xaa is C or S

SEQ ID NO: 25244 - protein, 34 aa, Artificial Sequence; identical to SEQ ID NO: 21502
  Cyclic GFR-binding peptide
  MOD_RES (28)..(28): Xaa is C or S

SEQ ID NO: 25245 - protein, 36 aa, Artificial Sequence; identical to SEQ ID NO: 21503
  Cyclic GFR-binding peptide
  MOD_RES (1)..(3): Xaa is C or S

SEQ ID NO: 25246 - protein, 31 aa, Artificial Sequence; identical to SEQ ID NO: 21504
  Cyclic GFR-binding peptide

SEQ ID NO: 25247 - protein, 35 aa, Artificial Sequence; identical to SEQ ID NO: 21505
  Cyclic GFR-binding peptide

SEQ ID NO: 25248 - protein, 32 aa, Artificial Sequence; identical to SEQ ID NO: 21506
  Cyclic GFR-binding peptide
  MOD_RES (31)..(31): Xaa is C or S

SEQ ID NO: 25249 - protein, 36 aa, Artificial Sequence; identical to SEQ ID NO: 21507
  Cyclic GFR-binding peptide
  MOD_RES (1)..(35): Xaa is C or S

SEQ ID NO: 25250 - protein, 35 aa, Artificial Sequence; identical to SEQ ID NO: 21508
  Cyclic GFR-binding peptide
  MOD_RES (2)..(4): Xaa is C or S

SEQ ID NO: 25251 - protein, 27 aa, Artificial Sequence
  Cyclic GFR-binding peptide
SHEELSMEGIHQGQHPKIRMIQMTINS

SEQ ID NO: 25252 - protein, 29 aa, Artificial Sequence
  Cyclic GFR-binding peptide
ELRVTAKKLKPKKRVYEIKRVQVPRHHVR

SEQ ID NO: 25253 - protein, 30 aa, Artificial Sequence; identical to SEQ ID NO: 21511
  Cyclic GFR-binding peptide

SEQ ID NO: 25254 - protein, 24 aa, Artificial Sequence
  Cyclic GFR-binding peptide
LRVTAKKLKPKKRVYEIKRVQVPR

SEQ ID NO: 25255 - protein, 26 aa, Artificial Sequence
  Cyclic GFR-binding peptide
VTAKKHQGQHPKIRIKRMQVPREETP

SEQ ID NO: 25256 - protein, 33 aa, Artificial Sequence; identical to SEQ ID NO: 21514
  Cyclic GFR-binding peptide
  MOD_RES (1)..(3): Xaa is C or S

SEQ ID NO: 25257 - protein, 29 aa, Artificial Sequence
  Cyclic GFR-binding peptide
QSHEELVQVEKHQGQHPKIRVKAMKVSRQ

SEQ ID NO: 25258 - protein, 44 aa, Artificial Sequence; identical to SEQ ID NO: 21516
  Cyclic GFR-binding peptide
  MOD_RES (2)..(4)..(41): Xaa is C or S

SEQ ID NO: 25259 - protein, 27 aa, Artificial Sequence
  Cyclic GFR-binding peptide
ELTVQVEKFIPKKRVIEVKAVKVSRLQ

SEQ ID NO: 25260 - protein, 43 aa, Artificial Sequence; identical to SEQ ID NO: 21518
  Cyclic GFR-binding peptide
  MOD_RES (2)..(39): Xaa is C or S

SEQ ID NO: 25261 - protein, 40 aa, Artificial Sequence; identical to SEQ ID NO: 21519
  Cyclic GFR-binding peptide
  MOD_RES (34)..(34): Xaa is C or S

SEQ ID NO: 25262 - protein, 30 aa, Artificial Sequence; identical to SEQ ID NO: 21520
  Cyclic GFR-binding peptide

SEQ ID NO: 25263 - protein, 35 aa, Artificial Sequence; identical to SEQ ID NO: 21521
  Cyclic GFR-binding peptide
  MOD_RES (32)..(32): Xaa is C or S

SEQ ID NO: 25264 - protein, 38 aa, Artificial Sequence; identical to SEQ ID NO: 21522
  Cyclic GFR-binding peptide
  MOD_RES (34)..(34): Xaa is C or S

SEQ ID NO: 25265 - protein, 25 aa, Artificial Sequence
  Cyclic GFR-binding peptide
EELSMEGIHQGQHPKIRMIQMTINS

SEQ ID NO: 25266 - protein, 31 aa, Artificial Sequence; identical to SEQ ID NO: 21524
  Cyclic GFR-binding peptide

SEQ ID NO: 25267 - protein, 31 aa, Artificial Sequence; identical to SEQ ID NO: 21525
  Cyclic GFR-binding peptide
  MOD_RES (1)..(1): Xaa is C or S

SEQ ID NO: 25268 - protein, 29 aa, Artificial Sequence
  Cyclic GFR-binding peptide
LTVQVEKFIPKKRVIEVKAVKVSRLQVQT

SEQ ID NO: 25269 - protein, 35 aa, Artificial Sequence; identical to SEQ ID NO: 21527
  Cyclic GFR-binding peptide

SEQ ID NO: 25270 - protein, 32 aa, Artificial Sequence; identical to SEQ ID NO: 21528
  Cyclic GFR-binding peptide
  MOD_RES (32)..(32): Xaa is C or S

SEQ ID NO: 25271 - protein, 28 aa, Artificial Sequence
  Cyclic GFR-binding peptide
HEELRSMEGLLKPKKRVYEMIQVTINSH

SEQ ID NO: 25272 - protein, 31 aa, Artificial Sequence; identical to SEQ ID NO: 21530
  Cyclic GFR-binding peptide
  MOD_RES (2)..(2): Xaa is C or S

SEQ ID NO: 25273 - protein, 35 aa, Artificial Sequence; identical to SEQ ID NO: 21531
  Cyclic GFR-binding peptide
  MOD_RES (30)..(30): Xaa is C or S

SEQ ID NO: 25274 - protein, 31 aa, Artificial Sequence; identical to SEQ ID NO: 21532
  Cyclic GFR-binding peptide
  MOD_RES (2)..(2): Xaa is C or S

SEQ ID NO: 25275 - protein, 32 aa, Artificial Sequence; identical to SEQ ID NO: 21533
  Cyclic GFR-binding peptide
  MOD_RES (32)..(32): Xaa is C or S

SEQ ID NO: 25276 - protein, 38 aa, Artificial Sequence; identical to SEQ ID NO: 21534
  Cyclic GFR-binding peptide
  MOD_RES (1)..(35): Xaa is C or S

SEQ ID NO: 25277 - protein, 26 aa, Artificial Sequence
  Cyclic GFR-binding peptide
EELRSMEGLLKPKKRVYEMIQVTINS

SEQ ID NO: 25278 - protein, 37 aa, Artificial Sequence; identical to SEQ ID NO: 21536
  Cyclic GFR-binding peptide
  MOD_RES (35)..(35): Xaa is C or S

SEQ ID NO: 25279 - protein, 26 aa, Artificial Sequence
  Cyclic GFR-binding peptide
RSMEGLLKPKKRVYEMIQVTINSHHV

SEQ ID NO: 25280 - protein, 33 aa, Artificial Sequence; identical to SEQ ID NO: 21538
  Cyclic GFR-binding peptide
  MOD_RES (31)..(31): Xaa is C or S

SEQ ID NO: 25281 - protein, 29 aa, Artificial Sequence
  Cyclic GFR-binding peptide
  MOD_RES (28)..(28): Xaa is C or S
SMEGIHQGQHPKIRMIQMTINSQGTPVXE

SEQ ID NO: 25282 - protein, 30 aa, Artificial Sequence; identical to SEQ ID NO: 21540
  Cyclic GFR-binding peptide
  MOD_RES (2)..(2): Xaa is C or S

SEQ ID NO: 25283 - protein, 24 aa, Artificial Sequence
  Cyclic GFR-binding peptide
TSMEGIFIPKKRVIEMIQVTINSL

SEQ ID NO: 25284 - protein, 34 aa, Artificial Sequence; identical to SEQ ID NO: 21542
  Cyclic GFR-binding peptide

SEQ ID NO: 25285 - protein, 24 aa, Artificial Sequence
  Cyclic GFR-binding peptide
TVQVEKFIPKKRVIEVKAVKVSRL

SEQ ID NO: 25286 - protein, 23 aa, Artificial Sequence
  Cyclic GFR-binding peptide
FSMEGLHQGQHPKIRMIQMTINS

SEQ ID NO: 25287 - protein, 29 aa, Artificial Sequence
  Cyclic GFR-binding peptide
  MOD_RES (1)..(1): Xaa is C or S
XQSHEELSMEGIHQGQHPKIRMIQMTINS

SEQ ID NO: 25288 - protein, 30 aa, Artificial Sequence; identical to SEQ ID NO: 21546
  Cyclic GFR-binding peptide
  MOD_RES (1)..(1): Xaa is C or S

SEQ ID NO: 25289 - protein, 39 aa, Artificial Sequence; identical to SEQ ID NO: 21547
  Cyclic GFR-binding peptide
  MOD_RES (2)..(36): Xaa is C or S

SEQ ID NO: 25290 - protein, 31 aa, Artificial Sequence; identical to SEQ ID NO: 21548
  Cyclic GFR-binding peptide
  MOD_RES (31)..(31): Xaa is C or S

SEQ ID NO: 25291 - protein, 32 aa, Artificial Sequence; identical to SEQ ID NO: 21549
  Cyclic GFR-binding peptide
  MOD_RES (28)..(28): Xaa is C or S

SEQ ID NO: 25292 - protein, 36 aa, Artificial Sequence; identical to SEQ ID NO: 21550
  Cyclic GFR-binding peptide
  MOD_RES (32)..(32): Xaa is C or S

SEQ ID NO: 25293 - protein, 40 aa, Artificial Sequence; identical to SEQ ID NO: 21551
  Cyclic GFR-binding peptide
  MOD_RES (34)..(34): Xaa is C or S

SEQ ID NO: 25294 - protein, 34 aa, Artificial Sequence; identical to SEQ ID NO: 21552
  Cyclic GFR-binding peptide
  MOD_RES (2)..(2): Xaa is C or S

SEQ ID NO: 25295 - protein, 30 aa, Artificial Sequence; identical to SEQ ID NO: 21553
  Cyclic GFR-binding peptide

SEQ ID NO: 25296 - protein, 43 aa, Artificial Sequence; identical to SEQ ID NO: 21554
  Cyclic GFR-binding peptide
  MOD_RES (2)..(39): Xaa is C or S

SEQ ID NO: 25297 - protein, 27 aa, Artificial Sequence
  Cyclic GFR-binding peptide
HEELSMEGIHQGQHPKIRMIQMTINSQ

SEQ ID NO: 25298 - protein, 39 aa, Artificial Sequence; identical to SEQ ID NO: 21556
  Cyclic GFR-binding peptide
  MOD_RES (1)..(35): Xaa is C or S

SEQ ID NO: 25299 - protein, 25 aa, Artificial Sequence
  Cyclic GFR-binding peptide
LFSMEGIHQGQHPKIRMIQMTINSE

SEQ ID NO: 25300 - protein, 22 aa, Artificial Sequence
  Cyclic GFR-binding peptide
VTAKKLKPKKRVYEIKRVQVPR

SEQ ID NO: 25301 - protein, 34 aa, Artificial Sequence; identical to SEQ ID NO: 21559
  Cyclic GFR-binding peptide
  MOD_RES (32)..(32): Xaa is C or S

SEQ ID NO: 25302 - protein, 38 aa, Artificial Sequence; identical to SEQ ID NO: 21560
  Cyclic GFR-binding peptide
  MOD_RES (1)..(38): Xaa is C or S

SEQ ID NO: 25303 - protein, 32 aa, Artificial Sequence; identical to SEQ ID NO: 21561
  Cyclic GFR-binding peptide
  MOD_RES (2)..(2): Xaa is C or S

SEQ ID NO: 25304 - protein, 37 aa, Artificial Sequence; identical to SEQ ID NO: 21562
  Cyclic GFR-binding peptide
  MOD_RES (34)..(34): Xaa is C or S

SEQ ID NO: 25305 - protein, 29 aa, Artificial Sequence
  Cyclic GFR-binding peptide
LRVTAKKLKPKKRVYEIKRVQVPRHHVRS

SEQ ID NO: 25306 - protein, 32 aa, Artificial Sequence; identical to SEQ ID NO: 21564
  Cyclic GFR-binding peptide
  MOD_RES (32)..(32): Xaa is C or S

SEQ ID NO: 25307 - protein, 35 aa, Artificial Sequence; identical to SEQ ID NO: 21565
  Cyclic GFR-binding peptide
  MOD_RES (1)..(3): Xaa is C or S

SEQ ID NO: 25308 - protein, 27 aa, Artificial Sequence
  Cyclic GFR-binding peptide
DELTSMEGLFIPKKRVIEMIQVTINSL

SEQ ID NO: 25309 - protein, 35 aa, Artificial Sequence; identical to SEQ ID NO: 21567
  Cyclic GFR-binding peptide
  MOD_RES (1)..(1): Xaa is C or S

SEQ ID NO: 25310 - protein, 33 aa, Artificial Sequence; identical to SEQ ID NO: 21568
  Cyclic GFR-binding peptide
  MOD_RES (1)..(3): Xaa is C or S

SEQ ID NO: 25311 - protein, 28 aa, Artificial Sequence
  Cyclic GFR-binding peptide
QSHEELSMEGIHQGQHPKIRMIQMTINS

SEQ ID NO: 25312 - protein, 32 aa, Artificial Sequence; identical to SEQ ID NO: 21570
  Cyclic GFR-binding peptide
  MOD_RES (2)..(4): Xaa is C or S

SEQ ID NO: 25313 - protein, 32 aa, Artificial Sequence; identical to SEQ ID NO: 21571
  Cyclic GFR-binding peptide

SEQ ID NO: 25314 - protein, 33 aa, Artificial Sequence; identical to SEQ ID NO: 21572
  Cyclic GFR-binding peptide
  MOD_RES (33)..(33): Xaa is C or S

SEQ ID NO: 25315 - protein, 36 aa, Artificial Sequence; identical to SEQ ID NO: 21573
  Cyclic GFR-binding peptide
  MOD_RES (31)..(31): Xaa is C or S

SEQ ID NO: 25316 - protein, 31 aa, Artificial Sequence; identical to SEQ ID NO: 21574
  Cyclic GFR-binding peptide
  MOD_RES (29)..(29): Xaa is C or S

SEQ ID NO: 25317 - protein, 41 aa, Artificial Sequence; identical to SEQ ID NO: 21575
  Cyclic GFR-binding peptide
  MOD_RES (2)..(36): Xaa is C or S

SEQ ID NO: 25318 - protein, 25 aa, Artificial Sequence
  Cyclic GFR-binding peptide
SMEGIHQGQHPKIRMIQMTINSEET

SEQ ID NO: 25319 - protein, 28 aa, Artificial Sequence
  Cyclic GFR-binding peptide
HDELTSMEGLFIPKKRVIEMIQVTINSL

SEQ ID NO: 25320 - protein, 34 aa, Artificial Sequence; identical to SEQ ID NO: 21578
  Cyclic GFR-binding peptide

SEQ ID NO: 25321 - protein, 32 aa, Artificial Sequence; identical to SEQ ID NO: 21579
  Cyclic GFR-binding peptide

SEQ ID NO: 25322 - protein, 43 aa, Artificial Sequence; identical to SEQ ID NO: 21580
  Cyclic GFR-binding peptide
  MOD_RES (2)..(39): Xaa is C or S

SEQ ID NO: 25323 - protein, 42 aa, Artificial Sequence; identical to SEQ ID NO: 21581
  Cyclic GFR-binding peptide
  MOD_RES (2)..(36): Xaa is C or S

SEQ ID NO: 25324 - protein, 30 aa, Artificial Sequence; identical to SEQ ID NO: 21582
  Cyclic GFR-binding peptide

SEQ ID NO: 25325 - protein, 23 aa, Artificial Sequence
  Cyclic GFR-binding peptide
SMEGLFIPKKRVIEMIQVTINSL

SEQ ID NO: 25326 - protein, 40 aa, Artificial Sequence; identical to SEQ ID NO: 21584
  Cyclic GFR-binding peptide
  MOD_RES (2)..(36): Xaa is C or S

SEQ ID NO: 25327 - protein, 27 aa, Artificial Sequence
  Cyclic GFR-binding peptide
TVQVEKFIPKKRVIEVKAVKVSRLQVQ

SEQ ID NO: 25328 - protein, 37 aa, Artificial Sequence; identical to SEQ ID NO: 21586
  Cyclic GFR-binding peptide
  MOD_RES (34)..(34): Xaa is C or S

SEQ ID NO: 25329 - protein, 31 aa, Artificial Sequence; identical to SEQ ID NO: 21587
  Cyclic GFR-binding peptide
  MOD_RES (31)..(31): Xaa is C or S

SEQ ID NO: 25330 - protein, 45 aa, Artificial Sequence; identical to SEQ ID NO: 21588
  Cyclic GFR-binding peptide
  MOD_RES (2)..(4)..(41): Xaa is C or S

SEQ ID NO: 25331 - protein, 37 aa, Artificial Sequence; identical to SEQ ID NO: 21589
  Cyclic GFR-binding peptide
  MOD_RES (31)..(31): Xaa is C or S

SEQ ID NO: 25332 - protein, 36 aa, Artificial Sequence; identical to SEQ ID NO: 21590
  Cyclic GFR-binding peptide
  MOD_RES (1)..(3): Xaa is C or S

SEQ ID NO: 25333 - protein, 38 aa, Artificial Sequence; identical to SEQ ID NO: 21591
  Cyclic GFR-binding peptide
  MOD_RES (37)..(37): Xaa is C or S

SEQ ID NO: 25334 - protein, 37 aa, Artificial Sequence; identical to SEQ ID NO: 21592
  Cyclic GFR-binding peptide
  MOD_RES (36)..(36): Xaa is C or S

SEQ ID NO: 25335 - protein, 30 aa, Artificial Sequence; identical to SEQ ID NO: 21593
  Cyclic GFR-binding peptide

SEQ ID NO: 25336 - protein, 34 aa, Artificial Sequence; identical to SEQ ID NO: 21594
  Cyclic GFR-binding peptide
  MOD_RES (1)..(3): Xaa is C or S

SEQ ID NO: 25337 - protein, 35 aa, Artificial Sequence; identical to SEQ ID NO: 21595
  Cyclic GFR-binding peptide
  MOD_RES (32)..(32): Xaa is C or S

SEQ ID NO: 25338 - protein, 29 aa, Artificial Sequence
  Cyclic GFR-binding peptide
KNHQLFVTAKKHQGQHPKIRIKRMQVPRE

SEQ ID NO: 25339 - protein, 24 aa, Artificial Sequence
  Cyclic GFR-binding peptide
FVQVEKHQGQHPKIRVKAMKVSRE

SEQ ID NO: 25340 - protein, 38 aa, Artificial Sequence; identical to SEQ ID NO: 21598
  Cyclic GFR-binding peptide
  MOD_RES (1)..(38): Xaa is C or S

SEQ ID NO: 25341 - protein, 30 aa, Artificial Sequence; identical to SEQ ID NO: 21599
  Cyclic GFR-binding peptide
  MOD_RES (1)..(1): Xaa is C or S

SEQ ID NO: 25342 - protein, 33 aa, Artificial Sequence; identical to SEQ ID NO: 21600
  Cyclic GFR-binding peptide

SEQ ID NO: 25343 - protein, 33 aa, Artificial Sequence; identical to SEQ ID NO: 21601
  Cyclic GFR-binding peptide
  MOD_RES (1)..(3): Xaa is C or S

SEQ ID NO: 25344 - protein, 34 aa, Artificial Sequence; identical to SEQ ID NO: 21602
  Cyclic GFR-binding peptide
  MOD_RES (2)..(4): Xaa is C or S

SEQ ID NO: 25345 - protein, 41 aa, Artificial Sequence; identical to SEQ ID NO: 21603
  Cyclic GFR-binding peptide
  MOD_RES (2)..(39): Xaa is C or S

SEQ ID NO: 25346 - protein, 37 aa, Artificial Sequence; identical to SEQ ID NO: 21604
  Cyclic GFR-binding peptide
  MOD_RES (2)..(4): Xaa is C or S

SEQ ID NO: 25347 - protein, 42 aa, Artificial Sequence; identical to SEQ ID NO: 21605
  Cyclic GFR-binding peptide
  MOD_RES (1)..(3)..(40): Xaa is C or S

SEQ ID NO: 25348 - protein, 40 aa, Artificial Sequence; identical to SEQ ID NO: 21606
  Cyclic GFR-binding peptide
  MOD_RES (2)..(36): Xaa is C or S

SEQ ID NO: 25349 - protein, 40 aa, Artificial Sequence; identical to SEQ ID NO: 21607
  Cyclic GFR-binding peptide
  MOD_RES (2)..(4): Xaa is C or S

SEQ ID NO: 25350 - protein, 32 aa, Artificial Sequence; identical to SEQ ID NO: 21608
  Cyclic GFR-binding peptide
  MOD_RES (2)..(2): Xaa is C or S

SEQ ID NO: 25351 - protein, 25 aa, Artificial Sequence
  Cyclic GFR-binding peptide
TSMEGLFIPKKRVIEMIQVTINSLQ

SEQ ID NO: 25352 - protein, 32 aa, Artificial Sequence; identical to SEQ ID NO: 21610
  Cyclic GFR-binding peptide
  MOD_RES (32)..(32): Xaa is C or S

SEQ ID NO: 25353 - protein, 23 aa, Artificial Sequence
  Cyclic GFR-binding peptide
VTAKKHQGQHPKIRIKRMQVPRE

SEQ ID NO: 25354 - protein, 31 aa, Artificial Sequence; identical to SEQ ID NO: 21612
  Cyclic GFR-binding peptide

SEQ ID NO: 25355 - protein, 34 aa, Artificial Sequence; identical to SEQ ID NO: 21613
  Cyclic GFR-binding peptide
  MOD_RES (28)..(28): Xaa is C or S

SEQ ID NO: 25356 - protein, 39 aa, Artificial Sequence; identical to SEQ ID NO: 21614
  Cyclic GFR-binding peptide
  MOD_RES (36)..(36): Xaa is C or S

SEQ ID NO: 25357 - protein, 28 aa, Artificial Sequence
  Cyclic GFR-binding peptide
FVTAKKHQGQHPKIRIKRMQVPREETPV

SEQ ID NO: 25358 - protein, 39 aa, Artificial Sequence; identical to SEQ ID NO: 21616
  Cyclic GFR-binding peptide
  MOD_RES (1)..(35): Xaa is C or S

SEQ ID NO: 25359 - protein, 25 aa, Artificial Sequence
  Cyclic GFR-binding peptide
RSMEGLLKPKKRVYEMIQVTINSHH

SEQ ID NO: 25360 - protein, 24 aa, Artificial Sequence
  Cyclic GFR-binding peptide
FSMEGIHQGQHPKIRMIQMTINSE

SEQ ID NO: 25361 - protein, 37 aa, Artificial Sequence; identical to SEQ ID NO: 21619
  Cyclic GFR-binding peptide
  MOD_RES (2)..(36): Xaa is C or S

SEQ ID NO: 25362 - protein, 36 aa, Artificial Sequence; identical to SEQ ID NO: 21620
  Cyclic GFR-binding peptide
  MOD_RES (33)..(33): Xaa is C or S

SEQ ID NO: 25363 - protein, 30 aa, Artificial Sequence; identical to SEQ ID NO: 21621
  Cyclic GFR-binding peptide

SEQ ID NO: 25364 - protein, 37 aa, Artificial Sequence; identical to SEQ ID NO: 21622
  Cyclic GFR-binding peptide
  MOD_RES (34)..(34): Xaa is C or S

SEQ ID NO: 25365 - protein, 36 aa, Artificial Sequence; identical to SEQ ID NO: 21623
  Cyclic GFR-binding peptide
  MOD_RES (30)..(30): Xaa is C or S

SEQ ID NO: 25366 - protein, 35 aa, Artificial Sequence; identical to SEQ ID NO: 21624
  Cyclic GFR-binding peptide
  MOD_RES (33)..(33): Xaa is C or S

SEQ ID NO: 25367 - protein, 37 aa, Artificial Sequence; identical to SEQ ID NO: 21625
  Cyclic GFR-binding peptide
  MOD_RES (1)..(3)..(37): Xaa is C or S

SEQ ID NO: 25368 - protein, 32 aa, Artificial Sequence; identical to SEQ ID NO: 21626
  Cyclic GFR-binding peptide
  MOD_RES (30)..(30): Xaa is C or S

SEQ ID NO: 25369 - protein, 34 aa, Artificial Sequence; identical to SEQ ID NO: 21627
  Cyclic GFR-binding peptide

SEQ ID NO: 25370 - protein, 30 aa, Artificial Sequence; identical to SEQ ID NO: 21628
  Cyclic GFR-binding peptide

SEQ ID NO: 25371 - protein, 37 aa, Artificial Sequence; identical to SEQ ID NO: 21629
  Cyclic GFR-binding peptide
  MOD_RES (2)..(4): Xaa is C or S

SEQ ID NO: 25372 - protein, 40 aa, Artificial Sequence; identical to SEQ ID NO: 21630
  Cyclic GFR-binding peptide
  MOD_RES (37)..(37): Xaa is C or S

SEQ ID NO: 25373 - protein, 35 aa, Artificial Sequence; identical to SEQ ID NO: 21631
  Cyclic GFR-binding peptide
  MOD_RES (33)..(33): Xaa is C or S

SEQ ID NO: 25374 - protein, 30 aa, Artificial Sequence; identical to SEQ ID NO: 21632
  Cyclic GFR-binding peptide

SEQ ID NO: 25375 - protein, 25 aa, Artificial Sequence
  Cyclic GFR-binding peptide
VQVEKHQGQHPKIRVKAMKVSREET

SEQ ID NO: 25376 - protein, 34 aa, Artificial Sequence; identical to SEQ ID NO: 21634
  Cyclic GFR-binding peptide
  MOD_RES (32)..(32): Xaa is C or S

SEQ ID NO: 25377 - protein, 28 aa, Artificial Sequence
  Cyclic GFR-binding peptide
LTSMEGLFIPKKRVIEMIQVTINSLQVQ

SEQ ID NO: 25378 - protein, 34 aa, Artificial Sequence; identical to SEQ ID NO: 21636
  Cyclic GFR-binding peptide
  MOD_RES (1)..(3): Xaa is C or S

SEQ ID NO: 25379 - protein, 40 aa, Artificial Sequence; identical to SEQ ID NO: 21637
  Cyclic GFR-binding peptide
  MOD_RES (37)..(37): Xaa is C or S

SEQ ID NO: 25380 - protein, 33 aa, Artificial Sequence; identical to SEQ ID NO: 21638
  Cyclic GFR-binding peptide
  MOD_RES (29)..(29): Xaa is C or S

SEQ ID NO: 25381 - protein, 35 aa, Artificial Sequence; identical to SEQ ID NO: 21639
  Cyclic GFR-binding peptide
  MOD_RES (2)..(2): Xaa is C or S

SEQ ID NO: 25382 - protein, 33 aa, Artificial Sequence; identical to SEQ ID NO: 21640
  Cyclic GFR-binding peptide
  MOD_RES (2)..(4): Xaa is C or S

SEQ ID NO: 25383 - protein, 31 aa, Artificial Sequence; identical to SEQ ID NO: 21641
  Cyclic GFR-binding peptide

SEQ ID NO: 25384 - protein, 22 aa, Artificial Sequence
  Cyclic GFR-binding peptide
SMEGLLKPKKRVYEMIQVTINS

SEQ ID NO: 25385 - protein, 37 aa, Artificial Sequence; identical to SEQ ID NO: 21643
  Cyclic GFR-binding peptide
  MOD_RES (32)..(32): Xaa is C or S

SEQ ID NO: 25386 - protein, 32 aa, Artificial Sequence; identical to SEQ ID NO: 21644
  Cyclic GFR-binding peptide

SEQ ID NO: 25387 - protein, 38 aa, Artificial Sequence; identical to SEQ ID NO: 21645
  Cyclic GFR-binding peptide
  MOD_RES (2)..(4): Xaa is C or S

SEQ ID NO: 25388 - protein, 33 aa, Artificial Sequence; identical to SEQ ID NO: 21646
  Cyclic GFR-binding peptide

SEQ ID NO: 25389 - protein, 42 aa, Artificial Sequence; identical to SEQ ID NO: 21647
  Cyclic GFR-binding peptide
  MOD_RES (2)..(4)..(38): Xaa is C or S

SEQ ID NO: 25390 - protein, 32 aa, Artificial Sequence; identical to SEQ ID NO: 21648
  Cyclic GFR-binding peptide
  MOD_RES (31)..(31): Xaa is C or S

SEQ ID NO: 25391 - protein, 33 aa, Artificial Sequence; identical to SEQ ID NO: 21649
  Cyclic GFR-binding peptide
  MOD_RES (33)..(33): Xaa is C or S

SEQ ID NO: 25392 - protein, 39 aa, Artificial Sequence; identical to SEQ ID NO: 21650
  Cyclic GFR-binding peptide
  MOD_RES (36)..(36): Xaa is C or S

SEQ ID NO: 25393 - protein, 41 aa, Artificial Sequence; identical to SEQ ID NO: 21651
  Cyclic GFR-binding peptide
  MOD_RES (2)..(4)..(38): Xaa is C or S

SEQ ID NO: 25394 - protein, 37 aa, Artificial Sequence; identical to SEQ ID NO: 21652
  Cyclic GFR-binding peptide
  MOD_RES (34)..(34): Xaa is C or S

SEQ ID NO: 25395 - protein, 35 aa, Artificial Sequence; identical to SEQ ID NO: 21653
  Cyclic GFR-binding peptide
  MOD_RES (2)..(2): Xaa is C or S

SEQ ID NO: 25396 - protein, 38 aa, Artificial Sequence; identical to SEQ ID NO: 21654
  Cyclic GFR-binding peptide
  MOD_RES (33)..(33): Xaa is C or S

SEQ ID NO: 25397 - protein, 32 aa, Artificial Sequence; identical to SEQ ID NO: 21655
  Cyclic GFR-binding peptide

SEQ ID NO: 25398 - protein, 28 aa, Artificial Sequence
  Cyclic GFR-binding peptide
KNHQLFSMEGIHQGQHPKIRMIQMTINS

SEQ ID NO: 25399 - protein, 39 aa, Artificial Sequence; identical to SEQ ID NO: 21657
  Cyclic GFR-binding peptide
  MOD_RES (1)..(38): Xaa is C or S

SEQ ID NO: 25400 - protein, 24 aa, Artificial Sequence
  Cyclic GFR-binding peptide
LVQVEKHQGQHPKIRVKAMKVSRQ

SEQ ID NO: 25401 - protein, 35 aa, Artificial Sequence; identical to SEQ ID NO: 21659
  Cyclic GFR-binding peptide
  MOD_RES (31)..(31): Xaa is C or S

SEQ ID NO: 25402 - protein, 30 aa, Artificial Sequence; identical to SEQ ID NO: 21660
  Cyclic GFR-binding peptide

SEQ ID NO: 25403 - protein, 39 aa, Artificial Sequence; identical to SEQ ID NO: 21661
  Cyclic GFR-binding peptide
  MOD_RES (36)..(36): Xaa is C or S

SEQ ID NO: 25404 - protein, 42 aa, Artificial Sequence; identical to SEQ ID NO: 21662
  Cyclic GFR-binding peptide
  MOD_RES (2)..(4)..(38): Xaa is C or S

SEQ ID NO: 25405 - protein, 42 aa, Artificial Sequence; identical to SEQ ID NO: 21663
  Cyclic GFR-binding peptide
  MOD_RES (2)..(39): Xaa is C or S

SEQ ID NO: 25406 - protein, 34 aa, Artificial Sequence; identical to SEQ ID NO: 21664
  Cyclic GFR-binding peptide
  MOD_RES (2)..(2): Xaa is C or S

SEQ ID NO: 25407 - protein, 43 aa, Artificial Sequence; identical to SEQ ID NO: 21665
  Cyclic GFR-binding peptide
  MOD_RES (1)..(3)..(37): Xaa is C or S

SEQ ID NO: 25408 - protein, 30 aa, Artificial Sequence; identical to SEQ ID NO: 21666
  Cyclic GFR-binding peptide

SEQ ID NO: 25409 - protein, 26 aa, Artificial Sequence
  Cyclic GFR-binding peptide
SMEGLHQGQHPKIRMIQMTINSEETP

SEQ ID NO: 25410 - protein, 31 aa, Artificial Sequence; identical to SEQ ID NO: 21668
  Cyclic GFR-binding peptide
  MOD_RES (31)..(31): Xaa is C or S

SEQ ID NO: 25411 - protein, 34 aa, Artificial Sequence; identical to SEQ ID NO: 21669
  Cyclic GFR-binding peptide

SEQ ID NO: 25412 - protein, 38 aa, Artificial Sequence; identical to SEQ ID NO: 21670
  Cyclic GFR-binding peptide
  MOD_RES (36)..(36): Xaa is C or S

SEQ ID NO: 25413 - protein, 32 aa, Artificial Sequence; identical to SEQ ID NO: 21671
  Cyclic GFR-binding peptide
  MOD_RES (30)..(30): Xaa is C or S

SEQ ID NO: 25414 - protein, 34 aa, Artificial Sequence; identical to SEQ ID NO: 21672
  Cyclic GFR-binding peptide
  MOD_RES (30)..(30): Xaa is C or S

SEQ ID NO: 25415 - protein, 34 aa, Artificial Sequence; identical to SEQ ID NO: 21673
  Cyclic GFR-binding peptide
  MOD_RES (34)..(34): Xaa is C or S

SEQ ID NO: 25416 - protein, 34 aa, Artificial Sequence; identical to SEQ ID NO: 21674
  Cyclic GFR-binding peptide

SEQ ID NO: 25417 - protein, 37 aa, Artificial Sequence; identical to SEQ ID NO: 21675
  Cyclic GFR-binding peptide
  MOD_RES (31)..(31): Xaa is C or S

SEQ ID NO: 25418 - protein, 32 aa, Artificial Sequence; identical to SEQ ID NO: 21676
  Cyclic GFR-binding peptide
  MOD_RES (31)..(31): Xaa is C or S

SEQ ID NO: 25419 - protein, 34 aa, Artificial Sequence; identical to SEQ ID NO: 21677
  Cyclic GFR-binding peptide
  MOD_RES (30)..(30): Xaa is C or S

SEQ ID NO: 25420 - protein, 33 aa, Artificial Sequence; identical to SEQ ID NO: 21678
  Cyclic GFR-binding peptide

SEQ ID NO: 25421 - protein, 32 aa, Artificial Sequence; identical to SEQ ID NO: 21679
  Cyclic GFR-binding peptide

SEQ ID NO: 25422 - protein, 24 aa, Artificial Sequence
  Cyclic GFR-binding peptide
SMEGILKPKKRVYEMIQVTINSHH

SEQ ID NO: 25423 - protein, 26 aa, Artificial Sequence
  Cyclic GFR-binding peptide
QLFVTAKKHQGQHPKIRIKRMQVPRE

SEQ ID NO: 25424 - protein, 30 aa, Artificial Sequence; identical to SEQ ID NO: 21682
  Cyclic GFR-binding peptide

SEQ ID NO: 25425 - protein, 27 aa, Artificial Sequence
  Cyclic GFR-binding peptide
HQLFVQVEKHQGQHPKIRVKAMKVSRE

SEQ ID NO: 25426 - protein, 35 aa, Artificial Sequence; identical to SEQ ID NO: 21684
  Cyclic GFR-binding peptide
  MOD_RES (1)..(35): Xaa is C or S

SEQ ID NO: 25427 - protein, 29 aa, Artificial Sequence
  Cyclic GFR-binding peptide
SHEELVTAKKHQGQHPKIRIKRMQVPRQG

SEQ ID NO: 25428 - protein, 26 aa, Artificial Sequence
  Cyclic GFR-binding peptide
EELRSMEGILKPKKRVYEMIQVTINS

SEQ ID NO: 25429 - protein, 38 aa, Artificial Sequence; identical to SEQ ID NO: 21687
  Cyclic GFR-binding peptide
  MOD_RES (35)..(35): Xaa is C or S

SEQ ID NO: 25430 - protein, 35 aa, Artificial Sequence; identical to SEQ ID NO: 21688
  Cyclic GFR-binding peptide
  MOD_RES (34)..(34): Xaa is C or S

SEQ ID NO: 25431 - protein, 34 aa, Artificial Sequence; identical to SEQ ID NO: 21689
  Cyclic GFR-binding peptide
  MOD_RES (33)..(33): Xaa is C or S

SEQ ID NO: 25432 - protein, 26 aa, Artificial Sequence
  Cyclic GFR-binding peptide
LVQVEKHQGQHPKIRVKAMKVSRQGT

SEQ ID NO: 25433 - protein, 25 aa, Artificial Sequence
  Cyclic GFR-binding peptide
LFSMEGLHQGQHPKIRMIQMTINSE

SEQ ID NO: 25434 - protein, 35 aa, Artificial Sequence; identical to SEQ ID NO: 21692
  Cyclic GFR-binding peptide
  MOD_RES (32)..(32): Xaa is C or S

SEQ ID NO: 25435 - protein, 37 aa, Artificial Sequence; identical to SEQ ID NO: 21693
  Cyclic GFR-binding peptide
  MOD_RES (32)..(32): Xaa is C or S

SEQ ID NO: 25436 - protein, 36 aa, Artificial Sequence; identical to SEQ ID NO: 21694
  Cyclic GFR-binding peptide
  MOD_RES (2)..(4): Xaa is C or S

SEQ ID NO: 25437 - protein, 36 aa, Artificial Sequence; identical to SEQ ID NO: 21695
  Cyclic GFR-binding peptide
  MOD_RES (1)..(35): Xaa is C or S

SEQ ID NO: 25438 - protein, 42 aa, Artificial Sequence; identical to SEQ ID NO: 21696
  Cyclic GFR-binding peptide
  MOD_RES (1)..(3)..(37): Xaa is C or S

SEQ ID NO: 25439 - protein, 38 aa, Artificial Sequence; identical to SEQ ID NO: 21697
  Cyclic GFR-binding peptide
  MOD_RES (2)..(36): Xaa is C or S

SEQ ID NO: 25440 - protein, 37 aa, Artificial Sequence; identical to SEQ ID NO: 21698
  Cyclic GFR-binding peptide
  MOD_RES (33)..(33): Xaa is C or S

SEQ ID NO: 25441 - protein, 39 aa, Artificial Sequence; identical to SEQ ID NO: 21699
  Cyclic GFR-binding peptide
  MOD_RES (33)..(33): Xaa is C or S

SEQ ID NO: 25442 - protein, 30 aa, Artificial Sequence; identical to SEQ ID NO: 21700
  Cyclic GFR-binding peptide
  MOD_RES (29)..(29): Xaa is C or S

SEQ ID NO: 25443 - protein, 33 aa, Artificial Sequence; identical to SEQ ID NO: 21701
  Cyclic GFR-binding peptide
  MOD_RES (1)..(3): Xaa is C or S

SEQ ID NO: 25444 - protein, 25 aa, Artificial Sequence
  Cyclic GFR-binding peptide
FVTAKKHQGQHPKIRIKRMQVPREE

SEQ ID NO: 25445 - protein, 30 aa, Artificial Sequence; identical to SEQ ID NO: 21703
  Cyclic GFR-binding peptide
  MOD_RES (2)..(2): Xaa is C or S

SEQ ID NO: 25446 - protein, 29 aa, Artificial Sequence
  Cyclic GFR-binding peptide
HEELVTAKKHQGQHPKIRIKRMQVPRQGT

SEQ ID NO: 25447 - protein, 35 aa, Artificial Sequence; identical to SEQ ID NO: 21705
  Cyclic GFR-binding peptide
  MOD_RES (33)..(33): Xaa is C or S

SEQ ID NO: 25448 - protein, 27 aa, Artificial Sequence
  Cyclic GFR-binding peptide
SMEGIHQGQHPKIRMIQMTINSQGTPV

SEQ ID NO: 25449 - protein, 28 aa, Artificial Sequence
  Cyclic GFR-binding peptide
HDELTVQVEKFIPKKRVIEVKAVKVSRL

SEQ ID NO: 25450 - protein, 31 aa, Artificial Sequence; identical to SEQ ID NO: 21708
  Cyclic GFR-binding peptide
  MOD_RES (28)..(28): Xaa is C or S

SEQ ID NO: 25451 - protein, 30 aa, Artificial Sequence; identical to SEQ ID NO: 21709
  Cyclic GFR-binding peptide
  MOD_RES (29)..(29): Xaa is C or S

SEQ ID NO: 25452 - protein, 38 aa, Artificial Sequence; identical to SEQ ID NO: 21710
  Cyclic GFR-binding peptide
  MOD_RES (32)..(32): Xaa is C or S

SEQ ID NO: 25453 - protein, 34 aa, Artificial Sequence; identical to SEQ ID NO: 21711
  Cyclic GFR-binding peptide
  MOD_RES (33)..(33): Xaa is C or S

SEQ ID NO: 25454 - protein, 27 aa, Artificial Sequence
  Cyclic GFR-binding peptide
LTVQVEKFIPKKRVIEVKAVKVSRLQV

SEQ ID NO: 25455 - protein, 24 aa, Artificial Sequence
  Cyclic GFR-binding peptide
RSMEGILKPKKRVYEMIQVTINSH

SEQ ID NO: 25456 - protein, 34 aa, Artificial Sequence; identical to SEQ ID NO: 21714
  Cyclic GFR-binding peptide
  MOD_RES (1)..(1): Xaa is C or S

SEQ ID NO: 25457 - protein, 29 aa, Artificial Sequence
  Cyclic GFR-binding peptide
  MOD_RES (1)..(1): Xaa is C or S
XQSHEELVQVEKHQGQHPKIRVKAMKVSR

SEQ ID NO: 25458 - protein, 33 aa, Artificial Sequence; identical to SEQ ID NO: 21716
  Cyclic GFR-binding peptide
  MOD_RES (33)..(33): Xaa is C or S

SEQ ID NO: 25459 - protein, 33 aa, Artificial Sequence; identical to SEQ ID NO: 21717
  Cyclic GFR-binding peptide
  MOD_RES (2)..(2): Xaa is C or S

SEQ ID NO: 25460 - protein, 30 aa, Artificial Sequence; identical to SEQ ID NO: 21718
  Cyclic GFR-binding peptide

SEQ ID NO: 25461 - protein, 40 aa, Artificial Sequence; identical to SEQ ID NO: 21719
  Cyclic GFR-binding peptide
  MOD_RES (1)..(35): Xaa is C or S

SEQ ID NO: 25462 - protein, 26 aa, Artificial Sequence
  Cyclic GFR-binding peptide
ELTSMEGIFIPKKRVIEMIQVTINSL

SEQ ID NO: 25463 - protein, 40 aa, Artificial Sequence; identical to SEQ ID NO: 21721
  Cyclic GFR-binding peptide
  MOD_RES (2)..(4): Xaa is C or S

SEQ ID NO: 25464 - protein, 37 aa, Artificial Sequence; identical to SEQ ID NO: 21722
  Cyclic GFR-binding peptide
  MOD_RES (2)..(2): Xaa is C or S

SEQ ID NO: 25465 - protein, 33 aa, Artificial Sequence; identical to SEQ ID NO: 21723
  Cyclic GFR-binding peptide
  MOD_RES (30)..(30): Xaa is C or S

SEQ ID NO: 25466 - protein, 38 aa, Artificial Sequence; identical to SEQ ID NO: 21724
  Cyclic GFR-binding peptide
  MOD_RES (37)..(37): Xaa is C or S

SEQ ID NO: 25467 - protein, 31 aa, Artificial Sequence; identical to SEQ ID NO: 21725
  Cyclic GFR-binding peptide
  MOD_RES (1)..(3): Xaa is C or S

SEQ ID NO: 25468 - protein, 35 aa, Artificial Sequence; identical to SEQ ID NO: 21726
  Cyclic GFR-binding peptide
  MOD_RES (2)..(2): Xaa is C or S

SEQ ID NO: 25469 - protein, 33 aa, Artificial Sequence; identical to SEQ ID NO: 21727
  Cyclic GFR-binding peptide
  MOD_RES (33)..(33): Xaa is C or S

SEQ ID NO: 25470 - protein, 39 aa, Artificial Sequence; identical to SEQ ID NO: 21728
  Cyclic GFR-binding peptide
  MOD_RES (35)..(35): Xaa is C or S

SEQ ID NO: 25471 - protein, 28 aa, Artificial Sequence
  Cyclic GFR-binding peptide
SHEELSMEGIHQGQHPKIRMIQMTINSQ

SEQ ID NO: 25472 - protein, 42 aa, Artificial Sequence; identical to SEQ ID NO: 21730
  Cyclic GFR-binding peptide
  MOD_RES (2)..(39): Xaa is C or S

SEQ ID NO: 25473 - protein, 36 aa, Artificial Sequence; identical to SEQ ID NO: 21731
  Cyclic GFR-binding peptide
  MOD_RES (32)..(32): Xaa is C or S

SEQ ID NO: 25474 - protein, 33 aa, Artificial Sequence; identical to SEQ ID NO: 21732
  Cyclic GFR-binding peptide
  MOD_RES (32)..(32): Xaa is C or S

SEQ ID NO: 25475 - protein, 33 aa, Artificial Sequence; identical to SEQ ID NO: 21733
  Cyclic GFR-binding peptide
  MOD_RES (32)..(32): Xaa is C or S

SEQ ID NO: 25476 - protein, 32 aa, Artificial Sequence; identical to SEQ ID NO: 21734
  Cyclic GFR-binding peptide

SEQ ID NO: 25477 - protein, 38 aa, Artificial Sequence; identical to SEQ ID NO: 21735
  Cyclic GFR-binding peptide
  MOD_RES (34)..(34): Xaa is C or S

SEQ ID NO: 25478 - protein, 32 aa, Artificial Sequence; identical to SEQ ID NO: 21736
  Cyclic GFR-binding peptide
  MOD_RES (31)..(31): Xaa is C or S

SEQ ID NO: 25479 - protein, 30 aa, Artificial Sequence; identical to SEQ ID NO: 21737
  Cyclic GFR-binding peptide

SEQ ID NO: 25480 - protein, 27 aa, Artificial Sequence
  Cyclic GFR-binding peptide
NHQLFVQVEKHQGQHPKIRVKAMKVSR

SEQ ID NO: 25481 - protein, 26 aa, Artificial Sequence
  Cyclic GFR-binding peptide
SMEGIHQGQHPKIRMIQMTINSQGTP

SEQ ID NO: 25482 - protein, 29 aa, Artificial Sequence
  Cyclic GFR-binding peptide
HQLFVTAKKHQGQHPKIRIKRMQVPREET

SEQ ID NO: 25483 - protein, 29 aa, Artificial Sequence
  Cyclic GFR-binding peptide
EELSMEGIHQGQHPKIRMIQMTINSQGTP

SEQ ID NO: 25484 - protein, 32 aa, Artificial Sequence; identical to SEQ ID NO: 21742
  Cyclic GFR-binding peptide

SEQ ID NO: 25485 - protein, 22 aa, Artificial Sequence
  Cyclic GFR-binding peptide
SMEGIFIPKKRVIEMIQVTINS

SEQ ID NO: 25486 - protein, 29 aa, Artificial Sequence
  Cyclic GFR-binding peptide
SMEGILKPKKRVYEMIQVTINSHHVRSPQ

SEQ ID NO: 25487 - protein, 28 aa, Artificial Sequence
  Cyclic GFR-binding peptide
FVQVEKHQGQHPKIRVKAMKVSREETPV

SEQ ID NO: 25488 - protein, 41 aa, Artificial Sequence; identical to SEQ ID NO: 21746
  Cyclic GFR-binding peptide
  MOD_RES (1)..(35): Xaa is C or S

SEQ ID NO: 25489 - protein, 29 aa, Artificial Sequence
  Cyclic GFR-binding peptide
  MOD_RES (29)..(29): Xaa is C or S
LSMEGIHQGQHPKIRMIQMTINSQGTPVX

SEQ ID NO: 25490 - protein, 36 aa, Artificial Sequence; identical to SEQ ID NO: 21748
  Cyclic GFR-binding peptide
  MOD_RES (30)..(30): Xaa is C or S

SEQ ID NO: 25491 - protein, 39 aa, Artificial Sequence; identical to SEQ ID NO: 21749
  Cyclic GFR-binding peptide
  MOD_RES (1)..(3): Xaa is C or S

SEQ ID NO: 25492 - protein, 33 aa, Artificial Sequence; identical to SEQ ID NO: 21750
  Cyclic GFR-binding peptide
  MOD_RES (30)..(30): Xaa is C or S

SEQ ID NO: 25493 - protein, 29 aa, Artificial Sequence
  Cyclic GFR-binding peptide
HEELSMEGIHQGQHPKIRMIQMTINSQGT

SEQ ID NO: 25494 - protein, 33 aa, Artificial Sequence; identical to SEQ ID NO: 21752
  Cyclic GFR-binding peptide
  MOD_RES (2)..(2): Xaa is C or S

SEQ ID NO: 25495 - protein, 28 aa, Artificial Sequence
  Cyclic GFR-binding peptide
LFVQVEKHQGQHPKIRVKAMKVSREETP

SEQ ID NO: 25496 - protein, 32 aa, Artificial Sequence; identical to SEQ ID NO: 21754
  Cyclic GFR-binding peptide
  MOD_RES (2)..(4): Xaa is C or S

SEQ ID NO: 25497 - protein, 24 aa, Artificial Sequence
  Cyclic GFR-binding peptide
ELVTAKKHQGQHPKIRIKRMQVPR

SEQ ID NO: 25498 - protein, 24 aa, Artificial Sequence
  Cyclic GFR-binding peptide
VTAKKHQGQHPKIRIKRMQVPRQG

SEQ ID NO: 25499 - protein, 28 aa, Artificial Sequence
  Cyclic GFR-binding peptide
HEELSMEGIHQGQHPKIRMIQMTINSQG

SEQ ID NO: 25500 - protein, 38 aa, Artificial Sequence; identical to SEQ ID NO: 21758
  Cyclic GFR-binding peptide
  MOD_RES (1)..(38): Xaa is C or S

SEQ ID NO: 25501 - protein, 39 aa, Artificial Sequence; identical to SEQ ID NO: 21759
  Cyclic GFR-binding peptide
  MOD_RES (1)..(3)..(37): Xaa is C or S

SEQ ID NO: 25502 - protein, 24 aa, Artificial Sequence
  Cyclic GFR-binding peptide
LTVQVEKFIPKKRVIEVKAVKVSR

SEQ ID NO: 25503 - protein, 30 aa, Artificial Sequence; identical to SEQ ID NO: 21761
  Cyclic GFR-binding peptide

SEQ ID NO: 25504 - protein, 34 aa, Artificial Sequence; identical to SEQ ID NO: 21762
  Cyclic GFR-binding peptide
  MOD_RES (31)..(31): Xaa is C or S

SEQ ID NO: 25505 - protein, 28 aa, Artificial Sequence
  Cyclic GFR-binding peptide
EELSMEGIHQGQHPKIRMIQMTINSQGT

SEQ ID NO: 25506 - protein, 36 aa, Artificial Sequence; identical to SEQ ID NO: 21764
  Cyclic GFR-binding peptide

SEQ ID NO: 25507 - protein, 32 aa, Artificial Sequence; identical to SEQ ID NO: 21765
  Cyclic GFR-binding peptide

SEQ ID NO: 25508 - protein, 38 aa, Artificial Sequence; identical to SEQ ID NO: 21766
  Cyclic GFR-binding peptide
  MOD_RES (34)..(34): Xaa is C or S

SEQ ID NO: 25509 - protein, 30 aa, Artificial Sequence; identical to SEQ ID NO: 21767
  Cyclic GFR-binding peptide
  MOD_RES (28)..(28): Xaa is C or S

SEQ ID NO: 25510 - protein, 35 aa, Artificial Sequence; identical to SEQ ID NO: 21768
  Cyclic GFR-binding peptide
  MOD_RES (1)..(1): Xaa is C or S

SEQ ID NO: 25511 - protein, 29 aa, Artificial Sequence
  Cyclic GFR-binding peptide
ELSMEGIHQGQHPKIRMIQMTINSQGTPV

SEQ ID NO: 25512 - protein, 44 aa, Artificial Sequence; identical to SEQ ID NO: 21770
  Cyclic GFR-binding peptide
  MOD_RES (1)..(3)..(40): Xaa is C or S

SEQ ID NO: 25513 - protein, 30 aa, Artificial Sequence; identical to SEQ ID NO: 21771
  Cyclic GFR-binding peptide

SEQ ID NO: 25514 - protein, 33 aa, Artificial Sequence; identical to SEQ ID NO: 21772
  Cyclic GFR-binding peptide
  MOD_RES (32)..(32): Xaa is C or S

SEQ ID NO: 25515 - protein, 37 aa, Artificial Sequence; identical to SEQ ID NO: 21773
  Cyclic GFR-binding peptide
  MOD_RES (32)..(32): Xaa is C or S

SEQ ID NO: 25516 - protein, 37 aa, Artificial Sequence; identical to SEQ ID NO: 21774
  Cyclic GFR-binding peptide
  MOD_RES (33)..(33): Xaa is C or S

SEQ ID NO: 25517 - protein, 32 aa, Artificial Sequence; identical to SEQ ID NO: 21775
  Cyclic GFR-binding peptide
  MOD_RES (30)..(30): Xaa is C or S

SEQ ID NO: 25518 - protein, 30 aa, Artificial Sequence; identical to SEQ ID NO: 21776
  Cyclic GFR-binding peptide
  MOD_RES (28)..(28): Xaa is C or S

SEQ ID NO: 25519 - protein, 42 aa, Artificial Sequence; identical to SEQ ID NO: 21777
  Cyclic GFR-binding peptide
  MOD_RES (2)..(36): Xaa is C or S

SEQ ID NO: 25520 - protein, 36 aa, Artificial Sequence; identical to SEQ ID NO: 21778
  Cyclic GFR-binding peptide
  MOD_RES (31)..(31): Xaa is C or S

SEQ ID NO: 25521 - protein, 33 aa, Artificial Sequence; identical to SEQ ID NO: 21779
  Cyclic GFR-binding peptide
  MOD_RES (1)..(1): Xaa is C or S

SEQ ID NO: 25522 - protein, 34 aa, Artificial Sequence; identical to SEQ ID NO: 21780
  Cyclic GFR-binding peptide
  MOD_RES (1)..(1): Xaa is C or S

SEQ ID NO: 25523 - protein, 28 aa, Artificial Sequence
  Cyclic GFR-binding peptide
  MOD_RES (28)..(28): Xaa is C or S
VQVEKHQGQHPKIRVKAMKVSREETPVX

SEQ ID NO: 25524 - protein, 29 aa, Artificial Sequence
  Cyclic GFR-binding peptide
VQVEKFIPKKRVIEVKAVKVSRLQVQTPR

SEQ ID NO: 25525 - protein, 34 aa, Artificial Sequence; identical to SEQ ID NO: 21783
  Cyclic GFR-binding peptide

SEQ ID NO: 25526 - protein, 36 aa, Artificial Sequence; identical to SEQ ID NO: 21784
  Cyclic GFR-binding peptide
  MOD_RES (1)..(35): Xaa is C or S

SEQ ID NO: 25527 - protein, 38 aa, Artificial Sequence; identical to SEQ ID NO: 21785
  Cyclic GFR-binding peptide
  MOD_RES (1)..(3)..(37): Xaa is C or S

SEQ ID NO: 25528 - protein, 35 aa, Artificial Sequence; identical to SEQ ID NO: 21786
  Cyclic GFR-binding peptide
  MOD_RES (2)..(4): Xaa is C or S

SEQ ID NO: 25529 - protein, 33 aa, Artificial Sequence; identical to SEQ ID NO: 21787
  Cyclic GFR-binding peptide
  MOD_RES (2)..(4): Xaa is C or S

SEQ ID NO: 25530 - protein, 31 aa, Artificial Sequence; identical to SEQ ID NO: 21788
  Cyclic GFR-binding peptide
  MOD_RES (1)..(3): Xaa is C or S

SEQ ID NO: 25531 - protein, 39 aa, Artificial Sequence; identical to SEQ ID NO: 21789
  Cyclic GFR-binding peptide
  MOD_RES (2)..(36): Xaa is C or S

SEQ ID NO: 25532 - protein, 27 aa, Artificial Sequence
  Cyclic GFR-binding peptide
SMEGLHQGQHPKIRMIQMTINSEETPV

SEQ ID NO: 25533 - protein, 31 aa, Artificial Sequence; identical to SEQ ID NO: 21791
  Cyclic GFR-binding peptide
  MOD_RES (1)..(1): Xaa is C or S

SEQ ID NO: 25534 - protein, 37 aa, Artificial Sequence; identical to SEQ ID NO: 21792
  Cyclic GFR-binding peptide
  MOD_RES (33)..(33): Xaa is C or S

SEQ ID NO: 25535 - protein, 26 aa, Artificial Sequence
  Cyclic GFR-binding peptide
ELRSMEGLLKPKKRVYEMIQVTINSH

SEQ ID NO: 25536 - protein, 36 aa, Artificial Sequence; identical to SEQ ID NO: 21794
  Cyclic GFR-binding peptide
  MOD_RES (2)..(4): Xaa is C or S

SEQ ID NO: 25537 - protein, 34 aa, Artificial Sequence; identical to SEQ ID NO: 21795
  Cyclic GFR-binding peptide
  MOD_RES (30)..(30): Xaa is C or S

SEQ ID NO: 25538 - protein, 36 aa, Artificial Sequence; identical to SEQ ID NO: 21796
  Cyclic GFR-binding peptide
  MOD_RES (31)..(31): Xaa is C or S

SEQ ID NO: 25539 - protein, 27 aa, Artificial Sequence
  Cyclic GFR-binding peptide
FVQVEKHQGQHPKIRVKAMKVSREETP

SEQ ID NO: 25540 - protein, 33 aa, Artificial Sequence; identical to SEQ ID NO: 21798
  Cyclic GFR-binding peptide
  MOD_RES (28)..(28): Xaa is C or S

SEQ ID NO: 25541 - protein, 34 aa, Artificial Sequence; identical to SEQ ID NO: 21799
  Cyclic GFR-binding peptide
  MOD_RES (33)..(33): Xaa is C or S

SEQ ID NO: 25542 - protein, 43 aa, Artificial Sequence; identical to SEQ ID NO: 21800
  Cyclic GFR-binding peptide
  MOD_RES (2)..(4)..(38): Xaa is C or S

SEQ ID NO: 25543 - protein, 40 aa, Artificial Sequence; identical to SEQ ID NO: 21801
  Cyclic GFR-binding peptide
  MOD_RES (1)..(38): Xaa is C or S

SEQ ID NO: 25544 - protein, 33 aa, Artificial Sequence; identical to SEQ ID NO: 21802
  Cyclic GFR-binding peptide
  MOD_RES (30)..(30): Xaa is C or S

SEQ ID NO: 25545 - protein, 28 aa, Artificial Sequence
  Cyclic GFR-binding peptide
HQLFVTAKKHQGQHPKIRIKRMQVPREE

SEQ ID NO: 25546 - protein, 33 aa, Artificial Sequence; identical to SEQ ID NO: 21804
  Cyclic GFR-binding peptide

SEQ ID NO: 25547 - protein, 36 aa, Artificial Sequence; identical to SEQ ID NO: 21805
  Cyclic GFR-binding peptide
  MOD_RES (2)..(2): Xaa is C or S

SEQ ID NO: 25548 - protein, 22 aa, Artificial Sequence
  Cyclic GFR-binding peptide
SMEGLHQGQHPKIRMIQMTINS

SEQ ID NO: 25549 - protein, 30 aa, Artificial Sequence; identical to SEQ ID NO: 21807
  Cyclic GFR-binding peptide
  MOD_RES (30)..(30): Xaa is C or S

SEQ ID NO: 25550 - protein, 30 aa, Artificial Sequence; identical to SEQ ID NO: 21808
  Cyclic GFR-binding peptide
  MOD_RES (29)..(29): Xaa is C or S

SEQ ID NO: 25551 - protein, 27 aa, Artificial Sequence
  Cyclic GFR-binding peptide
SMEGLLKPKKRVYEMIQVTINSHHVRS

SEQ ID NO: 25552 - protein, 40 aa, Artificial Sequence; identical to SEQ ID NO: 21810
  Cyclic GFR-binding peptide
  MOD_RES (1)..(3)..(37): Xaa is C or S

SEQ ID NO: 25553 - protein, 40 aa, Artificial Sequence; identical to SEQ ID NO: 21811
  Cyclic GFR-binding peptide
  MOD_RES (2)..(36): Xaa is C or S

SEQ ID NO: 25554 - protein, 30 aa, Artificial Sequence; identical to SEQ ID NO: 21812
  Cyclic GFR-binding peptide
  MOD_RES (1)..(1): Xaa is C or S

SEQ ID NO: 25555 - protein, 24 aa, Artificial Sequence
  Cyclic GFR-binding peptide
SMEGIFIPKKRVIEMIQVTINSLQ

SEQ ID NO: 25556 - protein, 25 aa, Artificial Sequence
  Cyclic GFR-binding peptide
FVQVEKHQGQHPKIRVKAMKVSREE

SEQ ID NO: 25557 - protein, 35 aa, Artificial Sequence; identical to SEQ ID NO: 21815
  Cyclic GFR-binding peptide
  MOD_RES (30)..(30): Xaa is C or S

SEQ ID NO: 25558 - protein, 27 aa, Artificial Sequence
  Cyclic GFR-binding peptide
LSMEGIHQGQHPKIRMIQMTINSQGTP

SEQ ID NO: 25559 - protein, 30 aa, Artificial Sequence; identical to SEQ ID NO: 21817
  Cyclic GFR-binding peptide
  MOD_RES (1)..(1): Xaa is C or S

SEQ ID NO: 25560 - protein, 32 aa, Artificial Sequence; identical to SEQ ID NO: 21818
  Cyclic GFR-binding peptide
  MOD_RES (31)..(31): Xaa is C or S

SEQ ID NO: 25561 - protein, 31 aa, Artificial Sequence; identical to SEQ ID NO: 21819
  Cyclic GFR-binding peptide

SEQ ID NO: 25562 - protein, 39 aa, Artificial Sequence; identical to SEQ ID NO: 21820
  Cyclic GFR-binding peptide
  MOD_RES (33)..(33): Xaa is C or S

SEQ ID NO: 25563 - protein, 30 aa, Artificial Sequence; identical to SEQ ID NO: 21821
  Cyclic GFR-binding peptide

SEQ ID NO: 25564 - protein, 33 aa, Artificial Sequence; identical to SEQ ID NO: 21822
  Cyclic GFR-binding peptide
  MOD_RES (31)..(31): Xaa is C or S

SEQ ID NO: 25565 - protein, 41 aa, Artificial Sequence; identical to SEQ ID NO: 21823
  Cyclic GFR-binding peptide
  MOD_RES (37)..(37): Xaa is C or S

SEQ ID NO: 25566 - protein, 37 aa, Artificial Sequence; identical to SEQ ID NO: 21824
  Cyclic GFR-binding peptide
  MOD_RES (2)..(36): Xaa is C or S

SEQ ID NO: 25567 - protein, 29 aa, Artificial Sequence
  Cyclic GFR-binding peptide
DELTSMEGIFIPKKRVIEMIQVTINSLQV

SEQ ID NO: 25568 - protein, 39 aa, Artificial Sequence; identical to SEQ ID NO: 21826
  Cyclic GFR-binding peptide
  MOD_RES (33)..(33): Xaa is C or S

SEQ ID NO: 25569 - protein, 34 aa, Artificial Sequence; identical to SEQ ID NO: 21827
  Cyclic GFR-binding peptide
  MOD_RES (2)..(4): Xaa is C or S

SEQ ID NO: 25570 - protein, 39 aa, Artificial Sequence; identical to SEQ ID NO: 21828
  Cyclic GFR-binding peptide
  MOD_RES (1)..(3): Xaa is C or S

SEQ ID NO: 25571 - protein, 31 aa, Artificial Sequence; identical to SEQ ID NO: 21829
  Cyclic GFR-binding peptide
  MOD_RES (29)..(29): Xaa is C or S

SEQ ID NO: 25572 - protein, 36 aa, Artificial Sequence; identical to SEQ ID NO: 21830
  Cyclic GFR-binding peptide
  MOD_RES (34)..(34): Xaa is C or S

SEQ ID NO: 25573 - protein, 38 aa, Artificial Sequence; identical to SEQ ID NO: 21831
  Cyclic GFR-binding peptide
  MOD_RES (33)..(33): Xaa is C or S

SEQ ID NO: 25574 - protein, 32 aa, Artificial Sequence; identical to SEQ ID NO: 21832
  Cyclic GFR-binding peptide
  MOD_RES (2)..(2): Xaa is C or S

SEQ ID NO: 25575 - protein, 32 aa, Artificial Sequence; identical to SEQ ID NO: 21833
  Cyclic GFR-binding peptide

SEQ ID NO: 25576 - protein, 33 aa, Artificial Sequence; identical to SEQ ID NO: 21834
  Cyclic GFR-binding peptide
  MOD_RES (2)..(4): Xaa is C or S

SEQ ID NO: 25577 - protein, 37 aa, Artificial Sequence; identical to SEQ ID NO: 21835
  Cyclic GFR-binding peptide
  MOD_RES (2)..(2): Xaa is C or S

SEQ ID NO: 25578 - protein, 33 aa, Artificial Sequence; identical to SEQ ID NO: 21836
  Cyclic GFR-binding peptide
  MOD_RES (2)..(2): Xaa is C or S

SEQ ID NO: 25579 - protein, 27 aa, Artificial Sequence
  Cyclic GFR-binding peptide
HDELTSMEGLFIPKKRVIEMIQVTINS

SEQ ID NO: 25580 - protein, 30 aa, Artificial Sequence; identical to SEQ ID NO: 21838
  Cyclic GFR-binding peptide

SEQ ID NO: 25581 - protein, 43 aa, Artificial Sequence; identical to SEQ ID NO: 21839
  Cyclic GFR-binding peptide
  MOD_RES (2)..(4)..(41): Xaa is C or S

SEQ ID NO: 25582 - protein, 34 aa, Artificial Sequence; identical to SEQ ID NO: 21840
  Cyclic GFR-binding peptide
  MOD_RES (2)..(2): Xaa is C or S

SEQ ID NO: 25583 - protein, 37 aa, Artificial Sequence; identical to SEQ ID NO: 21841
  Cyclic GFR-binding peptide
  MOD_RES (2)..(2): Xaa is C or S

SEQ ID NO: 25584 - protein, 30 aa, Artificial Sequence; identical to SEQ ID NO: 21842
  Cyclic GFR-binding peptide

SEQ ID NO: 25585 - protein, 35 aa, Artificial Sequence; identical to SEQ ID NO: 21843
  Cyclic GFR-binding peptide
  MOD_RES (31)..(31): Xaa is C or S

SEQ ID NO: 25586 - protein, 33 aa, Artificial Sequence; identical to SEQ ID NO: 21844
  Cyclic GFR-binding peptide
  MOD_RES (31)..(31): Xaa is C or S

SEQ ID NO: 25587 - protein, 25 aa, Artificial Sequence
  Cyclic GFR-binding peptide
VTAKKLKPKKRVYEIKRVQVPRHHV

SEQ ID NO: 25588 - protein, 30 aa, Artificial Sequence; identical to SEQ ID NO: 21846
  Cyclic GFR-binding peptide
  MOD_RES (30)..(30): Xaa is C or S

SEQ ID NO: 25589 - protein, 40 aa, Artificial Sequence; identical to SEQ ID NO: 21847
  Cyclic GFR-binding peptide
  MOD_RES (1)..(38): Xaa is C or S

SEQ ID NO: 25590 - protein, 30 aa, Artificial Sequence; identical to SEQ ID NO: 21848
  Cyclic GFR-binding peptide

SEQ ID NO: 25591 - protein, 30 aa, Artificial Sequence; identical to SEQ ID NO: 21849
  Cyclic GFR-binding peptide
  MOD_RES (30)..(30): Xaa is C or S

SEQ ID NO: 25592 - protein, 34 aa, Artificial Sequence; identical to SEQ ID NO: 21850
  Cyclic GFR-binding peptide
  MOD_RES (1)..(3): Xaa is C or S

SEQ ID NO: 25593 - protein, 35 aa, Artificial Sequence; identical to SEQ ID NO: 21851
  Cyclic GFR-binding peptide
  MOD_RES (2)..(4): Xaa is C or S

SEQ ID NO: 25594 - protein, 39 aa, Artificial Sequence; identical to SEQ ID NO: 21852
  Cyclic GFR-binding peptide
  MOD_RES (35)..(35): Xaa is C or S

SEQ ID NO: 25595 - protein, 24 aa, Artificial Sequence
  Cyclic GFR-binding peptide
LFVTAKKHQGQHPKIRIKRMQVPR

SEQ ID NO: 25596 - protein, 41 aa, Artificial Sequence; identical to SEQ ID NO: 21854
  Cyclic GFR-binding peptide
  MOD_RES (2)..(36): Xaa is C or S

SEQ ID NO: 25597 - protein, 34 aa, Artificial Sequence; identical to SEQ ID NO: 21855
  Cyclic GFR-binding peptide
  MOD_RES (2)..(4): Xaa is C or S

SEQ ID NO: 25598 - protein, 33 aa, Artificial Sequence; identical to SEQ ID NO: 21856
  Cyclic GFR-binding peptide
  MOD_RES (32)..(32): Xaa is C or S

SEQ ID NO: 25599 - protein, 31 aa, Artificial Sequence; identical to SEQ ID NO: 21857
  Cyclic GFR-binding peptide
  MOD_RES (1)..(1): Xaa is C or S

SEQ ID NO: 25600 - protein, 38 aa, Artificial Sequence; identical to SEQ ID NO: 21858
  Cyclic GFR-binding peptide
  MOD_RES (33)..(33): Xaa is C or S

SEQ ID NO: 25601 - protein, 31 aa, Artificial Sequence; identical to SEQ ID NO: 21859
  Cyclic GFR-binding peptide
  MOD_RES (28)..(28): Xaa is C or S

SEQ ID NO: 25602 - protein, 35 aa, Artificial Sequence; identical to SEQ ID NO: 21860
  Cyclic GFR-binding peptide
  MOD_RES (2)..(4): Xaa is C or S

SEQ ID NO: 25603 - protein, 26 aa, Artificial Sequence
  Cyclic GFR-binding peptide
HQLFVQVEKHQGQHPKIRVKAMKVSR

SEQ ID NO: 25604 - protein, 33 aa, Artificial Sequence; identical to SEQ ID NO: 21862
  Cyclic GFR-binding peptide
  MOD_RES (32)..(32): Xaa is C or S

SEQ ID NO: 25605 - protein, 35 aa, Artificial Sequence; identical to SEQ ID NO: 21863
  Cyclic GFR-binding peptide
  MOD_RES (33)..(33): Xaa is C or S

SEQ ID NO: 25606 - protein, 30 aa, Artificial Sequence; identical to SEQ ID NO: 21864
  Cyclic GFR-binding peptide

SEQ ID NO: 25607 - protein, 39 aa, Artificial Sequence; identical to SEQ ID NO: 21865
  Cyclic GFR-binding peptide
  MOD_RES (1)..(35): Xaa is C or S

SEQ ID NO: 25608 - protein, 41 aa, Artificial Sequence; identical to SEQ ID NO: 21866
  Cyclic GFR-binding peptide
  MOD_RES (1)..(3)..(37): Xaa is C or S

SEQ ID NO: 25609 - protein, 33 aa, Artificial Sequence; identical to SEQ ID NO: 21867
  Cyclic GFR-binding peptide
  MOD_RES (2)..(4): Xaa is C or S

SEQ ID NO: 25610 - protein, 27 aa, Artificial Sequence
  Cyclic GFR-binding peptide
NHQLFSMEGIHQGQHPKIRMIQMTINS

SEQ ID NO: 25611 - protein, 37 aa, Artificial Sequence; identical to SEQ ID NO: 21869
  Cyclic GFR-binding peptide
  MOD_RES (37)..(37): Xaa is C or S

SEQ ID NO: 25612 - protein, 29 aa, Artificial Sequence
  Cyclic GFR-binding peptide
LHDELTSMEGIFIPKKRVIEMIQVTINSL

SEQ ID NO: 25613 - protein, 42 aa, Artificial Sequence; identical to SEQ ID NO: 21871
  Cyclic GFR-binding peptide
  MOD_RES (1)..(3)..(37): Xaa is C or S

SEQ ID NO: 25614 - protein, 38 aa, Artificial Sequence; identical to SEQ ID NO: 21872
  Cyclic GFR-binding peptide
  MOD_RES (35)..(35): Xaa is C or S

SEQ ID NO: 25615 - protein, 23 aa, Artificial Sequence
  Cyclic GFR-binding peptide
SMEGIHQGQHPKIRMIQMTINSQ

SEQ ID NO: 25616 - protein, 33 aa, Artificial Sequence; identical to SEQ ID NO: 21874
  Cyclic GFR-binding peptide
  MOD_RES (31)..(31): Xaa is C or S

SEQ ID NO: 25617 - protein, 38 aa, Artificial Sequence; identical to SEQ ID NO: 21875
  Cyclic GFR-binding peptide
  MOD_RES (1)..(3): Xaa is C or S

SEQ ID NO: 25618 - protein, 41 aa, Artificial Sequence; identical to SEQ ID NO: 21876
  Cyclic GFR-binding peptide
  MOD_RES (2)..(39): Xaa is C or S

SEQ ID NO: 25619 - protein, 35 aa, Artificial Sequence; identical to SEQ ID NO: 21877
  Cyclic GFR-binding peptide
  MOD_RES (32)..(32): Xaa is C or S

SEQ ID NO: 25620 - protein, 40 aa, Artificial Sequence; identical to SEQ ID NO: 21878
  Cyclic GFR-binding peptide
  MOD_RES (2)..(4): Xaa is C or S

SEQ ID NO: 25621 - protein, 31 aa, Artificial Sequence; identical to SEQ ID NO: 21879
  Cyclic GFR-binding peptide

SEQ ID NO: 25622 - protein, 30 aa, Artificial Sequence; identical to SEQ ID NO: 21880
  Cyclic GFR-binding peptide

SEQ ID NO: 25623 - protein, 37 aa, Artificial Sequence; identical to SEQ ID NO: 21881
  Cyclic GFR-binding peptide
  MOD_RES (1)..(1): Xaa is C or S

SEQ ID NO: 25624 - protein, 40 aa, Artificial Sequence; identical to SEQ ID NO: 21882
  Cyclic GFR-binding peptide
  MOD_RES (1)..(35): Xaa is C or S

SEQ ID NO: 25625 - protein, 28 aa, Artificial Sequence
  Cyclic GFR-binding peptide
HQLFSMEGIHQGQHPKIRMIQMTINSEE

SEQ ID NO: 25626 - protein, 33 aa, Artificial Sequence; identical to SEQ ID NO: 21884
  Cyclic GFR-binding peptide
  MOD_RES (1)..(3): Xaa is C or S

SEQ ID NO: 25627 - protein, 30 aa, Artificial Sequence; identical to SEQ ID NO: 21885
  Cyclic GFR-binding peptide

SEQ ID NO: 25628 - protein, 27 aa, Artificial Sequence
  Cyclic GFR-binding peptide
ELSMEGIHQGQHPKIRMIQMTINSQGT

SEQ ID NO: 25629 - protein, 38 aa, Artificial Sequence; identical to SEQ ID NO: 21887
  Cyclic GFR-binding peptide
  MOD_RES (1)..(3)..(37): Xaa is C or S

SEQ ID NO: 25630 - protein, 36 aa, Artificial Sequence; identical to SEQ ID NO: 21888
  Cyclic GFR-binding peptide
  MOD_RES (2)..(4): Xaa is C or S

SEQ ID NO: 25631 - protein, 41 aa, Artificial Sequence; identical to SEQ ID NO: 21889
  Cyclic GFR-binding peptide
  MOD_RES (2)..(4)..(38): Xaa is C or S

SEQ ID NO: 25632 - protein, 30 aa, Artificial Sequence; identical to SEQ ID NO: 21890
  Cyclic GFR-binding peptide

SEQ ID NO: 25633 - protein, 42 aa, Artificial Sequence; identical to SEQ ID NO: 21891
  Cyclic GFR-binding peptide
  MOD_RES (1)..(3)..(40): Xaa is C or S

SEQ ID NO: 25634 - protein, 37 aa, Artificial Sequence; identical to SEQ ID NO: 21892
  Cyclic GFR-binding peptide
  MOD_RES (1)..(35): Xaa is C or S

SEQ ID NO: 25635 - protein, 37 aa, Artificial Sequence; identical to SEQ ID NO: 21893
  Cyclic GFR-binding peptide
  MOD_RES (34)..(34): Xaa is C or S

SEQ ID NO: 25636 - protein, 37 aa, Artificial Sequence; identical to SEQ ID NO: 21894
  Cyclic GFR-binding peptide
  MOD_RES (1)..(3)..(37): Xaa is C or S

SEQ ID NO: 25637 - protein, 26 aa, Artificial Sequence
  Cyclic GFR-binding peptide
HQLFVTAKKHQGQHPKIRIKRMQVPR

SEQ ID NO: 25638 - protein, 39 aa, Artificial Sequence; identical to SEQ ID NO: 21896
  Cyclic GFR-binding peptide
  MOD_RES (36)..(36): Xaa is C or S

SEQ ID NO: 25639 - protein, 30 aa, Artificial Sequence; identical to SEQ ID NO: 21897
  Cyclic GFR-binding peptide

SEQ ID NO: 25640 - protein, 42 aa, Artificial Sequence; identical to SEQ ID NO: 21898
  Cyclic GFR-binding peptide
  MOD_RES (2)..(4)..(41): Xaa is C or S

SEQ ID NO: 25641 - protein, 29 aa, Artificial Sequence
  Cyclic GFR-binding peptide
  MOD_RES (28)..(28): Xaa is C or S
VTAKKHQGQHPKIRIKRMQVPREETPVXE

SEQ ID NO: 25642 - protein, 35 aa, Artificial Sequence; identical to SEQ ID NO: 21900
  Cyclic GFR-binding peptide
  MOD_RES (33)..(33): Xaa is C or S

SEQ ID NO: 25643 - protein, 23 aa, Artificial Sequence
  Cyclic GFR-binding peptide
SMEGILKPKKRVYEMIQVTINSH

SEQ ID NO: 25644 - protein, 23 aa, Artificial Sequence
  Cyclic GFR-binding peptide
TSMEGLFIPKKRVIEMIQVTINS

SEQ ID NO: 25645 - protein, 42 aa, Artificial Sequence; identical to SEQ ID NO: 21903
  Cyclic GFR-binding peptide
  MOD_RES (2)..(36): Xaa is C or S

SEQ ID NO: 25646 - protein, 31 aa, Artificial Sequence; identical to SEQ ID NO: 21904
  Cyclic GFR-binding peptide
  MOD_RES (30)..(30): Xaa is C or S

SEQ ID NO: 25647 - protein, 37 aa, Artificial Sequence; identical to SEQ ID NO: 21905
  Cyclic GFR-binding peptide
  MOD_RES (1)..(1): Xaa is C or S

SEQ ID NO: 25648 - protein, 34 aa, Artificial Sequence; identical to SEQ ID NO: 21906
  Cyclic GFR-binding peptide
  MOD_RES (31)..(31): Xaa is C or S

SEQ ID NO: 25649 - protein, 33 aa, Artificial Sequence; identical to SEQ ID NO: 21907
  Cyclic GFR-binding peptide
  MOD_RES (33)..(33): Xaa is C or S

SEQ ID NO: 25650 - protein, 26 aa, Artificial Sequence
  Cyclic GFR-binding peptide
QLFVQVEKHQGQHPKIRVKAMKVSRE

SEQ ID NO: 25651 - protein, 38 aa, Artificial Sequence; identical to SEQ ID NO: 21909
  Cyclic GFR-binding peptide
  MOD_RES (1)..(3): Xaa is C or S

SEQ ID NO: 25652 - protein, 31 aa, Artificial Sequence; identical to SEQ ID NO: 21910
  Cyclic GFR-binding peptide
  MOD_RES (28)..(28): Xaa is C or S

SEQ ID NO: 25653 - protein, 38 aa, Artificial Sequence; identical to SEQ ID NO: 21911
  Cyclic GFR-binding peptide
  MOD_RES (33)..(33): Xaa is C or S

SEQ ID NO: 25654 - protein, 40 aa, Artificial Sequence; identical to SEQ ID NO: 21912
  Cyclic GFR-binding peptide
  MOD_RES (1)..(35): Xaa is C or S

SEQ ID NO: 25655 - protein, 25 aa, Artificial Sequence
  Cyclic GFR-binding peptide
ELTSMEGLFIPKKRVIEMIQVTINS

SEQ ID NO: 25656 - protein, 29 aa, Artificial Sequence
  Cyclic GFR-binding peptide
DELTSMEGLFIPKKRVIEMIQVTINSLQV

SEQ ID NO: 25657 - protein, 39 aa, Artificial Sequence; identical to SEQ ID NO: 21915
  Cyclic GFR-binding peptide
  MOD_RES (2)..(4): Xaa is C or S

SEQ ID NO: 25658 - protein, 39 aa, Artificial Sequence; identical to SEQ ID NO: 21916
  Cyclic GFR-binding peptide
  MOD_RES (2)..(39): Xaa is C or S

SEQ ID NO: 25659 - protein, 35 aa, Artificial Sequence; identical to SEQ ID NO: 21917
  Cyclic GFR-binding peptide
  MOD_RES (30)..(30): Xaa is C or S

SEQ ID NO: 25660 - protein, 33 aa, Artificial Sequence; identical to SEQ ID NO: 21918
  Cyclic GFR-binding peptide
  MOD_RES (2)..(4): Xaa is C or S

SEQ ID NO: 25661 - protein, 37 aa, Artificial Sequence; identical to SEQ ID NO: 21919
  Cyclic GFR-binding peptide
  MOD_RES (1)..(35): Xaa is C or S

SEQ ID NO: 25662 - protein, 43 aa, Artificial Sequence; identical to SEQ ID NO: 21920
  Cyclic GFR-binding peptide
  MOD_RES (2)..(4)..(41): Xaa is C or S

SEQ ID NO: 25663 - protein, 24 aa, Artificial Sequence
  Cyclic GFR-binding peptide
LSMEGIHQGQHPKIRMIQMTINSQ

SEQ ID NO: 25664 - protein, 39 aa, Artificial Sequence; identical to SEQ ID NO: 21922
  Cyclic GFR-binding peptide
  MOD_RES (1)..(35): Xaa is C or S

SEQ ID NO: 25665 - protein, 32 aa, Artificial Sequence; identical to SEQ ID NO: 21923
  Cyclic GFR-binding peptide
  MOD_RES (2)..(2): Xaa is C or S

SEQ ID NO: 25666 - protein, 32 aa, Artificial Sequence; identical to SEQ ID NO: 21924
  Cyclic GFR-binding peptide
  MOD_RES (29)..(29): Xaa is C or S

SEQ ID NO: 25667 - protein, 33 aa, Artificial Sequence; identical to SEQ ID NO: 21925
  Cyclic GFR-binding peptide
  MOD_RES (31)..(31): Xaa is C or S

SEQ ID NO: 25668 - protein, 35 aa, Artificial Sequence; identical to SEQ ID NO: 21926
  Cyclic GFR-binding peptide
  MOD_RES (30)..(30): Xaa is C or S

SEQ ID NO: 25669 - protein, 38 aa, Artificial Sequence; identical to SEQ ID NO: 21927
  Cyclic GFR-binding peptide
  MOD_RES (2)..(4)..(38): Xaa is C or S

SEQ ID NO: 25670 - protein, 23 aa, Artificial Sequence
  Cyclic GFR-binding peptide
FSMEGIHQGQHPKIRMIQMTINS

SEQ ID NO: 25671 - protein, 39 aa, Artificial Sequence; identical to SEQ ID NO: 21929
  Cyclic GFR-binding peptide
  MOD_RES (36)..(36): Xaa is C or S

SEQ ID NO: 25672 - protein, 29 aa, Artificial Sequence
  Cyclic GFR-binding peptide
ALHDELTSMEGIFIPKKRVIEMIQVTINS

SEQ ID NO: 25673 - protein, 27 aa, Artificial Sequence
  Cyclic GFR-binding peptide
DELTVQVEKFIPKKRVIEVKAVKVSRL

SEQ ID NO: 25674 - protein, 38 aa, Artificial Sequence; identical to SEQ ID NO: 21932
  Cyclic GFR-binding peptide
  MOD_RES (1)..(3)..(37): Xaa is C or S

SEQ ID NO: 25675 - protein, 38 aa, Artificial Sequence; identical to SEQ ID NO: 21933
  Cyclic GFR-binding peptide
  MOD_RES (2)..(2): Xaa is C or S

SEQ ID NO: 25676 - protein, 28 aa, Artificial Sequence
  Cyclic GFR-binding peptide
HQLFSMEGLHQGQHPKIRMIQMTINSEE

SEQ ID NO: 25677 - protein, 35 aa, Artificial Sequence; identical to SEQ ID NO: 21935
  Cyclic GFR-binding peptide
  MOD_RES (32)..(32): Xaa is C or S

SEQ ID NO: 25678 - protein, 37 aa, Artificial Sequence; identical to SEQ ID NO: 21936
  Cyclic GFR-binding peptide
  MOD_RES (33)..(33): Xaa is C or S

SEQ ID NO: 25679 - protein, 39 aa, Artificial Sequence; identical to SEQ ID NO: 21937
  Cyclic GFR-binding peptide
  MOD_RES (2)..(36): Xaa is C or S

SEQ ID NO: 25680 - protein, 23 aa, Artificial Sequence
  Cyclic GFR-binding peptide
LSMEGIHQGQHPKIRMIQMTINS

SEQ ID NO: 25681 - protein, 36 aa, Artificial Sequence; identical to SEQ ID NO: 21939
  Cyclic GFR-binding peptide
  MOD_RES (32)..(32): Xaa is C or S

SEQ ID NO: 25682 - protein, 25 aa, Artificial Sequence
  Cyclic GFR-binding peptide
LVQVEKHQGQHPKIRVKAMKVSRQG

SEQ ID NO: 25683 - protein, 31 aa, Artificial Sequence; identical to SEQ ID NO: 21941
  Cyclic GFR-binding peptide

SEQ ID NO: 25684 - protein, 38 aa, Artificial Sequence; identical to SEQ ID NO: 21942
  Cyclic GFR-binding peptide
  MOD_RES (2)..(4): Xaa is C or S

SEQ ID NO: 25685 - protein, 35 aa, Artificial Sequence; identical to SEQ ID NO: 21943
  Cyclic GFR-binding peptide
  MOD_RES (32)..(32): Xaa is C or S

SEQ ID NO: 25686 - protein, 40 aa, Artificial Sequence; identical to SEQ ID NO: 21944
  Cyclic GFR-binding peptide
  MOD_RES (1)..(38): Xaa is C or S

SEQ ID NO: 25687 - protein, 29 aa, Artificial Sequence
  Cyclic GFR-binding peptide
HDELTSMEGIFIPKKRVIEMIQVTINSLQ

SEQ ID NO: 25688 - protein, 27 aa, Artificial Sequence
  Cyclic GFR-binding peptide
QLFSMEGLHQGQHPKIRMIQMTINSEE

SEQ ID NO: 25689 - protein, 36 aa, Artificial Sequence; identical to SEQ ID NO: 21947
  Cyclic GFR-binding peptide
  MOD_RES (2)..(4): Xaa is C or S

SEQ ID NO: 25690 - protein, 25 aa, Artificial Sequence
  Cyclic GFR-binding peptide
LTSMEGLFIPKKRVIEMIQVTINSL

SEQ ID NO: 25691 - protein, 37 aa, Artificial Sequence; identical to SEQ ID NO: 21949
  Cyclic GFR-binding peptide
  MOD_RES (1)..(3)..(37): Xaa is C or S

SEQ ID NO: 25692 - protein, 27 aa, Artificial Sequence
  Cyclic GFR-binding peptide
QLFSMEGIHQGQHPKIRMIQMTINSEE

SEQ ID NO: 25693 - protein, 23 aa, Artificial Sequence
  Cyclic GFR-binding peptide
VQVEKHQGQHPKIRVKAMKVSRQ

SEQ ID NO: 25694 - protein, 31 aa, Artificial Sequence; identical to SEQ ID NO: 21952
  Cyclic GFR-binding peptide
  MOD_RES (31)..(31): Xaa is C or S

SEQ ID NO: 25695 - protein, 39 aa, Artificial Sequence; identical to SEQ ID NO: 21953
  Cyclic GFR-binding peptide
  MOD_RES (34)..(34): Xaa is C or S

SEQ ID NO: 25696 - protein, 25 aa, Artificial Sequence
  Cyclic GFR-binding peptide
ELRSMEGILKPKKRVYEMIQVTINS

SEQ ID NO: 25697 - protein, 41 aa, Artificial Sequence; identical to SEQ ID NO: 21955
  Cyclic GFR-binding peptide
  MOD_RES (2)..(39): Xaa is C or S

SEQ ID NO: 25698 - protein, 29 aa, Artificial Sequence
  Cyclic GFR-binding peptide
  MOD_RES (1)..(1): Xaa is C or S
XKNHQLFSMEGLHQGQHPKIRMIQMTINS

SEQ ID NO: 25699 - protein, 26 aa, Artificial Sequence
  Cyclic GFR-binding peptide
LTSMEGLFIPKKRVIEMIQVTINSLQ

SEQ ID NO: 25700 - protein, 32 aa, Artificial Sequence; identical to SEQ ID NO: 21958
  Cyclic GFR-binding peptide
  MOD_RES (1)..(1): Xaa is C or S

SEQ ID NO: 25701 - protein, 39 aa, Artificial Sequence; identical to SEQ ID NO: 21959
  Cyclic GFR-binding peptide
  MOD_RES (1)..(3): Xaa is C or S

SEQ ID NO: 25702 - protein, 33 aa, Artificial Sequence; identical to SEQ ID NO: 21960
  Cyclic GFR-binding peptide
  MOD_RES (32)..(32): Xaa is C or S

SEQ ID NO: 25703 - protein, 43 aa, Artificial Sequence; identical to SEQ ID NO: 21961
  Cyclic GFR-binding peptide
  MOD_RES (1)..(3)..(40): Xaa is C or S

SEQ ID NO: 25704 - protein, 33 aa, Artificial Sequence; identical to SEQ ID NO: 21962
  Cyclic GFR-binding peptide

SEQ ID NO: 25705 - protein, 44 aa, Artificial Sequence; identical to SEQ ID NO: 21963
  Cyclic GFR-binding peptide
  MOD_RES (1)..(3)..(40): Xaa is C or S

SEQ ID NO: 25706 - protein, 44 aa, Artificial Sequence; identical to SEQ ID NO: 21964
  Cyclic GFR-binding peptide
  MOD_RES (1)..(3)..(40): Xaa is C or S

SEQ ID NO: 25707 - protein, 38 aa, Artificial Sequence; identical to SEQ ID NO: 21965
  Cyclic GFR-binding peptide
  MOD_RES (2)..(4): Xaa is C or S

SEQ ID NO: 25708 - protein, 25 aa, Artificial Sequence
  Cyclic GFR-binding peptide
QLFSMEGIHQGQHPKIRMIQMTINS

SEQ ID NO: 25709 - protein, 33 aa, Artificial Sequence; identical to SEQ ID NO: 21967
  Cyclic GFR-binding peptide

SEQ ID NO: 25710 - protein, 35 aa, Artificial Sequence; identical to SEQ ID NO: 21968
  Cyclic GFR-binding peptide
  MOD_RES (1)..(35): Xaa is C or S

SEQ ID NO: 25711 - protein, 34 aa, Artificial Sequence; identical to SEQ ID NO: 21969
  Cyclic GFR-binding peptide
  MOD_RES (1)..(3): Xaa is C or S

SEQ ID NO: 25712 - protein, 33 aa, Artificial Sequence; identical to SEQ ID NO: 21970
  Cyclic GFR-binding peptide
  MOD_RES (2)..(2): Xaa is C or S

SEQ ID NO: 25713 - protein, 39 aa, Artificial Sequence; identical to SEQ ID NO: 21971
  Cyclic GFR-binding peptide
  MOD_RES (2)..(4): Xaa is C or S

SEQ ID NO: 25714 - protein, 31 aa, Artificial Sequence; identical to SEQ ID NO: 21972
  Cyclic GFR-binding peptide

SEQ ID NO: 25715 - protein, 37 aa, Artificial Sequence; identical to SEQ ID NO: 21973
  Cyclic GFR-binding peptide
  MOD_RES (2)..(36): Xaa is C or S

SEQ ID NO: 25716 - protein, 27 aa, Artificial Sequence
  Cyclic GFR-binding peptide
HEELVTAKKHQGQHPKIRIKRMQVPRQ

SEQ ID NO: 25717 - protein, 30 aa, Artificial Sequence; identical to SEQ ID NO: 21975
  Cyclic GFR-binding peptide

SEQ ID NO: 25718 - protein, 34 aa, Artificial Sequence; identical to SEQ ID NO: 21976
  Cyclic GFR-binding peptide
  MOD_RES (34)..(34): Xaa is C or S

SEQ ID NO: 25719 - protein, 32 aa, Artificial Sequence; identical to SEQ ID NO: 21977
  Cyclic GFR-binding peptide
  MOD_RES (32)..(32): Xaa is C or S

SEQ ID NO: 25720 - protein, 37 aa, Artificial Sequence; identical to SEQ ID NO: 21978
  Cyclic GFR-binding peptide
  MOD_RES (33)..(33): Xaa is C or S

SEQ ID NO: 25721 - protein, 33 aa, Artificial Sequence; identical to SEQ ID NO: 21979
  Cyclic GFR-binding peptide
  MOD_RES (33)..(33): Xaa is C or S

SEQ ID NO: 25722 - protein, 32 aa, Artificial Sequence; identical to SEQ ID NO: 21980
  Cyclic GFR-binding peptide
  MOD_RES (1)..(1): Xaa is C or S

SEQ ID NO: 25723 - protein, 38 aa, Artificial Sequence; identical to SEQ ID NO: 21981
  Cyclic GFR-binding peptide
  MOD_RES (2)..(4): Xaa is C or S

SEQ ID NO: 25724 - protein, 34 aa, Artificial Sequence; identical to SEQ ID NO: 21982
  Cyclic GFR-binding peptide
  MOD_RES (2)..(4): Xaa is C or S

SEQ ID NO: 25725 - protein, 30 aa, Artificial Sequence; identical to SEQ ID NO: 21983
  Cyclic GFR-binding peptide
  MOD_RES (28)..(28): Xaa is C or S

SEQ ID NO: 25726 - protein, 29 aa, Artificial Sequence
  Cyclic GFR-binding peptide
KNHQLFSMEGLHQGQHPKIRMIQMTINSE

SEQ ID NO: 25727 - protein, 32 aa, Artificial Sequence; identical to SEQ ID NO: 21985
  Cyclic GFR-binding peptide

SEQ ID NO: 25728 - protein, 38 aa, Artificial Sequence; identical to SEQ ID NO: 21986
  Cyclic GFR-binding peptide
  MOD_RES (1)..(3)..(37): Xaa is C or S

SEQ ID NO: 25729 - protein, 35 aa, Artificial Sequence; identical to SEQ ID NO: 21987
  Cyclic GFR-binding peptide
  MOD_RES (2)..(4): Xaa is C or S

SEQ ID NO: 25730 - protein, 39 aa, Artificial Sequence; identical to SEQ ID NO: 21988
  Cyclic GFR-binding peptide
  MOD_RES (37)..(37): Xaa is C or S

SEQ ID NO: 25731 - protein, 27 aa, Artificial Sequence
  Cyclic GFR-binding peptide
LFVTAKKHQGQHPKIRIKRMQVPREET

SEQ ID NO: 25732 - protein, 36 aa, Artificial Sequence; identical to SEQ ID NO: 21990
  Cyclic GFR-binding peptide
  MOD_RES (33)..(33): Xaa is C or S

SEQ ID NO: 25733 - protein, 33 aa, Artificial Sequence; identical to SEQ ID NO: 21991
  Cyclic GFR-binding peptide
  MOD_RES (30)..(30): Xaa is C or S

SEQ ID NO: 25734 - protein, 25 aa, Artificial Sequence
  Cyclic GFR-binding peptide
TSMEGIFIPKKRVIEMIQVTINSLQ

SEQ ID NO: 25735 - protein, 28 aa, Artificial Sequence
  Cyclic GFR-binding peptide
LVTAKKHQGQHPKIRIKRMQVPRQGTPV

SEQ ID NO: 25736 - protein, 31 aa, Artificial Sequence; identical to SEQ ID NO: 21994
  Cyclic GFR-binding peptide

SEQ ID NO: 25737 - protein, 38 aa, Artificial Sequence; identical to SEQ ID NO: 21995
  Cyclic GFR-binding peptide
  MOD_RES (32)..(32): Xaa is C or S

SEQ ID NO: 25738 - protein, 37 aa, Artificial Sequence; identical to SEQ ID NO: 21996
  Cyclic GFR-binding peptide
  MOD_RES (1)..(3)..(37): Xaa is C or S

SEQ ID NO: 25739 - protein, 39 aa, Artificial Sequence; identical to SEQ ID NO: 21997
  Cyclic GFR-binding peptide
  MOD_RES (33)..(33): Xaa is C or S

SEQ ID NO: 25740 - protein, 36 aa, Artificial Sequence; identical to SEQ ID NO: 21998
  Cyclic GFR-binding peptide
  MOD_RES (2)..(36): Xaa is C or S

SEQ ID NO: 25741 - protein, 35 aa, Artificial Sequence; identical to SEQ ID NO: 21999
  Cyclic GFR-binding peptide
  MOD_RES (29)..(29): Xaa is C or S

SEQ ID NO: 25742 - protein, 41 aa, Artificial Sequence; identical to SEQ ID NO: 22000
  Cyclic GFR-binding peptide
  MOD_RES (1)..(35): Xaa is C or S

SEQ ID NO: 25743 - protein, 28 aa, Artificial Sequence
  Cyclic GFR-binding peptide
LHDELTSMEGLFIPKKRVIEMIQVTINS

SEQ ID NO: 25744 - protein, 36 aa, Artificial Sequence; identical to SEQ ID NO: 22002
  Cyclic GFR-binding peptide
  MOD_RES (33)..(33): Xaa is C or S

SEQ ID NO: 25745 - protein, 24 aa, Artificial Sequence
  Cyclic GFR-binding peptide
SMEGIHQGQHPKIRMIQMTINSEE

SEQ ID NO: 25746 - protein, 32 aa, Artificial Sequence; identical to SEQ ID NO: 22004
  Cyclic GFR-binding peptide
  MOD_RES (1)..(1): Xaa is C or S

SEQ ID NO: 25747 - protein, 33 aa, Artificial Sequence; identical to SEQ ID NO: 22005
  Cyclic GFR-binding peptide
  MOD_RES (30)..(30): Xaa is C or S

SEQ ID NO: 25748 - protein, 29 aa, Artificial Sequence
  Cyclic GFR-binding peptide
HDELTSMEGLFIPKKRVIEMIQVTINSLQ

SEQ ID NO: 25749 - protein, 35 aa, Artificial Sequence; identical to SEQ ID NO: 22007
  Cyclic GFR-binding peptide
  MOD_RES (1)..(3): Xaa is C or S

SEQ ID NO: 25750 - protein, 31 aa, Artificial Sequence; identical to SEQ ID NO: 22008
  Cyclic GFR-binding peptide

SEQ ID NO: 25751 - protein, 35 aa, Artificial Sequence; identical to SEQ ID NO: 22009
  Cyclic GFR-binding peptide
  MOD_RES (2)..(4): Xaa is C or S

SEQ ID NO: 25752 - protein, 43 aa, Artificial Sequence; identical to SEQ ID NO: 22010
  Cyclic GFR-binding peptide
  MOD_RES (2)..(39): Xaa is C or S

SEQ ID NO: 25753 - protein, 30 aa, Artificial Sequence; identical to SEQ ID NO: 22011
  Cyclic GFR-binding peptide

SEQ ID NO: 25754 - protein, 35 aa, Artificial Sequence; identical to SEQ ID NO: 22012
  Cyclic GFR-binding peptide
  MOD_RES (1)..(3): Xaa is C or S

SEQ ID NO: 25755 - protein, 32 aa, Artificial Sequence; identical to SEQ ID NO: 22013
  Cyclic GFR-binding peptide
  MOD_RES (2)..(4): Xaa is C or S

SEQ ID NO: 25756 - protein, 37 aa, Artificial Sequence; identical to SEQ ID NO: 22014
  Cyclic GFR-binding peptide
  MOD_RES (34)..(34): Xaa is C or S

SEQ ID NO: 25757 - protein, 37 aa, Artificial Sequence; identical to SEQ ID NO: 22015
  Cyclic GFR-binding peptide
  MOD_RES (1)..(3)..(37): Xaa is C or S

SEQ ID NO: 25758 - protein, 33 aa, Artificial Sequence; identical to SEQ ID NO: 22016
  Cyclic GFR-binding peptide
  MOD_RES (1)..(1): Xaa is C or S

SEQ ID NO: 25759 - protein, 25 aa, Artificial Sequence
  Cyclic GFR-binding peptide
ELVTAKKHQGQHPKIRIKRMQVPRQ

SEQ ID NO: 25760 - protein, 38 aa, Artificial Sequence; identical to SEQ ID NO: 22018
  Cyclic GFR-binding peptide
  MOD_RES (2)..(2): Xaa is C or S

SEQ ID NO: 25761 - protein, 41 aa, Artificial Sequence; identical to SEQ ID NO: 22019
  Cyclic GFR-binding peptide
  MOD_RES (2)..(4)..(41): Xaa is C or S

SEQ ID NO: 25762 - protein, 28 aa, Artificial Sequence
  Cyclic GFR-binding peptide
QLFSMEGIHQGQHPKIRMIQMTINSEET

SEQ ID NO: 25763 - protein, 39 aa, Artificial Sequence; identical to SEQ ID NO: 22021
  Cyclic GFR-binding peptide
  MOD_RES (2)..(4): Xaa is C or S

SEQ ID NO: 25764 - protein, 37 aa, Artificial Sequence; identical to SEQ ID NO: 22022
  Cyclic GFR-binding peptide
  MOD_RES (2)..(4): Xaa is C or S

SEQ ID NO: 25765 - protein, 28 aa, Artificial Sequence
  Cyclic GFR-binding peptide
VQVEKFIPKKRVIEVKAVKVSRLQVQTP

SEQ ID NO: 25766 - protein, 33 aa, Artificial Sequence; identical to SEQ ID NO: 22024
  Cyclic GFR-binding peptide
  MOD_RES (33)..(33): Xaa is C or S

SEQ ID NO: 25767 - protein, 44 aa, Artificial Sequence; identical to SEQ ID NO: 22025
  Cyclic GFR-binding peptide
  MOD_RES (2)..(4)..(38): Xaa is C or S

SEQ ID NO: 25768 - protein, 41 aa, Artificial Sequence; identical to SEQ ID NO: 22026
  Cyclic GFR-binding peptide
  MOD_RES (2)..(4)..(38): Xaa is C or S

SEQ ID NO: 25769 - protein, 29 aa, Artificial Sequence
  Cyclic GFR-binding peptide
LHDELTVQVEKFIPKKRVIEVKAVKVSRL

SEQ ID NO: 25770 - protein, 33 aa, Artificial Sequence; identical to SEQ ID NO: 22028
  Cyclic GFR-binding peptide
  MOD_RES (1)..(1): Xaa is C or S

SEQ ID NO: 25771 - protein, 35 aa, Artificial Sequence; identical to SEQ ID NO: 22029
  Cyclic GFR-binding peptide
  MOD_RES (1)..(35): Xaa is C or S

SEQ ID NO: 25772 - protein, 37 aa, Artificial Sequence; identical to SEQ ID NO: 22030
  Cyclic GFR-binding peptide
  MOD_RES (1)..(1): Xaa is C or S

SEQ ID NO: 25773 - protein, 35 aa, Artificial Sequence; identical to SEQ ID NO: 22031
  Cyclic GFR-binding peptide
  MOD_RES (32)..(32): Xaa is C or S

SEQ ID NO: 25774 - protein, 45 aa, Artificial Sequence; identical to SEQ ID NO: 22032
  Cyclic GFR-binding peptide
  MOD_RES (2)..(4)..(41): Xaa is C or S

SEQ ID NO: 25775 - protein, 35 aa, Artificial Sequence; identical to SEQ ID NO: 22033
  Cyclic GFR-binding peptide
  MOD_RES (34)..(34): Xaa is C or S

SEQ ID NO: 25776 - protein, 40 aa, Artificial Sequence; identical to SEQ ID NO: 22034
  Cyclic GFR-binding peptide
  MOD_RES (1)..(3)..(40): Xaa is C or S

SEQ ID NO: 25777 - protein, 33 aa, Artificial Sequence; identical to SEQ ID NO: 22035
  Cyclic GFR-binding peptide
  MOD_RES (31)..(31): Xaa is C or S

SEQ ID NO: 25778 - protein, 25 aa, Artificial Sequence
  Cyclic GFR-binding peptide
ELTSMEGIFIPKKRVIEMIQVTINS

SEQ ID NO: 25779 - protein, 33 aa, Artificial Sequence; identical to SEQ ID NO: 22037
  Cyclic GFR-binding peptide
  MOD_RES (2)..(2): Xaa is C or S

SEQ ID NO: 25780 - protein, 35 aa, Artificial Sequence; identical to SEQ ID NO: 22038
  Cyclic GFR-binding peptide
  MOD_RES (1)..(3): Xaa is C or S

SEQ ID NO: 25781 - protein, 39 aa, Artificial Sequence; identical to SEQ ID NO: 22039
  Cyclic GFR-binding peptide
  MOD_RES (1)..(3): Xaa is C or S

SEQ ID NO: 25782 - protein, 32 aa, Artificial Sequence; identical to SEQ ID NO: 22040
  Cyclic GFR-binding peptide
  MOD_RES (1)..(3): Xaa is C or S

SEQ ID NO: 25783 - protein, 32 aa, Artificial Sequence; identical to SEQ ID NO: 22041
  Cyclic GFR-binding peptide
  MOD_RES (2)..(2): Xaa is C or S

SEQ ID NO: 25784 - protein, 38 aa, Artificial Sequence; identical to SEQ ID NO: 22042
  Cyclic GFR-binding peptide
  MOD_RES (35)..(35): Xaa is C or S

SEQ ID NO: 25785 - protein, 43 aa, Artificial Sequence; identical to SEQ ID NO: 22043
  Cyclic GFR-binding peptide
  MOD_RES (1)..(3)..(37): Xaa is C or S

SEQ ID NO: 25786 - protein, 29 aa, Artificial Sequence
  Cyclic GFR-binding peptide
NHQLFSMEGLHQGQHPKIRMIQMTINSEE

SEQ ID NO: 25787 - protein, 37 aa, Artificial Sequence; identical to SEQ ID NO: 22045
  Cyclic GFR-binding peptide
  MOD_RES (33)..(33): Xaa is C or S

SEQ ID NO: 25788 - protein, 40 aa, Artificial Sequence; identical to SEQ ID NO: 22046
  Cyclic GFR-binding peptide
  MOD_RES (2)..(4)..(38): Xaa is C or S

SEQ ID NO: 25789 - protein, 32 aa, Artificial Sequence; identical to SEQ ID NO: 22047
  Cyclic GFR-binding peptide
  MOD_RES (1)..(3): Xaa is C or S

SEQ ID NO: 25790 - protein, 29 aa, Artificial Sequence
  Cyclic GFR-binding peptide
  MOD_RES (1)..(1): Xaa is C or S
XKNHQLFSMEGIHQGQHPKIRMIQMTINS

SEQ ID NO: 25791 - protein, 29 aa, Artificial Sequence
  Cyclic GFR-binding peptide
  MOD_RES (1)..(1): Xaa is C or S
XQSHEELVTAKKHQGQHPKIRIKRMQVPR

SEQ ID NO: 25792 - protein, 27 aa, Artificial Sequence
  Cyclic GFR-binding peptide
QLFVTAKKHQGQHPKIRIKRMQVPREE

SEQ ID NO: 25793 - protein, 32 aa, Artificial Sequence; identical to SEQ ID NO: 22051
  Cyclic GFR-binding peptide
  MOD_RES (32)..(32): Xaa is C or S

SEQ ID NO: 25794 - protein, 33 aa, Artificial Sequence; identical to SEQ ID NO: 22052
  Cyclic GFR-binding peptide
  MOD_RES (28)..(28): Xaa is C or S

SEQ ID NO: 25795 - protein, 33 aa, Artificial Sequence; identical to SEQ ID NO: 22053
  Cyclic GFR-binding peptide

SEQ ID NO: 25796 - protein, 36 aa, Artificial Sequence; identical to SEQ ID NO: 22054
  Cyclic GFR-binding peptide
  MOD_RES (1)..(1): Xaa is C or S

SEQ ID NO: 25797 - protein, 35 aa, Artificial Sequence; identical to SEQ ID NO: 22055
  Cyclic GFR-binding peptide
  MOD_RES (30)..(30): Xaa is C or S

SEQ ID NO: 25798 - protein, 32 aa, Artificial Sequence; identical to SEQ ID NO: 22056
  Cyclic GFR-binding peptide
  MOD_RES (29)..(29): Xaa is C or S

SEQ ID NO: 25799 - protein, 39 aa, Artificial Sequence; identical to SEQ ID NO: 22057
  Cyclic GFR-binding peptide
  MOD_RES (2)..(4): Xaa is C or S

SEQ ID NO: 25800 - protein, 41 aa, Artificial Sequence; identical to SEQ ID NO: 22058
  Cyclic GFR-binding peptide
  MOD_RES (37)..(37): Xaa is C or S

SEQ ID NO: 25801 - protein, 42 aa, Artificial Sequence; identical to SEQ ID NO: 22059
  Cyclic GFR-binding peptide
  MOD_RES (2)..(4)..(38): Xaa is C or S

SEQ ID NO: 25802 - protein, 39 aa, Artificial Sequence; identical to SEQ ID NO: 22060
  Cyclic GFR-binding peptide
  MOD_RES (1)..(38): Xaa is C or S

SEQ ID NO: 25803 - protein, 32 aa, Artificial Sequence; identical to SEQ ID NO: 22061
  Cyclic GFR-binding peptide

SEQ ID NO: 25804 - protein, 36 aa, Artificial Sequence; identical to SEQ ID NO: 22062
  Cyclic GFR-binding peptide
  MOD_RES (2)..(2): Xaa is C or S

SEQ ID NO: 25805 - protein, 34 aa, Artificial Sequence; identical to SEQ ID NO: 22063
  Cyclic GFR-binding peptide
  MOD_RES (32)..(32): Xaa is C or S

SEQ ID NO: 25806 - protein, 29 aa, Artificial Sequence
  Cyclic GFR-binding peptide
  MOD_RES (29)..(29): Xaa is C or S
LVTAKKHQGQHPKIRIKRMQVPRQGTPVX

SEQ ID NO: 25807 - protein, 43 aa, Artificial Sequence; identical to SEQ ID NO: 22065
  Cyclic GFR-binding peptide
  MOD_RES (1)..(3)..(37): Xaa is C or S

SEQ ID NO: 25808 - protein, 38 aa, Artificial Sequence; identical to SEQ ID NO: 22066
  Cyclic GFR-binding peptide
  MOD_RES (35)..(35): Xaa is C or S

SEQ ID NO: 25809 - protein, 32 aa, Artificial Sequence; identical to SEQ ID NO: 22067
  Cyclic GFR-binding peptide
  MOD_RES (1)..(3): Xaa is C or S

SEQ ID NO: 25810 - protein, 25 aa, Artificial Sequence
  Cyclic GFR-binding peptide
ELRSMEGLLKPKKRVYEMIQVTINS

SEQ ID NO: 25811 - protein, 34 aa, Artificial Sequence; identical to SEQ ID NO: 22069
  Cyclic GFR-binding peptide
  MOD_RES (1)..(3): Xaa is C or S

SEQ ID NO: 25812 - protein, 34 aa, Artificial Sequence; identical to SEQ ID NO: 22070
  Cyclic GFR-binding peptide
  MOD_RES (2)..(4): Xaa is C or S

SEQ ID NO: 25813 - protein, 29 aa, Artificial Sequence
  Cyclic GFR-binding peptide
  MOD_RES (1)..(1): Xaa is C or S
XKNHQLFVTAKKHQGQHPKIRIKRMQVPR

SEQ ID NO: 25814 - protein, 32 aa, Artificial Sequence; identical to SEQ ID NO: 22072
  Cyclic GFR-binding peptide

SEQ ID NO: 25815 - protein, 34 aa, Artificial Sequence; identical to SEQ ID NO: 22073
  Cyclic GFR-binding peptide
  MOD_RES (29)..(29): Xaa is C or S

SEQ ID NO: 25816 - protein, 29 aa, Artificial Sequence
  Cyclic GFR-binding peptide
SHEELSMEGIHQGQHPKIRMIQMTINSQG

SEQ ID NO: 25817 - protein, 39 aa, Artificial Sequence; identical to SEQ ID NO: 22075
  Cyclic GFR-binding peptide
  MOD_RES (33)..(33): Xaa is C or S

SEQ ID NO: 25818 - protein, 37 aa, Artificial Sequence; identical to SEQ ID NO: 22076
  Cyclic GFR-binding peptide
  MOD_RES (2)..(36): Xaa is C or S

SEQ ID NO: 25819 - protein, 32 aa, Artificial Sequence; identical to SEQ ID NO: 22077
  Cyclic GFR-binding peptide

SEQ ID NO: 25820 - protein, 31 aa, Artificial Sequence; identical to SEQ ID NO: 22078
  Cyclic GFR-binding peptide

SEQ ID NO: 25821 - protein, 25 aa, Artificial Sequence
  Cyclic GFR-binding peptide
LFVTAKKHQGQHPKIRIKRMQVPRE

SEQ ID NO: 25822 - protein, 36 aa, Artificial Sequence; identical to SEQ ID NO: 22080
  Cyclic GFR-binding peptide
  MOD_RES (2)..(4): Xaa is C or S

SEQ ID NO: 25823 - protein, 26 aa, Artificial Sequence
  Cyclic GFR-binding peptide
FSMEGIHQGQHPKIRMIQMTINSEET

SEQ ID NO: 25824 - protein, 34 aa, Artificial Sequence; identical to SEQ ID NO: 22082
  Cyclic GFR-binding peptide
  MOD_RES (32)..(32): Xaa is C or S

SEQ ID NO: 25825 - protein, 26 aa, Artificial Sequence
  Cyclic GFR-binding peptide
FVQVEKHQGQHPKIRVKAMKVSREET

SEQ ID NO: 25826 - protein, 29 aa, Artificial Sequence
  Cyclic GFR-binding peptide
LRSMEGILKPKKRVYEMIQVTINSHHVRS

SEQ ID NO: 25827 - protein, 26 aa, Artificial Sequence
  Cyclic GFR-binding peptide
ELSMEGIHQGQHPKIRMIQMTINSQG

SEQ ID NO: 25828 - protein, 37 aa, Artificial Sequence; identical to SEQ ID NO: 22086
  Cyclic GFR-binding peptide
  MOD_RES (33)..(33): Xaa is C or S

SEQ ID NO: 25829 - protein, 30 aa, Artificial Sequence; identical to SEQ ID NO: 22087
  Cyclic GFR-binding peptide
  MOD_RES (2)..(2): Xaa is C or S

SEQ ID NO: 25830 - protein, 28 aa, Artificial Sequence
  Cyclic GFR-binding peptide
ELTVQVEKFIPKKRVIEVKAVKVSRLQV

SEQ ID NO: 25831 - protein, 25 aa, Artificial Sequence
  Cyclic GFR-binding peptide
ELRVTAKKLKPKKRVYEIKRVQVPR

SEQ ID NO: 25832 - protein, 30 aa, Artificial Sequence; identical to SEQ ID NO: 22090
  Cyclic GFR-binding peptide

SEQ ID NO: 25833 - protein, 28 aa, Artificial Sequence
  Cyclic GFR-binding peptide
QSHEELVTAKKHQGQHPKIRIKRMQVPR

SEQ ID NO: 25834 - protein, 41 aa, Artificial Sequence; identical to SEQ ID NO: 22092
  Cyclic GFR-binding peptide
  MOD_RES (1)..(3)..(40): Xaa is C or S

SEQ ID NO: 25835 - protein, 31 aa, Artificial Sequence; identical to SEQ ID NO: 22093
  Cyclic GFR-binding peptide
  MOD_RES (2)..(2): Xaa is C or S

SEQ ID NO: 25836 - protein, 32 aa, Artificial Sequence; identical to SEQ ID NO: 22094
  Cyclic GFR-binding peptide
  MOD_RES (28)..(28): Xaa is C or S

SEQ ID NO: 25837 - protein, 41 aa, Artificial Sequence; identical to SEQ ID NO: 22095
  Cyclic GFR-binding peptide
  MOD_RES (1)..(35): Xaa is C or S

SEQ ID NO: 25838 - protein, 38 aa, Artificial Sequence; identical to SEQ ID NO: 22096
  Cyclic GFR-binding peptide
  MOD_RES (2)..(4): Xaa is C or S

SEQ ID NO: 25839 - protein, 32 aa, Artificial Sequence; identical to SEQ ID NO: 22097
  Cyclic GFR-binding peptide
  MOD_RES (32)..(32): Xaa is C or S

SEQ ID NO: 25840 - protein, 37 aa, Artificial Sequence; identical to SEQ ID NO: 22098
  Cyclic GFR-binding peptide
  MOD_RES (1)..(3): Xaa is C or S

SEQ ID NO: 25841 - protein, 37 aa, Artificial Sequence; identical to SEQ ID NO: 22099
  Cyclic GFR-binding peptide
  MOD_RES (33)..(33): Xaa is C or S

SEQ ID NO: 25842 - protein, 28 aa, Artificial Sequence
  Cyclic GFR-binding peptide
SHEELVQVEKHQGQHPKIRVKAMKVSRQ

SEQ ID NO: 25843 - protein, 30 aa, Artificial Sequence; identical to SEQ ID NO: 22101
  Cyclic GFR-binding peptide

SEQ ID NO: 25844 - protein, 23 aa, Artificial Sequence
  Cyclic GFR-binding peptide
VTAKKLKPKKRVYEIKRVQVPRH

SEQ ID NO: 25845 - protein, 41 aa, Artificial Sequence; identical to SEQ ID NO: 22103
  Cyclic GFR-binding peptide
  MOD_RES (1)..(35): Xaa is C or S

SEQ ID NO: 25846 - protein, 43 aa, Artificial Sequence; identical to SEQ ID NO: 22104
  Cyclic GFR-binding peptide
  MOD_RES (2)..(4)..(38): Xaa is C or S

SEQ ID NO: 25847 - protein, 36 aa, Artificial Sequence; identical to SEQ ID NO: 22105
  Cyclic GFR-binding peptide
  MOD_RES (2)..(2): Xaa is C or S

SEQ ID NO: 25848 - protein, 43 aa, Artificial Sequence; identical to SEQ ID NO: 22106
  Cyclic GFR-binding peptide
  MOD_RES (2)..(4)..(38): Xaa is C or S

SEQ ID NO: 25849 - protein, 36 aa, Artificial Sequence; identical to SEQ ID NO: 22107
  Cyclic GFR-binding peptide
  MOD_RES (34)..(34): Xaa is C or S

SEQ ID NO: 25850 - protein, 33 aa, Artificial Sequence; identical to SEQ ID NO: 22108
  Cyclic GFR-binding peptide
  MOD_RES (33)..(33): Xaa is C or S

SEQ ID NO: 25851 - protein, 30 aa, Artificial Sequence; identical to SEQ ID NO: 22109
  Cyclic GFR-binding peptide

SEQ ID NO: 25852 - protein, 35 aa, Artificial Sequence; identical to SEQ ID NO: 22110
  Cyclic GFR-binding peptide
  MOD_RES (30)..(30): Xaa is C or S

SEQ ID NO: 25853 - protein, 32 aa, Artificial Sequence; identical to SEQ ID NO: 22111
  Cyclic GFR-binding peptide

SEQ ID NO: 25854 - protein, 28 aa, Artificial Sequence
  Cyclic GFR-binding peptide
LTVQVEKFIPKKRVIEVKAVKVSRLQVQ

SEQ ID NO: 25855 - protein, 38 aa, Artificial Sequence; identical to SEQ ID NO: 22113
  Cyclic GFR-binding peptide
  MOD_RES (37)..(37): Xaa is C or S

SEQ ID NO: 25856 - protein, 36 aa, Artificial Sequence; identical to SEQ ID NO: 22114
  Cyclic GFR-binding peptide
  MOD_RES (1)..(3): Xaa is C or S

SEQ ID NO: 25857 - protein, 39 aa, Artificial Sequence; identical to SEQ ID NO: 22115
  Cyclic GFR-binding peptide
  MOD_RES (1)..(35): Xaa is C or S

SEQ ID NO: 25858 - protein, 33 aa, Artificial Sequence; identical to SEQ ID NO: 22116
  Cyclic GFR-binding peptide
  MOD_RES (33)..(33): Xaa is C or S

SEQ ID NO: 25859 - protein, 38 aa, Artificial Sequence; identical to SEQ ID NO: 22117
  Cyclic GFR-binding peptide
  MOD_RES (34)..(34): Xaa is C or S

SEQ ID NO: 25860 - protein, 34 aa, Artificial Sequence; identical to SEQ ID NO: 22118
  Cyclic GFR-binding peptide
  MOD_RES (30)..(30): Xaa is C or S

SEQ ID NO: 25861 - protein, 33 aa, Artificial Sequence; identical to SEQ ID NO: 22119
  Cyclic GFR-binding peptide
  MOD_RES (30)..(30): Xaa is C or S

SEQ ID NO: 25862 - protein, 28 aa, Artificial Sequence
  Cyclic GFR-binding peptide
SHEELVTAKKHQGQHPKIRIKRMQVPRQ

SEQ ID NO: 25863 - protein, 37 aa, Artificial Sequence; identical to SEQ ID NO: 22121
  Cyclic GFR-binding peptide
  MOD_RES (1)..(3): Xaa is C or S

SEQ ID NO: 25864 - protein, 35 aa, Artificial Sequence; identical to SEQ ID NO: 22122
  Cyclic GFR-binding peptide
  MOD_RES (2)..(2): Xaa is C or S

SEQ ID NO: 25865 - protein, 44 aa, Artificial Sequence; identical to SEQ ID NO: 22123
  Cyclic GFR-binding peptide
  MOD_RES (2)..(4)..(38): Xaa is C or S

SEQ ID NO: 25866 - protein, 29 aa, Artificial Sequence
  Cyclic GFR-binding peptide
  MOD_RES (28)..(28): Xaa is C or S
SMEGLHQGQHPKIRMIQMTINSEETPVXE

SEQ ID NO: 25867 - protein, 35 aa, Artificial Sequence; identical to SEQ ID NO: 22125
  Cyclic GFR-binding peptide
  MOD_RES (31)..(31): Xaa is C or S

SEQ ID NO: 25868 - protein, 34 aa, Artificial Sequence; identical to SEQ ID NO: 22126
  Cyclic GFR-binding peptide
  MOD_RES (31)..(31): Xaa is C or S

SEQ ID NO: 25869 - protein, 35 aa, Artificial Sequence; identical to SEQ ID NO: 22127
  Cyclic GFR-binding peptide
  MOD_RES (29)..(29): Xaa is C or S

SEQ ID NO: 25870 - protein, 24 aa, Artificial Sequence
  Cyclic GFR-binding peptide
FVTAKKHQGQHPKIRIKRMQVPRE

SEQ ID NO: 25871 - protein, 34 aa, Artificial Sequence; identical to SEQ ID NO: 22129
  Cyclic GFR-binding peptide
  MOD_RES (34)..(34): Xaa is C or S

SEQ ID NO: 25872 - protein, 31 aa, Artificial Sequence; identical to SEQ ID NO: 22130
  Cyclic GFR-binding peptide

SEQ ID NO: 25873 - protein, 32 aa, Artificial Sequence; identical to SEQ ID NO: 22131
  Cyclic GFR-binding peptide

SEQ ID NO: 25874 - protein, 38 aa, Artificial Sequence; identical to SEQ ID NO: 22132
  Cyclic GFR-binding peptide
  MOD_RES (1)..(3)..(37): Xaa is C or S

SEQ ID NO: 25875 - protein, 41 aa, Artificial Sequence; identical to SEQ ID NO: 22133
  Cyclic GFR-binding peptide
  MOD_RES (2)..(4)..(41): Xaa is C or S

SEQ ID NO: 25876 - protein, 42 aa, Artificial Sequence; identical to SEQ ID NO: 22134
  Cyclic GFR-binding peptide
  MOD_RES (1)..(3)..(37): Xaa is C or S

SEQ ID NO: 25877 - protein, 33 aa, Artificial Sequence; identical to SEQ ID NO: 22135
  Cyclic GFR-binding peptide

SEQ ID NO: 25878 - protein, 42 aa, Artificial Sequence; identical to SEQ ID NO: 22136
  Cyclic GFR-binding peptide
  MOD_RES (2)..(4)..(41): Xaa is C or S

SEQ ID NO: 25879 - protein, 32 aa, Artificial Sequence; identical to SEQ ID NO: 22137
  Cyclic GFR-binding peptide

SEQ ID NO: 25880 - protein, 39 aa, Artificial Sequence; identical to SEQ ID NO: 22138
  Cyclic GFR-binding peptide
  MOD_RES (34)..(34): Xaa is C or S

SEQ ID NO: 25881 - protein, 32 aa, Artificial Sequence; identical to SEQ ID NO: 22139
  Cyclic GFR-binding peptide

SEQ ID NO: 25882 - protein, 29 aa, Artificial Sequence
  Cyclic GFR-binding peptide
HQLFVQVEKHQGQHPKIRVKAMKVSREET

SEQ ID NO: 25883 - protein, 31 aa, Artificial Sequence; identical to SEQ ID NO: 22141
  Cyclic GFR-binding peptide
  MOD_RES (31)..(31): Xaa is C or S

SEQ ID NO: 25884 - protein, 32 aa, Artificial Sequence; identical to SEQ ID NO: 22142
  Cyclic GFR-binding peptide

SEQ ID NO: 25885 - protein, 35 aa, Artificial Sequence; identical to SEQ ID NO: 22143
  Cyclic GFR-binding peptide

SEQ ID NO: 25886 - protein, 32 aa, Artificial Sequence; identical to SEQ ID NO: 22144
  Cyclic GFR-binding peptide
  MOD_RES (1)..(3): Xaa is C or S

SEQ ID NO: 25887 - protein, 28 aa, Artificial Sequence
  Cyclic GFR-binding peptide
EELRSMEGILKPKKRVYEMIQVTINSHH

SEQ ID NO: 25888 - protein, 33 aa, Artificial Sequence; identical to SEQ ID NO: 22146
  Cyclic GFR-binding peptide
  MOD_RES (2)..(2): Xaa is C or S

SEQ ID NO: 25889 - protein, 28 aa, Artificial Sequence
  Cyclic GFR-binding peptide
VTAKKLKPKKRVYEIKRVQVPRHHVRSP

SEQ ID NO: 25890 - protein, 40 aa, Artificial Sequence; identical to SEQ ID NO: 22148
  Cyclic GFR-binding peptide
  MOD_RES (2)..(39): Xaa is C or S

SEQ ID NO: 25891 - protein, 29 aa, Artificial Sequence
  Cyclic GFR-binding peptide
QSHEELVTAKKHQGQHPKIRIKRMQVPRQ

SEQ ID NO: 25892 - protein, 33 aa, Artificial Sequence; identical to SEQ ID NO: 22150
  Cyclic GFR-binding peptide
  MOD_RES (1)..(1): Xaa is C or S

SEQ ID NO: 25893 - protein, 31 aa, Artificial Sequence; identical to SEQ ID NO: 22151
  Cyclic GFR-binding peptide
  MOD_RES (29)..(29): Xaa is C or S

SEQ ID NO: 25894 - protein, 27 aa, Artificial Sequence
  Cyclic GFR-binding peptide
EELRSMEGILKPKKRVYEMIQVTINSH

SEQ ID NO: 25895 - protein, 37 aa, Artificial Sequence; identical to SEQ ID NO: 22153
  Cyclic GFR-binding peptide
  MOD_RES (2)..(4): Xaa is C or S

SEQ ID NO: 25896 - protein, 27 aa, Artificial Sequence
  Cyclic GFR-binding peptide
VTAKKLKPKKRVYEIKRVQVPRHHVRS

SEQ ID NO: 25897 - protein, 34 aa, Artificial Sequence; identical to SEQ ID NO: 22155
  Cyclic GFR-binding peptide
  MOD_RES (34)..(34): Xaa is C or S

SEQ ID NO: 25898 - protein, 37 aa, Artificial Sequence; identical to SEQ ID NO: 22156
  Cyclic GFR-binding peptide
  MOD_RES (2)..(4): Xaa is C or S

SEQ ID NO: 25899 - protein, 25 aa, Artificial Sequence
  Cyclic GFR-binding peptide
FSMEGIHQGQHPKIRMIQMTINSEE

SEQ ID NO: 25900 - protein, 33 aa, Artificial Sequence; identical to SEQ ID NO: 22158
  Cyclic GFR-binding peptide
  MOD_RES (1)..(1): Xaa is C or S

SEQ ID NO: 25901 - protein, 22 aa, Artificial Sequence
  Cyclic GFR-binding peptide
VQVEKFIPKKRVIEVKAVKVSR

SEQ ID NO: 25902 - protein, 30 aa, Artificial Sequence; identical to SEQ ID NO: 22160
  Cyclic GFR-binding peptide
  MOD_RES (1)..(1): Xaa is C or S

SEQ ID NO: 25903 - protein, 31 aa, Artificial Sequence; identical to SEQ ID NO: 22161
  Cyclic GFR-binding peptide

SEQ ID NO: 25904 - protein, 34 aa, Artificial Sequence; identical to SEQ ID NO: 22162
  Cyclic GFR-binding peptide
  MOD_RES (2)..(4): Xaa is C or S

SEQ ID NO: 25905 - protein, 33 aa, Artificial Sequence; identical to SEQ ID NO: 22163
  Cyclic GFR-binding peptide
  MOD_RES (33)..(33): Xaa is C or S

SEQ ID NO: 25906 - protein, 35 aa, Artificial Sequence; identical to SEQ ID NO: 22164
  Cyclic GFR-binding peptide
  MOD_RES (2)..(4): Xaa is C or S

SEQ ID NO: 25907 - protein, 32 aa, Artificial Sequence; identical to SEQ ID NO: 22165
  Cyclic GFR-binding peptide

SEQ ID NO: 25908 - protein, 38 aa, Artificial Sequence; identical to SEQ ID NO: 22166
  Cyclic GFR-binding peptide
  MOD_RES (32)..(32): Xaa is C or S

SEQ ID NO: 25909 - protein, 41 aa, Artificial Sequence; identical to SEQ ID NO: 22167
  Cyclic GFR-binding peptide
  MOD_RES (2)..(4)..(38): Xaa is C or S

SEQ ID NO: 25910 - protein, 31 aa, Artificial Sequence; identical to SEQ ID NO: 22168
  Cyclic GFR-binding peptide

SEQ ID NO: 25911 - protein, 34 aa, Artificial Sequence; identical to SEQ ID NO: 22169
  Cyclic GFR-binding peptide
  MOD_RES (28)..(28): Xaa is C or S

SEQ ID NO: 25912 - protein, 41 aa, Artificial Sequence; identical to SEQ ID NO: 22170
  Cyclic GFR-binding peptide
  MOD_RES (1)..(35): Xaa is C or S

SEQ ID NO: 25913 - protein, 36 aa, Artificial Sequence; identical to SEQ ID NO: 22171
  Cyclic GFR-binding peptide
  MOD_RES (32)..(32): Xaa is C or S

SEQ ID NO: 25914 - protein, 34 aa, Artificial Sequence; identical to SEQ ID NO: 22172
  Cyclic GFR-binding peptide
  MOD_RES (30)..(30): Xaa is C or S

SEQ ID NO: 25915 - protein, 30 aa, Artificial Sequence; identical to SEQ ID NO: 22173
  Cyclic GFR-binding peptide

SEQ ID NO: 25916 - protein, 35 aa, Artificial Sequence; identical to SEQ ID NO: 22174
  Cyclic GFR-binding peptide
  MOD_RES (33)..(33): Xaa is C or S

SEQ ID NO: 25917 - protein, 29 aa, Artificial Sequence
  Cyclic GFR-binding peptide
LHEELRSMEGLLKPKKRVYEMIQVTINSH

SEQ ID NO: 25918 - protein, 28 aa, Artificial Sequence
  Cyclic GFR-binding peptide
QSHEELVQVEKHQGQHPKIRVKAMKVSR

SEQ ID NO: 25919 - protein, 39 aa, Artificial Sequence; identical to SEQ ID NO: 22177
  Cyclic GFR-binding peptide
  MOD_RES (2)..(4): Xaa is C or S

SEQ ID NO: 25920 - protein, 33 aa, Artificial Sequence; identical to SEQ ID NO: 22178
  Cyclic GFR-binding peptide
  MOD_RES (2)..(4): Xaa is C or S

SEQ ID NO: 25921 - protein, 34 aa, Artificial Sequence; identical to SEQ ID NO: 22179
  Cyclic GFR-binding peptide
  MOD_RES (28)..(28): Xaa is C or S

SEQ ID NO: 25922 - protein, 32 aa, Artificial Sequence; identical to SEQ ID NO: 22180
  Cyclic GFR-binding peptide
  MOD_RES (2)..(4): Xaa is C or S

SEQ ID NO: 25923 - protein, 40 aa, Artificial Sequence; identical to SEQ ID NO: 22181
  Cyclic GFR-binding peptide
  MOD_RES (1)..(3)..(37): Xaa is C or S

SEQ ID NO: 25924 - protein, 25 aa, Artificial Sequence
  Cyclic GFR-binding peptide
FSMEGLHQGQHPKIRMIQMTINSEE

SEQ ID NO: 25925 - protein, 30 aa, Artificial Sequence; identical to SEQ ID NO: 22183
  Cyclic GFR-binding peptide

SEQ ID NO: 25926 - protein, 33 aa, Artificial Sequence; identical to SEQ ID NO: 22184
  Cyclic GFR-binding peptide
  MOD_RES (1)..(3): Xaa is C or S

SEQ ID NO: 25927 - protein, 33 aa, Artificial Sequence; identical to SEQ ID NO: 22185
  Cyclic GFR-binding peptide
  MOD_RES (32)..(32): Xaa is C or S

SEQ ID NO: 25928 - protein, 32 aa, Artificial Sequence; identical to SEQ ID NO: 22186
  Cyclic GFR-binding peptide
  MOD_RES (1)..(3): Xaa is C or S

SEQ ID NO: 25929 - protein, 34 aa, Artificial Sequence; identical to SEQ ID NO: 22187
  Cyclic GFR-binding peptide
  MOD_RES (2)..(2): Xaa is C or S

SEQ ID NO: 25930 - protein, 41 aa, Artificial Sequence; identical to SEQ ID NO: 22188
  Cyclic GFR-binding peptide
  MOD_RES (1)..(3)..(37): Xaa is C or S

SEQ ID NO: 25931 - protein, 36 aa, Artificial Sequence; identical to SEQ ID NO: 22189
  Cyclic GFR-binding peptide
  MOD_RES (36)..(36): Xaa is C or S

SEQ ID NO: 25932 - protein, 34 aa, Artificial Sequence; identical to SEQ ID NO: 22190
  Cyclic GFR-binding peptide
  MOD_RES (1)..(1): Xaa is C or S

SEQ ID NO: 25933 - protein, 26 aa, Artificial Sequence
  Cyclic GFR-binding peptide
HEELVTAKKHQGQHPKIRIKRMQVPR

SEQ ID NO: 25934 - protein, 38 aa, Artificial Sequence; identical to SEQ ID NO: 22192
  Cyclic GFR-binding peptide
  MOD_RES (2)..(4): Xaa is C or S

SEQ ID NO: 25935 - protein, 30 aa, Artificial Sequence; identical to SEQ ID NO: 22193
  Cyclic GFR-binding peptide
  MOD_RES (1)..(1): Xaa is C or S

SEQ ID NO: 25936 - protein, 36 aa, Artificial Sequence; identical to SEQ ID NO: 22194
  Cyclic GFR-binding peptide
  MOD_RES (34)..(34): Xaa is C or S

SEQ ID NO: 25937 - protein, 26 aa, Artificial Sequence
  Cyclic GFR-binding peptide
FSMEGLHQGQHPKIRMIQMTINSEET

SEQ ID NO: 25938 - protein, 33 aa, Artificial Sequence; identical to SEQ ID NO: 22196
  Cyclic GFR-binding peptide

SEQ ID NO: 25939 - protein, 31 aa, Artificial Sequence; identical to SEQ ID NO: 22197
  Cyclic GFR-binding peptide

SEQ ID NO: 25940 - protein, 29 aa, Artificial Sequence
  Cyclic GFR-binding peptide
  MOD_RES (28)..(28): Xaa is C or S
VTAKKHQGQHPKIRIKRMQVPRQGTPVXE

SEQ ID NO: 25941 - protein, 31 aa, Artificial Sequence; identical to SEQ ID NO: 22199
  Cyclic GFR-binding peptide

SEQ ID NO: 25942 - protein, 34 aa, Artificial Sequence; identical to SEQ ID NO: 22200
  Cyclic GFR-binding peptide
  MOD_RES (2)..(2): Xaa is C or S

SEQ ID NO: 25943 - protein, 36 aa, Artificial Sequence; identical to SEQ ID NO: 22201
  Cyclic GFR-binding peptide
  MOD_RES (2)..(36): Xaa is C or S

SEQ ID NO: 25944 - protein, 35 aa, Artificial Sequence; identical to SEQ ID NO: 22202
  Cyclic GFR-binding peptide

SEQ ID NO: 25945 - protein, 28 aa, Artificial Sequence
  Cyclic GFR-binding peptide
QLFVTAKKHQGQHPKIRIKRMQVPREET

SEQ ID NO: 25946 - protein, 44 aa, Artificial Sequence; identical to SEQ ID NO: 22204
  Cyclic GFR-binding peptide
  MOD_RES (2)..(4)..(38): Xaa is C or S

SEQ ID NO: 25947 - protein, 36 aa, Artificial Sequence; identical to SEQ ID NO: 22205
  Cyclic GFR-binding peptide
  MOD_RES (2)..(4): Xaa is C or S

SEQ ID NO: 25948 - protein, 26 aa, Artificial Sequence
  Cyclic GFR-binding peptide
DELTVQVEKFIPKKRVIEVKAVKVSR

SEQ ID NO: 25949 - protein, 30 aa, Artificial Sequence; identical to SEQ ID NO: 22207
  Cyclic GFR-binding peptide
  MOD_RES (30)..(30): Xaa is C or S

SEQ ID NO: 25950 - protein, 32 aa, Artificial Sequence; identical to SEQ ID NO: 22208
  Cyclic GFR-binding peptide
  MOD_RES (30)..(30): Xaa is C or S

SEQ ID NO: 25951 - protein, 33 aa, Artificial Sequence; identical to SEQ ID NO: 22209
  Cyclic GFR-binding peptide
  MOD_RES (30)..(30): Xaa is C or S

SEQ ID NO: 25952 - protein, 31 aa, Artificial Sequence; identical to SEQ ID NO: 22210
  Cyclic GFR-binding peptide
  MOD_RES (2)..(2): Xaa is C or S

SEQ ID NO: 25953 - protein, 34 aa, Artificial Sequence; identical to SEQ ID NO: 22211
  Cyclic GFR-binding peptide

SEQ ID NO: 25954 - protein, 37 aa, Artificial Sequence; identical to SEQ ID NO: 22212
  Cyclic GFR-binding peptide
  MOD_RES (32)..(32): Xaa is C or S

SEQ ID NO: 25955 - protein, 36 aa, Artificial Sequence; identical to SEQ ID NO: 22213
  Cyclic GFR-binding peptide
  MOD_RES (33)..(33): Xaa is C or S

SEQ ID NO: 25956 - protein, 38 aa, Artificial Sequence; identical to SEQ ID NO: 22214
  Cyclic GFR-binding peptide
  MOD_RES (1)..(35): Xaa is C or S

SEQ ID NO: 25957 - protein, 32 aa, Artificial Sequence; identical to SEQ ID NO: 22215
  Cyclic GFR-binding peptide

SEQ ID NO: 25958 - protein, 29 aa, Artificial Sequence
  Cyclic GFR-binding peptide
QSHEELSMEGIHQGQHPKIRMIQMTINSQ

SEQ ID NO: 25959 - protein, 32 aa, Artificial Sequence; identical to SEQ ID NO: 22217
  Cyclic GFR-binding peptide
  MOD_RES (2)..(4): Xaa is C or S

SEQ ID NO: 25960 - protein, 32 aa, Artificial Sequence; identical to SEQ ID NO: 22218
  Cyclic GFR-binding peptide
  MOD_RES (31)..(31): Xaa is C or S

SEQ ID NO: 25961 - protein, 37 aa, Artificial Sequence; identical to SEQ ID NO: 22219
  Cyclic GFR-binding peptide
  MOD_RES (34)..(34): Xaa is C or S

SEQ ID NO: 25962 - protein, 36 aa, Artificial Sequence; identical to SEQ ID NO: 22220
  Cyclic GFR-binding peptide
  MOD_RES (32)..(32): Xaa is C or S

SEQ ID NO: 25963 - protein, 42 aa, Artificial Sequence; identical to SEQ ID NO: 22221
  Cyclic GFR-binding peptide
  MOD_RES (1)..(3)..(40): Xaa is C or S

SEQ ID NO: 25964 - protein, 33 aa, Artificial Sequence; identical to SEQ ID NO: 22222
  Cyclic GFR-binding peptide
  MOD_RES (2)..(2): Xaa is C or S

SEQ ID NO: 25965 - protein, 42 aa, Artificial Sequence; identical to SEQ ID NO: 22223
  Cyclic GFR-binding peptide
  MOD_RES (1)..(3)..(37): Xaa is C or S

SEQ ID NO: 25966 - protein, 25 aa, Artificial Sequence
  Cyclic GFR-binding peptide
QLFSMEGLHQGQHPKIRMIQMTINS

SEQ ID NO: 25967 - protein, 41 aa, Artificial Sequence; identical to SEQ ID NO: 22225
  Cyclic GFR-binding peptide
  MOD_RES (37)..(37): Xaa is C or S

SEQ ID NO: 25968 - protein, 38 aa, Artificial Sequence; identical to SEQ ID NO: 22226
  Cyclic GFR-binding peptide
  MOD_RES (1)..(3): Xaa is C or S

SEQ ID NO: 25969 - protein, 24 aa, Artificial Sequence
  Cyclic GFR-binding peptide
ELSMEGIHQGQHPKIRMIQMTINS

SEQ ID NO: 25970 - protein, 36 aa, Artificial Sequence; identical to SEQ ID NO: 22228
  Cyclic GFR-binding peptide
  MOD_RES (33)..(33): Xaa is C or S

SEQ ID NO: 25971 - protein, 32 aa, Artificial Sequence; identical to SEQ ID NO: 22229
  Cyclic GFR-binding peptide
  MOD_RES (1)..(1): Xaa is C or S

SEQ ID NO: 25972 - protein, 28 aa, Artificial Sequence
  Cyclic GFR-binding peptide
SMEGLFIPKKRVIEMIQVTINSLQVQTP

SEQ ID NO: 25973 - protein, 37 aa, Artificial Sequence; identical to SEQ ID NO: 22231
  Cyclic GFR-binding peptide
  MOD_RES (36)..(36): Xaa is C or S

SEQ ID NO: 25974 - protein, 25 aa, Artificial Sequence
  Cyclic GFR-binding peptide
VQVEKFIPKKRVIEVKAVKVSRLQV

SEQ ID NO: 25975 - protein, 43 aa, Artificial Sequence; identical to SEQ ID NO: 22233
  Cyclic GFR-binding peptide
  MOD_RES (1)..(3)..(40): Xaa is C or S

SEQ ID NO: 25976 - protein, 36 aa, Artificial Sequence; identical to SEQ ID NO: 22234
  Cyclic GFR-binding peptide
  MOD_RES (33)..(33): Xaa is C or S

SEQ ID NO: 25977 - protein, 28 aa, Artificial Sequence
  Cyclic GFR-binding peptide
  MOD_RES (28)..(28): Xaa is C or S
VTAKKHQGQHPKIRIKRMQVPRQGTPVX

SEQ ID NO: 25978 - protein, 25 aa, Artificial Sequence
  Cyclic GFR-binding peptide
VTAKKHQGQHPKIRIKRMQVPREET

SEQ ID NO: 25979 - protein, 23 aa, Artificial Sequence
  Cyclic GFR-binding peptide
TVQVEKFIPKKRVIEVKAVKVSR

SEQ ID NO: 25980 - protein, 32 aa, Artificial Sequence; identical to SEQ ID NO: 22238
  Cyclic GFR-binding peptide
  MOD_RES (30)..(30): Xaa is C or S

SEQ ID NO: 25981 - protein, 31 aa, Artificial Sequence; identical to SEQ ID NO: 22239
  Cyclic GFR-binding peptide
  MOD_RES (2)..(2): Xaa is C or S

SEQ ID NO: 25982 - protein, 29 aa, Artificial Sequence
  Cyclic GFR-binding peptide
ELTVQVEKFIPKKRVIEVKAVKVSRLQVQ

SEQ ID NO: 25983 - protein, 39 aa, Artificial Sequence; identical to SEQ ID NO: 22241
  Cyclic GFR-binding peptide
  MOD_RES (37)..(37): Xaa is C or S

SEQ ID NO: 25984 - protein, 35 aa, Artificial Sequence; identical to SEQ ID NO: 22242
  Cyclic GFR-binding peptide
  MOD_RES (2)..(4): Xaa is C or S

SEQ ID NO: 25985 - protein, 41 aa, Artificial Sequence; identical to SEQ ID NO: 22243
  Cyclic GFR-binding peptide
  MOD_RES (2)..(36): Xaa is C or S

SEQ ID NO: 25986 - protein, 25 aa, Artificial Sequence
  Cyclic GFR-binding peptide
SMEGLLKPKKRVYEMIQVTINSHHV

SEQ ID NO: 25987 - protein, 32 aa, Artificial Sequence; identical to SEQ ID NO: 22245
  Cyclic GFR-binding peptide
  MOD_RES (1)..(3): Xaa is C or S

SEQ ID NO: 25988 - protein, 36 aa, Artificial Sequence; identical to SEQ ID NO: 22246
  Cyclic GFR-binding peptide
  MOD_RES (33)..(33): Xaa is C or S

SEQ ID NO: 25989 - protein, 37 aa, Artificial Sequence; identical to SEQ ID NO: 22247
  Cyclic GFR-binding peptide
  MOD_RES (31)..(31): Xaa is C or S

SEQ ID NO: 25990 - protein, 30 aa, Artificial Sequence; identical to SEQ ID NO: 22248
  Cyclic GFR-binding peptide

SEQ ID NO: 25991 - protein, 32 aa, Artificial Sequence; identical to SEQ ID NO: 22249
  Cyclic GFR-binding peptide

SEQ ID NO: 25992 - protein, 38 aa, Artificial Sequence; identical to SEQ ID NO: 22250
  Cyclic GFR-binding peptide
  MOD_RES (1)..(3)..(37): Xaa is C or S

SEQ ID NO: 25993 - protein, 29 aa, Artificial Sequence
  Cyclic GFR-binding peptide
ELVTAKKHQGQHPKIRIKRMQVPRQGTPV

SEQ ID NO: 25994 - protein, 32 aa, Artificial Sequence; identical to SEQ ID NO: 22252
  Cyclic GFR-binding peptide
  MOD_RES (1)..(3): Xaa is C or S

SEQ ID NO: 25995 - protein, 33 aa, Artificial Sequence; identical to SEQ ID NO: 22253
  Cyclic GFR-binding peptide
  MOD_RES (33)..(33): Xaa is C or S

SEQ ID NO: 25996 - protein, 27 aa, Artificial Sequence
  Cyclic GFR-binding peptide
VQVEKFIPKKRVIEVKAVKVSRLQVQT

SEQ ID NO: 25997 - protein, 34 aa, Artificial Sequence; identical to SEQ ID NO: 22255
  Cyclic GFR-binding peptide
  MOD_RES (1)..(1): Xaa is C or S

SEQ ID NO: 25998 - protein, 31 aa, Artificial Sequence; identical to SEQ ID NO: 22256
  Cyclic GFR-binding peptide
  MOD_RES (28)..(28): Xaa is C or S

SEQ ID NO: 25999 - protein, 32 aa, Artificial Sequence; identical to SEQ ID NO: 22257
  Cyclic GFR-binding peptide
  MOD_RES (31)..(31): Xaa is C or S

SEQ ID NO: 26000 - protein, 37 aa, Artificial Sequence; identical to SEQ ID NO: 22258
  Cyclic GFR-binding peptide
  MOD_RES (36)..(36): Xaa is C or S

SEQ ID NO: 26001 - protein, 36 aa, Artificial Sequence; identical to SEQ ID NO: 22259
  Cyclic GFR-binding peptide

SEQ ID NO: 26002 - protein, 44 aa, Artificial Sequence; identical to SEQ ID NO: 22260
  Cyclic GFR-binding peptide
  MOD_RES (2)..(4)..(41): Xaa is C or S

SEQ ID NO: 26003 - protein, 32 aa, Artificial Sequence; identical to SEQ ID NO: 22261
  Cyclic GFR-binding peptide
  MOD_RES (2)..(4): Xaa is C or S

SEQ ID NO: 26004 - protein, 28 aa, Artificial Sequence
  Cyclic GFR-binding peptide
HEELVQVEKHQGQHPKIRVKAMKVSRQG

SEQ ID NO: 26005 - protein, 36 aa, Artificial Sequence; identical to SEQ ID NO: 22263
  Cyclic GFR-binding peptide
  MOD_RES (33)..(33): Xaa is C or S

SEQ ID NO: 26006 - protein, 33 aa, Artificial Sequence; identical to SEQ ID NO: 22264
  Cyclic GFR-binding peptide

SEQ ID NO: 26007 - protein, 32 aa, Artificial Sequence; identical to SEQ ID NO: 22265
  Cyclic GFR-binding peptide

SEQ ID NO: 26008 - protein, 30 aa, Artificial Sequence; identical to SEQ ID NO: 22266
  Cyclic GFR-binding peptide
  MOD_RES (1)..(1): Xaa is C or S

SEQ ID NO: 26009 - protein, 34 aa, Artificial Sequence; identical to SEQ ID NO: 22267
  Cyclic GFR-binding peptide
  MOD_RES (2)..(2): Xaa is C or S

SEQ ID NO: 26010 - protein, 40 aa, Artificial Sequence; identical to SEQ ID NO: 22268
  Cyclic GFR-binding peptide
  MOD_RES (2)..(4)..(38): Xaa is C or S

SEQ ID NO: 26011 - protein, 34 aa, Artificial Sequence; identical to SEQ ID NO: 22269
  Cyclic GFR-binding peptide
  MOD_RES (32)..(32): Xaa is C or S

SEQ ID NO: 26012 - protein, 25 aa, Artificial Sequence
  Cyclic GFR-binding peptide
LRSMEGLLKPKKRVYEMIQVTINSH

SEQ ID NO: 26013 - protein, 24 aa, Artificial Sequence
  Cyclic GFR-binding peptide
LFSMEGLHQGQHPKIRMIQMTINS

SEQ ID NO: 26014 - protein, 37 aa, Artificial Sequence; identical to SEQ ID NO: 22272
  Cyclic GFR-binding peptide
  MOD_RES (36)..(36): Xaa is C or S

SEQ ID NO: 26015 - protein, 37 aa, Artificial Sequence; identical to SEQ ID NO: 22273
  Cyclic GFR-binding peptide
  MOD_RES (2)..(2): Xaa is C or S

SEQ ID NO: 26016 - protein, 27 aa, Artificial Sequence
  Cyclic GFR-binding peptide
VTAKKHQGQHPKIRIKRMQVPRQGTPV

SEQ ID NO: 26017 - protein, 44 aa, Artificial Sequence; identical to SEQ ID NO: 22275
  Cyclic GFR-binding peptide
  MOD_RES (2)..(4)..(38): Xaa is C or S

SEQ ID NO: 26018 - protein, 36 aa, Artificial Sequence; identical to SEQ ID NO: 22276
  Cyclic GFR-binding peptide
  MOD_RES (36)..(36): Xaa is C or S

SEQ ID NO: 26019 - protein, 35 aa, Artificial Sequence; identical to SEQ ID NO: 22277
  Cyclic GFR-binding peptide
  MOD_RES (35)..(35): Xaa is C or S

SEQ ID NO: 26020 - protein, 36 aa, Artificial Sequence; identical to SEQ ID NO: 22278
  Cyclic GFR-binding peptide
  MOD_RES (2)..(4): Xaa is C or S

SEQ ID NO: 26021 - protein, 28 aa, Artificial Sequence
  Cyclic GFR-binding peptide
DELTSMEGIFIPKKRVIEMIQVTINSLQ

SEQ ID NO: 26022 - protein, 36 aa, Artificial Sequence; identical to SEQ ID NO: 22280
  Cyclic GFR-binding peptide
  MOD_RES (32)..(32): Xaa is C or S

SEQ ID NO: 26023 - protein, 25 aa, Artificial Sequence
  Cyclic GFR-binding peptide
VTAKKHQGQHPKIRIKRMQVPRQGT

SEQ ID NO: 26024 - protein, 35 aa, Artificial Sequence; identical to SEQ ID NO: 22282
  Cyclic GFR-binding peptide
  MOD_RES (2)..(4): Xaa is C or S

SEQ ID NO: 26025 - protein, 37 aa, Artificial Sequence; identical to SEQ ID NO: 22283
  Cyclic GFR-binding peptide
  MOD_RES (1)..(1): Xaa is C or S

SEQ ID NO: 26026 - protein, 27 aa, Artificial Sequence
  Cyclic GFR-binding peptide
VTAKKHQGQHPKIRIKRMQVPREETPV

SEQ ID NO: 26027 - protein, 43 aa, Artificial Sequence; identical to SEQ ID NO: 22285
  Cyclic GFR-binding peptide
  MOD_RES (2)..(4)..(41): Xaa is C or S

SEQ ID NO: 26028 - protein, 29 aa, Artificial Sequence
  Cyclic GFR-binding peptide
QLFSMEGIHQGQHPKIRMIQMTINSEETP

SEQ ID NO: 26029 - protein, 34 aa, Artificial Sequence; identical to SEQ ID NO: 22287
  Cyclic GFR-binding peptide

SEQ ID NO: 26030 - protein, 31 aa, Artificial Sequence; identical to SEQ ID NO: 22288
  Cyclic GFR-binding peptide

SEQ ID NO: 26031 - protein, 37 aa, Artificial Sequence; identical to SEQ ID NO: 22289
  Cyclic GFR-binding peptide
  MOD_RES (34)..(34): Xaa is C or S

SEQ ID NO: 26032 - protein, 34 aa, Artificial Sequence; identical to SEQ ID NO: 22290
  Cyclic GFR-binding peptide
  MOD_RES (2)..(2): Xaa is C or S

SEQ ID NO: 26033 - protein, 37 aa, Artificial Sequence; identical to SEQ ID NO: 22291
  Cyclic GFR-binding peptide
  MOD_RES (1)..(35): Xaa is C or S

SEQ ID NO: 26034 - protein, 25 aa, Artificial Sequence
  Cyclic GFR-binding peptide
LTSMEGIFIPKKRVIEMIQVTINSL

SEQ ID NO: 26035 - protein, 37 aa, Artificial Sequence; identical to SEQ ID NO: 22293
  Cyclic GFR-binding peptide
  MOD_RES (2)..(4): Xaa is C or S

SEQ ID NO: 26036 - protein, 33 aa, Artificial Sequence; identical to SEQ ID NO: 22294
  Cyclic GFR-binding peptide
  MOD_RES (2)..(4): Xaa is C or S

SEQ ID NO: 26037 - protein, 30 aa, Artificial Sequence; identical to SEQ ID NO: 22295
  Cyclic GFR-binding peptide
  MOD_RES (28)..(28): Xaa is C or S

SEQ ID NO: 26038 - protein, 42 aa, Artificial Sequence; identical to SEQ ID NO: 22296
  Cyclic GFR-binding peptide
  MOD_RES (1)..(3)..(37): Xaa is C or S

SEQ ID NO: 26039 - protein, 39 aa, Artificial Sequence; identical to SEQ ID NO: 22297
  Cyclic GFR-binding peptide
  MOD_RES (1)..(3): Xaa is C or S

SEQ ID NO: 26040 - protein, 32 aa, Artificial Sequence; identical to SEQ ID NO: 22298
  Cyclic GFR-binding peptide

SEQ ID NO: 26041 - protein, 36 aa, Artificial Sequence; identical to SEQ ID NO: 22299
  Cyclic GFR-binding peptide
  MOD_RES (31)..(31): Xaa is C or S

SEQ ID NO: 26042 - protein, 26 aa, Artificial Sequence
  Cyclic GFR-binding peptide
EELVQVEKHQGQHPKIRVKAMKVSRQ

SEQ ID NO: 26043 - protein, 35 aa, Artificial Sequence; identical to SEQ ID NO: 22301
  Cyclic GFR-binding peptide
  MOD_RES (35)..(35): Xaa is C or S

SEQ ID NO: 26044 - protein, 34 aa, Artificial Sequence; identical to SEQ ID NO: 22302
  Cyclic GFR-binding peptide
  MOD_RES (2)..(4): Xaa is C or S

SEQ ID NO: 26045 - protein, 36 aa, Artificial Sequence; identical to SEQ ID NO: 22303
  Cyclic GFR-binding peptide
  MOD_RES (33)..(33): Xaa is C or S

SEQ ID NO: 26046 - protein, 36 aa, Artificial Sequence; identical to SEQ ID NO: 22304
  Cyclic GFR-binding peptide
  MOD_RES (34)..(34): Xaa is C or S

SEQ ID NO: 26047 - protein, 38 aa, Artificial Sequence; identical to SEQ ID NO: 22305
  Cyclic GFR-binding peptide
  MOD_RES (2)..(4)..(38): Xaa is C or S

SEQ ID NO: 26048 - protein, 34 aa, Artificial Sequence; identical to SEQ ID NO: 22306
  Cyclic GFR-binding peptide
  MOD_RES (33)..(33): Xaa is C or S

SEQ ID NO: 26049 - protein, 43 aa, Artificial Sequence; identical to SEQ ID NO: 22307
  Cyclic GFR-binding peptide
  MOD_RES (2)..(4)..(41): Xaa is C or S

SEQ ID NO: 26050 - protein, 29 aa, Artificial Sequence
  Cyclic GFR-binding peptide
LFVQVEKHQGQHPKIRVKAMKVSREETPV

SEQ ID NO: 26051 - protein, 30 aa, Artificial Sequence; identical to SEQ ID NO: 22309
  Cyclic GFR-binding peptide

SEQ ID NO: 26052 - protein, 36 aa, Artificial Sequence; identical to SEQ ID NO: 22310
  Cyclic GFR-binding peptide
  MOD_RES (2)..(4): Xaa is C or S

SEQ ID NO: 26053 - protein, 38 aa, Artificial Sequence; identical to SEQ ID NO: 22311
  Cyclic GFR-binding peptide
  MOD_RES (36)..(36): Xaa is C or S

SEQ ID NO: 26054 - protein, 35 aa, Artificial Sequence; identical to SEQ ID NO: 22312
  Cyclic GFR-binding peptide

SEQ ID NO: 26055 - protein, 33 aa, Artificial Sequence; identical to SEQ ID NO: 22313
  Cyclic GFR-binding peptide
  MOD_RES (29)..(29): Xaa is C or S

SEQ ID NO: 26056 - protein, 42 aa, Artificial Sequence; identical to SEQ ID NO: 22314
  Cyclic GFR-binding peptide
  MOD_RES (2)..(39): Xaa is C or S

SEQ ID NO: 26057 - protein, 22 aa, Artificial Sequence
  Cyclic GFR-binding peptide
VTAKKHQGQHPKIRIKRMQVPR

SEQ ID NO: 26058 - protein, 34 aa, Artificial Sequence; identical to SEQ ID NO: 22316
  Cyclic GFR-binding peptide
  MOD_RES (31)..(31): Xaa is C or S

SEQ ID NO: 26059 - protein, 39 aa, Artificial Sequence; identical to SEQ ID NO: 22317
  Cyclic GFR-binding peptide
  MOD_RES (2)..(39): Xaa is C or S

SEQ ID NO: 26060 - protein, 27 aa, Artificial Sequence
  Cyclic GFR-binding peptide
RSMEGILKPKKRVYEMIQVTINSHHVR

SEQ ID NO: 26061 - protein, 25 aa, Artificial Sequence
  Cyclic GFR-binding peptide
LRSMEGILKPKKRVYEMIQVTINSH

SEQ ID NO: 26062 - protein, 41 aa, Artificial Sequence; identical to SEQ ID NO: 22320
  Cyclic GFR-binding peptide
  MOD_RES (2)..(4)..(41): Xaa is C or S

SEQ ID NO: 26063 - protein, 39 aa, Artificial Sequence; identical to SEQ ID NO: 22321
  Cyclic GFR-binding peptide
  MOD_RES (2)..(39): Xaa is C or S

SEQ ID NO: 26064 - protein, 42 aa, Artificial Sequence; identical to SEQ ID NO: 22322
  Cyclic GFR-binding peptide
  MOD_RES (2)..(39): Xaa is C or S

SEQ ID NO: 26065 - protein, 33 aa, Artificial Sequence; identical to SEQ ID NO: 22323
  Cyclic GFR-binding peptide

SEQ ID NO: 26066 - protein, 31 aa, Artificial Sequence; identical to SEQ ID NO: 22324
  Cyclic GFR-binding peptide
  MOD_RES (1)..(1): Xaa is C or S

SEQ ID NO: 26067 - protein, 42 aa, Artificial Sequence; identical to SEQ ID NO: 22325
  Cyclic GFR-binding peptide
  MOD_RES (2)..(4)..(38): Xaa is C or S

SEQ ID NO: 26068 - protein, 30 aa, Artificial Sequence; identical to SEQ ID NO: 22326
  Cyclic GFR-binding peptide
  MOD_RES (30)..(30): Xaa is C or S

SEQ ID NO: 26069 - protein, 33 aa, Artificial Sequence; identical to SEQ ID NO: 22327
  Cyclic GFR-binding peptide
  MOD_RES (2)..(2): Xaa is C or S

SEQ ID NO: 26070 - protein, 37 aa, Artificial Sequence; identical to SEQ ID NO: 22328
  Cyclic GFR-binding peptide
  MOD_RES (1)..(1): Xaa is C or S

SEQ ID NO: 26071 - protein, 36 aa, Artificial Sequence; identical to SEQ ID NO: 22329
  Cyclic GFR-binding peptide
  MOD_RES (32)..(32): Xaa is C or S

SEQ ID NO: 26072 - protein, 32 aa, Artificial Sequence; identical to SEQ ID NO: 22330
  Cyclic GFR-binding peptide
  MOD_RES (2)..(2): Xaa is C or S

SEQ ID NO: 26073 - protein, 39 aa, Artificial Sequence; identical to SEQ ID NO: 22331
  Cyclic GFR-binding peptide
  MOD_RES (2)..(4)..(38): Xaa is C or S

SEQ ID NO: 26074 - protein, 31 aa, Artificial Sequence; identical to SEQ ID NO: 22332
  Cyclic GFR-binding peptide

SEQ ID NO: 26075 - protein, 41 aa, Artificial Sequence; identical to SEQ ID NO: 22333
  Cyclic GFR-binding peptide
  MOD_RES (1)..(3)..(40): Xaa is C or S

SEQ ID NO: 26076 - protein, 35 aa, Artificial Sequence; identical to SEQ ID NO: 22334
  Cyclic GFR-binding peptide
  MOD_RES (31)..(31): Xaa is C or S

SEQ ID NO: 26077 - protein, 24 aa, Artificial Sequence
  Cyclic GFR-binding peptide
LFSMEGIHQGQHPKIRMIQMTINS

SEQ ID NO: 26078 - protein, 34 aa, Artificial Sequence; identical to SEQ ID NO: 22336
  Cyclic GFR-binding peptide
  MOD_RES (2)..(4): Xaa is C or S

SEQ ID NO: 26079 - protein, 31 aa, Artificial Sequence; identical to SEQ ID NO: 22337
  Cyclic GFR-binding peptide

SEQ ID NO: 26080 - protein, 33 aa, Artificial Sequence; identical to SEQ ID NO: 22338
  Cyclic GFR-binding peptide
  MOD_RES (2)..(4): Xaa is C or S

SEQ ID NO: 26081 - protein, 27 aa, Artificial Sequence
  Cyclic GFR-binding peptide
HQLFSMEGLHQGQHPKIRMIQMTINSE

SEQ ID NO: 26082 - protein, 32 aa, Artificial Sequence; identical to SEQ ID NO: 22340
  Cyclic GFR-binding peptide

SEQ ID NO: 26083 - protein, 32 aa, Artificial Sequence; identical to SEQ ID NO: 22341
  Cyclic GFR-binding peptide
  MOD_RES (30)..(30): Xaa is C or S

SEQ ID NO: 26084 - protein, 28 aa, Artificial Sequence
  Cyclic GFR-binding peptide
FSMEGLHQGQHPKIRMIQMTINSEETPV

SEQ ID NO: 26085 - protein, 31 aa, Artificial Sequence; identical to SEQ ID NO: 22343
  Cyclic GFR-binding peptide

SEQ ID NO: 26086 - protein, 38 aa, Artificial Sequence; identical to SEQ ID NO: 22344
  Cyclic GFR-binding peptide
  MOD_RES (34)..(34): Xaa is C or S

SEQ ID NO: 26087 - protein, 29 aa, Artificial Sequence
  Cyclic GFR-binding peptide
ELHEELRVTAKKLKPKKRVYEIKRVQVPR

SEQ ID NO: 26088 - protein, 35 aa, Artificial Sequence; identical to SEQ ID NO: 22346
  Cyclic GFR-binding peptide

SEQ ID NO: 26089 - protein, 34 aa, Artificial Sequence; identical to SEQ ID NO: 22347
  Cyclic GFR-binding peptide
  MOD_RES (28)..(28): Xaa is C or S

SEQ ID NO: 26090 - protein, 29 aa, Artificial Sequence
  Cyclic GFR-binding peptide
ELHEELRSMEGLLKPKKRVYEMIQVTINS

SEQ ID NO: 26091 - protein, 22 aa, Artificial Sequence
  Cyclic GFR-binding peptide
SMEGLFIPKKRVIEMIQVTINS

SEQ ID NO: 26092 - protein, 41 aa, Artificial Sequence; identical to SEQ ID NO: 22350
  Cyclic GFR-binding peptide
  MOD_RES (1)..(3)..(37): Xaa is C or S

SEQ ID NO: 26093 - protein, 25 aa, Artificial Sequence
  Cyclic GFR-binding peptide
LFVQVEKHQGQHPKIRVKAMKVSRE

SEQ ID NO: 26094 - protein, 22 aa, Artificial Sequence
  Cyclic GFR-binding peptide
SMEGIHQGQHPKIRMIQMTINS

SEQ ID NO: 26095 - protein, 24 aa, Artificial Sequence
  Cyclic GFR-binding peptide
VQVEKHQGQHPKIRVKAMKVSRQG

SEQ ID NO: 26096 - protein, 32 aa, Artificial Sequence; identical to SEQ ID NO: 22354
  Cyclic GFR-binding peptide

SEQ ID NO: 26097 - protein, 36 aa, Artificial Sequence; identical to SEQ ID NO: 22355
  Cyclic GFR-binding peptide
  MOD_RES (34)..(34): Xaa is C or S

SEQ ID NO: 26098 - protein, 32 aa, Artificial Sequence; identical to SEQ ID NO: 22356
  Cyclic GFR-binding peptide
  MOD_RES (1)..(3): Xaa is C or S

SEQ ID NO: 26099 - protein, 36 aa, Artificial Sequence; identical to SEQ ID NO: 22357
  Cyclic GFR-binding peptide
  MOD_RES (31)..(31): Xaa is C or S

SEQ ID NO: 26100 - protein, 35 aa, Artificial Sequence; identical to SEQ ID NO: 22358
  Cyclic GFR-binding peptide
  MOD_RES (34)..(34): Xaa is C or S

SEQ ID NO: 26101 - protein, 32 aa, Artificial Sequence; identical to SEQ ID NO: 22359
  Cyclic GFR-binding peptide
  MOD_RES (30)..(30): Xaa is C or S

SEQ ID NO: 26102 - protein, 27 aa, Artificial Sequence
  Cyclic GFR-binding peptide
HQLFSMEGIHQGQHPKIRMIQMTINSE

SEQ ID NO: 26103 - protein, 31 aa, Artificial Sequence; identical to SEQ ID NO: 22361
  Cyclic GFR-binding peptide

SEQ ID NO: 26104 - protein, 35 aa, Artificial Sequence; identical to SEQ ID NO: 22362
  Cyclic GFR-binding peptide
  MOD_RES (34)..(34): Xaa is C or S

SEQ ID NO: 26105 - protein, 29 aa, Artificial Sequence
  Cyclic GFR-binding peptide
  MOD_RES (1)..(1): Xaa is C or S
XKNHQLFVQVEKHQGQHPKIRVKAMKVSR

SEQ ID NO: 26106 - protein, 29 aa, Artificial Sequence
  Cyclic GFR-binding peptide
HQLFSMEGIHQGQHPKIRMIQMTINSEET

SEQ ID NO: 26107 - protein, 31 aa, Artificial Sequence; identical to SEQ ID NO: 22365
  Cyclic GFR-binding peptide
  MOD_RES (30)..(30): Xaa is C or S

SEQ ID NO: 26108 - protein, 36 aa, Artificial Sequence; identical to SEQ ID NO: 22366
  Cyclic GFR-binding peptide
  MOD_RES (2)..(4): Xaa is C or S

SEQ ID NO: 26109 - protein, 28 aa, Artificial Sequence
  Cyclic GFR-binding peptide
HEELRSMEGILKPKKRVYEMIQVTINSH

SEQ ID NO: 26110 - protein, 43 aa, Artificial Sequence; identical to SEQ ID NO: 22368
  Cyclic GFR-binding peptide
  MOD_RES (2)..(4)..(38): Xaa is C or S

SEQ ID NO: 26111 - protein, 33 aa, Artificial Sequence; identical to SEQ ID NO: 22369
  Cyclic GFR-binding peptide

SEQ ID NO: 26112 - protein, 35 aa, Artificial Sequence; identical to SEQ ID NO: 22370
  Cyclic GFR-binding peptide
  MOD_RES (31)..(31): Xaa is C or S

SEQ ID NO: 26113 - protein, 42 aa, Artificial Sequence; identical to SEQ ID NO: 22371
  Cyclic GFR-binding peptide
  MOD_RES (1)..(38): Xaa is C or S

SEQ ID NO: 26114 - protein, 36 aa, Artificial Sequence; identical to SEQ ID NO: 22372
  Cyclic GFR-binding peptide
  MOD_RES (34)..(34): Xaa is C or S

SEQ ID NO: 26115 - protein, 40 aa, Artificial Sequence; identical to SEQ ID NO: 22373
  Cyclic GFR-binding peptide
  MOD_RES (36)..(36): Xaa is C or S

SEQ ID NO: 26116 - protein, 35 aa, Artificial Sequence; identical to SEQ ID NO: 22374
  Cyclic GFR-binding peptide
  MOD_RES (2)..(4): Xaa is C or S

SEQ ID NO: 26117 - protein, 27 aa, Artificial Sequence
  Cyclic GFR-binding peptide
RVTAKKLKPKKRVYEIKRVQVPRHHVR

SEQ ID NO: 26118 - protein, 36 aa, Artificial Sequence; identical to SEQ ID NO: 22376
  Cyclic GFR-binding peptide
  MOD_RES (1)..(3): Xaa is C or S

SEQ ID NO: 26119 - protein, 35 aa, Artificial Sequence; identical to SEQ ID NO: 22377
  Cyclic GFR-binding peptide

SEQ ID NO: 26120 - protein, 36 aa, Artificial Sequence; identical to SEQ ID NO: 22378
  Cyclic GFR-binding peptide
  MOD_RES (35)..(35): Xaa is C or S

SEQ ID NO: 26121 - protein, 30 aa, Artificial Sequence; identical to SEQ ID NO: 22379
  Cyclic GFR-binding peptide

SEQ ID NO: 26122 - protein, 34 aa, Artificial Sequence; identical to SEQ ID NO: 22380
  Cyclic GFR-binding peptide
  MOD_RES (2)..(4): Xaa is C or S

SEQ ID NO: 26123 - protein, 30 aa, Artificial Sequence; identical to SEQ ID NO: 22381
  Cyclic GFR-binding peptide
  MOD_RES (30)..(30): Xaa is C or S

SEQ ID NO: 26124 - protein, 41 aa, Artificial Sequence; identical to SEQ ID NO: 22382
  Cyclic GFR-binding peptide
  MOD_RES (1)..(38): Xaa is C or S

SEQ ID NO: 26125 - protein, 35 aa, Artificial Sequence; identical to SEQ ID NO: 22383
  Cyclic GFR-binding peptide

SEQ ID NO: 26126 - protein, 26 aa, Artificial Sequence
  Cyclic GFR-binding peptide
VQVEKHQGQHPKIRVKAMKVSREETP

SEQ ID NO: 26127 - protein, 39 aa, Artificial Sequence; identical to SEQ ID NO: 22385
  Cyclic GFR-binding peptide
  MOD_RES (1)..(3)..(37): Xaa is C or S

SEQ ID NO: 26128 - protein, 33 aa, Artificial Sequence; identical to SEQ ID NO: 22386
  Cyclic GFR-binding peptide

SEQ ID NO: 26129 - protein, 37 aa, Artificial Sequence; identical to SEQ ID NO: 22387
  Cyclic GFR-binding peptide
  MOD_RES (1)..(3): Xaa is C or S

SEQ ID NO: 26130 - protein, 31 aa, Artificial Sequence; identical to SEQ ID NO: 22388
  Cyclic GFR-binding peptide
  MOD_RES (2)..(2): Xaa is C or S

SEQ ID NO: 26131 - protein, 29 aa, Artificial Sequence
  Cyclic GFR-binding peptide
RVTAKKLKPKKRVYEIKRVQVPRHHVRSP

SEQ ID NO: 26132 - protein, 35 aa, Artificial Sequence; identical to SEQ ID NO: 22390
  Cyclic GFR-binding peptide
  MOD_RES (34)..(34): Xaa is C or S

SEQ ID NO: 26133 - protein, 34 aa, Artificial Sequence; identical to SEQ ID NO: 22391
  Cyclic GFR-binding peptide
  MOD_RES (29)..(29): Xaa is C or S

SEQ ID NO: 26134 - protein, 38 aa, Artificial Sequence; identical to SEQ ID NO: 22392
  Cyclic GFR-binding peptide
  MOD_RES (2)..(36): Xaa is C or S

SEQ ID NO: 26135 - protein, 39 aa, Artificial Sequence; identical to SEQ ID NO: 22393
  Cyclic GFR-binding peptide
  MOD_RES (1)..(38): Xaa is C or S

SEQ ID NO: 26136 - protein, 36 aa, Artificial Sequence; identical to SEQ ID NO: 22394
  Cyclic GFR-binding peptide
  MOD_RES (1)..(3): Xaa is C or S

SEQ ID NO: 26137 - protein, 22 aa, Artificial Sequence
  Cyclic GFR-binding peptide
SMEGILKPKKRVYEMIQVTINS

SEQ ID NO: 26138 - protein, 37 aa, Artificial Sequence; identical to SEQ ID NO: 22396
  Cyclic GFR-binding peptide
  MOD_RES (1)..(3): Xaa is C or S

SEQ ID NO: 26139 - protein, 33 aa, Artificial Sequence; identical to SEQ ID NO: 22397
  Cyclic GFR-binding peptide
  MOD_RES (29)..(29): Xaa is C or S

SEQ ID NO: 26140 - protein, 43 aa, Artificial Sequence; identical to SEQ ID NO: 22398
  Cyclic GFR-binding peptide
  MOD_RES (2)..(4)..(38): Xaa is C or S

SEQ ID NO: 26141 - protein, 37 aa, Artificial Sequence; identical to SEQ ID NO: 22399
  Cyclic GFR-binding peptide
  MOD_RES (37)..(37): Xaa is C or S

SEQ ID NO: 26142 - protein, 33 aa, Artificial Sequence; identical to SEQ ID NO: 22400
  Cyclic GFR-binding peptide
  MOD_RES (28)..(28): Xaa is C or S

SEQ ID NO: 26143 - protein, 35 aa, Artificial Sequence; identical to SEQ ID NO: 22401
  Cyclic GFR-binding peptide
  MOD_RES (2)..(2): Xaa is C or S

SEQ ID NO: 26144 - protein, 35 aa, Artificial Sequence; identical to SEQ ID NO: 22402
  Cyclic GFR-binding peptide
  MOD_RES (30)..(30): Xaa is C or S

SEQ ID NO: 26145 - protein, 30 aa, Artificial Sequence; identical to SEQ ID NO: 22403
  Cyclic GFR-binding peptide

SEQ ID NO: 26146 - protein, 38 aa, Artificial Sequence; identical to SEQ ID NO: 22404
  Cyclic GFR-binding peptide
  MOD_RES (1)..(38): Xaa is C or S

SEQ ID NO: 26147 - protein, 31 aa, Artificial Sequence; identical to SEQ ID NO: 22405
  Cyclic GFR-binding peptide

SEQ ID NO: 26148 - protein, 29 aa, Artificial Sequence
  Cyclic GFR-binding peptide
  MOD_RES (29)..(29): Xaa is C or S
FVTAKKHQGQHPKIRIKRMQVPREETPVX

SEQ ID NO: 26149 - protein, 43 aa, Artificial Sequence; identical to SEQ ID NO: 22407
  Cyclic GFR-binding peptide
  MOD_RES (2)..(39): Xaa is C or S

SEQ ID NO: 26150 - protein, 25 aa, Artificial Sequence
  Cyclic GFR-binding peptide
SMEGIFIPKKRVIEMIQVTINSLQV

SEQ ID NO: 26151 - protein, 38 aa, Artificial Sequence; identical to SEQ ID NO: 22409
  Cyclic GFR-binding peptide
  MOD_RES (36)..(36): Xaa is C or S

SEQ ID NO: 26152 - protein, 34 aa, Artificial Sequence; identical to SEQ ID NO: 22410
  Cyclic GFR-binding peptide

SEQ ID NO: 26153 - protein, 26 aa, Artificial Sequence
  Cyclic GFR-binding peptide
LTSMEGIFIPKKRVIEMIQVTINSLQ

SEQ ID NO: 26154 - protein, 26 aa, Artificial Sequence
  Cyclic GFR-binding peptide
VTAKKLKPKKRVYEIKRVQVPRHHVR

SEQ ID NO: 26155 - protein, 28 aa, Artificial Sequence
  Cyclic GFR-binding peptide
  MOD_RES (28)..(28): Xaa is C or S
VTAKKHQGQHPKIRIKRMQVPREETPVX

SEQ ID NO: 26156 - protein, 24 aa, Artificial Sequence
  Cyclic GFR-binding peptide
ELVQVEKHQGQHPKIRVKAMKVSR

SEQ ID NO: 26157 - protein, 39 aa, Artificial Sequence; identical to SEQ ID NO: 22415
  Cyclic GFR-binding peptide
  MOD_RES (33)..(33): Xaa is C or S

SEQ ID NO: 26158 - protein, 30 aa, Artificial Sequence; identical to SEQ ID NO: 22416
  Cyclic GFR-binding peptide
  MOD_RES (30)..(30): Xaa is C or S

SEQ ID NO: 26159 - protein, 34 aa, Artificial Sequence; identical to SEQ ID NO: 22417
  Cyclic GFR-binding peptide
  MOD_RES (28)..(28): Xaa is C or S

SEQ ID NO: 26160 - protein, 40 aa, Artificial Sequence; identical to SEQ ID NO: 22418
  Cyclic GFR-binding peptide
  MOD_RES (2)..(36): Xaa is C or S

SEQ ID NO: 26161 - protein, 33 aa, Artificial Sequence; identical to SEQ ID NO: 22419
  Cyclic GFR-binding peptide
  MOD_RES (32)..(32): Xaa is C or S

SEQ ID NO: 26162 - protein, 39 aa, Artificial Sequence; identical to SEQ ID NO: 22420
  Cyclic GFR-binding peptide
  MOD_RES (1)..(3)..(37): Xaa is C or S

SEQ ID NO: 26163 - protein, 34 aa, Artificial Sequence; identical to SEQ ID NO: 22421
  Cyclic GFR-binding peptide
  MOD_RES (2)..(2): Xaa is C or S

SEQ ID NO: 26164 - protein, 28 aa, Artificial Sequence
  Cyclic GFR-binding peptide
NHQLFSMEGLHQGQHPKIRMIQMTINSE

SEQ ID NO: 26165 - protein, 30 aa, Artificial Sequence; identical to SEQ ID NO: 22423
  Cyclic GFR-binding peptide

SEQ ID NO: 26166 - protein, 34 aa, Artificial Sequence; identical to SEQ ID NO: 22424
  Cyclic GFR-binding peptide
  MOD_RES (2)..(4): Xaa is C or S

SEQ ID NO: 26167 - protein, 31 aa, Artificial Sequence; identical to SEQ ID NO: 22425
  Cyclic GFR-binding peptide
  MOD_RES (30)..(30): Xaa is C or S

SEQ ID NO: 26168 - protein, 24 aa, Artificial Sequence
  Cyclic GFR-binding peptide
SMEGIHQGQHPKIRMIQMTINSQG

SEQ ID NO: 26169 - protein, 27 aa, Artificial Sequence
  Cyclic GFR-binding peptide
TSMEGLFIPKKRVIEMIQVTINSLQVQ

SEQ ID NO: 26170 - protein, 40 aa, Artificial Sequence; identical to SEQ ID NO: 22428
  Cyclic GFR-binding peptide
  MOD_RES (2)..(36): Xaa is C or S

SEQ ID NO: 26171 - protein, 34 aa, Artificial Sequence; identical to SEQ ID NO: 22429
  Cyclic GFR-binding peptide
  MOD_RES (29)..(29): Xaa is C or S

SEQ ID NO: 26172 - protein, 29 aa, Artificial Sequence
  Cyclic GFR-binding peptide
NHQLFVTAKKHQGQHPKIRIKRMQVPREE

SEQ ID NO: 26173 - protein, 39 aa, Artificial Sequence; identical to SEQ ID NO: 22431
  Cyclic GFR-binding peptide
  MOD_RES (1)..(3)..(37): Xaa is C or S

SEQ ID NO: 26174 - protein, 33 aa, Artificial Sequence; identical to SEQ ID NO: 22432
  Cyclic GFR-binding peptide
  MOD_RES (31)..(31): Xaa is C or S

SEQ ID NO: 26175 - protein, 38 aa, Artificial Sequence; identical to SEQ ID NO: 22433
  Cyclic GFR-binding peptide
  MOD_RES (33)..(33): Xaa is C or S

SEQ ID NO: 26176 - protein, 33 aa, Artificial Sequence; identical to SEQ ID NO: 22434
  Cyclic GFR-binding peptide
  MOD_RES (1)..(1): Xaa is C or S

SEQ ID NO: 26177 - protein, 41 aa, Artificial Sequence; identical to SEQ ID NO: 22435
  Cyclic GFR-binding peptide
  MOD_RES (2)..(36): Xaa is C or S

SEQ ID NO: 26178 - protein, 23 aa, Artificial Sequence
  Cyclic GFR-binding peptide
RSMEGLLKPKKRVYEMIQVTINS

SEQ ID NO: 26179 - protein, 24 aa, Artificial Sequence
  Cyclic GFR-binding peptide
SMEGLFIPKKRVIEMIQVTINSLQ

SEQ ID NO: 26180 - protein, 26 aa, Artificial Sequence
  Cyclic GFR-binding peptide
EELSMEGIHQGQHPKIRMIQMTINSQ

SEQ ID NO: 26181 - protein, 36 aa, Artificial Sequence; identical to SEQ ID NO: 22439
  Cyclic GFR-binding peptide
  MOD_RES (1)..(3): Xaa is C or S

SEQ ID NO: 26182 - protein, 34 aa, Artificial Sequence; identical to SEQ ID NO: 22440
  Cyclic GFR-binding peptide
  MOD_RES (32)..(32): Xaa is C or S

SEQ ID NO: 26183 - protein, 25 aa, Artificial Sequence
  Cyclic GFR-binding peptide
SMEGLHQGQHPKIRMIQMTINSEET

SEQ ID NO: 26184 - protein, 34 aa, Artificial Sequence; identical to SEQ ID NO: 22442
  Cyclic GFR-binding peptide
  MOD_RES (1)..(3): Xaa is C or S

SEQ ID NO: 26185 - protein, 31 aa, Artificial Sequence; identical to SEQ ID NO: 22443
  Cyclic GFR-binding peptide

SEQ ID NO: 26186 - protein, 27 aa, Artificial Sequence
  Cyclic GFR-binding peptide
ELTSMEGLFIPKKRVIEMIQVTINSLQ

SEQ ID NO: 26187 - protein, 27 aa, Artificial Sequence
  Cyclic GFR-binding peptide
ELTSMEGIFIPKKRVIEMIQVTINSLQ

SEQ ID NO: 26188 - protein, 37 aa, Artificial Sequence; identical to SEQ ID NO: 22446
  Cyclic GFR-binding peptide
  MOD_RES (32)..(32): Xaa is C or S

SEQ ID NO: 26189 - protein, 37 aa, Artificial Sequence; identical to SEQ ID NO: 22447
  Cyclic GFR-binding peptide
  MOD_RES (36)..(36): Xaa is C or S

SEQ ID NO: 26190 - protein, 31 aa, Artificial Sequence; identical to SEQ ID NO: 22448
  Cyclic GFR-binding peptide
  MOD_RES (1)..(1): Xaa is C or S

SEQ ID NO: 26191 - protein, 30 aa, Artificial Sequence; identical to SEQ ID NO: 22449
  Cyclic GFR-binding peptide
  MOD_RES (30)..(30): Xaa is C or S

SEQ ID NO: 26192 - protein, 35 aa, Artificial Sequence; identical to SEQ ID NO: 22450
  Cyclic GFR-binding peptide
  MOD_RES (31)..(31): Xaa is C or S

SEQ ID NO: 26193 - protein, 38 aa, Artificial Sequence; identical to SEQ ID NO: 22451
  Cyclic GFR-binding peptide
  MOD_RES (37)..(37): Xaa is C or S

SEQ ID NO: 26194 - protein, 42 aa, Artificial Sequence; identical to SEQ ID NO: 22452
  Cyclic GFR-binding peptide
  MOD_RES (2)..(39): Xaa is C or S

SEQ ID NO: 26195 - protein, 25 aa, Artificial Sequence
  Cyclic GFR-binding peptide
TVQVEKFIPKKRVIEVKAVKVSRLQ

SEQ ID NO: 26196 - protein, 40 aa, Artificial Sequence; identical to SEQ ID NO: 22454
  Cyclic GFR-binding peptide
  MOD_RES (2)..(36): Xaa is C or S

SEQ ID NO: 26197 - protein, 27 aa, Artificial Sequence
  Cyclic GFR-binding peptide
LTSMEGIFIPKKRVIEMIQVTINSLQV

SEQ ID NO: 26198 - protein, 36 aa, Artificial Sequence; identical to SEQ ID NO: 22456
  Cyclic GFR-binding peptide
  MOD_RES (1)..(1): Xaa is C or S

SEQ ID NO: 26199 - protein, 42 aa, Artificial Sequence; identical to SEQ ID NO: 22457
  Cyclic GFR-binding peptide
  MOD_RES (2)..(4)..(41): Xaa is C or S

SEQ ID NO: 26200 - protein, 34 aa, Artificial Sequence; identical to SEQ ID NO: 22458
  Cyclic GFR-binding peptide
  MOD_RES (34)..(34): Xaa is C or S

SEQ ID NO: 26201 - protein, 35 aa, Artificial Sequence; identical to SEQ ID NO: 22459
  Cyclic GFR-binding peptide
  MOD_RES (31)..(31): Xaa is C or S

SEQ ID NO: 26202 - protein, 44 aa, Artificial Sequence; identical to SEQ ID NO: 22460
  Cyclic GFR-binding peptide
  MOD_RES (1)..(3)..(40): Xaa is C or S

SEQ ID NO: 26203 - protein, 31 aa, Artificial Sequence; identical to SEQ ID NO: 22461
  Cyclic GFR-binding peptide

SEQ ID NO: 26204 - protein, 30 aa, Artificial Sequence; identical to SEQ ID NO: 22462
  Cyclic GFR-binding peptide

SEQ ID NO: 26205 - protein, 31 aa, Artificial Sequence; identical to SEQ ID NO: 22463
  Cyclic GFR-binding peptide

SEQ ID NO: 26206 - protein, 30 aa, Artificial Sequence; identical to SEQ ID NO: 22464
  Cyclic GFR-binding peptide
  MOD_RES (1)..(1): Xaa is C or S

SEQ ID NO: 26207 - protein, 33 aa, Artificial Sequence; identical to SEQ ID NO: 22465
  Cyclic GFR-binding peptide
  MOD_RES (30)..(30): Xaa is C or S

SEQ ID NO: 26208 - protein, 41 aa, Artificial Sequence; identical to SEQ ID NO: 22466
  Cyclic GFR-binding peptide
  MOD_RES (37)..(37): Xaa is C or S

SEQ ID NO: 26209 - protein, 34 aa, Artificial Sequence; identical to SEQ ID NO: 22467
  Cyclic GFR-binding peptide
  MOD_RES (33)..(33): Xaa is C or S

SEQ ID NO: 26210 - protein, 25 aa, Artificial Sequence
  Cyclic GFR-binding peptide
RVTAKKLKPKKRVYEIKRVQVPRHH

SEQ ID NO: 26211 - protein, 39 aa, Artificial Sequence; identical to SEQ ID NO: 22469
  Cyclic GFR-binding peptide
  MOD_RES (35)..(35): Xaa is C or S

SEQ ID NO: 26212 - protein, 42 aa, Artificial Sequence; identical to SEQ ID NO: 22470
  Cyclic GFR-binding peptide
  MOD_RES (1)..(38): Xaa is C or S

SEQ ID NO: 26213 - protein, 35 aa, Artificial Sequence; identical to SEQ ID NO: 22471
  Cyclic GFR-binding peptide
  MOD_RES (29)..(29): Xaa is C or S

SEQ ID NO: 26214 - protein, 25 aa, Artificial Sequence
  Cyclic GFR-binding peptide
ELSMEGIHQGQHPKIRMIQMTINSQ

SEQ ID NO: 26215 - protein, 34 aa, Artificial Sequence; identical to SEQ ID NO: 22473
  Cyclic GFR-binding peptide
  MOD_RES (1)..(1): Xaa is C or S

SEQ ID NO: 26216 - protein, 26 aa, Artificial Sequence
  Cyclic GFR-binding peptide
DELTSMEGIFIPKKRVIEMIQVTINS

SEQ ID NO: 26217 - protein, 35 aa, Artificial Sequence; identical to SEQ ID NO: 22475
  Cyclic GFR-binding peptide
  MOD_RES (2)..(2): Xaa is C or S

SEQ ID NO: 26218 - protein, 29 aa, Artificial Sequence
  Cyclic GFR-binding peptide
LFSMEGLHQGQHPKIRMIQMTINSEETPV

SEQ ID NO: 26219 - protein, 33 aa, Artificial Sequence; identical to SEQ ID NO: 22477
  Cyclic GFR-binding peptide
  MOD_RES (2)..(4): Xaa is C or S

SEQ ID NO: 26220 - protein, 37 aa, Artificial Sequence; identical to SEQ ID NO: 22478
  Cyclic GFR-binding peptide
  MOD_RES (2)..(4): Xaa is C or S

SEQ ID NO: 26221 - protein, 35 aa, Artificial Sequence; identical to SEQ ID NO: 22479
  Cyclic GFR-binding peptide
  MOD_RES (32)..(32): Xaa is C or S

SEQ ID NO: 26222 - protein, 30 aa, Artificial Sequence; identical to SEQ ID NO: 22480
  Cyclic GFR-binding peptide

SEQ ID NO: 26223 - protein, 39 aa, Artificial Sequence; identical to SEQ ID NO: 22481
  Cyclic GFR-binding peptide
  MOD_RES (1)..(38): Xaa is C or S

SEQ ID NO: 26224 - protein, 32 aa, Artificial Sequence; identical to SEQ ID NO: 22482
  Cyclic GFR-binding peptide
  MOD_RES (1)..(1): Xaa is C or S

SEQ ID NO: 26225 - protein, 37 aa, Artificial Sequence; identical to SEQ ID NO: 22483
  Cyclic GFR-binding peptide
  MOD_RES (31)..(31): Xaa is C or S

SEQ ID NO: 26226 - protein, 36 aa, Artificial Sequence; identical to SEQ ID NO: 22484
  Cyclic GFR-binding peptide
  MOD_RES (32)..(32): Xaa is C or S

SEQ ID NO: 26227 - protein, 43 aa, Artificial Sequence; identical to SEQ ID NO: 22485
  Cyclic GFR-binding peptide
  MOD_RES (1)..(3)..(40): Xaa is C or S

SEQ ID NO: 26228 - protein, 34 aa, Artificial Sequence; identical to SEQ ID NO: 22486
  Cyclic GFR-binding peptide
  MOD_RES (30)..(30): Xaa is C or S

SEQ ID NO: 26229 - protein, 34 aa, Artificial Sequence; identical to SEQ ID NO: 22487
  Cyclic GFR-binding peptide
  MOD_RES (1)..(1): Xaa is C or S

SEQ ID NO: 26230 - protein, 36 aa, Artificial Sequence; identical to SEQ ID NO: 22488
  Cyclic GFR-binding peptide
  MOD_RES (1)..(35): Xaa is C or S

SEQ ID NO: 26231 - protein, 41 aa, Artificial Sequence; identical to SEQ ID NO: 22489
  Cyclic GFR-binding peptide
  MOD_RES (1)..(3)..(37): Xaa is C or S

SEQ ID NO: 26232 - protein, 39 aa, Artificial Sequence; identical to SEQ ID NO: 22490
  Cyclic GFR-binding peptide
  MOD_RES (34)..(34): Xaa is C or S

SEQ ID NO: 26233 - protein, 26 aa, Artificial Sequence
  Cyclic GFR-binding peptide
HQLFSMEGLHQGQHPKIRMIQMTINS

SEQ ID NO: 26234 - protein, 33 aa, Artificial Sequence; identical to SEQ ID NO: 22492
  Cyclic GFR-binding peptide
  MOD_RES (28)..(28): Xaa is C or S

SEQ ID NO: 26235 - protein, 39 aa, Artificial Sequence; identical to SEQ ID NO: 22493
  Cyclic GFR-binding peptide
  MOD_RES (34)..(34): Xaa is C or S

SEQ ID NO: 26236 - protein, 34 aa, Artificial Sequence; identical to SEQ ID NO: 22494
  Cyclic GFR-binding peptide
  MOD_RES (32)..(32): Xaa is C or S

SEQ ID NO: 26237 - protein, 33 aa, Artificial Sequence; identical to SEQ ID NO: 22495
  Cyclic GFR-binding peptide

SEQ ID NO: 26238 - protein, 36 aa, Artificial Sequence; identical to SEQ ID NO: 22496
  Cyclic GFR-binding peptide
  MOD_RES (2)..(4): Xaa is C or S

SEQ ID NO: 26239 - protein, 38 aa, Artificial Sequence; identical to SEQ ID NO: 22497
  Cyclic GFR-binding peptide
  MOD_RES (32)..(32): Xaa is C or S

SEQ ID NO: 26240 - protein, 36 aa, Artificial Sequence; identical to SEQ ID NO: 22498
  Cyclic GFR-binding peptide
  MOD_RES (1)..(3): Xaa is C or S

SEQ ID NO: 26241 - protein, 33 aa, Artificial Sequence; identical to SEQ ID NO: 22499
  Cyclic GFR-binding peptide
  MOD_RES (1)..(3): Xaa is C or S

SEQ ID NO: 26242 - protein, 32 aa, Artificial Sequence; identical to SEQ ID NO: 22500
  Cyclic GFR-binding peptide
  MOD_RES (2)..(2): Xaa is C or S

SEQ ID NO: 26243 - protein, 35 aa, Artificial Sequence; identical to SEQ ID NO: 22501
  Cyclic GFR-binding peptide
  MOD_RES (29)..(29): Xaa is C or S

SEQ ID NO: 26244 - protein, 36 aa, Artificial Sequence; identical to SEQ ID NO: 22502
  Cyclic GFR-binding peptide
  MOD_RES (2)..(4): Xaa is C or S

SEQ ID NO: 26245 - protein, 27 aa, Artificial Sequence
  Cyclic GFR-binding peptide
VQVEKHQGQHPKIRVKAMKVSREETPV

SEQ ID NO: 26246 - protein, 33 aa, Artificial Sequence; identical to SEQ ID NO: 22504
  Cyclic GFR-binding peptide

SEQ ID NO: 26247 - protein, 30 aa, Artificial Sequence; identical to SEQ ID NO: 22505
  Cyclic GFR-binding peptide
  MOD_RES (1)..(1): Xaa is C or S

SEQ ID NO: 26248 - protein, 24 aa, Artificial Sequence
  Cyclic GFR-binding peptide
SMEGLLKPKKRVYEMIQVTINSHH

SEQ ID NO: 26249 - protein, 28 aa, Artificial Sequence
  Cyclic GFR-binding peptide
EELVQVEKHQGQHPKIRVKAMKVSRQGT

SEQ ID NO: 26250 - protein, 37 aa, Artificial Sequence; identical to SEQ ID NO: 22508
  Cyclic GFR-binding peptide
  MOD_RES (36)..(36): Xaa is C or S

SEQ ID NO: 26251 - protein, 32 aa, Artificial Sequence; identical to SEQ ID NO: 22509
  Cyclic GFR-binding peptide
  MOD_RES (1)..(1): Xaa is C or S

SEQ ID NO: 26252 - protein, 41 aa, Artificial Sequence; identical to SEQ ID NO: 22510
  Cyclic GFR-binding peptide
  MOD_RES (1)..(35): Xaa is C or S

SEQ ID NO: 26253 - protein, 28 aa, Artificial Sequence
  Cyclic GFR-binding peptide
  MOD_RES (28)..(28): Xaa is C or S
SMEGLHQGQHPKIRMIQMTINSEETPVX

SEQ ID NO: 26254 - protein, 29 aa, Artificial Sequence
  Cyclic GFR-binding peptide
VTAKKLKPKKRVYEIKRVQVPRHHVRSPQ

SEQ ID NO: 26255 - protein, 30 aa, Artificial Sequence; identical to SEQ ID NO: 22513
  Cyclic GFR-binding peptide
  MOD_RES (28)..(28): Xaa is C or S

SEQ ID NO: 26256 - protein, 29 aa, Artificial Sequence
  Cyclic GFR-binding peptide
  MOD_RES (29)..(29): Xaa is C or S
FVQVEKHQGQHPKIRVKAMKVSREETPVX

SEQ ID NO: 26257 - protein, 33 aa, Artificial Sequence; identical to SEQ ID NO: 22515
  Cyclic GFR-binding peptide
  MOD_RES (31)..(31): Xaa is C or S

SEQ ID NO: 26258 - protein, 34 aa, Artificial Sequence; identical to SEQ ID NO: 22516
  Cyclic GFR-binding peptide
  MOD_RES (33)..(33): Xaa is C or S

SEQ ID NO: 26259 - protein, 44 aa, Artificial Sequence; identical to SEQ ID NO: 22517
  Cyclic GFR-binding peptide
  MOD_RES (1)..(3)..(40): Xaa is C or S

SEQ ID NO: 26260 - protein, 26 aa, Artificial Sequence
  Cyclic GFR-binding peptide
VTAKKHQGQHPKIRIKRMQVPRQGTP

SEQ ID NO: 26261 - protein, 34 aa, Artificial Sequence; identical to SEQ ID NO: 22519
  Cyclic GFR-binding peptide
  MOD_RES (1)..(3): Xaa is C or S

SEQ ID NO: 26262 - protein, 32 aa, Artificial Sequence; identical to SEQ ID NO: 22520
  Cyclic GFR-binding peptide
  MOD_RES (31)..(31): Xaa is C or S

SEQ ID NO: 26263 - protein, 38 aa, Artificial Sequence; identical to SEQ ID NO: 22521
  Cyclic GFR-binding peptide
  MOD_RES (36)..(36): Xaa is C or S

SEQ ID NO: 26264 - protein, 33 aa, Artificial Sequence; identical to SEQ ID NO: 22522
  Cyclic GFR-binding peptide
  MOD_RES (30)..(30): Xaa is C or S

SEQ ID NO: 26265 - protein, 34 aa, Artificial Sequence; identical to SEQ ID NO: 22523
  Cyclic GFR-binding peptide

SEQ ID NO: 26266 - protein, 37 aa, Artificial Sequence; identical to SEQ ID NO: 22524
  Cyclic GFR-binding peptide
  MOD_RES (2)..(4): Xaa is C or S

SEQ ID NO: 26267 - protein, 32 aa, Artificial Sequence; identical to SEQ ID NO: 22525
  Cyclic GFR-binding peptide

SEQ ID NO: 26268 - protein, 32 aa, Artificial Sequence; identical to SEQ ID NO: 22526
  Cyclic GFR-binding peptide

SEQ ID NO: 26269 - protein, 37 aa, Artificial Sequence; identical to SEQ ID NO: 22527
  Cyclic GFR-binding peptide
  MOD_RES (2)..(4): Xaa is C or S

SEQ ID NO: 26270 - protein, 32 aa, Artificial Sequence; identical to SEQ ID NO: 22528
  Cyclic GFR-binding peptide
  MOD_RES (29)..(29): Xaa is C or S

SEQ ID NO: 26271 - protein, 36 aa, Artificial Sequence; identical to SEQ ID NO: 22529
  Cyclic GFR-binding peptide
  MOD_RES (32)..(32): Xaa is C or S

SEQ ID NO: 26272 - protein, 25 aa, Artificial Sequence
  Cyclic GFR-binding peptide
SMEGILKPKKRVYEMIQVTINSHHV

SEQ ID NO: 26273 - protein, 29 aa, Artificial Sequence
  Cyclic GFR-binding peptide
QLFVTAKKHQGQHPKIRIKRMQVPREETP

SEQ ID NO: 26274 - protein, 34 aa, Artificial Sequence; identical to SEQ ID NO: 22532
  Cyclic GFR-binding peptide
  MOD_RES (32)..(32): Xaa is C or S

SEQ ID NO: 26275 - protein, 32 aa, Artificial Sequence; identical to SEQ ID NO: 22533
  Cyclic GFR-binding peptide
  MOD_RES (30)..(30): Xaa is C or S

SEQ ID NO: 26276 - protein, 35 aa, Artificial Sequence; identical to SEQ ID NO: 22534
  Cyclic GFR-binding peptide
  MOD_RES (2)..(4): Xaa is C or S

SEQ ID NO: 26277 - protein, 38 aa, Artificial Sequence; identical to SEQ ID NO: 22535
  Cyclic GFR-binding peptide
  MOD_RES (1)..(35): Xaa is C or S

SEQ ID NO: 26278 - protein, 31 aa, Artificial Sequence; identical to SEQ ID NO: 22536
  Cyclic GFR-binding peptide

SEQ ID NO: 26279 - protein, 33 aa, Artificial Sequence; identical to SEQ ID NO: 22537
  Cyclic GFR-binding peptide

SEQ ID NO: 26280 - protein, 30 aa, Artificial Sequence; identical to SEQ ID NO: 22538
  Cyclic GFR-binding peptide
  MOD_RES (29)..(29): Xaa is C or S

SEQ ID NO: 26281 - protein, 28 aa, Artificial Sequence
  Cyclic GFR-binding peptide
LFVTAKKHQGQHPKIRIKRMQVPREETP

SEQ ID NO: 26282 - protein, 28 aa, Artificial Sequence
  Cyclic GFR-binding peptide
TSMEGIFIPKKRVIEMIQVTINSLQVQT

SEQ ID NO: 26283 - protein, 26 aa, Artificial Sequence
  Cyclic GFR-binding peptide
TSMEGIFIPKKRVIEMIQVTINSLQV

SEQ ID NO: 26284 - protein, 32 aa, Artificial Sequence; identical to SEQ ID NO: 22542
  Cyclic GFR-binding peptide

SEQ ID NO: 26285 - protein, 30 aa, Artificial Sequence; identical to SEQ ID NO: 22543
  Cyclic GFR-binding peptide

SEQ ID NO: 26286 - protein, 35 aa, Artificial Sequence; identical to SEQ ID NO: 22544
  Cyclic GFR-binding peptide
  MOD_RES (2)..(2): Xaa is C or S

SEQ ID NO: 26287 - protein, 40 aa, Artificial Sequence; identical to SEQ ID NO: 22545
  Cyclic GFR-binding peptide
  MOD_RES (2)..(4): Xaa is C or S

SEQ ID NO: 26288 - protein, 29 aa, Artificial Sequence
  Cyclic GFR-binding peptide
ELTSMEGIFIPKKRVIEMIQVTINSLQVQ

SEQ ID NO: 26289 - protein, 45 aa, Artificial Sequence; identical to SEQ ID NO: 22547
  Cyclic GFR-binding peptide
  MOD_RES (2)..(4)..(41): Xaa is C or S

SEQ ID NO: 26290 - protein, 34 aa, Artificial Sequence; identical to SEQ ID NO: 22548
  Cyclic GFR-binding peptide
  MOD_RES (1)..(1): Xaa is C or S

SEQ ID NO: 26291 - protein, 29 aa, Artificial Sequence
  Cyclic GFR-binding peptide
SMEGLLKPKKRVYEMIQVTINSHHVRSPQ

SEQ ID NO: 26292 - protein, 38 aa, Artificial Sequence; identical to SEQ ID NO: 22550
  Cyclic GFR-binding peptide
  MOD_RES (2)..(36): Xaa is C or S

SEQ ID NO: 26293 - protein, 38 aa, Artificial Sequence; identical to SEQ ID NO: 22551
  Cyclic GFR-binding peptide
  MOD_RES (2)..(4)..(38): Xaa is C or S

SEQ ID NO: 26294 - protein, 22 aa, Artificial Sequence
  Cyclic GFR-binding peptide
VQVEKHQGQHPKIRVKAMKVSR

SEQ ID NO: 26295 - protein, 33 aa, Artificial Sequence; identical to SEQ ID NO: 22553
  Cyclic GFR-binding peptide
  MOD_RES (31)..(31): Xaa is C or S

SEQ ID NO: 26296 - protein, 29 aa, Artificial Sequence
  Cyclic GFR-binding peptide
QLFSMEGLHQGQHPKIRMIQMTINSEETP

SEQ ID NO: 26297 - protein, 26 aa, Artificial Sequence
  Cyclic GFR-binding peptide
ELVTAKKHQGQHPKIRIKRMQVPRQG

SEQ ID NO: 26298 - protein, 45 aa, Artificial Sequence; identical to SEQ ID NO: 22556
  Cyclic GFR-binding peptide
  MOD_RES (2)..(4)..(41): Xaa is C or S

SEQ ID NO: 26299 - protein, 32 aa, Artificial Sequence; identical to SEQ ID NO: 22557
  Cyclic GFR-binding peptide

SEQ ID NO: 26300 - protein, 36 aa, Artificial Sequence; identical to SEQ ID NO: 22558
  Cyclic GFR-binding peptide
  MOD_RES (30)..(30): Xaa is C or S

SEQ ID NO: 26301 - protein, 34 aa, Artificial Sequence; identical to SEQ ID NO: 22559
  Cyclic GFR-binding peptide
  MOD_RES (1)..(1): Xaa is C or S

SEQ ID NO: 26302 - protein, 34 aa, Artificial Sequence; identical to SEQ ID NO: 22560
  Cyclic GFR-binding peptide
  MOD_RES (2)..(4): Xaa is C or S

SEQ ID NO: 26303 - protein, 30 aa, Artificial Sequence; identical to SEQ ID NO: 22561
  Cyclic GFR-binding peptide
  MOD_RES (2)..(2): Xaa is C or S

SEQ ID NO: 26304 - protein, 32 aa, Artificial Sequence; identical to SEQ ID NO: 22562
  Cyclic GFR-binding peptide
  MOD_RES (29)..(29): Xaa is C or S

SEQ ID NO: 26305 - protein, 32 aa, Artificial Sequence; identical to SEQ ID NO: 22563
  Cyclic GFR-binding peptide
  MOD_RES (30)..(30): Xaa is C or S

SEQ ID NO: 26306 - protein, 35 aa, Artificial Sequence; identical to SEQ ID NO: 22564
  Cyclic GFR-binding peptide
  MOD_RES (35)..(35): Xaa is C or S

SEQ ID NO: 26307 - protein, 27 aa, Artificial Sequence
  Cyclic GFR-binding peptide
SMEGLFIPKKRVIEMIQVTINSLQVQT

SEQ ID NO: 26308 - protein, 34 aa, Artificial Sequence; identical to SEQ ID NO: 22566
  Cyclic GFR-binding peptide
  MOD_RES (29)..(29): Xaa is C or S

SEQ ID NO: 26309 - protein, 24 aa, Artificial Sequence
  Cyclic GFR-binding peptide
LTSMEGLFIPKKRVIEMIQVTINS

SEQ ID NO: 26310 - protein, 31 aa, Artificial Sequence; identical to SEQ ID NO: 22568
  Cyclic GFR-binding peptide

SEQ ID NO: 26311 - protein, 26 aa, Artificial Sequence
  Cyclic GFR-binding peptide
LFSMEGLHQGQHPKIRMIQMTINSEE

SEQ ID NO: 26312 - protein, 40 aa, Artificial Sequence; identical to SEQ ID NO: 22570
  Cyclic GFR-binding peptide
  MOD_RES (1)..(3)..(37): Xaa is C or S

SEQ ID NO: 26313 - protein, 38 aa, Artificial Sequence; identical to SEQ ID NO: 22571
  Cyclic GFR-binding peptide
  MOD_RES (2)..(36): Xaa is C or S

SEQ ID NO: 26314 - protein, 34 aa, Artificial Sequence; identical to SEQ ID NO: 22572
  Cyclic GFR-binding peptide
  MOD_RES (31)..(31): Xaa is C or S

SEQ ID NO: 26315 - protein, 27 aa, Artificial Sequence
  Cyclic GFR-binding peptide
ELRSMEGILKPKKRVYEMIQVTINSHH

SEQ ID NO: 26316 - protein, 33 aa, Artificial Sequence; identical to SEQ ID NO: 22574
  Cyclic GFR-binding peptide
  MOD_RES (1)..(1): Xaa is C or S

SEQ ID NO: 26317 - protein, 33 aa, Artificial Sequence; identical to SEQ ID NO: 22575
  Cyclic GFR-binding peptide

SEQ ID NO: 26318 - protein, 32 aa, Artificial Sequence; identical to SEQ ID NO: 22576
  Cyclic GFR-binding peptide

SEQ ID NO: 26319 - protein, 28 aa, Artificial Sequence
  Cyclic GFR-binding peptide
RVTAKKLKPKKRVYEIKRVQVPRHHVRS

SEQ ID NO: 26320 - protein, 29 aa, Artificial Sequence
  Cyclic GFR-binding peptide
NHQLFSMEGIHQGQHPKIRMIQMTINSEE

SEQ ID NO: 26321 - protein, 39 aa, Artificial Sequence; identical to SEQ ID NO: 22579
  Cyclic GFR-binding peptide
  MOD_RES (2)..(4)..(38): Xaa is C or S

SEQ ID NO: 26322 - protein, 30 aa, Artificial Sequence; identical to SEQ ID NO: 22580
  Cyclic GFR-binding peptide
  MOD_RES (30)..(30): Xaa is C or S

SEQ ID NO: 26323 - protein, 29 aa, Artificial Sequence
  Cyclic GFR-binding peptide
SMEGLFIPKKRVIEMIQVTINSLQVQTPR

SEQ ID NO: 26324 - protein, 40 aa, Artificial Sequence; identical to SEQ ID NO: 22582
  Cyclic GFR-binding peptide
  MOD_RES (2)..(39): Xaa is C or S

SEQ ID NO: 26325 - protein, 36 aa, Artificial Sequence; identical to SEQ ID NO: 22583
  Cyclic GFR-binding peptide
  MOD_RES (1)..(3): Xaa is C or S

SEQ ID NO: 26326 - protein, 31 aa, Artificial Sequence; identical to SEQ ID NO: 22584
  Cyclic GFR-binding peptide
  MOD_RES (31)..(31): Xaa is C or S

SEQ ID NO: 26327 - protein, 28 aa, Artificial Sequence
  Cyclic GFR-binding peptide
TVQVEKFIPKKRVIEVKAVKVSRLQVQT

SEQ ID NO: 26328 - protein, 35 aa, Artificial Sequence; identical to SEQ ID NO: 22586
  Cyclic GFR-binding peptide

SEQ ID NO: 26329 - protein, 34 aa, Artificial Sequence; identical to SEQ ID NO: 22587
  Cyclic GFR-binding peptide
  MOD_RES (1)..(3): Xaa is C or S

SEQ ID NO: 26330 - protein, 34 aa, Artificial Sequence; identical to SEQ ID NO: 22588
  Cyclic GFR-binding peptide
  MOD_RES (2)..(2): Xaa is C or S

SEQ ID NO: 26331 - protein, 27 aa, Artificial Sequence
  Cyclic GFR-binding peptide
SMEGIHQGQHPKIRMIQMTINSEETPV

SEQ ID NO: 26332 - protein, 34 aa, Artificial Sequence; identical to SEQ ID NO: 22590
  Cyclic GFR-binding peptide
  MOD_RES (1)..(3): Xaa is C or S

SEQ ID NO: 26333 - protein, 32 aa, Artificial Sequence; identical to SEQ ID NO: 22591
  Cyclic GFR-binding peptide

SEQ ID NO: 26334 - protein, 44 aa, Artificial Sequence; identical to SEQ ID NO: 22592
  Cyclic GFR-binding peptide
  MOD_RES (2)..(4)..(41): Xaa is C or S

SEQ ID NO: 26335 - protein, 31 aa, Artificial Sequence; identical to SEQ ID NO: 22593
  Cyclic GFR-binding peptide
  MOD_RES (2)..(2): Xaa is C or S

SEQ ID NO: 26336 - protein, 29 aa, Artificial Sequence
  Cyclic GFR-binding peptide
HDELTVQVEKFIPKKRVIEVKAVKVSRLQ

SEQ ID NO: 26337 - protein, 35 aa, Artificial Sequence; identical to SEQ ID NO: 22595
  Cyclic GFR-binding peptide
  MOD_RES (1)..(3): Xaa is C or S

SEQ ID NO: 26338 - protein, 38 aa, Artificial Sequence; identical to SEQ ID NO: 22596
  Cyclic GFR-binding peptide
  MOD_RES (1)..(38): Xaa is C or S

SEQ ID NO: 26339 - protein, 29 aa, Artificial Sequence
  Cyclic GFR-binding peptide
HQLFSMEGLHQGQHPKIRMIQMTINSEET

SEQ ID NO: 26340 - protein, 40 aa, Artificial Sequence; identical to SEQ ID NO: 22598
  Cyclic GFR-binding peptide
  MOD_RES (1)..(35): Xaa is C or S

SEQ ID NO: 26341 - protein, 24 aa, Artificial Sequence
  Cyclic GFR-binding peptide
LFVQVEKHQGQHPKIRVKAMKVSR

SEQ ID NO: 26342 - protein, 42 aa, Artificial Sequence; identical to SEQ ID NO: 22600
  Cyclic GFR-binding peptide
  MOD_RES (1)..(3)..(40): Xaa is C or S

SEQ ID NO: 26343 - protein, 26 aa, Artificial Sequence
  Cyclic GFR-binding peptide
LRVTAKKLKPKKRVYEIKRVQVPRHH

SEQ ID NO: 26344 - protein, 35 aa, Artificial Sequence; identical to SEQ ID NO: 22602
  Cyclic GFR-binding peptide
  MOD_RES (2)..(2): Xaa is C or S

SEQ ID NO: 26345 - protein, 23 aa, Artificial Sequence
  Cyclic GFR-binding peptide
LVTAKKHQGQHPKIRIKRMQVPR

SEQ ID NO: 26346 - protein, 23 aa, Artificial Sequence
  Cyclic GFR-binding peptide
FVTAKKHQGQHPKIRIKRMQVPR

SEQ ID NO: 26347 - protein, 26 aa, Artificial Sequence
  Cyclic GFR-binding peptide
ELTVQVEKFIPKKRVIEVKAVKVSRL

SEQ ID NO: 26348 - protein, 33 aa, Artificial Sequence; identical to SEQ ID NO: 22606
  Cyclic GFR-binding peptide
  MOD_RES (2)..(2): Xaa is C or S

SEQ ID NO: 26349 - protein, 37 aa, Artificial Sequence; identical to SEQ ID NO: 22607
  Cyclic GFR-binding peptide
  MOD_RES (1)..(35): Xaa is C or S

SEQ ID NO: 26350 - protein, 31 aa, Artificial Sequence; identical to SEQ ID NO: 22608
  Cyclic GFR-binding peptide

SEQ ID NO: 26351 - protein, 30 aa, Artificial Sequence; identical to SEQ ID NO: 22609
  Cyclic GFR-binding peptide
  MOD_RES (28)..(28): Xaa is C or S

SEQ ID NO: 26352 - protein, 28 aa, Artificial Sequence
  Cyclic GFR-binding peptide
KNHQLFVTAKKHQGQHPKIRIKRMQVPR

SEQ ID NO: 26353 - protein, 28 aa, Artificial Sequence
  Cyclic GFR-binding peptide
ELVQVEKHQGQHPKIRVKAMKVSRQGTP

SEQ ID NO: 26354 - protein, 33 aa, Artificial Sequence; identical to SEQ ID NO: 22612
  Cyclic GFR-binding peptide
  MOD_RES (2)..(4): Xaa is C or S

SEQ ID NO: 26355 - protein, 35 aa, Artificial Sequence; identical to SEQ ID NO: 22613
  Cyclic GFR-binding peptide
  MOD_RES (34)..(34): Xaa is C or S

SEQ ID NO: 26356 - protein, 28 aa, Artificial Sequence
  Cyclic GFR-binding peptide
QLFSMEGLHQGQHPKIRMIQMTINSEET

SEQ ID NO: 26357 - protein, 41 aa, Artificial Sequence; identical to SEQ ID NO: 22615
  Cyclic GFR-binding peptide
  MOD_RES (1)..(38): Xaa is C or S

SEQ ID NO: 26358 - protein, 28 aa, Artificial Sequence
  Cyclic GFR-binding peptide
HDELTSMEGIFIPKKRVIEMIQVTINSL

SEQ ID NO: 26359 - protein, 29 aa, Artificial Sequence
  Cyclic GFR-binding peptide
LFSMEGIHQGQHPKIRMIQMTINSEETPV

SEQ ID NO: 26360 - protein, 26 aa, Artificial Sequence
  Cyclic GFR-binding peptide
SMEGLFIPKKRVIEMIQVTINSLQVQ

SEQ ID NO: 26361 - protein, 30 aa, Artificial Sequence; identical to SEQ ID NO: 22619
  Cyclic GFR-binding peptide

SEQ ID NO: 26362 - protein, 31 aa, Artificial Sequence; identical to SEQ ID NO: 22620
  Cyclic GFR-binding peptide
  MOD_RES (1)..(3): Xaa is C or S

SEQ ID NO: 26363 - protein, 40 aa, Artificial Sequence; identical to SEQ ID NO: 22621
  Cyclic GFR-binding peptide
  MOD_RES (1)..(3)..(37): Xaa is C or S

SEQ ID NO: 26364 - protein, 30 aa, Artificial Sequence; identical to SEQ ID NO: 22622
  Cyclic GFR-binding peptide

SEQ ID NO: 26365 - protein, 38 aa, Artificial Sequence; identical to SEQ ID NO: 22623
  Cyclic GFR-binding peptide
  MOD_RES (32)..(32): Xaa is C or S

SEQ ID NO: 26366 - protein, 28 aa, Artificial Sequence
  Cyclic GFR-binding peptide
HEELVTAKKHQGQHPKIRIKRMQVPRQG

SEQ ID NO: 26367 - protein, 35 aa, Artificial Sequence; identical to SEQ ID NO: 22625
  Cyclic GFR-binding peptide
  MOD_RES (1)..(35): Xaa is C or S

SEQ ID NO: 26368 - protein, 38 aa, Artificial Sequence; identical to SEQ ID NO: 22626
  Cyclic GFR-binding peptide
  MOD_RES (2)..(2): Xaa is C or S

SEQ ID NO: 26369 - protein, 24 aa, Artificial Sequence
  Cyclic GFR-binding peptide
VTAKKLKPKKRVYEIKRVQVPRHH

SEQ ID NO: 26370 - protein, 34 aa, Artificial Sequence; identical to SEQ ID NO: 22628
  Cyclic GFR-binding peptide
  MOD_RES (30)..(30): Xaa is C or S

SEQ ID NO: 26371 - protein, 32 aa, Artificial Sequence; identical to SEQ ID NO: 22629
  Cyclic GFR-binding peptide

SEQ ID NO: 26372 - protein, 38 aa, Artificial Sequence; identical to SEQ ID NO: 22630
  Cyclic GFR-binding peptide
  MOD_RES (1)..(3): Xaa is C or S

SEQ ID NO: 26373 - protein, 29 aa, Artificial Sequence
  Cyclic GFR-binding peptide
NHQLFVQVEKHQGQHPKIRVKAMKVSREE

SEQ ID NO: 26374 - protein, 30 aa, Artificial Sequence; identical to SEQ ID NO: 22632
  Cyclic GFR-binding peptide

SEQ ID NO: 26375 - protein, 34 aa, Artificial Sequence; identical to SEQ ID NO: 22633
  Cyclic GFR-binding peptide
  MOD_RES (33)..(33): Xaa is C or S

SEQ ID NO: 26376 - protein, 33 aa, Artificial Sequence; identical to SEQ ID NO: 22634
  Cyclic GFR-binding peptide
  MOD_RES (1)..(3): Xaa is C or S

SEQ ID NO: 26377 - protein, 25 aa, Artificial Sequence
  Cyclic GFR-binding peptide
LSMEGIHQGQHPKIRMIQMTINSQG

SEQ ID NO: 26378 - protein, 30 aa, Artificial Sequence; identical to SEQ ID NO: 22636
  Cyclic GFR-binding peptide
  MOD_RES (1)..(1): Xaa is C or S

SEQ ID NO: 26379 - protein, 36 aa, Artificial Sequence; identical to SEQ ID NO: 22637
  Cyclic GFR-binding peptide

SEQ ID NO: 26380 - protein, 36 aa, Artificial Sequence; identical to SEQ ID NO: 22638
  Cyclic GFR-binding peptide
  MOD_RES (1)..(1): Xaa is C or S

SEQ ID NO: 26381 - protein, 31 aa, Artificial Sequence; identical to SEQ ID NO: 22639
  Cyclic GFR-binding peptide
  MOD_RES (30)..(30): Xaa is C or S

SEQ ID NO: 26382 - protein, 33 aa, Artificial Sequence; identical to SEQ ID NO: 22640
  Cyclic GFR-binding peptide

SEQ ID NO: 26383 - protein, 35 aa, Artificial Sequence; identical to SEQ ID NO: 22641
  Cyclic GFR-binding peptide
  MOD_RES (33)..(33): Xaa is C or S

SEQ ID NO: 26384 - protein, 30 aa, Artificial Sequence; identical to SEQ ID NO: 22642
  Cyclic GFR-binding peptide

SEQ ID NO: 26385 - protein, 35 aa, Artificial Sequence; identical to SEQ ID NO: 22643
  Cyclic GFR-binding peptide
  MOD_RES (2)..(4): Xaa is C or S

SEQ ID NO: 26386 - protein, 32 aa, Artificial Sequence; identical to SEQ ID NO: 22644
  Cyclic GFR-binding peptide
  MOD_RES (32)..(32): Xaa is C or S

SEQ ID NO: 26387 - protein, 35 aa, Artificial Sequence; identical to SEQ ID NO: 22645
  Cyclic GFR-binding peptide
  MOD_RES (31)..(31): Xaa is C or S

SEQ ID NO: 26388 - protein, 34 aa, Artificial Sequence; identical to SEQ ID NO: 22646
  Cyclic GFR-binding peptide
  MOD_RES (34)..(34): Xaa is C or S

SEQ ID NO: 26389 - protein, 36 aa, Artificial Sequence; identical to SEQ ID NO: 22647
  Cyclic GFR-binding peptide

SEQ ID NO: 26390 - protein, 44 aa, Artificial Sequence; identical to SEQ ID NO: 22648
  Cyclic GFR-binding peptide
  MOD_RES (2)..(4)..(41): Xaa is C or S

SEQ ID NO: 26391 - protein, 25 aa, Artificial Sequence
  Cyclic GFR-binding peptide
QLFVTAKKHQGQHPKIRIKRMQVPR

SEQ ID NO: 26392 - protein, 31 aa, Artificial Sequence; identical to SEQ ID NO: 22650
  Cyclic GFR-binding peptide
  MOD_RES (28)..(28): Xaa is C or S

SEQ ID NO: 26393 - protein, 30 aa, Artificial Sequence; identical to SEQ ID NO: 22651
  Cyclic GFR-binding peptide
  MOD_RES (30)..(30): Xaa is C or S

SEQ ID NO: 26394 - protein, 27 aa, Artificial Sequence
  Cyclic GFR-binding peptide
EELRSMEGLLKPKKRVYEMIQVTINSH

SEQ ID NO: 26395 - protein, 34 aa, Artificial Sequence; identical to SEQ ID NO: 22653
  Cyclic GFR-binding peptide
  MOD_RES (32)..(32): Xaa is C or S

SEQ ID NO: 26396 - protein, 34 aa, Artificial Sequence; identical to SEQ ID NO: 22654
  Cyclic GFR-binding peptide
  MOD_RES (28)..(28): Xaa is C or S

SEQ ID NO: 26397 - protein, 44 aa, Artificial Sequence; identical to SEQ ID NO: 22655
  Cyclic GFR-binding peptide
  MOD_RES (2)..(4)..(41): Xaa is C or S

SEQ ID NO: 26398 - protein, 40 aa, Artificial Sequence; identical to SEQ ID NO: 22656
  Cyclic GFR-binding peptide
  MOD_RES (37)..(37): Xaa is C or S

SEQ ID NO: 26399 - protein, 24 aa, Artificial Sequence
  Cyclic GFR-binding peptide
TSMEGLFIPKKRVIEMIQVTINSL

SEQ ID NO: 26400 - protein, 31 aa, Artificial Sequence; identical to SEQ ID NO: 22658
  Cyclic GFR-binding peptide
  MOD_RES (28)..(28): Xaa is C or S

SEQ ID NO: 26401 - protein, 41 aa, Artificial Sequence; identical to SEQ ID NO: 22659
  Cyclic GFR-binding peptide
  MOD_RES (2)..(39): Xaa is C or S

SEQ ID NO: 26402 - protein, 36 aa, Artificial Sequence; identical to SEQ ID NO: 22660
  Cyclic GFR-binding peptide
  MOD_RES (33)..(33): Xaa is C or S

SEQ ID NO: 26403 - protein, 41 aa, Artificial Sequence; identical to SEQ ID NO: 22661
  Cyclic GFR-binding peptide
  MOD_RES (2)..(4)..(41): Xaa is C or S

SEQ ID NO: 26404 - protein, 38 aa, Artificial Sequence; identical to SEQ ID NO: 22662
  Cyclic GFR-binding peptide
  MOD_RES (33)..(33): Xaa is C or S

SEQ ID NO: 26405 - protein, 39 aa, Artificial Sequence; identical to SEQ ID NO: 22663
  Cyclic GFR-binding peptide
  MOD_RES (33)..(33): Xaa is C or S

SEQ ID NO: 26406 - protein, 30 aa, Artificial Sequence; identical to SEQ ID NO: 22664
  Cyclic GFR-binding peptide

SEQ ID NO: 26407 - protein, 28 aa, Artificial Sequence
  Cyclic GFR-binding peptide
ELRVTAKKLKPKKRVYEIKRVQVPRHHV

SEQ ID NO: 26408 - protein, 34 aa, Artificial Sequence; identical to SEQ ID NO: 22666
  Cyclic GFR-binding peptide
  MOD_RES (33)..(33): Xaa is C or S

SEQ ID NO: 26409 - protein, 33 aa, Artificial Sequence; identical to SEQ ID NO: 22667
  Cyclic GFR-binding peptide
  MOD_RES (31)..(31): Xaa is C or S

SEQ ID NO: 26410 - protein, 34 aa, Artificial Sequence; identical to SEQ ID NO: 22668
  Cyclic GFR-binding peptide
  MOD_RES (31)..(31): Xaa is C or S

SEQ ID NO: 26411 - protein, 45 aa, Artificial Sequence; identical to SEQ ID NO: 22669
  Cyclic GFR-binding peptide
  MOD_RES (2)..(4)..(41): Xaa is C or S

SEQ ID NO: 26412 - protein, 33 aa, Artificial Sequence; identical to SEQ ID NO: 22670
  Cyclic GFR-binding peptide
  MOD_RES (30)..(30): Xaa is C or S

SEQ ID NO: 26413 - protein, 25 aa, Artificial Sequence
  Cyclic GFR-binding peptide
EELVQVEKHQGQHPKIRVKAMKVSR

SEQ ID NO: 26414 - protein, 37 aa, Artificial Sequence; identical to SEQ ID NO: 22672
  Cyclic GFR-binding peptide
  MOD_RES (1)..(3): Xaa is C or S

SEQ ID NO: 26415 - protein, 26 aa, Artificial Sequence
  Cyclic GFR-binding peptide
LFVTAKKHQGQHPKIRIKRMQVPREE

SEQ ID NO: 26416 - protein, 32 aa, Artificial Sequence; identical to SEQ ID NO: 22674
  Cyclic GFR-binding peptide
  MOD_RES (1)..(1): Xaa is C or S

SEQ ID NO: 26417 - protein, 36 aa, Artificial Sequence; identical to SEQ ID NO: 22675
  Cyclic GFR-binding peptide
  MOD_RES (30)..(30): Xaa is C or S

SEQ ID NO: 26418 - protein, 33 aa, Artificial Sequence; identical to SEQ ID NO: 22676
  Cyclic GFR-binding peptide
  MOD_RES (29)..(29): Xaa is C or S

SEQ ID NO: 26419 - protein, 34 aa, Artificial Sequence; identical to SEQ ID NO: 22677
  Cyclic GFR-binding peptide
  MOD_RES (31)..(31): Xaa is C or S

SEQ ID NO: 26420 - protein, 40 aa, Artificial Sequence; identical to SEQ ID NO: 22678
  Cyclic GFR-binding peptide
  MOD_RES (34)..(34): Xaa is C or S

SEQ ID NO: 26421 - protein, 37 aa, Artificial Sequence; identical to SEQ ID NO: 22679
  Cyclic GFR-binding peptide
  MOD_RES (33)..(33): Xaa is C or S

SEQ ID NO: 26422 - protein, 34 aa, Artificial Sequence; identical to SEQ ID NO: 22680
  Cyclic GFR-binding peptide
  MOD_RES (29)..(29): Xaa is C or S

SEQ ID NO: 26423 - protein, 41 aa, Artificial Sequence; identical to SEQ ID NO: 22681
  Cyclic GFR-binding peptide
  MOD_RES (2)..(36): Xaa is C or S

SEQ ID NO: 26424 - protein, 41 aa, Artificial Sequence; identical to SEQ ID NO: 22682
  Cyclic GFR-binding peptide
  MOD_RES (1)..(38): Xaa is C or S

SEQ ID NO: 26425 - protein, 40 aa, Artificial Sequence; identical to SEQ ID NO: 22683
  Cyclic GFR-binding peptide
  MOD_RES (2)..(36): Xaa is C or S

SEQ ID NO: 26426 - protein, 24 aa, Artificial Sequence
  Cyclic GFR-binding peptide
FSMEGLHQGQHPKIRMIQMTINSE

SEQ ID NO: 26427 - protein, 27 aa, Artificial Sequence
  Cyclic GFR-binding peptide
ELRVTAKKLKPKKRVYEIKRVQVPRHH

SEQ ID NO: 26428 - protein, 29 aa, Artificial Sequence
  Cyclic GFR-binding peptide
LTSMEGLFIPKKRVIEMIQVTINSLQVQT

SEQ ID NO: 26429 - protein, 28 aa, Artificial Sequence
  Cyclic GFR-binding peptide
LHEELRSMEGILKPKKRVYEMIQVTINS

SEQ ID NO: 26430 - protein, 27 aa, Artificial Sequence
  Cyclic GFR-binding peptide
SMEGILKPKKRVYEMIQVTINSHHVRS

SEQ ID NO: 26431 - protein, 36 aa, Artificial Sequence; identical to SEQ ID NO: 22689
  Cyclic GFR-binding peptide
  MOD_RES (34)..(34): Xaa is C or S

SEQ ID NO: 26432 - protein, 44 aa, Artificial Sequence; identical to SEQ ID NO: 22690
  Cyclic GFR-binding peptide
  MOD_RES (2)..(4)..(38): Xaa is C or S

SEQ ID NO: 26433 - protein, 32 aa, Artificial Sequence; identical to SEQ ID NO: 22691
  Cyclic GFR-binding peptide
  MOD_RES (2)..(2): Xaa is C or S

SEQ ID NO: 26434 - protein, 36 aa, Artificial Sequence; identical to SEQ ID NO: 22692
  Cyclic GFR-binding peptide
  MOD_RES (1)..(1): Xaa is C or S

SEQ ID NO: 26435 - protein, 42 aa, Artificial Sequence; identical to SEQ ID NO: 22693
  Cyclic GFR-binding peptide
  MOD_RES (2)..(36): Xaa is C or S

SEQ ID NO: 26436 - protein, 38 aa, Artificial Sequence; identical to SEQ ID NO: 22694
  Cyclic GFR-binding peptide
  MOD_RES (1)..(3): Xaa is C or S

SEQ ID NO: 26437 - protein, 32 aa, Artificial Sequence; identical to SEQ ID NO: 22695
  Cyclic GFR-binding peptide
  MOD_RES (1)..(1): Xaa is C or S

SEQ ID NO: 26438 - protein, 23 aa, Artificial Sequence
  Cyclic GFR-binding peptide
SMEGIFIPKKRVIEMIQVTINSL

SEQ ID NO: 26439 - protein, 35 aa, Artificial Sequence; identical to SEQ ID NO: 22697
  Cyclic GFR-binding peptide
  MOD_RES (1)..(3): Xaa is C or S

SEQ ID NO: 26440 - protein, 40 aa, Artificial Sequence; identical to SEQ ID NO: 22698
  Cyclic GFR-binding peptide
  MOD_RES (1)..(3)..(37): Xaa is C or S

SEQ ID NO: 26441 - protein, 36 aa, Artificial Sequence; identical to SEQ ID NO: 22699
  Cyclic GFR-binding peptide
  MOD_RES (2)..(4): Xaa is C or S

SEQ ID NO: 26442 - protein, 43 aa, Artificial Sequence; identical to SEQ ID NO: 22700
  Cyclic GFR-binding peptide
  MOD_RES (2)..(4)..(38): Xaa is C or S

SEQ ID NO: 26443 - protein, 31 aa, Artificial Sequence; identical to SEQ ID NO: 22701
  Cyclic GFR-binding peptide
  MOD_RES (1)..(1): Xaa is C or S

SEQ ID NO: 26444 - protein, 33 aa, Artificial Sequence; identical to SEQ ID NO: 22702
  Cyclic GFR-binding peptide
  MOD_RES (2)..(2): Xaa is C or S

SEQ ID NO: 26445 - protein, 32 aa, Artificial Sequence; identical to SEQ ID NO: 22703
  Cyclic GFR-binding peptide
  MOD_RES (30)..(30): Xaa is C or S

SEQ ID NO: 26446 - protein, 27 aa, Artificial Sequence
  Cyclic GFR-binding peptide
LRVTAKKLKPKKRVYEIKRVQVPRHHV

SEQ ID NO: 26447 - protein, 28 aa, Artificial Sequence
  Cyclic GFR-binding peptide
DELTVQVEKFIPKKRVIEVKAVKVSRLQ

SEQ ID NO: 26448 - protein, 28 aa, Artificial Sequence
  Cyclic GFR-binding peptide
LHEELRVTAKKLKPKKRVYEIKRVQVPR

SEQ ID NO: 26449 - protein, 28 aa, Artificial Sequence
  Cyclic GFR-binding peptide
LTSMEGIFIPKKRVIEMIQVTINSLQVQ

SEQ ID NO: 26450 - protein, 32 aa, Artificial Sequence; identical to SEQ ID NO: 22708
  Cyclic GFR-binding peptide

SEQ ID NO: 26451 - protein, 29 aa, Artificial Sequence
  Cyclic GFR-binding peptide
ALHDELTSMEGLFIPKKRVIEMIQVTINS

SEQ ID NO: 26452 - protein, 38 aa, Artificial Sequence; identical to SEQ ID NO: 22710
  Cyclic GFR-binding peptide
  MOD_RES (35)..(35): Xaa is C or S

SEQ ID NO: 26453 - protein, 35 aa, Artificial Sequence; identical to SEQ ID NO: 22711
  Cyclic GFR-binding peptide
  MOD_RES (1)..(1): Xaa is C or S

SEQ ID NO: 26454 - protein, 32 aa, Artificial Sequence; identical to SEQ ID NO: 22712
  Cyclic GFR-binding peptide
  MOD_RES (28)..(28): Xaa is C or S

SEQ ID NO: 26455 - protein, 32 aa, Artificial Sequence; identical to SEQ ID NO: 22713
  Cyclic GFR-binding peptide
  MOD_RES (28)..(28): Xaa is C or S

SEQ ID NO: 26456 - protein, 40 aa, Artificial Sequence; identical to SEQ ID NO: 22714
  Cyclic GFR-binding peptide
  MOD_RES (2)..(4)..(38): Xaa is C or S

SEQ ID NO: 26457 - protein, 41 aa, Artificial Sequence; identical to SEQ ID NO: 22715
  Cyclic GFR-binding peptide
  MOD_RES (1)..(3)..(37): Xaa is C or S

SEQ ID NO: 26458 - protein, 26 aa, Artificial Sequence
  Cyclic GFR-binding peptide
FVTAKKHQGQHPKIRIKRMQVPREET

SEQ ID NO: 26459 - protein, 39 aa, Artificial Sequence; identical to SEQ ID NO: 22717
  Cyclic GFR-binding peptide
  MOD_RES (35)..(35): Xaa is C or S

SEQ ID NO: 26460 - protein, 38 aa, Artificial Sequence; identical to SEQ ID NO: 22718
  Cyclic GFR-binding peptide
  MOD_RES (2)..(2): Xaa is C or S

SEQ ID NO: 26461 - protein, 30 aa, Artificial Sequence; identical to SEQ ID NO: 22719
  Cyclic GFR-binding peptide

SEQ ID NO: 26462 - protein, 31 aa, Artificial Sequence; identical to SEQ ID NO: 22720
  Cyclic GFR-binding peptide
  MOD_RES (2)..(2): Xaa is C or S

SEQ ID NO: 26463 - protein, 40 aa, Artificial Sequence; identical to SEQ ID NO: 22721
  Cyclic GFR-binding peptide
  MOD_RES (2)..(39): Xaa is C or S

SEQ ID NO: 26464 - protein, 30 aa, Artificial Sequence; identical to SEQ ID NO: 22722
  Cyclic GFR-binding peptide
  MOD_RES (2)..(2): Xaa is C or S

SEQ ID NO: 26465 - protein, 29 aa, Artificial Sequence
  Cyclic GFR-binding peptide
TSMEGIFIPKKRVIEMIQVTINSLQVQTP

SEQ ID NO: 26466 - protein, 39 aa, Artificial Sequence; identical to SEQ ID NO: 22724
  Cyclic GFR-binding peptide
  MOD_RES (2)..(4)..(38): Xaa is C or S

SEQ ID NO: 26467 - protein, 39 aa, Artificial Sequence; identical to SEQ ID NO: 22725
  Cyclic GFR-binding peptide
  MOD_RES (35)..(35): Xaa is C or S

SEQ ID NO: 26468 - protein, 42 aa, Artificial Sequence; identical to SEQ ID NO: 22726
  Cyclic GFR-binding peptide
  MOD_RES (1)..(3)..(37): Xaa is C or S

SEQ ID NO: 26469 - protein, 31 aa, Artificial Sequence; identical to SEQ ID NO: 22727
  Cyclic GFR-binding peptide
  MOD_RES (31)..(31): Xaa is C or S

SEQ ID NO: 26470 - protein, 31 aa, Artificial Sequence; identical to SEQ ID NO: 22728
  Cyclic GFR-binding peptide
  MOD_RES (1)..(3): Xaa is C or S

SEQ ID NO: 26471 - protein, 31 aa, Artificial Sequence; identical to SEQ ID NO: 22729
  Cyclic GFR-binding peptide
  MOD_RES (30)..(30): Xaa is C or S

SEQ ID NO: 26472 - protein, 40 aa, Artificial Sequence; identical to SEQ ID NO: 22730
  Cyclic GFR-binding peptide
  MOD_RES (36)..(36): Xaa is C or S

SEQ ID NO: 26473 - protein, 31 aa, Artificial Sequence; identical to SEQ ID NO: 22731
  Cyclic GFR-binding peptide
  MOD_RES (1)..(3): Xaa is C or S

SEQ ID NO: 26474 - protein, 33 aa, Artificial Sequence; identical to SEQ ID NO: 22732
  Cyclic GFR-binding peptide
  MOD_RES (32)..(32): Xaa is C or S

SEQ ID NO: 26475 - protein, 40 aa, Artificial Sequence; identical to SEQ ID NO: 22733
  Cyclic GFR-binding peptide
  MOD_RES (1)..(3)..(40): Xaa is C or S

SEQ ID NO: 26476 - protein, 41 aa, Artificial Sequence; identical to SEQ ID NO: 22734
  Cyclic GFR-binding peptide
  MOD_RES (2)..(4)..(41): Xaa is C or S

SEQ ID NO: 26477 - protein, 29 aa, Artificial Sequence
  Cyclic GFR-binding peptide
LTSMEGIFIPKKRVIEMIQVTINSLQVQT

SEQ ID NO: 26478 - protein, 26 aa, Artificial Sequence
  Cyclic GFR-binding peptide
DELTSMEGLFIPKKRVIEMIQVTINS

SEQ ID NO: 26479 - protein, 37 aa, Artificial Sequence; identical to SEQ ID NO: 22737
  Cyclic GFR-binding peptide
  MOD_RES (37)..(37): Xaa is C or S

SEQ ID NO: 26480 - protein, 31 aa, Artificial Sequence; identical to SEQ ID NO: 22738
  Cyclic GFR-binding peptide

SEQ ID NO: 26481 - protein, 42 aa, Artificial Sequence; identical to SEQ ID NO: 22739
  Cyclic GFR-binding peptide
  MOD_RES (2)..(36): Xaa is C or S

SEQ ID NO: 26482 - protein, 30 aa, Artificial Sequence; identical to SEQ ID NO: 22740
  Cyclic GFR-binding peptide

SEQ ID NO: 26483 - protein, 36 aa, Artificial Sequence; identical to SEQ ID NO: 22741
  Cyclic GFR-binding peptide
  MOD_RES (2)..(2): Xaa is C or S

SEQ ID NO: 26484 - protein, 23 aa, Artificial Sequence
  Cyclic GFR-binding peptide
SMEGIHQGQHPKIRMIQMTINSE

SEQ ID NO: 26485 - protein, 33 aa, Artificial Sequence; identical to SEQ ID NO: 22743
  Cyclic GFR-binding peptide
  MOD_RES (1)..(1): Xaa is C or S

SEQ ID NO: 26486 - protein, 30 aa, Artificial Sequence; identical to SEQ ID NO: 22744
  Cyclic GFR-binding peptide

SEQ ID NO: 26487 - protein, 37 aa, Artificial Sequence; identical to SEQ ID NO: 22745
  Cyclic GFR-binding peptide
  MOD_RES (34)..(34): Xaa is C or S

SEQ ID NO: 26488 - protein, 36 aa, Artificial Sequence; identical to SEQ ID NO: 22746
  Cyclic GFR-binding peptide
  MOD_RES (2)..(4): Xaa is C or S

SEQ ID NO: 26489 - protein, 41 aa, Artificial Sequence; identical to SEQ ID NO: 22747
  Cyclic GFR-binding peptide
  MOD_RES (1)..(3)..(40): Xaa is C or S

SEQ ID NO: 26490 - protein, 34 aa, Artificial Sequence; identical to SEQ ID NO: 22748
  Cyclic GFR-binding peptide
  MOD_RES (1)..(1): Xaa is C or S

SEQ ID NO: 26491 - protein, 39 aa, Artificial Sequence; identical to SEQ ID NO: 22749
  Cyclic GFR-binding peptide
  MOD_RES (35)..(35): Xaa is C or S

SEQ ID NO: 26492 - protein, 33 aa, Artificial Sequence; identical to SEQ ID NO: 22750
  Cyclic GFR-binding peptide

SEQ ID NO: 26493 - protein, 39 aa, Artificial Sequence; identical to SEQ ID NO: 22751
  Cyclic GFR-binding peptide
  MOD_RES (2)..(4): Xaa is C or S

SEQ ID NO: 26494 - protein, 37 aa, Artificial Sequence; identical to SEQ ID NO: 22752
  Cyclic GFR-binding peptide
  MOD_RES (32)..(32): Xaa is C or S

SEQ ID NO: 26495 - protein, 34 aa, Artificial Sequence; identical to SEQ ID NO: 22753
  Cyclic GFR-binding peptide

SEQ ID NO: 26496 - protein, 31 aa, Artificial Sequence; identical to SEQ ID NO: 22754
  Cyclic GFR-binding peptide
  MOD_RES (29)..(29): Xaa is C or S

SEQ ID NO: 26497 - protein, 32 aa, Artificial Sequence; identical to SEQ ID NO: 22755
  Cyclic GFR-binding peptide
  MOD_RES (29)..(29): Xaa is C or S

SEQ ID NO: 26498 - protein, 29 aa, Artificial Sequence
  Cyclic GFR-binding peptide
KNHQLFVQVEKHQGQHPKIRVKAMKVSRE

SEQ ID NO: 26499 - protein, 28 aa, Artificial Sequence
  Cyclic GFR-binding peptide
KNHQLFSMEGLHQGQHPKIRMIQMTINS

SEQ ID NO: 26500 - protein, 32 aa, Artificial Sequence; identical to SEQ ID NO: 22758
  Cyclic GFR-binding peptide
  MOD_RES (1)..(3): Xaa is C or S

SEQ ID NO: 26501 - protein, 30 aa, Artificial Sequence; identical to SEQ ID NO: 22759
  Cyclic GFR-binding peptide

SEQ ID NO: 26502 - protein, 34 aa, Artificial Sequence; identical to SEQ ID NO: 22760
  Cyclic GFR-binding peptide
  MOD_RES (34)..(34): Xaa is C or S

SEQ ID NO: 26503 - protein, 28 aa, Artificial Sequence
  Cyclic GFR-binding peptide
LSMEGIHQGQHPKIRMIQMTINSQGTPV

SEQ ID NO: 26504 - protein, 38 aa, Artificial Sequence; identical to SEQ ID NO: 22762
  Cyclic GFR-binding peptide
  MOD_RES (1)..(38): Xaa is C or S

SEQ ID NO: 26505 - protein, 38 aa, Artificial Sequence; identical to SEQ ID NO: 22763
  Cyclic GFR-binding peptide
  MOD_RES (1)..(35): Xaa is C or S

SEQ ID NO: 26506 - protein, 24 aa, Artificial Sequence
  Cyclic GFR-binding peptide
VTAKKHQGQHPKIRIKRMQVPREE

SEQ ID NO: 26507 - protein, 39 aa, Artificial Sequence; identical to SEQ ID NO: 22765
  Cyclic GFR-binding peptide
  MOD_RES (2)..(39): Xaa is C or S

SEQ ID NO: 26508 - protein, 32 aa, Artificial Sequence; identical to SEQ ID NO: 22766
  Cyclic GFR-binding peptide
  MOD_RES (1)..(1): Xaa is C or S

SEQ ID NO: 26509 - protein, 37 aa, Artificial Sequence; identical to SEQ ID NO: 22767
  Cyclic GFR-binding peptide
  MOD_RES (34)..(34): Xaa is C or S

SEQ ID NO: 26510 - protein, 31 aa, Artificial Sequence; identical to SEQ ID NO: 22768
  Cyclic GFR-binding peptide

SEQ ID NO: 26511 - protein, 34 aa, Artificial Sequence; identical to SEQ ID NO: 22769
  Cyclic GFR-binding peptide
  MOD_RES (33)..(33): Xaa is C or S

SEQ ID NO: 26512 - protein, 42 aa, Artificial Sequence; identical to SEQ ID NO: 22770
  Cyclic GFR-binding peptide
  MOD_RES (2)..(4)..(38): Xaa is C or S

SEQ ID NO: 26513 - protein, 35 aa, Artificial Sequence; identical to SEQ ID NO: 22771
  Cyclic GFR-binding peptide
  MOD_RES (1)..(3): Xaa is C or S

SEQ ID NO: 26514 - protein, 23 aa, Artificial Sequence
  Cyclic GFR-binding peptide
FVQVEKHQGQHPKIRVKAMKVSR

SEQ ID NO: 26515 - protein, 30 aa, Artificial Sequence; identical to SEQ ID NO: 22773
  Cyclic GFR-binding peptide
  MOD_RES (2)..(2): Xaa is C or S

SEQ ID NO: 26516 - protein, 37 aa, Artificial Sequence; identical to SEQ ID NO: 22774
  Cyclic GFR-binding peptide
  MOD_RES (1)..(35): Xaa is C or S

SEQ ID NO: 26517 - protein, 23 aa, Artificial Sequence
  Cyclic GFR-binding peptide
LVQVEKHQGQHPKIRVKAMKVSR

SEQ ID NO: 26518 - protein, 35 aa, Artificial Sequence; identical to SEQ ID NO: 22776
  Cyclic GFR-binding peptide
  MOD_RES (1)..(35): Xaa is C or S

SEQ ID NO: 26519 - protein, 41 aa, Artificial Sequence; identical to SEQ ID NO: 22777
  Cyclic GFR-binding peptide
  MOD_RES (1)..(3)..(40): Xaa is C or S

SEQ ID NO: 26520 - protein, 33 aa, Artificial Sequence; identical to SEQ ID NO: 22778
  Cyclic GFR-binding peptide
  MOD_RES (1)..(1): Xaa is C or S

SEQ ID NO: 26521 - protein, 39 aa, Artificial Sequence; identical to SEQ ID NO: 22779
  Cyclic GFR-binding peptide
  MOD_RES (2)..(36): Xaa is C or S

SEQ ID NO: 26522 - protein, 28 aa, Artificial Sequence
  Cyclic GFR-binding peptide
SMEGILKPKKRVYEMIQVTINSHHVRSP

SEQ ID NO: 26523 - protein, 33 aa, Artificial Sequence; identical to SEQ ID NO: 22781
  Cyclic GFR-binding peptide

SEQ ID NO: 26524 - protein, 24 aa, Artificial Sequence
  Cyclic GFR-binding peptide
RSMEGLLKPKKRVYEMIQVTINSH

SEQ ID NO: 26525 - protein, 38 aa, Artificial Sequence; identical to SEQ ID NO: 22783
  Cyclic GFR-binding peptide
  MOD_RES (1)..(3)..(37): Xaa is C or S

SEQ ID NO: 26526 - protein, 28 aa, Artificial Sequence
  Cyclic GFR-binding peptide
LHEELRSMEGLLKPKKRVYEMIQVTINS

SEQ ID NO: 26527 - protein, 29 aa, Artificial Sequence
  Cyclic GFR-binding peptide
  MOD_RES (28)..(28): Xaa is C or S
VQVEKHQGQHPKIRVKAMKVSREETPVXE

SEQ ID NO: 26528 - protein, 33 aa, Artificial Sequence; identical to SEQ ID NO: 22786
  Cyclic GFR-binding peptide
  MOD_RES (2)..(4): Xaa is C or S

SEQ ID NO: 26529 - protein, 38 aa, Artificial Sequence; identical to SEQ ID NO: 22787
  Cyclic GFR-binding peptide
  MOD_RES (33)..(33): Xaa is C or S

SEQ ID NO: 26530 - protein, 33 aa, Artificial Sequence; identical to SEQ ID NO: 22788
  Cyclic GFR-binding peptide
  MOD_RES (28)..(28): Xaa is C or S

SEQ ID NO: 26531 - protein, 29 aa, Artificial Sequence
  Cyclic GFR-binding peptide
EELRVTAKKLKPKKRVYEIKRVQVPRHHV

SEQ ID NO: 26532 - protein, 42 aa, Artificial Sequence; identical to SEQ ID NO: 22790
  Cyclic GFR-binding peptide
  MOD_RES (1)..(38): Xaa is C or S

SEQ ID NO: 26533 - protein, 26 aa, Artificial Sequence
  Cyclic GFR-binding peptide
EELVTAKKHQGQHPKIRIKRMQVPRQ

SEQ ID NO: 26534 - protein, 31 aa, Artificial Sequence; identical to SEQ ID NO: 22792
  Cyclic GFR-binding peptide

SEQ ID NO: 26535 - protein, 34 aa, Artificial Sequence; identical to SEQ ID NO: 22793
  Cyclic GFR-binding peptide
  MOD_RES (2)..(4): Xaa is C or S

SEQ ID NO: 26536 - protein, 23 aa, Artificial Sequence
  Cyclic GFR-binding peptide
TSMEGIFIPKKRVIEMIQVTINS

SEQ ID NO: 26537 - protein, 33 aa, Artificial Sequence; identical to SEQ ID NO: 22795
  Cyclic GFR-binding peptide
  MOD_RES (33)..(33): Xaa is C or S

SEQ ID NO: 26538 - protein, 36 aa, Artificial Sequence; identical to SEQ ID NO: 22796
  Cyclic GFR-binding peptide
  MOD_RES (33)..(33): Xaa is C or S

SEQ ID NO: 26539 - protein, 34 aa, Artificial Sequence; identical to SEQ ID NO: 22797
  Cyclic GFR-binding peptide
  MOD_RES (2)..(2): Xaa is C or S

SEQ ID NO: 26540 - protein, 27 aa, Artificial Sequence
  Cyclic GFR-binding peptide
NHQLFSMEGLHQGQHPKIRMIQMTINS

SEQ ID NO: 26541 - protein, 37 aa, Artificial Sequence; identical to SEQ ID NO: 22799
  Cyclic GFR-binding peptide
  MOD_RES (2)..(4): Xaa is C or S

SEQ ID NO: 26542 - protein, 42 aa, Artificial Sequence; identical to SEQ ID NO: 22800
  Cyclic GFR-binding peptide
  MOD_RES (2)..(4)..(38): Xaa is C or S

SEQ ID NO: 26543 - protein, 28 aa, Artificial Sequence
  Cyclic GFR-binding peptide
LHDELTVQVEKFIPKKRVIEVKAVKVSR

SEQ ID NO: 26544 - protein, 27 aa, Artificial Sequence
  Cyclic GFR-binding peptide
HDELTSMEGIFIPKKRVIEMIQVTINS

SEQ ID NO: 26545 - protein, 33 aa, Artificial Sequence; identical to SEQ ID NO: 22803
  Cyclic GFR-binding peptide
  MOD_RES (30)..(30): Xaa is C or S

SEQ ID NO: 26546 - protein, 39 aa, Artificial Sequence; identical to SEQ ID NO: 22804
  Cyclic GFR-binding peptide
  MOD_RES (37)..(37): Xaa is C or S

SEQ ID NO: 26547 - protein, 32 aa, Artificial Sequence; identical to SEQ ID NO: 22805
  Cyclic GFR-binding peptide

SEQ ID NO: 26548 - protein, 33 aa, Artificial Sequence; identical to SEQ ID NO: 22806
  Cyclic GFR-binding peptide
  MOD_RES (2)..(2): Xaa is C or S

SEQ ID NO: 26549 - protein, 26 aa, Artificial Sequence
  Cyclic GFR-binding peptide
SMEGIHQGQHPKIRMIQMTINSEETP

SEQ ID NO: 26550 - protein, 29 aa, Artificial Sequence
  Cyclic GFR-binding peptide
EELVQVEKHQGQHPKIRVKAMKVSRQGTP

SEQ ID NO: 26551 - protein, 35 aa, Artificial Sequence; identical to SEQ ID NO: 22809
  Cyclic GFR-binding peptide
  MOD_RES (29)..(29): Xaa is C or S

SEQ ID NO: 26552 - protein, 34 aa, Artificial Sequence; identical to SEQ ID NO: 22810
  Cyclic GFR-binding peptide

SEQ ID NO: 26553 - protein, 36 aa, Artificial Sequence; identical to SEQ ID NO: 22811
  Cyclic GFR-binding peptide
  MOD_RES (34)..(34): Xaa is C or S

SEQ ID NO: 26554 - protein, 25 aa, Artificial Sequence
  Cyclic GFR-binding peptide
LRVTAKKLKPKKRVYEIKRVQVPRH

SEQ ID NO: 26555 - protein, 40 aa, Artificial Sequence; identical to SEQ ID NO: 22813
  Cyclic GFR-binding peptide
  MOD_RES (37)..(37): Xaa is C or S

SEQ ID NO: 26556 - protein, 36 aa, Artificial Sequence; identical to SEQ ID NO: 22814
  Cyclic GFR-binding peptide
  MOD_RES (2)..(36): Xaa is C or S

SEQ ID NO: 26557 - protein, 42 aa, Artificial Sequence; identical to SEQ ID NO: 22815
  Cyclic GFR-binding peptide
  MOD_RES (2)..(4)..(41): Xaa is C or S

SEQ ID NO: 26558 - protein, 35 aa, Artificial Sequence; identical to SEQ ID NO: 22816
  Cyclic GFR-binding peptide
  MOD_RES (1)..(1): Xaa is C or S

SEQ ID NO: 26559 - protein, 38 aa, Artificial Sequence; identical to SEQ ID NO: 22817
  Cyclic GFR-binding peptide
  MOD_RES (34)..(34): Xaa is C or S

SEQ ID NO: 26560 - protein, 35 aa, Artificial Sequence; identical to SEQ ID NO: 22818
  Cyclic GFR-binding peptide
  MOD_RES (2)..(2): Xaa is C or S

SEQ ID NO: 26561 - protein, 27 aa, Artificial Sequence
  Cyclic GFR-binding peptide
ELVTAKKHQGQHPKIRIKRMQVPRQGT

SEQ ID NO: 26562 - protein, 35 aa, Artificial Sequence; identical to SEQ ID NO: 22820
  Cyclic GFR-binding peptide
  MOD_RES (1)..(3): Xaa is C or S

SEQ ID NO: 26563 - protein, 33 aa, Artificial Sequence; identical to SEQ ID NO: 22821
  Cyclic GFR-binding peptide
  MOD_RES (33)..(33): Xaa is C or S

SEQ ID NO: 26564 - protein, 31 aa, Artificial Sequence; identical to SEQ ID NO: 22822
  Cyclic GFR-binding peptide

SEQ ID NO: 26565 - protein, 36 aa, Artificial Sequence; identical to SEQ ID NO: 22823
  Cyclic GFR-binding peptide
  MOD_RES (32)..(32): Xaa is C or S

SEQ ID NO: 26566 - protein, 33 aa, Artificial Sequence; identical to SEQ ID NO: 22824
  Cyclic GFR-binding peptide
  MOD_RES (1)..(1): Xaa is C or S

SEQ ID NO: 26567 - protein, 34 aa, Artificial Sequence; identical to SEQ ID NO: 22825
  Cyclic GFR-binding peptide
  MOD_RES (30)..(30): Xaa is C or S

SEQ ID NO: 26568 - protein, 40 aa, Artificial Sequence; identical to SEQ ID NO: 22826
  Cyclic GFR-binding peptide
  MOD_RES (34)..(34): Xaa is C or S

SEQ ID NO: 26569 - protein, 27 aa, Artificial Sequence
  Cyclic GFR-binding peptide
EELSMEGIHQGQHPKIRMIQMTINSQG

SEQ ID NO: 26570 - protein, 35 aa, Artificial Sequence; identical to SEQ ID NO: 22828
  Cyclic GFR-binding peptide
  MOD_RES (34)..(34): Xaa is C or S

SEQ ID NO: 26571 - protein, 30 aa, Artificial Sequence; identical to SEQ ID NO: 22829
  Cyclic GFR-binding peptide

SEQ ID NO: 26572 - protein, 32 aa, Artificial Sequence; identical to SEQ ID NO: 22830
  Cyclic GFR-binding peptide

SEQ ID NO: 26573 - protein, 31 aa, Artificial Sequence; identical to SEQ ID NO: 22831
  Cyclic GFR-binding peptide
  MOD_RES (1)..(1): Xaa is C or S

SEQ ID NO: 26574 - protein, 38 aa, Artificial Sequence; identical to SEQ ID NO: 22832
  Cyclic GFR-binding peptide
  MOD_RES (1)..(35): Xaa is C or S

SEQ ID NO: 26575 - protein, 25 aa, Artificial Sequence
  Cyclic GFR-binding peptide
QLFVQVEKHQGQHPKIRVKAMKVSR

SEQ ID NO: 26576 - protein, 35 aa, Artificial Sequence; identical to SEQ ID NO: 22834
  Cyclic GFR-binding peptide
  MOD_RES (35)..(35): Xaa is C or S

SEQ ID NO: 26577 - protein, 34 aa, Artificial Sequence; identical to SEQ ID NO: 22835
  Cyclic GFR-binding peptide
  MOD_RES (32)..(32): Xaa is C or S

SEQ ID NO: 26578 - protein, 36 aa, Artificial Sequence; identical to SEQ ID NO: 22836
  Cyclic GFR-binding peptide
  MOD_RES (30)..(30): Xaa is C or S

SEQ ID NO: 26579 - protein, 28 aa, Artificial Sequence
  Cyclic GFR-binding peptide
ELTSMEGIFIPKKRVIEMIQVTINSLQV

SEQ ID NO: 26580 - protein, 30 aa, Artificial Sequence; identical to SEQ ID NO: 22838
  Cyclic GFR-binding peptide

SEQ ID NO: 26581 - protein, 36 aa, Artificial Sequence; identical to SEQ ID NO: 22839
  Cyclic GFR-binding peptide
  MOD_RES (2)..(36): Xaa is C or S

SEQ ID NO: 26582 - protein, 34 aa, Artificial Sequence; identical to SEQ ID NO: 22840
  Cyclic GFR-binding peptide
  MOD_RES (30)..(30): Xaa is C or S

SEQ ID NO: 26583 - protein, 31 aa, Artificial Sequence; identical to SEQ ID NO: 22841
  Cyclic GFR-binding peptide

SEQ ID NO: 26584 - protein, 35 aa, Artificial Sequence; identical to SEQ ID NO: 22842
  Cyclic GFR-binding peptide
  MOD_RES (34)..(34): Xaa is C or S

SEQ ID NO: 26585 - protein, 34 aa, Artificial Sequence; identical to SEQ ID NO: 22843
  Cyclic GFR-binding peptide
  MOD_RES (29)..(29): Xaa is C or S

SEQ ID NO: 26586 - protein, 36 aa, Artificial Sequence; identical to SEQ ID NO: 22844
  Cyclic GFR-binding peptide
  MOD_RES (2)..(2): Xaa is C or S

SEQ ID NO: 26587 - protein, 31 aa, Artificial Sequence; identical to SEQ ID NO: 22845
  Cyclic GFR-binding peptide

SEQ ID NO: 26588 - protein, 27 aa, Artificial Sequence
  Cyclic GFR-binding peptide
FVTAKKHQGQHPKIRIKRMQVPREETP

SEQ ID NO: 26589 - protein, 25 aa, Artificial Sequence
  Cyclic GFR-binding peptide
SMEGIHQGQHPKIRMIQMTINSQGT

SEQ ID NO: 26590 - protein, 35 aa, Artificial Sequence; identical to SEQ ID NO: 22848
  Cyclic GFR-binding peptide
  MOD_RES (33)..(33): Xaa is C or S

SEQ ID NO: 26591 - protein, 41 aa, Artificial Sequence; identical to SEQ ID NO: 22849
  Cyclic GFR-binding peptide
  MOD_RES (37)..(37): Xaa is C or S

SEQ ID NO: 26592 - protein, 30 aa, Artificial Sequence; identical to SEQ ID NO: 22850
  Cyclic GFR-binding peptide

SEQ ID NO: 26593 - protein, 36 aa, Artificial Sequence; identical to SEQ ID NO: 22851
  Cyclic GFR-binding peptide
  MOD_RES (36)..(36): Xaa is C or S

SEQ ID NO: 26594 - protein, 35 aa, Artificial Sequence; identical to SEQ ID NO: 22852
  Cyclic GFR-binding peptide
  MOD_RES (2)..(4): Xaa is C or S

SEQ ID NO: 26595 - protein, 34 aa, Artificial Sequence; identical to SEQ ID NO: 22853
  Cyclic GFR-binding peptide
  MOD_RES (31)..(31): Xaa is C or S

SEQ ID NO: 26596 - protein, 29 aa, Artificial Sequence
  Cyclic GFR-binding peptide
  MOD_RES (28)..(28): Xaa is C or S
SMEGIHQGQHPKIRMIQMTINSEETPVXE

SEQ ID NO: 26597 - protein, 35 aa, Artificial Sequence; identical to SEQ ID NO: 22855
  Cyclic GFR-binding peptide
  MOD_RES (32)..(32): Xaa is C or S

SEQ ID NO: 26598 - protein, 35 aa, Artificial Sequence; identical to SEQ ID NO: 22856
  Cyclic GFR-binding peptide
  MOD_RES (1)..(3): Xaa is C or S

SEQ ID NO: 26599 - protein, 32 aa, Artificial Sequence; identical to SEQ ID NO: 22857
  Cyclic GFR-binding peptide

SEQ ID NO: 26600 - protein, 42 aa, Artificial Sequence; identical to SEQ ID NO: 22858
  Cyclic GFR-binding peptide
  MOD_RES (1)..(3)..(40): Xaa is C or S

SEQ ID NO: 26601 - protein, 35 aa, Artificial Sequence; identical to SEQ ID NO: 22859
  Cyclic GFR-binding peptide
  MOD_RES (32)..(32): Xaa is C or S

SEQ ID NO: 26602 - protein, 30 aa, Artificial Sequence; identical to SEQ ID NO: 22860
  Cyclic GFR-binding peptide

SEQ ID NO: 26603 - protein, 32 aa, Artificial Sequence; identical to SEQ ID NO: 22861
  Cyclic GFR-binding peptide
  MOD_RES (1)..(1): Xaa is C or S

SEQ ID NO: 26604 - protein, 30 aa, Artificial Sequence; identical to SEQ ID NO: 22862
  Cyclic GFR-binding peptide

SEQ ID NO: 26605 - protein, 34 aa, Artificial Sequence; identical to SEQ ID NO: 22863
  Cyclic GFR-binding peptide
  MOD_RES (30)..(30): Xaa is C or S

SEQ ID NO: 26606 - protein, 31 aa, Artificial Sequence; identical to SEQ ID NO: 22864
  Cyclic GFR-binding peptide

SEQ ID NO: 26607 - protein, 32 aa, Artificial Sequence; identical to SEQ ID NO: 22865
  Cyclic GFR-binding peptide

SEQ ID NO: 26608 - protein, 28 aa, Artificial Sequence
  Cyclic GFR-binding peptide
  MOD_RES (28)..(28): Xaa is C or S
VQVEKHQGQHPKIRVKAMKVSRQGTPVX

SEQ ID NO: 26609 - protein, 34 aa, Artificial Sequence; identical to SEQ ID NO: 22867
  Cyclic GFR-binding peptide
  MOD_RES (2)..(4): Xaa is C or S

SEQ ID NO: 26610 - protein, 33 aa, Artificial Sequence; identical to SEQ ID NO: 22868
  Cyclic GFR-binding peptide
  MOD_RES (1)..(1): Xaa is C or S

SEQ ID NO: 26611 - protein, 33 aa, Artificial Sequence; identical to SEQ ID NO: 22869
  Cyclic GFR-binding peptide
  MOD_RES (2)..(4): Xaa is C or S

SEQ ID NO: 26612 - protein, 37 aa, Artificial Sequence; identical to SEQ ID NO: 22870
  Cyclic GFR-binding peptide
  MOD_RES (34)..(34): Xaa is C or S

SEQ ID NO: 26613 - protein, 27 aa, Artificial Sequence
  Cyclic GFR-binding peptide
FSMEGLHQGQHPKIRMIQMTINSEETP

SEQ ID NO: 26614 - protein, 36 aa, Artificial Sequence; identical to SEQ ID NO: 22872
  Cyclic GFR-binding peptide
  MOD_RES (35)..(35): Xaa is C or S

SEQ ID NO: 26615 - protein, 31 aa, Artificial Sequence; identical to SEQ ID NO: 22873
  Cyclic GFR-binding peptide

SEQ ID NO: 26616 - protein, 28 aa, Artificial Sequence
  Cyclic GFR-binding peptide
LRSMEGILKPKKRVYEMIQVTINSHHVR

SEQ ID NO: 26617 - protein, 32 aa, Artificial Sequence; identical to SEQ ID NO: 22875
  Cyclic GFR-binding peptide
  MOD_RES (30)..(30): Xaa is C or S

SEQ ID NO: 26618 - protein, 26 aa, Artificial Sequence
  Cyclic GFR-binding peptide
EELRVTAKKLKPKKRVYEIKRVQVPR

SEQ ID NO: 26619 - protein, 30 aa, Artificial Sequence; identical to SEQ ID NO: 22877
  Cyclic GFR-binding peptide

SEQ ID NO: 26620 - protein, 34 aa, Artificial Sequence; identical to SEQ ID NO: 22878
  Cyclic GFR-binding peptide
  MOD_RES (2)..(4): Xaa is C or S

SEQ ID NO: 26621 - protein, 39 aa, Artificial Sequence; identical to SEQ ID NO: 22879
  Cyclic GFR-binding peptide
  MOD_RES (34)..(34): Xaa is C or S

SEQ ID NO: 26622 - protein, 38 aa, Artificial Sequence; identical to SEQ ID NO: 22880
  Cyclic GFR-binding peptide
  MOD_RES (2)..(4)..(38): Xaa is C or S

SEQ ID NO: 26623 - protein, 37 aa, Artificial Sequence; identical to SEQ ID NO: 22881
  Cyclic GFR-binding peptide
  MOD_RES (31)..(31): Xaa is C or S

SEQ ID NO: 26624 - protein, 31 aa, Artificial Sequence; identical to SEQ ID NO: 22882
  Cyclic GFR-binding peptide
  MOD_RES (31)..(31): Xaa is C or S

SEQ ID NO: 26625 - protein, 44 aa, Artificial Sequence; identical to SEQ ID NO: 22883
  Cyclic GFR-binding peptide
  MOD_RES (2)..(4)..(38): Xaa is C or S

SEQ ID NO: 26626 - protein, 36 aa, Artificial Sequence; identical to SEQ ID NO: 22884
  Cyclic GFR-binding peptide
  MOD_RES (36)..(36): Xaa is C or S

SEQ ID NO: 26627 - protein, 39 aa, Artificial Sequence; identical to SEQ ID NO: 22885
  Cyclic GFR-binding peptide
  MOD_RES (2)..(36): Xaa is C or S

SEQ ID NO: 26628 - protein, 43 aa, Artificial Sequence; identical to SEQ ID NO: 22886
  Cyclic GFR-binding peptide
  MOD_RES (2)..(4)..(41): Xaa is C or S

SEQ ID NO: 26629 - protein, 36 aa, Artificial Sequence; identical to SEQ ID NO: 22887
  Cyclic GFR-binding peptide
  MOD_RES (1)..(35): Xaa is C or S

SEQ ID NO: 26630 - protein, 28 aa, Artificial Sequence
  Cyclic GFR-binding peptide
ELVTAKKHQGQHPKIRIKRMQVPRQGTP

SEQ ID NO: 26631 - protein, 25 aa, Artificial Sequence
  Cyclic GFR-binding peptide
RSMEGILKPKKRVYEMIQVTINSHH

SEQ ID NO: 26632 - protein, 42 aa, Artificial Sequence; identical to SEQ ID NO: 22890
  Cyclic GFR-binding peptide
  MOD_RES (2)..(4)..(38): Xaa is C or S

SEQ ID NO: 26633 - protein, 34 aa, Artificial Sequence; identical to SEQ ID NO: 22891
  Cyclic GFR-binding peptide
  MOD_RES (32)..(32): Xaa is C or S

SEQ ID NO: 26634 - protein, 33 aa, Artificial Sequence; identical to SEQ ID NO: 22892
  Cyclic GFR-binding peptide
  MOD_RES (30)..(30): Xaa is C or S

SEQ ID NO: 26635 - protein, 28 aa, Artificial Sequence
  Cyclic GFR-binding peptide
QLFVQVEKHQGQHPKIRVKAMKVSREET

SEQ ID NO: 26636 - protein, 29 aa, Artificial Sequence
  Cyclic GFR-binding peptide
ELVQVEKHQGQHPKIRVKAMKVSRQGTPV

SEQ ID NO: 26637 - protein, 32 aa, Artificial Sequence; identical to SEQ ID NO: 22895
  Cyclic GFR-binding peptide
  MOD_RES (1)..(1): Xaa is C or S

SEQ ID NO: 26638 - protein, 44 aa, Artificial Sequence; identical to SEQ ID NO: 22896
  Cyclic GFR-binding peptide
  MOD_RES (2)..(4)..(38): Xaa is C or S

SEQ ID NO: 26639 - protein, 37 aa, Artificial Sequence; identical to SEQ ID NO: 22897
  Cyclic GFR-binding peptide
  MOD_RES (33)..(33): Xaa is C or S

SEQ ID NO: 26640 - protein, 32 aa, Artificial Sequence; identical to SEQ ID NO: 22898
  Cyclic GFR-binding peptide
  MOD_RES (29)..(29): Xaa is C or S

SEQ ID NO: 26641 - protein, 37 aa, Artificial Sequence; identical to SEQ ID NO: 22899
  Cyclic GFR-binding peptide
  MOD_RES (2)..(2): Xaa is C or S

SEQ ID NO: 26642 - protein, 31 aa, Artificial Sequence; identical to SEQ ID NO: 22900
  Cyclic GFR-binding peptide

SEQ ID NO: 26643 - protein, 36 aa, Artificial Sequence; identical to SEQ ID NO: 22901
  Cyclic GFR-binding peptide
  MOD_RES (2)..(4): Xaa is C or S

SEQ ID NO: 26644 - protein, 36 aa, Artificial Sequence; identical to SEQ ID NO: 22902
  Cyclic GFR-binding peptide
  MOD_RES (33)..(33): Xaa is C or S

SEQ ID NO: 26645 - protein, 36 aa, Artificial Sequence; identical to SEQ ID NO: 22903
  Cyclic GFR-binding peptide
  MOD_RES (2)..(4): Xaa is C or S

SEQ ID NO: 26646 - protein, 35 aa, Artificial Sequence; identical to SEQ ID NO: 22904
  Cyclic GFR-binding peptide
  MOD_RES (31)..(31): Xaa is C or S

SEQ ID NO: 26647 - protein, 30 aa, Artificial Sequence; identical to SEQ ID NO: 22905
  Cyclic GFR-binding peptide

SEQ ID NO: 26648 - protein, 30 aa, Artificial Sequence; identical to SEQ ID NO: 22906
  Cyclic GFR-binding peptide
  MOD_RES (30)..(30): Xaa is C or S

SEQ ID NO: 26649 - protein, 31 aa, Artificial Sequence; identical to SEQ ID NO: 22907
  Cyclic GFR-binding peptide

SEQ ID NO: 26650 - protein, 33 aa, Artificial Sequence; identical to SEQ ID NO: 22908
  Cyclic GFR-binding peptide
  MOD_RES (29)..(29): Xaa is C or S

SEQ ID NO: 26651 - protein, 27 aa, Artificial Sequence
  Cyclic GFR-binding peptide
HDELTVQVEKFIPKKRVIEVKAVKVSR

SEQ ID NO: 26652 - protein, 34 aa, Artificial Sequence; identical to SEQ ID NO: 22910
  Cyclic GFR-binding peptide
  MOD_RES (33)..(33): Xaa is C or S

SEQ ID NO: 26653 - protein, 31 aa, Artificial Sequence; identical to SEQ ID NO: 22911
  Cyclic GFR-binding peptide

SEQ ID NO: 26654 - protein, 39 aa, Artificial Sequence; identical to SEQ ID NO: 22912
  Cyclic GFR-binding peptide
  MOD_RES (2)..(39): Xaa is C or S

SEQ ID NO: 26655 - protein, 23 aa, Artificial Sequence
  Cyclic GFR-binding peptide
VTAKKHQGQHPKIRIKRMQVPRQ

SEQ ID NO: 26656 - protein, 34 aa, Artificial Sequence; identical to SEQ ID NO: 22914
  Cyclic GFR-binding peptide
  MOD_RES (32)..(32): Xaa is C or S

SEQ ID NO: 26657 - protein, 38 aa, Artificial Sequence; identical to SEQ ID NO: 22915
  Cyclic GFR-binding peptide
  MOD_RES (34)..(34): Xaa is C or S

SEQ ID NO: 26658 - protein, 30 aa, Artificial Sequence; identical to SEQ ID NO: 22916
  Cyclic GFR-binding peptide
  MOD_RES (28)..(28): Xaa is C or S

SEQ ID NO: 26659 - protein, 24 aa, Artificial Sequence
  Cyclic GFR-binding peptide
SMEGLHQGQHPKIRMIQMTINSEE

SEQ ID NO: 26660 - protein, 32 aa, Artificial Sequence; identical to SEQ ID NO: 22918
  Cyclic GFR-binding peptide
  MOD_RES (31)..(31): Xaa is C or S

SEQ ID NO: 26661 - protein, 31 aa, Artificial Sequence; identical to SEQ ID NO: 22919
  Cyclic GFR-binding peptide
  MOD_RES (2)..(2): Xaa is C or S

SEQ ID NO: 26662 - protein, 36 aa, Artificial Sequence; identical to SEQ ID NO: 22920
  Cyclic GFR-binding peptide
  MOD_RES (32)..(32): Xaa is C or S

SEQ ID NO: 26663 - protein, 34 aa, Artificial Sequence; identical to SEQ ID NO: 22921
  Cyclic GFR-binding peptide
  MOD_RES (31)..(31): Xaa is C or S

SEQ ID NO: 26664 - protein, 33 aa, Artificial Sequence; identical to SEQ ID NO: 22922
  Cyclic GFR-binding peptide
  MOD_RES (28)..(28): Xaa is C or S

SEQ ID NO: 26665 - protein, 32 aa, Artificial Sequence; identical to SEQ ID NO: 22923
  Cyclic GFR-binding peptide

SEQ ID NO: 26666 - protein, 38 aa, Artificial Sequence; identical to SEQ ID NO: 22924
  Cyclic GFR-binding peptide
  MOD_RES (32)..(32): Xaa is C or S

SEQ ID NO: 26667 - protein, 31 aa, Artificial Sequence; identical to SEQ ID NO: 22925
  Cyclic GFR-binding peptide
  MOD_RES (2)..(2): Xaa is C or S

SEQ ID NO: 26668 - protein, 43 aa, Artificial Sequence; identical to SEQ ID NO: 22926
  Cyclic GFR-binding peptide
  MOD_RES (1)..(3)..(40): Xaa is C or S

SEQ ID NO: 26669 - protein, 30 aa, Artificial Sequence; identical to SEQ ID NO: 22927
  Cyclic GFR-binding peptide
  MOD_RES (1)..(1): Xaa is C or S

SEQ ID NO: 26670 - protein, 34 aa, Artificial Sequence; identical to SEQ ID NO: 22928
  Cyclic GFR-binding peptide
  MOD_RES (34)..(34): Xaa is C or S

SEQ ID NO: 26671 - protein, 35 aa, Artificial Sequence; identical to SEQ ID NO: 22929
  Cyclic GFR-binding peptide
  MOD_RES (2)..(4): Xaa is C or S

SEQ ID NO: 26672 - protein, 39 aa, Artificial Sequence; identical to SEQ ID NO: 22930
  Cyclic GFR-binding peptide
  MOD_RES (37)..(37): Xaa is C or S

SEQ ID NO: 26673 - protein, 29 aa, Artificial Sequence
  Cyclic GFR-binding peptide
RSMEGILKPKKRVYEMIQVTINSHHVRSP

SEQ ID NO: 26674 - protein, 35 aa, Artificial Sequence; identical to SEQ ID NO: 22932
  Cyclic GFR-binding peptide
  MOD_RES (34)..(34): Xaa is C or S

SEQ ID NO: 26675 - protein, 30 aa, Artificial Sequence; identical to SEQ ID NO: 22933
  Cyclic GFR-binding peptide

SEQ ID NO: 26676 - protein, 33 aa, Artificial Sequence; identical to SEQ ID NO: 22934
  Cyclic GFR-binding peptide
  MOD_RES (1)..(3): Xaa is C or S

SEQ ID NO: 26677 - protein, 37 aa, Artificial Sequence; identical to SEQ ID NO: 22935
  Cyclic GFR-binding peptide
  MOD_RES (1)..(1): Xaa is C or S

SEQ ID NO: 26678 - protein, 30 aa, Artificial Sequence; identical to SEQ ID NO: 22936
  Cyclic GFR-binding peptide

SEQ ID NO: 26679 - protein, 36 aa, Artificial Sequence; identical to SEQ ID NO: 22937
  Cyclic GFR-binding peptide
  MOD_RES (2)..(36): Xaa is C or S

SEQ ID NO: 26680 - protein, 40 aa, Artificial Sequence; identical to SEQ ID NO: 22938
  Cyclic GFR-binding peptide
  MOD_RES (2)..(4): Xaa is C or S

SEQ ID NO: 26681 - protein, 37 aa, Artificial Sequence; identical to SEQ ID NO: 22939
  Cyclic GFR-binding peptide
  MOD_RES (32)..(32): Xaa is C or S

SEQ ID NO: 26682 - protein, 40 aa, Artificial Sequence; identical to SEQ ID NO: 22940
  Cyclic GFR-binding peptide
  MOD_RES (1)..(38): Xaa is C or S

SEQ ID NO: 26683 - protein, 33 aa, Artificial Sequence; identical to SEQ ID NO: 22941
  Cyclic GFR-binding peptide

SEQ ID NO: 26684 - protein, 36 aa, Artificial Sequence; identical to SEQ ID NO: 22942
  Cyclic GFR-binding peptide
  MOD_RES (34)..(34): Xaa is C or S

SEQ ID NO: 26685 - protein, 36 aa, Artificial Sequence; identical to SEQ ID NO: 22943
  Cyclic GFR-binding peptide
  MOD_RES (35)..(35): Xaa is C or S

SEQ ID NO: 26686 - protein, 35 aa, Artificial Sequence; identical to SEQ ID NO: 22944
  Cyclic GFR-binding peptide

SEQ ID NO: 26687 - protein, 39 aa, Artificial Sequence; identical to SEQ ID NO: 22945
  Cyclic GFR-binding peptide
  MOD_RES (34)..(34): Xaa is C or S

SEQ ID NO: 26688 - protein, 31 aa, Artificial Sequence; identical to SEQ ID NO: 22946
  Cyclic GFR-binding peptide

SEQ ID NO: 26689 - protein, 43 aa, Artificial Sequence; identical to SEQ ID NO: 22947
  Cyclic GFR-binding peptide
  MOD_RES (1)..(3)..(37): Xaa is C or S

SEQ ID NO: 26690 - protein, 40 aa, Artificial Sequence; identical to SEQ ID NO: 22948
  Cyclic GFR-binding peptide
  MOD_RES (1)..(3)..(40): Xaa is C or S

SEQ ID NO: 26691 - protein, 40 aa, Artificial Sequence; identical to SEQ ID NO: 22949
  Cyclic GFR-binding peptide
  MOD_RES (1)..(3)..(40): Xaa is C or S

SEQ ID NO: 26692 - protein, 37 aa, Artificial Sequence; identical to SEQ ID NO: 22950
  Cyclic GFR-binding peptide
  MOD_RES (1)..(3)..(37): Xaa is C or S

SEQ ID NO: 26693 - protein, 33 aa, Artificial Sequence; identical to SEQ ID NO: 22951
  Cyclic GFR-binding peptide
  MOD_RES (31)..(31): Xaa is C or S

SEQ ID NO: 26694 - protein, 36 aa, Artificial Sequence; identical to SEQ ID NO: 22952
  Cyclic GFR-binding peptide
  MOD_RES (36)..(36): Xaa is C or S

SEQ ID NO: 26695 - protein, 24 aa, Artificial Sequence
  Cyclic GFR-binding peptide
LRSMEGILKPKKRVYEMIQVTINS

SEQ ID NO: 26696 - protein, 29 aa, Artificial Sequence
  Cyclic GFR-binding peptide
  MOD_RES (29)..(29): Xaa is C or S
FSMEGIHQGQHPKIRMIQMTINSEETPVX

SEQ ID NO: 26697 - protein, 33 aa, Artificial Sequence; identical to SEQ ID NO: 22955
  Cyclic GFR-binding peptide

SEQ ID NO: 26698 - protein, 28 aa, Artificial Sequence
  Cyclic GFR-binding peptide
ELTSMEGLFIPKKRVIEMIQVTINSLQV

SEQ ID NO: 26699 - protein, 33 aa, Artificial Sequence; identical to SEQ ID NO: 22957
  Cyclic GFR-binding peptide
  MOD_RES (1)..(1): Xaa is C or S

SEQ ID NO: 26700 - protein, 37 aa, Artificial Sequence; identical to SEQ ID NO: 22958
  Cyclic GFR-binding peptide
  MOD_RES (2)..(36): Xaa is C or S

SEQ ID NO: 26701 - protein, 33 aa, Artificial Sequence; identical to SEQ ID NO: 22959
  Cyclic GFR-binding peptide

SEQ ID NO: 26702 - protein, 27 aa, Artificial Sequence
  Cyclic GFR-binding peptide
QLFVQVEKHQGQHPKIRVKAMKVSREE

SEQ ID NO: 26703 - protein, 28 aa, Artificial Sequence
  Cyclic GFR-binding peptide
EELVTAKKHQGQHPKIRIKRMQVPRQGT

SEQ ID NO: 26704 - protein, 34 aa, Artificial Sequence; identical to SEQ ID NO: 22962
  Cyclic GFR-binding peptide

SEQ ID NO: 26705 - protein, 35 aa, Artificial Sequence; identical to SEQ ID NO: 22963
  Cyclic GFR-binding peptide
  MOD_RES (31)..(31): Xaa is C or S

SEQ ID NO: 26706 - protein, 26 aa, Artificial Sequence
  Cyclic GFR-binding peptide
HEELSMEGIHQGQHPKIRMIQMTINS

SEQ ID NO: 26707 - protein, 40 aa, Artificial Sequence; identical to SEQ ID NO: 22965
  Cyclic GFR-binding peptide
  MOD_RES (37)..(37): Xaa is C or S

SEQ ID NO: 26708 - protein, 30 aa, Artificial Sequence; identical to SEQ ID NO: 22966
  Cyclic GFR-binding peptide

SEQ ID NO: 26709 - protein, 30 aa, Artificial Sequence; identical to SEQ ID NO: 22967
  Cyclic GFR-binding peptide

SEQ ID NO: 26710 - protein, 34 aa, Artificial Sequence; identical to SEQ ID NO: 22968
  Cyclic GFR-binding peptide
  MOD_RES (1)..(1): Xaa is C or S

SEQ ID NO: 26711 - protein, 31 aa, Artificial Sequence; identical to SEQ ID NO: 22969
  Cyclic GFR-binding peptide

SEQ ID NO: 26712 - protein, 32 aa, Artificial Sequence; identical to SEQ ID NO: 22970
  Cyclic GFR-binding peptide
  MOD_RES (2)..(4): Xaa is C or S

SEQ ID NO: 26713 - protein, 33 aa, Artificial Sequence; identical to SEQ ID NO: 22971
  Cyclic GFR-binding peptide
  MOD_RES (1)..(1): Xaa is C or S

SEQ ID NO: 26714 - protein, 34 aa, Artificial Sequence; identical to SEQ ID NO: 22972
  Cyclic GFR-binding peptide
  MOD_RES (34)..(34): Xaa is C or S

SEQ ID NO: 26715 - protein, 27 aa, Artificial Sequence
  Cyclic GFR-binding peptide
TSMEGIFIPKKRVIEMIQVTINSLQVQ

SEQ ID NO: 26716 - protein, 36 aa, Artificial Sequence; identical to SEQ ID NO: 22974
  Cyclic GFR-binding peptide
  MOD_RES (35)..(35): Xaa is C or S

SEQ ID NO: 26717 - protein, 31 aa, Artificial Sequence; identical to SEQ ID NO: 22975
  Cyclic GFR-binding peptide

SEQ ID NO: 26718 - protein, 37 aa, Artificial Sequence; identical to SEQ ID NO: 22976
  Cyclic GFR-binding peptide
  MOD_RES (2)..(4): Xaa is C or S

SEQ ID NO: 26719 - protein, 40 aa, Artificial Sequence; identical to SEQ ID NO: 22977
  Cyclic GFR-binding peptide
  MOD_RES (34)..(34): Xaa is C or S

SEQ ID NO: 26720 - protein, 32 aa, Artificial Sequence; identical to SEQ ID NO: 22978
  Cyclic GFR-binding peptide
  MOD_RES (32)..(32): Xaa is C or S

SEQ ID NO: 26721 - protein, 31 aa, Artificial Sequence; identical to SEQ ID NO: 22979
  Cyclic GFR-binding peptide

SEQ ID NO: 26722 - protein, 36 aa, Artificial Sequence; identical to SEQ ID NO: 22980
  Cyclic GFR-binding peptide

SEQ ID NO: 26723 - protein, 25 aa, Artificial Sequence
  Cyclic GFR-binding peptide
LTVQVEKFIPKKRVIEVKAVKVSRL

SEQ ID NO: 26724 - protein, 35 aa, Artificial Sequence; identical to SEQ ID NO: 22982
  Cyclic GFR-binding peptide
  MOD_RES (1)..(3): Xaa is C or S

SEQ ID NO: 26725 - protein, 26 aa, Artificial Sequence
  Cyclic GFR-binding peptide
TSMEGLFIPKKRVIEMIQVTINSLQV

SEQ ID NO: 26726 - protein, 40 aa, Artificial Sequence; identical to SEQ ID NO: 22984
  Cyclic GFR-binding peptide
  MOD_RES (2)..(39): Xaa is C or S

SEQ ID NO: 26727 - protein, 34 aa, Artificial Sequence; identical to SEQ ID NO: 22985
  Cyclic GFR-binding peptide
  MOD_RES (2)..(4): Xaa is C or S

SEQ ID NO: 26728 - protein, 27 aa, Artificial Sequence
  Cyclic GFR-binding peptide
SHEELVQVEKHQGQHPKIRVKAMKVSR

SEQ ID NO: 26729 - protein, 38 aa, Artificial Sequence; identical to SEQ ID NO: 22987
  Cyclic GFR-binding peptide
  MOD_RES (36)..(36): Xaa is C or S

SEQ ID NO: 26730 - protein, 32 aa, Artificial Sequence; identical to SEQ ID NO: 22988
  Cyclic GFR-binding peptide
  MOD_RES (1)..(3): Xaa is C or S

SEQ ID NO: 26731 - protein, 38 aa, Artificial Sequence; identical to SEQ ID NO: 22989
  Cyclic GFR-binding peptide
  MOD_RES (2)..(4)..(38): Xaa is C or S

SEQ ID NO: 26732 - protein, 35 aa, Artificial Sequence; identical to SEQ ID NO: 22990
  Cyclic GFR-binding peptide
  MOD_RES (32)..(32): Xaa is C or S

SEQ ID NO: 26733 - protein, 43 aa, Artificial Sequence; identical to SEQ ID NO: 22991
  Cyclic GFR-binding peptide
  MOD_RES (1)..(3)..(40): Xaa is C or S

SEQ ID NO: 26734 - protein, 31 aa, Artificial Sequence; identical to SEQ ID NO: 22992
  Cyclic GFR-binding peptide

SEQ ID NO: 26735 - protein, 40 aa, Artificial Sequence; identical to SEQ ID NO: 22993
  Cyclic GFR-binding peptide
  MOD_RES (2)..(39): Xaa is C or S

SEQ ID NO: 26736 - protein, 35 aa, Artificial Sequence; identical to SEQ ID NO: 22994
  Cyclic GFR-binding peptide
  MOD_RES (29)..(29): Xaa is C or S

SEQ ID NO: 26737 - protein, 43 aa, Artificial Sequence; identical to SEQ ID NO: 22995
  Cyclic GFR-binding peptide
  MOD_RES (1)..(3)..(40): Xaa is C or S

SEQ ID NO: 26738 - protein, 26 aa, Artificial Sequence
  Cyclic GFR-binding peptide
ELTSMEGLFIPKKRVIEMIQVTINSL

SEQ ID NO: 26739 - protein, 39 aa, Artificial Sequence; identical to SEQ ID NO: 22997
  Cyclic GFR-binding peptide
  MOD_RES (2)..(36): Xaa is C or S

SEQ ID NO: 26740 - protein, 43 aa, Artificial Sequence; identical to SEQ ID NO: 22998
  Cyclic GFR-binding peptide
  MOD_RES (2)..(4)..(41): Xaa is C or S

SEQ ID NO: 26741 - protein, 24 aa, Artificial Sequence
  Cyclic GFR-binding peptide
VQVEKHQGQHPKIRVKAMKVSREE

SEQ ID NO: 26742 - protein, 33 aa, Artificial Sequence; identical to SEQ ID NO: 23000
  Cyclic GFR-binding peptide

SEQ ID NO: 26743 - protein, 35 aa, Artificial Sequence; identical to SEQ ID NO: 23001
  Cyclic GFR-binding peptide
  MOD_RES (1)..(3): Xaa is C or S

SEQ ID NO: 26744 - protein, 28 aa, Artificial Sequence
  Cyclic GFR-binding peptide
SMEGLLKPKKRVYEMIQVTINSHHVRSP

SEQ ID NO: 26745 - protein, 28 aa, Artificial Sequence
  Cyclic GFR-binding peptide
ELRSMEGILKPKKRVYEMIQVTINSHHV

SEQ ID NO: 26746 - protein, 29 aa, Artificial Sequence
  Cyclic GFR-binding peptide
QLFVQVEKHQGQHPKIRVKAMKVSREETP

SEQ ID NO: 26747 - protein, 41 aa, Artificial Sequence; identical to SEQ ID NO: 23005
  Cyclic GFR-binding peptide
  MOD_RES (2)..(4)..(38): Xaa is C or S

SEQ ID NO: 26748 - protein, 31 aa, Artificial Sequence; identical to SEQ ID NO: 23006
  Cyclic GFR-binding peptide
  MOD_RES (2)..(2): Xaa is C or S

SEQ ID NO: 26749 - protein, 27 aa, Artificial Sequence
  Cyclic GFR-binding peptide
LTSMEGLFIPKKRVIEMIQVTINSLQV

SEQ ID NO: 26750 - protein, 26 aa, Artificial Sequence
  Cyclic GFR-binding peptide
HEELVQVEKHQGQHPKIRVKAMKVSR

SEQ ID NO: 26751 - protein, 36 aa, Artificial Sequence; identical to SEQ ID NO: 23009
  Cyclic GFR-binding peptide
  MOD_RES (2)..(36): Xaa is C or S

SEQ ID NO: 26752 - protein, 36 aa, Artificial Sequence; identical to SEQ ID NO: 23010
  Cyclic GFR-binding peptide
  MOD_RES (34)..(34): Xaa is C or S

SEQ ID NO: 26753 - protein, 35 aa, Artificial Sequence; identical to SEQ ID NO: 23011
  Cyclic GFR-binding peptide
  MOD_RES (2)..(2): Xaa is C or S

SEQ ID NO: 26754 - protein, 27 aa, Artificial Sequence
  Cyclic GFR-binding peptide
EELRVTAKKLKPKKRVYEIKRVQVPRH

SEQ ID NO: 26755 - protein, 39 aa, Artificial Sequence; identical to SEQ ID NO: 23013
  Cyclic GFR-binding peptide
  MOD_RES (2)..(36): Xaa is C or S

SEQ ID NO: 26756 - protein, 32 aa, Artificial Sequence; identical to SEQ ID NO: 23014
  Cyclic GFR-binding peptide
  MOD_RES (2)..(2): Xaa is C or S

SEQ ID NO: 26757 - protein, 37 aa, Artificial Sequence; identical to SEQ ID NO: 23015
  Cyclic GFR-binding peptide
  MOD_RES (35)..(35): Xaa is C or S

SEQ ID NO: 26758 - protein, 33 aa, Artificial Sequence; identical to SEQ ID NO: 23016
  Cyclic GFR-binding peptide
  MOD_RES (1)..(3): Xaa is C or S

SEQ ID NO: 26759 - protein, 24 aa, Artificial Sequence
  Cyclic GFR-binding peptide
LTSMEGIFIPKKRVIEMIQVTINS

SEQ ID NO: 26760 - protein, 40 aa, Artificial Sequence; identical to SEQ ID NO: 23018
  Cyclic GFR-binding peptide
  MOD_RES (2)..(4)..(38): Xaa is C or S

SEQ ID NO: 26761 - protein, 36 aa, Artificial Sequence; identical to SEQ ID NO: 23019
  Cyclic GFR-binding peptide
  MOD_RES (31)..(31): Xaa is C or S

SEQ ID NO: 26762 - protein, 33 aa, Artificial Sequence; identical to SEQ ID NO: 23020
  Cyclic GFR-binding peptide
  MOD_RES (32)..(32): Xaa is C or S

SEQ ID NO: 26763 - protein, 23 aa, Artificial Sequence
  Cyclic GFR-binding peptide
SMEGLLKPKKRVYEMIQVTINSH

SEQ ID NO: 26764 - protein, 32 aa, Artificial Sequence; identical to SEQ ID NO: 23022
  Cyclic GFR-binding peptide
  MOD_RES (30)..(30): Xaa is C or S

SEQ ID NO: 26765 - protein, 33 aa, Artificial Sequence; identical to SEQ ID NO: 23023
  Cyclic GFR-binding peptide
  MOD_RES (1)..(3): Xaa is C or S

SEQ ID NO: 26766 - protein, 41 aa, Artificial Sequence; identical to SEQ ID NO: 23024
  Cyclic GFR-binding peptide
  MOD_RES (1)..(3)..(37): Xaa is C or S

SEQ ID NO: 26767 - protein, 30 aa, Artificial Sequence; identical to SEQ ID NO: 23025
  Cyclic GFR-binding peptide

SEQ ID NO: 26768 - protein, 31 aa, Artificial Sequence; identical to SEQ ID NO: 23026
  Cyclic GFR-binding peptide
  MOD_RES (1)..(1): Xaa is C or S

SEQ ID NO: 26769 - protein, 35 aa, Artificial Sequence; identical to SEQ ID NO: 23027
  Cyclic GFR-binding peptide
  MOD_RES (2)..(4): Xaa is C or S

SEQ ID NO: 26770 - protein, 28 aa, Artificial Sequence
  Cyclic GFR-binding peptide
LFSMEGIHQGQHPKIRMIQMTINSEETP

SEQ ID NO: 26771 - protein, 34 aa, Artificial Sequence; identical to SEQ ID NO: 23029
  Cyclic GFR-binding peptide
  MOD_RES (1)..(3): Xaa is C or S

SEQ ID NO: 26772 - protein, 36 aa, Artificial Sequence; identical to SEQ ID NO: 23030
  Cyclic GFR-binding peptide
  MOD_RES (1)..(35): Xaa is C or S

SEQ ID NO: 26773 - protein, 31 aa, Artificial Sequence; identical to SEQ ID NO: 23031
  Cyclic GFR-binding peptide
  MOD_RES (28)..(28): Xaa is C or S

SEQ ID NO: 26774 - protein, 40 aa, Artificial Sequence; identical to SEQ ID NO: 23032
  Cyclic GFR-binding peptide
  MOD_RES (1)..(3)..(40): Xaa is C or S

SEQ ID NO: 26775 - protein, 30 aa, Artificial Sequence; identical to SEQ ID NO: 23033
  Cyclic GFR-binding peptide
  MOD_RES (1)..(1): Xaa is C or S

SEQ ID NO: 26776 - protein, 40 aa, Artificial Sequence; identical to SEQ ID NO: 23034
  Cyclic GFR-binding peptide
  MOD_RES (36)..(36): Xaa is C or S

SEQ ID NO: 26777 - protein, 29 aa, Artificial Sequence
  Cyclic GFR-binding peptide
TSMEGLFIPKKRVIEMIQVTINSLQVQTP

SEQ ID NO: 26778 - protein, 37 aa, Artificial Sequence; identical to SEQ ID NO: 23036
  Cyclic GFR-binding peptide
  MOD_RES (34)..(34): Xaa is C or S

SEQ ID NO: 26779 - protein, 30 aa, Artificial Sequence; identical to SEQ ID NO: 23037
  Cyclic GFR-binding peptide

SEQ ID NO: 26780 - protein, 23 aa, Artificial Sequence
  Cyclic GFR-binding peptide
SMEGLHQGQHPKIRMIQMTINSE

SEQ ID NO: 26781 - protein, 40 aa, Artificial Sequence; identical to SEQ ID NO: 23039
  Cyclic GFR-binding peptide
  MOD_RES (34)..(34): Xaa is C or S

SEQ ID NO: 26782 - protein, 37 aa, Artificial Sequence; identical to SEQ ID NO: 23040
  Cyclic GFR-binding peptide
  MOD_RES (1)..(3)..(37): Xaa is C or S

SEQ ID NO: 26783 - protein, 31 aa, Artificial Sequence; identical to SEQ ID NO: 23041
  Cyclic GFR-binding peptide
  MOD_RES (31)..(31): Xaa is C or S

SEQ ID NO: 26784 - protein, 30 aa, Artificial Sequence; identical to SEQ ID NO: 23042
  Cyclic GFR-binding peptide
  MOD_RES (29)..(29): Xaa is C or S

SEQ ID NO: 26785 - protein, 34 aa, Artificial Sequence; identical to SEQ ID NO: 23043
  Cyclic GFR-binding peptide
  MOD_RES (33)..(33): Xaa is C or S

SEQ ID NO: 26786 - protein, 34 aa, Artificial Sequence; identical to SEQ ID NO: 23044
  Cyclic GFR-binding peptide
  MOD_RES (33)..(33): Xaa is C or S

SEQ ID NO: 26787 - protein, 28 aa, Artificial Sequence
  Cyclic GFR-binding peptide
KNHQLFVQVEKHQGQHPKIRVKAMKVSR

SEQ ID NO: 26788 - protein, 42 aa, Artificial Sequence; identical to SEQ ID NO: 23046
  Cyclic GFR-binding peptide
  MOD_RES (2)..(4)..(41): Xaa is C or S

SEQ ID NO: 26789 - protein, 34 aa, Artificial Sequence; identical to SEQ ID NO: 23047
  Cyclic GFR-binding peptide

SEQ ID NO: 26790 - protein, 32 aa, Artificial Sequence; identical to SEQ ID NO: 23048
  Cyclic GFR-binding peptide
  MOD_RES (1)..(1): Xaa is C or S

SEQ ID NO: 26791 - protein, 41 aa, Artificial Sequence; identical to SEQ ID NO: 23049
  Cyclic GFR-binding peptide
  MOD_RES (2)..(4)..(41): Xaa is C or S

SEQ ID NO: 26792 - protein, 31 aa, Artificial Sequence; identical to SEQ ID NO: 23050
  Cyclic GFR-binding peptide
  MOD_RES (1)..(3): Xaa is C or S

SEQ ID NO: 26793 - protein, 32 aa, Artificial Sequence; identical to SEQ ID NO: 23051
  Cyclic GFR-binding peptide

SEQ ID NO: 26794 - protein, 27 aa, Artificial Sequence
  Cyclic GFR-binding peptide
HEELVQVEKHQGQHPKIRVKAMKVSRQ

SEQ ID NO: 26795 - protein, 40 aa, Artificial Sequence; identical to SEQ ID NO: 23053
  Cyclic GFR-binding peptide
  MOD_RES (2)..(4)..(38): Xaa is C or S

SEQ ID NO: 26796 - protein, 35 aa, Artificial Sequence; identical to SEQ ID NO: 23054
  Cyclic GFR-binding peptide
  MOD_RES (32)..(32): Xaa is C or S

SEQ ID NO: 26797 - protein, 34 aa, Artificial Sequence; identical to SEQ ID NO: 23055
  Cyclic GFR-binding peptide
  MOD_RES (2)..(2): Xaa is C or S

SEQ ID NO: 26798 - protein, 30 aa, Artificial Sequence; identical to SEQ ID NO: 23056
  Cyclic GFR-binding peptide
  MOD_RES (30)..(30): Xaa is C or S

SEQ ID NO: 26799 - protein, 41 aa, Artificial Sequence; identical to SEQ ID NO: 23057
  Cyclic GFR-binding peptide
  MOD_RES (2)..(4)..(38): Xaa is C or S

SEQ ID NO: 26800 - protein, 35 aa, Artificial Sequence; identical to SEQ ID NO: 23058
  Cyclic GFR-binding peptide
  MOD_RES (1)..(3): Xaa is C or S

SEQ ID NO: 26801 - protein, 31 aa, Artificial Sequence; identical to SEQ ID NO: 23059
  Cyclic GFR-binding peptide
  MOD_RES (30)..(30): Xaa is C or S

SEQ ID NO: 26802 - protein, 28 aa, Artificial Sequence
  Cyclic GFR-binding peptide
SMEGIFIPKKRVIEMIQVTINSLQVQTP

SEQ ID NO: 26803 - protein, 38 aa, Artificial Sequence; identical to SEQ ID NO: 23061
  Cyclic GFR-binding peptide
  MOD_RES (37)..(37): Xaa is C or S

SEQ ID NO: 26804 - protein, 33 aa, Artificial Sequence; identical to SEQ ID NO: 23062
  Cyclic GFR-binding peptide
  MOD_RES (2)..(2): Xaa is C or S

SEQ ID NO: 26805 - protein, 25 aa, Artificial Sequence
  Cyclic GFR-binding peptide
VQVEKHQGQHPKIRVKAMKVSRQGT

SEQ ID NO: 26806 - protein, 30 aa, Artificial Sequence; identical to SEQ ID NO: 23064
  Cyclic GFR-binding peptide

SEQ ID NO: 26807 - protein, 35 aa, Artificial Sequence; identical to SEQ ID NO: 23065
  Cyclic GFR-binding peptide
  MOD_RES (33)..(33): Xaa is C or S

SEQ ID NO: 26808 - protein, 32 aa, Artificial Sequence; identical to SEQ ID NO: 23066
  Cyclic GFR-binding peptide
  MOD_RES (2)..(2): Xaa is C or S

SEQ ID NO: 26809 - protein, 34 aa, Artificial Sequence; identical to SEQ ID NO: 23067
  Cyclic GFR-binding peptide
  MOD_RES (31)..(31): Xaa is C or S

SEQ ID NO: 26810 - protein, 42 aa, Artificial Sequence; identical to SEQ ID NO: 23068
  Cyclic GFR-binding peptide
  MOD_RES (2)..(36): Xaa is C or S

SEQ ID NO: 26811 - protein, 40 aa, Artificial Sequence; identical to SEQ ID NO: 23069
  Cyclic GFR-binding peptide
  MOD_RES (1)..(38): Xaa is C or S

SEQ ID NO: 26812 - protein, 38 aa, Artificial Sequence; identical to SEQ ID NO: 23070
  Cyclic GFR-binding peptide
  MOD_RES (34)..(34): Xaa is C or S

SEQ ID NO: 26813 - protein, 44 aa, Artificial Sequence; identical to SEQ ID NO: 23071
  Cyclic GFR-binding peptide
  MOD_RES (2)..(4)..(38): Xaa is C or S

SEQ ID NO: 26814 - protein, 28 aa, Artificial Sequence
  Cyclic GFR-binding peptide
NHQLFVTAKKHQGQHPKIRIKRMQVPRE

SEQ ID NO: 26815 - protein, 29 aa, Artificial Sequence
  Cyclic GFR-binding peptide
KNHQLFSMEGIHQGQHPKIRMIQMTINSE

SEQ ID NO: 26816 - protein, 26 aa, Artificial Sequence
  Cyclic GFR-binding peptide
QLFSMEGLHQGQHPKIRMIQMTINSE

SEQ ID NO: 26817 - protein, 28 aa, Artificial Sequence
  Cyclic GFR-binding peptide
  MOD_RES (28)..(28): Xaa is C or S
SMEGIHQGQHPKIRMIQMTINSQGTPVX

SEQ ID NO: 26818 - protein, 32 aa, Artificial Sequence; identical to SEQ ID NO: 23076
  Cyclic GFR-binding peptide
  MOD_RES (1)..(1): Xaa is C or S

SEQ ID NO: 26819 - protein, 31 aa, Artificial Sequence; identical to SEQ ID NO: 23077
  Cyclic GFR-binding peptide
  MOD_RES (1)..(1): Xaa is C or S

SEQ ID NO: 26820 - protein, 32 aa, Artificial Sequence; identical to SEQ ID NO: 23078
  Cyclic GFR-binding peptide
  MOD_RES (28)..(28): Xaa is C or S

SEQ ID NO: 26821 - protein, 38 aa, Artificial Sequence; identical to SEQ ID NO: 23079
  Cyclic GFR-binding peptide
  MOD_RES (34)..(34): Xaa is C or S

SEQ ID NO: 26822 - protein, 33 aa, Artificial Sequence; identical to SEQ ID NO: 23080
  Cyclic GFR-binding peptide

SEQ ID NO: 26823 - protein, 27 aa, Artificial Sequence
  Cyclic GFR-binding peptide
ELVQVEKHQGQHPKIRVKAMKVSRQGT

SEQ ID NO: 26824 - protein, 40 aa, Artificial Sequence; identical to SEQ ID NO: 23082
  Cyclic GFR-binding peptide
  MOD_RES (36)..(36): Xaa is C or S

SEQ ID NO: 26825 - protein, 26 aa, Artificial Sequence
  Cyclic GFR-binding peptide
LRSMEGILKPKKRVYEMIQVTINSHH

SEQ ID NO: 26826 - protein, 23 aa, Artificial Sequence
  Cyclic GFR-binding peptide
RSMEGILKPKKRVYEMIQVTINS

SEQ ID NO: 26827 - protein, 30 aa, Artificial Sequence; identical to SEQ ID NO: 23085
  Cyclic GFR-binding peptide

SEQ ID NO: 26828 - protein, 36 aa, Artificial Sequence; identical to SEQ ID NO: 23086
  Cyclic GFR-binding peptide
  MOD_RES (1)..(1): Xaa is C or S

SEQ ID NO: 26829 - protein, 30 aa, Artificial Sequence; identical to SEQ ID NO: 23087
  Cyclic GFR-binding peptide
  MOD_RES (2)..(2): Xaa is C or S

SEQ ID NO: 26830 - protein, 27 aa, Artificial Sequence
  Cyclic GFR-binding peptide
LRSMEGLLKPKKRVYEMIQVTINSHHV

SEQ ID NO: 26831 - protein, 32 aa, Artificial Sequence; identical to SEQ ID NO: 23089
  Cyclic GFR-binding peptide
  MOD_RES (2)..(2): Xaa is C or S

SEQ ID NO: 26832 - protein, 43 aa, Artificial Sequence; identical to SEQ ID NO: 23090
  Cyclic GFR-binding peptide
  MOD_RES (1)..(3)..(37): Xaa is C or S

SEQ ID NO: 26833 - protein, 29 aa, Artificial Sequence
  Cyclic GFR-binding peptide
LFVTAKKHQGQHPKIRIKRMQVPREETPV

SEQ ID NO: 26834 - protein, 30 aa, Artificial Sequence; identical to SEQ ID NO: 23092
  Cyclic GFR-binding peptide

SEQ ID NO: 26835 - protein, 28 aa, Artificial Sequence
  Cyclic GFR-binding peptide
NHQLFVQVEKHQGQHPKIRVKAMKVSRE

SEQ ID NO: 26836 - protein, 29 aa, Artificial Sequence
  Cyclic GFR-binding peptide
HEELRSMEGILKPKKRVYEMIQVTINSHH

SEQ ID NO: 26837 - protein, 34 aa, Artificial Sequence; identical to SEQ ID NO: 23095
  Cyclic GFR-binding peptide
  MOD_RES (32)..(32): Xaa is C or S

SEQ ID NO: 26838 - protein, 27 aa, Artificial Sequence
  Cyclic GFR-binding peptide
LFSMEGLHQGQHPKIRMIQMTINSEET

SEQ ID NO: 26839 - protein, 33 aa, Artificial Sequence; identical to SEQ ID NO: 23097
  Cyclic GFR-binding peptide
  MOD_RES (29)..(29): Xaa is C or S

SEQ ID NO: 26840 - protein, 28 aa, Artificial Sequence
  Cyclic GFR-binding peptide
HQLFVQVEKHQGQHPKIRVKAMKVSREE

SEQ ID NO: 26841 - protein, 35 aa, Artificial Sequence; identical to SEQ ID NO: 23099
  Cyclic GFR-binding peptide
  MOD_RES (31)..(31): Xaa is C or S

SEQ ID NO: 26842 - protein, 31 aa, Artificial Sequence; identical to SEQ ID NO: 23100
  Cyclic GFR-binding peptide
  MOD_RES (29)..(29): Xaa is C or S

SEQ ID NO: 26843 - protein, 34 aa, Artificial Sequence; identical to SEQ ID NO: 23101
  Cyclic GFR-binding peptide
  MOD_RES (1)..(3): Xaa is C or S

SEQ ID NO: 26844 - protein, 33 aa, Artificial Sequence; identical to SEQ ID NO: 23102
  Cyclic GFR-binding peptide
  MOD_RES (31)..(31): Xaa is C or S

SEQ ID NO: 26845 - protein, 26 aa, Artificial Sequence
  Cyclic GFR-binding peptide
LTVQVEKFIPKKRVIEVKAVKVSRLQ

SEQ ID NO: 26846 - protein, 38 aa, Artificial Sequence; identical to SEQ ID NO: 23104
  Cyclic GFR-binding peptide
  MOD_RES (1)..(3): Xaa is C or S

SEQ ID NO: 26847 - protein, 35 aa, Artificial Sequence; identical to SEQ ID NO: 23105
  Cyclic GFR-binding peptide
  MOD_RES (29)..(29): Xaa is C or S

SEQ ID NO: 26848 - protein, 31 aa, Artificial Sequence; identical to SEQ ID NO: 23106
  Cyclic GFR-binding peptide

SEQ ID NO: 26849 - protein, 36 aa, Artificial Sequence; identical to SEQ ID NO: 23107
  Cyclic GFR-binding peptide
  MOD_RES (2)..(4): Xaa is C or S

SEQ ID NO: 26850 - protein, 37 aa, Artificial Sequence; identical to SEQ ID NO: 23108
  Cyclic GFR-binding peptide
  MOD_RES (35)..(35): Xaa is C or S

SEQ ID NO: 26851 - protein, 32 aa, Artificial Sequence; identical to SEQ ID NO: 23109
  Cyclic GFR-binding peptide
  MOD_RES (2)..(2): Xaa is C or S

SEQ ID NO: 26852 - protein, 32 aa, Artificial Sequence; identical to SEQ ID NO: 23110
  Cyclic GFR-binding peptide
  MOD_RES (2)..(2): Xaa is C or S

SEQ ID NO: 26853 - protein, 31 aa, Artificial Sequence; identical to SEQ ID NO: 23111
  Cyclic GFR-binding peptide
  MOD_RES (30)..(30): Xaa is C or S

SEQ ID NO: 26854 - protein, 33 aa, Artificial Sequence; identical to SEQ ID NO: 23112
  Cyclic GFR-binding peptide
  MOD_RES (2)..(4): Xaa is C or S

SEQ ID NO: 26855 - protein, 30 aa, Artificial Sequence; identical to SEQ ID NO: 23113
  Cyclic GFR-binding peptide
  MOD_RES (29)..(29): Xaa is C or S

SEQ ID NO: 26856 - protein, 31 aa, Artificial Sequence; identical to SEQ ID NO: 23114
  Cyclic GFR-binding peptide
  MOD_RES (1)..(3): Xaa is C or S

SEQ ID NO: 26857 - protein, 27 aa, Artificial Sequence
  Cyclic GFR-binding peptide
DELTSMEGIFIPKKRVIEMIQVTINSL

SEQ ID NO: 26858 - protein, 33 aa, Artificial Sequence; identical to SEQ ID NO: 23116
  Cyclic GFR-binding peptide
  MOD_RES (1)..(3): Xaa is C or S

SEQ ID NO: 26859 - protein, 31 aa, Artificial Sequence; identical to SEQ ID NO: 23117
  Cyclic GFR-binding peptide
  MOD_RES (31)..(31): Xaa is C or S

SEQ ID NO: 26860 - protein, 26 aa, Artificial Sequence
  Cyclic GFR-binding peptide
TVQVEKFIPKKRVIEVKAVKVSRLQV

SEQ ID NO: 26861 - protein, 31 aa, Artificial Sequence; identical to SEQ ID NO: 23119
  Cyclic GFR-binding peptide
  MOD_RES (31)..(31): Xaa is C or S

SEQ ID NO: 26862 - protein, 28 aa, Artificial Sequence
  Cyclic GFR-binding peptide
HEELRVTAKKLKPKKRVYEIKRVQVPRH

SEQ ID NO: 26863 - protein, 30 aa, Artificial Sequence; identical to SEQ ID NO: 23121
  Cyclic GFR-binding peptide

SEQ ID NO: 26864 - protein, 27 aa, Artificial Sequence
  Cyclic GFR-binding peptide
VQVEKHQGQHPKIRVKAMKVSRQGTPV

SEQ ID NO: 26865 - protein, 25 aa, Artificial Sequence
  Cyclic GFR-binding peptide
LVTAKKHQGQHPKIRIKRMQVPRQG

SEQ ID NO: 26866 - protein, 35 aa, Artificial Sequence; identical to SEQ ID NO: 23124
  Cyclic GFR-binding peptide
  MOD_RES (1)..(1): Xaa is C or S

SEQ ID NO: 26867 - protein, 38 aa, Artificial Sequence; identical to SEQ ID NO: 23125
  Cyclic GFR-binding peptide
  MOD_RES (36)..(36): Xaa is C or S

SEQ ID NO: 26868 - protein, 34 aa, Artificial Sequence; identical to SEQ ID NO: 23126
  Cyclic GFR-binding peptide
  MOD_RES (34)..(34): Xaa is C or S

SEQ ID NO: 26869 - protein, 24 aa, Artificial Sequence
  Cyclic GFR-binding peptide
RVTAKKLKPKKRVYEIKRVQVPRH

SEQ ID NO: 26870 - protein, 42 aa, Artificial Sequence; identical to SEQ ID NO: 23128
  Cyclic GFR-binding peptide
  MOD_RES (2)..(39): Xaa is C or S

SEQ ID NO: 26871 - protein, 30 aa, Artificial Sequence; identical to SEQ ID NO: 23129
  Cyclic GFR-binding peptide

SEQ ID NO: 26872 - protein, 35 aa, Artificial Sequence; identical to SEQ ID NO: 23130
  Cyclic GFR-binding peptide
  MOD_RES (34)..(34): Xaa is C or S

SEQ ID NO: 26873 - protein, 38 aa, Artificial Sequence; identical to SEQ ID NO: 23131
  Cyclic GFR-binding peptide
  MOD_RES (34)..(34): Xaa is C or S

SEQ ID NO: 26874 - protein, 35 aa, Artificial Sequence; identical to SEQ ID NO: 23132
  Cyclic GFR-binding peptide
  MOD_RES (1)..(3): Xaa is C or S

SEQ ID NO: 26875 - protein, 35 aa, Artificial Sequence; identical to SEQ ID NO: 23133
  Cyclic GFR-binding peptide
  MOD_RES (1)..(1): Xaa is C or S

SEQ ID NO: 26876 - protein, 36 aa, Artificial Sequence; identical to SEQ ID NO: 23134
  Cyclic GFR-binding peptide
  MOD_RES (1)..(1): Xaa is C or S

SEQ ID NO: 26877 - protein, 38 aa, Artificial Sequence; identical to SEQ ID NO: 23135
  Cyclic GFR-binding peptide
  MOD_RES (34)..(34): Xaa is C or S

SEQ ID NO: 26878 - protein, 33 aa, Artificial Sequence; identical to SEQ ID NO: 23136
  Cyclic GFR-binding peptide

SEQ ID NO: 26879 - protein, 36 aa, Artificial Sequence; identical to SEQ ID NO: 23137
  Cyclic GFR-binding peptide
  MOD_RES (35)..(35): Xaa is C or S

SEQ ID NO: 26880 - protein, 33 aa, Artificial Sequence; identical to SEQ ID NO: 23138
  Cyclic GFR-binding peptide

SEQ ID NO: 26881 - protein, 34 aa, Artificial Sequence; identical to SEQ ID NO: 23139
  Cyclic GFR-binding peptide
  MOD_RES (2)..(2): Xaa is C or S

SEQ ID NO: 26882 - protein, 34 aa, Artificial Sequence; identical to SEQ ID NO: 23140
  Cyclic GFR-binding peptide

SEQ ID NO: 26883 - protein, 26 aa, Artificial Sequence
  Cyclic GFR-binding peptide
LRSMEGLLKPKKRVYEMIQVTINSHH

SEQ ID NO: 26884 - protein, 34 aa, Artificial Sequence; identical to SEQ ID NO: 23142
  Cyclic GFR-binding peptide
  MOD_RES (30)..(30): Xaa is C or S

SEQ ID NO: 26885 - protein, 26 aa, Artificial Sequence
  Cyclic GFR-binding peptide
RSMEGILKPKKRVYEMIQVTINSHHV

SEQ ID NO: 26886 - protein, 37 aa, Artificial Sequence; identical to SEQ ID NO: 23144
  Cyclic GFR-binding peptide
  MOD_RES (1)..(35): Xaa is C or S

SEQ ID NO: 26887 - protein, 36 aa, Artificial Sequence; identical to SEQ ID NO: 23145
  Cyclic GFR-binding peptide
  MOD_RES (35)..(35): Xaa is C or S

SEQ ID NO: 26888 - protein, 29 aa, Artificial Sequence
  Cyclic GFR-binding peptide
LHDELTSMEGLFIPKKRVIEMIQVTINSL

SEQ ID NO: 26889 - protein, 33 aa, Artificial Sequence; identical to SEQ ID NO: 23147
  Cyclic GFR-binding peptide
  MOD_RES (32)..(32): Xaa is C or S

SEQ ID NO: 26890 - protein, 26 aa, Artificial Sequence
  Cyclic GFR-binding peptide
VQVEKHQGQHPKIRVKAMKVSRQGTP

SEQ ID NO: 26891 - protein, 38 aa, Artificial Sequence; identical to SEQ ID NO: 23149
  Cyclic GFR-binding peptide
  MOD_RES (37)..(37): Xaa is C or S

SEQ ID NO: 26892 - protein, 31 aa, Artificial Sequence; identical to SEQ ID NO: 23150
  Cyclic GFR-binding peptide

SEQ ID NO: 26893 - protein, 32 aa, Artificial Sequence; identical to SEQ ID NO: 23151
  Cyclic GFR-binding peptide
  MOD_RES (1)..(3): Xaa is C or S

SEQ ID NO: 26894 - protein, 40 aa, Artificial Sequence; identical to SEQ ID NO: 23152
  Cyclic GFR-binding peptide
  MOD_RES (1)..(35): Xaa is C or S

SEQ ID NO: 26895 - protein, 35 aa, Artificial Sequence; identical to SEQ ID NO: 23153
  Cyclic GFR-binding peptide
  MOD_RES (34)..(34): Xaa is C or S

SEQ ID NO: 26896 - protein, 40 aa, Artificial Sequence; identical to SEQ ID NO: 23154
  Cyclic GFR-binding peptide
  MOD_RES (1)..(35): Xaa is C or S

SEQ ID NO: 26897 - protein, 28 aa, Artificial Sequence
  Cyclic GFR-binding peptide
LHDELTSMEGIFIPKKRVIEMIQVTINS

SEQ ID NO: 26898 - protein, 26 aa, Artificial Sequence
  Cyclic GFR-binding peptide
RVTAKKLKPKKRVYEIKRVQVPRHHV

SEQ ID NO: 26899 - protein, 41 aa, Artificial Sequence; identical to SEQ ID NO: 23157
  Cyclic GFR-binding peptide
  MOD_RES (2)..(36): Xaa is C or S

SEQ ID NO: 26900 - protein, 36 aa, Artificial Sequence; identical to SEQ ID NO: 23158
  Cyclic GFR-binding peptide
  MOD_RES (33)..(33): Xaa is C or S

SEQ ID NO: 26901 - protein, 28 aa, Artificial Sequence
  Cyclic GFR-binding peptide
LFSMEGLHQGQHPKIRMIQMTINSEETP

SEQ ID NO: 26902 - protein, 40 aa, Artificial Sequence; identical to SEQ ID NO: 23160
  Cyclic GFR-binding peptide
  MOD_RES (2)..(4): Xaa is C or S

SEQ ID NO: 26903 - protein, 36 aa, Artificial Sequence; identical to SEQ ID NO: 23161
  Cyclic GFR-binding peptide
  MOD_RES (2)..(2): Xaa is C or S

SEQ ID NO: 26904 - protein, 35 aa, Artificial Sequence; identical to SEQ ID NO: 23162
  Cyclic GFR-binding peptide
  MOD_RES (33)..(33): Xaa is C or S

SEQ ID NO: 26905 - protein, 37 aa, Artificial Sequence; identical to SEQ ID NO: 23163
  Cyclic GFR-binding peptide
  MOD_RES (1)..(3): Xaa is C or S

SEQ ID NO: 26906 - protein, 33 aa, Artificial Sequence; identical to SEQ ID NO: 23164
  Cyclic GFR-binding peptide

SEQ ID NO: 26907 - protein, 32 aa, Artificial Sequence; identical to SEQ ID NO: 23165
  Cyclic GFR-binding peptide
  MOD_RES (32)..(32): Xaa is C or S

SEQ ID NO: 26908 - protein, 28 aa, Artificial Sequence
  Cyclic GFR-binding peptide
DELTSMEGLFIPKKRVIEMIQVTINSLQ

SEQ ID NO: 26909 - protein, 31 aa, Artificial Sequence; identical to SEQ ID NO: 23167
  Cyclic GFR-binding peptide
  MOD_RES (29)..(29): Xaa is C or S

SEQ ID NO: 26910 - protein, 27 aa, Artificial Sequence
  Cyclic GFR-binding peptide
EELVTAKKHQGQHPKIRIKRMQVPRQG

SEQ ID NO: 26911 - protein, 43 aa, Artificial Sequence; identical to SEQ ID NO: 23169
  Cyclic GFR-binding peptide
  MOD_RES (1)..(3)..(37): Xaa is C or S

SEQ ID NO: 26912 - protein, 33 aa, Artificial Sequence; identical to SEQ ID NO: 23170
  Cyclic GFR-binding peptide
  MOD_RES (29)..(29): Xaa is C or S

SEQ ID NO: 26913 - protein, 45 aa, Artificial Sequence; identical to SEQ ID NO: 23171
  Cyclic GFR-binding peptide
  MOD_RES (2)..(4)..(41): Xaa is C or S

SEQ ID NO: 26914 - protein, 25 aa, Artificial Sequence
  Cyclic GFR-binding peptide
ELVQVEKHQGQHPKIRVKAMKVSRQ

SEQ ID NO: 26915 - protein, 29 aa, Artificial Sequence
  Cyclic GFR-binding peptide
TVQVEKFIPKKRVIEVKAVKVSRLQVQTP

SEQ ID NO: 26916 - protein, 28 aa, Artificial Sequence
  Cyclic GFR-binding peptide
ELRSMEGLLKPKKRVYEMIQVTINSHHV

SEQ ID NO: 26917 - protein, 36 aa, Artificial Sequence; identical to SEQ ID NO: 23175
  Cyclic GFR-binding peptide
  MOD_RES (32)..(32): Xaa is C or S

SEQ ID NO: 26918 - protein, 31 aa, Artificial Sequence; identical to SEQ ID NO: 23176
  Cyclic GFR-binding peptide
  MOD_RES (1)..(1): Xaa is C or S

SEQ ID NO: 26919 - protein, 34 aa, Artificial Sequence; identical to SEQ ID NO: 23177
  Cyclic GFR-binding peptide

SEQ ID NO: 26920 - protein, 37 aa, Artificial Sequence; identical to SEQ ID NO: 23178
  Cyclic GFR-binding peptide
  MOD_RES (34)..(34): Xaa is C or S

SEQ ID NO: 26921 - protein, 32 aa, Artificial Sequence; identical to SEQ ID NO: 23179
  Cyclic GFR-binding peptide

SEQ ID NO: 26922 - protein, 26 aa, Artificial Sequence
  Cyclic GFR-binding peptide
LFSMEGIHQGQHPKIRMIQMTINSEE

SEQ ID NO: 26923 - protein, 39 aa, Artificial Sequence; identical to SEQ ID NO: 23181
  Cyclic GFR-binding peptide
  MOD_RES (2)..(4)..(38): Xaa is C or S

SEQ ID NO: 26924 - protein, 35 aa, Artificial Sequence; identical to SEQ ID NO: 23182
  Cyclic GFR-binding peptide
  MOD_RES (32)..(32): Xaa is C or S

SEQ ID NO: 26925 - protein, 33 aa, Artificial Sequence; identical to SEQ ID NO: 23183
  Cyclic GFR-binding peptide
  MOD_RES (2)..(4): Xaa is C or S

SEQ ID NO: 26926 - protein, 27 aa, Artificial Sequence
  Cyclic GFR-binding peptide
HEELRVTAKKLKPKKRVYEIKRVQVPR

SEQ ID NO: 26927 - protein, 28 aa, Artificial Sequence
  Cyclic GFR-binding peptide
TSMEGLFIPKKRVIEMIQVTINSLQVQT

SEQ ID NO: 26928 - protein, 41 aa, Artificial Sequence; identical to SEQ ID NO: 23186
  Cyclic GFR-binding peptide
  MOD_RES (2)..(36): Xaa is C or S

SEQ ID NO: 26929 - protein, 26 aa, Artificial Sequence
  Cyclic GFR-binding peptide
LVTAKKHQGQHPKIRIKRMQVPRQGT

SEQ ID NO: 26930 - protein, 31 aa, Artificial Sequence; identical to SEQ ID NO: 23188
  Cyclic GFR-binding peptide

SEQ ID NO: 26931 - protein, 28 aa, Artificial Sequence
  Cyclic GFR-binding peptide
NHQLFSMEGIHQGQHPKIRMIQMTINSE

SEQ ID NO: 26932 - protein, 39 aa, Artificial Sequence; identical to SEQ ID NO: 23190
  Cyclic GFR-binding peptide
  MOD_RES (2)..(39): Xaa is C or S

SEQ ID NO: 26933 - protein, 36 aa, Artificial Sequence; identical to SEQ ID NO: 23191
  Cyclic GFR-binding peptide
  MOD_RES (1)..(3): Xaa is C or S

SEQ ID NO: 26934 - protein, 32 aa, Artificial Sequence; identical to SEQ ID NO: 23192
  Cyclic GFR-binding peptide
  MOD_RES (32)..(32): Xaa is C or S

SEQ ID NO: 26935 - protein, 29 aa, Artificial Sequence
  Cyclic GFR-binding peptide
SMEGIFIPKKRVIEMIQVTINSLQVQTPR

SEQ ID NO: 26936 - protein, 41 aa, Artificial Sequence; identical to SEQ ID NO: 23194
  Cyclic GFR-binding peptide
  MOD_RES (2)..(39): Xaa is C or S

SEQ ID NO: 26937 - protein, 39 aa, Artificial Sequence; identical to SEQ ID NO: 23195
  Cyclic GFR-binding peptide
  MOD_RES (1)..(3)..(37): Xaa is C or S

SEQ ID NO: 26938 - protein, 28 aa, Artificial Sequence
  Cyclic GFR-binding peptide
EELRSMEGLLKPKKRVYEMIQVTINSHH

SEQ ID NO: 26939 - protein, 38 aa, Artificial Sequence; identical to SEQ ID NO: 23197
  Cyclic GFR-binding peptide
  MOD_RES (2)..(2): Xaa is C or S

SEQ ID NO: 26940 - protein, 39 aa, Artificial Sequence; identical to SEQ ID NO: 23198
  Cyclic GFR-binding peptide
  MOD_RES (2)..(4)..(38): Xaa is C or S

SEQ ID NO: 26941 - protein, 31 aa, Artificial Sequence; identical to SEQ ID NO: 23199
  Cyclic GFR-binding peptide
  MOD_RES (30)..(30): Xaa is C or S

SEQ ID NO: 26942 - protein, 40 aa, Artificial Sequence; identical to SEQ ID NO: 23200
  Cyclic GFR-binding peptide
  MOD_RES (1)..(3)..(37): Xaa is C or S

SEQ ID NO: 26943 - protein, 34 aa, Artificial Sequence; identical to SEQ ID NO: 23201
  Cyclic GFR-binding peptide

SEQ ID NO: 26944 - protein, 39 aa, Artificial Sequence; identical to SEQ ID NO: 23202
  Cyclic GFR-binding peptide
  MOD_RES (1)..(38): Xaa is C or S

SEQ ID NO: 26945 - protein, 32 aa, Artificial Sequence; identical to SEQ ID NO: 23203
  Cyclic GFR-binding peptide
  MOD_RES (2)..(4): Xaa is C or S

SEQ ID NO: 26946 - protein, 27 aa, Artificial Sequence
  Cyclic GFR-binding peptide
HQLFVTAKKHQGQHPKIRIKRMQVPRE

SEQ ID NO: 26947 - protein, 42 aa, Artificial Sequence; identical to SEQ ID NO: 23205
  Cyclic GFR-binding peptide
  MOD_RES (1)..(38): Xaa is C or S

SEQ ID NO: 26948 - protein, 28 aa, Artificial Sequence
  Cyclic GFR-binding peptide
LVQVEKHQGQHPKIRVKAMKVSRQGTPV

SEQ ID NO: 26949 - protein, 36 aa, Artificial Sequence; identical to SEQ ID NO: 23207
  Cyclic GFR-binding peptide
  MOD_RES (30)..(30): Xaa is C or S

SEQ ID NO: 26950 - protein, 37 aa, Artificial Sequence; identical to SEQ ID NO: 23208
  Cyclic GFR-binding peptide
  MOD_RES (2)..(4): Xaa is C or S

SEQ ID NO: 26951 - protein, 31 aa, Artificial Sequence; identical to SEQ ID NO: 23209
  Cyclic GFR-binding peptide
  MOD_RES (1)..(1): Xaa is C or S

SEQ ID NO: 26952 - protein, 38 aa, Artificial Sequence; identical to SEQ ID NO: 23210
  Cyclic GFR-binding peptide
  MOD_RES (1)..(35): Xaa is C or S

SEQ ID NO: 26953 - protein, 42 aa, Artificial Sequence; identical to SEQ ID NO: 23211
  Cyclic GFR-binding peptide
  MOD_RES (1)..(3)..(40): Xaa is C or S

SEQ ID NO: 26954 - protein, 41 aa, Artificial Sequence; identical to SEQ ID NO: 23212
  Cyclic GFR-binding peptide
  MOD_RES (1)..(35): Xaa is C or S

SEQ ID NO: 26955 - protein, 33 aa, Artificial Sequence; identical to SEQ ID NO: 23213
  Cyclic GFR-binding peptide
  MOD_RES (2)..(4): Xaa is C or S

SEQ ID NO: 26956 - protein, 27 aa, Artificial Sequence
  Cyclic GFR-binding peptide
LFSMEGIHQGQHPKIRMIQMTINSEET

SEQ ID NO: 26957 - protein, 27 aa, Artificial Sequence
  Cyclic GFR-binding peptide
LRSMEGILKPKKRVYEMIQVTINSHHV

SEQ ID NO: 26958 - protein, 37 aa, Artificial Sequence; identical to SEQ ID NO: 23216
  Cyclic GFR-binding peptide
  MOD_RES (2)..(4): Xaa is C or S

SEQ ID NO: 26959 - protein, 26 aa, Artificial Sequence
  Cyclic GFR-binding peptide
ELVQVEKHQGQHPKIRVKAMKVSRQG

SEQ ID NO: 26960 - protein, 40 aa, Artificial Sequence; identical to SEQ ID NO: 23218
  Cyclic GFR-binding peptide
  MOD_RES (2)..(4)..(38): Xaa is C or S

SEQ ID NO: 26961 - protein, 32 aa, Artificial Sequence; identical to SEQ ID NO: 23219
  Cyclic GFR-binding peptide
  MOD_RES (29)..(29): Xaa is C or S

SEQ ID NO: 26962 - protein, 36 aa, Artificial Sequence; identical to SEQ ID NO: 23220
  Cyclic GFR-binding peptide
  MOD_RES (31)..(31): Xaa is C or S

SEQ ID NO: 26963 - protein, 33 aa, Artificial Sequence; identical to SEQ ID NO: 23221
  Cyclic GFR-binding peptide
  MOD_RES (31)..(31): Xaa is C or S

SEQ ID NO: 26964 - protein, 35 aa, Artificial Sequence; identical to SEQ ID NO: 23222
  Cyclic GFR-binding peptide
  MOD_RES (1)..(35): Xaa is C or S

SEQ ID NO: 26965 - protein, 39 aa, Artificial Sequence; identical to SEQ ID NO: 23223
  Cyclic GFR-binding peptide
  MOD_RES (2)..(4)..(38): Xaa is C or S

SEQ ID NO: 26966 - protein, 29 aa, Artificial Sequence
  Cyclic GFR-binding peptide
ELRSMEGILKPKKRVYEMIQVTINSHHVR

SEQ ID NO: 26967 - protein, 34 aa, Artificial Sequence; identical to SEQ ID NO: 23225
  Cyclic GFR-binding peptide
  MOD_RES (31)..(31): Xaa is C or S

SEQ ID NO: 26968 - protein, 41 aa, Artificial Sequence; identical to SEQ ID NO: 23226
  Cyclic GFR-binding peptide
  MOD_RES (1)..(3)..(40): Xaa is C or S

SEQ ID NO: 26969 - protein, 37 aa, Artificial Sequence; identical to SEQ ID NO: 23227
  Cyclic GFR-binding peptide
  MOD_RES (2)..(4): Xaa is C or S

SEQ ID NO: 26970 - protein, 37 aa, Artificial Sequence; identical to SEQ ID NO: 23228
  Cyclic GFR-binding peptide
  MOD_RES (2)..(36): Xaa is C or S

SEQ ID NO: 26971 - protein, 35 aa, Artificial Sequence; identical to SEQ ID NO: 23229
  Cyclic GFR-binding peptide
  MOD_RES (33)..(33): Xaa is C or S

SEQ ID NO: 26972 - protein, 40 aa, Artificial Sequence; identical to SEQ ID NO: 23230
  Cyclic GFR-binding peptide
  MOD_RES (1)..(3)..(40): Xaa is C or S

SEQ ID NO: 26973 - protein, 44 aa, Artificial Sequence; identical to SEQ ID NO: 23231
  Cyclic GFR-binding peptide
  MOD_RES (1)..(3)..(40): Xaa is C or S

SEQ ID NO: 26974 - protein, 33 aa, Artificial Sequence; identical to SEQ ID NO: 23232
  Cyclic GFR-binding peptide
  MOD_RES (2)..(2): Xaa is C or S

SEQ ID NO: 26975 - protein, 33 aa, Artificial Sequence; identical to SEQ ID NO: 23233
  Cyclic GFR-binding peptide

SEQ ID NO: 26976 - protein, 29 aa, Artificial Sequence
  Cyclic GFR-binding peptide
  MOD_RES (29)..(29): Xaa is C or S
LVQVEKHQGQHPKIRVKAMKVSRQGTPVX

SEQ ID NO: 26977 - protein, 26 aa, Artificial Sequence
  Cyclic GFR-binding peptide
SMEGLLKPKKRVYEMIQVTINSHHVR

SEQ ID NO: 26978 - protein, 31 aa, Artificial Sequence; identical to SEQ ID NO: 23236
  Cyclic GFR-binding peptide

SEQ ID NO: 26979 - protein, 33 aa, Artificial Sequence; identical to SEQ ID NO: 23237
  Cyclic GFR-binding peptide
  MOD_RES (32)..(32): Xaa is C or S

SEQ ID NO: 26980 - protein, 37 aa, Artificial Sequence; identical to SEQ ID NO: 23238
  Cyclic GFR-binding peptide
  MOD_RES (35)..(35): Xaa is C or S

SEQ ID NO: 26981 - protein, 28 aa, Artificial Sequence
  Cyclic GFR-binding peptide
FSMEGIHQGQHPKIRMIQMTINSEETPV

SEQ ID NO: 26982 - protein, 37 aa, Artificial Sequence; identical to SEQ ID NO: 23240
  Cyclic GFR-binding peptide
  MOD_RES (35)..(35): Xaa is C or S

SEQ ID NO: 26983 - protein, 31 aa, Artificial Sequence; identical to SEQ ID NO: 23241
  Cyclic GFR-binding peptide
  MOD_RES (30)..(30): Xaa is C or S

SEQ ID NO: 26984 - protein, 23 aa, Artificial Sequence
  Cyclic GFR-binding peptide
VQVEKFIPKKRVIEVKAVKVSRL

SEQ ID NO: 26985 - protein, 29 aa, Artificial Sequence
  Cyclic GFR-binding peptide
LHEELRVTAKKLKPKKRVYEIKRVQVPRH

SEQ ID NO: 26986 - protein, 41 aa, Artificial Sequence; identical to SEQ ID NO: 23244
  Cyclic GFR-binding peptide
  MOD_RES (1)..(3)..(40): Xaa is C or S

SEQ ID NO: 26987 - protein, 37 aa, Artificial Sequence; identical to SEQ ID NO: 23245
  Cyclic GFR-binding peptide
  MOD_RES (2)..(36): Xaa is C or S

SEQ ID NO: 26988 - protein, 40 aa, Artificial Sequence; identical to SEQ ID NO: 23246
  Cyclic GFR-binding peptide
  MOD_RES (1)..(3)..(37): Xaa is C or S

SEQ ID NO: 26989 - protein, 41 aa, Artificial Sequence; identical to SEQ ID NO: 23247
  Cyclic GFR-binding peptide
  MOD_RES (2)..(39): Xaa is C or S

SEQ ID NO: 26990 - protein, 24 aa, Artificial Sequence
  Cyclic GFR-binding peptide
VQVEKFIPKKRVIEVKAVKVSRLQ

SEQ ID NO: 26991 - protein, 41 aa, Artificial Sequence; identical to SEQ ID NO: 23249
  Cyclic GFR-binding peptide
  MOD_RES (2)..(4)..(38): Xaa is C or S

SEQ ID NO: 26992 - protein, 32 aa, Artificial Sequence; identical to SEQ ID NO: 23250
  Cyclic GFR-binding peptide
  MOD_RES (1)..(3): Xaa is C or S

SEQ ID NO: 26993 - protein, 40 aa, Artificial Sequence; identical to SEQ ID NO: 23251
  Cyclic GFR-binding peptide
  MOD_RES (2)..(4)..(38): Xaa is C or S

SEQ ID NO: 26994 - protein, 27 aa, Artificial Sequence
  Cyclic GFR-binding peptide
ELRSMEGLLKPKKRVYEMIQVTINSHH

SEQ ID NO: 26995 - protein, 33 aa, Artificial Sequence; identical to SEQ ID NO: 23253
  Cyclic GFR-binding peptide
  MOD_RES (2)..(4): Xaa is C or S

SEQ ID NO: 26996 - protein, 27 aa, Artificial Sequence
  Cyclic GFR-binding peptide
LVQVEKHQGQHPKIRVKAMKVSRQGTP

SEQ ID NO: 26997 - protein, 39 aa, Artificial Sequence; identical to SEQ ID NO: 23255
  Cyclic GFR-binding peptide
  MOD_RES (1)..(3): Xaa is C or S

SEQ ID NO: 26998 - protein, 38 aa, Artificial Sequence; identical to SEQ ID NO: 23256
  Cyclic GFR-binding peptide
  MOD_RES (1)..(35): Xaa is C or S

SEQ ID NO: 26999 - protein, 39 aa, Artificial Sequence; identical to SEQ ID NO: 23257
  Cyclic GFR-binding peptide
  MOD_RES (37)..(37): Xaa is C or S

SEQ ID NO: 27000 - protein, 40 aa, Artificial Sequence; identical to SEQ ID NO: 23258
  Cyclic GFR-binding peptide
  MOD_RES (34)..(34): Xaa is C or S

SEQ ID NO: 27001 - protein, 29 aa, Artificial Sequence
  Cyclic GFR-binding peptide
LHEELRSMEGILKPKKRVYEMIQVTINSH

SEQ ID NO: 27002 - protein, 35 aa, Artificial Sequence; identical to SEQ ID NO: 23260
  Cyclic GFR-binding peptide

SEQ ID NO: 27003 - protein, 38 aa, Artificial Sequence; identical to SEQ ID NO: 23261
  Cyclic GFR-binding peptide
  MOD_RES (2)..(36): Xaa is C or S

SEQ ID NO: 27004 - protein, 29 aa, Artificial Sequence
  Cyclic GFR-binding peptide
ELTSMEGLFIPKKRVIEMIQVTINSLQVQ

SEQ ID NO: 27005 - protein, 31 aa, Artificial Sequence; identical to SEQ ID NO: 23263
  Cyclic GFR-binding peptide

SEQ ID NO: 27006 - protein, 28 aa, Artificial Sequence
  Cyclic GFR-binding peptide
LRSMEGLLKPKKRVYEMIQVTINSHHVR

SEQ ID NO: 27007 - protein, 35 aa, Artificial Sequence; identical to SEQ ID NO: 23265
  Cyclic GFR-binding peptide
  MOD_RES (34)..(34): Xaa is C or S

SEQ ID NO: 27008 - protein, 31 aa, Artificial Sequence; identical to SEQ ID NO: 23266
  Cyclic GFR-binding peptide

SEQ ID NO: 27009 - protein, 34 aa, Artificial Sequence; identical to SEQ ID NO: 23267
  Cyclic GFR-binding peptide
  MOD_RES (30)..(30): Xaa is C or S

SEQ ID NO: 27010 - protein, 39 aa, Artificial Sequence; identical to SEQ ID NO: 23268
  Cyclic GFR-binding peptide
  MOD_RES (36)..(36): Xaa is C or S

SEQ ID NO: 27011 - protein, 29 aa, Artificial Sequence
  Cyclic GFR-binding peptide
DELTVQVEKFIPKKRVIEVKAVKVSRLQV

SEQ ID NO: 27012 - protein, 31 aa, Artificial Sequence; identical to SEQ ID NO: 23270
  Cyclic GFR-binding peptide

SEQ ID NO: 27013 - protein, 29 aa, Artificial Sequence
  Cyclic GFR-binding peptide
HEELRSMEGLLKPKKRVYEMIQVTINSHH

SEQ ID NO: 27014 - protein, 32 aa, Artificial Sequence; identical to SEQ ID NO: 23272
  Cyclic GFR-binding peptide
  MOD_RES (28)..(28): Xaa is C or S

SEQ ID NO: 27015 - protein, 40 aa, Artificial Sequence; identical to SEQ ID NO: 23273
  Cyclic GFR-binding peptide
  MOD_RES (36)..(36): Xaa is C or S

SEQ ID NO: 27016 - protein, 37 aa, Artificial Sequence; identical to SEQ ID NO: 23274
  Cyclic GFR-binding peptide
  MOD_RES (2)..(2): Xaa is C or S

SEQ ID NO: 27017 - protein, 34 aa, Artificial Sequence; identical to SEQ ID NO: 23275
  Cyclic GFR-binding peptide
  MOD_RES (31)..(31): Xaa is C or S

SEQ ID NO: 27018 - protein, 26 aa, Artificial Sequence
  Cyclic GFR-binding peptide
HQLFSMEGIHQGQHPKIRMIQMTINS

SEQ ID NO: 27019 - protein, 42 aa, Artificial Sequence; identical to SEQ ID NO: 23277
  Cyclic GFR-binding peptide
  MOD_RES (2)..(36): Xaa is C or S

SEQ ID NO: 27020 - protein, 25 aa, Artificial Sequence
  Cyclic GFR-binding peptide
ELTVQVEKFIPKKRVIEVKAVKVSR

SEQ ID NO: 27021 - protein, 26 aa, Artificial Sequence
  Cyclic GFR-binding peptide
QLFSMEGIHQGQHPKIRMIQMTINSE

SEQ ID NO: 27022 - protein, 31 aa, Artificial Sequence; identical to SEQ ID NO: 23280
  Cyclic GFR-binding peptide
  MOD_RES (29)..(29): Xaa is C or S

SEQ ID NO: 27023 - protein, 31 aa, Artificial Sequence; identical to SEQ ID NO: 23281
  Cyclic GFR-binding peptide

SEQ ID NO: 27024 - protein, 31 aa, Artificial Sequence; identical to SEQ ID NO: 23282
  Cyclic GFR-binding peptide

SEQ ID NO: 27025 - protein, 30 aa, Artificial Sequence; identical to SEQ ID NO: 23283
  Cyclic GFR-binding peptide
  MOD_RES (1)..(1): Xaa is C or S

SEQ ID NO: 27026 - protein, 36 aa, Artificial Sequence; identical to SEQ ID NO: 23284
  Cyclic GFR-binding peptide
  MOD_RES (1)..(3): Xaa is C or S

SEQ ID NO: 27027 - protein, 41 aa, Artificial Sequence; identical to SEQ ID NO: 23285
  Cyclic GFR-binding peptide
  MOD_RES (1)..(38): Xaa is C or S

SEQ ID NO: 27028 - protein, 41 aa, Artificial Sequence; identical to SEQ ID NO: 23286
  Cyclic GFR-binding peptide
  MOD_RES (1)..(3)..(37): Xaa is C or S

SEQ ID NO: 27029 - protein, 36 aa, Artificial Sequence; identical to SEQ ID NO: 23287
  Cyclic GFR-binding peptide
  MOD_RES (34)..(34): Xaa is C or S

SEQ ID NO: 27030 - protein, 43 aa, Artificial Sequence; identical to SEQ ID NO: 23288
  Cyclic GFR-binding peptide
  MOD_RES (2)..(39): Xaa is C or S

SEQ ID NO: 27031 - protein, 36 aa, Artificial Sequence; identical to SEQ ID NO: 23289
  Cyclic GFR-binding peptide
  MOD_RES (34)..(34): Xaa is C or S

SEQ ID NO: 27032 - protein, 33 aa, Artificial Sequence; identical to SEQ ID NO: 23290
  Cyclic GFR-binding peptide
  MOD_RES (28)..(28): Xaa is C or S

SEQ ID NO: 27033 - protein, 28 aa, Artificial Sequence
  Cyclic GFR-binding peptide
RSMEGILKPKKRVYEMIQVTINSHHVRS

SEQ ID NO: 27034 - protein, 35 aa, Artificial Sequence; identical to SEQ ID NO: 23292
  Cyclic GFR-binding peptide
  MOD_RES (2)..(4): Xaa is C or S

SEQ ID NO: 27035 - protein, 26 aa, Artificial Sequence
  Cyclic GFR-binding peptide
ELRVTAKKLKPKKRVYEIKRVQVPRH

SEQ ID NO: 27036 - protein, 36 aa, Artificial Sequence; identical to SEQ ID NO: 23294
  Cyclic GFR-binding peptide
  MOD_RES (2)..(36): Xaa is C or S

SEQ ID NO: 27037 - protein, 32 aa, Artificial Sequence; identical to SEQ ID NO: 23295
  Cyclic GFR-binding peptide
  MOD_RES (30)..(30): Xaa is C or S

SEQ ID NO: 27038 - protein, 23 aa, Artificial Sequence
  Cyclic GFR-binding peptide
VQVEKHQGQHPKIRVKAMKVSRE

SEQ ID NO: 27039 - protein, 39 aa, Artificial Sequence; identical to SEQ ID NO: 23297
  Cyclic GFR-binding peptide
  MOD_RES (1)..(35): Xaa is C or S

SEQ ID NO: 27040 - protein, 36 aa, Artificial Sequence; identical to SEQ ID NO: 23298
  Cyclic GFR-binding peptide

SEQ ID NO: 27041 - protein, 34 aa, Artificial Sequence; identical to SEQ ID NO: 23299
  Cyclic GFR-binding peptide
  MOD_RES (29)..(29): Xaa is C or S

SEQ ID NO: 27042 - protein, 29 aa, Artificial Sequence
  Cyclic GFR-binding peptide
HEELVQVEKHQGQHPKIRVKAMKVSRQGT

SEQ ID NO: 27043 - protein, 38 aa, Artificial Sequence; identical to SEQ ID NO: 23301
  Cyclic GFR-binding peptide
  MOD_RES (32)..(32): Xaa is C or S

SEQ ID NO: 27044 - protein, 32 aa, Artificial Sequence; identical to SEQ ID NO: 23302
  Cyclic GFR-binding peptide
  MOD_RES (31)..(31): Xaa is C or S

SEQ ID NO: 27045 - protein, 27 aa, Artificial Sequence
  Cyclic GFR-binding peptide
HEELRSMEGLLKPKKRVYEMIQVTINS

SEQ ID NO: 27046 - protein, 27 aa, Artificial Sequence
  Cyclic GFR-binding peptide
HEELRSMEGILKPKKRVYEMIQVTINS

SEQ ID NO: 27047 - protein, 42 aa, Artificial Sequence; identical to SEQ ID NO: 23305
  Cyclic GFR-binding peptide
  MOD_RES (2)..(4)..(41): Xaa is C or S

SEQ ID NO: 27048 - protein, 30 aa, Artificial Sequence; identical to SEQ ID NO: 23306
  Cyclic GFR-binding peptide

SEQ ID NO: 27049 - protein, 35 aa, Artificial Sequence; identical to SEQ ID NO: 23307
  Cyclic GFR-binding peptide
  MOD_RES (2)..(2): Xaa is C or S

SEQ ID NO: 27050 - protein, 29 aa, Artificial Sequence
  Cyclic GFR-binding peptide
EELVTAKKHQGQHPKIRIKRMQVPRQGTP

SEQ ID NO: 27051 - protein, 34 aa, Artificial Sequence; identical to SEQ ID NO: 23309
  Cyclic GFR-binding peptide
  MOD_RES (1)..(1): Xaa is C or S

SEQ ID NO: 27052 - protein, 35 aa, Artificial Sequence; identical to SEQ ID NO: 23310
  Cyclic GFR-binding peptide
  MOD_RES (31)..(31): Xaa is C or S

SEQ ID NO: 27053 - protein, 30 aa, Artificial Sequence; identical to SEQ ID NO: 23311
  Cyclic GFR-binding peptide
  MOD_RES (30)..(30): Xaa is C or S

SEQ ID NO: 27054 - protein, 33 aa, Artificial Sequence; identical to SEQ ID NO: 23312
  Cyclic GFR-binding peptide
  MOD_RES (1)..(3): Xaa is C or S

SEQ ID NO: 27055 - protein, 32 aa, Artificial Sequence; identical to SEQ ID NO: 23313
  Cyclic GFR-binding peptide

SEQ ID NO: 27056 - protein, 39 aa, Artificial Sequence; identical to SEQ ID NO: 23314
  Cyclic GFR-binding peptide
  MOD_RES (37)..(37): Xaa is C or S

SEQ ID NO: 27057 - protein, 31 aa, Artificial Sequence; identical to SEQ ID NO: 23315
  Cyclic GFR-binding peptide

SEQ ID NO: 27058 - protein, 29 aa, Artificial Sequence
  Cyclic GFR-binding peptide
RSMEGLLKPKKRVYEMIQVTINSHHVRSP

SEQ ID NO: 27059 - protein, 37 aa, Artificial Sequence; identical to SEQ ID NO: 23317
  Cyclic GFR-binding peptide
  MOD_RES (1)..(35): Xaa is C or S

SEQ ID NO: 27060 - protein, 30 aa, Artificial Sequence; identical to SEQ ID NO: 23318
  Cyclic GFR-binding peptide

SEQ ID NO: 27061 - protein, 28 aa, Artificial Sequence
  Cyclic GFR-binding peptide
EELRVTAKKLKPKKRVYEIKRVQVPRHH

SEQ ID NO: 27062 - protein, 33 aa, Artificial Sequence; identical to SEQ ID NO: 23320
  Cyclic GFR-binding peptide
  MOD_RES (30)..(30): Xaa is C or S

SEQ ID NO: 27063 - protein, 34 aa, Artificial Sequence; identical to SEQ ID NO: 23321
  Cyclic GFR-binding peptide
  MOD_RES (1)..(1): Xaa is C or S

SEQ ID NO: 27064 - protein, 37 aa, Artificial Sequence; identical to SEQ ID NO: 23322
  Cyclic GFR-binding peptide
  MOD_RES (5)..(5): Xaa is C or S

SEQ ID NO: 27065 - protein, 29 aa, Artificial Sequence
  Cyclic GFR-binding peptide
HHRPVQVRKIEYVRKKPKLKKATVRLEEH

SEQ ID NO: 27066 - protein, 23 aa, Artificial Sequence
  Cyclic GFR-binding peptide
RPVQVRKIEYVRKKPKLKKATVR

SEQ ID NO: 27067 - protein, 31 aa, Artificial Sequence; identical to SEQ ID NO: 23325
  Cyclic GFR-binding peptide
  MOD_RES (2)..(2): Xaa is C or S

SEQ ID NO: 27068 - protein, 29 aa, Artificial Sequence
  Cyclic GFR-binding peptide
RVHHSNITVQIMEYVRKKPKLLGEMSRLE

SEQ ID NO: 27069 - protein, 36 aa, Artificial Sequence; identical to SEQ ID NO: 23327
  Cyclic GFR-binding peptide
  MOD_RES (34)..(36): Xaa is C or S

SEQ ID NO: 27070 - protein, 34 aa, Artificial Sequence; identical to SEQ ID NO: 23328
  Cyclic GFR-binding peptide
  MOD_RES (1)..(1): Xaa is C or S

SEQ ID NO: 27071 - protein, 43 aa, Artificial Sequence; identical to SEQ ID NO: 23329
  Cyclic GFR-binding peptide
  MOD_RES (7)..(41)..(43): Xaa is C or S

SEQ ID NO: 27072 - protein, 35 aa, Artificial Sequence; identical to SEQ ID NO: 23330
  Cyclic GFR-binding peptide
  MOD_RES (1)..(35): Xaa is C or S

SEQ ID NO: 27073 - protein, 26 aa, Artificial Sequence
  Cyclic GFR-binding peptide
EERSVKMAKVRIKPHQGQHKEVQVFL

SEQ ID NO: 27074 - protein, 31 aa, Artificial Sequence; identical to SEQ ID NO: 23332
  Cyclic GFR-binding peptide

SEQ ID NO: 27075 - protein, 36 aa, Artificial Sequence; identical to SEQ ID NO: 23333
  Cyclic GFR-binding peptide
  MOD_RES (7)..(7): Xaa is C or S

SEQ ID NO: 27076 - protein, 30 aa, Artificial Sequence; identical to SEQ ID NO: 23334
  Cyclic GFR-binding peptide

SEQ ID NO: 27077 - protein, 32 aa, Artificial Sequence; identical to SEQ ID NO: 23335
  Cyclic GFR-binding peptide

SEQ ID NO: 27078 - protein, 34 aa, Artificial Sequence; identical to SEQ ID NO: 23336
  Cyclic GFR-binding peptide
  MOD_RES (1)..(1): Xaa is C or S

SEQ ID NO: 27079 - protein, 42 aa, Artificial Sequence; identical to SEQ ID NO: 23337
  Cyclic GFR-binding peptide
  MOD_RES (5)..(42): Xaa is C or S

SEQ ID NO: 27080 - protein, 27 aa, Artificial Sequence
  Cyclic GFR-binding peptide
PTGQRPVQMRKIRIKPHQGQHKKATVL

SEQ ID NO: 27081 - protein, 26 aa, Artificial Sequence
  Cyclic GFR-binding peptide
HSNITVQIMEYVRKKPKLIGEMSRLE

SEQ ID NO: 27082 - protein, 31 aa, Artificial Sequence; identical to SEQ ID NO: 23340
  Cyclic GFR-binding peptide
  MOD_RES (30)..(30): Xaa is C or S

SEQ ID NO: 27083 - protein, 32 aa, Artificial Sequence; identical to SEQ ID NO: 23341
  Cyclic GFR-binding peptide
  MOD_RES (2)..(2): Xaa is C or S

SEQ ID NO: 27084 - protein, 31 aa, Artificial Sequence; identical to SEQ ID NO: 23342
  Cyclic GFR-binding peptide
  MOD_RES (1)..(1): Xaa is C or S

SEQ ID NO: 27085 - protein, 31 aa, Artificial Sequence; identical to SEQ ID NO: 23343
  Cyclic GFR-binding peptide
  MOD_RES (2)..(2): Xaa is C or S

SEQ ID NO: 27086 - protein, 24 aa, Artificial Sequence
  Cyclic GFR-binding peptide
SNITVQIMEYVRKKPKLLGEMSRL

SEQ ID NO: 27087 - protein, 26 aa, Artificial Sequence
  Cyclic GFR-binding peptide
QVQLRSVKVAKVEIVRKKPIFKEVQV

SEQ ID NO: 27088 - protein, 35 aa, Artificial Sequence; identical to SEQ ID NO: 23346
  Cyclic GFR-binding peptide
  MOD_RES (34)..(34): Xaa is C or S

SEQ ID NO: 27089 - protein, 29 aa, Artificial Sequence
  Cyclic GFR-binding peptide
  MOD_RES (1)..(1): Xaa is C or S
XVPTEESNITMQIMRIKPHQGQHLGEMSF

SEQ ID NO: 27090 - protein, 36 aa, Artificial Sequence; identical to SEQ ID NO: 23348
  Cyclic GFR-binding peptide
  MOD_RES (34)..(36): Xaa is C or S

SEQ ID NO: 27091 - protein, 39 aa, Artificial Sequence; identical to SEQ ID NO: 23349
  Cyclic GFR-binding peptide
  MOD_RES (2)..(39): Xaa is C or S

SEQ ID NO: 27092 - protein, 36 aa, Artificial Sequence; identical to SEQ ID NO: 23350
  Cyclic GFR-binding peptide
  MOD_RES (34)..(36): Xaa is C or S

SEQ ID NO: 27093 - protein, 35 aa, Artificial Sequence; identical to SEQ ID NO: 23351
  Cyclic GFR-binding peptide
  MOD_RES (5)..(5): Xaa is C or S

SEQ ID NO: 27094 - protein, 37 aa, Artificial Sequence; identical to SEQ ID NO: 23352
  Cyclic GFR-binding peptide
  MOD_RES (1)..(1): Xaa is C or S

SEQ ID NO: 27095 - protein, 36 aa, Artificial Sequence; identical to SEQ ID NO: 23353
  Cyclic GFR-binding peptide
  MOD_RES (1)..(1): Xaa is C or S

SEQ ID NO: 27096 - protein, 45 aa, Artificial Sequence; identical to SEQ ID NO: 23354
  Cyclic GFR-binding peptide
  MOD_RES (5)..(42)..(44): Xaa is C or S

SEQ ID NO: 27097 - protein, 31 aa, Artificial Sequence; identical to SEQ ID NO: 23355
  Cyclic GFR-binding peptide
  MOD_RES (31)..(31): Xaa is C or S

SEQ ID NO: 27098 - protein, 34 aa, Artificial Sequence; identical to SEQ ID NO: 23356
  Cyclic GFR-binding peptide

SEQ ID NO: 27099 - protein, 29 aa, Artificial Sequence
  Cyclic GFR-binding peptide
VHHSNITVQIMEYVRKKPKLIGEMSRLEE

SEQ ID NO: 27100 - protein, 37 aa, Artificial Sequence; identical to SEQ ID NO: 23358
  Cyclic GFR-binding peptide
  MOD_RES (34)..(36): Xaa is C or S

SEQ ID NO: 27101 - protein, 35 aa, Artificial Sequence; identical to SEQ ID NO: 23359
  Cyclic GFR-binding peptide
  MOD_RES (1)..(1): Xaa is C or S

SEQ ID NO: 27102 - protein, 34 aa, Artificial Sequence; identical to SEQ ID NO: 23360
  Cyclic GFR-binding peptide
  MOD_RES (33)..(33): Xaa is C or S

SEQ ID NO: 27103 - protein, 34 aa, Artificial Sequence; identical to SEQ ID NO: 23361
  Cyclic GFR-binding peptide
  MOD_RES (1)..(1): Xaa is C or S

SEQ ID NO: 27104 - protein, 33 aa, Artificial Sequence; identical to SEQ ID NO: 23362
  Cyclic GFR-binding peptide

SEQ ID NO: 27105 - protein, 44 aa, Artificial Sequence; identical to SEQ ID NO: 23363
  Cyclic GFR-binding peptide
  MOD_RES (4)..(41)..(43): Xaa is C or S

SEQ ID NO: 27106 - protein, 34 aa, Artificial Sequence; identical to SEQ ID NO: 23364
  Cyclic GFR-binding peptide
  MOD_RES (32)..(34): Xaa is C or S

SEQ ID NO: 27107 - protein, 32 aa, Artificial Sequence; identical to SEQ ID NO: 23365
  Cyclic GFR-binding peptide
  MOD_RES (1)..(1): Xaa is C or S

SEQ ID NO: 27108 - protein, 30 aa, Artificial Sequence; identical to SEQ ID NO: 23366
  Cyclic GFR-binding peptide

SEQ ID NO: 27109 - protein, 38 aa, Artificial Sequence; identical to SEQ ID NO: 23367
  Cyclic GFR-binding peptide
  MOD_RES (37)..(37): Xaa is C or S

SEQ ID NO: 27110 - protein, 38 aa, Artificial Sequence; identical to SEQ ID NO: 23368
  Cyclic GFR-binding peptide
  MOD_RES (3)..(37): Xaa is C or S

SEQ ID NO: 27111 - protein, 28 aa, Artificial Sequence
  Cyclic GFR-binding peptide
RVHHRPVQVRKIEYVRKKPKLKKATVRL

SEQ ID NO: 27112 - protein, 40 aa, Artificial Sequence; identical to SEQ ID NO: 23370
  Cyclic GFR-binding peptide
  MOD_RES (6)..(40): Xaa is C or S

SEQ ID NO: 27113 - protein, 28 aa, Artificial Sequence
  Cyclic GFR-binding peptide
SRVHHSNITVQIMEYVRKKPKLLGEMSR

SEQ ID NO: 27114 - protein, 27 aa, Artificial Sequence
  Cyclic GFR-binding peptide
RVHHSNITVQIMEYVRKKPKLLGEMSR

SEQ ID NO: 27115 - protein, 37 aa, Artificial Sequence; identical to SEQ ID NO: 23373
  Cyclic GFR-binding peptide
  MOD_RES (3)..(3): Xaa is C or S

SEQ ID NO: 27116 - protein, 33 aa, Artificial Sequence; identical to SEQ ID NO: 23374
  Cyclic GFR-binding peptide
  MOD_RES (2)..(2): Xaa is C or S

SEQ ID NO: 27117 - protein, 42 aa, Artificial Sequence; identical to SEQ ID NO: 23375
  Cyclic GFR-binding peptide
  MOD_RES (6)..(40)..(42): Xaa is C or S

SEQ ID NO: 27118 - protein, 41 aa, Artificial Sequence; identical to SEQ ID NO: 23376
  Cyclic GFR-binding peptide
  MOD_RES (4)..(41): Xaa is C or S

SEQ ID NO: 27119 - protein, 38 aa, Artificial Sequence; identical to SEQ ID NO: 23377
  Cyclic GFR-binding peptide
  MOD_RES (4)..(4): Xaa is C or S

SEQ ID NO: 27120 - protein, 37 aa, Artificial Sequence; identical to SEQ ID NO: 23378
  Cyclic GFR-binding peptide
  MOD_RES (5)..(5): Xaa is C or S

SEQ ID NO: 27121 - protein, 38 aa, Artificial Sequence; identical to SEQ ID NO: 23379
  Cyclic GFR-binding peptide
  MOD_RES (1)..(35)..(37): Xaa is C or S

SEQ ID NO: 27122 - protein, 29 aa, Artificial Sequence
  Cyclic GFR-binding peptide
SRVHHSNITVQIMEYVRKKPKLLGEMSRL

SEQ ID NO: 27123 - protein, 30 aa, Artificial Sequence; identical to SEQ ID NO: 23381
  Cyclic GFR-binding peptide
  MOD_RES (2)..(2): Xaa is C or S

SEQ ID NO: 27124 - protein, 28 aa, Artificial Sequence
  Cyclic GFR-binding peptide
PTGQSNITMQIMRIKPHQGQHIGEMSLE

SEQ ID NO: 27125 - protein, 35 aa, Artificial Sequence; identical to SEQ ID NO: 23383
  Cyclic GFR-binding peptide
  MOD_RES (1)..(1): Xaa is C or S

SEQ ID NO: 27126 - protein, 39 aa, Artificial Sequence; identical to SEQ ID NO: 23384
  Cyclic GFR-binding peptide
  MOD_RES (2)..(36)..(38): Xaa is C or S

SEQ ID NO: 27127 - protein, 36 aa, Artificial Sequence; identical to SEQ ID NO: 23385
  Cyclic GFR-binding peptide
  MOD_RES (3)..(3): Xaa is C or S

SEQ ID NO: 27128 - protein, 26 aa, Artificial Sequence
  Cyclic GFR-binding peptide
TGQSNITMQIMRIKPHQGQHIGEMSL

SEQ ID NO: 27129 - protein, 35 aa, Artificial Sequence; identical to SEQ ID NO: 23387
  Cyclic GFR-binding peptide
  MOD_RES (3)..(3): Xaa is C or S

SEQ ID NO: 27130 - protein, 32 aa, Artificial Sequence; identical to SEQ ID NO: 23388
  Cyclic GFR-binding peptide

SEQ ID NO: 27131 - protein, 40 aa, Artificial Sequence; identical to SEQ ID NO: 23389
  Cyclic GFR-binding peptide
  MOD_RES (4)..(4): Xaa is C or S

SEQ ID NO: 27132 - protein, 38 aa, Artificial Sequence; identical to SEQ ID NO: 23390
  Cyclic GFR-binding peptide
  MOD_RES (1)..(35)..(37): Xaa is C or S

SEQ ID NO: 27133 - protein, 37 aa, Artificial Sequence; identical to SEQ ID NO: 23391
  Cyclic GFR-binding peptide
  MOD_RES (7)..(7): Xaa is C or S

SEQ ID NO: 27134 - protein, 34 aa, Artificial Sequence; identical to SEQ ID NO: 23392
  Cyclic GFR-binding peptide
  MOD_RES (32)..(34): Xaa is C or S

SEQ ID NO: 27135 - protein, 31 aa, Artificial Sequence; identical to SEQ ID NO: 23393
  Cyclic GFR-binding peptide

SEQ ID NO: 27136 - protein, 34 aa, Artificial Sequence; identical to SEQ ID NO: 23394
  Cyclic GFR-binding peptide
  MOD_RES (34)..(34): Xaa is C or S

SEQ ID NO: 27137 - protein, 29 aa, Artificial Sequence
  Cyclic GFR-binding peptide
VHHSNITVQIMEYVRKKPKLLGEMSRLEE

SEQ ID NO: 27138 - protein, 26 aa, Artificial Sequence
  Cyclic GFR-binding peptide
QVQLSNITVQIMEIVRKKPIFIGEMS

SEQ ID NO: 27139 - protein, 25 aa, Artificial Sequence
  Cyclic GFR-binding peptide
RPVQMRKIRIKPHQGQHKKATVLEE

SEQ ID NO: 27140 - protein, 31 aa, Artificial Sequence; identical to SEQ ID NO: 23398
  Cyclic GFR-binding peptide
  MOD_RES (2)..(2): Xaa is C or S

SEQ ID NO: 27141 - protein, 45 aa, Artificial Sequence; identical to SEQ ID NO: 23399
  Cyclic GFR-binding peptide
  MOD_RES (5)..(42)..(44): Xaa is C or S

SEQ ID NO: 27142 - protein, 34 aa, Artificial Sequence; identical to SEQ ID NO: 23400
  Cyclic GFR-binding peptide
  MOD_RES (5)..(5): Xaa is C or S

SEQ ID NO: 27143 - protein, 39 aa, Artificial Sequence; identical to SEQ ID NO: 23401
  Cyclic GFR-binding peptide
  MOD_RES (5)..(39): Xaa is C or S

SEQ ID NO: 27144 - protein, 29 aa, Artificial Sequence
  Cyclic GFR-binding peptide
RSVKVAKVEIVRKKPIFKEVQVTLEDHLA

SEQ ID NO: 27145 - protein, 42 aa, Artificial Sequence; identical to SEQ ID NO: 23403
  Cyclic GFR-binding peptide
  MOD_RES (5)..(42): Xaa is C or S

SEQ ID NO: 27146 - protein, 31 aa, Artificial Sequence; identical to SEQ ID NO: 23404
  Cyclic GFR-binding peptide
  MOD_RES (2)..(2): Xaa is C or S

SEQ ID NO: 27147 - protein, 38 aa, Artificial Sequence; identical to SEQ ID NO: 23405
  Cyclic GFR-binding peptide
  MOD_RES (5)..(5): Xaa is C or S

SEQ ID NO: 27148 - protein, 27 aa, Artificial Sequence
  Cyclic GFR-binding peptide
GQRSVKMAKVRIKPHQGQHKEVQVLEE

SEQ ID NO: 27149 - protein, 31 aa, Artificial Sequence; identical to SEQ ID NO: 23407
  Cyclic GFR-binding peptide

SEQ ID NO: 27150 - protein, 29 aa, Artificial Sequence
  Cyclic GFR-binding peptide
GQRSVKMAKVRIKPHQGQHKEVQVLEEHS

SEQ ID NO: 27151 - protein, 31 aa, Artificial Sequence; identical to SEQ ID NO: 23409
  Cyclic GFR-binding peptide
  MOD_RES (31)..(31): Xaa is C or S

SEQ ID NO: 27152 - protein, 32 aa, Artificial Sequence; identical to SEQ ID NO: 23410
  Cyclic GFR-binding peptide
  MOD_RES (30)..(32): Xaa is C or S

SEQ ID NO: 27153 - protein, 27 aa, Artificial Sequence
  Cyclic GFR-binding peptide
TQVQLSNITVQIMEIVRKKPIFIGEMS

SEQ ID NO: 27154 - protein, 33 aa, Artificial Sequence; identical to SEQ ID NO: 23412
  Cyclic GFR-binding peptide

SEQ ID NO: 27155 - protein, 34 aa, Artificial Sequence; identical to SEQ ID NO: 23413
  Cyclic GFR-binding peptide
  MOD_RES (2)..(2): Xaa is C or S

SEQ ID NO: 27156 - protein, 36 aa, Artificial Sequence; identical to SEQ ID NO: 23414
  Cyclic GFR-binding peptide
  MOD_RES (5)..(5): Xaa is C or S

SEQ ID NO: 27157 - protein, 40 aa, Artificial Sequence; identical to SEQ ID NO: 23415
  Cyclic GFR-binding peptide
  MOD_RES (5)..(5): Xaa is C or S

SEQ ID NO: 27158 - protein, 35 aa, Artificial Sequence; identical to SEQ ID NO: 23416
  Cyclic GFR-binding peptide

SEQ ID NO: 27159 - protein, 39 aa, Artificial Sequence; identical to SEQ ID NO: 23417
  Cyclic GFR-binding peptide
  MOD_RES (3)..(37)..(39): Xaa is C or S

SEQ ID NO: 27160 - protein, 41 aa, Artificial Sequence; identical to SEQ ID NO: 23418
  Cyclic GFR-binding peptide
  MOD_RES (5)..(5): Xaa is C or S

SEQ ID NO: 27161 - protein, 26 aa, Artificial Sequence
  Cyclic GFR-binding peptide
RVHHSNITVQIMEYVRKKPKLIGEMS

SEQ ID NO: 27162 - protein, 35 aa, Artificial Sequence; identical to SEQ ID NO: 23420
  Cyclic GFR-binding peptide
  MOD_RES (34)..(34): Xaa is C or S

SEQ ID NO: 27163 - protein, 32 aa, Artificial Sequence; identical to SEQ ID NO: 23421
  Cyclic GFR-binding peptide
  MOD_RES (2)..(2): Xaa is C or S

SEQ ID NO: 27164 - protein, 35 aa, Artificial Sequence; identical to SEQ ID NO: 23422
  Cyclic GFR-binding peptide
  MOD_RES (3)..(3): Xaa is C or S

SEQ ID NO: 27165 - protein, 27 aa, Artificial Sequence
  Cyclic GFR-binding peptide
TEERSVKMAKVRIKPHQGQHKEVQVFL

SEQ ID NO: 27166 - protein, 29 aa, Artificial Sequence
  Cyclic GFR-binding peptide
  MOD_RES (2)..(2): Xaa is C or S
EXVPTGQRSVKMAKVRIKPHQGQHKEVQV

SEQ ID NO: 27167 - protein, 27 aa, Artificial Sequence
  Cyclic GFR-binding peptide
RPVQMRKIRIKPHQGQHKKATVFLQHN

SEQ ID NO: 27168 - protein, 32 aa, Artificial Sequence; identical to SEQ ID NO: 23426
  Cyclic GFR-binding peptide

SEQ ID NO: 27169 - protein, 38 aa, Artificial Sequence; identical to SEQ ID NO: 23427
  Cyclic GFR-binding peptide
  MOD_RES (5)..(5): Xaa is C or S

SEQ ID NO: 27170 - protein, 24 aa, Artificial Sequence
  Cyclic GFR-binding peptide
QRPVQMRKIRIKPHQGQHKKATVL

SEQ ID NO: 27171 - protein, 32 aa, Artificial Sequence; identical to SEQ ID NO: 23429
  Cyclic GFR-binding peptide
  MOD_RES (5)..(5): Xaa is C or S

SEQ ID NO: 27172 - protein, 29 aa, Artificial Sequence
  Cyclic GFR-binding peptide
SNITVQIMEYVRKKPKLIGEMSRLEEHLE

SEQ ID NO: 27173 - protein, 41 aa, Artificial Sequence; identical to SEQ ID NO: 23431
  Cyclic GFR-binding peptide
  MOD_RES (4)..(41): Xaa is C or S

SEQ ID NO: 27174 - protein, 34 aa, Artificial Sequence; identical to SEQ ID NO: 23432
  Cyclic GFR-binding peptide
  MOD_RES (4)..(4): Xaa is C or S

SEQ ID NO: 27175 - protein, 32 aa, Artificial Sequence; identical to SEQ ID NO: 23433
  Cyclic GFR-binding peptide
  MOD_RES (2)..(2): Xaa is C or S

SEQ ID NO: 27176 - protein, 32 aa, Artificial Sequence; identical to SEQ ID NO: 23434
  Cyclic GFR-binding peptide
  MOD_RES (1)..(1): Xaa is C or S

SEQ ID NO: 27177 - protein, 36 aa, Artificial Sequence; identical to SEQ ID NO: 23435
  Cyclic GFR-binding peptide
  MOD_RES (2)..(36): Xaa is C or S

SEQ ID NO: 27178 - protein, 37 aa, Artificial Sequence; identical to SEQ ID NO: 23436
  Cyclic GFR-binding peptide
  MOD_RES (5)..(5): Xaa is C or S

SEQ ID NO: 27179 - protein, 37 aa, Artificial Sequence; identical to SEQ ID NO: 23437
  Cyclic GFR-binding peptide
  MOD_RES (1)..(1): Xaa is C or S

SEQ ID NO: 27180 - protein, 40 aa, Artificial Sequence; identical to SEQ ID NO: 23438
  Cyclic GFR-binding peptide
  MOD_RES (3)..(40): Xaa is C or S

SEQ ID NO: 27181 - protein, 43 aa, Artificial Sequence; identical to SEQ ID NO: 23439
  Cyclic GFR-binding peptide
  MOD_RES (6)..(40)..(42): Xaa is C or S

SEQ ID NO: 27182 - protein, 27 aa, Artificial Sequence
  Cyclic GFR-binding peptide
RPVQMRKIRIKPHQGQHKKATVLEEHS

SEQ ID NO: 27183 - protein, 40 aa, Artificial Sequence; identical to SEQ ID NO: 23441
  Cyclic GFR-binding peptide
  MOD_RES (2)..(39): Xaa is C or S

SEQ ID NO: 27184 - protein, 35 aa, Artificial Sequence; identical to SEQ ID NO: 23442
  Cyclic GFR-binding peptide
  MOD_RES (2)..(2): Xaa is C or S

SEQ ID NO: 27185 - protein, 25 aa, Artificial Sequence
  Cyclic GFR-binding peptide
VQLSNITVQIMEIVRKKPIFLGEMS

SEQ ID NO: 27186 - protein, 37 aa, Artificial Sequence; identical to SEQ ID NO: 23444
  Cyclic GFR-binding peptide
  MOD_RES (1)..(1): Xaa is C or S

SEQ ID NO: 27187 - protein, 34 aa, Artificial Sequence; identical to SEQ ID NO: 23445
  Cyclic GFR-binding peptide
  MOD_RES (7)..(7): Xaa is C or S

SEQ ID NO: 27188 - protein, 36 aa, Artificial Sequence; identical to SEQ ID NO: 23446
  Cyclic GFR-binding peptide
  MOD_RES (34)..(36): Xaa is C or S

SEQ ID NO: 27189 - protein, 31 aa, Artificial Sequence; identical to SEQ ID NO: 23447
  Cyclic GFR-binding peptide

SEQ ID NO: 27190 - protein, 35 aa, Artificial Sequence; identical to SEQ ID NO: 23448
  Cyclic GFR-binding peptide

SEQ ID NO: 27191 - protein, 36 aa, Artificial Sequence; identical to SEQ ID NO: 23449
  Cyclic GFR-binding peptide
  MOD_RES (2)..(36): Xaa is C or S

SEQ ID NO: 27192 - protein, 35 aa, Artificial Sequence; identical to SEQ ID NO: 23450
  Cyclic GFR-binding peptide
  MOD_RES (32)..(34): Xaa is C or S

SEQ ID NO: 27193 - protein, 27 aa, Artificial Sequence
  Cyclic GFR-binding peptide
SNITMQIMRIKPHQGQHIGEMSLEEHS

SEQ ID NO: 27194 - protein, 29 aa, Artificial Sequence
  Cyclic GFR-binding peptide
RVHHRPVQVRKIEYVRKKPKLKKATVRLE

SEQ ID NO: 27195 - protein, 30 aa, Artificial Sequence; identical to SEQ ID NO: 23453
  Cyclic GFR-binding peptide

SEQ ID NO: 27196 - protein, 24 aa, Artificial Sequence
  Cyclic GFR-binding peptide
RPVQVRKIEYVRKKPKLKKATVRL

SEQ ID NO: 27197 - protein, 26 aa, Artificial Sequence
  Cyclic GFR-binding peptide
PTEERPVQMRKIRIKPHQGQHKKATV

SEQ ID NO: 27198 - protein, 33 aa, Artificial Sequence; identical to SEQ ID NO: 23456
  Cyclic GFR-binding peptide
  MOD_RES (31)..(33): Xaa is C or S

SEQ ID NO: 27199 - protein, 29 aa, Artificial Sequence
  Cyclic GFR-binding peptide
QRSVKMAKVRIKPHQGQHKEVQVLEEHSQ

SEQ ID NO: 27200 - protein, 44 aa, Artificial Sequence; identical to SEQ ID NO: 23458
  Cyclic GFR-binding peptide
  MOD_RES (4)..(41)..(43): Xaa is C or S

SEQ ID NO: 27201 - protein, 27 aa, Artificial Sequence
  Cyclic GFR-binding peptide
QLRSVKVAKVEIVRKKPIFKEVQVTLE

SEQ ID NO: 27202 - protein, 43 aa, Artificial Sequence; identical to SEQ ID NO: 23460
  Cyclic GFR-binding peptide
  MOD_RES (5)..(42): Xaa is C or S

SEQ ID NO: 27203 - protein, 30 aa, Artificial Sequence; identical to SEQ ID NO: 23461
  Cyclic GFR-binding peptide

SEQ ID NO: 27204 - protein, 35 aa, Artificial Sequence; identical to SEQ ID NO: 23462
  Cyclic GFR-binding peptide
  MOD_RES (4)..(4): Xaa is C or S

SEQ ID NO: 27205 - protein, 38 aa, Artificial Sequence; identical to SEQ ID NO: 23463
  Cyclic GFR-binding peptide
  MOD_RES (5)..(5): Xaa is C or S

SEQ ID NO: 27206 - protein, 25 aa, Artificial Sequence
  Cyclic GFR-binding peptide
SNITMQIMRIKPHQGQHIGEMSLEE

SEQ ID NO: 27207 - protein, 31 aa, Artificial Sequence; identical to SEQ ID NO: 23465
  Cyclic GFR-binding peptide

SEQ ID NO: 27208 - protein, 31 aa, Artificial Sequence; identical to SEQ ID NO: 23466
  Cyclic GFR-binding peptide
  MOD_RES (31)..(31): Xaa is C or S

SEQ ID NO: 27209 - protein, 29 aa, Artificial Sequence
  Cyclic GFR-binding peptide
TQVQLRSVKVAKVEIVRKKPIFKEVQVTL

SEQ ID NO: 27210 - protein, 35 aa, Artificial Sequence; identical to SEQ ID NO: 23468
  Cyclic GFR-binding peptide

SEQ ID NO: 27211 - protein, 32 aa, Artificial Sequence; identical to SEQ ID NO: 23469
  Cyclic GFR-binding peptide
  MOD_RES (1)..(1): Xaa is C or S

SEQ ID NO: 27212 - protein, 28 aa, Artificial Sequence
  Cyclic GFR-binding peptide
HSNITVQIMEYVRKKPKLLGEMSRLEEH

SEQ ID NO: 27213 - protein, 31 aa, Artificial Sequence; identical to SEQ ID NO: 23471
  Cyclic GFR-binding peptide
  MOD_RES (30)..(30): Xaa is C or S

SEQ ID NO: 27214 - protein, 35 aa, Artificial Sequence; identical to SEQ ID NO: 23472
  Cyclic GFR-binding peptide
  MOD_RES (6)..(6): Xaa is C or S

SEQ ID NO: 27215 - protein, 31 aa, Artificial Sequence; identical to SEQ ID NO: 23473
  Cyclic GFR-binding peptide
  MOD_RES (30)..(30): Xaa is C or S

SEQ ID NO: 27216 - protein, 32 aa, Artificial Sequence; identical to SEQ ID NO: 23474
  Cyclic GFR-binding peptide
  MOD_RES (1)..(1): Xaa is C or S

SEQ ID NO: 27217 - protein, 38 aa, Artificial Sequence; identical to SEQ ID NO: 23475
  Cyclic GFR-binding peptide
  MOD_RES (4)..(38): Xaa is C or S

SEQ ID NO: 27218 - protein, 26 aa, Artificial Sequence
  Cyclic GFR-binding peptide
SNITVQIMEYVRKKPKLLGEMSRLEE

SEQ ID NO: 27219 - protein, 37 aa, Artificial Sequence; identical to SEQ ID NO: 23477
  Cyclic GFR-binding peptide
  MOD_RES (3)..(3): Xaa is C or S

SEQ ID NO: 27220 - protein, 26 aa, Artificial Sequence
  Cyclic GFR-binding peptide
VHHSNITVQIMEYVRKKPKLLGEMSR

SEQ ID NO: 27221 - protein, 33 aa, Artificial Sequence; identical to SEQ ID NO: 23479
  Cyclic GFR-binding peptide
  MOD_RES (3)..(3): Xaa is C or S

SEQ ID NO: 27222 - protein, 29 aa, Artificial Sequence
  Cyclic GFR-binding peptide
  MOD_RES (2)..(2): Xaa is C or S
EXVPTGQSNITMQIMRIKPHQGQHIGEMS

SEQ ID NO: 27223 - protein, 30 aa, Artificial Sequence; identical to SEQ ID NO: 23481
  Cyclic GFR-binding peptide
  MOD_RES (29)..(29): Xaa is C or S

SEQ ID NO: 27224 - protein, 24 aa, Artificial Sequence
  Cyclic GFR-binding peptide
LSNITVQIMEIVRKKPIFIGEMST

SEQ ID NO: 27225 - protein, 34 aa, Artificial Sequence; identical to SEQ ID NO: 23483
  Cyclic GFR-binding peptide

SEQ ID NO: 27226 - protein, 24 aa, Artificial Sequence
  Cyclic GFR-binding peptide
LRSVKVAKVEIVRKKPIFKEVQVT

SEQ ID NO: 27227 - protein, 23 aa, Artificial Sequence
  Cyclic GFR-binding peptide
SNITMQIMRIKPHQGQHLGEMSF

SEQ ID NO: 27228 - protein, 29 aa, Artificial Sequence
  Cyclic GFR-binding peptide
  MOD_RES (29)..(29): Xaa is C or S
SNITMQIMRIKPHQGQHIGEMSLEEHSQX

SEQ ID NO: 27229 - protein, 30 aa, Artificial Sequence; identical to SEQ ID NO: 23487
  Cyclic GFR-binding peptide
  MOD_RES (30)..(30): Xaa is C or S

SEQ ID NO: 27230 - protein, 39 aa, Artificial Sequence; identical to SEQ ID NO: 23488
  Cyclic GFR-binding peptide
  MOD_RES (4)..(38): Xaa is C or S

SEQ ID NO: 27231 - protein, 31 aa, Artificial Sequence; identical to SEQ ID NO: 23489
  Cyclic GFR-binding peptide
  MOD_RES (1)..(1): Xaa is C or S

SEQ ID NO: 27232 - protein, 32 aa, Artificial Sequence; identical to SEQ ID NO: 23490
  Cyclic GFR-binding peptide
  MOD_RES (5)..(5): Xaa is C or S

SEQ ID NO: 27233 - protein, 36 aa, Artificial Sequence; identical to SEQ ID NO: 23491
  Cyclic GFR-binding peptide
  MOD_RES (5)..(5): Xaa is C or S

SEQ ID NO: 27234 - protein, 40 aa, Artificial Sequence; identical to SEQ ID NO: 23492
  Cyclic GFR-binding peptide
  MOD_RES (7)..(7): Xaa is C or S

SEQ ID NO: 27235 - protein, 34 aa, Artificial Sequence; identical to SEQ ID NO: 23493
  Cyclic GFR-binding peptide
  MOD_RES (33)..(33): Xaa is C or S

SEQ ID NO: 27236 - protein, 30 aa, Artificial Sequence; identical to SEQ ID NO: 23494
  Cyclic GFR-binding peptide

SEQ ID NO: 27237 - protein, 43 aa, Artificial Sequence; identical to SEQ ID NO: 23495
  Cyclic GFR-binding peptide
  MOD_RES (5)..(42): Xaa is C or S

SEQ ID NO: 27238 - protein, 27 aa, Artificial Sequence
  Cyclic GFR-binding peptide
QSNITMQIMRIKPHQGQHIGEMSLEEH

SEQ ID NO: 27239 - protein, 39 aa, Artificial Sequence; identical to SEQ ID NO: 23497
  Cyclic GFR-binding peptide
  MOD_RES (5)..(39): Xaa is C or S

SEQ ID NO: 27240 - protein, 22 aa, Artificial Sequence
  Cyclic GFR-binding peptide
RPVQVRKIEYVRKKPKLKKATV

SEQ ID NO: 27241 - protein, 34 aa, Artificial Sequence; identical to SEQ ID NO: 23499
  Cyclic GFR-binding peptide
  MOD_RES (3)..(3): Xaa is C or S

SEQ ID NO: 27242 - protein, 38 aa, Artificial Sequence; identical to SEQ ID NO: 23500
  Cyclic GFR-binding peptide
  MOD_RES (1)..(38): Xaa is C or S

SEQ ID NO: 27243 - protein, 32 aa, Artificial Sequence; identical to SEQ ID NO: 23501
  Cyclic GFR-binding peptide
  MOD_RES (31)..(31): Xaa is C or S

SEQ ID NO: 27244 - protein, 37 aa, Artificial Sequence; identical to SEQ ID NO: 23502
  Cyclic GFR-binding peptide
  MOD_RES (4)..(4): Xaa is C or S

SEQ ID NO: 27245 - protein, 29 aa, Artificial Sequence
  Cyclic GFR-binding peptide
SRVHHRPVQVRKIEYVRKKPKLKKATVRL

SEQ ID NO: 27246 - protein, 32 aa, Artificial Sequence; identical to SEQ ID NO: 23504
  Cyclic GFR-binding peptide
  MOD_RES (1)..(1): Xaa is C or S

SEQ ID NO: 27247 - protein, 35 aa, Artificial Sequence; identical to SEQ ID NO: 23505
  Cyclic GFR-binding peptide
  MOD_RES (33)..(35): Xaa is C or S

SEQ ID NO: 27248 - protein, 27 aa, Artificial Sequence
  Cyclic GFR-binding peptide
LSNITVQIMEIVRKKPIFLGEMSTLED

SEQ ID NO: 27249 - protein, 35 aa, Artificial Sequence; identical to SEQ ID NO: 23507
  Cyclic GFR-binding peptide
  MOD_RES (35)..(35): Xaa is C or S

SEQ ID NO: 27250 - protein, 28 aa, Artificial Sequence
  Cyclic GFR-binding peptide
SNITMQIMRIKPHQGQHIGEMSLEEHSQ

SEQ ID NO: 27251 - protein, 32 aa, Artificial Sequence; identical to SEQ ID NO: 23509
  Cyclic GFR-binding peptide
  MOD_RES (29)..(31): Xaa is C or S

SEQ ID NO: 27252 - protein, 32 aa, Artificial Sequence; identical to SEQ ID NO: 23510
  Cyclic GFR-binding peptide

SEQ ID NO: 27253 - protein, 33 aa, Artificial Sequence; identical to SEQ ID NO: 23511
  Cyclic GFR-binding peptide
  MOD_RES (1)..(1): Xaa is C or S

SEQ ID NO: 27254 - protein, 36 aa, Artificial Sequence; identical to SEQ ID NO: 23512
  Cyclic GFR-binding peptide
  MOD_RES (6)..(6): Xaa is C or S

SEQ ID NO: 27255 - protein, 31 aa, Artificial Sequence; identical to SEQ ID NO: 23513
  Cyclic GFR-binding peptide
  MOD_RES (3)..(3): Xaa is C or S

SEQ ID NO: 27256 - protein, 41 aa, Artificial Sequence; identical to SEQ ID NO: 23514
  Cyclic GFR-binding peptide
  MOD_RES (6)..(40): Xaa is C or S

SEQ ID NO: 27257 - protein, 28 aa, Artificial Sequence
  Cyclic GFR-binding peptide
LSNITVQIMEIVRKKPIFLGEMSTLEDH

SEQ ID NO: 27258 - protein, 34 aa, Artificial Sequence; identical to SEQ ID NO: 23516
  Cyclic GFR-binding peptide

SEQ ID NO: 27259 - protein, 32 aa, Artificial Sequence; identical to SEQ ID NO: 23517
  Cyclic GFR-binding peptide

SEQ ID NO: 27260 - protein, 43 aa, Artificial Sequence; identical to SEQ ID NO: 23518
  Cyclic GFR-binding peptide
  MOD_RES (5)..(42): Xaa is C or S

SEQ ID NO: 27261 - protein, 42 aa, Artificial Sequence; identical to SEQ ID NO: 23519
  Cyclic GFR-binding peptide
  MOD_RES (7)..(41): Xaa is C or S

SEQ ID NO: 27262 - protein, 30 aa, Artificial Sequence; identical to SEQ ID NO: 23520
  Cyclic GFR-binding peptide

SEQ ID NO: 27263 - protein, 23 aa, Artificial Sequence
  Cyclic GFR-binding peptide
LSNITVQIMEIVRKKPIFLGEMS

SEQ ID NO: 27264 - protein, 27 aa, Artificial Sequence
  Cyclic GFR-binding peptide
QVQLRSVKVAKVEIVRKKPIFKEVQVT

SEQ ID NO: 27265 - protein, 31 aa, Artificial Sequence; identical to SEQ ID NO: 23523
  Cyclic GFR-binding peptide
  MOD_RES (1)..(1): Xaa is C or S

SEQ ID NO: 27266 - protein, 45 aa, Artificial Sequence; identical to SEQ ID NO: 23524
  Cyclic GFR-binding peptide
  MOD_RES (5)..(42)..(44): Xaa is C or S

SEQ ID NO: 27267 - protein, 37 aa, Artificial Sequence; identical to SEQ ID NO: 23525
  Cyclic GFR-binding peptide
  MOD_RES (7)..(7): Xaa is C or S

SEQ ID NO: 27268 - protein, 36 aa, Artificial Sequence; identical to SEQ ID NO: 23526
  Cyclic GFR-binding peptide
  MOD_RES (34)..(36): Xaa is C or S

SEQ ID NO: 27269 - protein, 38 aa, Artificial Sequence; identical to SEQ ID NO: 23527
  Cyclic GFR-binding peptide
  MOD_RES (2)..(2): Xaa is C or S

SEQ ID NO: 27270 - protein, 37 aa, Artificial Sequence; identical to SEQ ID NO: 23528
  Cyclic GFR-binding peptide
  MOD_RES (2)..(2): Xaa is C or S

SEQ ID NO: 27271 - protein, 30 aa, Artificial Sequence; identical to SEQ ID NO: 23529
  Cyclic GFR-binding peptide

SEQ ID NO: 27272 - protein, 34 aa, Artificial Sequence; identical to SEQ ID NO: 23530
  Cyclic GFR-binding peptide
  MOD_RES (32)..(34): Xaa is C or S

SEQ ID NO: 27273 - protein, 35 aa, Artificial Sequence; identical to SEQ ID NO: 23531
  Cyclic GFR-binding peptide
  MOD_RES (4)..(4): Xaa is C or S

SEQ ID NO: 27274 - protein, 29 aa, Artificial Sequence
  Cyclic GFR-binding peptide
ERPVQMRKIRIKPHQGQHKKATVFLQHNK

SEQ ID NO: 27275 - protein, 24 aa, Artificial Sequence
  Cyclic GFR-binding peptide
ERSVKMAKVRIKPHQGQHKEVQVF

SEQ ID NO: 27276 - protein, 38 aa, Artificial Sequence; identical to SEQ ID NO: 23534
  Cyclic GFR-binding peptide
  MOD_RES (1)..(38): Xaa is C or S

SEQ ID NO: 27277 - protein, 30 aa, Artificial Sequence; identical to SEQ ID NO: 23535
  Cyclic GFR-binding peptide
  MOD_RES (30)..(30): Xaa is C or S

SEQ ID NO: 27278 - protein, 33 aa, Artificial Sequence; identical to SEQ ID NO: 23536
  Cyclic GFR-binding peptide

SEQ ID NO: 27279 - protein, 33 aa, Artificial Sequence; identical to SEQ ID NO: 23537
  Cyclic GFR-binding peptide
  MOD_RES (31)..(33): Xaa is C or S

SEQ ID NO: 27280 - protein, 34 aa, Artificial Sequence; identical to SEQ ID NO: 23538
  Cyclic GFR-binding peptide
  MOD_RES (31)..(33): Xaa is C or S

SEQ ID NO: 27281 - protein, 41 aa, Artificial Sequence; identical to SEQ ID NO: 23539
  Cyclic GFR-binding peptide
  MOD_RES (3)..(40): Xaa is C or S

SEQ ID NO: 27282 - protein, 37 aa, Artificial Sequence; identical to SEQ ID NO: 23540
  Cyclic GFR-binding peptide
  MOD_RES (34)..(36): Xaa is C or S

SEQ ID NO: 27283 - protein, 42 aa, Artificial Sequence; identical to SEQ ID NO: 23541
  Cyclic GFR-binding peptide
  MOD_RES (3)..(40)..(42): Xaa is C or S

SEQ ID NO: 27284 - protein, 40 aa, Artificial Sequence; identical to SEQ ID NO: 23542
  Cyclic GFR-binding peptide
  MOD_RES (5)..(39): Xaa is C or S

SEQ ID NO: 27285 - protein, 40 aa, Artificial Sequence; identical to SEQ ID NO: 23543
  Cyclic GFR-binding peptide
  MOD_RES (37)..(39): Xaa is C or S

SEQ ID NO: 27286 - protein, 32 aa, Artificial Sequence; identical to SEQ ID NO: 23544
  Cyclic GFR-binding peptide
  MOD_RES (31)..(31): Xaa is C or S

SEQ ID NO: 27287 - protein, 25 aa, Artificial Sequence
  Cyclic GFR-binding peptide
QLSNITVQIMEIVRKKPIFLGEMST

SEQ ID NO: 27288 - protein, 32 aa, Artificial Sequence; identical to SEQ ID NO: 23546
  Cyclic GFR-binding peptide
  MOD_RES (1)..(1): Xaa is C or S

SEQ ID NO: 27289 - protein, 23 aa, Artificial Sequence
  Cyclic GFR-binding peptide
ERPVQMRKIRIKPHQGQHKKATV

SEQ ID NO: 27290 - protein, 31 aa, Artificial Sequence; identical to SEQ ID NO: 23548
  Cyclic GFR-binding peptide

SEQ ID NO: 27291 - protein, 34 aa, Artificial Sequence; identical to SEQ ID NO: 23549
  Cyclic GFR-binding peptide
  MOD_RES (7)..(7): Xaa is C or S

SEQ ID NO: 27292 - protein, 39 aa, Artificial Sequence; identical to SEQ ID NO: 23550
  Cyclic GFR-binding peptide
  MOD_RES (4)..(4): Xaa is C or S

SEQ ID NO: 27293 - protein, 28 aa, Artificial Sequence
  Cyclic GFR-binding peptide
VPTEERPVQMRKIRIKPHQGQHKKATVF

SEQ ID NO: 27294 - protein, 39 aa, Artificial Sequence; identical to SEQ ID NO: 23552
  Cyclic GFR-binding peptide
  MOD_RES (5)..(39): Xaa is C or S

SEQ ID NO: 27295 - protein, 25 aa, Artificial Sequence
  Cyclic GFR-binding peptide
HHSNITVQIMEYVRKKPKLLGEMSR

SEQ ID NO: 27296 - protein, 37 aa, Artificial Sequence; identical to SEQ ID NO: 23554
  Cyclic GFR-binding peptide
  MOD_RES (2)..(36): Xaa is C or S

SEQ ID NO: 27297 - protein, 36 aa, Artificial Sequence; identical to SEQ ID NO: 23555
  Cyclic GFR-binding peptide
  MOD_RES (4)..(4): Xaa is C or S

SEQ ID NO: 27298 - protein, 30 aa, Artificial Sequence; identical to SEQ ID NO: 23556
  Cyclic GFR-binding peptide

SEQ ID NO: 27299 - protein, 37 aa, Artificial Sequence; identical to SEQ ID NO: 23557
  Cyclic GFR-binding peptide
  MOD_RES (4)..(4): Xaa is C or S

SEQ ID NO: 27300 - protein, 36 aa, Artificial Sequence; identical to SEQ ID NO: 23558
  Cyclic GFR-binding peptide
  MOD_RES (7)..(7): Xaa is C or S

SEQ ID NO: 27301 - protein, 35 aa, Artificial Sequence; identical to SEQ ID NO: 23559
  Cyclic GFR-binding peptide
  MOD_RES (3)..(3): Xaa is C or S

SEQ ID NO: 27302 - protein, 37 aa, Artificial Sequence; identical to SEQ ID NO: 23560
  Cyclic GFR-binding peptide
  MOD_RES (1)..(35)..(37): Xaa is C or S

SEQ ID NO: 27303 - protein, 32 aa, Artificial Sequence; identical to SEQ ID NO: 23561
  Cyclic GFR-binding peptide
  MOD_RES (3)..(3): Xaa is C or S

SEQ ID NO: 27304 - protein, 34 aa, Artificial Sequence; identical to SEQ ID NO: 23562
  Cyclic GFR-binding peptide

SEQ ID NO: 27305 - protein, 30 aa, Artificial Sequence; identical to SEQ ID NO: 23563
  Cyclic GFR-binding peptide

SEQ ID NO: 27306 - protein, 40 aa, Artificial Sequence; identical to SEQ ID NO: 23564
  Cyclic GFR-binding peptide
  MOD_RES (4)..(4): Xaa is C or S

SEQ ID NO: 27307 - protein, 35 aa, Artificial Sequence; identical to SEQ ID NO: 23565
  Cyclic GFR-binding peptide
  MOD_RES (3)..(3): Xaa is C or S

SEQ ID NO: 27308 - protein, 30 aa, Artificial Sequence; identical to SEQ ID NO: 23566
  Cyclic GFR-binding peptide

SEQ ID NO: 27309 - protein, 25 aa, Artificial Sequence
  Cyclic GFR-binding peptide
TEERSVKMAKVRIKPHQGQHKEVQV

SEQ ID NO: 27310 - protein, 34 aa, Artificial Sequence; identical to SEQ ID NO: 23568
  Cyclic GFR-binding peptide
  MOD_RES (3)..(3): Xaa is C or S

SEQ ID NO: 27311 - protein, 28 aa, Artificial Sequence
  Cyclic GFR-binding peptide
QVQLSNITVQIMEIVRKKPIFLGEMSTL

SEQ ID NO: 27312 - protein, 34 aa, Artificial Sequence; identical to SEQ ID NO: 23570
  Cyclic GFR-binding peptide
  MOD_RES (32)..(34): Xaa is C or S

SEQ ID NO: 27313 - protein, 40 aa, Artificial Sequence; identical to SEQ ID NO: 23571
  Cyclic GFR-binding peptide
  MOD_RES (4)..(4): Xaa is C or S

SEQ ID NO: 27314 - protein, 33 aa, Artificial Sequence; identical to SEQ ID NO: 23572
  Cyclic GFR-binding peptide
  MOD_RES (5)..(5): Xaa is C or S

SEQ ID NO: 27315 - protein, 35 aa, Artificial Sequence; identical to SEQ ID NO: 23573
  Cyclic GFR-binding peptide
  MOD_RES (34)..(34): Xaa is C or S

SEQ ID NO: 27316 - protein, 33 aa, Artificial Sequence; identical to SEQ ID NO: 23574
  Cyclic GFR-binding peptide
  MOD_RES (30)..(32): Xaa is C or S

SEQ ID NO: 27317 - protein, 31 aa, Artificial Sequence; identical to SEQ ID NO: 23575
  Cyclic GFR-binding peptide

SEQ ID NO: 27318 - protein, 22 aa, Artificial Sequence
  Cyclic GFR-binding peptide
SNITVQIMEYVRKKPKLLGEMS

SEQ ID NO: 27319 - protein, 37 aa, Artificial Sequence; identical to SEQ ID NO: 23577
  Cyclic GFR-binding peptide
  MOD_RES (6)..(6): Xaa is C or S

SEQ ID NO: 27320 - protein, 38 aa, Artificial Sequence; identical to SEQ ID NO: 23578
  Cyclic GFR-binding peptide
  MOD_RES (35)..(37): Xaa is C or S

SEQ ID NO: 27321 - protein, 33 aa, Artificial Sequence; identical to SEQ ID NO: 23579
  Cyclic GFR-binding peptide

SEQ ID NO: 27322 - protein, 42 aa, Artificial Sequence; identical to SEQ ID NO: 23580
  Cyclic GFR-binding peptide
  MOD_RES (5)..(39)..(41): Xaa is C or S

SEQ ID NO: 27323 - protein, 32 aa, Artificial Sequence; identical to SEQ ID NO: 23581
  Cyclic GFR-binding peptide
  MOD_RES (2)..(2): Xaa is C or S

SEQ ID NO: 27324 - protein, 33 aa, Artificial Sequence; identical to SEQ ID NO: 23582
  Cyclic GFR-binding peptide
  MOD_RES (1)..(1): Xaa is C or S

SEQ ID NO: 27325 - protein, 39 aa, Artificial Sequence; identical to SEQ ID NO: 23583
  Cyclic GFR-binding peptide
  MOD_RES (4)..(4): Xaa is C or S

SEQ ID NO: 27326 - protein, 41 aa, Artificial Sequence; identical to SEQ ID NO: 23584
  Cyclic GFR-binding peptide
  MOD_RES (4)..(38)..(40): Xaa is C or S

SEQ ID NO: 27327 - protein, 37 aa, Artificial Sequence; identical to SEQ ID NO: 23585
  Cyclic GFR-binding peptide
  MOD_RES (4)..(4): Xaa is C or S

SEQ ID NO: 27328 - protein, 35 aa, Artificial Sequence; identical to SEQ ID NO: 23586
  Cyclic GFR-binding peptide
  MOD_RES (34)..(34): Xaa is C or S

SEQ ID NO: 27329 - protein, 38 aa, Artificial Sequence; identical to SEQ ID NO: 23587
  Cyclic GFR-binding peptide
  MOD_RES (6)..(6): Xaa is C or S

SEQ ID NO: 27330 - protein, 32 aa, Artificial Sequence; identical to SEQ ID NO: 23588
  Cyclic GFR-binding peptide

SEQ ID NO: 27331 - protein, 39 aa, Artificial Sequence; identical to SEQ ID NO: 23589
  Cyclic GFR-binding peptide
  MOD_RES (2)..(39): Xaa is C or S

SEQ ID NO: 27332 - protein, 24 aa, Artificial Sequence
  Cyclic GFR-binding peptide
QRSVKMAKVRIKPHQGQHKEVQVL

SEQ ID NO: 27333 - protein, 35 aa, Artificial Sequence; identical to SEQ ID NO: 23591
  Cyclic GFR-binding peptide
  MOD_RES (5)..(5): Xaa is C or S

SEQ ID NO: 27334 - protein, 30 aa, Artificial Sequence; identical to SEQ ID NO: 23592
  Cyclic GFR-binding peptide

SEQ ID NO: 27335 - protein, 39 aa, Artificial Sequence; identical to SEQ ID NO: 23593
  Cyclic GFR-binding peptide
  MOD_RES (4)..(4): Xaa is C or S

SEQ ID NO: 27336 - protein, 42 aa, Artificial Sequence; identical to SEQ ID NO: 23594
  Cyclic GFR-binding peptide
  MOD_RES (5)..(39)..(41): Xaa is C or S

SEQ ID NO: 27337 - protein, 42 aa, Artificial Sequence; identical to SEQ ID NO: 23595
  Cyclic GFR-binding peptide
  MOD_RES (4)..(41): Xaa is C or S

SEQ ID NO: 27338 - protein, 34 aa, Artificial Sequence; identical to SEQ ID NO: 23596
  Cyclic GFR-binding peptide
  MOD_RES (33)..(33): Xaa is C or S

SEQ ID NO: 27339 - protein, 43 aa, Artificial Sequence; identical to SEQ ID NO: 23597
  Cyclic GFR-binding peptide
  MOD_RES (7)..(41)..(43): Xaa is C or S

SEQ ID NO: 27340 - protein, 30 aa, Artificial Sequence; identical to SEQ ID NO: 23598
  Cyclic GFR-binding peptide

SEQ ID NO: 27341 - protein, 26 aa, Artificial Sequence
  Cyclic GFR-binding peptide
PTEESNITMQIMRIKPHQGQHLGEMS

SEQ ID NO: 27342 - protein, 31 aa, Artificial Sequence; identical to SEQ ID NO: 23600
  Cyclic GFR-binding peptide
  MOD_RES (1)..(1): Xaa is C or S

SEQ ID NO: 27343 - protein, 34 aa, Artificial Sequence; identical to SEQ ID NO: 23601
  Cyclic GFR-binding peptide

SEQ ID NO: 27344 - protein, 38 aa, Artificial Sequence; identical to SEQ ID NO: 23602
  Cyclic GFR-binding peptide
  MOD_RES (3)..(3): Xaa is C or S

SEQ ID NO: 27345 - protein, 32 aa, Artificial Sequence; identical to SEQ ID NO: 23603
  Cyclic GFR-binding peptide
  MOD_RES (3)..(3): Xaa is C or S

SEQ ID NO: 27346 - protein, 34 aa, Artificial Sequence; identical to SEQ ID NO: 23604
  Cyclic GFR-binding peptide

SEQ ID NO: 27347 - protein, 37 aa, Artificial Sequence; identical to SEQ ID NO: 23605
  Cyclic GFR-binding peptide
  MOD_RES (7)..(7): Xaa is C or S

SEQ ID NO: 27348 - protein, 32 aa, Artificial Sequence; identical to SEQ ID NO: 23606
  Cyclic GFR-binding peptide
  MOD_RES (2)..(2): Xaa is C or S

SEQ ID NO: 27349 - protein, 34 aa, Artificial Sequence; identical to SEQ ID NO: 23607
  Cyclic GFR-binding peptide
  MOD_RES (5)..(5): Xaa is C or S

SEQ ID NO: 27350 - protein, 33 aa, Artificial Sequence; identical to SEQ ID NO: 23608
  Cyclic GFR-binding peptide

SEQ ID NO: 27351 - protein, 32 aa, Artificial Sequence; identical to SEQ ID NO: 23609
  Cyclic GFR-binding peptide

SEQ ID NO: 27352 - protein, 24 aa, Artificial Sequence
  Cyclic GFR-binding peptide
HHSNITVQIMEYVRKKPKLIGEMS

SEQ ID NO: 27353 - protein, 26 aa, Artificial Sequence
  Cyclic GFR-binding peptide
ERPVQMRKIRIKPHQGQHKKATVFLQ

SEQ ID NO: 27354 - protein, 30 aa, Artificial Sequence; identical to SEQ ID NO: 23612
  Cyclic GFR-binding peptide

SEQ ID NO: 27355 - protein, 27 aa, Artificial Sequence
  Cyclic GFR-binding peptide
ERSVKMAKVRIKPHQGQHKEVQVFLQH

SEQ ID NO: 27356 - protein, 29 aa, Artificial Sequence
  Cyclic GFR-binding peptide
GQRPVQMRKIRIKPHQGQHKKATVLEEHS

SEQ ID NO: 27357 - protein, 26 aa, Artificial Sequence
  Cyclic GFR-binding peptide
SNITVQIMEYVRKKPKLIGEMSRLEE

SEQ ID NO: 27358 - protein, 38 aa, Artificial Sequence; identical to SEQ ID NO: 23616
  Cyclic GFR-binding peptide
  MOD_RES (4)..(4): Xaa is C or S

SEQ ID NO: 27359 - protein, 35 aa, Artificial Sequence; identical to SEQ ID NO: 23617
  Cyclic GFR-binding peptide
  MOD_RES (2)..(2): Xaa is C or S

SEQ ID NO: 27360 - protein, 26 aa, Artificial Sequence
  Cyclic GFR-binding peptide
TGQRSVKMAKVRIKPHQGQHKEVQVL

SEQ ID NO: 27361 - protein, 25 aa, Artificial Sequence
  Cyclic GFR-binding peptide
ESNITMQIMRIKPHQGQHLGEMSFL

SEQ ID NO: 27362 - protein, 35 aa, Artificial Sequence; identical to SEQ ID NO: 23620
  Cyclic GFR-binding peptide
  MOD_RES (4)..(4): Xaa is C or S

SEQ ID NO: 27363 - protein, 37 aa, Artificial Sequence; identical to SEQ ID NO: 23621
  Cyclic GFR-binding peptide
  MOD_RES (6)..(6): Xaa is C or S

SEQ ID NO: 27364 - protein, 36 aa, Artificial Sequence; identical to SEQ ID NO: 23622
  Cyclic GFR-binding peptide
  MOD_RES (33)..(35): Xaa is C or S

SEQ ID NO: 27365 - protein, 36 aa, Artificial Sequence; identical to SEQ ID NO: 23623
  Cyclic GFR-binding peptide
  MOD_RES (2)..(36): Xaa is C or S

SEQ ID NO: 27366 - protein, 42 aa, Artificial Sequence; identical to SEQ ID NO: 23624
  Cyclic GFR-binding peptide
  MOD_RES (6)..(40)..(42): Xaa is C or S

SEQ ID NO: 27367 - protein, 38 aa, Artificial Sequence; identical to SEQ ID NO: 23625
  Cyclic GFR-binding peptide
  MOD_RES (3)..(37): Xaa is C or S

SEQ ID NO: 27368 - protein, 37 aa, Artificial Sequence; identical to SEQ ID NO: 23626
  Cyclic GFR-binding peptide
  MOD_RES (5)..(5): Xaa is C or S

SEQ ID NO: 27369 - protein, 30 aa, Artificial Sequence; identical to SEQ ID NO: 23627
  Cyclic GFR-binding peptide
  MOD_RES (2)..(2): Xaa is C or S

SEQ ID NO: 27370 - protein, 33 aa, Artificial Sequence; identical to SEQ ID NO: 23628
  Cyclic GFR-binding peptide
  MOD_RES (31)..(33): Xaa is C or S

SEQ ID NO: 27371 - protein, 25 aa, Artificial Sequence
  Cyclic GFR-binding peptide
EERPVQMRKIRIKPHQGQHKKATVF

SEQ ID NO: 27372 - protein, 29 aa, Artificial Sequence
  Cyclic GFR-binding peptide
TGQRPVQMRKIRIKPHQGQHKKATVLEEH

SEQ ID NO: 27373 - protein, 35 aa, Artificial Sequence; identical to SEQ ID NO: 23631
  Cyclic GFR-binding peptide
  MOD_RES (3)..(3): Xaa is C or S

SEQ ID NO: 27374 - protein, 27 aa, Artificial Sequence
  Cyclic GFR-binding peptide
VPTGQSNITMQIMRIKPHQGQHIGEMS

SEQ ID NO: 27375 - protein, 28 aa, Artificial Sequence
  Cyclic GFR-binding peptide
LRSVKVAKVEIVRKKPIFKEVQVTLEDH

SEQ ID NO: 27376 - protein, 31 aa, Artificial Sequence; identical to SEQ ID NO: 23634
  Cyclic GFR-binding peptide
  MOD_RES (4)..(4): Xaa is C or S

SEQ ID NO: 27377 - protein, 38 aa, Artificial Sequence; identical to SEQ ID NO: 23635
  Cyclic GFR-binding peptide
  MOD_RES (7)..(7): Xaa is C or S

SEQ ID NO: 27378 - protein, 34 aa, Artificial Sequence; identical to SEQ ID NO: 23636
  Cyclic GFR-binding peptide
  MOD_RES (2)..(2): Xaa is C or S

SEQ ID NO: 27379 - protein, 27 aa, Artificial Sequence
  Cyclic GFR-binding peptide
VQLRSVKVAKVEIVRKKPIFKEVQVTL

SEQ ID NO: 27380 - protein, 24 aa, Artificial Sequence
  Cyclic GFR-binding peptide
HSNITVQIMEYVRKKPKLIGEMSR

SEQ ID NO: 27381 - protein, 34 aa, Artificial Sequence; identical to SEQ ID NO: 23639
  Cyclic GFR-binding peptide
  MOD_RES (34)..(34): Xaa is C or S

SEQ ID NO: 27382 - protein, 29 aa, Artificial Sequence
  Cyclic GFR-binding peptide
  MOD_RES (29)..(29): Xaa is C or S
RSVKMAKVRIKPHQGQHKEVQVLEEHSQX

SEQ ID NO: 27383 - protein, 33 aa, Artificial Sequence; identical to SEQ ID NO: 23641
  Cyclic GFR-binding peptide
  MOD_RES (1)..(1): Xaa is C or S

SEQ ID NO: 27384 - protein, 33 aa, Artificial Sequence; identical to SEQ ID NO: 23642
  Cyclic GFR-binding peptide
  MOD_RES (32)..(32): Xaa is C or S

SEQ ID NO: 27385 - protein, 26 aa, Artificial Sequence
  Cyclic GFR-binding peptide
LSNITVQIMEIVRKKPIFIGEMSTLE

SEQ ID NO: 27386 - protein, 40 aa, Artificial Sequence; identical to SEQ ID NO: 23644
  Cyclic GFR-binding peptide
  MOD_RES (37)..(39): Xaa is C or S

SEQ ID NO: 27387 - protein, 37 aa, Artificial Sequence; identical to SEQ ID NO: 23645
  Cyclic GFR-binding peptide
  MOD_RES (36)..(36): Xaa is C or S

SEQ ID NO: 27388 - protein, 33 aa, Artificial Sequence; identical to SEQ ID NO: 23646
  Cyclic GFR-binding peptide
  MOD_RES (4)..(4): Xaa is C or S

SEQ ID NO: 27389 - protein, 38 aa, Artificial Sequence; identical to SEQ ID NO: 23647
  Cyclic GFR-binding peptide
  MOD_RES (2)..(2): Xaa is C or S

SEQ ID NO: 27390 - protein, 31 aa, Artificial Sequence; identical to SEQ ID NO: 23648
  Cyclic GFR-binding peptide
  MOD_RES (29)..(31): Xaa is C or S

SEQ ID NO: 27391 - protein, 35 aa, Artificial Sequence; identical to SEQ ID NO: 23649
  Cyclic GFR-binding peptide
  MOD_RES (34)..(34): Xaa is C or S

SEQ ID NO: 27392 - protein, 33 aa, Artificial Sequence; identical to SEQ ID NO: 23650
  Cyclic GFR-binding peptide
  MOD_RES (1)..(1): Xaa is C or S

SEQ ID NO: 27393 - protein, 39 aa, Artificial Sequence; identical to SEQ ID NO: 23651
  Cyclic GFR-binding peptide
  MOD_RES (5)..(5): Xaa is C or S

SEQ ID NO: 27394 - protein, 28 aa, Artificial Sequence
  Cyclic GFR-binding peptide
QSNITMQIMRIKPHQGQHIGEMSLEEHS

SEQ ID NO: 27395 - protein, 42 aa, Artificial Sequence; identical to SEQ ID NO: 23653
  Cyclic GFR-binding peptide
  MOD_RES (4)..(41): Xaa is C or S

SEQ ID NO: 27396 - protein, 36 aa, Artificial Sequence; identical to SEQ ID NO: 23654
  Cyclic GFR-binding peptide
  MOD_RES (5)..(5): Xaa is C or S

SEQ ID NO: 27397 - protein, 33 aa, Artificial Sequence; identical to SEQ ID NO: 23655
  Cyclic GFR-binding peptide
  MOD_RES (2)..(2): Xaa is C or S

SEQ ID NO: 27398 - protein, 33 aa, Artificial Sequence; identical to SEQ ID NO: 23656
  Cyclic GFR-binding peptide
  MOD_RES (2)..(2): Xaa is C or S

SEQ ID NO: 27399 - protein, 32 aa, Artificial Sequence; identical to SEQ ID NO: 23657
  Cyclic GFR-binding peptide

SEQ ID NO: 27400 - protein, 38 aa, Artificial Sequence; identical to SEQ ID NO: 23658
  Cyclic GFR-binding peptide
  MOD_RES (5)..(5): Xaa is C or S

SEQ ID NO: 27401 - protein, 32 aa, Artificial Sequence; identical to SEQ ID NO: 23659
  Cyclic GFR-binding peptide
  MOD_RES (2)..(2): Xaa is C or S

SEQ ID NO: 27402 - protein, 30 aa, Artificial Sequence; identical to SEQ ID NO: 23660
  Cyclic GFR-binding peptide

SEQ ID NO: 27403 - protein, 27 aa, Artificial Sequence
  Cyclic GFR-binding peptide
RSVKMAKVRIKPHQGQHKEVQVFLQHN

SEQ ID NO: 27404 - protein, 26 aa, Artificial Sequence
  Cyclic GFR-binding peptide
PTGQSNITMQIMRIKPHQGQHIGEMS

SEQ ID NO: 27405 - protein, 29 aa, Artificial Sequence
  Cyclic GFR-binding peptide
TEERPVQMRKIRIKPHQGQHKKATVFLQH

SEQ ID NO: 27406 - protein, 29 aa, Artificial Sequence
  Cyclic GFR-binding peptide
PTGQSNITMQIMRIKPHQGQHIGEMSLEE

SEQ ID NO: 27407 - protein, 32 aa, Artificial Sequence; identical to SEQ ID NO: 23665
  Cyclic GFR-binding peptide

SEQ ID NO: 27408 - protein, 22 aa, Artificial Sequence
  Cyclic GFR-binding peptide
SNITVQIMEIVRKKPIFIGEMS

SEQ ID NO: 27409 - protein, 29 aa, Artificial Sequence
  Cyclic GFR-binding peptide
QPSRVHHSNITVQIMEYVRKKPKLIGEMS

SEQ ID NO: 27410 - protein, 28 aa, Artificial Sequence
  Cyclic GFR-binding peptide
VPTEERSVKMAKVRIKPHQGQHKEVQVF

SEQ ID NO: 27411 - protein, 29 aa, Artificial Sequence
  Cyclic GFR-binding peptide
  MOD_RES (1)..(1): Xaa is C or S
XVPTGQSNITMQIMRIKPHQGQHIGEMSL

SEQ ID NO: 27412 - protein, 39 aa, Artificial Sequence; identical to SEQ ID NO: 23670
  Cyclic GFR-binding peptide
  MOD_RES (37)..(39): Xaa is C or S

SEQ ID NO: 27413 - protein, 33 aa, Artificial Sequence; identical to SEQ ID NO: 23671
  Cyclic GFR-binding peptide
  MOD_RES (4)..(4): Xaa is C or S

SEQ ID NO: 27414 - protein, 29 aa, Artificial Sequence
  Cyclic GFR-binding peptide
TGQSNITMQIMRIKPHQGQHIGEMSLEEH

SEQ ID NO: 27415 - protein, 33 aa, Artificial Sequence; identical to SEQ ID NO: 23673
  Cyclic GFR-binding peptide
  MOD_RES (32)..(32): Xaa is C or S

SEQ ID NO: 27416 - protein, 28 aa, Artificial Sequence
  Cyclic GFR-binding peptide
PTEERSVKMAKVRIKPHQGQHKEVQVFL

SEQ ID NO: 27417 - protein, 24 aa, Artificial Sequence
  Cyclic GFR-binding peptide
RPVQMRKIRIKPHQGQHKKATVLE

SEQ ID NO: 27418 - protein, 24 aa, Artificial Sequence
  Cyclic GFR-binding peptide
GQRPVQMRKIRIKPHQGQHKKATV

SEQ ID NO: 27419 - protein, 28 aa, Artificial Sequence
  Cyclic GFR-binding peptide
GQSNITMQIMRIKPHQGQHIGEMSLEEH

SEQ ID NO: 27420 - protein, 38 aa, Artificial Sequence; identical to SEQ ID NO: 23678
  Cyclic GFR-binding peptide
  MOD_RES (1)..(38): Xaa is C or S

SEQ ID NO: 27421 - protein, 39 aa, Artificial Sequence; identical to SEQ ID NO: 23679
  Cyclic GFR-binding peptide
  MOD_RES (3)..(37)..(39): Xaa is C or S

SEQ ID NO: 27422 - protein, 24 aa, Artificial Sequence
  Cyclic GFR-binding peptide
RSVKVAKVEIVRKKPIFKEVQVTL

SEQ ID NO: 27423 - protein, 30 aa, Artificial Sequence; identical to SEQ ID NO: 23681
  Cyclic GFR-binding peptide

SEQ ID NO: 27424 - protein, 34 aa, Artificial Sequence; identical to SEQ ID NO: 23682
  Cyclic GFR-binding peptide
  MOD_RES (4)..(4): Xaa is C or S

SEQ ID NO: 27425 - protein, 28 aa, Artificial Sequence
  Cyclic GFR-binding peptide
TGQSNITMQIMRIKPHQGQHIGEMSLEE

SEQ ID NO: 27426 - protein, 36 aa, Artificial Sequence; identical to SEQ ID NO: 23684
  Cyclic GFR-binding peptide

SEQ ID NO: 27427 - protein, 32 aa, Artificial Sequence; identical to SEQ ID NO: 23685
  Cyclic GFR-binding peptide

SEQ ID NO: 27428 - protein, 38 aa, Artificial Sequence; identical to SEQ ID NO: 23686
  Cyclic GFR-binding peptide
  MOD_RES (5)..(5): Xaa is C or S

SEQ ID NO: 27429 - protein, 30 aa, Artificial Sequence; identical to SEQ ID NO: 23687
  Cyclic GFR-binding peptide
  MOD_RES (3)..(3): Xaa is C or S

SEQ ID NO: 27430 - protein, 35 aa, Artificial Sequence; identical to SEQ ID NO: 23688
  Cyclic GFR-binding peptide
  MOD_RES (35)..(35): Xaa is C or S

SEQ ID NO: 27431 - protein, 29 aa, Artificial Sequence
  Cyclic GFR-binding peptide
VPTGQSNITMQIMRIKPHQGQHIGEMSLE

SEQ ID NO: 27432 - protein, 44 aa, Artificial Sequence; identical to SEQ ID NO: 23690
  Cyclic GFR-binding peptide
  MOD_RES (5)..(42)..(44): Xaa is C or S

SEQ ID NO: 27433 - protein, 30 aa, Artificial Sequence; identical to SEQ ID NO: 23691
  Cyclic GFR-binding peptide

SEQ ID NO: 27434 - protein, 37 aa, Artificial Sequence; identical to SEQ ID NO: 23692
  Cyclic GFR-binding peptide
  MOD_RES (6)..(6): Xaa is C or S

SEQ ID NO: 27435 - protein, 37 aa, Artificial Sequence; identical to SEQ ID NO: 23693
  Cyclic GFR-binding peptide
  MOD_RES (5)..(5): Xaa is C or S

SEQ ID NO: 27436 - protein, 32 aa, Artificial Sequence; identical to SEQ ID NO: 23694
  Cyclic GFR-binding peptide
  MOD_RES (3)..(3): Xaa is C or S

SEQ ID NO: 27437 - protein, 30 aa, Artificial Sequence; identical to SEQ ID NO: 23695
  Cyclic GFR-binding peptide
  MOD_RES (3)..(3): Xaa is C or S

SEQ ID NO: 27438 - protein, 42 aa, Artificial Sequence; identical to SEQ ID NO: 23696
  Cyclic GFR-binding peptide
  MOD_RES (7)..(41): Xaa is C or S

SEQ ID NO: 27439 - protein, 36 aa, Artificial Sequence; identical to SEQ ID NO: 23697
  Cyclic GFR-binding peptide
  MOD_RES (6)..(6): Xaa is C or S

SEQ ID NO: 27440 - protein, 28 aa, Artificial Sequence
  Cyclic GFR-binding peptide
  MOD_RES (1)..(1): Xaa is C or S
XVPTEERSVKMAKVRIKPHQGQHKEVQV

SEQ ID NO: 27441 - protein, 29 aa, Artificial Sequence
  Cyclic GFR-binding peptide
RPTQVQLRSVKVAKVEIVRKKPIFKEVQV

SEQ ID NO: 27442 - protein, 34 aa, Artificial Sequence; identical to SEQ ID NO: 23700
  Cyclic GFR-binding peptide

SEQ ID NO: 27443 - protein, 36 aa, Artificial Sequence; identical to SEQ ID NO: 23701
  Cyclic GFR-binding peptide
  MOD_RES (2)..(36): Xaa is C or S

SEQ ID NO: 27444 - protein, 35 aa, Artificial Sequence; identical to SEQ ID NO: 23702
  Cyclic GFR-binding peptide
  MOD_RES (32)..(34): Xaa is C or S

SEQ ID NO: 27445 - protein, 33 aa, Artificial Sequence; identical to SEQ ID NO: 23703
  Cyclic GFR-binding peptide
  MOD_RES (30)..(32): Xaa is C or S

SEQ ID NO: 27446 - protein, 31 aa, Artificial Sequence; identical to SEQ ID NO: 23704
  Cyclic GFR-binding peptide
  MOD_RES (29)..(31): Xaa is C or S

SEQ ID NO: 27447 - protein, 39 aa, Artificial Sequence; identical to SEQ ID NO: 23705
  Cyclic GFR-binding peptide
  MOD_RES (4)..(38): Xaa is C or S

SEQ ID NO: 27448 - protein, 27 aa, Artificial Sequence
  Cyclic GFR-binding peptide
VPTEESNITMQIMRIKPHQGQHLGEMS

SEQ ID NO: 27449 - protein, 31 aa, Artificial Sequence; identical to SEQ ID NO: 23707
  Cyclic GFR-binding peptide
  MOD_RES (31)..(31): Xaa is C or S

SEQ ID NO: 27450 - protein, 37 aa, Artificial Sequence; identical to SEQ ID NO: 23708
  Cyclic GFR-binding peptide
  MOD_RES (5)..(5): Xaa is C or S

SEQ ID NO: 27451 - protein, 26 aa, Artificial Sequence
  Cyclic GFR-binding peptide
HSNITVQIMEYVRKKPKLLGEMSRLE

SEQ ID NO: 27452 - protein, 36 aa, Artificial Sequence; identical to SEQ ID NO: 23710
  Cyclic GFR-binding peptide
  MOD_RES (33)..(35): Xaa is C or S

SEQ ID NO: 27453 - protein, 34 aa, Artificial Sequence; identical to SEQ ID NO: 23711
  Cyclic GFR-binding peptide
  MOD_RES (5)..(5): Xaa is C or S

SEQ ID NO: 27454 - protein, 27 aa, Artificial Sequence
  Cyclic GFR-binding peptide
PTEERSVKMAKVRIKPHQGQHKEVQVF

SEQ ID NO: 27455 - protein, 33 aa, Artificial Sequence; identical to SEQ ID NO: 23713
  Cyclic GFR-binding peptide
  MOD_RES (6)..(6): Xaa is C or S

SEQ ID NO: 27456 - protein, 34 aa, Artificial Sequence; identical to SEQ ID NO: 23714
  Cyclic GFR-binding peptide
  MOD_RES (2)..(2): Xaa is C or S

SEQ ID NO: 27457 - protein, 43 aa, Artificial Sequence; identical to SEQ ID NO: 23715
  Cyclic GFR-binding peptide
  MOD_RES (6)..(40)..(42): Xaa is C or S

SEQ ID NO: 27458 - protein, 40 aa, Artificial Sequence; identical to SEQ ID NO: 23716
  Cyclic GFR-binding peptide
  MOD_RES (3)..(40): Xaa is C or S

SEQ ID NO: 27459 - protein, 33 aa, Artificial Sequence; identical to SEQ ID NO: 23717
  Cyclic GFR-binding peptide
  MOD_RES (4)..(4): Xaa is C or S

SEQ ID NO: 27460 - protein, 28 aa, Artificial Sequence
  Cyclic GFR-binding peptide
EERPVQMRKIRIKPHQGQHKKATVFLQH

SEQ ID NO: 27461 - protein, 33 aa, Artificial Sequence; identical to SEQ ID NO: 23719
  Cyclic GFR-binding peptide

SEQ ID NO: 27462 - protein, 36 aa, Artificial Sequence; identical to SEQ ID NO: 23720
  Cyclic GFR-binding peptide
  MOD_RES (35)..(35): Xaa is C or S

SEQ ID NO: 27463 - protein, 30 aa, Artificial Sequence; identical to SEQ ID NO: 23721
  Cyclic GFR-binding peptide
  MOD_RES (1)..(1): Xaa is C or S

SEQ ID NO: 27464 - protein, 30 aa, Artificial Sequence; identical to SEQ ID NO: 23722
  Cyclic GFR-binding peptide
  MOD_RES (2)..(2): Xaa is C or S

SEQ ID NO: 27465 - protein, 27 aa, Artificial Sequence
  Cyclic GFR-binding peptide
SRVHHSNITVQIMEYVRKKPKLLGEMS

SEQ ID NO: 27466 - protein, 40 aa, Artificial Sequence; identical to SEQ ID NO: 23724
  Cyclic GFR-binding peptide
  MOD_RES (4)..(38)..(40): Xaa is C or S

SEQ ID NO: 27467 - protein, 40 aa, Artificial Sequence; identical to SEQ ID NO: 23725
  Cyclic GFR-binding peptide
  MOD_RES (5)..(39): Xaa is C or S

SEQ ID NO: 27468 - protein, 30 aa, Artificial Sequence; identical to SEQ ID NO: 23726
  Cyclic GFR-binding peptide
  MOD_RES (30)..(30): Xaa is C or S

SEQ ID NO: 27469 - protein, 24 aa, Artificial Sequence
  Cyclic GFR-binding peptide
QLSNITVQIMEIVRKKPIFIGEMS

SEQ ID NO: 27470 - protein, 25 aa, Artificial Sequence
  Cyclic GFR-binding peptide
EERSVKMAKVRIKPHQGQHKEVQVF

SEQ ID NO: 27471 - protein, 35 aa, Artificial Sequence; identical to SEQ ID NO: 23729
  Cyclic GFR-binding peptide
  MOD_RES (6)..(6): Xaa is C or S

SEQ ID NO: 27472 - protein, 27 aa, Artificial Sequence
  Cyclic GFR-binding peptide
PTGQSNITMQIMRIKPHQGQHIGEMSL

SEQ ID NO: 27473 - protein, 30 aa, Artificial Sequence; identical to SEQ ID NO: 23731
  Cyclic GFR-binding peptide
  MOD_RES (30)..(30): Xaa is C or S

SEQ ID NO: 27474 - protein, 32 aa, Artificial Sequence; identical to SEQ ID NO: 23732
  Cyclic GFR-binding peptide
  MOD_RES (2)..(2): Xaa is C or S

SEQ ID NO: 27475 - protein, 31 aa, Artificial Sequence; identical to SEQ ID NO: 23733
  Cyclic GFR-binding peptide

SEQ ID NO: 27476 - protein, 39 aa, Artificial Sequence; identical to SEQ ID NO: 23734
  Cyclic GFR-binding peptide
  MOD_RES (7)..(7): Xaa is C or S

SEQ ID NO: 27477 - protein, 30 aa, Artificial Sequence; identical to SEQ ID NO: 23735
  Cyclic GFR-binding peptide

SEQ ID NO: 27478 - protein, 33 aa, Artificial Sequence; identical to SEQ ID NO: 23736
  Cyclic GFR-binding peptide
  MOD_RES (3)..(3): Xaa is C or S

SEQ ID NO: 27479 - protein, 41 aa, Artificial Sequence; identical to SEQ ID NO: 23737
  Cyclic GFR-binding peptide
  MOD_RES (5)..(5): Xaa is C or S

SEQ ID NO: 27480 - protein, 37 aa, Artificial Sequence; identical to SEQ ID NO: 23738
  Cyclic GFR-binding peptide
  MOD_RES (2)..(36): Xaa is C or S

SEQ ID NO: 27481 - protein, 29 aa, Artificial Sequence
  Cyclic GFR-binding peptide
VQLSNITVQIMEIVRKKPIFIGEMSTLED

SEQ ID NO: 27482 - protein, 39 aa, Artificial Sequence; identical to SEQ ID NO: 23740
  Cyclic GFR-binding peptide
  MOD_RES (7)..(7): Xaa is C or S

SEQ ID NO: 27483 - protein, 34 aa, Artificial Sequence; identical to SEQ ID NO: 23741
  Cyclic GFR-binding peptide
  MOD_RES (31)..(33): Xaa is C or S

SEQ ID NO: 27484 - protein, 39 aa, Artificial Sequence; identical to SEQ ID NO: 23742
  Cyclic GFR-binding peptide
  MOD_RES (37)..(39): Xaa is C or S

SEQ ID NO: 27485 - protein, 31 aa, Artificial Sequence; identical to SEQ ID NO: 23743
  Cyclic GFR-binding peptide
  MOD_RES (3)..(3): Xaa is C or S

SEQ ID NO: 27486 - protein, 38 aa, Artificial Sequence; identical to SEQ ID NO: 23744
  Cyclic GFR-binding peptide
  MOD_RES (6)..(6): Xaa is C or S

SEQ ID NO: 27487 - protein, 32 aa, Artificial Sequence; identical to SEQ ID NO: 23745
  Cyclic GFR-binding peptide
  MOD_RES (31)..(31): Xaa is C or S

SEQ ID NO: 27488 - protein, 32 aa, Artificial Sequence; identical to SEQ ID NO: 23746
  Cyclic GFR-binding peptide

SEQ ID NO: 27489 - protein, 33 aa, Artificial Sequence; identical to SEQ ID NO: 23747
  Cyclic GFR-binding peptide
  MOD_RES (30)..(32): Xaa is C or S

SEQ ID NO: 27490 - protein, 37 aa, Artificial Sequence; identical to SEQ ID NO: 23748
  Cyclic GFR-binding peptide
  MOD_RES (36)..(36): Xaa is C or S

SEQ ID NO: 27491 - protein, 33 aa, Artificial Sequence; identical to SEQ ID NO: 23749
  Cyclic GFR-binding peptide
  MOD_RES (32)..(32): Xaa is C or S

SEQ ID NO: 27492 - protein, 27 aa, Artificial Sequence
  Cyclic GFR-binding peptide
SNITVQIMEIVRKKPIFLGEMSTLEDH

SEQ ID NO: 27493 - protein, 30 aa, Artificial Sequence; identical to SEQ ID NO: 23751
  Cyclic GFR-binding peptide

SEQ ID NO: 27494 - protein, 43 aa, Artificial Sequence; identical to SEQ ID NO: 23752
  Cyclic GFR-binding peptide
  MOD_RES (3)..(40)..(42): Xaa is C or S

SEQ ID NO: 27495 - protein, 34 aa, Artificial Sequence; identical to SEQ ID NO: 23753
  Cyclic GFR-binding peptide
  MOD_RES (33)..(33): Xaa is C or S

SEQ ID NO: 27496 - protein, 37 aa, Artificial Sequence; identical to SEQ ID NO: 23754
  Cyclic GFR-binding peptide
  MOD_RES (36)..(36): Xaa is C or S

SEQ ID NO: 27497 - protein, 30 aa, Artificial Sequence; identical to SEQ ID NO: 23755
  Cyclic GFR-binding peptide

SEQ ID NO: 27498 - protein, 35 aa, Artificial Sequence; identical to SEQ ID NO: 23756
  Cyclic GFR-binding peptide
  MOD_RES (5)..(5): Xaa is C or S

SEQ ID NO: 27499 - protein, 33 aa, Artificial Sequence; identical to SEQ ID NO: 23757
  Cyclic GFR-binding peptide
  MOD_RES (3)..(3): Xaa is C or S

SEQ ID NO: 27500 - protein, 25 aa, Artificial Sequence
  Cyclic GFR-binding peptide
VHHRPVQVRKIEYVRKKPKLKKATV

SEQ ID NO: 27501 - protein, 30 aa, Artificial Sequence; identical to SEQ ID NO: 23759
  Cyclic GFR-binding peptide
  MOD_RES (1)..(1): Xaa is C or S

SEQ ID NO: 27502 - protein, 40 aa, Artificial Sequence; identical to SEQ ID NO: 23760
  Cyclic GFR-binding peptide
  MOD_RES (3)..(40): Xaa is C or S

SEQ ID NO: 27503 - protein, 30 aa, Artificial Sequence; identical to SEQ ID NO: 23761
  Cyclic GFR-binding peptide

SEQ ID NO: 27504 - protein, 30 aa, Artificial Sequence; identical to SEQ ID NO: 23762
  Cyclic GFR-binding peptide
  MOD_RES (1)..(1): Xaa is C or S

SEQ ID NO: 27505 - protein, 34 aa, Artificial Sequence; identical to SEQ ID NO: 23763
  Cyclic GFR-binding peptide
  MOD_RES (32)..(34): Xaa is C or S

SEQ ID NO: 27506 - protein, 35 aa, Artificial Sequence; identical to SEQ ID NO: 23764
  Cyclic GFR-binding peptide
  MOD_RES (32)..(34): Xaa is C or S

SEQ ID NO: 27507 - protein, 39 aa, Artificial Sequence; identical to SEQ ID NO: 23765
  Cyclic GFR-binding peptide
  MOD_RES (5)..(5): Xaa is C or S

SEQ ID NO: 27508 - protein, 24 aa, Artificial Sequence
  Cyclic GFR-binding peptide
RPVQMRKIRIKPHQGQHKKATVFL

SEQ ID NO: 27509 - protein, 41 aa, Artificial Sequence; identical to SEQ ID NO: 23767
  Cyclic GFR-binding peptide
  MOD_RES (6)..(40): Xaa is C or S

SEQ ID NO: 27510 - protein, 34 aa, Artificial Sequence; identical to SEQ ID NO: 23768
  Cyclic GFR-binding peptide
  MOD_RES (31)..(33): Xaa is C or S

SEQ ID NO: 27511 - protein, 33 aa, Artificial Sequence; identical to SEQ ID NO: 23769
  Cyclic GFR-binding peptide
  MOD_RES (2)..(2): Xaa is C or S

SEQ ID NO: 27512 - protein, 31 aa, Artificial Sequence; identical to SEQ ID NO: 23770
  Cyclic GFR-binding peptide
  MOD_RES (31)..(31): Xaa is C or S

SEQ ID NO: 27513 - protein, 38 aa, Artificial Sequence; identical to SEQ ID NO: 23771
  Cyclic GFR-binding peptide
  MOD_RES (6)..(6): Xaa is C or S

SEQ ID NO: 27514 - protein, 26 aa, Artificial Sequence
  Cyclic GFR-binding peptide
RSVKMAKVRIKPHQGQHKEVQVFLQH

SEQ ID NO: 27515 - protein, 33 aa, Artificial Sequence; identical to SEQ ID NO: 23773
  Cyclic GFR-binding peptide
  MOD_RES (2)..(2): Xaa is C or S

SEQ ID NO: 27516 - protein, 35 aa, Artificial Sequence; identical to SEQ ID NO: 23774
  Cyclic GFR-binding peptide
  MOD_RES (3)..(3): Xaa is C or S

SEQ ID NO: 27517 - protein, 30 aa, Artificial Sequence; identical to SEQ ID NO: 23775
  Cyclic GFR-binding peptide

SEQ ID NO: 27518 - protein, 39 aa, Artificial Sequence; identical to SEQ ID NO: 23776
  Cyclic GFR-binding peptide
  MOD_RES (5)..(39): Xaa is C or S

SEQ ID NO: 27519 - protein, 41 aa, Artificial Sequence; identical to SEQ ID NO: 23777
  Cyclic GFR-binding peptide
  MOD_RES (5)..(39)..(41): Xaa is C or S

SEQ ID NO: 27520 - protein, 37 aa, Artificial Sequence; identical to SEQ ID NO: 23778
  Cyclic GFR-binding peptide
  MOD_RES (1)..(1): Xaa is C or S

SEQ ID NO: 27521 - protein, 29 aa, Artificial Sequence
  Cyclic GFR-binding peptide
LSNITVQIMEIVRKKPIFIGEMSTLEDHL

SEQ ID NO: 27522 - protein, 42 aa, Artificial Sequence; identical to SEQ ID NO: 23780
  Cyclic GFR-binding peptide
  MOD_RES (6)..(40)..(42): Xaa is C or S

SEQ ID NO: 27523 - protein, 38 aa, Artificial Sequence; identical to SEQ ID NO: 23781
  Cyclic GFR-binding peptide
  MOD_RES (4)..(4): Xaa is C or S

SEQ ID NO: 27524 - protein, 23 aa, Artificial Sequence
  Cyclic GFR-binding peptide
QSNITMQIMRIKPHQGQHIGEMS

SEQ ID NO: 27525 - protein, 33 aa, Artificial Sequence; identical to SEQ ID NO: 23783
  Cyclic GFR-binding peptide
  MOD_RES (3)..(3): Xaa is C or S

SEQ ID NO: 27526 - protein, 38 aa, Artificial Sequence; identical to SEQ ID NO: 23784
  Cyclic GFR-binding peptide
  MOD_RES (36)..(38): Xaa is C or S

SEQ ID NO: 27527 - protein, 41 aa, Artificial Sequence; identical to SEQ ID NO: 23785
  Cyclic GFR-binding peptide
  MOD_RES (3)..(40): Xaa is C or S

SEQ ID NO: 27528 - protein, 35 aa, Artificial Sequence; identical to SEQ ID NO: 23786
  Cyclic GFR-binding peptide
  MOD_RES (4)..(4): Xaa is C or S

SEQ ID NO: 27529 - protein, 40 aa, Artificial Sequence; identical to SEQ ID NO: 23787
  Cyclic GFR-binding peptide
  MOD_RES (37)..(39): Xaa is C or S

SEQ ID NO: 27530 - protein, 31 aa, Artificial Sequence; identical to SEQ ID NO: 23788
  Cyclic GFR-binding peptide

SEQ ID NO: 27531 - protein, 30 aa, Artificial Sequence; identical to SEQ ID NO: 23789
  Cyclic GFR-binding peptide

SEQ ID NO: 27532 - protein, 37 aa, Artificial Sequence; identical to SEQ ID NO: 23790
  Cyclic GFR-binding peptide
  MOD_RES (37)..(37): Xaa is C or S

SEQ ID NO: 27533 - protein, 40 aa, Artificial Sequence; identical to SEQ ID NO: 23791
  Cyclic GFR-binding peptide
  MOD_RES (6)..(40): Xaa is C or S

SEQ ID NO: 27534 - protein, 33 aa, Artificial Sequence; identical to SEQ ID NO: 23792
  Cyclic GFR-binding peptide
  MOD_RES (31)..(33): Xaa is C or S

SEQ ID NO: 27535 - protein, 27 aa, Artificial Sequence
  Cyclic GFR-binding peptide
TGQSNITMQIMRIKPHQGQHIGEMSLE

SEQ ID NO: 27536 - protein, 38 aa, Artificial Sequence; identical to SEQ ID NO: 23794
  Cyclic GFR-binding peptide
  MOD_RES (2)..(36)..(38): Xaa is C or S

SEQ ID NO: 27537 - protein, 36 aa, Artificial Sequence; identical to SEQ ID NO: 23795
  Cyclic GFR-binding peptide
  MOD_RES (33)..(35): Xaa is C or S

SEQ ID NO: 27538 - protein, 41 aa, Artificial Sequence; identical to SEQ ID NO: 23796
  Cyclic GFR-binding peptide
  MOD_RES (4)..(38)..(40): Xaa is C or S

SEQ ID NO: 27539 - protein, 30 aa, Artificial Sequence; identical to SEQ ID NO: 23797
  Cyclic GFR-binding peptide

SEQ ID NO: 27540 - protein, 42 aa, Artificial Sequence; identical to SEQ ID NO: 23798
  Cyclic GFR-binding peptide
  MOD_RES (3)..(40)..(42): Xaa is C or S

SEQ ID NO: 27541 - protein, 37 aa, Artificial Sequence; identical to SEQ ID NO: 23799
  Cyclic GFR-binding peptide
  MOD_RES (4)..(4): Xaa is C or S

SEQ ID NO: 27542 - protein, 37 aa, Artificial Sequence; identical to SEQ ID NO: 23800
  Cyclic GFR-binding peptide
  MOD_RES (1)..(35)..(37): Xaa is C or S

SEQ ID NO: 27543 - protein, 26 aa, Artificial Sequence
  Cyclic GFR-binding peptide
RPVQMRKIRIKPHQGQHKKATVFLQH

SEQ ID NO: 27544 - protein, 39 aa, Artificial Sequence; identical to SEQ ID NO: 23802
  Cyclic GFR-binding peptide
  MOD_RES (4)..(4): Xaa is C or S

SEQ ID NO: 27545 - protein, 30 aa, Artificial Sequence; identical to SEQ ID NO: 23803
  Cyclic GFR-binding peptide

SEQ ID NO: 27546 - protein, 42 aa, Artificial Sequence; identical to SEQ ID NO: 23804
  Cyclic GFR-binding peptide
  MOD_RES (2)..(39)..(41): Xaa is C or S

SEQ ID NO: 27547 - protein, 29 aa, Artificial Sequence
  Cyclic GFR-binding peptide
  MOD_RES (2)..(2): Xaa is C or S
EXVPTEERPVQMRKIRIKPHQGQHKKATV

SEQ ID NO: 27548 - protein, 23 aa, Artificial Sequence
  Cyclic GFR-binding peptide
HSNITVQIMEYVRKKPKLIGEMS

SEQ ID NO: 27549 - protein, 23 aa, Artificial Sequence
  Cyclic GFR-binding peptide
SNITVQIMEIVRKKPIFLGEMST

SEQ ID NO: 27550 - protein, 42 aa, Artificial Sequence; identical to SEQ ID NO: 23808
  Cyclic GFR-binding peptide
  MOD_RES (7)..(41): Xaa is C or S

SEQ ID NO: 27551 - protein, 31 aa, Artificial Sequence; identical to SEQ ID NO: 23809
  Cyclic GFR-binding peptide
  MOD_RES (2)..(2): Xaa is C or S

SEQ ID NO: 27552 - protein, 37 aa, Artificial Sequence; identical to SEQ ID NO: 23810
  Cyclic GFR-binding peptide
  MOD_RES (37)..(37): Xaa is C or S

SEQ ID NO: 27553 - protein, 34 aa, Artificial Sequence; identical to SEQ ID NO: 23811
  Cyclic GFR-binding peptide
  MOD_RES (4)..(4): Xaa is C or S

SEQ ID NO: 27554 - protein, 26 aa, Artificial Sequence
  Cyclic GFR-binding peptide
ERSVKMAKVRIKPHQGQHKEVQVFLQ

SEQ ID NO: 27555 - protein, 38 aa, Artificial Sequence; identical to SEQ ID NO: 23813
  Cyclic GFR-binding peptide
  MOD_RES (36)..(38): Xaa is C or S

SEQ ID NO: 27556 - protein, 31 aa, Artificial Sequence; identical to SEQ ID NO: 23814
  Cyclic GFR-binding peptide
  MOD_RES (4)..(4): Xaa is C or S

SEQ ID NO: 27557 - protein, 38 aa, Artificial Sequence; identical to SEQ ID NO: 23815
  Cyclic GFR-binding peptide
  MOD_RES (6)..(6): Xaa is C or S

SEQ ID NO: 27558 - protein, 40 aa, Artificial Sequence; identical to SEQ ID NO: 23816
  Cyclic GFR-binding peptide
  MOD_RES (6)..(40): Xaa is C or S

SEQ ID NO: 27559 - protein, 25 aa, Artificial Sequence
  Cyclic GFR-binding peptide
SNITVQIMEIVRKKPIFLGEMSTLE

SEQ ID NO: 27560 - protein, 29 aa, Artificial Sequence
  Cyclic GFR-binding peptide
VQLSNITVQIMEIVRKKPIFLGEMSTLED

SEQ ID NO: 27561 - protein, 39 aa, Artificial Sequence; identical to SEQ ID NO: 23819
  Cyclic GFR-binding peptide
  MOD_RES (36)..(38): Xaa is C or S

SEQ ID NO: 27562 - protein, 39 aa, Artificial Sequence; identical to SEQ ID NO: 23820
  Cyclic GFR-binding peptide
  MOD_RES (1)..(38): Xaa is C or S

SEQ ID NO: 27563 - protein, 35 aa, Artificial Sequence; identical to SEQ ID NO: 23821
  Cyclic GFR-binding peptide
  MOD_RES (6)..(6): Xaa is C or S

SEQ ID NO: 27564 - protein, 37 aa, Artificial Sequence; identical to SEQ ID NO: 23822
  Cyclic GFR-binding peptide
  MOD_RES (3)..(37): Xaa is C or S

SEQ ID NO: 27565 - protein, 43 aa, Artificial Sequence; identical to SEQ ID NO: 23823
  Cyclic GFR-binding peptide
  MOD_RES (3)..(40)..(42): Xaa is C or S

SEQ ID NO: 27566 - protein, 24 aa, Artificial Sequence
  Cyclic GFR-binding peptide
QSNITMQIMRIKPHQGQHIGEMSL

SEQ ID NO: 27567 - protein, 39 aa, Artificial Sequence; identical to SEQ ID NO: 23825
  Cyclic GFR-binding peptide
  MOD_RES (5)..(39): Xaa is C or S

SEQ ID NO: 27568 - protein, 32 aa, Artificial Sequence; identical to SEQ ID NO: 23826
  Cyclic GFR-binding peptide
  MOD_RES (31)..(31): Xaa is C or S

SEQ ID NO: 27569 - protein, 32 aa, Artificial Sequence; identical to SEQ ID NO: 23827
  Cyclic GFR-binding peptide
  MOD_RES (4)..(4): Xaa is C or S

SEQ ID NO: 27570 - protein, 33 aa, Artificial Sequence; identical to SEQ ID NO: 23828
  Cyclic GFR-binding peptide
  MOD_RES (3)..(3): Xaa is C or S

SEQ ID NO: 27571 - protein, 35 aa, Artificial Sequence; identical to SEQ ID NO: 23829
  Cyclic GFR-binding peptide
  MOD_RES (6)..(6): Xaa is C or S

SEQ ID NO: 27572 - protein, 39 aa, Artificial Sequence; identical to SEQ ID NO: 23830
  Cyclic GFR-binding peptide
  MOD_RES (4)..(4): Xaa is C or S

SEQ ID NO: 27573 - protein, 29 aa, Artificial Sequence
  Cyclic GFR-binding peptide
SNITVQIMEIVRKKPIFIGEMSTLEDHLA

SEQ ID NO: 27574 - protein, 27 aa, Artificial Sequence
  Cyclic GFR-binding peptide
LRSVKVAKVEIVRKKPIFKEVQVTLED

SEQ ID NO: 27575 - protein, 38 aa, Artificial Sequence; identical to SEQ ID NO: 23833
  Cyclic GFR-binding peptide
  MOD_RES (2)..(36)..(38): Xaa is C or S

SEQ ID NO: 27576 - protein, 38 aa, Artificial Sequence; identical to SEQ ID NO: 23834
  Cyclic GFR-binding peptide
  MOD_RES (37)..(37): Xaa is C or S

SEQ ID NO: 27577 - protein, 28 aa, Artificial Sequence
  Cyclic GFR-binding peptide
EESNITMQIMRIKPHQGQHLGEMSFLQH

SEQ ID NO: 27578 - protein, 35 aa, Artificial Sequence; identical to SEQ ID NO: 23836
  Cyclic GFR-binding peptide
  MOD_RES (4)..(4): Xaa is C or S

SEQ ID NO: 27579 - protein, 37 aa, Artificial Sequence; identical to SEQ ID NO: 23837
  Cyclic GFR-binding peptide
  MOD_RES (5)..(5): Xaa is C or S

SEQ ID NO: 27580 - protein, 39 aa, Artificial Sequence; identical to SEQ ID NO: 23838
  Cyclic GFR-binding peptide
  MOD_RES (4)..(38): Xaa is C or S

SEQ ID NO: 27581 - protein, 23 aa, Artificial Sequence
  Cyclic GFR-binding peptide
SNITMQIMRIKPHQGQHIGEMSL

SEQ ID NO: 27582 - protein, 36 aa, Artificial Sequence; identical to SEQ ID NO: 23840
  Cyclic GFR-binding peptide
  MOD_RES (5)..(5): Xaa is C or S

SEQ ID NO: 27583 - protein, 25 aa, Artificial Sequence
  Cyclic GFR-binding peptide
GQRSVKMAKVRIKPHQGQHKEVQVL

SEQ ID NO: 27584 - protein, 31 aa, Artificial Sequence; identical to SEQ ID NO: 23842
  Cyclic GFR-binding peptide

SEQ ID NO: 27585 - protein, 38 aa, Artificial Sequence; identical to SEQ ID NO: 23843
  Cyclic GFR-binding peptide
  MOD_RES (35)..(37): Xaa is C or S

SEQ ID NO: 27586 - protein, 35 aa, Artificial Sequence; identical to SEQ ID NO: 23844
  Cyclic GFR-binding peptide
  MOD_RES (4)..(4): Xaa is C or S

SEQ ID NO: 27587 - protein, 40 aa, Artificial Sequence; identical to SEQ ID NO: 23845
  Cyclic GFR-binding peptide
  MOD_RES (3)..(40): Xaa is C or S

SEQ ID NO: 27588 - protein, 29 aa, Artificial Sequence
  Cyclic GFR-binding peptide
QLSNITVQIMEIVRKKPIFIGEMSTLEDH

SEQ ID NO: 27589 - protein, 27 aa, Artificial Sequence
  Cyclic GFR-binding peptide
EESNITMQIMRIKPHQGQHLGEMSFLQ

SEQ ID NO: 27590 - protein, 36 aa, Artificial Sequence; identical to SEQ ID NO: 23848
  Cyclic GFR-binding peptide
  MOD_RES (33)..(35): Xaa is C or S

SEQ ID NO: 27591 - protein, 25 aa, Artificial Sequence
  Cyclic GFR-binding peptide
LSNITVQIMEIVRKKPIFLGEMSTL

SEQ ID NO: 27592 - protein, 37 aa, Artificial Sequence; identical to SEQ ID NO: 23850
  Cyclic GFR-binding peptide
  MOD_RES (1)..(35)..(37): Xaa is C or S

SEQ ID NO: 27593 - protein, 23 aa, Artificial Sequence
  Cyclic GFR-binding peptide
QRSVKMAKVRIKPHQGQHKEVQV

SEQ ID NO: 27594 - protein, 31 aa, Artificial Sequence; identical to SEQ ID NO: 23852
  Cyclic GFR-binding peptide
  MOD_RES (1)..(1): Xaa is C or S

SEQ ID NO: 27595 - protein, 39 aa, Artificial Sequence; identical to SEQ ID NO: 23853
  Cyclic GFR-binding peptide
  MOD_RES (6)..(6): Xaa is C or S

SEQ ID NO: 27596 - protein, 25 aa, Artificial Sequence
  Cyclic GFR-binding peptide
SNITVQIMEYVRKKPKLIGEMSRLE

SEQ ID NO: 27597 - protein, 41 aa, Artificial Sequence; identical to SEQ ID NO: 23855
  Cyclic GFR-binding peptide
  MOD_RES (3)..(40): Xaa is C or S

SEQ ID NO: 27598 - protein, 29 aa, Artificial Sequence
  Cyclic GFR-binding peptide
  MOD_RES (29)..(29): Xaa is C or S
SNITMQIMRIKPHQGQHLGEMSFLQHNKX

SEQ ID NO: 27599 - protein, 26 aa, Artificial Sequence
  Cyclic GFR-binding peptide
QLSNITVQIMEIVRKKPIFLGEMSTL

SEQ ID NO: 27600 - protein, 32 aa, Artificial Sequence; identical to SEQ ID NO: 23858
  Cyclic GFR-binding peptide
  MOD_RES (32)..(32): Xaa is C or S

SEQ ID NO: 27601 - protein, 39 aa, Artificial Sequence; identical to SEQ ID NO: 23859
  Cyclic GFR-binding peptide
  MOD_RES (37)..(39): Xaa is C or S

SEQ ID NO: 27602 - protein, 33 aa, Artificial Sequence; identical to SEQ ID NO: 23860
  Cyclic GFR-binding peptide
  MOD_RES (2)..(2): Xaa is C or S

SEQ ID NO: 27603 - protein, 43 aa, Artificial Sequence; identical to SEQ ID NO: 23861
  Cyclic GFR-binding peptide
  MOD_RES (4)..(41)..(43): Xaa is C or S

SEQ ID NO: 27604 - protein, 33 aa, Artificial Sequence; identical to SEQ ID NO: 23862
  Cyclic GFR-binding peptide

SEQ ID NO: 27605 - protein, 44 aa, Artificial Sequence; identical to SEQ ID NO: 23863
  Cyclic GFR-binding peptide
  MOD_RES (5)..(42)..(44): Xaa is C or S

SEQ ID NO: 27606 - protein, 44 aa, Artificial Sequence; identical to SEQ ID NO: 23864
  Cyclic GFR-binding peptide
  MOD_RES (5)..(42)..(44): Xaa is C or S

SEQ ID NO: 27607 - protein, 38 aa, Artificial Sequence; identical to SEQ ID NO: 23865
  Cyclic GFR-binding peptide
  MOD_RES (35)..(37): Xaa is C or S

SEQ ID NO: 27608 - protein, 33 aa, Artificial Sequence; identical to SEQ ID NO: 23866
  Cyclic GFR-binding peptide

SEQ ID NO: 27609 - protein, 35 aa, Artificial Sequence; identical to SEQ ID NO: 23867
  Cyclic GFR-binding peptide
  MOD_RES (1)..(35): Xaa is C or S

SEQ ID NO: 27610 - protein, 34 aa, Artificial Sequence; identical to SEQ ID NO: 23868
  Cyclic GFR-binding peptide
  MOD_RES (32)..(34): Xaa is C or S

SEQ ID NO: 27611 - protein, 33 aa, Artificial Sequence; identical to SEQ ID NO: 23869
  Cyclic GFR-binding peptide
  MOD_RES (32)..(32): Xaa is C or S

SEQ ID NO: 27612 - protein, 39 aa, Artificial Sequence; identical to SEQ ID NO: 23870
  Cyclic GFR-binding peptide
  MOD_RES (36)..(38): Xaa is C or S

SEQ ID NO: 27613 - protein, 31 aa, Artificial Sequence; identical to SEQ ID NO: 23871
  Cyclic GFR-binding peptide

SEQ ID NO: 27614 - protein, 37 aa, Artificial Sequence; identical to SEQ ID NO: 23872
  Cyclic GFR-binding peptide
  MOD_RES (2)..(36): Xaa is C or S

SEQ ID NO: 27615 - protein, 27 aa, Artificial Sequence
  Cyclic GFR-binding peptide
QRPVQMRKIRIKPHQGQHKKATVLEEH

SEQ ID NO: 27616 - protein, 30 aa, Artificial Sequence; identical to SEQ ID NO: 23874
  Cyclic GFR-binding peptide

SEQ ID NO: 27617 - protein, 34 aa, Artificial Sequence; identical to SEQ ID NO: 23875
  Cyclic GFR-binding peptide
  MOD_RES (1)..(1): Xaa is C or S

SEQ ID NO: 27618 - protein, 32 aa, Artificial Sequence; identical to SEQ ID NO: 23876
  Cyclic GFR-binding peptide
  MOD_RES (1)..(1): Xaa is C or S

SEQ ID NO: 27619 - protein, 37 aa, Artificial Sequence; identical to SEQ ID NO: 23877
  Cyclic GFR-binding peptide
  MOD_RES (5)..(5): Xaa is C or S

SEQ ID NO: 27620 - protein, 33 aa, Artificial Sequence; identical to SEQ ID NO: 23878
  Cyclic GFR-binding peptide
  MOD_RES (1)..(1): Xaa is C or S

SEQ ID NO: 27621 - protein, 32 aa, Artificial Sequence; identical to SEQ ID NO: 23879
  Cyclic GFR-binding peptide
  MOD_RES (32)..(32): Xaa is C or S

SEQ ID NO: 27622 - protein, 38 aa, Artificial Sequence; identical to SEQ ID NO: 23880
  Cyclic GFR-binding peptide
  MOD_RES (35)..(37): Xaa is C or S

SEQ ID NO: 27623 - protein, 30 aa, Artificial Sequence; identical to SEQ ID NO: 23881
  Cyclic GFR-binding peptide
  MOD_RES (3)..(3): Xaa is C or S

SEQ ID NO: 27624 - protein, 29 aa, Artificial Sequence
  Cyclic GFR-binding peptide
ESNITMQIMRIKPHQGQHLGEMSFLQHNK

SEQ ID NO: 27625 - protein, 32 aa, Artificial Sequence; identical to SEQ ID NO: 23883
  Cyclic GFR-binding peptide

SEQ ID NO: 27626 - protein, 38 aa, Artificial Sequence; identical to SEQ ID NO: 23884
  Cyclic GFR-binding peptide
  MOD_RES (2)..(36)..(38): Xaa is C or S

SEQ ID NO: 27627 - protein, 35 aa, Artificial Sequence; identical to SEQ ID NO: 23885
  Cyclic GFR-binding peptide
  MOD_RES (32)..(34): Xaa is C or S

SEQ ID NO: 27628 - protein, 39 aa, Artificial Sequence; identical to SEQ ID NO: 23886
  Cyclic GFR-binding peptide
  MOD_RES (3)..(3): Xaa is C or S

SEQ ID NO: 27629 - protein, 27 aa, Artificial Sequence
  Cyclic GFR-binding peptide
TEERPVQMRKIRIKPHQGQHKKATVFL

SEQ ID NO: 27630 - protein, 36 aa, Artificial Sequence; identical to SEQ ID NO: 23888
  Cyclic GFR-binding peptide
  MOD_RES (4)..(4): Xaa is C or S

SEQ ID NO: 27631 - protein, 33 aa, Artificial Sequence; identical to SEQ ID NO: 23889
  Cyclic GFR-binding peptide
  MOD_RES (4)..(4): Xaa is C or S

SEQ ID NO: 27632 - protein, 25 aa, Artificial Sequence
  Cyclic GFR-binding peptide
QLSNITVQIMEIVRKKPIFIGEMST

SEQ ID NO: 27633 - protein, 28 aa, Artificial Sequence
  Cyclic GFR-binding peptide
VPTGQRPVQMRKIRIKPHQGQHKKATVL

SEQ ID NO: 27634 - protein, 31 aa, Artificial Sequence; identical to SEQ ID NO: 23892
  Cyclic GFR-binding peptide

SEQ ID NO: 27635 - protein, 37 aa, Artificial Sequence; identical to SEQ ID NO: 23893
  Cyclic GFR-binding peptide
  MOD_RES (1)..(35)..(37): Xaa is C or S

SEQ ID NO: 27636 - protein, 39 aa, Artificial Sequence; identical to SEQ ID NO: 23894
  Cyclic GFR-binding peptide
  MOD_RES (7)..(7): Xaa is C or S

SEQ ID NO: 27637 - protein, 36 aa, Artificial Sequence; identical to SEQ ID NO: 23895
  Cyclic GFR-binding peptide
  MOD_RES (1)..(35): Xaa is C or S

SEQ ID NO: 27638 - protein, 35 aa, Artificial Sequence; identical to SEQ ID NO: 23896
  Cyclic GFR-binding peptide
  MOD_RES (7)..(7): Xaa is C or S

SEQ ID NO: 27639 - protein, 41 aa, Artificial Sequence; identical to SEQ ID NO: 23897
  Cyclic GFR-binding peptide
  MOD_RES (7)..(41): Xaa is C or S

SEQ ID NO: 27640 - protein, 28 aa, Artificial Sequence
  Cyclic GFR-binding peptide
SNITVQIMEIVRKKPIFLGEMSTLEDHL

SEQ ID NO: 27641 - protein, 36 aa, Artificial Sequence; identical to SEQ ID NO: 23899
  Cyclic GFR-binding peptide
  MOD_RES (4)..(4): Xaa is C or S

SEQ ID NO: 27642 - protein, 33 aa, Artificial Sequence; identical to SEQ ID NO: 23900
  Cyclic GFR-binding peptide
  MOD_RES (4)..(4): Xaa is C or S

SEQ ID NO: 27643 - protein, 29 aa, Artificial Sequence
  Cyclic GFR-binding peptide
QLSNITVQIMEIVRKKPIFLGEMSTLEDH

SEQ ID NO: 27644 - protein, 35 aa, Artificial Sequence; identical to SEQ ID NO: 23902
  Cyclic GFR-binding peptide
  MOD_RES (33)..(35): Xaa is C or S

SEQ ID NO: 27645 - protein, 31 aa, Artificial Sequence; identical to SEQ ID NO: 23903
  Cyclic GFR-binding peptide

SEQ ID NO: 27646 - protein, 35 aa, Artificial Sequence; identical to SEQ ID NO: 23904
  Cyclic GFR-binding peptide
  MOD_RES (32)..(34): Xaa is C or S

SEQ ID NO: 27647 - protein, 43 aa, Artificial Sequence; identical to SEQ ID NO: 23905
  Cyclic GFR-binding peptide
  MOD_RES (5)..(42): Xaa is C or S

SEQ ID NO: 27648 - protein, 30 aa, Artificial Sequence; identical to SEQ ID NO: 23906
  Cyclic GFR-binding peptide

SEQ ID NO: 27649 - protein, 35 aa, Artificial Sequence; identical to SEQ ID NO: 23907
  Cyclic GFR-binding peptide
  MOD_RES (33)..(35): Xaa is C or S

SEQ ID NO: 27650 - protein, 32 aa, Artificial Sequence; identical to SEQ ID NO: 23908
  Cyclic GFR-binding peptide
  MOD_RES (29)..(31): Xaa is C or S

SEQ ID NO: 27651 - protein, 37 aa, Artificial Sequence; identical to SEQ ID NO: 23909
  Cyclic GFR-binding peptide
  MOD_RES (4)..(4): Xaa is C or S

SEQ ID NO: 27652 - protein, 37 aa, Artificial Sequence; identical to SEQ ID NO: 23910
  Cyclic GFR-binding peptide
  MOD_RES (1)..(35)..(37): Xaa is C or S

SEQ ID NO: 27653 - protein, 33 aa, Artificial Sequence; identical to SEQ ID NO: 23911
  Cyclic GFR-binding peptide
  MOD_RES (33)..(33): Xaa is C or S

SEQ ID NO: 27654 - protein, 25 aa, Artificial Sequence
  Cyclic GFR-binding peptide
QRPVQMRKIRIKPHQGQHKKATVLE

SEQ ID NO: 27655 - protein, 38 aa, Artificial Sequence; identical to SEQ ID NO: 23913
  Cyclic GFR-binding peptide
  MOD_RES (37)..(37): Xaa is C or S

SEQ ID NO: 27656 - protein, 41 aa, Artificial Sequence; identical to SEQ ID NO: 23914
  Cyclic GFR-binding peptide
  MOD_RES (1)..(38)..(40): Xaa is C or S

SEQ ID NO: 27657 - protein, 39 aa, Artificial Sequence; identical to SEQ ID NO: 23915
  Cyclic GFR-binding peptide
  MOD_RES (36)..(38): Xaa is C or S

SEQ ID NO: 27658 - protein, 37 aa, Artificial Sequence; identical to SEQ ID NO: 23916
  Cyclic GFR-binding peptide
  MOD_RES (34)..(36): Xaa is C or S

SEQ ID NO: 27659 - protein, 28 aa, Artificial Sequence
  Cyclic GFR-binding peptide
PTQVQLRSVKVAKVEIVRKKPIFKEVQV

SEQ ID NO: 27660 - protein, 33 aa, Artificial Sequence; identical to SEQ ID NO: 23918
  Cyclic GFR-binding peptide
  MOD_RES (1)..(1): Xaa is C or S

SEQ ID NO: 27661 - protein, 44 aa, Artificial Sequence; identical to SEQ ID NO: 23919
  Cyclic GFR-binding peptide
  MOD_RES (7)..(41)..(43): Xaa is C or S

SEQ ID NO: 27662 - protein, 41 aa, Artificial Sequence; identical to SEQ ID NO: 23920
  Cyclic GFR-binding peptide
  MOD_RES (4)..(38)..(40): Xaa is C or S

SEQ ID NO: 27663 - protein, 29 aa, Artificial Sequence
  Cyclic GFR-binding peptide
LRSVKVAKVEIVRKKPIFKEVQVTLEDHL

SEQ ID NO: 27664 - protein, 33 aa, Artificial Sequence; identical to SEQ ID NO: 23922
  Cyclic GFR-binding peptide
  MOD_RES (33)..(33): Xaa is C or S

SEQ ID NO: 27665 - protein, 35 aa, Artificial Sequence; identical to SEQ ID NO: 23923
  Cyclic GFR-binding peptide
  MOD_RES (1)..(35): Xaa is C or S

SEQ ID NO: 27666 - protein, 37 aa, Artificial Sequence; identical to SEQ ID NO: 23924
  Cyclic GFR-binding peptide
  MOD_RES (37)..(37): Xaa is C or S

SEQ ID NO: 27667 - protein, 35 aa, Artificial Sequence; identical to SEQ ID NO: 23925
  Cyclic GFR-binding peptide
  MOD_RES (4)..(4): Xaa is C or S

SEQ ID NO: 27668 - protein, 35 aa, Artificial Sequence; identical to SEQ ID NO: 23926
  Cyclic GFR-binding peptide
  MOD_RES (2)..(2): Xaa is C or S

SEQ ID NO: 27669 - protein, 40 aa, Artificial Sequence; identical to SEQ ID NO: 23927
  Cyclic GFR-binding peptide
  MOD_RES (1)..(38)..(40): Xaa is C or S

SEQ ID NO: 27670 - protein, 25 aa, Artificial Sequence
  Cyclic GFR-binding peptide
SNITVQIMEIVRKKPIFIGEMSTLE

SEQ ID NO: 27671 - protein, 33 aa, Artificial Sequence; identical to SEQ ID NO: 23929
  Cyclic GFR-binding peptide
  MOD_RES (32)..(32): Xaa is C or S

SEQ ID NO: 27672 - protein, 35 aa, Artificial Sequence; identical to SEQ ID NO: 23930
  Cyclic GFR-binding peptide
  MOD_RES (33)..(35): Xaa is C or S

SEQ ID NO: 27673 - protein, 39 aa, Artificial Sequence; identical to SEQ ID NO: 23931
  Cyclic GFR-binding peptide
  MOD_RES (37)..(39): Xaa is C or S

SEQ ID NO: 27674 - protein, 32 aa, Artificial Sequence; identical to SEQ ID NO: 23932
  Cyclic GFR-binding peptide
  MOD_RES (30)..(32): Xaa is C or S

SEQ ID NO: 27675 - protein, 32 aa, Artificial Sequence; identical to SEQ ID NO: 23933
  Cyclic GFR-binding peptide
  MOD_RES (31)..(31): Xaa is C or S

SEQ ID NO: 27676 - protein, 38 aa, Artificial Sequence; identical to SEQ ID NO: 23934
  Cyclic GFR-binding peptide
  MOD_RES (4)..(4): Xaa is C or S

SEQ ID NO: 27677 - protein, 29 aa, Artificial Sequence
  Cyclic GFR-binding peptide
EESNITMQIMRIKPHQGQHLGEMSFLQHN

SEQ ID NO: 27678 - protein, 37 aa, Artificial Sequence; identical to SEQ ID NO: 23936
  Cyclic GFR-binding peptide
  MOD_RES (5)..(5): Xaa is C or S

SEQ ID NO: 27679 - protein, 40 aa, Artificial Sequence; identical to SEQ ID NO: 23937
  Cyclic GFR-binding peptide
  MOD_RES (3)..(37)..(39): Xaa is C or S

SEQ ID NO: 27680 - protein, 32 aa, Artificial Sequence; identical to SEQ ID NO: 23938
  Cyclic GFR-binding peptide
  MOD_RES (30)..(32): Xaa is C or S

SEQ ID NO: 27681 - protein, 29 aa, Artificial Sequence
  Cyclic GFR-binding peptide
  MOD_RES (29)..(29): Xaa is C or S
RPVQMRKIRIKPHQGQHKKATVLEEHSQX

SEQ ID NO: 27682 - protein, 27 aa, Artificial Sequence
  Cyclic GFR-binding peptide
EERPVQMRKIRIKPHQGQHKKATVFLQ

SEQ ID NO: 27683 - protein, 32 aa, Artificial Sequence; identical to SEQ ID NO: 23941
  Cyclic GFR-binding peptide
  MOD_RES (1)..(1): Xaa is C or S

SEQ ID NO: 27684 - protein, 33 aa, Artificial Sequence; identical to SEQ ID NO: 23942
  Cyclic GFR-binding peptide
  MOD_RES (6)..(6): Xaa is C or S

SEQ ID NO: 27685 - protein, 33 aa, Artificial Sequence; identical to SEQ ID NO: 23943
  Cyclic GFR-binding peptide

SEQ ID NO: 27686 - protein, 36 aa, Artificial Sequence; identical to SEQ ID NO: 23944
  Cyclic GFR-binding peptide
  MOD_RES (36)..(36): Xaa is C or S

SEQ ID NO: 27687 - protein, 32 aa, Artificial Sequence; identical to SEQ ID NO: 23945
  Cyclic GFR-binding peptide
  MOD_RES (4)..(4): Xaa is C or S

SEQ ID NO: 27688 - protein, 39 aa, Artificial Sequence; identical to SEQ ID NO: 23946
  Cyclic GFR-binding peptide
  MOD_RES (36)..(38): Xaa is C or S

SEQ ID NO: 27689 - protein, 41 aa, Artificial Sequence; identical to SEQ ID NO: 23947
  Cyclic GFR-binding peptide
  MOD_RES (5)..(5): Xaa is C or S

SEQ ID NO: 27690 - protein, 42 aa, Artificial Sequence; identical to SEQ ID NO: 23948
  Cyclic GFR-binding peptide
  MOD_RES (5)..(39)..(41): Xaa is C or S

SEQ ID NO: 27691 - protein, 39 aa, Artificial Sequence; identical to SEQ ID NO: 23949
  Cyclic GFR-binding peptide
  MOD_RES (2)..(39): Xaa is C or S

SEQ ID NO: 27692 - protein, 32 aa, Artificial Sequence; identical to SEQ ID NO: 23950
  Cyclic GFR-binding peptide

SEQ ID NO: 27693 - protein, 36 aa, Artificial Sequence; identical to SEQ ID NO: 23951
  Cyclic GFR-binding peptide
  MOD_RES (35)..(35): Xaa is C or S

SEQ ID NO: 27694 - protein, 34 aa, Artificial Sequence; identical to SEQ ID NO: 23952
  Cyclic GFR-binding peptide
  MOD_RES (3)..(3): Xaa is C or S

SEQ ID NO: 27695 - protein, 29 aa, Artificial Sequence
  Cyclic GFR-binding peptide
  MOD_RES (1)..(1): Xaa is C or S
XVPTGQRPVQMRKIRIKPHQGQHKKATVL

SEQ ID NO: 27696 - protein, 43 aa, Artificial Sequence; identical to SEQ ID NO: 23954
  Cyclic GFR-binding peptide
  MOD_RES (7)..(41)..(43): Xaa is C or S

SEQ ID NO: 27697 - protein, 38 aa, Artificial Sequence; identical to SEQ ID NO: 23955
  Cyclic GFR-binding peptide
  MOD_RES (4)..(4): Xaa is C or S

SEQ ID NO: 27698 - protein, 32 aa, Artificial Sequence; identical to SEQ ID NO: 23956
  Cyclic GFR-binding peptide
  MOD_RES (30)..(32): Xaa is C or S

SEQ ID NO: 27699 - protein, 25 aa, Artificial Sequence
  Cyclic GFR-binding peptide
SNITVQIMEYVRKKPKLLGEMSRLE

SEQ ID NO: 27700 - protein, 34 aa, Artificial Sequence; identical to SEQ ID NO: 23958
  Cyclic GFR-binding peptide
  MOD_RES (32)..(34): Xaa is C or S

SEQ ID NO: 27701 - protein, 34 aa, Artificial Sequence; identical to SEQ ID NO: 23959
  Cyclic GFR-binding peptide
  MOD_RES (31)..(33): Xaa is C or S

SEQ ID NO: 27702 - protein, 29 aa, Artificial Sequence
  Cyclic GFR-binding peptide
  MOD_RES (29)..(29): Xaa is C or S
RPVQMRKIRIKPHQGQHKKATVFLQHNKX

SEQ ID NO: 27703 - protein, 32 aa, Artificial Sequence; identical to SEQ ID NO: 23961
  Cyclic GFR-binding peptide

SEQ ID NO: 27704 - protein, 34 aa, Artificial Sequence; identical to SEQ ID NO: 23962
  Cyclic GFR-binding peptide
  MOD_RES (6)..(6): Xaa is C or S

SEQ ID NO: 27705 - protein, 29 aa, Artificial Sequence
  Cyclic GFR-binding peptide
GQSNITMQIMRIKPHQGQHIGEMSLEEHS

SEQ ID NO: 27706 - protein, 39 aa, Artificial Sequence; identical to SEQ ID NO: 23964
  Cyclic GFR-binding peptide
  MOD_RES (7)..(7): Xaa is C or S

SEQ ID NO: 27707 - protein, 37 aa, Artificial Sequence; identical to SEQ ID NO: 23965
  Cyclic GFR-binding peptide
  MOD_RES (2)..(36): Xaa is C or S

SEQ ID NO: 27708 - protein, 32 aa, Artificial Sequence; identical to SEQ ID NO: 23966
  Cyclic GFR-binding peptide

SEQ ID NO: 27709 - protein, 31 aa, Artificial Sequence; identical to SEQ ID NO: 23967
  Cyclic GFR-binding peptide

SEQ ID NO: 27710 - protein, 25 aa, Artificial Sequence
  Cyclic GFR-binding peptide
ERPVQMRKIRIKPHQGQHKKATVFL

SEQ ID NO: 27711 - protein, 34 aa, Artificial Sequence; identical to SEQ ID NO: 23969
  Cyclic GFR-binding peptide
  MOD_RES (3)..(3): Xaa is C or S

SEQ ID NO: 27712 - protein, 26 aa, Artificial Sequence
  Cyclic GFR-binding peptide
TEERSVKMAKVRIKPHQGQHKEVQVF

SEQ ID NO: 27713 - protein, 29 aa, Artificial Sequence
  Cyclic GFR-binding peptide
SRVHHSNITVQIMEYVRKKPKLIGEMSRL

SEQ ID NO: 27714 - protein, 26 aa, Artificial Sequence
  Cyclic GFR-binding peptide
GQSNITMQIMRIKPHQGQHIGEMSLE

SEQ ID NO: 27715 - protein, 30 aa, Artificial Sequence; identical to SEQ ID NO: 23973
  Cyclic GFR-binding peptide
  MOD_RES (29)..(29): Xaa is C or S

SEQ ID NO: 27716 - protein, 28 aa, Artificial Sequence
  Cyclic GFR-binding peptide
VQLRSVKVAKVEIVRKKPIFKEVQVTLE

SEQ ID NO: 27717 - protein, 25 aa, Artificial Sequence
  Cyclic GFR-binding peptide
RPVQVRKIEYVRKKPKLKKATVRLE

SEQ ID NO: 27718 - protein, 30 aa, Artificial Sequence; identical to SEQ ID NO: 23976
  Cyclic GFR-binding peptide

SEQ ID NO: 27719 - protein, 28 aa, Artificial Sequence
  Cyclic GFR-binding peptide
RPVQMRKIRIKPHQGQHKKATVLEEHSQ

SEQ ID NO: 27720 - protein, 41 aa, Artificial Sequence; identical to SEQ ID NO: 23978
  Cyclic GFR-binding peptide
  MOD_RES (2)..(39)..(41): Xaa is C or S

SEQ ID NO: 27721 - protein, 31 aa, Artificial Sequence; identical to SEQ ID NO: 23979
  Cyclic GFR-binding peptide
  MOD_RES (30)..(30): Xaa is C or S

SEQ ID NO: 27722 - protein, 32 aa, Artificial Sequence; identical to SEQ ID NO: 23980
  Cyclic GFR-binding peptide
  MOD_RES (5)..(5): Xaa is C or S

SEQ ID NO: 27723 - protein, 41 aa, Artificial Sequence; identical to SEQ ID NO: 23981
  Cyclic GFR-binding peptide
  MOD_RES (7)..(41): Xaa is C or S

SEQ ID NO: 27724 - protein, 38 aa, Artificial Sequence; identical to SEQ ID NO: 23982
  Cyclic GFR-binding peptide
  MOD_RES (35)..(37): Xaa is C or S

SEQ ID NO: 27725 - protein, 32 aa, Artificial Sequence; identical to SEQ ID NO: 23983
  Cyclic GFR-binding peptide
  MOD_RES (1)..(1): Xaa is C or S

SEQ ID NO: 27726 - protein, 37 aa, Artificial Sequence; identical to SEQ ID NO: 23984
  Cyclic GFR-binding peptide
  MOD_RES (35)..(37): Xaa is C or S

SEQ ID NO: 27727 - protein, 37 aa, Artificial Sequence; identical to SEQ ID NO: 23985
  Cyclic GFR-binding peptide
  MOD_RES (5)..(5): Xaa is C or S

SEQ ID NO: 27728 - protein, 28 aa, Artificial Sequence
  Cyclic GFR-binding peptide
QRSVKMAKVRIKPHQGQHKEVQVLEEHS

SEQ ID NO: 27729 - protein, 30 aa, Artificial Sequence; identical to SEQ ID NO: 23987
  Cyclic GFR-binding peptide

SEQ ID NO: 27730 - protein, 23 aa, Artificial Sequence
  Cyclic GFR-binding peptide
HRPVQVRKIEYVRKKPKLKKATV

SEQ ID NO: 27731 - protein, 41 aa, Artificial Sequence; identical to SEQ ID NO: 23989
  Cyclic GFR-binding peptide
  MOD_RES (7)..(41): Xaa is C or S

SEQ ID NO: 27732 - protein, 43 aa, Artificial Sequence; identical to SEQ ID NO: 23990
  Cyclic GFR-binding peptide
  MOD_RES (6)..(40)..(42): Xaa is C or S

SEQ ID NO: 27733 - protein, 36 aa, Artificial Sequence; identical to SEQ ID NO: 23991
  Cyclic GFR-binding peptide
  MOD_RES (35)..(35): Xaa is C or S

SEQ ID NO: 27734 - protein, 36 aa, Artificial Sequence; identical to SEQ ID NO: 23992
  Cyclic GFR-binding peptide
  MOD_RES (3)..(3): Xaa is C or S

SEQ ID NO: 27735 - protein, 33 aa, Artificial Sequence; identical to SEQ ID NO: 23993
  Cyclic GFR-binding peptide
  MOD_RES (1)..(1): Xaa is C or S

SEQ ID NO: 27736 - protein, 30 aa, Artificial Sequence; identical to SEQ ID NO: 23994
  Cyclic GFR-binding peptide

SEQ ID NO: 27737 - protein, 35 aa, Artificial Sequence; identical to SEQ ID NO: 23995
  Cyclic GFR-binding peptide
  MOD_RES (6)..(6): Xaa is C or S

SEQ ID NO: 27738 - protein, 32 aa, Artificial Sequence; identical to SEQ ID NO: 23996
  Cyclic GFR-binding peptide

SEQ ID NO: 27739 - protein, 28 aa, Artificial Sequence
  Cyclic GFR-binding peptide
QVQLRSVKVAKVEIVRKKPIFKEVQVTL

SEQ ID NO: 27740 - protein, 38 aa, Artificial Sequence; identical to SEQ ID NO: 23998
  Cyclic GFR-binding peptide
  MOD_RES (2)..(2): Xaa is C or S

SEQ ID NO: 27741 - protein, 36 aa, Artificial Sequence; identical to SEQ ID NO: 23999
  Cyclic GFR-binding peptide
  MOD_RES (34)..(36): Xaa is C or S

SEQ ID NO: 27742 - protein, 39 aa, Artificial Sequence; identical to SEQ ID NO: 24000
  Cyclic GFR-binding peptide
  MOD_RES (5)..(39): Xaa is C or S

SEQ ID NO: 27743 - protein, 33 aa, Artificial Sequence; identical to SEQ ID NO: 24001
  Cyclic GFR-binding peptide
  MOD_RES (1)..(1): Xaa is C or S

SEQ ID NO: 27744 - protein, 38 aa, Artificial Sequence; identical to SEQ ID NO: 24002
  Cyclic GFR-binding peptide
  MOD_RES (5)..(5): Xaa is C or S

SEQ ID NO: 27745 - protein, 34 aa, Artificial Sequence; identical to SEQ ID NO: 24003
  Cyclic GFR-binding peptide
  MOD_RES (5)..(5): Xaa is C or S

SEQ ID NO: 27746 - protein, 33 aa, Artificial Sequence; identical to SEQ ID NO: 24004
  Cyclic GFR-binding peptide
  MOD_RES (4)..(4): Xaa is C or S

SEQ ID NO: 27747 - protein, 28 aa, Artificial Sequence
  Cyclic GFR-binding peptide
QRPVQMRKIRIKPHQGQHKKATVLEEHS

SEQ ID NO: 27748 - protein, 37 aa, Artificial Sequence; identical to SEQ ID NO: 24006
  Cyclic GFR-binding peptide
  MOD_RES (35)..(37): Xaa is C or S

SEQ ID NO: 27749 - protein, 35 aa, Artificial Sequence; identical to SEQ ID NO: 24007
  Cyclic GFR-binding peptide
  MOD_RES (34)..(34): Xaa is C or S

SEQ ID NO: 27750 - protein, 44 aa, Artificial Sequence; identical to SEQ ID NO: 24008
  Cyclic GFR-binding peptide
  MOD_RES (7)..(41)..(43): Xaa is C or S

SEQ ID NO: 27751 - protein, 29 aa, Artificial Sequence
  Cyclic GFR-binding peptide
  MOD_RES (2)..(2): Xaa is C or S
EXVPTEESNITMQIMRIKPHQGQHLGEMS

SEQ ID NO: 27752 - protein, 35 aa, Artificial Sequence; identical to SEQ ID NO: 24010
  Cyclic GFR-binding peptide
  MOD_RES (5)..(5): Xaa is C or S

SEQ ID NO: 27753 - protein, 34 aa, Artificial Sequence; identical to SEQ ID NO: 24011
  Cyclic GFR-binding peptide
  MOD_RES (4)..(4): Xaa is C or S

SEQ ID NO: 27754 - protein, 35 aa, Artificial Sequence; identical to SEQ ID NO: 24012
  Cyclic GFR-binding peptide
  MOD_RES (7)..(7): Xaa is C or S

SEQ ID NO: 27755 - protein, 24 aa, Artificial Sequence
  Cyclic GFR-binding peptide
ERPVQMRKIRIKPHQGQHKKATVF

SEQ ID NO: 27756 - protein, 34 aa, Artificial Sequence; identical to SEQ ID NO: 24014
  Cyclic GFR-binding peptide
  MOD_RES (1)..(1): Xaa is C or S

SEQ ID NO: 27757 - protein, 31 aa, Artificial Sequence; identical to SEQ ID NO: 24015
  Cyclic GFR-binding peptide

SEQ ID NO: 27758 - protein, 32 aa, Artificial Sequence; identical to SEQ ID NO: 24016
  Cyclic GFR-binding peptide

SEQ ID NO: 27759 - protein, 38 aa, Artificial Sequence; identical to SEQ ID NO: 24017
  Cyclic GFR-binding peptide
  MOD_RES (2)..(36)..(38): Xaa is C or S

SEQ ID NO: 27760 - protein, 41 aa, Artificial Sequence; identical to SEQ ID NO: 24018
  Cyclic GFR-binding peptide
  MOD_RES (1)..(38)..(40): Xaa is C or S

SEQ ID NO: 27761 - protein, 42 aa, Artificial Sequence; identical to SEQ ID NO: 24019
  Cyclic GFR-binding peptide
  MOD_RES (6)..(40)..(42): Xaa is C or S

SEQ ID NO: 27762 - protein, 33 aa, Artificial Sequence; identical to SEQ ID NO: 24020
  Cyclic GFR-binding peptide

SEQ ID NO: 27763 - protein, 42 aa, Artificial Sequence; identical to SEQ ID NO: 24021
  Cyclic GFR-binding peptide
  MOD_RES (2)..(39)..(41): Xaa is C or S

SEQ ID NO: 27764 - protein, 32 aa, Artificial Sequence; identical to SEQ ID NO: 24022
  Cyclic GFR-binding peptide

SEQ ID NO: 27765 - protein, 39 aa, Artificial Sequence; identical to SEQ ID NO: 24023
  Cyclic GFR-binding peptide
  MOD_RES (6)..(6): Xaa is C or S

SEQ ID NO: 27766 - protein, 32 aa, Artificial Sequence; identical to SEQ ID NO: 24024
  Cyclic GFR-binding peptide

SEQ ID NO: 27767 - protein, 29 aa, Artificial Sequence
  Cyclic GFR-binding peptide
TEERSVKMAKVRIKPHQGQHKEVQVFLQH

SEQ ID NO: 27768 - protein, 31 aa, Artificial Sequence; identical to SEQ ID NO: 24026
  Cyclic GFR-binding peptide
  MOD_RES (1)..(1): Xaa is C or S

SEQ ID NO: 27769 - protein, 32 aa, Artificial Sequence; identical to SEQ ID NO: 24027
  Cyclic GFR-binding peptide

SEQ ID NO: 27770 - protein, 35 aa, Artificial Sequence; identical to SEQ ID NO: 24028
  Cyclic GFR-binding peptide

SEQ ID NO: 27771 - protein, 32 aa, Artificial Sequence; identical to SEQ ID NO: 24029
  Cyclic GFR-binding peptide
  MOD_RES (30)..(32): Xaa is C or S

SEQ ID NO: 27772 - protein, 28 aa, Artificial Sequence
  Cyclic GFR-binding peptide
HHSNITVQIMEYVRKKPKLIGEMSRLEE

SEQ ID NO: 27773 - protein, 33 aa, Artificial Sequence; identical to SEQ ID NO: 24031
  Cyclic GFR-binding peptide
  MOD_RES (32)..(32): Xaa is C or S

SEQ ID NO: 27774 - protein, 28 aa, Artificial Sequence
  Cyclic GFR-binding peptide
PSRVHHRPVQVRKIEYVRKKPKLKKATV

SEQ ID NO: 27775 - protein, 40 aa, Artificial Sequence; identical to SEQ ID NO: 24033
  Cyclic GFR-binding peptide
  MOD_RES (2)..(39): Xaa is C or S

SEQ ID NO: 27776 - protein, 29 aa, Artificial Sequence
  Cyclic GFR-binding peptide
QRPVQMRKIRIKPHQGQHKKATVLEEHSQ

SEQ ID NO: 27777 - protein, 33 aa, Artificial Sequence; identical to SEQ ID NO: 24035
  Cyclic GFR-binding peptide
  MOD_RES (33)..(33): Xaa is C or S

SEQ ID NO: 27778 - protein, 31 aa, Artificial Sequence; identical to SEQ ID NO: 24036
  Cyclic GFR-binding peptide
  MOD_RES (3)..(3): Xaa is C or S

SEQ ID NO: 27779 - protein, 27 aa, Artificial Sequence
  Cyclic GFR-binding peptide
HSNITVQIMEYVRKKPKLIGEMSRLEE

SEQ ID NO: 27780 - protein, 37 aa, Artificial Sequence; identical to SEQ ID NO: 24038
  Cyclic GFR-binding peptide
  MOD_RES (34)..(36): Xaa is C or S

SEQ ID NO: 27781 - protein, 27 aa, Artificial Sequence
  Cyclic GFR-binding peptide
SRVHHRPVQVRKIEYVRKKPKLKKATV

SEQ ID NO: 27782 - protein, 34 aa, Artificial Sequence; identical to SEQ ID NO: 24040
  Cyclic GFR-binding peptide
  MOD_RES (1)..(1): Xaa is C or S

SEQ ID NO: 27783 - protein, 37 aa, Artificial Sequence; identical to SEQ ID NO: 24041
  Cyclic GFR-binding peptide
  MOD_RES (34)..(36): Xaa is C or S

SEQ ID NO: 27784 - protein, 33 aa, Artificial Sequence; identical to SEQ ID NO: 24042
  Cyclic GFR-binding peptide
  MOD_RES (33)..(33): Xaa is C or S

SEQ ID NO: 27785 - protein, 22 aa, Artificial Sequence
  Cyclic GFR-binding peptide
RSVKVAKVEIVRKKPIFKEVQV

SEQ ID NO: 27786 - protein, 30 aa, Artificial Sequence; identical to SEQ ID NO: 24044
  Cyclic GFR-binding peptide
  MOD_RES (30)..(30): Xaa is C or S

SEQ ID NO: 27787 - protein, 31 aa, Artificial Sequence; identical to SEQ ID NO: 24045
  Cyclic GFR-binding peptide

SEQ ID NO: 27788 - protein, 34 aa, Artificial Sequence; identical to SEQ ID NO: 24046
  Cyclic GFR-binding peptide
  MOD_RES (31)..(33): Xaa is C or S

SEQ ID NO: 27789 - protein, 33 aa, Artificial Sequence; identical to SEQ ID NO: 24047
  Cyclic GFR-binding peptide
  MOD_RES (1)..(1): Xaa is C or S

SEQ ID NO: 27790 - protein, 32 aa, Artificial Sequence; identical to SEQ ID NO: 24048
  Cyclic GFR-binding peptide

SEQ ID NO: 27791 - protein, 38 aa, Artificial Sequence; identical to SEQ ID NO: 24049
  Cyclic GFR-binding peptide
  MOD_RES (7)..(7): Xaa is C or S

SEQ ID NO: 27792 - protein, 41 aa, Artificial Sequence; identical to SEQ ID NO: 24050
  Cyclic GFR-binding peptide
  MOD_RES (4)..(38)..(40): Xaa is C or S

SEQ ID NO: 27793 - protein, 31 aa, Artificial Sequence; identical to SEQ ID NO: 24051
  Cyclic GFR-binding peptide

SEQ ID NO: 27794 - protein, 34 aa, Artificial Sequence; identical to SEQ ID NO: 24052
  Cyclic GFR-binding peptide
  MOD_RES (7)..(7): Xaa is C or S

SEQ ID NO: 27795 - protein, 41 aa, Artificial Sequence; identical to SEQ ID NO: 24053
  Cyclic GFR-binding peptide
  MOD_RES (7)..(41): Xaa is C or S

SEQ ID NO: 27796 - protein, 36 aa, Artificial Sequence; identical to SEQ ID NO: 24054
  Cyclic GFR-binding peptide
  MOD_RES (5)..(5): Xaa is C or S

SEQ ID NO: 27797 - protein, 34 aa, Artificial Sequence; identical to SEQ ID NO: 24055
  Cyclic GFR-binding peptide
  MOD_RES (5)..(5): Xaa is C or S

SEQ ID NO: 27798 - protein, 30 aa, Artificial Sequence; identical to SEQ ID NO: 24056
  Cyclic GFR-binding peptide

SEQ ID NO: 27799 - protein, 35 aa, Artificial Sequence; identical to SEQ ID NO: 24057
  Cyclic GFR-binding peptide
  MOD_RES (3)..(3): Xaa is C or S

SEQ ID NO: 27800 - protein, 29 aa, Artificial Sequence
  Cyclic GFR-binding peptide
HSNITVQIMEYVRKKPKLLGEMSRLEEHL

SEQ ID NO: 27801 - protein, 28 aa, Artificial Sequence
  Cyclic GFR-binding peptide
RSVKMAKVRIKPHQGQHKEVQVLEEHSQ

SEQ ID NO: 27802 - protein, 39 aa, Artificial Sequence; identical to SEQ ID NO: 24060
  Cyclic GFR-binding peptide
  MOD_RES (36)..(38): Xaa is C or S

SEQ ID NO: 27803 - protein, 33 aa, Artificial Sequence; identical to SEQ ID NO: 24061
  Cyclic GFR-binding peptide
  MOD_RES (30)..(32): Xaa is C or S

SEQ ID NO: 27804 - protein, 34 aa, Artificial Sequence; identical to SEQ ID NO: 24062
  Cyclic GFR-binding peptide
  MOD_RES (7)..(7): Xaa is C or S

SEQ ID NO: 27805 - protein, 32 aa, Artificial Sequence; identical to SEQ ID NO: 24063
  Cyclic GFR-binding peptide
  MOD_RES (29)..(31): Xaa is C or S

SEQ ID NO: 27806 - protein, 40 aa, Artificial Sequence; identical to SEQ ID NO: 24064
  Cyclic GFR-binding peptide
  MOD_RES (4)..(38)..(40): Xaa is C or S

SEQ ID NO: 27807 - protein, 25 aa, Artificial Sequence
  Cyclic GFR-binding peptide
EESNITMQIMRIKPHQGQHLGEMSF

SEQ ID NO: 27808 - protein, 30 aa, Artificial Sequence; identical to SEQ ID NO: 24066
  Cyclic GFR-binding peptide

SEQ ID NO: 27809 - protein, 33 aa, Artificial Sequence; identical to SEQ ID NO: 24067
  Cyclic GFR-binding peptide
  MOD_RES (31)..(33): Xaa is C or S

SEQ ID NO: 27810 - protein, 33 aa, Artificial Sequence; identical to SEQ ID NO: 24068
  Cyclic GFR-binding peptide
  MOD_RES (2)..(2): Xaa is C or S

SEQ ID NO: 27811 - protein, 32 aa, Artificial Sequence; identical to SEQ ID NO: 24069
  Cyclic GFR-binding peptide
  MOD_RES (30)..(32): Xaa is C or S

SEQ ID NO: 27812 - protein, 34 aa, Artificial Sequence; identical to SEQ ID NO: 24070
  Cyclic GFR-binding peptide
  MOD_RES (33)..(33): Xaa is C or S

SEQ ID NO: 27813 - protein, 41 aa, Artificial Sequence; identical to SEQ ID NO: 24071
  Cyclic GFR-binding peptide
  MOD_RES (5)..(39)..(41): Xaa is C or S

SEQ ID NO: 27814 - protein, 36 aa, Artificial Sequence; identical to SEQ ID NO: 24072
  Cyclic GFR-binding peptide
  MOD_RES (1)..(1): Xaa is C or S

SEQ ID NO: 27815 - protein, 34 aa, Artificial Sequence; identical to SEQ ID NO: 24073
  Cyclic GFR-binding peptide
  MOD_RES (34)..(34): Xaa is C or S

SEQ ID NO: 27816 - protein, 26 aa, Artificial Sequence
  Cyclic GFR-binding peptide
RPVQMRKIRIKPHQGQHKKATVLEEH

SEQ ID NO: 27817 - protein, 38 aa, Artificial Sequence; identical to SEQ ID NO: 24075
  Cyclic GFR-binding peptide
  MOD_RES (35)..(37): Xaa is C or S

SEQ ID NO: 27818 - protein, 30 aa, Artificial Sequence; identical to SEQ ID NO: 24076
  Cyclic GFR-binding peptide
  MOD_RES (30)..(30): Xaa is C or S

SEQ ID NO: 27819 - protein, 36 aa, Artificial Sequence; identical to SEQ ID NO: 24077
  Cyclic GFR-binding peptide
  MOD_RES (3)..(3): Xaa is C or S

SEQ ID NO: 27820 - protein, 26 aa, Artificial Sequence
  Cyclic GFR-binding peptide
TEESNITMQIMRIKPHQGQHLGEMSF

SEQ ID NO: 27821 - protein, 33 aa, Artificial Sequence; identical to SEQ ID NO: 24079
  Cyclic GFR-binding peptide

SEQ ID NO: 27822 - protein, 31 aa, Artificial Sequence; identical to SEQ ID NO: 24080
  Cyclic GFR-binding peptide

SEQ ID NO: 27823 - protein, 29 aa, Artificial Sequence
  Cyclic GFR-binding peptide
  MOD_RES (2)..(2): Xaa is C or S
EXVPTGQRPVQMRKIRIKPHQGQHKKATV

SEQ ID NO: 27824 - protein, 31 aa, Artificial Sequence; identical to SEQ ID NO: 24082
  Cyclic GFR-binding peptide

SEQ ID NO: 27825 - protein, 36 aa, Artificial Sequence; identical to SEQ ID NO: 24083
  Cyclic GFR-binding peptide
  MOD_RES (1)..(35): Xaa is C or S

SEQ ID NO: 27826 - protein, 35 aa, Artificial Sequence; identical to SEQ ID NO: 24084
  Cyclic GFR-binding peptide

SEQ ID NO: 27827 - protein, 28 aa, Artificial Sequence
  Cyclic GFR-binding peptide
TEERPVQMRKIRIKPHQGQHKKATVFLQ

SEQ ID NO: 27828 - protein, 44 aa, Artificial Sequence; identical to SEQ ID NO: 24086
  Cyclic GFR-binding peptide
  MOD_RES (7)..(41)..(43): Xaa is C or S

SEQ ID NO: 27829 - protein, 36 aa, Artificial Sequence; identical to SEQ ID NO: 24087
  Cyclic GFR-binding peptide
  MOD_RES (33)..(35): Xaa is C or S

SEQ ID NO: 27830 - protein, 26 aa, Artificial Sequence
  Cyclic GFR-binding peptide
RSVKVAKVEIVRKKPIFKEVQVTLED

SEQ ID NO: 27831 - protein, 30 aa, Artificial Sequence; identical to SEQ ID NO: 24089
  Cyclic GFR-binding peptide
  MOD_RES (1)..(1): Xaa is C or S

SEQ ID NO: 27832 - protein, 32 aa, Artificial Sequence; identical to SEQ ID NO: 24090
  Cyclic GFR-binding peptide
  MOD_RES (3)..(3): Xaa is C or S

SEQ ID NO: 27833 - protein, 33 aa, Artificial Sequence; identical to SEQ ID NO: 24091
  Cyclic GFR-binding peptide
  MOD_RES (4)..(4): Xaa is C or S

SEQ ID NO: 27834 - protein, 31 aa, Artificial Sequence; identical to SEQ ID NO: 24092
  Cyclic GFR-binding peptide
  MOD_RES (30)..(30): Xaa is C or S

SEQ ID NO: 27835 - protein, 34 aa, Artificial Sequence; identical to SEQ ID NO: 24093
  Cyclic GFR-binding peptide

SEQ ID NO: 27836 - protein, 37 aa, Artificial Sequence; identical to SEQ ID NO: 24094
  Cyclic GFR-binding peptide
  MOD_RES (6)..(6): Xaa is C or S

SEQ ID NO: 27837 - protein, 36 aa, Artificial Sequence; identical to SEQ ID NO: 24095
  Cyclic GFR-binding peptide
  MOD_RES (4)..(4): Xaa is C or S

SEQ ID NO: 27838 - protein, 38 aa, Artificial Sequence; identical to SEQ ID NO: 24096
  Cyclic GFR-binding peptide
  MOD_RES (4)..(38): Xaa is C or S

SEQ ID NO: 27839 - protein, 32 aa, Artificial Sequence; identical to SEQ ID NO: 24097
  Cyclic GFR-binding peptide

SEQ ID NO: 27840 - protein, 29 aa, Artificial Sequence
  Cyclic GFR-binding peptide
QSNITMQIMRIKPHQGQHIGEMSLEEHSQ

SEQ ID NO: 27841 - protein, 32 aa, Artificial Sequence; identical to SEQ ID NO: 24099
  Cyclic GFR-binding peptide
  MOD_RES (29)..(31): Xaa is C or S

SEQ ID NO: 27842 - protein, 32 aa, Artificial Sequence; identical to SEQ ID NO: 24100
  Cyclic GFR-binding peptide
  MOD_RES (2)..(2): Xaa is C or S

SEQ ID NO: 27843 - protein, 37 aa, Artificial Sequence; identical to SEQ ID NO: 24101
  Cyclic GFR-binding peptide
  MOD_RES (4)..(4): Xaa is C or S

SEQ ID NO: 27844 - protein, 36 aa, Artificial Sequence; identical to SEQ ID NO: 24102
  Cyclic GFR-binding peptide
  MOD_RES (5)..(5): Xaa is C or S

SEQ ID NO: 27845 - protein, 42 aa, Artificial Sequence; identical to SEQ ID NO: 24103
  Cyclic GFR-binding peptide
  MOD_RES (3)..(40)..(42): Xaa is C or S

SEQ ID NO: 27846 - protein, 42 aa, Artificial Sequence; identical to SEQ ID NO: 24104
  Cyclic GFR-binding peptide
  MOD_RES (6)..(40)..(42): Xaa is C or S

SEQ ID NO: 27847 - protein, 25 aa, Artificial Sequence
  Cyclic GFR-binding peptide
SNITMQIMRIKPHQGQHLGEMSFLQ

SEQ ID NO: 27848 - protein, 41 aa, Artificial Sequence; identical to SEQ ID NO: 24106
  Cyclic GFR-binding peptide
  MOD_RES (5)..(5): Xaa is C or S

SEQ ID NO: 27849 - protein, 38 aa, Artificial Sequence; identical to SEQ ID NO: 24107
  Cyclic GFR-binding peptide
  MOD_RES (36)..(38): Xaa is C or S

SEQ ID NO: 27850 - protein, 24 aa, Artificial Sequence
  Cyclic GFR-binding peptide
SNITMQIMRIKPHQGQHIGEMSLE

SEQ ID NO: 27851 - protein, 36 aa, Artificial Sequence; identical to SEQ ID NO: 24109
  Cyclic GFR-binding peptide
  MOD_RES (4)..(4): Xaa is C or S

SEQ ID NO: 27852 - protein, 32 aa, Artificial Sequence; identical to SEQ ID NO: 24110
  Cyclic GFR-binding peptide
  MOD_RES (32)..(32): Xaa is C or S

SEQ ID NO: 27853 - protein, 28 aa, Artificial Sequence
  Cyclic GFR-binding peptide
PTQVQLSNITVQIMEIVRKKPIFLGEMS

SEQ ID NO: 27854 - protein, 37 aa, Artificial Sequence; identical to SEQ ID NO: 24112
  Cyclic GFR-binding peptide
  MOD_RES (2)..(2): Xaa is C or S

SEQ ID NO: 27855 - protein, 25 aa, Artificial Sequence
  Cyclic GFR-binding peptide
VQLRSVKVAKVEIVRKKPIFKEVQV

SEQ ID NO: 27856 - protein, 43 aa, Artificial Sequence; identical to SEQ ID NO: 24114
  Cyclic GFR-binding peptide
  MOD_RES (4)..(41)..(43): Xaa is C or S

SEQ ID NO: 27857 - protein, 28 aa, Artificial Sequence
  Cyclic GFR-binding peptide
  MOD_RES (1)..(1): Xaa is C or S
XVPTGQRPVQMRKIRIKPHQGQHKKATV

SEQ ID NO: 27858 - protein, 25 aa, Artificial Sequence
  Cyclic GFR-binding peptide
TEERPVQMRKIRIKPHQGQHKKATV

SEQ ID NO: 27859 - protein, 23 aa, Artificial Sequence
  Cyclic GFR-binding peptide
RSVKVAKVEIVRKKPIFKEVQVT

SEQ ID NO: 27860 - protein, 32 aa, Artificial Sequence; identical to SEQ ID NO: 24118
  Cyclic GFR-binding peptide
  MOD_RES (3)..(3): Xaa is C or S

SEQ ID NO: 27861 - protein, 31 aa, Artificial Sequence; identical to SEQ ID NO: 24119
  Cyclic GFR-binding peptide
  MOD_RES (30)..(30): Xaa is C or S

SEQ ID NO: 27862 - protein, 29 aa, Artificial Sequence
  Cyclic GFR-binding peptide
QVQLRSVKVAKVEIVRKKPIFKEVQVTLE

SEQ ID NO: 27863 - protein, 39 aa, Artificial Sequence; identical to SEQ ID NO: 24121
  Cyclic GFR-binding peptide
  MOD_RES (3)..(3): Xaa is C or S

SEQ ID NO: 27864 - protein, 35 aa, Artificial Sequence; identical to SEQ ID NO: 24122
  Cyclic GFR-binding peptide
  MOD_RES (32)..(34): Xaa is C or S

SEQ ID NO: 27865 - protein, 41 aa, Artificial Sequence; identical to SEQ ID NO: 24123
  Cyclic GFR-binding peptide
  MOD_RES (6)..(40): Xaa is C or S

SEQ ID NO: 27866 - protein, 25 aa, Artificial Sequence
  Cyclic GFR-binding peptide
VHHSNITVQIMEYVRKKPKLLGEMS

SEQ ID NO: 27867 - protein, 32 aa, Artificial Sequence; identical to SEQ ID NO: 24125
  Cyclic GFR-binding peptide
  MOD_RES (30)..(32): Xaa is C or S

SEQ ID NO: 27868 - protein, 36 aa, Artificial Sequence; identical to SEQ ID NO: 24126
  Cyclic GFR-binding peptide
  MOD_RES (4)..(4): Xaa is C or S

SEQ ID NO: 27869 - protein, 37 aa, Artificial Sequence; identical to SEQ ID NO: 24127
  Cyclic GFR-binding peptide
  MOD_RES (7)..(7): Xaa is C or S

SEQ ID NO: 27870 - protein, 30 aa, Artificial Sequence; identical to SEQ ID NO: 24128
  Cyclic GFR-binding peptide

SEQ ID NO: 27871 - protein, 32 aa, Artificial Sequence; identical to SEQ ID NO: 24129
  Cyclic GFR-binding peptide

SEQ ID NO: 27872 - protein, 38 aa, Artificial Sequence; identical to SEQ ID NO: 24130
  Cyclic GFR-binding peptide
  MOD_RES (2)..(36)..(38): Xaa is C or S

SEQ ID NO: 27873 - protein, 29 aa, Artificial Sequence
  Cyclic GFR-binding peptide
VPTGQRPVQMRKIRIKPHQGQHKKATVLE

SEQ ID NO: 27874 - protein, 32 aa, Artificial Sequence; identical to SEQ ID NO: 24132
  Cyclic GFR-binding peptide
  MOD_RES (30)..(32): Xaa is C or S

SEQ ID NO: 27875 - protein, 33 aa, Artificial Sequence; identical to SEQ ID NO: 24133
  Cyclic GFR-binding peptide
  MOD_RES (1)..(1): Xaa is C or S

SEQ ID NO: 27876 - protein, 27 aa, Artificial Sequence
  Cyclic GFR-binding peptide
TQVQLRSVKVAKVEIVRKKPIFKEVQV

SEQ ID NO: 27877 - protein, 34 aa, Artificial Sequence; identical to SEQ ID NO: 24135
  Cyclic GFR-binding peptide
  MOD_RES (34)..(34): Xaa is C or S

SEQ ID NO: 27878 - protein, 31 aa, Artificial Sequence; identical to SEQ ID NO: 24136
  Cyclic GFR-binding peptide
  MOD_RES (4)..(4): Xaa is C or S

SEQ ID NO: 27879 - protein, 32 aa, Artificial Sequence; identical to SEQ ID NO: 24137
  Cyclic GFR-binding peptide
  MOD_RES (2)..(2): Xaa is C or S

SEQ ID NO: 27880 - protein, 37 aa, Artificial Sequence; identical to SEQ ID NO: 24138
  Cyclic GFR-binding peptide
  MOD_RES (2)..(2): Xaa is C or S

SEQ ID NO: 27881 - protein, 36 aa, Artificial Sequence; identical to SEQ ID NO: 24139
  Cyclic GFR-binding peptide

SEQ ID NO: 27882 - protein, 44 aa, Artificial Sequence; identical to SEQ ID NO: 24140
  Cyclic GFR-binding peptide
  MOD_RES (4)..(41)..(43): Xaa is C or S

SEQ ID NO: 27883 - protein, 32 aa, Artificial Sequence; identical to SEQ ID NO: 24141
  Cyclic GFR-binding peptide
  MOD_RES (29)..(31): Xaa is C or S

SEQ ID NO: 27884 - protein, 28 aa, Artificial Sequence
  Cyclic GFR-binding peptide
GQRSVKMAKVRIKPHQGQHKEVQVLEEH

SEQ ID NO: 27885 - protein, 36 aa, Artificial Sequence; identical to SEQ ID NO: 24143
  Cyclic GFR-binding peptide
  MOD_RES (4)..(4): Xaa is C or S

SEQ ID NO: 27886 - protein, 33 aa, Artificial Sequence; identical to SEQ ID NO: 24144
  Cyclic GFR-binding peptide

SEQ ID NO: 27887 - protein, 32 aa, Artificial Sequence; identical to SEQ ID NO: 24145
  Cyclic GFR-binding peptide

SEQ ID NO: 27888 - protein, 30 aa, Artificial Sequence; identical to SEQ ID NO: 24146
  Cyclic GFR-binding peptide
  MOD_RES (30)..(30): Xaa is C or S

SEQ ID NO: 27889 - protein, 34 aa, Artificial Sequence; identical to SEQ ID NO: 24147
  Cyclic GFR-binding peptide
  MOD_RES (33)..(33): Xaa is C or S

SEQ ID NO: 27890 - protein, 40 aa, Artificial Sequence; identical to SEQ ID NO: 24148
  Cyclic GFR-binding peptide
  MOD_RES (3)..(37)..(39): Xaa is C or S

SEQ ID NO: 27891 - protein, 34 aa, Artificial Sequence; identical to SEQ ID NO: 24149
  Cyclic GFR-binding peptide
  MOD_RES (3)..(3): Xaa is C or S

SEQ ID NO: 27892 - protein, 25 aa, Artificial Sequence
  Cyclic GFR-binding peptide
HSNITVQIMEYVRKKPKLLGEMSRL

SEQ ID NO: 27893 - protein, 24 aa, Artificial Sequence
  Cyclic GFR-binding peptide
SNITMQIMRIKPHQGQHLGEMSFL

SEQ ID NO: 27894 - protein, 37 aa, Artificial Sequence; identical to SEQ ID NO: 24152
  Cyclic GFR-binding peptide
  MOD_RES (2)..(2): Xaa is C or S

SEQ ID NO: 27895 - protein, 37 aa, Artificial Sequence; identical to SEQ ID NO: 24153
  Cyclic GFR-binding peptide
  MOD_RES (36)..(36): Xaa is C or S

SEQ ID NO: 27896 - protein, 27 aa, Artificial Sequence
  Cyclic GFR-binding peptide
VPTGQRPVQMRKIRIKPHQGQHKKATV

SEQ ID NO: 27897 - protein, 44 aa, Artificial Sequence; identical to SEQ ID NO: 24155
  Cyclic GFR-binding peptide
  MOD_RES (7)..(41)..(43): Xaa is C or S

SEQ ID NO: 27898 - protein, 36 aa, Artificial Sequence; identical to SEQ ID NO: 24156
  Cyclic GFR-binding peptide
  MOD_RES (1)..(1): Xaa is C or S

SEQ ID NO: 27899 - protein, 35 aa, Artificial Sequence; identical to SEQ ID NO: 24157
  Cyclic GFR-binding peptide
  MOD_RES (1)..(1): Xaa is C or S

SEQ ID NO: 27900 - protein, 28 aa, Artificial Sequence
  Cyclic GFR-binding peptide
QLSNITVQIMEIVRKKPIFIGEMSTLED

SEQ ID NO: 27901 - protein, 36 aa, Artificial Sequence; identical to SEQ ID NO: 24159
  Cyclic GFR-binding peptide
  MOD_RES (5)..(5): Xaa is C or S

SEQ ID NO: 27902 - protein, 25 aa, Artificial Sequence
  Cyclic GFR-binding peptide
TGQRPVQMRKIRIKPHQGQHKKATV

SEQ ID NO: 27903 - protein, 35 aa, Artificial Sequence; identical to SEQ ID NO: 24161
  Cyclic GFR-binding peptide
  MOD_RES (32)..(34): Xaa is C or S

SEQ ID NO: 27904 - protein, 37 aa, Artificial Sequence; identical to SEQ ID NO: 24162
  Cyclic GFR-binding peptide
  MOD_RES (37)..(37): Xaa is C or S

SEQ ID NO: 27905 - protein, 27 aa, Artificial Sequence
  Cyclic GFR-binding peptide
VPTEERPVQMRKIRIKPHQGQHKKATV

SEQ ID NO: 27906 - protein, 43 aa, Artificial Sequence; identical to SEQ ID NO: 24164
  Cyclic GFR-binding peptide
  MOD_RES (3)..(40)..(42): Xaa is C or S

SEQ ID NO: 27907 - protein, 34 aa, Artificial Sequence; identical to SEQ ID NO: 24165
  Cyclic GFR-binding peptide

SEQ ID NO: 27908 - protein, 37 aa, Artificial Sequence; identical to SEQ ID NO: 24166
  Cyclic GFR-binding peptide
  MOD_RES (4)..(4): Xaa is C or S

SEQ ID NO: 27909 - protein, 34 aa, Artificial Sequence; identical to SEQ ID NO: 24167
  Cyclic GFR-binding peptide
  MOD_RES (33)..(33): Xaa is C or S

SEQ ID NO: 27910 - protein, 37 aa, Artificial Sequence; identical to SEQ ID NO: 24168
  Cyclic GFR-binding peptide
  MOD_RES (3)..(37): Xaa is C or S

SEQ ID NO: 27911 - protein, 25 aa, Artificial Sequence
  Cyclic GFR-binding peptide
LSNITVQIMEIVRKKPIFIGEMSTL

SEQ ID NO: 27912 - protein, 37 aa, Artificial Sequence; identical to SEQ ID NO: 24170
  Cyclic GFR-binding peptide
  MOD_RES (34)..(36): Xaa is C or S

SEQ ID NO: 27913 - protein, 42 aa, Artificial Sequence; identical to SEQ ID NO: 24171
  Cyclic GFR-binding peptide
  MOD_RES (6)..(40)..(42): Xaa is C or S

SEQ ID NO: 27914 - protein, 39 aa, Artificial Sequence; identical to SEQ ID NO: 24172
  Cyclic GFR-binding peptide
  MOD_RES (37)..(39): Xaa is C or S

SEQ ID NO: 27915 - protein, 32 aa, Artificial Sequence; identical to SEQ ID NO: 24173
  Cyclic GFR-binding peptide

SEQ ID NO: 27916 - protein, 36 aa, Artificial Sequence; identical to SEQ ID NO: 24174
  Cyclic GFR-binding peptide
  MOD_RES (6)..(6): Xaa is C or S

SEQ ID NO: 27917 - protein, 26 aa, Artificial Sequence
  Cyclic GFR-binding peptide
QRSVKMAKVRIKPHQGQHKEVQVLEE

SEQ ID NO: 27918 - protein, 35 aa, Artificial Sequence; identical to SEQ ID NO: 24176
  Cyclic GFR-binding peptide
  MOD_RES (1)..(1): Xaa is C or S

SEQ ID NO: 27919 - protein, 36 aa, Artificial Sequence; identical to SEQ ID NO: 24177
  Cyclic GFR-binding peptide
  MOD_RES (4)..(4): Xaa is C or S

SEQ ID NO: 27920 - protein, 36 aa, Artificial Sequence; identical to SEQ ID NO: 24178
  Cyclic GFR-binding peptide
  MOD_RES (3)..(3): Xaa is C or S

SEQ ID NO: 27921 - protein, 38 aa, Artificial Sequence; identical to SEQ ID NO: 24179
  Cyclic GFR-binding peptide
  MOD_RES (1)..(35)..(37): Xaa is C or S

SEQ ID NO: 27922 - protein, 34 aa, Artificial Sequence; identical to SEQ ID NO: 24180
  Cyclic GFR-binding peptide
  MOD_RES (2)..(2): Xaa is C or S

SEQ ID NO: 27923 - protein, 43 aa, Artificial Sequence; identical to SEQ ID NO: 24181
  Cyclic GFR-binding peptide
  MOD_RES (3)..(40)..(42): Xaa is C or S

SEQ ID NO: 27924 - protein, 29 aa, Artificial Sequence
  Cyclic GFR-binding peptide
VPTEERSVKMAKVRIKPHQGQHKEVQVFL

SEQ ID NO: 27925 - protein, 30 aa, Artificial Sequence; identical to SEQ ID NO: 24183
  Cyclic GFR-binding peptide

SEQ ID NO: 27926 - protein, 38 aa, Artificial Sequence; identical to SEQ ID NO: 24184
  Cyclic GFR-binding peptide
  MOD_RES (3)..(3): Xaa is C or S

SEQ ID NO: 27927 - protein, 35 aa, Artificial Sequence; identical to SEQ ID NO: 24185
  Cyclic GFR-binding peptide

SEQ ID NO: 27928 - protein, 33 aa, Artificial Sequence; identical to SEQ ID NO: 24186
  Cyclic GFR-binding peptide
  MOD_RES (5)..(5): Xaa is C or S

SEQ ID NO: 27929 - protein, 42 aa, Artificial Sequence; identical to SEQ ID NO: 24187
  Cyclic GFR-binding peptide
  MOD_RES (4)..(41): Xaa is C or S

SEQ ID NO: 27930 - protein, 22 aa, Artificial Sequence
  Cyclic GFR-binding peptide
RPVQMRKIRIKPHQGQHKKATV

SEQ ID NO: 27931 - protein, 34 aa, Artificial Sequence; identical to SEQ ID NO: 24189
  Cyclic GFR-binding peptide
  MOD_RES (4)..(4): Xaa is C or S

SEQ ID NO: 27932 - protein, 39 aa, Artificial Sequence; identical to SEQ ID NO: 24190
  Cyclic GFR-binding peptide
  MOD_RES (1)..(38): Xaa is C or S

SEQ ID NO: 27933 - protein, 27 aa, Artificial Sequence
  Cyclic GFR-binding peptide
RVHHSNITVQIMEYVRKKPKLIGEMSR

SEQ ID NO: 27934 - protein, 25 aa, Artificial Sequence
  Cyclic GFR-binding peptide
HSNITVQIMEYVRKKPKLIGEMSRL

SEQ ID NO: 27935 - protein, 41 aa, Artificial Sequence; identical to SEQ ID NO: 24193
  Cyclic GFR-binding peptide
  MOD_RES (1)..(38)..(40): Xaa is C or S

SEQ ID NO: 27936 - protein, 39 aa, Artificial Sequence; identical to SEQ ID NO: 24194
  Cyclic GFR-binding peptide
  MOD_RES (1)..(38): Xaa is C or S

SEQ ID NO: 27937 - protein, 42 aa, Artificial Sequence; identical to SEQ ID NO: 24195
  Cyclic GFR-binding peptide
  MOD_RES (4)..(41): Xaa is C or S

SEQ ID NO: 27938 - protein, 33 aa, Artificial Sequence; identical to SEQ ID NO: 24196
  Cyclic GFR-binding peptide

SEQ ID NO: 27939 - protein, 31 aa, Artificial Sequence; identical to SEQ ID NO: 24197
  Cyclic GFR-binding peptide
  MOD_RES (31)..(31): Xaa is C or S

SEQ ID NO: 27940 - protein, 30 aa, Artificial Sequence; identical to SEQ ID NO: 24198
  Cyclic GFR-binding peptide
  MOD_RES (1)..(1): Xaa is C or S

SEQ ID NO: 27941 - protein, 33 aa, Artificial Sequence; identical to SEQ ID NO: 24199
  Cyclic GFR-binding peptide
  MOD_RES (32)..(32): Xaa is C or S

SEQ ID NO: 27942 - protein, 37 aa, Artificial Sequence; identical to SEQ ID NO: 24200
  Cyclic GFR-binding peptide
  MOD_RES (37)..(37): Xaa is C or S

SEQ ID NO: 27943 - protein, 36 aa, Artificial Sequence; identical to SEQ ID NO: 24201
  Cyclic GFR-binding peptide
  MOD_RES (5)..(5): Xaa is C or S

SEQ ID NO: 27944 - protein, 32 aa, Artificial Sequence; identical to SEQ ID NO: 24202
  Cyclic GFR-binding peptide
  MOD_RES (31)..(31): Xaa is C or S

SEQ ID NO: 27945 - protein, 39 aa, Artificial Sequence; identical to SEQ ID NO: 24203
  Cyclic GFR-binding peptide
  MOD_RES (2)..(36)..(38): Xaa is C or S

SEQ ID NO: 27946 - protein, 31 aa, Artificial Sequence; identical to SEQ ID NO: 24204
  Cyclic GFR-binding peptide

SEQ ID NO: 27947 - protein, 41 aa, Artificial Sequence; identical to SEQ ID NO: 24205
  Cyclic GFR-binding peptide
  MOD_RES (2)..(39)..(41): Xaa is C or S

SEQ ID NO: 27948 - protein, 35 aa, Artificial Sequence; identical to SEQ ID NO: 24206
  Cyclic GFR-binding peptide
  MOD_RES (5)..(5): Xaa is C or S

SEQ ID NO: 27949 - protein, 34 aa, Artificial Sequence; identical to SEQ ID NO: 24207
  Cyclic GFR-binding peptide
  MOD_RES (31)..(33): Xaa is C or S

SEQ ID NO: 27950 - protein, 31 aa, Artificial Sequence; identical to SEQ ID NO: 24208
  Cyclic GFR-binding peptide

SEQ ID NO: 27951 - protein, 33 aa, Artificial Sequence; identical to SEQ ID NO: 24209
  Cyclic GFR-binding peptide
  MOD_RES (30)..(32): Xaa is C or S

SEQ ID NO: 27952 - protein, 27 aa, Artificial Sequence
  Cyclic GFR-binding peptide
ESNITMQIMRIKPHQGQHLGEMSFLQH

SEQ ID NO: 27953 - protein, 32 aa, Artificial Sequence; identical to SEQ ID NO: 24211
  Cyclic GFR-binding peptide

SEQ ID NO: 27954 - protein, 32 aa, Artificial Sequence; identical to SEQ ID NO: 24212
  Cyclic GFR-binding peptide
  MOD_RES (3)..(3): Xaa is C or S

SEQ ID NO: 27955 - protein, 28 aa, Artificial Sequence
  Cyclic GFR-binding peptide
VPTEESNITMQIMRIKPHQGQHLGEMSF

SEQ ID NO: 27956 - protein, 31 aa, Artificial Sequence; identical to SEQ ID NO: 24214
  Cyclic GFR-binding peptide

SEQ ID NO: 27957 - protein, 29 aa, Artificial Sequence
  Cyclic GFR-binding peptide
RPVQVRKIEYVRKKPKLKKATVRLEEHLE

SEQ ID NO: 27958 - protein, 35 aa, Artificial Sequence; identical to SEQ ID NO: 24216
  Cyclic GFR-binding peptide

SEQ ID NO: 27959 - protein, 34 aa, Artificial Sequence; identical to SEQ ID NO: 24217
  Cyclic GFR-binding peptide
  MOD_RES (7)..(7): Xaa is C or S

SEQ ID NO: 27960 - protein, 29 aa, Artificial Sequence
  Cyclic GFR-binding peptide
SNITVQIMEYVRKKPKLLGEMSRLEEHLE

SEQ ID NO: 27961 - protein, 22 aa, Artificial Sequence
  Cyclic GFR-binding peptide
SNITVQIMEIVRKKPIFLGEMS

SEQ ID NO: 27962 - protein, 41 aa, Artificial Sequence; identical to SEQ ID NO: 24220
  Cyclic GFR-binding peptide
  MOD_RES (5)..(39)..(41): Xaa is C or S

SEQ ID NO: 27963 - protein, 25 aa, Artificial Sequence
  Cyclic GFR-binding peptide
ERSVKMAKVRIKPHQGQHKEVQVFL

SEQ ID NO: 27964 - protein, 24 aa, Artificial Sequence
  Cyclic GFR-binding peptide
GQRSVKMAKVRIKPHQGQHKEVQV

SEQ ID NO: 27965 - protein, 32 aa, Artificial Sequence; identical to SEQ ID NO: 24223
  Cyclic GFR-binding peptide

SEQ ID NO: 27966 - protein, 36 aa, Artificial Sequence; identical to SEQ ID NO: 24224
  Cyclic GFR-binding peptide
  MOD_RES (3)..(3): Xaa is C or S

SEQ ID NO: 27967 - protein, 36 aa, Artificial Sequence; identical to SEQ ID NO: 24225
  Cyclic GFR-binding peptide
  MOD_RES (6)..(6): Xaa is C or S

SEQ ID NO: 27968 - protein, 35 aa, Artificial Sequence; identical to SEQ ID NO: 24226
  Cyclic GFR-binding peptide
  MOD_RES (2)..(2): Xaa is C or S

SEQ ID NO: 27969 - protein, 32 aa, Artificial Sequence; identical to SEQ ID NO: 24227
  Cyclic GFR-binding peptide
  MOD_RES (3)..(3): Xaa is C or S

SEQ ID NO: 27970 - protein, 31 aa, Artificial Sequence; identical to SEQ ID NO: 24228
  Cyclic GFR-binding peptide

SEQ ID NO: 27971 - protein, 35 aa, Artificial Sequence; identical to SEQ ID NO: 24229
  Cyclic GFR-binding peptide
  MOD_RES (2)..(2): Xaa is C or S

SEQ ID NO: 27972 - protein, 29 aa, Artificial Sequence
  Cyclic GFR-binding peptide
  MOD_RES (29)..(29): Xaa is C or S
RSVKMAKVRIKPHQGQHKEVQVFLQHNKX

SEQ ID NO: 27973 - protein, 31 aa, Artificial Sequence; identical to SEQ ID NO: 24231
  Cyclic GFR-binding peptide
  MOD_RES (2)..(2): Xaa is C or S

SEQ ID NO: 27974 - protein, 36 aa, Artificial Sequence; identical to SEQ ID NO: 24232
  Cyclic GFR-binding peptide
  MOD_RES (33)..(35): Xaa is C or S

SEQ ID NO: 27975 - protein, 28 aa, Artificial Sequence
  Cyclic GFR-binding peptide
HSNITVQIMEYVRKKPKLIGEMSRLEEH

SEQ ID NO: 27976 - protein, 43 aa, Artificial Sequence; identical to SEQ ID NO: 24234
  Cyclic GFR-binding peptide
  MOD_RES (6)..(40)..(42): Xaa is C or S

SEQ ID NO: 27977 - protein, 33 aa, Artificial Sequence; identical to SEQ ID NO: 24235
  Cyclic GFR-binding peptide

SEQ ID NO: 27978 - protein, 35 aa, Artificial Sequence; identical to SEQ ID NO: 24236
  Cyclic GFR-binding peptide
  MOD_RES (5)..(5): Xaa is C or S

SEQ ID NO: 27979 - protein, 42 aa, Artificial Sequence; identical to SEQ ID NO: 24237
  Cyclic GFR-binding peptide
  MOD_RES (5)..(42): Xaa is C or S

SEQ ID NO: 27980 - protein, 36 aa, Artificial Sequence; identical to SEQ ID NO: 24238
  Cyclic GFR-binding peptide
  MOD_RES (3)..(3): Xaa is C or S

SEQ ID NO: 27981 - protein, 40 aa, Artificial Sequence; identical to SEQ ID NO: 24239
  Cyclic GFR-binding peptide
  MOD_RES (5)..(5): Xaa is C or S

SEQ ID NO: 27982 - protein, 35 aa, Artificial Sequence; identical to SEQ ID NO: 24240
  Cyclic GFR-binding peptide
  MOD_RES (32)..(34): Xaa is C or S

SEQ ID NO: 27983 - protein, 27 aa, Artificial Sequence
  Cyclic GFR-binding peptide
RVHHRPVQVRKIEYVRKKPKLKKATVR

SEQ ID NO: 27984 - protein, 36 aa, Artificial Sequence; identical to SEQ ID NO: 24242
  Cyclic GFR-binding peptide
  MOD_RES (34)..(36): Xaa is C or S

SEQ ID NO: 27985 - protein, 35 aa, Artificial Sequence; identical to SEQ ID NO: 24243
  Cyclic GFR-binding peptide

SEQ ID NO: 27986 - protein, 36 aa, Artificial Sequence; identical to SEQ ID NO: 24244
  Cyclic GFR-binding peptide
  MOD_RES (2)..(2): Xaa is C or S

SEQ ID NO: 27987 - protein, 30 aa, Artificial Sequence; identical to SEQ ID NO: 24245
  Cyclic GFR-binding peptide

SEQ ID NO: 27988 - protein, 34 aa, Artificial Sequence; identical to SEQ ID NO: 24246
  Cyclic GFR-binding peptide
  MOD_RES (31)..(33): Xaa is C or S

SEQ ID NO: 27989 - protein, 30 aa, Artificial Sequence; identical to SEQ ID NO: 24247
  Cyclic GFR-binding peptide
  MOD_RES (1)..(1): Xaa is C or S

SEQ ID NO: 27990 - protein, 41 aa, Artificial Sequence; identical to SEQ ID NO: 24248
  Cyclic GFR-binding peptide
  MOD_RES (4)..(41): Xaa is C or S

SEQ ID NO: 27991 - protein, 35 aa, Artificial Sequence; identical to SEQ ID NO: 24249
  Cyclic GFR-binding peptide

SEQ ID NO: 27992 - protein, 26 aa, Artificial Sequence
  Cyclic GFR-binding peptide
PTEERSVKMAKVRIKPHQGQHKEVQV

SEQ ID NO: 27993 - protein, 39 aa, Artificial Sequence; identical to SEQ ID NO: 24251
  Cyclic GFR-binding peptide
  MOD_RES (3)..(37)..(39): Xaa is C or S

SEQ ID NO: 27994 - protein, 33 aa, Artificial Sequence; identical to SEQ ID NO: 24252
  Cyclic GFR-binding peptide

SEQ ID NO: 27995 - protein, 37 aa, Artificial Sequence; identical to SEQ ID NO: 24253
  Cyclic GFR-binding peptide
  MOD_RES (35)..(37): Xaa is C or S

SEQ ID NO: 27996 - protein, 31 aa, Artificial Sequence; identical to SEQ ID NO: 24254
  Cyclic GFR-binding peptide
  MOD_RES (30)..(30): Xaa is C or S

SEQ ID NO: 27997 - protein, 29 aa, Artificial Sequence
  Cyclic GFR-binding peptide
PSRVHHRPVQVRKIEYVRKKPKLKKATVR

SEQ ID NO: 27998 - protein, 35 aa, Artificial Sequence; identical to SEQ ID NO: 24256
  Cyclic GFR-binding peptide
  MOD_RES (2)..(2): Xaa is C or S

SEQ ID NO: 27999 - protein, 34 aa, Artificial Sequence; identical to SEQ ID NO: 24257
  Cyclic GFR-binding peptide
  MOD_RES (6)..(6): Xaa is C or S

SEQ ID NO: 28000 - protein, 38 aa, Artificial Sequence; identical to SEQ ID NO: 24258
  Cyclic GFR-binding peptide
  MOD_RES (3)..(37): Xaa is C or S

SEQ ID NO: 28001 - protein, 39 aa, Artificial Sequence; identical to SEQ ID NO: 24259
  Cyclic GFR-binding peptide
  MOD_RES (2)..(39): Xaa is C or S

SEQ ID NO: 28002 - protein, 22 aa, Artificial Sequence
  Cyclic GFR-binding peptide
SNITVQIMEYVRKKPKLIGEMS

SEQ ID NO: 28003 - protein, 37 aa, Artificial Sequence; identical to SEQ ID NO: 24261
  Cyclic GFR-binding peptide
  MOD_RES (35)..(37): Xaa is C or S

SEQ ID NO: 28004 - protein, 33 aa, Artificial Sequence; identical to SEQ ID NO: 24262
  Cyclic GFR-binding peptide
  MOD_RES (5)..(5): Xaa is C or S

SEQ ID NO: 28005 - protein, 43 aa, Artificial Sequence; identical to SEQ ID NO: 24263
  Cyclic GFR-binding peptide
  MOD_RES (6)..(40)..(42): Xaa is C or S

SEQ ID NO: 28006 - protein, 37 aa, Artificial Sequence; identical to SEQ ID NO: 24264
  Cyclic GFR-binding peptide
  MOD_RES (1)..(1): Xaa is C or S

SEQ ID NO: 28007 - protein, 33 aa, Artificial Sequence; identical to SEQ ID NO: 24265
  Cyclic GFR-binding peptide
  MOD_RES (6)..(6): Xaa is C or S

SEQ ID NO: 28008 - protein, 35 aa, Artificial Sequence; identical to SEQ ID NO: 24266
  Cyclic GFR-binding peptide
  MOD_RES (34)..(34): Xaa is C or S

SEQ ID NO: 28009 - protein, 35 aa, Artificial Sequence; identical to SEQ ID NO: 24267
  Cyclic GFR-binding peptide
  MOD_RES (6)..(6): Xaa is C or S

SEQ ID NO: 28010 - protein, 30 aa, Artificial Sequence; identical to SEQ ID NO: 24268
  Cyclic GFR-binding peptide

SEQ ID NO: 28011 - protein, 38 aa, Artificial Sequence; identical to SEQ ID NO: 24269
  Cyclic GFR-binding peptide
  MOD_RES (1)..(38): Xaa is C or S

SEQ ID NO: 28012 - protein, 31 aa, Artificial Sequence; identical to SEQ ID NO: 24270
  Cyclic GFR-binding peptide

SEQ ID NO: 28013 - protein, 29 aa, Artificial Sequence
  Cyclic GFR-binding peptide
  MOD_RES (1)..(1): Xaa is C or S
XVPTEERPVQMRKIRIKPHQGQHKKATVF

SEQ ID NO: 28014 - protein, 43 aa, Artificial Sequence; identical to SEQ ID NO: 24272
  Cyclic GFR-binding peptide
  MOD_RES (5)..(42): Xaa is C or S

SEQ ID NO: 28015 - protein, 25 aa, Artificial Sequence
  Cyclic GFR-binding peptide
VQLSNITVQIMEIVRKKPIFIGEMS

SEQ ID NO: 28016 - protein, 38 aa, Artificial Sequence; identical to SEQ ID NO: 24274
  Cyclic GFR-binding peptide
  MOD_RES (3)..(3): Xaa is C or S

SEQ ID NO: 28017 - protein, 34 aa, Artificial Sequence; identical to SEQ ID NO: 24275
  Cyclic GFR-binding peptide

SEQ ID NO: 28018 - protein, 26 aa, Artificial Sequence
  Cyclic GFR-binding peptide
QLSNITVQIMEIVRKKPIFIGEMSTL

SEQ ID NO: 28019 - protein, 26 aa, Artificial Sequence
  Cyclic GFR-binding peptide
RVHHRPVQVRKIEYVRKKPKLKKATV

SEQ ID NO: 28020 - protein, 28 aa, Artificial Sequence
  Cyclic GFR-binding peptide
  MOD_RES (1)..(1): Xaa is C or S
XVPTEERPVQMRKIRIKPHQGQHKKATV

SEQ ID NO: 28021 - protein, 24 aa, Artificial Sequence
  Cyclic GFR-binding peptide
RSVKMAKVRIKPHQGQHKEVQVLE

SEQ ID NO: 28022 - protein, 39 aa, Artificial Sequence; identical to SEQ ID NO: 24280
  Cyclic GFR-binding peptide
  MOD_RES (7)..(7): Xaa is C or S

SEQ ID NO: 28023 - protein, 30 aa, Artificial Sequence; identical to SEQ ID NO: 24281
  Cyclic GFR-binding peptide
  MOD_RES (1)..(1): Xaa is C or S

SEQ ID NO: 28024 - protein, 40 aa, Artificial Sequence; identical to SEQ ID NO: 24282
  Cyclic GFR-binding peptide
  MOD_RES (5)..(39): Xaa is C or S

SEQ ID NO: 28025 - protein, 33 aa, Artificial Sequence; identical to SEQ ID NO: 24283
  Cyclic GFR-binding peptide
  MOD_RES (2)..(2): Xaa is C or S

SEQ ID NO: 28026 - protein, 39 aa, Artificial Sequence; identical to SEQ ID NO: 24284
  Cyclic GFR-binding peptide
  MOD_RES (3)..(37)..(39): Xaa is C or S

SEQ ID NO: 28027 - protein, 34 aa, Artificial Sequence; identical to SEQ ID NO: 24285
  Cyclic GFR-binding peptide
  MOD_RES (33)..(33): Xaa is C or S

SEQ ID NO: 28028 - protein, 28 aa, Artificial Sequence
  Cyclic GFR-binding peptide
ESNITMQIMRIKPHQGQHLGEMSFLQHN

SEQ ID NO: 28029 - protein, 30 aa, Artificial Sequence; identical to SEQ ID NO: 24287
  Cyclic GFR-binding peptide

SEQ ID NO: 28030 - protein, 34 aa, Artificial Sequence; identical to SEQ ID NO: 24288
  Cyclic GFR-binding peptide
  MOD_RES (31)..(33): Xaa is C or S

SEQ ID NO: 28031 - protein, 31 aa, Artificial Sequence; identical to SEQ ID NO: 24289
  Cyclic GFR-binding peptide
  MOD_RES (2)..(2): Xaa is C or S

SEQ ID NO: 28032 - protein, 24 aa, Artificial Sequence
  Cyclic GFR-binding peptide
GQSNITMQIMRIKPHQGQHIGEMS

SEQ ID NO: 28033 - protein, 27 aa, Artificial Sequence
  Cyclic GFR-binding peptide
QVQLSNITVQIMEIVRKKPIFLGEMST

SEQ ID NO: 28034 - protein, 40 aa, Artificial Sequence; identical to SEQ ID NO: 24292
  Cyclic GFR-binding peptide
  MOD_RES (5)..(39): Xaa is C or S

SEQ ID NO: 28035 - protein, 29 aa, Artificial Sequence
  Cyclic GFR-binding peptide
EERPVQMRKIRIKPHQGQHKKATVFLQHN

SEQ ID NO: 28036 - protein, 39 aa, Artificial Sequence; identical to SEQ ID NO: 24294
  Cyclic GFR-binding peptide
  MOD_RES (3)..(37)..(39): Xaa is C or S

SEQ ID NO: 28037 - protein, 33 aa, Artificial Sequence; identical to SEQ ID NO: 24295
  Cyclic GFR-binding peptide
  MOD_RES (3)..(3): Xaa is C or S

SEQ ID NO: 28038 - protein, 38 aa, Artificial Sequence; identical to SEQ ID NO: 24296
  Cyclic GFR-binding peptide
  MOD_RES (6)..(6): Xaa is C or S

SEQ ID NO: 28039 - protein, 33 aa, Artificial Sequence; identical to SEQ ID NO: 24297
  Cyclic GFR-binding peptide
  MOD_RES (33)..(33): Xaa is C or S

SEQ ID NO: 28040 - protein, 41 aa, Artificial Sequence; identical to SEQ ID NO: 24298
  Cyclic GFR-binding peptide
  MOD_RES (6)..(40): Xaa is C or S

SEQ ID NO: 28041 - protein, 23 aa, Artificial Sequence
  Cyclic GFR-binding peptide
SNITVQIMEYVRKKPKLLGEMSR

SEQ ID NO: 28042 - protein, 24 aa, Artificial Sequence
  Cyclic GFR-binding peptide
QLSNITVQIMEIVRKKPIFLGEMS

SEQ ID NO: 28043 - protein, 26 aa, Artificial Sequence
  Cyclic GFR-binding peptide
QSNITMQIMRIKPHQGQHIGEMSLEE

SEQ ID NO: 28044 - protein, 36 aa, Artificial Sequence; identical to SEQ ID NO: 24302
  Cyclic GFR-binding peptide
  MOD_RES (34)..(36): Xaa is C or S

SEQ ID NO: 28045 - protein, 34 aa, Artificial Sequence; identical to SEQ ID NO: 24303
  Cyclic GFR-binding peptide
  MOD_RES (3)..(3): Xaa is C or S

SEQ ID NO: 28046 - protein, 25 aa, Artificial Sequence
  Cyclic GFR-binding peptide
TEESNITMQIMRIKPHQGQHLGEMS

SEQ ID NO: 28047 - protein, 34 aa, Artificial Sequence; identical to SEQ ID NO: 24305
  Cyclic GFR-binding peptide
  MOD_RES (32)..(34): Xaa is C or S

SEQ ID NO: 28048 - protein, 31 aa, Artificial Sequence; identical to SEQ ID NO: 24306
  Cyclic GFR-binding peptide

SEQ ID NO: 28049 - protein, 27 aa, Artificial Sequence
  Cyclic GFR-binding peptide
QLSNITVQIMEIVRKKPIFLGEMSTLE

SEQ ID NO: 28050 - protein, 27 aa, Artificial Sequence
  Cyclic GFR-binding peptide
QLSNITVQIMEIVRKKPIFIGEMSTLE

SEQ ID NO: 28051 - protein, 37 aa, Artificial Sequence; identical to SEQ ID NO: 24309
  Cyclic GFR-binding peptide
  MOD_RES (6)..(6): Xaa is C or S

SEQ ID NO: 28052 - protein, 37 aa, Artificial Sequence; identical to SEQ ID NO: 24310
  Cyclic GFR-binding peptide
  MOD_RES (2)..(2): Xaa is C or S

SEQ ID NO: 28053 - protein, 31 aa, Artificial Sequence; identical to SEQ ID NO: 24311
  Cyclic GFR-binding peptide
  MOD_RES (31)..(31): Xaa is C or S

SEQ ID NO: 28054 - protein, 30 aa, Artificial Sequence; identical to SEQ ID NO: 24312
  Cyclic GFR-binding peptide
  MOD_RES (1)..(1): Xaa is C or S

SEQ ID NO: 28055 - protein, 35 aa, Artificial Sequence; identical to SEQ ID NO: 24313
  Cyclic GFR-binding peptide
  MOD_RES (5)..(5): Xaa is C or S

SEQ ID NO: 28056 - protein, 38 aa, Artificial Sequence; identical to SEQ ID NO: 24314
  Cyclic GFR-binding peptide
  MOD_RES (2)..(2): Xaa is C or S

SEQ ID NO: 28057 - protein, 42 aa, Artificial Sequence; identical to SEQ ID NO: 24315
  Cyclic GFR-binding peptide
  MOD_RES (4)..(41): Xaa is C or S

SEQ ID NO: 28058 - protein, 25 aa, Artificial Sequence
  Cyclic GFR-binding peptide
QLRSVKVAKVEIVRKKPIFKEVQVT

SEQ ID NO: 28059 - protein, 40 aa, Artificial Sequence; identical to SEQ ID NO: 24317
  Cyclic GFR-binding peptide
  MOD_RES (5)..(39): Xaa is C or S

SEQ ID NO: 28060 - protein, 27 aa, Artificial Sequence
  Cyclic GFR-binding peptide
VQLSNITVQIMEIVRKKPIFIGEMSTL

SEQ ID NO: 28061 - protein, 36 aa, Artificial Sequence; identical to SEQ ID NO: 24319
  Cyclic GFR-binding peptide
  MOD_RES (36)..(36): Xaa is C or S

SEQ ID NO: 28062 - protein, 42 aa, Artificial Sequence; identical to SEQ ID NO: 24320
  Cyclic GFR-binding peptide
  MOD_RES (2)..(39)..(41): Xaa is C or S

SEQ ID NO: 28063 - protein, 34 aa, Artificial Sequence; identical to SEQ ID NO: 24321
  Cyclic GFR-binding peptide
  MOD_RES (1)..(1): Xaa is C or S

SEQ ID NO: 28064 - protein, 35 aa, Artificial Sequence; identical to SEQ ID NO: 24322
  Cyclic GFR-binding peptide
  MOD_RES (5)..(5): Xaa is C or S

SEQ ID NO: 28065 - protein, 44 aa, Artificial Sequence; identical to SEQ ID NO: 24323
  Cyclic GFR-binding peptide
  MOD_RES (5)..(42)..(44): Xaa is C or S

SEQ ID NO: 28066 - protein, 31 aa, Artificial Sequence; identical to SEQ ID NO: 24324
  Cyclic GFR-binding peptide

SEQ ID NO: 28067 - protein, 31 aa, Artificial Sequence; identical to SEQ ID NO: 24325
  Cyclic GFR-binding peptide

SEQ ID NO: 28068 - protein, 30 aa, Artificial Sequence; identical to SEQ ID NO: 24326
  Cyclic GFR-binding peptide
  MOD_RES (30)..(30): Xaa is C or S

SEQ ID NO: 28069 - protein, 33 aa, Artificial Sequence; identical to SEQ ID NO: 24327
  Cyclic GFR-binding peptide
  MOD_RES (4)..(4): Xaa is C or S

SEQ ID NO: 28070 - protein, 41 aa, Artificial Sequence; identical to SEQ ID NO: 24328
  Cyclic GFR-binding peptide
  MOD_RES (5)..(5): Xaa is C or S

SEQ ID NO: 28071 - protein, 34 aa, Artificial Sequence; identical to SEQ ID NO: 24329
  Cyclic GFR-binding peptide
  MOD_RES (2)..(2): Xaa is C or S

SEQ ID NO: 28072 - protein, 25 aa, Artificial Sequence
  Cyclic GFR-binding peptide
HHRPVQVRKIEYVRKKPKLKKATVR

SEQ ID NO: 28073 - protein, 39 aa, Artificial Sequence; identical to SEQ ID NO: 24331
  Cyclic GFR-binding peptide
  MOD_RES (5)..(5): Xaa is C or S

SEQ ID NO: 28074 - protein, 42 aa, Artificial Sequence; identical to SEQ ID NO: 24332
  Cyclic GFR-binding peptide
  MOD_RES (5)..(42): Xaa is C or S

SEQ ID NO: 28075 - protein, 35 aa, Artificial Sequence; identical to SEQ ID NO: 24333
  Cyclic GFR-binding peptide
  MOD_RES (7)..(7): Xaa is C or S

SEQ ID NO: 28076 - protein, 25 aa, Artificial Sequence
  Cyclic GFR-binding peptide
QSNITMQIMRIKPHQGQHIGEMSLE

SEQ ID NO: 28077 - protein, 34 aa, Artificial Sequence; identical to SEQ ID NO: 24335
  Cyclic GFR-binding peptide
  MOD_RES (34)..(34): Xaa is C or S

SEQ ID NO: 28078 - protein, 26 aa, Artificial Sequence
  Cyclic GFR-binding peptide
SNITVQIMEIVRKKPIFIGEMSTLED

SEQ ID NO: 28079 - protein, 29 aa, Artificial Sequence
  Cyclic GFR-binding peptide
VPTEESNITMQIMRIKPHQGQHLGEMSFL

SEQ ID NO: 28080 - protein, 33 aa, Artificial Sequence; identical to SEQ ID NO: 24338
  Cyclic GFR-binding peptide
  MOD_RES (30)..(32): Xaa is C or S

SEQ ID NO: 28081 - protein, 37 aa, Artificial Sequence; identical to SEQ ID NO: 24339
  Cyclic GFR-binding peptide
  MOD_RES (34)..(36): Xaa is C or S

SEQ ID NO: 28082 - protein, 35 aa, Artificial Sequence; identical to SEQ ID NO: 24340
  Cyclic GFR-binding peptide
  MOD_RES (4)..(4): Xaa is C or S

SEQ ID NO: 28083 - protein, 30 aa, Artificial Sequence; identical to SEQ ID NO: 24341
  Cyclic GFR-binding peptide

SEQ ID NO: 28084 - protein, 39 aa, Artificial Sequence; identical to SEQ ID NO: 24342
  Cyclic GFR-binding peptide
  MOD_RES (2)..(39): Xaa is C or S

SEQ ID NO: 28085 - protein, 32 aa, Artificial Sequence; identical to SEQ ID NO: 24343
  Cyclic GFR-binding peptide
  MOD_RES (32)..(32): Xaa is C or S

SEQ ID NO: 28086 - protein, 37 aa, Artificial Sequence; identical to SEQ ID NO: 24344
  Cyclic GFR-binding peptide
  MOD_RES (7)..(7): Xaa is C or S

SEQ ID NO: 28087 - protein, 36 aa, Artificial Sequence; identical to SEQ ID NO: 24345
  Cyclic GFR-binding peptide
  MOD_RES (5)..(5): Xaa is C or S

SEQ ID NO: 28088 - protein, 43 aa, Artificial Sequence; identical to SEQ ID NO: 24346
  Cyclic GFR-binding peptide
  MOD_RES (4)..(41)..(43): Xaa is C or S

SEQ ID NO: 28089 - protein, 34 aa, Artificial Sequence; identical to SEQ ID NO: 24347
  Cyclic GFR-binding peptide
  MOD_RES (5)..(5): Xaa is C or S

SEQ ID NO: 28090 - protein, 34 aa, Artificial Sequence; identical to SEQ ID NO: 24348
  Cyclic GFR-binding peptide
  MOD_RES (34)..(34): Xaa is C or S

SEQ ID NO: 28091 - protein, 41 aa, Artificial Sequence; identical to SEQ ID NO: 24349
  Cyclic GFR-binding peptide
  MOD_RES (5)..(39)..(41): Xaa is C or S

SEQ ID NO: 28092 - protein, 39 aa, Artificial Sequence; identical to SEQ ID NO: 24350
  Cyclic GFR-binding peptide
  MOD_RES (6)..(6): Xaa is C or S

SEQ ID NO: 28093 - protein, 26 aa, Artificial Sequence
  Cyclic GFR-binding peptide
SNITMQIMRIKPHQGQHLGEMSFLQH

SEQ ID NO: 28094 - protein, 33 aa, Artificial Sequence; identical to SEQ ID NO: 24352
  Cyclic GFR-binding peptide
  MOD_RES (6)..(6): Xaa is C or S

SEQ ID NO: 28095 - protein, 39 aa, Artificial Sequence; identical to SEQ ID NO: 24353
  Cyclic GFR-binding peptide
  MOD_RES (6)..(6): Xaa is C or S

SEQ ID NO: 28096 - protein, 34 aa, Artificial Sequence; identical to SEQ ID NO: 24354
  Cyclic GFR-binding peptide
  MOD_RES (3)..(3): Xaa is C or S

SEQ ID NO: 28097 - protein, 33 aa, Artificial Sequence; identical to SEQ ID NO: 24355
  Cyclic GFR-binding peptide

SEQ ID NO: 28098 - protein, 36 aa, Artificial Sequence; identical to SEQ ID NO: 24356
  Cyclic GFR-binding peptide
  MOD_RES (33)..(35): Xaa is C or S

SEQ ID NO: 28099 - protein, 38 aa, Artificial Sequence; identical to SEQ ID NO: 24357
  Cyclic GFR-binding peptide
  MOD_RES (7)..(7): Xaa is C or S

SEQ ID NO: 28100 - protein, 36 aa, Artificial Sequence; identical to SEQ ID NO: 24358
  Cyclic GFR-binding peptide
  MOD_RES (34)..(36): Xaa is C or S

SEQ ID NO: 28101 - protein, 33 aa, Artificial Sequence; identical to SEQ ID NO: 24359
  Cyclic GFR-binding peptide
  MOD_RES (31)..(33): Xaa is C or S

SEQ ID NO: 28102 - protein, 32 aa, Artificial Sequence; identical to SEQ ID NO: 24360
  Cyclic GFR-binding peptide
  MOD_RES (31)..(31): Xaa is C or S

SEQ ID NO: 28103 - protein, 36 aa, Artificial Sequence; identical to SEQ ID NO: 24361
  Cyclic GFR-binding peptide
  MOD_RES (33)..(35): Xaa is C or S

SEQ ID NO: 28104 - protein, 27 aa, Artificial Sequence
  Cyclic GFR-binding peptide
VPTEERSVKMAKVRIKPHQGQHKEVQV

SEQ ID NO: 28105 - protein, 33 aa, Artificial Sequence; identical to SEQ ID NO: 24363
  Cyclic GFR-binding peptide

SEQ ID NO: 28106 - protein, 30 aa, Artificial Sequence; identical to SEQ ID NO: 24364
  Cyclic GFR-binding peptide
  MOD_RES (30)..(30): Xaa is C or S

SEQ ID NO: 28107 - protein, 24 aa, Artificial Sequence
  Cyclic GFR-binding peptide
HHSNITVQIMEYVRKKPKLLGEMS

SEQ ID NO: 28108 - protein, 28 aa, Artificial Sequence
  Cyclic GFR-binding peptide
TGQRSVKMAKVRIKPHQGQHKEVQVLEE

SEQ ID NO: 28109 - protein, 37 aa, Artificial Sequence; identical to SEQ ID NO: 24367
  Cyclic GFR-binding peptide
  MOD_RES (2)..(2): Xaa is C or S

SEQ ID NO: 28110 - protein, 32 aa, Artificial Sequence; identical to SEQ ID NO: 24368
  Cyclic GFR-binding peptide
  MOD_RES (32)..(32): Xaa is C or S

SEQ ID NO: 28111 - protein, 41 aa, Artificial Sequence; identical to SEQ ID NO: 24369
  Cyclic GFR-binding peptide
  MOD_RES (7)..(41): Xaa is C or S

SEQ ID NO: 28112 - protein, 28 aa, Artificial Sequence
  Cyclic GFR-binding peptide
  MOD_RES (1)..(1): Xaa is C or S
XVPTEESNITMQIMRIKPHQGQHLGEMS

SEQ ID NO: 28113 - protein, 29 aa, Artificial Sequence
  Cyclic GFR-binding peptide
QPSRVHHRPVQVRKIEYVRKKPKLKKATV

SEQ ID NO: 28114 - protein, 30 aa, Artificial Sequence; identical to SEQ ID NO: 24372
  Cyclic GFR-binding peptide
  MOD_RES (3)..(3): Xaa is C or S

SEQ ID NO: 28115 - protein, 29 aa, Artificial Sequence
  Cyclic GFR-binding peptide
  MOD_RES (1)..(1): Xaa is C or S
XVPTEERSVKMAKVRIKPHQGQHKEVQVF

SEQ ID NO: 28116 - protein, 33 aa, Artificial Sequence; identical to SEQ ID NO: 24374
  Cyclic GFR-binding peptide
  MOD_RES (3)..(3): Xaa is C or S

SEQ ID NO: 28117 - protein, 34 aa, Artificial Sequence; identical to SEQ ID NO: 24375
  Cyclic GFR-binding peptide
  MOD_RES (2)..(2): Xaa is C or S

SEQ ID NO: 28118 - protein, 44 aa, Artificial Sequence; identical to SEQ ID NO: 24376
  Cyclic GFR-binding peptide
  MOD_RES (5)..(42)..(44): Xaa is C or S

SEQ ID NO: 28119 - protein, 26 aa, Artificial Sequence
  Cyclic GFR-binding peptide
PTGQRPVQMRKIRIKPHQGQHKKATV

SEQ ID NO: 28120 - protein, 32 aa, Artificial Sequence; identical to SEQ ID NO: 24378
  Cyclic GFR-binding peptide
  MOD_RES (2)..(2): Xaa is C or S

SEQ ID NO: 28121 - protein, 38 aa, Artificial Sequence; identical to SEQ ID NO: 24379
  Cyclic GFR-binding peptide
  MOD_RES (3)..(3): Xaa is C or S

SEQ ID NO: 28122 - protein, 33 aa, Artificial Sequence; identical to SEQ ID NO: 24380
  Cyclic GFR-binding peptide
  MOD_RES (4)..(4): Xaa is C or S

SEQ ID NO: 28123 - protein, 34 aa, Artificial Sequence; identical to SEQ ID NO: 24381
  Cyclic GFR-binding peptide

SEQ ID NO: 28124 - protein, 32 aa, Artificial Sequence; identical to SEQ ID NO: 24382
  Cyclic GFR-binding peptide

SEQ ID NO: 28125 - protein, 32 aa, Artificial Sequence; identical to SEQ ID NO: 24383
  Cyclic GFR-binding peptide

SEQ ID NO: 28126 - protein, 37 aa, Artificial Sequence; identical to SEQ ID NO: 24384
  Cyclic GFR-binding peptide
  MOD_RES (34)..(36): Xaa is C or S

SEQ ID NO: 28127 - protein, 36 aa, Artificial Sequence; identical to SEQ ID NO: 24385
  Cyclic GFR-binding peptide
  MOD_RES (5)..(5): Xaa is C or S

SEQ ID NO: 28128 - protein, 25 aa, Artificial Sequence
  Cyclic GFR-binding peptide
VHHSNITVQIMEYVRKKPKLIGEMS

SEQ ID NO: 28129 - protein, 29 aa, Artificial Sequence
  Cyclic GFR-binding peptide
PTEERPVQMRKIRIKPHQGQHKKATVFLQ

SEQ ID NO: 28130 - protein, 34 aa, Artificial Sequence; identical to SEQ ID NO: 24388
  Cyclic GFR-binding peptide
  MOD_RES (3)..(3): Xaa is C or S

SEQ ID NO: 28131 - protein, 32 aa, Artificial Sequence; identical to SEQ ID NO: 24389
  Cyclic GFR-binding peptide
  MOD_RES (3)..(3): Xaa is C or S

SEQ ID NO: 28132 - protein, 31 aa, Artificial Sequence; identical to SEQ ID NO: 24390
  Cyclic GFR-binding peptide

SEQ ID NO: 28133 - protein, 33 aa, Artificial Sequence; identical to SEQ ID NO: 24391
  Cyclic GFR-binding peptide

SEQ ID NO: 28134 - protein, 30 aa, Artificial Sequence; identical to SEQ ID NO: 24392
  Cyclic GFR-binding peptide
  MOD_RES (2)..(2): Xaa is C or S

SEQ ID NO: 28135 - protein, 28 aa, Artificial Sequence
  Cyclic GFR-binding peptide
PTEERPVQMRKIRIKPHQGQHKKATVFL

SEQ ID NO: 28136 - protein, 28 aa, Artificial Sequence
  Cyclic GFR-binding peptide
TQVQLSNITVQIMEIVRKKPIFIGEMST

SEQ ID NO: 28137 - protein, 26 aa, Artificial Sequence
  Cyclic GFR-binding peptide
VQLSNITVQIMEIVRKKPIFIGEMST

SEQ ID NO: 28138 - protein, 32 aa, Artificial Sequence; identical to SEQ ID NO: 24396
  Cyclic GFR-binding peptide

SEQ ID NO: 28139 - protein, 30 aa, Artificial Sequence; identical to SEQ ID NO: 24397
  Cyclic GFR-binding peptide

SEQ ID NO: 28140 - protein, 35 aa, Artificial Sequence; identical to SEQ ID NO: 24398
  Cyclic GFR-binding peptide
  MOD_RES (34)..(34): Xaa is C or S

SEQ ID NO: 28141 - protein, 40 aa, Artificial Sequence; identical to SEQ ID NO: 24399
  Cyclic GFR-binding peptide
  MOD_RES (37)..(39): Xaa is C or S

SEQ ID NO: 28142 - protein, 29 aa, Artificial Sequence
  Cyclic GFR-binding peptide
QVQLSNITVQIMEIVRKKPIFIGEMSTLE

SEQ ID NO: 28143 - protein, 45 aa, Artificial Sequence; identical to SEQ ID NO: 24401
  Cyclic GFR-binding peptide
  MOD_RES (5)..(42)..(44): Xaa is C or S

SEQ ID NO: 28144 - protein, 34 aa, Artificial Sequence; identical to SEQ ID NO: 24402
  Cyclic GFR-binding peptide
  MOD_RES (34)..(34): Xaa is C or S

SEQ ID NO: 28145 - protein, 29 aa, Artificial Sequence
  Cyclic GFR-binding peptide
QPSRVHHSNITVQIMEYVRKKPKLLGEMS

SEQ ID NO: 28146 - protein, 38 aa, Artificial Sequence; identical to SEQ ID NO: 24404
  Cyclic GFR-binding peptide
  MOD_RES (3)..(37): Xaa is C or S

SEQ ID NO: 28147 - protein, 38 aa, Artificial Sequence; identical to SEQ ID NO: 24405
  Cyclic GFR-binding peptide
  MOD_RES (1)..(35)..(37): Xaa is C or S

SEQ ID NO: 28148 - protein, 22 aa, Artificial Sequence
  Cyclic GFR-binding peptide
RSVKMAKVRIKPHQGQHKEVQV

SEQ ID NO: 28149 - protein, 33 aa, Artificial Sequence; identical to SEQ ID NO: 24407
  Cyclic GFR-binding peptide
  MOD_RES (3)..(3): Xaa is C or S

SEQ ID NO: 28150 - protein, 29 aa, Artificial Sequence
  Cyclic GFR-binding peptide
PTEESNITMQIMRIKPHQGQHLGEMSFLQ

SEQ ID NO: 28151 - protein, 26 aa, Artificial Sequence
  Cyclic GFR-binding peptide
GQRPVQMRKIRIKPHQGQHKKATVLE

SEQ ID NO: 28152 - protein, 45 aa, Artificial Sequence; identical to SEQ ID NO: 24410
  Cyclic GFR-binding peptide
  MOD_RES (5)..(42)..(44): Xaa is C or S

SEQ ID NO: 28153 - protein, 32 aa, Artificial Sequence; identical to SEQ ID NO: 24411
  Cyclic GFR-binding peptide

SEQ ID NO: 28154 - protein, 36 aa, Artificial Sequence; identical to SEQ ID NO: 24412
  Cyclic GFR-binding peptide
  MOD_RES (7)..(7): Xaa is C or S

SEQ ID NO: 28155 - protein, 34 aa, Artificial Sequence; identical to SEQ ID NO: 24413
  Cyclic GFR-binding peptide
  MOD_RES (34)..(34): Xaa is C or S

SEQ ID NO: 28156 - protein, 34 aa, Artificial Sequence; identical to SEQ ID NO: 24414
  Cyclic GFR-binding peptide
  MOD_RES (31)..(33): Xaa is C or S

SEQ ID NO: 28157 - protein, 30 aa, Artificial Sequence; identical to SEQ ID NO: 24415
  Cyclic GFR-binding peptide
  MOD_RES (29)..(29): Xaa is C or S

SEQ ID NO: 28158 - protein, 32 aa, Artificial Sequence; identical to SEQ ID NO: 24416
  Cyclic GFR-binding peptide
  MOD_RES (4)..(4): Xaa is C or S

SEQ ID NO: 28159 - protein, 32 aa, Artificial Sequence; identical to SEQ ID NO: 24417
  Cyclic GFR-binding peptide
  MOD_RES (3)..(3): Xaa is C or S

SEQ ID NO: 28160 - protein, 35 aa, Artificial Sequence; identical to SEQ ID NO: 24418
  Cyclic GFR-binding peptide
  MOD_RES (1)..(1): Xaa is C or S

SEQ ID NO: 28161 - protein, 27 aa, Artificial Sequence
  Cyclic GFR-binding peptide
TQVQLSNITVQIMEIVRKKPIFLGEMS

SEQ ID NO: 28162 - protein, 34 aa, Artificial Sequence; identical to SEQ ID NO: 24420
  Cyclic GFR-binding peptide
  MOD_RES (6)..(6): Xaa is C or S

SEQ ID NO: 28163 - protein, 24 aa, Artificial Sequence
  Cyclic GFR-binding peptide
SNITVQIMEIVRKKPIFLGEMSTL

SEQ ID NO: 28164 - protein, 31 aa, Artificial Sequence; identical to SEQ ID NO: 24422
  Cyclic GFR-binding peptide

SEQ ID NO: 28165 - protein, 26 aa, Artificial Sequence
  Cyclic GFR-binding peptide
EESNITMQIMRIKPHQGQHLGEMSFL

SEQ ID NO: 28166 - protein, 40 aa, Artificial Sequence; identical to SEQ ID NO: 24424
  Cyclic GFR-binding peptide
  MOD_RES (4)..(38)..(40): Xaa is C or S

SEQ ID NO: 28167 - protein, 38 aa, Artificial Sequence; identical to SEQ ID NO: 24425
  Cyclic GFR-binding peptide
  MOD_RES (3)..(37): Xaa is C or S

SEQ ID NO: 28168 - protein, 34 aa, Artificial Sequence; identical to SEQ ID NO: 24426
  Cyclic GFR-binding peptide
  MOD_RES (4)..(4): Xaa is C or S

SEQ ID NO: 28169 - protein, 27 aa, Artificial Sequence
  Cyclic GFR-binding peptide
HHSNITVQIMEYVRKKPKLIGEMSRLE

SEQ ID NO: 28170 - protein, 33 aa, Artificial Sequence; identical to SEQ ID NO: 24428
  Cyclic GFR-binding peptide
  MOD_RES (33)..(33): Xaa is C or S

SEQ ID NO: 28171 - protein, 33 aa, Artificial Sequence; identical to SEQ ID NO: 24429
  Cyclic GFR-binding peptide

SEQ ID NO: 28172 - protein, 32 aa, Artificial Sequence; identical to SEQ ID NO: 24430
  Cyclic GFR-binding peptide

SEQ ID NO: 28173 - protein, 28 aa, Artificial Sequence
  Cyclic GFR-binding peptide
SRVHHRPVQVRKIEYVRKKPKLKKATVR

SEQ ID NO: 28174 - protein, 39 aa, Artificial Sequence; identical to SEQ ID NO: 24432
  Cyclic GFR-binding peptide
  MOD_RES (2)..(36)..(38): Xaa is C or S

SEQ ID NO: 28175 - protein, 30 aa, Artificial Sequence; identical to SEQ ID NO: 24433
  Cyclic GFR-binding peptide
  MOD_RES (1)..(1): Xaa is C or S

SEQ ID NO: 28176 - protein, 29 aa, Artificial Sequence
  Cyclic GFR-binding peptide
RPTQVQLSNITVQIMEIVRKKPIFLGEMS

SEQ ID NO: 28177 - protein, 40 aa, Artificial Sequence; identical to SEQ ID NO: 24435
  Cyclic GFR-binding peptide
  MOD_RES (2)..(39): Xaa is C or S

SEQ ID NO: 28178 - protein, 36 aa, Artificial Sequence; identical to SEQ ID NO: 24436
  Cyclic GFR-binding peptide
  MOD_RES (34)..(36): Xaa is C or S

SEQ ID NO: 28179 - protein, 31 aa, Artificial Sequence; identical to SEQ ID NO: 24437
  Cyclic GFR-binding peptide
  MOD_RES (1)..(1): Xaa is C or S

SEQ ID NO: 28180 - protein, 28 aa, Artificial Sequence
  Cyclic GFR-binding peptide
TQVQLRSVKVAKVEIVRKKPIFKEVQVT

SEQ ID NO: 28181 - protein, 35 aa, Artificial Sequence; identical to SEQ ID NO: 24439
  Cyclic GFR-binding peptide

SEQ ID NO: 28182 - protein, 34 aa, Artificial Sequence; identical to SEQ ID NO: 24440
  Cyclic GFR-binding peptide
  MOD_RES (32)..(34): Xaa is C or S

SEQ ID NO: 28183 - protein, 34 aa, Artificial Sequence; identical to SEQ ID NO: 24441
  Cyclic GFR-binding peptide
  MOD_RES (33)..(33): Xaa is C or S

SEQ ID NO: 28184 - protein, 34 aa, Artificial Sequence; identical to SEQ ID NO: 24442
  Cyclic GFR-binding peptide
  MOD_RES (32)..(34): Xaa is C or S

SEQ ID NO: 28185 - protein, 32 aa, Artificial Sequence; identical to SEQ ID NO: 24443
  Cyclic GFR-binding peptide

SEQ ID NO: 28186 - protein, 44 aa, Artificial Sequence; identical to SEQ ID NO: 24444
  Cyclic GFR-binding peptide
  MOD_RES (4)..(41)..(43): Xaa is C or S

SEQ ID NO: 28187 - protein, 31 aa, Artificial Sequence; identical to SEQ ID NO: 24445
  Cyclic GFR-binding peptide
  MOD_RES (30)..(30): Xaa is C or S

SEQ ID NO: 28188 - protein, 29 aa, Artificial Sequence
  Cyclic GFR-binding peptide
QLRSVKVAKVEIVRKKPIFKEVQVTLEDH

SEQ ID NO: 28189 - protein, 35 aa, Artificial Sequence; identical to SEQ ID NO: 24447
  Cyclic GFR-binding peptide
  MOD_RES (33)..(35): Xaa is C or S

SEQ ID NO: 28190 - protein, 38 aa, Artificial Sequence; identical to SEQ ID NO: 24448
  Cyclic GFR-binding peptide
  MOD_RES (1)..(38): Xaa is C or S

SEQ ID NO: 28191 - protein, 29 aa, Artificial Sequence
  Cyclic GFR-binding peptide
TEESNITMQIMRIKPHQGQHLGEMSFLQH

SEQ ID NO: 28192 - protein, 40 aa, Artificial Sequence; identical to SEQ ID NO: 24450
  Cyclic GFR-binding peptide
  MOD_RES (6)..(40): Xaa is C or S

SEQ ID NO: 28193 - protein, 24 aa, Artificial Sequence
  Cyclic GFR-binding peptide
RSVKMAKVRIKPHQGQHKEVQVFL

SEQ ID NO: 28194 - protein, 42 aa, Artificial Sequence; identical to SEQ ID NO: 24452
  Cyclic GFR-binding peptide
  MOD_RES (3)..(40)..(42): Xaa is C or S

SEQ ID NO: 28195 - protein, 26 aa, Artificial Sequence
  Cyclic GFR-binding peptide
HHRPVQVRKIEYVRKKPKLKKATVRL

SEQ ID NO: 28196 - protein, 35 aa, Artificial Sequence; identical to SEQ ID NO: 24454
  Cyclic GFR-binding peptide
  MOD_RES (34)..(34): Xaa is C or S

SEQ ID NO: 28197 - protein, 23 aa, Artificial Sequence
  Cyclic GFR-binding peptide
RPVQMRKIRIKPHQGQHKKATVL

SEQ ID NO: 28198 - protein, 23 aa, Artificial Sequence
  Cyclic GFR-binding peptide
RPVQMRKIRIKPHQGQHKKATVF

SEQ ID NO: 28199 - protein, 26 aa, Artificial Sequence
  Cyclic GFR-binding peptide
LRSVKVAKVEIVRKKPIFKEVQVTLE

SEQ ID NO: 28200 - protein, 33 aa, Artificial Sequence; identical to SEQ ID NO: 24458
  Cyclic GFR-binding peptide
  MOD_RES (32)..(32): Xaa is C or S

SEQ ID NO: 28201 - protein, 37 aa, Artificial Sequence; identical to SEQ ID NO: 24459
  Cyclic GFR-binding peptide
  MOD_RES (3)..(37): Xaa is C or S

SEQ ID NO: 28202 - protein, 31 aa, Artificial Sequence; identical to SEQ ID NO: 24460
  Cyclic GFR-binding peptide

SEQ ID NO: 28203 - protein, 30 aa, Artificial Sequence; identical to SEQ ID NO: 24461
  Cyclic GFR-binding peptide
  MOD_RES (3)..(3): Xaa is C or S

SEQ ID NO: 28204 - protein, 28 aa, Artificial Sequence
  Cyclic GFR-binding peptide
RPVQMRKIRIKPHQGQHKKATVFLQHNK

SEQ ID NO: 28205 - protein, 28 aa, Artificial Sequence
  Cyclic GFR-binding peptide
PTGQRSVKMAKVRIKPHQGQHKEVQVLE

SEQ ID NO: 28206 - protein, 33 aa, Artificial Sequence; identical to SEQ ID NO: 24464
  Cyclic GFR-binding peptide
  MOD_RES (30)..(32): Xaa is C or S

SEQ ID NO: 28207 - protein, 28 aa, Artificial Sequence
  Cyclic GFR-binding peptide
TEESNITMQIMRIKPHQGQHLGEMSFLQ

SEQ ID NO: 28208 - protein, 41 aa, Artificial Sequence; identical to SEQ ID NO: 24466
  Cyclic GFR-binding peptide
  MOD_RES (4)..(41): Xaa is C or S

SEQ ID NO: 28209 - protein, 28 aa, Artificial Sequence
  Cyclic GFR-binding peptide
LSNITVQIMEIVRKKPIFIGEMSTLEDH

SEQ ID NO: 28210 - protein, 26 aa, Artificial Sequence
  Cyclic GFR-binding peptide
QVQLSNITVQIMEIVRKKPIFLGEMS

SEQ ID NO: 28211 - protein, 30 aa, Artificial Sequence; identical to SEQ ID NO: 24469
  Cyclic GFR-binding peptide

SEQ ID NO: 28212 - protein, 31 aa, Artificial Sequence; identical to SEQ ID NO: 24470
  Cyclic GFR-binding peptide
  MOD_RES (29)..(31): Xaa is C or S

SEQ ID NO: 28213 - protein, 40 aa, Artificial Sequence; identical to SEQ ID NO: 24471
  Cyclic GFR-binding peptide
  MOD_RES (4)..(38)..(40): Xaa is C or S

SEQ ID NO: 28214 - protein, 30 aa, Artificial Sequence; identical to SEQ ID NO: 24472
  Cyclic GFR-binding peptide

SEQ ID NO: 28215 - protein, 38 aa, Artificial Sequence; identical to SEQ ID NO: 24473
  Cyclic GFR-binding peptide
  MOD_RES (7)..(7): Xaa is C or S

SEQ ID NO: 28216 - protein, 28 aa, Artificial Sequence
  Cyclic GFR-binding peptide
GQRPVQMRKIRIKPHQGQHKKATVLEEH

SEQ ID NO: 28217 - protein, 35 aa, Artificial Sequence; identical to SEQ ID NO: 24475
  Cyclic GFR-binding peptide
  MOD_RES (1)..(35): Xaa is C or S

SEQ ID NO: 28218 - protein, 38 aa, Artificial Sequence; identical to SEQ ID NO: 24476
  Cyclic GFR-binding peptide
  MOD_RES (37)..(37): Xaa is C or S

SEQ ID NO: 28219 - protein, 24 aa, Artificial Sequence
  Cyclic GFR-binding peptide
HHRPVQVRKIEYVRKKPKLKKATV

SEQ ID NO: 28220 - protein, 34 aa, Artificial Sequence; identical to SEQ ID NO: 24478
  Cyclic GFR-binding peptide
  MOD_RES (5)..(5): Xaa is C or S

SEQ ID NO: 28221 - protein, 32 aa, Artificial Sequence; identical to SEQ ID NO: 24479
  Cyclic GFR-binding peptide

SEQ ID NO: 28222 - protein, 38 aa, Artificial Sequence; identical to SEQ ID NO: 24480
  Cyclic GFR-binding peptide
  MOD_RES (36)..(38): Xaa is C or S

SEQ ID NO: 28223 - protein, 29 aa, Artificial Sequence
  Cyclic GFR-binding peptide
EERSVKMAKVRIKPHQGQHKEVQVFLQHN

SEQ ID NO: 28224 - protein, 30 aa, Artificial Sequence; identical to SEQ ID NO: 24482
  Cyclic GFR-binding peptide

SEQ ID NO: 28225 - protein, 34 aa, Artificial Sequence; identical to SEQ ID NO: 24483
  Cyclic GFR-binding peptide
  MOD_RES (2)..(2): Xaa is C or S

SEQ ID NO: 28226 - protein, 33 aa, Artificial Sequence; identical to SEQ ID NO: 24484
  Cyclic GFR-binding peptide
  MOD_RES (31)..(33): Xaa is C or S

SEQ ID NO: 28227 - protein, 25 aa, Artificial Sequence
  Cyclic GFR-binding peptide
GQSNITMQIMRIKPHQGQHIGEMSL

SEQ ID NO: 28228 - protein, 30 aa, Artificial Sequence; identical to SEQ ID NO: 24486
  Cyclic GFR-binding peptide
  MOD_RES (30)..(30): Xaa is C or S

SEQ ID NO: 28229 - protein, 36 aa, Artificial Sequence; identical to SEQ ID NO: 24487
  Cyclic GFR-binding peptide

SEQ ID NO: 28230 - protein, 36 aa, Artificial Sequence; identical to SEQ ID NO: 24488
  Cyclic GFR-binding peptide
  MOD_RES (36)..(36): Xaa is C or S

SEQ ID NO: 28231 - protein, 31 aa, Artificial Sequence; identical to SEQ ID NO: 24489
  Cyclic GFR-binding peptide
  MOD_RES (2)..(2): Xaa is C or S

SEQ ID NO: 28232 - protein, 33 aa, Artificial Sequence; identical to SEQ ID NO: 24490
  Cyclic GFR-binding peptide

SEQ ID NO: 28233 - protein, 35 aa, Artificial Sequence; identical to SEQ ID NO: 24491
  Cyclic GFR-binding peptide
  MOD_RES (3)..(3): Xaa is C or S

SEQ ID NO: 28234 - protein, 30 aa, Artificial Sequence; identical to SEQ ID NO: 24492
  Cyclic GFR-binding peptide

SEQ ID NO: 28235 - protein, 35 aa, Artificial Sequence; identical to SEQ ID NO: 24493
  Cyclic GFR-binding peptide
  MOD_RES (32)..(34): Xaa is C or S

SEQ ID NO: 28236 - protein, 34 aa, Artificial Sequence; identical to SEQ ID NO: 24494
  Cyclic GFR-binding peptide
  MOD_RES (1)..(1): Xaa is C or S

SEQ ID NO: 28237 - protein, 36 aa, Artificial Sequence; identical to SEQ ID NO: 24495
  Cyclic GFR-binding peptide

SEQ ID NO: 28238 - protein, 44 aa, Artificial Sequence; identical to SEQ ID NO: 24496
  Cyclic GFR-binding peptide
  MOD_RES (4)..(41)..(43): Xaa is C or S

SEQ ID NO: 28239 - protein, 25 aa, Artificial Sequence
  Cyclic GFR-binding peptide
RPVQMRKIRIKPHQGQHKKATVFLQ

SEQ ID NO: 28240 - protein, 31 aa, Artificial Sequence; identical to SEQ ID NO: 24498
  Cyclic GFR-binding peptide
  MOD_RES (4)..(4): Xaa is C or S

SEQ ID NO: 28241 - protein, 30 aa, Artificial Sequence; identical to SEQ ID NO: 24499
  Cyclic GFR-binding peptide
  MOD_RES (1)..(1): Xaa is C or S

SEQ ID NO: 28242 - protein, 27 aa, Artificial Sequence
  Cyclic GFR-binding peptide
HSNITVQIMEYVRKKPKLLGEMSRLEE

SEQ ID NO: 28243 - protein, 34 aa, Artificial Sequence; identical to SEQ ID NO: 24501
  Cyclic GFR-binding peptide
  MOD_RES (3)..(3): Xaa is C or S

SEQ ID NO: 28244 - protein, 34 aa, Artificial Sequence; identical to SEQ ID NO: 24502
  Cyclic GFR-binding peptide
  MOD_RES (7)..(7): Xaa is C or S

SEQ ID NO: 28245 - protein, 44 aa, Artificial Sequence; identical to SEQ ID NO: 24503
  Cyclic GFR-binding peptide
  MOD_RES (4)..(41)..(43): Xaa is C or S

SEQ ID NO: 28246 - protein, 40 aa, Artificial Sequence; identical to SEQ ID NO: 24504
  Cyclic GFR-binding peptide
  MOD_RES (4)..(4): Xaa is C or S

SEQ ID NO: 28247 - protein, 24 aa, Artificial Sequence
  Cyclic GFR-binding peptide
LSNITVQIMEIVRKKPIFLGEMST

SEQ ID NO: 28248 - protein, 31 aa, Artificial Sequence; identical to SEQ ID NO: 24506
  Cyclic GFR-binding peptide
  MOD_RES (4)..(4): Xaa is C or S

SEQ ID NO: 28249 - protein, 41 aa, Artificial Sequence; identical to SEQ ID NO: 24507
  Cyclic GFR-binding peptide
  MOD_RES (3)..(40): Xaa is C or S

SEQ ID NO: 28250 - protein, 36 aa, Artificial Sequence; identical to SEQ ID NO: 24508
  Cyclic GFR-binding peptide
  MOD_RES (4)..(4): Xaa is C or S

SEQ ID NO: 28251 - protein, 41 aa, Artificial Sequence; identical to SEQ ID NO: 24509
  Cyclic GFR-binding peptide
  MOD_RES (1)..(38)..(40): Xaa is C or S

SEQ ID NO: 28252 - protein, 38 aa, Artificial Sequence; identical to SEQ ID NO: 24510
  Cyclic GFR-binding peptide
  MOD_RES (6)..(6): Xaa is C or S

SEQ ID NO: 28253 - protein, 39 aa, Artificial Sequence; identical to SEQ ID NO: 24511
  Cyclic GFR-binding peptide
  MOD_RES (7)..(7): Xaa is C or S

SEQ ID NO: 28254 - protein, 30 aa, Artificial Sequence; identical to SEQ ID NO: 24512
  Cyclic GFR-binding peptide

SEQ ID NO: 28255 - protein, 28 aa, Artificial Sequence
  Cyclic GFR-binding peptide
VHHRPVQVRKIEYVRKKPKLKKATVRLE

SEQ ID NO: 28256 - protein, 34 aa, Artificial Sequence; identical to SEQ ID NO: 24514
  Cyclic GFR-binding peptide
  MOD_RES (2)..(2): Xaa is C or S

SEQ ID NO: 28257 - protein, 33 aa, Artificial Sequence; identical to SEQ ID NO: 24515
  Cyclic GFR-binding peptide
  MOD_RES (3)..(3): Xaa is C or S

SEQ ID NO: 28258 - protein, 34 aa, Artificial Sequence; identical to SEQ ID NO: 24516
  Cyclic GFR-binding peptide
  MOD_RES (4)..(4): Xaa is C or S

SEQ ID NO: 28259 - protein, 33 aa, Artificial Sequence; identical to SEQ ID NO: 24517
  Cyclic GFR-binding peptide
  MOD_RES (4)..(4): Xaa is C or S

SEQ ID NO: 28260 - protein, 25 aa, Artificial Sequence
  Cyclic GFR-binding peptide
RSVKMAKVRIKPHQGQHKEVQVLEE

SEQ ID NO: 28261 - protein, 37 aa, Artificial Sequence; identical to SEQ ID NO: 24519
  Cyclic GFR-binding peptide
  MOD_RES (35)..(37): Xaa is C or S

SEQ ID NO: 28262 - protein, 26 aa, Artificial Sequence
  Cyclic GFR-binding peptide
EERPVQMRKIRIKPHQGQHKKATVFL

SEQ ID NO: 28263 - protein, 32 aa, Artificial Sequence; identical to SEQ ID NO: 24521
  Cyclic GFR-binding peptide
  MOD_RES (32)..(32): Xaa is C or S

SEQ ID NO: 28264 - protein, 36 aa, Artificial Sequence; identical to SEQ ID NO: 24522
  Cyclic GFR-binding peptide
  MOD_RES (7)..(7): Xaa is C or S

SEQ ID NO: 28265 - protein, 33 aa, Artificial Sequence; identical to SEQ ID NO: 24523
  Cyclic GFR-binding peptide
  MOD_RES (5)..(5): Xaa is C or S

SEQ ID NO: 28266 - protein, 34 aa, Artificial Sequence; identical to SEQ ID NO: 24524
  Cyclic GFR-binding peptide
  MOD_RES (4)..(4): Xaa is C or S

SEQ ID NO: 28267 - protein, 40 aa, Artificial Sequence; identical to SEQ ID NO: 24525
  Cyclic GFR-binding peptide
  MOD_RES (7)..(7): Xaa is C or S

SEQ ID NO: 28268 - protein, 37 aa, Artificial Sequence; identical to SEQ ID NO: 24526
  Cyclic GFR-binding peptide
  MOD_RES (5)..(5): Xaa is C or S

SEQ ID NO: 28269 - protein, 34 aa, Artificial Sequence; identical to SEQ ID NO: 24527
  Cyclic GFR-binding peptide
  MOD_RES (6)..(6): Xaa is C or S

SEQ ID NO: 28270 - protein, 41 aa, Artificial Sequence; identical to SEQ ID NO: 24528
  Cyclic GFR-binding peptide
  MOD_RES (6)..(40): Xaa is C or S

SEQ ID NO: 28271 - protein, 41 aa, Artificial Sequence; identical to SEQ ID NO: 24529
  Cyclic GFR-binding peptide
  MOD_RES (4)..(41): Xaa is C or S

SEQ ID NO: 28272 - protein, 40 aa, Artificial Sequence; identical to SEQ ID NO: 24530
  Cyclic GFR-binding peptide
  MOD_RES (5)..(39): Xaa is C or S

SEQ ID NO: 28273 - protein, 24 aa, Artificial Sequence
  Cyclic GFR-binding peptide
ESNITMQIMRIKPHQGQHLGEMSF

SEQ ID NO: 28274 - protein, 27 aa, Artificial Sequence
  Cyclic GFR-binding peptide
HHRPVQVRKIEYVRKKPKLKKATVRLE

SEQ ID NO: 28275 - protein, 29 aa, Artificial Sequence
  Cyclic GFR-binding peptide
TQVQLSNITVQIMEIVRKKPIFLGEMSTL

SEQ ID NO: 28276 - protein, 28 aa, Artificial Sequence
  Cyclic GFR-binding peptide
SNITVQIMEYVRKKPKLIGEMSRLEEHL

SEQ ID NO: 28277 - protein, 27 aa, Artificial Sequence
  Cyclic GFR-binding peptide
SRVHHSNITVQIMEYVRKKPKLIGEMS

SEQ ID NO: 28278 - protein, 36 aa, Artificial Sequence; identical to SEQ ID NO: 24536
  Cyclic GFR-binding peptide
  MOD_RES (3)..(3): Xaa is C or S

SEQ ID NO: 28279 - protein, 32 aa, Artificial Sequence; identical to SEQ ID NO: 24537
  Cyclic GFR-binding peptide
  MOD_RES (31)..(31): Xaa is C or S

SEQ ID NO: 28280 - protein, 36 aa, Artificial Sequence; identical to SEQ ID NO: 24538
  Cyclic GFR-binding peptide
  MOD_RES (36)..(36): Xaa is C or S

SEQ ID NO: 28281 - protein, 42 aa, Artificial Sequence; identical to SEQ ID NO: 24539
  Cyclic GFR-binding peptide
  MOD_RES (7)..(41): Xaa is C or S

SEQ ID NO: 28282 - protein, 38 aa, Artificial Sequence; identical to SEQ ID NO: 24540
  Cyclic GFR-binding peptide
  MOD_RES (36)..(38): Xaa is C or S

SEQ ID NO: 28283 - protein, 32 aa, Artificial Sequence; identical to SEQ ID NO: 24541
  Cyclic GFR-binding peptide
  MOD_RES (32)..(32): Xaa is C or S

SEQ ID NO: 28284 - protein, 23 aa, Artificial Sequence
  Cyclic GFR-binding peptide
LSNITVQIMEIVRKKPIFIGEMS

SEQ ID NO: 28285 - protein, 35 aa, Artificial Sequence; identical to SEQ ID NO: 24543
  Cyclic GFR-binding peptide
  MOD_RES (33)..(35): Xaa is C or S

SEQ ID NO: 28286 - protein, 40 aa, Artificial Sequence; identical to SEQ ID NO: 24544
  Cyclic GFR-binding peptide
  MOD_RES (4)..(38)..(40): Xaa is C or S

SEQ ID NO: 28287 - protein, 36 aa, Artificial Sequence; identical to SEQ ID NO: 24545
  Cyclic GFR-binding peptide
  MOD_RES (33)..(35): Xaa is C or S

SEQ ID NO: 28288 - protein, 43 aa, Artificial Sequence; identical to SEQ ID NO: 24546
  Cyclic GFR-binding peptide
  MOD_RES (6)..(40)..(42): Xaa is C or S

SEQ ID NO: 28289 - protein, 31 aa, Artificial Sequence; identical to SEQ ID NO: 24547
  Cyclic GFR-binding peptide
  MOD_RES (31)..(31): Xaa is C or S

SEQ ID NO: 28290 - protein, 33 aa, Artificial Sequence; identical to SEQ ID NO: 24548
  Cyclic GFR-binding peptide
  MOD_RES (32)..(32): Xaa is C or S

SEQ ID NO: 28291 - protein, 27 aa, Artificial Sequence
  Cyclic GFR-binding peptide
VHHRPVQVRKIEYVRKKPKLKKATVRL

SEQ ID NO: 28292 - protein, 28 aa, Artificial Sequence
  Cyclic GFR-binding peptide
QLRSVKVAKVEIVRKKPIFKEVQVTLED

SEQ ID NO: 28293 - protein, 28 aa, Artificial Sequence
  Cyclic GFR-binding peptide
RPVQVRKIEYVRKKPKLKKATVRLEEHL

SEQ ID NO: 28294 - protein, 28 aa, Artificial Sequence
  Cyclic GFR-binding peptide
QVQLSNITVQIMEIVRKKPIFIGEMSTL

SEQ ID NO: 28295 - protein, 29 aa, Artificial Sequence
  Cyclic GFR-binding peptide
SNITVQIMEIVRKKPIFLGEMSTLEDHLA

SEQ ID NO: 28296 - protein, 38 aa, Artificial Sequence; identical to SEQ ID NO: 24554
  Cyclic GFR-binding peptide
  MOD_RES (4)..(4): Xaa is C or S

SEQ ID NO: 28297 - protein, 35 aa, Artificial Sequence; identical to SEQ ID NO: 24555
  Cyclic GFR-binding peptide
  MOD_RES (35)..(35): Xaa is C or S

SEQ ID NO: 28298 - protein, 32 aa, Artificial Sequence; identical to SEQ ID NO: 24556
  Cyclic GFR-binding peptide
  MOD_RES (5)..(5): Xaa is C or S

SEQ ID NO: 28299 - protein, 41 aa, Artificial Sequence; identical to SEQ ID NO: 24557
  Cyclic GFR-binding peptide
  MOD_RES (5)..(39)..(41): Xaa is C or S

SEQ ID NO: 28300 - protein, 26 aa, Artificial Sequence
  Cyclic GFR-binding peptide
TEERPVQMRKIRIKPHQGQHKKATVF

SEQ ID NO: 28301 - protein, 39 aa, Artificial Sequence; identical to SEQ ID NO: 24559
  Cyclic GFR-binding peptide
  MOD_RES (5)..(5): Xaa is C or S

SEQ ID NO: 28302 - protein, 38 aa, Artificial Sequence; identical to SEQ ID NO: 24560
  Cyclic GFR-binding peptide
  MOD_RES (37)..(37): Xaa is C or S

SEQ ID NO: 28303 - protein, 30 aa, Artificial Sequence; identical to SEQ ID NO: 24561
  Cyclic GFR-binding peptide

SEQ ID NO: 28304 - protein, 31 aa, Artificial Sequence; identical to SEQ ID NO: 24562
  Cyclic GFR-binding peptide
  MOD_RES (30)..(30): Xaa is C or S

SEQ ID NO: 28305 - protein, 40 aa, Artificial Sequence; identical to SEQ ID NO: 24563
  Cyclic GFR-binding peptide
  MOD_RES (2)..(39): Xaa is C or S

SEQ ID NO: 28306 - protein, 30 aa, Artificial Sequence; identical to SEQ ID NO: 24564
  Cyclic GFR-binding peptide
  MOD_RES (29)..(29): Xaa is C or S

SEQ ID NO: 28307 - protein, 29 aa, Artificial Sequence
  Cyclic GFR-binding peptide
PTQVQLSNITVQIMEIVRKKPIFIGEMST

SEQ ID NO: 28308 - protein, 39 aa, Artificial Sequence; identical to SEQ ID NO: 24566
  Cyclic GFR-binding peptide
  MOD_RES (5)..(5): Xaa is C or S

SEQ ID NO: 28309 - protein, 31 aa, Artificial Sequence; identical to SEQ ID NO: 24567
  Cyclic GFR-binding peptide
  MOD_RES (1)..(1): Xaa is C or S

SEQ ID NO: 28310 - protein, 31 aa, Artificial Sequence; identical to SEQ ID NO: 24568
  Cyclic GFR-binding peptide
  MOD_RES (2)..(2): Xaa is C or S

SEQ ID NO: 28311 - protein, 40 aa, Artificial Sequence; identical to SEQ ID NO: 24569
  Cyclic GFR-binding peptide
  MOD_RES (5)..(5): Xaa is C or S

SEQ ID NO: 28312 - protein, 31 aa, Artificial Sequence; identical to SEQ ID NO: 24570
  Cyclic GFR-binding peptide
  MOD_RES (29)..(31): Xaa is C or S

SEQ ID NO: 28313 - protein, 33 aa, Artificial Sequence; identical to SEQ ID NO: 24571
  Cyclic GFR-binding peptide
  MOD_RES (2)..(2): Xaa is C or S

SEQ ID NO: 28314 - protein, 40 aa, Artificial Sequence; identical to SEQ ID NO: 24572
  Cyclic GFR-binding peptide
  MOD_RES (1)..(38)..(40): Xaa is C or S

SEQ ID NO: 28315 - protein, 41 aa, Artificial Sequence; identical to SEQ ID NO: 24573
  Cyclic GFR-binding peptide
  MOD_RES (1)..(38)..(40): Xaa is C or S

SEQ ID NO: 28316 - protein, 29 aa, Artificial Sequence
  Cyclic GFR-binding peptide
TQVQLSNITVQIMEIVRKKPIFIGEMSTL

SEQ ID NO: 28317 - protein, 26 aa, Artificial Sequence
  Cyclic GFR-binding peptide
SNITVQIMEIVRKKPIFLGEMSTLED

SEQ ID NO: 28318 - protein, 37 aa, Artificial Sequence; identical to SEQ ID NO: 24576
  Cyclic GFR-binding peptide
  MOD_RES (1)..(1): Xaa is C or S

SEQ ID NO: 28319 - protein, 31 aa, Artificial Sequence; identical to SEQ ID NO: 24577
  Cyclic GFR-binding peptide

SEQ ID NO: 28320 - protein, 42 aa, Artificial Sequence; identical to SEQ ID NO: 24578
  Cyclic GFR-binding peptide
  MOD_RES (7)..(41): Xaa is C or S

SEQ ID NO: 28321 - protein, 30 aa, Artificial Sequence; identical to SEQ ID NO: 24579
  Cyclic GFR-binding peptide

SEQ ID NO: 28322 - protein, 36 aa, Artificial Sequence; identical to SEQ ID NO: 24580
  Cyclic GFR-binding peptide
  MOD_RES (35)..(35): Xaa is C or S

SEQ ID NO: 28323 - protein, 33 aa, Artificial Sequence; identical to SEQ ID NO: 24581
  Cyclic GFR-binding peptide
  MOD_RES (33)..(33): Xaa is C or S

SEQ ID NO: 28324 - protein, 30 aa, Artificial Sequence; identical to SEQ ID NO: 24582
  Cyclic GFR-binding peptide

SEQ ID NO: 28325 - protein, 37 aa, Artificial Sequence; identical to SEQ ID NO: 24583
  Cyclic GFR-binding peptide
  MOD_RES (4)..(4): Xaa is C or S

SEQ ID NO: 28326 - protein, 36 aa, Artificial Sequence; identical to SEQ ID NO: 24584
  Cyclic GFR-binding peptide
  MOD_RES (33)..(35): Xaa is C or S

SEQ ID NO: 28327 - protein, 41 aa, Artificial Sequence; identical to SEQ ID NO: 24585
  Cyclic GFR-binding peptide
  MOD_RES (2)..(39)..(41): Xaa is C or S

SEQ ID NO: 28328 - protein, 34 aa, Artificial Sequence; identical to SEQ ID NO: 24586
  Cyclic GFR-binding peptide
  MOD_RES (34)..(34): Xaa is C or S

SEQ ID NO: 28329 - protein, 39 aa, Artificial Sequence; identical to SEQ ID NO: 24587
  Cyclic GFR-binding peptide
  MOD_RES (5)..(5): Xaa is C or S

SEQ ID NO: 28330 - protein, 39 aa, Artificial Sequence; identical to SEQ ID NO: 24588
  Cyclic GFR-binding peptide
  MOD_RES (36)..(38): Xaa is C or S

SEQ ID NO: 28331 - protein, 37 aa, Artificial Sequence; identical to SEQ ID NO: 24589
  Cyclic GFR-binding peptide
  MOD_RES (6)..(6): Xaa is C or S

SEQ ID NO: 28332 - protein, 34 aa, Artificial Sequence; identical to SEQ ID NO: 24590
  Cyclic GFR-binding peptide

SEQ ID NO: 28333 - protein, 31 aa, Artificial Sequence; identical to SEQ ID NO: 24591
  Cyclic GFR-binding peptide
  MOD_RES (3)..(3): Xaa is C or S

SEQ ID NO: 28334 - protein, 32 aa, Artificial Sequence; identical to SEQ ID NO: 24592
  Cyclic GFR-binding peptide
  MOD_RES (4)..(4): Xaa is C or S

SEQ ID NO: 28335 - protein, 29 aa, Artificial Sequence
  Cyclic GFR-binding peptide
ERSVKMAKVRIKPHQGQHKEVQVFLQHNK

SEQ ID NO: 28336 - protein, 28 aa, Artificial Sequence
  Cyclic GFR-binding peptide
SNITMQIMRIKPHQGQHLGEMSFLQHNK

SEQ ID NO: 28337 - protein, 32 aa, Artificial Sequence; identical to SEQ ID NO: 24595
  Cyclic GFR-binding peptide
  MOD_RES (30)..(32): Xaa is C or S

SEQ ID NO: 28338 - protein, 30 aa, Artificial Sequence; identical to SEQ ID NO: 24596
  Cyclic GFR-binding peptide

SEQ ID NO: 28339 - protein, 34 aa, Artificial Sequence; identical to SEQ ID NO: 24597
  Cyclic GFR-binding peptide
  MOD_RES (1)..(1): Xaa is C or S

SEQ ID NO: 28340 - protein, 28 aa, Artificial Sequence
  Cyclic GFR-binding peptide
VPTGQSNITMQIMRIKPHQGQHIGEMSL

SEQ ID NO: 28341 - protein, 38 aa, Artificial Sequence; identical to SEQ ID NO: 24599
  Cyclic GFR-binding peptide
  MOD_RES (1)..(38): Xaa is C or S

SEQ ID NO: 28342 - protein, 38 aa, Artificial Sequence; identical to SEQ ID NO: 24600
  Cyclic GFR-binding peptide
  MOD_RES (4)..(38): Xaa is C or S

SEQ ID NO: 28343 - protein, 24 aa, Artificial Sequence
  Cyclic GFR-binding peptide
EERPVQMRKIRIKPHQGQHKKATV

SEQ ID NO: 28344 - protein, 39 aa, Artificial Sequence; identical to SEQ ID NO: 24602
  Cyclic GFR-binding peptide
  MOD_RES (1)..(38): Xaa is C or S

SEQ ID NO: 28345 - protein, 32 aa, Artificial Sequence; identical to SEQ ID NO: 24603
  Cyclic GFR-binding peptide
  MOD_RES (32)..(32): Xaa is C or S

SEQ ID NO: 28346 - protein, 37 aa, Artificial Sequence; identical to SEQ ID NO: 24604
  Cyclic GFR-binding peptide
  MOD_RES (4)..(4): Xaa is C or S

SEQ ID NO: 28347 - protein, 31 aa, Artificial Sequence; identical to SEQ ID NO: 24605
  Cyclic GFR-binding peptide

SEQ ID NO: 28348 - protein, 34 aa, Artificial Sequence; identical to SEQ ID NO: 24606
  Cyclic GFR-binding peptide
  MOD_RES (2)..(2): Xaa is C or S

SEQ ID NO: 28349 - protein, 42 aa, Artificial Sequence; identical to SEQ ID NO: 24607
  Cyclic GFR-binding peptide
  MOD_RES (5)..(39)..(41): Xaa is C or S

SEQ ID NO: 28350 - protein, 35 aa, Artificial Sequence; identical to SEQ ID NO: 24608
  Cyclic GFR-binding peptide
  MOD_RES (33)..(35): Xaa is C or S

SEQ ID NO: 28351 - protein, 23 aa, Artificial Sequence
  Cyclic GFR-binding peptide
RSVKMAKVRIKPHQGQHKEVQVF

SEQ ID NO: 28352 - protein, 30 aa, Artificial Sequence; identical to SEQ ID NO: 24610
  Cyclic GFR-binding peptide
  MOD_RES (29)..(29): Xaa is C or S

SEQ ID NO: 28353 - protein, 37 aa, Artificial Sequence; identical to SEQ ID NO: 24611
  Cyclic GFR-binding peptide
  MOD_RES (3)..(37): Xaa is C or S

SEQ ID NO: 28354 - protein, 23 aa, Artificial Sequence
  Cyclic GFR-binding peptide
RSVKMAKVRIKPHQGQHKEVQVL

SEQ ID NO: 28355 - protein, 35 aa, Artificial Sequence; identical to SEQ ID NO: 24613
  Cyclic GFR-binding peptide
  MOD_RES (1)..(35): Xaa is C or S

SEQ ID NO: 28356 - protein, 41 aa, Artificial Sequence; identical to SEQ ID NO: 24614
  Cyclic GFR-binding peptide
  MOD_RES (2)..(39)..(41): Xaa is C or S

SEQ ID NO: 28357 - protein, 33 aa, Artificial Sequence; identical to SEQ ID NO: 24615
  Cyclic GFR-binding peptide
  MOD_RES (33)..(33): Xaa is C or S

SEQ ID NO: 28358 - protein, 39 aa, Artificial Sequence; identical to SEQ ID NO: 24616
  Cyclic GFR-binding peptide
  MOD_RES (4)..(38): Xaa is C or S

SEQ ID NO: 28359 - protein, 28 aa, Artificial Sequence
  Cyclic GFR-binding peptide
PSRVHHSNITVQIMEYVRKKPKLIGEMS

SEQ ID NO: 28360 - protein, 33 aa, Artificial Sequence; identical to SEQ ID NO: 24618
  Cyclic GFR-binding peptide

SEQ ID NO: 28361 - protein, 24 aa, Artificial Sequence
  Cyclic GFR-binding peptide
HSNITVQIMEYVRKKPKLLGEMSR

SEQ ID NO: 28362 - protein, 38 aa, Artificial Sequence; identical to SEQ ID NO: 24620
  Cyclic GFR-binding peptide
  MOD_RES (2)..(36)..(38): Xaa is C or S

SEQ ID NO: 28363 - protein, 28 aa, Artificial Sequence
  Cyclic GFR-binding peptide
SNITVQIMEYVRKKPKLLGEMSRLEEHL

SEQ ID NO: 28364 - protein, 29 aa, Artificial Sequence
  Cyclic GFR-binding peptide
  MOD_RES (2)..(2): Xaa is C or S
EXVPTEERSVKMAKVRIKPHQGQHKEVQV

SEQ ID NO: 28365 - protein, 33 aa, Artificial Sequence; identical to SEQ ID NO: 24623
  Cyclic GFR-binding peptide
  MOD_RES (30)..(32): Xaa is C or S

SEQ ID NO: 28366 - protein, 33 aa, Artificial Sequence; identical to SEQ ID NO: 24624
  Cyclic GFR-binding peptide
  MOD_RES (6)..(6): Xaa is C or S

SEQ ID NO: 28367 - protein, 29 aa, Artificial Sequence
  Cyclic GFR-binding peptide
VHHRPVQVRKIEYVRKKPKLKKATVRLEE

SEQ ID NO: 28368 - protein, 42 aa, Artificial Sequence; identical to SEQ ID NO: 24626
  Cyclic GFR-binding peptide
  MOD_RES (5)..(42): Xaa is C or S

SEQ ID NO: 28369 - protein, 26 aa, Artificial Sequence
  Cyclic GFR-binding peptide
QRPVQMRKIRIKPHQGQHKKATVLEE

SEQ ID NO: 28370 - protein, 31 aa, Artificial Sequence; identical to SEQ ID NO: 24628
  Cyclic GFR-binding peptide

SEQ ID NO: 28371 - protein, 34 aa, Artificial Sequence; identical to SEQ ID NO: 24629
  Cyclic GFR-binding peptide
  MOD_RES (31)..(33): Xaa is C or S

SEQ ID NO: 28372 - protein, 23 aa, Artificial Sequence
  Cyclic GFR-binding peptide
SNITVQIMEIVRKKPIFIGEMST

SEQ ID NO: 28373 - protein, 33 aa, Artificial Sequence; identical to SEQ ID NO: 24631
  Cyclic GFR-binding peptide
  MOD_RES (1)..(1): Xaa is C or S

SEQ ID NO: 28374 - protein, 36 aa, Artificial Sequence; identical to SEQ ID NO: 24632
  Cyclic GFR-binding peptide
  MOD_RES (4)..(4): Xaa is C or S

SEQ ID NO: 28375 - protein, 34 aa, Artificial Sequence; identical to SEQ ID NO: 24633
  Cyclic GFR-binding peptide
  MOD_RES (33)..(33): Xaa is C or S

SEQ ID NO: 28376 - protein, 27 aa, Artificial Sequence
  Cyclic GFR-binding peptide
SNITMQIMRIKPHQGQHLGEMSFLQHN

SEQ ID NO: 28377 - protein, 37 aa, Artificial Sequence; identical to SEQ ID NO: 24635
  Cyclic GFR-binding peptide
  MOD_RES (34)..(36): Xaa is C or S

SEQ ID NO: 28378 - protein, 42 aa, Artificial Sequence; identical to SEQ ID NO: 24636
  Cyclic GFR-binding peptide
  MOD_RES (5)..(39)..(41): Xaa is C or S

SEQ ID NO: 28379 - protein, 28 aa, Artificial Sequence
  Cyclic GFR-binding peptide
RSVKVAKVEIVRKKPIFKEVQVTLEDHL

SEQ ID NO: 28380 - protein, 27 aa, Artificial Sequence
  Cyclic GFR-binding peptide
SNITVQIMEIVRKKPIFIGEMSTLEDH

SEQ ID NO: 28381 - protein, 39 aa, Artificial Sequence; identical to SEQ ID NO: 24639
  Cyclic GFR-binding peptide
  MOD_RES (3)..(3): Xaa is C or S

SEQ ID NO: 28382 - protein, 32 aa, Artificial Sequence; identical to SEQ ID NO: 24640
  Cyclic GFR-binding peptide

SEQ ID NO: 28383 - protein, 33 aa, Artificial Sequence; identical to SEQ ID NO: 24641
  Cyclic GFR-binding peptide
  MOD_RES (32)..(32): Xaa is C or S

SEQ ID NO: 28384 - protein, 29 aa, Artificial Sequence
  Cyclic GFR-binding peptide
PTGQRSVKMAKVRIKPHQGQHKEVQVLEE

SEQ ID NO: 28385 - protein, 35 aa, Artificial Sequence; identical to SEQ ID NO: 24643
  Cyclic GFR-binding peptide
  MOD_RES (7)..(7): Xaa is C or S

SEQ ID NO: 28386 - protein, 34 aa, Artificial Sequence; identical to SEQ ID NO: 24644
  Cyclic GFR-binding peptide

SEQ ID NO: 28387 - protein, 36 aa, Artificial Sequence; identical to SEQ ID NO: 24645
  Cyclic GFR-binding peptide
  MOD_RES (3)..(3): Xaa is C or S

SEQ ID NO: 28388 - protein, 25 aa, Artificial Sequence
  Cyclic GFR-binding peptide
HRPVQVRKIEYVRKKPKLKKATVRL

SEQ ID NO: 28389 - protein, 40 aa, Artificial Sequence; identical to SEQ ID NO: 24647
  Cyclic GFR-binding peptide
  MOD_RES (4)..(4): Xaa is C or S

SEQ ID NO: 28390 - protein, 36 aa, Artificial Sequence; identical to SEQ ID NO: 24648
  Cyclic GFR-binding peptide
  MOD_RES (1)..(35): Xaa is C or S

SEQ ID NO: 28391 - protein, 42 aa, Artificial Sequence; identical to SEQ ID NO: 24649
  Cyclic GFR-binding peptide
  MOD_RES (2)..(39)..(41): Xaa is C or S

SEQ ID NO: 28392 - protein, 35 aa, Artificial Sequence; identical to SEQ ID NO: 24650
  Cyclic GFR-binding peptide
  MOD_RES (35)..(35): Xaa is C or S

SEQ ID NO: 28393 - protein, 38 aa, Artificial Sequence; identical to SEQ ID NO: 24651
  Cyclic GFR-binding peptide
  MOD_RES (5)..(5): Xaa is C or S

SEQ ID NO: 28394 - protein, 35 aa, Artificial Sequence; identical to SEQ ID NO: 24652
  Cyclic GFR-binding peptide
  MOD_RES (34)..(34): Xaa is C or S

SEQ ID NO: 28395 - protein, 27 aa, Artificial Sequence
  Cyclic GFR-binding peptide
TGQRPVQMRKIRIKPHQGQHKKATVLE

SEQ ID NO: 28396 - protein, 35 aa, Artificial Sequence; identical to SEQ ID NO: 24654
  Cyclic GFR-binding peptide
  MOD_RES (33)..(35): Xaa is C or S

SEQ ID NO: 28397 - protein, 33 aa, Artificial Sequence; identical to SEQ ID NO: 24655
  Cyclic GFR-binding peptide
  MOD_RES (1)..(1): Xaa is C or S

SEQ ID NO: 28398 - protein, 31 aa, Artificial Sequence; identical to SEQ ID NO: 24656
  Cyclic GFR-binding peptide

SEQ ID NO: 28399 - protein, 36 aa, Artificial Sequence; identical to SEQ ID NO: 24657
  Cyclic GFR-binding peptide
  MOD_RES (5)..(5): Xaa is C or S

SEQ ID NO: 28400 - protein, 33 aa, Artificial Sequence; identical to SEQ ID NO: 24658
  Cyclic GFR-binding peptide
  MOD_RES (33)..(33): Xaa is C or S

SEQ ID NO: 28401 - protein, 34 aa, Artificial Sequence; identical to SEQ ID NO: 24659
  Cyclic GFR-binding peptide
  MOD_RES (5)..(5): Xaa is C or S

SEQ ID NO: 28402 - protein, 40 aa, Artificial Sequence; identical to SEQ ID NO: 24660
  Cyclic GFR-binding peptide
  MOD_RES (7)..(7): Xaa is C or S

SEQ ID NO: 28403 - protein, 27 aa, Artificial Sequence
  Cyclic GFR-binding peptide
GQSNITMQIMRIKPHQGQHIGEMSLEE

SEQ ID NO: 28404 - protein, 35 aa, Artificial Sequence; identical to SEQ ID NO: 24662
  Cyclic GFR-binding peptide
  MOD_RES (2)..(2): Xaa is C or S

SEQ ID NO: 28405 - protein, 30 aa, Artificial Sequence; identical to SEQ ID NO: 24663
  Cyclic GFR-binding peptide

SEQ ID NO: 28406 - protein, 32 aa, Artificial Sequence; identical to SEQ ID NO: 24664
  Cyclic GFR-binding peptide

SEQ ID NO: 28407 - protein, 31 aa, Artificial Sequence; identical to SEQ ID NO: 24665
  Cyclic GFR-binding peptide
  MOD_RES (31)..(31): Xaa is C or S

SEQ ID NO: 28408 - protein, 38 aa, Artificial Sequence; identical to SEQ ID NO: 24666
  Cyclic GFR-binding peptide
  MOD_RES (4)..(38): Xaa is C or S

SEQ ID NO: 28409 - protein, 25 aa, Artificial Sequence
  Cyclic GFR-binding peptide
RSVKMAKVRIKPHQGQHKEVQVFLQ

SEQ ID NO: 28410 - protein, 35 aa, Artificial Sequence; identical to SEQ ID NO: 24668
  Cyclic GFR-binding peptide
  MOD_RES (1)..(1): Xaa is C or S

SEQ ID NO: 28411 - protein, 34 aa, Artificial Sequence; identical to SEQ ID NO: 24669
  Cyclic GFR-binding peptide
  MOD_RES (3)..(3): Xaa is C or S

SEQ ID NO: 28412 - protein, 36 aa, Artificial Sequence; identical to SEQ ID NO: 24670
  Cyclic GFR-binding peptide
  MOD_RES (7)..(7): Xaa is C or S

SEQ ID NO: 28413 - protein, 28 aa, Artificial Sequence
  Cyclic GFR-binding peptide
VQLSNITVQIMEIVRKKPIFIGEMSTLE

SEQ ID NO: 28414 - protein, 30 aa, Artificial Sequence; identical to SEQ ID NO: 24672
  Cyclic GFR-binding peptide

SEQ ID NO: 28415 - protein, 36 aa, Artificial Sequence; identical to SEQ ID NO: 24673
  Cyclic GFR-binding peptide
  MOD_RES (1)..(35): Xaa is C or S

SEQ ID NO: 28416 - protein, 34 aa, Artificial Sequence; identical to SEQ ID NO: 24674
  Cyclic GFR-binding peptide
  MOD_RES (5)..(5): Xaa is C or S

SEQ ID NO: 28417 - protein, 31 aa, Artificial Sequence; identical to SEQ ID NO: 24675
  Cyclic GFR-binding peptide

SEQ ID NO: 28418 - protein, 35 aa, Artificial Sequence; identical to SEQ ID NO: 24676
  Cyclic GFR-binding peptide
  MOD_RES (2)..(2): Xaa is C or S

SEQ ID NO: 28419 - protein, 34 aa, Artificial Sequence; identical to SEQ ID NO: 24677
  Cyclic GFR-binding peptide
  MOD_RES (6)..(6): Xaa is C or S

SEQ ID NO: 28420 - protein, 36 aa, Artificial Sequence; identical to SEQ ID NO: 24678
  Cyclic GFR-binding peptide
  MOD_RES (35)..(35): Xaa is C or S

SEQ ID NO: 28421 - protein, 31 aa, Artificial Sequence; identical to SEQ ID NO: 24679
  Cyclic GFR-binding peptide

SEQ ID NO: 28422 - protein, 27 aa, Artificial Sequence
  Cyclic GFR-binding peptide
PTEERPVQMRKIRIKPHQGQHKKATVF

SEQ ID NO: 28423 - protein, 25 aa, Artificial Sequence
  Cyclic GFR-binding peptide
TGQSNITMQIMRIKPHQGQHIGEMS

SEQ ID NO: 28424 - protein, 35 aa, Artificial Sequence; identical to SEQ ID NO: 24682
  Cyclic GFR-binding peptide
  MOD_RES (3)..(3): Xaa is C or S

SEQ ID NO: 28425 - protein, 41 aa, Artificial Sequence; identical to SEQ ID NO: 24683
  Cyclic GFR-binding peptide
  MOD_RES (5)..(5): Xaa is C or S

SEQ ID NO: 28426 - protein, 30 aa, Artificial Sequence; identical to SEQ ID NO: 24684
  Cyclic GFR-binding peptide

SEQ ID NO: 28427 - protein, 36 aa, Artificial Sequence; identical to SEQ ID NO: 24685
  Cyclic GFR-binding peptide
  MOD_RES (1)..(1): Xaa is C or S

SEQ ID NO: 28428 - protein, 35 aa, Artificial Sequence; identical to SEQ ID NO: 24686
  Cyclic GFR-binding peptide
  MOD_RES (32)..(34): Xaa is C or S

SEQ ID NO: 28429 - protein, 34 aa, Artificial Sequence; identical to SEQ ID NO: 24687
  Cyclic GFR-binding peptide
  MOD_RES (4)..(4): Xaa is C or S

SEQ ID NO: 28430 - protein, 35 aa, Artificial Sequence; identical to SEQ ID NO: 24688
  Cyclic GFR-binding peptide
  MOD_RES (4)..(4): Xaa is C or S

SEQ ID NO: 28431 - protein, 35 aa, Artificial Sequence; identical to SEQ ID NO: 24689
  Cyclic GFR-binding peptide
  MOD_RES (33)..(35): Xaa is C or S

SEQ ID NO: 28432 - protein, 32 aa, Artificial Sequence; identical to SEQ ID NO: 24690
  Cyclic GFR-binding peptide

SEQ ID NO: 28433 - protein, 42 aa, Artificial Sequence; identical to SEQ ID NO: 24691
  Cyclic GFR-binding peptide
  MOD_RES (3)..(40)..(42): Xaa is C or S

SEQ ID NO: 28434 - protein, 35 aa, Artificial Sequence; identical to SEQ ID NO: 24692
  Cyclic GFR-binding peptide
  MOD_RES (4)..(4): Xaa is C or S

SEQ ID NO: 28435 - protein, 30 aa, Artificial Sequence; identical to SEQ ID NO: 24693
  Cyclic GFR-binding peptide

SEQ ID NO: 28436 - protein, 32 aa, Artificial Sequence; identical to SEQ ID NO: 24694
  Cyclic GFR-binding peptide
  MOD_RES (32)..(32): Xaa is C or S

SEQ ID NO: 28437 - protein, 30 aa, Artificial Sequence; identical to SEQ ID NO: 24695
  Cyclic GFR-binding peptide

SEQ ID NO: 28438 - protein, 34 aa, Artificial Sequence; identical to SEQ ID NO: 24696
  Cyclic GFR-binding peptide
  MOD_RES (5)..(5): Xaa is C or S

SEQ ID NO: 28439 - protein, 31 aa, Artificial Sequence; identical to SEQ ID NO: 24697
  Cyclic GFR-binding peptide

SEQ ID NO: 28440 - protein, 32 aa, Artificial Sequence; identical to SEQ ID NO: 24698
  Cyclic GFR-binding peptide

SEQ ID NO: 28441 - protein, 28 aa, Artificial Sequence
  Cyclic GFR-binding peptide
  MOD_RES (1)..(1): Xaa is C or S
XVPTGQRSVKMAKVRIKPHQGQHKEVQV

SEQ ID NO: 28442 - protein, 34 aa, Artificial Sequence; identical to SEQ ID NO: 24700
  Cyclic GFR-binding peptide
  MOD_RES (31)..(33): Xaa is C or S

SEQ ID NO: 28443 - protein, 33 aa, Artificial Sequence; identical to SEQ ID NO: 24701
  Cyclic GFR-binding peptide
  MOD_RES (33)..(33): Xaa is C or S

SEQ ID NO: 28444 - protein, 37 aa, Artificial Sequence; identical to SEQ ID NO: 24702
  Cyclic GFR-binding peptide
  MOD_RES (4)..(4): Xaa is C or S

SEQ ID NO: 28445 - protein, 27 aa, Artificial Sequence
  Cyclic GFR-binding peptide
PTEESNITMQIMRIKPHQGQHLGEMSF

SEQ ID NO: 28446 - protein, 36 aa, Artificial Sequence; identical to SEQ ID NO: 24704
  Cyclic GFR-binding peptide
  MOD_RES (2)..(2): Xaa is C or S

SEQ ID NO: 28447 - protein, 31 aa, Artificial Sequence; identical to SEQ ID NO: 24705
  Cyclic GFR-binding peptide

SEQ ID NO: 28448 - protein, 28 aa, Artificial Sequence
  Cyclic GFR-binding peptide
RVHHSNITVQIMEYVRKKPKLIGEMSRL

SEQ ID NO: 28449 - protein, 32 aa, Artificial Sequence; identical to SEQ ID NO: 24707
  Cyclic GFR-binding peptide
  MOD_RES (3)..(3): Xaa is C or S

SEQ ID NO: 28450 - protein, 26 aa, Artificial Sequence
  Cyclic GFR-binding peptide
RPVQVRKIEYVRKKPKLKKATVRLEE

SEQ ID NO: 28451 - protein, 30 aa, Artificial Sequence; identical to SEQ ID NO: 24709
  Cyclic GFR-binding peptide

SEQ ID NO: 28452 - protein, 34 aa, Artificial Sequence; identical to SEQ ID NO: 24710
  Cyclic GFR-binding peptide
  MOD_RES (31)..(33): Xaa is C or S

SEQ ID NO: 28453 - protein, 39 aa, Artificial Sequence; identical to SEQ ID NO: 24711
  Cyclic GFR-binding peptide
  MOD_RES (6)..(6): Xaa is C or S

SEQ ID NO: 28454 - protein, 38 aa, Artificial Sequence; identical to SEQ ID NO: 24712
  Cyclic GFR-binding peptide
  MOD_RES (1)..(35)..(37): Xaa is C or S

SEQ ID NO: 28455 - protein, 37 aa, Artificial Sequence; identical to SEQ ID NO: 24713
  Cyclic GFR-binding peptide
  MOD_RES (7)..(7): Xaa is C or S

SEQ ID NO: 28456 - protein, 31 aa, Artificial Sequence; identical to SEQ ID NO: 24714
  Cyclic GFR-binding peptide
  MOD_RES (1)..(1): Xaa is C or S

SEQ ID NO: 28457 - protein, 44 aa, Artificial Sequence; identical to SEQ ID NO: 24715
  Cyclic GFR-binding peptide
  MOD_RES (7)..(41)..(43): Xaa is C or S

SEQ ID NO: 28458 - protein, 36 aa, Artificial Sequence; identical to SEQ ID NO: 24716
  Cyclic GFR-binding peptide
  MOD_RES (1)..(1): Xaa is C or S

SEQ ID NO: 28459 - protein, 39 aa, Artificial Sequence; identical to SEQ ID NO: 24717
  Cyclic GFR-binding peptide
  MOD_RES (4)..(38): Xaa is C or S

SEQ ID NO: 28460 - protein, 43 aa, Artificial Sequence; identical to SEQ ID NO: 24718
  Cyclic GFR-binding peptide
  MOD_RES (3)..(40)..(42): Xaa is C or S

SEQ ID NO: 28461 - protein, 36 aa, Artificial Sequence; identical to SEQ ID NO: 24719
  Cyclic GFR-binding peptide
  MOD_RES (2)..(36): Xaa is C or S

SEQ ID NO: 28462 - protein, 28 aa, Artificial Sequence
  Cyclic GFR-binding peptide
PTGQRPVQMRKIRIKPHQGQHKKATVLE

SEQ ID NO: 28463 - protein, 25 aa, Artificial Sequence
  Cyclic GFR-binding peptide
HHSNITVQIMEYVRKKPKLIGEMSR

SEQ ID NO: 28464 - protein, 42 aa, Artificial Sequence; identical to SEQ ID NO: 24722
  Cyclic GFR-binding peptide
  MOD_RES (5)..(39)..(41): Xaa is C or S

SEQ ID NO: 28465 - protein, 34 aa, Artificial Sequence; identical to SEQ ID NO: 24723
  Cyclic GFR-binding peptide
  MOD_RES (3)..(3): Xaa is C or S

SEQ ID NO: 28466 - protein, 33 aa, Artificial Sequence; identical to SEQ ID NO: 24724
  Cyclic GFR-binding peptide
  MOD_RES (4)..(4): Xaa is C or S

SEQ ID NO: 28467 - protein, 28 aa, Artificial Sequence
  Cyclic GFR-binding peptide
TEERSVKMAKVRIKPHQGQHKEVQVFLQ

SEQ ID NO: 28468 - protein, 29 aa, Artificial Sequence
  Cyclic GFR-binding peptide
VPTGQRSVKMAKVRIKPHQGQHKEVQVLE

SEQ ID NO: 28469 - protein, 32 aa, Artificial Sequence; identical to SEQ ID NO: 24727
  Cyclic GFR-binding peptide
  MOD_RES (32)..(32): Xaa is C or S

SEQ ID NO: 28470 - protein, 44 aa, Artificial Sequence; identical to SEQ ID NO: 24728
  Cyclic GFR-binding peptide
  MOD_RES (7)..(41)..(43): Xaa is C or S

SEQ ID NO: 28471 - protein, 37 aa, Artificial Sequence; identical to SEQ ID NO: 24729
  Cyclic GFR-binding peptide
  MOD_RES (5)..(5): Xaa is C or S

SEQ ID NO: 28472 - protein, 32 aa, Artificial Sequence; identical to SEQ ID NO: 24730
  Cyclic GFR-binding peptide
  MOD_RES (4)..(4): Xaa is C or S

SEQ ID NO: 28473 - protein, 37 aa, Artificial Sequence; identical to SEQ ID NO: 24731
  Cyclic GFR-binding peptide
  MOD_RES (36)..(36): Xaa is C or S

SEQ ID NO: 28474 - protein, 31 aa, Artificial Sequence; identical to SEQ ID NO: 24732
  Cyclic GFR-binding peptide

SEQ ID NO: 28475 - protein, 36 aa, Artificial Sequence; identical to SEQ ID NO: 24733
  Cyclic GFR-binding peptide
  MOD_RES (4)..(4): Xaa is C or S

SEQ ID NO: 28476 - protein, 36 aa, Artificial Sequence; identical to SEQ ID NO: 24734
  Cyclic GFR-binding peptide
  MOD_RES (33)..(35): Xaa is C or S

SEQ ID NO: 28477 - protein, 35 aa, Artificial Sequence; identical to SEQ ID NO: 24735
  Cyclic GFR-binding peptide
  MOD_RES (5)..(5): Xaa is C or S

SEQ ID NO: 28478 - protein, 30 aa, Artificial Sequence; identical to SEQ ID NO: 24736
  Cyclic GFR-binding peptide

SEQ ID NO: 28479 - protein, 31 aa, Artificial Sequence; identical to SEQ ID NO: 24737
  Cyclic GFR-binding peptide

SEQ ID NO: 28480 - protein, 33 aa, Artificial Sequence; identical to SEQ ID NO: 24738
  Cyclic GFR-binding peptide
  MOD_RES (5)..(5): Xaa is C or S

SEQ ID NO: 28481 - protein, 27 aa, Artificial Sequence
  Cyclic GFR-binding peptide
RSVKVAKVEIVRKKPIFKEVQVTLEDH

SEQ ID NO: 28482 - protein, 34 aa, Artificial Sequence; identical to SEQ ID NO: 24740
  Cyclic GFR-binding peptide
  MOD_RES (2)..(2): Xaa is C or S

SEQ ID NO: 28483 - protein, 31 aa, Artificial Sequence; identical to SEQ ID NO: 24741
  Cyclic GFR-binding peptide

SEQ ID NO: 28484 - protein, 39 aa, Artificial Sequence; identical to SEQ ID NO: 24742
  Cyclic GFR-binding peptide
  MOD_RES (1)..(38): Xaa is C or S

SEQ ID NO: 28485 - protein, 23 aa, Artificial Sequence
  Cyclic GFR-binding peptide
QRPVQMRKIRIKPHQGQHKKATV

SEQ ID NO: 28486 - protein, 34 aa, Artificial Sequence; identical to SEQ ID NO: 24744
  Cyclic GFR-binding peptide
  MOD_RES (3)..(3): Xaa is C or S

SEQ ID NO: 28487 - protein, 38 aa, Artificial Sequence; identical to SEQ ID NO: 24745
  Cyclic GFR-binding peptide
  MOD_RES (5)..(5): Xaa is C or S

SEQ ID NO: 28488 - protein, 30 aa, Artificial Sequence; identical to SEQ ID NO: 24746
  Cyclic GFR-binding peptide
  MOD_RES (3)..(3): Xaa is C or S

SEQ ID NO: 28489 - protein, 24 aa, Artificial Sequence
  Cyclic GFR-binding peptide
EESNITMQIMRIKPHQGQHLGEMS

SEQ ID NO: 28490 - protein, 32 aa, Artificial Sequence; identical to SEQ ID NO: 24748
  Cyclic GFR-binding peptide
  MOD_RES (2)..(2): Xaa is C or S

SEQ ID NO: 28491 - protein, 31 aa, Artificial Sequence; identical to SEQ ID NO: 24749
  Cyclic GFR-binding peptide
  MOD_RES (30)..(30): Xaa is C or S

SEQ ID NO: 28492 - protein, 34 aa, Artificial Sequence; identical to SEQ ID NO: 24750
  Cyclic GFR-binding peptide
  MOD_RES (4)..(4): Xaa is C or S

SEQ ID NO: 28493 - protein, 33 aa, Artificial Sequence; identical to SEQ ID NO: 24751
  Cyclic GFR-binding peptide
  MOD_RES (6)..(6): Xaa is C or S

SEQ ID NO: 28494 - protein, 32 aa, Artificial Sequence; identical to SEQ ID NO: 24752
  Cyclic GFR-binding peptide

SEQ ID NO: 28495 - protein, 38 aa, Artificial Sequence; identical to SEQ ID NO: 24753
  Cyclic GFR-binding peptide
  MOD_RES (7)..(7): Xaa is C or S

SEQ ID NO: 28496 - protein, 31 aa, Artificial Sequence; identical to SEQ ID NO: 24754
  Cyclic GFR-binding peptide
  MOD_RES (30)..(30): Xaa is C or S

SEQ ID NO: 28497 - protein, 43 aa, Artificial Sequence; identical to SEQ ID NO: 24755
  Cyclic GFR-binding peptide
  MOD_RES (4)..(41)..(43): Xaa is C or S

SEQ ID NO: 28498 - protein, 30 aa, Artificial Sequence; identical to SEQ ID NO: 24756
  Cyclic GFR-binding peptide
  MOD_RES (30)..(30): Xaa is C or S

SEQ ID NO: 28499 - protein, 34 aa, Artificial Sequence; identical to SEQ ID NO: 24757
  Cyclic GFR-binding peptide
  MOD_RES (1)..(1): Xaa is C or S

SEQ ID NO: 28500 - protein, 39 aa, Artificial Sequence; identical to SEQ ID NO: 24758
  Cyclic GFR-binding peptide
  MOD_RES (3)..(3): Xaa is C or S

SEQ ID NO: 28501 - protein, 29 aa, Artificial Sequence
  Cyclic GFR-binding peptide
PSRVHHSNITVQIMEYVRKKPKLIGEMSR

SEQ ID NO: 28502 - protein, 35 aa, Artificial Sequence; identical to SEQ ID NO: 24760
  Cyclic GFR-binding peptide
  MOD_RES (2)..(2): Xaa is C or S

SEQ ID NO: 28503 - protein, 30 aa, Artificial Sequence; identical to SEQ ID NO: 24761
  Cyclic GFR-binding peptide

SEQ ID NO: 28504 - protein, 33 aa, Artificial Sequence; identical to SEQ ID NO: 24762
  Cyclic GFR-binding peptide
  MOD_RES (31)..(33): Xaa is C or S

SEQ ID NO: 28505 - protein, 37 aa, Artificial Sequence; identical to SEQ ID NO: 24763
  Cyclic GFR-binding peptide
  MOD_RES (37)..(37): Xaa is C or S

SEQ ID NO: 28506 - protein, 30 aa, Artificial Sequence; identical to SEQ ID NO: 24764
  Cyclic GFR-binding peptide

SEQ ID NO: 28507 - protein, 36 aa, Artificial Sequence; identical to SEQ ID NO: 24765
  Cyclic GFR-binding peptide
  MOD_RES (1)..(35): Xaa is C or S

SEQ ID NO: 28508 - protein, 40 aa, Artificial Sequence; identical to SEQ ID NO: 24766
  Cyclic GFR-binding peptide
  MOD_RES (37)..(39): Xaa is C or S

SEQ ID NO: 28509 - protein, 40 aa, Artificial Sequence; identical to SEQ ID NO: 24767
  Cyclic GFR-binding peptide
  MOD_RES (3)..(40): Xaa is C or S

SEQ ID NO: 28510 - protein, 33 aa, Artificial Sequence; identical to SEQ ID NO: 24768
  Cyclic GFR-binding peptide

SEQ ID NO: 28511 - protein, 36 aa, Artificial Sequence; identical to SEQ ID NO: 24769
  Cyclic GFR-binding peptide
  MOD_RES (3)..(3): Xaa is C or S

SEQ ID NO: 28512 - protein, 36 aa, Artificial Sequence; identical to SEQ ID NO: 24770
  Cyclic GFR-binding peptide
  MOD_RES (2)..(2): Xaa is C or S

SEQ ID NO: 28513 - protein, 35 aa, Artificial Sequence; identical to SEQ ID NO: 24771
  Cyclic GFR-binding peptide

SEQ ID NO: 28514 - protein, 39 aa, Artificial Sequence; identical to SEQ ID NO: 24772
  Cyclic GFR-binding peptide
  MOD_RES (6)..(6): Xaa is C or S

SEQ ID NO: 28515 - protein, 31 aa, Artificial Sequence; identical to SEQ ID NO: 24773
  Cyclic GFR-binding peptide

SEQ ID NO: 28516 - protein, 43 aa, Artificial Sequence; identical to SEQ ID NO: 24774
  Cyclic GFR-binding peptide
  MOD_RES (7)..(41)..(43): Xaa is C or S

SEQ ID NO: 28517 - protein, 40 aa, Artificial Sequence; identical to SEQ ID NO: 24775
  Cyclic GFR-binding peptide
  MOD_RES (1)..(38)..(40): Xaa is C or S

SEQ ID NO: 28518 - protein, 40 aa, Artificial Sequence; identical to SEQ ID NO: 24776
  Cyclic GFR-binding peptide
  MOD_RES (1)..(38)..(40): Xaa is C or S

SEQ ID NO: 28519 - protein, 33 aa, Artificial Sequence; identical to SEQ ID NO: 24777
  Cyclic GFR-binding peptide
  MOD_RES (3)..(3): Xaa is C or S

SEQ ID NO: 28520 - protein, 36 aa, Artificial Sequence; identical to SEQ ID NO: 24778
  Cyclic GFR-binding peptide
  MOD_RES (1)..(1): Xaa is C or S

SEQ ID NO: 28521 - protein, 24 aa, Artificial Sequence
  Cyclic GFR-binding peptide
SNITVQIMEYVRKKPKLIGEMSRL

SEQ ID NO: 28522 - protein, 33 aa, Artificial Sequence; identical to SEQ ID NO: 24780
  Cyclic GFR-binding peptide

SEQ ID NO: 28523 - protein, 28 aa, Artificial Sequence
  Cyclic GFR-binding peptide
VQLSNITVQIMEIVRKKPIFLGEMSTLE

SEQ ID NO: 28524 - protein, 33 aa, Artificial Sequence; identical to SEQ ID NO: 24782
  Cyclic GFR-binding peptide
  MOD_RES (33)..(33): Xaa is C or S

SEQ ID NO: 28525 - protein, 33 aa, Artificial Sequence; identical to SEQ ID NO: 24783
  Cyclic GFR-binding peptide

SEQ ID NO: 28526 - protein, 27 aa, Artificial Sequence
  Cyclic GFR-binding peptide
EERSVKMAKVRIKPHQGQHKEVQVFLQ

SEQ ID NO: 28527 - protein, 28 aa, Artificial Sequence
  Cyclic GFR-binding peptide
TGQRPVQMRKIRIKPHQGQHKKATVLEE

SEQ ID NO: 28528 - protein, 34 aa, Artificial Sequence; identical to SEQ ID NO: 24786
  Cyclic GFR-binding peptide

SEQ ID NO: 28529 - protein, 35 aa, Artificial Sequence; identical to SEQ ID NO: 24787
  Cyclic GFR-binding peptide
  MOD_RES (5)..(5): Xaa is C or S

SEQ ID NO: 28530 - protein, 26 aa, Artificial Sequence
  Cyclic GFR-binding peptide
SNITMQIMRIKPHQGQHIGEMSLEEH

SEQ ID NO: 28531 - protein, 40 aa, Artificial Sequence; identical to SEQ ID NO: 24789
  Cyclic GFR-binding peptide
  MOD_RES (4)..(4): Xaa is C or S

SEQ ID NO: 28532 - protein, 30 aa, Artificial Sequence; identical to SEQ ID NO: 24790
  Cyclic GFR-binding peptide

SEQ ID NO: 28533 - protein, 30 aa, Artificial Sequence; identical to SEQ ID NO: 24791
  Cyclic GFR-binding peptide

SEQ ID NO: 28534 - protein, 34 aa, Artificial Sequence; identical to SEQ ID NO: 24792
  Cyclic GFR-binding peptide
  MOD_RES (34)..(34): Xaa is C or S

SEQ ID NO: 28535 - protein, 31 aa, Artificial Sequence; identical to SEQ ID NO: 24793
  Cyclic GFR-binding peptide

SEQ ID NO: 28536 - protein, 33 aa, Artificial Sequence; identical to SEQ ID NO: 24794
  Cyclic GFR-binding peptide
  MOD_RES (33)..(33): Xaa is C or S

SEQ ID NO: 28537 - protein, 34 aa, Artificial Sequence; identical to SEQ ID NO: 24795
  Cyclic GFR-binding peptide
  MOD_RES (1)..(1): Xaa is C or S

SEQ ID NO: 28538 - protein, 27 aa, Artificial Sequence
  Cyclic GFR-binding peptide
QVQLSNITVQIMEIVRKKPIFIGEMST

SEQ ID NO: 28539 - protein, 36 aa, Artificial Sequence; identical to SEQ ID NO: 24797
  Cyclic GFR-binding peptide
  MOD_RES (2)..(2): Xaa is C or S

SEQ ID NO: 28540 - protein, 31 aa, Artificial Sequence; identical to SEQ ID NO: 24798
  Cyclic GFR-binding peptide

SEQ ID NO: 28541 - protein, 40 aa, Artificial Sequence; identical to SEQ ID NO: 24799
  Cyclic GFR-binding peptide
  MOD_RES (7)..(7): Xaa is C or S

SEQ ID NO: 28542 - protein, 32 aa, Artificial Sequence; identical to SEQ ID NO: 24800
  Cyclic GFR-binding peptide
  MOD_RES (1)..(1): Xaa is C or S

SEQ ID NO: 28543 - protein, 31 aa, Artificial Sequence; identical to SEQ ID NO: 24801
  Cyclic GFR-binding peptide

SEQ ID NO: 28544 - protein, 36 aa, Artificial Sequence; identical to SEQ ID NO: 24802
  Cyclic GFR-binding peptide

SEQ ID NO: 28545 - protein, 25 aa, Artificial Sequence
  Cyclic GFR-binding peptide
LRSVKVAKVEIVRKKPIFKEVQVTL

SEQ ID NO: 28546 - protein, 26 aa, Artificial Sequence
  Cyclic GFR-binding peptide
VQLSNITVQIMEIVRKKPIFLGEMST

SEQ ID NO: 28547 - protein, 40 aa, Artificial Sequence; identical to SEQ ID NO: 24805
  Cyclic GFR-binding peptide
  MOD_RES (2)..(39): Xaa is C or S

SEQ ID NO: 28548 - protein, 27 aa, Artificial Sequence
  Cyclic GFR-binding peptide
RSVKMAKVRIKPHQGQHKEVQVLEEHS

SEQ ID NO: 28549 - protein, 38 aa, Artificial Sequence; identical to SEQ ID NO: 24807
  Cyclic GFR-binding peptide
  MOD_RES (3)..(3): Xaa is C or S

SEQ ID NO: 28550 - protein, 32 aa, Artificial Sequence; identical to SEQ ID NO: 24808
  Cyclic GFR-binding peptide
  MOD_RES (30)..(32): Xaa is C or S

SEQ ID NO: 28551 - protein, 38 aa, Artificial Sequence; identical to SEQ ID NO: 24809
  Cyclic GFR-binding peptide
  MOD_RES (1)..(35)..(37): Xaa is C or S

SEQ ID NO: 28552 - protein, 35 aa, Artificial Sequence; identical to SEQ ID NO: 24810
  Cyclic GFR-binding peptide
  MOD_RES (4)..(4): Xaa is C or S

SEQ ID NO: 28553 - protein, 43 aa, Artificial Sequence; identical to SEQ ID NO: 24811
  Cyclic GFR-binding peptide
  MOD_RES (4)..(41)..(43): Xaa is C or S

SEQ ID NO: 28554 - protein, 31 aa, Artificial Sequence; identical to SEQ ID NO: 24812
  Cyclic GFR-binding peptide

SEQ ID NO: 28555 - protein, 40 aa, Artificial Sequence; identical to SEQ ID NO: 24813
  Cyclic GFR-binding peptide
  MOD_RES (2)..(39): Xaa is C or S

SEQ ID NO: 28556 - protein, 35 aa, Artificial Sequence; identical to SEQ ID NO: 24814
  Cyclic GFR-binding peptide
  MOD_RES (7)..(7): Xaa is C or S

SEQ ID NO: 28557 - protein, 43 aa, Artificial Sequence; identical to SEQ ID NO: 24815
  Cyclic GFR-binding peptide
  MOD_RES (4)..(41)..(43): Xaa is C or S

SEQ ID NO: 28558 - protein, 26 aa, Artificial Sequence
  Cyclic GFR-binding peptide
LSNITVQIMEIVRKKPIFLGEMSTLE

SEQ ID NO: 28559 - protein, 43 aa, Artificial Sequence; identical to SEQ ID NO: 24817
  Cyclic GFR-binding peptide
  MOD_RES (3)..(40)..(42): Xaa is C or S

SEQ ID NO: 28560 - protein, 24 aa, Artificial Sequence
  Cyclic GFR-binding peptide
EERSVKMAKVRIKPHQGQHKEVQV

SEQ ID NO: 28561 - protein, 33 aa, Artificial Sequence; identical to SEQ ID NO: 24819
  Cyclic GFR-binding peptide

SEQ ID NO: 28562 - protein, 35 aa, Artificial Sequence; identical to SEQ ID NO: 24820
  Cyclic GFR-binding peptide
  MOD_RES (33)..(35): Xaa is C or S

SEQ ID NO: 28563 - protein, 28 aa, Artificial Sequence
  Cyclic GFR-binding peptide
PSRVHHSNITVQIMEYVRKKPKLLGEMS

SEQ ID NO: 28564 - protein, 28 aa, Artificial Sequence
  Cyclic GFR-binding peptide
VHHSNITVQIMEYVRKKPKLIGEMSRLE

SEQ ID NO: 28565 - protein, 29 aa, Artificial Sequence
  Cyclic GFR-binding peptide
PTEERSVKMAKVRIKPHQGQHKEVQVFLQ

SEQ ID NO: 28566 - protein, 41 aa, Artificial Sequence; identical to SEQ ID NO: 24824
  Cyclic GFR-binding peptide
  MOD_RES (4)..(38)..(40): Xaa is C or S

SEQ ID NO: 28567 - protein, 31 aa, Artificial Sequence; identical to SEQ ID NO: 24825
  Cyclic GFR-binding peptide
  MOD_RES (30)..(30): Xaa is C or S

SEQ ID NO: 28568 - protein, 27 aa, Artificial Sequence
  Cyclic GFR-binding peptide
VQLSNITVQIMEIVRKKPIFLGEMSTL

SEQ ID NO: 28569 - protein, 26 aa, Artificial Sequence
  Cyclic GFR-binding peptide
RSVKMAKVRIKPHQGQHKEVQVLEEH

SEQ ID NO: 28570 - protein, 36 aa, Artificial Sequence; identical to SEQ ID NO: 24828
  Cyclic GFR-binding peptide
  MOD_RES (1)..(35): Xaa is C or S

SEQ ID NO: 28571 - protein, 36 aa, Artificial Sequence; identical to SEQ ID NO: 24829
  Cyclic GFR-binding peptide
  MOD_RES (3)..(3): Xaa is C or S

SEQ ID NO: 28572 - protein, 35 aa, Artificial Sequence; identical to SEQ ID NO: 24830
  Cyclic GFR-binding peptide
  MOD_RES (34)..(34): Xaa is C or S

SEQ ID NO: 28573 - protein, 27 aa, Artificial Sequence
  Cyclic GFR-binding peptide
HRPVQVRKIEYVRKKPKLKKATVRLEE

SEQ ID NO: 28574 - protein, 39 aa, Artificial Sequence; identical to SEQ ID NO: 24832
  Cyclic GFR-binding peptide
  MOD_RES (4)..(38): Xaa is C or S

SEQ ID NO: 28575 - protein, 32 aa, Artificial Sequence; identical to SEQ ID NO: 24833
  Cyclic GFR-binding peptide
  MOD_RES (31)..(31): Xaa is C or S

SEQ ID NO: 28576 - protein, 37 aa, Artificial Sequence; identical to SEQ ID NO: 24834
  Cyclic GFR-binding peptide
  MOD_RES (3)..(3): Xaa is C or S

SEQ ID NO: 28577 - protein, 33 aa, Artificial Sequence; identical to SEQ ID NO: 24835
  Cyclic GFR-binding peptide
  MOD_RES (31)..(33): Xaa is C or S

SEQ ID NO: 28578 - protein, 24 aa, Artificial Sequence
  Cyclic GFR-binding peptide
SNITVQIMEIVRKKPIFIGEMSTL

SEQ ID NO: 28579 - protein, 40 aa, Artificial Sequence; identical to SEQ ID NO: 24837
  Cyclic GFR-binding peptide
  MOD_RES (3)..(37)..(39): Xaa is C or S

SEQ ID NO: 28580 - protein, 36 aa, Artificial Sequence; identical to SEQ ID NO: 24838
  Cyclic GFR-binding peptide
  MOD_RES (6)..(6): Xaa is C or S

SEQ ID NO: 28581 - protein, 33 aa, Artificial Sequence; identical to SEQ ID NO: 24839
  Cyclic GFR-binding peptide
  MOD_RES (2)..(2): Xaa is C or S

SEQ ID NO: 28582 - protein, 23 aa, Artificial Sequence
  Cyclic GFR-binding peptide
HSNITVQIMEYVRKKPKLLGEMS

SEQ ID NO: 28583 - protein, 32 aa, Artificial Sequence; identical to SEQ ID NO: 24841
  Cyclic GFR-binding peptide
  MOD_RES (3)..(3): Xaa is C or S

SEQ ID NO: 28584 - protein, 33 aa, Artificial Sequence; identical to SEQ ID NO: 24842
  Cyclic GFR-binding peptide
  MOD_RES (31)..(33): Xaa is C or S

SEQ ID NO: 28585 - protein, 41 aa, Artificial Sequence; identical to SEQ ID NO: 24843
  Cyclic GFR-binding peptide
  MOD_RES (5)..(39)..(41): Xaa is C or S

SEQ ID NO: 28586 - protein, 30 aa, Artificial Sequence; identical to SEQ ID NO: 24844
  Cyclic GFR-binding peptide

SEQ ID NO: 28587 - protein, 35 aa, Artificial Sequence; identical to SEQ ID NO: 24845
  Cyclic GFR-binding peptide
  MOD_RES (32)..(34): Xaa is C or S

SEQ ID NO: 28588 - protein, 34 aa, Artificial Sequence; identical to SEQ ID NO: 24846
  Cyclic GFR-binding peptide
  MOD_RES (32)..(34): Xaa is C or S

SEQ ID NO: 28589 - protein, 36 aa, Artificial Sequence; identical to SEQ ID NO: 24847
  Cyclic GFR-binding peptide
  MOD_RES (2)..(36): Xaa is C or S

SEQ ID NO: 28590 - protein, 31 aa, Artificial Sequence; identical to SEQ ID NO: 24848
  Cyclic GFR-binding peptide
  MOD_RES (4)..(4): Xaa is C or S

SEQ ID NO: 28591 - protein, 40 aa, Artificial Sequence; identical to SEQ ID NO: 24849
  Cyclic GFR-binding peptide
  MOD_RES (1)..(38)..(40): Xaa is C or S

SEQ ID NO: 28592 - protein, 40 aa, Artificial Sequence; identical to SEQ ID NO: 24850
  Cyclic GFR-binding peptide
  MOD_RES (5)..(5): Xaa is C or S

SEQ ID NO: 28593 - protein, 29 aa, Artificial Sequence
  Cyclic GFR-binding peptide
PTQVQLSNITVQIMEIVRKKPIFLGEMST

SEQ ID NO: 28594 - protein, 37 aa, Artificial Sequence; identical to SEQ ID NO: 24852
  Cyclic GFR-binding peptide
  MOD_RES (4)..(4): Xaa is C or S

SEQ ID NO: 28595 - protein, 23 aa, Artificial Sequence
  Cyclic GFR-binding peptide
ESNITMQIMRIKPHQGQHLGEMS

SEQ ID NO: 28596 - protein, 40 aa, Artificial Sequence; identical to SEQ ID NO: 24854
  Cyclic GFR-binding peptide
  MOD_RES (7)..(7): Xaa is C or S

SEQ ID NO: 28597 - protein, 37 aa, Artificial Sequence; identical to SEQ ID NO: 24855
  Cyclic GFR-binding peptide
  MOD_RES (1)..(35)..(37): Xaa is C or S

SEQ ID NO: 28598 - protein, 31 aa, Artificial Sequence; identical to SEQ ID NO: 24856
  Cyclic GFR-binding peptide
  MOD_RES (1)..(1): Xaa is C or S

SEQ ID NO: 28599 - protein, 30 aa, Artificial Sequence; identical to SEQ ID NO: 24857
  Cyclic GFR-binding peptide
  MOD_RES (2)..(2): Xaa is C or S

SEQ ID NO: 28600 - protein, 34 aa, Artificial Sequence; identical to SEQ ID NO: 24858
  Cyclic GFR-binding peptide
  MOD_RES (2)..(2): Xaa is C or S

SEQ ID NO: 28601 - protein, 34 aa, Artificial Sequence; identical to SEQ ID NO: 24859
  Cyclic GFR-binding peptide
  MOD_RES (2)..(2): Xaa is C or S

SEQ ID NO: 28602 - protein, 28 aa, Artificial Sequence
  Cyclic GFR-binding peptide
RSVKMAKVRIKPHQGQHKEVQVFLQHNK

SEQ ID NO: 28603 - protein, 42 aa, Artificial Sequence; identical to SEQ ID NO: 24861
  Cyclic GFR-binding peptide
  MOD_RES (2)..(39)..(41): Xaa is C or S

SEQ ID NO: 28604 - protein, 34 aa, Artificial Sequence; identical to SEQ ID NO: 24862
  Cyclic GFR-binding peptide

SEQ ID NO: 28605 - protein, 32 aa, Artificial Sequence; identical to SEQ ID NO: 24863
  Cyclic GFR-binding peptide
  MOD_RES (32)..(32): Xaa is C or S

SEQ ID NO: 28606 - protein, 41 aa, Artificial Sequence; identical to SEQ ID NO: 24864
  Cyclic GFR-binding peptide
  MOD_RES (1)..(38)..(40): Xaa is C or S

SEQ ID NO: 28607 - protein, 31 aa, Artificial Sequence; identical to SEQ ID NO: 24865
  Cyclic GFR-binding peptide
  MOD_RES (29)..(31): Xaa is C or S

SEQ ID NO: 28608 - protein, 32 aa, Artificial Sequence; identical to SEQ ID NO: 24866
  Cyclic GFR-binding peptide

SEQ ID NO: 28609 - protein, 27 aa, Artificial Sequence
  Cyclic GFR-binding peptide
QRSVKMAKVRIKPHQGQHKEVQVLEEH

SEQ ID NO: 28610 - protein, 40 aa, Artificial Sequence; identical to SEQ ID NO: 24868
  Cyclic GFR-binding peptide
  MOD_RES (3)..(37)..(39): Xaa is C or S

SEQ ID NO: 28611 - protein, 35 aa, Artificial Sequence; identical to SEQ ID NO: 24869
  Cyclic GFR-binding peptide
  MOD_RES (4)..(4): Xaa is C or S

SEQ ID NO: 28612 - protein, 34 aa, Artificial Sequence; identical to SEQ ID NO: 24870
  Cyclic GFR-binding peptide
  MOD_RES (33)..(33): Xaa is C or S

SEQ ID NO: 28613 - protein, 30 aa, Artificial Sequence; identical to SEQ ID NO: 24871
  Cyclic GFR-binding peptide
  MOD_RES (1)..(1): Xaa is C or S

SEQ ID NO: 28614 - protein, 35 aa, Artificial Sequence; identical to SEQ ID NO: 24872
  Cyclic GFR-binding peptide
  MOD_RES (33)..(35): Xaa is C or S

SEQ ID NO: 28615 - protein, 31 aa, Artificial Sequence; identical to SEQ ID NO: 24873
  Cyclic GFR-binding peptide
  MOD_RES (2)..(2): Xaa is C or S

SEQ ID NO: 28616 - protein, 28 aa, Artificial Sequence
  Cyclic GFR-binding peptide
PTQVQLSNITVQIMEIVRKKPIFIGEMS

SEQ ID NO: 28617 - protein, 38 aa, Artificial Sequence; identical to SEQ ID NO: 24875
  Cyclic GFR-binding peptide
  MOD_RES (2)..(2): Xaa is C or S

SEQ ID NO: 28618 - protein, 33 aa, Artificial Sequence; identical to SEQ ID NO: 24876
  Cyclic GFR-binding peptide
  MOD_RES (32)..(32): Xaa is C or S

SEQ ID NO: 28619 - protein, 25 aa, Artificial Sequence
  Cyclic GFR-binding peptide
TGQRSVKMAKVRIKPHQGQHKEVQV

SEQ ID NO: 28620 - protein, 30 aa, Artificial Sequence; identical to SEQ ID NO: 24878
  Cyclic GFR-binding peptide

SEQ ID NO: 28621 - protein, 35 aa, Artificial Sequence; identical to SEQ ID NO: 24879
  Cyclic GFR-binding peptide
  MOD_RES (3)..(3): Xaa is C or S

SEQ ID NO: 28622 - protein, 32 aa, Artificial Sequence; identical to SEQ ID NO: 24880
  Cyclic GFR-binding peptide
  MOD_RES (31)..(31): Xaa is C or S

SEQ ID NO: 28623 - protein, 40 aa, Artificial Sequence; identical to SEQ ID NO: 24881
  Cyclic GFR-binding peptide
  MOD_RES (3)..(40): Xaa is C or S

SEQ ID NO: 28624 - protein, 38 aa, Artificial Sequence; identical to SEQ ID NO: 24882
  Cyclic GFR-binding peptide
  MOD_RES (5)..(5): Xaa is C or S

SEQ ID NO: 28625 - protein, 28 aa, Artificial Sequence
  Cyclic GFR-binding peptide
ERPVQMRKIRIKPHQGQHKKATVFLQHN

SEQ ID NO: 28626 - protein, 26 aa, Artificial Sequence
  Cyclic GFR-binding peptide
ESNITMQIMRIKPHQGQHLGEMSFLQ

SEQ ID NO: 28627 - protein, 28 aa, Artificial Sequence
  Cyclic GFR-binding peptide
  MOD_RES (1)..(1): Xaa is C or S
XVPTGQSNITMQIMRIKPHQGQHIGEMS

SEQ ID NO: 28628 - protein, 32 aa, Artificial Sequence; identical to SEQ ID NO: 24886
  Cyclic GFR-binding peptide
  MOD_RES (32)..(32): Xaa is C or S

SEQ ID NO: 28629 - protein, 31 aa, Artificial Sequence; identical to SEQ ID NO: 24887
  Cyclic GFR-binding peptide
  MOD_RES (31)..(31): Xaa is C or S

SEQ ID NO: 28630 - protein, 32 aa, Artificial Sequence; identical to SEQ ID NO: 24888
  Cyclic GFR-binding peptide
  MOD_RES (5)..(5): Xaa is C or S

SEQ ID NO: 28631 - protein, 38 aa, Artificial Sequence; identical to SEQ ID NO: 24889
  Cyclic GFR-binding peptide
  MOD_RES (5)..(5): Xaa is C or S

SEQ ID NO: 28632 - protein, 33 aa, Artificial Sequence; identical to SEQ ID NO: 24890
  Cyclic GFR-binding peptide

SEQ ID NO: 28633 - protein, 27 aa, Artificial Sequence
  Cyclic GFR-binding peptide
TGQRSVKMAKVRIKPHQGQHKEVQVLE

SEQ ID NO: 28634 - protein, 40 aa, Artificial Sequence; identical to SEQ ID NO: 24892
  Cyclic GFR-binding peptide
  MOD_RES (5)..(5): Xaa is C or S

SEQ ID NO: 28635 - protein, 26 aa, Artificial Sequence
  Cyclic GFR-binding peptide
HHSNITVQIMEYVRKKPKLIGEMSRL

SEQ ID NO: 28636 - protein, 23 aa, Artificial Sequence
  Cyclic GFR-binding peptide
SNITVQIMEYVRKKPKLIGEMSR

SEQ ID NO: 28637 - protein, 30 aa, Artificial Sequence; identical to SEQ ID NO: 24895
  Cyclic GFR-binding peptide

SEQ ID NO: 28638 - protein, 36 aa, Artificial Sequence; identical to SEQ ID NO: 24896
  Cyclic GFR-binding peptide
  MOD_RES (36)..(36): Xaa is C or S

SEQ ID NO: 28639 - protein, 30 aa, Artificial Sequence; identical to SEQ ID NO: 24897
  Cyclic GFR-binding peptide
  MOD_RES (29)..(29): Xaa is C or S

SEQ ID NO: 28640 - protein, 27 aa, Artificial Sequence
  Cyclic GFR-binding peptide
VHHSNITVQIMEYVRKKPKLLGEMSRL

SEQ ID NO: 28641 - protein, 43 aa, Artificial Sequence; identical to SEQ ID NO: 24899
  Cyclic GFR-binding peptide
  MOD_RES (7)..(41)..(43): Xaa is C or S

SEQ ID NO: 28642 - protein, 29 aa, Artificial Sequence
  Cyclic GFR-binding peptide
VPTEERPVQMRKIRIKPHQGQHKKATVFL

SEQ ID NO: 28643 - protein, 30 aa, Artificial Sequence; identical to SEQ ID NO: 24901
  Cyclic GFR-binding peptide

SEQ ID NO: 28644 - protein, 28 aa, Artificial Sequence
  Cyclic GFR-binding peptide
ERSVKMAKVRIKPHQGQHKEVQVFLQHN

SEQ ID NO: 28645 - protein, 29 aa, Artificial Sequence
  Cyclic GFR-binding peptide
HHSNITVQIMEYVRKKPKLIGEMSRLEEH

SEQ ID NO: 28646 - protein, 27 aa, Artificial Sequence
  Cyclic GFR-binding peptide
TEESNITMQIMRIKPHQGQHLGEMSFL

SEQ ID NO: 28647 - protein, 28 aa, Artificial Sequence
  Cyclic GFR-binding peptide
EERSVKMAKVRIKPHQGQHKEVQVFLQH

SEQ ID NO: 28648 - protein, 35 aa, Artificial Sequence; identical to SEQ ID NO: 24906
  Cyclic GFR-binding peptide
  MOD_RES (5)..(5): Xaa is C or S

SEQ ID NO: 28649 - protein, 31 aa, Artificial Sequence; identical to SEQ ID NO: 24907
  Cyclic GFR-binding peptide
  MOD_RES (3)..(3): Xaa is C or S

SEQ ID NO: 28650 - protein, 34 aa, Artificial Sequence; identical to SEQ ID NO: 24908
  Cyclic GFR-binding peptide
  MOD_RES (32)..(34): Xaa is C or S

SEQ ID NO: 28651 - protein, 33 aa, Artificial Sequence; identical to SEQ ID NO: 24909
  Cyclic GFR-binding peptide
  MOD_RES (3)..(3): Xaa is C or S

SEQ ID NO: 28652 - protein, 26 aa, Artificial Sequence
  Cyclic GFR-binding peptide
QLRSVKVAKVEIVRKKPIFKEVQVTL

SEQ ID NO: 28653 - protein, 38 aa, Artificial Sequence; identical to SEQ ID NO: 24911
  Cyclic GFR-binding peptide
  MOD_RES (36)..(38): Xaa is C or S

SEQ ID NO: 28654 - protein, 35 aa, Artificial Sequence; identical to SEQ ID NO: 24912
  Cyclic GFR-binding peptide
  MOD_RES (7)..(7): Xaa is C or S

SEQ ID NO: 28655 - protein, 31 aa, Artificial Sequence; identical to SEQ ID NO: 24913
  Cyclic GFR-binding peptide

SEQ ID NO: 28656 - protein, 36 aa, Artificial Sequence; identical to SEQ ID NO: 24914
  Cyclic GFR-binding peptide
  MOD_RES (33)..(35): Xaa is C or S

SEQ ID NO: 28657 - protein, 37 aa, Artificial Sequence; identical to SEQ ID NO: 24915
  Cyclic GFR-binding peptide
  MOD_RES (3)..(3): Xaa is C or S

SEQ ID NO: 28658 - protein, 32 aa, Artificial Sequence; identical to SEQ ID NO: 24916
  Cyclic GFR-binding peptide
  MOD_RES (31)..(31): Xaa is C or S

SEQ ID NO: 28659 - protein, 32 aa, Artificial Sequence; identical to SEQ ID NO: 24917
  Cyclic GFR-binding peptide
  MOD_RES (31)..(31): Xaa is C or S

SEQ ID NO: 28660 - protein, 31 aa, Artificial Sequence; identical to SEQ ID NO: 24918
  Cyclic GFR-binding peptide
  MOD_RES (2)..(2): Xaa is C or S

SEQ ID NO: 28661 - protein, 33 aa, Artificial Sequence; identical to SEQ ID NO: 24919
  Cyclic GFR-binding peptide
  MOD_RES (30)..(32): Xaa is C or S

SEQ ID NO: 28662 - protein, 30 aa, Artificial Sequence; identical to SEQ ID NO: 24920
  Cyclic GFR-binding peptide
  MOD_RES (2)..(2): Xaa is C or S

SEQ ID NO: 28663 - protein, 31 aa, Artificial Sequence; identical to SEQ ID NO: 24921
  Cyclic GFR-binding peptide
  MOD_RES (29)..(31): Xaa is C or S

SEQ ID NO: 28664 - protein, 27 aa, Artificial Sequence
  Cyclic GFR-binding peptide
LSNITVQIMEIVRKKPIFIGEMSTLED

SEQ ID NO: 28665 - protein, 33 aa, Artificial Sequence; identical to SEQ ID NO: 24923
  Cyclic GFR-binding peptide
  MOD_RES (31)..(33): Xaa is C or S

SEQ ID NO: 28666 - protein, 31 aa, Artificial Sequence; identical to SEQ ID NO: 24924
  Cyclic GFR-binding peptide
  MOD_RES (1)..(1): Xaa is C or S

SEQ ID NO: 28667 - protein, 26 aa, Artificial Sequence
  Cyclic GFR-binding peptide
VQLRSVKVAKVEIVRKKPIFKEVQVT

SEQ ID NO: 28668 - protein, 31 aa, Artificial Sequence; identical to SEQ ID NO: 24926
  Cyclic GFR-binding peptide
  MOD_RES (1)..(1): Xaa is C or S

SEQ ID NO: 28669 - protein, 28 aa, Artificial Sequence
  Cyclic GFR-binding peptide
HRPVQVRKIEYVRKKPKLKKATVRLEEH

SEQ ID NO: 28670 - protein, 30 aa, Artificial Sequence; identical to SEQ ID NO: 24928
  Cyclic GFR-binding peptide

SEQ ID NO: 28671 - protein, 27 aa, Artificial Sequence
  Cyclic GFR-binding peptide
VPTGQRSVKMAKVRIKPHQGQHKEVQV

SEQ ID NO: 28672 - protein, 25 aa, Artificial Sequence
  Cyclic GFR-binding peptide
GQRPVQMRKIRIKPHQGQHKKATVL

SEQ ID NO: 28673 - protein, 35 aa, Artificial Sequence; identical to SEQ ID NO: 24931
  Cyclic GFR-binding peptide
  MOD_RES (35)..(35): Xaa is C or S

SEQ ID NO: 28674 - protein, 38 aa, Artificial Sequence; identical to SEQ ID NO: 24932
  Cyclic GFR-binding peptide
  MOD_RES (3)..(3): Xaa is C or S

SEQ ID NO: 28675 - protein, 34 aa, Artificial Sequence; identical to SEQ ID NO: 24933
  Cyclic GFR-binding peptide
  MOD_RES (1)..(1): Xaa is C or S

SEQ ID NO: 28676 - protein, 24 aa, Artificial Sequence
  Cyclic GFR-binding peptide
HRPVQVRKIEYVRKKPKLKKATVR

SEQ ID NO: 28677 - protein, 42 aa, Artificial Sequence; identical to SEQ ID NO: 24935
  Cyclic GFR-binding peptide
  MOD_RES (4)..(41): Xaa is C or S

SEQ ID NO: 28678 - protein, 30 aa, Artificial Sequence; identical to SEQ ID NO: 24936
  Cyclic GFR-binding peptide

SEQ ID NO: 28679 - protein, 35 aa, Artificial Sequence; identical to SEQ ID NO: 24937
  Cyclic GFR-binding peptide
  MOD_RES (2)..(2): Xaa is C or S

SEQ ID NO: 28680 - protein, 38 aa, Artificial Sequence; identical to SEQ ID NO: 24938
  Cyclic GFR-binding peptide
  MOD_RES (5)..(5): Xaa is C or S

SEQ ID NO: 28681 - protein, 35 aa, Artificial Sequence; identical to SEQ ID NO: 24939
  Cyclic GFR-binding peptide
  MOD_RES (33)..(35): Xaa is C or S

SEQ ID NO: 28682 - protein, 35 aa, Artificial Sequence; identical to SEQ ID NO: 24940
  Cyclic GFR-binding peptide
  MOD_RES (35)..(35): Xaa is C or S

SEQ ID NO: 28683 - protein, 36 aa, Artificial Sequence; identical to SEQ ID NO: 24941
  Cyclic GFR-binding peptide
  MOD_RES (36)..(36): Xaa is C or S

SEQ ID NO: 28684 - protein, 38 aa, Artificial Sequence; identical to SEQ ID NO: 24942
  Cyclic GFR-binding peptide
  MOD_RES (5)..(5): Xaa is C or S

SEQ ID NO: 28685 - protein, 33 aa, Artificial Sequence; identical to SEQ ID NO: 24943
  Cyclic GFR-binding peptide

SEQ ID NO: 28686 - protein, 36 aa, Artificial Sequence; identical to SEQ ID NO: 24944
  Cyclic GFR-binding peptide
  MOD_RES (2)..(2): Xaa is C or S

SEQ ID NO: 28687 - protein, 33 aa, Artificial Sequence; identical to SEQ ID NO: 24945
  Cyclic GFR-binding peptide

SEQ ID NO: 28688 - protein, 34 aa, Artificial Sequence; identical to SEQ ID NO: 24946
  Cyclic GFR-binding peptide
  MOD_RES (33)..(33): Xaa is C or S

SEQ ID NO: 28689 - protein, 34 aa, Artificial Sequence; identical to SEQ ID NO: 24947
  Cyclic GFR-binding peptide

SEQ ID NO: 28690 - protein, 26 aa, Artificial Sequence
  Cyclic GFR-binding peptide
HHSNITVQIMEYVRKKPKLLGEMSRL

SEQ ID NO: 28691 - protein, 34 aa, Artificial Sequence; identical to SEQ ID NO: 24949
  Cyclic GFR-binding peptide
  MOD_RES (5)..(5): Xaa is C or S

SEQ ID NO: 28692 - protein, 26 aa, Artificial Sequence
  Cyclic GFR-binding peptide
VHHSNITVQIMEYVRKKPKLIGEMSR

SEQ ID NO: 28693 - protein, 37 aa, Artificial Sequence; identical to SEQ ID NO: 24951
  Cyclic GFR-binding peptide
  MOD_RES (3)..(37): Xaa is C or S

SEQ ID NO: 28694 - protein, 36 aa, Artificial Sequence; identical to SEQ ID NO: 24952
  Cyclic GFR-binding peptide
  MOD_RES (2)..(2): Xaa is C or S

SEQ ID NO: 28695 - protein, 29 aa, Artificial Sequence
  Cyclic GFR-binding peptide
LSNITVQIMEIVRKKPIFLGEMSTLEDHL

SEQ ID NO: 28696 - protein, 33 aa, Artificial Sequence; identical to SEQ ID NO: 24954
  Cyclic GFR-binding peptide
  MOD_RES (2)..(2): Xaa is C or S

SEQ ID NO: 28697 - protein, 26 aa, Artificial Sequence
  Cyclic GFR-binding peptide
PTGQRSVKMAKVRIKPHQGQHKEVQV

SEQ ID NO: 28698 - protein, 38 aa, Artificial Sequence; identical to SEQ ID NO: 24956
  Cyclic GFR-binding peptide
  MOD_RES (2)..(2): Xaa is C or S

SEQ ID NO: 28699 - protein, 31 aa, Artificial Sequence; identical to SEQ ID NO: 24957
  Cyclic GFR-binding peptide

SEQ ID NO: 28700 - protein, 32 aa, Artificial Sequence; identical to SEQ ID NO: 24958
  Cyclic GFR-binding peptide
  MOD_RES (30)..(32): Xaa is C or S

SEQ ID NO: 28701 - protein, 40 aa, Artificial Sequence; identical to SEQ ID NO: 24959
  Cyclic GFR-binding peptide
  MOD_RES (6)..(40): Xaa is C or S

SEQ ID NO: 28702 - protein, 35 aa, Artificial Sequence; identical to SEQ ID NO: 24960
  Cyclic GFR-binding peptide
  MOD_RES (2)..(2): Xaa is C or S

SEQ ID NO: 28703 - protein, 40 aa, Artificial Sequence; identical to SEQ ID NO: 24961
  Cyclic GFR-binding peptide
  MOD_RES (6)..(40): Xaa is C or S

SEQ ID NO: 28704 - protein, 28 aa, Artificial Sequence
  Cyclic GFR-binding peptide
SNITVQIMEIVRKKPIFIGEMSTLEDHL

SEQ ID NO: 28705 - protein, 26 aa, Artificial Sequence
  Cyclic GFR-binding peptide
VHHRPVQVRKIEYVRKKPKLKKATVR

SEQ ID NO: 28706 - protein, 41 aa, Artificial Sequence; identical to SEQ ID NO: 24964
  Cyclic GFR-binding peptide
  MOD_RES (6)..(40): Xaa is C or S

SEQ ID NO: 28707 - protein, 36 aa, Artificial Sequence; identical to SEQ ID NO: 24965
  Cyclic GFR-binding peptide
  MOD_RES (4)..(4): Xaa is C or S

SEQ ID NO: 28708 - protein, 28 aa, Artificial Sequence
  Cyclic GFR-binding peptide
PTEESNITMQIMRIKPHQGQHLGEMSFL

SEQ ID NO: 28709 - protein, 40 aa, Artificial Sequence; identical to SEQ ID NO: 24967
  Cyclic GFR-binding peptide
  MOD_RES (37)..(39): Xaa is C or S

SEQ ID NO: 28710 - protein, 36 aa, Artificial Sequence; identical to SEQ ID NO: 24968
  Cyclic GFR-binding peptide
  MOD_RES (35)..(35): Xaa is C or S

SEQ ID NO: 28711 - protein, 35 aa, Artificial Sequence; identical to SEQ ID NO: 24969
  Cyclic GFR-binding peptide
  MOD_RES (3)..(3): Xaa is C or S

SEQ ID NO: 28712 - protein, 37 aa, Artificial Sequence; identical to SEQ ID NO: 24970
  Cyclic GFR-binding peptide
  MOD_RES (35)..(37): Xaa is C or S

SEQ ID NO: 28713 - protein, 33 aa, Artificial Sequence; identical to SEQ ID NO: 24971
  Cyclic GFR-binding peptide

SEQ ID NO: 28714 - protein, 32 aa, Artificial Sequence; identical to SEQ ID NO: 24972
  Cyclic GFR-binding peptide
  MOD_RES (1)..(1): Xaa is C or S

SEQ ID NO: 28715 - protein, 28 aa, Artificial Sequence
  Cyclic GFR-binding peptide
QLSNITVQIMEIVRKKPIFLGEMSTLED

SEQ ID NO: 28716 - protein, 27 aa, Artificial Sequence
  Cyclic GFR-binding peptide
GQRPVQMRKIRIKPHQGQHKKATVLEE

SEQ ID NO: 28717 - protein, 43 aa, Artificial Sequence; identical to SEQ ID NO: 24975
  Cyclic GFR-binding peptide
  MOD_RES (7)..(41)..(43): Xaa is C or S

SEQ ID NO: 28718 - protein, 33 aa, Artificial Sequence; identical to SEQ ID NO: 24976
  Cyclic GFR-binding peptide
  MOD_RES (5)..(5): Xaa is C or S

SEQ ID NO: 28719 - protein, 45 aa, Artificial Sequence; identical to SEQ ID NO: 24977
  Cyclic GFR-binding peptide
  MOD_RES (5)..(42)..(44): Xaa is C or S

SEQ ID NO: 28720 - protein, 25 aa, Artificial Sequence
  Cyclic GFR-binding peptide
QRSVKMAKVRIKPHQGQHKEVQVLE

SEQ ID NO: 28721 - protein, 29 aa, Artificial Sequence
  Cyclic GFR-binding peptide
PTQVQLRSVKVAKVEIVRKKPIFKEVQVT

SEQ ID NO: 28722 - protein, 28 aa, Artificial Sequence
  Cyclic GFR-binding peptide
VHHSNITVQIMEYVRKKPKLLGEMSRLE

SEQ ID NO: 28723 - protein, 36 aa, Artificial Sequence; identical to SEQ ID NO: 24981
  Cyclic GFR-binding peptide
  MOD_RES (5)..(5): Xaa is C or S

SEQ ID NO: 28724 - protein, 31 aa, Artificial Sequence; identical to SEQ ID NO: 24982
  Cyclic GFR-binding peptide
  MOD_RES (31)..(31): Xaa is C or S

SEQ ID NO: 28725 - protein, 34 aa, Artificial Sequence; identical to SEQ ID NO: 24983
  Cyclic GFR-binding peptide

SEQ ID NO: 28726 - protein, 37 aa, Artificial Sequence; identical to SEQ ID NO: 24984
  Cyclic GFR-binding peptide
  MOD_RES (4)..(4): Xaa is C or S

SEQ ID NO: 28727 - protein, 32 aa, Artificial Sequence; identical to SEQ ID NO: 24985
  Cyclic GFR-binding peptide

SEQ ID NO: 28728 - protein, 39 aa, Artificial Sequence; identical to SEQ ID NO: 24986
  Cyclic GFR-binding peptide
  MOD_RES (2)..(36)..(38): Xaa is C or S

SEQ ID NO: 28729 - protein, 33 aa, Artificial Sequence; identical to SEQ ID NO: 24987
  Cyclic GFR-binding peptide
  MOD_RES (30)..(32): Xaa is C or S

SEQ ID NO: 28730 - protein, 27 aa, Artificial Sequence
  Cyclic GFR-binding peptide
RPVQVRKIEYVRKKPKLKKATVRLEEH

SEQ ID NO: 28731 - protein, 28 aa, Artificial Sequence
  Cyclic GFR-binding peptide
TQVQLSNITVQIMEIVRKKPIFLGEMST

SEQ ID NO: 28732 - protein, 26 aa, Artificial Sequence
  Cyclic GFR-binding peptide
TGQRPVQMRKIRIKPHQGQHKKATVL

SEQ ID NO: 28733 - protein, 31 aa, Artificial Sequence; identical to SEQ ID NO: 24991
  Cyclic GFR-binding peptide

SEQ ID NO: 28734 - protein, 39 aa, Artificial Sequence; identical to SEQ ID NO: 24992
  Cyclic GFR-binding peptide
  MOD_RES (1)..(38): Xaa is C or S

SEQ ID NO: 28735 - protein, 36 aa, Artificial Sequence; identical to SEQ ID NO: 24993
  Cyclic GFR-binding peptide
  MOD_RES (34)..(36): Xaa is C or S

SEQ ID NO: 28736 - protein, 32 aa, Artificial Sequence; identical to SEQ ID NO: 24994
  Cyclic GFR-binding peptide
  MOD_RES (1)..(1): Xaa is C or S

SEQ ID NO: 28737 - protein, 29 aa, Artificial Sequence
  Cyclic GFR-binding peptide
RPTQVQLSNITVQIMEIVRKKPIFIGEMS

SEQ ID NO: 28738 - protein, 41 aa, Artificial Sequence; identical to SEQ ID NO: 24996
  Cyclic GFR-binding peptide
  MOD_RES (3)..(40): Xaa is C or S

SEQ ID NO: 28739 - protein, 39 aa, Artificial Sequence; identical to SEQ ID NO: 24997
  Cyclic GFR-binding peptide
  MOD_RES (3)..(37)..(39): Xaa is C or S

SEQ ID NO: 28740 - protein, 28 aa, Artificial Sequence
  Cyclic GFR-binding peptide
HHSNITVQIMEYVRKKPKLLGEMSRLEE

SEQ ID NO: 28741 - protein, 38 aa, Artificial Sequence; identical to SEQ ID NO: 24999
  Cyclic GFR-binding peptide
  MOD_RES (37)..(37): Xaa is C or S

SEQ ID NO: 28742 - protein, 39 aa, Artificial Sequence; identical to SEQ ID NO: 25000
  Cyclic GFR-binding peptide
  MOD_RES (2)..(36)..(38): Xaa is C or S

SEQ ID NO: 28743 - protein, 31 aa, Artificial Sequence; identical to SEQ ID NO: 25001
  Cyclic GFR-binding peptide
  MOD_RES (2)..(2): Xaa is C or S

SEQ ID NO: 28744 - protein, 40 aa, Artificial Sequence; identical to SEQ ID NO: 25002
  Cyclic GFR-binding peptide
  MOD_RES (4)..(38)..(40): Xaa is C or S

SEQ ID NO: 28745 - protein, 34 aa, Artificial Sequence; identical to SEQ ID NO: 25003
  Cyclic GFR-binding peptide

SEQ ID NO: 28746 - protein, 39 aa, Artificial Sequence; identical to SEQ ID NO: 25004
  Cyclic GFR-binding peptide
  MOD_RES (2)..(39): Xaa is C or S

SEQ ID NO: 28747 - protein, 32 aa, Artificial Sequence; identical to SEQ ID NO: 25005
  Cyclic GFR-binding peptide
  MOD_RES (29)..(31): Xaa is C or S

SEQ ID NO: 28748 - protein, 27 aa, Artificial Sequence
  Cyclic GFR-binding peptide
ERPVQMRKIRIKPHQGQHKKATVFLQH

SEQ ID NO: 28749 - protein, 42 aa, Artificial Sequence; identical to SEQ ID NO: 25007
  Cyclic GFR-binding peptide
  MOD_RES (5)..(42): Xaa is C or S

SEQ ID NO: 28750 - protein, 28 aa, Artificial Sequence
  Cyclic GFR-binding peptide
VPTGQRSVKMAKVRIKPHQGQHKEVQVL

SEQ ID NO: 28751 - protein, 36 aa, Artificial Sequence; identical to SEQ ID NO: 25009
  Cyclic GFR-binding peptide
  MOD_RES (7)..(7): Xaa is C or S

SEQ ID NO: 28752 - protein, 37 aa, Artificial Sequence; identical to SEQ ID NO: 25010
  Cyclic GFR-binding peptide
  MOD_RES (34)..(36): Xaa is C or S

SEQ ID NO: 28753 - protein, 31 aa, Artificial Sequence; identical to SEQ ID NO: 25011
  Cyclic GFR-binding peptide
  MOD_RES (31)..(31): Xaa is C or S

SEQ ID NO: 28754 - protein, 38 aa, Artificial Sequence; identical to SEQ ID NO: 25012
  Cyclic GFR-binding peptide
  MOD_RES (4)..(38): Xaa is C or S

SEQ ID NO: 28755 - protein, 42 aa, Artificial Sequence; identical to SEQ ID NO: 25013
  Cyclic GFR-binding peptide
  MOD_RES (3)..(40)..(42): Xaa is C or S

SEQ ID NO: 28756 - protein, 41 aa, Artificial Sequence; identical to SEQ ID NO: 25014
  Cyclic GFR-binding peptide
  MOD_RES (7)..(41): Xaa is C or S

SEQ ID NO: 28757 - protein, 33 aa, Artificial Sequence; identical to SEQ ID NO: 25015
  Cyclic GFR-binding peptide
  MOD_RES (30)..(32): Xaa is C or S

SEQ ID NO: 28758 - protein, 27 aa, Artificial Sequence
  Cyclic GFR-binding peptide
VHHSNITVQIMEYVRKKPKLIGEMSRL

SEQ ID NO: 28759 - protein, 37 aa, Artificial Sequence; identical to SEQ ID NO: 25017
  Cyclic GFR-binding peptide
  MOD_RES (34)..(36): Xaa is C or S

SEQ ID NO: 28760 - protein, 26 aa, Artificial Sequence
  Cyclic GFR-binding peptide
GQRSVKMAKVRIKPHQGQHKEVQVLE

SEQ ID NO: 28761 - protein, 40 aa, Artificial Sequence; identical to SEQ ID NO: 25019
  Cyclic GFR-binding peptide
  MOD_RES (3)..(37)..(39): Xaa is C or S

SEQ ID NO: 28762 - protein, 32 aa, Artificial Sequence; identical to SEQ ID NO: 25020
  Cyclic GFR-binding peptide
  MOD_RES (4)..(4): Xaa is C or S

SEQ ID NO: 28763 - protein, 36 aa, Artificial Sequence; identical to SEQ ID NO: 25021
  Cyclic GFR-binding peptide
  MOD_RES (6)..(6): Xaa is C or S

SEQ ID NO: 28764 - protein, 33 aa, Artificial Sequence; identical to SEQ ID NO: 25022
  Cyclic GFR-binding peptide
  MOD_RES (3)..(3): Xaa is C or S

SEQ ID NO: 28765 - protein, 35 aa, Artificial Sequence; identical to SEQ ID NO: 25023
  Cyclic GFR-binding peptide
  MOD_RES (1)..(35): Xaa is C or S

SEQ ID NO: 28766 - protein, 39 aa, Artificial Sequence; identical to SEQ ID NO: 25024
  Cyclic GFR-binding peptide
  MOD_RES (2)..(36)..(38): Xaa is C or S

SEQ ID NO: 28767 - protein, 29 aa, Artificial Sequence
  Cyclic GFR-binding peptide
RVHHSNITVQIMEYVRKKPKLIGEMSRLE

SEQ ID NO: 28768 - protein, 34 aa, Artificial Sequence; identical to SEQ ID NO: 25026
  Cyclic GFR-binding peptide
  MOD_RES (4)..(4): Xaa is C or S

SEQ ID NO: 28769 - protein, 41 aa, Artificial Sequence; identical to SEQ ID NO: 25027
  Cyclic GFR-binding peptide
  MOD_RES (2)..(39)..(41): Xaa is C or S

SEQ ID NO: 28770 - protein, 37 aa, Artificial Sequence; identical to SEQ ID NO: 25028
  Cyclic GFR-binding peptide
  MOD_RES (34)..(36): Xaa is C or S

SEQ ID NO: 28771 - protein, 37 aa, Artificial Sequence; identical to SEQ ID NO: 25029
  Cyclic GFR-binding peptide
  MOD_RES (2)..(36): Xaa is C or S

SEQ ID NO: 28772 - protein, 35 aa, Artificial Sequence; identical to SEQ ID NO: 25030
  Cyclic GFR-binding peptide
  MOD_RES (3)..(3): Xaa is C or S

SEQ ID NO: 28773 - protein, 40 aa, Artificial Sequence; identical to SEQ ID NO: 25031
  Cyclic GFR-binding peptide
  MOD_RES (1)..(38)..(40): Xaa is C or S

SEQ ID NO: 28774 - protein, 44 aa, Artificial Sequence; identical to SEQ ID NO: 25032
  Cyclic GFR-binding peptide
  MOD_RES (5)..(42)..(44): Xaa is C or S

SEQ ID NO: 28775 - protein, 33 aa, Artificial Sequence; identical to SEQ ID NO: 25033
  Cyclic GFR-binding peptide
  MOD_RES (32)..(32): Xaa is C or S

SEQ ID NO: 28776 - protein, 33 aa, Artificial Sequence; identical to SEQ ID NO: 25034
  Cyclic GFR-binding peptide

SEQ ID NO: 28777 - protein, 29 aa, Artificial Sequence
  Cyclic GFR-binding peptide
  MOD_RES (1)..(1): Xaa is C or S
XVPTGQRSVKMAKVRIKPHQGQHKEVQVL

SEQ ID NO: 28778 - protein, 26 aa, Artificial Sequence
  Cyclic GFR-binding peptide
RVHHSNITVQIMEYVRKKPKLLGEMS

SEQ ID NO: 28779 - protein, 31 aa, Artificial Sequence; identical to SEQ ID NO: 25037
  Cyclic GFR-binding peptide

SEQ ID NO: 28780 - protein, 33 aa, Artificial Sequence; identical to SEQ ID NO: 25038
  Cyclic GFR-binding peptide
  MOD_RES (2)..(2): Xaa is C or S

SEQ ID NO: 28781 - protein, 37 aa, Artificial Sequence; identical to SEQ ID NO: 25039
  Cyclic GFR-binding peptide
  MOD_RES (3)..(3): Xaa is C or S

SEQ ID NO: 28782 - protein, 37 aa, Artificial Sequence; identical to SEQ ID NO: 25040
  Cyclic GFR-binding peptide
  MOD_RES (3)..(3): Xaa is C or S

SEQ ID NO: 28783 - protein, 23 aa, Artificial Sequence
  Cyclic GFR-binding peptide
LRSVKVAKVEIVRKKPIFKEVQV

SEQ ID NO: 28784 - protein, 29 aa, Artificial Sequence
  Cyclic GFR-binding peptide
HRPVQVRKIEYVRKKPKLKKATVRLEEHL

SEQ ID NO: 28785 - protein, 41 aa, Artificial Sequence; identical to SEQ ID NO: 25043
  Cyclic GFR-binding peptide
  MOD_RES (2)..(39)..(41): Xaa is C or S

SEQ ID NO: 28786 - protein, 37 aa, Artificial Sequence; identical to SEQ ID NO: 25044
  Cyclic GFR-binding peptide
  MOD_RES (2)..(36): Xaa is C or S

SEQ ID NO: 28787 - protein, 41 aa, Artificial Sequence; identical to SEQ ID NO: 25045
  Cyclic GFR-binding peptide
  MOD_RES (3)..(40): Xaa is C or S

SEQ ID NO: 28788 - protein, 24 aa, Artificial Sequence
  Cyclic GFR-binding peptide
QLRSVKVAKVEIVRKKPIFKEVQV

SEQ ID NO: 28789 - protein, 41 aa, Artificial Sequence; identical to SEQ ID NO: 25047
  Cyclic GFR-binding peptide
  MOD_RES (4)..(38)..(40): Xaa is C or S

SEQ ID NO: 28790 - protein, 32 aa, Artificial Sequence; identical to SEQ ID NO: 25048
  Cyclic GFR-binding peptide
  MOD_RES (30)..(32): Xaa is C or S

SEQ ID NO: 28791 - protein, 40 aa, Artificial Sequence; identical to SEQ ID NO: 25049
  Cyclic GFR-binding peptide
  MOD_RES (3)..(37)..(39): Xaa is C or S

SEQ ID NO: 28792 - protein, 27 aa, Artificial Sequence
  Cyclic GFR-binding peptide
HHSNITVQIMEYVRKKPKLLGEMSRLE

SEQ ID NO: 28793 - protein, 33 aa, Artificial Sequence; identical to SEQ ID NO: 25051
  Cyclic GFR-binding peptide
  MOD_RES (30)..(32): Xaa is C or S

SEQ ID NO: 28794 - protein, 27 aa, Artificial Sequence
  Cyclic GFR-binding peptide
PTGQRSVKMAKVRIKPHQGQHKEVQVL

SEQ ID NO: 28795 - protein, 39 aa, Artificial Sequence; identical to SEQ ID NO: 25053
  Cyclic GFR-binding peptide
  MOD_RES (37)..(39): Xaa is C or S

SEQ ID NO: 28796 - protein, 38 aa, Artificial Sequence; identical to SEQ ID NO: 25054
  Cyclic GFR-binding peptide
  MOD_RES (4)..(38): Xaa is C or S

SEQ ID NO: 28797 - protein, 39 aa, Artificial Sequence; identical to SEQ ID NO: 25055
  Cyclic GFR-binding peptide
  MOD_RES (3)..(3): Xaa is C or S

SEQ ID NO: 28798 - protein, 40 aa, Artificial Sequence; identical to SEQ ID NO: 25056
  Cyclic GFR-binding peptide
  MOD_RES (7)..(7): Xaa is C or S

SEQ ID NO: 28799 - protein, 29 aa, Artificial Sequence
  Cyclic GFR-binding peptide
HSNITVQIMEYVRKKPKLIGEMSRLEEHL

SEQ ID NO: 28800 - protein, 35 aa, Artificial Sequence; identical to SEQ ID NO: 25058
  Cyclic GFR-binding peptide

SEQ ID NO: 28801 - protein, 38 aa, Artificial Sequence; identical to SEQ ID NO: 25059
  Cyclic GFR-binding peptide
  MOD_RES (3)..(37): Xaa is C or S

SEQ ID NO: 28802 - protein, 29 aa, Artificial Sequence
  Cyclic GFR-binding peptide
QVQLSNITVQIMEIVRKKPIFLGEMSTLE

SEQ ID NO: 28803 - protein, 31 aa, Artificial Sequence; identical to SEQ ID NO: 25061
  Cyclic GFR-binding peptide

SEQ ID NO: 28804 - protein, 28 aa, Artificial Sequence
  Cyclic GFR-binding peptide
RVHHSNITVQIMEYVRKKPKLLGEMSRL

SEQ ID NO: 28805 - protein, 35 aa, Artificial Sequence; identical to SEQ ID NO: 25063
  Cyclic GFR-binding peptide
  MOD_RES (2)..(2): Xaa is C or S

SEQ ID NO: 28806 - protein, 34 aa, Artificial Sequence; identical to SEQ ID NO: 25064
  Cyclic GFR-binding peptide
  MOD_RES (5)..(5): Xaa is C or S

SEQ ID NO: 28807 - protein, 39 aa, Artificial Sequence; identical to SEQ ID NO: 25065
  Cyclic GFR-binding peptide
  MOD_RES (4)..(4): Xaa is C or S

SEQ ID NO: 28808 - protein, 29 aa, Artificial Sequence
  Cyclic GFR-binding peptide
VQLRSVKVAKVEIVRKKPIFKEVQVTLED

SEQ ID NO: 28809 - protein, 31 aa, Artificial Sequence; identical to SEQ ID NO: 25067
  Cyclic GFR-binding peptide

SEQ ID NO: 28810 - protein, 29 aa, Artificial Sequence
  Cyclic GFR-binding peptide
HHSNITVQIMEYVRKKPKLLGEMSRLEEH

SEQ ID NO: 28811 - protein, 32 aa, Artificial Sequence; identical to SEQ ID NO: 25069
  Cyclic GFR-binding peptide
  MOD_RES (5)..(5): Xaa is C or S

SEQ ID NO: 28812 - protein, 40 aa, Artificial Sequence; identical to SEQ ID NO: 25070
  Cyclic GFR-binding peptide
  MOD_RES (5)..(5): Xaa is C or S

SEQ ID NO: 28813 - protein, 37 aa, Artificial Sequence; identical to SEQ ID NO: 25071
  Cyclic GFR-binding peptide
  MOD_RES (36)..(36): Xaa is C or S

SEQ ID NO: 28814 - protein, 34 aa, Artificial Sequence; identical to SEQ ID NO: 25072
  Cyclic GFR-binding peptide
  MOD_RES (4)..(4): Xaa is C or S

SEQ ID NO: 28815 - protein, 42 aa, Artificial Sequence; identical to SEQ ID NO: 25073
  Cyclic GFR-binding peptide
  MOD_RES (7)..(41): Xaa is C or S

SEQ ID NO: 28816 - protein, 25 aa, Artificial Sequence
  Cyclic GFR-binding peptide
RSVKVAKVEIVRKKPIFKEVQVTLE

SEQ ID NO: 28817 - protein, 31 aa, Artificial Sequence; identical to SEQ ID NO: 25075
  Cyclic GFR-binding peptide
  MOD_RES (3)..(3): Xaa is C or S

SEQ ID NO: 28818 - protein, 31 aa, Artificial Sequence; identical to SEQ ID NO: 25076
  Cyclic GFR-binding peptide

SEQ ID NO: 28819 - protein, 31 aa, Artificial Sequence; identical to SEQ ID NO: 25077
  Cyclic GFR-binding peptide

SEQ ID NO: 28820 - protein, 30 aa, Artificial Sequence; identical to SEQ ID NO: 25078
  Cyclic GFR-binding peptide
  MOD_RES (30)..(30): Xaa is C or S

SEQ ID NO: 28821 - protein, 36 aa, Artificial Sequence; identical to SEQ ID NO: 25079
  Cyclic GFR-binding peptide
  MOD_RES (34)..(36): Xaa is C or S

SEQ ID NO: 28822 - protein, 41 aa, Artificial Sequence; identical to SEQ ID NO: 25080
  Cyclic GFR-binding peptide
  MOD_RES (4)..(41): Xaa is C or S

SEQ ID NO: 28823 - protein, 36 aa, Artificial Sequence; identical to SEQ ID NO: 25081
  Cyclic GFR-binding peptide
  MOD_RES (3)..(3): Xaa is C or S

SEQ ID NO: 28824 - protein, 43 aa, Artificial Sequence; identical to SEQ ID NO: 25082
  Cyclic GFR-binding peptide
  MOD_RES (5)..(42): Xaa is C or S

SEQ ID NO: 28825 - protein, 36 aa, Artificial Sequence; identical to SEQ ID NO: 25083
  Cyclic GFR-binding peptide
  MOD_RES (3)..(3): Xaa is C or S

SEQ ID NO: 28826 - protein, 28 aa, Artificial Sequence
  Cyclic GFR-binding peptide
SRVHHSNITVQIMEYVRKKPKLIGEMSR

SEQ ID NO: 28827 - protein, 35 aa, Artificial Sequence; identical to SEQ ID NO: 25085
  Cyclic GFR-binding peptide
  MOD_RES (32)..(34): Xaa is C or S

SEQ ID NO: 28828 - protein, 26 aa, Artificial Sequence
  Cyclic GFR-binding peptide
HRPVQVRKIEYVRKKPKLKKATVRLE

SEQ ID NO: 28829 - protein, 32 aa, Artificial Sequence; identical to SEQ ID NO: 25087
  Cyclic GFR-binding peptide
  MOD_RES (3)..(3): Xaa is C or S

SEQ ID NO: 28830 - protein, 23 aa, Artificial Sequence
  Cyclic GFR-binding peptide
ERSVKMAKVRIKPHQGQHKEVQV

SEQ ID NO: 28831 - protein, 36 aa, Artificial Sequence; identical to SEQ ID NO: 25089
  Cyclic GFR-binding peptide

SEQ ID NO: 28832 - protein, 34 aa, Artificial Sequence; identical to SEQ ID NO: 25090
  Cyclic GFR-binding peptide
  MOD_RES (6)..(6): Xaa is C or S

SEQ ID NO: 28833 - protein, 29 aa, Artificial Sequence
  Cyclic GFR-binding peptide
TGQRSVKMAKVRIKPHQGQHKEVQVLEEH

SEQ ID NO: 28834 - protein, 38 aa, Artificial Sequence; identical to SEQ ID NO: 25092
  Cyclic GFR-binding peptide
  MOD_RES (7)..(7): Xaa is C or S

SEQ ID NO: 28835 - protein, 32 aa, Artificial Sequence; identical to SEQ ID NO: 25093
  Cyclic GFR-binding peptide
  MOD_RES (2)..(2): Xaa is C or S

SEQ ID NO: 28836 - protein, 27 aa, Artificial Sequence
  Cyclic GFR-binding peptide
SNITVQIMEYVRKKPKLLGEMSRLEEH

SEQ ID NO: 28837 - protein, 27 aa, Artificial Sequence
  Cyclic GFR-binding peptide
SNITVQIMEYVRKKPKLIGEMSRLEEH

SEQ ID NO: 28838 - protein, 42 aa, Artificial Sequence; identical to SEQ ID NO: 25096
  Cyclic GFR-binding peptide
  MOD_RES (2)..(39)..(41): Xaa is C or S

SEQ ID NO: 28839 - protein, 30 aa, Artificial Sequence; identical to SEQ ID NO: 25097
  Cyclic GFR-binding peptide

SEQ ID NO: 28840 - protein, 35 aa, Artificial Sequence; identical to SEQ ID NO: 25098
  Cyclic GFR-binding peptide
  MOD_RES (34)..(34): Xaa is C or S

SEQ ID NO: 28841 - protein, 29 aa, Artificial Sequence
  Cyclic GFR-binding peptide
PTGQRPVQMRKIRIKPHQGQHKKATVLEE

SEQ ID NO: 28842 - protein, 34 aa, Artificial Sequence; identical to SEQ ID NO: 25100
  Cyclic GFR-binding peptide
  MOD_RES (34)..(34): Xaa is C or S

SEQ ID NO: 28843 - protein, 35 aa, Artificial Sequence; identical to SEQ ID NO: 25101
  Cyclic GFR-binding peptide
  MOD_RES (5)..(5): Xaa is C or S

SEQ ID NO: 28844 - protein, 30 aa, Artificial Sequence; identical to SEQ ID NO: 25102
  Cyclic GFR-binding peptide
  MOD_RES (1)..(1): Xaa is C or S

SEQ ID NO: 28845 - protein, 33 aa, Artificial Sequence; identical to SEQ ID NO: 25103
  Cyclic GFR-binding peptide
  MOD_RES (31)..(33): Xaa is C or S

SEQ ID NO: 28846 - protein, 32 aa, Artificial Sequence; identical to SEQ ID NO: 25104
  Cyclic GFR-binding peptide

SEQ ID NO: 28847 - protein, 39 aa, Artificial Sequence; identical to SEQ ID NO: 25105
  Cyclic GFR-binding peptide
  MOD_RES (3)..(3): Xaa is C or S

SEQ ID NO: 28848 - protein, 29 aa, Artificial Sequence
  Cyclic GFR-binding peptide
PSRVHHSNITVQIMEYVRKKPKLLGEMSR

SEQ ID NO: 28849 - protein, 37 aa, Artificial Sequence; identical to SEQ ID NO: 25107
  Cyclic GFR-binding peptide
  MOD_RES (3)..(37): Xaa is C or S

SEQ ID NO: 28850 - protein, 30 aa, Artificial Sequence; identical to SEQ ID NO: 25108
  Cyclic GFR-binding peptide

SEQ ID NO: 28851 - protein, 28 aa, Artificial Sequence
  Cyclic GFR-binding peptide
HHRPVQVRKIEYVRKKPKLKKATVRLEE

SEQ ID NO: 28852 - protein, 33 aa, Artificial Sequence; identical to SEQ ID NO: 25110
  Cyclic GFR-binding peptide
  MOD_RES (4)..(4): Xaa is C or S

SEQ ID NO: 28853 - protein, 34 aa, Artificial Sequence; identical to SEQ ID NO: 25111
  Cyclic GFR-binding peptide
  MOD_RES (34)..(34): Xaa is C or S

SEQ ID NO: 28854 - protein, 38 aa, Artificial Sequence; identical to SEQ ID NO: 749
  Cyclic GFR-binding peptide
  MOD_RES (32)..(33): Xaa is C or S

SEQ ID NO: 28855 - protein, 35 aa, Artificial Sequence
  Cyclic GFR-binding peptide
  MOD_RES (30)..(31): Xaa is C or S
KVVMEYQKYVKPTRGVIYLISIPSLDQPVXXPSAS

SEQ ID NO: 28856 - protein, 27 aa, Artificial Sequence
  Cyclic GFR-binding peptide
VVMEYKFKVKPTRGVLYLISIPELDQP

SEQ ID NO: 28857 - protein, 27 aa, Artificial Sequence
  Cyclic GFR-binding peptide
VMNYHYKLIVNSSDDKYLVSIPSLKTP

SEQ ID NO: 28858 - protein, 24 aa, Artificial Sequence
  Cyclic GFR-binding peptide
MRYKKLIKPTKGIFYLISIANLDQ

SEQ ID NO: 28859 - protein, 29 aa, Artificial Sequence
  Cyclic GFR-binding peptide
  MOD_RES (1)..(1): Xaa is C or S
XSKVVMRYKKLVKPTRGVFYLISIANLDQ

SEQ ID NO: 28860 - protein, 31 aa, Artificial Sequence; identical to SEQ ID NO: 756
  Cyclic GFR-binding peptide
  MOD_RES (2)..(2): Xaa is C or S

SEQ ID NO: 28861 - protein, 30 aa, Artificial Sequence; identical to SEQ ID NO: 757
  Cyclic GFR-binding peptide
  MOD_RES (1)..(1): Xaa is C or S

SEQ ID NO: 28862 - protein, 35 aa, Artificial Sequence
  Cyclic GFR-binding peptide
  MOD_RES (1)..(33)..(34): Xaa is C or S
XGEVVMDEYQKYVVKENEDIYLMSIPSLETPVXXA

SEQ ID NO: 28863 - protein, 33 aa, Artificial Sequence; identical to SEQ ID NO: 760
  Cyclic GFR-binding peptide
  MOD_RES (2)..(2): Xaa is C or S

SEQ ID NO: 28864 - protein, 24 aa, Artificial Sequence
  Cyclic GFR-binding peptide
VAMGEYQKYYTVVGKDIYLISIPS

SEQ ID NO: 28865 - protein, 40 aa, Artificial Sequence
  Cyclic GFR-binding peptide
  MOD_RES (2)..(4)..(36)..(37): Xaa is C or S
RXGXGEVVMEEYKFKVVKDYEDLYLMSIPELETPVXXAKP

SEQ ID NO: 28866 - protein, 28 aa, Artificial Sequence
  Cyclic GFR-binding peptide
RVIMRYKKLVKPKRGVFYLISIANLAQP

SEQ ID NO: 28867 - protein, 25 aa, Artificial Sequence
  Cyclic GFR-binding peptide
VVMDRYKKLVVKENEDFYLMSIANL

SEQ ID NO: 28868 - protein, 36 aa, Artificial Sequence; identical to SEQ ID NO: 765
  Cyclic GFR-binding peptide
  MOD_RES (1)..(33)..(34): Xaa is C or S

SEQ ID NO: 28869 - protein, 32 aa, Artificial Sequence; identical to SEQ ID NO: 767
  Cyclic GFR-binding peptide
  MOD_RES (1)..(32): Xaa is C or S

SEQ ID NO: 28870 - protein, 28 aa, Artificial Sequence
  Cyclic GFR-binding peptide
  MOD_RES (26)..(27): Xaa is C or S
EYKFKTPVGMDDLYLVSIPELKTPVXXA

SEQ ID NO: 28871 - protein, 27 aa, Artificial Sequence
  Cyclic GFR-binding peptide
  MOD_RES (27)..(27): Xaa is C or S
NRYKKLIVNNSSDFYLVSIANLKTPAX

SEQ ID NO: 28872 - protein, 32 aa, Artificial Sequence
  Cyclic GFR-binding peptide
  MOD_RES (2)..(2): Xaa is C or S
GXGEVVMEEYKFKVVKDYEDLYLMSIPELETP

SEQ ID NO: 28873 - protein, 32 aa, Artificial Sequence
  Cyclic GFR-binding peptide
  MOD_RES (31)..(32): Xaa is C or S
KVVMNEYQKYIVNNSSDIYLVSIPSLKTPAXX

SEQ ID NO: 28874 - protein, 32 aa, Artificial Sequence
  Cyclic GFR-binding peptide
  MOD_RES (30)..(31): Xaa is C or S
VAMGRYKKLYTVVGKDFYLISIANLKTPVXXA

SEQ ID NO: 28875 - protein, 25 aa, Artificial Sequence
  Cyclic GFR-binding peptide
MEYQKYVKPTRGVIYLISIPSLDQP

SEQ ID NO: 28876 - protein, 28 aa, Artificial Sequence
  Cyclic GFR-binding peptide
KVVMEYKFKVKPTRGVLYLISIPELDQP

SEQ ID NO: 28877 - protein, 24 aa, Artificial Sequence
  Cyclic GFR-binding peptide
VMDEYKFKVVKENEDLYLMSIPEL

SEQ ID NO: 28878 - protein, 33 aa, Artificial Sequence
  Cyclic GFR-binding peptide
  MOD_RES (31)..(32): Xaa is C or S
SKVVMEYKFKVKPTRGVLYLISIPELDQPVXXP

SEQ ID NO: 28879 - protein, 22 aa, Artificial Sequence
  Cyclic GFR-binding peptide
MRYKKLVKPKRGVFYLISIANL

SEQ ID NO: 28880 - protein, 35 aa, Artificial Sequence; identical to SEQ ID NO: 775
  Cyclic GFR-binding peptide
  MOD_RES (31)..(32): Xaa is C or S

SEQ ID NO: 28881 - protein, 31 aa, Artificial Sequence
  Cyclic GFR-binding peptide
  MOD_RES (1)..(1): Xaa is C or S
XESVAMGEYQKYYTVVGKDIYLISIPSLKTP

SEQ ID NO: 28882 - protein, 29 aa, Artificial Sequence
  Cyclic GFR-binding peptide
  MOD_RES (26)..(26): Xaa is C or S
EYKFKIVNSSDDLYLVSIPELKTPAXTPK

SEQ ID NO: 28883 - protein, 34 aa, Artificial Sequence; identical to SEQ ID NO: 776
  Cyclic GFR-binding peptide
  MOD_RES (1)..(3): Xaa is C or S

SEQ ID NO: 28884 - protein, 22 aa, Artificial Sequence
  Cyclic GFR-binding peptide
EYQKYIVNSSDDIYLVSIPSLK

SEQ ID NO: 28885 - protein, 42 aa, Artificial Sequence; identical to SEQ ID NO: 777
  Cyclic GFR-binding peptide
  MOD_RES (2)..(4)..(36)..(37): Xaa is C or S

SEQ ID NO: 28886 - protein, 29 aa, Artificial Sequence
  Cyclic GFR-binding peptide
  MOD_RES (28)..(29): Xaa is C or S
MNRYKKLIVNNSSDFYLVSIANLKTPAXX

SEQ ID NO: 28887 - protein, 23 aa, Artificial Sequence
  Cyclic GFR-binding peptide
MNRYKKLIVNSSDDFYLVSIANL

SEQ ID NO: 28888 - protein, 28 aa, Artificial Sequence
  Cyclic GFR-binding peptide
VMEEYKFKVVKDYEDLYLMSIPELETPV

SEQ ID NO: 28889 - protein, 32 aa, Artificial Sequence
  Cyclic GFR-binding peptide
  MOD_RES (2)..(2): Xaa is C or S
GXSRVVMNEYKFKIVNSSDDLYLVSIPELKTP

SEQ ID NO: 28890 - protein, 37 aa, Artificial Sequence
  Cyclic GFR-binding peptide
  MOD_RES (2)..(33)..(34): Xaa is C or S
KXSKVIMEYKFKIKPTKGILYLISIPELDQSVXXPSA

SEQ ID NO: 28891 - protein, 40 aa, Artificial Sequence
  Cyclic GFR-binding peptide
  MOD_RES (2)..(4)..(36)..(37): Xaa is C or S
HXGXARVVMNEYKFKIVNSSDDLYLVSIPELQTPAXXPKP

SEQ ID NO: 28892 - protein, 35 aa, Artificial Sequence
  Cyclic GFR-binding peptide
  MOD_RES (29)..(30): Xaa is C or S
VMDRYKKLVVNNAADFYLISIANLRAPVXXSAPAA

SEQ ID NO: 28893 - protein, 31 aa, Artificial Sequence
  Cyclic GFR-binding peptide
  MOD_RES (1)..(3): Xaa is C or S
XGXGEVVMDEYQKYVVKENEDIYLMSIPSLE

SEQ ID NO: 28894 - protein, 32 aa, Artificial Sequence
  Cyclic GFR-binding peptide
  MOD_RES (28)..(29): Xaa is C or S
IMEYQKYIKPTKGIIYLISIPSLDQSVXXPSA

SEQ ID NO: 28895 - protein, 36 aa, Artificial Sequence
  Cyclic GFR-binding peptide
  MOD_RES (31)..(32): Xaa is C or S
EVVMEEYQKYVVKDYEDIYLMSIPSLETPVXXAKPI

SEQ ID NO: 28896 - protein, 35 aa, Artificial Sequence; identical to SEQ ID NO: 783
  Cyclic GFR-binding peptide
  MOD_RES (30)..(31): Xaa is C or S

SEQ ID NO: 28897 - protein, 39 aa, Artificial Sequence; identical to SEQ ID NO: 784
  Cyclic GFR-binding peptide
  MOD_RES (1)..(3)..(35)..(36): Xaa is C or S

SEQ ID NO: 28898 - protein, 34 aa, Artificial Sequence
  Cyclic GFR-binding peptide
  MOD_RES (1)..(33)..(34): Xaa is C or S
XAEVVMDYHYKLVVNNAADKYLISIPSLRAPVXX

SEQ ID NO: 28899 - protein, 38 aa, Artificial Sequence; identical to SEQ ID NO: 785
  Cyclic GFR-binding peptide
  MOD_RES (1)..(33): Xaa is C or S

SEQ ID NO: 28900 - protein, 32 aa, Artificial Sequence; identical to SEQ ID NO: 789
  Cyclic GFR-binding peptide
  MOD_RES (31)..(32): Xaa is C or S

SEQ ID NO: 28901 - protein, 24 aa, Artificial Sequence
  Cyclic GFR-binding peptide
MDEYKFKVVKENEDLYLMSIPELE

SEQ ID NO: 28902 - protein, 31 aa, Artificial Sequence; identical to SEQ ID NO: 790
  Cyclic GFR-binding peptide
  MOD_RES (28)..(29): Xaa is C or S

SEQ ID NO: 28903 - protein, 35 aa, Artificial Sequence
  Cyclic GFR-binding peptide
  MOD_RES (1)..(3)..(35): Xaa is C or S
XGXGEVVMEEYKFKVVKDYEDLYLMSIPELETPVX

SEQ ID NO: 28904 - protein, 30 aa, Artificial Sequence; identical to SEQ ID NO: 795
  Cyclic GFR-binding peptide

SEQ ID NO: 28905 - protein, 32 aa, Artificial Sequence; identical to SEQ ID NO: 797
  Cyclic GFR-binding peptide
  MOD_RES (32)..(32): Xaa is C or S

SEQ ID NO: 28906 - protein, 29 aa, Artificial Sequence
  Cyclic GFR-binding peptide
SRVIMRYKKLVKPKRGVFYLISIANLAQP

SEQ ID NO: 28907 - protein, 31 aa, Artificial Sequence
  Cyclic GFR-binding peptide
  MOD_RES (31)..(31): Xaa is C or S
SVAMGRYKKLYTVVGKDFYLISIANLKTPVX

SEQ ID NO: 28908 - protein, 30 aa, Artificial Sequence; identical to SEQ ID NO: 807
  Cyclic GFR-binding peptide
  MOD_RES (27)..(28): Xaa is C or S

SEQ ID NO: 28909 - protein, 30 aa, Artificial Sequence; identical to SEQ ID NO: 808
  Cyclic GFR-binding peptide
  MOD_RES (2)..(2): Xaa is C or S

SEQ ID NO: 28910 - protein, 35 aa, Artificial Sequence; identical to SEQ ID NO: 809
  Cyclic GFR-binding peptide
  MOD_RES (29)..(30): Xaa is C or S

SEQ ID NO: 28911 - protein, 32 aa, Artificial Sequence; identical to SEQ ID NO: 810
  Cyclic GFR-binding peptide
  MOD_RES (1)..(1): Xaa is C or S

SEQ ID NO: 28912 - protein, 24 aa, Artificial Sequence
  Cyclic GFR-binding peptide
NEYKFKIVNSSDDLYLVSIPELKT

SEQ ID NO: 28913 - protein, 34 aa, Artificial Sequence
  Cyclic GFR-binding peptide
  MOD_RES (2)..(34): Xaa is C or S
GXGEVVMEEYQKYVVKDYEDIYLMSIPSLETPVX

SEQ ID NO: 28914 - protein, 30 aa, Artificial Sequence
  Cyclic GFR-binding peptide
KVVMNEYKFKIVNNSSDLYLVSIPELKTPA

SEQ ID NO: 28915 - protein, 42 aa, Artificial Sequence
  Cyclic GFR-binding peptide
  MOD_RES (2)..(4)..(36)..(37): Xaa is C or S
RXGXAEVVMDEYKFKVVNNAADLYLISIPELRAPVXXSAPAA

SEQ ID NO: 28916 - protein, 33 aa, Artificial Sequence; identical to SEQ ID NO: 813
  Cyclic GFR-binding peptide
  MOD_RES (30)..(31): Xaa is C or S

SEQ ID NO: 28917 - protein, 23 aa, Artificial Sequence
  Cyclic GFR-binding peptide
EEYKFKTPVGMDDLYLVSIPELK

SEQ ID NO: 28918 - protein, 32 aa, Artificial Sequence
  Cyclic GFR-binding peptide
  MOD_RES (28)..(29): Xaa is C or S
IMEYKFKIKPTKGILYLISIPELDQSVXXPSA

SEQ ID NO: 28919 - protein, 25 aa, Artificial Sequence
  Cyclic GFR-binding peptide
NRYKKLIVNNSSDFYLVSIANLKTP

SEQ ID NO: 28920 - protein, 36 aa, Artificial Sequence
  Cyclic GFR-binding peptide
  MOD_RES (31)..(32): Xaa is C or S
SKVVMEYQKYVKPTRGVIYLISIPSLDQPVXXPSAS

SEQ ID NO: 28921 - protein, 26 aa, Artificial Sequence
  Cyclic GFR-binding peptide
VIMEYQKYIKPTKGIIYLISIPSLDQ

SEQ ID NO: 28922 - protein, 33 aa, Artificial Sequence; identical to SEQ ID NO: 818
  Cyclic GFR-binding peptide
  MOD_RES (29)..(30): Xaa is C or S

SEQ ID NO: 28923 - protein, 38 aa, Artificial Sequence
  Cyclic GFR-binding peptide
  MOD_RES (2)..(4)..(36): Xaa is C or S
HXGXSRVVMNEYQKYIVNSSDDIYLVSIPSLKTPAXTP

SEQ ID NO: 28924 - protein, 25 aa, Artificial Sequence
  Cyclic GFR-binding peptide
VMDEYKFKVVKENEDLYLMSIPELE

SEQ ID NO: 28925 - protein, 37 aa, Artificial Sequence
  Cyclic GFR-binding peptide
  MOD_RES (31)..(32): Xaa is C or S
SRVIMEYQKYVKPKRGVIYLISIPSLAQPVXXPAASA

SEQ ID NO: 28926 - protein, 41 aa, Artificial Sequence
  Cyclic GFR-binding peptide
  MOD_RES (1)..(3)..(35)..(36): Xaa is C or S
XGXSRVVMNEYQKYIVNSSDDIYLVSIPSLKTPAXXPKPVY

SEQ ID NO: 28927 - protein, 31 aa, Artificial Sequence
  Cyclic GFR-binding peptide
  MOD_RES (30)..(31): Xaa is C or S
VVMDRYKKLVVNNAADFYLISIANLRAPVXX

SEQ ID NO: 28928 - protein, 24 aa, Artificial Sequence
  Cyclic GFR-binding peptide
MDEYQKYVVKENEDIYLMSIPSLE

SEQ ID NO: 28929 - protein, 32 aa, Artificial Sequence
  Cyclic GFR-binding peptide
  MOD_RES (1)..(32): Xaa is C or S
XSKVVMEYQKYVKPTRGVIYLISIPSLDQPVX

SEQ ID NO: 28930 - protein, 40 aa, Artificial Sequence
  Cyclic GFR-binding peptide
  MOD_RES (1)..(3)..(35)..(36): Xaa is C or S
XGXSRVVMNEYKFKIVNSSDDLYLVSIPELKTPAXXPKPV

SEQ ID NO: 28931 - protein, 26 aa, Artificial Sequence
  Cyclic GFR-binding peptide
  MOD_RES (26)..(26): Xaa is C or S
RYKKLVVKDYEDFYLMSIANLETPVX

SEQ ID NO: 28932 - protein, 40 aa, Artificial Sequence; identical to SEQ ID NO: 823
  Cyclic GFR-binding peptide
  MOD_RES (1)..(3)..(36)..(37): Xaa is C or S

SEQ ID NO: 28933 - protein, 37 aa, Artificial Sequence
  Cyclic GFR-binding peptide
  MOD_RES (1)..(33)..(34): Xaa is C or S
XESVAMGRYKKLYTVVGKDFYLISIANLKTPVXXAKS

SEQ ID NO: 28934 - protein, 40 aa, Artificial Sequence; identical to SEQ ID NO: 824
  Cyclic GFR-binding peptide
  MOD_RES (1)..(3)..(35): Xaa is C or S

SEQ ID NO: 28935 - protein, 20 aa, Artificial Sequence
  Cyclic GFR-binding peptide
EYKFKVVKENEDLYLMSIPE

SEQ ID NO: 28936 - protein, 42 aa, Artificial Sequence
  Cyclic GFR-binding peptide
  MOD_RES (2)..(4)..(36)..(37): Xaa is C or S
RXGXAEVVMDYHYKLVVNNAADKYLISIPSLRAPVXXSAPAA

SEQ ID NO: 28937 - protein, 28 aa, Artificial Sequence
  Cyclic GFR-binding peptide
MGEEYKFKTPVGMDDLYLVSIPELKTPV

SEQ ID NO: 28938 - protein, 24 aa, Artificial Sequence
  Cyclic GFR-binding peptide
EYKFKIKPTKGILYLISIPELDQS

SEQ ID NO: 28939 - protein, 25 aa, Artificial Sequence
  Cyclic GFR-binding peptide
IMRYKKLIKPTKGIFYLISIANLDQ

SEQ ID NO: 28940 - protein, 27 aa, Artificial Sequence
  Cyclic GFR-binding peptide
VAMGYHYKLYTVVGKDKYLISIPSLKT

SEQ ID NO: 28941 - protein, 26 aa, Artificial Sequence
  Cyclic GFR-binding peptide
  MOD_RES (26)..(26): Xaa is C or S
EYKFKVVNNAADLYLISIPELRAPVX

SEQ ID NO: 28942 - protein, 41 aa, Artificial Sequence
  Cyclic GFR-binding peptide
  MOD_RES (1)..(3)..(35)..(36): Xaa is C or S
XGXGEVVMDEYQKYVVKENEDIYLMSIPSLETPVXXAKPIK

SEQ ID NO: 28943 - protein, 26 aa, Artificial Sequence
  Cyclic GFR-binding peptide
  MOD_RES (26)..(26): Xaa is C or S
YHYKLVVKENEDKYLMSIPSLETPVX

SEQ ID NO: 28944 - protein, 37 aa, Artificial Sequence
  Cyclic GFR-binding peptide
  MOD_RES (2)..(34)..(35): Xaa is C or S
GXAEVVMDEYKFKVVNNAADLYLISIPELRAPVXXSA

SEQ ID NO: 28945 - protein, 33 aa, Artificial Sequence; identical to SEQ ID NO: 839
  Cyclic GFR-binding peptide
  MOD_RES (2)..(4): Xaa is C or S

SEQ ID NO: 28946 - protein, 36 aa, Artificial Sequence
  Cyclic GFR-binding peptide
  MOD_RES (31)..(31): Xaa is C or S
RVVMNEYQKYIVNSSDDIYLVSIPSLKTPAXTPKTV

SEQ ID NO: 28947 - protein, 37 aa, Artificial Sequence
  Cyclic GFR-binding peptide
  MOD_RES (1)..(33)..(34): Xaa is C or S
XGEVVMDEYKFKVVKENEDLYLMSIPELETPVXXAKP

SEQ ID NO: 28948 - protein, 28 aa, Artificial Sequence
  Cyclic GFR-binding peptide
VVMDYHYKLVVKENEDKYLMSIPSLETP

SEQ ID NO: 28949 - protein, 26 aa, Artificial Sequence
  Cyclic GFR-binding peptide
ESVAMGEYQKYYTVVGKDIYLISIPS

SEQ ID NO: 28950 - protein, 32 aa, Artificial Sequence; identical to SEQ ID NO: 845
  Cyclic GFR-binding peptide
  MOD_RES (2)..(4): Xaa is C or S

SEQ ID NO: 28951 - protein, 25 aa, Artificial Sequence
  Cyclic GFR-binding peptide
RVIMEYQKYVKPKRGVIYLISIPSL

SEQ ID NO: 28952 - protein, 33 aa, Artificial Sequence; identical to SEQ ID NO: 847
  Cyclic GFR-binding peptide
  MOD_RES (2)..(33): Xaa is C or S

SEQ ID NO: 28953 - protein, 35 aa, Artificial Sequence
  Cyclic GFR-binding peptide
  MOD_RES (1)..(32)..(33): Xaa is C or S
XSKVVMEYKFKVKPTRGVLYLISIPELDQPVXXPS

SEQ ID NO: 28954 - protein, 26 aa, Artificial Sequence
  Cyclic GFR-binding peptide
VVMNEYQKYIVNNSSDIYLVSIPSLK

SEQ ID NO: 28955 - protein, 30 aa, Artificial Sequence; identical to SEQ ID NO: 851
  Cyclic GFR-binding peptide
  MOD_RES (29)..(30): Xaa is C or S

SEQ ID NO: 28956 - protein, 27 aa, Artificial Sequence
  Cyclic GFR-binding peptide
GEVVMERYKKLVVKDYEDFYLMSIANL

SEQ ID NO: 28957 - protein, 34 aa, Artificial Sequence
  Cyclic GFR-binding peptide
  MOD_RES (28)..(29): Xaa is C or S
VMEYKFKVKPTRGVLYLISIPELDQPVXXPSASA

SEQ ID NO: 28958 - protein, 27 aa, Artificial Sequence
  Cyclic GFR-binding peptide
  MOD_RES (2)..(2): Xaa is C or S
KXSKVIMRYKKLIKPTKGIFYLISIAN

SEQ ID NO: 28959 - protein, 27 aa, Artificial Sequence
  Cyclic GFR-binding peptide
  MOD_RES (1)..(1): Xaa is C or S
XSKVIMEYKFKIKPTKGILYLISIPEL

SEQ ID NO: 28960 - protein, 29 aa, Artificial Sequence
  Cyclic GFR-binding peptide
  MOD_RES (1)..(1): Xaa is C or S
XESVAMGEYQKYYTVVGKDIYLISIPSLK

SEQ ID NO: 28961 - protein, 41 aa, Artificial Sequence
  Cyclic GFR-binding peptide
  MOD_RES (2)..(4)..(36)..(37): Xaa is C or S
HXGXAKVVMNEYKFKIVNNSSDLYLVSIPELKTPAXXAKPV

SEQ ID NO: 28962 - protein, 32 aa, Artificial Sequence; identical to SEQ ID NO: 859
  Cyclic GFR-binding peptide
  MOD_RES (2)..(2): Xaa is C or S

SEQ ID NO: 28963 - protein, 36 aa, Artificial Sequence
  Cyclic GFR-binding peptide
  MOD_RES (30)..(31): Xaa is C or S
VVMNEYQKYIVNSSDDIYLVSIPSLQTPAXXPKPVT

SEQ ID NO: 28964 - protein, 31 aa, Artificial Sequence
  Cyclic GFR-binding peptide
  MOD_RES (27)..(28): Xaa is C or S
EEYQKYTPVGMDDIYLVSIPSLKTPVXXAKG

SEQ ID NO: 28965 - protein, 27 aa, Artificial Sequence
  Cyclic GFR-binding peptide
MNEYQKYIVNSSDDIYLVSIPSLQTPA

SEQ ID NO: 28966 - protein, 33 aa, Artificial Sequence
  Cyclic GFR-binding peptide
  MOD_RES (1)..(33): Xaa is C or S
XSRVVMNEYKFKIVNSSDDLYLVSIPELKTPAX

SEQ ID NO: 28967 - protein, 30 aa, Artificial Sequence
  Cyclic GFR-binding peptide
  MOD_RES (2)..(4): Xaa is C or S
RXGXAEVVMDYHYKLVVNNAADKYLISIPS

SEQ ID NO: 28968 - protein, 29 aa, Artificial Sequence
  Cyclic GFR-binding peptide
ESVAMGYHYKLYTVVGKDKYLISIPSLKT

SEQ ID NO: 28969 - protein, 30 aa, Artificial Sequence; identical to SEQ ID NO: 867
  Cyclic GFR-binding peptide
  MOD_RES (30)..(30): Xaa is C or S

SEQ ID NO: 28970 - protein, 31 aa, Artificial Sequence; identical to SEQ ID NO: 868
  Cyclic GFR-binding peptide

SEQ ID NO: 28971 - protein, 26 aa, Artificial Sequence
  Cyclic GFR-binding peptide
VVMNYHYKLIVNNSSDKYLVSIPSLK

SEQ ID NO: 28972 - protein, 36 aa, Artificial Sequence
  Cyclic GFR-binding peptide
  MOD_RES (2)..(4)..(35)..(36): Xaa is C or S
SXKXSKVIMEYKFKIKPTKGILYLISIPELDQSVXX

SEQ ID NO: 28973 - protein, 37 aa, Artificial Sequence; identical to SEQ ID NO: 871
  Cyclic GFR-binding peptide
  MOD_RES (32)..(33): Xaa is C or S

SEQ ID NO: 28974 - protein, 38 aa, Artificial Sequence; identical to SEQ ID NO: 876
  Cyclic GFR-binding peptide
  MOD_RES (1)..(33)..(34): Xaa is C or S

SEQ ID NO: 28975 - protein, 31 aa, Artificial Sequence; identical to SEQ ID NO: 877
  Cyclic GFR-binding peptide
  MOD_RES (27)..(28): Xaa is C or S

SEQ ID NO: 28976 - protein, 23 aa, Artificial Sequence
  Cyclic GFR-binding peptide
EEYKFKVVKDYEDLYLMSIPELE

SEQ ID NO: 28977 - protein, 30 aa, Artificial Sequence
  Cyclic GFR-binding peptide
  MOD_RES (27)..(28): Xaa is C or S
MEYQKYVKPKRGVIYLISIPSLAQPVXXPA

SEQ ID NO: 28978 - protein, 33 aa, Artificial Sequence
  Cyclic GFR-binding peptide
  MOD_RES (2)..(2): Xaa is C or S
GXESVAMGEYQKYYTVVGKDIYLISIPSLKTPV

SEQ ID NO: 28979 - protein, 28 aa, Artificial Sequence
  Cyclic GFR-binding peptide
  MOD_RES (26)..(27): Xaa is C or S
YHYKLVKPKRGVKYLISIPSLAQPVXXP

SEQ ID NO: 28980 - protein, 30 aa, Artificial Sequence
  Cyclic GFR-binding peptide
ESVAMGRYKKLYTVVGKDFYLISIANLKTP

SEQ ID NO: 28981 - protein, 29 aa, Artificial Sequence
  Cyclic GFR-binding peptide
  MOD_RES (26)..(27): Xaa is C or S
EYQKYVVKENEDIYLMSIPSLETPVXXAK

SEQ ID NO: 28982 - protein, 28 aa, Artificial Sequence
  Cyclic GFR-binding peptide
  MOD_RES (26)..(27): Xaa is C or S
RYKKLIVNSSDDFYLVSIANLKTPAXXP

SEQ ID NO: 28983 - protein, 38 aa, Artificial Sequence
  Cyclic GFR-binding peptide
  MOD_RES (32)..(33): Xaa is C or S
GEVVMDEYKFKVVKENEDLYLMSIPELETPVXXAKPIK

SEQ ID NO: 28984 - protein, 26 aa, Artificial Sequence
  Cyclic GFR-binding peptide
KVVMYHYKLVKPTRGVKYLISIPSLD

SEQ ID NO: 28985 - protein, 30 aa, Artificial Sequence; identical to SEQ ID NO: 886
  Cyclic GFR-binding peptide
  MOD_RES (28)..(29): Xaa is C or S

SEQ ID NO: 28986 - protein, 36 aa, Artificial Sequence
  Cyclic GFR-binding peptide
  MOD_RES (30)..(31): Xaa is C or S
VVMDYHYKLVVNNAADKYLISIPSLRAPVXXSAPAA

SEQ ID NO: 28987 - protein, 37 aa, Artificial Sequence; identical to SEQ ID NO: 887
  Cyclic GFR-binding peptide
  MOD_RES (31)..(32): Xaa is C or S

SEQ ID NO: 28988 - protein, 36 aa, Artificial Sequence; identical to SEQ ID NO: 888
  Cyclic GFR-binding peptide
  MOD_RES (1)..(3)..(34)..(35): Xaa is C or S

SEQ ID NO: 28989 - protein, 28 aa, Artificial Sequence
  Cyclic GFR-binding peptide
SRVIMRYKKLVKPKRGVFYLISIANLAQ

SEQ ID NO: 28990 - protein, 32 aa, Artificial Sequence
  Cyclic GFR-binding peptide
  MOD_RES (27)..(27): Xaa is C or S
NEYQKYIVNSSDDIYLVSIPSLKTPAXTPKTV

SEQ ID NO: 28991 - protein, 27 aa, Artificial Sequence
  Cyclic GFR-binding peptide
  MOD_RES (1)..(1): Xaa is C or S
XAKVVMNRYKKLIVNNSSDFYLVSIAN

SEQ ID NO: 28992 - protein, 30 aa, Artificial Sequence; identical to SEQ ID NO: 893
  Cyclic GFR-binding peptide
  MOD_RES (2)..(2): Xaa is C or S

SEQ ID NO: 28993 - protein, 38 aa, Artificial Sequence
  Cyclic GFR-binding peptide
  MOD_RES (1)..(3)..(35)..(36): Xaa is C or S
XGXGEVVMDEYKFKVVKENEDLYLMSIPELETPVXXAK

SEQ ID NO: 28994 - protein, 28 aa, Artificial Sequence
  Cyclic GFR-binding peptide
VVMNYHYKLIVNSSDDKYLVSIPSLKTP

SEQ ID NO: 28995 - protein, 35 aa, Artificial Sequence; identical to SEQ ID NO: 897
  Cyclic GFR-binding peptide
  MOD_RES (1)..(32)..(33): Xaa is C or S

SEQ ID NO: 28996 - protein, 35 aa, Artificial Sequence; identical to SEQ ID NO: 900
  Cyclic GFR-binding peptide
  MOD_RES (1)..(3)..(35): Xaa is C or S

SEQ ID NO: 28997 - protein, 25 aa, Artificial Sequence
  Cyclic GFR-binding peptide
NEYKFKIVNSSDDLYLVSIPELKTP

SEQ ID NO: 28998 - protein, 39 aa, Artificial Sequence
  Cyclic GFR-binding peptide
  MOD_RES (2)..(4)..(36)..(37): Xaa is C or S
HXGXSRVVMNEYQKYIVNSSDDIYLVSIPSLKTPAXXPK

SEQ ID NO: 28999 - protein, 23 aa, Artificial Sequence
  Cyclic GFR-binding peptide
EYHYKLVVKDYEDKYLMSIPSLE

SEQ ID NO: 29000 - protein, 41 aa, Artificial Sequence
  Cyclic GFR-binding peptide
  MOD_RES (1)..(3)..(35)..(36): Xaa is C or S
XGXESVAMGYHYKLYTVVGKDKYLISIPSLKTPVXXAKSAK

SEQ ID NO: 29001 - protein, 31 aa, Artificial Sequence
  Cyclic GFR-binding peptide
  MOD_RES (28)..(29): Xaa is C or S
GEEYKFKTPVGMDDLYLVSIPELKTPVXXAK

SEQ ID NO: 29002 - protein, 29 aa, Artificial Sequence
  Cyclic GFR-binding peptide
  MOD_RES (28)..(29): Xaa is C or S
MGEYQKYYTVVGKDIYLISIPSLKTPVXX

SEQ ID NO: 29003 - protein, 32 aa, Artificial Sequence; identical to SEQ ID NO: 904
  Cyclic GFR-binding peptide
  MOD_RES (2)..(2): Xaa is C or S

SEQ ID NO: 29004 - protein, 23 aa, Artificial Sequence
  Cyclic GFR-binding peptide
EYKFKIVNNSSDLYLVSIPELKT

SEQ ID NO: 29005 - protein, 35 aa, Artificial Sequence
  Cyclic GFR-binding peptide
  MOD_RES (1)..(3)..(35): Xaa is C or S
XGXAKVVMNEYKFKIVNNSSDLYLVSIPELKTPAX

SEQ ID NO: 29006 - protein, 27 aa, Artificial Sequence
  Cyclic GFR-binding peptide
VMNYHYKLIVNNSSDKYLVSIPSLKTP

SEQ ID NO: 29007 - protein, 34 aa, Artificial Sequence
  Cyclic GFR-binding peptide
  MOD_RES (1)..(3): Xaa is C or S
XGXESVAMGEYQKYYTVVGKDIYLISIPSLKTPV

SEQ ID NO: 29008 - protein, 32 aa, Artificial Sequence
  Cyclic GFR-binding peptide
  MOD_RES (29)..(30): Xaa is C or S
VMNEYQKYIVNSSDDIYLVSIPSLQTPAXXPK

SEQ ID NO: 29009 - protein, 36 aa, Artificial Sequence
  Cyclic GFR-binding peptide
  MOD_RES (2)..(34)..(35): Xaa is C or S
GXGEVVMDEYQKYVVKENEDIYLMSIPSLETPVXXA

SEQ ID NO: 29010 - protein, 41 aa, Artificial Sequence; identical to SEQ ID NO: 910
  Cyclic GFR-binding peptide
  MOD_RES (1)..(3)..(35)..(36): Xaa is C or S

SEQ ID NO: 29011 - protein, 38 aa, Artificial Sequence; identical to SEQ ID NO: 911
  Cyclic GFR-binding peptide
  MOD_RES (2)..(4)..(36)..(37): Xaa is C or S

SEQ ID NO: 29012 - protein, 28 aa, Artificial Sequence
  Cyclic GFR-binding peptide
SKVVMEYQKYVKPTRGVIYLISIPSLDQ

SEQ ID NO: 29013 - protein, 25 aa, Artificial Sequence
  Cyclic GFR-binding peptide
RVIMYHYKLVKPKRGVKYLISIPSL

SEQ ID NO: 29014 - protein, 28 aa, Artificial Sequence
  Cyclic GFR-binding peptide
  MOD_RES (1)..(1): Xaa is C or S
XESVAMGYHYKLYTVVGKDKYLISIPSL

SEQ ID NO: 29015 - protein, 30 aa, Artificial Sequence
  Cyclic GFR-binding peptide
  MOD_RES (1)..(1): Xaa is C or S
XESVAMGRYKKLYTVVGKDFYLISIANLKT

SEQ ID NO: 29016 - protein, 23 aa, Artificial Sequence
  Cyclic GFR-binding peptide
MDRYKKLVVKENEDFYLMSIANL

SEQ ID NO: 29017 - protein, 40 aa, Artificial Sequence; identical to SEQ ID NO: 918
  Cyclic GFR-binding peptide
  MOD_RES (2)..(4)..(36)..(37): Xaa is C or S

SEQ ID NO: 29018 - protein, 32 aa, Artificial Sequence
  Cyclic GFR-binding peptide
  MOD_RES (26)..(27): Xaa is C or S
EYQKYVKPKRGVIYLISIPSLAQPVXXPAASA

SEQ ID NO: 29019 - protein, 35 aa, Artificial Sequence
  Cyclic GFR-binding peptide
  MOD_RES (29)..(30): Xaa is C or S
VMNEYQKYIVNSSDDIYLVSIPSLQTPAXXPKPVT

SEQ ID NO: 29020 - protein, 29 aa, Artificial Sequence
  Cyclic GFR-binding peptide
KVVMRYKKLVKPTRGVFYLISIANLDQPV

SEQ ID NO: 29021 - protein, 25 aa, Artificial Sequence
  Cyclic GFR-binding peptide
SKVIMYHYKLIKPTKGIKYLISIPS

SEQ ID NO: 29022 - protein, 35 aa, Artificial Sequence
  Cyclic GFR-binding peptide
  MOD_RES (29)..(30): Xaa is C or S
VMDEYKFKVVKENEDLYLMSIPELETPVXXAKPIK

SEQ ID NO: 29023 - protein, 31 aa, Artificial Sequence
  Cyclic GFR-binding peptide
SRVVMNEYQKYIVNSSDDIYLVSIPSLKTPA

SEQ ID NO: 29024 - protein, 34 aa, Artificial Sequence; identical to SEQ ID NO: 926
  Cyclic GFR-binding peptide
  MOD_RES (31)..(32): Xaa is C or S

SEQ ID NO: 29025 - protein, 38 aa, Artificial Sequence; identical to SEQ ID NO: 927
  Cyclic GFR-binding peptide
  MOD_RES (2)..(4)..(36)..(37): Xaa is C or S

SEQ ID NO: 29026 - protein, 29 aa, Artificial Sequence
  Cyclic GFR-binding peptide
SRVVMNRYKKLIVNSSDDFYLVSIANLKT

SEQ ID NO: 29027 - protein, 40 aa, Artificial Sequence
  Cyclic GFR-binding peptide
  MOD_RES (1)..(3)..(35)..(36): Xaa is C or S
XGXGEVVMEEYKFKVVKDYEDLYLMSIPELETPVXXAKPI

SEQ ID NO: 29028 - protein, 39 aa, Artificial Sequence; identical to SEQ ID NO: 933
  Cyclic GFR-binding peptide
  MOD_RES (1)..(3)..(35)..(36): Xaa is C or S

SEQ ID NO: 29029 - protein, 25 aa, Artificial Sequence
  Cyclic GFR-binding peptide
EYKFKVVKDYEDLYLMSIPELETPV

SEQ ID NO: 29030 - protein, 30 aa, Artificial Sequence
  Cyclic GFR-binding peptide
  MOD_RES (28)..(29): Xaa is C or S
MEEYQKYVVKDYEDIYLMSIPSLETPVXXA

SEQ ID NO: 29031 - protein, 34 aa, Artificial Sequence
  Cyclic GFR-binding peptide
  MOD_RES (31)..(32): Xaa is C or S
EVVMDEYQKYVVKENEDIYLMSIPSLETPVXXAK

SEQ ID NO: 29032 - protein, 32 aa, Artificial Sequence
  Cyclic GFR-binding peptide
  MOD_RES (28)..(29): Xaa is C or S
MGEYQKYYTVVGKDIYLISIPSLKTPVXXAKS

SEQ ID NO: 29033 - protein, 37 aa, Artificial Sequence
  Cyclic GFR-binding peptide
  MOD_RES (2)..(34)..(35): Xaa is C or S
GXAEVVMDRYKKLVVNNAADFYLISIANLRAPVXXSA

SEQ ID NO: 29034 - protein, 31 aa, Artificial Sequence
  Cyclic GFR-binding peptide
  MOD_RES (27)..(28): Xaa is C or S
NEYKFKIVNSSDDLYLVSIPELKTPAXXPKP

SEQ ID NO: 29035 - protein, 37 aa, Artificial Sequence
  Cyclic GFR-binding peptide
  MOD_RES (2)..(4)..(36)..(37): Xaa is C or S
RXGXAEVVMDYHYKLVVNNAADKYLISIPSLRAPVXX

SEQ ID NO: 29036 - protein, 32 aa, Artificial Sequence; identical to SEQ ID NO: 935
  Cyclic GFR-binding peptide
  MOD_RES (31)..(32): Xaa is C or S

SEQ ID NO: 29037 - protein, 38 aa, Artificial Sequence; identical to SEQ ID NO: 936
  Cyclic GFR-binding peptide
  MOD_RES (1)..(33)..(34): Xaa is C or S

SEQ ID NO: 29038 - protein, 32 aa, Artificial Sequence; identical to SEQ ID NO: 937
  Cyclic GFR-binding peptide
  MOD_RES (29)..(30): Xaa is C or S

SEQ ID NO: 29039 - protein, 36 aa, Artificial Sequence; identical to SEQ ID NO: 938
  Cyclic GFR-binding peptide
  MOD_RES (1)..(32)..(33): Xaa is C or S

SEQ ID NO: 29040 - protein, 33 aa, Artificial Sequence
  Cyclic GFR-binding peptide
  MOD_RES (1)..(3): Xaa is C or S
XGXSRVVMNEYKFKIVNSSDDLYLVSIPELKTP

SEQ ID NO: 29041 - protein, 26 aa, Artificial Sequence
  Cyclic GFR-binding peptide
MDRYKKLVVKENEDFYLMSIANLETP

SEQ ID NO: 29042 - protein, 40 aa, Artificial Sequence; identical to SEQ ID NO: 941
  Cyclic GFR-binding peptide
  MOD_RES (2)..(4)..(36)..(37): Xaa is C or S

SEQ ID NO: 29043 - protein, 38 aa, Artificial Sequence
  Cyclic GFR-binding peptide
  MOD_RES (2)..(34)..(35): Xaa is C or S
GXAEVVMDRYKKLVVNNAADFYLISIANLRAPVXXSAP

SEQ ID NO: 29044 - protein, 23 aa, Artificial Sequence
  Cyclic GFR-binding peptide
EYKFKVVKENEDLYLMSIPELET

SEQ ID NO: 29045 - protein, 35 aa, Artificial Sequence; identical to SEQ ID NO: 944
  Cyclic GFR-binding peptide
  MOD_RES (29)..(30): Xaa is C or S

SEQ ID NO: 29046 - protein, 34 aa, Artificial Sequence
  Cyclic GFR-binding peptide
  MOD_RES (30)..(31): Xaa is C or S
VVMEEYKFKVVKDYEDLYLMSIPELETPVXXAKP

SEQ ID NO: 29047 - protein, 41 aa, Artificial Sequence
  Cyclic GFR-binding peptide
  MOD_RES (2)..(4)..(36)..(37): Xaa is C or S
RXGXGEVVMEEYKFKVVKDYEDLYLMSIPELETPVXXAKPI

SEQ ID NO: 29048 - protein, 29 aa, Artificial Sequence
  Cyclic GFR-binding peptide
AKVVMNEYQKYIVNNSSDIYLVSIPSLKT

SEQ ID NO: 29049 - protein, 24 aa, Artificial Sequence
  Cyclic GFR-binding peptide
VIMEYQKYVKPKRGVIYLISIPSL

SEQ ID NO: 29050 - protein, 28 aa, Artificial Sequence
  Cyclic GFR-binding peptide
  MOD_RES (26)..(27): Xaa is C or S
YHYKLIVNSSDDKYLVSIPSLKTPAXXP

SEQ ID NO: 29051 - protein, 22 aa, Artificial Sequence
  Cyclic GFR-binding peptide
GEYQKYYTVVGKDIYLISIPSL

SEQ ID NO: 29052 - protein, 33 aa, Artificial Sequence
  Cyclic GFR-binding peptide
  MOD_RES (28)..(29): Xaa is C or S
MEEYQKYVVKDYEDIYLMSIPSLETPVXXAKPI

SEQ ID NO: 29053 - protein, 33 aa, Artificial Sequence; identical to SEQ ID NO: 949
  Cyclic GFR-binding peptide
  MOD_RES (29)..(30): Xaa is C or S

SEQ ID NO: 29054 - protein, 36 aa, Artificial Sequence; identical to SEQ ID NO: 950
  Cyclic GFR-binding peptide
  MOD_RES (1)..(33)..(34): Xaa is C or S

SEQ ID NO: 29055 - protein, 32 aa, Artificial Sequence; identical to SEQ ID NO: 951
  Cyclic GFR-binding peptide
  MOD_RES (1)..(3): Xaa is C or S

SEQ ID NO: 29056 - protein, 42 aa, Artificial Sequence
  Cyclic GFR-binding peptide
  MOD_RES (2)..(4)..(36)..(37): Xaa is C or S
RXGXESVAMGEYQKYYTVVGKDIYLISIPSLKTPVXXAKSAK

SEQ ID NO: 29057 - protein, 32 aa, Artificial Sequence; identical to SEQ ID NO: 952
  Cyclic GFR-binding peptide
  MOD_RES (32)..(32): Xaa is C or S

SEQ ID NO: 29058 - protein, 38 aa, Artificial Sequence
  Cyclic GFR-binding peptide
  MOD_RES (1)..(3)..(35)..(36): Xaa is C or S
XGXSRVVMNEYQKYIVNSSDDIYLVSIPSLKTPAXXPK

SEQ ID NO: 29059 - protein, 24 aa, Artificial Sequence
  Cyclic GFR-binding peptide
MEYQKYVKPTRGVIYLISIPSLDQ

SEQ ID NO: 29060 - protein, 27 aa, Artificial Sequence
  Cyclic GFR-binding peptide
  MOD_RES (26)..(27): Xaa is C or S
RYKKLVKPTRGVFYLISIANLDQPVXX

SEQ ID NO: 29061 - protein, 33 aa, Artificial Sequence
  Cyclic GFR-binding peptide
  MOD_RES (31)..(32): Xaa is C or S
SVAMGRYKKLYTVVGKDFYLISIANLKTPVXXA

SEQ ID NO: 29062 - protein, 25 aa, Artificial Sequence
  Cyclic GFR-binding peptide
VMNEYQKYIVNSSDDIYLVSIPSLQ

SEQ ID NO: 29063 - protein, 23 aa, Artificial Sequence
  Cyclic GFR-binding peptide
NRYKKLIVNSSDDFYLVSIANLK

SEQ ID NO: 29064 - protein, 31 aa, Artificial Sequence; identical to SEQ ID NO: 961
  Cyclic GFR-binding peptide
  MOD_RES (26)..(27): Xaa is C or S

SEQ ID NO: 29065 - protein, 27 aa, Artificial Sequence
  Cyclic GFR-binding peptide
IMEYQKYVKPKRGVIYLISIPSLAQPV

SEQ ID NO: 29066 - protein, 30 aa, Artificial Sequence
  Cyclic GFR-binding peptide
  MOD_RES (2)..(4): Xaa is C or S
RXGXAEVVMDEYKFKVVNNAADLYLISIPE

SEQ ID NO: 29067 - protein, 27 aa, Artificial Sequence
  Cyclic GFR-binding peptide
VMYHYKLVKPTRGVKYLISIPSLDQPV

SEQ ID NO: 29068 - protein, 33 aa, Artificial Sequence; identical to SEQ ID NO: 967
  Cyclic GFR-binding peptide
  MOD_RES (31)..(32): Xaa is C or S

SEQ ID NO: 29069 - protein, 31 aa, Artificial Sequence
  Cyclic GFR-binding peptide
  MOD_RES (29)..(30): Xaa is C or S
VMNEYQKYIVNSSDDIYLVSIPSLKTPAXXP

SEQ ID NO: 29070 - protein, 34 aa, Artificial Sequence; identical to SEQ ID NO: 973
  Cyclic GFR-binding peptide
  MOD_RES (29)..(30): Xaa is C or S

SEQ ID NO: 29071 - protein, 32 aa, Artificial Sequence
  Cyclic GFR-binding peptide
  MOD_RES (27)..(28): Xaa is C or S
GRYKKLYTVVGKDFYLISIANLKTPVXXAKSA

SEQ ID NO: 29072 - protein, 35 aa, Artificial Sequence
  Cyclic GFR-binding peptide
  MOD_RES (2)..(34)..(35): Xaa is C or S
GXESVAMGYHYKLYTVVGKDKYLISIPSLKTPVXX

SEQ ID NO: 29073 - protein, 26 aa, Artificial Sequence
  Cyclic GFR-binding peptide
NYHYKLIVNSSDDKYLVSIPSLQTPA

SEQ ID NO: 29074 - protein, 33 aa, Artificial Sequence
  Cyclic GFR-binding peptide
  MOD_RES (30)..(31): Xaa is C or S
KVIMEYKFKIKPTKGILYLISIPELDQSVXXPS

SEQ ID NO: 29075 - protein, 22 aa, Artificial Sequence
  Cyclic GFR-binding peptide
EYKFKIKPTKGILYLISIPELD

SEQ ID NO: 29076 - protein, 28 aa, Artificial Sequence
  Cyclic GFR-binding peptide
  MOD_RES (28)..(28): Xaa is C or S
GERYKKLTPVGMDDFYLVSIANLKTPVX

SEQ ID NO: 29077 - protein, 31 aa, Artificial Sequence
  Cyclic GFR-binding peptide
  MOD_RES (26)..(27): Xaa is C or S
EYQKYVVKENEDIYLMSIPSLETPVXXAKPI

SEQ ID NO: 29078 - protein, 34 aa, Artificial Sequence
  Cyclic GFR-binding peptide
  MOD_RES (2)..(4): Xaa is C or S
RXGXESVAMGRYKKLYTVVGKDFYLISIANLKTP

SEQ ID NO: 29079 - protein, 26 aa, Artificial Sequence
  Cyclic GFR-binding peptide
VVMNEYQKYIVNSSDDIYLVSIPSLK

SEQ ID NO: 29080 - protein, 41 aa, Artificial Sequence
  Cyclic GFR-binding peptide
  MOD_RES (2)..(4)..(36)..(37): Xaa is C or S
HXGXARVVMNEYQKYIVNSSDDIYLVSIPSLQTPAXXPKPV

SEQ ID NO: 29081 - protein, 29 aa, Artificial Sequence
  Cyclic GFR-binding peptide
  MOD_RES (26)..(27): Xaa is C or S
RYKKLYTVVGKDFYLISIANLKTPVXXAK

SEQ ID NO: 29082 - protein, 31 aa, Artificial Sequence; identical to SEQ ID NO: 986
  Cyclic GFR-binding peptide
  MOD_RES (31)..(31): Xaa is C or S

SEQ ID NO: 29083 - protein, 27 aa, Artificial Sequence
  Cyclic GFR-binding peptide
MNEYQKYIVNNSSDIYLVSIPSLKTPA

SEQ ID NO: 29084 - protein, 31 aa, Artificial Sequence; identical to SEQ ID NO: 988
  Cyclic GFR-binding peptide
  MOD_RES (27)..(28): Xaa is C or S

SEQ ID NO: 29085 - protein, 27 aa, Artificial Sequence
  Cyclic GFR-binding peptide
RVVMNRYKKLIVNSSDDFYLVSIANLK

SEQ ID NO: 29086 - protein, 37 aa, Artificial Sequence
  Cyclic GFR-binding peptide
  MOD_RES (1)..(3)..(35): Xaa is C or S
XGXSRVVMNEYKFKIVNSSDDLYLVSIPELKTPAXTP

SEQ ID NO: 29087 - protein, 40 aa, Artificial Sequence; identical to SEQ ID NO: 993
  Cyclic GFR-binding peptide
  MOD_RES (2)..(4)..(36)..(37): Xaa is C or S

SEQ ID NO: 29088 - protein, 24 aa, Artificial Sequence
  Cyclic GFR-binding peptide
IMEYKFKIKPTKGILYLISIPELD

SEQ ID NO: 29089 - protein, 26 aa, Artificial Sequence
  Cyclic GFR-binding peptide
VVMDEYQKYVVKENEDIYLMSIPSLE

SEQ ID NO: 29090 - protein, 28 aa, Artificial Sequence
  Cyclic GFR-binding peptide
  MOD_RES (28)..(28): Xaa is C or S
IMRYKKLVKPKRGVFYLISIANLAQPVX

SEQ ID NO: 29091 - protein, 33 aa, Artificial Sequence; identical to SEQ ID NO: 998
  Cyclic GFR-binding peptide
  MOD_RES (29)..(30): Xaa is C or S

SEQ ID NO: 29092 - protein, 34 aa, Artificial Sequence
  Cyclic GFR-binding peptide
  MOD_RES (28)..(29): Xaa is C or S
IMEYKFKIKPTKGILYLISIPELDQSVXXPSASA

SEQ ID NO: 29093 - protein, 30 aa, Artificial Sequence; identical to SEQ ID NO: 1001
  Cyclic GFR-binding peptide
  MOD_RES (26)..(27): Xaa is C or S

SEQ ID NO: 29094 - protein, 20 aa, Artificial Sequence
  Cyclic GFR-binding peptide
EYKFKVVNNAADLYLISIPE

SEQ ID NO: 29095 - protein, 31 aa, Artificial Sequence
  Cyclic GFR-binding peptide
  MOD_RES (27)..(28): Xaa is C or S
DEYKFKVVNNAADLYLISIPELRAPVXXSAP

SEQ ID NO: 29096 - protein, 39 aa, Artificial Sequence
  Cyclic GFR-binding peptide
  MOD_RES (1)..(3)..(36)..(37): Xaa is C or S
XGXEAVSMGEEYQKYTPVGMDDIYLVSIPSLKTPVXXAK

SEQ ID NO: 29097 - protein, 33 aa, Artificial Sequence
  Cyclic GFR-binding peptide
  MOD_RES (28)..(29): Xaa is C or S
MDYHYKLVVNNAADKYLISIPSLRAPVXXSAPA

SEQ ID NO: 29098 - protein, 27 aa, Artificial Sequence
  Cyclic GFR-binding peptide
SVAMGEYQKYYTVVGKDIYLISIPSLK

SEQ ID NO: 29099 - protein, 31 aa, Artificial Sequence
  Cyclic GFR-binding peptide
  MOD_RES (27)..(27): Xaa is C or S
NEYQKYIVNSSDDIYLVSIPSLKTPAXTPKT

SEQ ID NO: 29100 - protein, 27 aa, Artificial Sequence
  Cyclic GFR-binding peptide
  MOD_RES (26)..(27): Xaa is C or S
YHYKLVKPTRGVKYLISIPSLDQPVXX

SEQ ID NO: 29101 - protein, 31 aa, Artificial Sequence; identical to SEQ ID NO: 1013
  Cyclic GFR-binding peptide
  MOD_RES (26)..(27): Xaa is C or S

SEQ ID NO: 29102 - protein, 29 aa, Artificial Sequence
  Cyclic GFR-binding peptide
GEVVMEEYKFKVVKDYEDLYLMSIPELET

SEQ ID NO: 29103 - protein, 30 aa, Artificial Sequence
  Cyclic GFR-binding peptide
AVSMGEEYQKYTPVGMDDIYLVSIPSLKTP

SEQ ID NO: 29104 - protein, 37 aa, Artificial Sequence; identical to SEQ ID NO: 1016
  Cyclic GFR-binding peptide
  MOD_RES (32)..(33): Xaa is C or S

SEQ ID NO: 29105 - protein, 40 aa, Artificial Sequence; identical to SEQ ID NO: 1020
  Cyclic GFR-binding peptide
  MOD_RES (1)..(3)..(34)..(35): Xaa is C or S

SEQ ID NO: 29106 - protein, 35 aa, Artificial Sequence; identical to SEQ ID NO: 1021
  Cyclic GFR-binding peptide
  MOD_RES (31)..(32): Xaa is C or S

SEQ ID NO: 29107 - protein, 35 aa, Artificial Sequence
  Cyclic GFR-binding peptide
  MOD_RES (2)..(34): Xaa is C or S
GXSRVVMNEYQKYIVNSSDDIYLVSIPSLKTPAXT

SEQ ID NO: 29108 - protein, 23 aa, Artificial Sequence
  Cyclic GFR-binding peptide
MEYKFKVKPKRGVLYLISIPELA

SEQ ID NO: 29109 - protein, 37 aa, Artificial Sequence; identical to SEQ ID NO: 1024
  Cyclic GFR-binding peptide
  MOD_RES (1)..(3)..(35)..(36): Xaa is C or S

SEQ ID NO: 29110 - protein, 25 aa, Artificial Sequence
  Cyclic GFR-binding peptide
KVIMRYKKLIKPTKGIFYLISIANL

SEQ ID NO: 29111 - protein, 41 aa, Artificial Sequence; identical to SEQ ID NO: 1026
  Cyclic GFR-binding peptide
  MOD_RES (2)..(4)..(36)..(37): Xaa is C or S

SEQ ID NO: 29112 - protein, 30 aa, Artificial Sequence
  Cyclic GFR-binding peptide
  MOD_RES (1)..(3): Xaa is C or S
XGXESVAMGYHYKLYTVVGKDKYLISIPSL

SEQ ID NO: 29113 - protein, 33 aa, Artificial Sequence
  Cyclic GFR-binding peptide
  MOD_RES (2)..(2): Xaa is C or S
GXGEVVMDEYKFKVVKENEDLYLMSIPELETPV

SEQ ID NO: 29114 - protein, 33 aa, Artificial Sequence; identical to SEQ ID NO: 1028
  Cyclic GFR-binding peptide
  MOD_RES (1)..(33): Xaa is C or S

SEQ ID NO: 29115 - protein, 39 aa, Artificial Sequence; identical to SEQ ID NO: 1029
  Cyclic GFR-binding peptide
  MOD_RES (2)..(4)..(35)..(36): Xaa is C or S

SEQ ID NO: 29116 - protein, 23 aa, Artificial Sequence
  Cyclic GFR-binding peptide
IMYHYKLVKPKRGVKYLISIPSL

SEQ ID NO: 29117 - protein, 31 aa, Artificial Sequence
  Cyclic GFR-binding peptide
  MOD_RES (28)..(29): Xaa is C or S
GEEYQKYTPVGMDDIYLVSIPSLKTPVXXAK

SEQ ID NO: 29118 - protein, 40 aa, Artificial Sequence; identical to SEQ ID NO: 1034
  Cyclic GFR-binding peptide
  MOD_RES (2)..(4)..(35)..(36): Xaa is C or S

SEQ ID NO: 29119 - protein, 25 aa, Artificial Sequence
  Cyclic GFR-binding peptide
EYQKYIKPTKGIIYLISIPSLDQSV

SEQ ID NO: 29120 - protein, 35 aa, Artificial Sequence
  Cyclic GFR-binding peptide
  MOD_RES (29)..(30): Xaa is C or S
VIMEYKFKIKPTKGILYLISIPELDQSVXXPSASA

SEQ ID NO: 29121 - protein, 37 aa, Artificial Sequence
  Cyclic GFR-binding peptide
  MOD_RES (31)..(32): Xaa is C or S
SKVVMEYQKYVKPTRGVIYLISIPSLDQPVXXPSASA

SEQ ID NO: 29122 - protein, 30 aa, Artificial Sequence
  Cyclic GFR-binding peptide
  MOD_RES (1)..(1): Xaa is C or S
XSKVVMEYKFKVKPTRGVLYLISIPELDQP

SEQ ID NO: 29123 - protein, 26 aa, Artificial Sequence
  Cyclic GFR-binding peptide
EEYKFKVVKDYEDLYLMSIPELETPV

SEQ ID NO: 29124 - protein, 34 aa, Artificial Sequence
  Cyclic GFR-binding peptide
  MOD_RES (2)..(4): Xaa is C or S
RXGXGEVVMEEYQKYVVKDYEDIYLMSIPSLETP

SEQ ID NO: 29125 - protein, 28 aa, Artificial Sequence
  Cyclic GFR-binding peptide
SMGERYKKLTPVGMDDFYLVSIANLKTP

SEQ ID NO: 29126 - protein, 32 aa, Artificial Sequence
  Cyclic GFR-binding peptide
  MOD_RES (31)..(32): Xaa is C or S
RVVMNEYQKYIVNSSDDIYLVSIPSLKTPAXX

SEQ ID NO: 29127 - protein, 30 aa, Artificial Sequence
  Cyclic GFR-binding peptide
RVVMNEYKFKIVNSSDDLYLVSIPELKTPA

SEQ ID NO: 29128 - protein, 23 aa, Artificial Sequence
  Cyclic GFR-binding peptide
MGEEYKFKTPVGMDDLYLVSIPE

SEQ ID NO: 29129 - protein, 33 aa, Artificial Sequence
  Cyclic GFR-binding peptide
  MOD_RES (28)..(29): Xaa is C or S
MNEYQKYIVNSSDDIYLVSIPSLKTPAXXPKPV

SEQ ID NO: 29130 - protein, 38 aa, Artificial Sequence; identical to SEQ ID NO: 1041
  Cyclic GFR-binding peptide
  MOD_RES (2)..(34)..(35): Xaa is C or S

SEQ ID NO: 29131 - protein, 20 aa, Artificial Sequence
  Cyclic GFR-binding peptide
YHYKLVKPTRGVKYLISIPS

SEQ ID NO: 29132 - protein, 39 aa, Artificial Sequence
  Cyclic GFR-binding peptide
  MOD_RES (1)..(3)..(35)..(36): Xaa is C or S
XGXESVAMGEYQKYYTVVGKDIYLISIPSLKTPVXXAKS

SEQ ID NO: 29133 - protein, 34 aa, Artificial Sequence; identical to SEQ ID NO: 1046
  Cyclic GFR-binding peptide
  MOD_RES (2)..(4): Xaa is C or S

SEQ ID NO: 29134 - protein, 27 aa, Artificial Sequence
  Cyclic GFR-binding peptide
  MOD_RES (27)..(27): Xaa is C or S
NEYKFKIVNSSDDLYLVSIPELKTPAX

SEQ ID NO: 29135 - protein, 30 aa, Artificial Sequence; identical to SEQ ID NO: 1049
  Cyclic GFR-binding peptide
  MOD_RES (26)..(26): Xaa is C or S

SEQ ID NO: 29136 - protein, 35 aa, Artificial Sequence
  Cyclic GFR-binding peptide
  MOD_RES (1)..(3)..(35): Xaa is C or S
XGXARVVMNEYKFKIVNSSDDLYLVSIPELQTPAX

SEQ ID NO: 29137 - protein, 32 aa, Artificial Sequence; identical to SEQ ID NO: 1050
  Cyclic GFR-binding peptide
  MOD_RES (31)..(31): Xaa is C or S

SEQ ID NO: 29138 - protein, 29 aa, Artificial Sequence
  Cyclic GFR-binding peptide
  MOD_RES (1)..(1): Xaa is C or S
XSRVVMNYHYKLIVNSSDDKYLVSIPSLK

SEQ ID NO: 29139 - protein, 28 aa, Artificial Sequence
  Cyclic GFR-binding peptide
GEVVMDEYQKYVVKENEDIYLMSIPSLE

SEQ ID NO: 29140 - protein, 32 aa, Artificial Sequence; identical to SEQ ID NO: 1052
  Cyclic GFR-binding peptide
  MOD_RES (29)..(29): Xaa is C or S

SEQ ID NO: 29141 - protein, 34 aa, Artificial Sequence
  Cyclic GFR-binding peptide
  MOD_RES (31)..(32): Xaa is C or S
SVAMGEYQKYYTVVGKDIYLISIPSLKTPVXXAK

SEQ ID NO: 29142 - protein, 25 aa, Artificial Sequence
  Cyclic GFR-binding peptide
VMDRYKKLVVKENEDFYLMSIANLE

SEQ ID NO: 29143 - protein, 37 aa, Artificial Sequence
  Cyclic GFR-binding peptide
  MOD_RES (32)..(33): Xaa is C or S
AVSMGEEYKFKTPVGMDDLYLVSIPELKTPVXXAKGV

SEQ ID NO: 29144 - protein, 33 aa, Artificial Sequence
  Cyclic GFR-binding peptide
  MOD_RES (1)..(3): Xaa is C or S
XGXEAVSMGEEYQKYTPVGMDDIYLVSIPSLKT

SEQ ID NO: 29145 - protein, 35 aa, Artificial Sequence
  Cyclic GFR-binding peptide
  MOD_RES (1)..(34)..(35): Xaa is C or S
XEAVSMGEEYKFKTPVGMDDLYLVSIPELKTPVXX

SEQ ID NO: 29146 - protein, 30 aa, Artificial Sequence
  Cyclic GFR-binding peptide
  MOD_RES (1)..(3): Xaa is C or S
XKXSKVIMEYQKYIKPTKGIIYLISIPSLD

SEQ ID NO: 29147 - protein, 35 aa, Artificial Sequence; identical to SEQ ID NO: 1056
  Cyclic GFR-binding peptide
  MOD_RES (29)..(30): Xaa is C or S

SEQ ID NO: 29148 - protein, 39 aa, Artificial Sequence; identical to SEQ ID NO: 1058
  Cyclic GFR-binding peptide
  MOD_RES (1)..(33)..(34): Xaa is C or S

SEQ ID NO: 29149 - protein, 32 aa, Artificial Sequence; identical to SEQ ID NO: 1060
  Cyclic GFR-binding peptide
  MOD_RES (1)..(3): Xaa is C or S

SEQ ID NO: 29150 - protein, 28 aa, Artificial Sequence
  Cyclic GFR-binding peptide
VVMEYQKYVKPTRGVIYLISIPSLDQPV

SEQ ID NO: 29151 - protein, 35 aa, Artificial Sequence; identical to SEQ ID NO: 1061
  Cyclic GFR-binding peptide
  MOD_RES (30)..(31): Xaa is C or S

SEQ ID NO: 29152 - protein, 31 aa, Artificial Sequence; identical to SEQ ID NO: 1063
  Cyclic GFR-binding peptide
  MOD_RES (2)..(2): Xaa is C or S

SEQ ID NO: 29153 - protein, 38 aa, Artificial Sequence; identical to SEQ ID NO: 1065
  Cyclic GFR-binding peptide
  MOD_RES (1)..(3)..(35)..(36): Xaa is C or S

SEQ ID NO: 29154 - protein, 30 aa, Artificial Sequence
  Cyclic GFR-binding peptide
EVVMDEYKFKVVNNAADLYLISIPELRAPV

SEQ ID NO: 29155 - protein, 28 aa, Artificial Sequence
  Cyclic GFR-binding peptide
GEVVMEYHYKLVVKDYEDKYLMSIPSLE

SEQ ID NO: 29156 - protein, 29 aa, Artificial Sequence
  Cyclic GFR-binding peptide
VSMGEEYKFKTPVGMDDLYLVSIPELKTP

SEQ ID NO: 29157 - protein, 33 aa, Artificial Sequence
  Cyclic GFR-binding peptide
  MOD_RES (29)..(30): Xaa is C or S
VMDEYKFKVVNNAADLYLISIPELRAPVXXSAP

SEQ ID NO: 29158 - protein, 22 aa, Artificial Sequence
  Cyclic GFR-binding peptide
IMYHYKLIKPTKGIKYLISIPS

SEQ ID NO: 29159 - protein, 30 aa, Artificial Sequence
  Cyclic GFR-binding peptide
  MOD_RES (1)..(3): Xaa is C or S
XGXAEVVMDYHYKLVVNNAADKYLISIPSL

SEQ ID NO: 29160 - protein, 30 aa, Artificial Sequence
  Cyclic GFR-binding peptide
  MOD_RES (27)..(28): Xaa is C or S
NEYKFKIVNNSSDLYLVSIPELKTPAXXAK

SEQ ID NO: 29161 - protein, 29 aa, Artificial Sequence
  Cyclic GFR-binding peptide
  MOD_RES (26)..(27): Xaa is C or S
RYKKLIVNNSSDFYLVSIANLKTPAXXAK

SEQ ID NO: 29162 - protein, 25 aa, Artificial Sequence
  Cyclic GFR-binding peptide
MNYHYKLIVNSSDDKYLVSIPSLQT

SEQ ID NO: 29163 - protein, 30 aa, Artificial Sequence; identical to SEQ ID NO: 1078
  Cyclic GFR-binding peptide
  MOD_RES (1)..(3): Xaa is C or S

SEQ ID NO: 29164 - protein, 32 aa, Artificial Sequence; identical to SEQ ID NO: 1079
  Cyclic GFR-binding peptide
  MOD_RES (26)..(27): Xaa is C or S

SEQ ID NO: 29165 - protein, 38 aa, Artificial Sequence
  Cyclic GFR-binding peptide
  MOD_RES (1)..(3)..(35)..(36): Xaa is C or S
XGXAEVVMDYHYKLVVNNAADKYLISIPSLRAPVXXSA

SEQ ID NO: 29166 - protein, 27 aa, Artificial Sequence
  Cyclic GFR-binding peptide
  MOD_RES (1)..(1): Xaa is C or S
XSKVIMYHYKLIKPTKGIKYLISIPSL

SEQ ID NO: 29167 - protein, 28 aa, Artificial Sequence
  Cyclic GFR-binding peptide
MGERYKKLTPVGMDDFYLVSIANLKTPV

SEQ ID NO: 29168 - protein, 28 aa, Artificial Sequence
  Cyclic GFR-binding peptide
  MOD_RES (27)..(28): Xaa is C or S
MRYKKLIKPTKGIFYLISIANLDQSVXX

SEQ ID NO: 29169 - protein, 24 aa, Artificial Sequence
  Cyclic GFR-binding peptide
MNYHYKLIVNNSSDKYLVSIPSLK

SEQ ID NO: 29170 - protein, 30 aa, Artificial Sequence; identical to SEQ ID NO: 1087
  Cyclic GFR-binding peptide

SEQ ID NO: 29171 - protein, 33 aa, Artificial Sequence
  Cyclic GFR-binding peptide
  MOD_RES (29)..(30): Xaa is C or S
VMDRYKKLVVNNAADFYLISIANLRAPVXXSAP

SEQ ID NO: 29172 - protein, 37 aa, Artificial Sequence
  Cyclic GFR-binding peptide
  MOD_RES (2)..(4)..(36)..(37): Xaa is C or S
RXGXAEVVMDEYKFKVVNNAADLYLISIPELRAPVXX

SEQ ID NO: 29173 - protein, 25 aa, Artificial Sequence
  Cyclic GFR-binding peptide
VAMGEYQKYYTVVGKDIYLISIPSL

SEQ ID NO: 29174 - protein, 36 aa, Artificial Sequence; identical to SEQ ID NO: 1088
  Cyclic GFR-binding peptide
  MOD_RES (1)..(33)..(34): Xaa is C or S

SEQ ID NO: 29175 - protein, 28 aa, Artificial Sequence
  Cyclic GFR-binding peptide
EVVMERYKKLVVKDYEDFYLMSIANLET

SEQ ID NO: 29176 - protein, 21 aa, Artificial Sequence
  Cyclic GFR-binding peptide
MEYKFKIKPTKGILYLISIPE

SEQ ID NO: 29177 - protein, 35 aa, Artificial Sequence
  Cyclic GFR-binding peptide
  MOD_RES (1)..(3)..(34)..(35): Xaa is C or S
XKXSKVIMEYKFKIKPTKGILYLISIPELDQSVXX

SEQ ID NO: 29178 - protein, 38 aa, Artificial Sequence
  Cyclic GFR-binding peptide
  MOD_RES (1)..(3)..(35)..(36): Xaa is C or S
XGXSRVVMNEYKFKIVNSSDDLYLVSIPELKTPAXXPK

SEQ ID NO: 29179 - protein, 29 aa, Artificial Sequence
  Cyclic GFR-binding peptide
  MOD_RES (1)..(1): Xaa is C or S
XGEVVMDYHYKLVVKENEDKYLMSIPSLE

SEQ ID NO: 29180 - protein, 36 aa, Artificial Sequence; identical to SEQ ID NO: 1094
  Cyclic GFR-binding peptide
  MOD_RES (30)..(31): Xaa is C or S

SEQ ID NO: 29181 - protein, 30 aa, Artificial Sequence
  Cyclic GFR-binding peptide
  MOD_RES (1)..(1): Xaa is C or S
XSKVVMEYQKYVKPTRGVIYLISIPSLDQP

SEQ ID NO: 29182 - protein, 29 aa, Artificial Sequence
  Cyclic GFR-binding peptide
  MOD_RES (2)..(2): Xaa is C or S
GXAEVVMDYHYKLVVNNAADKYLISIPSL

SEQ ID NO: 29183 - protein, 33 aa, Artificial Sequence; identical to SEQ ID NO: 1096
  Cyclic GFR-binding peptide
  MOD_RES (2)..(2): Xaa is C or S

SEQ ID NO: 29184 - protein, 36 aa, Artificial Sequence; identical to SEQ ID NO: 1098
  Cyclic GFR-binding peptide
  MOD_RES (1)..(3)..(35)..(36): Xaa is C or S

SEQ ID NO: 29185 - protein, 36 aa, Artificial Sequence
  Cyclic GFR-binding peptide
  MOD_RES (1)..(32)..(33): Xaa is C or S
XSKVVMEYKFKVKPTRGVLYLISIPELDQPVXXPSA

SEQ ID NO: 29186 - protein, 33 aa, Artificial Sequence
  Cyclic GFR-binding peptide
  MOD_RES (2)..(4): Xaa is C or S
RXGXAEVVMDEYQKYVVNNAADIYLISIPSLRA

SEQ ID NO: 29187 - protein, 31 aa, Artificial Sequence
  Cyclic GFR-binding peptide
  MOD_RES (30)..(31): Xaa is C or S
VVMEEYKFKVVKDYEDLYLMSIPELETPVXX

SEQ ID NO: 29188 - protein, 28 aa, Artificial Sequence
  Cyclic GFR-binding peptide
KVVMNYHYKLIVNNSSDKYLVSIPSLKT

SEQ ID NO: 29189 - protein, 37 aa, Artificial Sequence; identical to SEQ ID NO: 1101
  Cyclic GFR-binding peptide
  MOD_RES (2)..(33)..(34): Xaa is C or S

SEQ ID NO: 29190 - protein, 35 aa, Artificial Sequence
  Cyclic GFR-binding peptide
  MOD_RES (30)..(31): Xaa is C or S
VVMDEYKFKVVKENEDLYLMSIPELETPVXXAKPI

SEQ ID NO: 29191 - protein, 26 aa, Artificial Sequence
  Cyclic GFR-binding peptide
  MOD_RES (1)..(1): Xaa is C or S
XSKVVMRYKKLVKPTRGVFYLISIAN

SEQ ID NO: 29192 - protein, 41 aa, Artificial Sequence; identical to SEQ ID NO: 1105
  Cyclic GFR-binding peptide
  MOD_RES (2)..(4)..(36)..(37): Xaa is C or S

SEQ ID NO: 29193 - protein, 35 aa, Artificial Sequence
  Cyclic GFR-binding peptide
  MOD_RES (31)..(32): Xaa is C or S
KVVMNEYKFKIVNNSSDLYLVSIPELKTPAXXAKP

SEQ ID NO: 29194 - protein, 28 aa, Artificial Sequence
  Cyclic GFR-binding peptide
VVMNYHYKLIVNNSSDKYLVSIPSLKTP

SEQ ID NO: 29195 - protein, 24 aa, Artificial Sequence
  Cyclic GFR-binding peptide
VIMRYKKLIKPTKGIFYLISIANL

SEQ ID NO: 29196 - protein, 31 aa, Artificial Sequence
  Cyclic GFR-binding peptide
  MOD_RES (31)..(31): Xaa is C or S
VSMGEEYQKYTPVGMDDIYLVSIPSLKTPVX

SEQ ID NO: 29197 - protein, 36 aa, Artificial Sequence
  Cyclic GFR-binding peptide
  MOD_RES (2)..(4)..(36): Xaa is C or S
RXGXAEVVMDYHYKLVVNNAADKYLISIPSLRAPVX

SEQ ID NO: 29198 - protein, 25 aa, Artificial Sequence
  Cyclic GFR-binding peptide
VMNYHYKLIVNNSSDKYLVSIPSLK

SEQ ID NO: 29199 - protein, 36 aa, Artificial Sequence
  Cyclic GFR-binding peptide
  MOD_RES (31)..(32): Xaa is C or S
SRVIMEYQKYVKPKRGVIYLISIPSLAQPVXXPAAS

SEQ ID NO: 29200 - protein, 32 aa, Artificial Sequence
  Cyclic GFR-binding peptide
  MOD_RES (29)..(30): Xaa is C or S
VVMEYQKYVKPTRGVIYLISIPSLDQPVXXPS

SEQ ID NO: 29201 - protein, 40 aa, Artificial Sequence
  Cyclic GFR-binding peptide
  MOD_RES (1)..(3)..(35)..(36): Xaa is C or S
XGXGEVVMEEYQKYVVKDYEDIYLMSIPSLETPVXXAKPI

SEQ ID NO: 29202 - protein, 35 aa, Artificial Sequence; identical to SEQ ID NO: 1113
  Cyclic GFR-binding peptide
  MOD_RES (2)..(34)..(35): Xaa is C or S

SEQ ID NO: 29203 - protein, 33 aa, Artificial Sequence; identical to SEQ ID NO: 1116
  Cyclic GFR-binding peptide
  MOD_RES (31)..(32): Xaa is C or S

SEQ ID NO: 29204 - protein, 36 aa, Artificial Sequence; identical to SEQ ID NO: 1117
  Cyclic GFR-binding peptide
  MOD_RES (32)..(33): Xaa is C or S

SEQ ID NO: 29205 - protein, 37 aa, Artificial Sequence
  Cyclic GFR-binding peptide
  MOD_RES (1)..(3)..(35): Xaa is C or S
XGXSRVVMNEYQKYIVNSSDDIYLVSIPSLKTPAXTP

SEQ ID NO: 29206 - protein, 27 aa, Artificial Sequence
  Cyclic GFR-binding peptide
GEEYKFKTPVGMDDLYLVSIPELKTPV

SEQ ID NO: 29207 - protein, 27 aa, Artificial Sequence
  Cyclic GFR-binding peptide
VIMYHYKLVKPKRGVKYLISIPSLAQP

SEQ ID NO: 29208 - protein, 29 aa, Artificial Sequence
  Cyclic GFR-binding peptide
  MOD_RES (29)..(29): Xaa is C or S
VMNEYKFKIVNSSDDLYLVSIPELQTPAX

SEQ ID NO: 29209 - protein, 34 aa, Artificial Sequence; identical to SEQ ID NO: 1122
  Cyclic GFR-binding peptide
  MOD_RES (2)..(4): Xaa is C or S

SEQ ID NO: 29210 - protein, 34 aa, Artificial Sequence
  Cyclic GFR-binding peptide
  MOD_RES (29)..(30): Xaa is C or S
VVMEYKFKVKPTRGVLYLISIPELDQPVXXPSAS

SEQ ID NO: 29211 - protein, 37 aa, Artificial Sequence
  Cyclic GFR-binding peptide
  MOD_RES (2)..(34): Xaa is C or S
GXSRVVMNEYKFKIVNSSDDLYLVSIPELKTPAXTPK

SEQ ID NO: 29212 - protein, 29 aa, Artificial Sequence
  Cyclic GFR-binding peptide
SRVVMNEYKFKIVNSSDDLYLVSIPELKT

SEQ ID NO: 29213 - protein, 28 aa, Artificial Sequence
  Cyclic GFR-binding peptide
  MOD_RES (2)..(2): Xaa is C or S
KXSRVIMYHYKLVKPKRGVKYLISIPSL

SEQ ID NO: 29214 - protein, 38 aa, Artificial Sequence; identical to SEQ ID NO: 1126
  Cyclic GFR-binding peptide
  MOD_RES (1)..(3)..(35)..(36): Xaa is C or S

SEQ ID NO: 29215 - protein, 31 aa, Artificial Sequence
  Cyclic GFR-binding peptide
  MOD_RES (28)..(29): Xaa is C or S
MDEYKFKVVNNAADLYLISIPELRAPVXXSA

SEQ ID NO: 29216 - protein, 31 aa, Artificial Sequence
  Cyclic GFR-binding peptide
  MOD_RES (2)..(2): Xaa is C or S
GXEAVSMGEEYQKYTPVGMDDIYLVSIPSLK

SEQ ID NO: 29217 - protein, 36 aa, Artificial Sequence
  Cyclic GFR-binding peptide
  MOD_RES (2)..(4)..(36): Xaa is C or S
RXGXGEVVMDEYQKYVVKENEDIYLMSIPSLETPVX

SEQ ID NO: 29218 - protein, 32 aa, Artificial Sequence
  Cyclic GFR-binding peptide
  MOD_RES (2)..(4): Xaa is C or S
RXGXEAVSMGEEYQKYTPVGMDDIYLVSIPSL

SEQ ID NO: 29219 - protein, 30 aa, Artificial Sequence
  Cyclic GFR-binding peptide
  MOD_RES (2)..(2): Xaa is C or S
KXSKVVMEYKFKVKPTRGVLYLISIPELDQ

SEQ ID NO: 29220 - protein, 30 aa, Artificial Sequence
  Cyclic GFR-binding peptide
  MOD_RES (27)..(28): Xaa is C or S
GYHYKLYTVVGKDKYLISIPSLKTPVXXAK

SEQ ID NO: 29221 - protein, 21 aa, Artificial Sequence
  Cyclic GFR-binding peptide
EYKFKTPVGMDDLYLVSIPEL

SEQ ID NO: 29222 - protein, 39 aa, Artificial Sequence
  Cyclic GFR-binding peptide
  MOD_RES (2)..(4)..(36)..(37): Xaa is C or S
RXGXESVAMGEYQKYYTVVGKDIYLISIPSLKTPVXXAK

SEQ ID NO: 29223 - protein, 33 aa, Artificial Sequence; identical to SEQ ID NO: 1130
  Cyclic GFR-binding peptide
  MOD_RES (27)..(28): Xaa is C or S

SEQ ID NO: 29224 - protein, 27 aa, Artificial Sequence
  Cyclic GFR-binding peptide
  MOD_RES (27)..(27): Xaa is C or S
GRYKKLYTVVGKDFYLISIANLKTPVX

SEQ ID NO: 29225 - protein, 32 aa, Artificial Sequence; identical to SEQ ID NO: 1132
  Cyclic GFR-binding peptide
  MOD_RES (28)..(29): Xaa is C or S

SEQ ID NO: 29226 - protein, 25 aa, Artificial Sequence
  Cyclic GFR-binding peptide
RVVMNRYKKLIVNSSDDFYLVSIAN

SEQ ID NO: 29227 - protein, 31 aa, Artificial Sequence
  Cyclic GFR-binding peptide
AVSMGEEYQKYTPVGMDDIYLVSIPSLKTPV

SEQ ID NO: 29228 - protein, 35 aa, Artificial Sequence
  Cyclic GFR-binding peptide
  MOD_RES (1)..(33)..(34): Xaa is C or S
XSRVVMNEYQKYIVNSSDDIYLVSIPSLKTPAXXP

SEQ ID NO: 29229 - protein, 40 aa, Artificial Sequence; identical to SEQ ID NO: 1134
  Cyclic GFR-binding peptide
  MOD_RES (1)..(3)..(35)..(36): Xaa is C or S

SEQ ID NO: 29230 - protein, 27 aa, Artificial Sequence
  Cyclic GFR-binding peptide
RVVMNEYKFKIVNSSDDLYLVSIPELQ

SEQ ID NO: 29231 - protein, 34 aa, Artificial Sequence; identical to SEQ ID NO: 1136
  Cyclic GFR-binding peptide
  MOD_RES (32)..(33): Xaa is C or S

SEQ ID NO: 29232 - protein, 35 aa, Artificial Sequence
  Cyclic GFR-binding peptide
  MOD_RES (29)..(30): Xaa is C or S
VMDEYKFKVVNNAADLYLISIPELRAPVXXSAPAA

SEQ ID NO: 29233 - protein, 29 aa, Artificial Sequence
  Cyclic GFR-binding peptide
  MOD_RES (28)..(29): Xaa is C or S
IMRYKKLVKPKRGVFYLISIANLAQPVXX

SEQ ID NO: 29234 - protein, 35 aa, Artificial Sequence; identical to SEQ ID NO: 1142
  Cyclic GFR-binding peptide
  MOD_RES (1)..(33)..(34): Xaa is C or S

SEQ ID NO: 29235 - protein, 39 aa, Artificial Sequence
  Cyclic GFR-binding peptide
  MOD_RES (2)..(4)..(36)..(37): Xaa is C or S
RXGXAEVVMDYHYKLVVNNAADKYLISIPSLRAPVXXSA

SEQ ID NO: 29236 - protein, 33 aa, Artificial Sequence
  Cyclic GFR-binding peptide
  MOD_RES (1)..(3): Xaa is C or S
XGXGEVVMEEYKFKVVKDYEDLYLMSIPELETP

SEQ ID NO: 29237 - protein, 27 aa, Artificial Sequence
  Cyclic GFR-binding peptide
KVIMRYKKLIKPTKGIFYLISIANLDQ

SEQ ID NO: 29238 - protein, 35 aa, Artificial Sequence; identical to SEQ ID NO: 1144
  Cyclic GFR-binding peptide
  MOD_RES (31)..(31): Xaa is C or S

SEQ ID NO: 29239 - protein, 30 aa, Artificial Sequence
  Cyclic GFR-binding peptide
SRVIMEYKFKVKPKRGVLYLISIPELAQPV

SEQ ID NO: 29240 - protein, 36 aa, Artificial Sequence; identical to SEQ ID NO: 1148
  Cyclic GFR-binding peptide
  MOD_RES (30)..(31): Xaa is C or S

SEQ ID NO: 29241 - protein, 31 aa, Artificial Sequence; identical to SEQ ID NO: 1149
  Cyclic GFR-binding peptide
  MOD_RES (1)..(1): Xaa is C or S

SEQ ID NO: 29242 - protein, 36 aa, Artificial Sequence
  Cyclic GFR-binding peptide
  MOD_RES (2)..(4)..(36): Xaa is C or S
RXGXESVAMGEYQKYYTVVGKDIYLISIPSLKTPVX

SEQ ID NO: 29243 - protein, 28 aa, Artificial Sequence
  Cyclic GFR-binding peptide
VMNEYQKYIVNNSSDIYLVSIPSLKTPA

SEQ ID NO: 29244 - protein, 38 aa, Artificial Sequence
  Cyclic GFR-binding peptide
  MOD_RES (1)..(3)..(34)..(35): Xaa is C or S
XKXSRVIMEYQKYVKPKRGVIYLISIPSLAQPVXXPAA

SEQ ID NO: 29245 - protein, 29 aa, Artificial Sequence
  Cyclic GFR-binding peptide
  MOD_RES (26)..(27): Xaa is C or S
EYKFKVKPKRGVLYLISIPELAQPVXXPA

SEQ ID NO: 29246 - protein, 28 aa, Artificial Sequence
  Cyclic GFR-binding peptide
VVMNEYQKYIVNSSDDIYLVSIPSLKTP

SEQ ID NO: 29247 - protein, 38 aa, Artificial Sequence; identical to SEQ ID NO: 1156
  Cyclic GFR-binding peptide
  MOD_RES (2)..(4)..(35)..(36): Xaa is C or S

SEQ ID NO: 29248 - protein, 22 aa, Artificial Sequence
  Cyclic GFR-binding peptide
EYQKYVVKDYEDIYLMSIPSLE

SEQ ID NO: 29249 - protein, 41 aa, Artificial Sequence
  Cyclic GFR-binding peptide
  MOD_RES (2)..(4)..(36)..(37): Xaa is C or S
RXGXAEVVMDYHYKLVVNNAADKYLISIPSLRAPVXXSAPA

SEQ ID NO: 29250 - protein, 30 aa, Artificial Sequence
  Cyclic GFR-binding peptide
  MOD_RES (2)..(4): Xaa is C or S
RXGXGEVVMDEYQKYVVKENEDIYLMSIPS

SEQ ID NO: 29251 - protein, 38 aa, Artificial Sequence
  Cyclic GFR-binding peptide
  MOD_RES (2)..(34)..(35): Xaa is C or S
GXESVAMGYHYKLYTVVGKDKYLISIPSLKTPVXXAKS

SEQ ID NO: 29252 - protein, 38 aa, Artificial Sequence
  Cyclic GFR-binding peptide
  MOD_RES (32)..(33): Xaa is C or S
ESVAMGYHYKLYTVVGKDKYLISIPSLKTPVXXAKSAK

SEQ ID NO: 29253 - protein, 37 aa, Artificial Sequence
  Cyclic GFR-binding peptide
  MOD_RES (2)..(4)..(36)..(37): Xaa is C or S
RXGXGEVVMDEYQKYVVKENEDIYLMSIPSLETPVXX

SEQ ID NO: 29254 - protein, 33 aa, Artificial Sequence; identical to SEQ ID NO: 1160
  Cyclic GFR-binding peptide
  MOD_RES (27)..(28): Xaa is C or S

SEQ ID NO: 29255 - protein, 25 aa, Artificial Sequence
  Cyclic GFR-binding peptide
MDEYKFKVVNNAADLYLISIPELRA

SEQ ID NO: 29256 - protein, 28 aa, Artificial Sequence
  Cyclic GFR-binding peptide
AVSMGEEYKFKTPVGMDDLYLVSIPELK

SEQ ID NO: 29257 - protein, 37 aa, Artificial Sequence
  Cyclic GFR-binding peptide
  MOD_RES (2)..(4)..(35)..(36): Xaa is C or S
SXKXSKVIMEYQKYIKPTKGIIYLISIPSLDQSVXXP

SEQ ID NO: 29258 - protein, 33 aa, Artificial Sequence
  Cyclic GFR-binding peptide
  MOD_RES (27)..(27): Xaa is C or S
NEYKFKIVNSSDDLYLVSIPELKTPAXTPKTVH

SEQ ID NO: 29259 - protein, 26 aa, Artificial Sequence
  Cyclic GFR-binding peptide
AEVVMDRYKKLVVNNAADFYLISIAN

SEQ ID NO: 29260 - protein, 30 aa, Artificial Sequence
  Cyclic GFR-binding peptide
  MOD_RES (29)..(30): Xaa is C or S
VMDEYKFKVVKENEDLYLMSIPELETPVXX

SEQ ID NO: 29261 - protein, 31 aa, Artificial Sequence
  Cyclic GFR-binding peptide
  MOD_RES (2)..(2): Xaa is C or S
KXSKVIMEYQKYIKPTKGIIYLISIPSLDQS

SEQ ID NO: 29262 - protein, 32 aa, Artificial Sequence; identical to SEQ ID NO: 1165
  Cyclic GFR-binding peptide
  MOD_RES (1)..(3): Xaa is C or S

SEQ ID NO: 29263 - protein, 35 aa, Artificial Sequence
  Cyclic GFR-binding peptide
  MOD_RES (32)..(33): Xaa is C or S
AEVVMDEYKFKVVNNAADLYLISIPELRAPVXXSA

SEQ ID NO: 29264 - protein, 32 aa, Artificial Sequence
  Cyclic GFR-binding peptide
  MOD_RES (2)..(4): Xaa is C or S
HXGXSRVVMNEYQKYIVNSSDDIYLVSIPSLK

SEQ ID NO: 29265 - protein, 21 aa, Artificial Sequence
  Cyclic GFR-binding peptide
EYKFKVKPTRGVLYLISIPEL

SEQ ID NO: 29266 - protein, 29 aa, Artificial Sequence
  Cyclic GFR-binding peptide
  MOD_RES (1)..(1): Xaa is C or S
XEAVSMGERYKKLTPVGMDDFYLVSIANL

SEQ ID NO: 29267 - protein, 30 aa, Artificial Sequence
  Cyclic GFR-binding peptide
  MOD_RES (2)..(4): Xaa is C or S
HXGXSRVVMNEYQKYIVNSSDDIYLVSIPS

SEQ ID NO: 29268 - protein, 27 aa, Artificial Sequence
  Cyclic GFR-binding peptide
GEVVMDRYKKLVVKENEDFYLMSIANL

SEQ ID NO: 29269 - protein, 28 aa, Artificial Sequence
  Cyclic GFR-binding peptide
  MOD_RES (26)..(27): Xaa is C or S
EYQKYIVNSSDDIYLVSIPSLQTPAXXP

SEQ ID NO: 29270 - protein, 39 aa, Artificial Sequence
  Cyclic GFR-binding peptide
  MOD_RES (2)..(34)..(35): Xaa is C or S
GXSRVVMNEYQKYIVNSSDDIYLVSIPSLKTPAXXPKPV

SEQ ID NO: 29271 - protein, 23 aa, Artificial Sequence
  Cyclic GFR-binding peptide
VMDRYKKLVVNNAADFYLISIAN

SEQ ID NO: 29272 - protein, 27 aa, Artificial Sequence
  Cyclic GFR-binding peptide
  MOD_RES (27)..(27): Xaa is C or S
DRYKKLVVKENEDFYLMSIANLETPVX

SEQ ID NO: 29273 - protein, 36 aa, Artificial Sequence
  Cyclic GFR-binding peptide
  MOD_RES (2)..(34)..(35): Xaa is C or S
GXESVAMGYHYKLYTVVGKDKYLISIPSLKTPVXXA

SEQ ID NO: 29274 - protein, 37 aa, Artificial Sequence
  Cyclic GFR-binding peptide
  MOD_RES (2)..(4)..(35)..(36): Xaa is C or S
SXKXSKVIMEYKFKIKPTKGILYLISIPELDQSVXXP

SEQ ID NO: 29275 - protein, 29 aa, Artificial Sequence
  Cyclic GFR-binding peptide
  MOD_RES (26)..(27): Xaa is C or S
EYKFKIVNSSDDLYLVSIPELQTPAXXPK

SEQ ID NO: 29276 - protein, 29 aa, Artificial Sequence
  Cyclic GFR-binding peptide
KVVMEYKFKVKPTRGVLYLISIPELDQPV

SEQ ID NO: 29277 - protein, 35 aa, Artificial Sequence; identical to SEQ ID NO: 1183
  Cyclic GFR-binding peptide
  MOD_RES (31)..(32): Xaa is C or S

SEQ ID NO: 29278 - protein, 31 aa, Artificial Sequence; identical to SEQ ID NO: 1185
  Cyclic GFR-binding peptide
  MOD_RES (1)..(1): Xaa is C or S

SEQ ID NO: 29279 - protein, 29 aa, Artificial Sequence
  Cyclic GFR-binding peptide
  MOD_RES (26)..(27): Xaa is C or S
YHYKLVVKDYEDKYLMSIPSLETPVXXAK

SEQ ID NO: 29280 - protein, 23 aa, Artificial Sequence
  Cyclic GFR-binding peptide
MGRYKKLYTVVGKDFYLISIANL

SEQ ID NO: 29281 - protein, 36 aa, Artificial Sequence
  Cyclic GFR-binding peptide
  MOD_RES (32)..(33): Xaa is C or S
AVSMGEEYQKYTPVGMDDIYLVSIPSLKTPVXXAKG

SEQ ID NO: 29282 - protein, 31 aa, Artificial Sequence
  Cyclic GFR-binding peptide
  MOD_RES (27)..(28): Xaa is C or S
NEYQKYIVNNSSDIYLVSIPSLKTPAXXAKP

SEQ ID NO: 29283 - protein, 36 aa, Artificial Sequence
  Cyclic GFR-binding peptide
  MOD_RES (32)..(32): Xaa is C or S
SRVVMNEYQKYIVNSSDDIYLVSIPSLKTPAXTPKT

SEQ ID NO: 29284 - protein, 24 aa, Artificial Sequence
  Cyclic GFR-binding peptide
VAMGYHYKLYTVVGKDKYLISIPS

SEQ ID NO: 29285 - protein, 28 aa, Artificial Sequence
  Cyclic GFR-binding peptide
  MOD_RES (28)..(28): Xaa is C or S
MNRYKKLIVNNSSDFYLVSIANLKTPAX

SEQ ID NO: 29286 - protein, 29 aa, Artificial Sequence
  Cyclic GFR-binding peptide
  MOD_RES (27)..(28): Xaa is C or S
NEYKFKIVNSSDDLYLVSIPELQTPAXXP

SEQ ID NO: 29287 - protein, 30 aa, Artificial Sequence; identical to SEQ ID NO: 1192
  Cyclic GFR-binding peptide
  MOD_RES (1)..(1): Xaa is C or S

SEQ ID NO: 29288 - protein, 41 aa, Artificial Sequence
  Cyclic GFR-binding peptide
  MOD_RES (2)..(4)..(36)..(37): Xaa is C or S
RXGXAEVVMDEYKFKVVNNAADLYLISIPELRAPVXXSAPA

SEQ ID NO: 29289 - protein, 38 aa, Artificial Sequence
  Cyclic GFR-binding peptide
  MOD_RES (1)..(3)..(36)..(37): Xaa is C or S
XGXEAVSMGEEYKFKTPVGMDDLYLVSIPELKTPVXXA

SEQ ID NO: 29290 - protein, 29 aa, Artificial Sequence
  Cyclic GFR-binding peptide
  MOD_RES (28)..(29): Xaa is C or S
GERYKKLTPVGMDDFYLVSIANLKTPVXX

SEQ ID NO: 29291 - protein, 27 aa, Artificial Sequence
  Cyclic GFR-binding peptide
IMEYKFKVKPKRGVLYLISIPELAQPV

SEQ ID NO: 29292 - protein, 29 aa, Artificial Sequence
  Cyclic GFR-binding peptide
EAVSMGERYKKLTPVGMDDFYLVSIANLK

SEQ ID NO: 29293 - protein, 40 aa, Artificial Sequence
  Cyclic GFR-binding peptide
  MOD_RES (2)..(4)..(36)..(37): Xaa is C or S
RXGXAEVVMDYHYKLVVNNAADKYLISIPSLRAPVXXSAP

SEQ ID NO: 29294 - protein, 34 aa, Artificial Sequence
  Cyclic GFR-binding peptide
  MOD_RES (32)..(33): Xaa is C or S
ARVVMNEYQKYIVNSSDDIYLVSIPSLQTPAXXP

SEQ ID NO: 29295 - protein, 27 aa, Artificial Sequence
  Cyclic GFR-binding peptide
  MOD_RES (1)..(1): Xaa is C or S
XSKVVMYHYKLVKPTRGVKYLISIPSL

SEQ ID NO: 29296 - protein, 37 aa, Artificial Sequence; identical to SEQ ID NO: 1197
  Cyclic GFR-binding peptide
  MOD_RES (1)..(3)..(35)..(36): Xaa is C or S

SEQ ID NO: 29297 - protein, 32 aa, Artificial Sequence
  Cyclic GFR-binding peptide
  MOD_RES (30)..(31): Xaa is C or S
VVMNEYQKYIVNSSDDIYLVSIPSLQTPAXXP

SEQ ID NO: 29298 - protein, 30 aa, Artificial Sequence
  Cyclic GFR-binding peptide
  MOD_RES (26)..(27): Xaa is C or S
EYKFKIVNNSSDLYLVSIPELKTPAXXAKP

SEQ ID NO: 29299 - protein, 26 aa, Artificial Sequence
  Cyclic GFR-binding peptide
SMGERYKKLTPVGMDDFYLVSIANLK

SEQ ID NO: 29300 - protein, 32 aa, Artificial Sequence; identical to SEQ ID NO: 1199
  Cyclic GFR-binding peptide
  MOD_RES (2)..(4): Xaa is C or S

SEQ ID NO: 29301 - protein, 25 aa, Artificial Sequence
  Cyclic GFR-binding peptide
SKVVMEYQKYVKPTRGVIYLISIPS

SEQ ID NO: 29302 - protein, 28 aa, Artificial Sequence
  Cyclic GFR-binding peptide
  MOD_RES (2)..(2): Xaa is C or S
GXGEVVMDRYKKLVVKENEDFYLMSIAN

SEQ ID NO: 29303 - protein, 20 aa, Artificial Sequence
  Cyclic GFR-binding peptide
RYKKLTPVGMDDFYLVSIAN

SEQ ID NO: 29304 - protein, 36 aa, Artificial Sequence; identical to SEQ ID NO: 1204
  Cyclic GFR-binding peptide
  MOD_RES (2)..(34): Xaa is C or S

SEQ ID NO: 29305 - protein, 30 aa, Artificial Sequence
  Cyclic GFR-binding peptide
  MOD_RES (28)..(29): Xaa is C or S
MNEYKFKIVNSSDDLYLVSIPELKTPAXXP

SEQ ID NO: 29306 - protein, 29 aa, Artificial Sequence
  Cyclic GFR-binding peptide
  MOD_RES (28)..(29): Xaa is C or S
MDRYKKLVVNNAADFYLISIANLRAPVXX

SEQ ID NO: 29307 - protein, 25 aa, Artificial Sequence
  Cyclic GFR-binding peptide
EYKFKIVNNSSDLYLVSIPELKTPA

SEQ ID NO: 29308 - protein, 41 aa, Artificial Sequence
  Cyclic GFR-binding peptide
  MOD_RES (2)..(4)..(37)..(38): Xaa is C or S
RXGXEAVSMGEEYQKYTPVGMDDIYLVSIPSLKTPVXXAKG

SEQ ID NO: 29309 - protein, 36 aa, Artificial Sequence
  Cyclic GFR-binding peptide
  MOD_RES (2)..(4)..(36): Xaa is C or S
RXGXAEVVMDEYKFKVVNNAADLYLISIPELRAPVX

SEQ ID NO: 29310 - protein, 27 aa, Artificial Sequence
  Cyclic GFR-binding peptide
SRVVMNEYQKYIVNSSDDIYLVSIPSL

SEQ ID NO: 29311 - protein, 25 aa, Artificial Sequence
  Cyclic GFR-binding peptide
NYHYKLIVNSSDDKYLVSIPSLKTP

SEQ ID NO: 29312 - protein, 26 aa, Artificial Sequence
  Cyclic GFR-binding peptide
MDYHYKLVVNNAADKYLISIPSLRAP

SEQ ID NO: 29313 - protein, 30 aa, Artificial Sequence; identical to SEQ ID NO: 1215
  Cyclic GFR-binding peptide
  MOD_RES (26)..(26): Xaa is C or S

SEQ ID NO: 29314 - protein, 30 aa, Artificial Sequence
  Cyclic GFR-binding peptide
SVAMGYHYKLYTVVGKDKYLISIPSLKTPV

SEQ ID NO: 29315 - protein, 33 aa, Artificial Sequence
  Cyclic GFR-binding peptide
  MOD_RES (27)..(28): Xaa is C or S
EEYQKYVVKDYEDIYLMSIPSLETPVXXAKPIS

SEQ ID NO: 29316 - protein, 32 aa, Artificial Sequence
  Cyclic GFR-binding peptide
  MOD_RES (2)..(4): Xaa is C or S
SXKXSKVVMEYKFKVKPTRGVLYLISIPELDQ

SEQ ID NO: 29317 - protein, 32 aa, Artificial Sequence
  Cyclic GFR-binding peptide
  MOD_RES (1)..(3): Xaa is C or S
XGXESVAMGYHYKLYTVVGKDKYLISIPSLKT

SEQ ID NO: 29318 - protein, 25 aa, Artificial Sequence
  Cyclic GFR-binding peptide
VMNEYKFKIVNSSDDLYLVSIPELK

SEQ ID NO: 29319 - protein, 31 aa, Artificial Sequence; identical to SEQ ID NO: 1218
  Cyclic GFR-binding peptide
  MOD_RES (30)..(31): Xaa is C or S

SEQ ID NO: 29320 - protein, 30 aa, Artificial Sequence; identical to SEQ ID NO: 1220
  Cyclic GFR-binding peptide
  MOD_RES (30)..(30): Xaa is C or S

SEQ ID NO: 29321 - protein, 31 aa, Artificial Sequence
  Cyclic GFR-binding peptide
  MOD_RES (29)..(30): Xaa is C or S
VVMEYQKYVKPTRGVIYLISIPSLDQPVXXP

SEQ ID NO: 29322 - protein, 42 aa, Artificial Sequence
  Cyclic GFR-binding peptide
  MOD_RES (2)..(4)..(37)..(38): Xaa is C or S
RXGXEAVSMGEEYQKYTPVGMDDIYLVSIPSLKTPVXXAKGV

SEQ ID NO: 29323 - protein, 29 aa, Artificial Sequence
  Cyclic GFR-binding peptide
  MOD_RES (2)..(2): Xaa is C or S
GXARVVMNYHYKLIVNSSDDKYLVSIPSL

SEQ ID NO: 29324 - protein, 33 aa, Artificial Sequence; identical to SEQ ID NO: 1226
  Cyclic GFR-binding peptide
  MOD_RES (30)..(31): Xaa is C or S

SEQ ID NO: 29325 - protein, 41 aa, Artificial Sequence; identical to SEQ ID NO: 1228
  Cyclic GFR-binding peptide
  MOD_RES (2)..(4)..(35)..(36): Xaa is C or S

SEQ ID NO: 29326 - protein, 31 aa, Artificial Sequence; identical to SEQ ID NO: 1231
  Cyclic GFR-binding peptide
  MOD_RES (31)..(31): Xaa is C or S

SEQ ID NO: 29327 - protein, 28 aa, Artificial Sequence
  Cyclic GFR-binding peptide
SRVVMNEYQKYIVNSSDDIYLVSIPSLK

SEQ ID NO: 29328 - protein, 33 aa, Artificial Sequence
  Cyclic GFR-binding peptide
  MOD_RES (32)..(33): Xaa is C or S
AEVVMDYHYKLVVNNAADKYLISIPSLRAPVXX

SEQ ID NO: 29329 - protein, 30 aa, Artificial Sequence
  Cyclic GFR-binding peptide
  MOD_RES (1)..(3): Xaa is C or S
XGXGEVVMDEYQKYVVKENEDIYLMSIPSL

SEQ ID NO: 29330 - protein, 28 aa, Artificial Sequence
  Cyclic GFR-binding peptide
  MOD_RES (26)..(27): Xaa is C or S
YHYKLVVNNAADKYLISIPSLRAPVXXS

SEQ ID NO: 29331 - protein, 40 aa, Artificial Sequence
  Cyclic GFR-binding peptide
  MOD_RES (1)..(3)..(35)..(36): Xaa is C or S
XGXESVAMGEYQKYYTVVGKDIYLISIPSLKTPVXXAKSA

SEQ ID NO: 29332 - protein, 34 aa, Artificial Sequence
  Cyclic GFR-binding peptide
  MOD_RES (29)..(30): Xaa is C or S
VMNEYKFKIVNSSDDLYLVSIPELQTPAXXPKPV

SEQ ID NO: 29333 - protein, 29 aa, Artificial Sequence
  Cyclic GFR-binding peptide
  MOD_RES (27)..(28): Xaa is C or S
MEYQKYVKPKRGVIYLISIPSLAQPVXXP

SEQ ID NO: 29334 - protein, 31 aa, Artificial Sequence
  Cyclic GFR-binding peptide
ARVVMNEYKFKIVNSSDDLYLVSIPELQTPA

SEQ ID NO: 29335 - protein, 30 aa, Artificial Sequence
  Cyclic GFR-binding peptide
  MOD_RES (30)..(30): Xaa is C or S
VVMNEYQKYIVNNSSDIYLVSIPSLKTPAX

SEQ ID NO: 29336 - protein, 37 aa, Artificial Sequence
  Cyclic GFR-binding peptide
  MOD_RES (2)..(4)..(36): Xaa is C or S
HXGXSRVVMNEYQKYIVNSSDDIYLVSIPSLKTPAXT

SEQ ID NO: 29337 - protein, 34 aa, Artificial Sequence
  Cyclic GFR-binding peptide
  MOD_RES (31)..(32): Xaa is C or S
RVVMNEYKFKIVNSSDDLYLVSIPELKTPAXXPK

SEQ ID NO: 29338 - protein, 37 aa, Artificial Sequence; identical to SEQ ID NO: 1238
  Cyclic GFR-binding peptide
  MOD_RES (32)..(33): Xaa is C or S

SEQ ID NO: 29339 - protein, 31 aa, Artificial Sequence
  Cyclic GFR-binding peptide
ESVAMGRYKKLYTVVGKDFYLISIANLKTPV

SEQ ID NO: 29340 - protein, 33 aa, Artificial Sequence
  Cyclic GFR-binding peptide
  MOD_RES (1)..(33): Xaa is C or S
XARVVMNEYKFKIVNSSDDLYLVSIPELQTPAX

SEQ ID NO: 29341 - protein, 37 aa, Artificial Sequence
  Cyclic GFR-binding peptide
  MOD_RES (32)..(33): Xaa is C or S
GEVVMDEYQKYVVKENEDIYLMSIPSLETPVXXAKPI

SEQ ID NO: 29342 - protein, 27 aa, Artificial Sequence
  Cyclic GFR-binding peptide
ARVVMNEYQKYIVNSSDDIYLVSIPSL

SEQ ID NO: 29343 - protein, 37 aa, Artificial Sequence; identical to SEQ ID NO: 1243
  Cyclic GFR-binding peptide
  MOD_RES (31)..(32): Xaa is C or S

SEQ ID NO: 29344 - protein, 37 aa, Artificial Sequence
  Cyclic GFR-binding peptide
  MOD_RES (1)..(33)..(34): Xaa is C or S
XSRVVMNEYKFKIVNSSDDLYLVSIPELKTPAXXPKP

SEQ ID NO: 29345 - protein, 33 aa, Artificial Sequence
  Cyclic GFR-binding peptide
  MOD_RES (28)..(29): Xaa is C or S
MNEYKFKIVNSSDDLYLVSIPELKTPAXXPKPV

SEQ ID NO: 29346 - protein, 28 aa, Artificial Sequence
  Cyclic GFR-binding peptide
VMDEYQKYVVKENEDIYLMSIPSLETPV

SEQ ID NO: 29347 - protein, 29 aa, Artificial Sequence
  Cyclic GFR-binding peptide
  MOD_RES (27)..(28): Xaa is C or S
GRYKKLYTVVGKDFYLISIANLKTPVXXA

SEQ ID NO: 29348 - protein, 26 aa, Artificial Sequence
  Cyclic GFR-binding peptide
EEYKFKTPVGMDDLYLVSIPELKTPV

SEQ ID NO: 29349 - protein, 39 aa, Artificial Sequence; identical to SEQ ID NO: 1248
  Cyclic GFR-binding peptide
  MOD_RES (2)..(34)..(35): Xaa is C or S

SEQ ID NO: 29350 - protein, 28 aa, Artificial Sequence
  Cyclic GFR-binding peptide
SRVVMNYHYKLIVNSSDDKYLVSIPSLK

SEQ ID NO: 29351 - protein, 30 aa, Artificial Sequence
  Cyclic GFR-binding peptide
  MOD_RES (2)..(4): Xaa is C or S
RXGXAEVVMDEYQKYVVNNAADIYLISIPS

SEQ ID NO: 29352 - protein, 28 aa, Artificial Sequence
  Cyclic GFR-binding peptide
  MOD_RES (1)..(1): Xaa is C or S
XSRVVMNEYKFKIVNSSDDLYLVSIPEL

SEQ ID NO: 29353 - protein, 35 aa, Artificial Sequence
  Cyclic GFR-binding peptide
  MOD_RES (31)..(32): Xaa is C or S
EVVMEEYKFKVVKDYEDLYLMSIPELETPVXXAKP

SEQ ID NO: 29354 - protein, 24 aa, Artificial Sequence
  Cyclic GFR-binding peptide
MNEYKFKIVNNSSDLYLVSIPELK

SEQ ID NO: 29355 - protein, 26 aa, Artificial Sequence
  Cyclic GFR-binding peptide
VMNEYKFKIVNSSDDLYLVSIPELQT

SEQ ID NO: 29356 - protein, 29 aa, Artificial Sequence
  Cyclic GFR-binding peptide
RVIMYHYKLVKPKRGVKYLISIPSLAQPV

SEQ ID NO: 29357 - protein, 24 aa, Artificial Sequence
  Cyclic GFR-binding peptide
RVIMYHYKLVKPKRGVKYLISIPS

SEQ ID NO: 29358 - protein, 25 aa, Artificial Sequence
  Cyclic GFR-binding peptide
SVAMGEYQKYYTVVGKDIYLISIPS

SEQ ID NO: 29359 - protein, 29 aa, Artificial Sequence
  Cyclic GFR-binding peptide
  MOD_RES (1)..(1): Xaa is C or S
XAKVVMNEYQKYIVNNSSDIYLVSIPSLK

SEQ ID NO: 29360 - protein, 30 aa, Artificial Sequence
  Cyclic GFR-binding peptide
ARVVMNEYQKYIVNSSDDIYLVSIPSLQTP

SEQ ID NO: 29361 - protein, 35 aa, Artificial Sequence; identical to SEQ ID NO: 1258
  Cyclic GFR-binding peptide
  MOD_RES (2)..(4)..(35): Xaa is C or S

SEQ ID NO: 29362 - protein, 28 aa, Artificial Sequence
  Cyclic GFR-binding peptide
  MOD_RES (27)..(28): Xaa is C or S
MRYKKLVKPTRGVFYLISIANLDQPVXX

SEQ ID NO: 29363 - protein, 32 aa, Artificial Sequence; identical to SEQ ID NO: 1262
  Cyclic GFR-binding peptide
  MOD_RES (2)..(4): Xaa is C or S

SEQ ID NO: 29364 - protein, 37 aa, Artificial Sequence; identical to SEQ ID NO: 1264
  Cyclic GFR-binding peptide
  MOD_RES (32)..(33): Xaa is C or S

SEQ ID NO: 29365 - protein, 28 aa, Artificial Sequence
  Cyclic GFR-binding peptide
  MOD_RES (1)..(1): Xaa is C or S
XGEVVMDEYKFKVVKENEDLYLMSIPEL

SEQ ID NO: 29366 - protein, 28 aa, Artificial Sequence
  Cyclic GFR-binding peptide
  MOD_RES (27)..(28): Xaa is C or S
MYHYKLVKPKRGVKYLISIPSLAQPVXX

SEQ ID NO: 29367 - protein, 34 aa, Artificial Sequence
  Cyclic GFR-binding peptide
  MOD_RES (2)..(4): Xaa is C or S
RXGXAEVVMDRYKKLVVNNAADFYLISIANLRAP

SEQ ID NO: 29368 - protein, 31 aa, Artificial Sequence
  Cyclic GFR-binding peptide
  MOD_RES (28)..(29): Xaa is C or S
MNEYKFKIVNNSSDLYLVSIPELKTPAXXAK

SEQ ID NO: 29369 - protein, 28 aa, Artificial Sequence
  Cyclic GFR-binding peptide
ARVVMNEYKFKIVNSSDDLYLVSIPELQ

SEQ ID NO: 29370 - protein, 33 aa, Artificial Sequence
  Cyclic GFR-binding peptide
  MOD_RES (27)..(28): Xaa is C or S
MEYQKYVKPKRGVIYLISIPSLAQPVXXPAASA

SEQ ID NO: 29371 - protein, 31 aa, Artificial Sequence; identical to SEQ ID NO: 1271
  Cyclic GFR-binding peptide
  MOD_RES (31)..(31): Xaa is C or S

SEQ ID NO: 29372 - protein, 29 aa, Artificial Sequence
  Cyclic GFR-binding peptide
  MOD_RES (2)..(2): Xaa is C or S
GXSRVVMNEYKFKIVNSSDDLYLVSIPEL

SEQ ID NO: 29373 - protein, 32 aa, Artificial Sequence
  Cyclic GFR-binding peptide
  MOD_RES (30)..(31): Xaa is C or S
VVMDYHYKLVVNNAADKYLISIPSLRAPVXXS

SEQ ID NO: 29374 - protein, 27 aa, Artificial Sequence
  Cyclic GFR-binding peptide
MDEYKFKVVNNAADLYLISIPELRAPV

SEQ ID NO: 29375 - protein, 34 aa, Artificial Sequence; identical to SEQ ID NO: 1282
  Cyclic GFR-binding peptide
  MOD_RES (29)..(30): Xaa is C or S

SEQ ID NO: 29376 - protein, 26 aa, Artificial Sequence
  Cyclic GFR-binding peptide
KVVMEYQKYVKPTRGVIYLISIPSLD

SEQ ID NO: 29377 - protein, 35 aa, Artificial Sequence
  Cyclic GFR-binding peptide
  MOD_RES (2)..(4): Xaa is C or S
RXGXAEVVMDEYKFKVVNNAADLYLISIPELRAPV

SEQ ID NO: 29378 - protein, 32 aa, Artificial Sequence
  Cyclic GFR-binding peptide
  MOD_RES (2)..(2): Xaa is C or S
GXEAVSMGEEYKFKTPVGMDDLYLVSIPELKT

SEQ ID NO: 29379 - protein, 40 aa, Artificial Sequence
  Cyclic GFR-binding peptide
  MOD_RES (1)..(3)..(35)..(36): Xaa is C or S
XGXAEVVMDYHYKLVVNNAADKYLISIPSLRAPVXXSAPA

SEQ ID NO: 29380 - protein, 29 aa, Artificial Sequence
  Cyclic GFR-binding peptide
  MOD_RES (2)..(2): Xaa is C or S
GXGEVVMDRYKKLVVKENEDFYLMSIANL

SEQ ID NO: 29381 - protein, 30 aa, Artificial Sequence; identical to SEQ ID NO: 1299
  Cyclic GFR-binding peptide

SEQ ID NO: 29382 - protein, 32 aa, Artificial Sequence; identical to SEQ ID NO: 1300
  Cyclic GFR-binding peptide
  MOD_RES (29)..(30): Xaa is C or S

SEQ ID NO: 29383 - protein, 36 aa, Artificial Sequence; identical to SEQ ID NO: 1301
  Cyclic GFR-binding peptide
  MOD_RES (30)..(31): Xaa is C or S

SEQ ID NO: 29384 - protein, 30 aa, Artificial Sequence
  Cyclic GFR-binding peptide
  MOD_RES (30)..(30): Xaa is C or S
VVMDEYQKYVVKENEDIYLMSIPSLETPVX

SEQ ID NO: 29385 - protein, 34 aa, Artificial Sequence
  Cyclic GFR-binding peptide
  MOD_RES (28)..(29): Xaa is C or S
MNEYKFKIVNNSSDLYLVSIPELKTPAXXAKPVA

SEQ ID NO: 29386 - protein, 29 aa, Artificial Sequence
  Cyclic GFR-binding peptide
  MOD_RES (27)..(28): Xaa is C or S
NYHYKLIVNSSDDKYLVSIPSLQTPAXXP

SEQ ID NO: 29387 - protein, 36 aa, Artificial Sequence; identical to SEQ ID NO: 1308
  Cyclic GFR-binding peptide
  MOD_RES (1)..(3)..(35): Xaa is C or S

SEQ ID NO: 29388 - protein, 40 aa, Artificial Sequence; identical to SEQ ID NO: 1310
  Cyclic GFR-binding peptide
  MOD_RES (2)..(34): Xaa is C or S

SEQ ID NO: 29389 - protein, 38 aa, Artificial Sequence; identical to SEQ ID NO: 1311
  Cyclic GFR-binding peptide
  MOD_RES (1)..(33)..(34): Xaa is C or S

SEQ ID NO: 29390 - protein, 21 aa, Artificial Sequence
  Cyclic GFR-binding peptide
DRYKKLVVKENEDFYLMSIAN

SEQ ID NO: 29391 - protein, 37 aa, Artificial Sequence; identical to SEQ ID NO: 1313
  Cyclic GFR-binding peptide
  MOD_RES (2)..(4)..(36)..(37): Xaa is C or S

SEQ ID NO: 29392 - protein, 30 aa, Artificial Sequence; identical to SEQ ID NO: 1315
  Cyclic GFR-binding peptide
  MOD_RES (1)..(3): Xaa is C or S

SEQ ID NO: 29393 - protein, 28 aa, Artificial Sequence
  Cyclic GFR-binding peptide
  MOD_RES (28)..(28): Xaa is C or S
MGYHYKLYTVVGKDKYLISIPSLKTPVX

SEQ ID NO: 29394 - protein, 35 aa, Artificial Sequence
  Cyclic GFR-binding peptide
  MOD_RES (32)..(33): Xaa is C or S
SRVVMNEYKFKIVNSSDDLYLVSIPELKTPAXXPK

SEQ ID NO: 29395 - protein, 23 aa, Artificial Sequence
  Cyclic GFR-binding peptide
EYKFKIVNSSDDLYLVSIPELQT

SEQ ID NO: 29396 - protein, 32 aa, Artificial Sequence; identical to SEQ ID NO: 1317
  Cyclic GFR-binding peptide
  MOD_RES (31)..(32): Xaa is C or S

SEQ ID NO: 29397 - protein, 38 aa, Artificial Sequence
  Cyclic GFR-binding peptide
  MOD_RES (2)..(34)..(35): Xaa is C or S
GXAEVVMDEYKFKVVNNAADLYLISIPELRAPVXXSAP

SEQ ID NO: 29398 - protein, 32 aa, Artificial Sequence
  Cyclic GFR-binding peptide
  MOD_RES (31)..(32): Xaa is C or S
SRVIMEYKFKVKPKRGVLYLISIPELAQPVXX

SEQ ID NO: 29399 - protein, 38 aa, Artificial Sequence
  Cyclic GFR-binding peptide
  MOD_RES (2)..(4)..(36)..(37): Xaa is C or S
RXGXESVAMGYHYKLYTVVGKDKYLISIPSLKTPVXXA

SEQ ID NO: 29400 - protein, 31 aa, Artificial Sequence
  Cyclic GFR-binding peptide
  MOD_RES (26)..(27): Xaa is C or S
EYQKYVKPTRGVIYLISIPSLDQPVXXPSAS

SEQ ID NO: 29401 - protein, 36 aa, Artificial Sequence; identical to SEQ ID NO: 1319
  Cyclic GFR-binding peptide
  MOD_RES (32)..(33): Xaa is C or S

SEQ ID NO: 29402 - protein, 32 aa, Artificial Sequence
  Cyclic GFR-binding peptide
  MOD_RES (28)..(29): Xaa is C or S
MNEYKFKIVNSSDDLYLVSIPELKTPAXXPKP

SEQ ID NO: 29403 - protein, 22 aa, Artificial Sequence
  Cyclic GFR-binding peptide
EYQKYVKPTRGVIYLISIPSLD

SEQ ID NO: 29404 - protein, 27 aa, Artificial Sequence
  Cyclic GFR-binding peptide
MNEYKFKIVNNSSDLYLVSIPELKTPA

SEQ ID NO: 29405 - protein, 30 aa, Artificial Sequence; identical to SEQ ID NO: 1320
  Cyclic GFR-binding peptide
  MOD_RES (27)..(28): Xaa is C or S

SEQ ID NO: 29406 - protein, 34 aa, Artificial Sequence
  Cyclic GFR-binding peptide
  MOD_RES (30)..(31): Xaa is C or S
VVMDEYQKYVVKENEDIYLMSIPSLETPVXXAKP

SEQ ID NO: 29407 - protein, 41 aa, Artificial Sequence
  Cyclic GFR-binding peptide
  MOD_RES (2)..(4)..(37)..(38): Xaa is C or S
RXGXEAVSMGEEYKFKTPVGMDDLYLVSIPELKTPVXXAKG

SEQ ID NO: 29408 - protein, 34 aa, Artificial Sequence
  Cyclic GFR-binding peptide
  MOD_RES (30)..(31): Xaa is C or S
VAMGYHYKLYTVVGKDKYLISIPSLKTPVXXAKS

SEQ ID NO: 29409 - protein, 20 aa, Artificial Sequence
  Cyclic GFR-binding peptide
EYKFKTPVGMDDLYLVSIPE

SEQ ID NO: 29410 - protein, 24 aa, Artificial Sequence
  Cyclic GFR-binding peptide
MERYKKLVVKDYEDFYLMSIANLE

SEQ ID NO: 29411 - protein, 33 aa, Artificial Sequence; identical to SEQ ID NO: 1328
  Cyclic GFR-binding peptide
  MOD_RES (32)..(33): Xaa is C or S

SEQ ID NO: 29412 - protein, 34 aa, Artificial Sequence; identical to SEQ ID NO: 1330
  Cyclic GFR-binding peptide
  MOD_RES (2)..(33)..(34): Xaa is C or S

SEQ ID NO: 29413 - protein, 29 aa, Artificial Sequence
  Cyclic GFR-binding peptide
KVVMNYHYKLIVNNSSDKYLVSIPSLKTP

SEQ ID NO: 29414 - protein, 28 aa, Artificial Sequence
  Cyclic GFR-binding peptide
  MOD_RES (1)..(1): Xaa is C or S
XGEVVMDRYKKLVVKENEDFYLMSIANL

SEQ ID NO: 29415 - protein, 30 aa, Artificial Sequence; identical to SEQ ID NO: 1334
  Cyclic GFR-binding peptide

SEQ ID NO: 29416 - protein, 21 aa, Artificial Sequence
  Cyclic GFR-binding peptide
MYHYKLIKPTKGIKYLISIPS

SEQ ID NO: 29417 - protein, 30 aa, Artificial Sequence; identical to SEQ ID NO: 1338
  Cyclic GFR-binding peptide
  MOD_RES (29)..(30): Xaa is C or S

SEQ ID NO: 29418 - protein, 27 aa, Artificial Sequence
  Cyclic GFR-binding peptide
VMNEYQKYIVNSSDDIYLVSIPSLQTP

SEQ ID NO: 29419 - protein, 28 aa, Artificial Sequence
  Cyclic GFR-binding peptide
  MOD_RES (2)..(2): Xaa is C or S
GXARVVMNYHYKLIVNSSDDKYLVSIPS

SEQ ID NO: 29420 - protein, 32 aa, Artificial Sequence
  Cyclic GFR-binding peptide
  MOD_RES (26)..(27): Xaa is C or S
EYKFKVVKENEDLYLMSIPELETPVXXAKPIK

SEQ ID NO: 29421 - protein, 25 aa, Artificial Sequence
  Cyclic GFR-binding peptide
VIMYHYKLIKPTKGIKYLISIPSLD

SEQ ID NO: 29422 - protein, 35 aa, Artificial Sequence
  Cyclic GFR-binding peptide
  MOD_RES (1)..(32)..(33): Xaa is C or S
XSKVVMEYQKYVKPTRGVIYLISIPSLDQPVXXPS

SEQ ID NO: 29423 - protein, 25 aa, Artificial Sequence
  Cyclic GFR-binding peptide
MEYQKYIKPTKGIIYLISIPSLDQS

SEQ ID NO: 29424 - protein, 21 aa, Artificial Sequence
  Cyclic GFR-binding peptide
DRYKKLVVNNAADFYLISIAN

SEQ ID NO: 29425 - protein, 34 aa, Artificial Sequence; identical to SEQ ID NO: 1343
  Cyclic GFR-binding peptide
  MOD_RES (30)..(31): Xaa is C or S

SEQ ID NO: 29426 - protein, 30 aa, Artificial Sequence; identical to SEQ ID NO: 1344
  Cyclic GFR-binding peptide

SEQ ID NO: 29427 - protein, 25 aa, Artificial Sequence
  Cyclic GFR-binding peptide
RYKKLVVKENEDFYLMSIANLETPV

SEQ ID NO: 29428 - protein, 23 aa, Artificial Sequence
  Cyclic GFR-binding peptide
MYHYKLVKPKRGVKYLISIPSLA

SEQ ID NO: 29429 - protein, 26 aa, Artificial Sequence
  Cyclic GFR-binding peptide
  MOD_RES (26)..(26): Xaa is C or S
EYKFKIVNNSSDLYLVSIPELKTPAX

SEQ ID NO: 29430 - protein, 30 aa, Artificial Sequence; identical to SEQ ID NO: 1349
  Cyclic GFR-binding peptide
  MOD_RES (29)..(30): Xaa is C or S

SEQ ID NO: 29431 - protein, 34 aa, Artificial Sequence
  Cyclic GFR-binding peptide
  MOD_RES (32)..(33): Xaa is C or S
ESVAMGEYQKYYTVVGKDIYLISIPSLKTPVXXA

SEQ ID NO: 29432 - protein, 24 aa, Artificial Sequence
  Cyclic GFR-binding peptide
NYHYKLIVNSSDDKYLVSIPSLKT

SEQ ID NO: 29433 - protein, 33 aa, Artificial Sequence; identical to SEQ ID NO: 1353
  Cyclic GFR-binding peptide
  MOD_RES (30)..(31): Xaa is C or S

SEQ ID NO: 29434 - protein, 27 aa, Artificial Sequence
  Cyclic GFR-binding peptide
  MOD_RES (1)..(1): Xaa is C or S
XESVAMGRYKKLYTVVGKDFYLISIAN

SEQ ID NO: 29435 - protein, 29 aa, Artificial Sequence
  Cyclic GFR-binding peptide
  MOD_RES (27)..(28): Xaa is C or S
DRYKKLVVNNAADFYLISIANLRAPVXXS

SEQ ID NO: 29436 - protein, 33 aa, Artificial Sequence
  Cyclic GFR-binding peptide
  MOD_RES (2)..(33): Xaa is C or S
KXSRVIMEYQKYVKPKRGVIYLISIPSLAQPVX

SEQ ID NO: 29437 - protein, 34 aa, Artificial Sequence; identical to SEQ ID NO: 1354
  Cyclic GFR-binding peptide
  MOD_RES (31)..(31): Xaa is C or S

SEQ ID NO: 29438 - protein, 24 aa, Artificial Sequence
  Cyclic GFR-binding peptide
VVMNEYKFKIVNSSDDLYLVSIPE

SEQ ID NO: 29439 - protein, 26 aa, Artificial Sequence
  Cyclic GFR-binding peptide
NEYKFKIVNSSDDLYLVSIPELKTPA

SEQ ID NO: 29440 - protein, 25 aa, Artificial Sequence
  Cyclic GFR-binding peptide
EVVMDRYKKLVVKENEDFYLMSIAN

SEQ ID NO: 29441 - protein, 33 aa, Artificial Sequence
  Cyclic GFR-binding peptide
  MOD_RES (30)..(31): Xaa is C or S
KVVMEYQKYVKPTRGVIYLISIPSLDQPVXXPS

SEQ ID NO: 29442 - protein, 37 aa, Artificial Sequence
  Cyclic GFR-binding peptide
  MOD_RES (1)..(32)..(33): Xaa is C or S
XSRVIMEYKFKVKPKRGVLYLISIPELAQPVXXPAAS

SEQ ID NO: 29443 - protein, 25 aa, Artificial Sequence
  Cyclic GFR-binding peptide
MDYHYKLVVKENEDKYLMSIPSLET

SEQ ID NO: 29444 - protein, 32 aa, Artificial Sequence
  Cyclic GFR-binding peptide
  MOD_RES (29)..(30): Xaa is C or S
VMDYHYKLVVNNAADKYLISIPSLRAPVXXSA

SEQ ID NO: 29445 - protein, 34 aa, Artificial Sequence
  Cyclic GFR-binding peptide
  MOD_RES (1)..(3): Xaa is C or S
XGXARVVMNEYKFKIVNSSDDLYLVSIPELQTPA

SEQ ID NO: 29446 - protein, 28 aa, Artificial Sequence
  Cyclic GFR-binding peptide
VIMRYKKLIKPTKGIFYLISIANLDQSV

SEQ ID NO: 29447 - protein, 33 aa, Artificial Sequence; identical to SEQ ID NO: 1365
  Cyclic GFR-binding peptide
  MOD_RES (32)..(33): Xaa is C or S

SEQ ID NO: 29448 - protein, 29 aa, Artificial Sequence
  Cyclic GFR-binding peptide
VVMDEYQKYVVKENEDIYLMSIPSLETPV

SEQ ID NO: 29449 - protein, 28 aa, Artificial Sequence
  Cyclic GFR-binding peptide
  MOD_RES (28)..(28): Xaa is C or S
MDRYKKLVVNNAADFYLISIANLRAPVX

SEQ ID NO: 29450 - protein, 30 aa, Artificial Sequence
  Cyclic GFR-binding peptide
  MOD_RES (1)..(1): Xaa is C or S
XAKVVMNEYKFKIVNNSSDLYLVSIPELKT

SEQ ID NO: 29451 - protein, 32 aa, Artificial Sequence
  Cyclic GFR-binding peptide
  MOD_RES (30)..(30): Xaa is C or S
VVMNEYKFKIVNSSDDLYLVSIPELKTPAXTP

SEQ ID NO: 29452 - protein, 31 aa, Artificial Sequence
  Cyclic GFR-binding peptide
  MOD_RES (30)..(31): Xaa is C or S
KVVMEYQKYVKPTRGVIYLISIPSLDQPVXX

SEQ ID NO: 29453 - protein, 25 aa, Artificial Sequence
  Cyclic GFR-binding peptide
EYQKYTPVGMDDIYLVSIPSLKTPV

SEQ ID NO: 29454 - protein, 40 aa, Artificial Sequence
  Cyclic GFR-binding peptide
  MOD_RES (1)..(3)..(34)..(35): Xaa is C or S
XKXSKVVMEYKFKVKPTRGVLYLISIPELDQPVXXPSASA

SEQ ID NO: 29455 - protein, 32 aa, Artificial Sequence
  Cyclic GFR-binding peptide
  MOD_RES (1)..(3): Xaa is C or S
XGXGEVVMEEYQKYVVKDYEDIYLMSIPSLET

SEQ ID NO: 29456 - protein, 36 aa, Artificial Sequence; identical to SEQ ID NO: 1372
  Cyclic GFR-binding peptide
  MOD_RES (1)..(3)..(35)..(36): Xaa is C or S

SEQ ID NO: 29457 - protein, 31 aa, Artificial Sequence; identical to SEQ ID NO: 1373
  Cyclic GFR-binding peptide
  MOD_RES (1)..(1): Xaa is C or S

SEQ ID NO: 29458 - protein, 28 aa, Artificial Sequence
  Cyclic GFR-binding peptide
  MOD_RES (1)..(1): Xaa is C or S
XGEVVMEEYKFKVVKDYEDLYLMSIPEL

SEQ ID NO: 29459 - protein, 32 aa, Artificial Sequence
  Cyclic GFR-binding peptide
  MOD_RES (2)..(2): Xaa is C or S
GXAEVVMDYHYKLVVNNAADKYLISIPSLRAP

SEQ ID NO: 29460 - protein, 35 aa, Artificial Sequence
  Cyclic GFR-binding peptide
  MOD_RES (1)..(3)..(35): Xaa is C or S
XGXESVAMGRYKKLYTVVGKDFYLISIANLKTPVX

SEQ ID NO: 29461 - protein, 32 aa, Artificial Sequence
  Cyclic GFR-binding peptide
  MOD_RES (2)..(4): Xaa is C or S
RXGXEAVSMGEEYKFKTPVGMDDLYLVSIPEL

SEQ ID NO: 29462 - protein, 30 aa, Artificial Sequence
  Cyclic GFR-binding peptide
EVVMDYHYKLVVNNAADKYLISIPSLRAPV

SEQ ID NO: 29463 - protein, 35 aa, Artificial Sequence
  Cyclic GFR-binding peptide
  MOD_RES (33)..(34): Xaa is C or S
EAVSMGEEYKFKTPVGMDDLYLVSIPELKTPVXXA

SEQ ID NO: 29464 - protein, 30 aa, Artificial Sequence
  Cyclic GFR-binding peptide
  MOD_RES (30)..(30): Xaa is C or S
KVVMEYKFKVKPTRGVLYLISIPELDQPVX

SEQ ID NO: 29465 - protein, 32 aa, Artificial Sequence; identical to SEQ ID NO: 1380
  Cyclic GFR-binding peptide
  MOD_RES (27)..(28): Xaa is C or S

SEQ ID NO: 29466 - protein, 29 aa, Artificial Sequence
  Cyclic GFR-binding peptide
  MOD_RES (26)..(27): Xaa is C or S
EYKFKVVNNAADLYLISIPELRAPVXXSA

SEQ ID NO: 29467 - protein, 32 aa, Artificial Sequence
  Cyclic GFR-binding peptide
  MOD_RES (1)..(3): Xaa is C or S
XKXSRVIMEYKFKVKPKRGVLYLISIPELAQP

SEQ ID NO: 29468 - protein, 29 aa, Artificial Sequence
  Cyclic GFR-binding peptide
SKVVMEYQKYVKPTRGVIYLISIPSLDQP

SEQ ID NO: 29469 - protein, 32 aa, Artificial Sequence
  Cyclic GFR-binding peptide
  MOD_RES (26)..(27): Xaa is C or S
EYQKYIVNSSDDIYLVSIPSLQTPAXXPKPVT

SEQ ID NO: 29470 - protein, 32 aa, Artificial Sequence
  Cyclic GFR-binding peptide
  MOD_RES (28)..(29): Xaa is C or S
MDEYQKYVVKENEDIYLMSIPSLETPVXXAKP

SEQ ID NO: 29471 - protein, 36 aa, Artificial Sequence
  Cyclic GFR-binding peptide
  MOD_RES (31)..(32): Xaa is C or S
EVVMDEYKFKVVKENEDLYLMSIPELETPVXXAKPI

SEQ ID NO: 29472 - protein, 28 aa, Artificial Sequence
  Cyclic GFR-binding peptide
VIMEYKFKIKPTKGILYLISIPELDQSV

SEQ ID NO: 29473 - protein, 32 aa, Artificial Sequence; identical to SEQ ID NO: 1388
  Cyclic GFR-binding peptide
  MOD_RES (30)..(31): Xaa is C or S

SEQ ID NO: 29474 - protein, 35 aa, Artificial Sequence; identical to SEQ ID NO: 1393
  Cyclic GFR-binding peptide
  MOD_RES (1)..(33)..(34): Xaa is C or S

SEQ ID NO: 29475 - protein, 31 aa, Artificial Sequence; identical to SEQ ID NO: 1394
  Cyclic GFR-binding peptide
  MOD_RES (1)..(1): Xaa is C or S

SEQ ID NO: 29476 - protein, 26 aa, Artificial Sequence
  Cyclic GFR-binding peptide
  MOD_RES (26)..(26): Xaa is C or S
EYQKYIKPTKGIIYLISIPSLDQSVX

SEQ ID NO: 29477 - protein, 28 aa, Artificial Sequence
  Cyclic GFR-binding peptide
  MOD_RES (26)..(27): Xaa is C or S
RYKKLVKPKRGVFYLISIANLAQPVXXP

SEQ ID NO: 29478 - protein, 21 aa, Artificial Sequence
  Cyclic GFR-binding peptide
NRYKKLIVNSSDDFYLVSIAN

SEQ ID NO: 29479 - protein, 29 aa, Artificial Sequence
  Cyclic GFR-binding peptide
  MOD_RES (27)..(28): Xaa is C or S
EYHYKLVVKDYEDKYLMSIPSLETPVXXA

SEQ ID NO: 29480 - protein, 36 aa, Artificial Sequence
  Cyclic GFR-binding peptide
  MOD_RES (1)..(3)..(35)..(36): Xaa is C or S
XGXGEVVMDEYKFKVVKENEDLYLMSIPELETPVXX

SEQ ID NO: 29481 - protein, 29 aa, Artificial Sequence
  Cyclic GFR-binding peptide
  MOD_RES (1)..(1): Xaa is C or S
XGEVVMEYHYKLVVKDYEDKYLMSIPSLE

SEQ ID NO: 29482 - protein, 34 aa, Artificial Sequence; identical to SEQ ID NO: 1399
  Cyclic GFR-binding peptide
  MOD_RES (30)..(31): Xaa is C or S

SEQ ID NO: 29483 - protein, 28 aa, Artificial Sequence
  Cyclic GFR-binding peptide
SKVIMYHYKLIKPTKGIKYLISIPSLDQ

SEQ ID NO: 29484 - protein, 34 aa, Artificial Sequence
  Cyclic GFR-binding peptide
  MOD_RES (31)..(32): Xaa is C or S
EVVMEEYQKYVVKDYEDIYLMSIPSLETPVXXAK

SEQ ID NO: 29485 - protein, 39 aa, Artificial Sequence; identical to SEQ ID NO: 1404
  Cyclic GFR-binding peptide
  MOD_RES (2)..(4)..(35)..(36): Xaa is C or S

SEQ ID NO: 29486 - protein, 32 aa, Artificial Sequence
  Cyclic GFR-binding peptide
  MOD_RES (2)..(4): Xaa is C or S
SXKXSKVIMEYQKYIKPTKGIIYLISIPSLDQ

SEQ ID NO: 29487 - protein, 27 aa, Artificial Sequence
  Cyclic GFR-binding peptide
  MOD_RES (2)..(2): Xaa is C or S
KXSKVVMEYQKYVKPTRGVIYLISIPS

SEQ ID NO: 29488 - protein, 33 aa, Artificial Sequence
  Cyclic GFR-binding peptide
  MOD_RES (1)..(3): Xaa is C or S
XKXSRVIMEYKFKVKPKRGVLYLISIPELAQPV

SEQ ID NO: 29489 - protein, 37 aa, Artificial Sequence
  Cyclic GFR-binding peptide
  MOD_RES (1)..(32)..(33): Xaa is C or S
XSRVIMEYQKYVKPKRGVIYLISIPSLAQPVXXPAAS

SEQ ID NO: 29490 - protein, 33 aa, Artificial Sequence
  Cyclic GFR-binding peptide
  MOD_RES (1)..(3): Xaa is C or S
XGXESVAMGEYQKYYTVVGKDIYLISIPSLKTP

SEQ ID NO: 29491 - protein, 33 aa, Artificial Sequence; identical to SEQ ID NO: 1407
  Cyclic GFR-binding peptide
  MOD_RES (1)..(3): Xaa is C or S

SEQ ID NO: 29492 - protein, 37 aa, Artificial Sequence; identical to SEQ ID NO: 1408
  Cyclic GFR-binding peptide
  MOD_RES (1)..(33)..(34): Xaa is C or S

SEQ ID NO: 29493 - protein, 37 aa, Artificial Sequence; identical to SEQ ID NO: 1409
  Cyclic GFR-binding peptide
  MOD_RES (2)..(35)..(36): Xaa is C or S

SEQ ID NO: 29494 - protein, 33 aa, Artificial Sequence
  Cyclic GFR-binding peptide
  MOD_RES (1)..(33): Xaa is C or S
XGEVVMDEYKFKVVKENEDLYLMSIPELETPVX

SEQ ID NO: 29495 - protein, 35 aa, Artificial Sequence
  Cyclic GFR-binding peptide
  MOD_RES (31)..(32): Xaa is C or S
RVVMNEYKFKIVNSSDDLYLVSIPELQTPAXXPKP

SEQ ID NO: 29496 - protein, 29 aa, Artificial Sequence
  Cyclic GFR-binding peptide
  MOD_RES (2)..(4): Xaa is C or S
SXKXSKVVMEYKFKVKPTRGVLYLISIPE

SEQ ID NO: 29497 - protein, 31 aa, Artificial Sequence
  Cyclic GFR-binding peptide
  MOD_RES (30)..(31): Xaa is C or S
SMGEEYQKYTPVGMDDIYLVSIPSLKTPVXX

SEQ ID NO: 29498 - protein, 30 aa, Artificial Sequence
  Cyclic GFR-binding peptide
  MOD_RES (29)..(30): Xaa is C or S
VMEEYQKYVVKDYEDIYLMSIPSLETPVXX

SEQ ID NO: 29499 - protein, 28 aa, Artificial Sequence
  Cyclic GFR-binding peptide
  MOD_RES (27)..(28): Xaa is C or S
MEYQKYIKPTKGIIYLISIPSLDQSVXX

SEQ ID NO: 29500 - protein, 32 aa, Artificial Sequence
  Cyclic GFR-binding peptide
  MOD_RES (26)..(27): Xaa is C or S
EYKFKIKPTKGILYLISIPELDQSVXXPSASA

SEQ ID NO: 29501 - protein, 30 aa, Artificial Sequence
  Cyclic GFR-binding peptide
  MOD_RES (29)..(30): Xaa is C or S
VVMEYKFKVKPTRGVLYLISIPELDQPVXX

SEQ ID NO: 29502 - protein, 27 aa, Artificial Sequence
  Cyclic GFR-binding peptide
  MOD_RES (27)..(27): Xaa is C or S
NYHYKLIVNSSDDKYLVSIPSLKTPAX

SEQ ID NO: 29503 - protein, 30 aa, Artificial Sequence
  Cyclic GFR-binding peptide
  MOD_RES (28)..(29): Xaa is C or S
MNEYQKYIVNSSDDIYLVSIPSLKTPAXXP

SEQ ID NO: 29504 - protein, 27 aa, Artificial Sequence
  Cyclic GFR-binding peptide
SRVIMRYKKLVKPKRGVFYLISIANLA

SEQ ID NO: 29505 - protein, 28 aa, Artificial Sequence
  Cyclic GFR-binding peptide
RVVMNYHYKLIVNSSDDKYLVSIPSLKT

SEQ ID NO: 29506 - protein, 24 aa, Artificial Sequence
  Cyclic GFR-binding peptide
RYKKLVKPTRGVFYLISIANLDQP

SEQ ID NO: 29507 - protein, 33 aa, Artificial Sequence; identical to SEQ ID NO: 1417
  Cyclic GFR-binding peptide
  MOD_RES (31)..(32): Xaa is C or S

SEQ ID NO: 29508 - protein, 29 aa, Artificial Sequence
  Cyclic GFR-binding peptide
  MOD_RES (2)..(2): Xaa is C or S
KXSKVIMEYKFKIKPTKGILYLISIPELD

SEQ ID NO: 29509 - protein, 29 aa, Artificial Sequence
  Cyclic GFR-binding peptide
  MOD_RES (1)..(1): Xaa is C or S
XARVVMNYHYKLIVNSSDDKYLVSIPSLQ

SEQ ID NO: 29510 - protein, 27 aa, Artificial Sequence
  Cyclic GFR-binding peptide
  MOD_RES (1)..(1): Xaa is C or S
XSRVVMNEYQKYIVNSSDDIYLVSIPS

SEQ ID NO: 29511 - protein, 31 aa, Artificial Sequence; identical to SEQ ID NO: 1421
  Cyclic GFR-binding peptide
  MOD_RES (1)..(3): Xaa is C or S

SEQ ID NO: 29512 - protein, 38 aa, Artificial Sequence
  Cyclic GFR-binding peptide
  MOD_RES (1)..(32)..(33): Xaa is C or S
XSKVIMEYQKYIKPTKGIIYLISIPSLDQSVXXPSASA

SEQ ID NO: 29513 - protein, 34 aa, Artificial Sequence
  Cyclic GFR-binding peptide
  MOD_RES (2)..(33)..(34): Xaa is C or S
KXSRVIMEYQKYVKPKRGVIYLISIPSLAQPVXX

SEQ ID NO: 29514 - protein, 29 aa, Artificial Sequence
  Cyclic GFR-binding peptide
  MOD_RES (28)..(29): Xaa is C or S
MNYHYKLIVNSSDDKYLVSIPSLQTPAXX

SEQ ID NO: 29515 - protein, 27 aa, Artificial Sequence
  Cyclic GFR-binding peptide
  MOD_RES (1)..(1): Xaa is C or S
XGEVVMEEYQKYVVKDYEDIYLMSIPS

SEQ ID NO: 29516 - protein, 35 aa, Artificial Sequence
  Cyclic GFR-binding peptide
  MOD_RES (30)..(31): Xaa is C or S
VVMNEYQKYIVNSSDDIYLVSIPSLKTPAXXPKPV

SEQ ID NO: 29517 - protein, 39 aa, Artificial Sequence
  Cyclic GFR-binding peptide
  MOD_RES (2)..(4)..(36)..(37): Xaa is C or S
HXGXARVVMNEYKFKIVNSSDDLYLVSIPELQTPAXXPK

SEQ ID NO: 29518 - protein, 28 aa, Artificial Sequence
  Cyclic GFR-binding peptide
  MOD_RES (26)..(27): Xaa is C or S
EYQKYIVNNSSDIYLVSIPSLKTPAXXA

SEQ ID NO: 29519 - protein, 35 aa, Artificial Sequence
  Cyclic GFR-binding peptide
  MOD_RES (2)..(34)..(35): Xaa is C or S
GXGEVVMEEYKFKVVKDYEDLYLMSIPELETPVXX

SEQ ID NO: 29520 - protein, 41 aa, Artificial Sequence; identical to SEQ ID NO: 1427
  Cyclic GFR-binding peptide
  MOD_RES (1)..(3)..(35)..(36): Xaa is C or S

SEQ ID NO: 29521 - protein, 38 aa, Artificial Sequence
  Cyclic GFR-binding peptide
  MOD_RES (1)..(3)..(34)..(35): Xaa is C or S
XKXSKVIMEYKFKIKPTKGILYLISIPELDQSVXXPSA

SEQ ID NO: 29522 - protein, 34 aa, Artificial Sequence
  Cyclic GFR-binding peptide
  MOD_RES (31)..(32): Xaa is C or S
EVVMDEYKFKVVNNAADLYLISIPELRAPVXXSA

SEQ ID NO: 29523 - protein, 29 aa, Artificial Sequence
  Cyclic GFR-binding peptide
  MOD_RES (27)..(28): Xaa is C or S
NEYKFKIVNSSDDLYLVSIPELKTPAXXP

SEQ ID NO: 29524 - protein, 34 aa, Artificial Sequence; identical to SEQ ID NO: 1437
  Cyclic GFR-binding peptide
  MOD_RES (2)..(4): Xaa is C or S

SEQ ID NO: 29525 - protein, 31 aa, Artificial Sequence
  Cyclic GFR-binding peptide
  MOD_RES (31)..(31): Xaa is C or S
VSMGEEYKFKTPVGMDDLYLVSIPELKTPVX

SEQ ID NO: 29526 - protein, 32 aa, Artificial Sequence
  Cyclic GFR-binding peptide
  MOD_RES (2)..(4): Xaa is C or S
RXGXAEVVMDRYKKLVVNNAADFYLISIANLR

SEQ ID NO: 29527 - protein, 32 aa, Artificial Sequence; identical to SEQ ID NO: 1439
  Cyclic GFR-binding peptide
  MOD_RES (30)..(31): Xaa is C or S

SEQ ID NO: 29528 - protein, 34 aa, Artificial Sequence; identical to SEQ ID NO: 1440
  Cyclic GFR-binding peptide
  MOD_RES (2)..(33)..(34): Xaa is C or S

SEQ ID NO: 29529 - protein, 28 aa, Artificial Sequence
  Cyclic GFR-binding peptide
  MOD_RES (26)..(27): Xaa is C or S
EYQKYVKPKRGVIYLISIPSLAQPVXXP

SEQ ID NO: 29530 - protein, 42 aa, Artificial Sequence
  Cyclic GFR-binding peptide
  MOD_RES (2)..(4)..(36)..(37): Xaa is C or S
RXGXAEVVMDEYQKYVVNNAADIYLISIPSLRAPVXXSAPAA

SEQ ID NO: 29531 - protein, 27 aa, Artificial Sequence
  Cyclic GFR-binding peptide
VMEYQKYVKPTRGVIYLISIPSLDQPV

SEQ ID NO: 29532 - protein, 32 aa, Artificial Sequence
  Cyclic GFR-binding peptide
  MOD_RES (29)..(30): Xaa is C or S
VMDEYQKYVVKENEDIYLMSIPSLETPVXXAK

SEQ ID NO: 29533 - protein, 35 aa, Artificial Sequence; identical to SEQ ID NO: 1444
  Cyclic GFR-binding peptide
  MOD_RES (2)..(4): Xaa is C or S

SEQ ID NO: 29534 - protein, 29 aa, Artificial Sequence
  Cyclic GFR-binding peptide
EVVMDEYQKYVVKENEDIYLMSIPSLETP

SEQ ID NO: 29535 - protein, 27 aa, Artificial Sequence
  Cyclic GFR-binding peptide
SKVVMEYQKYVKPTRGVIYLISIPSLD

SEQ ID NO: 29536 - protein, 34 aa, Artificial Sequence
  Cyclic GFR-binding peptide
  MOD_RES (2)..(34): Xaa is C or S
GXAKVVMNEYQKYIVNNSSDIYLVSIPSLKTPAX

SEQ ID NO: 29537 - protein, 35 aa, Artificial Sequence; identical to SEQ ID NO: 1451
  Cyclic GFR-binding peptide
  MOD_RES (2)..(4)..(35): Xaa is C or S

SEQ ID NO: 29538 - protein, 29 aa, Artificial Sequence
  Cyclic GFR-binding peptide
  MOD_RES (2)..(2): Xaa is C or S
GXGEVVMEYHYKLVVKDYEDKYLMSIPSL

SEQ ID NO: 29539 - protein, 36 aa, Artificial Sequence; identical to SEQ ID NO: 1457
  Cyclic GFR-binding peptide
  MOD_RES (32)..(33): Xaa is C or S

SEQ ID NO: 29540 - protein, 25 aa, Artificial Sequence
  Cyclic GFR-binding peptide
VIMEYQKYVKPKRGVIYLISIPSLA

SEQ ID NO: 29541 - protein, 36 aa, Artificial Sequence
  Cyclic GFR-binding peptide
  MOD_RES (2)..(34)..(35): Xaa is C or S
GXSRVVMNEYQKYIVNSSDDIYLVSIPSLKTPAXXP

SEQ ID NO: 29542 - protein, 21 aa, Artificial Sequence
  Cyclic GFR-binding peptide
NYHYKLIVNNSSDKYLVSIPS

SEQ ID NO: 29543 - protein, 29 aa, Artificial Sequence
  Cyclic GFR-binding peptide
  MOD_RES (2)..(2): Xaa is C or S
KXSRVIMEYKFKVKPKRGVLYLISIPELA

SEQ ID NO: 29544 - protein, 31 aa, Artificial Sequence
  Cyclic GFR-binding peptide
  MOD_RES (2)..(4): Xaa is C or S
SXKXSKVIMEYKFKIKPTKGILYLISIPELD

SEQ ID NO: 29545 - protein, 36 aa, Artificial Sequence
  Cyclic GFR-binding peptide
  MOD_RES (1)..(3)..(35)..(36): Xaa is C or S
XGXAEVVMDEYKFKVVNNAADLYLISIPELRAPVXX

SEQ ID NO: 29546 - protein, 27 aa, Artificial Sequence
  Cyclic GFR-binding peptide
VVMDEYKFKVVKENEDLYLMSIPELET

SEQ ID NO: 29547 - protein, 39 aa, Artificial Sequence; identical to SEQ ID NO: 1464
  Cyclic GFR-binding peptide
  MOD_RES (1)..(33)..(34): Xaa is C or S

SEQ ID NO: 29548 - protein, 24 aa, Artificial Sequence
  Cyclic GFR-binding peptide
EYKFKIVNSSDDLYLVSIPELQTP

SEQ ID NO: 29549 - protein, 40 aa, Artificial Sequence
  Cyclic GFR-binding peptide
  MOD_RES (1)..(3)..(34)..(35): Xaa is C or S
XKXSKVIMEYQKYIKPTKGIIYLISIPSLDQSVXXPSASA

SEQ ID NO: 29550 - protein, 40 aa, Artificial Sequence
  Cyclic GFR-binding peptide
  MOD_RES (2)..(34)..(35): Xaa is C or S
GXGEVVMDEYKFKVVKENEDLYLMSIPELETPVXXAKPIK

SEQ ID NO: 29551 - protein, 37 aa, Artificial Sequence; identical to SEQ ID NO: 1468
  Cyclic GFR-binding peptide
  MOD_RES (33)..(34): Xaa is C or S

SEQ ID NO: 29552 - protein, 33 aa, Artificial Sequence; identical to SEQ ID NO: 1469
  Cyclic GFR-binding peptide
  MOD_RES (29)..(30): Xaa is C or S

SEQ ID NO: 29553 - protein, 34 aa, Artificial Sequence; identical to SEQ ID NO: 1470
  Cyclic GFR-binding peptide
  MOD_RES (1)..(33)..(34): Xaa is C or S

SEQ ID NO: 29554 - protein, 27 aa, Artificial Sequence
  Cyclic GFR-binding peptide
  MOD_RES (27)..(27): Xaa is C or S
EEYKFKVVKDYEDLYLMSIPELETPVX

SEQ ID NO: 29555 - protein, 32 aa, Artificial Sequence
  Cyclic GFR-binding peptide
  MOD_RES (31)..(32): Xaa is C or S
RVVMNEYKFKIVNSSDDLYLVSIPELKTPAXX

SEQ ID NO: 29556 - protein, 36 aa, Artificial Sequence; identical to SEQ ID NO: 1472
  Cyclic GFR-binding peptide
  MOD_RES (2)..(33)..(34): Xaa is C or S

SEQ ID NO: 29557 - protein, 29 aa, Artificial Sequence
  Cyclic GFR-binding peptide
RVVMNEYKFKIVNSSDDLYLVSIPELQTP

SEQ ID NO: 29558 - protein, 27 aa, Artificial Sequence
  Cyclic GFR-binding peptide
VVMNEYKFKIVNSSDDLYLVSIPELQT

SEQ ID NO: 29559 - protein, 28 aa, Artificial Sequence
  Cyclic GFR-binding peptide
  MOD_RES (1)..(1): Xaa is C or S
XSKVVMEYQKYVKPTRGVIYLISIPSLD

SEQ ID NO: 29560 - protein, 40 aa, Artificial Sequence
  Cyclic GFR-binding peptide
  MOD_RES (2)..(4)..(36)..(37): Xaa is C or S
RXGXGEVVMEEYQKYVVKDYEDIYLMSIPSLETPVXXAKP

SEQ ID NO: 29561 - protein, 36 aa, Artificial Sequence; identical to SEQ ID NO: 1476
  Cyclic GFR-binding peptide
  MOD_RES (1)..(33): Xaa is C or S

SEQ ID NO: 29562 - protein, 23 aa, Artificial Sequence
  Cyclic GFR-binding peptide
DYHYKLVVNNAADKYLISIPSLR

SEQ ID NO: 29563 - protein, 36 aa, Artificial Sequence
  Cyclic GFR-binding peptide
  MOD_RES (31)..(32): Xaa is C or S
EVVMDEYQKYVVKENEDIYLMSIPSLETPVXXAKPI

SEQ ID NO: 29564 - protein, 25 aa, Artificial Sequence
  Cyclic GFR-binding peptide
MGEEYQKYTPVGMDDIYLVSIPSLK

SEQ ID NO: 29565 - protein, 33 aa, Artificial Sequence
  Cyclic GFR-binding peptide
  MOD_RES (32)..(33): Xaa is C or S
GEVVMDEYKFKVVKENEDLYLMSIPELETPVXX

SEQ ID NO: 29566 - protein, 22 aa, Artificial Sequence
  Cyclic GFR-binding peptide
GRYKKLYTVVGKDFYLISIANL

SEQ ID NO: 29567 - protein, 30 aa, Artificial Sequence
  Cyclic GFR-binding peptide
  MOD_RES (1)..(3): Xaa is C or S
XGXGEVVMDEYKFKVVKENEDLYLMSIPEL

SEQ ID NO: 29568 - protein, 35 aa, Artificial Sequence; identical to SEQ ID NO: 1483
  Cyclic GFR-binding peptide
  MOD_RES (32)..(33): Xaa is C or S

SEQ ID NO: 29569 - protein, 30 aa, Artificial Sequence; identical to SEQ ID NO: 1488
  Cyclic GFR-binding peptide
  MOD_RES (27)..(27): Xaa is C or S

SEQ ID NO: 29570 - protein, 29 aa, Artificial Sequence
  Cyclic GFR-binding peptide
  MOD_RES (29)..(29): Xaa is C or S
AMGYHYKLYTVVGKDKYLISIPSLKTPVX

SEQ ID NO: 29571 - protein, 32 aa, Artificial Sequence; identical to SEQ ID NO: 1490
  Cyclic GFR-binding peptide
  MOD_RES (29)..(30): Xaa is C or S

SEQ ID NO: 29572 - protein, 32 aa, Artificial Sequence
  Cyclic GFR-binding peptide
  MOD_RES (2)..(4): Xaa is C or S
SXKXSKVVMEYQKYVKPTRGVIYLISIPSLDQ

SEQ ID NO: 29573 - protein, 25 aa, Artificial Sequence
  Cyclic GFR-binding peptide
KVIMYHYKLIKPTKGIKYLISIPSL

SEQ ID NO: 29574 - protein, 30 aa, Artificial Sequence
  Cyclic GFR-binding peptide
  MOD_RES (26)..(27): Xaa is C or S
EYKFKVVKENEDLYLMSIPELETPVXXAKP

SEQ ID NO: 29575 - protein, 23 aa, Artificial Sequence
  Cyclic GFR-binding peptide
MNEYKFKIVNNSSDLYLVSIPEL

SEQ ID NO: 29576 - protein, 33 aa, Artificial Sequence; identical to SEQ ID NO: 1496
  Cyclic GFR-binding peptide
  MOD_RES (32)..(33): Xaa is C or S

SEQ ID NO: 29577 - protein, 42 aa, Artificial Sequence
  Cyclic GFR-binding peptide
  MOD_RES (1)..(3)..(36)..(37): Xaa is C or S
XGXEAVSMGEEYKFKTPVGMDDLYLVSIPELKTPVXXAKGVK

SEQ ID NO: 29578 - protein, 26 aa, Artificial Sequence
  Cyclic GFR-binding peptide
  MOD_RES (1)..(1): Xaa is C or S
XSRVIMRYKKLVKPKRGVFYLISIAN

SEQ ID NO: 29579 - protein, 33 aa, Artificial Sequence
  Cyclic GFR-binding peptide
  MOD_RES (27)..(28): Xaa is C or S
MEYQKYVKPTRGVIYLISIPSLDQPVXXPSASA

SEQ ID NO: 29580 - protein, 34 aa, Artificial Sequence; identical to SEQ ID NO: 1500
  Cyclic GFR-binding peptide
  MOD_RES (2)..(4): Xaa is C or S

SEQ ID NO: 29581 - protein, 32 aa, Artificial Sequence
  Cyclic GFR-binding peptide
  MOD_RES (28)..(29): Xaa is C or S
MDEYKFKVVKENEDLYLMSIPELETPVXXAKP

SEQ ID NO: 29582 - protein, 36 aa, Artificial Sequence; identical to SEQ ID NO: 1501
  Cyclic GFR-binding peptide
  MOD_RES (1)..(3)..(34)..(35): Xaa is C or S

SEQ ID NO: 29583 - protein, 29 aa, Artificial Sequence
  Cyclic GFR-binding peptide
GEVVMDEYKFKVVKENEDLYLMSIPELET

SEQ ID NO: 29584 - protein, 25 aa, Artificial Sequence
  Cyclic GFR-binding peptide
KVVMNRYKKLIVNNSSDFYLVSIAN

SEQ ID NO: 29585 - protein, 34 aa, Artificial Sequence
  Cyclic GFR-binding peptide
  MOD_RES (1)..(32)..(33): Xaa is C or S
XSKVIMEYKFKIKPTKGILYLISIPELDQSVXXP

SEQ ID NO: 29586 - protein, 33 aa, Artificial Sequence; identical to SEQ ID NO: 1505
  Cyclic GFR-binding peptide
  MOD_RES (31)..(32): Xaa is C or S

SEQ ID NO: 29587 - protein, 34 aa, Artificial Sequence; identical to SEQ ID NO: 1506
  Cyclic GFR-binding peptide
  MOD_RES (28)..(29): Xaa is C or S

SEQ ID NO: 29588 - protein, 34 aa, Artificial Sequence
  Cyclic GFR-binding peptide
  MOD_RES (28)..(29): Xaa is C or S
IMEYKFKVKPKRGVLYLISIPELAQPVXXPAASA

SEQ ID NO: 29589 - protein, 35 aa, Artificial Sequence
  Cyclic GFR-binding peptide
  MOD_RES (1)..(33)..(34): Xaa is C or S
XARVVMNEYQKYIVNSSDDIYLVSIPSLQTPAXXP

SEQ ID NO: 29590 - protein, 32 aa, Artificial Sequence; identical to SEQ ID NO: 1508
  Cyclic GFR-binding peptide
  MOD_RES (31)..(32): Xaa is C or S

SEQ ID NO: 29591 - protein, 40 aa, Artificial Sequence
  Cyclic GFR-binding peptide
  MOD_RES (2)..(4)..(36)..(37): Xaa is C or S
HXGXSRVVMNEYQKYIVNSSDDIYLVSIPSLKTPAXXPKP

SEQ ID NO: 29592 - protein, 35 aa, Artificial Sequence
  Cyclic GFR-binding peptide
  MOD_RES (1)..(33)..(34): Xaa is C or S
XGEVVMEEYKFKVVKDYEDLYLMSIPELETPVXXA

SEQ ID NO: 29593 - protein, 39 aa, Artificial Sequence; identical to SEQ ID NO: 1511
  Cyclic GFR-binding peptide
  MOD_RES (2)..(4)..(36)..(37): Xaa is C or S

SEQ ID NO: 29594 - protein, 27 aa, Artificial Sequence
  Cyclic GFR-binding peptide
AKVVMNYHYKLIVNNSSDKYLVSIPSL

SEQ ID NO: 29595 - protein, 22 aa, Artificial Sequence
  Cyclic GFR-binding peptide
MNEYKFKIVNNSSDLYLVSIPE

SEQ ID NO: 29596 - protein, 34 aa, Artificial Sequence
  Cyclic GFR-binding peptide
  MOD_RES (2)..(34): Xaa is C or S
GXESVAMGYHYKLYTVVGKDKYLISIPSLKTPVX

SEQ ID NO: 29597 - protein, 33 aa, Artificial Sequence
  Cyclic GFR-binding peptide
  MOD_RES (30)..(30): Xaa is C or S
VVMNEYQKYIVNSSDDIYLVSIPSLKTPAXTPK

SEQ ID NO: 29598 - protein, 31 aa, Artificial Sequence
  Cyclic GFR-binding peptide
  MOD_RES (26)..(27): Xaa is C or S
EYKFKIVNNSSDLYLVSIPELKTPAXXAKPV

SEQ ID NO: 29599 - protein, 28 aa, Artificial Sequence
  Cyclic GFR-binding peptide
KVVMRYKKLVKPTRGVFYLISIANLDQP

SEQ ID NO: 29600 - protein, 22 aa, Artificial Sequence
  Cyclic GFR-binding peptide
YHYKLYTVVGKDKYLISIPSLK

SEQ ID NO: 29601 - protein, 34 aa, Artificial Sequence; identical to SEQ ID NO: 1518
  Cyclic GFR-binding peptide
  MOD_RES (29)..(30): Xaa is C or S

SEQ ID NO: 29602 - protein, 31 aa, Artificial Sequence
  Cyclic GFR-binding peptide
  MOD_RES (27)..(28): Xaa is C or S
NEYKFKIVNSSDDLYLVSIPELQTPAXXPKP

SEQ ID NO: 29603 - protein, 25 aa, Artificial Sequence
  Cyclic GFR-binding peptide
VVMNEYKFKIVNSSDDLYLVSIPEL

SEQ ID NO: 29604 - protein, 30 aa, Artificial Sequence; identical to SEQ ID NO: 1519
  Cyclic GFR-binding peptide
  MOD_RES (26)..(27): Xaa is C or S

SEQ ID NO: 29605 - protein, 39 aa, Artificial Sequence; identical to SEQ ID NO: 1520
  Cyclic GFR-binding peptide
  MOD_RES (1)..(3)..(34)..(35): Xaa is C or S

SEQ ID NO: 29606 - protein, 30 aa, Artificial Sequence; identical to SEQ ID NO: 1521
  Cyclic GFR-binding peptide

SEQ ID NO: 29607 - protein, 37 aa, Artificial Sequence
  Cyclic GFR-binding peptide
  MOD_RES (1)..(33)..(34): Xaa is C or S
XARVVMNEYKFKIVNSSDDLYLVSIPELQTPAXXPKP

SEQ ID NO: 29608 - protein, 38 aa, Artificial Sequence; identical to SEQ ID NO: 1522
  Cyclic GFR-binding peptide
  MOD_RES (2)..(4)..(36): Xaa is C or S

SEQ ID NO: 29609 - protein, 26 aa, Artificial Sequence
  Cyclic GFR-binding peptide
VMEYQKYVKPTRGVIYLISIPSLDQP

SEQ ID NO: 29610 - protein, 32 aa, Artificial Sequence; identical to SEQ ID NO: 1525
  Cyclic GFR-binding peptide
  MOD_RES (2)..(2): Xaa is C or S

SEQ ID NO: 29611 - protein, 26 aa, Artificial Sequence
  Cyclic GFR-binding peptide
SMGEEYQKYTPVGMDDIYLVSIPSLK

SEQ ID NO: 29612 - protein, 31 aa, Artificial Sequence
  Cyclic GFR-binding peptide
  MOD_RES (26)..(27): Xaa is C or S
EYQKYVVKDYEDIYLMSIPSLETPVXXAKPI

SEQ ID NO: 29613 - protein, 29 aa, Artificial Sequence
  Cyclic GFR-binding peptide
  MOD_RES (27)..(28): Xaa is C or S
NEYQKYIVNNSSDIYLVSIPSLKTPAXXA

SEQ ID NO: 29614 - protein, 29 aa, Artificial Sequence
  Cyclic GFR-binding peptide
ESVAMGEYQKYYTVVGKDIYLISIPSLKT

SEQ ID NO: 29615 - protein, 32 aa, Artificial Sequence; identical to SEQ ID NO: 1527
  Cyclic GFR-binding peptide
  MOD_RES (27)..(28): Xaa is C or S

SEQ ID NO: 29616 - protein, 28 aa, Artificial Sequence
  Cyclic GFR-binding peptide
  MOD_RES (1)..(1): Xaa is C or S
XGEVVMERYKKLVVKDYEDFYLMSIANL

SEQ ID NO: 29617 - protein, 28 aa, Artificial Sequence
  Cyclic GFR-binding peptide
AMGYHYKLYTVVGKDKYLISIPSLKTPV

SEQ ID NO: 29618 - protein, 24 aa, Artificial Sequence
  Cyclic GFR-binding peptide
VVMDYHYKLVVKENEDKYLMSIPS

SEQ ID NO: 29619 - protein, 24 aa, Artificial Sequence
  Cyclic GFR-binding peptide
YHYKLVKPTRGVKYLISIPSLDQP

SEQ ID NO: 29620 - protein, 22 aa, Artificial Sequence
  Cyclic GFR-binding peptide
DEYKFKVVKENEDLYLMSIPEL

SEQ ID NO: 29621 - protein, 23 aa, Artificial Sequence
  Cyclic GFR-binding peptide
IMEYQKYIKPTKGIIYLISIPSL

SEQ ID NO: 29622 - protein, 32 aa, Artificial Sequence; identical to SEQ ID NO: 1538
  Cyclic GFR-binding peptide
  MOD_RES (2)..(4): Xaa is C or S

SEQ ID NO: 29623 - protein, 28 aa, Artificial Sequence
  Cyclic GFR-binding peptide
  MOD_RES (28)..(28): Xaa is C or S
MEEYKFKVVKDYEDLYLMSIPELETPVX

SEQ ID NO: 29624 - protein, 36 aa, Artificial Sequence
  Cyclic GFR-binding peptide
  MOD_RES (1)..(32)..(33): Xaa is C or S
XSRVIMEYQKYVKPKRGVIYLISIPSLAQPVXXPAA

SEQ ID NO: 29625 - protein, 38 aa, Artificial Sequence; identical to SEQ ID NO: 1542
  Cyclic GFR-binding peptide
  MOD_RES (2)..(4)..(36)..(37): Xaa is C or S

SEQ ID NO: 29626 - protein, 27 aa, Artificial Sequence
  Cyclic GFR-binding peptide
KVIMEYQKYIKPTKGIIYLISIPSLDQ

SEQ ID NO: 29627 - protein, 36 aa, Artificial Sequence; identical to SEQ ID NO: 1546
  Cyclic GFR-binding peptide
  MOD_RES (30)..(31): Xaa is C or S

SEQ ID NO: 29628 - protein, 41 aa, Artificial Sequence
  Cyclic GFR-binding peptide
  MOD_RES (2)..(4)..(36)..(37): Xaa is C or S
RXGXESVAMGYHYKLYTVVGKDKYLISIPSLKTPVXXAKSA

SEQ ID NO: 29629 - protein, 37 aa, Artificial Sequence
  Cyclic GFR-binding peptide
  MOD_RES (2)..(35)..(36): Xaa is C or S
GXEAVSMGEEYQKYTPVGMDDIYLVSIPSLKTPVXXA

SEQ ID NO: 29630 - protein, 40 aa, Artificial Sequence
  Cyclic GFR-binding peptide
  MOD_RES (1)..(3)..(35)..(36): Xaa is C or S
XGXSRVVMNEYQKYIVNSSDDIYLVSIPSLKTPAXXPKPV

SEQ ID NO: 29631 - protein, 37 aa, Artificial Sequence
  Cyclic GFR-binding peptide
  MOD_RES (32)..(33): Xaa is C or S
ARVVMNEYQKYIVNSSDDIYLVSIPSLQTPAXXPKPV

SEQ ID NO: 29632 - protein, 29 aa, Artificial Sequence
  Cyclic GFR-binding peptide
  MOD_RES (1)..(3): Xaa is C or S
XGXGEVVMDYHYKLVVKENEDKYLMSIPS

SEQ ID NO: 29633 - protein, 35 aa, Artificial Sequence
  Cyclic GFR-binding peptide
  MOD_RES (1)..(33)..(34): Xaa is C or S
XARVVMNEYKFKIVNSSDDLYLVSIPELQTPAXXP

SEQ ID NO: 29634 - protein, 35 aa, Artificial Sequence
  Cyclic GFR-binding peptide
  MOD_RES (29)..(30): Xaa is C or S
VIMEYQKYVKPKRGVIYLISIPSLAQPVXXPAASA

SEQ ID NO: 29635 - protein, 28 aa, Artificial Sequence
  Cyclic GFR-binding peptide
  MOD_RES (1)..(3): Xaa is C or S
XKXSRVIMEYKFKVKPKRGVLYLISIPE

SEQ ID NO: 29636 - protein, 33 aa, Artificial Sequence; identical to SEQ ID NO: 1554
  Cyclic GFR-binding peptide
  MOD_RES (28)..(29): Xaa is C or S

SEQ ID NO: 29637 - protein, 31 aa, Artificial Sequence
  Cyclic GFR-binding peptide
  MOD_RES (2)..(4): Xaa is C or S
HXGXARVVMNEYQKYIVNSSDDIYLVSIPSL

SEQ ID NO: 29638 - protein, 35 aa, Artificial Sequence
  Cyclic GFR-binding peptide
  MOD_RES (30)..(31): Xaa is C or S
VVMNEYKFKIVNNSSDLYLVSIPELKTPAXXAKPV

SEQ ID NO: 29639 - protein, 41 aa, Artificial Sequence
  Cyclic GFR-binding peptide
  MOD_RES (2)..(4)..(36)..(37): Xaa is C or S
HXGXAKVVMNEYQKYIVNNSSDIYLVSIPSLKTPAXXAKPV

SEQ ID NO: 29640 - protein, 29 aa, Artificial Sequence
  Cyclic GFR-binding peptide
  MOD_RES (2)..(2): Xaa is C or S
GXSRVVMNRYKKLIVNSSDDFYLVSIANL

SEQ ID NO: 29641 - protein, 22 aa, Artificial Sequence
  Cyclic GFR-binding peptide
MEYQKYVKPKRGVIYLISIPSL

SEQ ID NO: 29642 - protein, 33 aa, Artificial Sequence
  Cyclic GFR-binding peptide
  MOD_RES (30)..(31): Xaa is C or S
VVMDEYKFKVVKENEDLYLMSIPELETPVXXAK

SEQ ID NO: 29643 - protein, 31 aa, Artificial Sequence
  Cyclic GFR-binding peptide
  MOD_RES (31)..(31): Xaa is C or S
RVVMNEYKFKIVNSSDDLYLVSIPELQTPAX

SEQ ID NO: 29644 - protein, 30 aa, Artificial Sequence
  Cyclic GFR-binding peptide
  MOD_RES (28)..(29): Xaa is C or S
MGEYQKYYTVVGKDIYLISIPSLKTPVXXA

SEQ ID NO: 29645 - protein, 24 aa, Artificial Sequence
  Cyclic GFR-binding peptide
VVMDEYQKYVVKENEDIYLMSIPS

SEQ ID NO: 29646 - protein, 25 aa, Artificial Sequence
  Cyclic GFR-binding peptide
ERYKKLTPVGMDDFYLVSIANLKTP

SEQ ID NO: 29647 - protein, 30 aa, Artificial Sequence
  Cyclic GFR-binding peptide
  MOD_RES (29)..(30): Xaa is C or S
VIMEYKFKVKPKRGVLYLISIPELAQPVXX

SEQ ID NO: 29648 - protein, 30 aa, Artificial Sequence
  Cyclic GFR-binding peptide
  MOD_RES (2)..(2): Xaa is C or S
GXGEVVMEEYQKYVVKDYEDIYLMSIPSLE

SEQ ID NO: 29649 - protein, 34 aa, Artificial Sequence; identical to SEQ ID NO: 1562
  Cyclic GFR-binding peptide
  MOD_RES (1)..(32)..(33): Xaa is C or S

SEQ ID NO: 29650 - protein, 25 aa, Artificial Sequence
  Cyclic GFR-binding peptide
EYKFKVVNNAADLYLISIPELRAPV

SEQ ID NO: 29651 - protein, 37 aa, Artificial Sequence
  Cyclic GFR-binding peptide
  MOD_RES (31)..(32): Xaa is C or S
RVVMNEYKFKIVNSSDDLYLVSIPELQTPAXXPKPVT

SEQ ID NO: 29652 - protein, 39 aa, Artificial Sequence
  Cyclic GFR-binding peptide
  MOD_RES (1)..(33)..(34): Xaa is C or S
XESVAMGRYKKLYTVVGKDFYLISIANLKTPVXXAKSAK

SEQ ID NO: 29653 - protein, 33 aa, Artificial Sequence; identical to SEQ ID NO: 1563
  Cyclic GFR-binding peptide
  MOD_RES (27)..(27): Xaa is C or S

SEQ ID NO: 29654 - protein, 34 aa, Artificial Sequence; identical to SEQ ID NO: 1564
  Cyclic GFR-binding peptide
  MOD_RES (32)..(33): Xaa is C or S

SEQ ID NO: 29655 - protein, 27 aa, Artificial Sequence
  Cyclic GFR-binding peptide
  MOD_RES (26)..(27): Xaa is C or S
EYKFKVVKENEDLYLMSIPELETPVXX

SEQ ID NO: 29656 - protein, 33 aa, Artificial Sequence
  Cyclic GFR-binding peptide
  MOD_RES (32)..(33): Xaa is C or S
SRVVMNEYKFKIVNSSDDLYLVSIPELKTPAXX

SEQ ID NO: 29657 - protein, 39 aa, Artificial Sequence
  Cyclic GFR-binding peptide
  MOD_RES (1)..(3)..(34)..(35): Xaa is C or S
XKXSKVVMEYKFKVKPTRGVLYLISIPELDQPVXXPSAS

SEQ ID NO: 29658 - protein, 33 aa, Artificial Sequence
  Cyclic GFR-binding peptide
  MOD_RES (28)..(29): Xaa is C or S
MDRYKKLVVNNAADFYLISIANLRAPVXXSAPA

SEQ ID NO: 29659 - protein, 37 aa, Artificial Sequence; identical to SEQ ID NO: 1571
  Cyclic GFR-binding peptide
  MOD_RES (2)..(33)..(34): Xaa is C or S

SEQ ID NO: 29660 - protein, 29 aa, Artificial Sequence
  Cyclic GFR-binding peptide
  MOD_RES (28)..(29): Xaa is C or S
VMRYKKLVKPTRGVFYLISIANLDQPVXX

SEQ ID NO: 29661 - protein, 30 aa, Artificial Sequence
  Cyclic GFR-binding peptide
  MOD_RES (1)..(3): Xaa is C or S
XKXSRVIMEYKFKVKPKRGVLYLISIPELA

SEQ ID NO: 29662 - protein, 37 aa, Artificial Sequence
  Cyclic GFR-binding peptide
  MOD_RES (32)..(33): Xaa is C or S
GEVVMEEYQKYVVKDYEDIYLMSIPSLETPVXXAKPI

SEQ ID NO: 29663 - protein, 25 aa, Artificial Sequence
  Cyclic GFR-binding peptide
VAMGRYKKLYTVVGKDFYLISIANL

SEQ ID NO: 29664 - protein, 29 aa, Artificial Sequence
  Cyclic GFR-binding peptide
  MOD_RES (2)..(2): Xaa is C or S
KXSKVIMRYKKLIKPTKGIFYLISIANLD

SEQ ID NO: 29665 - protein, 37 aa, Artificial Sequence
  Cyclic GFR-binding peptide
  MOD_RES (31)..(32): Xaa is C or S
SKVVMEYKFKVKPTRGVLYLISIPELDQPVXXPSASA

SEQ ID NO: 29666 - protein, 33 aa, Artificial Sequence
  Cyclic GFR-binding peptide
  MOD_RES (1)..(33): Xaa is C or S
XAEVVMDYHYKLVVNNAADKYLISIPSLRAPVX

SEQ ID NO: 29667 - protein, 32 aa, Artificial Sequence; identical to SEQ ID NO: 1577
  Cyclic GFR-binding peptide
  MOD_RES (30)..(31): Xaa is C or S

SEQ ID NO: 29668 - protein, 36 aa, Artificial Sequence; identical to SEQ ID NO: 1578
  Cyclic GFR-binding peptide
  MOD_RES (1)..(3)..(35)..(36): Xaa is C or S

SEQ ID NO: 29669 - protein, 34 aa, Artificial Sequence; identical to SEQ ID NO: 1580
  Cyclic GFR-binding peptide
  MOD_RES (1)..(3): Xaa is C or S

SEQ ID NO: 29670 - protein, 36 aa, Artificial Sequence; identical to SEQ ID NO: 1581
  Cyclic GFR-binding peptide
  MOD_RES (1)..(3)..(35): Xaa is C or S

SEQ ID NO: 29671 - protein, 38 aa, Artificial Sequence
  Cyclic GFR-binding peptide
  MOD_RES (2)..(4)..(36): Xaa is C or S
HXGXSRVVMNEYKFKIVNSSDDLYLVSIPELKTPAXTP

SEQ ID NO: 29672 - protein, 34 aa, Artificial Sequence
  Cyclic GFR-binding peptide
  MOD_RES (30)..(31): Xaa is C or S
VVMNEYKFKIVNSSDDLYLVSIPELQTPAXXPKP

SEQ ID NO: 29673 - protein, 29 aa, Artificial Sequence
  Cyclic GFR-binding peptide
  MOD_RES (26)..(27): Xaa is C or S
EYQKYVVKDYEDIYLMSIPSLETPVXXAK

SEQ ID NO: 29674 - protein, 36 aa, Artificial Sequence
  Cyclic GFR-binding peptide
  MOD_RES (30)..(31): Xaa is C or S
VVMEEYQKYVVKDYEDIYLMSIPSLETPVXXAKPIS

SEQ ID NO: 29675 - protein, 20 aa, Artificial Sequence
  Cyclic GFR-binding peptide
EYKFKIKPTKGILYLISIPE

SEQ ID NO: 29676 - protein, 34 aa, Artificial Sequence; identical to SEQ ID NO: 1585
  Cyclic GFR-binding peptide
  MOD_RES (30)..(31): Xaa is C or S

SEQ ID NO: 29677 - protein, 22 aa, Artificial Sequence
  Cyclic GFR-binding peptide
YHYKLVVNNAADKYLISIPSLR

SEQ ID NO: 29678 - protein, 37 aa, Artificial Sequence
  Cyclic GFR-binding peptide
  MOD_RES (1)..(3)..(34)..(35): Xaa is C or S
XKXSRVIMEYKFKVKPKRGVLYLISIPELAQPVXXPA

SEQ ID NO: 29679 - protein, 33 aa, Artificial Sequence; identical to SEQ ID NO: 1588
  Cyclic GFR-binding peptide
  MOD_RES (2)..(4): Xaa is C or S

SEQ ID NO: 29680 - protein, 30 aa, Artificial Sequence
  Cyclic GFR-binding peptide
  MOD_RES (26)..(27): Xaa is C or S
EYQKYIKPTKGIIYLISIPSLDQSVXXPSA

SEQ ID NO: 29681 - protein, 30 aa, Artificial Sequence
  Cyclic GFR-binding peptide
  MOD_RES (26)..(27): Xaa is C or S
EYKFKIVNSSDDLYLVSIPELQTPAXXPKP

SEQ ID NO: 29682 - protein, 25 aa, Artificial Sequence
  Cyclic GFR-binding peptide
KVIMEYKFKIKPTKGILYLISIPEL

SEQ ID NO: 29683 - protein, 35 aa, Artificial Sequence
  Cyclic GFR-binding peptide
  MOD_RES (32)..(33): Xaa is C or S
GEVVMEEYQKYVVKDYEDIYLMSIPSLETPVXXAK

SEQ ID NO: 29684 - protein, 22 aa, Artificial Sequence
  Cyclic GFR-binding peptide
MDEYKFKVVNNAADLYLISIPE

SEQ ID NO: 29685 - protein, 31 aa, Artificial Sequence; identical to SEQ ID NO: 1590
  Cyclic GFR-binding peptide
  MOD_RES (26)..(27): Xaa is C or S

SEQ ID NO: 29686 - protein, 24 aa, Artificial Sequence
  Cyclic GFR-binding peptide
VMDYHYKLVVKENEDKYLMSIPSL

SEQ ID NO: 29687 - protein, 30 aa, Artificial Sequence; identical to SEQ ID NO: 1593
  Cyclic GFR-binding peptide
  MOD_RES (2)..(4): Xaa is C or S

SEQ ID NO: 29688 - protein, 35 aa, Artificial Sequence
  Cyclic GFR-binding peptide
  MOD_RES (30)..(31): Xaa is C or S
VVMDEYKFKVVNNAADLYLISIPELRAPVXXSAPA

SEQ ID NO: 29689 - protein, 37 aa, Artificial Sequence; identical to SEQ ID NO: 1595
  Cyclic GFR-binding peptide
  MOD_RES (2)..(4)..(35)..(36): Xaa is C or S

SEQ ID NO: 29690 - protein, 35 aa, Artificial Sequence
  Cyclic GFR-binding peptide
  MOD_RES (32)..(33): Xaa is C or S
GEVVMDEYKFKVVKENEDLYLMSIPELETPVXXAK

SEQ ID NO: 29691 - protein, 27 aa, Artificial Sequence
  Cyclic GFR-binding peptide
VMNEYKFKIVNNSSDLYLVSIPELKTP

SEQ ID NO: 29692 - protein, 29 aa, Artificial Sequence
  Cyclic GFR-binding peptide
  MOD_RES (1)..(3): Xaa is C or S
XGXSRVVMNYHYKLIVNSSDDKYLVSIPS

SEQ ID NO: 29693 - protein, 29 aa, Artificial Sequence
  Cyclic GFR-binding peptide
SMGEEYQKYTPVGMDDIYLVSIPSLKTPV

SEQ ID NO: 29694 - protein, 32 aa, Artificial Sequence; identical to SEQ ID NO: 1598
  Cyclic GFR-binding peptide
  MOD_RES (27)..(27): Xaa is C or S

SEQ ID NO: 29695 - protein, 41 aa, Artificial Sequence; identical to SEQ ID NO: 1600
  Cyclic GFR-binding peptide
  MOD_RES (2)..(4)..(36): Xaa is C or S

SEQ ID NO: 29696 - protein, 26 aa, Artificial Sequence
  Cyclic GFR-binding peptide
VSMGEEYKFKTPVGMDDLYLVSIPEL

SEQ ID NO: 29697 - protein, 27 aa, Artificial Sequence
  Cyclic GFR-binding peptide
IMYHYKLIKPTKGIKYLISIPSLDQSV

SEQ ID NO: 29698 - protein, 35 aa, Artificial Sequence
  Cyclic GFR-binding peptide
  MOD_RES (30)..(30): Xaa is C or S
VVMNEYKFKIVNSSDDLYLVSIPELKTPAXTPKTV

SEQ ID NO: 29699 - protein, 30 aa, Artificial Sequence; identical to SEQ ID NO: 1604
  Cyclic GFR-binding peptide

SEQ ID NO: 29700 - protein, 33 aa, Artificial Sequence
  Cyclic GFR-binding peptide
  MOD_RES (29)..(30): Xaa is C or S
VIMEYKFKVKPKRGVLYLISIPELAQPVXXPAA

SEQ ID NO: 29701 - protein, 23 aa, Artificial Sequence
  Cyclic GFR-binding peptide
EYQKYVKPTRGVIYLISIPSLDQ

SEQ ID NO: 29702 - protein, 24 aa, Artificial Sequence
  Cyclic GFR-binding peptide
RYKKLIKPTKGIFYLISIANLDQS

SEQ ID NO: 29703 - protein, 26 aa, Artificial Sequence
  Cyclic GFR-binding peptide
RVVMNRYKKLIVNSSDDFYLVSIANL

SEQ ID NO: 29704 - protein, 33 aa, Artificial Sequence
  Cyclic GFR-binding peptide
  MOD_RES (1)..(3): Xaa is C or S
XGXESVAMGRYKKLYTVVGKDFYLISIANLKTP

SEQ ID NO: 29705 - protein, 41 aa, Artificial Sequence
  Cyclic GFR-binding peptide
  MOD_RES (1)..(3)..(35)..(36): Xaa is C or S
XGXAEVVMDYHYKLVVNNAADKYLISIPSLRAPVXXSAPAA

SEQ ID NO: 29706 - protein, 32 aa, Artificial Sequence; identical to SEQ ID NO: 1611
  Cyclic GFR-binding peptide
  MOD_RES (32)..(32): Xaa is C or S

SEQ ID NO: 29707 - protein, 39 aa, Artificial Sequence
  Cyclic GFR-binding peptide
  MOD_RES (2)..(4)..(35)..(36): Xaa is C or S
SXKXSKVIMEYKFKIKPTKGILYLISIPELDQSVXXPSA

SEQ ID NO: 29708 - protein, 31 aa, Artificial Sequence; identical to SEQ ID NO: 1613
  Cyclic GFR-binding peptide
  MOD_RES (29)..(30): Xaa is C or S

SEQ ID NO: 29709 - protein, 23 aa, Artificial Sequence
  Cyclic GFR-binding peptide
RYKKLIVNNSSDFYLVSIANLKT

SEQ ID NO: 29710 - protein, 25 aa, Artificial Sequence
  Cyclic GFR-binding peptide
YHYKLVVKDYEDKYLMSIPSLETPV

SEQ ID NO: 29711 - protein, 31 aa, Artificial Sequence; identical to SEQ ID NO: 1619
  Cyclic GFR-binding peptide
  MOD_RES (31)..(31): Xaa is C or S

SEQ ID NO: 29712 - protein, 38 aa, Artificial Sequence; identical to SEQ ID NO: 1621
  Cyclic GFR-binding peptide
  MOD_RES (2)..(4)..(36)..(37): Xaa is C or S

SEQ ID NO: 29713 - protein, 34 aa, Artificial Sequence
  Cyclic GFR-binding peptide
  MOD_RES (1)..(33): Xaa is C or S
XSRVVMNEYKFKIVNSSDDLYLVSIPELKTPAXT

SEQ ID NO: 29714 - protein, 20 aa, Artificial Sequence
  Cyclic GFR-binding peptide
EYKFKVVKDYEDLYLMSIPE

SEQ ID NO: 29715 - protein, 26 aa, Artificial Sequence
  Cyclic GFR-binding peptide
AEVVMDEYKFKVVNNAADLYLISIPE

SEQ ID NO: 29716 - protein, 35 aa, Artificial Sequence
  Cyclic GFR-binding peptide
  MOD_RES (32)..(33): Xaa is C or S
GEVVMEEYKFKVVKDYEDLYLMSIPELETPVXXAK

SEQ ID NO: 29717 - protein, 30 aa, Artificial Sequence
  Cyclic GFR-binding peptide
  MOD_RES (2)..(2): Xaa is C or S
GXSRVVMNEYQKYIVNSSDDIYLVSIPSLK

SEQ ID NO: 29718 - protein, 38 aa, Artificial Sequence
  Cyclic GFR-binding peptide
  MOD_RES (1)..(33)..(34): Xaa is C or S
XAEVVMDYHYKLVVNNAADKYLISIPSLRAPVXXSAPA

SEQ ID NO: 29719 - protein, 39 aa, Artificial Sequence
  Cyclic GFR-binding peptide
  MOD_RES (2)..(33)..(34): Xaa is C or S
KXSRVIMEYQKYVKPKRGVIYLISIPSLAQPVXXPAASA

SEQ ID NO: 29720 - protein, 29 aa, Artificial Sequence
  Cyclic GFR-binding peptide
  MOD_RES (1)..(3): Xaa is C or S
XGXGEVVMEEYKFKVVKDYEDLYLMSIPE

SEQ ID NO: 29721 - protein, 27 aa, Artificial Sequence
  Cyclic GFR-binding peptide
  MOD_RES (26)..(27): Xaa is C or S
RYKKLTPVGMDDFYLVSIANLKTPVXX

SEQ ID NO: 29722 - protein, 32 aa, Artificial Sequence
  Cyclic GFR-binding peptide
  MOD_RES (27)..(28): Xaa is C or S
DEYQKYVVKENEDIYLMSIPSLETPVXXAKPI

SEQ ID NO: 29723 - protein, 35 aa, Artificial Sequence
  Cyclic GFR-binding peptide
  MOD_RES (32)..(33): Xaa is C or S
GEVVMDEYQKYVVKENEDIYLMSIPSLETPVXXAK

SEQ ID NO: 29724 - protein, 26 aa, Artificial Sequence
  Cyclic GFR-binding peptide
  MOD_RES (26)..(26): Xaa is C or S
EYKFKVKPKRGVLYLISIPELAQPVX

SEQ ID NO: 29725 - protein, 33 aa, Artificial Sequence
  Cyclic GFR-binding peptide
  MOD_RES (27)..(28): Xaa is C or S
MEYKFKIKPTKGILYLISIPELDQSVXXPSASA

SEQ ID NO: 29726 - protein, 39 aa, Artificial Sequence
  Cyclic GFR-binding peptide
  MOD_RES (2)..(34)..(35): Xaa is C or S
GXAEVVMDEYKFKVVNNAADLYLISIPELRAPVXXSAPA

SEQ ID NO: 29727 - protein, 33 aa, Artificial Sequence; identical to SEQ ID NO: 1627
  Cyclic GFR-binding peptide
  MOD_RES (33)..(33): Xaa is C or S

SEQ ID NO: 29728 - protein, 31 aa, Artificial Sequence; identical to SEQ ID NO: 1628
  Cyclic GFR-binding peptide
  MOD_RES (26)..(27): Xaa is C or S

SEQ ID NO: 29729 - protein, 34 aa, Artificial Sequence
  Cyclic GFR-binding peptide
  MOD_RES (2)..(4): Xaa is C or S
RXGXEAVSMGEEYQKYTPVGMDDIYLVSIPSLKT

SEQ ID NO: 29730 - protein, 31 aa, Artificial Sequence; identical to SEQ ID NO: 1629
  Cyclic GFR-binding peptide
  MOD_RES (1)..(3): Xaa is C or S

SEQ ID NO: 29731 - protein, 29 aa, Artificial Sequence
  Cyclic GFR-binding peptide
VVMEEYKFKVVKDYEDLYLMSIPELETPV

SEQ ID NO: 29732 - protein, 40 aa, Artificial Sequence
  Cyclic GFR-binding peptide
  MOD_RES (2)..(4)..(36)..(37): Xaa is C or S
RXGXESVAMGYHYKLYTVVGKDKYLISIPSLKTPVXXAKS

SEQ ID NO: 29733 - protein, 27 aa, Artificial Sequence
  Cyclic GFR-binding peptide
  MOD_RES (27)..(27): Xaa is C or S
MYHYKLVKPKRGVKYLISIPSLAQPVX

SEQ ID NO: 29734 - protein, 30 aa, Artificial Sequence
  Cyclic GFR-binding peptide
  MOD_RES (27)..(28): Xaa is C or S
EEYQKYVVKDYEDIYLMSIPSLETPVXXAK

SEQ ID NO: 29735 - protein, 32 aa, Artificial Sequence; identical to SEQ ID NO: 1636
  Cyclic GFR-binding peptide
  MOD_RES (30)..(31): Xaa is C or S

SEQ ID NO: 29736 - protein, 29 aa, Artificial Sequence
  Cyclic GFR-binding peptide
  MOD_RES (27)..(28): Xaa is C or S
EEYKFKTPVGMDDLYLVSIPELKTPVXXA

SEQ ID NO: 29737 - protein, 37 aa, Artificial Sequence
  Cyclic GFR-binding peptide
  MOD_RES (2)..(34)..(35): Xaa is C or S
GXGEVVMEEYQKYVVKDYEDIYLMSIPSLETPVXXAK

SEQ ID NO: 29738 - protein, 23 aa, Artificial Sequence
  Cyclic GFR-binding peptide
VVMEYKFKVKPTRGVLYLISIPE

SEQ ID NO: 29739 - protein, 35 aa, Artificial Sequence
  Cyclic GFR-binding peptide
  MOD_RES (1)..(3)..(35): Xaa is C or S
XGXGEVVMEEYQKYVVKDYEDIYLMSIPSLETPVX

SEQ ID NO: 29740 - protein, 25 aa, Artificial Sequence
  Cyclic GFR-binding peptide
AMGEYQKYYTVVGKDIYLISIPSLK

SEQ ID NO: 29741 - protein, 35 aa, Artificial Sequence
  Cyclic GFR-binding peptide
  MOD_RES (31)..(32): Xaa is C or S
RVVMNEYQKYIVNSSDDIYLVSIPSLQTPAXXPKP

SEQ ID NO: 29742 - protein, 36 aa, Artificial Sequence
  Cyclic GFR-binding peptide
  MOD_RES (1)..(3)..(35)..(36): Xaa is C or S
XGXAEVVMDRYKKLVVNNAADFYLISIANLRAPVXX

SEQ ID NO: 29743 - protein, 27 aa, Artificial Sequence
  Cyclic GFR-binding peptide
KVIMYHYKLIKPTKGIKYLISIPSLDQ

SEQ ID NO: 29744 - protein, 36 aa, Artificial Sequence
  Cyclic GFR-binding peptide
  MOD_RES (2)..(4)..(35)..(36): Xaa is C or S
SXKXSKVIMEYQKYIKPTKGIIYLISIPSLDQSVXX

SEQ ID NO: 29745 - protein, 40 aa, Artificial Sequence; identical to SEQ ID NO: 1641
  Cyclic GFR-binding peptide
  MOD_RES (2)..(4)..(35)..(36): Xaa is C or S

SEQ ID NO: 29746 - protein, 24 aa, Artificial Sequence
  Cyclic GFR-binding peptide
VMEEYQKYVVKDYEDIYLMSIPSL

SEQ ID NO: 29747 - protein, 32 aa, Artificial Sequence
  Cyclic GFR-binding peptide
  MOD_RES (29)..(30): Xaa is C or S
VMEEYKFKVVKDYEDLYLMSIPELETPVXXAK

SEQ ID NO: 29748 - protein, 36 aa, Artificial Sequence
  Cyclic GFR-binding peptide
  MOD_RES (1)..(3)..(35)..(36): Xaa is C or S
XGXSRVVMNEYQKYIVNSSDDIYLVSIPSLKTPAXX

SEQ ID NO: 29749 - protein, 37 aa, Artificial Sequence
  Cyclic GFR-binding peptide
  MOD_RES (2)..(4)..(35)..(36): Xaa is C or S
SXKXSKVVMEYQKYVKPTRGVIYLISIPSLDQPVXXP

SEQ ID NO: 29750 - protein, 30 aa, Artificial Sequence; identical to SEQ ID NO: 1649
  Cyclic GFR-binding peptide
  MOD_RES (2)..(2): Xaa is C or S

SEQ ID NO: 29751 - protein, 26 aa, Artificial Sequence
  Cyclic GFR-binding peptide
IMEYQKYIKPTKGIIYLISIPSLDQS

SEQ ID NO: 29752 - protein, 37 aa, Artificial Sequence; identical to SEQ ID NO: 1652
  Cyclic GFR-binding peptide
  MOD_RES (1)..(33)..(34): Xaa is C or S

SEQ ID NO: 29753 - protein, 35 aa, Artificial Sequence
  Cyclic GFR-binding peptide
  MOD_RES (30)..(31): Xaa is C or S
RVIMEYQKYVKPKRGVIYLISIPSLAQPVXXPAAS

SEQ ID NO: 29754 - protein, 38 aa, Artificial Sequence; identical to SEQ ID NO: 1655
  Cyclic GFR-binding peptide
  MOD_RES (2)..(34)..(35): Xaa is C or S

SEQ ID NO: 29755 - protein, 37 aa, Artificial Sequence
  Cyclic GFR-binding peptide
  MOD_RES (1)..(3)..(35)..(36): Xaa is C or S
XGXGEVVMDEYQKYVVKENEDIYLMSIPSLETPVXXA

SEQ ID NO: 29756 - protein, 32 aa, Artificial Sequence
  Cyclic GFR-binding peptide
  MOD_RES (2)..(4): Xaa is C or S
SXKXSKVIMEYKFKIKPTKGILYLISIPELDQ

SEQ ID NO: 29757 - protein, 23 aa, Artificial Sequence
  Cyclic GFR-binding peptide
MDYHYKLVVKENEDKYLMSIPSL

SEQ ID NO: 29758 - protein, 25 aa, Artificial Sequence
  Cyclic GFR-binding peptide
VVMEYQKYVKPTRGVIYLISIPSLD

SEQ ID NO: 29759 - protein, 30 aa, Artificial Sequence
  Cyclic GFR-binding peptide
  MOD_RES (27)..(27): Xaa is C or S
NEYKFKIVNSSDDLYLVSIPELKTPAXTPK

SEQ ID NO: 29760 - protein, 24 aa, Artificial Sequence
  Cyclic GFR-binding peptide
DEYKFKVVNNAADLYLISIPELRA

SEQ ID NO: 29761 - protein, 34 aa, Artificial Sequence; identical to SEQ ID NO: 1663
  Cyclic GFR-binding peptide
  MOD_RES (2)..(4): Xaa is C or S

SEQ ID NO: 29762 - protein, 29 aa, Artificial Sequence
  Cyclic GFR-binding peptide
  MOD_RES (1)..(3): Xaa is C or S
XKXSKVIMYHYKLIKPTKGIKYLISIPSL

SEQ ID NO: 29763 - protein, 32 aa, Artificial Sequence
  Cyclic GFR-binding peptide
  MOD_RES (2)..(2): Xaa is C or S
GXGEVVMDEYQKYVVKENEDIYLMSIPSLETP

SEQ ID NO: 29764 - protein, 32 aa, Artificial Sequence; identical to SEQ ID NO: 1668
  Cyclic GFR-binding peptide
  MOD_RES (29)..(30): Xaa is C or S

SEQ ID NO: 29765 - protein, 35 aa, Artificial Sequence; identical to SEQ ID NO: 1669
  Cyclic GFR-binding peptide
  MOD_RES (1)..(33)..(34): Xaa is C or S

SEQ ID NO: 29766 - protein, 22 aa, Artificial Sequence
  Cyclic GFR-binding peptide
DYHYKLVVKENEDKYLMSIPSL

SEQ ID NO: 29767 - protein, 30 aa, Artificial Sequence
  Cyclic GFR-binding peptide
  MOD_RES (2)..(2): Xaa is C or S
GXESVAMGRYKKLYTVVGKDFYLISIANLK

SEQ ID NO: 29768 - protein, 29 aa, Artificial Sequence
  Cyclic GFR-binding peptide
SKVIMEYQKYIKPTKGIIYLISIPSLDQS

SEQ ID NO: 29769 - protein, 34 aa, Artificial Sequence
  Cyclic GFR-binding peptide
  MOD_RES (2)..(4): Xaa is C or S
HXGXAKVVMNEYKFKIVNNSSDLYLVSIPELKTP

SEQ ID NO: 29770 - protein, 26 aa, Artificial Sequence
  Cyclic GFR-binding peptide
VVMEEYKFKVVKDYEDLYLMSIPELE

SEQ ID NO: 29771 - protein, 23 aa, Artificial Sequence
  Cyclic GFR-binding peptide
EYKFKIKPTKGILYLISIPELDQ

SEQ ID NO: 29772 - protein, 37 aa, Artificial Sequence
  Cyclic GFR-binding peptide
  MOD_RES (1)..(33)..(34): Xaa is C or S
XAEVVMDYHYKLVVNNAADKYLISIPSLRAPVXXSAP

SEQ ID NO: 29773 - protein, 28 aa, Artificial Sequence
  Cyclic GFR-binding peptide
EVVMDEYQKYVVKENEDIYLMSIPSLET

SEQ ID NO: 29774 - protein, 32 aa, Artificial Sequence; identical to SEQ ID NO: 1673
  Cyclic GFR-binding peptide
  MOD_RES (26)..(27): Xaa is C or S

SEQ ID NO: 29775 - protein, 25 aa, Artificial Sequence
  Cyclic GFR-binding peptide
EVVMERYKKLVVKDYEDFYLMSIAN

SEQ ID NO: 29776 - protein, 33 aa, Artificial Sequence
  Cyclic GFR-binding peptide
  MOD_RES (32)..(33): Xaa is C or S
GEVVMDEYQKYVVKENEDIYLMSIPSLETPVXX

SEQ ID NO: 29777 - protein, 27 aa, Artificial Sequence
  Cyclic GFR-binding peptide
  MOD_RES (2)..(2): Xaa is C or S
KXSKVIMEYKFKIKPTKGILYLISIPE

SEQ ID NO: 29778 - protein, 38 aa, Artificial Sequence
  Cyclic GFR-binding peptide
  MOD_RES (1)..(3)..(35): Xaa is C or S
XGXSRVVMNEYKFKIVNSSDDLYLVSIPELKTPAXTPK

SEQ ID NO: 29779 - protein, 25 aa, Artificial Sequence
  Cyclic GFR-binding peptide
MNYHYKLIVNNSSDKYLVSIPSLKT

SEQ ID NO: 29780 - protein, 35 aa, Artificial Sequence; identical to SEQ ID NO: 1684
  Cyclic GFR-binding peptide
  MOD_RES (31)..(32): Xaa is C or S

SEQ ID NO: 29781 - protein, 29 aa, Artificial Sequence
  Cyclic GFR-binding peptide
  MOD_RES (29)..(29): Xaa is C or S
VIMEYQKYIKPTKGIIYLISIPSLDQSVX

SEQ ID NO: 29782 - protein, 30 aa, Artificial Sequence
  Cyclic GFR-binding peptide
  MOD_RES (29)..(30): Xaa is C or S
AMGEYQKYYTVVGKDIYLISIPSLKTPVXX

SEQ ID NO: 29783 - protein, 33 aa, Artificial Sequence
  Cyclic GFR-binding peptide
  MOD_RES (29)..(30): Xaa is C or S
VMEEYQKYVVKDYEDIYLMSIPSLETPVXXAKP

SEQ ID NO: 29784 - protein, 34 aa, Artificial Sequence
  Cyclic GFR-binding peptide
  MOD_RES (1)..(32)..(33): Xaa is C or S
XSKVVMEYQKYVKPTRGVIYLISIPSLDQPVXXP

SEQ ID NO: 29785 - protein, 31 aa, Artificial Sequence; identical to SEQ ID NO: 1689
  Cyclic GFR-binding peptide
  MOD_RES (2)..(2): Xaa is C or S

SEQ ID NO: 29786 - protein, 20 aa, Artificial Sequence
  Cyclic GFR-binding peptide
EYQKYVKPTRGVIYLISIPS

SEQ ID NO: 29787 - protein, 26 aa, Artificial Sequence
  Cyclic GFR-binding peptide
GRYKKLYTVVGKDFYLISIANLKTPV

SEQ ID NO: 29788 - protein, 26 aa, Artificial Sequence
  Cyclic GFR-binding peptide
SRVIMEYKFKVKPKRGVLYLISIPEL

SEQ ID NO: 29789 - protein, 33 aa, Artificial Sequence
  Cyclic GFR-binding peptide
  MOD_RES (2)..(2): Xaa is C or S
GXAKVVMNEYKFKIVNNSSDLYLVSIPELKTPA

SEQ ID NO: 29790 - protein, 23 aa, Artificial Sequence
  Cyclic GFR-binding peptide
EYKFKVVKDYEDLYLMSIPELET

SEQ ID NO: 29791 - protein, 31 aa, Artificial Sequence
  Cyclic GFR-binding peptide
  MOD_RES (26)..(27): Xaa is C or S
EYQKYIKPTKGIIYLISIPSLDQSVXXPSAS

SEQ ID NO: 29792 - protein, 27 aa, Artificial Sequence
  Cyclic GFR-binding peptide
VVMNEYKFKIVNSSDDLYLVSIPELKT

SEQ ID NO: 29793 - protein, 24 aa, Artificial Sequence
  Cyclic GFR-binding peptide
VMDYHYKLVVNNAADKYLISIPSL

SEQ ID NO: 29794 - protein, 27 aa, Artificial Sequence
  Cyclic GFR-binding peptide
VVMEEYQKYVVKDYEDIYLMSIPSLET

SEQ ID NO: 29795 - protein, 30 aa, Artificial Sequence; identical to SEQ ID NO: 1696
  Cyclic GFR-binding peptide

SEQ ID NO: 29796 - protein, 32 aa, Artificial Sequence
  Cyclic GFR-binding peptide
  MOD_RES (30)..(31): Xaa is C or S
VVMDRYKKLVVNNAADFYLISIANLRAPVXXS

SEQ ID NO: 29797 - protein, 23 aa, Artificial Sequence
  Cyclic GFR-binding peptide
VVMRYKKLVKPTRGVFYLISIAN

SEQ ID NO: 29798 - protein, 32 aa, Artificial Sequence; identical to SEQ ID NO: 1698
  Cyclic GFR-binding peptide
  MOD_RES (31)..(32): Xaa is C or S

SEQ ID NO: 29799 - protein, 28 aa, Artificial Sequence
  Cyclic GFR-binding peptide
RVIMEYKFKVKPKRGVLYLISIPELAQP

SEQ ID NO: 29800 - protein, 21 aa, Artificial Sequence
  Cyclic GFR-binding peptide
EYKFKVVNNAADLYLISIPEL

SEQ ID NO: 29801 - protein, 28 aa, Artificial Sequence
  Cyclic GFR-binding peptide
RVVMNEYKFKIVNSSDDLYLVSIPELQT

SEQ ID NO: 29802 - protein, 21 aa, Artificial Sequence
  Cyclic GFR-binding peptide
YHYKLVKPTRGVKYLISIPSL

SEQ ID NO: 29803 - protein, 26 aa, Artificial Sequence
  Cyclic GFR-binding peptide
VVMDYHYKLVVKENEDKYLMSIPSLE

SEQ ID NO: 29804 - protein, 40 aa, Artificial Sequence; identical to SEQ ID NO: 1702
  Cyclic GFR-binding peptide
  MOD_RES (2)..(34)..(35): Xaa is C or S

SEQ ID NO: 29805 - protein, 31 aa, Artificial Sequence
  Cyclic GFR-binding peptide
  MOD_RES (29)..(30): Xaa is C or S
VMNEYQKYIVNNSSDIYLVSIPSLKTPAXXA

SEQ ID NO: 29806 - protein, 29 aa, Artificial Sequence
  Cyclic GFR-binding peptide
  MOD_RES (26)..(27): Xaa is C or S
RYKKLVVKENEDFYLMSIANLETPVXXAK

SEQ ID NO: 29807 - protein, 31 aa, Artificial Sequence; identical to SEQ ID NO: 1705
  Cyclic GFR-binding peptide
  MOD_RES (26)..(27): Xaa is C or S

SEQ ID NO: 29808 - skipped

SEQ ID NO: 29809 - protein, 37 aa, Artificial Sequence
  Cyclic GFR-binding peptide
  MOD_RES (32)..(33): Xaa is C or S
SRVVMNEYQKYIVNSSDDIYLVSIPSLKTPAXXPKPV

SEQ ID NO: 29810 - protein, 26 aa, Artificial Sequence
  Cyclic GFR-binding peptide
VIMRYKKLVKPKRGVFYLISIANLAQ

SEQ ID NO: 29811 - protein, 37 aa, Artificial Sequence
  Cyclic GFR-binding peptide
  MOD_RES (32)..(33): Xaa is C or S
ARVVMNEYKFKIVNSSDDLYLVSIPELQTPAXXPKPV

SEQ ID NO: 29812 - protein, 40 aa, Artificial Sequence; identical to SEQ ID NO: 1707
  Cyclic GFR-binding peptide
  MOD_RES (1)..(3)..(34)..(35): Xaa is C or S

SEQ ID NO: 29813 - protein, 32 aa, Artificial Sequence
  Cyclic GFR-binding peptide
  MOD_RES (29)..(29): Xaa is C or S
VMNEYKFKIVNSSDDLYLVSIPELKTPAXTPK

SEQ ID NO: 29814 - protein, 33 aa, Artificial Sequence
  Cyclic GFR-binding peptide
  MOD_RES (1)..(32)..(33): Xaa is C or S
XSKVIMEYQKYIKPTKGIIYLISIPSLDQSVXX

SEQ ID NO: 29815 - protein, 26 aa, Artificial Sequence
  Cyclic GFR-binding peptide
MDYHYKLVVKENEDKYLMSIPSLETP

SEQ ID NO: 29816 - protein, 23 aa, Artificial Sequence
  Cyclic GFR-binding peptide
RYKKLVKPTRGVFYLISIANLDQ

SEQ ID NO: 29817 - protein, 24 aa, Artificial Sequence
  Cyclic GFR-binding peptide
VVMDEYKFKVVKENEDLYLMSIPE

SEQ ID NO: 29818 - protein, 34 aa, Artificial Sequence; identical to SEQ ID NO: 1715
  Cyclic GFR-binding peptide
  MOD_RES (30)..(31): Xaa is C or S

SEQ ID NO: 29819 - protein, 24 aa, Artificial Sequence
  Cyclic GFR-binding peptide
EYKFKVKPTRGVLYLISIPELDQP

SEQ ID NO: 29820 - protein, 28 aa, Artificial Sequence
  Cyclic GFR-binding peptide
  MOD_RES (1)..(1): Xaa is C or S
XSRVIMRYKKLVKPKRGVFYLISIANLA

SEQ ID NO: 29821 - protein, 36 aa, Artificial Sequence; identical to SEQ ID NO: 1717
  Cyclic GFR-binding peptide
  MOD_RES (1)..(32)..(33): Xaa is C or S

SEQ ID NO: 29822 - protein, 26 aa, Artificial Sequence
  Cyclic GFR-binding peptide
AKVVMNEYQKYIVNNSSDIYLVSIPS

SEQ ID NO: 29823 - protein, 29 aa, Artificial Sequence
  Cyclic GFR-binding peptide
  MOD_RES (26)..(27): Xaa is C or S
RYKKLVVNNAADFYLISIANLRAPVXXSA

SEQ ID NO: 29824 - protein, 30 aa, Artificial Sequence
  Cyclic GFR-binding peptide
  MOD_RES (26)..(27): Xaa is C or S
EYKFKTPVGMDDLYLVSIPELKTPVXXAKG

SEQ ID NO: 29825 - protein, 29 aa, Artificial Sequence
  Cyclic GFR-binding peptide
AKVVMNYHYKLIVNNSSDKYLVSIPSLKT

SEQ ID NO: 29826 - protein, 27 aa, Artificial Sequence
  Cyclic GFR-binding peptide
SKVIMRYKKLIKPTKGIFYLISIANLD

SEQ ID NO: 29827 - protein, 32 aa, Artificial Sequence
  Cyclic GFR-binding peptide
  MOD_RES (2)..(2): Xaa is C or S
KXSRVIMEYQKYVKPKRGVIYLISIPSLAQPV

SEQ ID NO: 29828 - protein, 32 aa, Artificial Sequence
  Cyclic GFR-binding peptide
  MOD_RES (28)..(29): Xaa is C or S
MNEYQKYIVNSSDDIYLVSIPSLKTPAXXPKP

SEQ ID NO: 29829 - protein, 26 aa, Artificial Sequence
  Cyclic GFR-binding peptide
VVMNYHYKLIVNSSDDKYLVSIPSLK

SEQ ID NO: 29830 - protein, 30 aa, Artificial Sequence; identical to SEQ ID NO: 1724
  Cyclic GFR-binding peptide
  MOD_RES (1)..(3): Xaa is C or S

SEQ ID NO: 29831 - protein, 31 aa, Artificial Sequence
  Cyclic GFR-binding peptide
  MOD_RES (31)..(31): Xaa is C or S
RVVMNEYQKYIVNSSDDIYLVSIPSLQTPAX

SEQ ID NO: 29832 - protein, 35 aa, Artificial Sequence
  Cyclic GFR-binding peptide
  MOD_RES (29)..(29): Xaa is C or S
VMNEYQKYIVNSSDDIYLVSIPSLKTPAXTPKTVH

SEQ ID NO: 29833 - protein, 27 aa, Artificial Sequence
  Cyclic GFR-binding peptide
VVMRYKKLVKPTRGVFYLISIANLDQP

SEQ ID NO: 29834 - protein, 40 aa, Artificial Sequence
  Cyclic GFR-binding peptide
  MOD_RES (2)..(34)..(35): Xaa is C or S
GXARVVMNEYQKYIVNSSDDIYLVSIPSLQTPAXXPKPVT

SEQ ID NO: 29835 - protein, 25 aa, Artificial Sequence
  Cyclic GFR-binding peptide
EVVMDYHYKLVVNNAADKYLISIPS

SEQ ID NO: 29836 - protein, 36 aa, Artificial Sequence
  Cyclic GFR-binding peptide
  MOD_RES (33)..(34): Xaa is C or S
EAVSMGEEYKFKTPVGMDDLYLVSIPELKTPVXXAK

SEQ ID NO: 29837 - protein, 27 aa, Artificial Sequence
  Cyclic GFR-binding peptide
MNYHYKLIVNNSSDKYLVSIPSLKTPA

SEQ ID NO: 29838 - protein, 23 aa, Artificial Sequence
  Cyclic GFR-binding peptide
GRYKKLYTVVGKDFYLISIANLK

SEQ ID NO: 29839 - protein, 22 aa, Artificial Sequence
  Cyclic GFR-binding peptide
YHYKLIVNSSDDKYLVSIPSLK

SEQ ID NO: 29840 - protein, 33 aa, Artificial Sequence; identical to SEQ ID NO: 1732
  Cyclic GFR-binding peptide
  MOD_RES (1)..(32)..(33): Xaa is C or S

SEQ ID NO: 29841 - protein, 37 aa, Artificial Sequence
  Cyclic GFR-binding peptide
  MOD_RES (2)..(34)..(35): Xaa is C or S
GXESVAMGRYKKLYTVVGKDFYLISIANLKTPVXXAK

SEQ ID NO: 29842 - protein, 31 aa, Artificial Sequence
  Cyclic GFR-binding peptide
  MOD_RES (1)..(1): Xaa is C or S
XEAVSMGEEYQKYTPVGMDDIYLVSIPSLKT

SEQ ID NO: 29843 - protein, 26 aa, Artificial Sequence
  Cyclic GFR-binding peptide
  MOD_RES (26)..(26): Xaa is C or S
EYKFKIVNSSDDLYLVSIPELKTPAX

SEQ ID NO: 29844 - protein, 25 aa, Artificial Sequence
  Cyclic GFR-binding peptide
YHYKLIKPTKGIKYLISIPSLDQSV

SEQ ID NO: 29845 - protein, 41 aa, Artificial Sequence
  Cyclic GFR-binding peptide
  MOD_RES (2)..(4)..(36)..(37): Xaa is C or S
HXGXARVVMNEYKFKIVNSSDDLYLVSIPELQTPAXXPKPV

SEQ ID NO: 29846 - protein, 39 aa, Artificial Sequence; identical to SEQ ID NO: 1740
  Cyclic GFR-binding peptide
  MOD_RES (2)..(34)..(35): Xaa is C or S

SEQ ID NO: 29847 - protein, 37 aa, Artificial Sequence; identical to SEQ ID NO: 1741
  Cyclic GFR-binding peptide
  MOD_RES (2)..(34)..(35): Xaa is C or S

SEQ ID NO: 29848 - protein, 31 aa, Artificial Sequence
  Cyclic GFR-binding peptide
  MOD_RES (29)..(30): Xaa is C or S
MGEEYQKYTPVGMDDIYLVSIPSLKTPVXXA

SEQ ID NO: 29849 - protein, 28 aa, Artificial Sequence
  Cyclic GFR-binding peptide
  MOD_RES (28)..(28): Xaa is C or S
IMYHYKLVKPKRGVKYLISIPSLAQPVX

SEQ ID NO: 29850 - protein, 32 aa, Artificial Sequence
  Cyclic GFR-binding peptide
  MOD_RES (2)..(4): Xaa is C or S
HXGXAKVVMNEYQKYIVNNSSDIYLVSIPSLK

SEQ ID NO: 29851 - protein, 27 aa, Artificial Sequence
  Cyclic GFR-binding peptide
VMNEYKFKIVNSSDDLYLVSIPELKTP

SEQ ID NO: 29852 - protein, 31 aa, Artificial Sequence
  Cyclic GFR-binding peptide
  MOD_RES (30)..(31): Xaa is C or S
VVMDEYQKYVVKENEDIYLMSIPSLETPVXX

SEQ ID NO: 29853 - protein, 26 aa, Artificial Sequence
  Cyclic GFR-binding peptide
EVVMDRYKKLVVKENEDFYLMSIANL

SEQ ID NO: 29854 - protein, 21 aa, Artificial Sequence
  Cyclic GFR-binding peptide
NEYQKYIVNSSDDIYLVSIPS

SEQ ID NO: 29855 - protein, 30 aa, Artificial Sequence
  Cyclic GFR-binding peptide
  MOD_RES (29)..(30): Xaa is C or S
MGEEYQKYTPVGMDDIYLVSIPSLKTPVXX

SEQ ID NO: 29856 - protein, 36 aa, Artificial Sequence; identical to SEQ ID NO: 1747
  Cyclic GFR-binding peptide
  MOD_RES (2)..(4)..(36): Xaa is C or S

SEQ ID NO: 29857 - protein, 42 aa, Artificial Sequence
  Cyclic GFR-binding peptide
  MOD_RES (2)..(4)..(36)..(37): Xaa is C or S
HXGXARVVMNEYQKYIVNSSDDIYLVSIPSLQTPAXXPKPVT

SEQ ID NO: 29858 - protein, 22 aa, Artificial Sequence
  Cyclic GFR-binding peptide
EYKFKTPVGMDDLYLVSIPELK

SEQ ID NO: 29859 - protein, 26 aa, Artificial Sequence
  Cyclic GFR-binding peptide
  MOD_RES (26)..(26): Xaa is C or S
RYKKLYTVVGKDFYLISIANLKTPVX

SEQ ID NO: 29860 - protein, 27 aa, Artificial Sequence
  Cyclic GFR-binding peptide
VVMNYHYKLIVNSSDDKYLVSIPSLQT

SEQ ID NO: 29861 - protein, 32 aa, Artificial Sequence; identical to SEQ ID NO: 1750
  Cyclic GFR-binding peptide
  MOD_RES (29)..(30): Xaa is C or S

SEQ ID NO: 29862 - protein, 24 aa, Artificial Sequence
  Cyclic GFR-binding peptide
DYHYKLVVKENEDKYLMSIPSLET

SEQ ID NO: 29863 - protein, 26 aa, Artificial Sequence
  Cyclic GFR-binding peptide
RVIMYHYKLVKPKRGVKYLISIPSLA

SEQ ID NO: 29864 - protein, 31 aa, Artificial Sequence
  Cyclic GFR-binding peptide
  MOD_RES (29)..(30): Xaa is C or S
AMGEYQKYYTVVGKDIYLISIPSLKTPVXXA

SEQ ID NO: 29865 - protein, 28 aa, Artificial Sequence
  Cyclic GFR-binding peptide
GEVVMDYHYKLVVKENEDKYLMSIPSLE

SEQ ID NO: 29866 - protein, 33 aa, Artificial Sequence; identical to SEQ ID NO: 1761
  Cyclic GFR-binding peptide
  MOD_RES (2)..(2): Xaa is C or S

SEQ ID NO: 29867 - protein, 40 aa, Artificial Sequence
  Cyclic GFR-binding peptide
  MOD_RES (1)..(3)..(35)..(36): Xaa is C or S
XGXARVVMNEYQKYIVNSSDDIYLVSIPSLQTPAXXPKPV

SEQ ID NO: 29868 - protein, 24 aa, Artificial Sequence
  Cyclic GFR-binding peptide
KVIMYHYKLIKPTKGIKYLISIPS

SEQ ID NO: 29869 - protein, 29 aa, Artificial Sequence
  Cyclic GFR-binding peptide
  MOD_RES (2)..(2): Xaa is C or S
GXSRVVMNEYQKYIVNSSDDIYLVSIPSL

SEQ ID NO: 29870 - protein, 27 aa, Artificial Sequence
  Cyclic GFR-binding peptide
  MOD_RES (1)..(1): Xaa is C or S
XAKVVMNEYKFKIVNNSSDLYLVSIPE

SEQ ID NO: 29871 - protein, 31 aa, Artificial Sequence
  Cyclic GFR-binding peptide
  MOD_RES (1)..(3): Xaa is C or S
XGXARVVMNEYQKYIVNSSDDIYLVSIPSLQ

SEQ ID NO: 29872 - protein, 27 aa, Artificial Sequence
  Cyclic GFR-binding peptide
  MOD_RES (26)..(27): Xaa is C or S
RYKKLIKPTKGIFYLISIANLDQSVXX

SEQ ID NO: 29873 - protein, 23 aa, Artificial Sequence
  Cyclic GFR-binding peptide
MGYHYKLYTVVGKDKYLISIPSL

SEQ ID NO: 29874 - protein, 30 aa, Artificial Sequence
  Cyclic GFR-binding peptide
  MOD_RES (27)..(28): Xaa is C or S
MEYKFKVKPTRGVLYLISIPELDQPVXXPS

SEQ ID NO: 29875 - protein, 31 aa, Artificial Sequence; identical to SEQ ID NO: 1766
  Cyclic GFR-binding peptide
  MOD_RES (27)..(28): Xaa is C or S

SEQ ID NO: 29876 - protein, 37 aa, Artificial Sequence
  Cyclic GFR-binding peptide
  MOD_RES (1)..(3)..(35)..(36): Xaa is C or S
XGXESVAMGEYQKYYTVVGKDIYLISIPSLKTPVXXA

SEQ ID NO: 29877 - protein, 35 aa, Artificial Sequence; identical to SEQ ID NO: 1767
  Cyclic GFR-binding peptide
  MOD_RES (1)..(32)..(33): Xaa is C or S

SEQ ID NO: 29878 - protein, 29 aa, Artificial Sequence
  Cyclic GFR-binding peptide
  MOD_RES (2)..(2): Xaa is C or S
GXAKVVMNRYKKLIVNNSSDFYLVSIANL

SEQ ID NO: 29879 - protein, 27 aa, Artificial Sequence
  Cyclic GFR-binding peptide
SKVVMEYKFKVKPTRGVLYLISIPELD

SEQ ID NO: 29880 - protein, 31 aa, Artificial Sequence
  Cyclic GFR-binding peptide
  MOD_RES (2)..(4): Xaa is C or S
RXGXESVAMGRYKKLYTVVGKDFYLISIANL

SEQ ID NO: 29881 - protein, 36 aa, Artificial Sequence
  Cyclic GFR-binding peptide
  MOD_RES (32)..(33): Xaa is C or S
AKVVMNEYKFKIVNNSSDLYLVSIPELKTPAXXAKP

SEQ ID NO: 29882 - protein, 32 aa, Artificial Sequence
  Cyclic GFR-binding peptide
  MOD_RES (31)..(32): Xaa is C or S
KVVMNEYKFKIVNNSSDLYLVSIPELKTPAXX

SEQ ID NO: 29883 - protein, 39 aa, Artificial Sequence
  Cyclic GFR-binding peptide
  MOD_RES (1)..(33): Xaa is C or S
XSRVVMNEYQKYIVNSSDDIYLVSIPSLKTPAXTPKTVH

SEQ ID NO: 29884 - protein, 31 aa, Artificial Sequence
  Cyclic GFR-binding peptide
  MOD_RES (26)..(27): Xaa is C or S
EYKFKTPVGMDDLYLVSIPELKTPVXXAKGV

SEQ ID NO: 29885 - protein, 26 aa, Artificial Sequence
  Cyclic GFR-binding peptide
MDRYKKLVVNNAADFYLISIANLRAP

SEQ ID NO: 29886 - protein, 24 aa, Artificial Sequence
  Cyclic GFR-binding peptide
VMNRYKKLIVNSSDDFYLVSIANL

SEQ ID NO: 29887 - protein, 36 aa, Artificial Sequence
  Cyclic GFR-binding peptide
  MOD_RES (31)..(32): Xaa is C or S
SKVVMEYKFKVKPTRGVLYLISIPELDQPVXXPSAS

SEQ ID NO: 29888 - protein, 27 aa, Artificial Sequence
  Cyclic GFR-binding peptide
KVIMEYKFKIKPTKGILYLISIPELDQ

SEQ ID NO: 29889 - protein, 35 aa, Artificial Sequence
  Cyclic GFR-binding peptide
  MOD_RES (1)..(3)..(34)..(35): Xaa is C or S
XKXSRVIMEYKFKVKPKRGVLYLISIPELAQPVXX

SEQ ID NO: 29890 - protein, 29 aa, Artificial Sequence
  Cyclic GFR-binding peptide
SMGERYKKLTPVGMDDFYLVSIANLKTPV

SEQ ID NO: 29891 - protein, 28 aa, Artificial Sequence
  Cyclic GFR-binding peptide
VMNYHYKLIVNNSSDKYLVSIPSLKTPA

SEQ ID NO: 29892 - protein, 37 aa, Artificial Sequence
  Cyclic GFR-binding peptide
  MOD_RES (31)..(32): Xaa is C or S
SRVIMEYKFKVKPKRGVLYLISIPELAQPVXXPAASA

SEQ ID NO: 29893 - protein, 28 aa, Artificial Sequence
  Cyclic GFR-binding peptide
  MOD_RES (27)..(28): Xaa is C or S
DRYKKLVVKENEDFYLMSIANLETPVXX

SEQ ID NO: 29894 - protein, 27 aa, Artificial Sequence
  Cyclic GFR-binding peptide
EVVMDEYQKYVVKENEDIYLMSIPSLE

SEQ ID NO: 29895 - protein, 34 aa, Artificial Sequence; identical to SEQ ID NO: 1782
  Cyclic GFR-binding peptide
  MOD_RES (30)..(31): Xaa is C or S

SEQ ID NO: 29896 - protein, 31 aa, Artificial Sequence; identical to SEQ ID NO: 1785
  Cyclic GFR-binding peptide
  MOD_RES (28)..(29): Xaa is C or S

SEQ ID NO: 29897 - protein, 33 aa, Artificial Sequence; identical to SEQ ID NO: 1786
  Cyclic GFR-binding peptide
  MOD_RES (27)..(28): Xaa is C or S

SEQ ID NO: 29898 - protein, 24 aa, Artificial Sequence
  Cyclic GFR-binding peptide
VMDRYKKLVVKENEDFYLMSIANL

SEQ ID NO: 29899 - protein, 23 aa, Artificial Sequence
  Cyclic GFR-binding peptide
RYKKLVVKENEDFYLMSIANLET

SEQ ID NO: 29900 - protein, 31 aa, Artificial Sequence
  Cyclic GFR-binding peptide
  MOD_RES (27)..(28): Xaa is C or S
GEYQKYYTVVGKDIYLISIPSLKTPVXXAKS

SEQ ID NO: 29901 - protein, 25 aa, Artificial Sequence
  Cyclic GFR-binding peptide
MNRYKKLIVNNSSDFYLVSIANLKT

SEQ ID NO: 29902 - protein, 24 aa, Artificial Sequence
  Cyclic GFR-binding peptide
AMGYHYKLYTVVGKDKYLISIPSL

SEQ ID NO: 29903 - protein, 39 aa, Artificial Sequence
  Cyclic GFR-binding peptide
  MOD_RES (2)..(34): Xaa is C or S
GXSRVVMNEYKFKIVNSSDDLYLVSIPELKTPAXTPKTV

SEQ ID NO: 29904 - protein, 28 aa, Artificial Sequence
  Cyclic GFR-binding peptide
VVMNEYQKYIVNSSDDIYLVSIPSLQTP

SEQ ID NO: 29905 - protein, 24 aa, Artificial Sequence
  Cyclic GFR-binding peptide
VVMDRYKKLVVKENEDFYLMSIAN

SEQ ID NO: 29906 - protein, 34 aa, Artificial Sequence
  Cyclic GFR-binding peptide
  MOD_RES (29)..(30): Xaa is C or S
AMGRYKKLYTVVGKDFYLISIANLKTPVXXAKSA

SEQ ID NO: 29907 - protein, 33 aa, Artificial Sequence
  Cyclic GFR-binding peptide
  MOD_RES (1)..(3): Xaa is C or S
XKXSRVIMEYQKYVKPKRGVIYLISIPSLAQPV

SEQ ID NO: 29908 - protein, 36 aa, Artificial Sequence
  Cyclic GFR-binding peptide
  MOD_RES (2)..(4)..(36): Xaa is C or S
HXGXARVVMNEYQKYIVNSSDDIYLVSIPSLQTPAX

SEQ ID NO: 29909 - protein, 32 aa, Artificial Sequence
  Cyclic GFR-binding peptide
  MOD_RES (27)..(28): Xaa is C or S
DYHYKLVVNNAADKYLISIPSLRAPVXXSAPA

SEQ ID NO: 29910 - protein, 26 aa, Artificial Sequence
  Cyclic GFR-binding peptide
VMEYHYKLVVKDYEDKYLMSIPSLET

SEQ ID NO: 29911 - protein, 30 aa, Artificial Sequence; identical to SEQ ID NO: 1804
  Cyclic GFR-binding peptide
  MOD_RES (29)..(30): Xaa is C or S

SEQ ID NO: 29912 - protein, 29 aa, Artificial Sequence
  Cyclic GFR-binding peptide
VVMDYHYKLVVKENEDKYLMSIPSLETPV

SEQ ID NO: 29913 - protein, 41 aa, Artificial Sequence; identical to SEQ ID NO: 1806
  Cyclic GFR-binding peptide
  MOD_RES (2)..(4)..(36)..(37): Xaa is C or S

SEQ ID NO: 29914 - protein, 37 aa, Artificial Sequence
  Cyclic GFR-binding peptide
  MOD_RES (1)..(3)..(35)..(36): Xaa is C or S
XGXAEVVMDYHYKLVVNNAADKYLISIPSLRAPVXXS

SEQ ID NO: 29915 - protein, 32 aa, Artificial Sequence
  Cyclic GFR-binding peptide
  MOD_RES (32)..(32): Xaa is C or S
GEVVMDEYQKYVVKENEDIYLMSIPSLETPVX

SEQ ID NO: 29916 - protein, 42 aa, Artificial Sequence
  Cyclic GFR-binding peptide
  MOD_RES (2)..(4)..(37)..(38): Xaa is C or S
RXGXEAVSMGEEYKFKTPVGMDDLYLVSIPELKTPVXXAKGV

SEQ ID NO: 29917 - protein, 35 aa, Artificial Sequence
  Cyclic GFR-binding peptide
  MOD_RES (2)..(4): Xaa is C or S
RXGXESVAMGYHYKLYTVVGKDKYLISIPSLKTPV

SEQ ID NO: 29918 - protein, 28 aa, Artificial Sequence
  Cyclic GFR-binding peptide
  MOD_RES (1)..(1): Xaa is C or S
XSKVVMEYKFKVKPTRGVLYLISIPELD

SEQ ID NO: 29919 - protein, 38 aa, Artificial Sequence
  Cyclic GFR-binding peptide
  MOD_RES (2)..(4)..(36)..(37): Xaa is C or S
RXGXGEVVMDEYKFKVVKENEDLYLMSIPELETPVXXA

SEQ ID NO: 29920 - protein, 35 aa, Artificial Sequence; identical to SEQ ID NO: 1812
  Cyclic GFR-binding peptide
  MOD_RES (32)..(33): Xaa is C or S

SEQ ID NO: 29921 - protein, 27 aa, Artificial Sequence
  Cyclic GFR-binding peptide
  MOD_RES (26)..(27): Xaa is C or S
EYQKYIVNSSDDIYLVSIPSLKTPAXX

SEQ ID NO: 29922 - protein, 32 aa, Artificial Sequence; identical to SEQ ID NO: 1815
  Cyclic GFR-binding peptide
  MOD_RES (2)..(2): Xaa is C or S

SEQ ID NO: 29923 - protein, 30 aa, Artificial Sequence
  Cyclic GFR-binding peptide
  MOD_RES (30)..(30): Xaa is C or S
SMGEEYQKYTPVGMDDIYLVSIPSLKTPVX

SEQ ID NO: 29924 - protein, 32 aa, Artificial Sequence; identical to SEQ ID NO: 1817
  Cyclic GFR-binding peptide
  MOD_RES (26)..(27): Xaa is C or S

SEQ ID NO: 29925 - protein, 35 aa, Artificial Sequence
  Cyclic GFR-binding peptide
  MOD_RES (2)..(4): Xaa is C or S
RXGXAEVVMDYHYKLVVNNAADKYLISIPSLRAPV

SEQ ID NO: 29926 - protein, 28 aa, Artificial Sequence
  Cyclic GFR-binding peptide
  MOD_RES (26)..(27): Xaa is C or S
YHYKLIVNSSDDKYLVSIPSLQTPAXXP

SEQ ID NO: 29927 - protein, 33 aa, Artificial Sequence; identical to SEQ ID NO: 1820
  Cyclic GFR-binding peptide
  MOD_RES (28)..(29): Xaa is C or S

SEQ ID NO: 29928 - protein, 34 aa, Artificial Sequence
  Cyclic GFR-binding peptide
  MOD_RES (1)..(32)..(33): Xaa is C or S
XSRVIMEYKFKVKPKRGVLYLISIPELAQPVXXP

SEQ ID NO: 29929 - protein, 38 aa, Artificial Sequence
  Cyclic GFR-binding peptide
  MOD_RES (2)..(4)..(35)..(36): Xaa is C or S
SXKXSRVIMEYQKYVKPKRGVIYLISIPSLAQPVXXPA

SEQ ID NO: 29930 - protein, 32 aa, Artificial Sequence
  Cyclic GFR-binding peptide
  MOD_RES (32)..(32): Xaa is C or S
SRVVMNEYQKYIVNSSDDIYLVSIPSLKTPAX

SEQ ID NO: 29931 - protein, 31 aa, Artificial Sequence; identical to SEQ ID NO: 1823
  Cyclic GFR-binding peptide
  MOD_RES (27)..(28): Xaa is C or S

SEQ ID NO: 29932 - protein, 28 aa, Artificial Sequence
  Cyclic GFR-binding peptide
  MOD_RES (27)..(28): Xaa is C or S
ERYKKLVVKDYEDFYLMSIANLETPVXX

SEQ ID NO: 29933 - protein, 39 aa, Artificial Sequence
  Cyclic GFR-binding peptide
  MOD_RES (33)..(34): Xaa is C or S
EAVSMGEEYKFKTPVGMDDLYLVSIPELKTPVXXAKGVK

SEQ ID NO: 29934 - protein, 33 aa, Artificial Sequence
  Cyclic GFR-binding peptide
  MOD_RES (32)..(33): Xaa is C or S
GEVVMEEYQKYVVKDYEDIYLMSIPSLETPVXX

SEQ ID NO: 29935 - protein, 26 aa, Artificial Sequence
  Cyclic GFR-binding peptide
SVAMGEYQKYYTVVGKDIYLISIPSL

SEQ ID NO: 29936 - protein, 32 aa, Artificial Sequence
  Cyclic GFR-binding peptide
  MOD_RES (2)..(4): Xaa is C or S
HXGXARVVMNEYQKYIVNSSDDIYLVSIPSLQ

SEQ ID NO: 29937 - protein, 37 aa, Artificial Sequence
  Cyclic GFR-binding peptide
  MOD_RES (1)..(33)..(34): Xaa is C or S
XESVAMGEYQKYYTVVGKDIYLISIPSLKTPVXXAKS

SEQ ID NO: 29938 - protein, 28 aa, Artificial Sequence
  Cyclic GFR-binding peptide
  MOD_RES (2)..(2): Xaa is C or S
GXAEVVMDYHYKLVVNNAADKYLISIPS

SEQ ID NO: 29939 - protein, 35 aa, Artificial Sequence
  Cyclic GFR-binding peptide
  MOD_RES (32)..(33): Xaa is C or S
AEVVMDRYKKLVVNNAADFYLISIANLRAPVXXSA

SEQ ID NO: 29940 - protein, 27 aa, Artificial Sequence
  Cyclic GFR-binding peptide
RVVMNYHYKLIVNSSDDKYLVSIPSLQ

SEQ ID NO: 29941 - protein, 37 aa, Artificial Sequence
  Cyclic GFR-binding peptide
  MOD_RES (2)..(4)..(36)..(37): Xaa is C or S
RXGXESVAMGEYQKYYTVVGKDIYLISIPSLKTPVXX

SEQ ID NO: 29942 - protein, 33 aa, Artificial Sequence; identical to SEQ ID NO: 1834
  Cyclic GFR-binding peptide
  MOD_RES (32)..(33): Xaa is C or S

SEQ ID NO: 29943 - protein, 32 aa, Artificial Sequence
  Cyclic GFR-binding peptide
  MOD_RES (30)..(31): Xaa is C or S
VVMEEYQKYVVKDYEDIYLMSIPSLETPVXXA

SEQ ID NO: 29944 - protein, 22 aa, Artificial Sequence
  Cyclic GFR-binding peptide
YHYKLVKPTRGVKYLISIPSLD

SEQ ID NO: 29945 - protein, 33 aa, Artificial Sequence
  Cyclic GFR-binding peptide
  MOD_RES (32)..(33): Xaa is C or S
GEVVMEEYKFKVVKDYEDLYLMSIPELETPVXX

SEQ ID NO: 29946 - protein, 25 aa, Artificial Sequence
  Cyclic GFR-binding peptide
EYQKYVKPTRGVIYLISIPSLDQPV

SEQ ID NO: 29947 - protein, 36 aa, Artificial Sequence
  Cyclic GFR-binding peptide
  MOD_RES (2)..(34)..(35): Xaa is C or S
GXARVVMNEYQKYIVNSSDDIYLVSIPSLQTPAXXP

SEQ ID NO: 29948 - protein, 24 aa, Artificial Sequence
  Cyclic GFR-binding peptide
MNEYKFKIVNSSDDLYLVSIPELQ

SEQ ID NO: 29949 - protein, 33 aa, Artificial Sequence
  Cyclic GFR-binding peptide
  MOD_RES (2)..(4): Xaa is C or S
RXGXESVAMGEYQKYYTVVGKDIYLISIPSLKT

SEQ ID NO: 29950 - protein, 26 aa, Artificial Sequence
  Cyclic GFR-binding peptide
VMNYHYKLIVNSSDDKYLVSIPSLQT

SEQ ID NO: 29951 - protein, 27 aa, Artificial Sequence
  Cyclic GFR-binding peptide
KVVMNRYKKLIVNNSSDFYLVSIANLK

SEQ ID NO: 29952 - protein, 35 aa, Artificial Sequence; identical to SEQ ID NO: 1842
  Cyclic GFR-binding peptide
  MOD_RES (32)..(33): Xaa is C or S

SEQ ID NO: 29953 - protein, 40 aa, Artificial Sequence; identical to SEQ ID NO: 1843
  Cyclic GFR-binding peptide
  MOD_RES (2)..(34)..(35): Xaa is C or S

SEQ ID NO: 29954 - protein, 39 aa, Artificial Sequence; identical to SEQ ID NO: 1844
  Cyclic GFR-binding peptide
  MOD_RES (2)..(33)..(34): Xaa is C or S

SEQ ID NO: 29955 - protein, 32 aa, Artificial Sequence; identical to SEQ ID NO: 1845
  Cyclic GFR-binding peptide
  MOD_RES (29)..(30): Xaa is C or S

SEQ ID NO: 29956 - protein, 30 aa, Artificial Sequence
  Cyclic GFR-binding peptide
  MOD_RES (1)..(1): Xaa is C or S
XGEVVMDEYQKYVVKENEDIYLMSIPSLET

SEQ ID NO: 29957 - protein, 32 aa, Artificial Sequence; identical to SEQ ID NO: 1846
  Cyclic GFR-binding peptide
  MOD_RES (26)..(27): Xaa is C or S

SEQ ID NO: 29958 - protein, 35 aa, Artificial Sequence; identical to SEQ ID NO: 1847
  Cyclic GFR-binding peptide
  MOD_RES (29)..(30): Xaa is C or S

SEQ ID NO: 29959 - protein, 27 aa, Artificial Sequence
  Cyclic GFR-binding peptide
  MOD_RES (27)..(27): Xaa is C or S
DEYQKYVVKENEDIYLMSIPSLETPVX

SEQ ID NO: 29960 - protein, 42 aa, Artificial Sequence
  Cyclic GFR-binding peptide
  MOD_RES (2)..(4)..(36)..(37): Xaa is C or S
HXGXARVVMNEYKFKIVNSSDDLYLVSIPELQTPAXXPKPVT

SEQ ID NO: 29961 - protein, 28 aa, Artificial Sequence
  Cyclic GFR-binding peptide
SVAMGEYQKYYTVVGKDIYLISIPSLKT

SEQ ID NO: 29962 - protein, 42 aa, Artificial Sequence
  Cyclic GFR-binding peptide
  MOD_RES (2)..(4)..(36)..(37): Xaa is C or S
HXGXAKVVMNEYKFKIVNNSSDLYLVSIPELKTPAXXAKPVA

SEQ ID NO: 29963 - protein, 36 aa, Artificial Sequence; identical to SEQ ID NO: 1848
  Cyclic GFR-binding peptide
  MOD_RES (30)..(31): Xaa is C or S

SEQ ID NO: 29964 - protein, 36 aa, Artificial Sequence; identical to SEQ ID NO: 1849
  Cyclic GFR-binding peptide
  MOD_RES (2)..(34)..(35): Xaa is C or S

SEQ ID NO: 29965 - protein, 28 aa, Artificial Sequence
  Cyclic GFR-binding peptide
VVMDEYQKYVVKENEDIYLMSIPSLETP

SEQ ID NO: 29966 - protein, 38 aa, Artificial Sequence
  Cyclic GFR-binding peptide
  MOD_RES (2)..(35)..(36): Xaa is C or S
GXEAVSMGEEYQKYTPVGMDDIYLVSIPSLKTPVXXAK

SEQ ID NO: 29967 - protein, 39 aa, Artificial Sequence; identical to SEQ ID NO: 1851
  Cyclic GFR-binding peptide
  MOD_RES (1)..(33)..(34): Xaa is C or S

SEQ ID NO: 29968 - protein, 31 aa, Artificial Sequence
  Cyclic GFR-binding peptide
  MOD_RES (29)..(29): Xaa is C or S
VMNEYQKYIVNSSDDIYLVSIPSLKTPAXTP

SEQ ID NO: 29969 - protein, 31 aa, Artificial Sequence; identical to SEQ ID NO: 1852
  Cyclic GFR-binding peptide
  MOD_RES (31)..(31): Xaa is C or S

SEQ ID NO: 29970 - protein, 36 aa, Artificial Sequence
  Cyclic GFR-binding peptide
  MOD_RES (30)..(31): Xaa is C or S
VVMDEYKFKVVKENEDLYLMSIPELETPVXXAKPIK

SEQ ID NO: 29971 - protein, 29 aa, Artificial Sequence
  Cyclic GFR-binding peptide
  MOD_RES (2)..(2): Xaa is C or S
GXAKVVMNYHYKLIVNNSSDKYLVSIPSL

SEQ ID NO: 29972 - protein, 26 aa, Artificial Sequence
  Cyclic GFR-binding peptide
VVMERYKKLVVKDYEDFYLMSIANLE

SEQ ID NO: 29973 - protein, 31 aa, Artificial Sequence
  Cyclic GFR-binding peptide
  MOD_RES (27)..(28): Xaa is C or S
GRYKKLYTVVGKDFYLISIANLKTPVXXAKS

SEQ ID NO: 29974 - protein, 27 aa, Artificial Sequence
  Cyclic GFR-binding peptide
IMEYQKYIKPTKGIIYLISIPSLDQSV

SEQ ID NO: 29975 - protein, 28 aa, Artificial Sequence
  Cyclic GFR-binding peptide
  MOD_RES (27)..(28): Xaa is C or S
MEYQKYVKPTRGVIYLISIPSLDQPVXX

SEQ ID NO: 29976 - protein, 35 aa, Artificial Sequence; identical to SEQ ID NO: 1861
  Cyclic GFR-binding peptide
  MOD_RES (30)..(31): Xaa is C or S

SEQ ID NO: 29977 - protein, 29 aa, Artificial Sequence
  Cyclic GFR-binding peptide
  MOD_RES (28)..(29): Xaa is C or S
IMRYKKLIKPTKGIFYLISIANLDQSVXX

SEQ ID NO: 29978 - protein, 31 aa, Artificial Sequence
  Cyclic GFR-binding peptide
  MOD_RES (30)..(31): Xaa is C or S
VVMNEYKFKIVNSSDDLYLVSIPELQTPAXX

SEQ ID NO: 29979 - protein, 35 aa, Artificial Sequence
  Cyclic GFR-binding peptide
  MOD_RES (2)..(4): Xaa is C or S
HXGXARVVMNEYQKYIVNSSDDIYLVSIPSLQTPA

SEQ ID NO: 29980 - protein, 26 aa, Artificial Sequence
  Cyclic GFR-binding peptide
IMYHYKLIKPTKGIKYLISIPSLDQS

SEQ ID NO: 29981 - protein, 35 aa, Artificial Sequence; identical to SEQ ID NO: 1869
  Cyclic GFR-binding peptide
  MOD_RES (31)..(32): Xaa is C or S

SEQ ID NO: 29982 - protein, 30 aa, Artificial Sequence; identical to SEQ ID NO: 1870
  Cyclic GFR-binding peptide
  MOD_RES (26)..(27): Xaa is C or S

SEQ ID NO: 29983 - protein, 34 aa, Artificial Sequence
  Cyclic GFR-binding peptide
  MOD_RES (1)..(33)..(34): Xaa is C or S
XSRVVMNEYKFKIVNSSDDLYLVSIPELKTPAXX

SEQ ID NO: 29984 - protein, 40 aa, Artificial Sequence
  Cyclic GFR-binding peptide
  MOD_RES (2)..(4)..(36)..(37): Xaa is C or S
RXGXAEVVMDEYKFKVVNNAADLYLISIPELRAPVXXSAP

SEQ ID NO: 29985 - protein, 34 aa, Artificial Sequence; identical to SEQ ID NO: 1874
  Cyclic GFR-binding peptide
  MOD_RES (1)..(32)..(33): Xaa is C or S

SEQ ID NO: 29986 - protein, 28 aa, Artificial Sequence
  Cyclic GFR-binding peptide
AMGRYKKLYTVVGKDFYLISIANLKTPV

SEQ ID NO: 29987 - protein, 38 aa, Artificial Sequence; identical to SEQ ID NO: 1878
  Cyclic GFR-binding peptide
  MOD_RES (1)..(32)..(33): Xaa is C or S

SEQ ID NO: 29988 - protein, 32 aa, Artificial Sequence
  Cyclic GFR-binding peptide
  MOD_RES (2)..(4): Xaa is C or S
HXGXARVVMNEYKFKIVNSSDDLYLVSIPELQ

SEQ ID NO: 29989 - protein, 32 aa, Artificial Sequence
  Cyclic GFR-binding peptide
  MOD_RES (29)..(30): Xaa is C or S
VMNEYKFKIVNSSDDLYLVSIPELKTPAXXPK

SEQ ID NO: 29990 - protein, 31 aa, Artificial Sequence
  Cyclic GFR-binding peptide
  MOD_RES (1)..(3): Xaa is C or S
XGXAEVVMDEYKFKVVNNAADLYLISIPELR

SEQ ID NO: 29991 - protein, 29 aa, Artificial Sequence
  Cyclic GFR-binding peptide
  MOD_RES (26)..(27): Xaa is C or S
EYQKYIKPTKGIIYLISIPSLDQSVXXPS

SEQ ID NO: 29992 - protein, 31 aa, Artificial Sequence
  Cyclic GFR-binding peptide
  MOD_RES (28)..(29): Xaa is C or S
MGEYQKYYTVVGKDIYLISIPSLKTPVXXAK

SEQ ID NO: 29993 - protein, 27 aa, Artificial Sequence
  Cyclic GFR-binding peptide
  MOD_RES (1)..(1): Xaa is C or S
XSKVIMEYQKYIKPTKGIIYLISIPSL

SEQ ID NO: 29994 - protein, 22 aa, Artificial Sequence
  Cyclic GFR-binding peptide
EYQKYIVNNSSDIYLVSIPSLK

SEQ ID NO: 29995 - protein, 40 aa, Artificial Sequence
  Cyclic GFR-binding peptide
  MOD_RES (2)..(34)..(35): Xaa is C or S
GXGEVVMEEYQKYVVKDYEDIYLMSIPSLETPVXXAKPIS

SEQ ID NO: 29996 - protein, 21 aa, Artificial Sequence
  Cyclic GFR-binding peptide
DEYQKYVVKENEDIYLMSIPS

SEQ ID NO: 29997 - protein, 33 aa, Artificial Sequence
  Cyclic GFR-binding peptide
  MOD_RES (27)..(28): Xaa is C or S
EEYQKYTPVGMDDIYLVSIPSLKTPVXXAKGVK

SEQ ID NO: 29998 - protein, 39 aa, Artificial Sequence; identical to SEQ ID NO: 1881
  Cyclic GFR-binding peptide
  MOD_RES (2)..(4)..(36): Xaa is C or S

SEQ ID NO: 29999 - protein, 26 aa, Artificial Sequence
  Cyclic GFR-binding peptide
GEEYKFKTPVGMDDLYLVSIPELKTP

SEQ ID NO: 30000 - protein, 31 aa, Artificial Sequence
  Cyclic GFR-binding peptide
  MOD_RES (1)..(1): Xaa is C or S
XESVAMGRYKKLYTVVGKDFYLISIANLKTP

SEQ ID NO: 30001 - protein, 32 aa, Artificial Sequence; identical to SEQ ID NO: 1882
  Cyclic GFR-binding peptide
  MOD_RES (27)..(28): Xaa is C or S

SEQ ID NO: 30002 - protein, 38 aa, Artificial Sequence
  Cyclic GFR-binding peptide
  MOD_RES (2)..(4)..(36)..(37): Xaa is C or S
RXGXGEVVMDEYQKYVVKENEDIYLMSIPSLETPVXXA

SEQ ID NO: 30003 - protein, 40 aa, Artificial Sequence
  Cyclic GFR-binding peptide
  MOD_RES (1)..(34)..(35): Xaa is C or S
XEAVSMGEEYKFKTPVGMDDLYLVSIPELKTPVXXAKGVK

SEQ ID NO: 30004 - protein, 37 aa, Artificial Sequence; identical to SEQ ID NO: 1884
  Cyclic GFR-binding peptide
  MOD_RES (31)..(31): Xaa is C or S

SEQ ID NO: 30005 - protein, 39 aa, Artificial Sequence
  Cyclic GFR-binding peptide
  MOD_RES (2)..(4)..(36)..(37): Xaa is C or S
RXGXESVAMGYHYKLYTVVGKDKYLISIPSLKTPVXXAK

SEQ ID NO: 30006 - protein, 29 aa, Artificial Sequence
  Cyclic GFR-binding peptide
EVVMERYKKLVVKDYEDFYLMSIANLETP

SEQ ID NO: 30007 - protein, 30 aa, Artificial Sequence
  Cyclic GFR-binding peptide
AKVVMNEYKFKIVNNSSDLYLVSIPELKTP

SEQ ID NO: 30008 - protein, 32 aa, Artificial Sequence
  Cyclic GFR-binding peptide
  MOD_RES (28)..(29): Xaa is C or S
IMEYQKYVKPKRGVIYLISIPSLAQPVXXPAA

SEQ ID NO: 30009 - protein, 28 aa, Artificial Sequence
  Cyclic GFR-binding peptide
RVIMYHYKLVKPKRGVKYLISIPSLAQP

SEQ ID NO: 30010 - protein, 32 aa, Artificial Sequence
  Cyclic GFR-binding peptide
  MOD_RES (26)..(27): Xaa is C or S
EYKFKVVKDYEDLYLMSIPELETPVXXAKPIS

SEQ ID NO: 30011 - protein, 37 aa, Artificial Sequence; identical to SEQ ID NO: 1889
  Cyclic GFR-binding peptide
  MOD_RES (1)..(3)..(35)..(36): Xaa is C or S

SEQ ID NO: 30012 - protein, 32 aa, Artificial Sequence
  Cyclic GFR-binding peptide
  MOD_RES (32)..(32): Xaa is C or S
SRVVMNEYKFKIVNSSDDLYLVSIPELKTPAX

SEQ ID NO: 30013 - protein, 31 aa, Artificial Sequence
  Cyclic GFR-binding peptide
  MOD_RES (2)..(2): Xaa is C or S
KXSRVIMEYKFKVKPKRGVLYLISIPELAQP

SEQ ID NO: 30014 - protein, 26 aa, Artificial Sequence
  Cyclic GFR-binding peptide
IMEYKFKVKPKRGVLYLISIPELAQP

SEQ ID NO: 30015 - protein, 22 aa, Artificial Sequence
  Cyclic GFR-binding peptide
NYHYKLIVNSSDDKYLVSIPSL

SEQ ID NO: 30016 - protein, 37 aa, Artificial Sequence; identical to SEQ ID NO: 1891
  Cyclic GFR-binding peptide
  MOD_RES (31)..(32): Xaa is C or S

SEQ ID NO: 30017 - protein, 38 aa, Artificial Sequence
  Cyclic GFR-binding peptide
  MOD_RES (32)..(33): Xaa is C or S
AKVVMNEYQKYIVNNSSDIYLVSIPSLKTPAXXAKPVA

SEQ ID NO: 30018 - protein, 33 aa, Artificial Sequence
  Cyclic GFR-binding peptide
  MOD_RES (2)..(4): Xaa is C or S
RXGXGEVVMDEYQKYVVKENEDIYLMSIPSLET

SEQ ID NO: 30019 - protein, 34 aa, Artificial Sequence
  Cyclic GFR-binding peptide
  MOD_RES (29)..(30): Xaa is C or S
MGEEYQKYTPVGMDDIYLVSIPSLKTPVXXAKGV

SEQ ID NO: 30020 - protein, 28 aa, Artificial Sequence
  Cyclic GFR-binding peptide
  MOD_RES (1)..(1): Xaa is C or S
XEAVSMGEEYKFKTPVGMDDLYLVSIPE

SEQ ID NO: 30021 - protein, 29 aa, Artificial Sequence
  Cyclic GFR-binding peptide
  MOD_RES (2)..(2): Xaa is C or S
KXSKVVMRYKKLVKPTRGVFYLISIANLD

SEQ ID NO: 30022 - protein, 36 aa, Artificial Sequence
  Cyclic GFR-binding peptide
  MOD_RES (2)..(34)..(35): Xaa is C or S
GXGEVVMEEYKFKVVKDYEDLYLMSIPELETPVXXA

SEQ ID NO: 30023 - protein, 27 aa, Artificial Sequence
  Cyclic GFR-binding peptide
  MOD_RES (27)..(27): Xaa is C or S
MRYKKLIKPTKGIFYLISIANLDQSVX

SEQ ID NO: 30024 - protein, 31 aa, Artificial Sequence
  Cyclic GFR-binding peptide
  MOD_RES (30)..(31): Xaa is C or S
VAMGRYKKLYTVVGKDFYLISIANLKTPVXX

SEQ ID NO: 30025 - protein, 32 aa, Artificial Sequence; identical to SEQ ID NO: 1898
  Cyclic GFR-binding peptide
  MOD_RES (1)..(3): Xaa is C or S

SEQ ID NO: 30026 - protein, 39 aa, Artificial Sequence; identical to SEQ ID NO: 1899
  Cyclic GFR-binding peptide
  MOD_RES (1)..(3)..(35)..(36): Xaa is C or S

SEQ ID NO: 30027 - protein, 36 aa, Artificial Sequence; identical to SEQ ID NO: 1900
  Cyclic GFR-binding peptide
  MOD_RES (32)..(33): Xaa is C or S

SEQ ID NO: 30028 - protein, 40 aa, Artificial Sequence
  Cyclic GFR-binding peptide
  MOD_RES (1)..(3)..(34)..(35): Xaa is C or S
XKXSKVVMEYQKYVKPTRGVIYLISIPSLDQPVXXPSASA

SEQ ID NO: 30029 - protein, 31 aa, Artificial Sequence; identical to SEQ ID NO: 1901
  Cyclic GFR-binding peptide
  MOD_RES (27)..(28): Xaa is C or S

SEQ ID NO: 30030 - protein, 28 aa, Artificial Sequence
  Cyclic GFR-binding peptide
  MOD_RES (2)..(2): Xaa is C or S
GXESVAMGYHYKLYTVVGKDKYLISIPS

SEQ ID NO: 30031 - protein, 29 aa, Artificial Sequence
  Cyclic GFR-binding peptide
  MOD_RES (28)..(28): Xaa is C or S
MNRYKKLIVNSSDDFYLVSIANLKTPAXT

SEQ ID NO: 30032 - protein, 29 aa, Artificial Sequence
  Cyclic GFR-binding peptide
  MOD_RES (27)..(28): Xaa is C or S
GEYQKYYTVVGKDIYLISIPSLKTPVXXA

SEQ ID NO: 30033 - protein, 34 aa, Artificial Sequence; identical to SEQ ID NO: 1906
  Cyclic GFR-binding peptide
  MOD_RES (31)..(32): Xaa is C or S

SEQ ID NO: 30034 - protein, 37 aa, Artificial Sequence
  Cyclic GFR-binding peptide
  MOD_RES (1)..(33)..(34): Xaa is C or S
XGEVVMEEYKFKVVKDYEDLYLMSIPELETPVXXAKP

SEQ ID NO: 30035 - protein, 34 aa, Artificial Sequence; identical to SEQ ID NO: 1908
  Cyclic GFR-binding peptide
  MOD_RES (32)..(32): Xaa is C or S

SEQ ID NO: 30036 - protein, 32 aa, Artificial Sequence
  Cyclic GFR-binding peptide
  MOD_RES (28)..(29): Xaa is C or S
VMEYKFKVKPTRGVLYLISIPELDQPVXXPSA

SEQ ID NO: 30037 - protein, 23 aa, Artificial Sequence
  Cyclic GFR-binding peptide
EYQKYTPVGMDDIYLVSIPSLKT

SEQ ID NO: 30038 - protein, 33 aa, Artificial Sequence; identical to SEQ ID NO: 1911
  Cyclic GFR-binding peptide
  MOD_RES (28)..(28): Xaa is C or S

SEQ ID NO: 30039 - protein, 28 aa, Artificial Sequence
  Cyclic GFR-binding peptide
  MOD_RES (28)..(28): Xaa is C or S
MNYHYKLIVNNSSDKYLVSIPSLKTPAX

SEQ ID NO: 30040 - protein, 27 aa, Artificial Sequence
  Cyclic GFR-binding peptide
  MOD_RES (26)..(27): Xaa is C or S
EYKFKVKPTRGVLYLISIPELDQPVXX

SEQ ID NO: 30041 - protein, 32 aa, Artificial Sequence; identical to SEQ ID NO: 1913
  Cyclic GFR-binding peptide
  MOD_RES (1)..(1): Xaa is C or S

SEQ ID NO: 30042 - protein, 28 aa, Artificial Sequence
  Cyclic GFR-binding peptide
  MOD_RES (1)..(1): Xaa is C or S
XAEVVMDRYKKLVVNNAADFYLISIANL

SEQ ID NO: 30043 - protein, 33 aa, Artificial Sequence
  Cyclic GFR-binding peptide
  MOD_RES (1)..(3): Xaa is C or S
XGXAKVVMNEYKFKIVNNSSDLYLVSIPELKTP

SEQ ID NO: 30044 - protein, 25 aa, Artificial Sequence
  Cyclic GFR-binding peptide
EVVMDRYKKLVVNNAADFYLISIAN

SEQ ID NO: 30045 - protein, 36 aa, Artificial Sequence
  Cyclic GFR-binding peptide
  MOD_RES (31)..(32): Xaa is C or S
RVVMNEYKFKIVNSSDDLYLVSIPELKTPAXXPKPV

SEQ ID NO: 30046 - protein, 26 aa, Artificial Sequence
  Cyclic GFR-binding peptide
AMGEYQKYYTVVGKDIYLISIPSLKT

SEQ ID NO: 30047 - protein, 27 aa, Artificial Sequence
  Cyclic GFR-binding peptide
VAMGEYQKYYTVVGKDIYLISIPSLKT

SEQ ID NO: 30048 - protein, 36 aa, Artificial Sequence
  Cyclic GFR-binding peptide
  MOD_RES (2)..(4)..(35)..(36): Xaa is C or S
SXKXSKVVMEYQKYVKPTRGVIYLISIPSLDQPVXX

SEQ ID NO: 30049 - protein, 30 aa, Artificial Sequence; identical to SEQ ID NO: 1916
  Cyclic GFR-binding peptide
  MOD_RES (29)..(30): Xaa is C or S

SEQ ID NO: 30050 - protein, 37 aa, Artificial Sequence
  Cyclic GFR-binding peptide
  MOD_RES (31)..(32): Xaa is C or S
VSMGEEYQKYTPVGMDDIYLVSIPSLKTPVXXAKGVK

SEQ ID NO: 30051 - protein, 27 aa, Artificial Sequence
  Cyclic GFR-binding peptide
VMRYKKLVKPTRGVFYLISIANLDQPV

SEQ ID NO: 30052 - protein, 32 aa, Artificial Sequence; identical to SEQ ID NO: 1918
  Cyclic GFR-binding peptide
  MOD_RES (1)..(3): Xaa is C or S

SEQ ID NO: 30053 - protein, 26 aa, Artificial Sequence
  Cyclic GFR-binding peptide
KVVMNYHYKLIVNNSSDKYLVSIPSL

SEQ ID NO: 30054 - protein, 29 aa, Artificial Sequence
  Cyclic GFR-binding peptide
  MOD_RES (28)..(29): Xaa is C or S
IMYHYKLVKPKRGVKYLISIPSLAQPVXX

SEQ ID NO: 30055 - protein, 25 aa, Artificial Sequence
  Cyclic GFR-binding peptide
GEYQKYYTVVGKDIYLISIPSLKTP

SEQ ID NO: 30056 - protein, 37 aa, Artificial Sequence; identical to SEQ ID NO: 1925
  Cyclic GFR-binding peptide
  MOD_RES (2)..(34)..(35): Xaa is C or S

SEQ ID NO: 30057 - protein, 30 aa, Artificial Sequence; identical to SEQ ID NO: 1928
  Cyclic GFR-binding peptide
  MOD_RES (29)..(30): Xaa is C or S

SEQ ID NO: 30058 - protein, 38 aa, Artificial Sequence
  Cyclic GFR-binding peptide
  MOD_RES (2)..(4)..(36)..(37): Xaa is C or S
RXGXESVAMGEYQKYYTVVGKDIYLISIPSLKTPVXXA

SEQ ID NO: 30059 - protein, 30 aa, Artificial Sequence; identical to SEQ ID NO: 1929
  Cyclic GFR-binding peptide
  MOD_RES (29)..(30): Xaa is C or S

SEQ ID NO: 30060 - protein, 35 aa, Artificial Sequence
  Cyclic GFR-binding peptide
  MOD_RES (1)..(3)..(34)..(35): Xaa is C or S
XKXSRVIMEYQKYVKPKRGVIYLISIPSLAQPVXX

SEQ ID NO: 30061 - protein, 34 aa, Artificial Sequence
  Cyclic GFR-binding peptide
  MOD_RES (1)..(3)..(34): Xaa is C or S
XKXSRVIMEYQKYVKPKRGVIYLISIPSLAQPVX

SEQ ID NO: 30062 - protein, 29 aa, Artificial Sequence
  Cyclic GFR-binding peptide
  MOD_RES (26)..(27): Xaa is C or S
YHYKLIVNNSSDKYLVSIPSLKTPAXXAK

SEQ ID NO: 30063 - protein, 22 aa, Artificial Sequence
  Cyclic GFR-binding peptide
EYQKYYTVVGKDIYLISIPSLK

SEQ ID NO: 30064 - protein, 31 aa, Artificial Sequence; identical to SEQ ID NO: 1933
  Cyclic GFR-binding peptide
  MOD_RES (2)..(4): Xaa is C or S

SEQ ID NO: 30065 - protein, 30 aa, Artificial Sequence
  Cyclic GFR-binding peptide
  MOD_RES (26)..(26): Xaa is C or S
EYKFKIVNSSDDLYLVSIPELKTPAXTPKT

SEQ ID NO: 30066 - protein, 29 aa, Artificial Sequence
  Cyclic GFR-binding peptide
AEVVMDEYKFKVVNNAADLYLISIPELRA

SEQ ID NO: 30067 - protein, 30 aa, Artificial Sequence; identical to SEQ ID NO: 1935
  Cyclic GFR-binding peptide
  MOD_RES (27)..(28): Xaa is C or S

SEQ ID NO: 30068 - protein, 31 aa, Artificial Sequence
  Cyclic GFR-binding peptide
  MOD_RES (2)..(4): Xaa is C or S
HXGXSRVVMNEYKFKIVNSSDDLYLVSIPEL

SEQ ID NO: 30069 - protein, 27 aa, Artificial Sequence
  Cyclic GFR-binding peptide
  MOD_RES (1)..(1): Xaa is C or S
XESVAMGEYQKYYTVVGKDIYLISIPS

SEQ ID NO: 30070 - protein, 25 aa, Artificial Sequence
  Cyclic GFR-binding peptide
KVIMEYQKYIKPTKGIIYLISIPSL

SEQ ID NO: 30071 - protein, 40 aa, Artificial Sequence
  Cyclic GFR-binding peptide
  MOD_RES (2)..(35)..(36): Xaa is C or S
GXEAVSMGEEYQKYTPVGMDDIYLVSIPSLKTPVXXAKGV

SEQ ID NO: 30072 - protein, 34 aa, Artificial Sequence
  Cyclic GFR-binding peptide
  MOD_RES (1)..(32)..(33): Xaa is C or S
XSKVIMEYQKYIKPTKGIIYLISIPSLDQSVXXP

SEQ ID NO: 30073 - protein, 33 aa, Artificial Sequence
  Cyclic GFR-binding peptide
  MOD_RES (2)..(4): Xaa is C or S
RXGXESVAMGEYKFKYTVVGKDLYLISIPELKT

SEQ ID NO: 30074 - protein, 38 aa, Artificial Sequence; identical to SEQ ID NO: 1936
  Cyclic GFR-binding peptide
  MOD_RES (2)..(33)..(34): Xaa is C or S

SEQ ID NO: 30075 - protein, 27 aa, Artificial Sequence
  Cyclic GFR-binding peptide
  MOD_RES (2)..(2): Xaa is C or S
KXSKVVMRYKKLVKPTRGVFYLISIAN

SEQ ID NO: 30076 - protein, 24 aa, Artificial Sequence
  Cyclic GFR-binding peptide
MDYHYKLVVKENEDKYLMSIPSLE

SEQ ID NO: 30077 - protein, 33 aa, Artificial Sequence
  Cyclic GFR-binding peptide
  MOD_RES (29)..(30): Xaa is C or S
AMGEYQKYYTVVGKDIYLISIPSLKTPVXXAKS

SEQ ID NO: 30078 - protein, 31 aa, Artificial Sequence
  Cyclic GFR-binding peptide
  MOD_RES (2)..(4): Xaa is C or S
RXGXGEVVMDEYKFKVVKENEDLYLMSIPEL

SEQ ID NO: 30079 - protein, 27 aa, Artificial Sequence
  Cyclic GFR-binding peptide
VAMGRYKKLYTVVGKDFYLISIANLKT

SEQ ID NO: 30080 - protein, 38 aa, Artificial Sequence
  Cyclic GFR-binding peptide
  MOD_RES (2)..(34)..(35): Xaa is C or S
GXGEVVMEEYQKYVVKDYEDIYLMSIPSLETPVXXAKP

SEQ ID NO: 30081 - protein, 32 aa, Artificial Sequence
  Cyclic GFR-binding peptide
  MOD_RES (30)..(31): Xaa is C or S
KVIMEYQKYIKPTKGIIYLISIPSLDQSVXXP

SEQ ID NO: 30082 - protein, 23 aa, Artificial Sequence
  Cyclic GFR-binding peptide
NEYQKYIVNSSDDIYLVSIPSLQ

SEQ ID NO: 30083 - protein, 32 aa, Artificial Sequence
  Cyclic GFR-binding peptide
  MOD_RES (26)..(27): Xaa is C or S
YHYKLYTVVGKDKYLISIPSLKTPVXXAKSAK

SEQ ID NO: 30084 - protein, 32 aa, Artificial Sequence
  Cyclic GFR-binding peptide
  MOD_RES (29)..(30): Xaa is C or S
VIMEYKFKIKPTKGILYLISIPELDQSVXXPS

SEQ ID NO: 30085 - protein, 28 aa, Artificial Sequence
  Cyclic GFR-binding peptide
VVMDRYKKLVVKENEDFYLMSIANLETP

SEQ ID NO: 30086 - protein, 26 aa, Artificial Sequence
  Cyclic GFR-binding peptide
SRVIMYHYKLVKPKRGVKYLISIPSL

SEQ ID NO: 30087 - protein, 34 aa, Artificial Sequence; identical to SEQ ID NO: 1950
  Cyclic GFR-binding peptide
  MOD_RES (2)..(4): Xaa is C or S

SEQ ID NO: 30088 - protein, 21 aa, Artificial Sequence
  Cyclic GFR-binding peptide
NEYKFKIVNNSSDLYLVSIPE

SEQ ID NO: 30089 - protein, 31 aa, Artificial Sequence; identical to SEQ ID NO: 1951
  Cyclic GFR-binding peptide
  MOD_RES (31)..(31): Xaa is C or S

SEQ ID NO: 30090 - protein, 33 aa, Artificial Sequence
  Cyclic GFR-binding peptide
  MOD_RES (29)..(30): Xaa is C or S
VMNEYKFKIVNSSDDLYLVSIPELKTPAXXPKP

SEQ ID NO: 30091 - protein, 29 aa, Artificial Sequence
  Cyclic GFR-binding peptide
GEVVMDRYKKLVVKENEDFYLMSIANLET

SEQ ID NO: 30092 - protein, 27 aa, Artificial Sequence
  Cyclic GFR-binding peptide
  MOD_RES (2)..(2): Xaa is C or S
KXSKVIMEYQKYIKPTKGIIYLISIPS

SEQ ID NO: 30093 - protein, 33 aa, Artificial Sequence; identical to SEQ ID NO: 1953
  Cyclic GFR-binding peptide
  MOD_RES (27)..(28): Xaa is C or S

SEQ ID NO: 30094 - protein, 27 aa, Artificial Sequence
  Cyclic GFR-binding peptide
GEVVMEEYKFKVVKDYEDLYLMSIPEL

SEQ ID NO: 30095 - protein, 29 aa, Artificial Sequence
  Cyclic GFR-binding peptide
  MOD_RES (1)..(1): Xaa is C or S
XAEVVMDRYKKLVVNNAADFYLISIANLR

SEQ ID NO: 30096 - protein, 38 aa, Artificial Sequence
  Cyclic GFR-binding peptide
  MOD_RES (1)..(3)..(34)..(35): Xaa is C or S
XKXSKVVMEYKFKVKPTRGVLYLISIPELDQPVXXPSA

SEQ ID NO: 30097 - protein, 31 aa, Artificial Sequence; identical to SEQ ID NO: 1954
  Cyclic GFR-binding peptide
  MOD_RES (27)..(27): Xaa is C or S

SEQ ID NO: 30098 - protein, 30 aa, Artificial Sequence
  Cyclic GFR-binding peptide
  MOD_RES (2)..(4): Xaa is C or S
SXKXSKVIMEYKFKIKPTKGILYLISIPEL

SEQ ID NO: 30099 - protein, 33 aa, Artificial Sequence
  Cyclic GFR-binding peptide
  MOD_RES (2)..(2): Xaa is C or S
GXSRVVMNEYKFKIVNSSDDLYLVSIPELKTPA

SEQ ID NO: 30100 - protein, 25 aa, Artificial Sequence
  Cyclic GFR-binding peptide
MDRYKKLVVKENEDFYLMSIANLET

SEQ ID NO: 30101 - protein, 22 aa, Artificial Sequence
  Cyclic GFR-binding peptide
MEEYQKYVVKDYEDIYLMSIPS

SEQ ID NO: 30102 - protein, 32 aa, Artificial Sequence; identical to SEQ ID NO: 1958
  Cyclic GFR-binding peptide
  MOD_RES (29)..(30): Xaa is C or S

SEQ ID NO: 30103 - protein, 38 aa, Artificial Sequence; identical to SEQ ID NO: 1965
  Cyclic GFR-binding peptide
  MOD_RES (2)..(34)..(35): Xaa is C or S

SEQ ID NO: 30104 - protein, 33 aa, Artificial Sequence; identical to SEQ ID NO: 1966
  Cyclic GFR-binding peptide
  MOD_RES (29)..(30): Xaa is C or S

SEQ ID NO: 30105 - protein, 30 aa, Artificial Sequence
  Cyclic GFR-binding peptide
  MOD_RES (28)..(29): Xaa is C or S
MGYHYKLYTVVGKDKYLISIPSLKTPVXXA

SEQ ID NO: 30106 - protein, 27 aa, Artificial Sequence
  Cyclic GFR-binding peptide
VIMEYQKYIKPTKGIIYLISIPSLDQS

SEQ ID NO: 30107 - protein, 38 aa, Artificial Sequence; identical to SEQ ID NO: 1967
  Cyclic GFR-binding peptide
  MOD_RES (1)..(32)..(33): Xaa is C or S

SEQ ID NO: 30108 - protein, 28 aa, Artificial Sequence
  Cyclic GFR-binding peptide
  MOD_RES (2)..(2): Xaa is C or S
KXSKVIMYHYKLIKPTKGIKYLISIPSL

SEQ ID NO: 30109 - protein, 33 aa, Artificial Sequence
  Cyclic GFR-binding peptide
  MOD_RES (29)..(30): Xaa is C or S
VIMEYQKYIKPTKGIIYLISIPSLDQSVXXPSA

SEQ ID NO: 30110 - protein, 29 aa, Artificial Sequence
  Cyclic GFR-binding peptide
  MOD_RES (27)..(28): Xaa is C or S
NRYKKLIVNNSSDFYLVSIANLKTPAXXA

SEQ ID NO: 30111 - protein, 31 aa, Artificial Sequence
  Cyclic GFR-binding peptide
  MOD_RES (28)..(29): Xaa is C or S
MNEYQKYIVNSSDDIYLVSIPSLQTPAXXPK

SEQ ID NO: 30112 - protein, 42 aa, Artificial Sequence
  Cyclic GFR-binding peptide
  MOD_RES (2)..(4)..(36)..(37): Xaa is C or S
RXGXESVAMGEYKFKYTVVGKDLYLISIPELKTPVXXAKSAK

SEQ ID NO: 30113 - protein, 37 aa, Artificial Sequence
  Cyclic GFR-binding peptide
  MOD_RES (1)..(3)..(36)..(37): Xaa is C or S
XGXEAVSMGEEYQKYTPVGMDDIYLVSIPSLKTPVXX

SEQ ID NO: 30114 - protein, 31 aa, Artificial Sequence
  Cyclic GFR-binding peptide
  MOD_RES (2)..(2): Xaa is C or S
GXAKVVMNEYQKYIVNNSSDIYLVSIPSLKT

SEQ ID NO: 30115 - protein, 37 aa, Artificial Sequence
  Cyclic GFR-binding peptide
  MOD_RES (1)..(3)..(36)..(37): Xaa is C or S
XGXEAVSMGEEYKFKTPVGMDDLYLVSIPELKTPVXX

SEQ ID NO: 30116 - protein, 25 aa, Artificial Sequence
  Cyclic GFR-binding peptide
MDEYQKYVVKENEDIYLMSIPSLET

SEQ ID NO: 30117 - protein, 28 aa, Artificial Sequence
  Cyclic GFR-binding peptide
  MOD_RES (2)..(2): Xaa is C or S
GXGEVVMDEYKFKVVKENEDLYLMSIPE

SEQ ID NO: 30118 - protein, 35 aa, Artificial Sequence
  Cyclic GFR-binding peptide
  MOD_RES (2)..(34)..(35): Xaa is C or S
GXGEVVMDEYQKYVVKENEDIYLMSIPSLETPVXX

SEQ ID NO: 30119 - protein, 25 aa, Artificial Sequence
  Cyclic GFR-binding peptide
EYKFKIVNSSDDLYLVSIPELQTPA

SEQ ID NO: 30120 - protein, 26 aa, Artificial Sequence
  Cyclic GFR-binding peptide
NEYQKYIVNSSDDIYLVSIPSLKTPA

SEQ ID NO: 30121 - protein, 22 aa, Artificial Sequence
  Cyclic GFR-binding peptide
EYKFKVKPKRGVLYLISIPELA

SEQ ID NO: 30122 - protein, 34 aa, Artificial Sequence
  Cyclic GFR-binding peptide
  MOD_RES (30)..(31): Xaa is C or S
VVMDRYKKLVVNNAADFYLISIANLRAPVXXSAP

SEQ ID NO: 30123 - protein, 29 aa, Artificial Sequence
  Cyclic GFR-binding peptide
GEVVMERYKKLVVKDYEDFYLMSIANLET

SEQ ID NO: 30124 - protein, 30 aa, Artificial Sequence; identical to SEQ ID NO: 1985
  Cyclic GFR-binding peptide
  MOD_RES (1)..(1): Xaa is C or S

SEQ ID NO: 30125 - protein, 25 aa, Artificial Sequence
  Cyclic GFR-binding peptide
VMEYQKYVKPTRGVIYLISIPSLDQ

SEQ ID NO: 30126 - protein, 28 aa, Artificial Sequence
  Cyclic GFR-binding peptide
  MOD_RES (28)..(28): Xaa is C or S
IMRYKKLIKPTKGIFYLISIANLDQSVX

SEQ ID NO: 30127 - protein, 24 aa, Artificial Sequence
  Cyclic GFR-binding peptide
IMEYQKYIKPTKGIIYLISIPSLD

SEQ ID NO: 30128 - protein, 37 aa, Artificial Sequence; identical to SEQ ID NO: 1987
  Cyclic GFR-binding peptide
  MOD_RES (2)..(4)..(36): Xaa is C or S

SEQ ID NO: 30129 - protein, 25 aa, Artificial Sequence
  Cyclic GFR-binding peptide
VMDYHYKLVVKENEDKYLMSIPSLE

SEQ ID NO: 30130 - protein, 36 aa, Artificial Sequence; identical to SEQ ID NO: 1990
  Cyclic GFR-binding peptide
  MOD_RES (2)..(4)..(35)..(36): Xaa is C or S

SEQ ID NO: 30131 - protein, 32 aa, Artificial Sequence
  Cyclic GFR-binding peptide
  MOD_RES (32)..(32): Xaa is C or S
ARVVMNEYKFKIVNSSDDLYLVSIPELQTPAX

SEQ ID NO: 30132 - protein, 40 aa, Artificial Sequence; identical to SEQ ID NO: 1991
  Cyclic GFR-binding peptide
  MOD_RES (2)..(4)..(37)..(38): Xaa is C or S

SEQ ID NO: 30133 - protein, 37 aa, Artificial Sequence
  Cyclic GFR-binding peptide
  MOD_RES (2)..(33)..(34): Xaa is C or S
KXSKVVMEYKFKVKPTRGVLYLISIPELDQPVXXPSA

SEQ ID NO: 30134 - protein, 28 aa, Artificial Sequence
  Cyclic GFR-binding peptide
  MOD_RES (1)..(1): Xaa is C or S
XAKVVMNYHYKLIVNNSSDKYLVSIPSL

SEQ ID NO: 30135 - protein, 22 aa, Artificial Sequence
  Cyclic GFR-binding peptide
YHYKLVVKDYEDKYLMSIPSLE

SEQ ID NO: 30136 - protein, 33 aa, Artificial Sequence; identical to SEQ ID NO: 1994
  Cyclic GFR-binding peptide
  MOD_RES (2)..(33): Xaa is C or S

SEQ ID NO: 30137 - protein, 28 aa, Artificial Sequence
  Cyclic GFR-binding peptide
VSMGEEYKFKTPVGMDDLYLVSIPELKT

SEQ ID NO: 30138 - protein, 27 aa, Artificial Sequence
  Cyclic GFR-binding peptide
IMRYKKLIKPTKGIFYLISIANLDQSV

SEQ ID NO: 30139 - protein, 34 aa, Artificial Sequence
  Cyclic GFR-binding peptide
  MOD_RES (1)..(33)..(34): Xaa is C or S
XESVAMGYHYKLYTVVGKDKYLISIPSLKTPVXX

SEQ ID NO: 30140 - protein, 32 aa, Artificial Sequence
  Cyclic GFR-binding peptide
  MOD_RES (27)..(28): Xaa is C or S
GEYQKYYTVVGKDIYLISIPSLKTPVXXAKSA

SEQ ID NO: 30141 - protein, 32 aa, Artificial Sequence
  Cyclic GFR-binding peptide
  MOD_RES (27)..(28): Xaa is C or S
DEYKFKVVNNAADLYLISIPELRAPVXXSAPA

SEQ ID NO: 30142 - protein, 40 aa, Artificial Sequence
  Cyclic GFR-binding peptide
  MOD_RES (2)..(4)..(35)..(36): Xaa is C or S
SXKXSRVIMEYQKYVKPKRGVIYLISIPSLAQPVXXPAAS

SEQ ID NO: 30143 - protein, 33 aa, Artificial Sequence
  Cyclic GFR-binding peptide
  MOD_RES (27)..(28): Xaa is C or S
NEYQKYIVNSSDDIYLVSIPSLKTPAXXPKPVY

SEQ ID NO: 30144 - protein, 27 aa, Artificial Sequence
  Cyclic GFR-binding peptide
  MOD_RES (1)..(1): Xaa is C or S
XARVVMNEYQKYIVNSSDDIYLVSIPS

SEQ ID NO: 30145 - protein, 34 aa, Artificial Sequence; identical to SEQ ID NO: 2001
  Cyclic GFR-binding peptide
  MOD_RES (2)..(34): Xaa is C or S

SEQ ID NO: 30146 - protein, 37 aa, Artificial Sequence; identical to SEQ ID NO: 2002
  Cyclic GFR-binding peptide
  MOD_RES (2)..(4)..(36)..(37): Xaa is C or S

SEQ ID NO: 30147 - protein, 36 aa, Artificial Sequence; identical to SEQ ID NO: 2003
  Cyclic GFR-binding peptide
  MOD_RES (1)..(34)..(35): Xaa is C or S

SEQ ID NO: 30148 - protein, 39 aa, Artificial Sequence
  Cyclic GFR-binding peptide
  MOD_RES (1)..(3)..(34)..(35): Xaa is C or S
XKXSKVIMEYQKYIKPTKGIIYLISIPSLDQSVXXPSAS

SEQ ID NO: 30149 - protein, 31 aa, Artificial Sequence
  Cyclic GFR-binding peptide
  MOD_RES (26)..(26): Xaa is C or S
EYQKYIVNSSDDIYLVSIPSLKTPAXTPKTV

SEQ ID NO: 30150 - protein, 34 aa, Artificial Sequence
  Cyclic GFR-binding peptide
  MOD_RES (2)..(34): Xaa is C or S
GXAEVVMDRYKKLVVNNAADFYLISIANLRAPVX

SEQ ID NO: 30151 - protein, 31 aa, Artificial Sequence
  Cyclic GFR-binding peptide
  MOD_RES (26)..(27): Xaa is C or S
EYKFKIVNSSDDLYLVSIPELQTPAXXPKPV

SEQ ID NO: 30152 - protein, 38 aa, Artificial Sequence
  Cyclic GFR-binding peptide
  MOD_RES (1)..(33)..(34): Xaa is C or S
XGEVVMEEYQKYVVKDYEDIYLMSIPSLETPVXXAKPI

SEQ ID NO: 30153 - protein, 20 aa, Artificial Sequence
  Cyclic GFR-binding peptide
RYKKLVVKENEDFYLMSIAN

SEQ ID NO: 30154 - protein, 26 aa, Artificial Sequence
  Cyclic GFR-binding peptide
VMYHYKLVKPTRGVKYLISIPSLDQP

SEQ ID NO: 30155 - protein, 28 aa, Artificial Sequence
  Cyclic GFR-binding peptide
  MOD_RES (26)..(27): Xaa is C or S
RYKKLTPVGMDDFYLVSIANLKTPVXXA

SEQ ID NO: 30156 - protein, 24 aa, Artificial Sequence
  Cyclic GFR-binding peptide
MEYQKYIKPTKGIIYLISIPSLDQ

SEQ ID NO: 30157 - protein, 33 aa, Artificial Sequence
  Cyclic GFR-binding peptide
  MOD_RES (29)..(30): Xaa is C or S
VMDEYKFKVVKENEDLYLMSIPELETPVXXAKP

SEQ ID NO: 30158 - protein, 22 aa, Artificial Sequence
  Cyclic GFR-binding peptide
RYKKLIKPTKGIFYLISIANLD

SEQ ID NO: 30159 - protein, 23 aa, Artificial Sequence
  Cyclic GFR-binding peptide
DEYKFKVVNNAADLYLISIPELR

SEQ ID NO: 30160 - protein, 36 aa, Artificial Sequence; identical to SEQ ID NO: 2013
  Cyclic GFR-binding peptide
  MOD_RES (1)..(3)..(35)..(36): Xaa is C or S

SEQ ID NO: 30161 - protein, 31 aa, Artificial Sequence
  Cyclic GFR-binding peptide
  MOD_RES (2)..(2): Xaa is C or S
GXEAVSMGEEYKFKTPVGMDDLYLVSIPELK

SEQ ID NO: 30162 - protein, 27 aa, Artificial Sequence
  Cyclic GFR-binding peptide
VVMYHYKLVKPTRGVKYLISIPSLDQP

SEQ ID NO: 30163 - protein, 24 aa, Artificial Sequence
  Cyclic GFR-binding peptide
VMDRYKKLVVNNAADFYLISIANL

SEQ ID NO: 30164 - protein, 33 aa, Artificial Sequence
  Cyclic GFR-binding peptide
  MOD_RES (30)..(31): Xaa is C or S
VAMGEYQKYYTVVGKDIYLISIPSLKTPVXXAK

SEQ ID NO: 30165 - protein, 25 aa, Artificial Sequence
  Cyclic GFR-binding peptide
DRYKKLVVNNAADFYLISIANLRAP

SEQ ID NO: 30166 - protein, 23 aa, Artificial Sequence
  Cyclic GFR-binding peptide
IMEYKFKVKPKRGVLYLISIPEL

SEQ ID NO: 30167 - protein, 32 aa, Artificial Sequence
  Cyclic GFR-binding peptide
  MOD_RES (26)..(27): Xaa is C or S
YHYKLVVNNAADKYLISIPSLRAPVXXSAPAA

SEQ ID NO: 30168 - protein, 31 aa, Artificial Sequence; identical to SEQ ID NO: 2020
  Cyclic GFR-binding peptide
  MOD_RES (2)..(4): Xaa is C or S

SEQ ID NO: 30169 - protein, 31 aa, Artificial Sequence
  Cyclic GFR-binding peptide
  MOD_RES (26)..(27): Xaa is C or S
EYQKYYTVVGKDIYLISIPSLKTPVXXAKSA

SEQ ID NO: 30170 - protein, 30 aa, Artificial Sequence
  Cyclic GFR-binding peptide
  MOD_RES (30)..(30): Xaa is C or S
VVMEEYKFKVVKDYEDLYLMSIPELETPVX

SEQ ID NO: 30171 - protein, 30 aa, Artificial Sequence
  Cyclic GFR-binding peptide
  MOD_RES (26)..(27): Xaa is C or S
EYKFKVVNNAADLYLISIPELRAPVXXSAP

SEQ ID NO: 30172 - protein, 34 aa, Artificial Sequence
  Cyclic GFR-binding peptide
  MOD_RES (1)..(3): Xaa is C or S
XGXGEVVMEEYKFKVVKDYEDLYLMSIPELETPV

SEQ ID NO: 30173 - protein, 31 aa, Artificial Sequence
  Cyclic GFR-binding peptide
  MOD_RES (28)..(29): Xaa is C or S
IMEYKFKIKPTKGILYLISIPELDQSVXXPS

SEQ ID NO: 30174 - protein, 33 aa, Artificial Sequence
  Cyclic GFR-binding peptide
  MOD_RES (1)..(33): Xaa is C or S
XSRVVMNEYQKYIVNSSDDIYLVSIPSLKTPAX

SEQ ID NO: 30175 - protein, 34 aa, Artificial Sequence
  Cyclic GFR-binding peptide
  MOD_RES (1)..(3): Xaa is C or S
XGXAEVVMDYHYKLVVNNAADKYLISIPSLRAPV

SEQ ID NO: 30176 - protein, 35 aa, Artificial Sequence
  Cyclic GFR-binding peptide
  MOD_RES (2)..(33)..(34): Xaa is C or S
KXSRVIMEYQKYVKPKRGVIYLISIPSLAQPVXXP

SEQ ID NO: 30177 - protein, 31 aa, Artificial Sequence; identical to SEQ ID NO: 2023
  Cyclic GFR-binding peptide
  MOD_RES (28)..(29): Xaa is C or S

SEQ ID NO: 30178 - protein, 38 aa, Artificial Sequence; identical to SEQ ID NO: 2024
  Cyclic GFR-binding peptide
  MOD_RES (33)..(34): Xaa is C or S

SEQ ID NO: 30179 - protein, 36 aa, Artificial Sequence; identical to SEQ ID NO: 2025
  Cyclic GFR-binding peptide
  MOD_RES (2)..(33)..(34): Xaa is C or S

SEQ ID NO: 30180 - protein, 30 aa, Artificial Sequence
  Cyclic GFR-binding peptide
  MOD_RES (28)..(29): Xaa is C or S
MEEYKFKVVKDYEDLYLMSIPELETPVXXA

SEQ ID NO: 30181 - protein, 30 aa, Artificial Sequence
  Cyclic GFR-binding peptide
  MOD_RES (29)..(30): Xaa is C or S
VMNEYKFKIVNSSDDLYLVSIPELKTPAXX

SEQ ID NO: 30182 - protein, 39 aa, Artificial Sequence
  Cyclic GFR-binding peptide
  MOD_RES (1)..(3)..(35)..(36): Xaa is C or S
XGXSRVVMNEYQKYIVNSSDDIYLVSIPSLKTPAXXPKP

SEQ ID NO: 30183 - protein, 32 aa, Artificial Sequence
  Cyclic GFR-binding peptide
  MOD_RES (31)..(32): Xaa is C or S
EVVMEEYKFKVVKDYEDLYLMSIPELETPVXX

SEQ ID NO: 30184 - protein, 26 aa, Artificial Sequence
  Cyclic GFR-binding peptide
KVIMEYKFKIKPTKGILYLISIPELD

SEQ ID NO: 30185 - protein, 26 aa, Artificial Sequence
  Cyclic GFR-binding peptide
MGEEYKFKTPVGMDDLYLVSIPELKT

SEQ ID NO: 30186 - protein, 28 aa, Artificial Sequence
  Cyclic GFR-binding peptide
  MOD_RES (27)..(28): Xaa is C or S
DEYQKYVVKENEDIYLMSIPSLETPVXX

SEQ ID NO: 30187 - protein, 40 aa, Artificial Sequence; identical to SEQ ID NO: 2029
  Cyclic GFR-binding peptide
  MOD_RES (2)..(4)..(36)..(37): Xaa is C or S

SEQ ID NO: 30188 - protein, 27 aa, Artificial Sequence
  Cyclic GFR-binding peptide
MDRYKKLVVKENEDFYLMSIANLETPV

SEQ ID NO: 30189 - protein, 24 aa, Artificial Sequence
  Cyclic GFR-binding peptide
VMDEYKFKVVNNAADLYLISIPEL

SEQ ID NO: 30190 - protein, 31 aa, Artificial Sequence
  Cyclic GFR-binding peptide
  MOD_RES (28)..(29): Xaa is C or S
VMEYKFKVKPTRGVLYLISIPELDQPVXXPS

SEQ ID NO: 30191 - protein, 24 aa, Artificial Sequence
  Cyclic GFR-binding peptide
MDEYKFKVVNNAADLYLISIPELR

SEQ ID NO: 30192 - protein, 38 aa, Artificial Sequence
  Cyclic GFR-binding peptide
  MOD_RES (1)..(3)..(35)..(36): Xaa is C or S
XGXARVVMNEYQKYIVNSSDDIYLVSIPSLQTPAXXPK

SEQ ID NO: 30193 - protein, 30 aa, Artificial Sequence
  Cyclic GFR-binding peptide
  MOD_RES (1)..(1): Xaa is C or S
XARVVMNEYQKYIVNSSDDIYLVSIPSLQT

SEQ ID NO: 30194 - protein, 34 aa, Artificial Sequence
  Cyclic GFR-binding peptide
  MOD_RES (2)..(4): Xaa is C or S
SXKXSRVIMEYKFKVKPKRGVLYLISIPELAQPV

SEQ ID NO: 30195 - protein, 30 aa, Artificial Sequence; identical to SEQ ID NO: 2037
  Cyclic GFR-binding peptide
  MOD_RES (2)..(4): Xaa is C or S

SEQ ID NO: 30196 - protein, 31 aa, Artificial Sequence; identical to SEQ ID NO: 2039
  Cyclic GFR-binding peptide
  MOD_RES (30)..(31): Xaa is C or S

SEQ ID NO: 30197 - protein, 32 aa, Artificial Sequence
  Cyclic GFR-binding peptide
  MOD_RES (32)..(32): Xaa is C or S
ESVAMGRYKKLYTVVGKDFYLISIANLKTPVX

SEQ ID NO: 30198 - protein, 35 aa, Artificial Sequence; identical to SEQ ID NO: 2041
  Cyclic GFR-binding peptide
  MOD_RES (1)..(34)..(35): Xaa is C or S

SEQ ID NO: 30199 - protein, 40 aa, Artificial Sequence; identical to SEQ ID NO: 2042
  Cyclic GFR-binding peptide
  MOD_RES (1)..(3)..(35)..(36): Xaa is C or S

SEQ ID NO: 30200 - protein, 25 aa, Artificial Sequence
  Cyclic GFR-binding peptide
SKVIMEYKFKIKPTKGILYLISIPE

SEQ ID NO: 30201 - protein, 25 aa, Artificial Sequence
  Cyclic GFR-binding peptide
EVVMEYHYKLVVKDYEDKYLMSIPS

SEQ ID NO: 30202 - protein, 32 aa, Artificial Sequence; identical to SEQ ID NO: 2044
  Cyclic GFR-binding peptide
  MOD_RES (28)..(29): Xaa is C or S

SEQ ID NO: 30203 - protein, 35 aa, Artificial Sequence
  Cyclic GFR-binding peptide
  MOD_RES (29)..(30): Xaa is C or S
VVMEYQKYVKPTRGVIYLISIPSLDQPVXXPSASA

SEQ ID NO: 30204 - protein, 30 aa, Artificial Sequence
  Cyclic GFR-binding peptide
  MOD_RES (1)..(1): Xaa is C or S
XGEVVMEEYQKYVVKDYEDIYLMSIPSLET

SEQ ID NO: 30205 - protein, 37 aa, Artificial Sequence
  Cyclic GFR-binding peptide
  MOD_RES (31)..(32): Xaa is C or S
EVVMEEYQKYVVKDYEDIYLMSIPSLETPVXXAKPIS

SEQ ID NO: 30206 - protein, 39 aa, Artificial Sequence
  Cyclic GFR-binding peptide
  MOD_RES (33)..(34): Xaa is C or S
EAVSMGEEYQKYTPVGMDDIYLVSIPSLKTPVXXAKGVK

SEQ ID NO: 30207 - protein, 30 aa, Artificial Sequence; identical to SEQ ID NO: 2047
  Cyclic GFR-binding peptide
  MOD_RES (30)..(30): Xaa is C or S

SEQ ID NO: 30208 - protein, 35 aa, Artificial Sequence
  Cyclic GFR-binding peptide
  MOD_RES (31)..(32): Xaa is C or S
SKVVMEYQKYVKPTRGVIYLISIPSLDQPVXXPSA

SEQ ID NO: 30209 - protein, 32 aa, Artificial Sequence
  Cyclic GFR-binding peptide
  MOD_RES (32)..(32): Xaa is C or S
GEVVMEEYQKYVVKDYEDIYLMSIPSLETPVX

SEQ ID NO: 30210 - protein, 31 aa, Artificial Sequence
  Cyclic GFR-binding peptide
  MOD_RES (27)..(28): Xaa is C or S
DYHYKLVVNNAADKYLISIPSLRAPVXXSAP

SEQ ID NO: 30211 - protein, 24 aa, Artificial Sequence
  Cyclic GFR-binding peptide
EYKFKVVKENEDLYLMSIPELETP

SEQ ID NO: 30212 - protein, 26 aa, Artificial Sequence
  Cyclic GFR-binding peptide
AKVVMNRYKKLIVNNSSDFYLVSIAN

SEQ ID NO: 30213 - protein, 34 aa, Artificial Sequence
  Cyclic GFR-binding peptide
  MOD_RES (1)..(34): Xaa is C or S
XEAVSMGEEYKFKTPVGMDDLYLVSIPELKTPVX

SEQ ID NO: 30214 - protein, 41 aa, Artificial Sequence; identical to SEQ ID NO: 2053
  Cyclic GFR-binding peptide
  MOD_RES (2)..(4)..(35)..(36): Xaa is C or S

SEQ ID NO: 30215 - protein, 22 aa, Artificial Sequence
  Cyclic GFR-binding peptide
MRYKKLVKPTRGVFYLISIANL

SEQ ID NO: 30216 - protein, 34 aa, Artificial Sequence
  Cyclic GFR-binding peptide
  MOD_RES (28)..(29): Xaa is C or S
IMEYQKYIKPTKGIIYLISIPSLDQSVXXPSASA

SEQ ID NO: 30217 - protein, 32 aa, Artificial Sequence
  Cyclic GFR-binding peptide
  MOD_RES (1)..(3): Xaa is C or S
XKXSKVIMEYKFKIKPTKGILYLISIPELDQS

SEQ ID NO: 30218 - protein, 32 aa, Artificial Sequence; identical to SEQ ID NO: 2059
  Cyclic GFR-binding peptide
  MOD_RES (29)..(30): Xaa is C or S

SEQ ID NO: 30219 - protein, 42 aa, Artificial Sequence; identical to SEQ ID NO: 2061
  Cyclic GFR-binding peptide
  MOD_RES (2)..(4)..(36)..(37): Xaa is C or S

SEQ ID NO: 30220 - protein, 22 aa, Artificial Sequence
  Cyclic GFR-binding peptide
IMEYKFKIKPTKGILYLISIPE

SEQ ID NO: 30221 - protein, 39 aa, Artificial Sequence; identical to SEQ ID NO: 2062
  Cyclic GFR-binding peptide
  MOD_RES (1)..(33)..(34): Xaa is C or S

SEQ ID NO: 30222 - protein, 32 aa, Artificial Sequence
  Cyclic GFR-binding peptide
  MOD_RES (27)..(28): Xaa is C or S
EEYQKYTPVGMDDIYLVSIPSLKTPVXXAKGV

SEQ ID NO: 30223 - protein, 24 aa, Artificial Sequence
  Cyclic GFR-binding peptide
ERYKKLTPVGMDDFYLVSIANLKT

SEQ ID NO: 30224 - protein, 35 aa, Artificial Sequence
  Cyclic GFR-binding peptide
  MOD_RES (1)..(33)..(34): Xaa is C or S
XGEVVMEEYQKYVVKDYEDIYLMSIPSLETPVXXA

SEQ ID NO: 30225 - protein, 36 aa, Artificial Sequence
  Cyclic GFR-binding peptide
  MOD_RES (2)..(33)..(34): Xaa is C or S
KXSRVIMEYQKYVKPKRGVIYLISIPSLAQPVXXPA

SEQ ID NO: 30226 - protein, 29 aa, Artificial Sequence
  Cyclic GFR-binding peptide
  MOD_RES (28)..(29): Xaa is C or S
MNYHYKLIVNNSSDKYLVSIPSLKTPAXX

SEQ ID NO: 30227 - protein, 27 aa, Artificial Sequence
  Cyclic GFR-binding peptide
  MOD_RES (1)..(1): Xaa is C or S
XAKVVMNEYQKYIVNNSSDIYLVSIPS

SEQ ID NO: 30228 - protein, 31 aa, Artificial Sequence; identical to SEQ ID NO: 2071
  Cyclic GFR-binding peptide
  MOD_RES (1)..(1): Xaa is C or S

SEQ ID NO: 30229 - protein, 28 aa, Artificial Sequence
  Cyclic GFR-binding peptide
  MOD_RES (1)..(1): Xaa is C or S
XARVVMNYHYKLIVNSSDDKYLVSIPSL

SEQ ID NO: 30230 - protein, 22 aa, Artificial Sequence
  Cyclic GFR-binding peptide
IMRYKKLVKPKRGVFYLISIAN

SEQ ID NO: 30231 - protein, 30 aa, Artificial Sequence; identical to SEQ ID NO: 2080
  Cyclic GFR-binding peptide
  MOD_RES (1)..(1): Xaa is C or S

SEQ ID NO: 30232 - protein, 32 aa, Artificial Sequence; identical to SEQ ID NO: 2081
  Cyclic GFR-binding peptide
  MOD_RES (30)..(30): Xaa is C or S

SEQ ID NO: 30233 - protein, 27 aa, Artificial Sequence
  Cyclic GFR-binding peptide
GEVVMDEYKFKVVKENEDLYLMSIPEL

SEQ ID NO: 30234 - protein, 27 aa, Artificial Sequence
  Cyclic GFR-binding peptide
  MOD_RES (2)..(2): Xaa is C or S
KXSRVIMRYKKLVKPKRGVFYLISIAN

SEQ ID NO: 30235 - protein, 36 aa, Artificial Sequence
  Cyclic GFR-binding peptide
  MOD_RES (2)..(4)..(36): Xaa is C or S
RXGXESVAMGYHYKLYTVVGKDKYLISIPSLKTPVX

SEQ ID NO: 30236 - protein, 33 aa, Artificial Sequence; identical to SEQ ID NO: 2086
  Cyclic GFR-binding peptide
  MOD_RES (31)..(32): Xaa is C or S

SEQ ID NO: 30237 - protein, 32 aa, Artificial Sequence
  Cyclic GFR-binding peptide
  MOD_RES (1)..(3): Xaa is C or S
XGXAEVVMDEYKFKVVNNAADLYLISIPELRA

SEQ ID NO: 30238 - protein, 33 aa, Artificial Sequence
  Cyclic GFR-binding peptide
  MOD_RES (31)..(32): Xaa is C or S
VSMGEEYQKYTPVGMDDIYLVSIPSLKTPVXXA

SEQ ID NO: 30239 - protein, 32 aa, Artificial Sequence; identical to SEQ ID NO: 2089
  Cyclic GFR-binding peptide
  MOD_RES (1)..(1): Xaa is C or S

SEQ ID NO: 30240 - protein, 26 aa, Artificial Sequence
  Cyclic GFR-binding peptide
  MOD_RES (26)..(26): Xaa is C or S
EYKFKVVKENEDLYLMSIPELETPVX

SEQ ID NO: 30241 - protein, 27 aa, Artificial Sequence
  Cyclic GFR-binding peptide
MNEYKFKIVNSSDDLYLVSIPELQTPA

SEQ ID NO: 30242 - protein, 30 aa, Artificial Sequence; identical to SEQ ID NO: 2092
  Cyclic GFR-binding peptide
  MOD_RES (28)..(29): Xaa is C or S

SEQ ID NO: 30243 - protein, 42 aa, Artificial Sequence
  Cyclic GFR-binding peptide
  MOD_RES (1)..(3)..(36)..(37): Xaa is C or S
XGXEAVSMGEEYQKYTPVGMDDIYLVSIPSLKTPVXXAKGVK

SEQ ID NO: 30244 - protein, 28 aa, Artificial Sequence
  Cyclic GFR-binding peptide
  MOD_RES (28)..(28): Xaa is C or S
MGEYQKYYTVVGKDIYLISIPSLKTPVX

SEQ ID NO: 30245 - protein, 33 aa, Artificial Sequence; identical to SEQ ID NO: 2094
  Cyclic GFR-binding peptide
  MOD_RES (29)..(30): Xaa is C or S

SEQ ID NO: 30246 - protein, 33 aa, Artificial Sequence; identical to SEQ ID NO: 2095
  Cyclic GFR-binding peptide
  MOD_RES (2)..(4): Xaa is C or S

SEQ ID NO: 30247 - protein, 38 aa, Artificial Sequence
  Cyclic GFR-binding peptide
  MOD_RES (1)..(33)..(34): Xaa is C or S
XGEVVMDEYQKYVVKENEDIYLMSIPSLETPVXXAKPI

SEQ ID NO: 30248 - protein, 31 aa, Artificial Sequence
  Cyclic GFR-binding peptide
  MOD_RES (1)..(3): Xaa is C or S
XKXSKVVMEYQKYVKPTRGVIYLISIPSLDQ

SEQ ID NO: 30249 - protein, 38 aa, Artificial Sequence; identical to SEQ ID NO: 2096
  Cyclic GFR-binding peptide
  MOD_RES (1)..(3)..(35)..(36): Xaa is C or S

SEQ ID NO: 30250 - protein, 37 aa, Artificial Sequence
  Cyclic GFR-binding peptide
  MOD_RES (31)..(32): Xaa is C or S
KVVMNEYQKYIVNNSSDIYLVSIPSLKTPAXXAKPVA

SEQ ID NO: 30251 - protein, 32 aa, Artificial Sequence
  Cyclic GFR-binding peptide
  MOD_RES (2)..(2): Xaa is C or S
GXARVVMNEYKFKIVNSSDDLYLVSIPELQTP

SEQ ID NO: 30252 - protein, 39 aa, Artificial Sequence
  Cyclic GFR-binding peptide
  MOD_RES (1)..(3)..(34)..(35): Xaa is C or S
XKXSKVVMEYQKYVKPTRGVIYLISIPSLDQPVXXPSAS

SEQ ID NO: 30253 - protein, 28 aa, Artificial Sequence
  Cyclic GFR-binding peptide
AVSMGERYKKLTPVGMDDFYLVSIANLK

SEQ ID NO: 30254 - protein, 24 aa, Artificial Sequence
  Cyclic GFR-binding peptide
RYKKLTPVGMDDFYLVSIANLKTP

SEQ ID NO: 30255 - protein, 36 aa, Artificial Sequence; identical to SEQ ID NO: 2102
  Cyclic GFR-binding peptide
  MOD_RES (1)..(33)..(34): Xaa is C or S

SEQ ID NO: 30256 - protein, 26 aa, Artificial Sequence
  Cyclic GFR-binding peptide
VVMEYQKYVKPTRGVIYLISIPSLDQ

SEQ ID NO: 30257 - protein, 26 aa, Artificial Sequence
  Cyclic GFR-binding peptide
MNEYKFKIVNSSDDLYLVSIPELKTP

SEQ ID NO: 30258 - protein, 30 aa, Artificial Sequence; identical to SEQ ID NO: 2104
  Cyclic GFR-binding peptide
  MOD_RES (27)..(28): Xaa is C or S

SEQ ID NO: 30259 - protein, 29 aa, Artificial Sequence
  Cyclic GFR-binding peptide
  MOD_RES (26)..(27): Xaa is C or S
EYKFKIVNNSSDLYLVSIPELKTPAXXAK

SEQ ID NO: 30260 - protein, 37 aa, Artificial Sequence
  Cyclic GFR-binding peptide
  MOD_RES (1)..(3)..(34)..(35): Xaa is C or S
XKXSRVIMEYQKYVKPKRGVIYLISIPSLAQPVXXPA

SEQ ID NO: 30261 - protein, 30 aa, Artificial Sequence
  Cyclic GFR-binding peptide
  MOD_RES (1)..(1): Xaa is C or S
XAEVVMDEYKFKVVNNAADLYLISIPELRA

SEQ ID NO: 30262 - protein, 32 aa, Artificial Sequence
  Cyclic GFR-binding peptide
  MOD_RES (2)..(2): Xaa is C or S
KXSRVIMEYKFKVKPKRGVLYLISIPELAQPV

SEQ ID NO: 30263 - protein, 35 aa, Artificial Sequence
  Cyclic GFR-binding peptide
  MOD_RES (31)..(32): Xaa is C or S
KVVMNEYQKYIVNNSSDIYLVSIPSLKTPAXXAKP

SEQ ID NO: 30264 - protein, 34 aa, Artificial Sequence
  Cyclic GFR-binding peptide
  MOD_RES (28)..(29): Xaa is C or S
VMEYQKYVKPTRGVIYLISIPSLDQPVXXPSASA

SEQ ID NO: 30265 - protein, 20 aa, Artificial Sequence
  Cyclic GFR-binding peptide
EYKFKIVNNSSDLYLVSIPE

SEQ ID NO: 30266 - protein, 28 aa, Artificial Sequence
  Cyclic GFR-binding peptide
  MOD_RES (28)..(28): Xaa is C or S
VMRYKKLVKPTRGVFYLISIANLDQPVX

SEQ ID NO: 30267 - protein, 42 aa, Artificial Sequence
  Cyclic GFR-binding peptide
  MOD_RES (2)..(4)..(36)..(37): Xaa is C or S
HXGXAKVVMNEYQKYIVNNSSDIYLVSIPSLKTPAXXAKPVA

SEQ ID NO: 30268 - protein, 35 aa, Artificial Sequence; identical to SEQ ID NO: 2110
  Cyclic GFR-binding peptide
  MOD_RES (2)..(4): Xaa is C or S

SEQ ID NO: 30269 - protein, 29 aa, Artificial Sequence
  Cyclic GFR-binding peptide
  MOD_RES (27)..(28): Xaa is C or S
NYHYKLIVNSSDDKYLVSIPSLKTPAXXP

SEQ ID NO: 30270 - protein, 36 aa, Artificial Sequence
  Cyclic GFR-binding peptide
  MOD_RES (2)..(34)..(35): Xaa is C or S
GXAEVVMDYHYKLVVNNAADKYLISIPSLRAPVXXS

SEQ ID NO: 30271 - protein, 28 aa, Artificial Sequence
  Cyclic GFR-binding peptide
  MOD_RES (28)..(28): Xaa is C or S
MGRYKKLYTVVGKDFYLISIANLKTPVX

SEQ ID NO: 30272 - protein, 42 aa, Artificial Sequence; identical to SEQ ID NO: 2114
  Cyclic GFR-binding peptide
  MOD_RES (2)..(4)..(36)..(37): Xaa is C or S

SEQ ID NO: 30273 - protein, 31 aa, Artificial Sequence; identical to SEQ ID NO: 2115
  Cyclic GFR-binding peptide
  MOD_RES (30)..(31): Xaa is C or S

SEQ ID NO: 30274 - protein, 33 aa, Artificial Sequence
  Cyclic GFR-binding peptide
  MOD_RES (1)..(33): Xaa is C or S
XESVAMGYHYKLYTVVGKDKYLISIPSLKTPVX

SEQ ID NO: 30275 - protein, 32 aa, Artificial Sequence; identical to SEQ ID NO: 2117
  Cyclic GFR-binding peptide
  MOD_RES (28)..(29): Xaa is C or S

SEQ ID NO: 30276 - protein, 30 aa, Artificial Sequence; identical to SEQ ID NO: 2119
  Cyclic GFR-binding peptide
  MOD_RES (2)..(4): Xaa is C or S

SEQ ID NO: 30277 - protein, 39 aa, Artificial Sequence; identical to SEQ ID NO: 2120
  Cyclic GFR-binding peptide
  MOD_RES (1)..(33)..(34): Xaa is C or S

SEQ ID NO: 30278 - protein, 41 aa, Artificial Sequence; identical to SEQ ID NO: 2121
  Cyclic GFR-binding peptide
  MOD_RES (2)..(35)..(36): Xaa is C or S

SEQ ID NO: 30279 - protein, 34 aa, Artificial Sequence
  Cyclic GFR-binding peptide
  MOD_RES (1)..(32)..(33): Xaa is C or S
XSRVIMEYQKYVKPKRGVIYLISIPSLAQPVXXP

SEQ ID NO: 30280 - protein, 32 aa, Artificial Sequence; identical to SEQ ID NO: 2124
  Cyclic GFR-binding peptide
  MOD_RES (1)..(1): Xaa is C or S

SEQ ID NO: 30281 - protein, 39 aa, Artificial Sequence
  Cyclic GFR-binding peptide
  MOD_RES (2)..(35)..(36): Xaa is C or S
GXEAVSMGEEYKFKTPVGMDDLYLVSIPELKTPVXXAKG

SEQ ID NO: 30282 - protein, 31 aa, Artificial Sequence
  Cyclic GFR-binding peptide
  MOD_RES (29)..(30): Xaa is C or S
VMEEYKFKVVKDYEDLYLMSIPELETPVXXA

SEQ ID NO: 30283 - protein, 34 aa, Artificial Sequence; identical to SEQ ID NO: 2125
  Cyclic GFR-binding peptide
  MOD_RES (28)..(29): Xaa is C or S

SEQ ID NO: 30284 - protein, 30 aa, Artificial Sequence
  Cyclic GFR-binding peptide
  MOD_RES (1)..(3): Xaa is C or S
XGXARVVMNEYKFKIVNSSDDLYLVSIPEL

SEQ ID NO: 30285 - protein, 33 aa, Artificial Sequence; identical to SEQ ID NO: 2126
  Cyclic GFR-binding peptide
  MOD_RES (2)..(33): Xaa is C or S

SEQ ID NO: 30286 - protein, 31 aa, Artificial Sequence; identical to SEQ ID NO: 2127
  Cyclic GFR-binding peptide
  MOD_RES (2)..(2): Xaa is C or S

SEQ ID NO: 30287 - protein, 35 aa, Artificial Sequence
  Cyclic GFR-binding peptide
  MOD_RES (31)..(32): Xaa is C or S
EVVMDEYKFKVVNNAADLYLISIPELRAPVXXSAP

SEQ ID NO: 30288 - protein, 32 aa, Artificial Sequence
  Cyclic GFR-binding peptide
  MOD_RES (1)..(3): Xaa is C or S
XKXSRVIMEYQKYVKPKRGVIYLISIPSLAQP

SEQ ID NO: 30289 - protein, 30 aa, Artificial Sequence
  Cyclic GFR-binding peptide
  MOD_RES (1)..(1): Xaa is C or S
XEAVSMGEEYKFKTPVGMDDLYLVSIPELK

SEQ ID NO: 30290 - protein, 31 aa, Artificial Sequence
  Cyclic GFR-binding peptide
  MOD_RES (30)..(31): Xaa is C or S
KVVMEYKFKVKPTRGVLYLISIPELDQPVXX

SEQ ID NO: 30291 - protein, 32 aa, Artificial Sequence
  Cyclic GFR-binding peptide
  MOD_RES (26)..(27): Xaa is C or S
EYQKYIVNSSDDIYLVSIPSLKTPAXXPKPVY

SEQ ID NO: 30292 - protein, 38 aa, Artificial Sequence
  Cyclic GFR-binding peptide
  MOD_RES (32)..(32): Xaa is C or S
SRVVMNEYKFKIVNSSDDLYLVSIPELKTPAXTPKTVH

SEQ ID NO: 30293 - protein, 31 aa, Artificial Sequence; identical to SEQ ID NO: 2134
  Cyclic GFR-binding peptide
  MOD_RES (2)..(4): Xaa is C or S

SEQ ID NO: 30294 - protein, 35 aa, Artificial Sequence; identical to SEQ ID NO: 2136
  Cyclic GFR-binding peptide
  MOD_RES (1)..(3)..(34)..(35): Xaa is C or S

SEQ ID NO: 30295 - protein, 34 aa, Artificial Sequence; identical to SEQ ID NO: 2137
  Cyclic GFR-binding peptide
  MOD_RES (30)..(31): Xaa is C or S

SEQ ID NO: 30296 - protein, 26 aa, Artificial Sequence
  Cyclic GFR-binding peptide
  MOD_RES (26)..(26): Xaa is C or S
RYKKLVKPKRGVFYLISIANLAQPVX

SEQ ID NO: 30297 - protein, 20 aa, Artificial Sequence
  Cyclic GFR-binding peptide
EYQKYTPVGMDDIYLVSIPS

SEQ ID NO: 30298 - protein, 26 aa, Artificial Sequence
  Cyclic GFR-binding peptide
KVIMRYKKLIKPTKGIFYLISIANLD

SEQ ID NO: 30299 - protein, 29 aa, Artificial Sequence
  Cyclic GFR-binding peptide
  MOD_RES (27)..(28): Xaa is C or S
MYHYKLIKPTKGIKYLISIPSLDQSVXXP

SEQ ID NO: 30300 - protein, 34 aa, Artificial Sequence
  Cyclic GFR-binding peptide
  MOD_RES (1)..(3): Xaa is C or S
XGXGEVVMEEYQKYVVKDYEDIYLMSIPSLETPV

SEQ ID NO: 30301 - protein, 31 aa, Artificial Sequence
  Cyclic GFR-binding peptide
  MOD_RES (1)..(1): Xaa is C or S
XARVVMNEYQKYIVNSSDDIYLVSIPSLQTP

SEQ ID NO: 30302 - protein, 32 aa, Artificial Sequence; identical to SEQ ID NO: 2146
  Cyclic GFR-binding peptide
  MOD_RES (1)..(1): Xaa is C or S

SEQ ID NO: 30303 - protein, 33 aa, Artificial Sequence; identical to SEQ ID NO: 2149
  Cyclic GFR-binding peptide
  MOD_RES (2)..(33): Xaa is C or S

SEQ ID NO: 30304 - protein, 20 aa, Artificial Sequence
  Cyclic GFR-binding peptide
EYQKYIVNSSDDIYLVSIPS

SEQ ID NO: 30305 - protein, 26 aa, Artificial Sequence
  Cyclic GFR-binding peptide
VMDYHYKLVVNNAADKYLISIPSLRA

SEQ ID NO: 30306 - protein, 21 aa, Artificial Sequence
  Cyclic GFR-binding peptide
EYKFKIKPTKGILYLISIPEL

SEQ ID NO: 30307 - protein, 30 aa, Artificial Sequence
  Cyclic GFR-binding peptide
  MOD_RES (1)..(3): Xaa is C or S
XGXEAVSMGEEYKFKTPVGMDDLYLVSIPE

SEQ ID NO: 30308 - protein, 31 aa, Artificial Sequence; identical to SEQ ID NO: 2151
  Cyclic GFR-binding peptide
  MOD_RES (29)..(30): Xaa is C or S

SEQ ID NO: 30309 - protein, 26 aa, Artificial Sequence
  Cyclic GFR-binding peptide
VVMDRYKKLVVKENEDFYLMSIANLE

SEQ ID NO: 30310 - protein, 34 aa, Artificial Sequence
  Cyclic GFR-binding peptide
  MOD_RES (31)..(31): Xaa is C or S
RVVMNEYKFKIVNSSDDLYLVSIPELKTPAXTPK

SEQ ID NO: 30311 - protein, 30 aa, Artificial Sequence; identical to SEQ ID NO: 2158
  Cyclic GFR-binding peptide
  MOD_RES (1)..(1): Xaa is C or S

SEQ ID NO: 30312 - protein, 33 aa, Artificial Sequence; identical to SEQ ID NO: 2159
  Cyclic GFR-binding peptide
  MOD_RES (29)..(30): Xaa is C or S

SEQ ID NO: 30313 - protein, 31 aa, Artificial Sequence; identical to SEQ ID NO: 2160
  Cyclic GFR-binding peptide
  MOD_RES (30)..(31): Xaa is C or S

SEQ ID NO: 30314 - protein, 29 aa, Artificial Sequence
  Cyclic GFR-binding peptide
SKVIMRYKKLIKPTKGIFYLISIANLDQS

SEQ ID NO: 30315 - protein, 22 aa, Artificial Sequence
  Cyclic GFR-binding peptide
DEYKFKVVNNAADLYLISIPEL

SEQ ID NO: 30316 - protein, 27 aa, Artificial Sequence
  Cyclic GFR-binding peptide
VMNEYQKYIVNNSSDIYLVSIPSLKTP

SEQ ID NO: 30317 - protein, 39 aa, Artificial Sequence
  Cyclic GFR-binding peptide
  MOD_RES (2)..(4)..(36)..(37): Xaa is C or S
HXGXARVVMNEYQKYIVNSSDDIYLVSIPSLQTPAXXPK

SEQ ID NO: 30318 - protein, 27 aa, Artificial Sequence
  Cyclic GFR-binding peptide
  MOD_RES (1)..(1): Xaa is C or S
XSRVVMNYHYKLIVNSSDDKYLVSIPS

SEQ ID NO: 30319 - protein, 37 aa, Artificial Sequence
  Cyclic GFR-binding peptide
  MOD_RES (2)..(34)..(35): Xaa is C or S
GXSRVVMNEYQKYIVNSSDDIYLVSIPSLKTPAXXPK

SEQ ID NO: 30320 - protein, 28 aa, Artificial Sequence
  Cyclic GFR-binding peptide
SKVIMEYKFKIKPTKGILYLISIPELDQ

SEQ ID NO: 30321 - protein, 34 aa, Artificial Sequence; identical to SEQ ID NO: 2166
  Cyclic GFR-binding peptide
  MOD_RES (28)..(29): Xaa is C or S

SEQ ID NO: 30322 - protein, 30 aa, Artificial Sequence; identical to SEQ ID NO: 2169
  Cyclic GFR-binding peptide
  MOD_RES (2)..(4): Xaa is C or S

SEQ ID NO: 30323 - protein, 28 aa, Artificial Sequence
  Cyclic GFR-binding peptide
  MOD_RES (27)..(28): Xaa is C or S
NRYKKLIVNNSSDFYLVSIANLKTPAXX

SEQ ID NO: 30324 - protein, 31 aa, Artificial Sequence; identical to SEQ ID NO: 2171
  Cyclic GFR-binding peptide
  MOD_RES (31)..(31): Xaa is C or S

SEQ ID NO: 30325 - protein, 31 aa, Artificial Sequence
  Cyclic GFR-binding peptide
  MOD_RES (26)..(27): Xaa is C or S
YHYKLYTVVGKDKYLISIPSLKTPVXXAKSA

SEQ ID NO: 30326 - protein, 30 aa, Artificial Sequence
  Cyclic GFR-binding peptide
SVAMGRYKKLYTVVGKDFYLISIANLKTPV

SEQ ID NO: 30327 - protein, 29 aa, Artificial Sequence
  Cyclic GFR-binding peptide
RVVMNYHYKLIVNSSDDKYLVSIPSLQTP

SEQ ID NO: 30328 - protein, 33 aa, Artificial Sequence
  Cyclic GFR-binding peptide
  MOD_RES (1)..(32)..(33): Xaa is C or S
XSKVIMEYKFKIKPTKGILYLISIPELDQSVXX

SEQ ID NO: 30329 - protein, 26 aa, Artificial Sequence
  Cyclic GFR-binding peptide
SKVVMEYKFKVKPTRGVLYLISIPEL

SEQ ID NO: 30330 - protein, 26 aa, Artificial Sequence
  Cyclic GFR-binding peptide
MNYHYKLIVNNSSDKYLVSIPSLKTP

SEQ ID NO: 30331 - protein, 29 aa, Artificial Sequence
  Cyclic GFR-binding peptide
KVVMNRYKKLIVNNSSDFYLVSIANLKTP

SEQ ID NO: 30332 - protein, 30 aa, Artificial Sequence; identical to SEQ ID NO: 2182
  Cyclic GFR-binding peptide
  MOD_RES (30)..(30): Xaa is C or S

SEQ ID NO: 30333 - protein, 31 aa, Artificial Sequence; identical to SEQ ID NO: 2184
  Cyclic GFR-binding peptide
  MOD_RES (2)..(2): Xaa is C or S

SEQ ID NO: 30334 - protein, 21 aa, Artificial Sequence
  Cyclic GFR-binding peptide
GEYQKYYTVVGKDIYLISIPS

SEQ ID NO: 30335 - protein, 37 aa, Artificial Sequence; identical to SEQ ID NO: 2185
  Cyclic GFR-binding peptide
  MOD_RES (32)..(33): Xaa is C or S

SEQ ID NO: 30336 - protein, 30 aa, Artificial Sequence
  Cyclic GFR-binding peptide
SRVIMEYQKYVKPKRGVIYLISIPSLAQPV

SEQ ID NO: 30337 - protein, 29 aa, Artificial Sequence
  Cyclic GFR-binding peptide
  MOD_RES (1)..(1): Xaa is C or S
XAKVVMNYHYKLIVNNSSDKYLVSIPSLK

SEQ ID NO: 30338 - protein, 39 aa, Artificial Sequence
  Cyclic GFR-binding peptide
  MOD_RES (1)..(34)..(35): Xaa is C or S
XEAVSMGEEYQKYTPVGMDDIYLVSIPSLKTPVXXAKGV

SEQ ID NO: 30339 - protein, 34 aa, Artificial Sequence; identical to SEQ ID NO: 2187
  Cyclic GFR-binding peptide
  MOD_RES (2)..(2): Xaa is C or S

SEQ ID NO: 30340 - protein, 42 aa, Artificial Sequence; identical to SEQ ID NO: 2188
  Cyclic GFR-binding peptide
  MOD_RES (2)..(4)..(36): Xaa is C or S

SEQ ID NO: 30341 - protein, 28 aa, Artificial Sequence
  Cyclic GFR-binding peptide
  MOD_RES (28)..(28): Xaa is C or S
MNEYKFKIVNSSDDLYLVSIPELKTPAX

SEQ ID NO: 30342 - protein, 37 aa, Artificial Sequence
  Cyclic GFR-binding peptide
  MOD_RES (1)..(3)..(34)..(35): Xaa is C or S
XKXSKVIMEYKFKIKPTKGILYLISIPELDQSVXXPS

SEQ ID NO: 30343 - protein, 27 aa, Artificial Sequence
  Cyclic GFR-binding peptide
EVVMDRYKKLVVNNAADFYLISIANLR

SEQ ID NO: 30344 - protein, 30 aa, Artificial Sequence; identical to SEQ ID NO: 2190
  Cyclic GFR-binding peptide
  MOD_RES (28)..(29): Xaa is C or S

SEQ ID NO: 30345 - protein, 23 aa, Artificial Sequence
  Cyclic GFR-binding peptide
VIMEYKFKVKPKRGVLYLISIPE

SEQ ID NO: 30346 - protein, 36 aa, Artificial Sequence
  Cyclic GFR-binding peptide
  MOD_RES (30)..(30): Xaa is C or S
VVMNEYQKYIVNSSDDIYLVSIPSLKTPAXTPKTVH

SEQ ID NO: 30347 - protein, 36 aa, Artificial Sequence
  Cyclic GFR-binding peptide
  MOD_RES (31)..(32): Xaa is C or S
RVVMNEYQKYIVNSSDDIYLVSIPSLQTPAXXPKPV

SEQ ID NO: 30348 - protein, 40 aa, Artificial Sequence
  Cyclic GFR-binding peptide
  MOD_RES (2)..(4)..(36): Xaa is C or S
HXGXSRVVMNEYKFKIVNSSDDLYLVSIPELKTPAXTPKT

SEQ ID NO: 30349 - protein, 32 aa, Artificial Sequence; identical to SEQ ID NO: 2194
  Cyclic GFR-binding peptide
  MOD_RES (2)..(4): Xaa is C or S

SEQ ID NO: 30350 - protein, 36 aa, Artificial Sequence; identical to SEQ ID NO: 2197
  Cyclic GFR-binding peptide
  MOD_RES (30)..(31): Xaa is C or S

SEQ ID NO: 30351 - protein, 29 aa, Artificial Sequence
  Cyclic GFR-binding peptide
VVMNEYKFKIVNSSDDLYLVSIPELQTPA

SEQ ID NO: 30352 - protein, 21 aa, Artificial Sequence
  Cyclic GFR-binding peptide
EYQKYVKPKRGVIYLISIPSL

SEQ ID NO: 30353 - protein, 25 aa, Artificial Sequence
  Cyclic GFR-binding peptide
SKVVMEYKFKVKPTRGVLYLISIPE

SEQ ID NO: 30354 - protein, 31 aa, Artificial Sequence
  Cyclic GFR-binding peptide
  MOD_RES (1)..(3): Xaa is C or S
XGXAKVVMNEYQKYIVNNSSDIYLVSIPSLK

SEQ ID NO: 30355 - protein, 38 aa, Artificial Sequence
  Cyclic GFR-binding peptide
  MOD_RES (2)..(33)..(34): Xaa is C or S
KXSKVVMEYKFKVKPTRGVLYLISIPELDQPVXXPSAS

SEQ ID NO: 30356 - protein, 23 aa, Artificial Sequence
  Cyclic GFR-binding peptide
MRYKKLIKPTKGIFYLISIANLD

SEQ ID NO: 30357 - protein, 27 aa, Artificial Sequence
  Cyclic GFR-binding peptide
AEVVMDEYKFKVVNNAADLYLISIPEL

SEQ ID NO: 30358 - protein, 26 aa, Artificial Sequence
  Cyclic GFR-binding peptide
VMNEYKFKIVNSSDDLYLVSIPELKT

SEQ ID NO: 30359 - protein, 35 aa, Artificial Sequence; identical to SEQ ID NO: 2204
  Cyclic GFR-binding peptide
  MOD_RES (2)..(4): Xaa is C or S

SEQ ID NO: 30360 - protein, 39 aa, Artificial Sequence; identical to SEQ ID NO: 2205
  Cyclic GFR-binding peptide
  MOD_RES (1)..(33)..(34): Xaa is C or S

SEQ ID NO: 30361 - protein, 28 aa, Artificial Sequence
  Cyclic GFR-binding peptide
  MOD_RES (28)..(28): Xaa is C or S
GEEYQKYTPVGMDDIYLVSIPSLKTPVX

SEQ ID NO: 30362 - protein, 25 aa, Artificial Sequence
  Cyclic GFR-binding peptide
RYKKLVKPTRGVFYLISIANLDQPV

SEQ ID NO: 30363 - protein, 27 aa, Artificial Sequence
  Cyclic GFR-binding peptide
  MOD_RES (26)..(27): Xaa is C or S
EYQKYVKPKRGVIYLISIPSLAQPVXX

SEQ ID NO: 30364 - protein, 27 aa, Artificial Sequence
  Cyclic GFR-binding peptide
AEVVMDRYKKLVVNNAADFYLISIANL

SEQ ID NO: 30365 - protein, 31 aa, Artificial Sequence
  Cyclic GFR-binding peptide
  MOD_RES (1)..(3): Xaa is C or S
XKXSRVIMEYQKYVKPKRGVIYLISIPSLAQ

SEQ ID NO: 30366 - protein, 32 aa, Artificial Sequence; identical to SEQ ID NO: 2213
  Cyclic GFR-binding peptide
  MOD_RES (27)..(28): Xaa is C or S

SEQ ID NO: 30367 - protein, 30 aa, Artificial Sequence; identical to SEQ ID NO: 2214
  Cyclic GFR-binding peptide
  MOD_RES (28)..(29): Xaa is C or S

SEQ ID NO: 30368 - protein, 23 aa, Artificial Sequence
  Cyclic GFR-binding peptide
VIMRYKKLIKPTKGIFYLISIAN

SEQ ID NO: 30369 - protein, 24 aa, Artificial Sequence
  Cyclic GFR-binding peptide
VMNEYKFKIVNSSDDLYLVSIPEL

SEQ ID NO: 30370 - protein, 32 aa, Artificial Sequence; identical to SEQ ID NO: 2217
  Cyclic GFR-binding peptide
  MOD_RES (29)..(30): Xaa is C or S

SEQ ID NO: 30371 - protein, 24 aa, Artificial Sequence
  Cyclic GFR-binding peptide
VMNEYKFKIVNNSSDLYLVSIPEL

SEQ ID NO: 30372 - protein, 30 aa, Artificial Sequence
  Cyclic GFR-binding peptide
  MOD_RES (2)..(4): Xaa is C or S
SXKXSKVVMEYKFKVKPTRGVLYLISIPEL

SEQ ID NO: 30373 - protein, 37 aa, Artificial Sequence; identical to SEQ ID NO: 2221
  Cyclic GFR-binding peptide
  MOD_RES (1)..(32)..(33): Xaa is C or S

SEQ ID NO: 30374 - protein, 35 aa, Artificial Sequence
  Cyclic GFR-binding peptide
  MOD_RES (1)..(33)..(34): Xaa is C or S
XGEVVMDEYKFKVVKENEDLYLMSIPELETPVXXA

SEQ ID NO: 30375 - protein, 28 aa, Artificial Sequence
  Cyclic GFR-binding peptide
GEVVMDEYKFKVVKENEDLYLMSIPELE

SEQ ID NO: 30376 - protein, 29 aa, Artificial Sequence
  Cyclic GFR-binding peptide
  MOD_RES (28)..(29): Xaa is C or S
MNEYQKYIVNSSDDIYLVSIPSLQTPAXX

SEQ ID NO: 30377 - protein, 28 aa, Artificial Sequence
  Cyclic GFR-binding peptide
  MOD_RES (27)..(28): Xaa is C or S
NEYKFKIVNSSDDLYLVSIPELKTPAXX

SEQ ID NO: 30378 - protein, 25 aa, Artificial Sequence
  Cyclic GFR-binding peptide
MNEYKFKIVNNSSDLYLVSIPELKT

SEQ ID NO: 30379 - protein, 37 aa, Artificial Sequence
  Cyclic GFR-binding peptide
  MOD_RES (2)..(34)..(35): Xaa is C or S
GXAKVVMNEYQKYIVNNSSDIYLVSIPSLKTPAXXAK

SEQ ID NO: 30380 - protein, 34 aa, Artificial Sequence
  Cyclic GFR-binding peptide
  MOD_RES (29)..(30): Xaa is C or S
VMEEYQKYVVKDYEDIYLMSIPSLETPVXXAKPI

SEQ ID NO: 30381 - protein, 28 aa, Artificial Sequence
  Cyclic GFR-binding peptide
VVMNYHYKLIVNSSDDKYLVSIPSLQTP

SEQ ID NO: 30382 - protein, 29 aa, Artificial Sequence
  Cyclic GFR-binding peptide
  MOD_RES (1)..(3): Xaa is C or S
XGXESVAMGYHYKLYTVVGKDKYLISIPS

SEQ ID NO: 30383 - protein, 28 aa, Artificial Sequence
  Cyclic GFR-binding peptide
VVMYHYKLVKPTRGVKYLISIPSLDQPV

SEQ ID NO: 30384 - protein, 30 aa, Artificial Sequence; identical to SEQ ID NO: 2231
  Cyclic GFR-binding peptide
  MOD_RES (2)..(4): Xaa is C or S

SEQ ID NO: 30385 - protein, 25 aa, Artificial Sequence
  Cyclic GFR-binding peptide
RYKKLVVNNAADFYLISIANLRAPV

SEQ ID NO: 30386 - protein, 25 aa, Artificial Sequence
  Cyclic GFR-binding peptide
GEEYKFKTPVGMDDLYLVSIPELKT

SEQ ID NO: 30387 - protein, 34 aa, Artificial Sequence; identical to SEQ ID NO: 2236
  Cyclic GFR-binding peptide
  MOD_RES (29)..(30): Xaa is C or S

SEQ ID NO: 30388 - protein, 24 aa, Artificial Sequence
  Cyclic GFR-binding peptide
RVIMRYKKLVKPKRGVFYLISIAN

SEQ ID NO: 30389 - protein, 26 aa, Artificial Sequence
  Cyclic GFR-binding peptide
DEYQKYVVKENEDIYLMSIPSLETPV

SEQ ID NO: 30390 - protein, 36 aa, Artificial Sequence; identical to SEQ ID NO: 2239
  Cyclic GFR-binding peptide
  MOD_RES (2)..(34)..(35): Xaa is C or S

SEQ ID NO: 30391 - protein, 30 aa, Artificial Sequence
  Cyclic GFR-binding peptide
  MOD_RES (1)..(3): Xaa is C or S
XGXSRVVMNEYQKYIVNSSDDIYLVSIPSL

SEQ ID NO: 30392 - protein, 35 aa, Artificial Sequence
  Cyclic GFR-binding peptide
  MOD_RES (31)..(32): Xaa is C or S
EVVMDRYKKLVVNNAADFYLISIANLRAPVXXSAP

SEQ ID NO: 30393 - protein, 34 aa, Artificial Sequence
  Cyclic GFR-binding peptide
  MOD_RES (31)..(32): Xaa is C or S
EVVMDYHYKLVVNNAADKYLISIPSLRAPVXXSA

SEQ ID NO: 30394 - protein, 34 aa, Artificial Sequence; identical to SEQ ID NO: 2247
  Cyclic GFR-binding peptide
  MOD_RES (1)..(32)..(33): Xaa is C or S

SEQ ID NO: 30395 - protein, 39 aa, Artificial Sequence
  Cyclic GFR-binding peptide
  MOD_RES (1)..(33)..(34): Xaa is C or S
XAEVVMDRYKKLVVNNAADFYLISIANLRAPVXXSAPAA

SEQ ID NO: 30396 - protein, 23 aa, Artificial Sequence
  Cyclic GFR-binding peptide
YHYKLVVKENEDKYLMSIPSLET

SEQ ID NO: 30397 - protein, 36 aa, Artificial Sequence
  Cyclic GFR-binding peptide
  MOD_RES (2)..(4): Xaa is C or S
RXGXEAVSMGEEYKFKTPVGMDDLYLVSIPELKTPV

SEQ ID NO: 30398 - protein, 22 aa, Artificial Sequence
  Cyclic GFR-binding peptide
MNRYKKLIVNSSDDFYLVSIAN

SEQ ID NO: 30399 - protein, 33 aa, Artificial Sequence
  Cyclic GFR-binding peptide
  MOD_RES (2)..(4): Xaa is C or S
RXGXGEVVMEEYQKYVVKDYEDIYLMSIPSLET

SEQ ID NO: 30400 - protein, 31 aa, Artificial Sequence; identical to SEQ ID NO: 2250
  Cyclic GFR-binding peptide

SEQ ID NO: 30401 - protein, 33 aa, Artificial Sequence; identical to SEQ ID NO: 2251
  Cyclic GFR-binding peptide
  MOD_RES (31)..(32): Xaa is C or S

SEQ ID NO: 30402 - protein, 29 aa, Artificial Sequence
  Cyclic GFR-binding peptide
  MOD_RES (1)..(3): Xaa is C or S
XGXAKVVMNEYKFKIVNNSSDLYLVSIPE

SEQ ID NO: 30403 - protein, 32 aa, Artificial Sequence; identical to SEQ ID NO: 2253
  Cyclic GFR-binding peptide
  MOD_RES (26)..(27): Xaa is C or S

SEQ ID NO: 30404 - protein, 25 aa, Artificial Sequence
  Cyclic GFR-binding peptide
KVVMEYQKYVKPTRGVIYLISIPSL

SEQ ID NO: 30405 - protein, 29 aa, Artificial Sequence
  Cyclic GFR-binding peptide
  MOD_RES (2)..(4): Xaa is C or S
SXKXSKVVMRYKKLVKPTRGVFYLISIAN

SEQ ID NO: 30406 - protein, 37 aa, Artificial Sequence; identical to SEQ ID NO: 2258
  Cyclic GFR-binding peptide
  MOD_RES (2)..(4)..(36)..(37): Xaa is C or S

SEQ ID NO: 30407 - protein, 37 aa, Artificial Sequence; identical to SEQ ID NO: 2259
  Cyclic GFR-binding peptide
  MOD_RES (2)..(4)..(36)..(37): Xaa is C or S

SEQ ID NO: 30408 - protein, 28 aa, Artificial Sequence
  Cyclic GFR-binding peptide
VVMDEYKFKVVKENEDLYLMSIPELETP

SEQ ID NO: 30409 - protein, 41 aa, Artificial Sequence
  Cyclic GFR-binding peptide
  MOD_RES (1)..(3)..(35)..(36): Xaa is C or S
XGXESVAMGRYKKLYTVVGKDFYLISIANLKTPVXXAKSAK

SEQ ID NO: 30410 - protein, 37 aa, Artificial Sequence
  Cyclic GFR-binding peptide
  MOD_RES (31)..(32): Xaa is C or S
EVVMDEYQKYVVKENEDIYLMSIPSLETPVXXAKPIK

SEQ ID NO: 30411 - protein, 31 aa, Artificial Sequence; identical to SEQ ID NO: 2262
  Cyclic GFR-binding peptide
  MOD_RES (2)..(4): Xaa is C or S

SEQ ID NO: 30412 - protein, 28 aa, Artificial Sequence
  Cyclic GFR-binding peptide
  MOD_RES (1)..(1): Xaa is C or S
XSKVIMEYQKYIKPTKGIIYLISIPSLD

SEQ ID NO: 30413 - protein, 32 aa, Artificial Sequence; identical to SEQ ID NO: 2263
  Cyclic GFR-binding peptide
  MOD_RES (2)..(4): Xaa is C or S

SEQ ID NO: 30414 - protein, 32 aa, Artificial Sequence; identical to SEQ ID NO: 2264
  Cyclic GFR-binding peptide
  MOD_RES (30)..(30): Xaa is C or S

SEQ ID NO: 30415 - protein, 37 aa, Artificial Sequence; identical to SEQ ID NO: 2265
  Cyclic GFR-binding peptide
  MOD_RES (1)..(3)..(34)..(35): Xaa is C or S

SEQ ID NO: 30416 - protein, 28 aa, Artificial Sequence
  Cyclic GFR-binding peptide
ESVAMGRYKKLYTVVGKDFYLISIANLK

SEQ ID NO: 30417 - protein, 33 aa, Artificial Sequence; identical to SEQ ID NO: 2268
  Cyclic GFR-binding peptide
  MOD_RES (2)..(4): Xaa is C or S

SEQ ID NO: 30418 - protein, 34 aa, Artificial Sequence; identical to SEQ ID NO: 2270
  Cyclic GFR-binding peptide
  MOD_RES (29)..(30): Xaa is C or S

SEQ ID NO: 30419 - protein, 24 aa, Artificial Sequence
  Cyclic GFR-binding peptide
EYQKYVKPTRGVIYLISIPSLDQP

SEQ ID NO: 30420 - protein, 30 aa, Artificial Sequence
  Cyclic GFR-binding peptide
  MOD_RES (26)..(27): Xaa is C or S
EYQKYTPVGMDDIYLVSIPSLKTPVXXAKG

SEQ ID NO: 30421 - protein, 22 aa, Artificial Sequence
  Cyclic GFR-binding peptide
EYQKYIVNSSDDIYLVSIPSLQ

SEQ ID NO: 30422 - protein, 32 aa, Artificial Sequence
  Cyclic GFR-binding peptide
  MOD_RES (30)..(31): Xaa is C or S
KVVMEYKFKVKPTRGVLYLISIPELDQPVXXP

SEQ ID NO: 30423 - protein, 40 aa, Artificial Sequence; identical to SEQ ID NO: 2272
  Cyclic GFR-binding peptide
  MOD_RES (2)..(34)..(35): Xaa is C or S

SEQ ID NO: 30424 - protein, 37 aa, Artificial Sequence
  Cyclic GFR-binding peptide
  MOD_RES (31)..(32): Xaa is C or S
SKVIMEYKFKIKPTKGILYLISIPELDQSVXXPSASA

SEQ ID NO: 30425 - protein, 39 aa, Artificial Sequence
  Cyclic GFR-binding peptide
  MOD_RES (2)..(34)..(35): Xaa is C or S
GXAEVVMDYHYKLVVNNAADKYLISIPSLRAPVXXSAPA

SEQ ID NO: 30426 - protein, 27 aa, Artificial Sequence
  Cyclic GFR-binding peptide
VSMGEEYKFKTPVGMDDLYLVSIPELK

SEQ ID NO: 30427 - protein, 28 aa, Artificial Sequence
  Cyclic GFR-binding peptide
  MOD_RES (26)..(27): Xaa is C or S
YHYKLYTVVGKDKYLISIPSLKTPVXXA

SEQ ID NO: 30428 - protein, 26 aa, Artificial Sequence
  Cyclic GFR-binding peptide
EVVMDYHYKLVVKENEDKYLMSIPSL

SEQ ID NO: 30429 - protein, 27 aa, Artificial Sequence
  Cyclic GFR-binding peptide
EVVMDEYKFKVVNNAADLYLISIPELR

SEQ ID NO: 30430 - protein, 25 aa, Artificial Sequence
  Cyclic GFR-binding peptide
RYKKLIVNNSSDFYLVSIANLKTPA

SEQ ID NO: 30431 - protein, 25 aa, Artificial Sequence
  Cyclic GFR-binding peptide
EEYQKYTPVGMDDIYLVSIPSLKTP

SEQ ID NO: 30432 - protein, 30 aa, Artificial Sequence; identical to SEQ ID NO: 2279
  Cyclic GFR-binding peptide
  MOD_RES (30)..(30): Xaa is C or S

SEQ ID NO: 30433 - protein, 32 aa, Artificial Sequence
  Cyclic GFR-binding peptide
  MOD_RES (30)..(31): Xaa is C or S
SMGEEYQKYTPVGMDDIYLVSIPSLKTPVXXA

SEQ ID NO: 30434 - protein, 30 aa, Artificial Sequence; identical to SEQ ID NO: 2284
  Cyclic GFR-binding peptide
  MOD_RES (27)..(28): Xaa is C or S

SEQ ID NO: 30435 - protein, 36 aa, Artificial Sequence; identical to SEQ ID NO: 2285
  Cyclic GFR-binding peptide
  MOD_RES (2)..(4)..(36): Xaa is C or S

SEQ ID NO: 30436 - protein, 33 aa, Artificial Sequence
  Cyclic GFR-binding peptide
  MOD_RES (33)..(33): Xaa is C or S
EAVSMGEEYKFKTPVGMDDLYLVSIPELKTPVX

SEQ ID NO: 30437 - protein, 23 aa, Artificial Sequence
  Cyclic GFR-binding peptide
VIMEYQKYIKPTKGIIYLISIPS

SEQ ID NO: 30438 - protein, 28 aa, Artificial Sequence
  Cyclic GFR-binding peptide
  MOD_RES (2)..(2): Xaa is C or S
KXSKVVMRYKKLVKPTRGVFYLISIANL

SEQ ID NO: 30439 - protein, 27 aa, Artificial Sequence
  Cyclic GFR-binding peptide
  MOD_RES (1)..(1): Xaa is C or S
XSRVVMNRYKKLIVNSSDDFYLVSIAN

SEQ ID NO: 30440 - protein, 28 aa, Artificial Sequence
  Cyclic GFR-binding peptide
  MOD_RES (28)..(28): Xaa is C or S
MEYHYKLVVKDYEDKYLMSIPSLETPVX

SEQ ID NO: 30441 - protein, 32 aa, Artificial Sequence
  Cyclic GFR-binding peptide
  MOD_RES (32)..(32): Xaa is C or S
AEVVMDYHYKLVVNNAADKYLISIPSLRAPVX

SEQ ID NO: 30442 - protein, 29 aa, Artificial Sequence
  Cyclic GFR-binding peptide
RVVMNEYKFKIVNSSDDLYLVSIPELKTP

SEQ ID NO: 30443 - protein, 29 aa, Artificial Sequence
  Cyclic GFR-binding peptide
  MOD_RES (1)..(1): Xaa is C or S
XAKVVMNRYKKLIVNNSSDFYLVSIANLK

SEQ ID NO: 30444 - protein, 37 aa, Artificial Sequence
  Cyclic GFR-binding peptide
  MOD_RES (32)..(33): Xaa is C or S
AVSMGEEYQKYTPVGMDDIYLVSIPSLKTPVXXAKGV

SEQ ID NO: 30445 - protein, 25 aa, Artificial Sequence
  Cyclic GFR-binding peptide
SKVVMRYKKLVKPTRGVFYLISIAN

SEQ ID NO: 30446 - protein, 24 aa, Artificial Sequence
  Cyclic GFR-binding peptide
MNRYKKLIVNSSDDFYLVSIANLK

SEQ ID NO: 30447 - protein, 27 aa, Artificial Sequence
  Cyclic GFR-binding peptide
  MOD_RES (26)..(27): Xaa is C or S
EYQKYIKPTKGIIYLISIPSLDQSVXX

SEQ ID NO: 30448 - protein, 28 aa, Artificial Sequence
  Cyclic GFR-binding peptide
SKVIMRYKKLIKPTKGIFYLISIANLDQ

SEQ ID NO: 30449 - protein, 29 aa, Artificial Sequence
  Cyclic GFR-binding peptide
EVVMEEYQKYVVKDYEDIYLMSIPSLETP

SEQ ID NO: 30450 - protein, 31 aa, Artificial Sequence
  Cyclic GFR-binding peptide
  MOD_RES (2)..(4): Xaa is C or S
SXKXSKVIMEYQKYIKPTKGIIYLISIPSLD

SEQ ID NO: 30451 - protein, 32 aa, Artificial Sequence
  Cyclic GFR-binding peptide
  MOD_RES (27)..(28): Xaa is C or S
DRYKKLVVNNAADFYLISIANLRAPVXXSAPA

SEQ ID NO: 30452 - protein, 30 aa, Artificial Sequence; identical to SEQ ID NO: 2311
  Cyclic GFR-binding peptide
  MOD_RES (1)..(1): Xaa is C or S

SEQ ID NO: 30453 - protein, 30 aa, Artificial Sequence
  Cyclic GFR-binding peptide
ESVAMGEYQKYYTVVGKDIYLISIPSLKTP

SEQ ID NO: 30454 - protein, 42 aa, Artificial Sequence
  Cyclic GFR-binding peptide
  MOD_RES (2)..(4)..(36)..(37): Xaa is C or S
RXGXGEVVMEEYKFKVVKDYEDLYLMSIPELETPVXXAKPIS

SEQ ID NO: 30455 - protein, 27 aa, Artificial Sequence
  Cyclic GFR-binding peptide
VVMNRYKKLIVNSSDDFYLVSIANLKT

SEQ ID NO: 30456 - protein, 27 aa, Artificial Sequence
  Cyclic GFR-binding peptide
  MOD_RES (1)..(1): Xaa is C or S
XGEVVMERYKKLVVKDYEDFYLMSIAN

SEQ ID NO: 30457 - protein, 34 aa, Artificial Sequence; identical to SEQ ID NO: 2319
  Cyclic GFR-binding peptide
  MOD_RES (29)..(30): Xaa is C or S

SEQ ID NO: 30458 - protein, 32 aa, Artificial Sequence; identical to SEQ ID NO: 2320
  Cyclic GFR-binding peptide
  MOD_RES (30)..(31): Xaa is C or S

SEQ ID NO: 30459 - protein, 34 aa, Artificial Sequence; identical to SEQ ID NO: 2322
  Cyclic GFR-binding peptide
  MOD_RES (28)..(28): Xaa is C or S

SEQ ID NO: 30460 - protein, 40 aa, Artificial Sequence
  Cyclic GFR-binding peptide
  MOD_RES (1)..(3)..(34)..(35): Xaa is C or S
XKXSRVIMEYQKYVKPKRGVIYLISIPSLAQPVXXPAASA

SEQ ID NO: 30461 - protein, 36 aa, Artificial Sequence
  Cyclic GFR-binding peptide
  MOD_RES (2)..(35)..(36): Xaa is C or S
GXEAVSMGEEYKFKTPVGMDDLYLVSIPELKTPVXX

SEQ ID NO: 30462 - protein, 39 aa, Artificial Sequence; identical to SEQ ID NO: 2325
  Cyclic GFR-binding peptide
  MOD_RES (2)..(34)..(35): Xaa is C or S

SEQ ID NO: 30463 - protein, 38 aa, Artificial Sequence
  Cyclic GFR-binding peptide
  MOD_RES (1)..(3)..(35)..(36): Xaa is C or S
XGXESVAMGYHYKLYTVVGKDKYLISIPSLKTPVXXAK

SEQ ID NO: 30464 - protein, 37 aa, Artificial Sequence
  Cyclic GFR-binding peptide
  MOD_RES (1)..(33)..(34): Xaa is C or S
XGEVVMDEYQKYVVKENEDIYLMSIPSLETPVXXAKP

SEQ ID NO: 30465 - protein, 37 aa, Artificial Sequence; identical to SEQ ID NO: 2327
  Cyclic GFR-binding peptide
  MOD_RES (31)..(32): Xaa is C or S

SEQ ID NO: 30466 - protein, 35 aa, Artificial Sequence; identical to SEQ ID NO: 2328
  Cyclic GFR-binding peptide
  MOD_RES (30)..(31): Xaa is C or S

SEQ ID NO: 30467 - protein, 34 aa, Artificial Sequence; identical to SEQ ID NO: 2329
  Cyclic GFR-binding peptide
  MOD_RES (1)..(33): Xaa is C or S

SEQ ID NO: 30468 - protein, 21 aa, Artificial Sequence
  Cyclic GFR-binding peptide
EYQKYIVNNSSDIYLVSIPSL

SEQ ID NO: 30469 - protein, 30 aa, Artificial Sequence
  Cyclic GFR-binding peptide
  MOD_RES (2)..(2): Xaa is C or S
GXESVAMGYHYKLYTVVGKDKYLISIPSLK

SEQ ID NO: 30470 - protein, 24 aa, Artificial Sequence
  Cyclic GFR-binding peptide
MGYHYKLYTVVGKDKYLISIPSLK

SEQ ID NO: 30471 - protein, 31 aa, Artificial Sequence
  Cyclic GFR-binding peptide
  MOD_RES (29)..(30): Xaa is C or S
VMDEYQKYVVKENEDIYLMSIPSLETPVXXA

SEQ ID NO: 30472 - protein, 27 aa, Artificial Sequence
  Cyclic GFR-binding peptide
  MOD_RES (1)..(1): Xaa is C or S
XGEVVMEYHYKLVVKDYEDKYLMSIPS

SEQ ID NO: 30473 - protein, 37 aa, Artificial Sequence
  Cyclic GFR-binding peptide
  MOD_RES (2)..(33)..(34): Xaa is C or S
KXSRVIMEYKFKVKPKRGVLYLISIPELAQPVXXPAA

SEQ ID NO: 30474 - protein, 33 aa, Artificial Sequence
  Cyclic GFR-binding peptide
  MOD_RES (27)..(28): Xaa is C or S
DEYKFKVVKENEDLYLMSIPELETPVXXAKPIK

SEQ ID NO: 30475 - protein, 27 aa, Artificial Sequence
  Cyclic GFR-binding peptide
  MOD_RES (1)..(1): Xaa is C or S
XARVVMNEYKFKIVNSSDDLYLVSIPE

SEQ ID NO: 30476 - protein, 36 aa, Artificial Sequence
  Cyclic GFR-binding peptide
  MOD_RES (30)..(31): Xaa is C or S
KVVMEYKFKVKPTRGVLYLISIPELDQPVXXPSASA

SEQ ID NO: 30477 - protein, 33 aa, Artificial Sequence
  Cyclic GFR-binding peptide
  MOD_RES (31)..(32): Xaa is C or S
RVVMNEYQKYIVNSSDDIYLVSIPSLKTPAXXP

SEQ ID NO: 30478 - protein, 38 aa, Artificial Sequence
  Cyclic GFR-binding peptide
  MOD_RES (1)..(33)..(34): Xaa is C or S
XGEVVMEEYKFKVVKDYEDLYLMSIPELETPVXXAKPI

SEQ ID NO: 30479 - protein, 32 aa, Artificial Sequence; identical to SEQ ID NO: 2334
  Cyclic GFR-binding peptide
  MOD_RES (2)..(2): Xaa is C or S

SEQ ID NO: 30480 - protein, 34 aa, Artificial Sequence
  Cyclic GFR-binding peptide
  MOD_RES (2)..(34): Xaa is C or S
GXGEVVMEEYKFKVVKDYEDLYLMSIPELETPVX

SEQ ID NO: 30481 - protein, 40 aa, Artificial Sequence; identical to SEQ ID NO: 2337
  Cyclic GFR-binding peptide
  MOD_RES (2)..(34)..(35): Xaa is C or S

SEQ ID NO: 30482 - protein, 38 aa, Artificial Sequence
  Cyclic GFR-binding peptide
  MOD_RES (1)..(3)..(36)..(37): Xaa is C or S
XGXEAVSMGEEYQKYTPVGMDDIYLVSIPSLKTPVXXA

SEQ ID NO: 30483 - protein, 32 aa, Artificial Sequence
  Cyclic GFR-binding peptide
  MOD_RES (30)..(31): Xaa is C or S
VVMEEYKFKVVKDYEDLYLMSIPELETPVXXA

SEQ ID NO: 30484 - protein, 30 aa, Artificial Sequence
  Cyclic GFR-binding peptide
  MOD_RES (2)..(4): Xaa is C or S
RXGXESVAMGEYKFKYTVVGKDLYLISIPE

SEQ ID NO: 30485 - protein, 29 aa, Artificial Sequence
  Cyclic GFR-binding peptide
KVVMNEYKFKIVNNSSDLYLVSIPELKTP

SEQ ID NO: 30486 - protein, 31 aa, Artificial Sequence
  Cyclic GFR-binding peptide
GEVVMDEYQKYVVKENEDIYLMSIPSLETPV

SEQ ID NO: 30487 - protein, 35 aa, Artificial Sequence; identical to SEQ ID NO: 2339
  Cyclic GFR-binding peptide
  MOD_RES (32)..(33): Xaa is C or S

SEQ ID NO: 30488 - protein, 30 aa, Artificial Sequence; identical to SEQ ID NO: 2340
  Cyclic GFR-binding peptide
  MOD_RES (26)..(27): Xaa is C or S

SEQ ID NO: 30489 - protein, 35 aa, Artificial Sequence; identical to SEQ ID NO: 2342
  Cyclic GFR-binding peptide
  MOD_RES (30)..(31): Xaa is C or S

SEQ ID NO: 30490 - protein, 27 aa, Artificial Sequence
  Cyclic GFR-binding peptide
  MOD_RES (1)..(1): Xaa is C or S
XAEVVMDEYKFKVVNNAADLYLISIPE

SEQ ID NO: 30491 - protein, 31 aa, Artificial Sequence; identical to SEQ ID NO: 2345
  Cyclic GFR-binding peptide

SEQ ID NO: 30492 - protein, 35 aa, Artificial Sequence
  Cyclic GFR-binding peptide
  MOD_RES (32)..(32): Xaa is C or S
SRVVMNEYKFKIVNSSDDLYLVSIPELKTPAXTPK

SEQ ID NO: 30493 - protein, 28 aa, Artificial Sequence
  Cyclic GFR-binding peptide
  MOD_RES (27)..(28): Xaa is C or S
EEYQKYVVKDYEDIYLMSIPSLETPVXX

SEQ ID NO: 30494 - protein, 23 aa, Artificial Sequence
  Cyclic GFR-binding peptide
MNYHYKLIVNNSSDKYLVSIPSL

SEQ ID NO: 30495 - protein, 32 aa, Artificial Sequence
  Cyclic GFR-binding peptide
  MOD_RES (2)..(2): Xaa is C or S
GXEAVSMGEEYQKYTPVGMDDIYLVSIPSLKT

SEQ ID NO: 30496 - protein, 31 aa, Artificial Sequence
  Cyclic GFR-binding peptide
  MOD_RES (26)..(27): Xaa is C or S
RYKKLYTVVGKDFYLISIANLKTPVXXAKSA

SEQ ID NO: 30497 - protein, 33 aa, Artificial Sequence
  Cyclic GFR-binding peptide
  MOD_RES (30)..(31): Xaa is C or S
VVMNEYKFKIVNSSDDLYLVSIPELQTPAXXPK

SEQ ID NO: 30498 - protein, 35 aa, Artificial Sequence
  Cyclic GFR-binding peptide
  MOD_RES (2)..(4): Xaa is C or S
RXGXGEVVMEEYKFKVVKDYEDLYLMSIPELETPV

SEQ ID NO: 30499 - protein, 35 aa, Artificial Sequence
  Cyclic GFR-binding peptide
  MOD_RES (31)..(32): Xaa is C or S
VSMGEEYQKYTPVGMDDIYLVSIPSLKTPVXXAKG

SEQ ID NO: 30500 - protein, 22 aa, Artificial Sequence
  Cyclic GFR-binding peptide
RYKKLVVKDYEDFYLMSIANLE

SEQ ID NO: 30501 - protein, 32 aa, Artificial Sequence
  Cyclic GFR-binding peptide
  MOD_RES (31)..(32): Xaa is C or S
SKVVMEYKFKVKPTRGVLYLISIPELDQPVXX

SEQ ID NO: 30502 - protein, 35 aa, Artificial Sequence; identical to SEQ ID NO: 2354
  Cyclic GFR-binding peptide
  MOD_RES (29)..(30): Xaa is C or S

SEQ ID NO: 30503 - protein, 41 aa, Artificial Sequence
  Cyclic GFR-binding peptide
  MOD_RES (2)..(4)..(36)..(37): Xaa is C or S
RXGXESVAMGEYQKYYTVVGKDIYLISIPSLKTPVXXAKSA

SEQ ID NO: 30504 - protein, 40 aa, Artificial Sequence; identical to SEQ ID NO: 2355
  Cyclic GFR-binding peptide
  MOD_RES (2)..(4)..(36): Xaa is C or S

SEQ ID NO: 30505 - protein, 35 aa, Artificial Sequence
  Cyclic GFR-binding peptide
  MOD_RES (1)..(33)..(34): Xaa is C or S
XESVAMGYHYKLYTVVGKDKYLISIPSLKTPVXXA

SEQ ID NO: 30506 - protein, 37 aa, Artificial Sequence; identical to SEQ ID NO: 2356
  Cyclic GFR-binding peptide
  MOD_RES (1)..(33): Xaa is C or S

SEQ ID NO: 30507 - protein, 31 aa, Artificial Sequence; identical to SEQ ID NO: 2357
  Cyclic GFR-binding peptide
  MOD_RES (30)..(31): Xaa is C or S

SEQ ID NO: 30508 - protein, 30 aa, Artificial Sequence
  Cyclic GFR-binding peptide
  MOD_RES (30)..(30): Xaa is C or S
VVMNEYKFKIVNSSDDLYLVSIPELQTPAX

SEQ ID NO: 30509 - protein, 24 aa, Artificial Sequence
  Cyclic GFR-binding peptide
MEYKFKVKPTRGVLYLISIPELDQ

SEQ ID NO: 30510 - protein, 28 aa, Artificial Sequence
  Cyclic GFR-binding peptide
EAVSMGEEYQKYTPVGMDDIYLVSIPSL

SEQ ID NO: 30511 - protein, 31 aa, Artificial Sequence; identical to SEQ ID NO: 2360
  Cyclic GFR-binding peptide
  MOD_RES (2)..(4): Xaa is C or S

SEQ ID NO: 30512 - protein, 31 aa, Artificial Sequence; identical to SEQ ID NO: 2364
  Cyclic GFR-binding peptide
  MOD_RES (28)..(29): Xaa is C or S

SEQ ID NO: 30513 - protein, 26 aa, Artificial Sequence
  Cyclic GFR-binding peptide
  MOD_RES (26)..(26): Xaa is C or S
EYQKYTPVGMDDIYLVSIPSLKTPVX

SEQ ID NO: 30514 - protein, 31 aa, Artificial Sequence; identical to SEQ ID NO: 2367
  Cyclic GFR-binding peptide
  MOD_RES (2)..(2): Xaa is C or S

SEQ ID NO: 30515 - protein, 22 aa, Artificial Sequence
  Cyclic GFR-binding peptide
DYHYKLVVNNAADKYLISIPSL

SEQ ID NO: 30516 - protein, 40 aa, Artificial Sequence
  Cyclic GFR-binding peptide
  MOD_RES (1)..(3)..(35)..(36): Xaa is C or S
XGXESVAMGRYKKLYTVVGKDFYLISIANLKTPVXXAKSA

SEQ ID NO: 30517 - protein, 32 aa, Artificial Sequence
  Cyclic GFR-binding peptide
  MOD_RES (27)..(28): Xaa is C or S
EEYKFKVVKDYEDLYLMSIPELETPVXXAKPI

SEQ ID NO: 30518 - protein, 23 aa, Artificial Sequence
  Cyclic GFR-binding peptide
VMEYHYKLVVKDYEDKYLMSIPS

SEQ ID NO: 30519 - protein, 33 aa, Artificial Sequence
  Cyclic GFR-binding peptide
  MOD_RES (30)..(31): Xaa is C or S
VVMNEYKFKIVNNSSDLYLVSIPELKTPAXXAK

SEQ ID NO: 30520 - protein, 29 aa, Artificial Sequence
  Cyclic GFR-binding peptide
  MOD_RES (27)..(28): Xaa is C or S
MEYKFKIKPTKGILYLISIPELDQSVXXP

SEQ ID NO: 30521 - protein, 27 aa, Artificial Sequence
  Cyclic GFR-binding peptide
ESVAMGYHYKLYTVVGKDKYLISIPSL

SEQ ID NO: 30522 - protein, 27 aa, Artificial Sequence
  Cyclic GFR-binding peptide
  MOD_RES (1)..(1): Xaa is C or S
XAEVVMDYHYKLVVNNAADKYLISIPS

SEQ ID NO: 30523 - protein, 40 aa, Artificial Sequence; identical to SEQ ID NO: 2370
  Cyclic GFR-binding peptide
  MOD_RES (2)..(4)..(35)..(36): Xaa is C or S

SEQ ID NO: 30524 - protein, 38 aa, Artificial Sequence
  Cyclic GFR-binding peptide
  MOD_RES (2)..(34)..(35): Xaa is C or S
GXGEVVMDEYQKYVVKENEDIYLMSIPSLETPVXXAKP

SEQ ID NO: 30525 - protein, 28 aa, Artificial Sequence
  Cyclic GFR-binding peptide
EVVMDYHYKLVVNNAADKYLISIPSLRA

SEQ ID NO: 30526 - protein, 22 aa, Artificial Sequence
  Cyclic GFR-binding peptide
RYKKLVKPTRGVFYLISIANLD

SEQ ID NO: 30527 - protein, 31 aa, Artificial Sequence
  Cyclic GFR-binding peptide
  MOD_RES (29)..(30): Xaa is C or S
VMNEYKFKIVNSSDDLYLVSIPELQTPAXXP

SEQ ID NO: 30528 - protein, 24 aa, Artificial Sequence
  Cyclic GFR-binding peptide
VAMGRYKKLYTVVGKDFYLISIAN

SEQ ID NO: 30529 - protein, 33 aa, Artificial Sequence
  Cyclic GFR-binding peptide
  MOD_RES (30)..(31): Xaa is C or S
VVMNEYQKYIVNSSDDIYLVSIPSLKTPAXXPK

SEQ ID NO: 30530 - protein, 34 aa, Artificial Sequence; identical to SEQ ID NO: 2376
  Cyclic GFR-binding peptide
  MOD_RES (1)..(33): Xaa is C or S

SEQ ID NO: 30531 - protein, 24 aa, Artificial Sequence
  Cyclic GFR-binding peptide
SMGEEYKFKTPVGMDDLYLVSIPE

SEQ ID NO: 30532 - protein, 32 aa, Artificial Sequence
  Cyclic GFR-binding peptide
  MOD_RES (27)..(28): Xaa is C or S
MEYQKYVKPTRGVIYLISIPSLDQPVXXPSAS

SEQ ID NO: 30533 - protein, 29 aa, Artificial Sequence
  Cyclic GFR-binding peptide
  MOD_RES (28)..(29): Xaa is C or S
MNEYKFKIVNNSSDLYLVSIPELKTPAXX

SEQ ID NO: 30534 - protein, 34 aa, Artificial Sequence; identical to SEQ ID NO: 2378
  Cyclic GFR-binding peptide
  MOD_RES (30)..(31): Xaa is C or S

SEQ ID NO: 30535 - protein, 40 aa, Artificial Sequence
  Cyclic GFR-binding peptide
  MOD_RES (1)..(3)..(35)..(36): Xaa is C or S
XGXAKVVMNEYQKYIVNNSSDIYLVSIPSLKTPAXXAKPV

SEQ ID NO: 30536 - protein, 28 aa, Artificial Sequence
  Cyclic GFR-binding peptide
  MOD_RES (28)..(28): Xaa is C or S
MNEYQKYIVNSSDDIYLVSIPSLKTPAX

SEQ ID NO: 30537 - protein, 38 aa, Artificial Sequence
  Cyclic GFR-binding peptide
  MOD_RES (2)..(33)..(34): Xaa is C or S
KXSKVIMEYKFKIKPTKGILYLISIPELDQSVXXPSAS

SEQ ID NO: 30538 - protein, 28 aa, Artificial Sequence
  Cyclic GFR-binding peptide
SMGEEYQKYTPVGMDDIYLVSIPSLKTP

SEQ ID NO: 30539 - protein, 33 aa, Artificial Sequence; identical to SEQ ID NO: 2384
  Cyclic GFR-binding peptide
  MOD_RES (32)..(33): Xaa is C or S

SEQ ID NO: 30540 - protein, 29 aa, Artificial Sequence
  Cyclic GFR-binding peptide
  MOD_RES (26)..(27): Xaa is C or S
EYQKYYTVVGKDIYLISIPSLKTPVXXAK

SEQ ID NO: 30541 - protein, 35 aa, Artificial Sequence
  Cyclic GFR-binding peptide
  MOD_RES (30)..(31): Xaa is C or S
VVMNEYQKYIVNNSSDIYLVSIPSLKTPAXXAKPV

SEQ ID NO: 30542 - protein, 29 aa, Artificial Sequence
  Cyclic GFR-binding peptide
RVVMNRYKKLIVNSSDDFYLVSIANLKTP

SEQ ID NO: 30543 - protein, 35 aa, Artificial Sequence
  Cyclic GFR-binding peptide
  MOD_RES (29)..(30): Xaa is C or S
VMDYHYKLVVNNAADKYLISIPSLRAPVXXSAPAA

SEQ ID NO: 30544 - protein, 33 aa, Artificial Sequence
  Cyclic GFR-binding peptide
  MOD_RES (2)..(4): Xaa is C or S
SXKXSRVIMEYKFKVKPKRGVLYLISIPELAQP

SEQ ID NO: 30545 - protein, 32 aa, Artificial Sequence
  Cyclic GFR-binding peptide
  MOD_RES (1)..(1): Xaa is C or S
XESVAMGRYKKLYTVVGKDFYLISIANLKTPV

SEQ ID NO: 30546 - protein, 23 aa, Artificial Sequence
  Cyclic GFR-binding peptide
MYHYKLIKPTKGIKYLISIPSLD

SEQ ID NO: 30547 - protein, 33 aa, Artificial Sequence
  Cyclic GFR-binding peptide
  MOD_RES (28)..(29): Xaa is C or S
MDEYQKYVVKENEDIYLMSIPSLETPVXXAKPI

SEQ ID NO: 30548 - protein, 35 aa, Artificial Sequence
  Cyclic GFR-binding peptide
  MOD_RES (29)..(30): Xaa is C or S
VMNEYQKYIVNNSSDIYLVSIPSLKTPAXXAKPVA

SEQ ID NO: 30549 - protein, 39 aa, Artificial Sequence; identical to SEQ ID NO: 2394
  Cyclic GFR-binding peptide
  MOD_RES (1)..(33)..(34): Xaa is C or S

SEQ ID NO: 30550 - protein, 36 aa, Artificial Sequence
  Cyclic GFR-binding peptide
  MOD_RES (2)..(34)..(35): Xaa is C or S
GXAEVVMDEYKFKVVNNAADLYLISIPELRAPVXXS

SEQ ID NO: 30551 - protein, 21 aa, Artificial Sequence
  Cyclic GFR-binding peptide
RYKKLTPVGMDDFYLVSIANL

SEQ ID NO: 30552 - protein, 32 aa, Artificial Sequence
  Cyclic GFR-binding peptide
  MOD_RES (29)..(30): Xaa is C or S
AMGYHYKLYTVVGKDKYLISIPSLKTPVXXAK

SEQ ID NO: 30553 - protein, 34 aa, Artificial Sequence
  Cyclic GFR-binding peptide
  MOD_RES (32)..(33): Xaa is C or S
AVSMGEEYQKYTPVGMDDIYLVSIPSLKTPVXXA

SEQ ID NO: 30554 - protein, 34 aa, Artificial Sequence; identical to SEQ ID NO: 2399
  Cyclic GFR-binding peptide
  MOD_RES (31)..(32): Xaa is C or S

SEQ ID NO: 30555 - protein, 31 aa, Artificial Sequence
  Cyclic GFR-binding peptide
  MOD_RES (2)..(4): Xaa is C or S
SXKXSRVIMEYKFKVKPKRGVLYLISIPELA

SEQ ID NO: 30556 - protein, 33 aa, Artificial Sequence; identical to SEQ ID NO: 2401
  Cyclic GFR-binding peptide
  MOD_RES (29)..(30): Xaa is C or S

SEQ ID NO: 30557 - protein, 35 aa, Artificial Sequence
  Cyclic GFR-binding peptide
  MOD_RES (30)..(31): Xaa is C or S
VVMDRYKKLVVNNAADFYLISIANLRAPVXXSAPA

SEQ ID NO: 30558 - protein, 36 aa, Artificial Sequence; identical to SEQ ID NO: 2402
  Cyclic GFR-binding peptide
  MOD_RES (2)..(4)..(36): Xaa is C or S

SEQ ID NO: 30559 - protein, 39 aa, Artificial Sequence; identical to SEQ ID NO: 2403
  Cyclic GFR-binding peptide
  MOD_RES (2)..(34)..(35): Xaa is C or S

SEQ ID NO: 30560 - protein, 29 aa, Artificial Sequence
  Cyclic GFR-binding peptide
  MOD_RES (1)..(1): Xaa is C or S
XARVVMNEYQKYIVNSSDDIYLVSIPSLQ

SEQ ID NO: 30561 - protein, 33 aa, Artificial Sequence; identical to SEQ ID NO: 2406
  Cyclic GFR-binding peptide
  MOD_RES (2)..(2): Xaa is C or S

SEQ ID NO: 30562 - protein, 36 aa, Artificial Sequence
  Cyclic GFR-binding peptide
  MOD_RES (2)..(34): Xaa is C or S
GXSRVVMNEYQKYIVNSSDDIYLVSIPSLKTPAXTP

SEQ ID NO: 30563 - protein, 27 aa, Artificial Sequence
  Cyclic GFR-binding peptide
KVVMNYHYKLIVNNSSDKYLVSIPSLK

SEQ ID NO: 30564 - protein, 30 aa, Artificial Sequence
  Cyclic GFR-binding peptide
  MOD_RES (28)..(29): Xaa is C or S
MDEYQKYVVKENEDIYLMSIPSLETPVXXA

SEQ ID NO: 30565 - protein, 25 aa, Artificial Sequence
  Cyclic GFR-binding peptide
EYQKYVVKENEDIYLMSIPSLETPV

SEQ ID NO: 30566 - protein, 28 aa, Artificial Sequence
  Cyclic GFR-binding peptide
  MOD_RES (27)..(28): Xaa is C or S
DEYKFKVVNNAADLYLISIPELRAPVXX

SEQ ID NO: 30567 - protein, 34 aa, Artificial Sequence
  Cyclic GFR-binding peptide
  MOD_RES (32)..(33): Xaa is C or S
AEVVMDRYKKLVVNNAADFYLISIANLRAPVXXS

SEQ ID NO: 30568 - protein, 29 aa, Artificial Sequence
  Cyclic GFR-binding peptide
  MOD_RES (29)..(29): Xaa is C or S
VMNYHYKLIVNSSDDKYLVSIPSLQTPAX

SEQ ID NO: 30569 - protein, 33 aa, Artificial Sequence; identical to SEQ ID NO: 2410
  Cyclic GFR-binding peptide
  MOD_RES (2)..(2): Xaa is C or S

SEQ ID NO: 30570 - protein, 26 aa, Artificial Sequence
  Cyclic GFR-binding peptide
VIMYHYKLIKPTKGIKYLISIPSLDQ

SEQ ID NO: 30571 - protein, 32 aa, Artificial Sequence
  Cyclic GFR-binding peptide
  MOD_RES (1)..(1): Xaa is C or S
XESVAMGYHYKLYTVVGKDKYLISIPSLKTPV

SEQ ID NO: 30572 - protein, 35 aa, Artificial Sequence
  Cyclic GFR-binding peptide
  MOD_RES (2)..(4): Xaa is C or S
RXGXEAVSMGEEYQKYTPVGMDDIYLVSIPSLKTP

SEQ ID NO: 30573 - protein, 29 aa, Artificial Sequence
  Cyclic GFR-binding peptide
  MOD_RES (27)..(27): Xaa is C or S
NEYKFKIVNSSDDLYLVSIPELKTPAXTP

SEQ ID NO: 30574 - protein, 34 aa, Artificial Sequence
  Cyclic GFR-binding peptide
  MOD_RES (29)..(29): Xaa is C or S
VMNEYQKYIVNSSDDIYLVSIPSLKTPAXTPKTV

SEQ ID NO: 30575 - protein, 39 aa, Artificial Sequence
  Cyclic GFR-binding peptide
  MOD_RES (1)..(3)..(35)..(36): Xaa is C or S
XGXAEVVMDEYKFKVVNNAADLYLISIPELRAPVXXSAP

SEQ ID NO: 30576 - protein, 22 aa, Artificial Sequence
  Cyclic GFR-binding peptide
EYQKYIKPTKGIIYLISIPSLD

SEQ ID NO: 30577 - protein, 34 aa, Artificial Sequence; identical to SEQ ID NO: 2416
  Cyclic GFR-binding peptide
  MOD_RES (2)..(4): Xaa is C or S

SEQ ID NO: 30578 - protein, 35 aa, Artificial Sequence
  Cyclic GFR-binding peptide
  MOD_RES (29)..(30): Xaa is C or S
VMNEYQKYIVNSSDDIYLVSIPSLKTPAXXPKPVY

SEQ ID NO: 30579 - protein, 39 aa, Artificial Sequence; identical to SEQ ID NO: 2417
  Cyclic GFR-binding peptide
  MOD_RES (1)..(3)..(35)..(36): Xaa is C or S

SEQ ID NO: 30580 - protein, 28 aa, Artificial Sequence
  Cyclic GFR-binding peptide
  MOD_RES (1)..(3): Xaa is C or S
XKXSKVIMEYQKYIKPTKGIIYLISIPS

SEQ ID NO: 30581 - protein, 35 aa, Artificial Sequence; identical to SEQ ID NO: 2419
  Cyclic GFR-binding peptide
  MOD_RES (31)..(32): Xaa is C or S

SEQ ID NO: 30582 - protein, 27 aa, Artificial Sequence
  Cyclic GFR-binding peptide
EVVMERYKKLVVKDYEDFYLMSIANLE

SEQ ID NO: 30583 - protein, 32 aa, Artificial Sequence; identical to SEQ ID NO: 2423
  Cyclic GFR-binding peptide
  MOD_RES (26)..(27): Xaa is C or S

SEQ ID NO: 30584 - protein, 36 aa, Artificial Sequence
  Cyclic GFR-binding peptide
  MOD_RES (1)..(33)..(34): Xaa is C or S
XAKVVMNEYQKYIVNNSSDIYLVSIPSLKTPAXXAK

SEQ ID NO: 30585 - protein, 34 aa, Artificial Sequence; identical to SEQ ID NO: 2424
  Cyclic GFR-binding peptide
  MOD_RES (31)..(31): Xaa is C or S

SEQ ID NO: 30586 - protein, 35 aa, Artificial Sequence; identical to SEQ ID NO: 2426
  Cyclic GFR-binding peptide
  MOD_RES (2)..(34): Xaa is C or S

SEQ ID NO: 30587 - protein, 37 aa, Artificial Sequence; identical to SEQ ID NO: 2427
  Cyclic GFR-binding peptide
  MOD_RES (1)..(33): Xaa is C or S

SEQ ID NO: 30588 - protein, 31 aa, Artificial Sequence
  Cyclic GFR-binding peptide
  MOD_RES (31)..(31): Xaa is C or S
SKVVMEYKFKVKPTRGVLYLISIPELDQPVX

SEQ ID NO: 30589 - protein, 29 aa, Artificial Sequence
  Cyclic GFR-binding peptide
KVVMYHYKLVKPTRGVKYLISIPSLDQPV

SEQ ID NO: 30590 - protein, 34 aa, Artificial Sequence
  Cyclic GFR-binding peptide
  MOD_RES (29)..(30): Xaa is C or S
VMNEYKFKIVNSSDDLYLVSIPELKTPAXXPKPV

SEQ ID NO: 30591 - protein, 37 aa, Artificial Sequence
  Cyclic GFR-binding peptide
  MOD_RES (2)..(33)..(34): Xaa is C or S
KXSKVVMEYQKYVKPTRGVIYLISIPSLDQPVXXPSA

SEQ ID NO: 30592 - protein, 29 aa, Artificial Sequence
  Cyclic GFR-binding peptide
  MOD_RES (28)..(29): Xaa is C or S
MDRYKKLVVKENEDFYLMSIANLETPVXX

SEQ ID NO: 30593 - protein, 33 aa, Artificial Sequence
  Cyclic GFR-binding peptide
  MOD_RES (30)..(31): Xaa is C or S
VVMDEYQKYVVKENEDIYLMSIPSLETPVXXAK

SEQ ID NO: 30594 - protein, 30 aa, Artificial Sequence; identical to SEQ ID NO: 2433
  Cyclic GFR-binding peptide
  MOD_RES (1)..(1): Xaa is C or S

SEQ ID NO: 30595 - protein, 22 aa, Artificial Sequence
  Cyclic GFR-binding peptide
MEYQKYVKPTRGVIYLISIPSL

SEQ ID NO: 30596 - protein, 34 aa, Artificial Sequence
  Cyclic GFR-binding peptide
  MOD_RES (2)..(4): Xaa is C or S
HXGXAKVVMNEYQKYIVNNSSDIYLVSIPSLKTP

SEQ ID NO: 30597 - protein, 30 aa, Artificial Sequence; identical to SEQ ID NO: 2434
  Cyclic GFR-binding peptide

SEQ ID NO: 30598 - protein, 35 aa, Artificial Sequence; identical to SEQ ID NO: 2435
  Cyclic GFR-binding peptide
  MOD_RES (29)..(30): Xaa is C or S

SEQ ID NO: 30599 - protein, 23 aa, Artificial Sequence
  Cyclic GFR-binding peptide
DEYQKYVVKENEDIYLMSIPSLE

SEQ ID NO: 30600 - protein, 34 aa, Artificial Sequence
  Cyclic GFR-binding peptide
  MOD_RES (2)..(33)..(34): Xaa is C or S
KXSKVIMEYQKYIKPTKGIIYLISIPSLDQSVXX

SEQ ID NO: 30601 - protein, 34 aa, Artificial Sequence
  Cyclic GFR-binding peptide
  MOD_RES (29)..(30): Xaa is C or S
VIMEYKFKVKPKRGVLYLISIPELAQPVXXPAAS

SEQ ID NO: 30602 - protein, 41 aa, Artificial Sequence
  Cyclic GFR-binding peptide
  MOD_RES (2)..(4)..(36)..(37): Xaa is C or S
HXGXSRVVMNEYQKYIVNSSDDIYLVSIPSLKTPAXXPKPV

SEQ ID NO: 30603 - protein, 25 aa, Artificial Sequence
  Cyclic GFR-binding peptide
EEYQKYVVKDYEDIYLMSIPSLETP

SEQ ID NO: 30604 - protein, 28 aa, Artificial Sequence
  Cyclic GFR-binding peptide
  MOD_RES (27)..(28): Xaa is C or S
DYHYKLVVKENEDKYLMSIPSLETPVXX

SEQ ID NO: 30605 - protein, 35 aa, Artificial Sequence
  Cyclic GFR-binding peptide
  MOD_RES (1)..(33)..(34): Xaa is C or S
XESVAMGRYKKLYTVVGKDFYLISIANLKTPVXXA

SEQ ID NO: 30606 - protein, 37 aa, Artificial Sequence; identical to SEQ ID NO: 2437
  Cyclic GFR-binding peptide
  MOD_RES (1)..(3)..(34)..(35): Xaa is C or S

SEQ ID NO: 30607 - protein, 31 aa, Artificial Sequence; identical to SEQ ID NO: 2439
  Cyclic GFR-binding peptide
  MOD_RES (2)..(2): Xaa is C or S

SEQ ID NO: 30608 - protein, 23 aa, Artificial Sequence
  Cyclic GFR-binding peptide
MERYKKLVVKDYEDFYLMSIANL

SEQ ID NO: 30609 - protein, 26 aa, Artificial Sequence
  Cyclic GFR-binding peptide
AKVVMNYHYKLIVNNSSDKYLVSIPS

SEQ ID NO: 30610 - protein, 40 aa, Artificial Sequence
  Cyclic GFR-binding peptide
  MOD_RES (1)..(3)..(35): Xaa is C or S
XGXSRVVMNEYKFKIVNSSDDLYLVSIPELKTPAXTPKTV

SEQ ID NO: 30611 - protein, 29 aa, Artificial Sequence
  Cyclic GFR-binding peptide
  MOD_RES (28)..(29): Xaa is C or S
MEYHYKLVVKDYEDKYLMSIPSLETPVXX

SEQ ID NO: 30612 - protein, 22 aa, Artificial Sequence
  Cyclic GFR-binding peptide
NEYQKYIVNNSSDIYLVSIPSL

SEQ ID NO: 30613 - protein, 40 aa, Artificial Sequence; identical to SEQ ID NO: 2444
  Cyclic GFR-binding peptide
  MOD_RES (1)..(3)..(35)..(36): Xaa is C or S

SEQ ID NO: 30614 - protein, 25 aa, Artificial Sequence
  Cyclic GFR-binding peptide
DEYKFKVVNNAADLYLISIPELRAP

SEQ ID NO: 30615 - protein, 36 aa, Artificial Sequence
  Cyclic GFR-binding peptide
  MOD_RES (1)..(33)..(34): Xaa is C or S
XARVVMNEYQKYIVNSSDDIYLVSIPSLQTPAXXPK

SEQ ID NO: 30616 - protein, 31 aa, Artificial Sequence
  Cyclic GFR-binding peptide
  MOD_RES (27)..(28): Xaa is C or S
NEYQKYIVNSSDDIYLVSIPSLKTPAXXPKP

SEQ ID NO: 30617 - protein, 32 aa, Artificial Sequence
  Cyclic GFR-binding peptide
  MOD_RES (28)..(29): Xaa is C or S
MGYHYKLYTVVGKDKYLISIPSLKTPVXXAKS

SEQ ID NO: 30618 - protein, 35 aa, Artificial Sequence
  Cyclic GFR-binding peptide
  MOD_RES (2)..(4): Xaa is C or S
RXGXGEVVMDEYKFKVVKENEDLYLMSIPELETPV

SEQ ID NO: 30619 - protein, 38 aa, Artificial Sequence; identical to SEQ ID NO: 2445
  Cyclic GFR-binding peptide
  MOD_RES (1)..(3)..(34)..(35): Xaa is C or S

SEQ ID NO: 30620 - protein, 28 aa, Artificial Sequence
  Cyclic GFR-binding peptide
VSMGEEYQKYTPVGMDDIYLVSIPSLKT

SEQ ID NO: 30621 - protein, 40 aa, Artificial Sequence
  Cyclic GFR-binding peptide
  MOD_RES (2)..(4)..(36)..(37): Xaa is C or S
HXGXAKVVMNEYQKYIVNNSSDIYLVSIPSLKTPAXXAKP

SEQ ID NO: 30622 - protein, 28 aa, Artificial Sequence
  Cyclic GFR-binding peptide
  MOD_RES (1)..(1): Xaa is C or S
XGEVVMEEYQKYVVKDYEDIYLMSIPSL

SEQ ID NO: 30623 - protein, 29 aa, Artificial Sequence
  Cyclic GFR-binding peptide
VVMERYKKLVVKDYEDFYLMSIANLETPV

SEQ ID NO: 30624 - protein, 29 aa, Artificial Sequence
  Cyclic GFR-binding peptide
  MOD_RES (1)..(3): Xaa is C or S
XKXSRVIMEYQKYVKPKRGVIYLISIPSL

SEQ ID NO: 30625 - protein, 40 aa, Artificial Sequence; identical to SEQ ID NO: 2447
  Cyclic GFR-binding peptide
  MOD_RES (2)..(4)..(36)..(37): Xaa is C or S

SEQ ID NO: 30626 - protein, 25 aa, Artificial Sequence
  Cyclic GFR-binding peptide
IMEYQKYVKPKRGVIYLISIPSLAQ

SEQ ID NO: 30627 - protein, 34 aa, Artificial Sequence
  Cyclic GFR-binding peptide
  MOD_RES (28)..(29): Xaa is C or S
MGEYQKYYTVVGKDIYLISIPSLKTPVXXAKSAK

SEQ ID NO: 30628 - protein, 34 aa, Artificial Sequence
  Cyclic GFR-binding peptide
  MOD_RES (2)..(33)..(34): Xaa is C or S
KXSKVVMEYQKYVKPTRGVIYLISIPSLDQPVXX

SEQ ID NO: 30629 - protein, 24 aa, Artificial Sequence
  Cyclic GFR-binding peptide
EYQKYIVNSSDDIYLVSIPSLKTP

SEQ ID NO: 30630 - protein, 32 aa, Artificial Sequence; identical to SEQ ID NO: 2448
  Cyclic GFR-binding peptide
  MOD_RES (28)..(29): Xaa is C or S

SEQ ID NO: 30631 - protein, 28 aa, Artificial Sequence
  Cyclic GFR-binding peptide
  MOD_RES (2)..(2): Xaa is C or S
GXGEVVMEEYKFKVVKDYEDLYLMSIPE

SEQ ID NO: 30632 - protein, 30 aa, Artificial Sequence
  Cyclic GFR-binding peptide
  MOD_RES (26)..(27): Xaa is C or S
EYQKYIVNSSDDIYLVSIPSLKTPAXXPKP

SEQ ID NO: 30633 - protein, 37 aa, Artificial Sequence; identical to SEQ ID NO: 2452
  Cyclic GFR-binding peptide
  MOD_RES (2)..(4)..(35)..(36): Xaa is C or S

SEQ ID NO: 30634 - protein, 32 aa, Artificial Sequence
  Cyclic GFR-binding peptide
  MOD_RES (26)..(27): Xaa is C or S
EYQKYVVKDYEDIYLMSIPSLETPVXXAKPIS

SEQ ID NO: 30635 - protein, 30 aa, Artificial Sequence; identical to SEQ ID NO: 2453
  Cyclic GFR-binding peptide
  MOD_RES (28)..(29): Xaa is C or S

SEQ ID NO: 30636 - protein, 32 aa, Artificial Sequence
  Cyclic GFR-binding peptide
  MOD_RES (2)..(2): Xaa is C or S
GXSRVVMNEYQKYIVNSSDDIYLVSIPSLKTP

SEQ ID NO: 30637 - protein, 32 aa, Artificial Sequence
  Cyclic GFR-binding peptide
  MOD_RES (29)..(30): Xaa is C or S
VMDEYKFKVVNNAADLYLISIPELRAPVXXSA

SEQ ID NO: 30638 - protein, 35 aa, Artificial Sequence
  Cyclic GFR-binding peptide
  MOD_RES (2)..(34)..(35): Xaa is C or S
GXGEVVMDEYKFKVVKENEDLYLMSIPELETPVXX

SEQ ID NO: 30639 - protein, 23 aa, Artificial Sequence
  Cyclic GFR-binding peptide
EYQKYVKPKRGVIYLISIPSLAQ

SEQ ID NO: 30640 - protein, 31 aa, Artificial Sequence
  Cyclic GFR-binding peptide
  MOD_RES (30)..(30): Xaa is C or S
VVMNEYQKYIVNSSDDIYLVSIPSLKTPAXT

SEQ ID NO: 30641 - protein, 42 aa, Artificial Sequence; identical to SEQ ID NO: 2461
  Cyclic GFR-binding peptide
  MOD_RES (2)..(4)..(36): Xaa is C or S

SEQ ID NO: 30642 - protein, 40 aa, Artificial Sequence; identical to SEQ ID NO: 2462
  Cyclic GFR-binding peptide
  MOD_RES (2)..(34)..(35): Xaa is C or S

SEQ ID NO: 30643 - protein, 26 aa, Artificial Sequence
  Cyclic GFR-binding peptide
SRVIMRYKKLVKPKRGVFYLISIANL

SEQ ID NO: 30644 - protein, 35 aa, Artificial Sequence
  Cyclic GFR-binding peptide
  MOD_RES (2)..(33)..(34): Xaa is C or S
KXSKVVMEYKFKVKPTRGVLYLISIPELDQPVXXP

SEQ ID NO: 30645 - protein, 29 aa, Artificial Sequence
  Cyclic GFR-binding peptide
  MOD_RES (2)..(4): Xaa is C or S
SXKXSRVIMEYQKYVKPKRGVIYLISIPS

SEQ ID NO: 30646 - protein, 36 aa, Artificial Sequence
  Cyclic GFR-binding peptide
  MOD_RES (2)..(34)..(35): Xaa is C or S
GXAKVVMNEYKFKIVNNSSDLYLVSIPELKTPAXXA

SEQ ID NO: 30647 - protein, 31 aa, Artificial Sequence
  Cyclic GFR-binding peptide
  MOD_RES (29)..(30): Xaa is C or S
VMDEYKFKVVKENEDLYLMSIPELETPVXXA

SEQ ID NO: 30648 - protein, 32 aa, Artificial Sequence; identical to SEQ ID NO: 2467
  Cyclic GFR-binding peptide
  MOD_RES (1)..(1): Xaa is C or S

SEQ ID NO: 30649 - protein, 38 aa, Artificial Sequence
  Cyclic GFR-binding peptide
  MOD_RES (2)..(4)..(36)..(37): Xaa is C or S
RXGXAEVVMDRYKKLVVNNAADFYLISIANLRAPVXXS

SEQ ID NO: 30650 - protein, 32 aa, Artificial Sequence
  Cyclic GFR-binding peptide
  MOD_RES (1)..(1): Xaa is C or S
XSRVVMNEYKFKIVNSSDDLYLVSIPELKTPA

SEQ ID NO: 30651 - protein, 32 aa, Artificial Sequence
  Cyclic GFR-binding peptide
  MOD_RES (1)..(3): Xaa is C or S
XGXAEVVMDRYKKLVVNNAADFYLISIANLRA

SEQ ID NO: 30652 - protein, 36 aa, Artificial Sequence; identical to SEQ ID NO: 2468
  Cyclic GFR-binding peptide
  MOD_RES (1)..(3)..(34)..(35): Xaa is C or S

SEQ ID NO: 30653 - protein, 35 aa, Artificial Sequence
  Cyclic GFR-binding peptide
  MOD_RES (1)..(33)..(34): Xaa is C or S
XAEVVMDRYKKLVVNNAADFYLISIANLRAPVXXS

SEQ ID NO: 30654 - protein, 25 aa, Artificial Sequence
  Cyclic GFR-binding peptide
VVMEYKFKVKPTRGVLYLISIPELD

SEQ ID NO: 30655 - protein, 26 aa, Artificial Sequence
  Cyclic GFR-binding peptide
DRYKKLVVNNAADFYLISIANLRAPV

SEQ ID NO: 30656 - protein, 32 aa, Artificial Sequence; identical to SEQ ID NO: 2472
  Cyclic GFR-binding peptide
  MOD_RES (2)..(4): Xaa is C or S

SEQ ID NO: 30657 - protein, 32 aa, Artificial Sequence; identical to SEQ ID NO: 2473
  Cyclic GFR-binding peptide
  MOD_RES (28)..(29): Xaa is C or S

SEQ ID NO: 30658 - protein, 21 aa, Artificial Sequence
  Cyclic GFR-binding peptide
MEYKFKVKPKRGVLYLISIPE

SEQ ID NO: 30659 - protein, 30 aa, Artificial Sequence
  Cyclic GFR-binding peptide
  MOD_RES (26)..(27): Xaa is C or S
EYQKYVKPTRGVIYLISIPSLDQPVXXPSA

SEQ ID NO: 30660 - protein, 35 aa, Artificial Sequence; identical to SEQ ID NO: 2475
  Cyclic GFR-binding peptide
  MOD_RES (29)..(30): Xaa is C or S

SEQ ID NO: 30661 - protein, 24 aa, Artificial Sequence
  Cyclic GFR-binding peptide
DYHYKLVVNNAADKYLISIPSLRA

SEQ ID NO: 30662 - protein, 43 aa, Artificial Sequence; identical to SEQ ID NO: 2476
  Cyclic GFR-binding peptide
  MOD_RES (2)..(4)..(37)..(38): Xaa is C or S

SEQ ID NO: 30663 - protein, 25 aa, Artificial Sequence
  Cyclic GFR-binding peptide
EVVMEEYKFKVVKDYEDLYLMSIPE

SEQ ID NO: 30664 - protein, 35 aa, Artificial Sequence
  Cyclic GFR-binding peptide
  MOD_RES (32)..(33): Xaa is C or S
ESVAMGYHYKLYTVVGKDKYLISIPSLKTPVXXAK

SEQ ID NO: 30665 - protein, 29 aa, Artificial Sequence
  Cyclic GFR-binding peptide
SRVVMNEYQKYIVNSSDDIYLVSIPSLKT

SEQ ID NO: 30666 - protein, 28 aa, Artificial Sequence
  Cyclic GFR-binding peptide
VMNYHYKLIVNSSDDKYLVSIPSLKTPA

SEQ ID NO: 30667 - protein, 31 aa, Artificial Sequence
  Cyclic GFR-binding peptide
  MOD_RES (30)..(31): Xaa is C or S
VVMDYHYKLVVNNAADKYLISIPSLRAPVXX

SEQ ID NO: 30668 - protein, 34 aa, Artificial Sequence
  Cyclic GFR-binding peptide
  MOD_RES (31)..(32): Xaa is C or S
SVAMGRYKKLYTVVGKDFYLISIANLKTPVXXAK

SEQ ID NO: 30669 - protein, 38 aa, Artificial Sequence
  Cyclic GFR-binding peptide
  MOD_RES (2)..(34)..(35): Xaa is C or S
GXESVAMGRYKKLYTVVGKDFYLISIANLKTPVXXAKS

SEQ ID NO: 30670 - protein, 39 aa, Artificial Sequence
  Cyclic GFR-binding peptide
  MOD_RES (1)..(33)..(34): Xaa is C or S
XGEVVMEEYKFKVVKDYEDLYLMSIPELETPVXXAKPIS

SEQ ID NO: 30671 - protein, 26 aa, Artificial Sequence
  Cyclic GFR-binding peptide
AVSMGEEYQKYTPVGMDDIYLVSIPS

SEQ ID NO: 30672 - protein, 30 aa, Artificial Sequence; identical to SEQ ID NO: 2484
  Cyclic GFR-binding peptide
  MOD_RES (2)..(4): Xaa is C or S

SEQ ID NO: 30673 - protein, 39 aa, Artificial Sequence
  Cyclic GFR-binding peptide
  MOD_RES (1)..(3)..(34)..(35): Xaa is C or S
XKXSRVIMEYQKYVKPKRGVIYLISIPSLAQPVXXPAAS

SEQ ID NO: 30674 - protein, 30 aa, Artificial Sequence; identical to SEQ ID NO: 2485
  Cyclic GFR-binding peptide
  MOD_RES (30)..(30): Xaa is C or S

SEQ ID NO: 30675 - protein, 33 aa, Artificial Sequence; identical to SEQ ID NO: 2486
  Cyclic GFR-binding peptide
  MOD_RES (30)..(31): Xaa is C or S

SEQ ID NO: 30676 - protein, 28 aa, Artificial Sequence
  Cyclic GFR-binding peptide
EVVMDRYKKLVVKENEDFYLMSIANLET

SEQ ID NO: 30677 - protein, 36 aa, Artificial Sequence
  Cyclic GFR-binding peptide
  MOD_RES (1)..(3)..(35)..(36): Xaa is C or S
XGXARVVMNEYQKYIVNSSDDIYLVSIPSLQTPAXX

SEQ ID NO: 30678 - protein, 26 aa, Artificial Sequence
  Cyclic GFR-binding peptide
VIMEYKFKVKPKRGVLYLISIPELAQ

SEQ ID NO: 30679 - protein, 37 aa, Artificial Sequence
  Cyclic GFR-binding peptide
  MOD_RES (31)..(32): Xaa is C or S
RVVMNEYKFKIVNSSDDLYLVSIPELKTPAXXPKPVY

SEQ ID NO: 30680 - protein, 34 aa, Artificial Sequence
  Cyclic GFR-binding peptide
  MOD_RES (32)..(33): Xaa is C or S
GEVVMEEYKFKVVKDYEDLYLMSIPELETPVXXA

SEQ ID NO: 30681 - protein, 27 aa, Artificial Sequence
  Cyclic GFR-binding peptide
SVAMGYHYKLYTVVGKDKYLISIPSLK

SEQ ID NO: 30682 - protein, 33 aa, Artificial Sequence; identical to SEQ ID NO: 2492
  Cyclic GFR-binding peptide
  MOD_RES (1)..(3): Xaa is C or S

SEQ ID NO: 30683 - protein, 30 aa, Artificial Sequence; identical to SEQ ID NO: 2493
  Cyclic GFR-binding peptide
  MOD_RES (27)..(28): Xaa is C or S

SEQ ID NO: 30684 - protein, 24 aa, Artificial Sequence
  Cyclic GFR-binding peptide
IMYHYKLIKPTKGIKYLISIPSLD

SEQ ID NO: 30685 - protein, 30 aa, Artificial Sequence; identical to SEQ ID NO: 2497
  Cyclic GFR-binding peptide
  MOD_RES (2)..(4): Xaa is C or S

SEQ ID NO: 30686 - protein, 38 aa, Artificial Sequence; identical to SEQ ID NO: 2498
  Cyclic GFR-binding peptide
  MOD_RES (1)..(3)..(35)..(36): Xaa is C or S

SEQ ID NO: 30687 - protein, 24 aa, Artificial Sequence
  Cyclic GFR-binding peptide
EEYQKYTPVGMDDIYLVSIPSLKT

SEQ ID NO: 30688 - protein, 36 aa, Artificial Sequence
  Cyclic GFR-binding peptide
  MOD_RES (32)..(33): Xaa is C or S
AVSMGEEYKFKTPVGMDDLYLVSIPELKTPVXXAKG

SEQ ID NO: 30689 - protein, 29 aa, Artificial Sequence
  Cyclic GFR-binding peptide
  MOD_RES (28)..(29): Xaa is C or S
IMYHYKLIKPTKGIKYLISIPSLDQSVXX

SEQ ID NO: 30690 - protein, 35 aa, Artificial Sequence
  Cyclic GFR-binding peptide
  MOD_RES (1)..(3)..(35): Xaa is C or S
XGXSRVVMNEYKFKIVNSSDDLYLVSIPELKTPAX

SEQ ID NO: 30691 - protein, 37 aa, Artificial Sequence
  Cyclic GFR-binding peptide
  MOD_RES (2)..(4)..(36)..(37): Xaa is C or S
RXGXGEVVMDEYKFKVVKENEDLYLMSIPELETPVXX

SEQ ID NO: 30692 - protein, 30 aa, Artificial Sequence; identical to SEQ ID NO: 2501
  Cyclic GFR-binding peptide
  MOD_RES (28)..(29): Xaa is C or S

SEQ ID NO: 30693 - protein, 33 aa, Artificial Sequence
  Cyclic GFR-binding peptide
  MOD_RES (2)..(2): Xaa is C or S
GXGEVVMEEYKFKVVKDYEDLYLMSIPELETPV

SEQ ID NO: 30694 - protein, 31 aa, Artificial Sequence; identical to SEQ ID NO: 2502
  Cyclic GFR-binding peptide
  MOD_RES (29)..(29): Xaa is C or S

SEQ ID NO: 30695 - protein, 36 aa, Artificial Sequence
  Cyclic GFR-binding peptide
  MOD_RES (1)..(3)..(35): Xaa is C or S
XGXSRVVMNEYQKYIVNSSDDIYLVSIPSLKTPAXT

SEQ ID NO: 30696 - protein, 36 aa, Artificial Sequence
  Cyclic GFR-binding peptide
  MOD_RES (1)..(3)..(34)..(35): Xaa is C or S
XKXSKVVMEYQKYVKPTRGVIYLISIPSLDQPVXXP

SEQ ID NO: 30697 - protein, 26 aa, Artificial Sequence
  Cyclic GFR-binding peptide
GEVVMDYHYKLVVKENEDKYLMSIPS

SEQ ID NO: 30698 - protein, 35 aa, Artificial Sequence
  Cyclic GFR-binding peptide
  MOD_RES (2)..(4)..(35): Xaa is C or S
SXKXSKVVMEYQKYVKPTRGVIYLISIPSLDQPVX

SEQ ID NO: 30699 - protein, 28 aa, Artificial Sequence
  Cyclic GFR-binding peptide
VVMEEYKFKVVKDYEDLYLMSIPELETP

SEQ ID NO: 30700 - protein, 29 aa, Artificial Sequence
  Cyclic GFR-binding peptide
  MOD_RES (1)..(3): Xaa is C or S
XGXAEVVMDYHYKLVVNNAADKYLISIPS

SEQ ID NO: 30701 - protein, 26 aa, Artificial Sequence
  Cyclic GFR-binding peptide
  MOD_RES (1)..(1): Xaa is C or S
XSKVIMRYKKLIKPTKGIFYLISIAN

SEQ ID NO: 30702 - protein, 28 aa, Artificial Sequence
  Cyclic GFR-binding peptide
AKVVMNRYKKLIVNNSSDFYLVSIANLK

SEQ ID NO: 30703 - protein, 30 aa, Artificial Sequence; identical to SEQ ID NO: 2510
  Cyclic GFR-binding peptide
  MOD_RES (1)..(3): Xaa is C or S

SEQ ID NO: 30704 - protein, 24 aa, Artificial Sequence
  Cyclic GFR-binding peptide
RYKKLIVNNSSDFYLVSIANLKTP

SEQ ID NO: 30705 - protein, 22 aa, Artificial Sequence
  Cyclic GFR-binding peptide
DRYKKLVVNNAADFYLISIANL

SEQ ID NO: 30706 - protein, 29 aa, Artificial Sequence
  Cyclic GFR-binding peptide
  MOD_RES (26)..(26): Xaa is C or S
YHYKLIVNSSDDKYLVSIPSLKTPAXTPK

SEQ ID NO: 30707 - protein, 30 aa, Artificial Sequence; identical to SEQ ID NO: 2517
  Cyclic GFR-binding peptide
  MOD_RES (2)..(2): Xaa is C or S

SEQ ID NO: 30708 - protein, 35 aa, Artificial Sequence
  Cyclic GFR-binding peptide
  MOD_RES (29)..(30): Xaa is C or S
AMGEYQKYYTVVGKDIYLISIPSLKTPVXXAKSAK

SEQ ID NO: 30709 - protein, 34 aa, Artificial Sequence
  Cyclic GFR-binding peptide
  MOD_RES (29)..(30): Xaa is C or S
VIMEYQKYVKPKRGVIYLISIPSLAQPVXXPAAS

SEQ ID NO: 30710 - protein, 34 aa, Artificial Sequence
  Cyclic GFR-binding peptide
  MOD_RES (32)..(33): Xaa is C or S
SRVVMNEYQKYIVNSSDDIYLVSIPSLKTPAXXP

SEQ ID NO: 30711 - protein, 37 aa, Artificial Sequence; identical to SEQ ID NO: 2521
  Cyclic GFR-binding peptide
  MOD_RES (2)..(4)..(37): Xaa is C or S

SEQ ID NO: 30712 - protein, 22 aa, Artificial Sequence
  Cyclic GFR-binding peptide
GYHYKLYTVVGKDKYLISIPSL

SEQ ID NO: 30713 - protein, 33 aa, Artificial Sequence; identical to SEQ ID NO: 2522
  Cyclic GFR-binding peptide
  MOD_RES (2)..(2): Xaa is C or S

SEQ ID NO: 30714 - protein, 33 aa, Artificial Sequence; identical to SEQ ID NO: 2524
  Cyclic GFR-binding peptide
  MOD_RES (30)..(31): Xaa is C or S

SEQ ID NO: 30715 - protein, 33 aa, Artificial Sequence; identical to SEQ ID NO: 2526
  Cyclic GFR-binding peptide
  MOD_RES (27)..(28): Xaa is C or S

SEQ ID NO: 30716 - protein, 40 aa, Artificial Sequence
  Cyclic GFR-binding peptide
  MOD_RES (2)..(34)..(35): Xaa is C or S
GXAKVVMNEYKFKIVNNSSDLYLVSIPELKTPAXXAKPVA

SEQ ID NO: 30717 - protein, 35 aa, Artificial Sequence
  Cyclic GFR-binding peptide
  MOD_RES (1)..(33)..(34): Xaa is C or S
XAEVVMDYHYKLVVNNAADKYLISIPSLRAPVXXS

SEQ ID NO: 30718 - protein, 39 aa, Artificial Sequence; identical to SEQ ID NO: 2529
  Cyclic GFR-binding peptide
  MOD_RES (2)..(33)..(34): Xaa is C or S

SEQ ID NO: 30719 - protein, 23 aa, Artificial Sequence
  Cyclic GFR-binding peptide
VVMYHYKLVKPTRGVKYLISIPS

SEQ ID NO: 30720 - protein, 35 aa, Artificial Sequence; identical to SEQ ID NO: 2531
  Cyclic GFR-binding peptide
  MOD_RES (32)..(33): Xaa is C or S

SEQ ID NO: 30721 - protein, 39 aa, Artificial Sequence
  Cyclic GFR-binding peptide
  MOD_RES (1)..(3)..(35)..(36): Xaa is C or S
XGXAEVVMDYHYKLVVNNAADKYLISIPSLRAPVXXSAP

SEQ ID NO: 30722 - protein, 29 aa, Artificial Sequence
  Cyclic GFR-binding peptide
  MOD_RES (29)..(29): Xaa is C or S
VMNEYQKYIVNNSSDIYLVSIPSLKTPAX

SEQ ID NO: 30723 - protein, 21 aa, Artificial Sequence
  Cyclic GFR-binding peptide
RYKKLIVNSSDDFYLVSIANL

SEQ ID NO: 30724 - protein, 33 aa, Artificial Sequence; identical to SEQ ID NO: 2537
  Cyclic GFR-binding peptide
  MOD_RES (1)..(33): Xaa is C or S

SEQ ID NO: 30725 - protein, 35 aa, Artificial Sequence; identical to SEQ ID NO: 2538
  Cyclic GFR-binding peptide
  MOD_RES (2)..(4): Xaa is C or S

SEQ ID NO: 30726 - protein, 35 aa, Artificial Sequence
  Cyclic GFR-binding peptide
  MOD_RES (32)..(33): Xaa is C or S
ESVAMGEYQKYYTVVGKDIYLISIPSLKTPVXXAK

SEQ ID NO: 30727 - protein, 36 aa, Artificial Sequence; identical to SEQ ID NO: 2539
  Cyclic GFR-binding peptide
  MOD_RES (31)..(32): Xaa is C or S

SEQ ID NO: 30728 - protein, 25 aa, Artificial Sequence
  Cyclic GFR-binding peptide
EYKFKVKPKRGVLYLISIPELAQPV

SEQ ID NO: 30729 - protein, 29 aa, Artificial Sequence
  Cyclic GFR-binding peptide
VVMNEYQKYIVNSSDDIYLVSIPSLKTPA

SEQ ID NO: 30730 - protein, 30 aa, Artificial Sequence
  Cyclic GFR-binding peptide
  MOD_RES (2)..(2): Xaa is C or S
GXARVVMNEYQKYIVNSSDDIYLVSIPSLQ

SEQ ID NO: 30731 - protein, 32 aa, Artificial Sequence; identical to SEQ ID NO: 2546
  Cyclic GFR-binding peptide
  MOD_RES (27)..(28): Xaa is C or S

SEQ ID NO: 30732 - protein, 32 aa, Artificial Sequence; identical to SEQ ID NO: 2548
  Cyclic GFR-binding peptide
  MOD_RES (2)..(4): Xaa is C or S

SEQ ID NO: 30733 - protein, 31 aa, Artificial Sequence
  Cyclic GFR-binding peptide
  MOD_RES (27)..(28): Xaa is C or S
EEYKFKVVKDYEDLYLMSIPELETPVXXAKP

SEQ ID NO: 30734 - protein, 30 aa, Artificial Sequence
  Cyclic GFR-binding peptide
  MOD_RES (28)..(29): Xaa is C or S
MGRYKKLYTVVGKDFYLISIANLKTPVXXA

SEQ ID NO: 30735 - protein, 39 aa, Artificial Sequence
  Cyclic GFR-binding peptide
  MOD_RES (2)..(33)..(34): Xaa is C or S
KXSKVIMEYKFKIKPTKGILYLISIPELDQSVXXPSASA

SEQ ID NO: 30736 - protein, 24 aa, Artificial Sequence
  Cyclic GFR-binding peptide
MGEEYKFKTPVGMDDLYLVSIPEL

SEQ ID NO: 30737 - protein, 25 aa, Artificial Sequence
  Cyclic GFR-binding peptide
MNEYQKYIVNSSDDIYLVSIPSLQT

SEQ ID NO: 30738 - protein, 27 aa, Artificial Sequence
  Cyclic GFR-binding peptide
MDRYKKLVVNNAADFYLISIANLRAPV

SEQ ID NO: 30739 - protein, 30 aa, Artificial Sequence; identical to SEQ ID NO: 2554
  Cyclic GFR-binding peptide

SEQ ID NO: 30740 - protein, 34 aa, Artificial Sequence
  Cyclic GFR-binding peptide
  MOD_RES (29)..(30): Xaa is C or S
VMDEYQKYVVKENEDIYLMSIPSLETPVXXAKPI

SEQ ID NO: 30741 - protein, 25 aa, Artificial Sequence
  Cyclic GFR-binding peptide
SMGEEYKFKTPVGMDDLYLVSIPEL

SEQ ID NO: 30742 - protein, 29 aa, Artificial Sequence
  Cyclic GFR-binding peptide
SMGEEYKFKTPVGMDDLYLVSIPELKTPV

SEQ ID NO: 30743 - protein, 25 aa, Artificial Sequence
  Cyclic GFR-binding peptide
YHYKLVKPTRGVKYLISIPSLDQPV

SEQ ID NO: 30744 - protein, 38 aa, Artificial Sequence; identical to SEQ ID NO: 2558
  Cyclic GFR-binding peptide
  MOD_RES (2)..(4)..(35)..(36): Xaa is C or S

SEQ ID NO: 30745 - protein, 25 aa, Artificial Sequence
  Cyclic GFR-binding peptide
NEYQKYIVNSSDDIYLVSIPSLKTP

SEQ ID NO: 30746 - protein, 26 aa, Artificial Sequence
  Cyclic GFR-binding peptide
EVVMDEYKFKVVNNAADLYLISIPEL

SEQ ID NO: 30747 - protein, 40 aa, Artificial Sequence
  Cyclic GFR-binding peptide
  MOD_RES (2)..(34)..(35): Xaa is C or S
GXESVAMGRYKKLYTVVGKDFYLISIANLKTPVXXAKSAK

SEQ ID NO: 30748 - protein, 25 aa, Artificial Sequence
  Cyclic GFR-binding peptide
MEYKFKVKPTRGVLYLISIPELDQP

SEQ ID NO: 30749 - protein, 32 aa, Artificial Sequence
  Cyclic GFR-binding peptide
  MOD_RES (1)..(3): Xaa is C or S
XGXESVAMGRYKKLYTVVGKDFYLISIANLKT

SEQ ID NO: 30750 - protein, 30 aa, Artificial Sequence
  Cyclic GFR-binding peptide
  MOD_RES (1)..(1): Xaa is C or S
XESVAMGEYQKYYTVVGKDIYLISIPSLKT

SEQ ID NO: 30751 - protein, 30 aa, Artificial Sequence; identical to SEQ ID NO: 2563
  Cyclic GFR-binding peptide
  MOD_RES (2)..(4): Xaa is C or S

SEQ ID NO: 30752 - protein, 34 aa, Artificial Sequence
  Cyclic GFR-binding peptide
  MOD_RES (31)..(32): Xaa is C or S
SKVIMEYKFKIKPTKGILYLISIPELDQSVXXPS

SEQ ID NO: 30753 - protein, 34 aa, Artificial Sequence
  Cyclic GFR-binding peptide
  MOD_RES (1)..(3): Xaa is C or S
XGXARVVMNEYQKYIVNSSDDIYLVSIPSLQTPA

SEQ ID NO: 30754 - protein, 40 aa, Artificial Sequence
  Cyclic GFR-binding peptide
  MOD_RES (2)..(34): Xaa is C or S
GXSRVVMNEYQKYIVNSSDDIYLVSIPSLKTPAXTPKTVH

SEQ ID NO: 30755 - protein, 38 aa, Artificial Sequence
  Cyclic GFR-binding peptide
  MOD_RES (32)..(33): Xaa is C or S
ESVAMGEYQKYYTVVGKDIYLISIPSLKTPVXXAKSAK

SEQ ID NO: 30756 - protein, 35 aa, Artificial Sequence; identical to SEQ ID NO: 2566
  Cyclic GFR-binding peptide
  MOD_RES (30)..(31): Xaa is C or S

SEQ ID NO: 30757 - protein, 36 aa, Artificial Sequence
  Cyclic GFR-binding peptide
  MOD_RES (33)..(34): Xaa is C or S
EAVSMGEEYQKYTPVGMDDIYLVSIPSLKTPVXXAK

SEQ ID NO: 30758 - protein, 34 aa, Artificial Sequence; identical to SEQ ID NO: 2569
  Cyclic GFR-binding peptide
  MOD_RES (1)..(33)..(34): Xaa is C or S

SEQ ID NO: 30759 - protein, 30 aa, Artificial Sequence
  Cyclic GFR-binding peptide
AVSMGEEYKFKTPVGMDDLYLVSIPELKTP

SEQ ID NO: 30760 - protein, 24 aa, Artificial Sequence
  Cyclic GFR-binding peptide
NEYQKYIVNSSDDIYLVSIPSLKT

SEQ ID NO: 30761 - protein, 40 aa, Artificial Sequence; identical to SEQ ID NO: 2572
  Cyclic GFR-binding peptide
  MOD_RES (1)..(3)..(34)..(35): Xaa is C or S

SEQ ID NO: 30762 - protein, 41 aa, Artificial Sequence; identical to SEQ ID NO: 2573
  Cyclic GFR-binding peptide
  MOD_RES (1)..(3)..(36)..(37): Xaa is C or S

SEQ ID NO: 30763 - protein, 39 aa, Artificial Sequence
  Cyclic GFR-binding peptide
  MOD_RES (2)..(4)..(37)..(38): Xaa is C or S
RXGXEAVSMGEEYQKYTPVGMDDIYLVSIPSLKTPVXXA

SEQ ID NO: 30764 - protein, 35 aa, Artificial Sequence
  Cyclic GFR-binding peptide
  MOD_RES (2)..(34)..(35): Xaa is C or S
GXESVAMGEYQKYYTVVGKDIYLISIPSLKTPVXX

SEQ ID NO: 30765 - protein, 33 aa, Artificial Sequence; identical to SEQ ID NO: 2574
  Cyclic GFR-binding peptide
  MOD_RES (30)..(30): Xaa is C or S

SEQ ID NO: 30766 - protein, 27 aa, Artificial Sequence
  Cyclic GFR-binding peptide
  MOD_RES (2)..(2): Xaa is C or S
KXSRVIMEYQKYVKPKRGVIYLISIPS

SEQ ID NO: 30767 - protein, 36 aa, Artificial Sequence
  Cyclic GFR-binding peptide
  MOD_RES (32)..(33): Xaa is C or S
ESVAMGRYKKLYTVVGKDFYLISIANLKTPVXXAKS

SEQ ID NO: 30768 - protein, 34 aa, Artificial Sequence; identical to SEQ ID NO: 2579
  Cyclic GFR-binding peptide
  MOD_RES (2)..(4): Xaa is C or S

SEQ ID NO: 30769 - protein, 29 aa, Artificial Sequence
  Cyclic GFR-binding peptide
SVAMGEYQKYYTVVGKDIYLISIPSLKTP

SEQ ID NO: 30770 - protein, 36 aa, Artificial Sequence; identical to SEQ ID NO: 2582
  Cyclic GFR-binding peptide
  MOD_RES (1)..(3)..(35)..(36): Xaa is C or S

SEQ ID NO: 30771 - protein, 35 aa, Artificial Sequence; identical to SEQ ID NO: 2583
  Cyclic GFR-binding peptide
  MOD_RES (30)..(31): Xaa is C or S

SEQ ID NO: 30772 - protein, 27 aa, Artificial Sequence
  Cyclic GFR-binding peptide
KVVMEYQKYVKPTRGVIYLISIPSLDQ

SEQ ID NO: 30773 - protein, 40 aa, Artificial Sequence
  Cyclic GFR-binding peptide
  MOD_RES (1)..(3)..(35): Xaa is C or S
XGXSRVVMNEYQKYIVNSSDDIYLVSIPSLKTPAXTPKTV

SEQ ID NO: 30774 - protein, 37 aa, Artificial Sequence
  Cyclic GFR-binding peptide
  MOD_RES (1)..(3)..(34)..(35): Xaa is C or S
XKXSKVVMEYKFKVKPTRGVLYLISIPELDQPVXXPS

SEQ ID NO: 30775 - protein, 33 aa, Artificial Sequence
  Cyclic GFR-binding peptide
  MOD_RES (2)..(4): Xaa is C or S
RXGXESVAMGYHYKLYTVVGKDKYLISIPSLKT

SEQ ID NO: 30776 - protein, 27 aa, Artificial Sequence
  Cyclic GFR-binding peptide
  MOD_RES (1)..(1): Xaa is C or S
XAEVVMDRYKKLVVNNAADFYLISIAN

SEQ ID NO: 30777 - protein, 35 aa, Artificial Sequence
  Cyclic GFR-binding peptide
  MOD_RES (1)..(3)..(35): Xaa is C or S
XGXESVAMGEYQKYYTVVGKDIYLISIPSLKTPVX

SEQ ID NO: 30778 - protein, 38 aa, Artificial Sequence; identical to SEQ ID NO: 2592
  Cyclic GFR-binding peptide
  MOD_RES (1)..(34)..(35): Xaa is C or S

SEQ ID NO: 30779 - protein, 41 aa, Artificial Sequence; identical to SEQ ID NO: 2594
  Cyclic GFR-binding peptide
  MOD_RES (1)..(3)..(35)..(36): Xaa is C or S

SEQ ID NO: 30780 - protein, 27 aa, Artificial Sequence
  Cyclic GFR-binding peptide
  MOD_RES (27)..(27): Xaa is C or S
MEYQKYIKPTKGIIYLISIPSLDQSVX

SEQ ID NO: 30781 - protein, 31 aa, Artificial Sequence; identical to SEQ ID NO: 2595
  Cyclic GFR-binding peptide
  MOD_RES (2)..(4): Xaa is C or S

SEQ ID NO: 30782 - protein, 32 aa, Artificial Sequence
  Cyclic GFR-binding peptide
  MOD_RES (27)..(28): Xaa is C or S
NEYKFKIVNNSSDLYLVSIPELKTPAXXAKPV

SEQ ID NO: 30783 - protein, 26 aa, Artificial Sequence
  Cyclic GFR-binding peptide
  MOD_RES (26)..(26): Xaa is C or S
YHYKLYTVVGKDKYLISIPSLKTPVX

SEQ ID NO: 30784 - protein, 29 aa, Artificial Sequence
  Cyclic GFR-binding peptide
  MOD_RES (1)..(3): Xaa is C or S
XGXAEVVMDEYKFKVVNNAADLYLISIPE

SEQ ID NO: 30785 - protein, 39 aa, Artificial Sequence; identical to SEQ ID NO: 2597
  Cyclic GFR-binding peptide
  MOD_RES (1)..(3)..(34)..(35): Xaa is C or S

SEQ ID NO: 30786 - protein, 32 aa, Artificial Sequence
  Cyclic GFR-binding peptide
  MOD_RES (26)..(27): Xaa is C or S
EYQKYYTVVGKDIYLISIPSLKTPVXXAKSAK

SEQ ID NO: 30787 - protein, 38 aa, Artificial Sequence
  Cyclic GFR-binding peptide
  MOD_RES (2)..(4)..(36)..(37): Xaa is C or S
RXGXAEVVMDEYKFKVVNNAADLYLISIPELRAPVXXS

SEQ ID NO: 30788 - protein, 27 aa, Artificial Sequence
  Cyclic GFR-binding peptide
  MOD_RES (26)..(26): Xaa is C or S
EYQKYIVNSSDDIYLVSIPSLKTPAXT

SEQ ID NO: 30789 - protein, 36 aa, Artificial Sequence; identical to SEQ ID NO: 2598
  Cyclic GFR-binding peptide
  MOD_RES (31)..(32): Xaa is C or S

SEQ ID NO: 30790 - protein, 28 aa, Artificial Sequence
  Cyclic GFR-binding peptide
VIMEYQKYVKPKRGVIYLISIPSLAQPV

SEQ ID NO: 30791 - protein, 30 aa, Artificial Sequence; identical to SEQ ID NO: 2599
  Cyclic GFR-binding peptide
  MOD_RES (2)..(2): Xaa is C or S

SEQ ID NO: 30792 - protein, 31 aa, Artificial Sequence; identical to SEQ ID NO: 2600
  Cyclic GFR-binding peptide

SEQ ID NO: 30793 - protein, 29 aa, Artificial Sequence
  Cyclic GFR-binding peptide
  MOD_RES (26)..(27): Xaa is C or S
EYQKYIVNNSSDIYLVSIPSLKTPAXXAK

SEQ ID NO: 30794 - protein, 30 aa, Artificial Sequence; identical to SEQ ID NO: 2602
  Cyclic GFR-binding peptide
  MOD_RES (27)..(27): Xaa is C or S

SEQ ID NO: 30795 - protein, 39 aa, Artificial Sequence
  Cyclic GFR-binding peptide
  MOD_RES (2)..(4)..(35)..(36): Xaa is C or S
SXKXSKVVMEYQKYVKPTRGVIYLISIPSLDQPVXXPSA

SEQ ID NO: 30796 - protein, 25 aa, Artificial Sequence
  Cyclic GFR-binding peptide
KVVMYHYKLVKPTRGVKYLISIPSL

SEQ ID NO: 30797 - protein, 30 aa, Artificial Sequence; identical to SEQ ID NO: 2605
  Cyclic GFR-binding peptide
  MOD_RES (2)..(2): Xaa is C or S

SEQ ID NO: 30798 - protein, 34 aa, Artificial Sequence; identical to SEQ ID NO: 2606
  Cyclic GFR-binding peptide
  MOD_RES (31)..(32): Xaa is C or S

SEQ ID NO: 30799 - protein, 31 aa, Artificial Sequence
  Cyclic GFR-binding peptide
  MOD_RES (1)..(3): Xaa is C or S
XKXSKVVMEYKFKVKPTRGVLYLISIPELDQ

SEQ ID NO: 30800 - protein, 31 aa, Artificial Sequence
  Cyclic GFR-binding peptide
  MOD_RES (29)..(30): Xaa is C or S
VMDYHYKLVVNNAADKYLISIPSLRAPVXXS

SEQ ID NO: 30801 - protein, 32 aa, Artificial Sequence; identical to SEQ ID NO: 2607
  Cyclic GFR-binding peptide
  MOD_RES (26)..(27): Xaa is C or S

SEQ ID NO: 30802 - protein, 35 aa, Artificial Sequence; identical to SEQ ID NO: 2608
  Cyclic GFR-binding peptide
  MOD_RES (30)..(31): Xaa is C or S

SEQ ID NO: 30803 - protein, 34 aa, Artificial Sequence; identical to SEQ ID NO: 2609
  Cyclic GFR-binding peptide
  MOD_RES (30)..(31): Xaa is C or S

SEQ ID NO: 30804 - protein, 42 aa, Artificial Sequence; identical to SEQ ID NO: 2611
  Cyclic GFR-binding peptide
  MOD_RES (2)..(4)..(36)..(37): Xaa is C or S

SEQ ID NO: 30805 - protein, 28 aa, Artificial Sequence
  Cyclic GFR-binding peptide
RVIMEYQKYVKPKRGVIYLISIPSLAQP

SEQ ID NO: 30806 - protein, 28 aa, Artificial Sequence
  Cyclic GFR-binding peptide
  MOD_RES (27)..(28): Xaa is C or S
NYHYKLIVNSSDDKYLVSIPSLKTPAXX

SEQ ID NO: 30807 - protein, 29 aa, Artificial Sequence
  Cyclic GFR-binding peptide
  MOD_RES (1)..(3): Xaa is C or S
XKXSKVIMRYKKLIKPTKGIFYLISIANL

SEQ ID NO: 30808 - protein, 24 aa, Artificial Sequence
  Cyclic GFR-binding peptide
EYQKYTPVGMDDIYLVSIPSLKTP

SEQ ID NO: 30809 - protein, 31 aa, Artificial Sequence
  Cyclic GFR-binding peptide
  MOD_RES (2)..(2): Xaa is C or S
KXSRVIMEYQKYVKPKRGVIYLISIPSLAQP

SEQ ID NO: 30810 - protein, 39 aa, Artificial Sequence; identical to SEQ ID NO: 2616
  Cyclic GFR-binding peptide
  MOD_RES (2)..(4)..(36)..(37): Xaa is C or S

SEQ ID NO: 30811 - protein, 33 aa, Artificial Sequence; identical to SEQ ID NO: 2617
  Cyclic GFR-binding peptide
  MOD_RES (28)..(29): Xaa is C or S

SEQ ID NO: 30812 - protein, 36 aa, Artificial Sequence
  Cyclic GFR-binding peptide
  MOD_RES (31)..(32): Xaa is C or S
EVVMDRYKKLVVNNAADFYLISIANLRAPVXXSAPA

SEQ ID NO: 30813 - protein, 31 aa, Artificial Sequence
  Cyclic GFR-binding peptide
  MOD_RES (27)..(28): Xaa is C or S
GYHYKLYTVVGKDKYLISIPSLKTPVXXAKS

SEQ ID NO: 30814 - protein, 29 aa, Artificial Sequence
  Cyclic GFR-binding peptide
  MOD_RES (27)..(28): Xaa is C or S
MRYKKLIKPTKGIFYLISIANLDQSVXXP

SEQ ID NO: 30815 - protein, 35 aa, Artificial Sequence; identical to SEQ ID NO: 2620
  Cyclic GFR-binding peptide
  MOD_RES (2)..(35): Xaa is C or S

SEQ ID NO: 30816 - protein, 35 aa, Artificial Sequence
  Cyclic GFR-binding peptide
  MOD_RES (1)..(3)..(34)..(35): Xaa is C or S
XKXSKVIMEYQKYIKPTKGIIYLISIPSLDQSVXX

SEQ ID NO: 30817 - protein, 43 aa, Artificial Sequence; identical to SEQ ID NO: 2622
  Cyclic GFR-binding peptide
  MOD_RES (2)..(4)..(37)..(38): Xaa is C or S

SEQ ID NO: 30818 - protein, 31 aa, Artificial Sequence; identical to SEQ ID NO: 2625
  Cyclic GFR-binding peptide
  MOD_RES (2)..(2): Xaa is C or S

SEQ ID NO: 30819 - protein, 21 aa, Artificial Sequence
  Cyclic GFR-binding peptide
YHYKLYTVVGKDKYLISIPSL

SEQ ID NO: 30820 - protein, 35 aa, Artificial Sequence
  Cyclic GFR-binding peptide
  MOD_RES (29)..(29): Xaa is C or S
VMNEYKFKIVNSSDDLYLVSIPELKTPAXTPKTVH

SEQ ID NO: 30821 - protein, 33 aa, Artificial Sequence
  Cyclic GFR-binding peptide
  MOD_RES (31)..(32): Xaa is C or S
RVVMNEYKFKIVNSSDDLYLVSIPELQTPAXXP

SEQ ID NO: 30822 - protein, 26 aa, Artificial Sequence
  Cyclic GFR-binding peptide
  MOD_RES (1)..(1): Xaa is C or S
XSRVIMEYQKYVKPKRGVIYLISIPS

SEQ ID NO: 30823 - protein, 33 aa, Artificial Sequence; identical to SEQ ID NO: 2627
  Cyclic GFR-binding peptide
  MOD_RES (2)..(2): Xaa is C or S

SEQ ID NO: 30824 - protein, 33 aa, Artificial Sequence; identical to SEQ ID NO: 2628
  Cyclic GFR-binding peptide
  MOD_RES (1)..(33): Xaa is C or S

SEQ ID NO: 30825 - protein, 34 aa, Artificial Sequence; identical to SEQ ID NO: 2629
  Cyclic GFR-binding peptide
  MOD_RES (29)..(30): Xaa is C or S

SEQ ID NO: 30826 - protein, 27 aa, Artificial Sequence
  Cyclic GFR-binding peptide
VIMEYQKYVKPKRGVIYLISIPSLAQP

SEQ ID NO: 30827 - protein, 31 aa, Artificial Sequence; identical to SEQ ID NO: 2630
  Cyclic GFR-binding peptide
  MOD_RES (2)..(2): Xaa is C or S

SEQ ID NO: 30828 - protein, 37 aa, Artificial Sequence
  Cyclic GFR-binding peptide
  MOD_RES (1)..(33)..(34): Xaa is C or S
XARVVMNEYQKYIVNSSDDIYLVSIPSLQTPAXXPKP

SEQ ID NO: 30829 - protein, 33 aa, Artificial Sequence
  Cyclic GFR-binding peptide
  MOD_RES (29)..(30): Xaa is C or S
VMDYHYKLVVNNAADKYLISIPSLRAPVXXSAP

SEQ ID NO: 30830 - protein, 29 aa, Artificial Sequence
  Cyclic GFR-binding peptide
  MOD_RES (2)..(2): Xaa is C or S
GXGEVVMEEYKFKVVKDYEDLYLMSIPEL

SEQ ID NO: 30831 - protein, 29 aa, Artificial Sequence
  Cyclic GFR-binding peptide
  MOD_RES (1)..(3): Xaa is C or S
XGXESVAMGEYQKYYTVVGKDIYLISIPS

SEQ ID NO: 30832 - protein, 29 aa, Artificial Sequence
  Cyclic GFR-binding peptide
ARVVMNEYKFKIVNSSDDLYLVSIPELQT

SEQ ID NO: 30833 - protein, 32 aa, Artificial Sequence; identical to SEQ ID NO: 2632
  Cyclic GFR-binding peptide
  MOD_RES (27)..(28): Xaa is C or S

SEQ ID NO: 30834 - protein, 35 aa, Artificial Sequence
  Cyclic GFR-binding peptide
  MOD_RES (30)..(31): Xaa is C or S
SMGEEYQKYTPVGMDDIYLVSIPSLKTPVXXAKGV

SEQ ID NO: 30835 - protein, 34 aa, Artificial Sequence; identical to SEQ ID NO: 2634
  Cyclic GFR-binding peptide
  MOD_RES (1)..(33)..(34): Xaa is C or S

SEQ ID NO: 30836 - protein, 32 aa, Artificial Sequence
  Cyclic GFR-binding peptide
  MOD_RES (28)..(29): Xaa is C or S
MEEYQKYVVKDYEDIYLMSIPSLETPVXXAKP

SEQ ID NO: 30837 - protein, 39 aa, Artificial Sequence; identical to SEQ ID NO: 2635
  Cyclic GFR-binding peptide
  MOD_RES (33)..(34): Xaa is C or S

SEQ ID NO: 30838 - protein, 24 aa, Artificial Sequence
  Cyclic GFR-binding peptide
RYKKLVKPKRGVFYLISIANLAQP

SEQ ID NO: 30839 - protein, 38 aa, Artificial Sequence
  Cyclic GFR-binding peptide
  MOD_RES (33)..(34): Xaa is C or S
EAVSMGEEYQKYTPVGMDDIYLVSIPSLKTPVXXAKGV

SEQ ID NO: 30840 - protein, 37 aa, Artificial Sequence; identical to SEQ ID NO: 2642
  Cyclic GFR-binding peptide
  MOD_RES (1)..(3)..(34)..(35): Xaa is C or S

SEQ ID NO: 30841 - protein, 31 aa, Artificial Sequence
  Cyclic GFR-binding peptide
  MOD_RES (1)..(1): Xaa is C or S
XSRVIMEYQKYVKPKRGVIYLISIPSLAQPV

SEQ ID NO: 30842 - protein, 30 aa, Artificial Sequence
  Cyclic GFR-binding peptide
  MOD_RES (27)..(28): Xaa is C or S
MEYKFKVKPKRGVLYLISIPELAQPVXXPA

SEQ ID NO: 30843 - protein, 32 aa, Artificial Sequence
  Cyclic GFR-binding peptide
  MOD_RES (29)..(30): Xaa is C or S
VMNEYQKYIVNNSSDIYLVSIPSLKTPAXXAK

SEQ ID NO: 30844 - protein, 24 aa, Artificial Sequence
  Cyclic GFR-binding peptide
KVIMEYKFKIKPTKGILYLISIPE

SEQ ID NO: 30845 - protein, 28 aa, Artificial Sequence
  Cyclic GFR-binding peptide
  MOD_RES (28)..(28): Xaa is C or S
IMYHYKLIKPTKGIKYLISIPSLDQSVX

SEQ ID NO: 30846 - protein, 31 aa, Artificial Sequence
  Cyclic GFR-binding peptide
  MOD_RES (29)..(30): Xaa is C or S
VMEEYQKYVVKDYEDIYLMSIPSLETPVXXA

SEQ ID NO: 30847 - protein, 34 aa, Artificial Sequence; identical to SEQ ID NO: 2645
  Cyclic GFR-binding peptide
  MOD_RES (1)..(33)..(34): Xaa is C or S

SEQ ID NO: 30848 - protein, 33 aa, Artificial Sequence
  Cyclic GFR-binding peptide
  MOD_RES (30)..(31): Xaa is C or S
VVMDEYKFKVVNNAADLYLISIPELRAPVXXSA

SEQ ID NO: 30849 - protein, 36 aa, Artificial Sequence; identical to SEQ ID NO: 2647
  Cyclic GFR-binding peptide
  MOD_RES (2)..(4)..(35)..(36): Xaa is C or S

SEQ ID NO: 30850 - protein, 26 aa, Artificial Sequence
  Cyclic GFR-binding peptide
EVVMDYHYKLVVNNAADKYLISIPSL

SEQ ID NO: 30851 - protein, 37 aa, Artificial Sequence
  Cyclic GFR-binding peptide
  MOD_RES (2)..(4)..(37): Xaa is C or S
RXGXEAVSMGEEYQKYTPVGMDDIYLVSIPSLKTPVX

SEQ ID NO: 30852 - protein, 26 aa, Artificial Sequence
  Cyclic GFR-binding peptide
VVMNEYQKYIVNSSDDIYLVSIPSLQ

SEQ ID NO: 30853 - protein, 28 aa, Artificial Sequence
  Cyclic GFR-binding peptide
  MOD_RES (1)..(1): Xaa is C or S
XSRVVMNRYKKLIVNSSDDFYLVSIANL

SEQ ID NO: 30854 - protein, 30 aa, Artificial Sequence
  Cyclic GFR-binding peptide
  MOD_RES (27)..(28): Xaa is C or S
DEYQKYVVKENEDIYLMSIPSLETPVXXAK

SEQ ID NO: 30855 - protein, 26 aa, Artificial Sequence
  Cyclic GFR-binding peptide
  MOD_RES (26)..(26): Xaa is C or S
RYKKLVKPTRGVFYLISIANLDQPVX

SEQ ID NO: 30856 - protein, 29 aa, Artificial Sequence
  Cyclic GFR-binding peptide
  MOD_RES (26)..(27): Xaa is C or S
RYKKLVKPKRGVFYLISIANLAQPVXXPA

SEQ ID NO: 30857 - protein, 38 aa, Artificial Sequence
  Cyclic GFR-binding peptide
  MOD_RES (32)..(33): Xaa is C or S
GEVVMDEYQKYVVKENEDIYLMSIPSLETPVXXAKPIK

SEQ ID NO: 30858 - protein, 27 aa, Artificial Sequence
  Cyclic GFR-binding peptide
MDYHYKLVVKENEDKYLMSIPSLETPV

SEQ ID NO: 30859 - protein, 26 aa, Artificial Sequence
  Cyclic GFR-binding peptide
AMGRYKKLYTVVGKDFYLISIANLKT

SEQ ID NO: 30860 - protein, 24 aa, Artificial Sequence
  Cyclic GFR-binding peptide
KVVMEYKFKVKPTRGVLYLISIPE

SEQ ID NO: 30861 - protein, 32 aa, Artificial Sequence
  Cyclic GFR-binding peptide
  MOD_RES (31)..(32): Xaa is C or S
EVVMEEYQKYVVKDYEDIYLMSIPSLETPVXX

SEQ ID NO: 30862 - protein, 29 aa, Artificial Sequence
  Cyclic GFR-binding peptide
  MOD_RES (28)..(29): Xaa is C or S
IMEYKFKVKPKRGVLYLISIPELAQPVXX

SEQ ID NO: 30863 - protein, 38 aa, Artificial Sequence; identical to SEQ ID NO: 2655
  Cyclic GFR-binding peptide
  MOD_RES (1)..(33)..(34): Xaa is C or S

SEQ ID NO: 30864 - protein, 28 aa, Artificial Sequence
  Cyclic GFR-binding peptide
ARVVMNEYQKYIVNSSDDIYLVSIPSLQ

SEQ ID NO: 30865 - protein, 27 aa, Artificial Sequence
  Cyclic GFR-binding peptide
  MOD_RES (1)..(1): Xaa is C or S
XGEVVMDEYQKYVVKENEDIYLMSIPS

SEQ ID NO: 30866 - protein, 39 aa, Artificial Sequence; identical to SEQ ID NO: 2659
  Cyclic GFR-binding peptide
  MOD_RES (1)..(3)..(35): Xaa is C or S

SEQ ID NO: 30867 - protein, 37 aa, Artificial Sequence
  Cyclic GFR-binding peptide
  MOD_RES (1)..(32)..(33): Xaa is C or S
XSKVVMEYQKYVKPTRGVIYLISIPSLDQPVXXPSAS

SEQ ID NO: 30868 - protein, 32 aa, Artificial Sequence
  Cyclic GFR-binding peptide
  MOD_RES (1)..(1): Xaa is C or S
XGEVVMEEYQKYVVKDYEDIYLMSIPSLETPV

SEQ ID NO: 30869 - protein, 29 aa, Artificial Sequence
  Cyclic GFR-binding peptide
SKVVMYHYKLVKPTRGVKYLISIPSLDQP

SEQ ID NO: 30870 - protein, 33 aa, Artificial Sequence
  Cyclic GFR-binding peptide
  MOD_RES (1)..(33): Xaa is C or S
XGEVVMEEYKFKVVKDYEDLYLMSIPELETPVX

SEQ ID NO: 30871 - protein, 31 aa, Artificial Sequence; identical to SEQ ID NO: 2663
  Cyclic GFR-binding peptide
  MOD_RES (30)..(31): Xaa is C or S

SEQ ID NO: 30872 - protein, 33 aa, Artificial Sequence
  Cyclic GFR-binding peptide
  MOD_RES (31)..(32): Xaa is C or S
KVVMNEYKFKIVNNSSDLYLVSIPELKTPAXXA

SEQ ID NO: 30873 - protein, 36 aa, Artificial Sequence
  Cyclic GFR-binding peptide
  MOD_RES (30)..(31): Xaa is C or S
VVMDEYQKYVVKENEDIYLMSIPSLETPVXXAKPIK

SEQ ID NO: 30874 - protein, 25 aa, Artificial Sequence
  Cyclic GFR-binding peptide
DYHYKLVVNNAADKYLISIPSLRAP

SEQ ID NO: 30875 - protein, 31 aa, Artificial Sequence
  Cyclic GFR-binding peptide
  MOD_RES (1)..(3): Xaa is C or S
XGXESVAMGEYQKYYTVVGKDIYLISIPSLK

SEQ ID NO: 30876 - protein, 31 aa, Artificial Sequence; identical to SEQ ID NO: 2675
  Cyclic GFR-binding peptide
  MOD_RES (30)..(31): Xaa is C or S

SEQ ID NO: 30877 - protein, 28 aa, Artificial Sequence
  Cyclic GFR-binding peptide
  MOD_RES (28)..(28): Xaa is C or S
VMYHYKLVKPTRGVKYLISIPSLDQPVX

SEQ ID NO: 30878 - protein, 32 aa, Artificial Sequence
  Cyclic GFR-binding peptide
  MOD_RES (1)..(32): Xaa is C or S
XSRVIMEYQKYVKPKRGVIYLISIPSLAQPVX

SEQ ID NO: 30879 - protein, 24 aa, Artificial Sequence
  Cyclic GFR-binding peptide
VMNEYQKYIVNSSDDIYLVSIPSL

SEQ ID NO: 30880 - protein, 39 aa, Artificial Sequence; identical to SEQ ID NO: 2679
  Cyclic GFR-binding peptide
  MOD_RES (1)..(3)..(34)..(35): Xaa is C or S

SEQ ID NO: 30881 - protein, 28 aa, Artificial Sequence
  Cyclic GFR-binding peptide
  MOD_RES (2)..(2): Xaa is C or S
KXSKVVMYHYKLVKPTRGVKYLISIPSL

SEQ ID NO: 30882 - protein, 33 aa, Artificial Sequence
  Cyclic GFR-binding peptide
  MOD_RES (1)..(3): Xaa is C or S
XGXGEVVMEEYQKYVVKDYEDIYLMSIPSLETP

SEQ ID NO: 30883 - protein, 30 aa, Artificial Sequence; identical to SEQ ID NO: 2681
  Cyclic GFR-binding peptide
  MOD_RES (28)..(29): Xaa is C or S

SEQ ID NO: 30884 - protein, 32 aa, Artificial Sequence; identical to SEQ ID NO: 2685
  Cyclic GFR-binding peptide
  MOD_RES (28)..(29): Xaa is C or S

SEQ ID NO: 30885 - protein, 30 aa, Artificial Sequence
  Cyclic GFR-binding peptide
  MOD_RES (29)..(30): Xaa is C or S
VIMEYQKYVKPKRGVIYLISIPSLAQPVXX

SEQ ID NO: 30886 - protein, 24 aa, Artificial Sequence
  Cyclic GFR-binding peptide
MGERYKKLTPVGMDDFYLVSIANL

SEQ ID NO: 30887 - protein, 41 aa, Artificial Sequence
  Cyclic GFR-binding peptide
  MOD_RES (2)..(4)..(36)..(37): Xaa is C or S
RXGXGEVVMDEYQKYVVKENEDIYLMSIPSLETPVXXAKPI

SEQ ID NO: 30888 - protein, 28 aa, Artificial Sequence
  Cyclic GFR-binding peptide
  MOD_RES (1)..(1): Xaa is C or S
XSRVVMNYHYKLIVNSSDDKYLVSIPSL

SEQ ID NO: 30889 - protein, 26 aa, Artificial Sequence
  Cyclic GFR-binding peptide
DRYKKLVVKENEDFYLMSIANLETPV

SEQ ID NO: 30890 - protein, 29 aa, Artificial Sequence
  Cyclic GFR-binding peptide
ARVVMNYHYKLIVNSSDDKYLVSIPSLQT

SEQ ID NO: 30891 - protein, 25 aa, Artificial Sequence
  Cyclic GFR-binding peptide
VVMDEYQKYVVKENEDIYLMSIPSL

SEQ ID NO: 30892 - protein, 31 aa, Artificial Sequence
  Cyclic GFR-binding peptide
  MOD_RES (31)..(31): Xaa is C or S
EVVMDEYQKYVVKENEDIYLMSIPSLETPVX

SEQ ID NO: 30893 - protein, 40 aa, Artificial Sequence
  Cyclic GFR-binding peptide
  MOD_RES (2)..(34)..(35): Xaa is C or S
GXAEVVMDRYKKLVVNNAADFYLISIANLRAPVXXSAPAA

SEQ ID NO: 30894 - protein, 27 aa, Artificial Sequence
  Cyclic GFR-binding peptide
EAVSMGEEYKFKTPVGMDDLYLVSIPE

SEQ ID NO: 30895 - protein, 32 aa, Artificial Sequence
  Cyclic GFR-binding peptide
  MOD_RES (31)..(32): Xaa is C or S
EVVMDEYQKYVVKENEDIYLMSIPSLETPVXX

SEQ ID NO: 30896 - protein, 28 aa, Artificial Sequence
  Cyclic GFR-binding peptide
  MOD_RES (28)..(28): Xaa is C or S
MNEYKFKIVNNSSDLYLVSIPELKTPAX

SEQ ID NO: 30897 - protein, 36 aa, Artificial Sequence; identical to SEQ ID NO: 2694
  Cyclic GFR-binding peptide
  MOD_RES (32)..(32): Xaa is C or S

SEQ ID NO: 30898 - protein, 34 aa, Artificial Sequence
  Cyclic GFR-binding peptide
  MOD_RES (32)..(33): Xaa is C or S
ESVAMGYHYKLYTVVGKDKYLISIPSLKTPVXXA

SEQ ID NO: 30899 - protein, 41 aa, Artificial Sequence; identical to SEQ ID NO: 2695
  Cyclic GFR-binding peptide
  MOD_RES (1)..(3)..(35)..(36): Xaa is C or S

SEQ ID NO: 30900 - protein, 31 aa, Artificial Sequence; identical to SEQ ID NO: 2699
  Cyclic GFR-binding peptide
  MOD_RES (27)..(28): Xaa is C or S

SEQ ID NO: 30901 - protein, 34 aa, Artificial Sequence
  Cyclic GFR-binding peptide
  MOD_RES (33)..(34): Xaa is C or S
EAVSMGEEYQKYTPVGMDDIYLVSIPSLKTPVXX

SEQ ID NO: 30902 - protein, 35 aa, Artificial Sequence
  Cyclic GFR-binding peptide
  MOD_RES (2)..(34)..(35): Xaa is C or S
GXARVVMNEYKFKIVNSSDDLYLVSIPELQTPAXX

SEQ ID NO: 30903 - protein, 31 aa, Artificial Sequence
  Cyclic GFR-binding peptide
  MOD_RES (29)..(30): Xaa is C or S
VIMEYQKYIKPTKGIIYLISIPSLDQSVXXP

SEQ ID NO: 30904 - protein, 37 aa, Artificial Sequence; identical to SEQ ID NO: 2701
  Cyclic GFR-binding peptide
  MOD_RES (2)..(4)..(36): Xaa is C or S

SEQ ID NO: 30905 - protein, 24 aa, Artificial Sequence
  Cyclic GFR-binding peptide
VVMNRYKKLIVNNSSDFYLVSIAN

SEQ ID NO: 30906 - protein, 27 aa, Artificial Sequence
  Cyclic GFR-binding peptide
SKVIMYHYKLIKPTKGIKYLISIPSLD

SEQ ID NO: 30907 - protein, 33 aa, Artificial Sequence; identical to SEQ ID NO: 2704
  Cyclic GFR-binding peptide
  MOD_RES (29)..(30): Xaa is C or S

SEQ ID NO: 30908 - protein, 29 aa, Artificial Sequence
  Cyclic GFR-binding peptide
  MOD_RES (28)..(29): Xaa is C or S
GEEYQKYTPVGMDDIYLVSIPSLKTPVXX

SEQ ID NO: 30909 - protein, 28 aa, Artificial Sequence
  Cyclic GFR-binding peptide
VVMDEYKFKVVNNAADLYLISIPELRAP

SEQ ID NO: 30910 - protein, 30 aa, Artificial Sequence
  Cyclic GFR-binding peptide
  MOD_RES (26)..(27): Xaa is C or S
EYQKYVVKENEDIYLMSIPSLETPVXXAKP

SEQ ID NO: 30911 - protein, 32 aa, Artificial Sequence
  Cyclic GFR-binding peptide
  MOD_RES (26)..(27): Xaa is C or S
EYKFKIVNNSSDLYLVSIPELKTPAXXAKPVA

SEQ ID NO: 30912 - protein, 33 aa, Artificial Sequence
  Cyclic GFR-binding peptide
  MOD_RES (2)..(4): Xaa is C or S
HXGXARVVMNEYKFKIVNSSDDLYLVSIPELQT

SEQ ID NO: 30913 - protein, 24 aa, Artificial Sequence
  Cyclic GFR-binding peptide
MDRYKKLVVKENEDFYLMSIANLE

SEQ ID NO: 30914 - protein, 34 aa, Artificial Sequence; identical to SEQ ID NO: 2709
  Cyclic GFR-binding peptide
  MOD_RES (1)..(32)..(33): Xaa is C or S

SEQ ID NO: 30915 - protein, 32 aa, Artificial Sequence
  Cyclic GFR-binding peptide
  MOD_RES (28)..(29): Xaa is C or S
MNEYQKYIVNSSDDIYLVSIPSLQTPAXXPKP

SEQ ID NO: 30916 - protein, 30 aa, Artificial Sequence
  Cyclic GFR-binding peptide
  MOD_RES (28)..(29): Xaa is C or S
MDEYKFKVVNNAADLYLISIPELRAPVXXS

SEQ ID NO: 30917 - protein, 38 aa, Artificial Sequence
  Cyclic GFR-binding peptide
  MOD_RES (2)..(4)..(35)..(36): Xaa is C or S
SXKXSKVIMEYQKYIKPTKGIIYLISIPSLDQSVXXPS

SEQ ID NO: 30918 - protein, 28 aa, Artificial Sequence
  Cyclic GFR-binding peptide
  MOD_RES (2)..(2): Xaa is C or S
GXGEVVMERYKKLVVKDYEDFYLMSIAN

SEQ ID NO: 30919 - protein, 23 aa, Artificial Sequence
  Cyclic GFR-binding peptide
VMDYHYKLVVKENEDKYLMSIPS

SEQ ID NO: 30920 - protein, 33 aa, Artificial Sequence
  Cyclic GFR-binding peptide
  MOD_RES (31)..(32): Xaa is C or S
SVAMGEYQKYYTVVGKDIYLISIPSLKTPVXXA

SEQ ID NO: 30921 - protein, 26 aa, Artificial Sequence
  Cyclic GFR-binding peptide
VVMRYKKLVKPTRGVFYLISIANLDQ

SEQ ID NO: 30922 - protein, 21 aa, Artificial Sequence
  Cyclic GFR-binding peptide
MYHYKLVKPKRGVKYLISIPS

SEQ ID NO: 30923 - protein, 28 aa, Artificial Sequence
  Cyclic GFR-binding peptide
  MOD_RES (27)..(28): Xaa is C or S
DYHYKLVVNNAADKYLISIPSLRAPVXX

SEQ ID NO: 30924 - protein, 30 aa, Artificial Sequence
  Cyclic GFR-binding peptide
  MOD_RES (2)..(2): Xaa is C or S
GXAKVVMNEYKFKIVNNSSDLYLVSIPELK

SEQ ID NO: 30925 - protein, 29 aa, Artificial Sequence
  Cyclic GFR-binding peptide
  MOD_RES (28)..(29): Xaa is C or S
MGYHYKLYTVVGKDKYLISIPSLKTPVXX

SEQ ID NO: 30926 - protein, 31 aa, Artificial Sequence; identical to SEQ ID NO: 2721
  Cyclic GFR-binding peptide
  MOD_RES (2)..(4): Xaa is C or S

SEQ ID NO: 30927 - protein, 25 aa, Artificial Sequence
  Cyclic GFR-binding peptide
RVIMRYKKLVKPKRGVFYLISIANL

SEQ ID NO: 30928 - protein, 30 aa, Artificial Sequence; identical to SEQ ID NO: 2724
  Cyclic GFR-binding peptide
  MOD_RES (1)..(3): Xaa is C or S

SEQ ID NO: 30929 - protein, 28 aa, Artificial Sequence
  Cyclic GFR-binding peptide
  MOD_RES (1)..(1): Xaa is C or S
XGEVVMEYHYKLVVKDYEDKYLMSIPSL

SEQ ID NO: 30930 - protein, 34 aa, Artificial Sequence; identical to SEQ ID NO: 2727
  Cyclic GFR-binding peptide
  MOD_RES (2)..(34): Xaa is C or S

SEQ ID NO: 30931 - protein, 30 aa, Artificial Sequence; identical to SEQ ID NO: 2728
  Cyclic GFR-binding peptide
  MOD_RES (30)..(30): Xaa is C or S

SEQ ID NO: 30932 - protein, 33 aa, Artificial Sequence
  Cyclic GFR-binding peptide
  MOD_RES (28)..(29): Xaa is C or S
MDEYKFKVVNNAADLYLISIPELRAPVXXSAPA

SEQ ID NO: 30933 - protein, 27 aa, Artificial Sequence
  Cyclic GFR-binding peptide
SKVVMYHYKLVKPTRGVKYLISIPSLD

SEQ ID NO: 30934 - protein, 27 aa, Artificial Sequence
  Cyclic GFR-binding peptide
AKVVMNEYQKYIVNNSSDIYLVSIPSL

SEQ ID NO: 30935 - protein, 31 aa, Artificial Sequence
  Cyclic GFR-binding peptide
EAVSMGEEYKFKTPVGMDDLYLVSIPELKTP

SEQ ID NO: 30936 - protein, 37 aa, Artificial Sequence; identical to SEQ ID NO: 2734
  Cyclic GFR-binding peptide
  MOD_RES (31)..(32): Xaa is C or S

SEQ ID NO: 30937 - protein, 29 aa, Artificial Sequence
  Cyclic GFR-binding peptide
  MOD_RES (28)..(29): Xaa is C or S
VMYHYKLVKPTRGVKYLISIPSLDQPVXX

SEQ ID NO: 30938 - protein, 30 aa, Artificial Sequence
  Cyclic GFR-binding peptide
  MOD_RES (1)..(3): Xaa is C or S
XGXSRVVMNEYKFKIVNSSDDLYLVSIPEL

SEQ ID NO: 30939 - protein, 41 aa, Artificial Sequence; identical to SEQ ID NO: 2737
  Cyclic GFR-binding peptide
  MOD_RES (2)..(4)..(37)..(38): Xaa is C or S

SEQ ID NO: 30940 - protein, 29 aa, Artificial Sequence
  Cyclic GFR-binding peptide
VVMDRYKKLVVKENEDFYLMSIANLETPV

SEQ ID NO: 30941 - protein, 31 aa, Artificial Sequence; identical to SEQ ID NO: 2741
  Cyclic GFR-binding peptide

SEQ ID NO: 30942 - protein, 34 aa, Artificial Sequence
  Cyclic GFR-binding peptide
  MOD_RES (1)..(3)..(34): Xaa is C or S
XKXSRVIMEYKFKVKPKRGVLYLISIPELAQPVX

SEQ ID NO: 30943 - protein, 22 aa, Artificial Sequence
  Cyclic GFR-binding peptide
MEYHYKLVVKDYEDKYLMSIPS

SEQ ID NO: 30944 - protein, 33 aa, Artificial Sequence
  Cyclic GFR-binding peptide
  MOD_RES (30)..(31): Xaa is C or S
VAMGYHYKLYTVVGKDKYLISIPSLKTPVXXAK

SEQ ID NO: 30945 - protein, 36 aa, Artificial Sequence
  Cyclic GFR-binding peptide
  MOD_RES (32)..(32): Xaa is C or S
SRVVMNEYKFKIVNSSDDLYLVSIPELKTPAXTPKT

SEQ ID NO: 30946 - protein, 34 aa, Artificial Sequence
  Cyclic GFR-binding peptide
  MOD_RES (32)..(33): Xaa is C or S
ARVVMNEYKFKIVNSSDDLYLVSIPELQTPAXXP

SEQ ID NO: 30947 - protein, 23 aa, Artificial Sequence
  Cyclic GFR-binding peptide
MDEYKFKVVNNAADLYLISIPEL

SEQ ID NO: 30948 - protein, 33 aa, Artificial Sequence; identical to SEQ ID NO: 2743
  Cyclic GFR-binding peptide
  MOD_RES (27)..(28): Xaa is C or S

SEQ ID NO: 30949 - protein, 33 aa, Artificial Sequence; identical to SEQ ID NO: 2746
  Cyclic GFR-binding peptide
  MOD_RES (32)..(33): Xaa is C or S

SEQ ID NO: 30950 - protein, 29 aa, Artificial Sequence
  Cyclic GFR-binding peptide
  MOD_RES (27)..(27): Xaa is C or S
NYHYKLIVNSSDDKYLVSIPSLKTPAXTP

SEQ ID NO: 30951 - protein, 32 aa, Artificial Sequence; identical to SEQ ID NO: 2749
  Cyclic GFR-binding peptide
  MOD_RES (30)..(31): Xaa is C or S

SEQ ID NO: 30952 - protein, 33 aa, Artificial Sequence
  Cyclic GFR-binding peptide
  MOD_RES (2)..(2): Xaa is C or S
GXAKVVMNEYQKYIVNNSSDIYLVSIPSLKTPA

SEQ ID NO: 30953 - protein, 23 aa, Artificial Sequence
  Cyclic GFR-binding peptide
DYHYKLVVKENEDKYLMSIPSLE

SEQ ID NO: 30954 - protein, 32 aa, Artificial Sequence; identical to SEQ ID NO: 2751
  Cyclic GFR-binding peptide
  MOD_RES (29)..(29): Xaa is C or S

SEQ ID NO: 30955 - protein, 32 aa, Artificial Sequence
  Cyclic GFR-binding peptide
  MOD_RES (26)..(26): Xaa is C or S
EYQKYIVNSSDDIYLVSIPSLKTPAXTPKTVH

SEQ ID NO: 30956 - protein, 28 aa, Artificial Sequence
  Cyclic GFR-binding peptide
  MOD_RES (28)..(28): Xaa is C or S
IMEYKFKVKPKRGVLYLISIPELAQPVX

SEQ ID NO: 30957 - protein, 30 aa, Artificial Sequence
  Cyclic GFR-binding peptide
  MOD_RES (28)..(28): Xaa is C or S
MNEYQKYIVNSSDDIYLVSIPSLKTPAXTP

SEQ ID NO: 30958 - protein, 26 aa, Artificial Sequence
  Cyclic GFR-binding peptide
KVVMNRYKKLIVNNSSDFYLVSIANL

SEQ ID NO: 30959 - protein, 34 aa, Artificial Sequence
  Cyclic GFR-binding peptide
  MOD_RES (30)..(30): Xaa is C or S
VVMNEYKFKIVNSSDDLYLVSIPELKTPAXTPKT

SEQ ID NO: 30960 - protein, 37 aa, Artificial Sequence; identical to SEQ ID NO: 2755
  Cyclic GFR-binding peptide
  MOD_RES (2)..(4)..(36)..(37): Xaa is C or S

SEQ ID NO: 30961 - protein, 31 aa, Artificial Sequence; identical to SEQ ID NO: 2756
  Cyclic GFR-binding peptide

SEQ ID NO: 30962 - protein, 35 aa, Artificial Sequence
  Cyclic GFR-binding peptide
  MOD_RES (1)..(32)..(33): Xaa is C or S
XSRVIMEYKFKVKPKRGVLYLISIPELAQPVXXPA

SEQ ID NO: 30963 - protein, 34 aa, Artificial Sequence
  Cyclic GFR-binding peptide
  MOD_RES (32)..(33): Xaa is C or S
AEVVMDYHYKLVVNNAADKYLISIPSLRAPVXXS

SEQ ID NO: 30964 - protein, 32 aa, Artificial Sequence
  Cyclic GFR-binding peptide
  MOD_RES (29)..(30): Xaa is C or S
VMNEYQKYIVNSSDDIYLVSIPSLKTPAXXPK

SEQ ID NO: 30965 - protein, 32 aa, Artificial Sequence; identical to SEQ ID NO: 2758
  Cyclic GFR-binding peptide
  MOD_RES (28)..(28): Xaa is C or S

SEQ ID NO: 30966 - protein, 36 aa, Artificial Sequence; identical to SEQ ID NO: 2764
  Cyclic GFR-binding peptide
  MOD_RES (31)..(32): Xaa is C or S

SEQ ID NO: 30967 - protein, 30 aa, Artificial Sequence; identical to SEQ ID NO: 2765
  Cyclic GFR-binding peptide
  MOD_RES (26)..(27): Xaa is C or S

SEQ ID NO: 30968 - protein, 24 aa, Artificial Sequence
  Cyclic GFR-binding peptide
EYQKYIKPTKGIIYLISIPSLDQS

SEQ ID NO: 30969 - protein, 32 aa, Artificial Sequence; identical to SEQ ID NO: 2766
  Cyclic GFR-binding peptide
  MOD_RES (29)..(30): Xaa is C or S

SEQ ID NO: 30970 - protein, 31 aa, Artificial Sequence; identical to SEQ ID NO: 2767
  Cyclic GFR-binding peptide
  MOD_RES (28)..(28): Xaa is C or S

SEQ ID NO: 30971 - protein, 32 aa, Artificial Sequence
  Cyclic GFR-binding peptide
  MOD_RES (2)..(2): Xaa is C or S
KXSKVIMEYQKYIKPTKGIIYLISIPSLDQSV

SEQ ID NO: 30972 - protein, 36 aa, Artificial Sequence
  Cyclic GFR-binding peptide
  MOD_RES (1)..(3)..(34)..(35): Xaa is C or S
XKXSKVIMEYQKYIKPTKGIIYLISIPSLDQSVXXP

SEQ ID NO: 30973 - protein, 30 aa, Artificial Sequence
  Cyclic GFR-binding peptide
  MOD_RES (30)..(30): Xaa is C or S
SMGEEYKFKTPVGMDDLYLVSIPELKTPVX

SEQ ID NO: 30974 - protein, 20 aa, Artificial Sequence
  Cyclic GFR-binding peptide
YHYKLIKPTKGIKYLISIPS

SEQ ID NO: 30975 - protein, 26 aa, Artificial Sequence
  Cyclic GFR-binding peptide
VVMNRYKKLIVNNSSDFYLVSIANLK

SEQ ID NO: 30976 - protein, 35 aa, Artificial Sequence; identical to SEQ ID NO: 2774
  Cyclic GFR-binding peptide
  MOD_RES (2)..(4)..(35): Xaa is C or S

SEQ ID NO: 30977 - protein, 27 aa, Artificial Sequence
  Cyclic GFR-binding peptide
RVVMNYHYKLIVNSSDDKYLVSIPSLK

SEQ ID NO: 30978 - protein, 38 aa, Artificial Sequence
  Cyclic GFR-binding peptide
  MOD_RES (2)..(4)..(36)..(37): Xaa is C or S
HXGXSRVVMNEYQKYIVNSSDDIYLVSIPSLKTPAXXP

SEQ ID NO: 30979 - protein, 33 aa, Artificial Sequence
  Cyclic GFR-binding peptide
  MOD_RES (2)..(4): Xaa is C or S
SXKXSRVIMEYQKYVKPKRGVIYLISIPSLAQP

SEQ ID NO: 30980 - protein, 26 aa, Artificial Sequence
  Cyclic GFR-binding peptide
KVVMRYKKLVKPTRGVFYLISIANLD

SEQ ID NO: 30981 - protein, 39 aa, Artificial Sequence; identical to SEQ ID NO: 2777
  Cyclic GFR-binding peptide
  MOD_RES (1)..(3)..(34)..(35): Xaa is C or S

SEQ ID NO: 30982 - protein, 30 aa, Artificial Sequence
  Cyclic GFR-binding peptide
  MOD_RES (26)..(27): Xaa is C or S
EYQKYVVKDYEDIYLMSIPSLETPVXXAKP

SEQ ID NO: 30983 - protein, 39 aa, Artificial Sequence; identical to SEQ ID NO: 2778
  Cyclic GFR-binding peptide
  MOD_RES (2)..(34)..(35): Xaa is C or S

SEQ ID NO: 30984 - protein, 38 aa, Artificial Sequence
  Cyclic GFR-binding peptide
  MOD_RES (1)..(32)..(33): Xaa is C or S
XSRVIMEYQKYVKPKRGVIYLISIPSLAQPVXXPAASA

SEQ ID NO: 30985 - protein, 39 aa, Artificial Sequence; identical to SEQ ID NO: 2780
  Cyclic GFR-binding peptide
  MOD_RES (2)..(33)..(34): Xaa is C or S

SEQ ID NO: 30986 - protein, 30 aa, Artificial Sequence
  Cyclic GFR-binding peptide
  MOD_RES (2)..(4): Xaa is C or S
RXGXGEVVMDEYKFKVVKENEDLYLMSIPE

SEQ ID NO: 30987 - protein, 26 aa, Artificial Sequence
  Cyclic GFR-binding peptide
  MOD_RES (26)..(26): Xaa is C or S
EYQKYIVNSSDDIYLVSIPSLQTPAX

SEQ ID NO: 30988 - protein, 22 aa, Artificial Sequence
  Cyclic GFR-binding peptide
NRYKKLIVNNSSDFYLVSIANL

SEQ ID NO: 30989 - protein, 28 aa, Artificial Sequence
  Cyclic GFR-binding peptide
ARVVMNYHYKLIVNSSDDKYLVSIPSLQ

SEQ ID NO: 30990 - protein, 34 aa, Artificial Sequence
  Cyclic GFR-binding peptide
  MOD_RES (28)..(29): Xaa is C or S
GEEYQKYTPVGMDDIYLVSIPSLKTPVXXAKGVK

SEQ ID NO: 30991 - protein, 36 aa, Artificial Sequence
  Cyclic GFR-binding peptide
  MOD_RES (31)..(32): Xaa is C or S
RVVMNEYQKYIVNSSDDIYLVSIPSLKTPAXXPKPV

SEQ ID NO: 30992 - protein, 22 aa, Artificial Sequence
  Cyclic GFR-binding peptide
MNRYKKLIVNNSSDFYLVSIAN

SEQ ID NO: 30993 - protein, 29 aa, Artificial Sequence
  Cyclic GFR-binding peptide
AKVVMNRYKKLIVNNSSDFYLVSIANLKT

SEQ ID NO: 30994 - protein, 28 aa, Artificial Sequence
  Cyclic GFR-binding peptide
  MOD_RES (27)..(28): Xaa is C or S
NYHYKLIVNNSSDKYLVSIPSLKTPAXX

SEQ ID NO: 30995 - protein, 32 aa, Artificial Sequence
  Cyclic GFR-binding peptide
  MOD_RES (1)..(3): Xaa is C or S
XGXESVAMGEYQKYYTVVGKDIYLISIPSLKT

SEQ ID NO: 30996 - protein, 40 aa, Artificial Sequence; identical to SEQ ID NO: 2788
  Cyclic GFR-binding peptide
  MOD_RES (1)..(3)..(35): Xaa is C or S

SEQ ID NO: 30997 - protein, 38 aa, Artificial Sequence
  Cyclic GFR-binding peptide
  MOD_RES (32)..(33): Xaa is C or S
SRVVMNEYKFKIVNSSDDLYLVSIPELKTPAXXPKPVY

SEQ ID NO: 30998 - protein, 30 aa, Artificial Sequence
  Cyclic GFR-binding peptide
  MOD_RES (2)..(2): Xaa is C or S
GXEAVSMGEEYKFKTPVGMDDLYLVSIPEL

SEQ ID NO: 30999 - protein, 34 aa, Artificial Sequence
  Cyclic GFR-binding peptide
  MOD_RES (1)..(33)..(34): Xaa is C or S
XGEVVMEEYKFKVVKDYEDLYLMSIPELETPVXX

SEQ ID NO: 31000 - protein, 33 aa, Artificial Sequence
  Cyclic GFR-binding peptide
  MOD_RES (2)..(4): Xaa is C or S
HXGXARVVMNEYQKYIVNSSDDIYLVSIPSLQT

SEQ ID NO: 31001 - protein, 37 aa, Artificial Sequence
  Cyclic GFR-binding peptide
  MOD_RES (1)..(32)..(33): Xaa is C or S
XSKVIMEYQKYIKPTKGIIYLISIPSLDQSVXXPSAS

SEQ ID NO: 31002 - protein, 24 aa, Artificial Sequence
  Cyclic GFR-binding peptide
VMNRYKKLIVNNSSDFYLVSIANL

SEQ ID NO: 31003 - protein, 29 aa, Artificial Sequence
  Cyclic GFR-binding peptide
AEVVMDRYKKLVVNNAADFYLISIANLRA

SEQ ID NO: 31004 - protein, 27 aa, Artificial Sequence
  Cyclic GFR-binding peptide
VVMDYHYKLVVNNAADKYLISIPSLRA

SEQ ID NO: 31005 - protein, 23 aa, Artificial Sequence
  Cyclic GFR-binding peptide
MEYKFKIKPTKGILYLISIPELD

SEQ ID NO: 31006 - protein, 39 aa, Artificial Sequence
  Cyclic GFR-binding peptide
  MOD_RES (1)..(3)..(35)..(36): Xaa is C or S
XGXAKVVMNEYKFKIVNNSSDLYLVSIPELKTPAXXAKP

SEQ ID NO: 31007 - protein, 37 aa, Artificial Sequence; identical to SEQ ID NO: 2798
  Cyclic GFR-binding peptide
  MOD_RES (1)..(3)..(35): Xaa is C or S

SEQ ID NO: 31008 - protein, 34 aa, Artificial Sequence; identical to SEQ ID NO: 2799
  Cyclic GFR-binding peptide
  MOD_RES (28)..(29): Xaa is C or S

SEQ ID NO: 31009 - protein, 30 aa, Artificial Sequence; identical to SEQ ID NO: 2800
  Cyclic GFR-binding peptide
  MOD_RES (28)..(29): Xaa is C or S

SEQ ID NO: 31010 - protein, 37 aa, Artificial Sequence; identical to SEQ ID NO: 2802
  Cyclic GFR-binding peptide
  MOD_RES (31)..(31): Xaa is C or S

SEQ ID NO: 31011 - protein, 33 aa, Artificial Sequence; identical to SEQ ID NO: 2803
  Cyclic GFR-binding peptide
  MOD_RES (1)..(1): Xaa is C or S

SEQ ID NO: 31012 - protein, 31 aa, Artificial Sequence; identical to SEQ ID NO: 2804
  Cyclic GFR-binding peptide
  MOD_RES (28)..(29): Xaa is C or S

SEQ ID NO: 31013 - protein, 31 aa, Artificial Sequence
  Cyclic GFR-binding peptide
  MOD_RES (2)..(2): Xaa is C or S
GXGEVVMEEYQKYVVKDYEDIYLMSIPSLET

SEQ ID NO: 31014 - protein, 24 aa, Artificial Sequence
  Cyclic GFR-binding peptide
VVMEEYKFKVVKDYEDLYLMSIPE

SEQ ID NO: 31015 - protein, 34 aa, Artificial Sequence
  Cyclic GFR-binding peptide
  MOD_RES (2)..(4): Xaa is C or S
RXGXAEVVMDEYQKYVVNNAADIYLISIPSLRAP

SEQ ID NO: 31016 - protein, 37 aa, Artificial Sequence
  Cyclic GFR-binding peptide
  MOD_RES (1)..(3)..(35)..(36): Xaa is C or S
XGXAEVVMDEYKFKVVNNAADLYLISIPELRAPVXXS

SEQ ID NO: 31017 - protein, 34 aa, Artificial Sequence; identical to SEQ ID NO: 2808
  Cyclic GFR-binding peptide
  MOD_RES (30)..(31): Xaa is C or S

SEQ ID NO: 31018 - protein, 32 aa, Artificial Sequence
  Cyclic GFR-binding peptide
  MOD_RES (31)..(32): Xaa is C or S
SKVIMEYKFKIKPTKGILYLISIPELDQSVXX

SEQ ID NO: 31019 - protein, 37 aa, Artificial Sequence; identical to SEQ ID NO: 2810
  Cyclic GFR-binding peptide
  MOD_RES (31)..(32): Xaa is C or S

SEQ ID NO: 31020 - protein, 28 aa, Artificial Sequence
  Cyclic GFR-binding peptide
  MOD_RES (27)..(28): Xaa is C or S
DEYKFKVVKENEDLYLMSIPELETPVXX

SEQ ID NO: 31021 - protein, 26 aa, Artificial Sequence
  Cyclic GFR-binding peptide
VMNRYKKLIVNSSDDFYLVSIANLKT

SEQ ID NO: 31022 - protein, 37 aa, Artificial Sequence
  Cyclic GFR-binding peptide
  MOD_RES (31)..(32): Xaa is C or S
SVAMGRYKKLYTVVGKDFYLISIANLKTPVXXAKSAK

SEQ ID NO: 31023 - protein, 36 aa, Artificial Sequence; identical to SEQ ID NO: 2816
  Cyclic GFR-binding peptide
  MOD_RES (31)..(32): Xaa is C or S

SEQ ID NO: 31024 - protein, 38 aa, Artificial Sequence; identical to SEQ ID NO: 2817
  Cyclic GFR-binding peptide
  MOD_RES (32)..(33): Xaa is C or S

SEQ ID NO: 31025 - protein, 38 aa, Artificial Sequence; identical to SEQ ID NO: 2818
  Cyclic GFR-binding peptide
  MOD_RES (32)..(33): Xaa is C or S

SEQ ID NO: 31026 - protein, 29 aa, Artificial Sequence
  Cyclic GFR-binding peptide
  MOD_RES (2)..(2): Xaa is C or S
KXSRVIMEYQKYVKPKRGVIYLISIPSLA

SEQ ID NO: 31027 - protein, 37 aa, Artificial Sequence
  Cyclic GFR-binding peptide
  MOD_RES (1)..(3)..(35)..(36): Xaa is C or S
XGXSRVVMNEYQKYIVNSSDDIYLVSIPSLKTPAXXP

SEQ ID NO: 31028 - protein, 24 aa, Artificial Sequence
  Cyclic GFR-binding peptide
AMGEYQKYYTVVGKDIYLISIPSL

SEQ ID NO: 31029 - protein, 23 aa, Artificial Sequence
  Cyclic GFR-binding peptide
IMEYKFKIKPTKGILYLISIPEL

SEQ ID NO: 31030 - protein, 31 aa, Artificial Sequence
  Cyclic GFR-binding peptide
AEVVMDRYKKLVVNNAADFYLISIANLRAPV

SEQ ID NO: 31031 - protein, 25 aa, Artificial Sequence
  Cyclic GFR-binding peptide
AMGRYKKLYTVVGKDFYLISIANLK

SEQ ID NO: 31032 - protein, 27 aa, Artificial Sequence
  Cyclic GFR-binding peptide
  MOD_RES (26)..(27): Xaa is C or S
YHYKLVVKDYEDKYLMSIPSLETPVXX

SEQ ID NO: 31033 - protein, 30 aa, Artificial Sequence; identical to SEQ ID NO: 2824
  Cyclic GFR-binding peptide
  MOD_RES (26)..(27): Xaa is C or S

SEQ ID NO: 31034 - protein, 38 aa, Artificial Sequence
  Cyclic GFR-binding peptide
  MOD_RES (2)..(4)..(36)..(37): Xaa is C or S
HXGXSRVVMNEYKFKIVNSSDDLYLVSIPELKTPAXXP

SEQ ID NO: 31035 - protein, 24 aa, Artificial Sequence
  Cyclic GFR-binding peptide
VVMNEYQKYIVNSSDDIYLVSIPS

SEQ ID NO: 31036 - protein, 33 aa, Artificial Sequence
  Cyclic GFR-binding peptide
  MOD_RES (1)..(1): Xaa is C or S
XEAVSMGEEYKFKTPVGMDDLYLVSIPELKTPV

SEQ ID NO: 31037 - protein, 30 aa, Artificial Sequence; identical to SEQ ID NO: 2825
  Cyclic GFR-binding peptide
  MOD_RES (30)..(30): Xaa is C or S

SEQ ID NO: 31038 - protein, 22 aa, Artificial Sequence
  Cyclic GFR-binding peptide
MNEYQKYIVNNSSDIYLVSIPS

SEQ ID NO: 31039 - protein, 25 aa, Artificial Sequence
  Cyclic GFR-binding peptide
SMGEEYQKYTPVGMDDIYLVSIPSL

SEQ ID NO: 31040 - protein, 25 aa, Artificial Sequence
  Cyclic GFR-binding peptide
EYQKYIVNSSDDIYLVSIPSLQTPA

SEQ ID NO: 31041 - protein, 39 aa, Artificial Sequence; identical to SEQ ID NO: 2828
  Cyclic GFR-binding peptide
  MOD_RES (1)..(3)..(34)..(35): Xaa is C or S

SEQ ID NO: 31042 - protein, 30 aa, Artificial Sequence
  Cyclic GFR-binding peptide
  MOD_RES (1)..(3): Xaa is C or S
XGXEAVSMGEEYQKYTPVGMDDIYLVSIPS

SEQ ID NO: 31043 - protein, 36 aa, Artificial Sequence
  Cyclic GFR-binding peptide
  MOD_RES (30)..(31): Xaa is C or S
VVMNEYKFKIVNSSDDLYLVSIPELKTPAXXPKPVY

SEQ ID NO: 31044 - protein, 34 aa, Artificial Sequence; identical to SEQ ID NO: 2832
  Cyclic GFR-binding peptide
  MOD_RES (1)..(3): Xaa is C or S

SEQ ID NO: 31045 - protein, 22 aa, Artificial Sequence
  Cyclic GFR-binding peptide
RYKKLVKPKRGVFYLISIANLA

SEQ ID NO: 31046 - protein, 25 aa, Artificial Sequence
  Cyclic GFR-binding peptide
NYHYKLIVNSSDDKYLVSIPSLQTP

SEQ ID NO: 31047 - protein, 28 aa, Artificial Sequence
  Cyclic GFR-binding peptide
  MOD_RES (28)..(28): Xaa is C or S
MDEYKFKVVKENEDLYLMSIPELETPVX

SEQ ID NO: 31048 - protein, 35 aa, Artificial Sequence
  Cyclic GFR-binding peptide
  MOD_RES (1)..(33)..(34): Xaa is C or S
XAEVVMDEYKFKVVNNAADLYLISIPELRAPVXXS

SEQ ID NO: 31049 - protein, 32 aa, Artificial Sequence; identical to SEQ ID NO: 2835
  Cyclic GFR-binding peptide
  MOD_RES (28)..(28): Xaa is C or S

SEQ ID NO: 31050 - protein, 37 aa, Artificial Sequence
  Cyclic GFR-binding peptide
  MOD_RES (32)..(33): Xaa is C or S
AEVVMDRYKKLVVNNAADFYLISIANLRAPVXXSAPA

SEQ ID NO: 31051 - protein, 28 aa, Artificial Sequence
  Cyclic GFR-binding peptide
  MOD_RES (28)..(28): Xaa is C or S
IMEYKFKIKPTKGILYLISIPELDQSVX

SEQ ID NO: 31052 - protein, 30 aa, Artificial Sequence
  Cyclic GFR-binding peptide
  MOD_RES (2)..(2): Xaa is C or S
GXAEVVMDRYKKLVVNNAADFYLISIANLR

SEQ ID NO: 31053 - protein, 37 aa, Artificial Sequence; identical to SEQ ID NO: 2837
  Cyclic GFR-binding peptide
  MOD_RES (31)..(32): Xaa is C or S

SEQ ID NO: 31054 - protein, 23 aa, Artificial Sequence
  Cyclic GFR-binding peptide
NEYKFKIVNNSSDLYLVSIPELK

SEQ ID NO: 31055 - protein, 35 aa, Artificial Sequence; identical to SEQ ID NO: 2838
  Cyclic GFR-binding peptide
  MOD_RES (2)..(4): Xaa is C or S

SEQ ID NO: 31056 - protein, 30 aa, Artificial Sequence
  Cyclic GFR-binding peptide
  MOD_RES (27)..(28): Xaa is C or S
DRYKKLVVNNAADFYLISIANLRAPVXXSA

SEQ ID NO: 31057 - protein, 33 aa, Artificial Sequence
  Cyclic GFR-binding peptide
  MOD_RES (30)..(31): Xaa is C or S
VVMNEYQKYIVNNSSDIYLVSIPSLKTPAXXAK

SEQ ID NO: 31058 - protein, 26 aa, Artificial Sequence
  Cyclic GFR-binding peptide
VMEYKFKVKPTRGVLYLISIPELDQP

SEQ ID NO: 31059 - protein, 25 aa, Artificial Sequence
  Cyclic GFR-binding peptide
SKVVMYHYKLVKPTRGVKYLISIPS

SEQ ID NO: 31060 - protein, 23 aa, Artificial Sequence
  Cyclic GFR-binding peptide
GYHYKLYTVVGKDKYLISIPSLK

SEQ ID NO: 31061 - protein, 30 aa, Artificial Sequence
  Cyclic GFR-binding peptide
  MOD_RES (1)..(1): Xaa is C or S
XAKVVMNEYQKYIVNNSSDIYLVSIPSLKT

SEQ ID NO: 31062 - protein, 33 aa, Artificial Sequence
  Cyclic GFR-binding peptide
  MOD_RES (1)..(32)..(33): Xaa is C or S
XSRVIMEYQKYVKPKRGVIYLISIPSLAQPVXX

SEQ ID NO: 31063 - protein, 33 aa, Artificial Sequence
  Cyclic GFR-binding peptide
  MOD_RES (2)..(4): Xaa is C or S
RXGXGEVVMEEYKFKVVKDYEDLYLMSIPELET

SEQ ID NO: 31064 - protein, 33 aa, Artificial Sequence; identical to SEQ ID NO: 2851
  Cyclic GFR-binding peptide
  MOD_RES (31)..(32): Xaa is C or S

SEQ ID NO: 31065 - protein, 33 aa, Artificial Sequence; identical to SEQ ID NO: 2853
  Cyclic GFR-binding peptide
  MOD_RES (27)..(28): Xaa is C or S

SEQ ID NO: 31066 - protein, 37 aa, Artificial Sequence
  Cyclic GFR-binding peptide
  MOD_RES (1)..(3)..(35)..(36): Xaa is C or S
XGXARVVMNEYQKYIVNSSDDIYLVSIPSLQTPAXXP

SEQ ID NO: 31067 - protein, 38 aa, Artificial Sequence; identical to SEQ ID NO: 2856
  Cyclic GFR-binding peptide
  MOD_RES (2)..(34)..(35): Xaa is C or S

SEQ ID NO: 31068 - protein, 23 aa, Artificial Sequence
  Cyclic GFR-binding peptide
GERYKKLTPVGMDDFYLVSIANL

SEQ ID NO: 31069 - protein, 31 aa, Artificial Sequence
  Cyclic GFR-binding peptide
  MOD_RES (28)..(29): Xaa is C or S
MDEYKFKVVKENEDLYLMSIPELETPVXXAK

SEQ ID NO: 31070 - protein, 31 aa, Artificial Sequence
  Cyclic GFR-binding peptide
  MOD_RES (28)..(28): Xaa is C or S
MNEYQKYIVNSSDDIYLVSIPSLKTPAXTPK

SEQ ID NO: 31071 - protein, 36 aa, Artificial Sequence
  Cyclic GFR-binding peptide
  MOD_RES (30)..(31): Xaa is C or S
RVIMEYKFKVKPKRGVLYLISIPELAQPVXXPAASA

SEQ ID NO: 31072 - protein, 33 aa, Artificial Sequence
  Cyclic GFR-binding peptide
  MOD_RES (31)..(32): Xaa is C or S
SRVIMEYKFKVKPKRGVLYLISIPELAQPVXXP

SEQ ID NO: 31073 - protein, 36 aa, Artificial Sequence
  Cyclic GFR-binding peptide
  MOD_RES (2)..(4)..(35)..(36): Xaa is C or S
SXKXSKVVMEYKFKVKPTRGVLYLISIPELDQPVXX

SEQ ID NO: 31074 - protein, 35 aa, Artificial Sequence
  Cyclic GFR-binding peptide
  MOD_RES (32)..(33): Xaa is C or S
AVSMGEEYQKYTPVGMDDIYLVSIPSLKTPVXXAK

SEQ ID NO: 31075 - protein, 31 aa, Artificial Sequence; identical to SEQ ID NO: 2863
  Cyclic GFR-binding peptide
  MOD_RES (28)..(29): Xaa is C or S

SEQ ID NO: 31076 - protein, 34 aa, Artificial Sequence
  Cyclic GFR-binding peptide
  MOD_RES (29)..(30): Xaa is C or S
VMDEYKFKVVNNAADLYLISIPELRAPVXXSAPA

SEQ ID NO: 31077 - protein, 33 aa, Artificial Sequence
  Cyclic GFR-binding peptide
  MOD_RES (27)..(28): Xaa is C or S
EEYKFKVVKDYEDLYLMSIPELETPVXXAKPIS

SEQ ID NO: 31078 - protein, 30 aa, Artificial Sequence; identical to SEQ ID NO: 2866
  Cyclic GFR-binding peptide
  MOD_RES (27)..(28): Xaa is C or S

SEQ ID NO: 31079 - protein, 34 aa, Artificial Sequence; identical to SEQ ID NO: 2867
  Cyclic GFR-binding peptide
  MOD_RES (1)..(34): Xaa is C or S

SEQ ID NO: 31080 - protein, 26 aa, Artificial Sequence
  Cyclic GFR-binding peptide
MNRYKKLIVNNSSDFYLVSIANLKTP

SEQ ID NO: 31081 - protein, 41 aa, Artificial Sequence; identical to SEQ ID NO: 2870
  Cyclic GFR-binding peptide
  MOD_RES (2)..(4)..(36)..(37): Xaa is C or S

SEQ ID NO: 31082 - protein, 32 aa, Artificial Sequence; identical to SEQ ID NO: 2871
  Cyclic GFR-binding peptide
  MOD_RES (27)..(28): Xaa is C or S

SEQ ID NO: 31083 - protein, 33 aa, Artificial Sequence; identical to SEQ ID NO: 2873
  Cyclic GFR-binding peptide
  MOD_RES (30)..(31): Xaa is C or S

SEQ ID NO: 31084 - protein, 30 aa, Artificial Sequence
  Cyclic GFR-binding peptide
  MOD_RES (26)..(26): Xaa is C or S
EYQKYIVNSSDDIYLVSIPSLKTPAXTPKT

SEQ ID NO: 31085 - protein, 29 aa, Artificial Sequence
  Cyclic GFR-binding peptide
  MOD_RES (28)..(29): Xaa is C or S
MEEYQKYVVKDYEDIYLMSIPSLETPVXX

SEQ ID NO: 31086 - protein, 35 aa, Artificial Sequence
  Cyclic GFR-binding peptide
  MOD_RES (2)..(4)..(35): Xaa is C or S
SXKXSRVIMEYKFKVKPKRGVLYLISIPELAQPVX

SEQ ID NO: 31087 - protein, 24 aa, Artificial Sequence
  Cyclic GFR-binding peptide
VIMEYKFKIKPTKGILYLISIPEL

SEQ ID NO: 31088 - protein, 31 aa, Artificial Sequence
  Cyclic GFR-binding peptide
AKVVMNEYQKYIVNNSSDIYLVSIPSLKTPA

SEQ ID NO: 31089 - protein, 35 aa, Artificial Sequence; identical to SEQ ID NO: 2878
  Cyclic GFR-binding peptide
  MOD_RES (29)..(30): Xaa is C or S

SEQ ID NO: 31090 - protein, 29 aa, Artificial Sequence
  Cyclic GFR-binding peptide
SKVVMEYKFKVKPTRGVLYLISIPELDQP

SEQ ID NO: 31091 - protein, 23 aa, Artificial Sequence
  Cyclic GFR-binding peptide
VMDEYKFKVVNNAADLYLISIPE

SEQ ID NO: 31092 - protein, 27 aa, Artificial Sequence
  Cyclic GFR-binding peptide
VMEYKFKVKPTRGVLYLISIPELDQPV

SEQ ID NO: 31093 - protein, 34 aa, Artificial Sequence; identical to SEQ ID NO: 2879
  Cyclic GFR-binding peptide
  MOD_RES (28)..(29): Xaa is C or S

SEQ ID NO: 31094 - protein, 21 aa, Artificial Sequence
  Cyclic GFR-binding peptide
GRYKKLYTVVGKDFYLISIAN

SEQ ID NO: 31095 - protein, 37 aa, Artificial Sequence; identical to SEQ ID NO: 2880
  Cyclic GFR-binding peptide
  MOD_RES (1)..(3)..(35)..(36): Xaa is C or S

SEQ ID NO: 31096 - protein, 23 aa, Artificial Sequence
  Cyclic GFR-binding peptide
VMNRYKKLIVNSSDDFYLVSIAN

SEQ ID NO: 31097 - protein, 30 aa, Artificial Sequence; identical to SEQ ID NO: 2882
  Cyclic GFR-binding peptide
  MOD_RES (27)..(28): Xaa is C or S

SEQ ID NO: 31098 - protein, 37 aa, Artificial Sequence
  Cyclic GFR-binding peptide
  MOD_RES (1)..(3)..(35)..(36): Xaa is C or S
XGXAKVVMNEYKFKIVNNSSDLYLVSIPELKTPAXXA

SEQ ID NO: 31099 - protein, 41 aa, Artificial Sequence
  Cyclic GFR-binding peptide
  MOD_RES (2)..(4)..(35)..(36): Xaa is C or S
SXKXSRVIMEYKFKVKPKRGVLYLISIPELAQPVXXPAASA

SEQ ID NO: 31100 - protein, 40 aa, Artificial Sequence; identical to SEQ ID NO: 2888
  Cyclic GFR-binding peptide
  MOD_RES (2)..(4)..(35)..(36): Xaa is C or S

SEQ ID NO: 31101 - protein, 31 aa, Artificial Sequence
  Cyclic GFR-binding peptide
  MOD_RES (30)..(31): Xaa is C or S
VVMNEYKFKIVNNSSDLYLVSIPELKTPAXX

SEQ ID NO: 31102 - protein, 26 aa, Artificial Sequence
  Cyclic GFR-binding peptide
  MOD_RES (26)..(26): Xaa is C or S
EYKFKVVKDYEDLYLMSIPELETPVX

SEQ ID NO: 31103 - protein, 26 aa, Artificial Sequence
  Cyclic GFR-binding peptide
SRVVMNRYKKLIVNSSDDFYLVSIAN

SEQ ID NO: 31104 - protein, 30 aa, Artificial Sequence; identical to SEQ ID NO: 2892
  Cyclic GFR-binding peptide
  MOD_RES (29)..(29): Xaa is C or S

SEQ ID NO: 31105 - protein, 25 aa, Artificial Sequence
  Cyclic GFR-binding peptide
MRYKKLIKPTKGIFYLISIANLDQS

SEQ ID NO: 31106 - protein, 38 aa, Artificial Sequence
  Cyclic GFR-binding peptide
  MOD_RES (2)..(34)..(35): Xaa is C or S
GXAEVVMDYHYKLVVNNAADKYLISIPSLRAPVXXSAP

SEQ ID NO: 31107 - protein, 30 aa, Artificial Sequence
  Cyclic GFR-binding peptide
  MOD_RES (26)..(27): Xaa is C or S
RYKKLVVNNAADFYLISIANLRAPVXXSAP

SEQ ID NO: 31108 - protein, 33 aa, Artificial Sequence; identical to SEQ ID NO: 2902
  Cyclic GFR-binding peptide
  MOD_RES (29)..(29): Xaa is C or S

SEQ ID NO: 31109 - protein, 36 aa, Artificial Sequence; identical to SEQ ID NO: 2903
  Cyclic GFR-binding peptide
  MOD_RES (1)..(3)..(34)..(35): Xaa is C or S

SEQ ID NO: 31110 - protein, 39 aa, Artificial Sequence
  Cyclic GFR-binding peptide
  MOD_RES (2)..(4)..(36)..(37): Xaa is C or S
HXGXSRVVMNEYKFKIVNSSDDLYLVSIPELKTPAXXPK

SEQ ID NO: 31111 - protein, 30 aa, Artificial Sequence
  Cyclic GFR-binding peptide
  MOD_RES (2)..(4): Xaa is C or S
SXKXSKVIMEYQKYIKPTKGIIYLISIPSL

SEQ ID NO: 31112 - protein, 23 aa, Artificial Sequence
  Cyclic GFR-binding peptide
RYKKLYTVVGKDFYLISIANLKT

SEQ ID NO: 31113 - protein, 32 aa, Artificial Sequence
  Cyclic GFR-binding peptide
  MOD_RES (2)..(2): Xaa is C or S
GXAEVVMDRYKKLVVNNAADFYLISIANLRAP

SEQ ID NO: 31114 - protein, 30 aa, Artificial Sequence; identical to SEQ ID NO: 2908
  Cyclic GFR-binding peptide
  MOD_RES (28)..(29): Xaa is C or S

SEQ ID NO: 31115 - protein, 36 aa, Artificial Sequence
  Cyclic GFR-binding peptide
  MOD_RES (1)..(32)..(33): Xaa is C or S
XSKVIMEYKFKIKPTKGILYLISIPELDQSVXXPSA

SEQ ID NO: 31116 - protein, 40 aa, Artificial Sequence; identical to SEQ ID NO: 2911
  Cyclic GFR-binding peptide
  MOD_RES (1)..(3)..(35)..(36): Xaa is C or S

SEQ ID NO: 31117 - protein, 23 aa, Artificial Sequence
  Cyclic GFR-binding peptide
DEYKFKVVKENEDLYLMSIPELE

SEQ ID NO: 31118 - protein, 31 aa, Artificial Sequence; identical to SEQ ID NO: 2912
  Cyclic GFR-binding peptide
  MOD_RES (26)..(27): Xaa is C or S

SEQ ID NO: 31119 - protein, 24 aa, Artificial Sequence
  Cyclic GFR-binding peptide
MRYKKLVKPTRGVFYLISIANLDQ

SEQ ID NO: 31120 - protein, 33 aa, Artificial Sequence; identical to SEQ ID NO: 2916
  Cyclic GFR-binding peptide
  MOD_RES (27)..(28): Xaa is C or S

SEQ ID NO: 31121 - protein, 24 aa, Artificial Sequence
  Cyclic GFR-binding peptide
MGRYKKLYTVVGKDFYLISIANLK

SEQ ID NO: 31122 - protein, 29 aa, Artificial Sequence
  Cyclic GFR-binding peptide
  MOD_RES (27)..(28): Xaa is C or S
DRYKKLVVKENEDFYLMSIANLETPVXXA

SEQ ID NO: 31123 - protein, 30 aa, Artificial Sequence; identical to SEQ ID NO: 2918
  Cyclic GFR-binding peptide
  MOD_RES (1)..(3): Xaa is C or S

SEQ ID NO: 31124 - protein, 41 aa, Artificial Sequence
  Cyclic GFR-binding peptide
  MOD_RES (1)..(3)..(35)..(36): Xaa is C or S
XGXAKVVMNEYKFKIVNNSSDLYLVSIPELKTPAXXAKPVA

SEQ ID NO: 31125 - protein, 37 aa, Artificial Sequence
  Cyclic GFR-binding peptide
  MOD_RES (31)..(32): Xaa is C or S
EVVMEEYKFKVVKDYEDLYLMSIPELETPVXXAKPIS

SEQ ID NO: 31126 - protein, 29 aa, Artificial Sequence
  Cyclic GFR-binding peptide
  MOD_RES (26)..(27): Xaa is C or S
EYKFKVKPTRGVLYLISIPELDQPVXXPS

SEQ ID NO: 31127 - protein, 40 aa, Artificial Sequence
  Cyclic GFR-binding peptide
  MOD_RES (1)..(3)..(35)..(36): Xaa is C or S
XGXAEVVMDEYKFKVVNNAADLYLISIPELRAPVXXSAPA

SEQ ID NO: 31128 - protein, 29 aa, Artificial Sequence
  Cyclic GFR-binding peptide
  MOD_RES (29)..(29): Xaa is C or S
VMEYHYKLVVKDYEDKYLMSIPSLETPVX

SEQ ID NO: 31129 - protein, 27 aa, Artificial Sequence
  Cyclic GFR-binding peptide
  MOD_RES (27)..(27): Xaa is C or S
NEYQKYIVNNSSDIYLVSIPSLKTPAX

SEQ ID NO: 31130 - protein, 39 aa, Artificial Sequence
  Cyclic GFR-binding peptide
  MOD_RES (2)..(34)..(35): Xaa is C or S
GXSRVVMNEYKFKIVNSSDDLYLVSIPELKTPAXXPKPV

SEQ ID NO: 31131 - protein, 40 aa, Artificial Sequence
  Cyclic GFR-binding peptide
  MOD_RES (2)..(4)..(36)..(37): Xaa is C or S
HXGXARVVMNEYQKYIVNSSDDIYLVSIPSLQTPAXXPKP

SEQ ID NO: 31132 - protein, 35 aa, Artificial Sequence; identical to SEQ ID NO: 2922
  Cyclic GFR-binding peptide
  MOD_RES (2)..(33)..(34): Xaa is C or S

SEQ ID NO: 31133 - protein, 35 aa, Artificial Sequence
  Cyclic GFR-binding peptide
  MOD_RES (2)..(34)..(35): Xaa is C or S
GXAEVVMDYHYKLVVNNAADKYLISIPSLRAPVXX

SEQ ID NO: 31134 - protein, 20 aa, Artificial Sequence
  Cyclic GFR-binding peptide
EYQKYVVKENEDIYLMSIPS

SEQ ID NO: 31135 - protein, 31 aa, Artificial Sequence; identical to SEQ ID NO: 2923
  Cyclic GFR-binding peptide

SEQ ID NO: 31136 - protein, 38 aa, Artificial Sequence; identical to SEQ ID NO: 2924
  Cyclic GFR-binding peptide
  MOD_RES (1)..(32)..(33): Xaa is C or S

SEQ ID NO: 31137 - protein, 28 aa, Artificial Sequence
  Cyclic GFR-binding peptide
KVVMNEYQKYIVNNSSDIYLVSIPSLKT

SEQ ID NO: 31138 - protein, 36 aa, Artificial Sequence; identical to SEQ ID NO: 2925
  Cyclic GFR-binding peptide
  MOD_RES (2)..(4)..(36): Xaa is C or S

SEQ ID NO: 31139 - protein, 34 aa, Artificial Sequence; identical to SEQ ID NO: 2926
  Cyclic GFR-binding peptide
  MOD_RES (1)..(3): Xaa is C or S

SEQ ID NO: 31140 - protein, 35 aa, Artificial Sequence; identical to SEQ ID NO: 2927
  Cyclic GFR-binding peptide
  MOD_RES (31)..(32): Xaa is C or S

SEQ ID NO: 31141 - protein, 25 aa, Artificial Sequence
  Cyclic GFR-binding peptide
MNRYKKLIVNSSDDFYLVSIANLKT

SEQ ID NO: 31142 - protein, 35 aa, Artificial Sequence; identical to SEQ ID NO: 2929
  Cyclic GFR-binding peptide
  MOD_RES (2)..(33)..(34): Xaa is C or S

SEQ ID NO: 31143 - protein, 24 aa, Artificial Sequence
  Cyclic GFR-binding peptide
VVMYHYKLVKPTRGVKYLISIPSL

SEQ ID NO: 31144 - protein, 35 aa, Artificial Sequence
  Cyclic GFR-binding peptide
  MOD_RES (31)..(32): Xaa is C or S
EVVMDYHYKLVVNNAADKYLISIPSLRAPVXXSAP

SEQ ID NO: 31145 - protein, 37 aa, Artificial Sequence
  Cyclic GFR-binding peptide
  MOD_RES (1)..(33): Xaa is C or S
XSRVVMNEYKFKIVNSSDDLYLVSIPELKTPAXTPKT

SEQ ID NO: 31146 - protein, 38 aa, Artificial Sequence
  Cyclic GFR-binding peptide
  MOD_RES (1)..(3)..(35)..(36): Xaa is C or S
XGXESVAMGEYQKYYTVVGKDIYLISIPSLKTPVXXAK

SEQ ID NO: 31147 - protein, 37 aa, Artificial Sequence
  Cyclic GFR-binding peptide
  MOD_RES (1)..(3)..(35)..(36): Xaa is C or S
XGXESVAMGYHYKLYTVVGKDKYLISIPSLKTPVXXA

SEQ ID NO: 31148 - protein, 30 aa, Artificial Sequence; identical to SEQ ID NO: 2934
  Cyclic GFR-binding peptide
  MOD_RES (1)..(3): Xaa is C or S

SEQ ID NO: 31149 - protein, 35 aa, Artificial Sequence
  Cyclic GFR-binding peptide
  MOD_RES (31)..(31): Xaa is C or S
RVVMNEYQKYIVNSSDDIYLVSIPSLKTPAXTPKT

SEQ ID NO: 31150 - protein, 31 aa, Artificial Sequence
  Cyclic GFR-binding peptide
  MOD_RES (30)..(30): Xaa is C or S
VVMNEYKFKIVNSSDDLYLVSIPELKTPAXT

SEQ ID NO: 31151 - protein, 33 aa, Artificial Sequence
  Cyclic GFR-binding peptide
  MOD_RES (31)..(32): Xaa is C or S
VSMGEEYKFKTPVGMDDLYLVSIPELKTPVXXA

SEQ ID NO: 31152 - protein, 23 aa, Artificial Sequence
  Cyclic GFR-binding peptide
AMGEYQKYYTVVGKDIYLISIPS

SEQ ID NO: 31153 - protein, 33 aa, Artificial Sequence
  Cyclic GFR-binding peptide
  MOD_RES (27)..(28): Xaa is C or S
NEYKFKIVNSSDDLYLVSIPELKTPAXXPKPVY

SEQ ID NO: 31154 - protein, 32 aa, Artificial Sequence
  Cyclic GFR-binding peptide
  MOD_RES (32)..(32): Xaa is C or S
AVSMGEEYKFKTPVGMDDLYLVSIPELKTPVX

SEQ ID NO: 31155 - protein, 27 aa, Artificial Sequence
  Cyclic GFR-binding peptide
RVIMRYKKLVKPKRGVFYLISIANLAQ

SEQ ID NO: 31156 - protein, 31 aa, Artificial Sequence; identical to SEQ ID NO: 2940
  Cyclic GFR-binding peptide
  MOD_RES (27)..(28): Xaa is C or S

SEQ ID NO: 31157 - protein, 28 aa, Artificial Sequence
  Cyclic GFR-binding peptide
VVMNRYKKLIVNNSSDFYLVSIANLKTP

SEQ ID NO: 31158 - protein, 32 aa, Artificial Sequence; identical to SEQ ID NO: 2942
  Cyclic GFR-binding peptide
  MOD_RES (1)..(1): Xaa is C or S

SEQ ID NO: 31159 - protein, 30 aa, Artificial Sequence
  Cyclic GFR-binding peptide
  MOD_RES (2)..(4): Xaa is C or S
RXGXESVAMGEYQKYYTVVGKDIYLISIPS

SEQ ID NO: 31160 - protein, 35 aa, Artificial Sequence; identical to SEQ ID NO: 2945
  Cyclic GFR-binding peptide
  MOD_RES (2)..(34)..(35): Xaa is C or S

SEQ ID NO: 31161 - protein, 31 aa, Artificial Sequence; identical to SEQ ID NO: 2948
  Cyclic GFR-binding peptide
  MOD_RES (28)..(29): Xaa is C or S

SEQ ID NO: 31162 - protein, 31 aa, Artificial Sequence
  Cyclic GFR-binding peptide
  MOD_RES (29)..(30): Xaa is C or S
VIMEYKFKIKPTKGILYLISIPELDQSVXXP

SEQ ID NO: 31163 - protein, 35 aa, Artificial Sequence; identical to SEQ ID NO: 2949
  Cyclic GFR-binding peptide
  MOD_RES (30)..(31): Xaa is C or S

SEQ ID NO: 31164 - protein, 28 aa, Artificial Sequence
  Cyclic GFR-binding peptide
  MOD_RES (2)..(2): Xaa is C or S
GXSRVVMNRYKKLIVNSSDDFYLVSIAN

SEQ ID NO: 31165 - protein, 40 aa, Artificial Sequence
  Cyclic GFR-binding peptide
  MOD_RES (1)..(3)..(35)..(36): Xaa is C or S
XGXAKVVMNEYKFKIVNNSSDLYLVSIPELKTPAXXAKPV

SEQ ID NO: 31166 - protein, 36 aa, Artificial Sequence
  Cyclic GFR-binding peptide
  MOD_RES (31)..(32): Xaa is C or S
SKVIMEYQKYIKPTKGIIYLISIPSLDQSVXXPSAS

SEQ ID NO: 31167 - protein, 29 aa, Artificial Sequence
  Cyclic GFR-binding peptide
RVIMEYQKYVKPKRGVIYLISIPSLAQPV

SEQ ID NO: 31168 - protein, 35 aa, Artificial Sequence; identical to SEQ ID NO: 2952
  Cyclic GFR-binding peptide
  MOD_RES (32)..(33): Xaa is C or S

SEQ ID NO: 31169 - protein, 25 aa, Artificial Sequence
  Cyclic GFR-binding peptide
MRYKKLVKPTRGVFYLISIANLDQP

SEQ ID NO: 31170 - protein, 26 aa, Artificial Sequence
  Cyclic GFR-binding peptide
ESVAMGYHYKLYTVVGKDKYLISIPS

SEQ ID NO: 31171 - protein, 29 aa, Artificial Sequence
  Cyclic GFR-binding peptide
RVVMNYHYKLIVNSSDDKYLVSIPSLKTP

SEQ ID NO: 31172 - protein, 29 aa, Artificial Sequence
  Cyclic GFR-binding peptide
  MOD_RES (1)..(1): Xaa is C or S
XSKVIMRYKKLIKPTKGIFYLISIANLDQ

SEQ ID NO: 31173 - protein, 35 aa, Artificial Sequence
  Cyclic GFR-binding peptide
  MOD_RES (29)..(30): Xaa is C or S
VMNEYKFKIVNSSDDLYLVSIPELKTPAXXPKPVY

SEQ ID NO: 31174 - protein, 34 aa, Artificial Sequence
  Cyclic GFR-binding peptide
  MOD_RES (30)..(31): Xaa is C or S
VVMDYHYKLVVNNAADKYLISIPSLRAPVXXSAP

SEQ ID NO: 31175 - protein, 34 aa, Artificial Sequence; identical to SEQ ID NO: 2957
  Cyclic GFR-binding peptide
  MOD_RES (2)..(4): Xaa is C or S

SEQ ID NO: 31176 - protein, 31 aa, Artificial Sequence; identical to SEQ ID NO: 2958
  Cyclic GFR-binding peptide
  MOD_RES (2)..(4): Xaa is C or S

SEQ ID NO: 31177 - protein, 32 aa, Artificial Sequence
  Cyclic GFR-binding peptide
  MOD_RES (2)..(4): Xaa is C or S
RXGXAEVVMDEYKFKVVNNAADLYLISIPELR

SEQ ID NO: 31178 - protein, 26 aa, Artificial Sequence
  Cyclic GFR-binding peptide
DYHYKLVVKENEDKYLMSIPSLETPV

SEQ ID NO: 31179 - protein, 31 aa, Artificial Sequence
  Cyclic GFR-binding peptide
  MOD_RES (28)..(29): Xaa is C or S
MNEYKFKIVNSSDDLYLVSIPELQTPAXXPK

SEQ ID NO: 31180 - protein, 42 aa, Artificial Sequence
  Cyclic GFR-binding peptide
  MOD_RES (2)..(4)..(36)..(37): Xaa is C or S
RXGXESVAMGYHYKLYTVVGKDKYLISIPSLKTPVXXAKSAK

SEQ ID NO: 31181 - protein, 41 aa, Artificial Sequence
  Cyclic GFR-binding peptide
  MOD_RES (2)..(35)..(36): Xaa is C or S
GXEAVSMGEEYQKYTPVGMDDIYLVSIPSLKTPVXXAKGVK

SEQ ID NO: 31182 - protein, 38 aa, Artificial Sequence; identical to SEQ ID NO: 2962
  Cyclic GFR-binding peptide
  MOD_RES (1)..(33)..(34): Xaa is C or S

SEQ ID NO: 31183 - protein, 32 aa, Artificial Sequence
  Cyclic GFR-binding peptide
  MOD_RES (1)..(1): Xaa is C or S
XAEVVMDYHYKLVVNNAADKYLISIPSLRAPV

SEQ ID NO: 31184 - protein, 30 aa, Artificial Sequence
  Cyclic GFR-binding peptide
  MOD_RES (27)..(28): Xaa is C or S
NEYQKYIVNSSDDIYLVSIPSLQTPAXXPK

SEQ ID NO: 31185 - protein, 31 aa, Artificial Sequence
  Cyclic GFR-binding peptide
  MOD_RES (1)..(1): Xaa is C or S
XGEVVMDEYQKYVVKENEDIYLMSIPSLETP

SEQ ID NO: 31186 - protein, 28 aa, Artificial Sequence
  Cyclic GFR-binding peptide
  MOD_RES (1)..(1): Xaa is C or S
XEAVSMGEEYQKYTPVGMDDIYLVSIPS

SEQ ID NO: 31187 - protein, 30 aa, Artificial Sequence
  Cyclic GFR-binding peptide
  MOD_RES (27)..(28): Xaa is C or S
MEYQKYVKPTRGVIYLISIPSLDQPVXXPS

SEQ ID NO: 31188 - protein, 29 aa, Artificial Sequence
  Cyclic GFR-binding peptide
  MOD_RES (29)..(29): Xaa is C or S
VIMEYKFKVKPKRGVLYLISIPELAQPVX

SEQ ID NO: 31189 - protein, 32 aa, Artificial Sequence; identical to SEQ ID NO: 2967
  Cyclic GFR-binding peptide
  MOD_RES (2)..(4): Xaa is C or S

SEQ ID NO: 31190 - protein, 29 aa, Artificial Sequence
  Cyclic GFR-binding peptide
  MOD_RES (2)..(4): Xaa is C or S
SXKXSKVIMEYQKYIKPTKGIIYLISIPS

SEQ ID NO: 31191 - protein, 25 aa, Artificial Sequence
  Cyclic GFR-binding peptide
VSMGEEYQKYTPVGMDDIYLVSIPS

SEQ ID NO: 31192 - protein, 39 aa, Artificial Sequence
  Cyclic GFR-binding peptide
  MOD_RES (2)..(33)..(34): Xaa is C or S
KXSKVVMEYQKYVKPTRGVIYLISIPSLDQPVXXPSASA

SEQ ID NO: 31193 - protein, 25 aa, Artificial Sequence
  Cyclic GFR-binding peptide
VVMDEYKFKVVKENEDLYLMSIPEL

SEQ ID NO: 31194 - protein, 29 aa, Artificial Sequence
  Cyclic GFR-binding peptide
  MOD_RES (29)..(29): Xaa is C or S
VIMYHYKLIKPTKGIKYLISIPSLDQSVX

SEQ ID NO: 31195 - protein, 27 aa, Artificial Sequence
  Cyclic GFR-binding peptide
  MOD_RES (27)..(27): Xaa is C or S
DRYKKLVVNNAADFYLISIANLRAPVX

SEQ ID NO: 31196 - protein, 35 aa, Artificial Sequence
  Cyclic GFR-binding peptide
  MOD_RES (29)..(30): Xaa is C or S
MGEEYKFKTPVGMDDLYLVSIPELKTPVXXAKGVK

SEQ ID NO: 31197 - protein, 28 aa, Artificial Sequence
  Cyclic GFR-binding peptide
  MOD_RES (28)..(28): Xaa is C or S
MNYHYKLIVNSSDDKYLVSIPSLQTPAX

SEQ ID NO: 31198 - protein, 35 aa, Artificial Sequence; identical to SEQ ID NO: 2974
  Cyclic GFR-binding peptide
  MOD_RES (1)..(33): Xaa is C or S

SEQ ID NO: 31199 - protein, 39 aa, Artificial Sequence
  Cyclic GFR-binding peptide
  MOD_RES (2)..(33)..(34): Xaa is C or S
KXSKVVMEYKFKVKPTRGVLYLISIPELDQPVXXPSASA

SEQ ID NO: 31200 - protein, 40 aa, Artificial Sequence
  Cyclic GFR-binding peptide
  MOD_RES (2)..(34)..(35): Xaa is C or S
GXGEVVMDEYQKYVVKENEDIYLMSIPSLETPVXXAKPIK

SEQ ID NO: 31201 - protein, 32 aa, Artificial Sequence
  Cyclic GFR-binding peptide
  MOD_RES (27)..(28): Xaa is C or S
MEYKFKVKPTRGVLYLISIPELDQPVXXPSAS

SEQ ID NO: 31202 - protein, 38 aa, Artificial Sequence
  Cyclic GFR-binding peptide
  MOD_RES (1)..(32)..(33): Xaa is C or S
XSKVVMEYQKYVKPTRGVIYLISIPSLDQPVXXPSASA

SEQ ID NO: 31203 - protein, 34 aa, Artificial Sequence; identical to SEQ ID NO: 2977
  Cyclic GFR-binding peptide
  MOD_RES (2)..(33)..(34): Xaa is C or S

SEQ ID NO: 31204 - protein, 34 aa, Artificial Sequence
  Cyclic GFR-binding peptide
  MOD_RES (31)..(32): Xaa is C or S
SVAMGYHYKLYTVVGKDKYLISIPSLKTPVXXAK

SEQ ID NO: 31205 - protein, 40 aa, Artificial Sequence
  Cyclic GFR-binding peptide
  MOD_RES (2)..(4)..(36): Xaa is C or S
HXGXSRVVMNEYQKYIVNSSDDIYLVSIPSLKTPAXTPKT

SEQ ID NO: 31206 - protein, 27 aa, Artificial Sequence
  Cyclic GFR-binding peptide
VMNYHYKLIVNSSDDKYLVSIPSLQTP

SEQ ID NO: 31207 - protein, 33 aa, Artificial Sequence
  Cyclic GFR-binding peptide
  MOD_RES (1)..(3): Xaa is C or S
XGXGEVVMDEYQKYVVKENEDIYLMSIPSLETP

SEQ ID NO: 31208 - protein, 31 aa, Artificial Sequence
  Cyclic GFR-binding peptide
  MOD_RES (2)..(4): Xaa is C or S
RXGXAEVVMDYHYKLVVNNAADKYLISIPSL

SEQ ID NO: 31209 - protein, 26 aa, Artificial Sequence
  Cyclic GFR-binding peptide
SRVIMEYQKYVKPKRGVIYLISIPSL

SEQ ID NO: 31210 - protein, 22 aa, Artificial Sequence
  Cyclic GFR-binding peptide
GEEYKFKTPVGMDDLYLVSIPE

SEQ ID NO: 31211 - protein, 31 aa, Artificial Sequence
  Cyclic GFR-binding peptide
ESVAMGYHYKLYTVVGKDKYLISIPSLKTPV

SEQ ID NO: 31212 - protein, 34 aa, Artificial Sequence
  Cyclic GFR-binding peptide
  MOD_RES (2)..(4): Xaa is C or S
SXKXSRVIMEYQKYVKPKRGVIYLISIPSLAQPV

SEQ ID NO: 31213 - protein, 34 aa, Artificial Sequence; identical to SEQ ID NO: 2983
  Cyclic GFR-binding peptide
  MOD_RES (29)..(30): Xaa is C or S

SEQ ID NO: 31214 - protein, 33 aa, Artificial Sequence
  Cyclic GFR-binding peptide
  MOD_RES (27)..(28): Xaa is C or S
GYHYKLYTVVGKDKYLISIPSLKTPVXXAKSAK

SEQ ID NO: 31215 - protein, 26 aa, Artificial Sequence
  Cyclic GFR-binding peptide
VVMDEYKFKVVNNAADLYLISIPELR

SEQ ID NO: 31216 - protein, 33 aa, Artificial Sequence; identical to SEQ ID NO: 2985
  Cyclic GFR-binding peptide
  MOD_RES (2)..(4): Xaa is C or S

SEQ ID NO: 31217 - protein, 38 aa, Artificial Sequence
  Cyclic GFR-binding peptide
  MOD_RES (2)..(34)..(35): Xaa is C or S
GXARVVMNEYQKYIVNSSDDIYLVSIPSLQTPAXXPKP

SEQ ID NO: 31218 - protein, 29 aa, Artificial Sequence
  Cyclic GFR-binding peptide
  MOD_RES (27)..(28): Xaa is C or S
MEYQKYIKPTKGIIYLISIPSLDQSVXXP

SEQ ID NO: 31219 - protein, 36 aa, Artificial Sequence
  Cyclic GFR-binding peptide
  MOD_RES (1)..(3)..(35)..(36): Xaa is C or S
XGXAEVVMDYHYKLVVNNAADKYLISIPSLRAPVXX

SEQ ID NO: 31220 - protein, 29 aa, Artificial Sequence
  Cyclic GFR-binding peptide
  MOD_RES (26)..(27): Xaa is C or S
YHYKLIKPTKGIKYLISIPSLDQSVXXPS

SEQ ID NO: 31221 - protein, 31 aa, Artificial Sequence
  Cyclic GFR-binding peptide
  MOD_RES (1)..(3): Xaa is C or S
XGXGEVVMDEYKFKVVKENEDLYLMSIPELE

SEQ ID NO: 31222 - protein, 27 aa, Artificial Sequence
  Cyclic GFR-binding peptide
VVMDRYKKLVVNNAADFYLISIANLRA

SEQ ID NO: 31223 - protein, 38 aa, Artificial Sequence
  Cyclic GFR-binding peptide
  MOD_RES (2)..(4)..(36)..(37): Xaa is C or S
RXGXAEVVMDYHYKLVVNNAADKYLISIPSLRAPVXXS

SEQ ID NO: 31224 - protein, 32 aa, Artificial Sequence
  Cyclic GFR-binding peptide
  MOD_RES (29)..(30): Xaa is C or S
VVMEYKFKVKPTRGVLYLISIPELDQPVXXPS

SEQ ID NO: 31225 - protein, 33 aa, Artificial Sequence
  Cyclic GFR-binding peptide
  MOD_RES (28)..(29): Xaa is C or S
VMEYKFKVKPTRGVLYLISIPELDQPVXXPSAS

SEQ ID NO: 31226 - protein, 36 aa, Artificial Sequence; identical to SEQ ID NO: 2998
  Cyclic GFR-binding peptide
  MOD_RES (1)..(3)..(34)..(35): Xaa is C or S

SEQ ID NO: 31227 - protein, 33 aa, Artificial Sequence
  Cyclic GFR-binding peptide
  MOD_RES (2)..(4): Xaa is C or S
HXGXSRVVMNEYKFKIVNSSDDLYLVSIPELKT

SEQ ID NO: 31228 - protein, 22 aa, Artificial Sequence
  Cyclic GFR-binding peptide
RYKKLYTVVGKDFYLISIANLK

SEQ ID NO: 31229 - protein, 26 aa, Artificial Sequence
  Cyclic GFR-binding peptide
VIMEYQKYVKPKRGVIYLISIPSLAQ

SEQ ID NO: 31230 - protein, 31 aa, Artificial Sequence
  Cyclic GFR-binding peptide
  MOD_RES (1)..(1): Xaa is C or S
XSKVVMEYKFKVKPTRGVLYLISIPELDQPV

SEQ ID NO: 31231 - protein, 27 aa, Artificial Sequence
  Cyclic GFR-binding peptide
  MOD_RES (1)..(1): Xaa is C or S
XSKVVMEYKFKVKPTRGVLYLISIPEL

SEQ ID NO: 31232 - protein, 32 aa, Artificial Sequence
  Cyclic GFR-binding peptide
  MOD_RES (29)..(30): Xaa is C or S
VIMEYQKYVKPKRGVIYLISIPSLAQPVXXPA

SEQ ID NO: 31233 - protein, 32 aa, Artificial Sequence
  Cyclic GFR-binding peptide
  MOD_RES (28)..(29): Xaa is C or S
IMEYKFKVKPKRGVLYLISIPELAQPVXXPAA

SEQ ID NO: 31234 - protein, 34 aa, Artificial Sequence
  Cyclic GFR-binding peptide
  MOD_RES (2)..(2): Xaa is C or S
GXEAVSMGEEYQKYTPVGMDDIYLVSIPSLKTPV

SEQ ID NO: 31235 - protein, 37 aa, Artificial Sequence; identical to SEQ ID NO: 3000
  Cyclic GFR-binding peptide
  MOD_RES (2)..(34)..(35): Xaa is C or S

SEQ ID NO: 31236 - protein, 35 aa, Artificial Sequence; identical to SEQ ID NO: 3001
  Cyclic GFR-binding peptide
  MOD_RES (29)..(29): Xaa is C or S

SEQ ID NO: 31237 - protein, 33 aa, Artificial Sequence
  Cyclic GFR-binding peptide
  MOD_RES (30)..(31): Xaa is C or S
KVVMEYKFKVKPTRGVLYLISIPELDQPVXXPS

SEQ ID NO: 31238 - protein, 35 aa, Artificial Sequence
  Cyclic GFR-binding peptide
  MOD_RES (2)..(34)..(35): Xaa is C or S
GXGEVVMEEYQKYVVKDYEDIYLMSIPSLETPVXX

SEQ ID NO: 31239 - protein, 35 aa, Artificial Sequence; identical to SEQ ID NO: 3003
  Cyclic GFR-binding peptide
  MOD_RES (30)..(31): Xaa is C or S

SEQ ID NO: 31240 - protein, 30 aa, Artificial Sequence; identical to SEQ ID NO: 3005
  Cyclic GFR-binding peptide
  MOD_RES (1)..(3): Xaa is C or S

SEQ ID NO: 31241 - protein, 28 aa, Artificial Sequence
  Cyclic GFR-binding peptide
  MOD_RES (26)..(27): Xaa is C or S
EYQKYTPVGMDDIYLVSIPSLKTPVXXA

SEQ ID NO: 31242 - protein, 32 aa, Artificial Sequence
  Cyclic GFR-binding peptide
  MOD_RES (27)..(28): Xaa is C or S
NEYQKYIVNSSDDIYLVSIPSLQTPAXXPKPV

SEQ ID NO: 31243 - protein, 30 aa, Artificial Sequence
  Cyclic GFR-binding peptide
  MOD_RES (27)..(28): Xaa is C or S
MEYKFKIKPTKGILYLISIPELDQSVXXPS

SEQ ID NO: 31244 - protein, 28 aa, Artificial Sequence
  Cyclic GFR-binding peptide
  MOD_RES (28)..(28): Xaa is C or S
MEEYQKYVVKDYEDIYLMSIPSLETPVX

SEQ ID NO: 31245 - protein, 35 aa, Artificial Sequence; identical to SEQ ID NO: 3007
  Cyclic GFR-binding peptide
  MOD_RES (1)..(33): Xaa is C or S

SEQ ID NO: 31246 - protein, 36 aa, Artificial Sequence; identical to SEQ ID NO: 3008
  Cyclic GFR-binding peptide
  MOD_RES (30)..(31): Xaa is C or S

SEQ ID NO: 31247 - protein, 32 aa, Artificial Sequence; identical to SEQ ID NO: 3011
  Cyclic GFR-binding peptide
  MOD_RES (2)..(2): Xaa is C or S

SEQ ID NO: 31248 - protein, 33 aa, Artificial Sequence
  Cyclic GFR-binding peptide
  MOD_RES (2)..(33): Xaa is C or S
KXSKVIMEYQKYIKPTKGIIYLISIPSLDQSVX

SEQ ID NO: 31249 - protein, 31 aa, Artificial Sequence; identical to SEQ ID NO: 3016
  Cyclic GFR-binding peptide
  MOD_RES (29)..(30): Xaa is C or S

SEQ ID NO: 31250 - protein, 32 aa, Artificial Sequence; identical to SEQ ID NO: 3017
  Cyclic GFR-binding peptide
  MOD_RES (26)..(27): Xaa is C or S

SEQ ID NO: 31251 - protein, 36 aa, Artificial Sequence
  Cyclic GFR-binding peptide
  MOD_RES (32)..(33): Xaa is C or S
GEVVMEEYQKYVVKDYEDIYLMSIPSLETPVXXAKP

SEQ ID NO: 31252 - protein, 25 aa, Artificial Sequence
  Cyclic GFR-binding peptide
RYKKLVKPKRGVFYLISIANLAQPV

SEQ ID NO: 31253 - protein, 36 aa, Artificial Sequence
  Cyclic GFR-binding peptide
  MOD_RES (31)..(32): Xaa is C or S
EVVMDYHYKLVVNNAADKYLISIPSLRAPVXXSAPA

SEQ ID NO: 31254 - protein, 31 aa, Artificial Sequence; identical to SEQ ID NO: 3024
  Cyclic GFR-binding peptide
  MOD_RES (27)..(28): Xaa is C or S

SEQ ID NO: 31255 - protein, 30 aa, Artificial Sequence
  Cyclic GFR-binding peptide
  MOD_RES (29)..(29): Xaa is C or S
VMNEYQKYIVNSSDDIYLVSIPSLKTPAXT

SEQ ID NO: 31256 - protein, 33 aa, Artificial Sequence
  Cyclic GFR-binding peptide
  MOD_RES (28)..(29): Xaa is C or S
IMEYKFKIKPTKGILYLISIPELDQSVXXPSAS

SEQ ID NO: 31257 - protein, 26 aa, Artificial Sequence
  Cyclic GFR-binding peptide
GEVVMERYKKLVVKDYEDFYLMSIAN

SEQ ID NO: 31258 - protein, 27 aa, Artificial Sequence
  Cyclic GFR-binding peptide
  MOD_RES (26)..(27): Xaa is C or S
EYQKYIVNSSDDIYLVSIPSLQTPAXX

SEQ ID NO: 31259 - protein, 31 aa, Artificial Sequence
  Cyclic GFR-binding peptide
  MOD_RES (26)..(27): Xaa is C or S
EYKFKVKPKRGVLYLISIPELAQPVXXPAAS

SEQ ID NO: 31260 - protein, 34 aa, Artificial Sequence
  Cyclic GFR-binding peptide
  MOD_RES (2)..(34): Xaa is C or S
GXAEVVMDEYKFKVVNNAADLYLISIPELRAPVX

SEQ ID NO: 31261 - protein, 35 aa, Artificial Sequence
  Cyclic GFR-binding peptide
  MOD_RES (2)..(4): Xaa is C or S
HXGXSRVVMNEYKFKIVNSSDDLYLVSIPELKTPA

SEQ ID NO: 31262 - protein, 29 aa, Artificial Sequence
  Cyclic GFR-binding peptide
  MOD_RES (2)..(2): Xaa is C or S
GXGEVVMDEYKFKVVKENEDLYLMSIPEL
